United States Patent Application Publication US 2014/0255922 A1 - sequence listing, part 3

SEQ ID NO: 8340 - DNA, 652 bp, Gossypium hirsutum
gtcaatgcaagaggacatgaatttaagcatgctatagtgcattatcctcctatttatggattgagaaggggctatgtatggttttaggcattgtgtcaaaaagaacaaatataatcaaaatctatattgagctcgagctcaactcgataattaaatttaaagttaatagtatattagaataaaaaaactcaataagacttgcaagtcatttgagccgagtattattaagttcgaattcaacttgatcataaataattcgagctcaacttgataattacccaatcaagtttaaatttttttcaaattgaactcgaataattcgccagtaccccctatctcatttatgaagttgcagagcatgtgaaattgatgtcagaaacaaaaggcgacctgacataaagttgacactccacccttcaatacctttacttttgtttcattggattgctccttcatcatcgccaatcttacagacaaaaaaatatcaagagaaagaaaactcaaaaatggcataagaattttgttgaatgaatcaattagtctgaactcataattagtgttgaccactttaaaaaccccccttttttttaatgattaggtgggggctatggagtttcccttgtttagaaatcaatcatccccctataatcaa

SEQ ID NO: 8341 - DNA, 610 bp, Gossypium hirsutum
ctttgaaaagaaaagaagcgatgctgttctctttcgtttaaggtcacttagagaaatttattcaaagaaagtgagaactaaagaaagacaaatgtgtgtatatttatgttcttgatttctcatactcaagattccaacaacaagataacattaattttatgaaatgagaagtgattgtataaaattataaatctattttattcttcttgattttttatatttttaattaaaaataaagagggagataaaaatgatcgtgaaatcacaattttatacaatctcttctcttgaaacttttaaagagaagtacttaaaattaataatattttcatcttccaattttttttttatatttcatgaaattatatttaataatatttttataatgaagatttgaaaattggaagggtgtgattgattcaaaaattaaagactggtatggtccgtcaatggtggtcaaaagttagaaaaggcaggtaattgaagtatatatttttgcttcttccatggattttagtttttaatcatttagtactaattcgattatgcctttgatagtcaaaagtttaaagaaaatggcgccccgtggtgtgaacgaggaagccacctg

SEQ ID NO: 8342 - DNA, 797 bp, Gossypium hirsutum
  misc_feature (318)..(318): n is a, c, g, or t
  misc_feature (329)..(329): n is a, c, g, or t
  misc_feature (471)..(471): n is a, c, g, or t
  misc_feature (553)..(553): n is a, c, g, or t
  misc_feature (747)..(747): n is a, c, g, or t
  misc_feature (782)..(782): n is a, c, g, or t
agaaaatggcagacgaatattatgtatatctttctgggtttggccttcagtgcaggattattataaaattttgatagtgtacgtttaaagaaatgaaaggcagtagtgcgaacaaaaagccactttgaaaagaaaagaagcgatgctgttctctttcgtttaaggtcacttagagaaatttattcaaagaaagtgagaactaaagaaagacaaatgtgtgtatatttatgttcttgatttctcatactcaagattccaacaacaagataacattaattttatgaaatgagaagtgattgtataaaattataaatctantttattcttcntgattttttatatttttaattaaaaataaagagggagataaaaatgatcgtgaaatcacaattttatacaatctcttctcttgaaacttttaaagagaagtacttaaaattaataatattttcatcttccaatttttttttnatatttcatgaaattatatttaataatatttttataatgaagatttgaaaattggaagggtgtgattgattcaaaaattaangactggtatggtccgtcaatggtggtcaaaagttagaaaaggcaggtaattgaagtatatatttttgcttcttccatggattttagtttttaatcatttagtactaattcgattatgcctttgatagtcaaaagtttaaagaaaatggcgccccgtggtgtgaacgaggaagccaccttgatatcatgaaaaanaaatcattatttattttattgaaaggctaatagtntaactaaaaacaaaa

SEQ ID NO: 8343 - DNA, 632 bp, Gossypium hirsutum
  misc_feature (21)..(21): n is a, c, g, or t
ttatccccgtgctcctgaaangatattgaaagaggataacaccagtaatggaggattttcaacaataacggcaaaaggcttggctcagagatccaaggcagcaactcgcactaatccaggagccgatgccgaagtatttgggttcaacaccacagcaacaggcctcggagatggttacgtggtcgatggatttactgcagtgaggaagtcatcaagcacgtcgagcttacaagaccaggacagtagtagcctatcatccctatggccaacatccaaatggaacttgaagcctgatctacaagcactctcaacggtaagcattacaaaacccatttttgatggattgccaaagccaatatctgctcgtaaaaacaaagcagcacttgattagctcccttttccctcgcctgcattgtgttccccatttacatataccaaattttgactgcaattcatgaggcctccattgctagttcttcttcgaggggtttatacagatacaagaaaaggacaataagaaaaaaaaatgaagtccattgatacaacagcttctcttgacgtagttaatatgaactatatatatatgtaatttgtgtaatatattgctccacttttgacccgtttttcattgt

SEQ ID NO: 8344 - DNA, 619 bp, Gossypium hirsutum
gggaagggggcgcgtaccttgcttggcgattttatccatgcaatgcagccaaatatgggtcaaggaggatgtatggccattgaggtatgacttgaaaaaccattgtgttggcagttttttgtttctgtaacttaagcattgccgaagataaataatgttctaagttctagatcctagagtggtttagtggtatctattatgtcttcccaataagaacgtcgggttatccaagagaatccaatgccagacaagaacattttttcccttcgtctttgcaggatagttaccaattagcattggaacttagcaaggcatggaaacaaagcgtcgagtcagggactgctattgatatcgtatcttctttaaggaggtatgatagcattttcctattttcccaaatagttggaaagggtcaagtattaaaaaaggtcaaaactgcatgtttaatctaaaaatttacattgagaaattactggtttgtcggcctgaattgttgaatttaagtttgccctgattttacttgattctagttcttcagaccacataagtaaaacatcttagctagtttcttttggattttccttttcagtctgttgataatgttcgtttcaataccatg

SEQ ID NO: 8345 - DNA, 660 bp, Gossypium hirsutum
gtttaacaatgggcggttgctaccttctactgcagttttaggcattataccgaatgtcatttctggcatcagtgagccaccaaccgtatgtttggccactcgtgaacagataaatatatagttcaattttgccatctgttttttaattatatagtatagtatacttattttttcatggaaaaaaataatatgataatttatttgtttttttagataggaaactgtaccgggaatcgagcgatcgttcatcatacctgtgtaccgtatgataatagagactcattctagggacggcgtaaaacacgctttcgaatctttcttttttaaatacaataattgtacaaaaaaattaactaataacctgttgtctatactatgcagtttctatggatgttatatgttgaggaagggtcacggcgctcataccatcatgggttatcgggcagtaacagttgttcctgtcaaatgttctgttgattcatttccatatggtggagtggcacgatggaggtcgggtattgaggtagttcaattgcgcacaacctatcctgaaccttctcgtcgacataaaaaaagcccacggaatggacaaaaagggtttgggtcgggacgctttaaattgggcgaaaaaacatgaacaatatatatttctgtggaatg

SEQ ID NO: 8346 - DNA, 647 bp, Gossypium hirsutum
tgtttgcttgttgtattgcatgttttcagtagcattgcatgtaaacttaactgacatgtgttatgttgtaatacagttatctcatgctaattgtaagtcttctaagtacttggtttagataacttgagttacgccttgactgtggcagtattgtataaagcttttatattgctgttaatttgaattctcctattttgatcttaagtgtaaaaaactatgacttgaaatcttaggtgttctacccctcttgaatttaggaattactctaaggttcttgctagttctgaagctatgcaaccaccttgcccaaggaataatgtgtcgaatctccctcaggaggtcctggattctttatttaaaatccccaagagttctgagcatgaaccaagcactatgagttggaggaatgtagtaaagaagatgcagttgttgggaccacctattgatttttgtccatctactgatgcagaacctcagcaggatatctatggtattctcttgttaattttctcaggctttgcatgttattgtatgtatgagtttgttggtactgtgacctccggttttgaaatggggttatgaatatcactataaacagttttatttgctaaattgtacttgagcacctttattggaagggtaaactg

SEQ ID NO: 8347 - DNA, 585 bp, Gossypium hirsutum
gagctttaggggataacattctccttttcccgagtctttgggaaccccctttttttttatttactctctttgattctccttataattcaaaggttaatttttattttgtttttattactgcttatggttgtccaatttcatctctttaaattaatacatttttattctttaaaatcgagaaatgtatataacttccctaaaatcttcttactgttttaagataatggtaagattaaaattttatattcgaaataaaaatattttaaagattaaatacaaaatataaaatttaaaataataataatattttttaaaaataattaaatgaaatttaggttcttttttcctttcaatatgttagccatgctcaaatgttgcatctcggaaactgatttcctaaaaaagtaaagtatattttatttaaagtaaaaaaacaagcatgattaagacataaaaaggaaacatacatggaattgaagcaaaacccacatcattcaaccacacatgcacgctaacaacataatacaaccccccccccccaaaaaaaaaaaaaaaaaaaccaaatttttttttttttcccaaaag

SEQ ID NO: 8348 - DNA, 629 bp, Gossypium hirsutum
agttttatttttcgttctttccgattaggccaacgtgacgaggacgaaccatataatgtggacaatgggagatgatttccaatatcaatatgctgaaacatggttcagacagatggacaaatttattcactatgttaacaaggtagtttcacacgatgaaatcgatttttaattgctaattttattttgaaattgtagcttgtgagctcgaatttaccctcaatgtgtacaatactattcatttgtgcttccttttcttaggatggcagagtgaacgcattgtattctacaccatccatatataccgatgcaaaaaatgccgcaaacgaaacgtggccgcttaaaactgatgactatttcccgtaagcacttcatttgcttgaccatttgttttcgagtttgcttaggctgatctaatacacgtacgcttgtttgatgatgcatggcagttatgcagacagtcaaaatgcttattggactggatatttcacaagtcggccggcctttaaacgatttgttcgtaagcttagtggatattatttggtattgtcatcaaactaacgagatgaaaaactgaacaacctgtagttaatggtaaaatcgagctgatttttctgtattcttagaac

SEQ ID NO: 8349 - DNA, 646 bp, Gossypium hirsutum
gtgagtcttcaacattttatcaatgcgacaccttacaaaactttcatggtaaaactctaccgcctgtttattttggtaattagattgtgcttttaaatgtacttttatttattttttgctcatgttttaatatctgttgtaggaattggtgccacaaaatgttcttcctgatgatttcacacgttctattaagtattctgattacagttctgtaagatcctctctttaattcttttatttaacgcaacttattaattttttttacatcacatacttggctatacatacaattactagccaaaagataaatcagctattaactatgttactcagacttgtcttgagtgccgtatgtatgtccttatgctcgtgtgtcgaacatgagtgttggccacagctaaagagtccgagcaacataggtttttaatattcagcaagcatggatatgttgtgagatcaatttagtctgctgataaagaatgtctacaaaatgtatttatactgccatgtgctaaacatattttgctatcatttattgaaacagggaactaccaaaataaacgtagctgttgataagttgcctgatttccattgttgcaagtcaattgatggtcttcagtacactggtaccattcatatcggttct

SEQ ID NO: 8350 - DNA, 491 bp, Gossypium hirsutum
acgatgccgtaagcgccacgaccaacaggctgaataggaggaacatacttggaagagacttcgaagatgttacctaagatgttgtaacgtacatatctgccatcgtaggttggggttcctctgagatcaatcgccgttccttcattctccatcttcttttatcacttcccttgaaaagaaaacagtggtgcaaaaagaaaggaaaagaaaggcgtgtttttatggaagaaggaaagagacagcaacagagcggccaattgaggtttgcttttgtttgtggattttgaaatttgaatgtggaaccaaaagtgaaaggactgttgaccatacaaagaatgaaaaagtcactgggaaagttttacgaaaagtgacttccctagataacttgatgagtggtaggattttgtttgtttaccaggaaaatagtgttatggccgagcggttctgggctaaccaaaattttagacccgtttattaggctgggctcaacc

SEQ ID NO: 8351 - DNA, 614 bp, Gossypium hirsutum
ttatccagccgtcgttgatgtctaataaaaaattgcattaataatatgtttaaataaaaattttgctttaattataacactttttcaattacataatttttattaaaataatattagaattatgattcttaaattttattatacgtgtatgcatgtaaaaattatgtatttaaaacataaatatgtgtttaaaaataacgtacaataaataatatatatgattaatggatgtaataaaatgtgcataataaaattaaaatacataaataaattaaaatgaagttttgatttagtggtaaatttttttaaaaatctatgtaattgttatggatttaaatcatacaatatgtatatttttattgttttttaaatgaaaaaactaaagtatcctcaaataatataaattattttaaattaagaagatcatttttgtaattccttaattgaaatagtattcgattgactcgtaacattaacttaatcagagattttattaataatataaattatgcaattgttattctttaaatatttaaatttaaatttttatttaatattatatttacaactgtcactctttctcttatctttttttttctcatgatcttccaacc

SEQ ID NO: 8352 - DNA, 592 bp, Gossypium hirsutum
cccttgaaatattcattacgctaaaaattttaaaaatataagttcaagttacttcttccttgagactatttttttcgataactccagattgtttacttttgttcagattactccttatatagctttgctaatggttggagcacatcacaggttaacagatcaggagcaggaagatggcatcataaaaggccaagtggcaaacaactcataaactatcagtttaaggcttcttagagaggatactgcccaacagagaaatgagacctcaagaaataggatatcattgctttaaggtctctaagctcatagttcactaaagaatatcaaacaggcaaggatttaacagaataaagccagggtagaagctgagatcgtggaggtggccggtttcctactaatcacaggattaggtgatatgtcgactccatccacttttacaacgtaataacctttattatctgcattgatttcaatctaggaactcaggcatattgaacacacaaaaagaactaaaagaactgaaaagcgattaactcaaccagaggctgaaactatctgaacaacaacaaatcacaagaacccaatcaataca

SEQ ID NO: 8353 - DNA, 564 bp, Gossypium hirsutum
  misc_feature (530)..(530): n is a, c, g, or t
ttcatatcaaagcagatcctggcattccagaaggtgagttgttagtgccactgaaggctgttctactggatattggcaaggaacgcaaggaggcatgggccagttgggtacagtcctatatacaagaggtacaatatgttcctggtcatgaatgtgtactcaccaatgattatgtgcatgtcagtagttatgttaatttttatttattaatttccttcattgttggctgaaaataaatcatagccaaatacccatggtaaccttataaacctacttgcggcagttaaagaaaagaccagctttcctacatatgtttccatttcataaatatgtatgtataactatttatttctttggtgtttttctctatgcatcaaactgaagtagtttgcctccaactcctaggtgtagcaaatacttagctttgtataatgtcccattaacagtttataattatgatatttgatcaggaaacaatgattttctgtgtgcgtttctcatcttctaatttgttggtatcaactgctgtnatctcacaaaatctcttttgtctttatgcagctt

SEQ ID NO: 8354 - DNA, 360 bp, Gossypium hirsutum
  misc_feature (41)..(43): n is a, c, g, or t
cgttcgattctctcgcgttacggaaaaaaccttacgcactnnnagagaaccgttgcatggttttcaaagaaagctctgctttcaatgaaggtattggaatcgagagggctacttttgtcactctctgaatcaatcgcttttcataggcttccgaattttgaaactattgttgtgatcgctaaagctaaaggcgctaatgtctactcttgggacgatcgtagaggcttcctttgctttgctaggcaaaaaagagttagcattttcaggcatgacggtaatctctttgattttccttcttctttttttcaattttcagcatcaccactaaatctatgtttctatttaaccgtattttttttt

SEQ ID NO: 8355 - DNA, 436 bp, Gossypium hirsutum
aaattgtaaatataacataagtgaatggcattttccaaacataaaagatcgtattttctacatattgtactacacaaacgaactttaaaatatagtacagtacagttcgttcaaaggtgtaacctttatttatttatttttaacctaaattctccatctttaatcaattaagttccattttttttaattctctggaaatagaaagattcaattcaatcaaaatgatgcatatgaccttttactggagccggcaggtaactctcctcttcagctcatggcggaccgattcatggccgagttacgcgttgactcttctcgcttgtgttttggcttccgttttttaccagtatttggagcacgtaaggtaccgtgtaaggcgatctaggaagccggcgggagaaccgttgttgtcgcagccgaatcgagccgcaggtaa

SEQ ID NO: 8356 - DNA, 634 bp, Gossypium hirsutum
tgttcctcagtaccatctggctgaacagattcactggcaattgtcacaggcaaaacttcttctggctgaatgactaattggagatttcccttcaaatcttcagtttcaactgtcttcaattctgatgtggcagaagcagaacggttcacagagtcctcagcttctggcatattctcaggcttcagtacaccatcagttattacactctccacagattgcattgctgcaccatcagaggaacttgatctagatataacatatttaaaaccagtccaggtttcaccatcttcaagcatcgtcggttcaggagattcttcatctgaatcatcatgaacaatgacttcagcactaagtggatcaccacctatataaccccgacaatgaggtgaaccacagtgacatttttttgcagcagctccaaataccctcacatagttgtagtcaaatgtaacctcttcaccctaacaaatataccaagctcgtcacacatatatacgaagatgacttctcatgcaacagaaagacaagacacagacatatacacacacacgtgtatatatgcgtatgtatctgtgaaatgccataacaatttcttcaagttcagtccatgtaccctataccctccaaatattct

SEQ ID NO: 8357 - DNA, 431 bp, Gossypium hirsutum
attaaagtatacagggccactacccttattatccactttcgtctattaaacaaggtttttcactattataggtggattcaacatttaaggtgagtttggatggacgattaggtgcggtgcggtgtgtttagcttactttttgtcttacgttatagtattgctacaatatctaatctcaccgtcatcgctgtttttacactaaccgcaagtaaatacaacgcccatccaaactcacccttaggcttactgaaaatattttcagtcttctccaatgtttttgtcatgtaaaataagatggtcaacgtaaaagatttttcagtcaatgttaaattatctctttattcccgtaaaatgttttatcaaatattgttccgtaagacatttttaaaactgctaagggtatgtacattgtaacattctcatacctgact

SEQ ID NO: 8358 - DNA, 663 bp, Gossypium hirsutum
catgactggtaatctacaaatacatttataccaaccatgaatccgagactgcaatacgatggcatttttaacttgttttccgttcataggtgtgaagctttttcgacatatcctcgaacatacgatctccttcacctcgatggcctttttgccgccgagagccataggtacaatatcgggcttataacagattcattacgttttgcccttttacaaggattgaaatatccaacatataagcaaaccattgtcttgtcaggtgtcatatgaagtatgtgctgttggaaatggaccgcatcctgcgaccggaggggcacgcattaatacgggaatccagctacttcatggatgctatcgagaccattgcgaagggaatgaggtggaactgccacaaagaagatactgaaaatagtggggagaatgagaaaatactagtatgccagaaaactctgtggtatgcctcctctactaacagtacaagatgatcgcaaaagtcttctttgcctggttagaaccataattattgttccaacagtatgggagctgaatgaaacaaaggagtattccctactttcgatacacaaaaatggataaattaataagatattccaaagaaatcaacaaacttttgaattcatcatgttcttcagctgaagaattagc

SEQ ID NO: 8359 - DNA, 666 bp, Gossypium hirsutum
  misc_feature (630)..(631): n is a, c, g, or t
  misc_feature (644)..(645): n is a, c, g, or t
ttcacctgcaaagcaacttgagtggctcgttcagcagcacaaagtataactccagcacagtcctgaaattttgcatccacaaaagttattgcatgcctgagttgaggcgtgctatactgctatacaagaacacacatttatttgattttaagttcacttgatctacatgcctagttaaataactgaatcaaataaatggcaaaaaccgttatcctcacaatatatagagaatgtcatctgaagttagagtagctgttaatggtatatgttcatgttcatgttcatgcgagcatggagaataacactggccacataaaatcatcaagaattgatagtatctgtgactgtttgaaagaccaagaaaaccatggcatgcacccctttttttcccaacccaaaaataaataaggacttcatttcttcagaaacaatctgataataatagcatatatctggaacttgaaatatttgcacctgatgatgataatgaccaggttggtaaatgtatcaagtttcatacaactgtttttagaaaaatatcataaagaatttcaggaataagagaaagggaaaataaaaggaaccttagggtcaactctcccattgtcgcaatcccttgcaacagaatanncataggacctgannaatgaaagctgtcaacttctg

SEQ ID NO: 8360 - DNA, 648 bp, Gossypium hirsutum
cactactggtacatgttgaagagtgacacagatatgaatgctgtttcaaccacatcaaagaaaagaatcagtcctgataatagaaattgctaccaccaaggtaacagattctaacttgaagacaagtatactagtatctatgaaagcatctaaaattcacaataaagtaacacatttaatcaatcatactagaggccgaccagaggtaattcaaatgactaagggaagtcaattcaatgcaaaagcaaagaaagaatgaggtaaacagtggtcacctgttgggcctctgcaatgcatttaaatgccaacctttgccagacatgatatcattgacttcaaatatgtccagaacagcagatccaaatgccacgattgtcatgtctgggttcccaatgatgaacaactcaggaatctcctttatcctaccatttgaaatagctgttattctatatatctcaatattaaagaattcagcggaaaatgtgaaatgaattcgaaccctttctgaatcatcttcgatacttccatgatttttcttgtgttctccaagtaacctatgcgttttcaaggaaacaataatcagccaaaaaccagaacccctgaataatctaacagtgtagatgacaatttgctagcttcaggcattgt

SEQ ID NO: 8361 - DNA, 647 bp, Gossypium hirsutum
tacttttcttttataagttgttaggatacttaaactttgatgcttgttgtgaatttaatagcatatgtaactacaaatacaaaacttctgccatactttttgttaaattccttgtttcctcattctgggaatatgttgtgaaacattgtcatttatatgtatctaaaagttctattgtgcatgcatttgcagagaaccaattagcatatgctcatttaactaagagtagttgctgtactactccctggaatatatgtagtggtacatttgttttaggggcttttattacatatttgaagtgcctgttatatgtcagacgtggttcttctgatatctagtcatagctcgactgctttaatgaatctgagctagctatctactgaatctgaattccaatttgcatgtagctacttgaaaacattgatccgttttaacatgcttattttccagcacttttcaggctttaagccttttgttaaaatccgaatggatatatctttcgtccaatttgtggcaatgctgttaaatctaagttcttttcttctgtgaatatttagttttagcattaatttttgagattgtattagaatgatacgagtgagattggttttcatgaagttggaaaagttgcccttggcagacatggt

SEQ ID NO: 8362 - DNA, 622 bp, Gossypium hirsutum
caaattagtccctttattattatgaaataaattaatttaatcctgtattattaaaaggaagagtaaattccattaaacgtccctgaaatatggcttatattctaaattagtcctcaaactttaaaatgttgtaattacattcttaaaaaatatatattttctgatttttttacttttcactctcatcactgtttgagttcttaaatctcggtatgtggtttcccaattttttttcttcctcatacattttaggattttattttttaattttttttctattttacagacaaaatcatcttcattccttgaaaaattacatcttaagagactaacactctcatattttatttttgggttctttctccttctcctccttttattattattcatcagtttatttctagtaaatgattattaaatttaattaattctaaaattagaatcagacccttaagtattgaatttaaatattagttgactcgtttttttatcattgaaagttatgttttattaaaacatttttagagttcgagagattagccaaaaatgaaaatagatagataaacaagaactaaacctatgatatacccattcatttttagcaaacatttttatgcctgca

SEQ ID NO: 8363 - DNA, 637 bp, Gossypium hirsutum
ccgaaaattccatcaacatagaaggtgtcattaggctttgtctagcatgaaacactattcttaatgaagacaattaacagtgagctacaaaaatgctttaccttaagtatgtgcgttgggatagagtattcccacctcatgtcaaattctaattgctccctcttctttcatctcttcccttttatttgtttgcagacatgagaaatgtgtatttttttctgaggtaactctctacttagtttattgtttcagtggatgagttggaacagtgcaataagttggttggtaaagatgataaccggacaattagagtgcactcccatggtttaagattgcctttactggggctgcaaggggttacacccagaagatattttcctttcaagcaaggttctctttttgttgcaacacttagagtaggaccggagggagtacaaatgacagttgatgggaagcatgtaacatcctttgcttatcgagaagtaatttctaaatcctcttgtggaatttgtttaataattaatagttccgttaagcttaatgacttattggctgcttttatattcagacattggagccatggcttgttagtgaggttagaatttctggtgatgtgaaattaatctctgtgctggta

SEQ ID NO: 8364 - DNA, 661 bp, Gossypium hirsutum
caatccaaaattaatgcctaatattcagctttctaaaaagcaaatggtgcatcaatcaccattatggataaaaaagcaggctaatatattttatatgtgaggaaaaaagaaagtggaaaatagtctcctgttaaaagagatcaatttgtctgaaaacacaaagaatgcttgaattacaatcccaagaatataaaaccatcaagtctccaaagtcaagattcagtacttgcacacaagaaattgccatttaagaacctcactaaaatacctcaccttttggcttttcatttcgaaatcatcatctcacttcaattattcaacgaattacatcatccagcttcgtgcagttataggctatcttcgtccgtttcttcaaacggctcacattctgtaataacaacgagtcacatataacaaaatgagacttgcatttatacttctgcatataaattcaacatcagatggatttacaataagcttacaaggttagagttaacatgtatatatatttctgtgaactctgtaccttctttgttcaactgctcaatggtagcattaaggtcccgacatctcctaacacccctttctgtttcaacctcttgtagctttggtgtgcttaaagctccattgcaaaaattttccattgcgggacagaagctcc

SEQ ID NO: 8365 - DNA, 620 bp, Gossypium hirsutum
tttgtctcttgctgaagatgaaggtagactttaagttattttgttttactttgcatatttctcaatgatatataaattttattgataaaattacatcaaattcttcacatcaatcttgccgtagtccgcttgtgagcaatatatttctgagatagaccataaaggtctatgatgcataaatgttattacaacaacaaaaggatggcaattcttacagggagagatacattgtagtatgtgttatgccttctctgtagtatgttttgtgtgtttccttcagggaaaaatccttgactttctagtctttgaagtttgttacaccttataacaaaatctgaaggttgaagggatatagcacattccatctgtatatgtacttctacctattcctttccatctcttgtttctttatccagataattatgtacatgctaacatctgtttgatagagaactttatgttttaggatagcattatatttttctatttatttcttactcagtttttctgctagcaggtgttctaattgcatatctagcatttgcggatggagatatcaagtcgagagctgagaggtttttaagcagtattacaaactctattgaaataggagagacgta

SEQ ID NO: 8366 - DNA, 603 bp, Gossypium hirsutum
  misc_feature (535)..(535): n is a, c, g, or t
  misc_feature (587)..(600): n is a, c, g, or t
tcaccatgcaaatctttttatcattcattcagggactctttaggatttatgttcggggttgtggatgcatctcctaataatgttctgttgaaagttcaaaaatttaataataagctaaacaaaatgaaaattaataaccctgtcaatcttgaaagtgtgcatcaattgtatataattttgattggtataataacaaatttagccattgatatttacattttttgttaatttgatcttggttctaaaaaaataacaaattttgcctcaacatttacatatttatagactaaatttgttaaatcatgaccaaattaatagaatgtgtaaattatgcaatcgaaattaattattataccaatcaaaataaaaaaaattaacttttaaaattgatagagattaaattattttaatttttttagaagaaccaatttactcagatattaaaattgagaacaacaaagagttatttttaactatgattaaacctattacttttcaaagcaaattcttggtggagtacaaaaaaatgaagagnccaaaaatcagaccttgacaagcaatgttgtagcaccaaacatgtcaggaannnnnnnnnnnnnnctt

SEQ ID NO: 8367 - DNA, 668 bp, Gossypium hirsutum
aaaagttgcgttttattgtcataaattataacactgaaattaggaaaaatattgctaaataataactttgctgattgttagaaatatatagattgcatgaataaaatattaaattttaaaatgattataatttatataattatattgtaataagtttaaaattgattaattaattaattcatcttggaaaataaatctccaaccctttcaaatgagttattatattttattattagttaaggaatgaaattattttagcacaatttatgtatattttaaaagaataattcaatttaattttaagataaaaccttttgaaaatatctttaaatggtatatgatttttgagttaaaaattattcaaagtaaaaggaaggataatgtgcttcatcccactcaaactcacatcctcttgcatggactataataaccatacaaatcgaattaaaactcaatcggcaaaaaaaagtggcttttaatatattcactattacatattaattagttttattgttacaaatattcattttgtctcattactgcatatcaacctcctctgaaggctaccactagtcatatttggtattttgataatggatgctccaagttttagaatgtattgattgtggatggtttaaaagccaatttcataagtattaaccgtcttt

SEQ ID NO: 8368 - DNA, 675 bp, Gossypium hirsutum
cttcagaaccttcaaaggagaaaaagacatcaaaacggaatcaccattaacatgtaaccgtcactatatcttcgaatacgatttaagactagaattgtttgaaacagagatttcctatcaaatatacaaacaaacaatttgaagcatttaaaagaatcccaaaacctctttatcccatcaaaatagaacattaggagaacgcctaacctatttttctataagatccatgcttttcagggtgtcaaaatataaaacacaaattcaactacaatagactggttttcgcagtcagtaactgaaaatgaaaagaatcatccatcgaattccaccaaatctaccgcaacagacgaaaatgtaatgcctgattcatgcaggaaatatgtttctttacaaaattattgatgaattcttcaaatttatcatttgcttttatagccgatcgcacttccattttgcttccaaagccaaagagaaagaacaacagcaatgatcaaatgattctaaagctaaatagaaatcgcaacttaatcgcaaatgaattcttcacttttttctataaattcgtaacaaataaagctaatgtagtgatagatcaccaacctgttcagtggatagttcagcacggtccatatatgctcaagaaagtacttcaaatcacacgaactcaatccctac

SEQ ID NO: 8369 - DNA, 609 bp, Gossypium hirsutum
cataagagttgtggacaaaagaactcacgagattctcaaaagggcatcaatgtgtttgtaccatcgagaaacattgacatagctagacgatggggcaccagatagagctgcgtagacggtaatatcatcctttgaagcttggtacctgcaaaaacaaacatataaacaaaaatcctaagccaaagaagataaaacctaacaactatagaacatttcattaaagtatggtttttgaaaaattacccagagatgtagctgcgagtaaggagatactcatccagcttcttcaagccagcagcagaacccaggtcgttgaatgtgacagccatttcttgtttctgaaattaaaatcaaatcagagagaaatcagattatgaactactgtttatgaaaactatagccaaaacaaacaagagaaacgaaggatgagttaacaaaggattcgatacacaacatcgtgaaaacaagcaatcaagaatggctccaccaatagccaatcaaatacatgatttcggcttcggatctatcaataacacgatcaaaccactaagctaaagaaaacaaaccacaacaaagcgcacaacaaagatgaactaaagaacttgagaa

SEQ ID NO: 8370 - DNA, 575 bp, Gossypium hirsutum
taagcatggctagggtacttgaaacgagataaactcaaattataagaagtttgaacacgtctactattaggttggattaagtttatttatccagtaaaactaagtcaaattctcatgtttatctttaaattcgattatttatttatgttagatttcgagcataagtttgaaaatttcaaaactaattaataataaggataaacaacacccaaaatcattaaaatatttgtaagtttacgtttttatcatttaatttcaaaaagctataaaatgatcactaaactatttaaaagttttcatttaaattacagggttgttaaactcgctattgtatggttttctttgttcacactactcatcccaatcaaaatttttacttcctaatcttttaaaacaattcattttttaatgaaatggctttgaatgttacaaatttgagaactaaaatctaaatagttttcttctcagatctctgatactgaccgtcagatcaacttacatcaaaggcatgttcatctgcttgtcgatgggtactgatccaccttacttatcgtcaaagcgtcacttagagctcg

SEQ ID NO: 8371 - DNA, 604 bp, Gossypium hirsutum
tttttactgttcccgacctaatggattaaagtcacttttaatattgacatttttttattttaactccatttttaaataattttgttgctgttttctgaaggtctttccaaaggataatagaactatgctatctaggaaggacttgtttaaagatactttgcgaaaagctgctcatgcatggaagcggataattgagcttcgtctctctggtttgtttttcagctgtgttttttttcttcttctaaattgatttttcccatggacatatctggtttaatagaaatcttcccttttaacagaagaagaggcctctaaattaaggttttttgtcgatcagcctgttttcacagatcttcactgggtaagttcctatttttcttttcctgtttctaatcttcacatgtaaatgtatgtttggaaaacgtaacatgccttggttgattaatttcccgaatttaatataaaatgttagcagggaatttaatatgacatttcttcaaagagttttcttaaccttctttgtatattttcttgacagggaatgttcatacctgcaattaaaggacaaggaaatgaggagcagcaacagaagtggcttcccatg

SEQ ID NO: 8372 - DNA, 546 bp, Gossypium hirsutum
ttctgtcatagacaatcaagaataggtggttattccctaaacgacaactgaatttatttctttttcatatatatgaacttgatgtgttttacctatagatatcatcctggcaaataatatagtgaatatttatctttgacattcagattaagtacatatccatggattaggacattcacaaccaggccaaggcaaattaaggagggtaagctcaccatgtgagaaaatgacccaccgtttttcagttcatcaacttataatgcctagcagcagtgccctttaaaatggaatctatccaagttaagatcaaaatatccaacaagtagcacaaaaacaaaggtctttgactgatctgatattaaaatgcaaattgtcaaaattagatatagtaatgcttaaaacattttgctatatttatatcactctaaattcaagcgcaactccctcacataaatgtaccctaatgcctgtcacctaaaaataaaaaatcacattttacaaagggcataacaatgatggatatcaacacaagtccaacacataaaa

SEQ ID NO: 8373 - DNA, 615 bp, Gossypium hirsutum
ctgcttctgttttagtggtaagtttgagaacttaatctcaattgatggttgtgcattgttagtacagtggatggattatcactgaatttacatggatcatatctctctttggaaatataagtcttgttagttttaagatgctgttcttcttttatgcgtgctagatataataaacatttttaaattcattgtttgccaagctgttgcttgtcaagccatgttcagttttgacctacgaaccaaaaccatgatatttggggtttgagcttgattgaactgctccttcaccgtgtcaactggtggaatttcttgggagtggttatatgtttatagggttcttgtagtcagtggttatattttattttattgtgttataatatatatctttattgtggcagcagaaacggcgtttgactggattgtcataacttcacctgaagctggttcggtctttcttgaggcatggaagtaaggattagaacttgcaagcaagaaaccgtctactttttgcgttaaaatctttattagcatttcttgtctggctttaggaacctttagtgctcaaatgaagattcatgtgtttgcttcaaatgcctctcaagtttcatctgtatc

SEQ ID NO: 8374 - DNA, 643 bp, Gossypium hirsutum
gcttctactttagctttttctatcatctccttgatcgatgattcggtagcggcaaccatgccattgttaacctctcaaactctgacctcgattccgccaaagctctactcatcaaagtctcttggttgatctcagattccaccaacaatgcttgtatcgttgaatgtaaatacatgactttacaataccatgcgctgtcaaatgtcctgtttgcaattccaactccacatcccatgatttcttgaacgagggtgttgtaaaaagcagagggcatgtcgattctgagtcttgtaaatgccgaagcaagaagttcatgaaggttgttgcggttttgcaagatgttgagactaaaacgaagagtttgttgtacagaaaaacagttggtgtaattatctattatcagatcatggcggaggagattgatgtctacgattaacttgatttggatgtgacgaggaggtaaaggacgcttctgttatatcaacccgtgatggtgaacatggtgggaaataacattggacgggtataaaattgaagccgatgccattaaagaaacttgaagagaaacaaagctttaacttaactatcccaatcggattttccgattcttgtattgatatttatttataaagagcaaggaatc

SEQ ID NO: 8375 - DNA, 612 bp, Gossypium hirsutum
gatgcaatgctgataaactttcagcataataatgcaggacagatatagtaaatgcaaaattgcaattgaaaatgcatatgtacatttctatatatgccagttaatgtatctcttcaaaatttaaaatagaacaggtaccgggcaagaaaggtgaggttaatgcacaatgctcattcttttcaaaattgcctaatcagtttcctataatgagtaaaccaaagataaaaaggatgagccatttaaaatgtaacataaaaattccataaaagttgttaatggtttcttctctaaaaacctcctaaataaaatttttaaaattatcatggcaaaaagaagaagaagaaggagaagaagaagaagaagaagaagaagaagaagaagaagaagaaaaaaaggatatgacaagacaagctaactcgtaagaatataatctaaaatgcgcatccaagtgacatgttgaaatcaacatccctttaaaatctaaataatctcatgaaaaagacaagacactttcaggctagggggtgctcacagtttgaaatagtccagtctagcgttctgaaacaaaaatgaaaatctaagttcagtttgagcttcctttgggggtgttcg

SEQ ID NO: 8376 - DNA, 662 bp, Gossypium hirsutum
gtttgagtcaatgcaacagctttcaaataagaaaagtaatgatgaaatcttcatcaaattggtaaggcccccttgattccttcgggagttctatcatcgacgacttattagtttgcaaatatgtattgactattaatcatatgtgccttcaattgtctactacagggatctgataaggataagagaaaagaggcttatgagaaagaagagagagctaagaaggtattcgtacatccttttatacaacccgtgttacaattttcctgtttttcgagtttcatgtgagccaatatttaagttcattggactgcagcacactttgtgcttttttaattttatagacttgggcacttggcaaactttggatgattattttgtaatttatccataagttatagcttgcaaatgtgctcctttctctttatagtgattttgtaatttaattccgaaaaatgtctttatggcatgtactgatccttattatttacttggtaatggttgtagtctttgagcattaatgaatttctgaagcctgctgaaaggaagaggtactacaatccaagtggacgcggaaggggtcgggttcagggtcaagatcaaggtcgcgggcatagctcaagagggtttggtggaggaaatgcaagaagtagtatgggcagcag

SEQ ID NO: 8377 - DNA, 561 bp, Gossypium hirsutum
  misc_feature (473)..(476): n is a, c, g, or t
tttcttttcttttctttccttaatgctcaaccctccaagggatttaggcttacacaaattatcccggccgataaaatgaatcttctttttgcccttcatatacttctaccagacttttgtgtggctttaaaataagacacctagggagtgttgacttaacaagagttagtcttccttcaagagaaagtagccgtgttcttcaattccgaaatttatcctaaactctacctagaatatatagattgaaaaaatatattttcttaaagagaatcaaaatatattccaatgtttttaccaattaaggagtattttcctaaaatcttattatattgttcgagaatagatttgataaccttacttcatccgaattaactctaaataatttataattgtcatgtgcaaaaaaaaaaaaaaaggttgaaaaaaaaaaactttccccaatggggttttttccccaaaaaaattacttttcnnnnaccccaaaaaaagggggggggccaaaaaattaagaaaaaaaaaaaatgtttttttttaaaaccccaaaaaaagggggggggaaaa

SEQ ID NO: 8378 - DNA, 573 bp, Gossypium hirsutum
  misc_feature (282)..(283): n is a, c, g, or t
  misc_feature (529)..(531): n is a, c, g, or t
  misc_feature (536)..(537): n is a, c, g, or t
  misc_feature (559)..(559): n is a, c, g, or t
  misc_feature (565)..(568): n is a, c, g, or t
actgtgaggagcagatgacattttgagctgttaaagataatattttctactgttttagaaaaaaaattctctgtaaagcattcaaatatgttctgaagcagaatatgttcttttggcatattaattattaagccaggaaactactattggtggtacttattggtccaagcgtaggtcttatagtaggatctatttgcgtcacctgggagactcaccaacccgctaagcctaggataagaatcttcaaataacatggttaaatttaaaggaattcctttgatnnaattaaaaatatatgtaacattccatacatgattttctctttggttcaaccttagattggatattccatactgaaattagtgaaagcaaactaacacatttcaatgcaatgtaagaataaaagcaagcaatgcaagatgtaaatgtattttaggataacaaacagaggctcaacccagacctgaacccaattactttctgcaagatttgcctaaatgtggcaagaagttgaccaaatgacaaaaannngagcnnaccataccaacctgaattaacnaaatgnnnnaccca

SEQ ID NO: 8379 - DNA, 687 bp, Gossypium hirsutum
aggatctaagattggtcttgaaagcaaaaaatgataagtatgaaaccatgcttgatgatgcaaagaatgagatcgatcttcttacaaataccattgaacagtccaagaacgaataccagaattcgaaaattgaatgggaacagaaagaaatgcatttagtggattgcgtaaaaaaatcagaagaagaaagctcttctctcgaaaaagaagttaataggctggtgaatttgttgaaacaatccaaggaagaagcttcggcatcgaaggaagaagaagctcagttgaaagagagcctaaaggaagttgaatccgaggtgatttatttgcaagaagctctaaaggaagtcaaaaccgagagcaggaaattgaaggagagtttgttggacaaagaaacggaattgcagagtgtcactcaagaaaacgaggaactccgagctaaggaagctgcttctcttaagaaaatcgagcagttgtcaaagttgttagaagaagctacaatcgaaaagcaaaatgaggagaacggcgagttatcggacagtgagaaggactacgattggctgcctaaggtagttgaattctctgaagggaatggacatggaattgacgaaaagcctaagctagagctgtcatcggaacaacctgatgagcctaaaaaagaatccccggacttaaacaatgactcgaaag

SEQ ID NO: 8380 - DNA, 683 bp, Gossypium hirsutum
tctcaaccattctgtcaccatatcataagatcatttacacaaaataagtatattgctatacatgccatacttaaatttacaagccatttaccaaaaatcttccggatagtgtgactgagccttcgacctatcccgactcctgaactggcttgtccaaaactacaatgagtaagaaggagggagtaagcataaatgcttagtaagttcatatgtaaataataaataacataacaaacaatcaaactaatcaacattagcatatatcatcaacacacttatcacattttttaatcatttttcatcatcttattaccttatcgtggttgtaatcaacactcaacccgagggttaaatacatacctgtccaaaatatccatttctcatcacttaccaatacgtctcttttcatctcgagtattcctccatttgagtaaaactttacccgttgaacacatcggaatataattcggatacatggataatttgcatataagtgccacatattcaatcaagcaatcatgtaacccgcccataagcgaactcggactcaactcaacgagctcgggcgttcgcatccataagtgaactcggactcaacacaacgagttcggatgcctagttacatttcacgaactcggactcaactcaacgagttcggacattcgcatccataagtgaactcg

SEQ ID NO: 8381 - DNA, 560 bp, Gossypium hirsutum
  misc_feature (541)..(543): n is a, c, g, or t
attttactcatctcttccccactggtagctgcttcccaatcttcagcctcaattgaattataacccactgcctatacagccaataatgagaaatacattaaactgcaacaaccagagcaagacagacaacaattttttcttttttcgttttaaatatgaaaatgtaaagcaacataaacagacttttgatgtaaagtatacaagtttgagtacaaattaaacaccaattcatcctcaacatacttattatccttaattggcaattatataccctcttcaacaaaaagatactaaaatggctacaagtcaccggcaccggtaaaaagatgcttaagtgaaacatcaactattcccacatgctaaaaaacatatactcctcaacgagtcgtgcacctatggggattaatgaaagccacttgcttcttgcctcttgcttcttgcttcctaaagttactaaaagctatgttactcggacttgggtgtgtgtgtgatgcgggtaagtgtctgacatggctatggtcagatctttcttagtttttcnnntgtattggaggattatg

SEQ ID NO: 8382 - DNA, 565 bp, Gossypium hirsutum
tctttagaatctacggtagataccaaccgagcataaagctgcaattaatttcagaaatcagaacgaaaaaagaattaacgcacacacagaaaaaaaaaccctaaaagattgaaatttacatacgttaggaggacaatcgtttaacagaacaggagattcagataaattattgagaagtttgaggttctgttccagttgattccttaaacgccgattttcggattttagggtttccaattctttttgaagctcggaattgtgaagattgtggggagcatcatggtgatggtggaggtggtggctacattccaaggcggtccatgcgacgtcggcgacttcgaggacggtcttggcaacttccacagcttcatggccgcccattgatgaaggtaaaaaatggaacttttcttcggggacttgagatatgggggaagagaggggttggatgttgtcgttttcacctttacgtgtccaaaattgccgtttctgctaagaccgtcaaccggtttcgtttaaagcgctgttacttgctttgactctctcaaacacaacacccaatacattt

SEQ ID NO: 8383 - DNA, 927 bp, Gossypium hirsutum
  misc_feature (77)..(77): n is a, c, g, or t
  misc_feature (100)..(100): n is a, c, g, or t
  misc_feature (113)..(113): n is a, c, g, or t
  misc_feature (121)..(121): n is a, c, g, or t
  misc_feature (128)..(128): n is a, c, g, or t
  misc_feature (139)..(139): n is a, c, g, or t
  misc_feature (142)..(142): n is a, c, g, or t
  misc_feature (307)..(307): n is a, c, g, or t
  misc_feature (325)..(325): n is a, c, g, or t
  misc_feature (427)..(427): n is a, c, g, or t
  misc_feature (473)..(473): n is a, c, g, or t
  misc_feature (503)..(503): n is a, c, g, or t
  misc_feature (546)..(546): n is a, c, g, or t
  misc_feature (562)..(562): n is a, c, g, or t
  misc_feature (570)..(570): n is a, c, g, or t
  misc_feature (578)..(578): n is a, c, g, or t
taatatcggattcattaagagatttgagtcgggtcaaaaagtctctagaatctacggtagataccaaccgagcatanagctgcaattaatttcagaaatnagaacgaaaaaanaattaacncacacanagaaaaaaaanccntaaaagattgaaatttacatacgttaggaggacaatcgtttaacagaacaggagattcagataaattattgagaagtttgaggttctgttccagttgattccttaaacgccgattttcggattttagggtttccaattctttttgaagctcggaattgtgaagantgtggggagcatcatggngatggtggaggtggtggctacattccaaggcggtccatgcgacgtcggcgacttcgaggacggtcttggcaacttccacagcttcatggccgcccattgatnaaggtaaaaaatggaacttttcttcggggacttgagatatgggggnagagaggggttggatgttgtcgttttcacntttacgtgtccaaaattgccgtttctgctaagaccgtcaaccngtttcgtttaaagcgntgttactngctttgantctctcaaacacaacacccaatacatttcacttttgcttctcatcttctataattgaatttgtttcgtttttttacttgaaaatagtaaaatttttattatttattagttaaaaagtcttctctcctactctttgaaatttaataaattattttttttctgaaagtaagtaattaaggataattaatcactaaaattaatatattttattaattataaataattttaattgatatgataataaatttaatcctcgatatttatatattttgttactttattctaaaaaaaatcaataaatttagcccctacatttaatatcgtaaagctaattttttaaatcgtgacta

SEQ ID NO: 8384 - DNA, 584 bp, Gossypium hirsutum
  misc_feature (522)..(522): n is a, c, g, or t
  misc_feature (525)..(525): n is a, c, g, or t
  misc_feature (540)..(542): n is a, c, g, or t
cacataagtgacgtaactctcaaaaagcaaggaagcttcataatagtcaatatcttcaatgaggtttctaaggtttgaacacattattaggctaaaaagatgtgaaacaactacaaagctgagtaaccccaaagaaaatggcacactatgtttcacaaccttacaataacaaagggcagactatcgagcaaaatattttaaggtaaattactctaatagtcatccaattattagttttttttttgttatcgacaaattataaaatattatttaactattagtaaaattcttttagtcacttaattatgaaagatacaaaaatttaatcttcaaagaatattttggtatagcatttttttcaagtgtatagcaaaattcctgcttcgcatcttcatttcatctttgaaatattataactttgattcaaaaatcgactttattcatgatttaaactgttaattatatttatttttcattttagaatttaattttattccattttggtaattaaactattacttngtnatgatttttagcccnnnacaattgatggtcttaaaaaaataggtagcatatcaacaaat

SEQ ID NO: 8385 - DNA, 648 bp, Gossypium hirsutum
aagagtagctgtaatatagacaaataaatggtgtttgaaactcctattatagtattttcttaaggttgtaaaatatgtaattcgcaacaaaaggaccttctttctgattttagaacagaacgacattgcatagctatggtagcaagtatagtttaaaaaaaaaatagtatgcaacaatgatactctaccctgatgattcatacagtcaatgatactctaccctgatgattcatacagtcatgtaactaaaccaatatgtcattcatgctgcagacataaaaatcaataacaaaaatgtagtgaagataaaggggagcatgacaatgatggtacaactagagcagcagccacaacagaatcaatcacttctaatatttgtatgctaaaagcttaatgattatttgccatgatggtgccatttaactagaggaaccacaaattaaaggccattgaaattctcttaatgcttaataaatatttctattctgtatatagttggcaaggcaattacttaaaggacagtaaacttaagattggagaaactatgtaaccaattacaaagtctgcctaagctcattattcaggaaaagaaaccccatatcatgttccttatttattttctttcatattttaatcaagccaattagg

SEQ ID NO: 8386 - DNA, 572 bp, Gossypium hirsutum
ttacatcgtcatctaatcgacgattccaaaagcattcaccgtgattcatggcatcgtttctcaagcaagaagaaatctcacggttggtgtgatttcacgccttcttctactgttttcgatcccaagtcaggttatctcttcaataacgacgccgttttgattaccgccgatatcttaatcttgaatgaatccgttaatttcacacgtgataataatgatgttcaatcctcattgtcttctatgatttcgtcttctgttgttgccattcccgtttctgatgttttgagtgacaaattcacttggaaagtgcataattttagtttgtttaaggagatgattaagacacagaagataatgagcccggttttcccagccggggagtgtaacttgaggattagtgtgtatcaaagctcggttaacgggcaagagtatttgtctatgtgtttggagagtaaggatacggataaaacggttgcttctgataggagttgttggtgtttatttagaatgtcgacgctgaatcagaagccagggtcgaatcatatgcacagagactcgtagggaggttgctg

SEQ ID NO: 8387 - DNA, 626 bp, Gossypium hirsutum
ttaatttcggcttgagttacttataaacaaacttcaactacatgagtctgttgatgtacaagatatggtttagaaatgtctaaattatccagattaatggtttagaaatgtctaaattatccagattaagtgttgctatgaaaagtgctaccatttgttgaattcaaaatgtaaaaagaattgcataaaacaataaaagttcagaaatgtgagcgtaacagtcatttcatattctaaagtgggtttaaccagagaagtaggtttctatatgtgtagcatccatgtccaaaaaacttgcttgtatattaaaaccaagaagctgaagttgttgcaacaagcatattctaaattaatcagttcagaatgcgctggtgaggtcttccttacatgtataaaagtgaaagtctatgtagtaagaggtaatagaaatcataagggaaaaaaggaataggaaacaagcatcttaaggatacataccggagtgcggcttccatcaaatgtgtaaggaaaagcatccttggttatgctgatgttagcaactcttgtagttgcttggtcacgaatgaaagggtgatctagcagttgaaaggctgtaggacgtgctgacgggtctcgtgcaagcaaag

SEQ ID NO: 8388 - DNA, 678 bp, Gossypium hirsutum
agcaacactacccagcaccggggatttgatgccaaatggagtttcttctatcagcattattattgagatattgtggtcttgtttaaatttcttgacatcactttaatacccaaaggacagcagccactggactactcattttcaagacgctttcacacagggaaggaacattatgcaggaagcgagctaatacagaaaaaatgctggatttcggactagctttcaacctcacatgcttaattttatttctcccccggactctttgattgctgcgaattctcagagaatacctatgtatccaacagtctgtaaaactttgaatgaatcctagttctttccttgaccaaaaaaactgccataacctcgcaaacattctcctctatttttcaactccatctttggcatgaaatatccagaaaatataaaaaaccaattacaattatatttaaagcaccatagggaaaatcaagaaaaatatcattgatgatagaagaattgagagaacaaaaaagtaaaaattttctatcttcttgctttgaatttctatttaattgctccaaaaaagtagaagttctaatcttgcaaactattttagtttttatatctactttttgttttaaaatgttataataaaatacacttttttataaatagggatgatataatgtttgacccata

SEQ ID NO: 8389 - DNA, 652 bp, Gossypium hirsutum
ctagaactagccatattccttgatacagagaatgaaggtaggattaattaggatgtgacagattgagtaagagcagaagtgtagttttatgttccagattcatactccaacgaacagtgaacctaaaactagtttgcagtttctctgtttctgtagtgaatttgattttgttttggcttttggaatgcaagttagtccttgtagaatggttggaaatggttcattggtgctataatgatttttaatagattttaagattttttttcccttcaatgttatacctttcaattttagtatttactttgataattgttgtaagacactttttgaaattattggtctagcctctctctcccttctacttggtaaccttatactttggttgttgagattgatatttctgttcataactggaaacactatgtcatatttatttgggcctttcattcctttgtatatttgagcaatgttttatcttcgattttacattcacaaactttcatcagtgtttatcagtcagcatagcagaacgatcaaagttttcggagggggaaattcaaacatttatgtctatagatgctgatcgaactgtcaatttatgcaacagtttccatgacatgtggaggtaatctcttaaatcacacatagctcc

SEQ ID NO: 8390 - DNA, 636 bp, Gossypium hirsutum
tacgatgtttaagaacaagccaaatgaacactttaactttttgtggtccaatatacttccaaggtaatttccaaacatcctcctttctatgccaagaatcttctctaagtttattatacgcgcttttaacagtaaaaccaccagatgtagttccttcccaaataattatgttcgaacctgaatttgattggggtggtggaattccaataatcttctgaataatgtcttcagataaccaaaggtaaaagaagtccaaattccaatcccgttctccatgaccatgtcattaaggggacaatacatatccaagttaatagttcaaactaatttttagataagggtcccactttaggcacccacaaatccttccaacagtttattttacgcccatctccaactgatcagagcaaattttcccgaataagcagccaaatcttcgacaaagatctccataagaaagagcatcgccccctcgataaagactcaggtaacccattttgaaccccatttttggaccgaagcatatttacccataacgaagaatggtcagtcactaatttgaaacctagtttcataatgaatgacatattatgatcacgaagagccctcacacccagcccacaatgtgccttaagt

SEQ ID NO: 8391 - DNA, 577 bp, Gossypium hirsutum
  misc_feature (569)..(569): n is a, c, g, or t
taggattgactcgggactggtgtcacttacatatatagaaatgaatgaatttatacctgccatgagccaatcttaagcaaagaaattgggaagttttcagctttgatcttattaattgtttgttggaaaacatcctttgacttttttgtagctgatataaaaccaccaccaacgttagaatttgtttgctgtctgacattgtagttttgttgttgttgttggggtagtttctgtagcttttccacgaaatctggtgttgttgaaagttttaaaccaccaacaggtaacatttgaagagcctcctgatcatatgagttaacctgcgacgataattaaacaaaaaatgaattattcttaaattaaggatcaaaatagtttgcaaaatggttaattatatcaaagtcttcaccatgaatctatcatttaatcattattattaagtataaaccatgaaaaaatgcattacacaacattagcctcacgcttaaagcaatcaatcaagaaaaaaaaatgcagtaaactcctcctgggtgcaacttcaaaacaagaaaaggaaaaggtcagaaaanactgcaaa

SEQ ID NO: 8392 - DNA, 541 bp, Gossypium hirsutum
  misc_feature (533)..(538): n is a, c, g, or t
ggtaacatgatgcgcctgttttagggaagcctacaatatttgcaactgataagtcggggtaattctctttcttttggatgctctgcattatcttaaagaaaatcaattaacgtattacttggctatgttttggttcatttttgtgggcttgttgaaatctttgtactgcttgtataatattgaaataccgtattgtacttataatgtagttcgcactttggtgggtttattcaagtattctgtgaaatcataatgaaaataccaaacactatatactgtgatagcttgtcttacaggcggcaagagttgtcttaaaccacgaaaattccaatctgtttcttgtgtcagggaaaagatccagtgggctcagtgtgaagattgttttaagtggcgtcgattgccttccgatgttcttcttccttccaagtggacctgttccagtaactcatgggatcctgaaaggtaagcagtcgtttgagtgtttttctctaccaactaaacatggttatacattttcatttctaataacactnnnnnnatt

SEQ ID NO: 8393 - DNA, 585 bp, Gossypium hirsutum
  misc_feature (556)..(558): n is a, c, g, or t
  misc_feature (570)..(572): n is a, c, g, or t
accatacatgagtgtgaaacatagagtgagaacgaacaagctggcggagcggttctccatatgctactttgtgttcccagcaaaaggcagtgtgatctgtagttctaaatacaaaccttttacttataccgatttccaacagcaagtgcaacatgacaccaagactctaggttataaagttggtctccaaagattcaagcttaatgcagctgtttaatattatatatatatatatacctattatcaattattttatgtagggtaactcttaattttctgttgtactaattccccctttattacggaaaatcttttaattcaatcctaccattaactcatccttaattactcctcgggaatatgcagtctgtaattcggtataggatgagaaattataaatattaacattccaactcagactaaagggtaaactataaaaatagtcacttttgtttgtttcaggtaacattttagtcacttatgtttgaaatgttatgtttagtcccttatgctattattttgttaagaagtgatcactcttccgttaagttccatnnntctctaacggtnnnctacgggcatcca

SEQ ID NO: 8394 - DNA, 532 bp, Gossypium hirsutum
  misc_feature (513)..(513): n is a, c, g, or t
attcttgattaccaccaaaaaatttgctaaggaaaaaccttgtgtcgtgatctgaactcaacctgacaaggaatcgcgaagagttgtaactaaggaagcaaggattcacaaatactttccttgtcaattttattgccattttcagataaatggtaatgacaaacaacctgcaccaaacccagattcattttcatttattaacacataagaagcattacaaaggcccaaagtaccattaacaaaatgaaaagtatgtctggatatatatatatggggagagatccacttacatcggtttcgttttaacgctctaatcattgaatttattgatataattgtaatttttgtataaaaagatacaaaagagtgtaaaactatacaccggtgtaagtggttatcccatattatatatatatatatagagagagagagagagagagagagagagtagagagcataacaaagagcaaggccaggaagttttcacaacaaagttccaggtaatcctccatngacgtgattttatatgaat

SEQ ID NO: 8395 - DNA, 644 bp, Gossypium hirsutum
tcatttaacactcgatccacttcaaaacattaagatctccactttactcaaatctaacggctacaatctcaccaaacaccgtctctctcccatttattttggagcgcctcgtttctctgtacgaaaaagtggatctctgccaaaacaaaaaagaaaacacacaaaggaaaaaaaaatctcttgtttgagagaaatagatggcgaagttatcgaaaccgacgtcgtccgatgaagcattatccgatggttccagttcatcggaagaagagaggatcgacgatcagatcaacggcgatgaagacgatgaagaagagctcgaagccgtcgctcgttccgccggtgcttccgatgaagacgaagatgataacgctgcacctgatgcaaacgcggatgatgcttacgaggtagttttactatttctccccttatttcgtgttcgatttttttaatgatttttagttgttcgatctagctttctgccaagaattgaaaataagctttttaagtttttagtgtttgcactttattttgattatttgtaggtaattttatggatttccccttatgttgctttcgaatttttatgatttttagttgttcgatctagctttatttttttggttatttgtagttaaggtctgctg

SEQ ID NO: 8396 - DNA, 676 bp, Gossypium hirsutum
cgaatttagttcgagtcaggtgtcatttcacaatgttctatgcatatctggctgtgggttttcttatgccaagtaggtttaaacaatgtcttaacaatgattgagagatgaagaacttaatcaaatattgttttggcattcttggtctgtgagaaaaaccttgtttgtccaagtggtcatgtgtccctttagcagcatgtctggaaggatctaggttcaatccttgcctctggaaaagggccatggggttttgtgcccaatcatattctttaagcttctttttctaatatagttggttatattttttccttaaagattgcttctgaaatgttcctaggtcttgggctaaaaatatgacttgggaaggcagagcctagttttcaaatcctattaaactttcctgcctatcatattccttaaagatagttggttggttatattttttcaaatccttgcctctggaaaagggccatggggttttgtgcccaatcatattctttaagcttctttttctaatatagttggttatatttttccttaaagattgcttctgaaatgatcctaggtcttgggctaaaaatatgacttgggaaggcagagcctagttttcaaatccaattaaactttcttgcctatcggtcatcaaaaaagatgttgcatgtgtgtatttccctag

SEQ ID NO: 8397 - DNA, 521 bp, Gossypium hirsutum
  misc_feature (58)..(61): n is a, c, g, or t
  misc_feature (469)..(470): n is a, c, g, or t
  misc_feature (500)..(500): n is a, c, g, or t
gcattactgttggttaccattagatattccaatattgtgttacaatataatggaaatnnnntggaaattggtgaaagtacctgccaagtccctctattaaccagaccagattgcaatagagttaacatttactgtttataaaatgccgtgaaaattaattttttcatttgcagaaccataaaaagctttcaaaatattaactctgttgaaatttgaacttatttggtgatcatggataattgaagtttatttcaaaaacgtttcgaagtaccatatataataagtgaaggtatttgcaatgtaccttgtatacgaagatcaacaattagctcattaagtgcaccatttgtcactaaatctttgtgtacaagaagagtttcctgtcataagtaaaagagaagcattaaagaactacataatgtgctcggtataatctgaaaatattcaaacaaaagagagcctgaaagannaaaatcgacaaatgaatgatgaataaccangcattgcaagcagctgggtaa

SEQ ID NO: 8398 - DNA, 644 bp, Gossypium hirsutum
gctctctttttgacctcatagaactcctcctttgtcagatcagacaaacctcgggacaaaagatattgctccacatcaattaactctttaagctgagtgaggaaccatttgtcaatgaaactcagctcatatatttcgtccactttcatccccttcttcattgcagcatatacagaatggattcgatctgggctggggactctgagactgtacttcaactgatcccaatcccagttgagttctttaacttcagcacatccccatccagagtagccacattccagtgatcgaactgccttctgaaaggattcctggaatgtgcggcctagagccatggattcgccaacagatttcatctgagttgtcaatattggtggagagccagggaatttctcaaatgcaaatcgtgggatctgcaacacttgtatagattaaagatattaaaatatatatattcataagctgataatataaaatcatatgcaagtaaacaaagttatgaatgctatctgaaccctcggcacaagattattcctcttaaaaagccaattgaaacacacagatacagtttctattctactgttccttctataagatgcatcatcatgtgataaatgaatgatctagcattaaataaagaaacc

SEQ ID NO: 8399 - DNA, 632 bp, Gossypium hirsutum
gtttggaatccgacattcctttttgagattcaatggggttggtttagttggtaagaacctgacatttcatccgagactggttttaaatttgattttcattcctgaaaagagatctgcggcatgcatggcatgaccttccctcttaaaaacaaggagaatgaactacgtaactaaataccattagtcattagatatgggcctatatatcaataaatcctgttggaccctgaggaactgacaccgtctttgaataaggtggaccttggcccaagctcaagttggacatggataccatcgtcattctttttaaaacacgaataaattcacacacacacttaacaagaactcagaaagcttattcctttaaaattgccgattcctcttcccattgaagcatggttctagtataatccaatcctatcttataggtaagtatactttcaactcaaatctttccagtacgaaagtactgctgagagttaacattgacttttattgtatggtttctcttgggaactgaattttcttctctccagtttggtgggttgaacatggagccgccgcctactggtgaagaacccacttcgtgggatgagctatataacataaatttgattccttctgagctgttc

SEQ ID NO: 8400 - DNA, 644 bp, Gossypium hirsutum
ctcgagggagctcatagtggactgcaccggggagggggctgtttttgtggaggctgaagctaattgtgggattgaagagatgggggacataacaaagcctgaccctaacattcttggaaagttggtttatgaaatctctggtgctcagaacttgctagagatacctcttttggtgattcaggtttggggattgctttactcttttgtttcttgtctctcttgcatatgtcaaagtggatcttttggcaagtaaaacttgttaaccttagtgtcactgctatgtgctatgcttagtctctttcaaaggacctttacatatttaccttactcttcatttttcctaaaatatctgcctcataaattaaggtacaatctttgagtttatgatcaaatttataaaaacttgtacacgttactccgttccaaaatccatattcagcacatacttgaacataggcaaaggataaatggaaaatctagggaattgaatatacatgtgatatataatatatatattacacctgaatctcaaggtgaaaatattacggaggtttttatattaagtatttaattgtattttgcccttttcacttaaaaatgaataaattacgttaacatgaaatatacgtggcatgtcattgttt

SEQ ID NO: 8401 - DNA, 595 bp, Gossypium hirsutum
  misc_feature (63)..(64): n is a, c, g, or t
  misc_feature (67)..(67): n is a, c, g, or t
  misc_feature (549)..(550): n is a, c, g, or t
  misc_feature (579)..(579): n is a, c, g, or t
actgttgtagtttttccggttccaggaggtccatgcagcaaaaatacatcctttgatgacacnnttnttaaaatggcatctctcttgacccaaaaaataaggttaatgaataaattaggccagggaggaggatccttaatttgtaaaatatgtagcacacataaagcctataaattggatatactactagacatattgaataagaatgttagtgcatgaatcaacaagcagtgatgactgatgaccataacacatatagtagccagtcaattaaaattttagatcaacagcaaaggaatcaaagttactattcagaaaacccaggcaataaccatttctttacttcactcaattcatcttattgcaatctgagtatctgacctagaataaaatatcaattacccaaaaataatggagaaaagggcatgagagaggaaacaaagatagcatcaaatatttcacattgtaaatatgttttgaggccaacatgttcatagtgcaaatagaatatagtttttaaccataatatcatcaccgctctgagtgagnngaataaaaggaaacaaaagaaacacaggnaaaagaaaaatgaaaa

SEQ ID NO: 8402 - DNA, 516 bp, Gossypium hirsutum
  misc_feature (34)..(34): n is a, c, g, or t
  misc_feature (36)..(37): n is a, c, g, or t
  misc_feature (454)..(461): n is a, c, g, or t
  misc_feature (502)..(504): n is a, c, g, or t
tcttttgttattgtatggtgaaaaaaatatccgngnncccttggaaacatggccttttaataagtggcgaatctacgggctggcagagccccagcaccttggaaaataggccccagcattttttttcaattaaggttttttaataaattataaaattttaaattaagaataataaaattatatttttaattttttaaaaaaataaaattttgatttaatttttttaaaaaccataaaactataaactaataaaattataagatcatatttttactatcataaaaatataatttaattttagtctctaaaaaatattatttagtttggccttgttgtggatatattctaaaatgaaaactaaaaaatgtgtgaatctgaagggtttttggatagaataattaaattaaaaagtgatgttaggagatgtttgacatccatagctttgaggtttcannnnnnnnaggggcagaacacctataccgtatcaacatccgatgcatgnnnggtggaaaacct

SEQ ID NO: 8403 - DNA, 623 bp, Gossypium hirsutum
  misc_feature (61)..(62): n is a, c, g, or t
ttgagctgcctgataatgaggttttccacgggttagttcctaattgttgccttttagattnnttttcttgatttctgttgccttggtcaaatgagataacactgaattcttttcattagttatccactatgttacttgggcttctttatgagtacagatacagttatgtgtctgaaacgggcatatcctcacatccatgtctcagacatgagtgttggacacgggtatttcaagtaaaatgaatagtccgagcaacataggttatacatggaattactctgtgttgattaatatgtagctttgttggcagtaactatgttgatcatcacgttagctcaagagagcagattactcttcaagattccatggatggcatggtatactccacttcacaatttggattagatggtcagtacaagctctggattgtgatgatcattgatttagctacattttgattagaaaatatgtaaatctaaaattctgtgttttatatacttccagagcggtttggtgatggggatacttctcagattggtctccttgatgaggtaatcttgttattcttgtatcactgacgttttcttgaaaattaatcaggaatcagcaggaggcaattttaa

SEQ ID NO: 8404 - DNA, 656 bp, Gossypium hirsutum
aacttttcatgatggtggtgtgatgaaattccagattcgtgatttgaggaaagtatcggatgcgggcgttcctgtactaaacggtatcaacatcggtagccctaaagggatgatcgtcgggatcatcggaccaagcgggagtgggaaatcgacgctgcttagagctcttaatcgcctgtgggagcctccatccgatacggtgttccttgacggccgtgatattgttgaccttgatgtgcttggacttcgccgtaaagtcggcatgcttttccagctccccgttttgtttcaaggtgcaaaattcgctaattatatttctcaatttatttttctttgcatactagttatttaaattttgtgtgtgaatttctagttaaaaagatggatttttcgaatttctttcaaatgtcttctcacttaactgtatctgattcaccgtgaatggatttctaggaagttttgatgaaatttatgaatttacttttatagttattacactgtaattaactgaatataattctgagttgctcataaaactgttaatggcaaatagcaaggaggaagctgaaaactttgaggttttaggatcaagttgttccagatttattctgattatcaatccggtagtccaacagtgatcggtgattgcttaagtt

SEQ ID NO: 8405 - DNA, 647 bp, Gossypium hirsutum
atttacagctactggctaaagatgcaacagatgacattgactcaggcaaccccaaattgattcaagaacatacatttttcttggcaacttcaagcatccatcagttattgctaatggcactgaagttatacagtagtgaaagctctgacatagaagcaacttcacagaatcatagccagtcatcctcaagcaagacatcaaagagttgttttaagatcatttcatttgctttgaatgcatccctccatcatgtaaaatcttcagccgctgtgggaaatgaaggtccaatgaagaagttgatctatggggaaatcaatatgctggggcctccattgctgagattaactctactgctcaaacctggttcaaatgttgcaactagtcagaggaaaaaagaaagcaaagcaaaaaaggatgcagaggaaagaaaggaacatctccttctagcattattttgcttgaaagaaatgataacagtcagtctatgtggttcttgtttgactcacttgcttgagaatctcttgtcagttcctgaacttgagcatgctgatttgcatgatgaatgtgatcaagcctctgaaattaatgaccaagatataaaaaacaaagagctattcattcagaaatatttgaagccgctgctcaca

SEQ ID NO: 8406 - DNA, 578 bp, Gossypium hirsutum
  misc_feature (482)..(484): n is a, c, g, or t
  misc_feature (516)..(525): n is a, c, g, or t
aatgccaatcttggggaaaagatggattagaacaaaccttgttgtcttggaaagtgagttcaatttcagatatatcatcttgagcttgaagtattgttttcaatgaagggatgacatcctccgacatcaactccggcaaagatttggcaggagcctttgcagcaggtttaggctttgctgcagctgcttttggggctgccttcacttcctcctcaccaccagcaacgccggctgatggtggagtggttcccttggtttcagcagtggctaatggaaaaaagccaacacatttttaagcaaccccgagtttagaagatgagctttaaaaggattcttgcacactgataagaagggaaaaagctacctgtaggagtagaagattcctgaacagcggagcaggcgacacatagacgatagataattgatttccccaccacaacctgcggataaaagattccaactccgaacttacttttagaaannngtataaaaaatacaaaattgtaaactatagtnnnnnnnnnnaaatgatagtgtggaagaggaggtgggtttgaaggtggaagtgagatagaaga

SEQ ID NO: 8407 - DNA, 622 bp, Gossypium hirsutum
tggtttattatttgtaattacccatgctatcaggctctaattttcctgaactcgtccaacaggtaccccgtcactttattcaatgagctctattatcttaattcagggggaacgatttggacaggtacctagatattaactcaattgttaaaattggatttcttgtagatgacttgtgccaatctttccctttttgtctgtactgcagatgggtcatctccggtccatagtttagaaagcattggaggaaagaagttttcccttgataaatcccagttgggattgaaaagcataattggtgttccccataaaaatgatactgccattgacattttgggaaggatgacttctatactcgagcaaatacacactccaattacatcaaattcggctttaggaacaaatttgcttcaagaaggagaggaaaatattggtcaattcctttatcttgaaggaattgagtatcacatgtggaacacctatgatgtccatttttatgcatcttttgcactaatcatgttatttccaaaactacaactcagcatccaaagagactttgcagctgcagtaatgatgcatgatcctagtaagatgaaacttttacatgatggacaactggtac

SEQ ID NO: 8408 - DNA, 639 bp, Gossypium hirsutum
tgcttcctttgacaattgacattctgttagatcccgagttctcatattaatttcatcatctagcgcgaaatgattcatattcaaaagaaacatattttgctgaaaaactgataaatggtcaatacaaacattctagctatcctattttttactgttgggtatagcactggaaacttttcagcatttttgaccaaaaagtatagtacttttgttgagatgcgaaaggcccacttttttatgcttagctaaactgaatcagaaatttttatcatgaatttttggtttagctaaaataaatcacaagatttcttcttgatattttgaagatgtaaaaattggaattgatttatgtctaatatattgtattttatacaccgtgttatggtttgcttcttactagtgtataaatttatccactatcttatagtagtttggatgaaaaaaaatgaagaaaagtggggaaacctttgacaaaaaagttgagataggagagaagtgcaaaaatgtgaaaatctaaggccgaaaaagcatatccaaacaaaacggttgccaaaaggatgagcctaccagcttagttactccactgttgtgtggaagctaacaagacttttcttccttcaaacaatggcttcccttctt

SEQ ID NO: 8409 - DNA, 576 bp, Gossypium hirsutum
  misc_feature (539)..(539): n is a, c, g, or t
  misc_feature (568)..(569): n is a, c, g, or t
cttaataggttgcagagatttgaataaatatttagctgaaagtatcacctttggatacggtagtgaaaatgctttaagtaacagagaatctttcctctcacttaagtggtcgacataagattatagtggttgctgatgtaaatatcttttggttcataatgcagtgcatgtgcagctcttgtgcaaaggttttgagatgccagacaaatcggtgcccaatctgtaggcaaccggttgagaggcttttggagataaaggtcaacaatggccctgatgaatgagatgacaacatgtttgttgaactatcttcctgtatagtactttgttgttatcattatgtcatgcctttctaataatcaaacaggaagttataatcaattatacagtacatgatatgaacgaaatgccggaattcgacacaaactatattcagacaaataggtgccatcttgtagatgaacatcaaaatttttttttttgggtgcccccctctattcttatgtaaaaaaaaaaaaaaaaattttttttttgttctttanattattacatcagtagctgaaaaactagnngggaaaa

SEQ ID NO: 8410 - DNA, 675 bp, Gossypium hirsutum
gcaaataacattaatagagacaaagaatgaggaaaagaaataaatgcagcaagaaaataataaataaaagggtcactacaaacaaacaaaattcaatggtcccctagaggttacaagtactaacagttttttctttgaaagaaagtactatcaaaattaagaagtgaaacttgtagaactctttgtcaccatatagtttaaaggttagtaacatttgagaatatttcaatccttttttcacctactcatacaagaaactggtaccaatattcattacactcaatattgtcaaggcacacaccaaggcgtgcctaaatgctgcactttgaccataaacaacataagtatcttagaccccttttagtgagggcctgaggagcatttgatcaggcacgcacctgacccaccaaagtgaactttttttgcaagactataggtgcaaaaaaagtaaatgaaattcacttttcttttattttcatagttattaattaactttacctctaagaattaaaagagggacgtatcacactctatacttctcacaaggaaagggtgcatgttgagcaaaaaaggaaaattttgcatgtttagtaggataaaaatgtatcgccctttaatttattgacagaattgtattcctatgcttatcacacatatatacacacaaacaacaac

SEQ ID NO: 8411 - DNA, 387 bp, Gossypium hirsutum
gtttctataatttggaggcataaagccatcctgtaagtgtggaagtctttcactaaaggaggaggttgggagagccttaattaggctgagaatcttttagttattaggctagtgcctagaattgctattttctcctaagaggggaattttcaaaattacagatgattttctgaactacagcaggtctataaagctccttgcatgatttttttttttttaaaattccccagggtggaatcggtctatccttttggtttatttgaggcatttggggggggttaaccaaaaagctactggttggggataggaaaatcaacaacaaaaaaaatcggcggagcccacaaacaaggttgttgaaaggccccatatggagggggcttttgggaa

SEQ ID NO: 8412 - DNA, 649 bp, Gossypium hirsutum
  misc_feature (294)..(294): n is a, c, g, or t
  misc_feature (457)..(457): n is a, c, g, or t
  misc_feature (463)..(465): n is a, c, g, or t
  misc_feature (475)..(481): n is a, c, g, or t
  misc_feature (483)..(483): n is a, c, g, or t
  misc_feature (488)..(495): n is a, c, g, or t
  misc_feature (502)..(507): n is a, c, g, or t
  misc_feature (509)..(511): n is a, c, g, or t
  misc_feature (513)..(521): n is a, c, g, or t
  misc_feature (523)..(529): n is a, c, g, or t
  misc_feature (533)..(533): n is a, c, g, or t
  misc_feature (535)..(546): n is a, c, g, or t
  misc_feature (548)..(567): n is a, c, g, or t
  misc_feature (569)..(573): n is a, c, g, or t
  misc_feature (575)..(578): n is a, c, g, or t
  misc_feature (580)..(580): n is a, c, g, or t
  misc_feature (582)..(587): n is a, c, g, or t
  misc_feature (589)..(600): n is a, c, g, or t
  misc_feature (603)..(607): n is a, c, g, or t
  misc_feature (611)..(639): n is a, c, g, or t
ttttaggtaataaaggaggaattatcattattcaccagctttagagtgcccaatcttagctaaaactctaaccttattcaccacataaaactctccttgaaagagaatagagctttcactaacctgcaatgttgtctgtcgccttggttccatcatggattcctgcaagaaatgttaaattgccatcatgataacaacttatatataagtacaaaacttctaatttatatctgcctcccatgactaaaatctttttctttttaaaagcgaacggcctggctacaaatgtaattntaataatcattttcaggtaaaaaaaaggccaggctggcccaattaaaaaaattaaaatccaaataacccccaacggccaacccaatggtccctatatatattccataaaatttttaaatttgaaaaacctataatttttttcaaaaaagattttcgggctctnatattnnncccctgaaannnnnnntnatctnnnnnnnnttatatnnnnnntnnntnnnnnnnnnannnnnnnccgnannnnnnnnnnnnannnnnnnnnnnnnnnnnnnntnnnnnannnnanannnnnntnnnnnnnnnnnnaannnnntttnnnnnnnnnnnnnnnnnnnnnnnnnnnnnaaaaaaaaaa

SEQ ID NO: 8413 - DNA, 640 bp, Gossypium hirsutum
agtgtacatcagctgtaaatagcttaggaagatgttgtaatctggttaggataatatctatatatattacaagtttctaatgtgtttatactgaaaaaaattgacatgtagtaaggaaagtttgtggagggaaaaattgtaacataaacccctccccctttatatataatttttaattgcgctttggaagttatatttttataataattttttacaatttatttatattcaataatccaacttatgttttgatctatcacttttgagtcaccaaatattgcctctgaaccggttgggaaggttaattcaaaagcaaatattgcctctgaaccggttgggaaggttaattcaaaagcgaagatactcatagacagtctaaacaatcttaggaaaataatccttacctcctcacttttgaaataggcttgttataccctcacccggtttagacatgcaacaccacaagaaggtgattgagagacattcatagccggccctcagcctcacagcacttagatagatggtctcccaccttatatcgccactcgagcacctcgtcctccaagccacccacttttagttggaatgcactcatctacatgggggaccactaagagactacaaaggcgtgaactaccac

SEQ ID NO: 8414 - DNA, 639 bp, Gossypium hirsutum
cttgtatgtagctgaggttttgataggatgaatgggttatgtagaaaatatataatctaatcaagatgttctttaataacgttaagccttttcgtttgatatgaattacatattaagttgcaaattagaggatctatcttaaaggggcactgaatatgcagatcctgtagacacatttatatttacgtttgtgagttcattgcactcagggctgattgttgctgggcagctagaccagtaaatattctgttggcatgacttcatgtcagcaaataaataatttcttttactcacggttttgtttatttttgttacttaaagcttttactcttgatggaaattatgcacctatggaaagtgaacttgagaaaacattgctcttgttatgtagctctaagaattaagaactttacaaaagaatagttatctatttgccaagttgatttgaaatgtgaaaatctcaacttatttcaggcaacagcaaggtgatgaaacaccaatggtgtgggaaatgcttctgtacttttacatcctctattcacccgattggcattatcgcagtacaatgcctactttcttgttcttttacggagctttgtatgcagtggtccatgctctcttccgctttggatttggctt

SEQ ID NO: 8415 - DNA, 629 bp, Gossypium hirsutum
cttcttgtggttcaagcatagcggccataaggagctcctcaaatgatactgacccaaaccctggtccttcaaaagtcttcacactgtccatgcaagttgcggccggtgaactgataaggctctcgtctttgccccaaaagatcatttcttctaatgtgaacattgatcccatggtgcgggaagagttggaaatttgcgaaaatcttttcgaggacgcagttgagtatatcaatgactccatatcagccgtgcaaggagggcagggagacgagatggtgttgtcaacggccaagattaacgatataaagacgtggctcagcagcgcaatcacgaaccaggaaacatgtttagatggactaatggaagccgcgaaccatgcggctataccccaagaaatggaaaatgctacgaggaactccactgaattcagcagcaacagcttagctattgcaacccacataatgaccatcctacagagtttccaagttccgattcatcggaagttgctaaaattcgaccgccaccaccacggtcttgaattcgatccccgttttcctctctgggttcgtaggggggacaggagattgcttcaggaggaaaatcctataccgaatattaccgtggctaaa

SEQ ID NO: 8416 - DNA, 676 bp, Gossypium hirsutum
  misc_feature (672)..(672): n is a, c, g, or t
gtcctcgggttaaactgaggttttgttttgttgactctaatgagagcttgagtgtcggagacagggttcatagaacgggagcgtcttgttggatcaggacatgtgtggcacatggccacctaccgatgggacatgtaggcggcggtaggtcgccgtgtgcacacatggtctaatctcttgttctgtgaactcatgtcctaggtggtcttttcaggcaccccggctctaacccaaggacaatgctgacttgttgaggggtttgtcagcttttggatggatggcacttcaaagatttctccagaaagagtcggccttccatatatatagggagatagttttaattgggagttcaactatgttttgatcttttctttttaacgggaaattggcttatttttctaagtaaacatgttttatgatcattttgttcatcctaaactactatatttttcataaattttcatttgatcttatgttttatgatccttatattccaggaaaaacatttgatcttatgttcgtcccttatatttcagaaattttcgttgctatagtatatttttcgagtctttatcaagaactgaaagcttaccttcttttcttttccactagcagcatgcaagaaaccaatcacttcaaccatggagaaaatcatgcctgtggaaagtcagntaac

SEQ ID NO: 8417 - DNA, 614 bp, Gossypium hirsutum
ggttatatttattgtctctcaaattatgtgcaggtatccatacaataatgcgctacatcatcatgtggaaagtataatattatcttgtctggaaagcaagaatgatgcaatagtcgaccatcttcttcaagaatgtgatttgatcaggaaattgatccaaactgacaaacatccatttctttctggtgacaataatcaggtagatgttaatcatattgttgtttgtccagtttggtaatgggcattattaaaaatataattgaaaatggttataatgctactggatcatgcagccaacttaccttttttgtttgagcagccaactttacctgctgctggaaaacatgcaccacgagcaggaaacattggtcacattacacgtatctcaaataaacttgtacagttaggaggcagtaatagctgcattcagacacatctacaggtggggaattggctgcttgttaatgttgtatgaatgcttctgtaaggatcttacaggttataggtgcattttttattttaagtcaacaaattttgttttaattaatatcagggtatgaatgtttttgtagcatgttgaatctgtattaaattcttcacagttagtgtctgtt

SEQ ID NO: 8418 - DNA, 573 bp, Gossypium hirsutum
  misc_feature (564)..(565): n is a, c, g, or t
atggttgtccaaattggggtagttcaatcaaggcacctatttcagaaagctagaattttttatgtacatttatggctcataaattttggtgagagcttaattttaaagatttagtgaatttttaatgaacttattcatataaattttatttacgcataaagataaattaagactataacgttaattcattttgattttttcacttttaaaatttagttaaattatttttttaacagaaaaattgattaaattgttaaaattttagtgaaattgatgtggtgtcttgcaagttatcgatgtatttttcattgataacatagataattttttgaaaaaaattatgtttttttctaaaaatttataaatattttattattttttaagtttttatatattactacatcaatatcaataaattcttaattcaaaagaaaaaaaattaagaactaatatgagaaaaagagaaacaccaaaaaaggtaaacctggcgtcccttctaatgatcttcaagaccatcccatgccaaacatgataaaaatctaaagtgataaggataagaaagannggactaag

SEQ ID NO: 8419 - DNA, 616 bp, Gossypium hirsutum
  misc_feature (516)..(518): n is a, c, g, or t
  misc_feature (521)..(525): n is a, c, g, or t
  misc_feature (532)..(533): n is a, c, g, or t
  misc_feature (535)..(538): n is a, c, g, or t
  misc_feature (549)..(554): n is a, c, g, or t
  misc_feature (562)..(565): n is a, c, g, or t
  misc_feature (570)..(572): n is a, c, g, or t
  misc_feature (574)..(577): n is a, c, g, or t
  misc_feature (582)..(583): n is a, c, g, or t
  misc_feature (585)..(585): n is a, c, g, or t
aaaggggaaaatgaaacagaaatggatgtttctgttaattacaagcagaataaaaatacacacacttactacctgtacgtgaattttgaagatcccaatgatgctttattagcagtgccagaaagaggagtagataatggagaacatgtggccaaaagatctcttatatggttttcctggttggaattagatagatataatgttatattagtatccacttttcccttgaaagaagagagtaaaccgaaatgccattcttttggctgcattctgtaataattactctcatgagcgggtaaaacaaaatttaagtgtgctctattctcatactatagccatccttgtgatctcattgtgaaggtgccgtacagaaaatattattcctattacttgatgagagagacacacagtccacctatgagtcctgtgtcatttggataccctctctaatacacaaatcattgatgcgtgatggggaaggtagctatatgatgatcacatatcatatataggatnnnaannnnnaattttnntnnnncgatagtgcannnnnnatctctgnnnntgagnnncnnnnatganncntgtgtataacaactcaaggaattacctgctg

SEQ ID NO: 8420 - DNA, 643 bp, Gossypium hirsutum
gtaggtttcttttgctgctactttgctattgctgcctgcctgttataaccacgaaaattcattttgcaagttgcaccttaaattgaatgttgttttgttaaattatgttcataagcttctaattcagcctagatgcaaataggaacaatgtgcatttctgtttgactgaaatacattgtctccttgtggataacaaaaacaaaatgatgcagaatcctggaaacttcttcaaatgagcttctagaaagctttaatgccgaggcatcagattctgtgaagtcacagcatgcaaggaattttttggaatactgttgtttcagggctcttgctctttctacacgagtaatgggtcatctggctgataaaaagtttcgacgccttacatttgaaatgatggtggcctgggaagccccagcatctgccagtgaatgtctagttaatgtaagcttcatattttaagtcttctttatttttttatttttatatttgttttgaaaaggggtggggggattggcattttggatcatctcgcaaaccttccgtcatgtcgttgggcacatgttcgacacttggggactttcaccccacaatagtgtcctgcttcatagagggatccttatctttgttgacatgacacagcaca

SEQ ID NO: 8421 - DNA, 651 bp, Gossypium hirsutum
gcatattttagggagatctgcatgttttccacctaacatataaatttcgtattttactttttaaatcgagtattttttttcttgtttttatgaacttgaatttatataatcatgcacaaaagtcagatctatgtgtaaaaatatgggttcaaatacgtgacgatggcaaaactttatgaaacttgtatataggcaaagaaaagaatgtgcatgagatgcattgttgttaattcattgacatgtatgtatatatgtatttgttatggatgaaaacaaaagggaaaggcatgggcgaaaaagatgaggaagcaaaccctccaaaagtggagctaaagaagcagcagctaaacctgacagagatgaacttggaggaaataaagaggcatccaacggtgcatcacgtgtcaccaagggcaggcaaagcagcaatgacagcaggggtaaggtccagctgcctctgctcccccaccacccacgccggctccttcagatgccgttaccatagagtttcaaacatgccaaggcctagttccgtgggttccaaccttaacatgctccatgaccactaacccccaccgatcttcaccacttccactgcttcctttaacttgtgttccaatttgtatatgtaatctctcctcaaatgtaccc

SEQ ID NO: 8422 - DNA, 616 bp, Gossypium hirsutum
tagaggaagtatttggcatgttttgagacaaaaatttactaaactatgctttattgacaacgcattaccaaatgccttgaaaatatgattagaaagttctccaaagagttctattctaagtttctgtttccaatatctaatcactcatatcgtagaaaaccatctaacaaagtgattgcacttgtaacactttcaaaagtataacagcacgctcatcttttcttctttaacttgagtcaaaaacacatggacatagactttgaccaatctggtttgaacacaaccgtcatatatggtacattaataactatgcatgaaggttaacatggtgaatagcaagtttatctcttaacagtgtatagccacgaaataccacagtagtaaactctaaattccaagtcaagttagaagttatttaagttgtttgatagaaagtcatgatgttccacttccatgttgatttataggtgctgatggattcaatattcttgatgtgctagttttacttttgattgtggcatagaaacagtagtctggaacctaaacatcatgtagtgtcttcaatggtgactccacatcaaattaccacatgtacactagtcacccaacccaactt

SEQ ID NO: 8423 - DNA, 576 bp, Gossypium hirsutum
tgtccttcaggaaaccaacgagtatgagacttaagcatatatcacagtatgattaatttttagaaaaagcttaccaatgatgctagaatagcaatagaaaaaagttcgctcatatgaataagcattgatgttggagttacatatatcaggcatgttttaggaagaaatttcaaagtttgtgtcattttccaattaaacaattagttgatatgaaaactagtcaacaacaggtatctgcttaagatggaagcatggagcaagaaacaggaatccaagtcttttggactggcaggattttggaatgatgttaaagtaattggatagtgttaaaaacaacaagcaaacaaggtcaaaatcaacttcaattatgatgcaaatgctggtataggttaacaacaatgcattaaaattgttaagctaaggaaaaacattacacttgattcagtctcaatcaacggagacaaaataacactccaaccgacaaaatctaatccttgtaaacagtcaagttaaagaactcagatcttaaacaaaattagcttagcaaatgaggaagcttcagtctcaaggcataga

SEQ ID NO: 8424 - DNA, 658 bp, Gossypium hirsutum
tgagactgctgaagaagctgctcgagcttatgacgaagccgcttgccttctccacggttccaatactcggaccaacttcattactcaggcgccctcggattctcctcttgcttgtcggattcggaatcttcttaatagcaagaaaggaggtgaacaacatcatcatcaaagtgttgttgtctcagcagccccctcaacaagtgctaccattagttttagccctatgcctagtcctagcactagcagtagtggttgcagttctaatggtggtttaagcaatgggaatctttcagttagtggaagggttcaagatacacagttgtttgatgatgcatataagcctgatatgagaagttggagaagggaatctgggtttgattctgattttacatacacctcttctgaattagggtttgataggtttctttatacacaagaaaccacaggtttacctgaagaaactggttctgagttaacagagttccaaagcatgaaagttgaaaggcagatttcagcttcacttcatgcaatgaatggagttgaagaatatatggaaactgtccatgattcttctgaaaacttgtgggatcttccccctttatgctctttgctctactaaattatttcactttacaatattgttgggctcatcgatgta

SEQ ID NO: 8425 - DNA, 867 bp, Gossypium hirsutum
  misc_feature (566)..(566): n is a, c, g, or t
  misc_feature (816)..(816): n is a, c, g, or t
  misc_feature (823)..(823): n is a, c, g, or t
agcaaagggtccaaattcaaaggaagaaacaacaataaggttaacaagtttgtaggtgtgaggcaaaggccttcaggtagatgggtggctgaaatcaaaaacacaacacacaagattaggatgtggcttggtacctttgagactgctgaagaagctgctcgagcttatgacgaagccgcttgccttctccacggttccaatactcggaccaacttcattactcaggcgccctcggattctcctcttgcttgtcggattcggaatcttcttaatagcaagaaaggaggtgaacaacatcatcatcaaagtgttgttgtctcagcagccccctcaacaagtgctaccattagttttagccctatgcctagtcctagcactagcagtagtggttgcagttctaatggtggtttaagcaatgggaatctttcagttagtggaagggttcaagatacacagttgtttgatgatgcatataagcctgatatgagaagttggagaagggaatctgggtttgattctgattttacatacacctcttctgaattagggtttgataggtttctttntacacaagaaaccacaggtttacctgaagaaactggttctgagttaacagagttccaaagcatgaaagttgaaaggcagatttcagcttcacttcatgcaatgaatggagttgaagaatatatggaaactgtccatgattcttctgaaaacttgtgggatcttccccctttatgctctttgctctactaaattatttcactttacaatattgttgggctcatcgatgtaaggagatccatacccgatttncatttanagttgaaagagaagagtttttaactccgactttaaatccaatct

SEQ ID NO: 8426 - DNA, 682 bp, Gossypium hirsutum
cttgtggttctgtgaatgaatttgctactaatgtaaatagatactcatcattaacctgatgtaatgcgactgtgtaggtaatggatacatggcttgcgtatgcaccagtgaaaaacaaccctgaggatgctgctaaggtaccaaaagggaacccatatcacagtgcaacttctggagaaatggccatatatctcatccttaaaaaggtgagcatgttgttcttctgctaaaactcagctctatgttttctcgttctttaggatgtttttcactctaattctgtctctcatcttattgttaaacaacaaattttatccgtttgctaggcgggtgtccaagtggaggttcctgtgcaacaggctttcaacggccaagaggtggaagtgtggctacgtgaagcctaaatgggggataatcaaaagcaaagttagtggaagttgctctatttctctaaggtctaccatggcccttaaggggcgtgatatcttggatggagttcttatcatcaattcaactgacggtgcagaggtatgccattaacggtagacgcatccattcccttgcactattttgccacaatgtttattagatttgttattcaattccatgttttggatgttgttcatgacttcaattttcttacattcttcttgcttgataactctgacttgtcactgccttt

SEQ ID NO: 8427 - DNA, 618 bp, Gossypium hirsutum
  misc_feature (614)..(614): n is a, c, g, or t
tgagagaccgaaaaatatagggtaaggaatttctgtttgaagtgtccattatgtactgttttttgtaacacaatgtaatgaaagtgttgaaatttgtctttaaactgcaactggtgtggtgactcattgtctccatttctagcaaagtttgttttatatagacttttacagttcatgaaatgaatcctatgtgcaaaccctaactgagctaaccgagcaccttctactaaattagcatgatgtgagaaaaaggattaaaatacgggtagaagtatcatgaaaatttttgtacagagagttgcatcgtattagtttttaacagtaaaaataaataaatttttaacaaaaaatatcagtttgctttttatctaaatatagagtttagtttacttattttttaaataaaaacaaattacaatttaacttttagcataaatcatctctataatactcaaaatacgtagttttgaataaaagaaatcgcgaggtatactttctttgattagatatacaattgtgtaaaaatacaaataagatagattaatatatatacacaaaatgtaataattaagatcaaattttacgacttaggctatcgatctaatgtggaaagnaatg

SEQ ID NO: 8428 - DNA, 534 bp, Gossypium hirsutum
  misc_feature (523)..(530): n is a, c, g, or t
aaatttctctctttgattaactgtatagatgactaacatttcgtgtacgagctgctgttctcaacctttaatccatatcaggtggaagaaccaattgagaaaagaaaatttgaaagagcttaagcccacttacagtgtttactagaatgagtgaagacaacggtgctctgtcaaaatgcagtaggtctttcatatgttcatgctccaaagtttaaaatagcagacattggtcaagaatttggtgcagctttgtttagaaagcagaaagaggaggctttcaattccgcgtacgtgcttattattttaaagaaagttacatttggccaattttattttaattgatattcttttaatccagctaagcaccactgagattattatttaacttagaaaacctgttaacacttaatttaaactacactcataaaaattctgacactaatcaacactcaaccaatttttttaaactaaaggatataaaaaatttcacaaattctcaaaaaaaaaaaaccaatcccctttnnnnnnnnaaaa

SEQ ID NO: 8429 - DNA, 878 bp, Gossypium hirsutum
  misc_feature (83)..(83): n is a, c, g, or t
actccatctcaccaaacgtacctcaaaacatttccatctctttgattaactgtatagatgactaacatttcgtgtacgagctnctgttctcaacctttaatccatatcaggtggaagaaccaattgagaaaagaaaatttgaaagagcttaagcccacttacagtgtttactagaatgagtgaagacaacggtgctctgtcaaaatgcagtaggtctttcatatgttcatgctccaaagtttaaaatagcagacattggtcaagaatttggtgcagctttgtttagaaagcagaaagaggaggctttcaattccgcgtacgtgcttattattttaaagaaagttacatttggccaattttattttaattgatattcttttaatccagctaagcaccactgagattattatttaacttagaaaacctgttaacacttaatttaaactacactcataaaaattctgacactaatcaacactcaacaaatttttttaaactaaaggatataaaaaatttcacaaattctcaaaaaaaaaaaaccaagtcccattctgcaatgtaaaaattctaacaattttattgttcccggtatagatataaaatgtttttgagttagtatgttttctacatgtagtatgctatgtgtattatgttgattacgtgattttatcctatatgttatatgataataatttttggggaagtagacaaattttgaatttaaaaaaaaaacaattgtttttattataattaagtgacctgaatccttatttaaataaaatacagagataaaataaaataaaagtaaaatacctatagaactacacttcttttattttattttagaataaggttttttagaccttatttaactctat

SEQ ID NO: 8430 - DNA, 605 bp, Gossypium hirsutum
  misc_feature (564)..(566): n is a, c, g, or t
  misc_feature (573)..(573): n is a, c, g, or t
ccccttctttcagaagcatccctggatatgtaagctcgctttcaccaatttgctgtctacagtgattttgcatcgagggagggttcaccataaatgttgctttgcttgtttgtttgtgttgcagggggagagtaaacagcattctgcagatgtcaaagcaccttggaagctgcctttggatgctaaaacaatgccagcaaaccaagcaatatctgtggattcctacaggtaactttcatctataattggctcagaccaattattcttaaacccaacttttctcgctcggcttacgttttttttttcattggtgtgcaactcctacaggacttttaatgaggggacaatgtctactgtatacacttcttgaaagggtattgcatgttgatgttttatgttgtatatattcttagtatcaaattcaatgctaaacagtatggaggaaatttcagcatatgattccatactttgctccccggactcgggggtatatgtcggtcgaatttttaagtttttcatatatattgtactcatgtctgaaaatgaaacagcttaggatgattnnntaagccnaatcatcccaaacaatcaaaagctacaaactg

SEQ ID NO: 8431 - DNA, 673 bp, Gossypium hirsutum
agaaacaacgtccgagaattttagccaaagcaaggatggaaaaacattgaaagcgataaagaagaaatatatgctaagatcttcgacaaataatgacagggctttgccatcaaattcacaagagaaatctaagcctggtcagctgagcaataatttggttgatgttgcttctagtgagcagcgacaaaggaggaaaaagaaaaggagggaaaaaagagaagttgttgatgaatattcaagaatcaggggacatcttagatatttattgaatcgaataagctatgagcgcagcctgattgctgtatattctgcagaaggctggaagggccaaaggtgtgtttattttactttattattattatcttgcatctcttttatttatgaactaattgtcatgataatgtatgtcaccttttggaattgaaattgattctttacatgtgatcgtagaagtctgattgcccatttccccatggatagctaacgtatgtttcttgctttggattgtttgtgtaaccttcagcctagaaaagttaaaaccagagaaggagcttcagcgtgctacatctgaaattcttcgacgcaaattgaaaatcaaagatctatttaaacgcattgattcattatgtgctgaaggaaggcttcctgaatctttatttgattctgaaggaca

SEQ ID NO: 8432 - DNA, 675 bp, Gossypium hirsutum
acttatacatttgtaagctcagtactaattcaattgtcacaaattctgggctgctatggatgaatcaccttaatatagcttatatccatgatggatgtgcagtctgctggacaacaataacttaacggggaatctaccaccagaattttcacagatgcctaaattgagaatactgtaagtttactgttaattaatatcttgaattggatggaattttgattacatctcatactagtatttgtttgtattgcagccaacttgataataacaattttggtggaacagagattccagcttcttatggcaacatgtccaatctagtgaaattgtcagcttctttccctttcactattgactatcagtttattcaaagggaaaaaggatataaagattagaccagtattcatttctttcaaaatgttgtcaagtcgaaatggctaaaatcgcgcatgattttattgaattcatctgtacaggagtcttaggaattgcagcttgcaaggagccattcctgatttcagcagtattaaaacatttcgctatctgtaagcctttccagcatttataggagtttgtttacatactaatctattgtttgatatatttaaacactactttgtgttggcctgtcatacggcagtgatctgagccgtaaccaacttactggagggatac

SEQ ID NO: 8433 - DNA, 645 bp, Gossypium hirsutum
attctttgtttggaactccatacattgtttatgttgttcatgatgtgatgatattgttgttctgcatgaaaaaagaataaagaattgataaaaatatgccttgggactaattaaaagttgataagttaattgtacaccaagaatcttttccgtttctgcttgctaaatttcttgtagaggtgaagttattttgttcatatgcatgttggaacattaaaaaaagcctgatagattatatgccctttttccacagattaaggagtccattgtgaagaaggaagattccattagttttaacaataaactggcgctgctgcaaaaggtgacttcttctgttctgagagttgttttctttcttggacatgagatatattgttcttaagatctttatccttcatgcttcagttgtcattctttgtatacttcttaggaacctctttgcctattagcaagattattgtgttgtgtggcttgagagcttgtgctcgatccctaacaaccccacccccaacccaattatcaaaaagaaaaaagccacttgatcatgattttattggaaagcctgtttatcaagggttttagttgatgaaataaaatggatttgaaacttgtttcatttatttgtccttgaaacctttatccaac

SEQ ID NO: 8434 - DNA, 641 bp, Gossypium hirsutum
tccagagtctcaaaacaagatttcctgttttgagttgggtggtttacaggtataaccttgtaagggccttcttgtgcatcaactatagatattacccactaagcatcttaggccagaggtttaaaacatctatacataatctctgcaccaaacaacagttaatataaaaatttctgcttttgggctatgtatttgggttagtgattctttttgatgtttgttatgatagctgagatgtcgtccgtttgtctgcttagatgttacagtattatcaatgcatacaagaaataataactaataaccagtttttgattcattgtggggattcaggaattggctttttatgtacattgaaccatttatatcgattactttttgagcattgggtttcttcttctttgtggaacatcttgctttgcttcagcatgcaagcattcattaaatggttattagttatagtagtgcaccttgtattttgtctgggttttcaaactttgagcctgttcttgtcattcatttatgttcagggtttagtgtttgtttaagaagtttgtccaacagtcatatgatagacaggcttgtattacatacatgtggtaattggatatgattaacccctaggaaggaagtgcgtcaaagct

SEQ ID NO: 8435 - DNA, 608 bp, Gossypium hirsutum
  misc_feature (603)..(604): n is a, c, g, or t
gtgtctccatgctttcttgtttaaattagaacagcccctcataaatagtgagcatagtagtcatcagaatattccacttcaaaatagttgaataaattatttctaagaattaatggtgttcggaggtagcatatcaaccattcctttatttttctcgagcaagtggaatcatcaacaattgtattgtcttgctcgaaaccccttcataactaacaatgttgcatatatgttcgaatatacggagaaaacccactagatcttcgtgttcatctttgctgacttagagattcgaaataacctaatatatgtgaaatgaattaagctaatgtaagcgcaatcctatatgatataattcaggaaataaaagatttttataatccatacttatcattagaattatataattttattaatgaaatatggaaaactcatattaccgaataaagagcaaactttagaagagctcttactaagctttcacaatttttagttgaaaaaaaaactaaagaacaataaactcatgatttattgttaaattctattttatatctgattgggaggaactagaaattagtttcttagatattaaagagataaataatnnctga

SEQ ID NO: 8436 - DNA, 599 bp, Gossypium hirsutum
tctatattccgatatcggtggcatcaatgagattcttttcaagtattttcagtttctctttcattttcattttcttccttttgtttcctccatgtttgcagatgtttaatcttttttgtcataaggtaagtttctatttgacaagtaatttttgttctttctaggtggcatttacacacatatcactatataattataatctattgttaccctgatgtttcatatgtttttggtattcatgttggatacatatttgtgtataatatacgatcttcttaaaaatataataaagctacctaaccttcacagaagaggggaaatggttgggggtgaggatttctaaaaagtttgagccacaatctaagttttgaaaataaaaaaagatgaaattattgtaacagcaaggttgacaatggcagtatcgtaagttcggttttggggtttttatttcattaaggtggacagtttaaaattattggcgaagataaaaaattgtcgttgataatgatagattagagtattaatagctttttggtacaatatatattattaataattaaaaggttatgtttataaattacacaatacttctaaatata

SEQ ID NO: 8437 - DNA, 576 bp, Gossypium hirsutum
  misc_feature (547)..(549): n is a, c, g, or t
gctctcgtttcttggaatggataatgatcttgttcgtgtcaaaggaaagaacggtaagactcccttgcacttcttaagtgaagctggaaatcatgatggcatgttggatagaattttagagatttgtcctcaatgtatacaatatgttccaattgagaatcgcaatgctttgcatattgctgtagaaaacaacagactggatgttctccaagtcctaattcgaacactttggaagacagactattatcgggaagtggtgaaccaaatagatgaagatggaaacactgcactgcagttatctgctttccataatcaacccgaggtttgactcatctacttcaatagcagtccgtattgattaggttcttttgtatttcatacgtaggattaactaaacgtagcctttttgaacagagcttaaactactattaaactgcaaagccgataagcatgccaacaatcaggctggttggacggtaatggatgtagcacaacaacaacataatagggaaagcattactattctgcgtggttgctttattccagnnngtttcaaactttaaatgtaaatgagaa

SEQ ID NO: 8438 - DNA, 642 bp, Gossypium hirsutum
ttactgcatgcttatcgcatcataaaaattcaaagctgatctatagttctatactgcatgattagatttggtgtatactatcaaaacccgaagaattctagaatttctctacgttctgcatctcttctccttgatatctctcaattcgaacaaatttgcaacttttgtctttgaaatttaccatgattgacctatcatttgaattattacatgtgcagatggtgttttgatgttgaattagttttcctctgcaaatggtttcgtattccagtgctggaggtatccgtaaactggtccgaaattcctggatccaaggtaaacctattgagcataccaaacatgctttgggaacttgccctcatgtctgtcggatacagaactcaaatgtggaaaattaactcctgaggttgggattttcccgaatccatcaagcaaacaatgaatgaagagaagcaattagccgattcgataacattaggttgaaagcattcttttaggaaaaaaggaatttacagtcagctgattgcagcttatcctagcttttttcattatacaatatcacagccagaacatgcagtttttttcagttgtaatagtgaggtaacactttaatgttttcttacatttttagtgttccaactt

SEQ ID NO: 8439 - DNA, 541 bp, Gossypium hirsutum
atggtgcagatcctaacggcaaaggtactctccagtctgtcttgttgaatttcgttttcctctaggcaattcttgcggttcttagttcattactctcacaggtacccttgatagctaatgtggaaattcttaacaaatattaaatcattgcatgcacatcagttacttgtcaattcattttaacatttatttatttgtataatttagatgaataatggtgttatgtgttgacttctgcacatgctagggggaaaataatcatattacctatccaaataaaaaaacaaaccccatatgttgatttattaacccacatttcacctccaaaactgaaaagctcttctactttgaagccggtttcctaaaataactaaggagttaaaagaaatgttttactttgctttataatgtctggtacaaataccttttgggttttttcttcttcttttgtacaaatggaactgcaacttgagataggggaagagctgcacttgcagatgttgggatttgaaccccaaacctgttggatgtcacgaatcaa

SEQ ID NO: 8440 - DNA, 627 bp, Gossypium hirsutum
gccagctcctgacatctataacactcaattttttatttgaataactgatcatatcttttgcctctgccctgagataaatcttgatcattcatattgtgttggtgatgtctgccaccatctctattgcctcaagctcttcctcgactaggcgaagatacatgatttgtagaagctttcagtgcttgctcctccttgtcccgctgaactattttcttctcatgaactaatagagagccctgtaacgcatcacgagaaagagtatcaagatcctttgattttttaataaaacataccacataattaaattgtagtgtcattgatagcagaattttctcaatcacaatcacatcttcaatcttttcaccatggattcacattttgtttattattgccattgttcttgagaaaaaatcagaaactgattctccagtctgcatccgtaatgtttgcctcttgatcttatttgatccttgatatttgtttttcatggggtcccaaatgtgcttggaggtatctttgcaaaggattgtctccaagattgaatgttcaatggcctgaaacaagtagtttttgagcttaagatccttcaacttcatccgagacattgttgttgttggctctgaaact

SEQ ID NO: 8441 - DNA, 617 bp, Gossypium hirsutum
ttcttcccgaatcgccagtagaagcaagcatacaagaacgaggagtttggtataggtacgggtttgctcatcttcttcgatttcctcgttttcattctctttaagatacttcatttcttctgattattcttcttcaggttactcttttctttgtttgcctgctgatcttctttgtttgtcatttcttttcttgtttcttcatttttctgtgttacataaaaaatgcaagcctgaaatataatagacgccttttgtgttttgagattctaaaatgacgtttcagggttcattgatgccatgcgtaatagtttctttgcttgatggtccgaacataatgattctaaaatatactttttaagttttttttcctctccagtctccagttatggaactatattgtcctcattaaccttgttgttttggtcctcaaagtaatttgctatggtctgatatggtatatgaggtttcggtcctatgagctaatttgcatgtattggtttgtatttagtttcatgtttattattttactctgaggtcagcaagtaattgaatagggaatacatctagcagtattttggaaagagacttcaagctgctatagcgttggctgtcactaa

SEQ ID NO: 8442 - DNA, 616 bp, Gossypium hirsutum
tgtgtagtccttgaggaggggtaatctcccaagtgaaggtaatgatgtgatgtttgaacaatcacatagatttagatacaccatattaacaaaagaaggattcccaatccaagatgggaactttgacccttcataaaagaatatgctgagtttctttagattttgatggggttctagcatgtcaagaacttcaaattcatctacttcactctgaatatcattcggagcactactccatttcattactaaatcatcaagtccacgtttctcctttaaattggcaacccttacatctcgaatcttagccacattttgcaggtcaaataatgaaagctgcccttgaagatgagacaggcctttcggctctgttatcctacgcccattgccttttgccacaataaactttgacagcttcttgagattgatcaacttaccaatatgaagtggcatctctgtcatattatcagtacgaacaatatttagataatggaggctaattaaattccccattccttgaggcaatttagtaagtttcttacaatgactcaagtctaatgtctgtaaattgcagagagcacatagtgactcaggtaagtatctaattctagtgcgagac

SEQ ID NO: 8443 - DNA, 630 bp, Gossypium hirsutum
gacacggtgtcgttttctcttgtcaggctttgcttacgtcagacatacagatgtaaagatgctttttctttctttaaaattaaaatacttcttaattttattttaaatattttaagtgaatttttaaattaaaatattgctttaatcgagttgttttttgtactagttctaaccaattttttttaatcagttatggaaacttctagaaaatactctttgaaagggatttttcatgagctcaaaaaactttaataattttgtaagagattttagtagttttgttaaataatttggaagaatttcaatttatatagagtgaattcaataattttttgaaaacattataatattgcaacccaaatttagtaattttaagtagctcataatagaattttcttcgactttaaatatcatgttaaaaaatctttttggatgagtggtacgtttatttacagtcaatataaaaataagagtagaagtaaaaataaatattatagcaatactgtactatgaaaaaaaaaaactaaaagcatcacactggaggttaatacctatctaaaagggcccttattctaatatgttttaactctaaacaaatgtaaattaattaatatttttaaccaagtcaag

SEQ ID NO: 8444 - DNA, 642 bp, Gossypium hirsutum
  misc_feature (636)..(636): n is a, c, g, or t
  misc_feature (638)..(638): n is a, c, g, or t
gtttcaatgtgaaggtaataggaaagttaagtgaaggaaaagcttgtcatgttccatatcgtgactccaagcttacccgtcttctgcaatcttcactaagtgggcatggacttgtttcggtgagttgatcagtatcttacctgtagctgacatttttttctatttcttatcggtttgttaattttatcttcaacatgaaaattgaaattttaatttcctctatctatcaattttttctccattcttattaagtaatctgtctgcagttatgtatcttttattgatatgtgacaaaatttttgcctattttgcatttttctgtaaaattacagctcatttgcactgtcacgcctgcatctagcaatatggaggaaactcataataccctgaagtttgcaagcagggctaagcgagtggaaatctatgcctcacgtaataaggtttttatagcctcagtgttatttctttcagctagttatagagagatacacttaaggtcgaatcttatgctactttcaaaactacattttattccagattattgatgaaaaatcattgattaagaagtatcaaagagaaatttctgtcctcaaagaagaacttgatcggctaaggaagggaatggttgttggtgtntntcat

SEQ ID NO: 8445 - DNA, 218 bp, Gossypium hirsutum
  misc_feature (59)..(59): n is a, c, g, or t
  misc_feature (191)..(193): n is a, c, g, or t
  misc_feature (195)..(197): n is a, c, g, or t
  misc_feature (200)..(201): n is a, c, g, or t
ctgatgtttacaaatccacttccaccaacctggccatgtcctatcaaactcattcatcngtgaaaaatattccgagacagagaattgatttgttggcaaaacttccttcgagatatatctgtactcagtaggaactatctgcaagcaccctaagagaacatttggatgaatagagatgacaaaacttaacnnntnnntannattttatggatctggga

SEQ ID NO: 8446 - DNA, 578 bp, Gossypium hirsutum
  misc_feature (552)..(552): n is a, c, g, or t
  misc_feature (554)..(555): n is a, c, g, or t
atctgactcaactgtggcaaatgaaaacggtaaagtgccggatgaatatgagagtgaagggtctattgaggaacctacctttatggagtcagtttcagattcgaatcctgttgatgaaaagcaaccattctgataggaggaagtagctccgttgttttgaaggataaggtaagatcttatatgttcatttacggtctaaattttatcagctagtctatctgtaattaggggattaaagaaaattaggttctagagtcactctgatttctaaatattgatggcaatactggttgaataattgttgatagaaagatcagagagaagcaattgagacttgtcattcaaaattatatgatgatatgaatgtaatgaatgattatgaaggatttgcagatcaattttcttcccagctaagtggaaattttagcagtagaatgactacgccgcatacaaacaagaagaactagttatattcttatgttttccatgtgtttgttttaatgcctgtttggtatttcatatatgttaatttgatggttaatatgttaatcncnnattttaatcattcattttgatag

SEQ ID NO: 8447 - DNA, 659 bp, Gossypium hirsutum
ttctctatttctcgcggctccaacaacggggattgcgcggtttgtttgtcgaaattcgaagcgcaggatcaactcaggcttctccctctttgttgccacgcgttccacactcattgtatcgacacttggctcacttccaaccaaacttgtcctttatgccgctctcagccctttgcttccgactcccatctcaggaaggttttgcttcagtcttccaatacttcaagtgcgattggaattggcggcagcgacagtttccggctcgagatcggctctatcagtcgccgtcatccaggctccgactccggcgagcagagaaggtcttattccatcggcgctttcgattatatcatcgaggaagaatcggaggtgaatagggatcaaacgcatcgaaacgtgaccgacaaggaagcgagtctcccggcagatgttagtactgaaaggagttggctcaaggaatacgataggctgtcgttttatttatcgtctcgttcgtcgtcctttcgtagctcaggaaggtacttaatggggagcagtcgccgaagcggtagtatctcctccgttcccggagattacgatgtggaagccaatcgcattggcgaggagatcagcgaaatgtttcgttggttctcagagatatgaatccaggtgaagtgaac

SEQ ID NO: 8448 - DNA, 678 bp, Gossypium hirsutum
tcaattaggctttgcttggttgggtggaaaagtggagggatgggaggagggaatgaaaaagtaaaaagcaaataaattttgagtgtgcttggtagggaagaaaagtgaggaaagacgatcattttccatcctaatgagaaagaggagagaaatgagaaagaggtgtatgttcaaaattatgcattttcaaatgttttctttctttcctttcctttttcaacccttccaagcaatggatggaaagaaaaagtaatttttctttccacttttctatctttcctaccaagcattcctatggaaagacaaattatgttttccattcaattgtctacccttcaattttctttccactctaccaaccaaagcttgcttataattgacaaaaactagggttggtagctgaaatctattttacttggacttgggtgcaagttttgggtatccctgtccaacacggttatgtttatttttccctaagcttcccatgtatttggataatccttggagggcctaactccatactcatgtccaaattatgcctctgacacgggtactccaagaaaaatgaagagactaagaaacataggttggatataagggcctacatgtagttgcttgatgtttgtgctactccagtttctgtgttttcaatattctgaagttaccattgaattgatg

SEQ ID NO: 8449 - DNA, 574 bp, Gossypium hirsutum
atttatcgtttttttaaagagacattagtttttgtttttataactctttttagtcccttaagtacatataaacaaccaaatgtcagatatctctcagctcaaggtttcaagggcttgtatgtgttgcgatggtcaaatgagccggtgaagtgaaatgcatattttgaagcatcggattattttaccttatctaaattcttttcttttgcttttcttgcagactgtggctgccatttttcgggctatgcttttgaaagtactgaagctgcaaaaggcttaaacgagagagagagagagagagagagagagaggggaggggaaggctggtctcctgacttggaccgtatatcaaagcgtaagaaaggtcctttatcactaaacatagccgaactactgtctatgcaatcgtcatcaatgcataggacatgtcaaccccgtctttctaacatttctcccaaatcccagattttctttctctttaaagctgagatagaaggtatattgtttggggtaggtgaagttttgagtttctgagaaaggaatgtaagtggtatggagatagatgagattcaga

SEQ ID NO: 8450 - DNA, 657 bp, Gossypium hirsutum
aaggcctggactgattcctttgatgatattaaacctgtttttccagtccaagagttttcgctttgtcgaatcttcaaagaaagcaaagagtatttcagatgggaaactcaatgcaagagtaaagaaaacaaataagatgttaaagtgattgggaaagttgagtaatgatttctaaccaaagagaaatgcatccaagcttttgttaggcatgtattcatacaccaacatcttttcttctctttcgatacaacatcccaacagtcgaacgagatttcgatgttgaagtttagaaatcactaacacctcattggcaaattcttcaaatccctgtcctgaaacacttgacaatctcttcactgctatttctttcccatccaacaactttccctgaaaaaaagtagaccctttgaagtccatattttcactcaaagtcgagtgtgacatgggtttgaactcatttttgcataaagctaaaaagctcaccctataaaccgggccaaagccaccctgcccaagcttatttgaagggttgaaatctattgttgcagtggcaagttcctcaaatttgaagagtggcagctgatgaagtttggtctcttttccattgtcttcaaacatggcaagttcctcaaatttcacatatactcttctgcctgt

SEQ ID NO: 8451 - DNA, 599 bp, Gossypium hirsutum
  misc_feature (542)..(547): n is a, c, g, or t
agggagtgattgaaagtctcccaagcccattgttccgattcttggacagaatgggtggccaagccttcagagttgtcttcttcccaaaaggcgcattgacaggtctgctgactgtccctgtactcggcaccacaagaataacagaactcgtgcccacacctgaaaaggagacatgaagcatattgaacatcaaaccaatgtaaaaatgaagtcatatatgcctcaattgcacgtgtgaacaaaacatacaaatacacttcttcacacatggacaaacaagaaccggacaaaaccatgccaaactgtataatcaaaggaaatcaagttggctaagtcatggatgacttggtcatatcatggggccaaagaatggtccaaacatacacaacaaagtttttaagtccaaacatcaatggacccttccaacttaaaaggtctctcttgccacctgatcatgtcagagctccaaccaagttcccataaatataatctaatcaaagggaggtgtgcatacgataagatcaatgctgtcacaaaaaaannnnnnacactaccatttccaaatggtacaagctggatgggctgggactaagttcaag

SEQ ID NO: 8452 - DNA, 645 bp, Gossypium hirsutum
atccagcttactggatgaagatgaagcatggttattactgctaacactagttgaaggaggcacccgccgaggaggagatccagctatatctggatcagaagtaagaaaatacgaatctcctaatttagaatgaatctgcaatttaagaaacaaagaaattaaaaacatatattagtaatagtaaaaacatagttcaagacttcaagtcaatagtgcatcttttattcgctgcaagtaattccagcattaaagaccaaactaattctccaaactctaatggcacaagttgcacatttctagtttagcttaaaaactactcattcctaataacagttctaaattctaattgttgaaaacctaatctcaaattattccacaagcacgtgaaagtattgcaataacagaggagaaaaaaataaataagtaccatttacaaattcgctagagcacaaagcaaacagtaaaagacttaatatgtactacaactaaaatgagataaggtgattaccattattggatgagcagattctgcatggtacttcttagaagcttcagaaacatcaacgattccacctgaaaataagtacatgaaaagaaacaactaaacacggatgattctagaaactactaatcactatttccagc

SEQ ID NO: 8453 - DNA, 633 bp, Gossypium hirsutum
tcacaggtatagtagaaattcacatggaacgtatccaagtaagcgacataggtctcacggcaatttccaattgtttaaacctagaaattcttcacctcgttaagactccagagtgcacgaacgtcggacttggatctgttgctgagaaatgtagattgttgaggaagcttcacattgatggatggaaggccaatcgaataggtgaccaaggattaattgctgtcgcgaaatcttgccttaatttacaagaattagttcttattggtgttaatccgacgaaaataagtttggaaatgttagcttcgaattgtcagaatctagaacggttagctttatgcggtagtgatacagttggtgatgcagagatatcttgtattgctttgaaatgcatagctttaaagaagctttgtattaagagttgccctgtatcagaccatggaatggaagccctagctagtggttgcccgaatttggttaaagtgaaggtgaagaaatgtagaggagtaacttcggagggggtggaatggttaagaacgaatagaggatcactcgtaattaatttggatacaggggaacagttggatgcaagtgccagtgatggtggtggtgcacaagataatggagtcgaatttc

SEQ ID NO: 8454 - DNA, 660 bp, Gossypium hirsutum
gttttatagaattgaacaatttactataaacctaacattaataaatgtattgaacagacttcaacactcattagtgtcgagtttatctagaaattaaacattaattgttcaactcaactagccataattaattagaggcatcgacttcatacaaaatgttttattatcatgcttataaatatcccctctctcattttgtttgttcacctaagttaaagttggctgaaacacattttattccattgtgactactatttctagataatttagggtgagtttggatgagcggtgtgtttacctgcagttagtataaaaatagcagtagcggtgagattagatactttagcaacactgtagcgtgagacaaaaagtaagctaaatgcaccgcaccgcatcataccaaattgcccctccaaaaccactagtagaaaggtgaagacgatgtattattacttttcacttcgcccacagtaaaatgacaatcacatacattccaatccaaggagccattatcgtcggttgactttgatctctttgttgggggtatttggaagcgctagaatgcattcatttttagttctgctcaagtgagtttgaaatcggttcttgcacaaactatagtttaccccttccccctcaaaaaaatggaaattcatgctt

SEQ ID NO: 8455 - DNA, 656 bp, Gossypium hirsutum
agtgctgtctcccttcaggttttacgactgtcaggaagtttaataagtgattcgatagtcaaacaaactgcacaaaggctttccacactcactttcttggatttgacttgctgtcccaaaatcggtgcccaagctttagaggccattggaaagtactgtaaacttcttgacactctgtgtcgagacatgatgtttctggatgtattaggcaaagtcgaggtggaggatgaggcgaatgcaatagcaggtacaatgccaaggctaaagcatcttgatttgggttttcttcttattagcactgaatttgttctcaacatcctctctcgctgtcatcagcttgaacgtttgattataaatgtatgcgtgagtgtgaaacttgatcgtaacttccttacagaagcgtacccaaatttagagatttcgttgatgactccggtcttaagcagtgacatattctgaagatttaatctttgaaggcgggaattaaattgtacatatcttctcaccttatttggcaaagaagatgaatccgatgatgatgagtgttttgctatctaattcaaccttcaacatatcttcatattgtgagcaaccttaatcctctataataacttggtctttgcatggattaaatctggggctttattcgtgatctt

SEQ ID NO: 8456 - DNA, 572 bp, Gossypium hirsutum
  misc_feature (53)..(53): n is a, c, g, or t
tggcaagggattttgtagcagctgcatcaactcgtgaagaaccagtgaaattnatattgcattaaagcttcccagcggaacacgccctgctataccagatttctcattaaagtatcctgacatctggaattcaaaaataaagatgttcattaaaggtggtttcccagcctgtgctaaaccattggcactagtagtagaacctttgaaatacatcagtacatcaattcatcaacacaggcacaaaatttccatcaaataggacattcaacctggagatgccattcataaccaaactgaaacttatgaatgctttaaccaaatattatggatagtgcctatggcattactcataagacatcaccaacagtgggagtcaagtctatatcagagatgagagaatgcttgagcagtaccctggtagaaatatcacttctagtttacttatgaggattgcatctatatcacttctagtttacttatgaggattgcatctcaaattgctatatgaaaaaaaaagtgcgttagtggcacacatttattcatagaatgcacccaaaccatatatatacaat

SEQ ID NO: 8457 - DNA, 643 bp, Gossypium hirsutum
tgaccctttccttaactaagtttgttttcaatacgttggcttagactcttcattttttcttcttgaaatgcccatgtccaacactcatgtctaagtaacacttgctcaaacatgaccttccaaggactcctaatacatgaaacaacttaaaaatttttgaacattcttgtatttgacagttatacccaagtatgaacaacatagtttttcatgataatgctactaacaaaggtttggacaattacagcttcattagtcagaacaacatagatttttatgactgatactaagtaagatttggacaatgatgacttcatttgactgctgttgacaatcaacttagatgaattctcaaaaagagaaaaaaaaggtattaatttgattcaatatgagttagtttcagatgcttgcttattttacaagtcaaatgaaatgtgagaaagttaaaagcaatatattttaagtaatcactactaattaagatatgttttgtataaatttaatggaacaaatcaattttcaaaaacgaattaatctatgataatctgtgtatagaaaattaaaaacagcaacaaaaataggatgcattttgactagatataaatatcattttctcgcgtccaggtggccaatcaaacctggt

SEQ ID NO: 8458 - DNA, 639 bp, Gossypium hirsutum
acaattctctaagtgtttataaaaaactttttacataattgcatttaattttcagtgtttgcttcttttggcttatttacatgttatttttcttctttgcatgagcagaaataaacgaacattaatattattatgtctctgatgtttgttgctactcacagattgaagtccctttgtgatgaaggccaagtggagatgatgaatgaacagatcaaggcattacacaataaggtgcaaaaagaaattcttcgaatattcttctagtgtctaaattcatggttgatattgctctttagtgcaaacgttgcttactccagtcactattatgcagttgctagaggcactagattggaaacttatgcatgaatcagactccttaatgaatgaggttctttctaagctttgtcatgacttgaattttgatgattttaaattttgtgaagaaaatcgtctaaatcatggttaatgtttgtgcaatgcagaaaacaaaatctaaagggtcaggagttaatgatgatctcaatgaactgatctctagtcaggttggttaagtcttccaggatcttagtgtggttattctcttatgcataaactacaaatgatatgtttgcattatgtgtctttgtaatccttggaaac

SEQ ID NO: 8459 - DNA, 670 bp, Gossypium hirsutum
agagtaggcttcccctaacatacctaaatcttgacagttcagaaaattagagcataactttttcacattgtcctaatcaaatttccacatcaaccattaataattcagaaaattttgaattaaacccaagacaccacaagaaggttattcaaagaatcaaattcatgcaaactaatacgatataaaccgaagtcattaaccaatggcttaaaaaggaaagtgggctcaatttgttagttactatctcacaaacacaaacactctaactaaaaacagggcaagaaagatactaactaaaaacagttatatatggacagaaagagtactacatatcccaaggacagatcgattaaactaattattgtagagtttcacaaggaattatttaattaaagtcattcatatgcgccgatttactgatggttgactggtttcacagtacttataatccagccaatcagagatttttcttttgcagcacatcagactagaaagcagttttttatacacgagaccattaggctatctggactgtcacattaaaatagttttcttttaaaccaaccaaaagcataaattacaaacaaatcactttctgaatccttaaaagacggaaaacacattcaattgaatacatagatgatgttagactactatggaatttctgtac

SEQ ID NO: 8460 - DNA, 657 bp, Gossypium hirsutum
tgcttaagctggtcagagtattcggtccaatgatatattcaacattatctgcttcaacacctgttggtgtagacatcgaggcggagcaaaggtctgcctgtttgcttcctaactgcaaatttaatattcaagtgttcagtaattggattattaactgaggtcttgttgctgattgtcctaggtttgaacgttgcaacctctgctttgtagaacttgaaaaagtaaagcgatgtctccccacagttactaggtgagcatggtggttatttaaacatgcagatagctgctttactagggtttaatcatacacaaactttctatactgtatgacattttcctgagatctccatattcatttatctatttatttatttttgtttccgttttctccatagaagagggggatcggtggcaaagtctgcccaggaattgaatctagcatttcaagaagtgtcataaccgaaaccaacacatagaatcatgagtgcatacactaagcttattccgtgtgctttttatggattaaaatattttgctgatgtggagtgcaagtttttagcatttaaaatgcatgccggtgaaagcatcgacgactacttccatgcatactgtcaagccctaatggtccttgtaaatggaggtttaatctggaagctg

SEQ ID NO: 8461 - DNA, 608 bp, Gossypium hirsutum
tctggagttgttatctcattcttgggtgatgcaatttctaccattgggaataatctgttcaaacattgggatattgttaggcaacatatatcctgcttaaaaggctttaaaggtaactagtattttatttgcttttgttgaccttatattgttacggttgtgtgcatagttttgtaaatcaaatttgtaggtactaatagcaattaattgattttcttgtctagctttccttgttgggatgtcccagaattgtattcctttccatttttgaacactcgagactctttattcctaatttgtttttctcaacttttatttttatgtttttcacctttttgtattgaatggcattgaaaatgaatgttattgaaatttttataactctaatacaatatgcactaaattcaagtgtttctttttcctgacaatctccatgaaagacaaagtggaaacaaacaaaaagagatatggggagtgttgtatattttatgtttctactgatagctcattaaatttcaatctctatattgctttaagctgtttgacattgagattgcttgttgaagtattgattgatgaaatgaaattgggactttatgtttgcctgt

SEQ ID NO: 8462 - DNA, 608 bp, Gossypium hirsutum
tatatgctgccccaagaagagcctttagtaacctgagctttccattcgtgtacggtgggtatcttagaggtgcatcaccagcaaaacttctataaagaacagccttcttatggctaaaagtgtcaaaggagaatttcccatggtacacacccattccgctgtccccgactcctccaaatggcaaagtgggctcagcaagctgaaaacgatatcaggtgtgtatcacatatacttctaatgttcaataagcatgcgaaaatgaatttagagaagtactttattttgaaaaataggagcaactatgtatttttcagcatttgttaaaaacaaaaggaacttggaatattctttttggtggggaacagtatgaacttgtcagaaagaaagcaaaagaatacatcaaaatccatgtagtgtcttaaaatgcagtacaatgggcaaataaccatggtcaagttggcgtttataaaacagtatgaacatattagaaagaaacaaaaggagcatatgcttcctacatatccatgtagggaagcaaaaaatgaataaaaattccacaaaagatatatttgattatttcaaatagcaacatgtatccaagagcacca

SEQ ID NO: 8463 - DNA, 456 bp, Gossypium hirsutum
tgtgcatgttgtgtttgtttgtaattgagtcgttatcatctttgttttcttgttcatgtttccacaagcattttaactttactgtctttcagattcttcacaaaagtctattaagttagtaagttcggacaacaaagaacttagtactagcagcagctgcaagatccctgcttctgcttctgcttctgatactaatttgaccacaaagcaagatgacggcgcacttccaaaaccaccagcatcagatgcaactgttggagcaggcctaaaacctcctcctgggagaccagctcctcctcctccagcaccacctcctgccgcacctcctcccaaagcagcagcaccaccacctcctcctcgtgctgctgcccccccacctccaccaggtgcccgtcctccacctatgccgccaaaatcgaaagctgctgcaccccttggaggacgtaagcaacgtat

SEQ ID NO: 8464 - DNA, 633 bp, Gossypium hirsutum
tttggtaaattatagtttggccttcaaaaagtactagaattttgatttagtccttttgaaatccataaaaatataagtcaatatatataagagtggaattacattttaactctcgtaaaaatatataacttaatctcaacaatttttaaaaaaattttgacttcgcccctaactccagatttgtttaatgctatccttaagaggtgacaatatatgaaatatatgagctaagtcgaaaatttcaaagactaaaacaaaggataaaaaaacattatacctgaattgatttcactgcatgccttgtagggttgtttggtacattttttccatctaaaatcttaggttttcttgtatccaaccctaaatcagcctctccaagtacataacaaagtgttaaccccaagaaaatgatcactcgtttaaaacttgttcttctcattttgatattgtttctcaaattgatcatcaatggcatgtataattgcatataatattgtatataggtgttttttatgtgatcacacaagcatttttctaatgattttaatcatgaaaaatacaatcttttctcaaggaattattatttgccattatatagatgttatagatgatcaaatcacacataaaatttga

SEQ ID NO: 8465 - DNA, 703 bp, Gossypium hirsutum
  misc_feature (637)..(644): n is a, c, g, or t
  misc_feature (646)..(646): n is a, c, g, or t
  misc_feature (653)..(658): n is a, c, g, or t
  misc_feature (660)..(669): n is a, c, g, or t
  misc_feature (671)..(675): n is a, c, g, or t
  misc_feature (681)..(682): n is a, c, g, or t
  misc_feature (684)..(685): n is a, c, g, or t
  misc_feature (688)..(692): n is a, c, g, or t
  misc_feature (699)..(699): n is a, c, g, or t
cgtacttttcgaggttttatcagcaagggcagttatttgccccagacttccagggatcaaattagtttggcttaatgggcaattcagtggtacagaaaagggatgattgagaaaattgttgacccccaaattgcagggagtatcagtgaaggatcattgaaaaaattcgcagaaactgctgagaaatgtttagctgaatatggagttgatagaccaagcatgggagaagtcttatggaacttggaatattcattgcaacttcaagaagctactattgcttcttcttcttcctcttcttcaaatattgatgatttattagaagaaaaactaagtagaaatgttgtctccattgctaatattctttctgatgatgactctgatagtactgttggctctcagttgcattttccaaacgtgggaaatatgcagggaaggtaaacaaatggtgaaatatcatcaaatgaggtttcaaaggagcttttcatccttttcacaactcctaaaacgtttttcaaagaaaatgttgtgagattggagttgaacaattattgtaatttcatgaaaacttgattacttaaaatagacttcagactgattttataatagcataatttgttgtttgcctgggttagtagannnnnnnnanccctgannnnnncnnnnnnnnnncnnnnnaggcanntnncgnnnnntttctgntggt

SEQ ID NO: 8466 - DNA, 429 bp, Gossypium hirsutum
  misc_feature (367)..(367): n is a, c, g, or t
  misc_feature (410)..(411): n is a, c, g, or t
  misc_feature (416)..(417): n is a, c, g, or t
gcctggagaaaagcaaaacatggacttgatttaaattcaaaggcacatctcatatggtacaattaaaagatcattggcaacccatactatgcagttgcaacttccactgggatatcctttaggattatccgtaaatggaaattattcctttttggctacacgtatgagtctgttgcatatgtacccctaatatcccaaaaaaaaaagtaaaggccctagcaaaaaaaaactacccccaaacctggaccttcccacagaattccaaagggatggaattcctccaaaatatggggttttaacttttaacatctaaaattaaggcaattaatcctttttaccttccaattaggttaatcaggttatatancagggttggaaaaacactacctgccagtggaaaaggaacctanngaaanntgcactctgagg

SEQ ID NO: 8467 - DNA, 394 bp, Gossypium hirsutum
  misc_feature (374)..(380): n is a, c, g, or t
ggaaatttatctttgatgtggatgaaaaggtcaagaacacacttattttcaacacttttgtcctctgccaagtgttcaatgagttcaatgccagaaaacttgaaaagaagaatatattccagggactacacaagaacaaactctttctagggatcattgccataaccataattcttcaagtggtaatggtggaattcttgaagaggtttgctaacactcagaggctgaactgggggcaatggggtacttgtattggaattgcagctttgtcctggccacttggctggctagttaagtggattccagcatgaaaaaaatcctcctccccggcaccaaggttttggctcccaaaaaaataccagttaactcccatnnnnnnntccttttcatttat

SEQ ID NO: 8468 - DNA, 381 bp, Gossypium hirsutum
ctcgtttatctgtttttcctttcttggttctgaacctttgtgatggtttcatcggcttggctcttgctcagttcggggattggtttcttactttttccttcattatcattcatgtttatgacctcgggaatctgatcctgagctccttttggcacttcagtttctgccaagctctcagctaaattaccttcttcttggatggccttttcgacatctttgtacatgcccgaggtgtctcctgaatccacggcttcatctgatggctttccatcttcgatcttctctttttccaatcctaaatctgataattgttcatcttgcgatgtttttgctacagagatgcattctccagtctcctgttctgtatgcacatatgattcc

SEQ ID NO: 8469 - DNA, 565 bp, Gossypium hirsutum
gaagcgaacttgcactccttactagctttcaacaaatctttaatggataaaattgcgcaaaattaagattaaaatgacctaatggggttattgttatctttatctactgaaaaggaatgttaaccttatctctccattgaatttctttatcaagtaaaaatttatggtttttcactttttcacaaatatttatgtgaaaactcaaatatagctgtcatactcccaaacacatgaaggaaataaatgaaaaataacttgactggtgaagtcattaataagaatattatatatatatgtatgctgtaaggtcacccttcttcaatacatttgcgcattcacaataacaatgtttttatttttgctaaaatttaaattttaatctaatttattttataatattattagttaggtaaaaatgtagttttcttaaattactactaattaatatgattaaatagatattttggtacaatcttgagtaaaactaacaccaaacccacaacccaaaactgaacttactaataagaaagattaaatttcaagaaactagccatgtgcaacataa

SEQ ID NO: 8470 - DNA, 720 bp, Gossypium hirsutum
  misc_feature (551)..(551): n is a, c, g, or t
  misc_feature (553)..(554): n is a, c, g, or t
  misc_feature (564)..(575): n is a, c, g, or t
  misc_feature (578)..(588): n is a, c, g, or t
  misc_feature (591)..(593): n is a, c, g, or t
  misc_feature (595)..(601): n is a, c, g, or t
  misc_feature (604)..(614): n is a, c, g, or t
  misc_feature (616)..(621): n is a, c, g, or t
  misc_feature (644)..(656): n is a, c, g, or t
  misc_feature (658)..(659): n is a, c, g, or t
  misc_feature (662)..(698): n is a, c, g, or t
  misc_feature (700)..(702): n is a, c, g, or t
  misc_feature (713)..(714): n is a, c, g, or t
gctgtattgatcagcaagctcttgaatgtcgagtgcctcgcttttaaccgatcgctttggattcggatcactttcgccatagccagcacgatcatatagcagaaaatatattcccagttcctctattagttcctggaaacttaaccaattgtgaagttaactccacttaacattcacatattcaggcaaaagataaaaacagcaatgattgaatgtgatcaagtctgtatggaatgttaaatacatgctcgtatctaacacttaatccaagcctaggtttcattaaaaattcaaagcagtgtaacatttgagaagagaggtaaaaggcagtacttggggaacttgaaaattcatatctttggagctaccaaagccatgaacaatgatgatcttgcagttagatttggccttgggcacacctctctctctgtaagctatatgtctgccatcactgagtttgactgtgggtgaaacaagtggaggatcctcaggtgaactatcagttttccagttgagcaggaagcaactgtgtggccttaccaaaaaaaaancnntttttaaaannnnnnnnnnnnaannnnnnnnnnnaannnannnnnnnttnnnnnnnnnnntnnnnnnaaaaaaaaaaaaaaaaaaaaacnnnnnnnnnnnnnanncannnnnnnnnnnnnnnnnnnnnnnnnnnnnnnnnnnnngnnncccttttgtcnnctctct

SEQ ID NO: 8471 - DNA, 661 bp, Gossypium hirsutum
gtgtaatctgtggaagcagtactcctttatggtgacaccgtcatcataaacctaaaatgtggttgagacaaaaattaatcctgtccaatagaatctcatagatccatcatcccttgatcatgaaagtcctagggataagaaagaacagtagtgcatgttggagatcagtggagttaggttgtctttagttgatcaagtctctggaatgcagaaaatttctgaaagtccacctgtctaacagaaatacaagacctgatttgctaagacaacataatgctatatgtctaagccattaacttctagtatcatatcaaaagtaagatactaaggacttggattagataactcaacctgcaacttgggataataaggcgaatggaatggtcttttcaaactttgagcagctactacttttcttccatcgaccccatccggcagcattcatctccaacatatgtgttacaaggcatttttcattggttaaacttctaatctcccaagtagatgctgccatccatggaaatatacatacaaattgagtggctataaaagggacttgtatatcaagaggactcatacgaaacatattagagtcatcatccagtgccatagtcactagtttatgaaaaattaagttgccacatactggaaatgtcatgac

SEQ ID NO: 8472 - DNA, 551 bp, Gossypium hirsutum
tgtcttgtactaatgtagtaaggattattattctctatactatcaaaagaagttttaaattttaggtttaaatgaaagatattccaatatttttaaatattactaaggatgaaacggttttctgcatgcaatttttttttaaacaatcttattataagttttgataatatatgctttttttgacattatatttagaactattcgtagccttttttcaatttatgtcaatcgagctaagattaaattgacgcttgtaaattctttttgaactatattgatcctgaaatgtgaaacaaacgaaggtttgatttagatggttggtgagattggttttgacaaaagttgaaaacaatggtaggggtgaaattagtaattgtagtgataaaatcagatattatagggtaaaagtatcatgaaggcttctgtattagaagttaaattgtattttttatcatttttatttaaaagatgggtaaattagtctctatacattagatcaaagagcaaattaatatttctgttaaaagctttatctattaaaaattctgtca

SEQ ID NO: 8473 - DNA, 664 bp, Gossypium hirsutum
ttgaaacctgaaaggctgagtttttagtatctctcggtacaactttattaattatcgattcatacgataaataaagaggtgaaagaagtgatacatatggaaaaccatgcatcagacaagtttctgatagcttgtttgaaaatctcagagatggttcagatgttagaaacagcttagaagaatttatgggtaaattggtttgtttcattgcagatgagttgaaagtatgtaccttctcattctcattgtccaaggtgtttcctttcttcctctaagcatagcaaaaccagaaaaaagaaaagccctttcatttcaatgataaattaatgtaagctggggtcggtcaagatttggacttgaggtgaacgtgaaagcaagaaagcctgcaagaagagaggtgagatatggggaccttgtaattgggactcctatgcttaagtcagtgatatggcttataggataagcgaaagaataaaagaagatgaatagtgaaattagtaaagtcgaacttccatcttaccattcacatgactgttgtcttaaccttggataccaatctgcttcatctgtttgctcctgtccgttttaatcatgtcaggcgttctcagcccaatcttttgcggcgtcaagctccattttgcttcctgacattcgtcttttgata

SEQ ID NO: 8474 - DNA, 660 bp, Gossypium hirsutum
tgtcacggttgaattctaagaatcaacctgttgttttgcttttgcctctggattcagttttagaaggtattttctttgatagaaatatgaataattaaaaattaacattatattaatgcactagatgctaaaaatgtctggaaaaaaattacagaagtttcagatgatgctgctcctaatgatgataatgcaagggcttgtcaggaattgcgccagctgatgaattcaggtaaaaagtggcattgtccatggggttccactgtggttgataatgttgctccggcatttaaaatgatattggaagagaacttcatgacatcttccggctgtcctttagaagatacaaaaagtacgaggtctttgtggtggatggttagaaagaaggttgatcaccaacttggtaaactgttgaggtaggtattctcttttcatcaaatatgtgtccatccatttttgacacaattattgtgatttgggattggatcaccagtggccaactggtgttcacaaaacttcattcacaagttcttcaacttgtctccttttggctacattttagtaaactacccaaagtttgtatgtaatttgcagcatttcatgttgaaattgactactgatgtatgaaatatatatatatatatgcctggcctgcgttccaga

SEQ ID NO: 8475 - DNA, 489 bp, Gossypium hirsutum
  misc_feature (423)..(423): n is a, c, g, or t
agcgctacagtgtggagcagaggaagtacagtcattgtcactactcgacttgagaaagttgctcttatgaattatgatggctacaattcctttctatcgcttgggatgtttgtcagatgatgattcttggtccttattcaagcaaagagcctttgggatgggaataaaagaaggcaatgtgaacctggacgcaactgggaggcagatactacagagatgtggaggggtaccattggcaattacggccataggaagcatactgtgttccaaaagtctagaaagtgaatggttatgtgtcaaagatagcgagatatgggctttggaggatgagggaaaaagaatcttggctgtgttgatgttgagttatgagcatcttccaccatatatgaaacaatgtttttcattttgctcactatttcccanaagattctgtcatggtaaaggacgagctgataggactatggatggcaaatggatttattccttctc

SEQ ID NO: 8476 - DNA, 595 bp, Gossypium hirsutum
tagctgcaatcgcacattttcttctggcattttctttattgaaaaatgaaacaactgaacaagtaaaactttgctctttgagggaggagctcagcaagtcctgcttgttctttctttattttaacaatcacatttactctaagattagattcagttgtgtttagttctactatgcatagatcctaacacttttatggcatcaattatatggctatagtgaatgctgctgctttcttgttacttattccttaatatacctattctcttctttgatatgaagttttagcctttagtaatccgcgaacttcataccttgatttacttgagatatgatgtagaaatattcatgcatgaacaaacaagaggctggggttccttattctttttcgttaactcttttaaagtatgtaccacttgacttgttaaagagaaactgggggttgggaaataataaaaacagatagggaaaggaaaatactacttaggttatattatcttctggtgttttggttggatagggttccggttgttggaggaaaggctctggatctgcatcaactcttcgtggaagtcacatcacgtggaggtctcgaaa

SEQ ID NO: 8477 - DNA, 590 bp, Gossypium hirsutum
gattccagcacaaaaaaattgtagatcatatgttcattgagcttacaacaaatgcagatttggctttgcaatgttggaacaaaatgcattgcctggtttctacatgcttttctgttcatttagttagagcatagccagggccagcaattgtacatattttctcggaggcctcagcctgtaatgtaagagatcattgtaaatatatatcccaatttcaagtctattcaatcttattcgtttccagagtgaatgtaataaaccaattgcatttgtgaaataactccgatgtaaatcttgattactagcaattttatattgacacacgtgtgtagacactcataaattgataaattaaaaagaaaaaactgtaaatggagcgatacctgttggtcattgtataaacaaggggaaaaaaaataaaaaaatctactcaaaatttccaagtttgagttatgttttatacatctgcgttggtggccgatttgtttcatttttgctatgggaactgatagcatggcttttgctgtagttttagtactgtttgggtttttaaccatgcattccagcttaagacacgcagaagattcaga

SEQ ID NO: 8478 - DNA, 622 bp, Gossypium hirsutum
  misc_feature (618)..(619): n is a, c, g, or t
ttctttgcctgccccagattgggagcagaaaagttctgttggaggctcgtactctgatgcgggttttgtcactgttgatacctggaaagaagatgcacaaccaaccttatcttcaggggatgactggagaagaaaatatgaggaccttgagagcaagttttatgggttagcagaacaaaatgaaatgctggaacagtccttgatggaaagaaaccacgtggtgcaaagatgggaggaacttttgggcagaattgatatgccttcacagatgcggtccatggaacccgaggaaaagattgaatggctaggtgcggcactttcagaggctaatcatgataaaaattctttgcagaagaagattgatgaccttcaaaattattttgggtcagtagctgctgatttggaagagtctgaaaagagaatatcaaatcttgactcagaccttcaatcagttgcccttgagagggagcacctttctgaaagattggatgctttgacttctgataatcataaccttgcagcaaaggcaactcaatttgaagttgagaatgaaaaacttcagattaaagttagtggtttgaaggaagaattggataagaggattgaggaagagaaagnnaaa

SEQ ID NO: 8479 - DNA, 609 bp, Gossypium hirsutum
  misc_feature (438)..(438): n is a, c, g, or t
ttaacgtattctctgtattttccccttttttgtgttttgtttttatattttgatgctcttatgaaattatctgcctgtgtgaaaatgtacacattaaataatatatatatccattcacatctgtgaggataaagtatatatcagtttgaaaaggggagggggggagaagagaaatgatttgcttgcttcttaatggtgacacataaacatttacaaaaccaaggatgagaggatgacagagtgaattccagtcattggtgattggacaccgtatctgttacaatctgatatcaaggactgaaagggtcaaattctaccaaccaaattatggcctttataatgaagggccaaattttggtttggaaacccttgatttctgattccaattaaattttattggtattttctattaaaattaccaaccggtttattcctggnacatcttttccttccggtgaatcctgaaaaaactccttttcctaaaacttgaataatgggatggcaccaatgggttccgaattcccttttaattttagtaataattttaaataaaattaagaacaggaataatcccggaataacctatccttccggtgaagcctggaaaaa

SEQ ID NO: 8480 - DNA, 607 bp, Gossypium hirsutum
agttgacgtgatatgctaaatcggattctggataatcgaacgaaatgcgtgctttctttgtctcgtaaaaaaaattctgtctgtataaatatccggttggctagttccatatgtttaatccttcaccgactctttatataggcgtgcatttgtgagtttgaattttcggaatctaaagctgtgttgctcgatctctgcgtcaaaacttgcttgtatgattttgttcacttttttctctgcaccaggtattcaatttcagcactggcaggattattaccaaatcgaactttgacagcgaggttacctcaatggaccatgatcataccggtcagctaattttctgtggagatgcacaggtctctcttataccgtcctcgccataatcatcataatcaaagatatctgtttggtcttttagaatgttccttatgggacgataatttcgcagggatgcatatacaccgcaagtatggaatcccgcacaggtgcattatcccgttctcatcgatataaaagtggcaacaaactgaaatgtccagtcgcgaccgtacagtaccgaagtttctctttgatgacaaagggtcctgtgttattgtcgtgcactcaa

SEQ ID NO: 8481 - DNA, 648 bp, Gossypium hirsutum
taaagttacttaacttatataacctttttaaatcaaagctttgtataatatgttgaattaattatcatctttattaactggtaatgagctgcactaatatatatgtttctaaattgcttctgtagttgaaacaataccaggtacggaccgtccttgttaatgtcgatggaggagtaaagaatattacgggtaagtaaaaataatgaaaatattctcaattatagatctgtcatgggctgggcttggccaggccatggctcagttcctaaaaaattttaaggccatgcccaacccacccaaaagcttgttttgctgttaaaaatgaataaaatatatttatattaatgttttatgtaattttataattaaattaattttaaaattttattattatttaaactgaattcgagccaagttgagtcgagacaaaaaccttgagacaaaaaccttgtccaaatgtaatgtgagttgggctgaacttactgggttgggtgggttgctcaacccaagacagttctattcttaaaatcaacttggacttcttatgttataatttggtccgactcttaattttattttctagaaaaggcatatacatatatatacattatacagtacttgtacccgagtctaggtaagatagatgga

SEQ ID NO: 8482 - DNA, 578 bp, Gossypium hirsutum
  misc_feature (573)..(574): n is a, c, g, or t
atattatcctttctgcaatgattgcaagtattacttaaagaaacgaagtatctgtacctgttttgttccatcagaaaagttattcaaataatagcgtttaagggaaatatatctatctttaaggatcccctgaactcttcgctgaccagacctacaatccaaaaggaataagttctggtagagcagaacattaatgtcttatgctatcatggatatagcaaagaacattgtcgcagagaaatttgagcacaaaatgctatttctaccaagatgctttaaaatagcctcaaaacatttgctaaatatatacgttaacattcaacttttaaaatacctgacgagatctccttttagtgcggcagtgccagaatattgtatgcttatgtcatccccatgattagcccacactatatatgtccaaagatttttaacgtaaatttcagtttatatgctaggaaaccgaatagatatgtgcaacatactgagtaccaatacgttaagaattaatatcaattgaaaacagttgaacaaatatatatatcaactgaaagcaaattattagaataagaaatnncaat

SEQ ID NO: 8483 - DNA, 640 bp, Gossypium hirsutum
ttctgctattatttgtttatttaatgaaaatgtgtcatgttactatttaacgatgatgcatgaaatttatataggaaccgtacatcaaaaattacttactcttcgtgcatatttccggttaaattttttcttgctgctgttaattgctattatattattgttttgttatgcaaaatttttcgtgccaaatcaattgaattcaccacctacaattgacactttgttacaagcaacatttgcaacaacaaattctcaggaaatgactcatgatttcactatgttgagtcttgaatcacaacttttcgttgcaatgattactttaatataaatttctcatattcgtgccaagatgaggatgtcataccctgaatatatccataaagtgagtggagactcatcacaacatgagagagtgacaccgacaaacgatcagaactttcaagatggagagaatgaacagttgctcaatcataatcagataaactattcgatgctgtgtataggccagaaaagacgctttaaagagcttgacacagaggaacagtgcaactccgaacaatcaccaatgcggaaaaataaaaaatttaccagggaagagcttgtcaaaacgaaaactgggcatgaaataaggttactatac

SEQ ID NO: 8484 - DNA, 610 bp, Gossypium hirsutum
tatttgacaagcaaaggcaataactaaagcaacagtaataacttgaattgttatctgtgtcggtggaggcagcgagataattgtgatttaaaaatgttaattaaaatttggatttctaaattcttaactgtttggatttttaatttctttaactaaaattgcgtttttaaatcatttgtggaagttcatggttgagttgcaaaactgtgattttgacagaaattacggatccttttagctcgaatgattatgtctatcaaacaaacagagatttgagaaatcttattttgttcttattgcaggttggaggtgatttgagtaagcttggcgatttgagtaagctcggagatttgtgcatgcttggcgatttcagtacgcttggaggtttgagtaagctcggcgatttgagtaagattgatgatcttgttccatctggagccctctcggctgtccaaagtcttccaggagtgggaggtttggctactgagttgccaggcactggattgctgagctctgcctcagggctcctcaagcaggtctcgtccaacgccatcccaggcgctcaaatggtggctgatgtccagcatgctggagcggtaagcattacctc

SEQ ID NO: 8485 - DNA, 576 bp, Gossypium hirsutum
  misc_feature (71)..(74): n is a, c, g, or t
  misc_feature (368)..(370): n is a, c, g, or t
  misc_feature (373)..(376): n is a, c, g, or t
  misc_feature (390)..(395): n is a, c, g, or t
  misc_feature (399)..(400): n is a, c, g, or t
  misc_feature (408)..(409): n is a, c, g, or t
  misc_feature (411)..(412): n is a, c, g, or t
  misc_feature (414)..(415): n is a, c, g, or t
  misc_feature (417)..(422): n is a, c, g, or t
  misc_feature (425)..(429): n is a, c, g, or t
  misc_feature (433)..(445): n is a, c, g, or t
  misc_feature (453)..(462): n is a, c, g, or t
  misc_feature (465)..(465): n is a, c, g, or t
  misc_feature (468)..(471): n is a, c, g, or t
  misc_feature (473)..(477): n is a, c, g, or t
  misc_feature (481)..(484): n is a, c, g, or t
  misc_feature (486)..(497): n is a, c, g, or t
  misc_feature (499)..(500): n is a, c, g, or t
  misc_feature (503)..(507): n is a, c, g, or t
  misc_feature (510)..(514): n is a, c, g, or t
  misc_feature (522)..(536): n is a, c, g, or t
  misc_feature (545)..(552): n is a, c, g, or t
  misc_feature (557)..(561): n is a, c, g, or t
  misc_feature (563)..(572): n is a, c, g, or t
aattttctcttacccttttcacgctttttcgcatggactcaccagtttgtgtacaatagtataagtagccnnnngtcgattactttgtgatctcgaggtttttcaaggccattcaattccttcaaaatctcttgacagagtagctataggtaatgtgtagatataaaagagcatatcaaattaaaaccataaattgtcaaataagaaaaaagaaaataaaacctggattggccaataagaaaaaaggataattacttaccccccttaattggaaggtaaatctccaagcatccaaaaaagaaggctccggggtggccacacacccacttccctttgaatttaattttttggattgggggaatatgggnnngcnnnnccaaatttaaaagnnnnnngatnngggaaaannanncnncnnnnnntannnnngggnnnnnnnnnnnnnaaaaatcnnnnnnnnnnggncannnncnnnnnatcnnnngnnnnnnnnnnnnannggnnnnnggnnnnnaccttcannnnnnnnnnnnnnnattaaattnnnnnnnnaagcnnnnncnnnnnnnnnnctta

SEQ ID NO: 8486 - DNA, 599 bp, Gossypium hirsutum
aaatgcaggtgaatttgttctacttcttgtttctagtttattttatcttttaatgtcaacaaactgaggaaaaaatgtttaatatttgataatgttattagggtttttgttataatccaacatctaatatactgtaatgatcaaatctgtctgaagtttttttcttttacagatggtgcagtacaggggatatatagcaaatctcttttatgttcatttttgttgattatttgttaatatgatgtaattatttagttaattttttgttaattgtatttttttcattattctttataaagatttacatgtttttttttaatgctatcatttctcctttttcttcacaatattatatatataaataattgaaaatgttatcatagagacaacataaacccaagtgaatgacatctctattaaaaataaaaaaaaacccataaagataattccaattagaagataaaaaaaaaatggaattcgaattttgatcccaaataatcaatgttaacttcacaatcaaacagacaacctagtatgttgacatgatatgcctcgaatccagacaacttttatgaatattttatatcagctctgccatt

SEQ ID NO: 8487 - DNA, 343 bp, Gossypium hirsutum
tagtttgtcttgaagttcctttaattataacaatcatatggcctatgcagaagaatctctgctttgcagttcattgtactttatcaggattcaaaagaaaagatgaaaaaccttttcatcttagtaaataattagagcagtatcatcaaagataatgcaatcctagttgtatatttccaccacatcaattaaaattgtctgcaaaaaccaaaaacttgaatgcaattccaacttttgcatcaatggacatgcctcgagaatatttcttacccacaaaaggccaaggtgcggtacaaaatcttttaaaattgctagatgttggaaattgtaatgtgttggtaag

SEQ ID NO: 8488 - DNA, 882 bp, Gossypium hirsutum
  misc_feature (350)..(350): n is a, c, g, or t
  misc_feature (432)..(434): n is a, c, g, or t
  misc_feature (470)..(470): n is a, c, g, or t
  misc_feature (529)..(529): n is a, c, g, or t
  misc_feature (543)..(543): n is a, c, g, or t
  misc_feature (547)..(547): n is a, c, g, or t
  misc_feature (876)..(876): n is a, c, g, or t
tcaaggacaagacaatccttattcaatcagctatccggggggaaaaagaacagaaggcattcctattaaacaccaatgaatgttgccttagtttcattagattccgatcattttcaagaaacaatctacagaggctaatgctagcagtaaaaaaaaaagacttttaagttaatatgaagcaacattaattctggtatgtttttgagtagatcattcatgtgagctgtcatctgttcttcccaaatgattttcagtttgtcttgaagttcctttaattataacaatcatatggcctatgcagaagaatctctgctttgcagttcattgtactttatcaggattcaaaaganaagatgaaaaaccttttcatcttagtaaataattagagcagtatcatcaaagataatgcaatcctagctgtatatttccacnnnatcaattaaaattgtctgcaaaaaccaaaaacttgnatgcaattccaacttttgcatcaatggacatgcctcgagaatatttcttacccacaaanggccaaggtgcggnacanaatcttttaaaattgctagatgttggaaattgtaatgtgttggtaacttggcccagggcctaaccccccaccctccctcacccccccccccccaaaaaaaaaaattaaagacgaaagaaataactctaattccgattcactaaagtaaatacatcaatcacgatgtctcaagctgcggcatgtcacaggggaacttatagaaaggccaatgagcatcgtctctcatcttcataccagtgaaccgaataactgcagtctttagattcttttttcctcgagtgaatgagaagtacttggtgtagggacctttaagaattcacttgacgacnacccat

SEQ ID NO: 8489 - DNA, 668 bp, Gossypium hirsutum
tgctcctgacagtgtcaggaaaggtaaagaagcacgcatgtgctcctcctggaggaagttgagccgccattcttggggataaatctgggagacgtaggtccttttttcttgaatcgaggctaggtatgaaaatgaaaatgaaaatgaaggtgtatcgtagtcgatatactatatatacgccatataaaaagaaaagaaacgatcccactgtgtaccgttacagggcgtgaaacaaactgaagttagttaaaaagtttaagtctgtttttttcttttaggttaaatcctgctattcttttgcaaaatttatggatttagtccttatactttaatttggtcatttttaatctctatacttttcaatttttaaaattttagtcctcatgaaatgattcattgttaaattttgccatttctaaaatctaatgtggcatacatattacatattatcatatatatgccatgtcatcttgttatttctacatattaccaaaaatttagctaatgaattaatgactatcattttgcatcaaaactgaaagttcaaattttgaaaatataggggattagaatgatataattgaagaatatggactaaatctataactatacgtataatacaaagctagtaattgactttaaccaaacaagtttagctgctactgctt

SEQ ID NO: 8490 - DNA, 649 bp, Gossypium hirsutum
cagcgacctatggaacttttctatgattatcttgcaactttacacattgtggcaaatccaatttttcacacaaagcatattgagatagatactgactatctacgtgaacaacttttgactgggaacattgttacatcttacgtgagtactaagtttcaatttactaatgtattcaccaaagccttgggatatctacaatttgtttacctactttgcaagttgacgtttgtaatctacatgctccaacttgaggggaagtattgaaatatcataaatatgataaatattattgtaatttagataacatatatttgtgattgatattgtatcctaaataaaattagttttgctagttgttagactctgaatataagggataaccaataaataaaaatctcaagacttttctccaactaattttatcatattatcttttctctcattttttttcttaccaaacacacacaaaatttattttcttttcactttttcattctcttattccatcccttcactttcccatccaactaagcacaccttaaaactttacttagtagagtggaaagaaaaccggaaagataaaaaattgaagggatagaaaaaataaaaagatgaaacatataaaatttttcccattggtgtacttact

SEQ ID NO: 8491 - DNA, 654 bp, Gossypium hirsutum
  misc_feature (29)..(29): n is a, c, g, or t
gagggaaagtggggaagcagttccctggntcaatgaattaatacctgattcacaatattatccacctcatggcacagcgtttcaaacgtctgataaacgtcccctaaccagcctatgcctttatatttaaaatccatcactgagatatatcaaactggcaaagccaatatcacatacatctcagtaatagtaaaaaggtatatgccattattcatgcttcgggatctttaatttagcctgaaaaattcacaaaaattttagtgatcactcagagaacttgaagaaaagcaagcaatcctaaataaatgataccatcaacatcagagctcaaaagagcttcataggaggtaagctcaatgccaattaagaagtgcaaatagattgtaagtaatgaaaatagcatttcatcacttattcttcaaattgacagtccaaattgtagcattcaaattataacaccctacatggctaacaatctcagagaaacaattttcaagaaaactaataactttttttttggttatatactcaatttattgagtttttacttcccaaaaaactgtttccccttttatattgctttcaaacatttcaaaaaagaagtaatttttcattttactacatttactttccagtgggaaagggagtgatatg

SEQ ID NO: 8492 - DNA, 562 bp, Gossypium hirsutum
  misc_feature (501)..(503): n is a, c, g, or t
  misc_feature (542)..(549): n is a, c, g, or t
tttttctcctgttattttcgttctttttaagagtatgttatgatcattattgttatttttttccccttttaatgttataaacatactctttcatagatgggggtggagagatttgaatccataacctccttgggcctcaccttgtctttccatcccctaggcctttgcttcagtggcttgttatccttattacttggtaacacaaaataatgctaaacttcaattcgagtaaaacaacgttcttagtattacataccatttaagataataggacagtagcgttatggcactgtaaggaagattttacacaactttcgcagaagataatggtactaatgaaacggaaagcttacctttcatgaatgttaatccgaagtatttatccccttttttttttcatcttaaccaattcctcagatgcagagtagttcaatttgatttacaacattctttaatctcaacccaaaaatgggtgaaacgaaatccatgtcatttgtggannngcatgtccgtacttgaaggtctaattgtccattcctttnnnnnnnnttctccttttgtt

SEQ ID NO: 8493 - DNA, 645 bp, Gossypium hirsutum
caggttcctgttgttgatggcttttcatttcctcatctcactaaacggatgaatgtagcgggtcggcacataacatcctatcttgttgatttactctctcgtagggggtgaggaccaatttttgtgacaaaaaacttgtcagatcataagacttccaattctattgatcatcaaatgatcttttgggtgtctttctgtaggtatgcaatgaatagaactgctgattttgagactgtcagggaaatcaaagagaaactctgctatataaggtgaacaagcatcttcttttgttttccaattttatgtaattatttatgtaatccaaagtcacattacttgtatttacttgcagttatgattacaaaagggaatatcaactgggacttgagaccaccatccttgttaagaattatactgtaagtacttttggtaaatttttcatttcccttgtccgccaaaaatacttgatttgtaactcatatgcaggaaacttcatcgggaacctaaacatttttttctcatttgtttgacatgttatccactggttatcttttatgattttactcaaaaatgttgcatctagaaaactgaaaatttttgtttgaaacagctgccagatggaagagttattaaagtaggcactga

SEQ ID NO: 8494 - DNA, 634 bp, Gossypium hirsutum
aggcccttatattaggaatcagactgcattttgcccactctactcaaaaaaataggtaaattagtccctgtactgttagattaaagagcaaattggttctttttgttaaaagttccatctatttgtattattaaaaataagcgtaagtgataaaataaccagacattgatatatgacgtgccacatattcctcatgctgacatatagagatcaatttttaatggtaaaaataaatgaaaattttaacagaaggaccaacttgctttttggtctatcatacaatgattaatttgactatttttttagaaggaagtccaccacaaataaaaggatctccatgatacatttaccatatatgaaacaatttctagtagaatacaatgcatatacattctagtcaaccgtaacctagcatcaatgccgatagacataataaaaatctcagctttgatgaaagacttaaaatacaaaatatatcatctaaaagaaattaacttatattcatccatgatcgaaaaatactataagataaaaccatagagcctcaccagaatgccttgaggtccttttggttttaaaggaagcaatgctttttgtcttggtagatgattcatcgacaaagttgatagcatgc

SEQ ID NO: 8495 - DNA, 636 bp, Gossypium hirsutum
agacagctatcaaccaatgcataacacttccaaattgaactattgttcaaacaataatggcagcaattaaagcaattacccaataagtcataccaactcgggtgtgaggaccagatacaggtatgtaacagcgacaagtatggttagattcttctaagttttttcttcatccttggaggttatatcatcaaatccatgtgtcagaggcgagtgttagacacaggtatttcaagaaaaatgaggagtccaagcaacacaaactccagcaacctgtttgactataatagttttatacattgatatttctactacgagagattcctcttactgaatcacgggcctccaagtttctgaagcattacaaccaacaatttttccaagactcttggcattgccatgacactagtacaactgcataataagtgaaatacaaaatgttcacaaatatttcaccattgtaaggtccaagtagttttacaaccaataatatgtgaaagccacgtcacctaacattggaggaaatcttaaaaatatatttaacacagaacaattggcaagccttatagatcaaagttggttatgactccaaatccctacactcttcgtatatttggaatttagtcctccacttctatt

SEQ ID NO: 8496 - DNA, 770 bp, Gossypium hirsutum
  misc_feature (637)..(663): n is a, c, g, or t
  misc_feature (669)..(676): n is a, c, g, or t
  misc_feature (678)..(680): n is a, c, g, or t
  misc_feature (682)..(682): n is a, c, g, or t
  misc_feature (684)..(687): n is a, c, g, or t
  misc_feature (690)..(690): n is a, c, g, or t
  misc_feature (699)..(716): n is a, c, g, or t
  misc_feature (720)..(726): n is a, c, g, or t
  misc_feature (729)..(738): n is a, c, g, or t
  misc_feature (740)..(740): n is a, c, g, or t
  misc_feature (742)..(742): n is a, c, g, or t
  misc_feature (746)..(750): n is a, c, g, or t
  misc_feature (753)..(755): n is a, c, g, or t
tgcagacatcctggattgaagacaattggcttgtctattttgaccttggattatagattatatgtattgatgcttgccttttcacgttcttgtctgctgaaaatgttctgtccatcctatagatgattttcttgtgttattgtagggatccaaatcgcctttccgggagttagacataaaggccccattacggaaactattagctgatatggttgttctagagtatcctgtgattcatgtgtttcttccttcggaacactgtgattttgaagttatcagggagaatcatctcgtcactcacgggccagagggaaaagattctagcggtgctgataatgaaataccaaaaggtgttaccttcaaggaggaggaaatagaagacaatggtagctctttagaacctcaggtctttgatcttatgaagcatgtgctgtcaagtccaatgcatcaaatcccttctcaaaacaagtctgagaaagcattcggtggtaactcagttttgtctttgtcggcgagagccggggcaggaaacagggtacattgcagcctccaggctaaggactctggattatttgatgacatggagtttgattttgatcaaggcttaatagatgcgtattcagacctgattgccaannnnnnnnnnnnnnnnnnnnnnnnnnnccggtnnnnnnnnannnantnnnnggngacaaaggnnnnnnnnnnnnnnnnnnaagnnnnnnnttnnnnnnnnnncnantgtnnnnncannnggtgatttttgagaa

SEQ ID NO: 8497 - DNA, 558 bp, Gossypium hirsutum
tgcttactcaaggctgaaggtggcttaggattgagaagcttggttgactggaataaggcttgcattctacaaaaaatcaaggcccgtcttaccgaagaggtcctcctttagattgcttgggttcgggcttatgttttgaagggagggagcttttgggatgctacttgtaattgatctgccagtagctagaattggagaagatttcttaaagctaaaagacattgttgctaggttgcctgctggcaatattgctactttaaagattttgggggagattcgagtaaaaaataataaagttccatggcattagctgatccggtttgccttgcatattccaaagcagtcgatcattgcttggatggttgtgttaaataggcttccaactaaagataagctttcttctcaaggtctcaatgttgatatggtatgcttattgtgcaacagggctgaggagtctagggatcacatgttataattattattgtctattctaagaagatttggggctttgcaactttgacagggttgttggccattggagacaagagctttcatgga

SEQ ID NO: 8498 - DNA, 630 bp, Gossypium hirsutum
ttgctcttccttggcattctcaatttgactttgttcagatttcacaactgaatcttcagtagtgcattccttcacctcatattcttttgcttcggtgccttcatctgtaccttggagctcgggatccccatccgtatatgaccgcatggcattgtgatgactatgaaatgtttcatcatttgaaacaccattcgagtaaactatagcacaatctgattgcttgtccatgcagatgtttgtaacttctacacccattgagctgcacatttcaatcgcaacatccgcattgccataagaatctctatattgatgctaatttacataaaaccatcaacaagttcaatcaccatttagattgatagaaaacatgctatttcagagcaatcaaccaataatctttagacgcagctggcacataaatttgcttctagaaagatgatctcaatcatcccaacgaaacatggaatagaaggaatagtatagatatatatcattaagatttggtttatgcggccactcttaaaagttagaatttagatggtctggattcaaatctcaacatctacaatcctttccattgtacaaaaaagaaaaaatcatttgcatttattaaaaaggcgtgctttgtcc

SEQ ID NO: 8499 - DNA, 616 bp, Gossypium hirsutum
ttcttgcagctcttcaccttcaactttctcattttctgaataaaaagcaagtatatgaagtaataatttattctcttttctcctttataaggataccgaacaactacttcacaactagattcaaaagtttaagattgtggatgttatggtaaactaggatatgaaaaagatgcaatgcccacaacaaaacaagaaacatataccacatagaaatgaaaaaagaacaggatgcagcagattaccttccaggtgggcaccaagcccttctaaaacagttggattagcacgaacaacagaaagggctacttctagtgcagactgtaataatgctttcacctctctttgaacaagatcaactagatgtccctgtatgttctggatcagtctttgatatagatagtgcaggaattggaaaccaaaaaagggataaagtgataaaattaaatttattgaagagtaaaattggacctgatcacgtccccaaggaactgatcccccagattcatccatgcctccaccagacacggtagctaaagacagaggacctatagtctgatttagaccatattcagctactgccttgtatgccatgtctgttgctcgcctaatatcatca

SEQ ID NO: 8500 - DNA, 418 bp, Gossypium hirsutum
agtgatttgtcgttgccattgccatggttgagcctgaaaagtggaagaaataaaaggctatgatcttttcgattcatctggtattgaattgatgtagacaacagcagttggagcgttgattttactgctgttcatgagttttatgaaacagtagtgagatttagctgtgactgatttttaatgattttcttgttgctcaaaagcaaagcaaagtttatagccagaaaaagaaaaagtttagcgctaacaaacaaaggctaagaaaagagagcaaaaacaaagaaaaaatacggtatgttattatgtggcaggtagctgaaggtataaaacggagaagaaacttgtttgtgcacgcgcagtggaatgcgcgtctgattcgaagtaaacgattacatattccttgagaggtgtgtgatgc

SEQ ID NO: 8501 - DNA, 582 bp, Gossypium hirsutum
atcacacagttctcagactacttaaatctcaaatattagcatttttttttattggctaacgttagaatattaacattcaagaccatgatgttatcaagattatattgaaccgaacttactgtcactccgagtttattgcagatattctccgcgagaagaagtgagtatgcagattgcttgtctgctctagatggatctgaaaagcaaatagttagccgaaggataacttttaccaaaagatacatcgtctactaattatcattaccttcaagaagccattctctatcggaaatcacaacaatggaaaaaggaatacgattcggtttcacgacattattttgtacattcattatagtttcctctaacgtatcatagttcatggagtttccgatctgcaacgtgtgaaggcaaaataacaatattagagcgaaaccttaaaaaggcttatcattgcagtcattccacaccacatgagcaactaaataagaaagtaccttatggataacctgaacattttttagttttgcttgacctgaaagggagcttgctctcttcctttcttctaatggaacatcagataat

SEQ ID NO: 8502 - DNA, 589 bp, Gossypium hirsutum
atttactggaatttagctgcttaataaaatcaaaatgatatgcaggatttatatatcaaaacaaaaggaacaaaataccaaacacagaatcctgcataaaacatatatgccaactagttggaaagctaaccatatgaatgtgtttgagcatcactcctatttagattaattgttgtttaagatcaggctaagttcattaaggtcgaaactaagtgtgattagtggtcaagcccaagttcatttctagtcaaagttgatgttggatttttaaaggtccaaaagattcaaactccacatgagtgtaagtcttaggcgcaactgcgcaaggaggccttcactactcccatatgatttttgaaaatgcttatagttttgtcttatattttaaagcgagagacatggaggaagatgctttactatcaagttgtggaattttagactgaaatgtattcatttaataccttgttctgcaatttttctttcttttatcatttggagctttaatattagactgaaatgtattcatttaatatctatgtaaagtttgaaattttaagtatgaaattgctgaactgaatatactgaaatt

SEQ ID NO: 8503 - DNA, 668 bp, Gossypium hirsutum
ccagcagatttgtgttcaaatgggaattttacagaagcaggcgattcaggtgtcccagtatgctttccagacaactccagaggccgatggaagagtaaatgagcaacagcacggtcaattggattggtctcagtttcagcctctgacatcctgttccattatacattcaaggaaaacaaaatgagacttcggcttccaattcaatgaaacaagcataagatgctgcaataagagtttaaaatgggccttttaagtcagagaaggctgttggtccagggaaagaacctagaaagttcagaagaatgtctttaaaacgatagaataccaaataattaacaccaaatgaaaccatattaacacttttacgttttgagtttatttgaggtgaccggatcatggaaacttatgaagtttaagaagagaagcagataatccataaacacaatggagcaatcatgtacatctttaacttacacgaagaatatcaccctggctgaagataacatgaagtcatttcctatgttgctcctactattcatttcccttgaaatgaatcgtgtctgacgcatattgggacatggaaatgaggatatgatcctccaaggaccctccaaatacatggaaatctttaaaaagtttaaacatatccatgctcgacacttgcaccc

SEQ ID NO: 8504 - DNA, 613 bp, Gossypium hirsutum
  misc_feature (605)..(606): n is a, c, g, or t
cgcaatgggaagaagaaccgaatgtaccgagagtgtggatgcccggccaagattgccccggtctagctatgtcgagagctttcggggatttctgcctcaaggatcatggacttatctctacacctcaagtttcttatagaaggcttactcccaaagatgaatttgtagtgttggcaactgatggggtaagttataacatagagggacgcaaatcataattgaaccaattttgacacagcataatagtaccattttaaaattggtgcaggtgtgggatgtgctttcaaacaacgaggtggtacaaatagtagcctcagtaaagagaccatctatagcagcaaaagtactggtttattatgcagttcaagcatggagaaccaagtacccgggttctaaggtcgatgactgcacggttgtttgcttgttcctcaagaaacgaccttcggtatcgggaacgttgtcagatatcagccagcagaccgcaagtcacgtcaatggggtggatccgaaaggcaagaaaacggaagaaggggagactgtgattaattgtgacatagtggtggatccaaaggcgcttgaagaagtaaatagaataaatgggaacnncatcagc

SEQ ID NO: 8505 - DNA, 588 bp, Gossypium hirsutum
gctgggttcttttctctctttttttgaattttctacgttttttttagtttttgtttctgcatgaaagcctgttttcattttcctttgaataaagggcaggttttatgcatgcagggcttacgagttgtattttatgtacagtattttattttaagtagatctattttttcttgattttctgttggctttcttggtcttcctgctgggtgttcgtttatcttttcgtggctgcttcttggctcgttgaggctttggtggtttctctcgaaatcgatcggtggcggtggtcctgtttggggagtttttttctggcctgagttcgttgtctagtctttatactgttcggtctatctctgtgtggatgctggttagtgcgctaggggcccctcggtggccgagttcttatctttcttacgacttttccacgttcttttttatgcctctgcatgaaagtgggttctcttttttccccgacgtaaaaagtgcatgtttcatgcatgcagggttctacgtattttttgtcctctttaatgatttttattaagttgattgcttctttttctagtggtgttttctttattgttcttg

SEQ ID NO: 8506 - DNA, 610 bp, Gossypium hirsutum
gacaaggaaagtgaaaaagaagaacaagaagatcaatgtccaaaagccaatgatgaggttaggttatgggaaccaatggtggaagaggcttcgaggataaggggggagtcggttcatgataaagccttggaatatcaaataaggcaacaattggtttctccattgcacgcggaggttgaaccagataaccacgaagttcatttcagaacgaatcttgtttaccaaatgcgtattgacgagcagcctaataattctcttttgctaacaaattatgctcagtttcttcaccttgttgtcaaggactatgacaggtaaattttctgccttcggatttgagctttttatttgtgctctcaatctctttgcgtcagatatggggtatgagtatcgtaatttgtaatggttgggatttagacgtttactcctcatcttcactgtatcaatatactaaccatatgccccctaaagtttgctacatgaaggtgcacctgagttttgaattaaaggttgaatgggtacccataggtttaaggtttaagatttaaggtttggattatccttaaagcttcataagccttactcatatcccataatgtgttacacacgaata

SEQ ID NO: 8507 - DNA, 548 bp, Gossypium hirsutum
gaggagtttgagggccaaatttgctgcttttctgctttgtgggttggagaaggttcttgcgaatctccaatggtggttgttcaaaagcttttttcttttctggatctttgattcgttttgaggctctgttttgcttggaaagggttcggctgctgatattctcttgggaagttttggggagtgggtttggggtttgatagtggttttgatttctatgtgctgtttacctatttttgctttggttttttcctgctttattgtttttgctttggttttttcctgtttttgttgtagtttcatgttttccttgggtgactttttctgtcagttatttgtcgaacctatcccctctttaatgaatatcagttatttaaagtaaaaaaaaaaagaaattacgtaaataaataaatttctttaagaaaataaaaaaaagggttcgaatctgcggttcgcgccttttgttaatgggtaaagtggcaattattaaccgaacgtacgcaaaattaggccccacttggttagggccccgtttcttttatggaaaaaaa

SEQ ID NO: 8508 - DNA, 222 bp, Gossypium hirsutum
tgtatacacattttcatctaagtttgaaggttcttattagaaccacaagttcaaattaaaagggaaaaaggtatatactagggcagttgaaactccaaatcacttacttgaagatcttcaatatctttcaattggctacattcataacaatgattactcagtagcggtatttggtggagtaatctttaggagcaattaccagaccacgaccctttctagccc

SEQ ID NO: 8509 - DNA, 663 bp, Gossypium hirsutum
gctttacaactgatccaatacggaatatttttttgatatattccctgtgccgtttgggagtatcctaccactttgagaccgaagtagagcagcaattagctcaccgttttgatacactaagccaactcattcataacaataattatgatttgcacacaattgccgacatgtttcaagttttcagatttcatggttacaacatgtcttctcgtaagtataatatatcatgtatatatatatatcatattaatcttaactaatattataatcaatgatttgttgtctcatcaaaattaatcttgtccaaaaggatctctatggctcttctggatattgtcgcacagaattttaaaaaaatatatcctgccattcaaacacatcatcatttgtaggtgtgtttggcacaccttaagtggagaacacatgttcaaatcttggagacaacaactctgaacttcaaatatggacaataaaataagccataacatgcaattgtaactgtaatactaacaaattgtacttttttttcccttcttttatgttagatgcttttaataagttcaaatatgagaacggcaagtttaacgttagtgatacgaaagggatgataagtttatacgaagctactcaatttagaataaatggtgaaaatattcttgacga

SEQ ID NO: 8510 - DNA, 632 bp, Gossypium hirsutum
ctagcaagtattggcattgttattaatgggatgaaacttgttttggtcctcagcatcatgaattaatggccgaagctttctacttgatggccattgtatttgacaagctggggcaaccagaacagagggaagaagctgcatgttctttcaagaatcacgttatgtctcttgaccatcctcatgacgtggaagatcccatccaatccgataccctcttaaacgcctgagccccgaggagcataattaaagtagggtaagcgggtgttttgcccattcctttttgatgaattaattataaggctgattatatgattgctgaaaattggatggtcttttatttaacacaactgattgaaaaaatatgttgattatatatggtgattaggttattgtgtttggtgaaaattcagtgattttaggcgaggttgatcatagatttgctttgcctttgacagtgattttgtttgaatataaaatgatcaataacttgtaacccgagtaaaatgaaaaattaattataccgactttaatatgggaattaaaattttgttctcccaaaatgatagattaaaaattattttaatttaattaaaagataaaatataaggatggatgatccatgagtccttaat

SEQ ID NO: 8511 - DNA, 572 bp, Gossypium hirsutum
  misc_feature (516)..(519): n is a, c, g, or t
  misc_feature (521)..(522): n is a, c, g, or t
  misc_feature (558)..(560): n is a, c, g, or t
ttcttaatttatattttagcatgactgttcctcaacaattagtccgcatatattatattcttctctccttggattatctgatcttaactgcatttcaagtctattactcttgtcttttggattaattttaaaacaaattttctgtggcttttgatcctattgaatggtggctgtgtatcctgtttattaacagtttagcagtaggatgtataagatgatctgataggataaattcctggtggactggttatgatattacttacttaatccacgggcccaacaataataattaactttcccctttttaggcatggttccccctttatttaacaggcctttataatggaaaggaaaccaaaaggccttttatatggttttatatgtttttaaatttttttaactgtttgtctatggtgatcaaagattgcttcttcattcattcccttaatgatcatgcagtgatattagaggtgtggctgtttctggtgttgagggagagcctgtgagccttactgnnnnanntacagaagcaatagctgctggttttgctgcatggtnnnagataagaaaaa

SEQ ID NO: 8512 - DNA, 625 bp, Gossypium hirsutum
  misc_feature (597)..(599): n is a, c, g, or t
cgcgctcgtcgaattcgcgttgttctgcaagaaatctcgtttgcagaaaccagatcggacgctgccgccgcgtttacacgtacctttagaggaggaaaacgatgccggtgcactaggaggaaccctaacgccagcggattccaccagattcatggtcatcgtcgctgttgagatttcttggaactataaataataaattaaaaaccaaaaggagctgaagaaattcttcaggattcaaacaaacagacagccggtagaatcggaagagattgaaacaaaacccgccttatataaaggcgctcaaagcatgaaaattccgtgaaagattaagattagggttttatgtgaaattacaaaaacaggtcttcatattaatgaccgttaaggcggcgttgctggaaatgaataaggggtgttttagataattcgatttgaggcggttacggatttgtggggcccgcaacaaacgttcgttcgagatgagagcgatgattattaaacaacaaacttgttggctaagtagcttttctcttcgtttacttatctttgccaaatcagatgttggattcggactttttttgttctttcttcggcccnnnagaaattagacattaaaaagaaaaaa

SEQ ID NO: 8513 - DNA, 208 bp, Gossypium hirsutum
gactcgataaaaacatttaataattgaagtcaactattgaatccaactttaccatgaattcaagcacgagacagacacaattgaagacaatgttattgttttttacttaacaaggaaggcagaaaattgggaggaacttggtccaacccaactggacagcttgacttggttcccacatccatttatcaaagggcaaccccatcttttt

SEQ ID NO: 8514 - DNA, 607 bp, Gossypium hirsutum
  misc_feature (41)..(41): n is a, c, g, or t
  misc_feature (520)..(521): n is a, c, g, or t
  misc_feature (542)..(581): n is a, c, g, or t
  misc_feature (584)..(591): n is a, c, g, or t
  misc_feature (597)..(599): n is a, c, g, or t
gataaggagttcaaattttaaagtcgaccaaagcaagttantatctttcactcttttaacatatatttccaacttcatatataaacatttatttatactcatggtttagaaacagggctgaaaaaactctcttgaaagcagataccattggcggcagccatgggtttatgtgaagaagaaaagatgcctctatctctatgagtagaattattgcagtgggtcacaccttcgctttcatttacttcaacttctcaggtaatattccaacattacagcgttgaattgtttgcaaatttatttacctcatattcccactttctttgatctctccttgtcccaaccacgttggattttgaaccatttggtcttatattacataacatacaaatgaaaagaaaagaaaaacatttgcgattccgaccataaataaataatgttctgttctgtaacgagaaacagccaaagcttccagcacttacaataataataaaagtaatgagggtaaaggcttcaaagtttnnttttttttttttttttaaaannnnnnnnnnnnnnnnnnnnnnnnnnnnnnnnnnnnnnnnaannnnnnnnttaatnnnaaatttaa

SEQ ID NO: 8515 - DNA, 587 bp, Gossypium hirsutum
gaggattgaagttaaaaccccgagcttctatacctaagattcaagcttttcttgttataagtccaagatatgcagtaataatagaagattaatgattgatatcaaaggcccctcatgcccacaactgctgccacccatttaaataataattcaagcatcaaaattttaatattctaagcgtcaaaagccatttagttattcatttaaagatggagtaaaattttcaatatgctaaaaagtaaattatatttcacactaacaatatgctaaaaagtaaattatatttcacactaactttcttttataattttttttatgtgatgaatttgataataattttatattgaatctcgttaatttattagcttaacatctatattatctttttaatcaataaaataaatatatttatattaattatgttgacaataaaaatcttattcttttactatttccatggaacgcatgctttctgtaagtattaattcactcgaatttgttgtttttcgtccttcttggctccttgcgtttaactttggagttttctttggttcatctccttctgtagttgtctagaggagtattgg

SEQ ID NO: 8516 - DNA, 642 bp, Gossypium hirsutum
ctcaatcctctcggtatccttattcacagcaaattggacccctaaaaaaaattaagataatttaatcattatcaatttccaaaatgaactattaggcagctgtatataatttcgactggtataataataatgtagtcctcaaagtttatacattttgtcaatttgatattgatttaacaaatctagcctacaaaaatgtgtataaatgttgagattaaatttgttgaatcttttagaatcgagactaaatcgacaaaatatataagcatcaatggctaaatttgttattatatcaatcaaaattatgcataataacggaagacattaacagggtgattaattgtctttagtgacacattttcaaaattgacaaggactaaattactccgattttcttaaagacaccaatttgctcaatatcgaaattaagaagaattgaagaggtctttttactgattaaattataaaatatattaatataaaaataatctttaataaattagaatatatgaagggtaaaaaattggatgattgggtgaagccgaagtgaattcaggtatgaagacgaaaatgttttactagtgccgcacacttcaaaatcaattatctactcagccaggggaaggaagtgaaacaattacg

SEQ ID NO: 8517 - DNA, 605 bp, Gossypium hirsutum
  misc_feature (62)..(62): n is a, c, g, or t
agcttggaaatagtgactgagatcaatacgggttatttaatgcataagctaatcttatcttnagattaagctaacagagggtgacccacaaaaacttgggtacttaactgattggtccaaacagcttgcctgtttttcaatcttaattgatattcatagttttgaatccatataaccacccctgaatgttcatacaactctatgccgcggttctaatcacaaaaacccttggatggacagttgattttattaacttaaggattaagcaatgcaaaaatgaccatgacacaaataaataaataaaatgctacataatacctcaatcttcctcatctcagcctcagtttttgctttttgatggttctcccatgcttgaattttcatttcttcacgtttgaacctggataaaagtgcctcataactttacaattcaagttgcggatgagtgttaactaaaaacctaccactaaggtttaggcagatttttgtatatgaatattcttgtcaatattccaaaaacataagtattattccataaaaatcctacaataagtgcatccatgggaacttatatcttctgtacatgtccatgcaacgagtgacaa

SEQ ID NO: 8518 - DNA, 625 bp, Gossypium hirsutum
atcccgaagcgagtatactccgaagagaggataaggtttttactgttcacaaatcttatttatttctgtaaaataattctttgattttaatgctattgagaattttatagttgtaattttttctccttttttcttttaagcttgaattaaaagtaaagcctgaaaaagtgaaggtaccgaaggcattgcttagcgtggaggtctccatttaacagacctttttatttctcactcactttgatatttttcttttaatcgtaaaaggaaattgggatttgcatgaatgggtccaatttgcacgtgatagggggcgggagggtgggtggtgtcagcagcccatgtgagtgcattgcctcgtgtcaaaagccagatctgacggtgatcaaatgtagtttcgggtttccatgatgcttcgagttggaccaaatgagataagacttaaaaaggcataggagcgtatacataaataaaaatatatatttgttccaagacattagagtgtgtattattgtggttcttctagcatatagtttcaacgataacgtttgtatgataaataaataaataaaaacccgataacgtgaggccacgtgccgagcggtcacgtgagtgatgttgaagacaa

SEQ ID NO: 8519 - DNA, 651 bp, Gossypium hirsutum
catcgttgctatttagaatcactacatagctttacacacactattcaaatgtgatatgcatacaacagtcctaaatcgagttttaggttcatgaaactatcctgtatgtcaagacctgtatatgagaccctgagagcacctaccgtatatctgagcctgcaattgcaaggtaactcccactatgatcgaaatccactgaaagaaaaaagaaaagaattaaactgctgttgaaagtatagccctttataataaacaactctaatcaaaagaaataaaatatttggacgttcactttcttttgtctttcctaactctaaagtcccacggaaaaaggtgtatgttgggacctagtttacaatgacaaaacagtgaactattacatgataaaataacacaattattgctcattcctaaaaagagttgatatgagacaagcttaacatagaagcatgcaatactgagtccgttgtcaagatattacgtaccagagttagtcggcgtgtcttgatcatataactcaaaagaacggaaattctttaatttacgtagatcccacaacttaacaccatcatgtgcagcagtctattgttaaaaataaataaatcagatcattttcattcacggccatcaacctaatgtgaaaattttggc

SEQ ID NO: 8520 - DNA, 632 bp, Gossypium hirsutum
tttcgagagtatttccttcagatcatcgcagcgacttcggtggtaatctatccacgtgcaaagttgcctaatggcctccctcttctcctctcctaagcctaatataccttcatccttctcttttattgccctctccaacaactcaactttattctccagttgcttcaccgatttcatcagattctccttctcgttttcttccttgtttgccttaatctgtagcttctcaacttgttcccgtaacgtagattctttttccttctgatctttcagttgctcgatcatgttagtcatttcattcataagctgcttcttttcgctctttgtttctccaacccaatgtttagcaatcctcagctcttttgatgtttcttcaacgcagtgtttgtatttactatagcctgcttcgaatttctgattgatagcttcaaatccagtcaaggtattactcacgttccccgagaaatcagtgatcatcctgcgatatgcttcattgttttcagacaatattgtgatcctttcttcaagcattctttgttcttccatgaacttggcttctgcttttctgaaactctcttctttctcagttagtaactgttccgtgactcggagtttttggtttgacaagcgga

SEQ ID NO: 8521 - DNA, 645 bp, Gossypium hirsutum
gatgacgtaccaaggttgtcgataaatggaattgttaaaggtccaattttgtatggtgtaggtgccgcacgttacatagatgaagaactgaaactaagatactcatataaggtgggttttttccctcaatgttatagctttgtgtttacagtcttgtttatatacttgttcattgattggctactctggcttctatgggagatccattacacctaatgttgaataacttagatggctaggttttcaaaattggctgagctggctgatcaccttcttcataggaaaatgctgggttggaaaacattatggctgtgtaaattttcaagctttttgagtgctttagtagatggttttgatggttttcattgcaggatgggacaatgtcatttattcctagcatttcactaccaactaatagggcgtcatttgcattcaagcgacgcttcagtccatcggataaattgaggttagtagttacaactcctttatctttgtaaatattggaatctgtcgtgaatgtgcttaatagctagaggtgccatttcttttgttttgcattctatatatgcggaaacatatttgattcattagctatagagggttgctttttccttgcaatgtcaatttcgattgaggtgttctctt

SEQ ID NO: 8522 - DNA, 637 bp, Gossypium hirsutum
tcagtatatgccttgcagtgtaaagctttccatctacatcaacagtgtgtggatccacaatctgcatgatatttcatcaaattggattcacaatcaacaaccattaaaaacacaaacgcgtttaaacatatcataaagagactatgtggagagaggatcgatcatctacctttccacggccttcgattaatgtgacacccgctttgttgagaatgttcttgtaaatacccgtaagacgctgtaactcggcatttttattagccatcagggtgctccaatcatgctttggttccgtgtcatatttccatccaaaaccattactctcatcaaattcatgagaatattttgatgcgtaaaccattagtttctttggtacacatcctctaagaacgcatctgcaatcacactcgcattgtttttgttacaacttgaagtaaacacagacaaaaaacagtacttgctatactggtgaaaatcaatttatgtaggctttgttgaattcactttagcctttgggttcgcaaaagctttggtcaagcaagttaaccataacttagaacttcaagtaaaaaaaccaaggaaaaaaaaaacccccaaaccccaaaaagaaaattgaaaaaaccccaccccagcccag

SEQ ID NO: 8523 - DNA, 652 bp, Gossypium hirsutum
ttctcttagattattgaatcttgaatgctgaaattgaagaaagcttattaagacggatagactgtgattttgttgattgatgcttaagcgagaagggggctgcttatatttataggatagggatagggatggatcaaaaagccataaactgggggaaaggaacgacaggctatctgctctagctcatggtttttggagacgatggttttgtttgttttgggcaggtgggttggacctacttgtagttatcgttatgaccccaaataggtgagggcaatgaatgggatttaggataataattcaatcctgagatgattaaagatggtccaggggcacaccatttattctaaataattaaatagccaataaggagtatgggagtacaaaagtccaaaccacctgttttctacctcggaatttggaggaaaacaagaggcaaattttagcacatgaccaaactcagtgccacctactgagttcgtcattgaatatttaccgtctcttaggttatgtgctacccaattctctaatccacgttgcagcgggattggctgacacactagtaattcatgcaaattaacttattttattaaagttctatagtatcgaacatatattcgaattttgaaccataaattttccatcaaagtag

SEQ ID NO: 8524 - DNA, 526 bp, Gossypium hirsutum
  misc_feature (441)..(441): n is a, c, g, or t
cgtcgagatgtttggactccggggagagatcattgaaaaatacggttcgattaatgcaagcaacgttggctctatcgttcccgtttatttcaccgaaaacgagtactccaaggacgaagaaaagcttatttttgacctcattcgtttcttctccgcttctccagggaaagatcttgctgatcgggtgtggcttcctctctttcttttcttttttaaattttagtctcgattttgtggacgttttgtttattcattttttttctggttgacttcattttagttctcgatcaggtgaatttggcatataaaagtacgatttagttagggattttcttttttggtactagttttttttttgtttttttactttgaattagcatttttacattaacaaagtccttcggttgatgtttaaattttaaattcaataacgaagaaccngcaacgccaatttataataattaacctgggcaatttcttcttgaacaggaaaaggaggaggggggggccgattctttgtctcttc

SEQ ID NO: 8525 - DNA, 671 bp, Gossypium hirsutum
acaagcacagcttctgaggccactaaaattgtgaacaatgtggaaagttcttgaaacaaagataaagaaaacgagacagaagcagtggtgcagccatgcaggaaccttatccagattatcgatatctcaaaaaattatatgaataaaaaaagacatgcacatatattcacttgactatatatgcattagagacagttacccggtatatggaattagaaatttagcatactacttaaatgagattccaacaattaaaacaaaagaataactcaccatgctcttctacaaatctcagggccttctccaaaaatgttggagctccatcaacatcttccagtgcaagtaaaattggtctgtgtaagacagaggatctcacaggctgtttatcattcactaacaaagagaagaggagagcatcaatatctcatgtatgaggaaaaataaatcaaaagagccaaccaagttagagcctagaaacaacttgacaaacttgtaaagaaaaataacaagataaagaaaggaaaactagaaaaaaggagggtacctagaagaaaaaatggaaggaactaccatctaaggctccggattagtaacatgcttgaacttttaggataatgaacttatgtcatgcattatttctgatgtttaaattaggagcaacatatgaatga

SEQ ID NO: 8526 - DNA, 658 bp, Gossypium hirsutum
atcgagaagactttcgagaagtcgtgcatgggaaagagctagtgaaacagatcaaggagaaggcggttatgatgttattttgatgactgaaattccatacccgatgtcatcattgaagaaattatacgcactgattaagaaggttagtttcttaatttcgcataaggaaagaagaaaacctttgtatttatcatgtccttgttagtaaaagtatcatggaggcctttatactaggagtcagattgcattttatcccctttactcaaaaaatgggcaaattagtctttatacgatagatgaaagagcaaactggtcatttctattaaaaaattcatccatttctattgttaaaaactagtgttgttgatgaaattactagacagttacatgtacctcatgctaacgtacaaagactagttttaaataatagaaatggatgaaatttttaacaaaaggattaaattgctcttcaatctagtgtcaaagactaaatttgccaatttttgagtaaagggacaaaatacaatccgacttctagcacaatggcatccatagtacttttactctccctgtctgtttataaacaatgcaattgaagcaacattggcatcccgaaaaactcatgatttgaagtaagggtgtatatgtatcgagttgt

SEQ ID NO: 8527 - DNA, 630 bp, Gossypium hirsutum
ttggtcagagttgaaggaagctttgatgaattaaatttgtgggtctttttgactaaaataatttagatgatacaattaagattagatcaagaactggaaaattgaggaaaaaagggctttatgtataatgaagaacaaaatagaagaatgacctgaaatctgtatcatcaaagattttctgcactttccagcgcttaatgggccacttggagagcacggcgttgccatattcaggtgcccaactctcagcaaatacgtagttcatccccaaagcagcagctaaatcagacaatggcttcattgctttttcttcctcagctttcacatcttgcagagctaatatatcagcatctaactccctcaagacttcaagcactgtctttctgcttctataactctcgcaaccttctattccgtttcccatattcgtcggaaaactcactactgatctcaacggggctttacctctccaagctttacccgcagcagcactcgaagagccatcctttcccatttccgcaaagctcagttgtcgatttcgcaataaagaaatctcattatctggcaaattgatagacacccttaacttggatttcacgaattttttctgctgggagagattctctttgt

SEQ ID NO: 8528 - DNA, 591 bp, Gossypium hirsutum
  misc_feature (552)..(552): n is a, c, g, or t
agcatctggctgaaaatgaaaagcatgccagagaaactgcaagcaagacctggaaatggatgaaaatcaatgaagtaattaaaccctaccactctaaggcagctcaatttatatagcataagtcaagatagaaggtgagaatatgttaacagacctccaatttctgtaattttcaacttctcatgcaaaaaaattctagccatgattgaagccattattggagttgtaaagcttaataaaatagccagagagaaaggtatcctttgaatgctgaaaacaaaattgagcaaaccagttacgactaccagattatcttatttttgttaacaatgaaaaatcttacttgccatagcaagagcaatttcaagaattgctagtttaaaataactagagaaattaaaaagaagcaaaacctagttttggaaactaatgtttaaaccattatcgacagtgggttatactagcaaacgggttaattcatgtttagcttggtaatagtctacatcctatgccaatttgatggcctaaatttccaagttcacgtaaagcagngaatcaaataaataaaataaaaactacggttttgcaggc

SEQ ID NO: 8529 - DNA, 579 bp, Gossypium hirsutum
cattacttgatatctaaggtacttgtaatctgtatgacccacaaagagtgacttggtagtgaaagcataaggttggacatccacatcagccctcgtgattttgttcataaatgaactcttaccaacattagggtacccacaaatcaacatggttcgagtattaggatcaatagatggcaaccttgccatatgttgcctaatctgctcaaggtaggctagactaggaccaatcctctttatgacagtacacatacgaccaagtgcagcaacctttagcgacttgcaccgacatagcaagtcaccatactttaatagcttgacataatctttagcaatcttgctaatgagattcctagcagtatttatctggccaagagcaagcttgtagtgatccttgttatagagaacatgaagaagatcaccataaaatggattggatatcatcaaggcaagggaactcatcaattattgtcgaaagcttctcatgaaaattctgctgggtgtatttaactttacgcatatagaactggcggagacgggaaatcgcataccctttgtggaaaacagtggagttgccgt

SEQ ID NO: 8530 - DNA, 468 bp, Gossypium hirsutum
gttgacctgacactggtacgcttaagcgccggatagctttagccgctgtagataagatatgtttgagtgaactaagcgataatttctttgcaattatcgttccgacggagtatgatttgctaatggctagtactcgcaaaactgaaattgttaccgtcttggtcgatgctaccaagaatgcttctgaatatgaactcgaggtggatttttcaaataggtattagttatcgattcaactgccattggcatgtttcagtttgtttgttgctttgattcaatctttaagctttgttttgaactaacatgattgtgcccaatgtagataaaatttattaacattatgcaaacacctttgtattctagtataactggttgattggggctttcaattcggggtcttttatttgttatttcattcatttcttgatatgtgcattggtatctccaagcttccatgtctatgaatca

SEQ ID NO: 8531 - DNA, 663 bp, Gossypium hirsutum
gaaacaacggttcttcaggggatgatgagaaggctgagccttggatgacatcttcgagtccaatgaagaatctcccagctcaggcttgtcctgtttctcttagagatgctaggtctttagtcacttcgggcagtgattctaatagtgtaataatggtctttcatcatcttcatcaagttctccatgcacttctccttcatggtgattagggtttctgtcaaagctcaaaactagccagggaatctttattttaagctttttgtaccgttttctcaaatgttttcaaaattctaacaaccattggtaactaaaattcctactttctcattggtttttttatttagcagaaaggttctcttggattcatttgtttgttgactgtgttgtggtgttcttgaaaaagctgttgacagcagaaaacaaagcttaatggttttgtttctttttcttctttggcattccaataatgcatctgacattgcaaaaagaagttagaaatttagtagttgtttttttttctttttattcaaacagatatattatttccattcctgtttatggatattagttattaccaaatcatcatggctatgactaaagtttgctgctattattagtcatttcttttttctttgtaatcttacacaaccctaatccaacggg

SEQ ID NO: 8532 - DNA, 645 bp, Gossypium hirsutum
gatttctttctataccaattgaaaatattccctcttttacttgcgttttcatttttactgatgatagttatatgggttcattttaactattttattccacgagtttttgaaccaactgcattttgatttgcagaacattcccaagtcgcacaggggagttatctttcatgcgcatttatggtcaacgtgcacaagtctctggttctgttattattgatggtaatttaactatctctcaagtctcagttaaccccactgattctgactaactggattttaacaaagttaaacacctgatactgtgggctgttcttgattttttgtcttgtcctccctttggaaacttgaaaaaggtggttccggctattgcaagtttgggtggagcaagtatgcttgtccatctgggcggtctgcaacttttctggtaagcttgtaaggttttacaaagacggattttctagatgtgggaaactccattctgttgttagatatgtcttcatctttccttatatatgtatacgacgtgatgttaatttaaaatttgtctttgacatcaatgtgtcaggagtttggtaatatcgaatctccaatgtatgctagacttcgacatttttttggcactatttatagcaggtttgttgtatt

SEQ ID NO: 8533 - DNA, 464 bp, Gossypium hirsutum
tccaggaatggcaagactagatacaaggattctgcaccggcgttcttctaacgggacggatttttttgggtaaatatttgcttcggttttgctctactctgccttttaaacttttttttacccagaaatattcagtgcatcttttaatatatataatgtgtactaaaaacacatatacacactaaattatagtacacgtgcaatgtttgtgcgttcacaaaatgttgaatatagtatttgtactttaaaaatattcaatgtgatatttaaattatcaataagtgttttattattgtacttgtacttttataacatgtctaatatggtagcggtactttgaaatgtccaatgtggttcctgaactatcaatatgtttttgttatggtagctaatgttaacaacgttaatgaattgttaaatcaatcaataaaaatttaatagtaaaattctttttattaatcatc

SEQ ID NO: 8534 - DNA, 620 bp, Gossypium hirsutum
  misc_feature (612)..(614): n is a, c, g, or t
ggctttattgccgctctttgccgacttttcttctgataatgattctatttcccaccctaaaatcattgttttaagcagtgattcagcaagcaactacagcatggctgttgaggtatgatcataattactttatcccatgacatgtggtttaagtttataggtggacgtagtttttgaccttctcattagtttaatccattccacatatatttcgtgttccccagaaaattgctcttaacttaagatatcccagtggggtggtgaagcatgtagctgttcatggagatgttgatggtgttctgagcatgactgaccttgtgatatatggctcgtttcttgaggagccttcatttccagaaattttgataaaagccatgagccatgggaaaccaatcatagcaccagatctctccaatataaggaaatatgtaagcttctaatgctcttcccagttcatccatattctggtttatgaggcaaattactgactttctgttggaaataacaattaggtagataacagggtaaacggttatcttttccctaaggagaatattagtgttctgacacagatcatattgcaaatgatatccaaaggaaaattgtcaccannngctcta

SEQ ID NO: 8535 - DNA, 636 bp, Gossypium hirsutum
gttggtgattcattatcaagcttttgaaatagaaaaacagaataatggagtgagaggggaagctttattgacaatcccgaaggcatcttctctcatttcaacttcttttttgtttttacttttaggaaaaggccccttagatggataaatattctccactaccactcccactccatttataaacaaattgatcagttttaagcaattgtcgggtcggctttttattctgaaacaggactttgaccatcttctgtcttacaagttttatcacatgattttttatgatccataaaataactcgaaagaatttcaagggtcatctcccacaaagaataaatgtgctttaagtttctttttagaacaaatctttagaattcctgtgggagcagttgtcagggaatcgaccaacacccagaatctaacttaataattgaactaataattccttaaaaggagcccaacatcagtggcttttctcgcaaaagttacgacacatctctttccaagttttttatatagaaaatcacagctcaaagatacactaaacttaatttccccccattcaaacatgaacaaaccaacaaattatagtgagtcaggtacaatattttatttgctactgataacatcaagaat

SEQ ID NO: 8536 - DNA, 557 bp, Gossypium hirsutum
gcatacaaaggtgcttgggtgtaccccaccaagaatcttcatggagcaccagtgtaccactaccatacctactaaacatgaaaactctcatttatatcagtgatagcgtatgccatcaaatacaaaaaatgaaggcggcatgcgtatgatttaattaattctatcaactcccgccattgcttgatagatctgcctgttgcttggtcagacaaaccagcctggtatactcactcccctatctgtatcttccgtcagtaattaaaatgaatgagaaacaaacgagtttgcttgaggaattttatgtatgaaataaatccctttgtatccttttctgccggctgcttggtgtgcgtccatccctctccattcttacacatgcttgtgaataaattttttgtctgtcactttcattttattttgtaatttcataacaaataactcttttatttaataaatgaggctaccctacacaaaaaaaactaaaattcttgtttttcttatttactaacataaacattgatgcattctctctctatccaagcaaccgtcaatcagtc

SEQ ID NO: 8537 - DNA, 627 bp, Gossypium hirsutum
tatgttggtcatttgtcttcaaggacaagatcacgtgatctagaggacatgtttagcagatatgggaggtaatcaagtcttttttcattgttgagtaatttgtgaaatttgtagttattgcaattagctctgattggtttaccggttgcattttttttatttattccatttgggagttatattcattttttatgtaatatggccattcagataggttcagggtgggagaaaatagagtccttgttttagtgcttgacatctggtctttcttatatgagcgagaatgttgtgaccctccacgtgtctgtgtggttaacttgaatgatcttgttgaaggctgttggcttttgcctaacctggaggtctatggtgagagggtgaccttggtggatttggcgtgtctttctatagtgttattgcgtgtttttagcaaaatggcaacaatctcaaaagtggtgtttttggttcatctgtgaggggcgaactatcaacccttcaataattgtgtcatgatggccttactgtttctggcacccgtttacgcagagtacgtgatgtggatatgaagcgtgactatgcatttgttgtacgtatttctttactctttttgtttaatcccgaccgaca

SEQ ID NO: 8538 - DNA, 367 bp, Gossypium hirsutum
tgctctgtcgagacgatttccccctgtcactttggccaccatgtatctactggacaacccatcgtgctttgcaacaattaacagttcgttccttcctttatatgcttttaacttactattattgcttttaattaaattaatatatacttaagcatttatatttctttttgctaggtgaatattttagataattggagggattatttatataatttttaataatataacctgagttttggggttatgttatatattcggattttatatgatagtacatgaatatatgcaattgttgtaggtcttaattataaaattagccccaatcaatatcgtttttctcacttagttatttagaaagttttttttt

SEQ ID NO: 8539 - DNA, 557 bp, Gossypium hirsutum
tcatttgttgattggcgtttcttgtatcaagtttgaacttctttacttcttgtagcaattcgttttgttttgagcgacctcttccagaatctgcgcagtgaagataggcatgcactactacatgtatgtttcacaattaatttcttcagtttgaacttgttttgatttgctttttaatttgatcacatgtctatcaaacaggaaggtgcaggacaccaggttttgtctgcatttgtggagattgtttttgataattctgacaatcgtatcccggtaattcttacttcccactttgtcacttttcttttcgttggcaggcggaagttgtttggaaccaggttttttgcctttttatatttgtggttttcttttcttttttcctttttttatttaaaatgttgttaaatgtttattttggttgttagaaaatttattgattaattttctttttggtatcttataaaaaagttcggcgaagttgaatcattctgatatgaatgttcttttgcttttctctaaatgatgtgaccattttatttattttttgccatcattca

SEQ ID NO: 8540 - DNA, 576 bp, Gossypium hirsutum
  misc_feature (56)..(57): n is a, c, g, or t
  misc_feature (59)..(59): n is a, c, g, or t
gaaaaaatgggcttgtgattggttgcattgcatgttcactcctttctttgtttaanngncgttaataattctcagcttacttaccaagaataattaaaaaaagaagaagaagaagaaaaagataaaaaagcaaaacaaaacaaaaatgtaatctctaatgggacgtagatatatatagccttaaaagacttacctcttttttagtatttttggcttctctatttctcacccaacacattagggtagttgattcatgctttctttgggaagtggaagatttaattaaggttttatactttcaattaatagatttatatattcattaaaaaattgaagtaacttttaaaaagtttaattagtagtatttatgtcatcaaatactgagaattgaacttagaatatttctggagaaatcatatattaaataataattttgtaattttgttaacatataaatttcttgattaataataaaaaatatatattcaatattaattaaataagaatacatcattaaaaattaaattatttgatgcatgaatttaataaaccaaactgatattaagcaaaagatta

SEQ ID NO: 8541 - DNA, 503 bp, Gossypium hirsutum
ctgtcaaaaggatattcagcaagataaaatgagagaacacaagtaaacaatacaacatgaatgtcaggtgcagtactgagttaaaaaatacaattccaacgatagttcagcaataaccttcgcataagcaccatcataccaagatgcctcaccccaaaaagatgataaacttaatcacaatgcacacgagtgcaatgatgagccagctaacaatgctccagaaagataaaatgtaatgatgcagtttaccacatgatcttgatgcaaaaatcacctataccctgagtacaatggtgcctgcaaggaagtgtacctgagctgagcgacaagcaagcagatgaggagtcaagcccaaggctctaagttcccggacactatgctgtgtaggcttagttttctgcacccgtgagacgagagaattatctccaccattaaagttgacgaagtaaaatttcaaggagctggattatttcagcttaaaaatatgattgacgatcaacgtc

SEQ ID NO: 8542 - DNA, 528 bp, Gossypium hirsutum
atgattatgtggaacgaaatcaggttttgtttttcattgcaagaaatagttttggggtgctaatgggatctgcctctttattctaattcatttgtactttatttttatgagtgcagtatttatatgctctttgttgatcattatgtgggttttcatttctatatatttttctaattatttcttaggaggactttgatgaatttgatgatgttgatgagctctacagctcattacctctagacaaggtggagtctcttgaagatctagttgcaattggcccactttccaaggtaaagtttttggttttgttgcttttgcttgaagattcttgtatcatttcatagaaattgcaatccaaatcagttttctcttgacattgtttctcactaagatatgctatttactagcatattgtttttagaaagttgtatgtgaacaacaatggggagtattgataaacggaaaaagcttgtttggctgctgcctggaagcagtgcactgcattgacttgtttctgtggtgttcata

SEQ ID NO: 8543 - DNA, 365 bp, Gossypium hirsutum
tctcgatgccagtcatccctgcgttcggtaccctgaagtacgcgctgtcttattatccttgcgctccttgggtaacctcagggagccaccataccacacatggcatccttcttccatggacctcctcgattggttgggactattctttggtttccaacacgataacgtaaagaaccaaagggaacaccttgttctccacttggctaatgcccatatgcgcctctctatgccaccggttgacaacaatggaaccttccaagccatagtcctccgcgaattccggcgtaagctactcgaaaaatacactaactggtgttcttacctggggaaggcatccaacgttgacaacttggagtctgatactc

SEQ ID NO: 8544 - DNA, 607 bp, Gossypium hirsutum
  misc_feature (544)..(549): n is a, c, g, or t
agggatgatcatgacagggatagaggcagagagagggataggagaaggcgaatgaattgagatgtgtggtgttagttgtttatggtaatggttggtctattggtgacttatgatctgggtaggatggatttgagaccagtagtagatgccttggtttgtgttggaggctgcactgcactgcactccctatcgcaaaacttggtttcaaacaatgctaagacgcacaagttccatctgtgactgttgactgacaacaaaccccatgaggaagtctggttctctttgaaccatattgtagtatttttgtttttgttttttctttgggaaaagattccttcactttgatgtatttgattatttgataatgcattttgcaaaagcaaagttaatttattggctatatttttgtctttattctttcaagtgaagttagtaacccgttgttttttttccttctttgaattgtggttgatcctttccatggtgggatcagtttaaaattattattatcggattgaaacatataaataatatggaggggttnnnnnnaatgattgaggacagtcttctacgatgtacacgcatgcaaggctggagagcgctggag

SEQ ID NO: 8545 - DNA, 616 bp, Gossypium hirsutum
  misc_feature (435)..(435): n is a, c, g, or t
  misc_feature (443)..(443): n is a, c, g, or t
  misc_feature (448)..(448): n is a, c, g, or t
  misc_feature (454)..(454): n is a, c, g, or t
  misc_feature (456)..(457): n is a, c, g, or t
  misc_feature (460)..(460): n is a, c, g, or t
  misc_feature (480)..(480): n is a, c, g, or t
  misc_feature (482)..(482): n is a, c, g, or t
  misc_feature (488)..(489): n is a, c, g, or t
  misc_feature (498)..(499): n is a, c, g, or t
  misc_feature (502)..(502): n is a, c, g, or t
  misc_feature (505)..(505): n is a, c, g, or t
  misc_feature (508)..(508): n is a, c, g, or t
  misc_feature (513)..(513): n is a, c, g, or t
  misc_feature (515)..(516): n is a, c, g, or t
  misc_feature (518)..(518): n is a, c, g, or t
  misc_feature (521)..(521): n is a, c, g, or t
  misc_feature (525)..(525): n is a, c, g, or t
  misc_feature (529)..(529): n is a, c, g, or t
  misc_feature (532)..(536): n is a, c, g, or t
  misc_feature (545)..(546): n is a, c, g, or t
  misc_feature (548)..(561): n is a, c, g, or t
  misc_feature (564)..(564): n is a, c, g, or t
  misc_feature (581)..(594): n is a, c, g, or t
  misc_feature (597)..(597): n is a, c, g, or t
  misc_feature (599)..(601): n is a, c, g, or t
cgagcagcttttagaagttttgtatgagtgcgagaaggatatgatggcacaagcgtttattgaaacgccgttggcggcggaggtcattgatgtcaagattcccgtggatgaaaactggaatcaagaaaatgaaatgtcgtgtgatgtgccgttctcgaaaagtgttagctcaggtagtttaagctcgctggaatggatgcaacaggctgctatcaagcctaatttccttgattttaccggaatggatttcagttctgtttacggaatgaggagagcgtttagcgaaggagatatgaaggtcagccttaattgttttcgcatcgttttcttattacaatcataaaaacctacctgaatcaagtgatagtgaaactttagttgatcaccgtgcatgtattgtctttgtaaaaccgtccagtagccaaaaaaaaaaanatgtttcnggccntttccncnnganggggttggtttttaaaaccnanttttannaaaaactcnnggnaanggnaacgngnncntcntccnctcnccnnnnnaaaaacctnnannnnnnnnnnnnnnttntaaaaaaaaaaaaaggnnnnnnnnnnnnnnaancnnnaaaaaaaaaaaaaaa

SEQ ID NO: 8546 - DNA, 356 bp, Gossypium hirsutum
ctcattagatttatgtcagagaaagaaaaccattgaattttgaaggcaaaagttttttaaaagaagaagaaatctgaaaatgaagcagtttaaagaagtcaaccttccacttccctttatttcgcttcttaataactcttacccttttttccttgtaagtcgtcactactttgacaataatttattttttaattgttatatatgttcgacatttaaattagtcaaaaaaaaattacgagatgtgatatgatacttacttcattcattaattataaggttagtttataaaaataaaacacattttataattaattaattattttttaaaaaaagactcgaattgtttccgaattagt

SEQ ID NO: 8547 - DNA, 617 bp, Gossypium hirsutum
tcatgatagtttcaagcatgggaggaaaaggaaataaaataaaaataacaaatggaaaccagaaccccacaatttggtcggagttgaaggtgtttggcccgacaaagtttgcaccaccttggggggtttttcctcggagctcctttggctgggcttcattggatctctctctctatcacaaatttctgtcctttttcttggaatagtaagctaagttatatggatgataaattaaaatgaattggccataactctttaagtcctaaacaatctctttaatgggggaaatgatggccaaaacagtgtattattcattccttggagaaaatataaagaaattgcaatgatgagaaccattacatagttagttcacaattgtatctacctgataacatagctattgaattccctatttaatgaaaaaagatgatgatgacgatgatgatgatgatgaaatcaaatctaagcatcttagctttgacaatctagctccaacgcaaattatttttatatttcactactaaatttcttttgtgaggtgtgatgctcaaaatttagtacaaaattaattattaattatgcacaactttagaaagatgtgagaagaagtaaccaac

SEQ ID NO: 8548 - DNA, 370 bp, Gossypium hirsutum
tgtgtcattcattaacttttgtttcttttttctcaggtttgagtttttgttggatgcatggtccaggattagctgaattcatgcatagtgacgacttgtttgagctaactgctgatcttaaagtgggcattctatcattattttgttctatttgtattttgttagatttctggtgtaatatgataagtgcggtattttgtttgattggtattgataaactttttaattggtgggatatatatttatatcataaatgttattcttcttttcaatattttgaaaatgaattttaatttttttatatttttcatgactttttataaattttttttaaattttatgacctttaacggcgtttagcgtttattat

SEQ ID NO: 8549 - DNA, 555 bp, Gossypium hirsutum
aaggaactatcagaggttaaaaggcacagcagcctaggcaaaagctgtggagttcttctgattcataggtctcttagacccaaaacaggcagctgttatccgtagctaatacaaccccacaatcttcaaaatagtgttatattagtggaatgatttgaagggggagggaagagagatgtgtccttgcttgtgaggagaagcaacactgcaataggctagaagggaatagggttttcttgaagttgagttgtcacttgaggagtgaaattggttaagcttttaagcttcttctttttttaaaccatatgacaagaaaagagaatcatttgcttgtgaagcaatatttccatgccatggcaagataaggaggagagttgagtggagaaaaatccaagaaatactagaggttgttaagcctcttttcgtttttttgactttgggaagtgggatttagtattttccaggcatttcccacaccactttatattcccccaccattcattcctctctcacatgccatcataattagtcaatcaacatcatcaccatttgagg

SEQ ID NO: 8550 - DNA, 447 bp, Gossypium hirsutum
  misc_feature (435)..(436): n is a, c, g, or t
tgctctacttttgcctgaacagtaaaaagacctataactattgccaatgcttactgctctgcatatgaccccggaaaattatcctttttatgattgatcatgacctttccggttaagagaagactcgaatcataatctttagattttgtaatggcgtatgatttagttagctgcatgacctcaaccggaaaccaaccatatcaaggttcagtctttttcactgagctttttcacacacaatataattacttttgatttttgagtatgtgatcacgaaagggattttgaatacctcgattctccgcatttccgcttctagttttgctctctgctgactctcccatgcttgaatttttatctcctcgcgcttatacctgataatttgaaatatgcaatgagataaaggaacttgatggaaaatagtctgagaatacnngcgcgtgcgtg

SEQ ID NO: 8551 - DNA, 639 bp, Gossypium hirsutum
gtcgctgattctaatgggaatgtaatacattttattctttacatgctgtttttatctttcaccaagacaaatgatatgttggatgttggctggatgaaaatttagttcttttatttgtaaaaagtgcttaaagattcaacaagttcttagttaactaggtgttgcatttttaccaaatacaaatgaaagttaggggtggcatcttctggtctatcatgatttctttctgcaaccaagcatttggctcaacttgtgggttaataattccccattcaaagagtgggattctattccccattaccccaaaccaagagaaaaataattgctttccctaatttttatagttacatatttctatgacatttaggagtagggaactttatgtttttctatctgtgtccctcatcccttcccctcctttttcttcttatttgatcttgtgttgtaagatatgtgtataaactgtggttcttgtttggaatagttactgtctgtttgatcaaaatgcattcatgggatgcatacaagtgtttatacagacacaactttggagatcattgataggaagtttccctttctagagagaagttaatagaatttcttaactactatttgcagacatgttgaggctggatatat

SEQ ID NO: 8552 - DNA, 596 bp, Gossypium hirsutum
tcattattatgatatagaaataaaatcttttaagagaagtgtaacacaatagacatatgttcgaaattaagattgtgaatgcttatggtgacataaatgatttttttttatatatttatatagttcaggaataatctataatctctggtttgataaaaaaaaattttaagatctataaaaaaatttatgtgtaccttggaagccagaaaacaaaacaaagatgtgagtatgacaatgtttaaaataggaagatgtcattggacttatttgagcaatggacatggtttcaatcatacttataaaataagtagtaatatctataataaagaggtatatatgtgtggtgttatagccacttgatagcacaattattgatactctaatatgactatgttcttaaaataaatgcagttttttaagaaaaataataatgataactcctgtctctctattttaattaaagtctaataaaaataatatagtaaggttaaaatatctaattcaaatcaatatcaaatcaagcaaatatacctctatacggattccacttttaataataattttaaatttattttgatattaatttatagttccat

SEQ ID NO: 8553 - DNA, 650 bp, Gossypium hirsutum
ggagaaaagaaaccatgattcagaaagagtttattacaaaaaaaaatcatttgtataaacatgcaaccatgtcaaaattataccagctctccagcaagttcatataaggattcatctagtgttgcctgcacaggatttgataatgctttcaagagtcttgaggtaattaaaggcaaaataaaggtaaacagaaagagaaacaattacatataaaactattcgcatttagcaaagagtacctgcaataagcgcagagcacaatactgactaacagcaggaccctcaagtttggcaattacctgcaccatttataaaaggaatgaattgatcaaaccatagaacaggagatgatgacttctgtactcttatgtatgaattgaaaccttgcatattgttttctgaccaggaactcacatacaataagagagaatgtgttcctcattctcatgcatagccttccaactacatctaatgactaatgactaatgactaatgactaatgaggaagagatacatgattcttagaagataaacactcataaatttacttggtaaaggttcaacacaactactaaactgtataaccacccaaagaataatataaaaacaggctatatacatgggttaaaaatagtttcaaccatctcaaa

SEQ ID NO: 8554 - DNA, 618 bp, Gossypium hirsutum
  misc_feature (50)..(50): n is a, c, g, or t
  misc_feature (68)..(68): n is a, c, g, or t
  misc_feature (220)..(220): n is a, c, g, or t
aagaggttcgaacgagggtccttgtaaagcatcttcgcaacacaataggnggcatgccttttggtgtncactttccgcataaatttgcagggtctgctcctagtccaaaggcaggaagctctcaggctggtgattctaagaaacaagagaaagtaggtgttagagtgcagcagactaaggagggttttacaggtcagaaagcagatgagttttcaaatgngagggacagaaagagaggtattgaaatgcctaagcctaatttgccaaagcccaagaaatcaggaacttcaaaaaatgccaagaagagaacaaggaaatcagtagtggagtctgatgaaagttgtgagactgctagtggaattaaagttgaaaatgtggccagtcaggaagattgcagtaataatactggggtgaattcaaatgtgaatggaggccatccttctaggagatcttcaaggcaaaaacaacctgtttcttatgaggagaagttggcagatgatgatgatgatcttgaaagcccttcttataaaaaatctaaggtaacggcagcacccaatgctaatgcagaaaaggtgaataatgaggtaatgaaaaaggaaaattctggtggctgtactg

SEQ ID NO: 8555 - DNA, 666 bp, Gossypium hirsutum
cttgtctctgttttataacataacagtaagacattactgacatgaattactatttttctgttgcttaaacttattaaaggtgtgagataattaagagggctccaatttgtggttatattttactgctagaggtatttattttgacaacgcagtaatttgtgtgcaagtgctcctcaagtatgcttatctgtgtgtgtctctctctatacatgtatatctgtgtaagttctgcacatatggcttgagtaatactatggtattataagtttatgcaatgcatgggtgataaaatggtatgtcaacagctaagcttctctataataattgaggttctctgaaggaagcctgtcttgatacatgttctcttatacatcccagtctttcagttctcataccttaaaagcatataataagatgaaattctactggaatcacctataaaacatttccttcttgcttgataactttaacttgtataatggaactgtaatggtttttgagaatctatatcttgatcgattattgcagacaatattactgttccaattttctggcttctttttgtttctctagagccaaatgtcatttgatacactgtgtttacaagtccttgcacgttacaggtcgggccaggttctttacttcaggctccactggatgatgatg

SEQ ID NO: 8556 - DNA, 645 bp, Gossypium hirsutum
ttcaggttggatccacacaaaaggttagtacatatgaaaatgaaagatataatatattcttttttattggcatttagcgattctattttcagtcttaactgttcattttgatatggattacccaaactagtgtatttggttagtcttctttatattttgatttctacttcagaaatatataattaaagcaaatggattgataaattaatttgcaagtaagcattcatcccgtgcaccagcacccctgttgcaaaaatttctaattattgtttgctgtggttgcagattttagagagattggactttttggatgaaacaaagaagttattttgtgatggggggagttttcatgggcttacacctttggaaattgaagcttgcaatcaagacgatagttttgcggcactaagatcatgtggaaatatttacaatgagaatctggcaactgaactgtatggcttccctagagagccaaaagggtggccatgttccttaaaaaatgtcactgaatcctccattttcatgcgcgagattcgagacccaagtgtgaactcggtggtacagaacttatctcatctcagaaatcaacggcaaacaagtaatgcagaagctctatttttatcgtccggtaagatctctcctgtt

SEQ ID NO: 8557 - DNA, 631 bp, Gossypium hirsutum
tggtgcagctgctggtgcccaggttgtagggataacttcattggttggaccttatggacgatacaaaggtgacactggagaatggccacgctccatgtactcagctccaagagatgagatgtcatcaaaagaattttctcttcgtttggtttgtccaactgctaatattggaggggtgattggcaaaggtggtgctataatcaactagatcaggcaggaatcaggtgcagccatcaaagtagatagctcagctacagatggagatgattgcttaataactatatcagctaaggaggtcagcttttcatctttgctatgtttatttgtctatgctctgccttatgctaagctttgacggggttcctaatcttctgctgtattagttctttgaggataggtattcacctgctaacgaagctgctgcacggttgcaacctagatgcagtgagaaggttgaaggagactctggaattgtatcattcacaacccgcttacttgtgccaacctcacgtattggttgccttattggtaaaggaggagctattgtaacggagatgagaaggatcacaaaagctaatatccgtatcctgtcaaaggagaatcttccaaaaattgcatctgaagatgatga

SEQ ID NO: 8558 - DNA, 638 bp, Gossypium hirsutum
gctggccttcctcaggcccttagacccacgttctgatggatctagaggcactttgtgcatgcatgtttgaagtggcacattcctgtcgataagaaacaaaacgaatggctctttggatagctatattgcaagagatccatatttattctaaagtaccagtggaaagagcaacgagattctttggataagtaatatgcgttttgttcctacaggtcaatcagatagttgtgctgagtttagaaaaagagtatttccgtagcttactcaaagaatgcatgttatcttgtttactgttcagtggatatttctggtgtcatcatataaagtagtgctagaatagttttagccggaatatagtttttacatccaagttagagggaaaaaaaagtattaccaagccgcgtttggatcatcggactcgggacatagtggaggttcttgttgtgacctttgctcatagcactcattagatgtaggctttctaaatgttgctatggccaccttatttattggttctttagaagttttgtttacaagctcccagcacatagcttttgtttgttcaatcatagctgcacaaaatccacacataaattaagcagcagtaagacacaaaatagttctcatacaaggccaaa

SEQ ID NO: 8559 - DNA, 606 bp, Gossypium hirsutum
  misc_feature (588)..(588): n is a, c, g, or t
tctggttttttgtcaggtcaactggccaatcaggatatatatcaccatccttaaaaaagtcggatactccatcatctcccccctcgggaatttctccgcaatcagcaattataacctcttgagtggggtaatcaccatcctcagtagcaacaagctcgatagaacgaacaacacccattccttttataaccttcccaaaaaccacatgttttccatcgagatgagatgatcgagtagttgtaatgaagaattgagacccattggtgttaggccccatattagccatcgataacattccttttctttcatgttttaactcgaaattttcatcttcaaatttcaagccataaatggattctcccccagttccatcaccagctgatatatccccaccttgtatcataaaacctcggataatgcgatgaaagcgcacaccctattaaattgaaattgcattatattagaaaaaggaaatcactacaaagtttcttatataagtaaaggaaactatttggaagtgcatagtcatcattgtcggcagattaatttcataatagcagaatacaagaaaaccataacattttgcanatgcatcaaattctaacg

SEQ ID NO: 8560 - DNA, 444 bp, Gossypium hirsutum
tgtcttttctttttgtttggtttcttttcagtcctgtagtgttcttgaatgcttgttttggatgtgttactaatgcctatcaagcttaaatacactcgaaatgattgatgcagggttattgcaactgttatggctcttccaagtcctgaaacgtcaggaaggttgcttttgctccttaattcgattggtgaggtcactgagacatccagttcaaaacgggccaaaaagaagtctagttataatgtgggatcattggttccagcaaaggtgaaaaattagtgtttgatcttttagaactttgtttttcccttttttgggcttgtttgattcaaatacatctattgaaaactttggctaaatgctccataggttacgaaaataaagccccttgagttgaaattaaaatttggaattggtttcgaaactggggttcaaataaaaaaa

SEQ ID NO: 8561 - DNA, 521 bp, Gossypium hirsutum
gactatgtttctactccgtccccttcatcgaaaaacaaagtacgacccaatgcttctattctgtccccttctccatcaaaacacaaagtacaatccaatgcttctactgcttctacttcacgtcctcgttcgagttcacatagtcaacctgcaatactagccggagccatagggggtactatatgtcttctaatattaatagccattacctatatctttaatacgtataaagtatccaccgtgaagccatggagaacggggttaagcggacaacttcaaaaagcatttgtgaccggtaattattcttcttgttttctattgcgaaactaaacgtcctcaactgaacttcaaaacattctaattgatttaggtgtaccaaagctgaaaagatcggagctggaagcagcctgtgaggatttcagcaatgtaattgattcatcaacgatcggtaccgtttacaaagggacattgtctaatggggttgaaatagcagtggtctctttcccggtgaaatccactaa

SEQ ID NO: 8562 - DNA, 557 bp, Gossypium hirsutum
gtgctacctactgatccatcgttgtgagcaaagtgttggtggatgtgttcaaaatttggtgaagattgagtgatatggcattgcaactcttttatttcttccaaatctttctcatacactattctaacaccacacttcttcaccttaaggctatgaccattgaaaaacacatgaagcccatcacgtttatgatctaagcaatctgttgtctgtaaattattggtttcacagccaccatatttatccttcaaggaaaatggatatactttatcacgcgaccaataacgaagaaaaatgtgatctttcattatgggcttgttgaatcgtttacccaccaactagcctctcatctcaatgtgtcgaggatttctaccatacattaacgctctgaagtcgataaagcccacatcctttgaagcatcattattgacaaaaatgcagcaacaagcaactccaatccattcactatcctcttgaaggttgataggtaagggaatcttaataaaggagtcacctttttgttggctaaaccattctgggatttcacttcccggcat

SEQ ID NO: 8563 - DNA, 450 bp, Gossypium hirsutum
  misc_feature (441)..(441): n is a, c, g, or t
tagaaactgattaaaatagtattaataacttgatttacaaacccaaaaaggactcaaacataggtggtcaagtaccttatcattcaatcaccaaattcagaacacatttaagcgacaggaagatccatagaaagtaaacactagagagcttgctatgtaaacaactaactagacagagcatcttaaagaaaaagaaaataaaaataaacaccgctaatcctgcaatagtatgtgtcaaataacctatctattgactcagaatggaagtacatatggaaatgaattttcaagtggttagggtttgccaagggtgtctcttccttctttctattccaatggaatttctttattatcttaaaaatacttgccatggtaaggattaaggaagaagggcgaacaagcacatgaggactgctctgcttgtacaattttttttttttnggggggggg

SEQ ID NO: 8564 - DNA, 640 bp, Gossypium hirsutum
aaaactacctaatggtttaaaagatggtttcggtgctatctatacaaggagtacagggtcgatgaaaagtcacggctcaagttttttaaggtcaacttgccattctaattttcattcctgtctcttgtattgtatatgtagtgatgagaggtttattcttggcgtcacattgctgctaatgttgtaatattctggaatttatacagattgtcatattttgtttcagcaaaaattgtgggcagacagatgttacatatataacttccactttaaggtaatttgcctacttttttttattttttattttattttgtcaatttgtatttaacttatgccattgccgacatggagtggcaagttgtacaaagttgtgataagagaagactataattatatatattcatttatgttccttcgattatgatgagtataaattgaataagagtttatttatttagaaaatgggtgaaccaaacataaatgtctaagaaatatagtaaatatagtaaaaatccaacacgaaactataaggatgctagtaatctcgtttaaagaaatagtagattagaaaaggcagaatgagagaaaagggaaaggtgaggccaatggaacaagtggcaatggcaatgcctattgtagg

SEQ ID NO: 8565 - DNA, 656 bp, Gossypium hirsutum
tcatattccaagatgcatgtccttttatgcgttggacaccagtatttcaagaaaaatagagtcgccgcagcatagtatttgaatattgctttcattcttgatggtaaagatacccattggccattattttcctaagttcttgatatacacaaacctgcagaaagaaggctacaactataacagtaatgaaaagagttgccgtctcgaaaagctggaagtttaagtccatttcctgtcccataatccacccaataaccacacaaaaaggaatctgcgtattcaacaagaataccggattagcacaccaaggaaaagaaacaacacattagaattatatatatttatatatcatggttcagtttcaacttcaagctttgaagttaatcacaatgccacgacttaaacactcattgggagttgtcatgtaaaaagagtggagattagtaaataattgacgaaataaaagaacacatataagaatgtgattcagtacttgctactgagaaaataaaagtaaacccaaaaactcctgaccttaggaggtatgtatgacaaaatgtaatattgatacacaatgagcacattcaatgtacaacacctaccccaaacatagaaatttgagtcgatgaccctattgccactcccaatgatatgtc

SEQ ID NO: 8566 - DNA, 619 bp, Gossypium hirsutum
tggacaagtcaccagaatacagattgctcctccacaaggtattgacgtttcataagcaccctgttacttcccttttcttaactactgatttgaagcagttgctgagtggtgattctggtggccatttgctgtcgtggacgttaccgccctgaaagatctggcaaatcaggtgtgctaattttaaaaaacaaagaacaaacaaactattgaatgattttggtaaagtactaaggaggcttcagattacattttgccccctctactaaggggcaaattagtctttgtacattaaattaaagagcaaatttatcatttctattaaaaactctagccatttataaaaactggcatggctaacaaattaacttgacaaccacgtgtacctcatattgacgtatatggactagtttttaataatagaaatagatgaaaattttaataaaaggaacaatttgcttttctatctaatgtatagggactaatttgtccacttattgagtagaaggaacaaaatgtaattcaactcttagtataaagacctccatgatacttttacagatgattttcatctatatcagttcctgattttatgtttgtgttaaaaacaccttatcccgat

SEQ ID NO: 8567 - DNA, 623 bp, Gossypium hirsutum
gtagacatgccctcgcctagcccccacttcaatgatcaatgcgctacgctggcaaacaaacggtaagggaattacttactctagcaaaagggacggatagactaattggcttactaactctatctctatctattctagcaccggggttaaaatagcatgacgaactgactgactctatcatgagtgattttcccaactcttgctctagaaaaaggggaattactacctacgcatacataccttactctagctctagaactcgaaagagcttgttggcaggttggcttcttctatcctcaccttgcttcctttaggcgtgggattactatctccttgaacactggtttgctggtaaaatgggggatagataatagatagcctttgaaagtccctttccacggtaatcagcctttgattttgaactcgatgcctctgaaactactaaccgaacttttgaggatgagtaagattcttctgtaaagtatgctacaaagggacctttccaacttcttatgccggtactattaccgctcttgccgcaactaattcatctagggtagctctctcagttgtggttagctagtgtcattggcctttgacttcttacccttggtatggtgctg

SEQ ID NO: 8568 - DNA, 588 bp, Gossypium hirsutum
  misc_feature (231)..(231): n is a, c, g, or t
  misc_feature (234)..(234): n is a, c, g, or t
attcctcactcttacattcccctaatgctaggcacacattacctcaggctcctatatctatttgttattttacatagtttttgagaaccaacaaaggttaacgttcatttatcaccatggaaataaccaaatacacaccaaaagttacaaaccaaatgcagcaggctaatgatattcaaagtaacccatgcaaaatgataggtttccaaatgggaaaaagggaagagggangangttattgactaagctgggttaagatcagtctttcttcatccaagtcaaacccaaagcgggcttaccctcttacacaattgggtaaaaacaaatgcattgttttgaaaaagaacataacagcataaaatctaacatctctgatggaaagaaaagaataaaaacagtaccatctccagaatggtaatgcgccagctcttgtgctgtaaatgctatttttccaagaacttcattcatctaaatcacacacacacaaaaagaagaccactccttcgatgttaaagcagataaacagtatcctccaagaagaaagcaatgtaaataaaaggatagcttttgatattaaattttcatgtt

SEQ ID NO: 8569 - DNA, 627 bp, Gossypium hirsutum
  misc_feature (300)..(303): n is a, c, g, or t
  misc_feature (324)..(324): n is a, c, g, or t
  misc_feature (330)..(330): n is a, c, g, or t
  misc_feature (333)..(333): n is a, c, g, or t
  misc_feature (335)..(335): n is a, c, g, or t
  misc_feature (338)..(338): n is a, c, g, or t
  misc_feature (341)..(341): n is a, c, g, or t
  misc_feature (344)..(344): n is a, c, g, or t
  misc_feature (351)..(351): n is a, c, g, or t
  misc_feature (355)..(355): n is a, c, g, or t
  misc_feature (361)..(361): n is a, c, g, or t
  misc_feature (365)..(365): n is a, c, g, or t
  misc_feature (372)..(372): n is a, c, g, or t
  misc_feature (374)..(375): n is a, c, g, or t
  misc_feature (377)..(377): n is a, c, g, or t
  misc_feature (381)..(382): n is a, c, g, or t
  misc_feature (384)..(384): n is a, c, g, or t
  misc_feature (393)..(393): n is a, c, g, or t
  misc_feature (395)..(395): n is a, c, g, or t
  misc_feature (397)..(398): n is a, c, g, or t
  misc_feature (405)..(405): n is a, c, g, or t
  misc_feature (407)..(409): n is a, c, g, or t
  misc_feature (412)..(412): n is a, c, g, or t
  misc_feature (414)..(414): n is a, c, g, or t
  misc_feature (420)..(420): n is a, c, g, or t
  misc_feature (424)..(425): n is a, c, g, or t
  misc_feature (427)..(427): n is a, c, g, or t
  misc_feature (432)..(432): n is a, c, g, or t
  misc_feature (434)..(434): n is a, c, g, or t
  misc_feature (438)..(438): n is a, c, g, or t
  misc_feature (441)..(441): n is a, c, g, or t
  misc_feature (443)..(443): n is a, c, g, or t
  misc_feature (448)..(448): n is a, c, g, or t
  misc_feature (451)..(454): n is a, c, g, or t
  misc_feature (461)..(461): n is a, c, g, or t
  misc_feature (463)..(464): n is a, c, g, or t
  misc_feature (469)..(469): n is a, c, g, or t
  misc_feature (471)..(471): n is a, c, g, or t
  misc_feature (478)..(478): n is a, c, g, or t
  misc_feature (481)..(482): n is a, c, g, or t
  misc_feature (489)..(489): n is a, c, g, or t
  misc_feature (493)..(494): n is a, c, g, or t
  misc_feature (498)..(498): n is a, c, g, or t
  misc_feature (502)..(502): n is a, c, g, or t
  misc_feature (514)..(514): n is a, c, g, or t
  misc_feature (521)..(521): n is a, c, g, or t
  misc_feature (524)..(524): n is a, c, g, or t
  misc_feature (526)..(526): n is a, c, g, or t
  misc_feature (528)..(528): n is a, c, g, or t
  misc_feature (530)..(530): n is a, c, g, or t
  misc_feature (532)..(534): n is a, c, g, or t
  misc_feature (539)..(540): n is a, c, g, or t
  misc_feature (545)..(549): n is a, c, g, or t
  misc_feature (551)..(551): n is a, c, g, or t
  misc_feature (553)..(560): n is a, c, g, or t
  misc_feature (562)..(565): n is a, c, g, or t
  misc_feature (580)..(582): n is a, c, g, or t
  misc_feature (584)..(584): n is a, c, g, or t
  misc_feature (586)..(586): n is a, c, g, or t
  misc_feature (588)..(590): n is a, c, g, or t
  misc_feature (597)..(598): n is a, c, g, or t
  misc_feature (600)..(600): n is a, c, g, or t
  misc_feature (602)..(602): n is a, c, g, or t
  misc_feature (605)..(609): n is a, c, g, or t
  misc_feature (613)..(615): n is a, c, g, or t
tggccaaggctggccagtacggcaggcccttcattgcagctgatgagaagagtcctttgagatggaagcttggtgaggatgaactatcagttatactgcatctaatggatgtttcctgtgattcagtttcagcgatcaaatttctcctttggctgttgccaatagttagcagtaatcctggtcctactgttcatagtgggagaaacagtctaagggtgcccaggaatgtagataattgtgcatgtgcagtgggggaggcatatcttttatcatctcttcgaaggtgaaatatcattattnnnncctttttttttttttttaaantaattngtncntgnatntcngttctgnaaanaaaaantttntgctttncnngnctgnntntttattagngncnnttgtatngnnnatntnattaantacnntngctgngncttnatntnacttnacnnnnaattttntnnctttncntctcttnccnncccccantttnnggcnaaancaaaccggttcnggatttncgngnancnannnatatnnttatnnnnngnannnnnnnntnnnnaaatttttttttttnnntngngnnnggtggannananctnnnnncacnnncccgcccgggga

SEQ ID NO: 8570 - DNA, 686 bp, Gossypium hirsutum
  misc_feature (679)..(682): n is a, c, g, or t
gtgtggccaagtatgggcagaaatggatccggacaaggacaatcgttgacaatttcatgccaaggtggaatgagcagtacacttgggaggttttcgatccttgtactgtcatcactataggggtttttgataatggtcatatacacgggggagctggaggggcaaaggatgcaagaattgggaaggtaaggattcggttatcgacacttgaagccaacagggtctatacacattcgtatcctctactggtgctacattcttcaggggttaaaaaaactggtgaagttcaattggctgtgaggttcacctgctcaactttgattaacatgctgcatatgtattcgcatccactgttgcctaagatgcactacatccacccattgtctgtgattcagctcgatagcttgaggcaccaagctgtgcagatggtctcggtgaggctgagccgggccgagccaccattgaggaaggaagttgtggagtacatactggatgttgattcacatatgtggagcatgaggagaagtaaagcaaactttttccgaattatgggagttctaagtgggttgattgcagttggaaaatggtttgatcaaatctgcaattggagaaaccctattacaaccattttgattcatatccttttcattatattggttctttaccctgagctaatacnnnncaca

SEQ ID NO: 8571 - DNA, 590 bp, Gossypium hirsutum
  misc_feature (53)..(56): n is a, c, g, or t
  misc_feature (573)..(579): n is a, c, g, or t
tgaatagagctgtaatcagtaatttaactgtttggttgaatggaatggaatannnntataatagtattcttgtgtttggttgaatgtaatgatgttgtaatagcataagaaaaaaaaactaaaatgactaaaatacctttaactgattttttttaagtagatgattatttttattgttattgttattaaattttaatacgattattattgaaaataatttaataaaaataataaataatttaaccatattttaacattattattattaaatataatttaataacattcttaatataattattatatgaattaaaaaattaaaatatataatactataaaaaaatataatctactttattatttttaaactgcaatacatatttaatgtactaaaatatcattaatgaaacaaataatttaattattctacaataaaaaaataaaatattagaagtaataaataacttgagaattatattaagaatgttattaaattatatttaataagattattaagattatttaaaagtaaataatcctaattatgtgtagacctgtccatgggccgggccnnnnnnnaaatttttttt

SEQ ID NO: 8572 - DNA, 673 bp, Gossypium hirsutum
caaggtcttcggttggaagctggtacttcaaggtaaaagaacgaccattaagaagagcacgagagagacgggtacaaagggccgaaagggaacaatgacgatcaaccgcaacgatacgagtctcaccgccgatgtaacaaagcgatttgtcatgtggacgaggcattatatgaccaccaaagctacacattaggcgtagccttgcaccaggaacagctgggagaggatcatcataggtgttgtcattatgagaccgtggagatgattcaactgattcaggatagtttagatgtacacttgtggcaccaactgtgggggcagcagggaaagatggtagatccattggaggaggacgcaaaaagaatgaaagggaagggttggttttatagttactgtcttatcattttggactttctctaaacaaagcaatgctattaaacagctaagccttgactatgactaggatttaacagcaaaattggtattggtggtatattattattattatttttataggggtaaactagttcgaatgtcactgaattattagtaagtttgtattttaatcacttaacttcaaaaagttataaaatggtcattgaattatttagaagtttttatttaagttactaagctgtcaaagtcgatattgtacatgatcttctctattcac

SEQ ID NO: 8573 - DNA, 922 bp, Gossypium hirsutum
  misc_feature (660)..(660): n is a, c, g, or t
  misc_feature (666)..(666): n is a, c, g, or t
  misc_feature (730)..(730): n is a, c, g, or t
  misc_feature (766)..(767): n is a, c, g, or t
acaaacggattctcgaggaggttgccgaagaagctgatggtgctactaaacgatcatattcttcaatcatgttctcaagatcctcatctgtagatacagatacaagggaatcaaggtcttcggttggaagctggtacttcaaggtaaaagaacgaccattaagaagagcacgagagagacgggtacaaagggccgaaagggaacaatgacgatcaaccgcaacgatacgagtctcaccgccgatgtaacaaagcgatttgtcatgtggacgaggcattatatgaccaccaaagctacacattaggcgtagccttgcaccaggaacagctgggagaggatcatcataggtgttgtcattatgagaccgtggagatgattcaactgattcaggatagtttagatgtacacttgtggcaccaactgtgggggcagcagggaaagatggtagatccattggaggaggacgcaaaaagaatgaaagggaagggttggttttatagttactgtcttatcattttggactttctctaaacaaagcaatgctattaaacagctaagccttgactatgactaggatttaacagcaaaattggtattggtggtatattattattattatttttataggggtaaactagttcgaatgtcactgaattattngtaagnttgtattttaatcacttaacttcaaaaagttataaaatggtcattgaattatttagaagttttnatttaagttactaagctgtcaaagtcgatattgtanntgatcttctctattcacaccgtctgcaccaatcaaaatccttcattcctttttttcttttccttttatagttcaatttttttttcaaatctaaataatttttttctccgatctctaacactaacccgttagatcgatggggactaatccactgta

SEQ ID NO: 8574 - DNA, 652 bp, Gossypium hirsutum
gactttgggttattgggcttattactgggccactacaatttgagttaatgggttctgaaatttgggctgtaaatggactgtttggactaataaatttggacttttattgtttttgggtttttatattatttttatttttgtttgtgttattttggttttggttttttatgggcccgggcgaaatgggcctattacattcttcctgtgcattcttagtttagttaattaatttagataaaacaaacccttttattttttaggctagataataaaaagagagttaatactagtacttttagttcctgtgggttcgacatctcggtcttgctataaactatattgttgttcgataggtgcacttgccttcatcgtgataatagttagttttcaagtacggtgaattataaatttaaaacttatcacgatttaacgattatcaagtttttagcgccgttgtcagggaaataaaatattaggaacacttaatttttattattttagcaatttattttattgcaatttaaattttatgttgatttttgttactaaattttctttctccttctggcaggtttttatagtttatgactagaagaaaccaatcaggaccattactttttgatagtgagatagaacacatagctcgcaaaaa

SEQ ID NO: 8575 - DNA, 681 bp, Gossypium hirsutum
  misc_feature (660)..(662): n is a, c, g, or t
  misc_feature (664)..(664): n is a, c, g, or t
  misc_feature (667)..(669): n is a, c, g, or t
  misc_feature (671)..(672): n is a, c, g, or t
ctgaatttggatagcgggttgccaagtcgggtcataaggcgtttcattcggcccaaatcgaacccatcatcggaatcggtaccggcgtctttagggacgccggatttctcgtagtttatgagggaatcgatgaactggataaaaccttcgagctccggctcctccgtgaacgacgagagccattgtttcgattccaaatggaagtttgacaacggttttctgtgagtgagagtagagcgttggctgacgataagcttacggatttgcattccttttttggggggattttccgtttgtttcccaggaaaaagatgctgcactcactttaactcaatcccaaatgacgtcgattcattggcttctttaatacgtagttattatttattaagggttaacataacttttaatccctgaacttatcaattaggtccaatttggtactgcactttttttttcactttggttcttaaacttggtagttatgcccatttagtccttcaacttgacaagaataaaaatttgatgacattatcatcctaagatcttgtcagaacttaaaaagatcattttaaaatttcaggtaacaatatgaaacaatctagagtttcacctcaaattttgataacacccaagtttactaactaaacagacctatttgtnnngntcnnngnngggattaaa

SEQ ID NO: 8576 - DNA, 481 bp, Gossypium hirsutum
tggcggactccacccaagtatatatatataggaaattaaaacttcaataaaaaaaatcatatattataaatggattttccagaatttttaaatcagcaactgaccaattcctaatttgtttataatccttgcaagtcaatgattctaggcgtacccagaaatcttcaaactactccattgcttgaagaggagtattgagaaagcaactttatcctatttctacatatatagctttaatgtgttgacacatgacacaattccttttcaatcttattcagtattcgaatactctttaaaatatgctctctaggaagagacctcggatgcgaattatccgaagatccactaaacattctcaaaatgctgagaccattgccaataactatgatcttctcatacagattttagttcgtttacctgttaaatctcttctccgatttaaatctgtttcgaaaacctggaactctatcatctccaatcc

SEQ ID NO: 8577 - DNA, 682 bp, Gossypium hirsutum
cagttggtgctacttaactactttctatcatgtggtctagaggtgtccatgggctgggttccaaaaaaattttgaagcacagacccattttgggcgtggcccatgctaaaagcccatttcactattcaaaaaataataaaaaataaaaaatatattttaattgatattttatatacttttataattaaattttaaaaaaatatattttttattacttaaattgaatttgcgccagcccaaggtgcgaaaatccttgtccaagcctggactgggtggctaccaggcccttggacaggtctaatgtggtttcattaataatgtctttattttggtgttctagatggcaagggaattggattcaatagtggaccatggagaagctaatcctgctcgaagctgtaccactgagagtggctctgtgtccttccttgagcaaatcatatgtcctatatataatacgatggcagaggtcagttctttttgtgctttctatatatcctcttttctttagggctcatattcatgttagtggtgcatatttgctaacctgcttatgaaagttatctttagcatgtccattaagctttgactatggtcatcagtttttgctattctgtttgtagtcgtgtttttgtgtgatttgcacctttcattttggaattaatgctgtcccagtgagagg

SEQ ID NO: 8578 - DNA, 548 bp, Gossypium hirsutum
cggttcaagtttatatatatgaaagaaggtcaagatattattaggtgattttacgtaaatgcgattaccttgtgtttctctatagtgagagtggatttatacacaaaagcattgcccttttacgtaaatgcgattaccttgtgtttctctatagtgagagtggatttatacacaaaagcattgccctttttcgattaattcacaatgttggatatcatattcgttgagagcagtactggttttagatccatagatcctagtctctactttttcctactgttgtagttggattaatatttagtcattggatttcttagctcttctttccaaattgtcattacttttagatttggaagtaactttaattaactcgaagctgatttggtaatatgttttccaactttgtataggtggtgaagatgatttggaattaaaattagatttggtcatagaaggttgtaatgatgcatgtccagaaagtactggcgaagagaggacttccaaagattacgaagacccgtgttgggcccagtgcaaaaaacgaagca

SEQ ID NO: 8579 - DNA, 641 bp, Gossypium hirsutum
acgctaacgttcaagaaaatattttagcaactaaaaagtttaatcaaattgaaaagcttgaatttgagatttccaaccttcaatacaatatagatagtacaaatagtattaaaaaccagaagtagaatagaggtgataaacggaataatatgctattgaagattatttaaccttgtaatacccaaacaccaaaatgcagtgctaaacacctcaatataaataattgcctaaacaaaggaactgaacggtagagaagctttactactgaaacaaaagccagaggaatccacattatgtaggtcaacagcagaaatagactagttaaacagatcccatctaagtgaaaatttatccccatgtgatccaccactgtcaataagttcccatttgatcttagaattacttcttcacattatagacaatggaatagagagaagaagcaaattatgaaaagaatgtttaccagctttcttggcagcatgcataagaacctcctctatcaggtgttgtgcagggtctccatctggaaacttctccatgaagctctcaacaagagaaaccaccttctgattgctcagatattgatataatccatcagatgaaaggattaaaaattgatcccttgggcaaagtctatggtg

SEQ ID NO: 8580 - DNA, 614 bp, Gossypium hirsutum
  misc_feature (600)..(601): n is a, c, g, or t
tgtctgatgttcctgaagcatatttgtgagagcccaagctgcctcgaactacaaaacaaaaggataaaacaataaaaacaaaaaagaaagagattgagcaaaatcttagtaacttcagaaacaaaatatcacacctgaagctgagggaagtcatccctattaaggaactcaacaaagcgaggaacaacacctgcttgtacaacttcattgattggaggactacgttctgcacataaactaagagtaaaactcaaatttctaacaaaaaacgatgtcagaaaggggaaacataacagcaaattaatcaacctattgatagcagctttcggaattgagtggttgcctcaagctgcgcattcttgtcatcagaccaaacgcccacaaccatagccggaagactttctaactgcaattagataataaaaataccagaaatattttttaatgcaatatccattatcaattttcttcttgaggcttactacaatcgatatattaaacaaacattcctctccatttgattaatacagcttgagctacctactaatcagcaattcatatttcaaaacacgattaacactgcaaaaaagtattcatgtnnaaaacctaattaa

SEQ ID NO: 8581 - DNA, 637 bp, Gossypium hirsutum
cgaactatcgaaacgaacgttgagacaagctgactatgaactggcaaagaacccgcaggtgtagactcagaggacagaaatctactttcatcaaacacaacatgacgagaaaccacaatcttgccagacggaagaagacactggttacccttgtgttgagtactataacccaaaaaaatagaaggttgagaatgaaagtctaacttatgaggtgtaaatggccataaataagggaagcaacaacacccaaataccctcagatgatcataagtgggttcacgcccataaagagccttaaaaggggtctatccctttagaactagaataggaagacgattaatgaggtgaactgcacaacaaaacgcatagccccagtattccatagacaggccggcttgggctagaagagtgatgtccatatcaacaatgtgacgatgtttgcgctcagccacgccattttgttcagaagtatgtgggcacattaatcgatgaataatcccttgaggggctaggatcgatgtgaacgctcgacactcttttccccaatcactctgaaactgtttaatactcttcccgaactgagttttaacaagttgttggaactgaacaaaatattgcactgcctgcgactttcatg

SEQ ID NO: 8582 - DNA, 606 bp, Gossypium hirsutum
  misc_feature (585)..(587): n is a, c, g, or t
  misc_feature (593)..(595): n is a, c, g, or t
ccagcagcattggcagctgccatttcaggaagaatgtttcagcaaagtccagttgaataaaaaaaatgggatggaattaatatctcaaaatataagatcaatttagagttttttttttctcgtttctattttaggatttatatctgtcttgctgggaaaatataccggcggacaaagagttgtttctatgattttgtcaactataagtagtaattgttatgaacttagaatgttgtaaatacaacattgcagaagaattggggaaacacacaatttaaaaacagaataggacaggaaatctgttcaagcatcagcttcatgtaaatattcttttcattttgtttttgtttttgaataaattggtgtctgtaattattcacattcccttcctaacttataaataaaagaaaatacgttttaacgcactcgaattcatgtcctcttgcattgaaaacatcatgtatactaatcaagctaatatttaatctacatattcttttcattttgagtataaaacataattggttcaaaaaaaggaaaaagaataattgaatattttcagctttaaaataagttttgcgtacnnnaaactnnngataataaatc

SEQ ID NO: 8583 - DNA, 653 bp, Gossypium hirsutum
ccaccaattgaggaaaaataaagcggtagtcgtaacttgcatatagaggggcactcctagaggctacgcctcgggggtttagttgggtcatgaaattttaaagttttaaattcaaaattttaaataaggttgtaaaaaaataaatttgaaagacatatatggtggtatggtttaatgtgtatattaaatagtcaagaataaaataagatttgattcaaacatgttagccgttattcaagtctttgtatcatttagtaccccaacccgatgatcgagttgagcctaaggtgttacaattaacctttactcaatgctgctcacatgagctatggagaatttacagcacattcatgatcttagctatcggtaaggtatccaacactgatacatagtacctgatacaatataaacattggtacaaagtacctattccattttaaaccctaatgatatgtcatttgtatcttaatcattcaccaagttcacacaagccttaatttcacattcgttctatttaaatccttgatcatcttcaaatacgtataacatcaccatttgcagtcacatattcacttatatttatcaactaaactttatttcacaatttaatccttcaatatcaaactcctcatttattacagctcaatcacaca

SEQ ID NO: 8584 - DNA, 634 bp, Gossypium hirsutum
agattttatttgcagagaccccttcttcttttgggaacattagggatttgaaatttgaaaagttcgagcgtgttttgaatattttgatgttgaacctgaagctctgtacgagctgttagcccccacttaggtcagcacaacgtcgtcgtataaattcggtgcaactagaccaactcaacggcgtcgtctgaaagcttcctatatacgccgttaacaatttaacactcaacatactagtttaggtctaatgatgattgcagtccctccactactataaaatttagattctaatcttcctattttagattttctaattttagaatttaaagcttccttaatattatcagtaaatccaaattgttgataaacaccgttaatagttgcctattttcgtaaaaaatccaataaatagtgttcaattagtctaagccgaatctcaaagctgggttttcttttttaaatgtactattagccatttgaacctaccaataatattgtaaaagtagaaagactaaattatgccaaatcaaagtcgaaaaactgaatcccaaatttcaacaaaataaggggactaaaaccataattagatcactaaaatcaggctaattgtaaaaatattgttcaattttgcctg

SEQ ID NO: 8585 - DNA, 636 bp, Gossypium hirsutum
gactttgaatcctgtaagttcaacccttcaatggtgcatgcatgatttgaaatgttggtatttgggataaaaataaacttataagaaattaaagaaggcttcaaggcgtgtattaaagcccctttaaggttctattcatccccactatattattttggtctgtaggagaataaaatttttttttgatgtgtcaaacaaataaaatttgactcctatttataggagtcctcatgtcttttcgcagaaatacaactatctaaatggataatcacatcttttaataataaacataataattcaatatatatctcatttaataatcatgattcattgttaaaatcaagtaatataatttttgaattcaagagacattacccatcattatgaaataagataacttttggttaataatcaaacgatataactttttgttacttataacttttcatttgcaacaatcagaacattatatatattttgaaaatgttccaacaatctccttctactctcaaaaatattctagattttaataatcttgaaaatcaattgcataaatgaaagcgtcttacgatagaacctccacttagtgaaaacatgttaaagttaatcgaaattgcatggtaggtaagcttgaac

SEQ ID NO: 8586 - DNA, 610 bp, Gossypium hirsutum
cagcatccatttcactatgttctttttattgtgcttgtttcagcaagttcggtttatgttgtacatataaccttatatatcatcgagctgattttgtgttcacctttatgcaggaacttcttctcccttttactatcactgctcggaattttgaaaagcttagacgatgggaggagccgcacttgactctctcatttctcgcatttgcttatacaattattttcaggtagacgcatcacggaaatcattgttaggcaaacagcacttaatcttacaagcaatactacacttgttagcttttgaatatgaactcatgagttcccatatcggtcgtgctatatattttgcttgttgtagaatagggtcttcacctaataggtttcgagcttttgtttaaattgggtaaatgtaccatggaagcccctatactaggaatccgtttaatagaaaaatgggcaaattagtatctgcacattagattaaagagcaaattggtcatttctattaaaaatttcatccatttttactattaaaaactagtgtgactgatcagacaacatggaccagtttttaatagtggaaatggataaagctttcaacatgaggacca

SEQ ID NO: 8587 - DNA, 623 bp, Gossypium hirsutum
gctccgtctgctttgctttcaagatggaaatggtagtttgacacagcaagccttgatccgaggattgagatattagactgcgatggctatccgtcaaactatgcatcttgcagctaccattgaaacttattcaacataccttgttcgagagtgattcagcagtttcgattcaagaactgaaccgtgtctttccaactaatctttttgatgagattggactgccattttcaggtttcatttgctgcctcgttctagcctcatatgcaacatggttgctcattgtactgaggaattaagatcttccaaactgtagttctagagaatgaagggaaaactgttgccatgagtcagcattttattctaagaaaactaataaaattttctcggattgtttgcacatgtatgtttgacaattttgttggaagagctgtccttaataaaaaaaatacattgtacttggtcctagtaatctaagaaaactgttgccatgaggcagcacgttttcatgtttttaagcaaatccatttaaaatgcatgaacaatgacatgttcaaagcacaaatttatggaatcattcacctttttatttcccctaagctaaatccaattcacaacaggccaaa

SEQ ID NO: 8588 - DNA, 604 bp, Gossypium hirsutum
taactgtcagccaccaatcatcgctaatccttgctcttttgtctctcccctttgttcaacaaatgaaattaaattttatgtacatattacagagttaatgtttaaggaaaactcttacgtgactctgctaaaatgaattacaacctacttactgacaattaatttttaaaatttaaatgcataacttatttaaggtaaaagtacaaaacaaaaccttgtacttggggcggattgcattttggccctaaatgacaaattagccattcttcaaatttttctattaaataattatgtgcaacgttaattgaaatggttaattattaatttggtccttaaactatagctaaaatatttttttttattttttaaaaattttctttaacagtaattctatattttttaaaaatattttgttcaaaatttttttaaatattaaaaataaatataaattgttaaaaatatatgaaaattttttaaaaataaaaaaatctaaaaattcaaaatatacatgtaaaacattataccaaaaaatttaaaaactttaatcaaaatttcgagttgaaaccccaaaactatcgtctttttgcaaaacccatgaggtccc

SEQ ID NO: 8589 - DNA, 574 bp, Gossypium hirsutum
gatgataaaaaatgctgcaactcagctgaaggttttgaaggaagaggacaaataacagaacgaagccatttcgcagttgtcattgcagtgctgaccggtgtagctgccatctttgcatttggcggcccaaggacaccatttgcatgagatgcagaagagcgttgaggagacagtgggcttgagatcgactttgatggtgaagctaccgaatcaagtttcctctactcaaaacagaataaatgctttcttaaataaagtgaccactcagtaaagcataaaaactaaaaagtagaatacattttcttaaatttgaaacagaccttgataccagtaacattcatggcccctccagacaagcttcctaaaccaagtaaactatcttcatcgtttacaaacaacctctcatccagatcacctttattacaaattgcatcatcataatccttttctaaaattttcaaactggatgaaagagattgttcctccattaaaccttcaaaatagatcaagatatctgcatcaaagaagatcagataaattagaagcaaaactgaccgacgaaagcagctccaaa

SEQ ID NO: 8590 - DNA, 603 bp, Gossypium hirsutum
cgtacatatatacgatggtgtcatacatacattcatacatgctctgagtactctgagggtctactatgggtgcttttatactatctctggtgtaccatcctagtccctgtttgccatctgaattgtccattctagtggaattcaatacatacatagaaggtgtcatacatacatagtgtttcatacatacatacatacatacatacatatatggtgtcatacatacattcatacctgctctgagtactcttaggttctaactatgggtgcttttatactatttttctctggtgtaccattctggtcctggttagctatctgaattttccattctagtggcattgattacatacataggtgtcatacatacatacatggtctgagtacactgagagttagctatctgattgtttttatactatttctttggtgtaccatctttgtcccggttagctatctgaattttccattctagtggaattcattacatacatacattagttctacaattagtattgctacgtgatgagaggttcattaaaatgttaggtactatccctattactatgctccatttgcgtcagacatgaagggtctttctca

SEQ ID NO: 8591 - DNA, 516 bp, Gossypium hirsutum
  misc_feature (455)..(456): n is a, c, g, or t
  misc_feature (467)..(470): n is a, c, g, or t
  misc_feature (473)..(476): n is a, c, g, or t
  misc_feature (504)..(507): n is a, c, g, or t
gcacattggcctgattacattgaacaaaaccataaataaacacaacccaaagtgtaaaaataaaataaaactgatattgcagacacccatatgtattcttgaattatttttaagtacctgagattcgctgatttctactgcgaaaccatctacaatgaccaaagataaggtcttctcatatgtaccagcttgaagggtacttgccaaaagctcgtcgtgcttcttactcagatacaaatcaagctcatacgccccttttttagttctattaaacaacaataagaaaacataaacatggagaaagaaacttgcagatagataattaaaatatgaagcagtaatgatataatgaaactcactgatcagctcgaagacggtggtattcaggatcatagttcatgaaaacaaagtatagctcagttcttgtgctgcccattgccactattctttttttnncaggtttgggnnnnggnnnngtttttgcattttcccaagctcattatnnnnaggtattat

SEQ ID NO: 8592 - DNA, 435 bp, Gossypium hirsutum
cacacacacacatataagggaaaaaaaaggaaaaggcgtggcctttacttcaagatattacacaaattccaattgggggttttggggaagagattataccagagcctcctcgataattgagcgttgatcagcagttgcagcaagtccccgttgtgtgtcttgaacagccaggagaagattgtgtttcttgttttccaactcaacctcggatacctaatatccagaaaagcaaatcccattactaccgcaaattctaataaggagaaaacatgttctaaaacaggatgagtagagaaataaaggtaagggacacaagaattagaacccgattcctgtcaggagcaacagctactgagcatagaaacttgttgtgaaaagaccgtctcttgttggtaacgagttttgagctgtgaggtcttatctcgtagattactc

SEQ ID NO: 8593 - DNA, 671 bp, Gossypium hirsutum
ttaaaggcgtggggcattctttagatggtttaaaattggaagcaattctagaaccatctatctttctaataatggtggaagttaatctactgatttcttttgcaggggtggagttgataaacttatggcttgattttggagttgatctctttctatcagaaatcttcattgcagacttgttggacattggagtgacattattccctttgttgggacgaatagcagatgaagatggcactttggttcttcttccataacttgacaccttaagtagaggtttctccatctgggtttcttcactgagctccaattccattccttcctcaagctttctcgactggttaaccttcttctcgagattctccacatgggttgcttcactaagctccaaatctttaatttcagcttcattcttcaaattaatttccacaagaacattgtgttcaccaactgagtcagctccttccactaagctgctctcaaactcgacaaaatccgagttattattctctttaccatcataaatggagccagtttcttcatggccaagggctgccatttgagagcttgagttcattatctctgagacttgggttccaatatcctgaaccataccttcattagctttggcttgctcaagcagtgctttcctagctgccagggtcttgtaa

SEQ ID NO: 8594 - DNA, 601 bp, Gossypium hirsutum
cattacaaccattcgcaaataggggcaaagcaagaaaatatttttagggactgagataaaaatataaattgtctgaggcaaaaatcagaaactctatactcaaaggatttaaattgaattataaattttaacgaggccaaaagtgaaatttcaccattttctacaaacatgaaatacccagaaagttcatcgaaggtcaaagaaatcaagcaaggaagctaattaaccataacctaaggatgctcaacaaaatcgaatcttcataaaacaatttctgggaaataaaaaataatttaaataatctaaatattagtcaacgttgtgtcagcgcggatctattcatttcatataatcataagcgggtatgaaaattctttttgttcttcacaatgaatagtattaaacaaaattatagaaaaaaagaaaaaagaaaagaaaggctgtgatataggacgtaccgaatcaaactactagtgaattcagtgaggattgaatttgattatggtgaacagttaacagctgaggaaaaacctaaaagaaaattgacatttcaaaagagatttaattgactttcttaggaaacaaatcaacaagcagatcg

SEQ ID NO: 8595 - DNA, 644 bp, Gossypium hirsutum
ttcttttgtgatttacacaggccatttaccaaaatgatcggaggtgttcgtgggataatatactatttggtacctaagtttggctgtaatgttcaatttgatacttaagttatttttttccaatttggtactcaagtttgacttcaatgtttaagttggtaccccagactgaccgattcaataaatatttgacatatgtactctaataaaagcatgagtacttaattgagacaaaaaaaaagataaaactcagatatcaaattaaatctggaagtcaaatttgggtacttaaatgagataaggaaaattttaagtatcaaatttaaaaacctaagcactaaattgaaccttgaaaacaaatttaggtactaaagtgaatcttgaagccaaagtcaagtaccaaattggaacaaaaaatttcagataccaaattaaaaattgaagctaaactcaagtaccaaatagtatattaatctttattttctttaaatatcaatatttttgtttaatgcgtagaaatcatatatatttttatttttattaaaattctaaacatattttttaattaattttttttcatgtgatgcaataattagaatatgttatatttcatgcctatttataaaagcccaatctgaagtctt

SEQ ID NO: 8596 - DNA, 584 bp, Gossypium hirsutum
  misc_feature (24)..(24): n is a, c, g, or t
  misc_feature (564)..(566): n is a, c, g, or t
gatcctatagacagagttggtgcnactaggcaaccctaaaatatttcgtattcgttagaattgcaacaagttacttggctctgcaaattaaagcggtataaaatattttgtgagacaagtagacattgaaatatatctcaccctgtcctcaccatgctggctttctcgcaaaatgcagataatgctgatattgtgtcaaccgtaatccgaggcacataaaccacacttctcagaccaaatgctgttgcctatgagaagttgaaaagaaaactattatcagctattctagtataactcttagaaaatttacatttcagtggtcatatgaaaaatatggtttatccttgcttattcactgaggctgcaaaataagttgatataagaatatagtagtgtttagataccgaacctgttttacgttgtcataaactgctgaaggcttagtgaaatcaacaacgactcctgtctcttttgactgatagaattattgtgatcaaaatggtatgaccggtgaagtcaacttaaaaagatattggaattggaatgctacctgagatatcgaannntaaaaccatagtgagatc

SEQ ID NO: 8597 - DNA, 593 bp, Gossypium hirsutum
  misc_feature (51)..(53): n is a, c, g, or t
  misc_feature (55)..(55): n is a, c, g, or t
  misc_feature (543)..(543): n is a, c, g, or t
  misc_feature (545)..(546): n is a, c, g, or t
  misc_feature (555)..(557): n is a, c, g, or t
  misc_feature (559)..(559): n is a, c, g, or t
gttgtgtattaaaagatggagacaggtgttggttgaagtagatcaactgtnnncnttctgcgttccatgaatgttctacgagacgtatgtatatatatgttcatgcaatcttcttttatgtaattgaaatgggcttgtttttctacctaaatggaaaaagaatccaatagactatttggcaaagccttaatatgagttcaaaacattaaactcggaccaaaataagcccatggcatgcttctgcctagtcaaaaagtttagctcaagagtcagctaaacccactcctctaaatctatggaccaacaaccatctacatagtctttaaagatctaagagtatcaacaaagggaacacaaaagaattcaggaaatggggttgcttggttgtgggggcaataaagtagagaccaagcttaggctgaatgctgttggtcccaaaggcatgatgacctcaaatggaccccaaaagttcccctaaagaaacccaaatgggagacaaaggaaattctttaaggagctctttgttttatcctcatttctagnanngatccaaannntntgatgaaattaaaaaaatttaaaaatactaagtt

SEQ ID NO: 8598 - DNA, 614 bp, Gossypium hirsutum
cttcctcccttccaaatgttaactctctatattttgaaataatacataaacttcaaaaagaaaaagtttaaagtctttctaccataaatgatctcgtccaagttcaattacatcaatcttctaataggaaaggataaataacatatctacataaatgttggtgaatgtagttaagagttagtgtattataagaattgaatcaaattaatttctcttttattgaatgaataatttaatccttatagtattaaaaaaattaaataagatcaaattaaaataaagttaatatttactgcttacaaaatacaattttttttgtttaacaaagtttagcatttttaaaggttttatcgttttgtaaatgaaatcttctggttgaaattgaactgcaattaaaataattaatttttaagatattttgcatatagtaaatgttaactctattataatttaaatttatttgattctttttttatagtatagggactaaattaatctatttcataatagaactaatttgattcaatccctataatacaatggcctactaggtacttcaacccaaaaacatatattggtcttcccaatattgggttagataaggaagctatggc

SEQ ID NO: 8599 - DNA, 645 bp, Gossypium hirsutum
cttcttgacggatttttctcactagggaacgcattgagcaaactaattattaagtgtagtggtaaggcacattgcactcctaatagagaagacaagttcgaactttggagacaataatattgggagagagagtcatacattctcaaatcttcatggaccataaaacggacgttaaggaaaccttaattatacaaaaaagaaataatttgtacccaaatttatcaataaaaaccatggaggagtactcggagttccactaaaaaaagataaaaacaagacaagaggatgaatgttgtacaatacaaaagaaacatctcagttacaatcttctttgtggccctgcagggaccttttcaaaggaagcatgtcaactgcatatcaattttgaatcttctatccaaattcaatcctcaatgatacccatcttgtcgcatttggtacttcaattctggtaacacaaaccacaaggttatcaccagtgacagcaaaaaactatgctgctcggactcttcccatgcatatcccaacacaaatatgaagaaaatcttgaaaaaaatatttaaaaagtaaccacatcggatacaaacatgagtctgagtaaactattagctccatatatagaaattctggtgaagagcaaattct

SEQ ID NO: 8600 - DNA, 606 bp, Gossypium hirsutum
tatgagaaaaatatggctgaaaccatcagcaagcaaacaaagaatattatgggataggaaagcacttatgacttgcaagttcagggatcaaaataaaagttgagcttcttttacctgtaaatacgacgactccatcagccgatactcttgcaaaatctggaagtgtcttgttgagatatcttggagacaagtaatctaatgcatccgaaacaattacaagagggaacgactttggcctgtatggaagaggaaatttgatgtcagccacacgcatgatgccattacgcactagtcttttgcagttagcatcagcatcctcaatatcgtatggttccaccccccaagcttcagtttcttcttcttttaacaaatttgagaccactgaacaagaatcaggaccaatatgcaaaactttatgaatgccaccaccgtaagctttcttcagaataggaagcgcccgtagaacctcaaatgtgcaggaaaagtcacctgcacacaaagatcaaatcctatctaaaaatctaaagttcatttatctaatagcaaattgaaaggcataggtaaatgatgcctcagcagatgaaacatatcattaagattccacag

SEQ ID NO: 8601 - DNA, 667 bp, Gossypium hirsutum
  misc_feature (650)..(650): n is a, c, g, or t
  misc_feature (652)..(652): n is a, c, g, or t
  misc_feature (654)..(654): n is a, c, g, or t
  misc_feature (656)..(659): n is a, c, g, or t
  misc_feature (661)..(664): n is a, c, g, or t
ttcttgtcactgacttatttctcatcttgtataaaacatggcatttctttcgtaacatattttggtaagggggagtgctatttgtacacttaagtgcaagtgcactctttgttcggcacggagagagagaagaagcacttgtattctagagagttgttaagaagaggacttgtaaacagtatctataattgagcttttaagtcaatactctccaaaacatcttaaaggtgaaggaaacctaagaatcttacagattttcttaggcttaactccacagtcttccgaacatggaatgtcgtttttaaggttaacactacaaccttctcagcatggagtgttgtaatcaaggaatgctcctgccaatcttcctaggcttagctccataatgttccaaatctagaaggttttttggtgaggagaaaaagtgttgctaacaagtgaaaaaaaatgtacaaagagaaacggggagaaagattggagcaaaccttttaacattgagtgcgacagtaaaggtgaaaaagggctaagtgtggttgggattaaggcggagcaaatgaaatggttgaaagagcttttagagagagtttagaagtctaagaaatttgtcaaaacgccaaaagcccactcacatagactcctaaaaaaaactnancngnnnntnnnnttt

SEQ ID NO: 8602 - DNA, 572 bp, Gossypium hirsutum
  misc_feature (508)..(508): n is a, c, g, or t
  misc_feature (510)..(512): n is a, c, g, or t
  misc_feature (524)..(524): n is a, c, g, or t
  misc_feature (569)..(569): n is a, c, g, or t
caataagctttgatggctgaagtttagggtctaaaaggaatcaaggtttaagccttgaggctcatccatgaaattcagttcagtgtgatttatgatagtacttgaatttgataatgatgtattgaaaaataactcggtggtgcaacgttttcaatgggcgagctcataattgcatatgtagtaggacaattttcattttcacccgtctttaattaaattaataataagtagaaaaataaacaaatacatatgtattttttataattaaaagtgattttattcattttacggtttcagtctaatcttatcctggttggaggtaaacccttcaaacaatgtcaaatttaagatttgaacctaatccaaatgttttcccaaaataaatattttagagctcttttataaaaatatattttttagttagtttaaattaatgatctaaataataaataaaagagtctaatttttgtatatcatttaaagtgagaaatattataaaagaaatctntnnnttttacttaatngactggatttataaaaagagtcaccctaggtcattagcacaaganctg

SEQ ID NO: 8603 - DNA, 609 bp, Gossypium hirsutum
tcaaatcccagatcatttttacccaccatgaattttactggcacagtgatttttgatccttgccagggtgcagtaagctcccaattcctgttttatcaatttgaaacattagctctgaagaagaacactaataaatatgaaaatcaaccatttctgattagcaaaaataccagaacttacaagtccatagcacggtagtaattaagagctccagtgaagccagattcctgaaacttgtcagcataaacctggagttcctcttcagtaatccatggtggtaaccttgatagtgttctcagataatcaataatctccattccaggaggagctatcagattatcagtctgtgtaatcagcaagaacttctttatcaccgtcaaataatcatacctggtgaatgccctttccgctcttcccggttcctatcgaacaaatttccccaagaaaaagcctgattaacatcaacaacatcatgtacatcccatatcttgactaaatgggacagaatttacctggaattgggaaatgtaaaatccatccccatatgttctgattaaggattcagcaaatttggcatttgggtttctactatagtatggaacggataag

SEQ ID NO: 8604 - DNA, 536 bp, Gossypium hirsutum
aaaggagcaaacagccattcatggcttgcagccaaattaacatcaaggccaacctggtttgcgacatcaaccaaaacctgttcaatcatgctatacttctcatctgctgttagaaagttctccataggattaagcttccaagacaatatttccttctcagggccacaaagagttgcaaccattgccagtggattttgaagataacgcccaagagcaacagcccgtttaacaattcctgacaatatttataatggactagatcatcaataaatcaagatggatagaaacttgcatacctaacaacaattcaaaaactacaggcagaatatcgtgaatgaagatctattcacctgatgtaccaggtaactgatccgcagaaatccgagaattttcatagagacggggtagagactcatccccatatacaatgctcagctcatccatttcatgcccaacatctctaggattttcctccaccatcttaaaaataatctggtaaagaagacataaactacataagcagcaaatagcatgaa

SEQ ID NO: 8605 - DNA, 575 bp, Gossypium hirsutum
  misc_feature (508)..(509): n is a, c, g, or t
  misc_feature (517)..(522): n is a, c, g, or t
  misc_feature (530)..(531): n is a, c, g, or t
  misc_feature (563)..(567): n is a, c, g, or t
tagactcatatttaagcaaatgaatgaaaagataccgtcttataacccatacactactataatgctgcaccaattaaatgagaacttctaaaaggtgatatgtagcatctgacttgtacaaatttctcatggccttaagaccagtcatcgaatctcagtcaattgcactgcttaaaatgacaagtttttcagaaaaatacctcaattatgtccagtgccgccaagcatgctgcttgactcatagaagccagcaaaggagttgcagctgttaaacatgaacccacgatagatccaacagtttgtctatatcttctggaatcagtcaacttgaacacaatagtttcccattgctctacaataatgatgtcatcatttaattagtaccaatcgtttctgctctaggatagatccaagataaagaatgaagctattaaaaattcaaccaaattcttataattaaataaaaaaaaacacttacacgcacaacaacaaaagggtatcacttttnntgcaaagnnnnnngttttccnnaataattacatatatatggtggaaaagctgannnnnatttactg

SEQ ID NO: 8606 - DNA, 605 bp, Gossypium hirsutum
catagggggtcacagcaccatgttttgcacagctctcaactacatctgtatgcgattattgggagtaggacctgatggtggcctcaataatgcttgtgagagaggccgaaaatggattcttgatcgtgggggtgtcactactatttcttcttgggggaagacttggctttcagtatgtcatctttcttcttttacaacaatatttactatcaaacttaattctttttatattatatatatttgatacttctatttaatttggttgtagatactgggtgtttacgaatggtcaggctgccatccaatgcctccggagttttggctctttccttcttattttcccgttcatccaggtttacaatgtttatttgtttgtgatcaattcaaaatatgtataatatatattgactgttaggcaagaacctaggggtggtatggcctaggtccctaaaatagaatattttggtcttttaaaattttaaattaataaaggtaaaatttcactttaccttccctaaaaatgataaaattttgatttaatcttttaaaaattacagttttactattataaaaattacaatttaatttcggcctcctaaaaataa

SEQ ID NO: 8607 - DNA, 585 bp, Gossypium hirsutum
  misc_feature (422)..(422): n is a, c, g, or t
  misc_feature (448)..(449): n is a, c, g, or t
  misc_feature (500)..(502): n is a, c, g, or t
  misc_feature (510)..(515): n is a, c, g, or t
  misc_feature (521)..(524): n is a, c, g, or t
  misc_feature (526)..(528): n is a, c, g, or t
  misc_feature (530)..(530): n is a, c, g, or t
tatttgcttggagtacaagataaatatgtacactttccatcagtaagttgccaggcataaagatacaaggtatgttatttggatttcgatgtgcattgcatgattatgtgtcctaaacaactatgcttttaaaaaaaaaagtttatctatatattttggaagggttttgaaaaaacaatttccgaatttccatttcaaattgtttggaacgggattttggagggaaacttcaaaaaaaaaaaaaattaaaccaaccaaacaaaatgggaaaaaaaaaaactttgatttccggaaaaaaaccgggccgggaagggccaaggaattcctttacccggactaaagggaaaagtttaaaaaggttgtgtcttaaatgaacatatttaaattttaatttttttatatattaaaaaatcttattttcntattcctggccgaaaatttggccaanncaaagctttaagaaaaaaaaaaaaaaaaggaactttttttttcaaaaaaannnaaaggttnnnnnnccccgnnnngnnnanccaaccaaaccaaaaataaaaacgcttggtgggggggggtccccttgcccaaaaa

SEQ ID NO: 8608 - DNA, 584 bp, Gossypium hirsutum
atctatttgttctttgattagtttctttctttcacatgttaactgtatcacaaaagctgttttataccatctagagaaggtgaagacattgacttttatagatttgaaggctaatgtttctatttattatgtttcaggagccatcttcttctaaaggtgaaacatctcattatgatgcaaccaaaaagagaccacaggatatgcttcagttagagtatggggtaggttagttgttttaatgttccctgagcacatcattattaatatcaaacgagtttgggtgtgacattatttttcagtgttttacctttaaccttttgtaaggactgggatcacttggttcaatagccgtagctgatcttgcgagaaagcatgtcaagttggatccgcatgctgaagctcaaataacatcctctggtcatgtaagtagatttggtagtgacagttgattatgttggtgaatattgacattaatttcattcacagaattgaacatatagtcttgaaggacattgttttttttatcattttattcaagatgattgaatatagttcctcaaacaacataagaatgtttcttggga

SEQ ID NO: 8609 - DNA, 575 bp, Gossypium hirsutum
ttttggacactgctgctcttttactcttttaactcagttatctccagcaagaggctcttgatgctccatgtttctccagcatcaccgaatgagacctttttattttgggatttgaatttcatgtcactttttgtaagtaattgtatgagtggggatccttataattttttagtaatagcagaactgctttcctgtttcaaccacatcctctcaagtcttccggctttaacccattttctaccatcttttgtaaatggagcttacgacttacgtgagttctcttgtaataggaccccaaaatccaatagatttcagatttttcccattctaattatctttttgataaaccataaaactctctgtgtctatatatatgcttttccgttttacctcacaagatgggtatctcccaagatttcgacatcaaatctttaattaccaataatttcggatatattaaccaaaaataattataataaaataaataaataaagggtaatcacaaaagaaaacgaggaaggcgatcaaccctacaatttcggaccactttgttttgctttttttgtgtctacttg

SEQ ID NO: 8610 - DNA, 544 bp, Gossypium hirsutum
gaaaaaacaaaagtgaagatgtgaatgacaaacttcctcttcttcttcatcgtcttcagttaaattggctttgcttgtagatgccatgaaagaatcacgcgttatcgagcaggtaaaatcagcttcaaattttggttccgtcgcaaattgccggtggctacagaaaattaatcaaaatcaatcgttcatagcaaaaagtataatcaaaagcgatgagggtgacagggaaagatctggttctcaaggaaaacgcaagtaaaagtaggaaaagcaatttagccatggaattacaataagctcgatctaatgctaaagttttgcaaaattagacttacctcccccaaattattcgtaatgacaaaagtttcttggttttttagttaaaattcgaaatttgtcttttaacattcccatccttcaagtctgaccaatttttcgaaccaataatttggctctaaaatgcaaataaagtaggttaactagcagtctcttcccgcatctgatcatgccggaatcgtgtgtcttaaacttcactaaggtggat

SEQ ID NO: 8611 - DNA, 515 bp, Gossypium hirsutum
  misc_feature (44)..(45): n is a, c, g, or t
  misc_feature (47)..(47): n is a, c, g, or t
  misc_feature (311)..(311): n is a, c, g, or t
  misc_feature (349)..(349): n is a, c, g, or t
  misc_feature (351)..(353): n is a, c, g, or t
  misc_feature (359)..(361): n is a, c, g, or t
  misc_feature (363)..(371): n is a, c, g, or t
  misc_feature (373)..(373): n is a, c, g, or t
  misc_feature (376)..(376): n is a, c, g, or t
  misc_feature (378)..(378): n is a, c, g, or t
  misc_feature (386)..(388): n is a, c, g, or t
  misc_feature (402)..(407): n is a, c, g, or t
  misc_feature (414)..(418): n is a, c, g, or t
  misc_feature (428)..(431): n is a, c, g, or t
  misc_feature (433)..(435): n is a, c, g, or t
  misc_feature (470)..(475): n is a, c, g, or t
  misc_feature (479)..(480): n is a, c, g, or t
atagctttcttcaatagagaggaccctggaatttccaaaatagnntnggcttctatatcacccccatatgcaaacaagcatcataaattctgcaattcaaacatcaaaagactactttaatttttccaaaattttaaatttgggaaacttaaaaaaaaattgggcctccatggacctttggaaaaaaggagtggtctggacacagaacactacgggttgtgaaaatgcaagaggggacgaaagaaggcaagggaggacaaaggacctcaatgaatgcccagctaccacacagtttccacacaaccatacanatcaaaataaactcaccctggccccattgaattcactnannnaccacnnnannnnnnnnnangtnancattattnnnaaaaggaaattttnnnnnnaaaaaannnnntttgaaaccnnnncnnnataaatgaattgctttcccacttcatgagaatcgnnnnnnccanntcaagctgagaatattatgaggatataattaacac

SEQ ID NO: 8612 - DNA, 657 bp, Gossypium hirsutum
ctcgtcactgaaatcatatgaaacatctttcggtagctccccagagctttctgacagatttctgggggaggatgcctcaatatctgatgagtagttttctgacttggacaagccaccattgctttcattctaaaatcagaaaataaacattattttgagtcgtgaacttcctttgcaattcacaacaacaaccacaaacacatacaacttacagaacgacgaacaagcaagttggttgtctcaactttactggaaggagtggaaggagaaataaggcttccattgcctgtgaagataaaaattataattataattttaagaaattcgagcagataaattgatacatacagcacaagtaacagcatttataaacaaagtctcgcctttactactatcatcttgccctgatgtacaatcatgtctgtcctccctcgtatccggactaccttctccatcagctgtgaaaacttacattgatcaacatactacattgtaaccaaaaaacaaaaaataactaacaatacaagtgtgaaaagaagggcacaatgaatggcagcacacacatcatacacttcttgtgcatatcatcataaccaaaaaagaataaacaactaacaatgcagccactaatctatatcataacatgggagaagttct

SEQ ID NO: 8613 - DNA, 657 bp, Gossypium hirsutum
tcaccattaatagaagacagggcagagaacggtttagcacttatagtttaacgagtgggatgtaaatatgacttaagtaaattataggttcttagccatgatacttagttgctttacaggtgttccatggaccgaagaggaacatcggctctttctaattggcctccagaaattagggaaaggggactggcggggaatagctcgaaactttgttgtatcaaggacaccaactcaggtagcaagtcatgcccagaagtatttcatccgtcaaagtaatgttacccgaaggaagagacgttcaagccttttcgacatggttccaaatgatatggtttgttttgtttctttatattgtttttgcatttcctaaaagtagtagcagtgcctgtcttgcacatgcacatgcacatgcacatggttaatgtaaagttagttttctaagtgctaaggagaatatctgggtccactgccattaccgaaggaattcaactggcacattctgatcccaaatgtgcatggtaaaataaaatcatcttacactatagcaaaggagatcaacagcatatgcaatctagccaacaatttggttgcggctgggtttgggttgggctttgtgttgttgacttttgttcgaacttgagtttggtactgcacagc

SEQ ID NO: 8614 - DNA, 604 bp, Gossypium hirsutum
gagagcttgctaacggattcaagtgatgatattgacactttgaaggagagattggcaaaatatgttgtttatgagcgcaagctagaatcatctaggtttctagagtactgggttcctgtactcttatccaatgtgcagctagagaagtattgttttactctaatttcaaattctctctctctttgttccccttcaaagagtgatcctgttggagttctccgtaacattcttatctccaaccgaaaggttttgttacttaactttttgcttcattcacatgattctgtgagatttgggctctttttcttaatttataccttaactatcaagtcatctaattaaagtattcatcttgcgttcctgacattttgtgtttgcctgctgtatggactttggaaactaggactaggttatgttccaactataatcttggaaattttggacgcgttatactaaggttttccatttggagttattaatctgatgatgcttttggaaaatctcgaaatgcaattcaatttatttatattttggaccgccatggtttgtgacagctaaaacctaggatcttatacccaatactcaccccaaccttaccacttga

SEQ ID NO: 8615 - DNA, 627 bp, Gossypium hirsutum
tccatggattagcatatgtatgaattatggtatccttgacatatttgatctatcattgcaactaacgttttctccttatttctcatcaactattcatctaacagttgtcatgtgtaatctctgtcctcttaagatcagaatttctgatgaccttcaccatgactaattaacctctctttttagttagtcagctgttattaaaggaatcactatatctcttgaagaccaacatctgacaagcaatatatccaagaccccgttatgtgcaattaatagtacatacatgaacttaaggtaccattttcagctgaaaagttacactgcaataattaaggcagaaaatgcatgacaagaaaagggtaatgctatagaaatttaagcgagtaatggacctggtcaataatagcaagtgttccatcagctacaattgggatgaatttcttatccacctgttgcagaaccttggcctctgtgagacactttttactaattgatttaggaaccaatgatccagcaacaagattaaggaatccagaagcgatatcaagtaaagtatcttcattgtcagcatcatataatttgttattcctctgcattaataatacagtaaatactattgaccgctaa

SEQ ID NO: 8616 - DNA, 555 bp, Gossypium hirsutum
acctagagtgccactcatgaaaactttccaagtagtctctagcaagttccctttaaaaaaaaatagttttggaaagattattcaatgcaaaaccacaaataaactttgccaccttctaattattgatatttcatacaaatgcaattatctgttgtagtataaataagcatatcctccgaaatatcacataacagaagccactgctcttttctttttattattttgtatctcttgatcagcagttaagaagaacatgtttacacacctcaaattctgtagaccccaccacaaacagtacaagtatttggaaaagaatttagttgatgaaacaatgccagatgataaagcctgggtgaagattccaaaatcaaatggaggattatcatcattttcatccgctgggcacttctcattaagaacagaatctcgcatgcccttccatatgttgtaacctttcatttgctgattcccacaatacaagaaatctttattgcagtcactaccaatatccttgcatgcattctgccagcatgtatcatttcgctctacgctacc

SEQ ID NO: 8617 - DNA, 611 bp, Gossypium hirsutum
  misc_feature (555)..(561): n is a, c, g, or t
  misc_feature (563)..(563): n is a, c, g, or t
  misc_feature (565)..(567): n is a, c, g, or t
  misc_feature (588)..(588): n is a, c, g, or t
  misc_feature (590)..(590): n is a, c, g, or t
tctttgaaggaggttagtttacctttctatatgtttataggttttcacattaagttgcagtatgtactaatttattctttattttacatatatatatgtttcatattataatcaaatgctgtaaagagtattcaggtttattttcttgtttagaaatgaagttttcatctacaaggaatgagatggtgaaacaatgccagggtaagggaatataagaaggggatattatggattcttgttcctaaaacaatgaaatattgtgcagtataatctgaatgttatcatttttgcctcctttaattactgagttttgttgtaacaacgcctatcatcaccaggaccggttttcttcttgtaaaactatgcaaaacagaaggaaacaagaggttatgtatttctgaatgttacatttttcctatgtccaacaacaaaatgacaaaaaaggaatttgcttcaagctgaatacatacacatatatatggtctcatcttatgttgctgctcatgttctattgtagatcttacagtgttcttccctatctgtatcccaaaacannnnnnnancnnnaaatacatattcttttaatcngncgtctagatcctcgatcagtt

SEQ ID NO: 8618 - DNA, 584 bp, Gossypium hirsutum
  misc_feature (19)..(20): n is a, c, g, or t
tttgccattacaccatggnntcagttgacatatctttcacagattatttaaaagtgaaatttgaaatcaattattgccagattataaaacacatcaaatgctaacacatttaattcaaaacaacttataccactgaaatgatcttccacattcttcttttttccaggtcaaggcaaacaatatattgtaaccatttgaaagaacagctctgtgctttacctttgttaatgttgtaacctttgctgggggtgaagccctggatatgtctctgttaccatccactatcaagtagcgatacccactgacatgataagcattctctccaccccatccctttgacaacttttcttcaactttcaaaatcttcagtgaggcctaagagttaaagagattgtcagcctagccaattatgaaaagatattgtttctaaacttgatataattattgcatctaattattaaggatcattgtctattaggaatttgctttaatgcttaagtcatgcacatttcaaatgtcctaaacatgagttatcatttcagatattattatatctatcaagaagacaaaaggtttttaaaagg

SEQ ID NO: 8619 - DNA, 667 bp, Gossypium hirsutum
tagtgtgaaacaatagcctaaaaagtgttttattgagtttccttccttgtttgatatattgacgcataaaatgctttgcctgagaaaataaatgtagaaggatgggaaatggtgttcgtgtgcttattcaaactaagggatgttttagtggattataatcactatgcaagtaccggcttcggttacaggtggaatattttgaactgcatattggccattacctttaattggtgggattttagagttggaaatggtgcttggattcttaaatgtttagttctaattattcgtggtgctaaaattatttcgtctgtcgtttgcaactgccacatgctataatatgttccttgtatgcttactttttctcttccttttgttccatttgcagcaataatactggcattactggatttagtgaggaggattctaaagcagttttcaattttatgaagtctacagtagagttggcgaaatctggtgatcatttggtaattatgtcaattcttttctcatgcaccagctttattgtttgaggatacgtgtgggatacttgaatcccagtccatttgcaattccagaacctatacaatggatagcttctataagtaatttagaatataagagtttgtagtgatttcaagtaggctaacaatagtaggaccctgtg

SEQ ID NO: 8620 - DNA, 597 bp, Gossypium hirsutum
tcagttctagtcatcctcgacatgaagttgcatctctgcattccggttttgtctatgaaccaagaagatggcgttccaccaatgcttctgcatttgcatccatatcagcattacttgaaaagctccgaagggaaaaggatggcatcaaatcggaaaagaatggttataatattcatgaagattttaaaggaaaggacaatatggaggaggactcgaaacaaggccttgtcgtgaagagttcccgtaacatctatactatatcctctattattgaccgaacggctgcatcaaacatggttgaggcagtaagtgattttttcttgtcacaattacattatacgtgcaattatatagtctaccacttggtcattgataccatcaatatgtttctattaatttttgctcaggaaccatacatcatgaagctgacggaggatcagataatgcagttactgtcaggtttctggatacaggccactctttctgataatttgccttcaaacatagaagccatatcacactcttccgtgttgacgttaatttctttacgattgaaggtaaattgaaatgctacatggtgttaaccttgagtaattc

SEQ ID NO: 8621 - DNA, 605 bp, Gossypium hirsutum
  misc_feature (570)..(572): n is a, c, g, or t
gatcgattgcttgtcgtgtcaaggtcatggcaatagtcgtgcccacgactccaatcatacctgcaaaaattagaaataaaagtaaatcagggattttttgaaatgtttagaaactagataattgaaacaacataaataattaattaaataaattagaaaataaattcagaattttgcaacagataaaataaaccttagccttagactcggtaaatttcgtatcaagaacctatcctcaaaaattaatcttctcctccaaatgataagctggttatagcagttaagaatgtcctaaccaccaattcctcttctagtagctggttccgatacgacctgtaaaccaacccttaccgattatctaaccgagatacacgcattcccgattcaagattcaggcagctttgcattctgaagaacccaactcgaattaacggcctcaaccgcgtgggtcgtttaaatttgatcactttttcctcgatttgttctcggagatccgaatacagcacggccgactccttccttcaactgtcagctaacacgactccaacccaacatgcactttttgacttnnnatcgagttaaccttaagggatgggttggtcatc

SEQ ID NO: 8622 - DNA, 608 bp, Gossypium hirsutum
atctgcatagactggaactaactcttggccgcaccggaaatgtgctggaaatgatgaattgcaattgtaaaagaaggtaaggttgtggtttttatcggaatagcgcaggaaagagtatgccagagtcacatttgaaatacgactgggatctgaactacaaacttgatcccacaaatcctccctagcgattgtcattctataaagaggctgatccacggaaaccaatcggaatttagtctcgccaatacggatgactggctgatgattatcttcacattcgatcacctggaagccgtcttggcgacaatattcagggctatcctctttccaaaaggggaacaccagggcctttacgcttccacaatcaaaaccattaaaacactgcctaagactgggttcatcttgggtgtatgatactgggaggaggaagatgataaacaacaacaaagtgaagatggagatggagatggaaggggttgaaatgcagggttgatgatgcattttctttttcaatttctgaagagggaggaactgactaataaaacccggaaaattatgcagtatttctacgattaaaatgtaaaataaattataaagtggactatccc

SEQ ID NO: 8623 - DNA, 632 bp, Gossypium hirsutum
  misc_feature (626)..(627): n is a, c, g, or t
tataattagctagtgctgatctaaagcattatttattcaccccatttcaggattttagagaaaggagtaaacacatacgtgtaacataaactgtttgtgagcacttgcaagatgtcagcactgaagccattttcatcaaacaaaccgtggtaacgtgtggccttgcttgtcccctacacaacaacatcagtatcagatcggacaaatttaacataaaaaccatcacacttcaagggaagcctcatttaacctggattccagcatgactattgagataaaaatcaaactcagttggatgacagatgctagtatccacaacagtacctaaaatttattggctacattaaaatatgctaacaaaatgaagatcaagagaatacgatcaaatccctattataagattagaatcacctggtaatatgttgccactcctatcagttttgttgcgatcagtagggaataagcgagtatgatgcctcttttgaaccacaacaaatgtaacccgaggcatatatccttcctgtagcgaggaacaagcctggaaggaagaaaactgcaggggtcagaagcatccattatacagtgaaccaactataatagacattatacagtgatttcaatacctnncgaat

SEQ ID NO: 8624 - DNA, 590 bp, Gossypium hirsutum
atacgttgcacttcaaactatatcaatcaatgcataattgagatagaaattcctttaattctagacctcacaattgaaattttagttaaggtaacttgtatctcagtttcatccttattgttaatatgcttccaattccatccatttagttctagatggttactccagtctcaatattaccaatgttcaaaatacaggaacctataaatgttaacaaatctgaggaaagaagaaagtcacgagataagctccattctaagactaccgttgcagaaggcatgcctttgtcaacaacagcagtaccagttgaaaggtatgagcatacaataagttgtgaacaacaaggccaatctgtttgtctcgagaatcagagttagttattaagcaatatatttactgtagatgagttcattggctaatcatttatgtttttcctacttacgataccagcagtgatgttaatcttgccgaattgctaagagaagtggaaggtcttaaggaaaggaacaaatctatggagcgtgagcttaaagacatggaagaaaggtattctgaaataagtctcaaattgcagaagggaagggaaagac

SEQ ID NO: 8625 - DNA, 659 bp, Gossypium hirsutum
  misc_feature (36)..(36): n is a, c, g, or t
cgttggtgaagtaaaaactcaaaacgaaagacgggnaaagtttaaaacttagaaactcggaagactgaaaaactggaaaacttagaaaagaatttctacattgggaagaagctacattaatgaagccgagcactttataaacctttctataaacctttctataaacctttctatctgaggaagattctagaatacatttgagaactagacacctggcgagttgaaacgttgaaatcctaagtaattattaatactgtattatgtgtaacgcataaccattaatgtaagtattcacacgcgcacacctctaaaaaccatggatcctatgcatatcccacctgcaaatccccaatattttaaaatttgaaattcaaatgcgatatagtaattctcactccaataacttcatcgtttgacaatatttcgagagacgctattaaataatcttgttttagattgaaaaagattgctatatattcactttttaagtataccttttgaatttatttcttaagagagtcccatttactttttagacatatccctcgaaaacactaattaatttatattcatttaagctcatgtgaattatatttactaactatcacttctgatctcatcgtcatatcctatctaagtgattgaaagcacatcaatcc

SEQ ID NO: 8626 - DNA, 572 bp, Gossypium hirsutum
gatcctaatgaatttctttgccccattatattcggagattatgacagatcctgttattgtggcaactggacaggtaagataatattgttggatattgttgatgtgtttttggttgtggacttgacctggttcggagttcgggtgtgtttgcaatatacacgtaagattcggggcataagagggagtttgtgctccaaaacaagtttcgatgcttaagtagatgatataagagctcgagctagttcaatgcggtaaagatgtagggactataaatatatgagatgaaagtcgtaaaccctaaacctgtaaagttaaagtttccttaggcctgaagctattacaatttgctcgtgaatttggttaaaccttcttacatgttgcaagaaaactgatatgattgttgttgttgttgtttttgaagacctacgaaagagaaagtattacgaagtggctaaactcaaaccatcgaacctgtccaaagactggacagaccttggatcacttgtctctagcaccaaatttcgcactccgcaaccttttctccaatggtgcgagaagaacaactttgagct

SEQ ID NO: 8627 - DNA, 366 bp, Gossypium hirsutum
  misc_feature (295)..(295): n is a, c, g, or t
  misc_feature (299)..(300): n is a, c, g, or t
  misc_feature (307)..(309): n is a, c, g, or t
  misc_feature (316)..(319): n is a, c, g, or t
  misc_feature (321)..(322): n is a, c, g, or t
  misc_feature (325)..(327): n is a, c, g, or t
  misc_feature (337)..(342): n is a, c, g, or t
  misc_feature (344)..(344): n is a, c, g, or t
  misc_feature (346)..(346): n is a, c, g, or t
  misc_feature (354)..(359): n is a, c, g, or t
gcaatgagagaatcaagttctttgtgtgtaactgagaactctatgtcaaatggtgctatctgcaaggccaaaatccattaaaagttacatcttattaatttttgaaaaaagaaaaagaggggtaaaaaagataacctgttcccttaatatcaaaaggtgctttataaggaagagttgcccatccattggtgtggatctctttgcaactagtttgcttgctttctatttacaattgaaagataaaagagggacaaatacaaatagttagaaaaccaaccaagcccatggcatgtangacnncatgttnnngagggannnngnnttnnnattcatcatnnnnnngntnacatgatnnnnnnaaaatct

SEQ ID NO: 8628 - DNA, 582 bp, Gossypium hirsutum
catgcatacgtaaatcctttttttacaatccaagccttttgaaactgaatggattttgaaacaaaagatgttgcttcatttacagttcctttccaattcaagaaaagttacttgtattgaagttgacattcatttggtaaattttcttcatgtagggggagttggagacagcagaaattcaacctaaagaacacagtaagatcttgtggccctttaactctttgtctattattgagttttctaatttctgagtcttatttcaacacctctgatgcacagataccactcgtgtcaaatttcagttgaagaaagagtgctcatttggggagcattttttcatagtaggggatcatcctatgttaggctcatgggaccctgagagttgtatcccactgacttggtcagaaggacatgtttgggcagtagagctggtaagcagcaacttattgagaatgtgagatattcttgttgaaggctttattgacaactgatgagatctctttttttggtacttgctcaggatatacctgttggaatctcagtccagttcaaattcattctgaaaacaaccactgggacatt

SEQ ID NO: 8629 - DNA, 516 bp, Gossypium hirsutum
cagcttcaatagatgcatcttccccctgtttcagccaaaataactcgaaattacttttcagggaaaaaatcatgcataaactgaacattttcgtacacaaactgtgatttatacatggatgatagaacaagtttaccttttctttccagtaaaacatatttccatatttccctgccaaacggctccaaaagcttcggggaatgtctaagtcaacagaatccccaatattgaaattcaatatattgcctggtccgaaatccatccataattagaaaatttccatccatcatattagagtttaaagacaatgccgtagtcaaattctttaccaaaggtaggatcagcaacaaaaactatagttcgatcatctacttgccaaaagtctttgattgccaaccctgtagcaatttgagaataaacataagttttaaagagaaaatctaattataagaaaacacacacacagtgagatcaatgacacataaactatatattactcatacctggtgtgtcagg

SEQ ID NO: 8630 - DNA, 656 bp, Gossypium hirsutum
catttctatcagaggtattcctggttttctgctcttgaaaatatgaatttcacacttaatttattctcattagaactaactcattgttgactaagttagtgcacattcatgtgatctgatcactataatgagttatggtgcatattgtagtgggcgcttatgacactcttagacccagctcgtagcttggagaacttgatatacattggatatcctggcgattcttcctctgccatccgcatcactaggagaaggcgtctggataggaagaagcaacaatcagaaagaaatgttttccagtgctttgtttttggtccagcaaacgctgggaaatctgcattgatgaattcttttcttggcaggtattcattaaaattcttttcctgatatctaattcttttccccatctttttaactttatttactttaatataggccctatttggattcatattctccaactgctgatgagcaatacgctgtgaatgttgtggaattacctggggtaagtgccattatattatgcactgtcttgtaattttctggttaaagcaagcccccctttaaacacaaggagttactttgtcattttgggggattggggattttcaagtatatgcgtttcttggtgttatggagtctaaaccatgaatggg

SEQ ID NO: 8631 - DNA, 564 bp, Gossypium hirsutum
ctacgttgcttcatagaagtaatgtgtgtaggattgccgttgaagagctctcaactttaggtactgcgtttcacacaaagagcatatcaacaaagcagagagacaaatccggtaaaacaaaatgtaaatagagaagtaatcagagatgcaatcacaaagtttcagcaaaaacaaattgcacaaagctaaatcactaagacaaccgtttttagtgtaacattagaaacgaaattcaataccaacacataaaggccttccaaataacctttcagtggagaaaaaccactaatggattaatggaaaaaaacaatggaccatatatttaaaaaaaccatgaaaaaatcaagattgaactcttacaagttctagtagccaaaattgatattaccttatcaagtggtcctgaattggcctttttgtttggagtgatcacatgaatccctttacgcaaccagtcatggtaacagcttgcaacattagagtccgccgtacaatctaccaaaacagtatttggaataaaatgatttccatgcacgtgttgagtaaattttctaaatcagcaac

SEQ ID NO: 8632 - DNA, 480 bp, Gossypium hirsutum
cttgatcagactaaaatttccacacccacgaatgataatttatttatttcatttatttattaatataaaatataagtgctttaattaattggttattatcttatgacataaaaagaaatattatcttgttgattttggatattcctaattgaaagatttcatcgaaccatctaaaagagaacgatataatttacctaattttagtagaggttaacatatatttggtaaaaaggaaatattcaatcatgcatattcatcattacataatgtgatcgagcgaacctttgttgtacttaaaaaaattgggtcattttgaaggatatgtctagttatagttttgaaaaacaaaggttaattgttgttgctacaatggttgtacaaaatttcatatgaaaacatggaggtgtacattatgtggattttatggaatatgaaactaatgagagggcatataagaatattacagagctagaatcaggg

SEQ ID NO: 8633 - DNA, 588 bp, Gossypium hirsutum
ctgttgtgatttttatgatttgttaaaggtcatggaaaatgataaagaaatcagggcatacatgttttgtcgtaacataccttctttgcacataatacctgaagatgttcgttccacggtatgtacgtggctttcatttgattatctagtttaccagtcaaagcacatgatacctgaatcccgatgacatccattggataatttgtatttccctttttcactcttgttaacttttgcatggagaaataattcgttgttaacctccatgtctattaatgttctgtgttctggttgtcttgtaaggccaatatctcatttaaaggtctagtgtaatttcccttggtccaattgtataactttatggatcgagatgaccttgctagaaataagattaccgttattttttagccaaattgcagttattctggatgttgtagggccaatgttcagcatattcaaaaaatcccactttcaatggcagcggaagtccttttttatatgttttatgttattttatttctgttctctgtggataatgagctatgatatcctgaagaaaattgttttggtatcattttgctgaaaata

SEQ ID NO: 8634 - DNA, 357 bp, Gossypium hirsutum
  misc_feature (227)..(232): n is a, c, g, or t
  misc_feature (235)..(249): n is a, c, g, or t
  misc_feature (251)..(259): n is a, c, g, or t
  misc_feature (261)..(261): n is a, c, g, or t
  misc_feature (263)..(268): n is a, c, g, or t
  misc_feature (274)..(291): n is a, c, g, or t
  misc_feature (293)..(293): n is a, c, g, or t
  misc_feature (300)..(312): n is a, c, g, or t
  misc_feature (316)..(336): n is a, c, g, or t
  misc_feature (342)..(345): n is a, c, g, or t
  misc_feature (348)..(351): n is a, c, g, or t
tgtggggcaatttctaaattctatcataaattggtattgtatatttgggtgggataaaatttacagcggggtttgacatgtaacaacaccttttcattaaataaagtaatttaaattaaacgtaatctaggacatgttttaaaggaatttgacttggcatattcccgatattacttttttttataaaggaatttgacttggcatattcccgatattccagccttttnnnnnnacnnnnnnnnnnnnnnnannnnnnnnncngnnnnnnaaatcnnnnnnnnnnnnnnnnnngntttgatnnnnnnnnnnnnnctannnnnnnnnnnnnnnnnnnnnccaaannnnggnnnnaaaaaa

SEQ ID NO: 8635 - DNA, 606 bp, Gossypium hirsutum
tgatcagaaatgtagagatgtttagacttgtcagtgtcgtcaaaccaaatttgggtgtcggagttgatcctcgacaagttcttgattggttccgaaacattgggatcacctttttctttctcaccttcggacagctccgacaagtcatccgcggcgtcgttacgaccttgctcgcgttccagtcgtcgtttcgctagccttcgtgcatcatcccatgctatctgtaattatacaaactatatgttcatttcatttatttttaatgttatctgtttttatattgtcagtgtcagagaaaaaaggaaaacagattgcgactgtaatctattaataattttaaaaatcaatcgcgaagtgttattatgtgattcactaaccccatattaaatacaaactcgcatattaattatttatataataaatatatttattaaaagattacataaaaattaaatgaatatttaatgtttgtttaaaattcattatatttttattgattttatataaaatataaaaagataaaattactctcatataatataacttattttatatatagaaaggtatttaagtaactttttaattaaattggtgaccggttaagtc

SEQ ID NO: 8636 - DNA, 626 bp, Gossypium hirsutum
aacttgggcagacatatctggagacgttaaatgattcatcagctatctactttgctctcttaggcttcttaccatcttgactactcactgctcgcttggatgtcttcacagtcttcgcttgtttgttactagtattagttttaaccttcctacctttctctgtcggatcttcatcatcctcttcactgctaacatcattgttaccaccactgtcatcatcatcatcatcatcatcatcatcatcatcatcactctctttggcttttcttttcatagggggctttttaccacgacctctagggtttccccccttcttaggcttggtaattttagtgctttcctcttcctcattcgtaggttcatcaccaacgccatcttcatcatcaacattatcctcagcctcatcacctccttttttctttgaagcctgctttctaggtttacctgctgcttttgtagctactgttccactcaatttctgcaagtccggtacatatgcggatgtctgtaccagaaagtgaacagttaaacaaggcacttgatcgaccaacataaaccatattttagaatgacctaccctgccaccagcattgataaaatcaattttcttccctgttattgaaaga

SEQ ID NO: 8637 - DNA, 658 bp, Gossypium hirsutum
tgcttagcatattttggaaaggcctttgaaatatagaaatgtttttgcaatttgggtagattagtgtgacaataatgttgtggtctataagcattggcatttaattatctttggtcactttacttttatcacactttcaaaaaattgtattttgttaaacatgttcttagagtaagagttgccacactgaaattaagctgctttatgcaagaagggggggggagaacacagaccgttttatacaatttttttttcttgttgtcagaattgttctttagaactttgggatcagttgaaagtcggtttcaggcttttggcttctttcatatgaatgtgatttaccattcctgcagcttaggtttggttttgttttgttttttctttgagaaatctatgcatgccaaaaggattttcacaaattggctaattgaggatgagcttatgtgcttgttcaatttcacttgtattataattcctctgaggttccgtgttaaactaactctaaattactgtctctttttcctttctcccatgcatgggatgcatctgttgtaacattgtttgtcctttttgctgaatgaatttttgtgcttatttatgtttgtggaaacttatgttagctcatacataactttgcattgaatgctgtgaggggggg

SEQ ID NO: 8638 - DNA, 562 bp, Gossypium hirsutum
caatatctcttccaatgtcactaacttcattgaaggtatcatgaggctcttcatcagaggtgagttcacttgaacgatgaagatgcaattggagaacagctaaagggaggcgtccagagagtaacgcatcttttaccacagttttcaaatccagattatctattttccaacgtgcaatcatctcttttggattttcagttggaagaattttccctgagcccactccatgtcgaatgagggcagttgcttcacctggatcctccgagttcaaataagactcggtgcttatggaattgttgggcaccaaagcaagtttctcattattgttgggtaggaatgctaatgcaggaatttgaagctcatgttgattcagtgtctccagtgaatccactgaaggtgttgaaaactgaaattcatcctgcaaggaacttggatctacgatagttaatgattccttccggtccacctgtttcatatggaaaaattattacttaaaattccagagatagactacatgtatacaaccagcaaagagtatccaaatcataccaatgcttgacct

SEQ ID NO: 8639 - DNA, 645 bp, Gossypium hirsutum
  misc_feature (615)..(619): n is a, c, g, or t
tgacttaatgcatgatatatcttatatttgagaaacctaacttggaataaactgatgatatgtgctctttcaaactaatgatttctgtttattttttatattaccattttcatcaataacttttttttgttgctatgcacctgagcatatgggtttatagtaggttcatgtatcctcttctcaaagagctagtttcatatctctccaaattttgatggggctaaaagaccaaagagataacacttatactctatgctttgctgcttgctttgttaactgatcatgaaaatgggtcatctgatttgaaggattgaaattgttcaaagtatactgttccttgtcttacagctgggaatgtatatcatattctaaacttatgaaactctcagttcctgaaaaattgtggtggttgtgtaatgtaattgtggatctcataaatcttgcttattgtatctgaaatacaagtcctagcattgattcatagatgaatttatgctttacatgttttcattgtctctgatctgtccacttttcgattaccttcaacaaataatcttgtgaaggatgataggtgattcaattattgatggctatatgctaacgaaattaacctcnnnnnagttttgctttgcaagatgtgatttg

SEQ ID NO: 8640 - DNA, 596 bp, Gossypium hirsutum
gttcattgcgttttaatttatatgagtaaattaaatttaaagttagtaagtggtgacttaattaaaaaaaattgtaaaataattattgaaatattcagaagttttaatttatgtcactgattattgagttttttttttaaattctgctagtgagctccaagcggtaatttaatgatcgatatggtagatcaatatccgccgacaagtaaaaatataccttagatccaagtttatctgacaattaatgccggagaagaaaactgtttggattttagttcgtagattcatcactttcaaagttgtttcataaaaaagaaaattaaattgtacaagaaaagaggaatgaggaatgaaagcttttaattagtgtagttggtgcgaatagagaagtctctgtaacaacgattttaacaatccagtaacttaaatgaaaactttcaaacgatttagtgattattttgtaacttttttaaagtcaagtgactaaaacataaacttactaataatttagtgaacttgatcttacccttaataataaatataactgtacgaaattagctaaaaaaactaaaattgaacttcttaaaagaagtccg

SEQ ID NO: 8641 - DNA, 597 bp, Gossypium hirsutum
tcatggaatatggttggtttcgttaatggttttggcataaataacccaagtaagtttccatgatttatttaaattttaagcactgttatgtgccaatgaatattataagagtggtttttgataattcatgtatgccagttcccaaaattttgtttctttgatcttcattagtaatttatgacattttttcgagttggggcatattattatttttaataggtgattaatgacattttttttagcatcatgcacatgtcatacatcatgatccatgatccataaattatactcaatgtcattaaactattaataatttatattttagtcaattaacttcaaacaattatgaaatagttattgaattattaaaagttttcatttaagtcattgggttattaaaatcgttgctatatgggcttctttatttgcaccatctgtaccaattgaaggcacttcttcctcttctcttgtataatctagttttttttcatgaaacagttttgtacgttacgaatttgcagatcaacatttgagcaactttcttcttcgattttcgacaccatgttcttctattgttaataggtgtgatcactatac

SEQ ID NO: 8642 - DNA, 598 bp, Gossypium hirsutum
  misc_feature (54)..(58): n is a, c, g, or t
  misc_feature (330)..(330): n is a, c, g, or t
  misc_feature (344)..(344): n is a, c, g, or t
  misc_feature (408)..(409): n is a, c, g, or t
  misc_feature (412)..(412): n is a, c, g, or t
tttattgttgttctttctaatttagttattattttatatattcaaaaacttatnnnnntaaaaataaaacaattcaaccattttttataaatgtagtttaacatattttttttttaatttatgctgctgtatattataatggtttttgaactgatgtgttattgttattattttggtttggtttggtttgttgttgttggttaattggacaattgttgttttgttctgtagtaggtttctactgttctattgacttttgcttatgttttgtttttttattataatgttatttatttcgactcatgctatttacttggatttttacttctnatttttattataancttttttctttattttttttgtttattattaatcatgatgcttattatttatgatgatgggtgnnttntatcttttatctaattacttacttccttttgttgtttgatgatggataaaaactacaaacaaaaaaattattttttaaattacacataaaaaaaaacaaacaacattattttttttttatatttaaacctaacacaaaaaaataattccaatccactctattccacccccttccacccccaatcca

SEQ ID NO: 8643 - DNA, 646 bp, Gossypium hirsutum
acagtcgaatttgggactggcaatcgctagagaatcacaagtttgtcgctccagagcccttgtgccaccccagggagcatggcaaaatgtaatggtgtttctcttcttgctctctcaaagaatgtaattaaaacttacctggagactcttacaaattactacaaggaacttacctcattaattcttctggttgggatcctttattgggggcacttgtcctgcaataattcaaaatttaacatgacaaactattagcgtcctgaaataattcaaaattttaacatgaacaaactattagctttatgtcgtttatagcaatatatcagataaggaatctgcattcttgaggacacaagttgggaaagaaactcatggtgatcctcaaaagttgaacctatataccatacattttaacagattcattcagatactgaggaatatatttactccaatccagttcctccatattatactaattacttcactttctttcattgtaagcttcaaaatttggatttttcagaccagatcaaccttcttaggcaatttccaggaacatagctaggatatgtaactgagaaacaataaaatttccagcatgtactcagacatagtggaatttcttatcattctagagactgctgga

SEQ ID NO: 8644 - DNA, 576 bp, Gossypium hirsutum
gaggatggctagtggctaccagcacaggagtctattttcctgactgccacttctctcattgtactgaactgaattcatgggccggaaacaaaacccaatttaattaatgggccgaaaaccaaacccaaactttgaccatccatttttgttttcatttattttatttttgtcatttcaggaagtggcaccagttgaacatataatctcgaggaaaccaagaataaatattattaactagcttaggatagttaatttaatagaattttcttatataaaattatattagatattatatcacaactatataatattgtatttttaataatatttcgtttggttttcatattccatgaaagaatcgcaaaactttttatcctcgtattatacttatcaaatccctagcataaataatgattttagaatatttaagataatatgattttgatgggttttatttgatatggaattggagttggcagttgggtttgacgaaaaagaacactatgataaattgatttatctttcttgacttttttctttaatttcacaagccctaaacaaaaaaacgcagagcta

SEQ ID NO: 8645 - DNA, 655 bp, Gossypium hirsutum
ttgttagagagcaacacaggaagggacgatcacattctttacgataagctggttcgtatgtctgacatataaaagcctttggggtccaataagatgttataatctgttttgcatcaaatgaggcattcccattcaaggtgcgactcataggagctaaacttgagtcactgacgttcaaatagagggttttagcttctcttagtgtataagctattggtatatgcaagggattgtttgctcatggcatatatcatgtcaagagattagtccaatgtggtctgtggtcttaggccttagtgaatgttcttaatctatttgttttcattttccttatttgaattgagatcaactgtattttagccaataattgttggatatctatggtggtattcggtcaaaacttctttgaagcagctcttgtctgctattttgatgataggttcaaactttgttggtcctcgaaaaaagaaaactgatggtattccatgtgattttacatggtatgacagccgttaaagggagtaaatgaatgggggtgtgagtagaaagggggcacattaaaggaagtaagtgaatagtaaaagagccgtaattaaaaagtagaacatgttggcaggcaattcctcactcacaactagttttggtaaacaaagta

SEQ ID NO: 8646 - DNA, 363 bp, Gossypium hirsutum
tttccggtgctttggagtttgtcgggattggaagcatctaatatcaacacctttctttgcgcacaatcaatcaaattctttccattctgtctcgggtttcttttaccaatcacaagcaggcgtgccgtcattcatgtgtcttgaccctgtggcttatggtgttccagacccatctttaaagtttctgcccgaacctgttgatattaggtcctcttgtaaagggctgctttgttgccaggggcgtactggttacaaggcttactacgtctgcaatcctgttaccaagcagtgggagaaacttccaaaaccagatgctgatcatgggtctgaccctgccgtggtgctcgtatatggcccagcaaa

SEQ ID NO: 8647 - DNA, 632 bp, Gossypium hirsutum
acgagaattgaatttgagtatcatcgtcctatgaaagccattgcacttgaccctgattatgcaagaaaaacatctaggagatttgtaactggtggtttagctggtcacttgtattttaataccaaaaagtggcttggctataaggatcaggttcgtgatacttgcctgactttaatttatttgaaaattgagatgttcatgaattctgaatgttgtctattttaatgtgtttttaggtgttgcactcaggtgaaggtccaatccatgcagtgaaatggagaacgagtctcattgcttgggctaatgatgcgggagtaaaagtttatgatgctgcaaatgatcagcggattacatttatagaaagaccaagagggactcctcatcctgaaatcttgctccctcatttagtttggcaggttagtcaaatgattaaaatagaaaacatctgaggttgttccaggctttcttatgttgtctaaacaactgcaatatcatttgcaatattattcgttcttttgaagttttcacttctcctatgccctagtctttgtgaagcataggttgtttgccattgctcattgtctgaacctcttcaggatgagtcaaaagattaaaatggaaaatgtctgagg

SEQ ID NO: 8648 - DNA, 689 bp, Gossypium hirsutum
attggatggaggcacatcatatgttatgccatcactatctgtctattactgttaaaaacttcaaaacttgaatgaatagaatagaatagaatagcaaaaagtgagtccttttaaacagaaaatgaaagtttatggttctgattatttggccatggtattgttctttatcacatatgtatgactaaaactgaaataattttctttgcttaaggttttgattggtgtttttatgtcatatgtgcaggttatgttcatgtgggtcagtgtcgaatttcaccagatcacaattttctagcatacacgcttgatgctactggcagtgaacagttcatgcttcaaattaaggacctcagaaatggatgtattattccaatggaaccagtaaatggagttgttagcttggcatgggctcaagattgcaagactctgctctatacaattgctgatgagaatcaaagaccttacaggcatatttcttcactgtgttgccttatttttcttagaacttgatatgttgcccaacatatctctaaattttttgcagggttctttgcacgaaattagaaccgggtaatacagatgataccttggtatttatggaaaatgatcctagctattgtgtggacctaacaagtacaaaagatggcaagttcataactgtgaattcaaattcaaggagctcatctgag

SEQ ID NO: 8649 - DNA, 676 bp, Gossypium hirsutum
ttcaattgtgacctccacatttattctctctcaatacaactttaactattttgggaatttcagctataatcacaatttcgacatgtttttgtagtataaaagcttatgctgtgtcgtgtcaaccaagcctttggttcagcggaaaaaattttaggttcagagttcaaagatgaagaacccaattctctccccttgtcaaacaaaaattaaaaatgggactagattgagtaaagagtttcaaaggaatgtaccatgtataagggactaaggcttttctacatgtcaaacttcaaagactggagtcctgtcagccatttcatacactaaccattctgccacccggtttcggacctttcgattcgagaattgaaccaagaacaaattagagcctacaattttaatttgaaccgatccttcatcgctcccaaagagatttgcagttctaaaatattagctaaaatttcgtggacccacattaattttctaccattgacttataccttcctccaaagccgcctgtgggtatggcttaaccacgagcttatcgtttttaatttctccgtttggggaaagaacggtaaagattaggttgtgttactctaaaaaagctatctccaatctgttgaagattgaacctcacctcgtcgatggttcctttcggatcattcagctcttc

SEQ ID NO: 8650 - DNA, 597 bp, Gossypium hirsutum
tgggagttgattcttgcacaatctgacgatgatgtcttcacaacatttttacaggtattcatcgttcggtaatacatataaagctcttgtatctattactttttcatacagtagaatgttctagcagttttccaacatataaagtttaaacttgcaattggaccaccaaagaaccaatgaagcaatttttgtttttcatgcatgttttgaagtgttaaatatgctcccaatttgcacatcatgacctcaggtctaaacagccttcagattatatgatctatacccttcatgttttcttttgtatgcatgttaacctttttcttttttcttggtctgtaaacaggttttgcactacaagttacataatgacccttggaggctggaacttgctcaccttaaaaaagactacggattaccaccagaatgtttgataagaatcaagtgaagagcttttaaattgaagtaatataacaatgcgccaatccaaagtgaccaaaaccaaatatacattaatcaacattcattcttagctttataccaaagatttggaaagcggccaatatctaaaagtgtcaaattgatgcaagattcagtgac

SEQ ID NO: 8651 - DNA, 581 bp, Gossypium hirsutum
tgatgagtgcttcagccttttcagcttgtcatgcagcattttctaacaagtcgattccttattactgaagtttacctatctataatttttttatcttttgggagtaattcagttctcaaatggtacaggaagtaaaactggcaggtctcttctgatcgaggatggagcacttccttggattgtacagaatgctaacaatgatgcctctccaatccgacggcatattgaactcgcagtctgccacttagcacaacatggtaagcttgttttatcttcagagattttcaaaagtttcttcgaaaacctttataactccaaattcaccacattgcagaagtgaatgctagagacatgataaccggaggtgccttatgggaactggttcgcatctcccaagactgttccagggaagacataagaactcttgcgcaccggacgcttacttccagccccaccttcttagccgaactgaggcggctacgaatagactattgataacatttcagaaggtttgattgaagtgtgcacaagctgcgtcagcacgaaccaattcagactatagagaactgaaactcccaacc

SEQ ID NO: 8652 - DNA, 657 bp, Gossypium hirsutum
  misc_feature (651)..(654): n is a, c, g, or t
ttcaacgcaaaccatctcacgtttggaattccagctgccaaagatagaagtagacatttaattgtagaaaacaaataggcagaatagagcaaatcaaactcttcctatttcaaaaactcaacaagcaggaaaagtagtccttacttcctccctgaagtattttatacaacttcgattcatacatcaactgtggatgcttggtcttcacattttcctgagcaaaacaaaatatcatcaatttctaaacacaatccgtgcaattgaaaacactataaacaaaagaaagttgcggaataaattgcattatcgataccttataagggaaacattttttagtacacacaacagtcagacgaaagtcatactacctagattcattcagatgtatgattatcatttgatcactaaaatatcaatagaatcaccactggcttggagagttcaacttcaatatgctatcatgcagttgagcttgggagaagctcacaacgaaaactgctcaaatcattattatttaaacgctctggatgataatggcatgattcaagctctacagttcaatgatattatgaaatatatgcaaaacccacatgtccttgttcacgacatgcaagtggctttaagtaaaccagtagataaacacaaatctannnncct

SEQ ID NO: 8653 - DNA, 590 bp, Gossypium hirsutum
  misc_feature (56)..(59): n is a, c, g, or t
gagtacaacaggttgctttttttatgcccaagctactgatcctccacttagcatannnnttagcctgaagtactctttcgatcactcaaatctccagcataatcattgtctgtgtactccattagttcatgtgtgcaattcctcttgtaaagaatgccaaaatctgtggtagcttgaacatatctcaaaattcatttaactgccaacatatgtgcttccattagatttggcatgaatctactgaccagacatacactgtacatcaaatcaggtcttgtgactgtcatgtatatcaaacttcttacaatttgctagaataaagtttcatcaacttgtgctccttcttcctcctttgataatttgctaccaggaactattggattcctgactccattatgagcctccattctgaatttttcaagaacttcattggcatatttcttttggttgatgaagatcccattagtgtcttgatatacttctattcccagaaactacttcatctcacccaaatcagtcatttcaaacccatttttcattgagtttttgaaaccttgcatcattaacaaatcattacttataaaaatgaa

SEQ ID NO: 8654 - DNA, 396 bp, Gossypium hirsutum
agtgaggtgaaggctcattggaatgcaacttggctcattagaatgctacctgacttttcgttgccattgctagtgtgttctttagttcccatagatagtacatagaactcaagcatcacaatcgtcgttttctcttgtgcaagcttaagggtaataggtatcaagaaagagaaggttgttttcactgaggtagatgtcttattgtgaattttgctagattgaattggttttattgtatgtacgattctggttcagggtttgtgatcttgtgcgaaatttgtctttctgatggcatatcataaatctcagaggttattaaatttttaccttgtcttgcaattagaagcacaaattattgcgattaggagcagaacatgatggttgtttctgaccttc

SEQ ID NO: 8655 - DNA, 592 bp, Gossypium hirsutum
actgaagtttcaaaaagtagttttccatagttatttgatgagattccagatattagtgtgaccataatcttttgcgatcactctactactctactactagtttcaagcatgtggtcgtgttcatgtcatgcttatatggaggaagtctacttggttactcatttggaaagtttgattatgatgcatgagtagatatagaggtgtatttctgtcatttctataagcatttgcagatacataagttctcaatgcttattccatatattcatatatatactgtataaaattggaccatgattagatttgcattattttgtaagaatgtttttgggttctagaagttttgtttgtatttgtacttttgttgcttgcatttgattctgctgagtatgatttggttctcattagtgtggtttttattgttccaggggaattcaatatcgactaccaagtacaacgtttttacctttctaccaaaggggctatatgaacaggtaatcttattggagttctacagaactgaaactggtatatggttgtgtgattctttaggcatttcttatgataactttttactggtatatggttggga

SEQ ID NO: 8656 - DNA, 461 bp, Gossypium hirsutum
  misc_feature (454)..(458): n is a, c, g, or t
tttcagaccattcattactgacagatttgaagaataagaatgtctttaaatatatacatatataatttttgaactaatttttatttctagaaaactagaaataatttatcatcatatatcactaagatagatgaaatattattatctcttgatttccttttttaccgcactattcttttctaacaaaaatacttaaaatttaacttcctacttttctacttcctacttcctatttcccacttcctcctatccttctagccttaattcaaggcaaccgggattctctccagttttcctcaaccgaatcgtacttgaatcaagctttactctctcgtattaacaatatacattctacctacctaaaatcgatccaattttagaaacttaatccctcccaaacaaacaaaaatcccaaactagattttttttttttttaaaccatcaggtgttgatnnnnnaat

SEQ ID NO: 8657 - DNA, 315 bp, Gossypium hirsutum
gtatttacgcttgttggtgaagtgcgagatggcgataggagctgagcacaagtcacagtcctatgttagagtttgggggtttttcaagctgccatttcggcaaaccgggaacgctaccggtacgacgtcgtcttcttccttgtcgtcgaatctatacgctgaaactcaacctcagaacgaaggatcgaaccgtcatgcctctgccaattcggtttctgccgttgcgaagtcgcttttgccgactcggcgtcgcctgaaacttgatcccgccaataaactctattttccatgtaagttccttttaaaaaaaaaaaa

SEQ ID NO: 8658 - DNA, 656 bp, Gossypium hirsutum
aaccgagttccgacctccgcgagttatgaaccctcatgcacccgagtttgtacctacaactgagccagcaacaacagaagcaaaagctctccatgtgaatgaaggacatgacgtggcatctcaatccagcacctgtgaacaaccaaaaacatcagatgtaaatataaagaaaacccgggacggcgaaggatttacggttgtaacgaagcgaagaaggaagaggcagcagtttatgaatggagtaagtaatggaccatacaatcatcatcatcaatcaatatgtgcttaggttagataatgcccatatttcagtaagcaggatacgagggaaaagcaatttgcagatatgttctagtgaaaagctgggttttgatttctatgtttaatttgcagatgaggttgttatgtagctaaataatatatgtaaattccttctctttgtttacagattttgttttattaataaaaagtgccatttgataacacgaagtcgaattatattttgttctttttatttttttattaataaaaaatgtactttttaataaagtaaaatggcatttttgttaaaagtttctatctatatttattgttaaaaattgattttgtatgttagcatgagatatagatggtatgagacgggtcactaatgggta

SEQ ID NO: 8659 - DNA, 623 bp, Gossypium hirsutum
ttttttaaagctaagaacactgattccaaaagggttcttctctttagcccaaacaatgaaaagattagaattcaataagcgagcgctgacgagacagttcttgatgctagagaagccagataaaggaaacccaaagtaattcgaaaaaggaaattgcatgtataacatatagatataaagaatgcacctgtaagtggtgaaagtgggagaggggagaaaaataggagctgccatcgaagttgcagtgagaagcagcagtgaatttgattgctttttgttttcatttgtttaacaacccattttattattatttagattattctctaaaaattataaatacttttacattaatatttttatatttttataattatatttgaattataaatttagttagctcaaattaaaattcactttattcaagtccaacataaaataaaaccgactttatcatattgtgctgcctgtagccggatctttaaataaatctaagtaattttgataattacttatatttcgcttgttttgatatgtgaatttatcatcttacttttatgtttatatgataatataaaattacataaaaaataaactctaatatcttttaatttatactacaacat

SEQ ID NO: 8660 - DNA, 676 bp, Gossypium hirsutum
gagggcaactaaagcgctaggggaggatggtttgccagccttgttttaccagaagtgctagcacattattggagatgaggtcacttcttattgcgtacaaatactaaatggcgatatggaggtcagttctttgaattcagctaatattgtgcttatttcaaaaaattctaatcccatgagtctctgtaatgttttatacaaaatattggcgaaggcgattgctaatcgttttcgaagagtaatcgaaaaatgtattgatgaggcgcaaagtgcatttgtgccaggaagattgatatcagacaatgtgttgatagcttatgaaattcttaatacgcttaagcataaaagacagggaaagaaagggtctatgataatgaagttggacatgagtaaagcgtatgatcgagtcgaatgaagattattgaaggaagtgatgattcgtatggggtttgctacaatataggttgaaggggttatggattgcatttcttctgtttcttattcagttgtcattaatggatccattggggaaaaatttcgaccatccaggggccttagatagggtgaccctttgaacctatttttatttcttttatgtggggagggtctatcgagcttgttgagactagcgatgcaggaaggaagtttgaaaggggtgaaggtcaacagaagtgga

SEQ ID NO: 8661 - DNA, 566 bp, Gossypium hirsutum
  misc_feature (77)..(78): n is a, c, g, or t
ttgctacattcatacaagaattgcaagttcgtttcagtaatgacgatattcaagttttaaacgttgaagcaaaaccnnggagaatattagagtaactaataagacagttaggcagttagttagttaattatcggttagctattagcacatgttagttaagtttgctactataaatatacaaacaacgattgtactaaatgatagttttgattcaatgaatattttcacaagcattgtatcttaacagagcatactgacttgcaacatctcccaaatgatccttctccagatataaaatgctcttctggagcttagaaggtatgcttttacctcgtatatatcactatattttctaaacagagtatgccaggatttcttcctttatttccatattttcgctacaaacattactaagtctgccttctcattccctgttaatgttttggcataacagaagaaaggcgatccacacaaaatcctggattctgaaccgctcgaaatgatactgcttcaaagactttcagttgccttcattgacctgattgctactgccgaaaacatccctc

SEQ ID NO: 8662 - DNA, 599 bp, Gossypium hirsutum
  misc_feature (536)..(539): n is a, c, g, or t
tctttttagtgctagacattatacaaagtcaacaataaagatcctctgtctaggtaagtaacacatataaacagagataaccaggaagtaagagacaggaccaaggccccccctcccctccaaagatgaaaatcttttagtttaatcccttttaaattctaaaataacaagcatatacaaagataaaattgtactttgacccctttagaattttataatttaattttggccccccaagataaatttctggctttgtccctgcaagaagtgttgattcaaagaaaataagtttattgcatgaaagacaaaaaaaattagatatcgtcacctgctcaacattacaataggagcaagtgcaagacctgcaaaatccaaaagaaagtcagtagttttctaatatttaataagttcctgaaactgaattaaactttttcttggtagtttgcatggcaagactcggattaaactcaagcttacggagttaaaacacacaaaacatcaagattcatatgccatatgtttagtaaacataaagnnnnacttgtgtaagatttataaaacggaagagcagcaagtgatatacgacagaaagtacagga

SEQ ID NO: 8663 - DNA, 637 bp, Gossypium hirsutum
acgcattttgatgcttcttccagtaattgtcctggaaaatattgccacgaaatgtcattggatctacttaaaaaatgggtactacttgaatgattaaacaactttatatatggccttacctgattcatatcaatggtttgaagagcttctccccgagtgaaaactaaagcatgattctgattttcaggttttccttctcctaacttcgcatttccaggcaactttattcgatagatttccttcaaagaagataaaagaagtagtcagcaccatactgacacaggttgctctaatttttcagtttatagggaccactacctggtcaagattatcaacacctttaaccagtacagaatagtaaactttctgagcttttccaccatccctttcttcaatttcgtcaatgtatgccacacgaagagagggattactgtataagaaaaaaggagttagaaagggagaggtcaagatgtcagaaaaaaaaaaggacgtaaaaacatattatcacccaaggtactcacttaaccatcaaattaaggatgtcagttgcacaacggtctccattccttttttgatttccatagttttgacaggtagcaacataagtaaattttaagtcacccactgcctccaactg

SEQ ID NO: 8664 - DNA, 379 bp, Gossypium hirsutum
ttggacgtctagcatttccttaggtggaaatactattgttcctgttgcatctgagcaattttcaacttatttggctgctcctgagtggcaaaagcatcatgctgcgttgattgcccttgcacagattgccgagggttgttccaaggtatatatgtagcacttttaagcactagcactgttatttgcgaattacattattgttatgtctaactccagaagcgtaccaataaaattgcttccaactatggctgtaaatgcatgtgttttccatttattacttgaacaatgagctggaattcgtttagtatctcttgattctggtggttttaaccatacctttccttgaggatttagttcatgttttgaaagggaaaaaaaa

SEQ ID NO: 8665 - DNA, 604 bp, Gossypium hirsutum
atcctgggatgaagaacctgtggcacgggtgggcatttctgtggaactttgtcaagcccatttggcagcattgaaggtaacctatcaataacaagaggatctttataaagctttgcaaataaagttcaaaatagccgagtcaaatgctaatagggagatgtatcgtagaagtgtaaattatcaaactaagaacacaacaaaatcaacacaaaatatccaatattgactcctacccattgtcgtagcagcaaatttagtcatgataatggacattaaatagtagcctcttatataaaccatttagtaaaagaaccacacctatcattagaaacatcttctccagccgacttatctactccaatttcatacccatacaacctgccgcttccatctgcaccatttcacatttaagatttaattcatctaagaaacagacatttacctaagttgaaacaggaataaaaaaatagttgggaagattaccgattccaagagaactatgccggctatggatgccacttggtaggtcaccacagtccaaggttgtctctacttgctctaatacattgtcctcagaccctgacacagaaccattccttgtact

SEQ ID NO: 8666 - DNA, 591 bp, Gossypium hirsutum
tgtatcccttgtatttttagaagaacattgtgctatcttttcctgttgcctatgattttgtgctcatgagatgaattttgagataaaaatttaaagaaaaaagttgaaagtgctttatgttgaccccttgtccaaaaagaacagaggggatccaaaaatgcttttaggagaagcactaagaagaaataaggagagcaaaagaaattagtggttaggaagagtaaaaaggataagaaaaataaattctttatttcctttatgcatgttgcagggagttgagtcgcgcttgccttgatgccctttattggaagtttgctgctgaagcatggaaatatgaccactagggaagctaaaatgtggtaacgtcataaatatttgataatatgtatatggcaatcaaccaaagcataatgagggtcttcagtttatccacaattttatgcatttaatggtgaatggtgtgattttgttttgttaggtttgtcttcaatatttttagtttgataagatcattcaagaatttgtattctatttgacaataaaagaaaggggggatagcaaagtaaagggcatcatatcttaaaaatataa

SEQ ID NO: 8667 - DNA, 457 bp, Gossypium hirsutum
tgcatatccatctttataaagcttaaaaagttgatttgcaaattactatgtttcaaaacgcaatttaaccctcttacattccaagacagaataatgatgattgagagtttggaggtgaagtccctaaggtataatcatttgttaaaatgctcttatatattacaagctgtgtttccattatcaagtgtaggggctttttctaacaaactgtaattccagaagttaatgatctcccattatatttatatatgcaccacccaccttcaaataaagaagcaattaagcatcgctttgttgatatgtctaaaactcgtgaagttggagaagaaacctgtgaaaacaatatgtataattcatttgtcatatgatctcttttaagtaaaattcccgaccatccaactcaaatgatcgttttctttagtttaccttcagttgcccgattggaatgggttaggag

SEQ ID NO: 8668 - DNA, 626 bp, Gossypium hirsutum
agattttgtcgtatcttagaggcatgaccgcatcttttcttttcttttcttttttcccaactggtgattatgtgagagttaaattccctccatgtttcaatcatgtagcagaagtgaagatgagatacttaaattgttactcttaatccaaaatctagagcagagttatcatctatgctctaattcaggccatcatagatatatgatccaagggcttgggataagcattcacatatttttcaaagttacaaaactaattgattttcgacatgttttatgtttacccaaagccggaatgttgcaaggcaaaagaggtgagacagtggcataacaaaggaaaatgcgattgggagcccaagtatggtatggaaatgacccacatgaaaaggccattcatcagtcaccaccgcagggggtcctaagggctttcagtcttatctaccgacaaccatcaaaagctacgcgttgcccaaaatttgataaagtcccactccctctgtcatcagtctcaaccaccacaactgtcgtactcaccctttagccaacagagcagtttgtccccggtcctagcagtacggtcaagcacaggtgtcttgtaccttttccgaaaatcacccaatgtaccc

SEQ ID NO: 8669 - DNA, 638 bp, Gossypium hirsutum
agtactttacaagggttttatagacacctgttgcagaaccaagttgcactagctgtctcctcctgatatggtatttcataaatacatcagactcttcattcattacacattaaaactagcaaacagaaaacaaaggaggctcaccgatccatttgttgcttccatagcaaagaatatcgatcacgtatgcttccaccagaactaattagagcatctacctctgcttgcttattcctttctgatctctccttttgttgtctgattagtgttcctcgaaaatcttgaggcatgtaggtcataactgcaacccagagatattgcatcagttgatcatataatatctactcaaacatatatgtcatatctgtaggtcaacaagacaaatacttgtttgtagcacacactgattaataaaatttttgccccttgcaaaacatagacaatacctacagatgtgaagatttaaactttaaagctattggatgcaaaatacataattatataaagaagcaagtcaaggttatcaaccccttgacaaagcaaaatcataattacataatgcaggtcattacccttcccccctccccccacaacacacacacaccaaaaaaaaaaaaaatttaaaccccatttttggg

SEQ ID NO: 8670 - DNA, 884 bp, Gossypium hirsutum
  misc_feature (346)..(346): n is a, c, g, or t
  misc_feature (390)..(390): n is a, c, g, or t
agaattactcttcaacttatcagatcgcaacagctaaatataacaagacagtgaagacaaacctgcggaactccaaccaagtactttacaagggttttatagacacctgttgcagaaccaagttgcactagctgtctcctcctgatatggtatttcataaatacatcagactcttcattcattacacattaaaactagcaaacagaaaacaaaggaggctcaccgatccatttgttgcttccatagcaaagaatatcgatcacgtatgcttccaccagaactaattagagcatctacctctgcttgcttattcctttctgatctctccttttgttgtctgattagngttcctcgaaaatcttgaggcatgtaggtcataactgcaacccngagatattgcatcagttgatcatataatatctactcaaacatatatgtcatatctgtaggtcaacaagacaaatacttgtttgtagcacacactgattaataaaatttttgccccttgcaaaacatagacaatacctacagatgtgaagatttaaactttaaagctattggatgcaaaatacataattatataaagaagcaagtcaaggttatcaaccccttgacaaagcaaaatcataattacataatgcaggtcattacccttcccccctccccccacaacacacacacaccaaaaaaaaaaaaagcattaaaccacatatttggagctttggtgacggcacctccaaagctgttcttttgcattcctcccacaagaagcaaaatatatatatttttataaaaacaaaatcgagaaaaagattaactctatcattatttttctggttaggaacaaatttcagattggttgaaatctctgagaactaaattaa

SEQ ID NO: 8671 - DNA, 579 bp, Gossypium hirsutum
ggagttacacttggtgtgccaatttttaacagtaaaaatggatgaaatttttaacaaaaagactattttgctctttgattgaacctacgaggactaataagaaaaatataatcagactcttagtacaggagacgctgtggtacttttaccccctcctatgaaatagatttatcttctaaagtaagcatcacatacataacatttatatccaaatgccttaatcaaaaacagtctaattactaaatactctaattaagaaaatcaagcattttattaatacaatcaaaactttttaccagtacccttttttattttttaagaaatttcaccgttttcaatatttctctaaataccaaagattaaaaaataaacccaaaaaaaaatcatcaagaaaaaaacaaacaaaattctaaaatcaattaaaacttattaccataactttgaagggtttggtcatctttcaatattcgccctttataaatcaatcgttgctgatcagctgggatatcacaattctgagccaaaagagctttgaaagatccaacggttgattcaaggttggtcctcaccgtaaatttt

SEQ ID NO: 8672 - DNA, 558 bp, Gossypium hirsutum
aacattttggcttttctttttcatgaatttacatggattatgagttattcttgatggccaaagttgaaaatagttgggaactggtttcaggttctataatatttgtcagagtactagttattttattatcatttgtcattacccttctgacctgatgaaaatagaatgaatcctttctttcagagtactacatggtttgacaaggtttgatatttcattggtcgtgtagttgctagatcttcatatctgcttaagttaggctatattggaaactttcttttaggggtgagcaaaactcgattcgactcgaaaaaattgaaaaaaaattcgaatttcgagttaaacgaattgagttattcgaatcaactcgaattttttttttcgaatttcgagtttgaatcgagttgagttttcaaattcgaataactcaaataattcgaataattcgaatatcaaactataatattttacatttttaccccaaactcctaaacttttttactttccctcaaaacttttattccttcctacttttctcccaaaactttgactcctctc

SEQ ID NO: 8673 - DNA, 554 bp, Gossypium hirsutum
gtctctcttctctatcctcggcctcagtcgcccttcccccctccatttcaccgcactttctctcacgcgccgtcacatcgcctgtctcttttacttcccttttgaaattttcagatataatttatagtaatttaattgctatcaaaataaaaatagagaaaatttggcaaaataaaaacgataatctaattgctcccaaaacaattaatcttcaatggataaaatagtatttatatattaaaaaaattataaattaattatttcattaaaaattttgatgataagtgatgatttggatttcttaaagttttttttgaggtaagttacatggaattaaatgatgaataagattaggtaaaaatattacggatacccatatattaagagtcggactgtatttttcttatctattcaaaaactatttaattagtctgtatacttcatatcaaaaaacaaattagtctttttattatccatttttacttgtaagtgacgttatgattgaccaaacaatcaaataacaatacgtgctatgtcatgtgtacctgacgttg

SEQ ID NO: 8674 - DNA, 612 bp, Gossypium hirsutum
  misc_feature (371)..(371): n is a, c, g, or t
ttctttcatcataataagtctgggatacagatttgaaaccaactatgagactcttatctttgaaaatcacgagtttatgcttgtattttttcttgcagctactgaatctcagtgggattttgacagttttcttctgtggcattctcatgtcacattacacatggcataacgttactcaaagctcaaggataacaacaaagtaaaaacattcctttgtcttcaatgaatcttcaagaaccaatactatgacatgtttaatcctcattctttgcaccggttgatgttcaggcatgcatttgcaacaatgtcattcattgcagaaacatttatattcctatatgttggcatggatgccttggacattgacaaanggaaagccagcagtgcaaggtttttttttcccctcctttctgatgtatctttccagaaaattaggcggttgtcactcaactaatataactccaatatgcaacttggttgattgagcaaccggctataatttcatatgattctaacttggatcacattctggattcagtgcaggaacttttattgctgtcagctcaacactgtttgcattggtgttagttggaagggcagcatttgtgttcc

SEQ ID NO: 8675 - DNA, 643 bp, Gossypium hirsutum
tcattcgctcttcaattgaacttagcttacgagattggtcactttcgaaagatagaaatcacgctccctcttggcagcggagatttctaaagccaacttctgctccctaattgcactcttgtaagctatatgagaaaagaaatcaactcagacacaatcaatataaacattacacatgtataattatatatagcaccaaaatcattgcaaaacagagaaatataaaccaatgagttaccaatttcttcagtaagatcatcccatttgaatttactcaagtatttgatattccaaatatcataatagaacgatgacctcttcctcccacctaatcacagtgaaaaagaccaaaaatgtaaggacacacaatatcatcacaaaatgctaatacatgaggtaaaagaatcacagaagcccctgtattaggaatcagaatgcattttgctccctttactcaaaaaattggcaaattagtccttgtatattagatcaaagagcaaatttaaattttctgatatgtgtatatatctgacacaatcatatttaaattttctttttaaagattatcaatatatttgaaggattcttggagggtcatatccccattccatatatgaaagagttagacatgggtgtagaacac

SEQ ID NO: 8676 - DNA, 673 bp, Gossypium hirsutum
tgaggttagcatctgatgtggtggtctccatggtattttatgtatgtatagcaattactggccgtccaatgatgaagtttgagggtggatacactgtggagactgtgtttgatggaagtaagcttggggttgaacctcacactattgagattttgcccagtggagagctgctaattttggactctgctaatagcaacctttatcggatgtctagttctttatctctgtgtaagtgggtttcttctttctcgtagtattattcaaatggttggctttgttaatttttgttgcatttgcattagtaattcaaattgtttgccttgtttgggtaatgctttgtttttttagtgtgatcttttcttactgaatgtttcaaggcttgttattaatggaaaaagttgaggtatttgcatctgttggcagtgagtcctgttgctgaacctgcctcataaaggacagtgcacgtttagctgagttggcatacattctccattgtccaagtgctgagtgcaattttttattttgatggtcttgttagagttagagcaagttgtttcatctgtcaagcattttaatgtacttcaaatgcatttccatttcatatatttgaaagatgccggttatagaaatatttgtaagttagaacttagatgaatggtgcagatgttctacc

SEQ ID NO: 8677 - DNA, 568 bp, Gossypium hirsutum
catcaattgcgacatccaaaagccgtttcaatttatttcataaacatttaagtacatgcataccaaacaggtagataatggataattggatcagtcactaataagtacaacataaactatggaaagtacaaaataaaccttttgaatgatcaataatatgcaaagttcccaagctttattaaagtaatttgtataattcacagctttaattaaaactaggcctaaacccgaggtctgataccgtcctggtaaacataattaaggacacatcttttattattctataggcaagcacatgcatttaaataatttactgcaaccagctctgccgtaactaggcagacattgttaattatttttattcatcttttaatattttaaacatgaatctccacagatgttagatgcagcagatgcactaactgaattatcataaaactattaacccattgagtccatgaaagagttattcgttataaaacttggatttaataatcatttaaccatgaaaatgaaccatattgttagggtctttccaagatagtaggggcgtaactaagaggccggt

SEQ ID NO: 8678 - DNA, 585 bp, Gossypium hirsutum
  misc_feature (62)..(65): n is a, c, g, or t
tcatagatgcccctatattaggagtcagattgcattttgctcctactactcaaaaaataggnnnnattaatccctatacgttagttcaaagaggtctttgtatgttaatataaggtacacatggcatgaaatttttaacaaaaggaccggtttgctctttgagctaatgtacaaagactactttagtcattttttgaatagagaggaaaaatgcaatctgactcctaatacaatggcgtctatagtacttttgttgaggcaagggtgctccagcaattaccatggcgcaaaagtgggagcagcagaagcctatgttcctttgacttttcatttttttcgagtgttagtgtccgacacttttgaatatcaaggactctccatatacatgaaaaacttcgaaaaaaaattaaacatacacatgttaaacaagtacctatatccggcactcataccagaatcctagacagaagcaactgctcatgcaatgagaatagattaccaaatggtcttccatctaccataatttctactatcgatacatgtccattatcttatatatgaagatgcattatgatggtatctttg

SEQ ID NO: 8679 - DNA, 646 bp, Gossypium hirsutum
cggtgatagtgtttgtaaaattaaaattcgagaaaatggggaagagtatatgttatcaaagacttgacattttatgcataattggtgttatgaatcgcttgacagtggtttcatggttgaccggagttcatcgttaggttggtatgataattgtgagactatgatgcaattttcagtagtttgatcagagtaatgcatctctagtttgtttatgaattcttcaagtgttttgactattgtccttttatctttctcctggattattctagatacttttatatcaatttatagtatcttatttatcatttatattatgtcatgtttttatatttttacggttcatggttattattagtggtaacaattcttataaaatgctaaattggtttttgtaaatataaattttatatttaattattatcttattttcgaaagtaacatatttggtattttaacttagacttgaataaaataatgattaaaatttttatactcacgagttcaaacatgacctttacccctgcccaataatatataaaatacgtttgatattctataaataataataaaacatataatctaccaaaaattttctacaaaagaaatgaaagcacttccatttgccggccaactattagcattaggt

SEQ ID NO: 8680 - DNA, 671 bp, Gossypium hirsutum
aaaagagatgagaaactaaaataaaaaagtcaagcttacagcagcagacaaaacgcgtgaaatgtgaacaaaggagataaaaagaaagtgttaatacctgttttggcccctttattatagtgaaattctcactttggctcttatattatttttccagtcactttacctcccctgctttcattatgtccatcaagttagccctctgaacatttccgtttaaaaaattttctcagtgttggtcccttgacttgtagtgaaatgttatactatttgtcgaaacttttttttaatatcgactttttattttaggaaaaagataaaaatgggagtcgccaccaatctcttttttatgaggtgtgatcggatcaccttataatttgatcattttaataaacggtttgatttactaaaataacaatttttggtctacaagattcaagaaatgagtttcggagtcggttacgcacgaggaaggattagcacttttgtaaccccaaaattggtacctaattggttaattaatgtcttagtgtcgtgaattgaaaatttgaaaagagtttaaaacacaatcctttttgtactaagacaatatctaattaaagtgattttcgcaaaaaagacttatttcaagttaatcgaaaaaaaagatcacgtccagtaagttaggacac

SEQ ID NO: 8681 - DNA, 676 bp, Gossypium hirsutum
gaccgatggttgttgttttttcccctttgggccatcccttttttttgttttttttggctaggcttttgaggtgtttgaaattatatattttccttcccaggttgaaactaaatcacgggaatttcagagttgaggttccggaatatgatgcaagtaatccgcttccatctataccgaaagagctaatagatcggaaggcatatctaatctgggaaagtagaggtagaccccaaagctcgccagaacagcaaaaggtgtgttatggtgcaaaaagatgaattatcttctcagtctccttttaaatttatgcattgcttttcatttgttcaagcctaacagttctattcttcatatgcttgttgccatctaacttcccttttctttgcaagctagtgaaaatcagtttgaggaaattcataaacatcattaagttatcgaaactagtatatgcgttatcatgcgtgttctgattttccagatactctccactctttatgttacattcagagttcagaccataacttgaaaccatttttactatctgaagatatttctgcgaccaataccttgtgtttggaaattttctcacttcatgcaagtactatcatttcctttctcatttgtagatcatgatggttcttttcctcctttgcgctctcagctatttgctgtttag

SEQ ID NO: 8682 - DNA, 616 bp, Gossypium hirsutum
tgtatcaaatgattcattttgttagtgatgtcttgtgttctgaatctgattaattttttatcttgttgcagtcaggcgcacccaatcttcggcgttcatctagaaagaggagagtttctgtgagccttaacaattttactgatagttccggttcaggggatgaagacatgatggtaccttccaagcatgcaattttttggaattcaattatttttctcggatttgatgccatcgtattcacatcacagaaatgtgttctgtttcaacttcttgctattttttttcagagatcttcatatcagactttgagcaaccgtgttggtaacagtgtaagtcaagatgagtctccttctcccaaacgcaaaaagaccatggagactacagaaactcctcggcgtgaaggattgcgccctcgtcgttcaaaagcagttgcagttaagcggataaatttggattatcatgctgagcaagagacttcggaggagaaagttggtgaagatgaaactgaaaatgggaatgatttagatgatgatgctgcagatgatggtcaaaatgagagtgagggtgatgctgaagatgagggtgatggagaggctgagggtgagggtgaagatga

SEQ ID NO: 8683 - DNA, 621 bp, Gossypium hirsutum
  misc_feature (616)..(616): n is a, c, g, or t
cttatagatacatcaaactactaaagtaaaagggtcaaaggtctcaattgaaggaacttttcaaatttagaagataatgcgatatacatttaaccgaaactgcaaccatgccatttagctcaataaatgagctgattgccacaggttgttgctatttagctcaataaatgagctgattgccacaggttcctcgtacctccaaaaaaaggtaagcctcaaaggcatggagacaaaataagatctaatacaccagccatatataataaagattcacttacaggtctgctcgtccagcacgatcttgtttgtctgcctttccaaagacattcaatgcaaagccctctagatgtaaatgatcttcaggtcccaacttcagcgttttcttatcctgcaatgcatcaaatatccttggatatcaaaatcctctaacaatatcgaggagagatatatagtttacataaataaataaaaaaatttcctcctcctgaaggataacattgattacaaatgaacaaagaacctttaaacaatgtgagggcattacaggcagcataaacatggcatgaaagtagatgctgcaaagtggatcccaccaattgattttgcatattaagtnaagcc

SEQ ID NO: 8684 - DNA, 660 bp, Gossypium hirsutum
cactccatccatcatttttaatcacattggaacttttaactagttgcaagagataattatcttcaactggcagtataggccacttgaaaaatatggagagatcatcacaacatgaattcaaatagctccacagcaactttatccattccaaacttggctgtccttcatgaccaggaacccagcttaccttttttgcaagttgccaatcagctggaagtaatttcaaaaacagcttctcaagcagatggcatgatagaaaagaaagatttgattgctcactttgggccatatcacatagtttgctatgaaccacttccaaaagttcacaataaaccaattgttgcggaagtaaatccttgagaagaccatactcatccccccttgctatatagattctttcaccagctccattcttctcaaatgttgtaacagacccatctgcgagaggtaacaaaggtaaaccaaacaaacaatcagcttgaacaggaatttttaagtcaagcaagcaatattcaagggtcaagatcactgcattcctgtccttcaaaccacgttttcgcctagataacagagatcttaaaaactgaggtgttagataatgtaatgatggacagacatccatgaatcgctctactactggtttgggaacatttgcaagag

SEQ ID NO: 8685 - DNA, 619 bp, Gossypium hirsutum
  misc_feature (604)..(613): n is a, c, g, or t
caaagaatcaaacaaaatttaatctttaagaagaaaacaatgaaaatgaaatcgaggaaaaagaagatttacgtggtgagagaagggagaaatcgatcagcgaagagagataaggcactgtatttcactatcggagaagctcgcagttgctttcaaatcacaacagcaaaatgaagttaataatgaagtaattttagctttgttctaatcttttacagatataattaattagatttcttacatgagaagatcgaataagaaactccaccgatttctttcggagtggcttcatttcattggaggaatcagtttggcgggagacttccatttgaacaaaaaggaacagaggcggaatggcttctattgaaagttcaaaaccaaaccttcaatagagtcttgcagcaagaccggaatggcttctattcttccagctgctataccgcagttcaatcaaccttacaaaataattaaaattattgttattttacattttattaaaaatatgaattactattgagaaattatttctaattatttaatgacattttaataaaaatttccatatattaacatatacttttgctaattttttatctcgagcccnnnnnnnnnnttaaaa

SEQ ID NO: 8686 - DNA, 623 bp, Gossypium hirsutum
cagcgtttacattgaacccactgcattggacaggtcttgtattcttttcctataatttcataatgcagacaattagtaaatctaactttatcatttccattcatttctatttatttggttctacatgcaatttatttctaatttcaacaagttagcagagaaatcaattgcatatatataattacaacataaataatttataattagattccaactttttcacctattaattatttaatcatgaaatcattccactattgtatcataactgaactcccctgaatacataccattatgaaagctatttaataaatgctcgtccaatgacgctgtcataaatgtgctattttcataagatacatgattttggtagttttttacctcgaaccttgaaccacgaactccaaacccttgatttcgagccttgaaccttaaactttccgaactcaaaccctaaatcttataagatttagcatttgagtttgaggtttagggttcagaattcaagactaggattcatgatttagtgtttgaggttcaagtaaaaaaattacccaaattatgtgacaataacataaaagttactgaaatgtattaaataattggaaaaggactgttgtgga

SEQ ID NO: 8687 - DNA, 603 bp, Gossypium hirsutum
atcgagaagtgttcctgcccctcaggtagacttgtcactatgcttgcacttttgtcaattacaaactatttaaatgtttgtttatttcccatgagaattttttgaccattttacttgaaatagcttttgatcagtccttaaaaccatatgtatggaggttgtttgagtatagttcttactgtttcttttaattttaggccatcaaaatacttgatgatgaaatgcagtgtgacatcataaaaattggaaacttggttcgcaataaggtatgtgtttcagaatttcctttatttatttgattaaaattttgcccattttacttttgtgaatctggtataatggtcgctattggtatactagcagatgcttgagttggtaggtgaaatctgtgtcgagcattgattatttctttaacttgtagttgagccttggttgatcaatggatcttatatcgctggatcacttgaactttaattcttttagcatacactcttttagcattatgtagggtcaactatgatgcattgcaccactaagaagatttttcgacaatatgatgccccataaaactcggattataaaatctgagtgcctttatgtttc

SEQ ID NO: 8688 - DNA, 610 bp, Gossypium hirsutum
  misc_feature (598)..(603): n is a, c, g, or t
cttgcctccattggctaaatgttgaggtgttattcaggcatggtctaattactatgttaaaattttgattttaatccctatactttaattttttgtataatttgatccttttagaattttatggtaagttgataaggttgttatgcaatcatatagttaaggcaaatgtgaaaatccaatcaatcctatacaatctataataaaataaatttaaatattagttaaatgcttgaagatcgactaatgatgttatcaatttaaagctattaatgacattataaaataaaaggatcaaattatgtaaatatgactaaaatcataattagaccactaagtattaatgttgaagaaaaagataaaattagttttctttttttttttttcataacaaataaaacccagattttttagatgctactaagggtgaatcccaaagattgaaggctttttgatgtggcacaaaaccagtttcaatatttgctcagattctccaggaaataaaaaaaagaaaaaagaaaaaaagtgttcatatcaaccatagggaaaatagaccacagacaattttcacttatgataaaaccattggagtattggatgnnnnnnaaaagaa

SEQ ID NO: 8689 - DNA, 615 bp, Gossypium hirsutum
ctgattatcacatcctaagaagttaatatttaaaattaattaatttaaatgaaataaattttgttgcattcaaaataatttatagggtaaatatatattttcgtacctgaacttggtttcagggttcaaattggtacttaaagttttttttttccaattatgtacttaaacacggattcaacgtttaatttaatacctaaagtttatattgatctattttaatacttgaacttgacttcttggtttaagttgatacttgaacttagctttctgattcaatttggtgcttagttatttgaaccgatttgaattataaaaccaaatttaggtatctaattgaactaaaaaaacctttaaagtaccaatttaaaccttgaagtcaagttcaaataccaaaatatcccatcggcaacttgaagcaatacgaggatgtatttattattattttgtaggttaaaatatgccctaaaaatatccatacatttagaatttagtctctctacttttctattttaaggaatttagtccctcaacttttcaaatttaaaaattcaggtctaattgttaataccgtcaaaatcttcttttttttgttaaatttaagttcattacaat

SEQ ID NO: 8690 - DNA, 647 bp, Gossypium hirsutum
catatttggccccgtcgcacgaaggtgcatggtttaatgttagtaactgaatttaattttaatgtttgtttaatatttaagggtttttatatttgaagtaatcgtattctcgtataatattaatcgtaagcattctttctccattaattaatttttaaaaaaatttatcacctttcatcattccaaatatcgttaaaattatatatgagaaacaaatcacctctcattaataaaggttaacatttttttactagtatttcttagttaactagccattaatgattaaaaacgtatttgaatttattttatatacagtgtgaactgaacataacaagtgattaatctttacaaaaaatcagaaacttcggaatcaaatttcacttgtctaagattaactcaaaataattttttttcctcaaccttatttgctttataatgtaattaagattgtgttgtgttattctattaaaagcattgcttcgtacgataaaaataggtgaaagtatgctattagtccatgtactatgcataatttgtagatttagtccctatactttaatttgattagatttaattatattttttgatatggttgattttagccacactgcttttcgaaaattaaactttcagtcctgattcaaatg

SEQ ID NO: 8691 - DNA, 606 bp, Gossypium hirsutum
  misc_feature (602)..(602): n is a, c, g, or t
cataagatatatgcaagctcagtaggaacctaccaaatccttccttcaaactcgcaataacagtatcctagtgcttaccattgctttcaaatcagtccccttcggcttttcagaaaactggacaatacggcccctgccatctatcttcaccagtccataatcagaagcacggctggaaagtaaccaattatcgatggtcagcttcttagatgattttaggatttgttgatagaaagttatacaaaagtaaatcaactttgtttcgagtttacaaaaagaagattgcagtaaaaataaacccaagagataatttcatcatgatggtaaaccatgaatctggtactaaaagggaacagttaaataaagtatatatacaacttaaaaatctaaatggttaagctgagaagatcgaagacctgttgtccatcgtcacacatgaaattgtaatatcagcattaccgtctacgtgactctgtcatccattgcaataagttagcaaagcattcagcttatgctaaaaaacatgacaccaattgagtaaaagatatcaatacctgtacgaattccatataatccattcgatagagatgatccccgcacangatc

SEQ ID NO: 8692 - DNA, 744 bp, Gossypium hirsutum
  misc_feature (400)..(400): n is a, c, g, or t
  misc_feature (413)..(419): n is a, c, g, or t
  misc_feature (421)..(422): n is a, c, g, or t
  misc_feature (426)..(427): n is a, c, g, or t
  misc_feature (429)..(429): n is a, c, g, or t
  misc_feature (431)..(433): n is a, c, g, or t
  misc_feature (443)..(445): n is a, c, g, or t
  misc_feature (447)..(447): n is a, c, g, or t
  misc_feature (453)..(463): n is a, c, g, or t
  misc_feature (467)..(468): n is a, c, g, or t
  misc_feature (470)..(482): n is a, c, g, or t
  misc_feature (485)..(488): n is a, c, g, or t
  misc_feature (490)..(499): n is a, c, g, or t
  misc_feature (502)..(506): n is a, c, g, or t
  misc_feature (508)..(511): n is a, c, g, or t
  misc_feature (513)..(518): n is a, c, g, or t
  misc_feature (522)..(541): n is a, c, g, or t
  misc_feature (543)..(560): n is a, c, g, or t
  misc_feature (562)..(563): n is a, c, g, or t
  misc_feature (569)..(587): n is a, c, g, or t
  misc_feature (589)..(597): n is a, c, g, or t
  misc_feature (600)..(602): n is a, c, g, or t
  misc_feature (604)..(605): n is a, c, g, or t
  misc_feature (607)..(607): n is a, c, g, or t
  misc_feature (609)..(609): n is a, c, g, or t
  misc_feature (612)..(613): n is a, c, g, or t
  misc_feature (617)..(626): n is a, c, g, or t
  misc_feature (629)..(636): n is a, c, g, or t
  misc_feature (638)..(638): n is a, c, g, or t
  misc_feature (641)..(641): n is a, c, g, or t
  misc_feature (647)..(649): n is a, c, g, or t
  misc_feature (651)..(651): n is a, c, g, or t
  misc_feature (654)..(656): n is a, c, g, or t
  misc_feature (661)..(661): n is a, c, g, or t
  misc_feature (664)..(666): n is a, c, g, or t
  misc_feature (669)..(673): n is a, c, g, or t
  misc_feature (675)..(687): n is a, c, g, or t
  misc_feature (692)..(715): n is a, c, g, or t
  misc_feature (717)..(719): n is a, c, g, or t
  misc_feature (721)..(725): n is a, c, g, or t
  misc_feature (727)..(738): n is a, c, g, or t
tttattattattaaagaaaaaacatatattttaaaaaatgggttagcattcaacaatatggtgaaagtaagcatcaacaaaatatacacaagtgcttgaacagcaactgggaaatctctggtttaattaaacataaaatctgttattaaaaaagaaggaaagaaagatacattttcgattttttttttttgggaaaaatttgaaaattggatggtattggaagggaaaaaattcccctttggttgggggaaatggattaaggggccttggggggaaaaaattgggggcacccgggggaaaaaaaccaaaaattccagaattttccaaaatttggaacctttacaaaaaagggaaattttaattccctggggtcaacaggaacaaaaaaagaacccaaccnggcaagggggttnnnnnnnanntcgnntngnnngttttattgnnntntaatgnnnnnnnnnnngaannannnnnnnnnnnnngcnnnngnnnnnnnnnnaannnnnannnnannnnnnaaannnnnnnnnnnnnnnnnnnntnnnnnnnnnnnnnnnnnntnngttctnnnnnnnnnnnnnnnnnnntnnnnnnnnncannntnntngnagnntcgnnnnnnnnnnagnnnnnnnntnacnttatcnnngngtnnnggggnccnnngtnnnnncnnnnnnnnnnnnngattnnnnnnnnnnnnnnnnnnnnnnnncnnnannnnntnnnnnnnnnnnnagctgg

SEQ ID NO: 8693 - DNA, 601 bp, Gossypium hirsutum
  misc_feature (402)..(403): n is a, c, g, or t
  misc_feature (409)..(409): n is a, c, g, or t
  misc_feature (420)..(420): n is a, c, g, or t
  misc_feature (488)..(488): n is a, c, g, or t
  misc_feature (490)..(492): n is a, c, g, or t
  misc_feature (494)..(494): n is a, c, g, or t
  misc_feature (501)..(503): n is a, c, g, or t
  misc_feature (505)..(507): n is a, c, g, or t
  misc_feature (511)..(516): n is a, c, g, or t
  misc_feature (518)..(520): n is a, c, g, or t
  misc_feature (522)..(528): n is a, c, g, or t
  misc_feature (543)..(545): n is a, c, g, or t
  misc_feature (554)..(555): n is a, c, g, or t
  misc_feature (559)..(578): n is a, c, g, or t
acagacccaacttgagagaaagacaaggaagttgcaccataaagcagttgtaacagcacgttgactagagggtcaaagatttaaggcaaacaacaagatatcaaggcaaaaggatatgaataaactgacatgtagtctaagcattcaccacagaatgagatcaaaatgagaagagctcactccacttataacgaaacatagtaagtagccaacacactcttagttttaatcaccaggaatcaatcaaaggcaacctaaactatccaagataatgaaaatatagaagtaatttgactttttttccccaattataagtatacagcaaaattgaatcgattgcaactatattcttcattattttctcaaaaaagcaattcgggttttccctacggaaataccccnntagccnacccccatctngttctttgttttggctaaaattaaaaaagggaatttctatgcaaaacaaattctaaaaaaaaaacagncnnnanattaaannncnnntcannnnnngnnnannnnnnncgattttcaaacacnnnatttttggnnggannnnnnnnnnnnnnnnnnnnagaaaaaggaagtacctgtgctg

SEQ ID NO: 8694 - DNA, 481 bp, Gossypium hirsutum
  misc_feature (456)..(457): n is a, c, g, or t
  misc_feature (462)..(470): n is a, c, g, or t
  misc_feature (472)..(473): n is a, c, g, or t
atagtctctagtcagatgttgccggatcaagtttgagtaatccggtgttttctgcaatattgaaatttaaccataaatcaccatcttagcacctaattgtgttcttcagttgcctagcattaaaattaattttatagaaattgcaactaacgggagcacataggctaaagacagcagtttaattccacagcacactctagcttttgtttttatttgaagaccattatgagttacaactaaagattttggttcatgcaactactttgtaaaaaaggacatccttcaaacatccaacaattaccggatttacaaaaagaaaatttcttatttataattgccacctaaaaatcaaaaccaaaaccaaaaccaaaacaaaagacatgtatctaactcatacctttccccaatcaactaaataaaaattaaacctaagtggcatacataggttggagtagnncaaannnnnnnnngnngtcacgtg

SEQ ID NO: 8695 - DNA, 595 bp, Gossypium hirsutum
  misc_feature (592)..(592): n is a, c, g, or t
cttattaataagtaattattattttttattgcagaaaaagcatttggaccttgctaaggatgccaatgatcttgttgagcagcaaagagccagcacacaacttgggcgtacctatcatgaaatgtttctaaaatctgaagatgaccattactcggtgcagaatgccaaaaagtatttcaagtctgccatgaaacttgcccagactctcaaggagaacccccctaataataagtcttcttttctcaaagagcatattgatgcacacaataatataggaatgcttgaagttgaccttgataacttggatgaagcactgaaatttctcactaaaggtctggagatatgtgatgaagaggaagtcgttgaggatgatgatgggcgtagtaggcttcatcacaatctaggaaacgtctttatggaattgaggaggtggggcaaagcacgtgaacatattgaaaaagacataatgatttgtaagagaattggacaccgccaaggagaggcaaaagggtacattaatcttggtgagttgcattacagggttcaaaggtatgatgaggcaatactttgctaccacaaggcactgattgcnatt

SEQ ID NO: 8696 - DNA, 610 bp, Gossypium hirsutum
agctgtccacatcacaaattccttgaatcatagataaaccaagaaatacataaaagtatctgtattaagtcattaaaagagaacaaactatatttgattttcctgctatacattccaacatagaaaaaagaagggtataaactaaaattataaacaccttattctggaaattgactttctgcttgtaaatatctaatttccttttagataatactttcagtggtataaatccactacagtaatccagtgttctttgactaattcaggaatgccataaagcttactactgttaagacttttgaggtcatcatatgctgccctaattataagtaagaattggatatcacccgtgtctacatttcttacatttgcagcagtctttctccaaattaaatttctataaatttttataattaaaattacagaccatttgacctgtgaatggatgctaattaggaaaatgaaaaaaatcgtggatataatgatgccattagtgctagacacctttaatttatgtgacatacgcattaaaaatgccttctttcttttttttgttttatagatttttgcgtaaatttttttttataaatttttgcgtacagcaatgaac

SEQ ID NO: 8697 - DNA, 593 bp, Gossypium hirsutum
cctgtaggggagttcaattagggatttgggagaaaaaagatatttattccagtttttccatataatggatctggagagagttttaaaaggttcactgtggaccttcaataatcacttgttgattctgtctcacttacaacaaggggaggagccactaaaagtttcattaatttatagtccattctgggttcaaatccacgacgtccctattttcttattctctgaaaaattagcagagcaatcgggaaatttcctaggcgatttcctagaatatgatggatcaggcagagggaaggaaaaccggaattacatgcgaattagagccaaacttgatatcagacgccccttgaagaggaaaaagcaagttttgtttaatggcagatgctcctatgtcaggtttaaatatgaatgtctatcccttttctgtttctattgtggtcgattggggtatagtgactcgttttatgaggctaaaatgatgttggatgtggaggttgctaagatgggttgggacttatcattgcgcacccaatcccgtagagcgttatcaatgacaagcatctggctaagggaggaaagtgaggggaaaaatg

SEQ ID NO: 8698 - DNA, 600 bp, Gossypium hirsutum
  misc_feature (587)..(588): n is a, c, g, or t
ttgtatcctttagtggcatactataaataaatttgtaaagtctgattctatttgaatttttctagaagcaaagagtcttgcttggcacttggtgattttcttatcctctgtatcatgccttctacactcatttctgacctaataaacacctgctctgcttaccaatttttttgagtcatccacttctctttatgcttcttagaattcgataaaggttaaggaataataacaatataaatagggcttatgctcataaaatttgtaaaaagtatcaacaatgtcattggaaaagtaccttctgattgacaataaaatttatcttattctacagtgaatagcttttgatatctgaatttgaatttttttatgctttttaataataaatttcattgagggccaactatgcaatgaacagtttgttaatactaatttgaatgtgttaacaaggttgaggatgaagaaaatatcacgaagatcccttttacacttggggctggattggatgttgaggaaaaaacagctcatcaggatgtcagaatctctgaaaaggaagaggaaccaagttctactaacatcaaagcatcggnnttcctccacaca

SEQ ID NO: 8699 - DNA, 652 bp, Gossypium hirsutum
acagctctgacggagatcaataaatttaataggcttctctttcaatttaataaccttctagtcttcaagtgttaaattgtctttgcatgcaattgattaacaggaaaaggaagatggtactggcactgtgatatttggaacctttctttcattcttaaacactatttacattatgacatccagttgcaaaaagaaacttgtatgaaacgcgacatatttacactgggacaacatcatcattctgggtatcatcacatgtcaaaataagaccttccacatatgttgggaggaggcacctgctccattgacaccctgttgagataggttctgatggtggaacaatcatgagcacgttatcatggcgccgcacaacccccatcacacttacggtgctcccttcttttatgcaactgtcacaacaaacgccctcttttatcagcactggactgaaaagttactcataatgatactactgaggttcataatagtccaaaaaaaaatggcatacccttcttttaggcgcattatacaatcatcattagagagattgcgctctgctagccaacgtaaaaggcttggaaacgagtctctgttttcctttgttacatcaagtacagtagcaggtttgatcattggagcaaccttaaatcca

SEQ ID NO: 8700 - DNA, 573 bp, Gossypium hirsutum
taggtgcgaacgcacttaggattttcttttgtttttttgtgttttatggttttgggcttaattgagcttcaagttaggctgaattgagtttagtttttaaatttggttttgggtcttatggattgttgggtcaagtttggggttgtattagttttgggctaatggttttttattaggtttgatttgggtcttgggtttggtttgggttgtttggttttgggcccggtcaaaatttgtgtcttccggcggtgacttcaagagctccaaaccctcaaacataaaccaaacaaaagccatggaacctcctatcttttttagaacaacttataaacaaacgggataataatgttcacatcattcattcctacatttaccacttcctcttccaaatcctcgacttgttcgaggttgaagttatggagcatagctattatagaaatagtcgagatcggtgtgactgtcaggtcgtccatgattgtatacgtaatgacccctttcacagaaccctcctttgcagtaggtgatgatgttgaaaccttatttggtggcaggtgtacaaatgttgcagggatt

SEQ ID NO: 8701 - DNA, 627 bp, Gossypium hirsutum
ctttgttttccttatacagggtaaagactacaggtctcagtttcaatgggaaatggtgctttttttggagctagttatatccaggtaaattgtatgaagccatattatatttgttgaattgagcaaagatgaagaacttagcaaaatagacaagttatgggatttttagtacctagaaaattgacttttatgcttagatccagtataacagggatctatgcacggctatggtttgtcttcctggtcattgtttctgttaaaatatgcactggtaaatttgttcctaaatatgccattaaggtctatttggcatgaacaaaagagctggaagtagctttaaaaaaggaagaaaggtctcttgattctctcaagcattttaataaactcatgctggattaaatacagtgattattgatattctgttgtgacatccagtccatgtcctccagtgaattaaccacattctttatgcatatctacggagcacaatgaaacagcaacaataattggtcaatattatccttctctaagcttttttaatgccttgtctccatctttgtttttgttagctttgtttaatgtctattttccataaagaaaaaattagattctcttttcttgcatctc

SEQ ID NO: 8702 - DNA, 655 bp, Gossypium hirsutum
ccagtacctgtgttcttagcagtcatccatggcagatcagatcgataggattagatgtgggatgttcggattccttctgatgttgtcttgtttttaatggtgtcatctgatggagattcttatggtcccagtccaagctaagctagccattgtgtaaagttggttatattttcttctatattgaaatagcttcaagctcatgtcacaaccagcggcatattaggtattgcccgctggtacttgcaatatatgatggttagaatgacgctgtttacttccaaaggatcaaatatttatgctcttttcttgtagcaattccagtttgattttttatttttacatagttatgttgtagtttgatgagaggtcagatattttgtaatttttgtattatctgattttggttttactttaaaatcagtttattattcgcattaaatccagatatgcatgcgaggggcatctgggcatctggatagcctaggttcaggtgtatgccagttgactaccgtcttatctaatgaggttgtcagtaccacttatgaaagcgaatgaacaaaagagcttattccaattcagcaagggaagcaaagggaaagcccgttgaaccaaaaccattaggcatcgtactccgaggaggcctctgaaactttct

SEQ ID NO: 8703 - DNA, 460 bp, Gossypium hirsutum
atttttctgactgtaagattaaaggcgcaaaaaaatgaactttagaaaatggcatagtttatttcttattcactggaaaagtcttcatcttctcagataagcttctattttattctagttttagaagctggttctatggtaagataaaaaaaggaaacagtgtgattggggcattccgagaattgaactcgagacctctcgcaccctaagcgagaatcataccactagaccaaatgcccatgtcactctttatcagttccagttttcaatttcattttatcctccaacctcaccccaaaaaataaaaattagctctgtatttaattttttttatctcttttaatcaatgaactcgtattttttgtcaaatcatctcaaaattgatgaaaaagttaatatttttaaactttgatgatgtggcgtacatgtgaattgccaagtaggtagcatataagcactt

SEQ ID NO: 8704 - DNA, 590 bp, Gossypium hirsutum
tttttttgatgacgggtcgactcgggttttgaaatgaaaacgaaaacgggagtcgccaccaatcctttttgataaggtgtgattggatcacctcgaaaagtggttgtttttaataaacggtttgattttattaaaacaagaagtttggtccacgaaattcagaaaaacgggttcaggagtcggttacgtacgaggaaggattagcaccctcgtaacgcccaaaattggtacctagttgattagttaatgtcttaatgtcgaaaattgaaaactttgaagaattttaaaaacacgatccttgtattaaaatgtaatttttgggaaaaaaggcatatttcacgttaatcgagataaagaatcatatccagtaagttaggacacaatgtctcgaattcccgatacgtgaatgaatgctaaaaatttacttatttaaaatatatttagctatcccggattttaaaaaagggatcacgaccagtaagttagggcacgatcttttttaattcccgagatcgtttaaaacttgagtttggaaatattcacgtatttagatttattgtgaaaatcgaaacccagtaagttagggtacg

SEQ ID NO: 8705 - DNA, 628 bp, Gossypium hirsutum
tgggtaaagactttatatatatgattaagattgaataaaagggtcaacttgagatcaaatggtatgggttttcgagcatgagcttggaggattggagaagaaaacaggacacgcgcaaagagaactgaactttagttactgcgaaacaattgaatcgacaaaacagaagcagaggcagaagaaaaaaaaaacagattactatcatttcctctttaataataaaacaaaagggttttacttttcagcataaaaaaaaaaaaccccaaaaaaaaaaaaaaaggatttttttttttagaatttccttcttaaccacaaaaggggggaaggaaaaatttttaacccctttttagttctatctgattttcctaggcaacaaaaaaaataaactaaacaacataacaaaaaaccgatcaaaaacaataacaaaaaactgagggtccccatgaaaacttcttaccttgtttcaccccaaaggagaaaagccttcagggttccctaagcaaaatttaagtaaaagggaaaaaaaaaagggatcactttttttttttttttttttttttttaaaaataccaaaaaaaaaaatattttttggggggggggggaaggggaaactggggttaaaaaaaag

SEQ ID NO: 8706 - DNA, 353 bp, Gossypium hirsutum
  misc_feature (250)..(250): n is a, c, g, or t
  misc_feature (301)..(309): n is a, c, g, or t
  misc_feature (312)..(332): n is a, c, g, or t
  misc_feature (334)..(336): n is a, c, g, or t
agaataaattaacagtttcaatgatacagtattgcagatgactaccagatgaaacccactgagacagaaaaacatcaaacatccattcaacagcattttctatatggaaaagaactaaacggacctggggaagttcctctgaattttccaacagctataaattccaatattctttccttaacatcagttaatccataatggtcttcatcaagaatggttggggcccaaataacatcaaaattttcttccnggcttaaaaaatggaaggagattgtaatcaaacaaacggaagtcattcttnnnnnnnnntgnnnnnnnnnnnnnnnnnnnnntnnntcttgcatgcacaacca

SEQ ID NO: 8707 - DNA, 499 bp, Gossypium hirsutum
  misc_feature (448)..(451): n is a, c, g, or t
  misc_feature (457)..(462): n is a, c, g, or t
  misc_feature (467)..(467): n is a, c, g, or t
  misc_feature (470)..(471): n is a, c, g, or t
  misc_feature (483)..(486): n is a, c, g, or t
tttctgagttctcttagacctttcaaatgtgcttcatataggaagacatatcgcgcagtccctctgaaattcagataatcttgcatagttagctagcatttaaagcatgtatgaatcgatcttttttactgcaaaaattagaacctaccagggtcatgaatgaagcttttgagagccaacaaggaaagagttctgtcttcaatgtcctttgaagacttgaatgttgatataaagtgcttgagtaggcagactcgggcagctcctcttattccggtgtctggaataacgccaagcatgtatactagccatgttgctgccacaaagcaagtggaacatagctttgctgatttgctcttcagcccttctgctaaagcttcaaaaaccaaaccaaattcatgacttactaaaacaaatgctgtttttctttcccaagcatcagctgccttcnnnncttccnnnnnntacanttnnatcaaagtgacnnnnaggaaaaaaaaaa

SEQ ID NO: 8708 - DNA, 585 bp, Gossypium hirsutum
aattagacagctttgtggagacggggaacgagtcggagataaatttacggttctcaatgatagaatcgagggaggcaccgcttttacaacaacgacgaaattgacggatgggtgaagaaatatagggtacaattgtctgggaaaaaaaatttgctactacatccgtcgttgaatgagctattcttaaccccctccgccgaatgacgattcgataaatctaacaaataagagaaaaataaccattcgccgaatgaaaaaaagggtaaaccaaactttatcttaactattcatttaagaataaagattccattctctctaactaaacttggcctaaaaatattaaaattaggtttattaaatgaagttttaaaaggtaaacaactcaattatcacttcattaaagagtgtattaaatagcaataattacgttggcaggagaaaagtcccgctgcctgctttcatcagtcttttcaaatccccttcactccccatcattggaaatttaaatcctctctccatgcctttcccatttcttcaccatctctttctcttcaaatttttcttctcattcgtttttagctttgg

SEQ ID NO: 8709 - DNA, 644 bp, Gossypium hirsutum
agggaaatcaaggagaagggcaaagaaacaaaggaaattggagaaatgagagaactaggaacaaaaaccagtaagaaccaatagaaagaacaaaatctcatatcaattttccaaattctccacaagtaattgttcaaaaagactaacagaaataacattggtgcacacaagctaaactctaaaccaaattcaaatgcctagaatatcctaaatacaagaaaatggaaaccatcgggaagaaaaaacaatgtattttggctctttcttcactagaaagtacaatactagctatgaacttcagatgcagaagtattttaaatatcattccatataaatttgatcataatactcaaatccaaggtaatattactggtttaaaaaaagaaaaaagctactatggttgtacaatataacaatagataagaaccattttcttttctctacctgtataatagcaggatcattgtgtataggtgccggagtctgaactggtggtggcgaagatttaacctgcaagtcctgaaagccaaatgcacaacaagaaaaataagacgattacggcactaatactgataataggcatatataatttagaagaacaagaaattttttatcttcactgaaagtatatggcaccaaacctg

SEQ ID NO: 8710 - DNA, 654 bp, Gossypium hirsutum
  misc_feature (645)..(650): n is a, c, g, or t
cattgatgcctcgcataatattctaccaacatcagtcaactatgaaaatgacgtacctagccaactaatctcaattttgcatagaagtcattaagatgatgtttccaagggttttatttgaatccggtttagtttattgccggtttgcagcctcttcaggcatacggctttaggtaggatacatgtatctgtttcattctctcatatttcaagacattcttgttagtcaaacgaaatgatctcaaaagaatatcagcttgttttaaagacttaattattagctgtcatggtttaccaggaatagattattctggtagacttctaatcttaacaataattatattaaatataagataaagaatttcattagtgtatatatgcatgacttcaaaaacataaataaatttactaaaattattccaactgaagttgattcagcaaatagtttataagttgtctgaccttgcaatgttgacaatgagctctttttccaagaaatgttgcaaggccccaagttttatttttaaactctaaattagcctgcaaaactgatcactgtcatctatataactcagaattatatatctttgacattgtagagaaaaccaatcttttaggtctgttttcctggggatattaatggcnnnnnnacaa

SEQ ID NO: 8711 - DNA, 571 bp, Gossypium hirsutum
ctgaaaggtaatatagttactaatatggctcagctgaatgccaaatctcctgagcacatcatattgagttgaccgctattctggatcttaactcattctaattctggagtggctcttaaccatgcatctgtgaggaatgaatcacacacgaaatcgaggtgattgttttgtctaaaccacgctccttcctttggctatatcctgttgagatcaggtgtcgtttttgaatgacagctactaattaaggtgttagatatttgtatgcgtagtatagaaattttatgatgcgagttatggaagatttaacatgtggagcctggatgatagatgccatggcaggcgagctttaaggatgcgtaccgtaattcttatagctatgtacagtataggcgaatagtattgtctagaatagcttaatgccattgaggtttttgtatattttgaccttcccatgcactttgttaaatgcaaatttccatcgttgacatctactaattattttctttttaattaatataatactgtaaatatggtattttctattagcaaatttctactgctgataacataa

SEQ ID NO: 8712 - DNA, 451 bp, Gossypium hirsutum
ggtctggaagaggctgcttgttactttcttgagtatttttgttgtcatttttctctatctcgttgtagctgtccttgtcttgattatttgggcagtttcagtgggacaaatgcacgttatgggtgttgcagtgttagccgttttagtggttttgttcaccgcggggctcttctatttggccacaatctggcacttggctaccactgtatctgttttagaagaggcatatgggtttgcagccatggtgaagagcaaaaacctcatcaaaggaaagctagggttggcgatagccgtgttttttatcctgcaactggcgatggggttaaaccatatggcattcaagaggctggttgtggaaggaaccgacatgggcatggctaacagggttgtgtatgcaatcatttgtttcttgttgctttccacggggattctcttcccattagtcatccag

SEQ ID NO: 8713 - DNA, 647 bp, Gossypium hirsutum
agttcatccacaagttcgattccaaaaacattgttttgaaccaaaaccaagctggtccaatttaatgactttatccaagagtcagtgattctatcttatcagtgtgtagaactaggaaaaaatctgaggcagttgcatgtttgcattgcgatgcatatttggttttagagatttgcacatgaatacaaaaaaggagcctaaaacaaaagactatttggaaaccctaaaatctccctatccaccaccactagcatatcctagaaaagcatagggagtgaagtgtttgggaaatcctgagagcaaaacaacattatgaacaccatttgcaagtcaatatgtaaacttatattaaaaatataaacaggaagatttatgtttctgaaccctacattcggtgttaacctaaaaacagattctaatgtgtttgtgtgtgtctttgtctacttcaaatatcttgcatctgaactttaccaaagaagtaaaattaaagaataaactaaatgaaggcagagcatacacaagaaaactggaggatccacaacatccttccttacctagctaaatatatggaagtaattgtcaaatagacacttcctactcttaagagaacatgaaaactggggtttgagctcttctgtcactggctg

SEQ ID NO: 8714 - DNA, 626 bp, Gossypium hirsutum
  misc_feature (26)..(26): n is a, c, g, or t
  misc_feature (36)..(38): n is a, c, g, or t
gcattcaccagacaagaaaacatggnaacaaaaatnnnggggaattctcctctcgaaccccgcaaatcctgttggcaatctactttctcgggagatgctttatgctattttggactttgctcgagaaaagaacatccatgtcatatcggatgaaatatttgcagggtctatgtatgggaatgaagagtttgttagcatggctgaagttcttgattcagagggttttgataaaaacagggttcatatagtttacgggctatcaaaggacctttctcttccaggatttagggttggagtgatctattcatttaatgagaatgttttggctgctgctagaaagttaactaggttttcttccgtttctgctccaactcaaaggttactagtttcaatgctttcagatgcgagattcatcgaggaatacattaagaccaataaaaggaggctacaaaatatgcatgctttatttgtagctggtctgaaaggattaaatattagatgtgcagatagtagtgctggcttgtattgttgggctgatatgagcaaattaatctcctcttacagtgagaaaggagaacttgagctgtgggataagctattaaatgtgggtaagatcaatgtaactc

SEQ ID NO: 8715 - DNA, 568 bp, Gossypium hirsutum
tcagggtgtaaggctcgagttatgcacatcggatagacaatgtttattagccgacgtaactagaacgttcagagaaaatggtcttaacgtgacgagagctgagatatcaaccacgagcgatgtagctctaaatgttttttatgtaaccgacgcaacgggaaacctagccgatcccaaaaccatcgaagcagtacgacaaaagatcggtttaggtaacttaaaggtcaaggaactaccttcggtttaccatgaaaaagccgaacccgaagagcaacaagctgttggggtcggtggggcggtattgttatcacttggtagcctagtgagaaggaatctatacaacttggggttgattaaatcctattcttgaatggaaaaattgcaaaaagaaagatttgtttcattggttggcaaattggcatattctttgcttaagagttgggatttggggccccttttgtgtaaatatgaaaaaagtagctgcaaaaatttggtgattgttgttgttgttgagattttgggtggttgaatggataggggaaatcatatagccaatgttgaaaggcag

SEQ ID NO: 8716 - DNA, 648 bp, Gossypium hirsutum
cttgttgctgatttcatgcttttgccgtctagcccaaatagaccttgggtctatttgacttttaagccctcttccttttatcatttaagctatttaatcatttcccataattttacatttgttacaatttagtcctttttgttcaatttattatcggaactttaaaatttctcaacgaaactttaatactaactttttaacactccataaatatttataaaaatatttatgactcggtttaaaatccccaatgtctcgatacctcattttcgattctaattattttaatatttatttctagtgcactattcactatttcaaaaattttcctaacttcacatttaacttatactcactaaattaataatattttctacccattttttgaatttagtgatctcgaatcaccgttctgacacctctgaaaattcaggccagtacatttttcctcgtcggatttgtagtcccaaaaccactgttccgactagacccaaaatcgggttgttagaattatgtcgtctataaagttaaattagggagataccttatcttaggtattagagtgattgaatctcaaaagatacaggcatcaatgtgattgtctagattgataatacatcagataagacccaagttgaattaccccta

SEQ ID NO: 8717 - DNA, 630 bp, Gossypium hirsutum
  misc_feature (61)..(62): n is a, c, g, or t
  misc_feature (279)..(279): n is a, c, g, or t
  misc_feature (281)..(282): n is a, c, g, or t
  misc_feature (287)..(287): n is a, c, g, or t
  misc_feature (289)..(289): n is a, c, g, or t
  misc_feature (291)..(291): n is a, c, g, or t
  misc_feature (293)..(294): n is a, c, g, or t
  misc_feature (301)..(301): n is a, c, g, or t
  misc_feature (303)..(303): n is a, c, g, or t
  misc_feature (313)..(313): n is a, c, g, or t
  misc_feature (316)..(318): n is a, c, g, or t
  misc_feature (334)..(334): n is a, c, g, or t
  misc_feature (372)..(372): n is a, c, g, or t
  misc_feature (375)..(375): n is a, c, g, or t
  misc_feature (377)..(378): n is a, c, g, or t
  misc_feature (390)..(390): n is a, c, g, or t
  misc_feature (397)..(397): n is a, c, g, or t
  misc_feature (401)..(403): n is a, c, g, or t
  misc_feature (424)..(424): n is a, c, g, or t
  misc_feature (427)..(427): n is a, c, g, or t
  misc_feature (433)..(433): n is a, c, g, or t
  misc_feature (446)..(446): n is a, c, g, or t
  misc_feature (448)..(448): n is a, c, g, or t
  misc_feature (450)..(450): n is a, c, g, or t
  misc_feature (453)..(453): n is a, c, g, or t
  misc_feature (456)..(456): n is a, c, g, or t
  misc_feature (459)..(460): n is a, c, g, or t
  misc_feature (463)..(463): n is a, c, g, or t
  misc_feature (474)..(474): n is a, c, g, or t
  misc_feature (477)..(483): n is a, c, g, or t
  misc_feature (485)..(487): n is a, c, g, or t
  misc_feature (491)..(491): n is a, c, g, or t
  misc_feature (493)..(495): n is a, c, g, or t
  misc_feature (508)..(508): n is a, c, g, or t
  misc_feature (516)..(525): n is a, c, g, or t
  misc_feature (528)..(528): n is a, c, g, or t
  misc_feature (531)..(532): n is a, c, g, or t
  misc_feature (535)..(539): n is a, c, g, or t
  misc_feature (543)..(544): n is a, c, g, or t
  misc_feature (546)..(546): n is a, c, g, or t
  misc_feature (548)..(549): n is a, c, g, or t
  misc_feature (551)..(553): n is a, c, g, or t
  misc_feature (556)..(556): n is a, c, g, or t
  misc_feature (559)..(574): n is a, c, g, or t
  misc_feature (601)..(604): n is a, c, g, or t
  misc_feature (611)..(614): n is a, c, g, or t
  misc_feature (616)..(616): n is a, c, g, or t
aggaaagaatgaatgatgcaacaaactgaaaagaaaaagaaggttgtaataaaaacaaatnnagatttgtcgactttaggagatgtaccgtttcaagcgaatgaatcagcacccacatcagcaaacttaattggtttcaacactcactgtaactcttcaaatcaattgaaaattgcttagcaatggtgtttttttggacggctttcaatgttccaaaattaatccatcaacatgttgagctaaatgacagatttcatcccaaattaaaaaaaaaaaaancnnaaatnanancnngaaattngntgtttaaaancannnaattaaaaaaaaaaanttgtttgcccctttgaaaaaattaatttggaaaaaccnttnanncccaaaaaaaantggggtncaannntttttacccttccccttaaanggnaaaaanttaaaaaaaaggntnanatntanaannccnaaaattccccnagnnnnnnnannngtanannnatttttttttttngttttttnnnnnnnnnnccnttnnttnnnnntttnnangnntnnntgnggnnnnnnnnnnnnnnnnaaattttttttttctgggggggggggnnnnccccccnnnncnccccaaaaaaaaaa

SEQ ID NO: 8718 - DNA, 579 bp, Gossypium hirsutum
  misc_feature (565)..(566): n is a, c, g, or t
  misc_feature (568)..(568): n is a, c, g, or t
ccacaccccacttcctattcctcttcttttattttctaatcaaccacctggacctttctttgtctcttttttatatgccattcaatttccagctcaaacccccagatttatacataaaggttaaagacatgttcaagcgcaaattctgagttgggtgggaaatttgtgaaaatttgaaacctccctccaaaatccaaacccagaatctacaagccatggaatgtcttagaaggtttaactaataaacgtattgacaagaaagagagaaagaaaactggggctaaacatagctatggattgcaatgtaaagcgagagagaccttttagcaaattatttgaaggatgttgtttcataatccatcaagtatcattgtttccctccaactttcacgcactcaaattagccatcagtcaccagacataaatacatatattgcactaaagcaggctttacatatacagatacatcataaaatcatataaagtctcgctttctctctctatatatatcgagatggaaatgccctcttccatttaataacctccaggaatctttgtccatgannanaaaaaatgcag

SEQ ID NO: 8719 - DNA, 605 bp, Gossypium hirsutum
attggctcaccattcagcatgtactgacctctggcaagttctttcaaactttattgctttcaaattggcgatttaaattttcaaattggcgatttaaattttcaaatttgacttattgtaaggatttttttctcagaatttatggtgaaattttacagggaaagaaaaaggaaggaaatgctgcgagatatgtgatgaggtcacaagctattaaaatccttcaagttagcctttcggatttcaggttcatctcttctttatcacttttattaatttttattattatttaagctattaaaatgcaattagtgtatgccaaatgcaagaactaaatctacttattgtttccatgttcctattcttgtttgcagcaaatatgccatagagatttgaaattagaaaatacctttttagatggaagccctgcacctcgtttgaaaatttgtgatttcggttattgtttgggaataattatatatagtccatcttaaatgtcagttgctttatgattttccaatcattaagtttttttttaacacttggtgtagtcatctctgttgcattcaagacccaaatcaacagttggaactccagcatatatagca

SEQ ID NO: 8720 - DNA, 635 bp, Gossypium hirsutum
attattcacagctaataattttttgatgcagtgatctgtccatatggattataatcttcccaattttctctctcctttttttcccaatctctcttatttttttcacacatgttgataaaattagtattagaacttttaaatataaggaattgacataaaaggtttgtcgtgtggtattgcatctgatcttttcagggttcagttttgataaattgatggttgatttttttcttaccctaataattccatttgtagaatttagaagttccaagatgattcctttttctttttggttatattgtaacaaggcaatattaatgattgaatacttctacttttgataaaacgaaaattcgatgatgcatttagcttgacaatattatatttcaccttaacccaagactgcatagattggaaactcaagtgcagcatcaaggttcttaactactgtcacatgggtttgaatataaaatgagattttccgtatgacatcatgatttacggttatttttatcatatatggatcatcatagagcaatgatatcttaatgttaaaaaattccatcaacaatcttttctatcaactacctagtggtccagcagtgattataaatatataggattctccctttgct

SEQ ID NO: 8721 - DNA, 637 bp, Gossypium hirsutum
  misc_feature (607)..(615): n is a, c, g, or t
  misc_feature (619)..(619): n is a, c, g, or t
  misc_feature (621)..(630): n is a, c, g, or t
tttattgccgtcttcttcgtcttcgtcgtcgtcggcgaataatagcagtaaaacaaatgatgataattcgacgaatttggatcggttcttggagtttacgactcctgtggtttcggctcagtatttacccaaggtaaaaaagggatccccaaatttcgctaatcacgagatttgaacagtgtttcttgttgtttattttttaaaatattttggttcaattatatatatttggggttctctgattggttaaaataatggtccactgctgtttatatgatgaaatatgtggaaatctggtttttaaaatggttaataaatgttactgattagctcaaattagtgctaatactggaatttacttaatttctttgtgagaattaaaatccggtggtgagttgaagaaatgggttttattttattagtcagaaaatgtaggaaaattgaagaagctttgctaaacaacagaagatcagatgacccgaatcattgaaaaatatggaaattttgtttcctgaagtgttgagcagaatatgaagtgtttgatttttgttcttttggtgaatattattattgatgaaattttaatgctggttgatattctttgcannnnnnnnnctantnnnnnnnnnnaaatgag

SEQ ID NO: 8722 - DNA, 632 bp, Gossypium hirsutum
  misc_feature (597)..(597): n is a, c, g, or t
  misc_feature (620)..(620): n is a, c, g, or t
  misc_feature (623)..(624): n is a, c, g, or t
tttaaagatataacaatagatgagctttaaagaacgtaccatttgactattacaacttaacatgcacggataccagcaaaatataaataacaaaatacctttttaagtactcaggcagaaaagaatgcttttgaagtagaaagttgcagaaagaaaattatatgagaatacacaagcatcatggtgattactaccacataattcaaaaccattctccaggaaatctctagcaagtgaaacaaatgctaaagagcctcatcaggatgtattggtcaaaattactagagcattgcccatgaattcttattttttgtgacaaagagcagaatagctaattattatgcataattaaagaaagagaggaaacaatgagaaagctaatgacaagcaagaaagtgagactttcaacaaattacaaattaaaaaaaaaaaaaaaaaaaaaaaaaactcaggttctaaaggttcagtcttaaaaatcaggaaaaacttgaggaaggacaaaaggttttgtacaaaatttattttcccccatcaaagctagacttaaacaaaagcttccccaaaaaacccctaaaaacacaacattttggcagtcanttctacaagttcggaaaaaacgncgnnaactaggg

SEQ ID NO: 8723 - DNA, 672 bp, Gossypium hirsutum
agctcaagaatggaaaacatgtcatataaacatagagtgcaataatcttatgttaaattcctatgtcatttactcttcattttttcttgaaatacccttgttcaacactcatttccaatgcatatccaaacacgagtacgggtatatgatcttccaaaatccatccaaatacaggaaaaaacttgaaataaattgggtatacccatgttggatacatatggatatatatactcactgattcctcagcctatattggctcatgcttttgcagaagaatcaaagttccaaatccatagctagggacattactaacttgaagcaatcaaactatttgtcaaaaaaactctcaaagttacataatttgcaagaccggttcctgtaattaactcaagaaacacaacaaaacattatacaaccattagcatgtcaaccataaacatgaaacaagcaaaggtacgctccaaaaatgttcaaaatccggttatttcatatagttttatgcacaaacctttagctaccttctactatcatactatactgtatacattacataacaagaaaataaacgaaaatatcataaataaatcccataaaactaatttaccttatcttcagcaagcaaaggaagatgcaaaagaatctcaagaggctcagtatcggcagccatcacaa

SEQ ID NO: 8724 - DNA, 638 bp, Gossypium hirsutum
ctccattacaaagagttgctttatgcgaaaagatgctatctagtgaaagatatagaacaatgtcatttacaatgatgggtaaattctagaatatcatattttcaatgactttttttctagctgatgaaactggttcttaatggaagaggggagaatagtatctgtatttgttacctccagtcaagatagcaatatcttccaagcagtggctcttgcgctcaccaaaggctggggccttaatagcagctgccttcagcacacccttgagtttgttcctaatgactggagcaagagcttccttctcaatatcctccgcaactatcacgactgggtacttctctttaacagcgctgtccaatattttaaacatctctttcggatttgtgattttcttgtcaaccaataggaactgcaagagaagaattccacaccctctaatcactttataggaacacatgtcaggtttttaaagaacctaatgtttataccttgcaattgtggagctcaacaatcatcttatctcgatcagtgacaaagtaaggagacaaatatcctcgttcgaactgcattccttctaccatctctagactgttctcagtaccttttcctttttcaattttgactacacccttcccttc

SEQ ID NO: 8725 - DNA, 590 bp, Gossypium hirsutum
tcctattactctaaaacaatgaaagaggagatacacagagagactaatgatattggttcaacttccatacatcatcccatcaatgttactcgctttctttcaaacttaaaaccagattacattttttcttaatagatgtctgattgatttaaatgctactttctttctttccttctatcagtaagtaattgtatcagctacttacaacaataaatgtcactgcttcatgatgcagagcaacgatatatacatgcatcggtatttatctctctgattgaattacaatgtagcaattttcctctggaaagcatttacaacttttagtacccaacatggataagaaacaaaagtatactatttctcctaacctaaaacataaagttcccactgcatacactacatttgaacatcataagatcacatatacaacctacgaagaggataccttaaccgctttaaaagctggatgaagcgatctaagtacatctttcacctcaatgggattcctgctctcgtttcgaactttcttcacccttctactagccaaagatttctgagtaaacccataaatctgaagaatctgatatccc

SEQ ID NO: 8726 - DNA, 603 bp, Gossypium hirsutum
  misc_feature (558)..(562): n is a, c, g, or t
cttctgaaccttgaagtcgagttcagattctagtcgtgactccaatcatagacaaaagggtctaggccgtgggtggtctcgtggtcgtacttggggctcgggtcgagggtggtcttggtcaaaaccacaatgtcagttgtgtggtaaaataggacatttggtgcaaacatgttatcatcgttttgatgaaaacttttctcgtcctgattcaagttcatcggtggctgttaactatcatcaattctatgatgctcctgcaaactgttgcccctcccagagctgttgtcatgcatgtccatcttattctgcaagtgcctaatcaaatgcggtacccagattctggtgcaaccaaccatatcaccctgaatgtaactggtctttaaaataattcaacttacacaggtaccaacaaggtatccatgggtaatgatgagttagtgttcattgctaatattggttcttcaacctttgtagctggttctaggttgttgcatctaaagaacgtactgcatgttccctcagtctacaaaaacttaatttctgtaggacaatttgcannnnntaatgcagtctatttgagtttcatccttttctatgctttgt

SEQ ID NO: 8727 - DNA, 666 bp, Gossypium hirsutum
aatgccactcactttttgtatctatctgcaactatgattgttgattgtagagattcagctcccaagcttctatatatgtgttttgagataaatacaaattcttgagccatttcttattagtttaagcagcaaggaaagtgttggttcctcctaaaataaacaccttaattttcttcaggtgatttcagcttaaagaacccgttttttggttggtatttgcactatgggaagttaaaatactaaataattctttgttggcatcccaagaatcaggttttgatcctcgtaattgtcattcctttcccccaaaaatatagctgctttgttggaatataaaattgaataattaatagaaacttgtattttgcttccttgatatatgtatatatatacacgcactaccatcattatctttcattttcatggagtcaagccatcttaatcccttgttcatctacagtattacagaaagtctgattaaattattggtttgaaacctgctgcaacagtgcaactttaagagccattcaaaaaacctgccatatgactaggacaatgtagggtctttgaaaaagaaatggagcgggagggaatggcattcttttacctatttgttttagaatactatgaaatgagttttagggcatttttaacttgcttggagaa

SEQ ID NO: 8728 - DNA, 682 bp, Gossypium hirsutum
ctactgggattcactcacagctttgctcggctgccacagatcccttgaaaggttataattttttgacccctatagtttctttctttacagaactgaggaattcaattgctacggatcttaactgctttgaaatgtctgaacaatcttcagatcaaggaacggatgatataacgagggagaaatcaaccggttccaaagttactggaaggtctgagctggcctcaattaaagactcttcttgttctgacaggataatccgatgccttcccgaagagcaatcaccggttgacaaggacaatgaaacctcagaggtttctccaaacacacaactaactgttcaagcaagtgtcaatacggattctgaaccgaaacatacagtggaaggtgaaattcttggaacagaaacagagaagcagcagatagcagactcagatgaaagttttacgaaggatcaaactccaactgcactgattctgaacttttcagacatcgattcagttccttcggtagaagaccttaataagacctttagccattacgggccattggtttcaccaggtgctgaagtgttcaaaaagagcacccgagccaaagtggttttcaaaagacgagcagacgcagaaacggccttcagcagttccggaaagtacagcatttttggtccctcacttgttagttaccg

SEQ ID NO: 8729 - DNA, 597 bp, Gossypium hirsutum
  misc_feature (447)..(447): n is a, c, g, or t
  misc_feature (539)..(539): n is a, c, g, or t
  misc_feature (591)..(591): n is a, c, g, or t
tctttgaaggcactgtatcctggtaaagtctgtaatttgaaaaatatttacttgaaaataatgcattgcatggctgaaatgattacaactatttacttgtagggtaaagatggaaaggaaaagggaaaactgaggatagttgggtaatatttcaccttatgtctgagctgtttagtgtgaagttgttggccactacattcctacatagaatttcatgaaaaattcttagtctcctaatccatgttggaaaatatttaatgaattaatttcctcatcccccgtgtgtattatgtatagaccctcaaatattggacgtattggcacattcattgtttttattatctgtatgtacatctacatccatactgattataaggggaaaaaaggctccatttgagcaccagcaagactcatgctcaaagcaatatattgaatttgaaatcaaanataggaagtttcatgggttaagagatgtacagttgcaagcttgaatctatccatgagggcaaatttcccgatagctgattgtaagacacatntctgcgtcagagtacattagttaaaaatgatagctttacaactatagatatnataaat

SEQ ID NO: 8730 - DNA, 666 bp, Gossypium hirsutum
gcaggctttcagttgcaaatggcaaagtttttagttgttcacattaatccatgataaaaaagtaatagatagaaaaccgataacgaaatatccaccagtaaaagatggcagtgaagactgttataaaatttctatactatatgtacagcaagctcaataatgacaatctcgagttacctttggaactgccgcctggaaaagaaaaccattataaacattaggtgacaaatttgtaaaagtagcctggatgaacgttgtttgtgggtttcctggttgctttgagaagttgaacgtcatcctcaaggtgctgctctcatatgcaactaaggatggataagctggaccattttcctctgctcacagaaaagataactataactactttggcaactacaaggctataactatcggtcaaacagagttccaaactttaaaatttaccatgcttttgagtaatagcacccgtcccgttcaacaaatccatcattccagcagaacttgcaggagaagtggcatttgcagaaagtgaggaatgtgatgcaaggccatttaaattggcaactggtgctttgttgtcatgactggaggataatatgtcaattgctgatgagctgctttgcacaggaggcaatgttccaattgacaaaagatccagcagaacatctg

SEQ ID NO: 8731 - DNA, 608 bp, Gossypium hirsutum
cacgtcttgtatcttgagtttcctatatgtcgtgtgatgatatatccaagttggtgcttgatataacaaaaaatttacagctttattttctcgatctataggattaaaaccttttttagttaagcaattcaacaaaaatagtacaattgtctttacaaaccgtgcatgatagaaattccacaaacaacaatttacaataatgtccatgaaataatgttacaagaaactacttaagacttgctctttacaagcaaaagttatatatttcgacatgcatcaaattctcatgaaataccaaaatgaaatcaataaaacaattttcttaccgatcaattagatcttgtgcttctaggctcatttcttcaggcacccttggccaaggtattttacggttgagaatattatcaaatattgtctataaccaaaatatggaagaaaatggaagtaagaatgggcaatgctttaaaatgaaattttgtaagtggatagcacaccaataattttagcagcattttttaagaactctgacagttccagaaaatgaacaatcttttaagaataataatatttttattaaaaaacaaacttagaacaaatcaacattagag

SEQ ID NO: 8732 - DNA, 558 bp, Gossypium hirsutum
  misc_feature (48)..(48): n is a, c, g, or t
  misc_feature (50)..(50): n is a, c, g, or t
  misc_feature (522)..(523): n is a, c, g, or t
gtgtgtttcgacttggaatctaaattgattttcttgaaattagggcantnttatacactgatatattcgaacgagggccaaacaccttctctaatggttactaatgcgggaaggtagtgaagagttagtcttttgaaactggaatccgacatgtgactcaattcagtggtcatatcatcgtcaagtatgatcttctcgattgctgtacaatcatcgactatcaactcctctaggttcaagaagaatcgaagcatggagcttttcaagacgtacttcaactttggacatgcgtgcacatacaggatccgtagcatagtgaagcttccttcaggaagaaggtcgttgcagatgtattccaaattccacaaatagtgaagatccaagtgctctaggcatggaaatacaacctcggtaaattccttatcgtccaaaacagctttaactgtgggacactcacttactatgcagtgtttcaacttattcatgttggcaatacggaacttcgatatgctgattacgtcnnaggtgatgatctaaataaaaagctgagcaatatgc

SEQ ID NO: 8733 - DNA, 619 bp, Gossypium hirsutum
atacactacagacattaaaataacatgaagatacatgaccaaatagaaaaaagaataagcatgtctgatgcttgacgcccataattagagacaatccaagagagttttaattgatattaaacgccatcatggaaagtgaaagggataaaagaaaccttcccacttaaacatgatggtctccaaatatattttcaggcaagacatcaatgcatgaaaataaaatactactattagccaaatgaagtccatatgtttagcaccttaatcccatcaaaagaacccactatcaactcagcaggtctatgcaaagcctgtgacagatcttcatgcatttgcattgctttccttatattgtgggacagagcaaacagttttgatgcaaattccctgtgtactttctgcaaaaaaccaaaatcaaaagcactccattaggtaaataagacttcaagacaaaatatgactactactatgaaacagcgccagtcaaaaacaattcatagaacagcagataaatattggttcctgaataagacctttgacatatgaaggttcacattgtcaccattttccaagggaattgccaatattccatgcagtggcttagtagcatcgggtaaat

SEQ ID NO: 8734 - DNA, 581 bp, Gossypium hirsutum
  misc_feature (531)..(531): n is a, c, g, or t
  misc_feature (577)..(577): n is a, c, g, or t
agctggctaaatttgttgaagacattatagtccctccaaggatggttgacataattgttgatggagaggtatttatgattttcttttgtccacctactctaaggtgcaaattataattttaactttcttttgatatttcttgcatggtgtcttgctcaaaaatgtctttgaatattgtcttattaagaacagtattctcatgcaattattggttgtctcagttgcctaatctttcttggggataatccttttatgactccattaggaaatatgagctgaagaatgctccatgtaggttaggaaaagttctagatctggtgtaagctttctaaagcatttgtaatggagcaaattgtgtgattttttactgcatagcaagtcacctacttaagatgaaaaagaaaagaaaggaaaaaaaaaaaaacaaaattttacccaatactcttttaccgtttctctctataatacacacccctgcccatccccaagtaaattttctttttccgtttgaagttgtgaccttaaataaangcctaaaaaaagggggaaatcactcaaattcatgaaaaaaaagggnaggg

SEQ ID NO: 8735 - DNA, 642 bp, Gossypium hirsutum
gcttattgtattcacaggcaagccttgtgtcaattatgtgcctcaaagtggcaaaatgagatatcagtgacatactgacatttgagattgtttgttgacgtgcctttaggttggaagtgcaggtaatgacactaaaaatccggtccctaacgatataaattgttggcaaaggcctgaagacatgaggtacaagaggcctgtttcagtttgtaatgagacagcttctgatttagcaggggaaattgttgcagcactatcagcagcttcaatagtattcaaacaagagaatgaatattcacaaagattgcttaaaaaagcagagcagatatatgagataactgcaaaagaagaccggattcacagagccataacttacaccaccattgatgcttgtggaggtgaagcaagaaagttttacggatcatccgggtacaaagatgagttggtctgggcagcaacttggttgttctttgctacagggaaccatgcttttcttgattatgccaccacaaactttgctgcagcagctgatgatgaaacaaccactgacaaagggatcttctattggaataacaagcttgccgccaatgcggtaagcttagtgaatatgtttcatgtggtttttataatgttcaattccta

SEQ ID NO: 8736 - DNA, 642 bp, Gossypium hirsutum
agagatggtgctacgacttatggaaattaataaagatcttgttcgtgtgaaaggaaaaaatggtgagactcctttgcattacattagtaaattaagttgtcttgattgtatccgacatgttgccattcagaatggcactgctttgcatatagcagtggaaaacaaaagactggacattttccaagtcctaatcgaaatgcttaagaagaaagactatcatcgagaagtggtgaattgaagagacgaagatggcaacactgcgttacacttagctgctactaataatcaaccccaggtttgactcgttcgctttaattgtaagctcggttgtatgaaataattgattctagcttttctatatctaaaactatcaattaaacagatgcttaaactactgttaaactgcaaggctgataaccatgccaccaatcaagctggttcaacagcaccggatgttgcacaagaacataatatcagagaaagcattactattctacgaggtttttttattccggtattttcgaacttcaagcatggtaattttagggttgcttctaactgcaacctaccaagctagtctttgccctcctggtggtgtttggcagggagataatacttcaaagtccaaagggtcatatgatg

SEQ ID NO: 8737 - DNA, 561 bp, Gossypium hirsutum
tgttagggagaagtcctataccattattgggtatagttccattaaggtagttttgaaaaagatctaggtcttgcaaggaactaagatttccaaaactagaaggaacgttcccagtaaagtagttttcttggagatgaagcttgtacaaccgggttaggttggctacggatgattcactccctgaaaactgattttcagataaatcaagcaggcgtagcatcttaaggtttcctattaactgcgggaaatttgcctgtcatgttatttttctgcattcttagctcggtcaagttaacaaggttgttgacccctatagggatacttccccttagacggttccctcccaatctcaattggacaggttgatttgagagattgccaatagaatcaggaataaccccaccaagctggtcataacttaaatccaatatctgtaactttctgcatttagttaaagaattcaagaaatctagatcatcaacttctcctctccccaagggattagaagcaagaactagccacaatagaccaggcaaacctccaaaatcaatattaaccttc

SEQ ID NO: 8738 - DNA, 674 bp, Gossypium hirsutum
gtcatgcagccgcttctgcacttccatctgtaacttcaaagcttcagtgatccccatacccctgctccagttcaaagtgaaaaattcacttaatacggcgaattaaactaaacaactcaacacagtgaggcgttagtagaccttgaatattaagtacactgctccttacaggttccattaggaaattgtctataatcaaatcctttctcccaatcaaaaagaattacaaaggatttcatggtttcagatcagcattttctatatgttgagtttattagatgatttgcaacatttaaagatgaagtgtttccaattagtagctttcctgcaaattttagaagacccttacgctttcaaatccagagatgagtgacaaccccaatctcacaagagagcttgcatcataaatcagtatgggagaataggattattgagtgcacgatagacatgcatcataaattttcactggacagctaaagattctgaaaccaattgaaccaaatgaaaagaaacaatgatcacttcattgataaggacatggtggaatatttagcactcaacaatcccgccaaccccaacacaagtcaccatagataaatgcatgcagagaagtaacacagataggataatagaagaaaattaaaaaagagcatggcatataccttcttatgact

SEQ ID NO: 8739 - DNA, 594 bp, Gossypium hirsutum
gataagatcaaggcataccatgatcaaaagatagcccgtaaacaatttgtggtaaggcaaaaagtattactttatgactttatactaagaatctttgtaggtaagttttgacctaagtagttagggtcttttgttattatttacgtatttccacatggtacagttgaggttaaaagcgaagaatccggaaaaaatttcaaggtcaacggacagcgattaaagcctttctacaaaaattttcaagtccacatggttgaagaattagtcctcgaggagccgattaaataaatttcaaggtcatcgagttaacgacgttaaacaaaagcgctttttgggagacaacccaaatttattctcatttatttaattttgagtttaagtaagatttaggttgtaaataaatttttatttattccagttaatttaatattttgaggaatgtaatggaggttgtgaatatttcaaaagtcgaataatgatggtggcgtggccacaacatgctacatgctgaaaattatttacctacaaacaaaatccaacaccgacaacaccgttaaaagacacatggtgagtattcttaacttttttaattgt

SEQ ID NO: 8740 - DNA, 626 bp, Gossypium hirsutum
agattcttacttcgacctatggttattcaaaaggcagattcgttcttaatgaaccccctctcaaaataatgtttattttttatagaataattgcttatctccttatttcatattgacagcctttcaaagaaaagagtcttaatagaattcgtaacttagagtttatgaaggaaataaaaacttaatataatagagaaaataaggaaaactaaaactcttaataaaacctgctataataaataaataaataaactcaaattcctattgcaataaaagcgtccatatcattactccccttctcggagttgagcttgtcctcaagcttaaattctgcataaacttcagaacttatccaaaatcatctatctcatcatcatcttgcttgccttcaacatttggtacttctattcaaaataactttttacatatgtgtcccatggaataagactcgtcacaattataacaaagccctttagcccttcttttcgccatttttatctatgtcaatctctaaataaatggtgtagaagaacctattttcccgttgttccctgttggttctgttgtttgtccccctccctttgcaatgctcttagttgttggaatgattgaattgctaccagtga

SEQ ID NO: 8741 - DNA, 732 bp, Gossypium hirsutum
  misc_feature (379)..(379): n is a, c, g, or t
  misc_feature (385)..(391): n is a, c, g, or t
  misc_feature (393)..(397): n is a, c, g, or t
  misc_feature (416)..(421): n is a, c, g, or t
  misc_feature (427)..(428): n is a, c, g, or t
  misc_feature (449)..(450): n is a, c, g, or t
  misc_feature (464)..(467): n is a, c, g, or t
  misc_feature (472)..(477): n is a, c, g, or t
  misc_feature (488)..(489): n is a, c, g, or t
  misc_feature (492)..(493): n is a, c, g, or t
  misc_feature (497)..(505): n is a, c, g, or t
  misc_feature (507)..(508): n is a, c, g, or t
  misc_feature (510)..(512): n is a, c, g, or t
  misc_feature (524)..(527): n is a, c, g, or t
  misc_feature (529)..(529): n is a, c, g, or t
  misc_feature (536)..(536): n is a, c, g, or t
  misc_feature (542)..(545): n is a, c, g, or t
  misc_feature (552)..(552): n is a, c, g, or t
  misc_feature (557)..(558): n is a, c, g, or t
  misc_feature (572)..(573): n is a, c, g, or t
  misc_feature (576)..(577): n is a, c, g, or t
  misc_feature (579)..(585): n is a, c, g, or t
  misc_feature (589)..(594): n is a, c, g, or t
  misc_feature (598)..(605): n is a, c, g, or t
  misc_feature (615)..(618): n is a, c, g, or t
  misc_feature (621)..(626): n is a, c, g, or t
  misc_feature (631)..(631): n is a, c, g, or t
  misc_feature (642)..(642): n is a, c, g, or t
  misc_feature (645)..(645): n is a, c, g, or t
  misc_feature (647)..(651): n is a, c, g, or t
  misc_feature (655)..(657): n is a, c, g, or t
  misc_feature (659)..(659): n is a, c, g, or t
  misc_feature (662)..(668): n is a, c, g, or t
  misc_feature (675)..(686): n is a, c, g, or t
  misc_feature (688)..(692): n is a, c, g, or t
  misc_feature (701)..(704): n is a, c, g, or t
  misc_feature (706)..(709): n is a, c, g, or t
  misc_feature (711)..(724): n is a, c, g, or t
ggcctcctgatacgtgagaccccacctttacaatattttaaaaactaaactaattaatgtgatgcatggtttagaattgttaagcaaaatcataaaattatttactttaggtagaatgcatttttgtatgcttggaggaaagcatatgaagattgggtttattgtcctttgtgtgcattttgtcagctgctgaattttgaaaggtgtttaggggcccaaattgttttttgagttgacttattttattgcacctttcttagcataaaagtgtactttttcttttaatattacaattttacagaatttaaggcatagatttgtatcctatttattagttacattttttgttttgtttttggttatccagggatgaggcagnccattnnnnnnnannnnntgtcctctacctttctagnnnnnncattgnntatttcaagcacaatgatatnntttctctgaaaaannnncttgnnnnnnttacagcacannatnngcgnnnnnnnnnannannncgctacattgtnnnngnatctgtntatcannnntgttatntcaanntctcgcaaatttcnncgnntnnnnnnnttannnnnncatnnnnnnnnaaagagccgnnnntgnnnnnnatggngcgggttaaanaantnnnnnggcnnncnttnnnnnnnaattttnnnnnnnnnnnntnnnnngtccaggtnnnncnnnncnnnnnnnnnnnnnncccttaac

SEQ ID NO: 8742 - DNA, 576 bp, Gossypium hirsutum
ttttcatctcaaattgcagtaagaaatgcaatgcaaagtgtacatgtatatatattttaaataagggtagagatagataaaagaaccgttaatgaattggaaacataaatttttatttttttatttgtaatttagtggactcagataataagatgattgatgtattattagcaagtaaaaatggtaatagtgaggataatgatgaagtgagtatgcatgcatgatgatggatggcatggagatgaagaccaaagagggacggatgtagtgtgtccttttgtggtgattccattgtatgaagtaaggaatgaagtcaaattaataggcaaaggctcaaactctttcagtgtcacctcagcctccctccctccgactccgatgtctcccccacatttccctcctttgtcagaaatcgaacacacacacccttttaatttaatataaatactattaattttttcaaaaataaaattaaaaaaaaaaaaaacaccaacaaccttaccaaattaaaccccaaaacaaactttggaacaaaataacaccccacccccctccccccccccccaccttttcatt

SEQ ID NO: 8743 - DNA, 623 bp, Gossypium hirsutum
cttttagtatttggggcatctccaccatatatgagagggtacaaattgtgtttgagctcaacagtatttatagatgttccctaaaatatgtacttaatattagaatttgtaaaacatggagttaatatatgaaaattagggcttttttaaaaacttttttaccttgtaaatttcaccattacccaatttgacctcagtgaaaaattttctatctatggtactcgcagctactgagagggaccaaggtgaaacatttgtgatacttgcaagctgaggtcctgaattaccagcagaatttgatgtgaggattccgtttttcatcgaatggaaagctccgatagcaatggaatcgttgaaataatcaatcgcgaatgaccctccgacggaaagcgagattacatcaacaccatcagcaattgcatcatcaaacgctgcaaggatgtccgcatcagagcaaccatcggcccaacatatcttatagactgcgattcgagctgagggaacccctcccctagctaaacccgaagcaagaccggataagcttgccttgtgtaccaaggcaccagctgctatcgaagatgtatgactcccatggccttccgaatctcttggtgattggatat

SEQ ID NO: 8744 - DNA, 650 bp, Gossypium hirsutum
gttgggatgagtctcgattaaaaccagtagttcgacatttggcgtctactttatgtcaaatcatcactgtaggacaggactttttactagcgtaaattaagttgattcaaaatcattagcctaacactgtgttttcctgggctttataaccgaactgattgctatttaagttggttcaggcctaagtaaagctcctgactggcaaagtggaaagagcctgagtttagggatgaatatgggccatgaactgggtcgaaactctagtttataaaacatggcctagcctacccagtccaccaggataaatataaatcttaaatttaacttatttatttaggttaagatatgcttcatgtctttatatatagatttttataattttaaattttttatcttttacttttttgaattcaaaaatttaagttaaattgttaataacattgttaatgtttttctattaaatttattagtgtgacattttgaaataaaaaaagtaataatcatgtaataaaataattactttataatagacttgaatttaatatataaattttaacagtattaataactgagcttttatttttaaatctaaaaattaagataacaaaatctcttaaaataaaaataggactaaattccaaatgtatgaa

SEQ ID NO: 8745 - DNA, 660 bp, Gossypium hirsutum
aactcaacccatcacccatggcatatagatcattaatgaaggaatcattaataggtttattggcagagattcatcgacaagtttaaatcataagtcaaacaactcttgccgacaaaaatcgattggtctgctgtttttagaagtgttgatggccgggctacttagtttagcccgaaggcccgctcgaaatataagagtgtttgagtaaaaatataaatttaaaaaataagcttggacaaaaaataaggcccgtttaaaaaatgggtctggcattgagtaaggtattttttgtccgggtctagcccggcccgaattcactaaaggacaaaaaattattttttttatttttgaatgttattttcttgttgttttctccctattttgctaccattttattatcatgttactactattttgttgttattgtttagatattgtataaaacttattttattgttaattttgttattattttaaaggtatttgttaaattttttattattttagaggcatttacttgttaagttgcatctatcttagtgttatttaagtctacatattttttaaaatttatttttaatttgttgaaaaatatttatttgatgtttttagtgtttttaatgtattatatatttaaaaataatataaaaattaatacgg

SEQ ID NO: 8746 - DNA, 688 bp, Gossypium hirsutum
agctgcacaaaggaagatggaagaatcatcagaagaattccatagaaacatagaatctaaaagtcaaatggcagttgatctgaggcaaatggttgaggaccttcaaagagatctagaagcaaaaggtgatgggaaaattacttcgtcaaccagattacagatcaagctaggcgagaagtacaaacaacttgaaacttcattacaggactgcaaggcaactattgaagtcacggaaaggaagatgcaagaaatggctggagagcacaattaagaacattcaatccaaccatcaaatagtagctgatttggagcaaattattgaagacttgaaaagagattttgaaataaaaggtgaagatctgagtactttaatcgagaacgttcacacaattgaagttaagctctcttccttgaagaacaaaaaatgattgaagaaaagatcaaaacacccattccaggatgatcactgatatctcagagaatgtgaaagctgtcatccgtaaattctaacatggctatggaaactacgaccaccatgttgaagaaacatcgaaagaactaaggattgctaagcattgggtcaaagggacagaatgaaaagaagcagctgatgaatgaaatgactaatttgattgagcaactgaaacattagatagaataagaatctacattgcaagagagaacacca

SEQ ID NO: 8747 - DNA, 551 bp, Gossypium hirsutum
  misc_feature (528)..(528): n is a, c, g, or t
  misc_feature (534)..(534): n is a, c, g, or t
  misc_feature (536)..(536): n is a, c, g, or t
catcagcattcaactcgcattgctttcgtcgagtttgtaatggtaattgtttttttcctcttcattcatgcaatgtgactgaacaacttttcccttgtttatcaaggctttaatgaggtatacgagtgcatgagcttttagacctgaaaattttggctagccggtcagtattcccctttggaagagtgcattctctttggagctgtggtttttgttttcgtggattaaattcgaaagcaaaaaactcgatttaactgttgaattctaatatagtaggtggtactgcatagggtaaaagtaccatggaggtcattatactaagagttggattgcattttgctcccctactcaaaaaatggacaaattagactatacgttatatcaaagagcaaactgggtttttttttttttttttttttttgttaaaaccatgccatgtgttattttttggttattctgtcagttaagttagttttaactatacaaatgaatgtatattttaacaaaaagaatcaatttgttctttantttaangnacaaggactaattgt

SEQ ID NO: 8748 - DNA, 325 bp, Gossypium hirsutum
ttgttttctgattactttgttatgtatgaataggctttgtcagggcaagcgttgcagggttcatcacaacactatgggctgcgactcggtgcacactcctatggcaccatgaaaggttgctctactccctctatgtaattcatttttattataaatctcgttattttgaaaggggaagtatttgagaactctttggaggatggatgtaaagttaagaatatgaattatgacgaatgatttttgctattaatctggagagactgagagatgttttgaattttgaaacagcctgcaatggggaataagtgcttccatgttttttttt

SEQ ID NO: 8749 - DNA, 623 bp, Gossypium hirsutum
gtgtgagcagcgaggaggcctataaagcatgcaagtgtcacaatatttgatcttcacagtgattccattgacctccacttccttaatgcgtggcaatcgtaactgtggagtttgaccagccccaacatctacacttccatcaaaactttctggctcaggagggtgtgcattgcgcggaattataccaggatctcttcctgatgttagcaatagaagaagtaaatcctgaaagaagaaataaacacatgtatgagcttcaagatctgttttaaagaaatcatatggattctccaaaactccaataaatgccatgggggatttgtttcctacatgcaagataccattttggatcttccaaaacattcataaatgccatcttgatcgatgctgcaatcctactattaattctatactaaactgccataaaagtacgcaaacggaggaaaagagaccatataagctatgatcatagcaaattacgaattcagagttgatatctagccaagaacaaaagggggtttatcaccaaccttaacaatggtaaacatcatgaattaacactacatggaaaatataaataatgttaaaggcaagataattcacggttcatccctcataaaaat

SEQ ID NO: 8750 - DNA, 604 bp, Gossypium hirsutum
tgacaaactacaaaggaaagtagtttatacatgtatgtatgtatgcatgcatgcatgtatagtacatatatgcacatttgtatgtaggcgtgcatgtataaaacaagcaactttcattgatacaagcgaaaagatgaaagcatgaataagtaatttaatgtgagtagtagagtactagatttttaacttcagtgattgtgattcaatgtatacagcagcttagataaaaaggaaaaaaactttattagttttatttatttataaatacatatttatgaaatagttaaaaaagtttgccagttatacaaattttctcctttcgttctttcaatataatgttagggataggtgcggaatgaactcatgccaaatgggtgtctactgtctaacaaggcataaagtattttcaaattattagtattgtttctagtaccaacccaagtcaagatattcatctaggaatgcagcgtatgattggatgatcagcttgtatgatttccgattgactcgtcccatcaggttcatacgggccgtctacattctgccatacacaatggatatcattgccactgatttcttttaggtttgcatcccatgctttctt

SEQ ID NO: 8751 - DNA, 622 bp, Gossypium hirsutum
tattctggttaaattctattattagtcccttttcttttaagttgtggatttagtccctatactttttgaattggtcaagtttagttcatgtatttttttaattttaaaattttagtcttaatcaaaacattagtagttagatccctttgtttaagttcaactgctagttatatactatatagatttagtccatattttcaattcgatcattctgggtaaaacgacttctccagtctctctcaattttgaaattgaacaaattggtccctctaaaaagatcagagtaatttaatctttgtcaatttcaaaagtgagcaactaataaaaattaattatgatgttaatattttttatcaattgtatacaattttgattggtataataacaaatttctccttcaaagttacacaccttttcaagttgtgattctgccaataatgcttggagttctactaacaatggtgtcttcactcttaaaagtgcatgatggtctccaagtgaatatcaccaatttagaaacggaattagatgttaattaaccactatctccccacccccgttttgactttccttgagggaactaatgccaataaattttaccccatttttcagtgttgccaat

SEQ ID NO: 8752 - DNA, 628 bp, Gossypium hirsutum
tattctgtaaggatttacaattaataccgttggtccacaatcagactagactgatagacaacctttagtttcatatcccctatgttgtgtacagatattcctgcaaccgaatctaacattttctaaaatgggataagcataaattgatgaaagttggtgatgaaattccttccagtgaatataaccaacagtacactcagagaataagcatgctgtagccataagccttttgcttttcttatagtacccttccagccgttatgcccttgctgtcgtgggatacatgacaaattctgaaattttggaggaagctttctttgacgcgtagccctagcagtttttaatggtgactcggtctggttccctggttcaatggccacgggttcattcacaacattacccctgctcaagtggaaccttgtcctcaaggttccagtcaggaatagttttcaaaaggtggttcttatcttcccaggtggcatcctcgctgaaaagaccttcccaacgaactagaaactgatcaatgaactggccggagcgctcgatgactcgtttgtttatgacagctgttggattcaaaatgaaggtgtttgttgagtcgactaagtggaggggtgtaacttgttga

SEQ ID NO: 8753 - DNA, 646 bp, Gossypium hirsutum
aagtatattcatcgaacatttcggcgtttacatttcataatttaatcatcattattgtaccctttatgtgcttgtagattctttctcgatcttctagtttcgaattgctcgaaacttgaatctcgttgcttgctaaccaagtcaacttcccaggttgttgctggttacatgatgatcacctctttaaacaagaaaggatataatgcatataccatctccattccgtccctcgatgaccttcaaacgattttcggacttgctgccccggtgttcataatgctgatggcaaaggtttggatgcattttattttaaagctttatatactcgaatttgattatttatttatttatttatttaggtagctttctacgcactcattatctatttcgcgacaaatatgggcacacacacgggggccgctcatcaggttcctgaacactctctattagttttgatttctttttgctttccgatgttaaaacatatcggtcttaatattactagtctgtgcttcactctaggtcatgatccaaacctattgtatgtgcaccgtatggggtgagcctttatcccaaaccgcacagtcatttatgccggaattgctttatggtatcaacaaaaatttaccaaaggtatgggattccg

SEQ ID NO: 8754 - DNA, 649 bp, Gossypium hirsutum
tgttcaagaggccaggtactgttacttcattgtattatatatatatatatatattaaattttcagttgtctttcagaatttacttgtttatttctttgtattatttggtcttatattttccttttctacatatttctgatttgtccccgtcactctgttttctctttaattttatgaatactttttggaaatttaatagggcagtgtatcggtgggttattaaagcattaattttaaccttgtaatttagcctttttatttcttgttttctctatattgttgtgaattttttataatctaagccttttataacgctgattatacaaatttatttactcaagaagcaattatttgcgattttttagaagaatttgttttattcattgttaaggttgtaaagaggaaatggatgcccaagggaggaacaaggcgttgtttcgcgccaaattgaatgcacaaaagaaggagaagcgcatagattctccccttatcaggtaaatttatcactttattacaatatactttagccatgaaatgaaaatattatgtcctggcaatgcttttctattttgtttttttttcttgtaatatatattttttgcttttcaatgtctgttttctaaaggattggcccaaaatatatccttct

SEQ ID NO: 8755 - DNA, 507 bp, Gossypium hirsutum
  misc_feature (10)..(10): n is a, c, g, or t
atagaaaaangacactattagaacaaaataaccgagataagactactgggataaagagccatcctatacaaatcaatcagttgatgcttcaaatcaaggacataaaggtctcaacaagaattacaaaaacaaacataaaatgtcgtgggaaccatggtcaagttccacatgctactagatgaaaacaagcgcgctgtaatgaagctacaaatttacctaaaccattacttccaaaacctatcagaaatggtttctaatatcatttatatttcttagtttataatttacttgctttccaacttcccaataacagaatagtaaagtcacaacctaatcaaatcgttttagaacttactgattttggcactcctgcatatcagtgtcatactcattaaaaaattaatttgttcattgaacaaacataagctgtttttcgcacttccccagcagcaaggcacataaataaatgaataaaaattaaccctaaaaccccatcagtggtccttc

SEQ ID NO: 8756 - DNA, 583 bp, Gossypium hirsutum
  misc_feature (534)..(538): n is a, c, g, or t
  misc_feature (554)..(555): n is a, c, g, or t
  misc_feature (557)..(559): n is a, c, g, or t
ttctttttggtattaagtttcacatttgcttgttaaaaaaaattatcataatggcatggttttacgtaatacaatttttttacctaaactttattgtgtgcaaacattgacaggaagaagcttgctcgtcgactgctttttgaccgcagtgctaatgacgatcatgaaaggagtattcttaccaagctaaagcagcaatgtggtggtcaattcacctcaaagatggagggcatggtgagtcggcctctgtttttagcccagtttgtttgtctacaccaattgtggtttttaattgtggtttacctccctaataggtcacagatctgacattggcaagggaaaaccaagccaactttgaggactatcttaggagtaactcagctgcacatcctgggattgatttgacagtgactgttctcacaacaggattctggccaagttataaatcatttgacctcaatctccctgccgagatggtaatgattgaagatgatattccttgatgacgggactaactttatttctccacggtgnnnnnagaactgttatttatnntnnntatcattgtttcaagtcaagtgtg

SEQ ID NO: 8757 - DNA, 624 bp, Gossypium hirsutum
cattgggtgtagtagctttagccagaatttgagaagccctagtttcaagagtgcatttgagggtcattatgggatggagaaagaatcactttactcatcttattatactgaaagttttgggggtgaaatttctccatgttctactactgatctaaggtggttgagatgaaggagattattcatgtatggttttcattcttagcacattatttttatctgaaaatgcatcatttgggcttagaaaggtggtatgttttgtatggaatttaacaaaatttatgatctcagactctgagatgagatttggcccaatagttgtatgcctttgttttctgttcccaacatctaatcatgataagcccaaatgcaaaaaccctgtttttgtggataaaaaatttccatccttttcttgaaaaggttttaccttttttgccctttttaaggttggataattttttaatgaattaaattatgataaatcattaaaaactaagtcataattttttaaaaatgtttagcattaattttttagttttttttaaacaattcctaacataataatcacaacaaattacttaaaaaataacggattctttatgaacaattacaaaccctcgtttctgt

SEQ ID NO: 8758 - DNA, 630 bp, Gossypium hirsutum
ctggatcctcttttaccaaaactaaaattttggggtattaatctaatattatatcgaactcagtccgtttctaatctccttggccgtgcaatgtttgcgatggtgattgcttttagcaccggcagttatgtgattttaaaaccttctcatggacttgccatcgcttcatgtttcatctgccctggcttttttgtttgttattacgtacaacaatccctatctttcgtgaagtggttgttggagtgataataacgaatttcatcacaaatattatattatctgtgacaaattttatatgtcgcactaattataccacaatagtcattattatgataatagttgtgacggtttaaatattgtttctataaatgtataatggtgacctaatctatttgtcattagcaattctctttcttcttgagtaattatataatagtcacaacatataattattccgaacaaaattaggcatttataaagctcaaacaaaagcatttgaattttttgtaatgagatgaatagaagttattaattccgagttttgtaagtagagataatcaatttttactaaaaggtactcatattgtgtgaaagacaataaaaagaagagctcatggaggcccatggtaa

SEQ ID NO: 8759 - DNA, 590 bp, Gossypium hirsutum
ccatacacgctggcattaaaagtagaatcaaatttaatcgagaaggagagtatgaaatttaatgttttgtcaaaaaaggttatcgctcaatgctcttatacaggtggttcagaggtgctagcaattaaagagaaaataactagagaagaaaacagtacgaacgggatgttacaagggacactacaatcgaatggtgtggagaagaagacaaaggaacaagaggaagtatctacgctcatgacagatgaatagatgaatgaaagcaagaacagactggttaataattcaaacttagctaagaaagcaagttggaaaataattgctccaatacaaatgatgactcaaccaaaggatgaaagctgtattaggaagaggaaatctcttgaagacgaatttgagaattgttgcgcaaaagctgcatatgaagacggagctaaaaggctaaaaaaagatggagaaaatgtgtgtggtgaaatgttaccagaagcgataattgatgctatggagcagagtgatattcaactatttatgggataggcggctgccaagaggcaagccgaccagacgcaatgaaaagcataagctggaac

SEQ ID NO: 8760 - DNA, 605 bp, Gossypium hirsutum
acctcaaacacaacccataaacttggtagactgcaagtgtaaggatttgtgcttttgcaccactatagaaggactttacaccctcattatagaaaatgcatgtaattgcatccagtgaatgcctatacttcacagctccactggtcatcatcatcctcctgctcacagtatccagcgggtgaaccgccatgctgcgacaactagcatacaaagtatttacaacagccctgcctaaaacacttccctgcgaaaaaaggagccatatcatttatcagattgttagataccagtagattggttctcaaatcccaactaatcaactgacctgaaaatggtgcaacaaaaattgttgccaaggctttgaaacagcagttactgctctcaaaagggcaattttaggaatcattatattaaatccacggtacacgccggctatgccatctgatttcagcgtttttctgtagacgtcgaatatgccattaaactgcctttccctcgagttactgcttgttatgacatcgtttgccatgcgtgttccagcataatataatggataaacaagaaactgattcacaactgcagaaaggaaaacagccactttccgc

SEQ ID NO: 8761 - DNA, 581 bp, Gossypium hirsutum
  misc_feature (564)..(570): n is a, c, g, or t
aacaaatactaaacatatacaggttcttatgaaatgtgtatgcatgtgcttggatgcttatctcgttttagtatatctattcatgtatgaaaagctcagatactttgaggttgaaattgaaggcctgtaatagtttgaaaggcatattctttactagaaatgaagtcacctcccatggtaaaaatatttgtatatagtaacaagttagaatatacattcattgctagttttttgtaagagttttacagaagataacttaagagatttgcaatcacttttttttcttagagctaccccaagagaaccaattttaacataaagagcataccttataacaatgctggctcatcattgtatacaaacacgatagcccaatggtaggtattgctaaaagcagcatggatttcaagtaaaaaagttccttctcaggcttactattaatttcagtaaacagcgctggttcatgttaacttgcatgaaacggaaaaattgattacaaatctttaagctttcagacaaggcaaacacaaatcaacttagtaggtggaaaatgcccttatatgnnnnnnntacacatgcac

SEQ ID NO: 8762 - DNA, 647 bp, Gossypium hirsutum
  misc_feature (638)..(640): n is a, c, g, or t
gcgtggagcttcaaggcagcatgccgaagctcgcataaaacaacagtttgcggcaagtaagccatggtcgtaggcacactggccgtggaagtaacggcattggcgtaactgctagttgatgcagcatctaaatccctcctctgagacatcaagtcagaataagcaacatcgtcctcatggtagccgccactgctgacgttaccgtcgatgacatgattcgataccgccaacgacaattgagaaaatcgtgacgtcatcagatcgcccaatgccattcaaatcccgcgaaaccaaaaaaaaaaaaaaaaaaaaaaaaaaaaaacccccggattcaaaattttaattaaaaaaaactaatccccccaaaacctacccttttttttttttccccaactggtcccccaaaaaaaatgttaccctttttttaaagaaaggggggaaaaaaaaaaattttttcccaaaaccccccaaaaccccgggccttttaaaacccccaaaaaaaaaaaaaaaaccccccccccgaaatttttaaaaagaaacccaaaaaggggaaaatttaagggttttaaaccccttggggggggggggggaaaaaaaaaaaatttgggggggggggggaaaaaaaaaccaggggggannnaaaaaaa

SEQ ID NO: 8763 - DNA, 532 bp, Gossypium hirsutum
cgagaccccattgaaaaaaagaaagaagaaaaactgagtcctttttaaatgtttgagggtgtgattgaggaggagtacaagagcttcagtagaaatgacaaaagaaaaaagatacagtgcagagataaagactagtatagtaggtaagaaagaaaatttgatgagagagaaagtgagaagttataccagcttgaatagatagtatagtccatataggaggatcaacataagtcgtactccatgaacttccattaccaaattgattggggaattggatttttcctgcaataatatcaaaatcgattatatcaggaagaactagataatataacagctaaacatgaaagaccattacagacagagttaacttgtaacttatgctactcggttcactctttcctcttcgttttttccgagggaagtcaacaaacatgaacatggctaaaaggcaacactatttctactatcaaaagtaaactcaagaattttgttgccaaaaagttttacattttctaaatttgtttgctttgta

SEQ ID NO: 8764 - DNA, 626 bp, Gossypium hirsutum
cttctcctgattttgctgaatcttttcactgtaaatgtggtaatcttcagaacgcgttggagcagaagtagttgaatgtgcatgtgttatcgagttgccagatttaaaggtgtgtatttaacttccaatcttagctgcatcttgtatattgtgctcataaaagcatacactttgtgaaggcaaaggaattttcaatttctgtatatatcattatccatatacatagatgtttgtgtatatttggtttaggccttaattagcaaaatattgtgattaacatatttgtagggtcgagaacgcttgaatggcaagccattgtatgtacttctggagtcctactgagcctatccgacaaacggtgcactagcataacgagatgtacattagagctccatggatatctacttgcacctggaatctttatttttattattattactattatttattctctactctcattagtgaagattgataaaaccttggtgatggagaaagggcttttgattaaacaaaatgctatttaggattattctcatttatttctttttttttaatttaagaaatgaaatttatagaccctgaatatattgttgtcttgataagacatgtgtggatggaccctt

SEQ ID NO: 8765 - DNA, 586 bp, Gossypium hirsutum
  misc_feature (173)..(173): n is a, c, g, or t
tcttgtagattgccagcaaattccaggctaaaaaaggctaaggagattatgcatcgatccaattctttcaagaaatggaacagataccttatcttcctctggcttttaggcttcttttctgttgggtttatttggttcttgacaagtttcaatggcgtaccctcggaggggantgagaaaattcccccttcttgtgaagacaacgcaagaatcttgctccaacatttcaatgttagcaagaaccagcttcatgctttagcttctttcttctacgaatcagatcaggtaaatttgcacctttttttggcttaagttgtttggtttgtagctggaattggtatatattgacaaaactgtttcttttacaagactcttgttttggtttatgaaccattaaggctgatttggccaacataaacaagatacagtcaaatttggtcttgttctattggaatttccgtttgcagaagatgatgcagattcaaaatattgttgattggtttttcccaatttcaattgtagttgcactagaaataattgcaaacatgaatctgattatggtattatgatatatgatatgataacc

SEQ ID NO: 8766 - DNA, 643 bp, Gossypium hirsutum
  misc_feature (623)..(626): n is a, c, g, or t
  misc_feature (630)..(632): n is a, c, g, or t
aacacgaaaactgaatcaccctcttcaccaccccagtagtttttctcaacactcaaaatagttccttcaacagcatctccaactatctgaagagcaagcaatctcgggcttcctgttcatcaagaagcacaacacaagaatgaaacccaatcactccaaatttagcaaccaagaatgcaccaaagcttattctcctttaaaaaaagaacaagacaaataaagggcttagatgccaggaaaataacaatccctccattattaaattgcaaacggaaagttacaaaaggatattagacataaaaaaactgtagactcggtgcaatccatattagacatgtcataatgcagatatcgaatatgcaatttccatgcttgccgccaaaagattattcaaagaaaagcatatttgatcttaacagaaccacatgttgtataatataaaaggtcatttttgttgcataacagtaagcttcctaaagttgtacgaagttagatagaattaacttataatgcaattcagaagaaatcaatatattaagatgctaacaacattcatcctgctcatttgaatcaatcaaatacagtctagacttatcaccagatgaaacacaaagccaccaaannnntgannntagatgaaatg

SEQ ID NO: 8767 - DNA, 611 bp, Gossypium hirsutum
  misc_feature (416)..(416): n is a, c, g, or t
cttgcagattactgacctgttgatgatgcaatgcctgagaggctgccacaagcaagactaaccataatagtggaatcatcaggcctaaagcaaaatcagaggaattacaaacaggttacagccttagcacaccaagaaaatttctatatactgaaataaaaatttttacctttggaattggccaaaaaaaccccaaaaatcctatactggaaagcttatagctattcttgggcccaccccctggatcacacattggattggcaccaccactattagagactaagatataaaaaaataattattaaagcaaaatactctatataccaattgtggtgctccgagttctttatacaagcaaaaaactccctcttctctgcaagtggtaagaaaggtgtgccaaatccccgtgtaatatngtgtgtttctctgcagagctcaaaaaaattattgatgtggaagataaaaaaaaagtatactctctatataaaaaaaagggaaccaataccacttttaaaatttttttaaaaaacataggaaagggaaaagggaagggccaaactcatttcccgggggtggaaaacccccctttacaaaacccaggggatttttaa

SEQ ID NO: 8768 - DNA, 629 bp, Gossypium hirsutum
gaggatgcttactttttttgctgcaagaaaaatgatagaattgacactaattttcatcttcatgtttatggtcccttaagaaaacttcgagcctaggctactaggactcttcatttctttctaaaagtatccttatttgacactcagactgaatgtagataatgtaaatggaaggagataaacgaaattctagataaagttaacatgtgattgatgggtttggtgttagactttagagattcggtttccacaaagtgtagagacaaaaggaatgtaggaatataatgattcgcagtccttgcttgcacgctaggtttggttgggttttgttttgttttgttttgtgctgttgggtttttccattcacacagacactccactctctgtctgactcataattcattgtttgctttctctgccatctctctctcccacatgccttacagcttttgctttgtgtatcatggaatgacagttattaacatcaccctattggttttagtagattgtatagagtccaacctgcgaaagaagttattattagcattattggaccaacaaaattattgggatgcaggcagcctgcaccacacaactttttttctcccttctctgggtctgcctgcttt

SEQ ID NO: 8769 - DNA, 628 bp, Gossypium hirsutum
agataacaaatccttcaatgaaaagtattgtcctcttattgaagttttgtcctcaaccttgatgaagaataatgtgcagttcaagaaaggtaatttatatatttgagtgccttactaagtataatggatgcataattatatatattatatgtggcattatatgttattactagccaaatttcagtgctattacaaataatatcaagttgaacccacaacacaacaaattcatccataatttttatatcacgtgacagttattatacataagtatgtatttctaccacattcacataagtctatagctgcgctacccaactaataaggtattattacttgggtcctaccaaaaaccctttgatatacattctcaaggacagggtttccctcttcttcctcctccaacctaggtttatggagcttttcataaactctcctccctcaactcaatcacatacgattttcaacctattcatattttagattgagtgaatcagctccaacctctaaacacaaatcttgtatctttcaacttagggagcttattatttaggggaaattacattatagatcatacaactatgtttaaatattctttttgttattcaactataaaacgttacaagac

SEQ ID NO: 8770 - DNA, 466 bp, Gossypium hirsutum
ttcgaacagatctcacattctgcaatattttgtacttgtattccgtattatcgttcttgtgaagatgtcatgagacaaactacgtttacatggaagtcactccaatctgctgaatcatgttaacaatgttaatttcccttaatatcaaatcattttacatgcttgtatattctttatgatacaaaaggagcctgtaaacaagggatggggggttagagaatgagctatatgactctggggcttgagatgttgatattcagctcaaaataataaggcttatttataagctttcgaatttttttcaaaataatcaattaagtccttctgaactttttacatccaactgagtttttgaattaacaatagttcctttgactaacattgactgttaatatttaatgacaatacttatgtggccgttaactgtgtcacatcattgtcaaaaactaatgtggtagtgtcacgt

SEQ ID NO: 8771 - DNA, 571 bp, Gossypium hirsutum
atgatctctgctgtcgcaccaccaagtttctatatgaaaaaggaatgtttaacttaacaagtagggaaatgaaaacaagtagcataatccatatgcaaaaagaaatgccgtatttcttctgtattaaaagcttacttggcaaaacttgtagaagtcttcaaggtatgctttgtagagagtgttcctcatgatttcaatgttcatgtcatcaagatcctggagaaagtccaagatacatgaagccaaaataaaaggttcaaatattacttcgttcaacacaatcaacaccccaacacaactactaacaatcggacatgtgtgcttatacacagataatcaggaaagttgttagaagcatgtacctcagaggtaatacactcagagaagtatggagccagaggagtgtcaacaagaaccaatctgtagagttcgcgcatgttctgagcaactgccagggttgcaatactgaagcagcaaaacagaaaagttagcatacatatcaggtgaggttagataataacctgatctctaatcaagaggataaattacctgtcaaacatgcccaaaggat

SEQ ID NO: 8772 - DNA, 478 bp, Gossypium hirsutum
ccaataggcactgccttttagctacctattctaaactcaaaattcttcttgtgtctcttattagttgatattctctggtctaagtttaatttctgacgtgcaaaatccatattatgacaagcacagggcataactcacaggagattcattctgatgtttatagatagttttttttttatatctcccttacaactaaggatccttcctccttttataggaaaatttggataggttttcaaggagatcagaaggaatctctttaaccaaggagataagaaggaatctccttttacaaagtaaaatagtacaactttatcaaagtaaaatagtacaaactttatctactttaattactttcgtagtcggtgctgatatctgatgtgaggttctgctcctcaattcttatctccttgttcagctttgccctatagtgtttttcttcccatttgctgtgagctgtcaaggtccattggtgttg

SEQ ID NO: 8773 - DNA, 632 bp, Gossypium hirsutum
gcatttcgtatgtaccgaggaggcatagcttgatgatcactgaagatggttgaattgaatctgctgtgtctgaaagtgaaatgagcacataagaccataaagtggtagttgttcttctgcaatgtggcatctcatagtagatcaacaatatttgtgaagctcactgccttaaacatgagctaaaatgtcttatgtctataagaaagtattaatttgcttagggtcataggtgtaaagtgcgccttgttcattctcagagatctggcctgaatttgggtctaaattggaggccttgttttaattttaactgtatggacctcgattttcgtggctaagaatagatcttgcaagttgaaggcctcatcgggtcaacatttctatttcttaattatcagtcaaatttaaagtaaaacacactcaaaattatggagtatagagccaaaggatttgtttcttaatgagagcttaatcttggaaaggtaaataagacaaaccactgaagtaaactacactcgatacttcttggagtctcggaaactgtggaaaccatcgatgaagaacatccaaatccaatggatataacctggttttgatgacttttttgacaccccagtaccctcattacggatatg

SEQ ID NO: 8774 - DNA, 554 bp, Gossypium hirsutum
  misc_feature (55)..(57): n is a, c, g, or t
  misc_feature (532)..(537): n is a, c, g, or t
gttgcattgacctataaaggatagttatcttctttccaattgaagacaccagaannnttaatacaagatctcacacttgggttctctactcatccacagtaagatagctacacaaccaacaaaaactcggttttaaacgtttcatagatgaatacaagaaaaaaaataattacaatagaagaagaccaaccttgtaatgtaaccaagcaaaaaccttcttgtcatcaagcctgaaaaactttgtggacccaatttctgcatatttacagagcaggtgaggataattaatatatgcttatttgcagtagttagttattgcggacgatttgacatatagttaatggaacaatttgtaatgcagttattagcatatacgctccacgaaaaacaggactaaacccttgccaccagaagaaaatagtagagacaggatcccttaaccacatgccacaatcagatttatgacaaggtaattaatggaaaaaaaaaacaaatttctttcctggtaacaaatacaaaaacggacgggacnnnnnnacttaaaagaaggcttc

SEQ ID NO: 8775 - DNA, 661 bp, Gossypium hirsutum
ggggaggttactttgccaatgggcagtaagtgcattaattctttaaagaatttactttaatccgaaattctaaacccagaacaatctaaaactcatgtcttgtgttttttctttttttacagaggaaagccaaagaagggaagagttagagaagccaagagaataagacactctagtgaaccagattttgactatgatgatgatcctgatgtcacattttgaaacctcttttatctgatgaaatgcttcttggccttttcctcgagcttttaacttgttcgttctgaaacgatcattaatggcggatgttattttcaggattttgaggtttacgttttcatggtgctcaaactgaatcatggggtacatatggttcaatgttgaatggcaatgtaaatcaactttgtacagttgaaagcttcggaccaagtttcaggcaacaagtttcttctcttgtttcattttagcggtattattaccatttcaacaaggtagtattttttgaatttgaaaattttaagtatgatcttttttatcaagtttagattcaaattggtcgatcaagtttaaaggattattttttttatgataaaattaaatgaataaaaaattccatcgtccgcggtaggcatgcttagtttctatcattcgctccgttgtg

SEQ ID NO: 8776 - DNA, 433 bp, Gossypium hirsutum
  misc_feature (280)..(280): n is a, c, g, or t
  misc_feature (345)..(345): n is a, c, g, or t
  misc_feature (368)..(368): n is a, c, g, or t
  misc_feature (402)..(402): n is a, c, g, or t
tggtcgtcgatatgtaatttgatcgatactttaaaggtcttttcctgtgcatatgaggttggttacaatgtacagttcgtgagcatccagccccttctacaaatggcactgcctcttgagtagactttctcccacatgcgaatgtatagagttgactccgcttgatcttagctctaatcttacccttagccatctctcagaaccaaactttaaataataaaaaaaacgagacacatgtgtcaaacaaatgaaagcccccaaatctacccttcaccagganatattagtgcacccactccttcaagatttccgtgctttacctcgtgtttcacaaaaccaagtggnaatcaaacattaatatatatcanatatttacaaattgaagcttgcaagtacaattancgctcacaattcatacacacatactttcaga

SEQ ID NO: 8777 - DNA, 619 bp, Gossypium hirsutum
gttagtatgatttcttctttttgctgatcaaattatagctgtcctataattaaaagcttgaaataattctttaaatttctttttcggtctaaacttttgaaagagtttcatgtcaattgttaattactggtttttgtttttcatgcatttgcatcagcaactaaagctagttatggattcaatcatttgggcatttcggcatacagagaggaatattgcagaaactggtttaaatcttctattggagatgctgagaaactttcaggtttgacaatgttgtagtttttgcatatttgattagtgtgttgatttatgaaccagatgctgagttttcggttttggtaacttggcaggcttctgaattttgtaaccagttctatcgaacctactttttgacaattgagcaagaaatatttgccgtcttgacagacacatttcacaaacctggcttcaagttgcatgtcttgattttacagcagctgttctgcctggttaagtatcgtacttggccttgattgctccaactttggatcagttttatcttacttaacaaattgttctcaggttgagaatggtttattgactgagcctttgtgggatgctgctacggttccatttc

SEQ ID NO: 8778 - DNA, 634 bp, Gossypium hirsutum
ctaaatttccttctttaacttgaagactagtcaacttttcttcacttgttccattgccacaagagtttttaggggatggtattatatataaatatcacatatatgatatgggttgtgttagcaggtgctacaaagctcaaattgaaatcaggatatgtaaattatctcagtttcaagtcattttaggaactaatactagtaaaatttgggatgttgttgtacttcttcccctcgaatattgcacctcgggtctggttgatttcttacataggtatcatcgggttcgggttgggtttatttctgtcttgaacctgacctgatttggtcataagctaaatccaattctgatctgacctgaccaattttagatttatttttatattccgatcccgatctaaattacacacgtgctagattcttctggattggctgaattaattactaggagagttggtatgtttaggtccatctccctcgtctcttaagcctgcccagaggaacatggattattaattaaaagaaaaacataacgtaggacagaagaataaaacaagacaataaatttgtaggagggaccattctattccaatttggcccctttttactttttcataggctatcagctattgccatt

SEQ ID NO: 8779 - DNA, 622 bp, Gossypium hirsutum
gttttatttatctattttttaatttgcagaaatggaaaatttcatgctttaggcatgaggggttctccccagaaaacccaaaacctgagtatatcgagcatttcctgcccgaagaattaggacaacctgagttcagtacgcctagtgctcgcaaaagagattggaaatcaactcttcaggaggtaatattttcttttaatcagttcagtttagtggaccgctgatgtttatttatttacatgccacaatagatggtatgttcagtttaatctgcacatctgctatctattattggctactcattgagtctattgcaatcagcctcttcatagactggacaatcaatttgttagctagagtttagtctgggatagtatttgcgggagaaaatagatgttggtcatttgtggacaatcgatcttaacatgtataattctggtgatcctacttcttttgtatcaactaattaaatcggcaacatgacatttaccctttacattttggtctcttttttttttttttttaaaccccaaaaaaaaatttttttttatttttttttttttttttggggaaaaaaaaattgggggggggggaaaaattttttatttttccaatttttttg

SEQ ID NO: 8780 - DNA, 554 bp, Gossypium hirsutum
gctatcgggaaattttagggtaaaagtaccatgaaggcccttgtactaagggttaaattacattttgccccctcttctcaaaaaattggcaaattagtctctaacgttagatcaaaaagcaaactagtcatttctattgaaaattccatccatttgtactgttaaaaaacaggcacgactaacaaaaaatcagacagtgacaggtgaaatgccacgtatacctcatgttgatatacaaagaccagtttttaacagcaaaactggatgacatttttaacactagatgaaatttttaacagaaagaccagtttgttcttttatctaatagacaaggactaatttgcacattttttgagtagaggagaaaaatgcaatccaactcctagtaaaggggctttcatggtactcttaccaaaatcttggtaatatatacacaaatacaatatgaaccataacatgataacaatattttgattccaactgcaaagcaacaaacaatcgggaattcggaaatattgcaatcggtaagctaacctttggaatcgagtaatgaa

SEQ ID NO: 8781 - DNA, 679 bp, Gossypium hirsutum
gttgcttggattatggtagtgttaaatcgggtattaaggagaagtgtaggagagagggagagagagagaaaaaagagatcctgttttcaggcaggattaagggtttacatactcttagttataatctcgaggtgttatgtgtcatcaccataagcaaatcaaaaaaaggtggcctaacggtctgttcccgtgagtagttgtgactaaaagtggtgattaataagtgggtttatctgtgttcacatgtgcttatgcgactgtagagtcgaggagtgccctgaggggtttatccaaagagtaagcaagacttttgttcgacacaagtctgagggttgtttatgagggtataaggtctccgagagtaaaggtataacaaacatggtagaaaaatcttaaaaaaaagttcagcctacttgtgtcacatgtacccttatactataatcatccgattcctaacacagctgcaaatagctgagcaaggtattaagatttgatttctttcaatttagtaatattctggaaagatgtttgaaacattcaagattctttgtttttgcaactcatttcatgttatgccacaagagaggttcaatttctgatagaattgtgtaactttgttcacagttaatgaaatggaatttggcatgattttgatcttatttgtggcttcaatccctac

SEQ ID NO: 8782 - DNA, 649 bp, Gossypium hirsutum
agcgcacggcaagaaaagaaatctgttgccactcaagacttctttacaaatttcttagcttccctcgagaaacttttcaccataattctgtcagagaatgtaagaggagattcttcatctggagaccctctgtgatcagaccaacccgtaaaaacactcttatcgtttgagctgtctccattggattccatagaggagtcaggatcttcaggtatatctcgatataaatgtttcaaaatgaacagtgcggtatcataatctctccaatagtttctgttaaaccaaaagtataaatgagactaaaactatatacttttattcttcaaaactgaggcaccatcaaacacaaggttcaaactattagaccattacaagtattcttactgcataaaattagaaaacatgaggacattatgaaattgagcacatttcttgcaggggcttgtctggaggcagtaagatccccaaatttcgttcttttacattatttgttcatatactaataatgcttttcagttctcatctcttatgagaaaaaaatcagtttgatgttactgtcaataacattcatttacgattccaacctcaaaactaaaagtgacacagtatattagaacatgagaaataaaaaaaagatactctggtcttt

SEQ ID NO: 8783 - DNA, 651 bp, Gossypium hirsutum
gagtaggctttatttgttaccaggtacggctccaagtagctgaatgttaagctttatactacttagagatagtagtttaatttgtgcttgattgatcccatcaactttgtactttattatggtaacaagtttggtatattcctatgctttacactttttgaaagagtgattgttaagacggaaaatggtaagatggcaatattcaaacttgaacttatttaacatctttaagttcataatatgtttactctaatcgagtgatgcagaccctataacttatatagacccaaactcccatggtgttacatatcattatataaattattatatagttgaattacgagaatgaatgaacactgtaatttttattagatttcttcatttatgtagacaaacatgtttgttctatcaagcttaggtgttcaatggctatttattaaacgattgtgtgcttgaagtattggtgtttaatattcatgtataacacatatttagataaaaaaaattaaaacaaagaatatttcaaatatacgaaaaacctgaaaaaattaaatatatttgtatttaattcttacacttaaattcaagtaacataaaagcatgatatattataattaaagtaagcacatggtagatattacaggttggcaa

SEQ ID NO: 8784 - DNA, 515 bp, Gossypium hirsutum
tgcatgtatgtatgtgtatgtatgatgtgtaaatgcatgtgaaaacactctgccactctatccgtgggcatgcatgtttgcatggtaggcgtgaagagagagaggaaaataaattaaaatatgtttcaagtccttatattatttgtgtatttaaaatttagttagatttggaagataatgaaaatgtggcccgatgatgatgggttttagccgaccatcgacatcgacttgacaaataagtttcaacattatgttccaagcgagaacttggtacgagactctggcattccatgatatctcagagtgccacgggtaagcggtgaaggacatgagaggagatttcctctcgtgctcatggaaaaaaaaagtttcaaaatgggcatggttaagggtgatggacgtaacccttgtttggattcaagttgtgaactgtcggtattcaaagctttagcttctagaggttattgtcttcgttttgtaagttagaaatatttgtttagagagccggaattaaa

SEQ ID NO: 8785 - DNA, 585 bp, Gossypium hirsutum
  misc_feature (531)..(532): n is a, c, g, or t
  misc_feature (552)..(582): n is a, c, g, or t
ccttccggactgctctgctcgaatgatggtagtttaatgggaatataaattttttgccttttgctgctgtttatttctggtgctgtcaactgtgtggatggttggtggcttggcaaggtataatttggagtctcccgaaactggataaagtaacaaagaaaaaaaaaggaagtgaacttgatttttgccttttagaattatagtctagttcctggtgtttttcccttcttacacatggttcctggttaccgtagctaatttcaattgggattttgatgcatattcctaatatgaaagtgtatgtatcatgggttctctaccaaaataaccacaaatgatctacattggttctctggatcacaatgaccacaaaaaatctttgtatgtatcgtgtctagtgatgctaggtaatggataattatcgcttctactatcaattaagatatcttggcattcttgactgaaaaagttttgttttgatcggtgaataatcttttgattctctttccatgaagttctttatattgaacnnatagattttttctgcagttnnnnnnnnnnnnnnnnnnnnnnnnnnnnnnnccc

SEQ ID NO: 8786 - DNA, 579 bp, Gossypium hirsutum
cttgactaagtattaatagagtgggtaaattctttcccaaaagatgccacctggaagcctttgcagcaactgaaggatgccttccctcatattaatcctcgaggacaatgatcatttcgaggaggtatttgatacgagtcaaatctgagatatggaaacttaagaggaaaaagggcaaacggtacgttttagtttaaattaatgaaacgatgtgcatcaaactttaatgaaaacggggcattttggtctagtgtccatactgttagttttaaccaatttttaaattgttttttttttcttttcccgatatattcaattgtaatttgagttggaggttatgctattggttatcacaattttcatcaagtttctcctctcttctttcttctccgattctctctctttttcttcctttgctcctctcttttctggttttcaataaaaccagaaacggaattaaaatgtgaagttctttcacttaggtttacagtaaagaaagtaactaacatcttaaaattcttacacagaaattgaaccttaaaaatttagagtttccactattcaaaataagatcgcaaa

SEQ ID NO: 8787 - DNA, 661 bp, Gossypium hirsutum
tttttgatggatcaccatatatatgatggttatgcatttgttatttaggattgatcagcaccaaggatattcaactccatgtgatagaatggatcaattcatgaataatattatcatatgtggatatattccaaactatcttcttgttttacatatattagctctgatttgacgtttgcaagaggaactgaatagcagtggaggagtggtaacattttactgttcatccttttttccaggggagaaatatctgttatttgccaggatgtgagattgcttaaagagaagttcgatgagcgtatcccattgagcaaatccatttcctcaagccaaaccagctgcatcctggcctcttccagctcatctctgaaaagcatggcatctgatcttggtcccgagcagggagaggcaactaaaatcctggagaagaaaagcccaacaccatctgttgatatgcagtcaccaaaaagtagatcatacgaagaacaatacaaagctgatgacaaggagttactggatgaggggtgggaattttttgatgatgttgaaatcaagatatagtacagtgaagctatgtgtatctttttctttttttttgacaaaaagctatatgaatcttttgatagaacattaaggggaccctttcctagctcataaatgg

SEQ ID NO: 8788 - DNA, 616 bp, Gossypium hirsutum
tcttttcataacataggcaagactgaatttggttctgatgaggatgctcatgttgtgggagactgtgtaaaggtagcattgtcagtcattatatcatttattatcagattcatgttcatattccttagtcatgaaagttgtttgatccacagcatgttctaagggagctaccctcatccccagttcctgcatcctgctgtactgcattgttggaggcttacagtatgttgaactctttgctttcttatttccacgttttctctgaatgtgggctttttttaaaacaaattttataaataccttcttaagatgtgtgtattcttggggcaaaatttggtgcattatatgtatagttaaagcaaaaagtacaatcttggcttatgaagttatgatgcttcacgtgctcgctttaccctgtacctatgagttattgcgtgctgagttgatatattgacatgctagcctagagtgaatagcattcacactgtcactctctaattctttttttgtgcatgaaatgattggacttgaatgaacaagcttctatgcttttgaactttaagaaatataatttttcatcagctttttatggtttctgtttgattccagtctggtg

SEQ ID NO: 8789 - DNA, 653 bp, Gossypium hirsutum
tgcattttttaggccccactctctaatcttcagtttcaattctagattctgttttactcttctgtgtatatcatccataatcatataagcaattaggcattaatatcgccaagcaatcataaattcagacattgatattgtaccacaacttattgtcagtttgtcaacgatactgcaacagatgaatccagatcactaaagatgaggtcccaatagagatagctctcaatatttattctctaaccaaccatttgaactatttgtgacttcttaaaaaaaatggtttgaaactcttgtctccttgttataatcaaagggtagacatattcacaatgcatcattcgaaataggaagttgtcagattacagtttactaattaaggaatatttaagtgtatcagataggattctgtaaatattttactgattactatccctaactttaaggctgtttttttagacagcatccctagagttagtctgtttcctagtatagagtttcctaagttaggcttactatgtgtataaatatttatgtaatgtcttataaataaaatggaatagaaaaagcctgttcttaacatggtatccgagccaggtttttagctcaaattctgggattttttttctttgtctggcaacttcttctcattc

SEQ ID NO: 8790 - DNA, 632 bp, Gossypium hirsutum
aaagcatgtattaatggagcttcttcatatttgcttctgctaacccaacatttctcatcagtttaagaaattgttcaaataaggaatttatcttgtcaatattatcaaatgcaaccactttgtcgtaagaaaacgaactgttttgcgaatatgacttgcgacctataattactcaatagtaattaaaatcaaagcgaagcacagttcatagttcttacagatagtagatttcgtaattcatgtttttatcctactacgcataactaagaattttttaggttaaattacattattaatcattaaattatgggtaaatttttgttttagttatttaactcaaaaaaattataatttgatcattaatttttttgaaattgttttttaccccgttgttaagtcgcactttttagtcggtataataattttaatactcaatttttatattttttttgtcgatttgaccctaattatatataaaatgataaaagattaaatttcttcaaaattttagaaaagttaaaatttaaataaaaggaaataaaaaaattcaaaaaatagataaagggggagaaaataaggatttttttaaaccttccaaatttctctctgcattatttatacagagatatcca

SEQ ID NO: 8791 - DNA, 599 bp, Gossypium hirsutum
gaggtatattgtcttacccagctaagagacaccttgaatatatcatcttgtactccatgaaataccttgaaagataaacaggttacaatttttctaaatacgctaagagatgatcctgaaaaggcacggccaatcaatctcaaccaaagaaacaggctgatgcatgtgaaagttacccatgatccattcttggagagaactggtgtagaatctagagagagtttcatccagaacgattttatcccaaatgcttctggcaacaaggagatctttgagaacgtgaagcacctcttcagactcatgaccacaaaaaccacatgcattgtcactcccaatccctcgcctaatcctttcagcattcgtaagcaaatgctgcttaagggtaagccaaatgaaaaaacagatccgatgtggaccttggaacttccaaggtaaatcccaaattgactcatttggattcaaggaaccttcgtgaattttagcataggcattcttgagggagaaataaccagtcgaagaagccccccaaatgattctatcaaggccaaaagcaatgtgtggcggtggaacactaatggtcctgttaatgacctctcaga

SEQ ID NO: 8792 - DNA, 663 bp, Gossypium hirsutum
ggatacgatgcttctatctgcaagtctcgttgggaaaaatctccctcttatcctgccggtaaattctctctctctctctctctctcatctttttctagaaatatctctataattctggaaaagttatgctatccatttcctctgttatgagttgatttttaatttcctttttagttactggaatgataaatagcttgtttttgacaagcaggggaatatgaatacatagatgtgataatcgacggggagcgattgctgatcgacatcgatttcagatcagaattcgaaatcgcccgatcaacgaagacctataaatcaatcctccaaatgcttcccttcatcttcgttggtaaagccgatcgtctccagaggataattgctattgtttccgaggcggcaaagcagagcctgaagaagaagggaatgcatattcctccatggcgtaaagctgagtatgtcagcgccaaatggctctctccttataaccgagccacgccgtctcctcctccacttactcccacacccacacccacacccacaactggtacacttagagaatctgaatttgattccaaagctaaagagaaagaccagcaaccttttactgaattgaattccgaggacaaatactcggttgaagatgctgagttgggtgagtccata

SEQ ID NO: 8793 - DNA, 604 bp, Gossypium hirsutum
ctcctgtgagccccccatcgttggctgatgcacccgtgtgaacctatacttatgctacttgcaaggcttcttcgcgttttatgtcaaacaccttgattagggcatcttcgacaacctggttaatccaaatagacatatatatattaatttggatagtatacacatagtagtgttattaacagaaacatataatataaagttaatagaactagtatagtatgataaaccctgcattagctacaaccaaaaagttgcaaactgtgaagtcaatactgctaatgatccctagggctttttaccaggtgataattattattactgtgtggtagagaaggtgaaatcttaggaggattttttaaacataaattgtttggtaaagtcaaaaagcaaaagcaaaaataacgaaaattatatcattttacaaataaatctaaataattaataacattcttgaaagcatgcaacatttgacttagccacccttattttctcttcccccatcttttcaatatgaaatgatctatttttgtaaataagagtgaaaaatgatcatttttcctattattttcccctttaaactttttcgccttcctacctatcacta

SEQ ID NO: 8794 - DNA, 641 bp, Gossypium hirsutum
gaagtgtagatgaactgtgggtggggtttgaagggagggtgaaccctttccatggaactttccaggactataagaagctcctccagtcctcttcctaaaactgttatcggatatcaaattttctacatgaaggtaattcgaggtttagagcaaattccttatttctttttggggaaaaaagtttttttttgttcaaatgtaataagagggatttctgggtatggaaattgaagtaaaaaaaaaatgttaaactatgattgtctttctcaatttgagggataaagcttattcgtttgcttttgttattgattctcatgagattacttgaatgttcatctttgcgctatgaggtctacacctacagcaccgcattttttttgggcttggctatcaattcaaatactaaacagtttttatgtaaacatatatttaatatttgctgctaatagttaaaaatacgagcttcaaagaccagatttttttggggtttccaattggactccatagacgacttgaaatgcaagtgaaaagcatggcatgactaagcacaagggggttctttaaaaaaataaatattcacgcattcgagtatattaaaatattaaatctaacccctggtcaagctagttaaagggggtcaa

SEQ ID NO: 8795 - DNA, 668 bp, Gossypium hirsutum
caggctagtatgtaattttaagtggtgaagcaactgaaagttatgtttcttgttgttaattgcagaataaaccactaaaatacctgagcacgactgtatttgagggttgctctccggagcttctgagggacttctatatggacaatgattatagaaagcagtgggataaaacggtgatcgatcatgtgcagctgcagatgaacacaacaaatgggattgaaattggctgtacaataaagaagtttccccttttgacacccagagaatatgttcttgcttggagattgtgggagggaaaagatagaacattctactgttttatcaaggtgactatcggtgaaacttctttcatcatattgagttcatatcagattcatattattttggaaactggaagttctatggctgatattaaggattaagaacatgattggcagtatctttaatgtgaaagagatgtacgtattttatgctgaaagttattaatattggaatttatccacatctagcacatgctaattaacggctcatgggtatacaatcattgacccaattagagatcatggaatattgtatctcatgctgtcatttgaggaaagtttttattctgttcaggaatgatagtagggtggagctccattaggtttggggttctaacttctaaacct

SEQ ID NO: 8796 - DNA, 632 bp, Gossypium hirsutum
ctagaccgttcgatttcccaaaagaacttataattaaacacgtgtcattattgctggtggcatatttgagtaaagttagttttgattggttcccggtacttgtacttttttctttagctcaagctaggcaataggcataccctttttcccttactattcatatataatgttttttgtatcgttttggatttatggatatttttaagtttaaatatttttcgcatgtaattttttactcttaatttataatttcttttttacaataaagtgaatcctcacatgagaataacaaattaataaagaaaatagttcctataacgaacgtgagtctctttctatttcactctaattttcatgtctgcaattgaaagtatataaataatcaataactattgttgattgagtattgactcgattgatatagatattattattgatgcaagaggatgtaagtttaagtacgttgaaacgcattatcttcttatttatagattagatactataagtaattttaaacattgtataaaaaaagaacatatataatcaaaatatataatgaaattctttaaaaaacaacaacaattattcaacaaaaaatttaatctattgaactttgtcatgtaattgggtct

SEQ ID NO: 8797 - DNA, 634 bp, Gossypium hirsutum
ttccttctccaattaatttctctacataaaggtttctatagtgtcaatgagtaatttaaaacttctgggttgtttatctttcaatttctttaggatcatccaagtgtgaggttccttcttttatctattctatttttaattcttttgtgtttgctgacgtgttgaaatgaaatactaagctgtcacaagtctatattttgctgagaaccattacctgtcatgtatttgaacagctttgcctgggttcattctgtcgttggtaggttagtcaacccctagttttgtatttttagttcattgtgttatgaaagctccattcagttgatacctttttctacttgctttttcatatttgcttcttgattttttattataaagtacaggcaaacggctaaaatcaaagttttaattaaagtggacaaatagttagaatgtaacagcaattttaagaaaaatagttattcagttttattgttgtcaaggtttgtttctaggtgtgcctagggctacactttcgcactatatagcaaaaacaccttaaaccctttcaggtgaagcacttttgataaggtgcattcatggtgtgcttaggcatgtttgtttataaggtggcaggcacaaagaagtttgcgtg

SEQ ID NO: 8798 - DNA, 639 bp, Gossypium hirsutum
aaaatcctctccgcaaggctactagtttcactggcaaccgataatgaacaagagctatcaagatcgaaaacccgatcaccttccagtgagaaagaatcctcctccccgctgtctcggtccataacgtcattactagaaatccaaacatctttactgtcagatatcatatccatggaggcagtagctctttctcccttgatttctcctgtcagtggcagctctacactactttcttcagtctccataccagcatagttacaatccacatctccagcagtatctaaatggttagtagccttggtttcagaatcagttaaaacaggagcaggacttgccgtaagcttaagtcttgtaatgtccatacgggtagcaaaggtagagttttcacacactgagttaccaaatctaaatggcactgcgaccgtcaaagacatctcctccatcaaaatccctatattggcagtacaaaaagttaccctccaacccttcaaacatcacacaacctgtcatttttcaacgaaactatgaccttctgatgaaataaagaacaacaacggaatgtgaatggtgggttttaagaggccatttcccatgccttcatcaactaaaaggtgtccaaaaaagaaggatacaagttca

SEQ ID NO: 8799 - DNA, 644 bp, Gossypium hirsutum
tcatgaacttcatcattataataatttattccataatcatcgtaaaaacgagactgatcttcgctattttcccacaaagattcctgtcttaaatctgggtatgagctactgtttctcttcaacctccttacgacggtcgtttcctccaccgcgtttattggtggaggatggtcgtcgtagattttccttaccgggtactgatcaaaccattgttgcttgttaatgtgagtatcaccatcattcctactgttctcattgtcgccgtccccgctgccgtcgtttcgcctggcgaaaacgccgcaaaagatggcgaagaagaccaggaaaaggttgagggaatcggagttttttttaacgccggtgggttgggaaatctgagcggcgatggtagagagaaaaggagggacggcgaagaacaggagaagcaatgcgatggtgggtaagagaattatgagaatcggtggggagaaaagaggagacggcggctgacgaagacggcgatgaatggtgacggtggccagttgtggccataacggcgggggttctccggtgatttccatgaagggaaaggccaagttttggagttttcttcgaggcttaaaagactttataaacaaaaatacaaaggagaagcttgactttcg

SEQ ID NO: 8800 - DNA, 581 bp, Gossypium hirsutum
gtttgacaaaaaattagaaaattaaaaattcaagatttaaaaaatataaaaaattgaataagagttaaaatgatttttttttaatttggagggggaaaagtttattatcctttttttttctttctaaaaaacaccatataatatatattttatataaccatataatataacacttaacaggagagatgaaaaacattaaaaccaccgaacttttgtcccaaaaaaataaaaataaaaccaccaaactaaataagttgtactccgtcaaaaccacgacatttcacttcctccgtctcctttacctgctctgctcttcctttgcttatggatccctacaaggtattctctttcttctatttctattattgtaattttaatcgttcgcttgattaaattcgactctctatttctttttctgatgtatcaacttcctcattgaatcaaatcaaacatgatgtgtccctcctttcatctttgttgatttttctttgtttttgttgttgttctttttttttttaaaatggacttttttggaaaaatggtggccgggttccccagggttttttaaaaatttttttttg

SEQ ID NO: 8801 - DNA, 665 bp, Gossypium hirsutum
ttcacagaagttgagaaactgtttgttcatacactggagtaatttaataaaacataattttaatatatattattagctggtataaaaatacttttaataatatattttactaaaaataccacttcctattcttgaatccaaacacagattcaagcacatacctcacctattcgatctcactgccaccctcactctcattcaatgctgatttgacaggatcttaacttccagtctattacaaacgtggcaaaatgaatagaaaagtaggggctaaagcaaactttttttcttgctgaatcatctcccaagttttttgttccatcattggcatgattaagaacaccaaaaacacaaaacgggaattaccaacatatcataaccaatccgaattcataaacatttcggagtttacatacactggcaaattgctttatgtaagaaaaggcaaccccccatgcaaaacctacatataatgaacacagcaactcattacagctttgctatattttttccccttattattaattatcgttataggcctcaaattctaatgggaactgccttccaaatgggttagataaaacatctacagttgcctggaaccaaaaacaaaggttagtggaatctccaaaatcagctgctttcaggttatctaacgacaccca

SEQ ID NO: 8802 - DNA, 647 bp, Gossypium hirsutum
ggatctgtaacttgcctcaatcaaaatatggaaaagttttaactacttgagccaatgtctattggatagagtaataaggtcttttgtttaaggtttcagtttgaattttttgatatttttcatgtctgggttcaggttttagttattcctccttaacaattttgtgttgtctccaaatttatgaatattagattatgatatactcattatgtgggtgaaaatagaattatataagtatgtttatagaaaaattgatatgattaataaataaggatcggttgaatgataaaatacaattattaaaaataatagacattttagtttaaatcctattatttttctgtataaaatatatgaaatcacaaaaagtaaaaaaatatatatatatttgaaagaatataatttattttgtaaagtaaagtttttaatcattactcgaaagaatttagtattagtagagatgaataagtttaatatctataattattttaaatgttttgtttataaaattatacatattaagttatatttttatgaaattttttatttttttatataataactcgataaaaatttgattataataagatttgaatcgagaacattatgtatgataaatttgtcacccacttcggactatatacatc

SEQ ID NO: 8803 - DNA, 933 bp, Gossypium hirsutum
  misc_feature (647)..(648): n is a, c, g, or t
  misc_feature (760)..(760): n is a, c, g, or t
  misc_feature (777)..(777): n is a, c, g, or t
  misc_feature (922)..(922): n is a, c, g, or t
ttcgagaagtctctctttcattccgggtctcactggcgtctctgcggacgaattaaagtgtgagccaactattatttactgcaaagttcaaactgatatttctgatggcaataacgaataatttacgcttacccgattttgtttgccaaacttcttgtacattaattctatgcatattgatagattcaatccatggagtgatttcttaaaggactaaaattgattagcagttcacagttttcagaatgacatatatttcaggatctgtaacttgcctcaatcaaaatatggaaaagttttaactacttgagccaatgtctattggatagagtaataaggtcttttgtttaaggtttcagtttgaattttttgatatttttcatgtctgggttcaggttttagttattcctccttaacaattttgtgttgtctccaaatttatgaatattagattatgatatactcattatgtgggtgaaaatagaattatataagtatgtttatagaaaaattgatatgattaataaataaggatcggttgaatgataaaatacaattattaaaaataatagacattttagtttaaatcctattatttttctgtataaaatatatgaaatcacaaaaagtaaaaaaatatatatatnnttgaaagaatataatttattttgtaaagtaaagtttttaatcattactcgaaagaatttagtattagtagagatgaataagtttaatatctataattattttaaatgttttntttataaaattatacanattaagttatatttttatgaaattttttatttttttatataataactcgataaaaatttgattataataagatttgaatcgagaacattatgtatgataaatttgtcacccacttcggactatatacatcattaacttgagaagnaaaattgaggt

SEQ ID NO: 8804 - DNA, 629 bp, Gossypium hirsutum
tttttgcaatcagccagggtgtttttccagaatcaatcataaaaaattagaggatagaagagtgaaaagttgctgccttaagcctcttaatatggaaccattaaatgatgttctagtattcatatatgcttaaatacagatacaaacagttggccttacttctcattacaatctttttactatcggctaaagtttcactaccttacacagtctaagatatcacaaagaccgggctctatccacttgccttccatttttttcaaacccaagaatgtttcaaggttaaaatctacccaaagttcttgtattttaattcacttcaacttttatttttaataatttttttttaaatttcaaaatttaagtattacggttaaattttttttgttaaatgtgttagcataatatttttaaaaaatataaatattcattctgtagtcatataacaaaaaaaaacattgtaataaacttaaatttatatttattttttaaagagtcgaaatgtaatttaatcatattaatttataatttaattatttcataatagattgcataacaaaattttccctttcaggggccaaagtttttgtctacctcttaaatttgctttgattattgctgtactccaa

SEQ ID NO: 8805 - DNA, 604 bp, Gossypium hirsutum
  misc_feature (58)..(58): n is a, c, g, or t
cgcaataagtcacaaacttaagatcaacccagatgaaaatttactccatatttcactncttttattcctaaaatttataactaaatctcggttcacaaattacaactaacaatagtgggcaaaaagcaactcccaatttgcaatcaaagcaactgagattcccatggttatataacttaaataaaaaagaaaccaagctagaaaaattcactaaaatcttgataaataaattcaaatcataaccagataaactgaagtcctataaataaagaaatatcagaaaataagtggaaagcaacaccaaatctgaattacatctaaaaacaaagccaacccagttttccaagtaccttaagattgagatcaaaggcagagagcatgaggtcaaaggcaaattgcagaatcaaaagagatataaatagttatcttagaaagctaaccagagagtgatcaaagacacagaagttcctcaatttgtatggagaaggtctgagacaaaagtagattaaagtgctgggagtggcaaccaagataggaaaagtaaattattcgatgagaaaaaaaactaaaagaacagatgctctttactccttaatccttaatc

SEQ ID NO: 8806 - DNA, 653 bp, Gossypium hirsutum
gtagattcgttctcaaatcacttgggaatcacatagtggggactacttggttcgtcgttgcttaaatccagtaactaaagtgctagaatattgcttggaagatatttccactgtgtttcccaactctgaagccctcattataaacaattcaaaagcaaagcctagatgtaagatcacaaaggttcaactaatgaaggacattgcatatttatacaggcatatcctgaaagatcaaaaggcaacattgagtacaggggttttttcagcaataccgatggcaacccggataattctcgacactaaattccttgttaaagaatatacggaagagctttccatgaagggcaactcgaactgctcgaatgggaaaacattcaagctcttgtgtacagttatatcgagaagcgatgagatagatgaagcgttgatgaagccgttgcccccatacgagtgtgtatgtttaaaagaaaacgctacgtttgatgagctcaaacaagaggtggagaagaatttcagggaagtgtattggaggctgaggaatttcgttgtggaaacaatagtgaatttgagtgtgaagggatcggatttggtaatggggtcagtcgaaatgggtcagaaacttgttttcattggcagcaacgaagatcagatag

SEQ ID NO: 8807 - DNA, 637 bp, Gossypium hirsutum
atcaaacatatcagaatcaatttgtcggcatccatcagatataccttgaccaccatgttgatcttcttttatcttcaatggctcaatgtcaaaggtttcaaggcctttttcactctgccccgacagcaattgaactgcaccagcttctctccctgagtaatgtttgtcaacagattctaaattctttgagcatggcaaaccatttgctgatgattcaagcacattattagattgtttcaaatttaagttaactgaatatgcagagttaacacaatcagcttccacagggtcggccaagtattcatcaacacatccagatgaactactaggttggactgacatagaatccttggtatcatcctccttaacatcaacgatcatttctcggtgcaattcactaacagatctttccaaatcaccaggcctattggtactttgcttgtctcctttaacattttgagatacttccacattggatgactgaggcctggaataaggataatttcagtgcaatcagagctcaaacaaggagctattcaagtggaaaacaataaagccaaaatcctaggggtgacaaaccttttcagagtatttatacgcggagatgtaaaaactagagggggagaactgagtccca

SEQ ID NO: 8808 - DNA, 659 bp, Gossypium hirsutum
cgaaatcaggtcagatcatgtcagtttcctttattttattttaaagaatcttgagcttaatttttttaatccatcaaatcaagggtcgtccaattaatcaaccaaacacttgttagctactcaaaccaaagcattaagatacttgaatccgggtccttcgttagctctagctcgacgtcgacctggcaaagtctttttaagcatacatgagctgacagacttaccgttaaactcttcagtagcgtccatgaacagcttggaccgctcacatatctttgcatgttcctttttcccagcactcaactcagcctataactttgatatcctagaacccacattatccagctttcaacgctcaaaatgttccatggtaaaatccaccttcgaaatttattatataattataataaaataaaaataacccaatccgagaaccgatctgacccgaaatccgacacaatataataaaagaaaaccttaaacccccaaagtaagggctccttctcctacctccatttttttctctaaaacaagaggagaccatagaccattttctctcctatggggtcctccatttatacttttgttagattctttgtatcaaccatggtgtgatgaacgtggatcgaacacgggaccttcagatccagggaactcag

SEQ ID NO: 8809 - DNA, 577 bp, Gossypium hirsutum
  misc_feature (28)..(30): n is a, c, g, or t
gaagagtcattgaatggtttcccattgnnnaagcattaatcagtcaatcaaatgaataagtaaaataaatctatgcatttctgaggaccggaacctgaactgacatcaaatgtgttctaggaaatattttaaatatatcgaaaccgatgacactattccaaaatttgacagccagaagaatttgctaatttataatttctctcgactaattctttccactcaagccgattcattaaccaaaggagaaaaaagatgtggaaaagcttacaaaacagcttttattttctttagcctagtcttgcaacagtacagtggcaacagatgtgaggaatggattgagtaacaagcttacctgtagcaagaactggatcgagaagaagaacatggcgttctgaaatatccgtgggaagcttctcatatataagctaagaatattcaagaaagcagattatggctaagagttaattatatgtaaaacctaatggcttgaagatcccaaaaacactactaacctgtttcccatcatctccctcacgatgaatcaaaatttttccaatttttatccttgcaacatgca

SEQ ID NO: 8810 - DNA, 645 bp, Gossypium hirsutum
ggtatgatcaaatgttttagttgtatacatttgaagatcatattatatgcatacctctgtttgaatacgttggagacaaatctgaaaaaatgcatatcaaacaccaaattggatgaaacttcaattccttatccaatttgtgcgatatattgaaccgatttagataaagaaactagattgaatggtattagtctttatactttgtgaatgaaagttgtggatttaactgtcctttaatttgaacaattttagtcttaaatactttttgaattttgaaattttagtctttgactatacaatagtaattaaatttgtttggttaaacaattattagtcatgtactatgtatacatatataaatttagttcatattcttcaatgggatctttctataattttgtatttttcaaaatttaaaattttaattttgacataaatttcaatattgagtttgcgatgatatgtttgttgcattatatttttaaaataacagagcttaattttaattttaatacttattgtttggtgaccattgtaattttaaaatttgaaatgactaaattaaagtattaagaattaaattcgaaatttttgtgaagtacaaggattaatagcagtatttaacaaataattttggtttgattg

SEQ ID NO: 8811 - DNA, 670 bp, Gossypium hirsutum
agagtcatgtttgcagcttcccttggtgttttattatttttatttttctggtctgaaatatgtagaagttcatcagattatctagaacatgcctatggtaaatattaaagcagacattcatatacattaaatgtggcactgacgacatctatatctcaacagagaagctgatatgacaaaagaacgtattgagaaacttctgaaagctggagcaaatgttgttctgactacaaaagggatagatgacatggcactcaaggcaagtttcctttgtatttgtttttctccaactgcttactttctattttttctttcattttcttcctaaaatctttattgcttcatcagtattttgtggaggcaggagctattgctgtgagacgtgtccgaaaagaggatatgcgccatgttgctaaggcaactggtgcaaccatggtacattcctactcagcttagaaatgataattatgtcataaccatataagttttgcatgctttgtgctacggtataactcatattcatgttctttccagtgccgaattgattgatggttatgattaataatcaatcccttttctatgaagcaccactgttattagggcacgaggcacgctctatgtgctacctttaggtgctaagcacaaaaaaagaagctagctgagtgaagtg

SEQ ID NO: 8812 - DNA, 642 bp, Gossypium hirsutum
ctgccgcctacaaattttaatattattcacgtttctcctcttaaaaataatttattatgataggtgttatattaattaattgtttttgtatactgatatataataaggaaatgtgtattgtgcagtaaaagtaatttctttacgacgcttagtcgtaacggtaaggtatattatattattaaagagaactcgattttgaatattagaaatattattgttgagagggataactatgaactccgaaagaattagtatttatgaatcataaaacggagataaataacactttattgttgggagcgggggcaaagctagaaaaatgtcttggggattgaaattaagttgtagatttttatgagagctaaaatataatttcatcattttaataacttatatcttgatagtcttttaaaggactaaatcaaaattttatcattttaggggttcaaggtgtaaatttaccatgcacgaacttaaaattttataaattataaaggctcaaaagttgaatttgccatttaggggggcaaggcccttgctagcccttgccgtcatcggagggataaccatgaactctaaaaaattgatcttcatagattgtgaaatggacatgaataataccttattgttgagaggaataac

SEQ ID NO: 8813 - DNA, 552 bp, Gossypium hirsutum
gtgagagtcatgctgcgacattcgcggcggcgagggtgaggctgctgttgggatgtgcggctaaggctggaggctactagggttttttgtgtgtatgtgttttaggctaatgggttgggtctattaaaaggtattgggctgaattttgggtttaggttgtaaatggtaattgggcctgctgtgtttttattttgtatgggcccgggcagaaagaaattgggtattacacatgtccacaaggataatatttgatgaattgtatgcagcagcgtggaacaaaatgggcggcaaagttgggggattaagaaacttgtcaataatcaatcataagttaataaatataatgtacgaactccgagacaggattaagatgggaaatgtaaatttagcgaaagagtacaaaaagcccatgatctaatggcattagaggtgctcatgggccgggtcgggtttgggccgggcctatgaaaaattttagtccggcctgaaatatgggttcaaaattttgcccaagcccggctcgggaaaaaaattataaacccaggcttggcc

SEQ ID NO: 8814 - DNA, 640 bp, Gossypium hirsutum
tgcgtatgggttctattggcttcattctgatctttttagttgataatgttttctaggaactactatagatgcacttctgctgggtgtcctgttcgtaagcatattgagacagctgtagataatacaaatgctgtcgttataacatataaaggtgttcatgaccatgacatgcctgtaccaaaaaagcggcatggcccttcaagtgctcctctcgttgctgctgctgctcctgcttctatgaacaatttacaacttgcaatagctgatggagagcaaaagcaagttacatcaacaaagtggtcagtgggtacagaaggtgaattgaccggtgaggctgtagaccttggaggtgagaaggcaatggaatcagctagaacgctactgagtatcggatttgaaatcaagccatgctgaacttattgggcctttttctgttgtcaacatcaggcatgtctctatataaactattgaaatggtaattcatcaggtttgatttttcctacgcttagtttttcctttgttatttctggtgaggctgtatattttctgttgtattctctctctcaatctgtttggaacaaggttataatagtggaaacaatatagatttggttggcaacccatttattgtgatcttatt

SEQ ID NO: 8815 - DNA, 646 bp, Gossypium hirsutum
atttccatccaaatgcatatcattatcaggatatgttctccagacagaatgggaatctgcattgatactctgcatttgaaggtttttatgcagaggctggtcgttgaaaacaccatggccggcaaattcctcaagagtgttttgaaaatcatgagcactttgctcaaataacttagaatcaaacggcaaatcaaaatttgaagatgaatccatggaccatttgggcagctctaaggcattgtcggccaaaggattctgaaagatgtacttgaattagaacatctatatatcatgattttgacaaaagatccaaataagaccaaacatcaaaagtccagaaagagaaaaccagtctattaagagaagtttggttaaattttggatattttctgactacatactcttgttattacttgtaatcaatcctttaggcattacacattagaaaaaaactcaaaagttgacagttctctgtaactgtcaaagtttcaataaactctgacaggattcaattctgtatgcttaataaaaaaaggaaagtgaaaagaataccagtttctggcattagtccaaaattagataaaacgtttagcattagaaattataaagaaaccacatgcattaaaaagttcagcatttagcctca

SEQ ID NO: 8816 - DNA, 679 bp, Gossypium hirsutum
gtacggagtattaccggatatatcggataagttatcactaattcacaaataaataacatacatagcatactttaatcaatacattacctagatattagatacatgccacaatatcaaaagaaaggcacatcactaaaattcactaattcaaaaatatttttaaagtcacgcttaacttataattattaattaataaatttttctaactttttcatcgaatttagtgatctcaaatcactgttctgacactactgaaaattgagctgttacaactcttccccccttaaaaattttcgtcctcgaaatttctcacctgatacaagctattaagtcaaatctttcttccaccttttttatcgaagtccataaaattaatcataactcatatcacttccgaactcatatcaaaactcattttagaacttgatactatgactgaacttaactgagtagctctgatgttctcctgtcatcactttctcactagtagtataactaccgagaatttccagtaatcgtcaatcaaaacataactgagaaacccgtattattaaactctgactgatatttttgacgtggttgcatctgtaactttcaactgatatttgtttcttttttttccatgaaagcgtcaagtaatatcattttacacaactacaataacttcaacaaccaggac

SEQ ID NO: 8817 - DNA, 666 bp, Gossypium hirsutum
ttgttaaggtcagttgccttgtgttttagattaatgaatttggctggtattatgagttccatttggcttgtgaattttggttcttttgcatgttggaaagtttgatctgttggcagttttattgcctttgttttactgacaattattttggttctttgtaattgacgtaaatgttattactatggaacaggtttataaatcagggtccttcgggaggtcgttggatatctccaaatttagcagctacaatgagctgcgcagtgaactcgctcgcatgtttggccttgaaggccagttggaggaccctttgagatcaggctggcagcttgtatttgttgatcgggagaatgatgttcttctccttggtgatgatccttggccgtaagtttccattccccttctattgtatggatatagtttcatcttgaactctaggatgcatgtcaagttcttggaccacttgatcaagaaattgttacattctaccttaaaacacttttgacgtgtacgagaacttggggtaaatttcaacctttttgagtgcatgcatttaaatctattttgggttccacatgctaagttcttttgctaattccaaactttactttatattccgttttccaccagggagtttgtgaacagtgtgtggtgcatcaagatactttc

SEQ ID NO: 8818 - DNA, 424 bp, Gossypium hirsutum
  misc_feature (406)..(406): n is a, c, g, or t
  misc_feature (412)..(412): n is a, c, g, or t
  misc_feature (414)..(414): n is a, c, g, or t
tatatttccatttcgcacagatatagaaaagtaacccaaatgaaagaaagcaaactcgagaaaaggaaaacagacagatacagagtccacggtgcagcgtcaactatgagaatgaaaatatgagaatgaaaacagcaaacccaccaggatcacactgttggtagaacttgtcaacatctgccataaaaagcccaaaatatgacaacaaaaactaattaattgaatccatctgtaattttgaaatggaaaataaaaaaagaaaccaagaacgaaagaaagaaaagggaacgaaccagtggtgagggccttaatcaagccagcacgtctgcctttaaagtcgttgaagacctcttctaccgttctcggtatcgggtgtggtatcccttccatttgtttctctcaaaantaaatnanttctctatat

SEQ ID NO: 8819 - DNA, 594 bp, Gossypium hirsutum
  misc_feature (563)..(564): n is a, c, g, or t
aaagcaaaagaaaacaattaaaacttgcttcaggcaggtatagcgggttcctttggtggggtaccaagaagttccatcaccagggagagcaatactaaaaaagcgttgtcatacacatacacatacacatacacatacacatacacatacacacagacacacatatatatatataattaatctttaatataaataattaaaaaatattttttattttaaaaggcaaaatatgtgggggaaaagggttttctttattgggtcctgagttgttagatagaccttgaacagtatagtccaaattataagacaaatgggcttcttttgttttcatttcttaacgaagtcgactcaaattttgagcggggaaagtccccagtcttaacgaactgactgcaaacttcagtcagttactggcaaaccccataaaagtacaagtagaagatttcttcagctttctcatactctacagaagaaggaggaggagaaacgaaagaccccccaaaggcattgcttcattcaacaatgtcgatcccaatcctagagacgtgcaggaaaagaaagannaagccaaagttatttgggttacattcattt

SEQ ID NO: 8820 - DNA, 620 bp, Gossypium hirsutum
gctttgctcactaatagacatcaagtagctaaccatttgaatatgaatgatctctcggtaggataaaagaatatcaacaaaaagtcagaaaaagaaaaaaaaaataggaaccataccatatttctacctttcttttcatgacttgataatcggatggatataggctagggttcggaactctttttaggaactcaatcttttctttcatgctgccccataattcatttcaatactttggtaccttgctctggaacatcatctgatgataggaaaaagttccatcttcaaactgccatcaattgtttgcttcacataagttgattgttcctgggaatcaaaaactcaagcaagcaaaactgttgaaaattccagggggattgatagacagggggacattttgcatttcatcaacaaaactattaatatgcctcataaaaccaaaaaaaaaaaaaaaaattccaaaaataaaccggcccccccatttcagccgaaaagcaaacttcccaccccgggtcctccaaaaagaacggccccaaaaccaaaaccggtaactttaaacgggggtttccctttggacccgtttccgcccccccctccccctcccaaaccaggcctttcgg

SEQ ID NO: 8821 - DNA, 577 bp, Gossypium hirsutum
attaatgcatttgtgcagtgtgtgagcgtctgctcgtgtctctgtgtaaatctgttgaagcatttacattgcatcctctcatagttttatgtaaaattatggtgcttttctactgttgtaattttgtaaactgatccatctgctggatttactaatcataagaaatgattatcattctgagtgttttggacctactgctaagttgaacttctttgtaggttattggtttagattgtagcaaggcaataccatgctcggcaaaggttagttcaggacttctatttcctttatttacatgctcaaatagtttcttgtagcatgtggtagttctgaacataggttgtttcctctgttaggagggaatcggtataacagaaattcttaatgccattgttgaaaggattcctccacctcgtgatgctgctatgagtccactaagagctttaatatttgataggtataattcaggcattttttttattcattgaacttgttggttatattaacttatactctacggatcatgtctcacatctagttgacacatatttcttttagtggatgtaatattatttct

SEQ ID NO: 8822 - DNA, 585 bp, Gossypium hirsutum
tgcatatcaaatgaaatcatcaagaccggggttacttacaggtagtcgatcagatctgttatttctgatgcttccacagggactggcggttgagtgttttttccaaatacatccaccagtgtattcaatagtaacgatagaatctgaaagatatttcataaaaagtaagcacaggacaatcaatcatgcgttggttaaatgttataaaccttattatcagtcatggtttcctcttgccctttcttttttatgctaaaaattctatacaaaactcaagttaccgtataccagaccatgtcaacatcctattgcatgttctctctggagcataagcctttttttctaaaatcatctttgccacatcattttttctttgaaacaccaaaatcaacctcttttaggtcgatgccccaacgtttcgagatttccagttcttctaagaccttgagtttttcatgcactcttatctgcatgtgcttctttctccaatattcccctttcacattctatatacatctggttatctgattagtaatattatcatatctgccaacatgccaaactcctaacagccactcaataaga

SEQ ID NO: 8823 - DNA, 615 bp, Gossypium hirsutum
gagttgaatcacaacataaccccactgcacgggataaagatcatcgaaaaacaacataagtttgggaagaattctatagacataaccgggtacattagcatatcctataccaagccggccagcaccttctatataataggcaatgaatgaacatacctgccgagttggaagtttaaatgttgtgtacttctcgatatccttcactttgatgtcctgccggtaagtgcgtgcttggcaatcatttaccctgccttgtggttcaactgtgatcttcccaactccatgcggatcgaaaagctcaaagttcctgatgtatccttccgaaaagaaaaaataaaaacaagttaatgaccgaaaaacaagcaacggatccatcgtctggtagcaggcagtagccacaagtctaaacattcaacatcttagacccttagtccataactatgttctttcaactctttattcttcttaaaataactatttaaattggatttttgaattctggtacgaagatatgaacttctaaggacctttcaaataaatgaaaaaactcgaaaattttttaatataccagtgttgaacacataactatatctaagacttacacgagtaacatag

SEQ ID NO: 8824 - DNA, 628 bp, Gossypium hirsutum
tgggctggattaatttgggttaatagacattttgggccgtgtaaatggactggacatttttgtcattatttagtttttatttgattttttaaccaggccaaaattgacctattacaataagaatccaaaattttaaaacataaatataatctgaaatcaaattttgggtggtttactccacccatacaataatgggaagggataaatgaattttggtttaatgtgtaattcgatatatgaattttaatttggtataattatatatatgaaattttgatttttgattcaattacatttaaagaaatgaatacatatatattttttcatattcaattaatatacttgttcctgtatgtaatatatcaatgtaaaataatgctaattcaataatattgttaatgatctgtaaaaattgaatcaaaccaaaatattatgtataaaatcgcgcaacatgaaaattcttatacaacattacgcattgtatcaaaatctatgtataattttgatacttttgtggttgtaaagtgaatacaacactaatcacaacaattaatatttttttttggtgaattagtgaattacaatatcagggtaaaggcgaacaacaaacacggttaacgcgactcat

SEQ ID NO: 8825 - DNA, 588 bp, Gossypium hirsutum
  misc_feature (579)..(581): n is a, c, g, or t
gttgcactacaaattcctaaggaaccagataatgatcagacataaacatagaatcagtacaagcacaatgctatgatgattttatctctacattagccgtcatattccccttgtgcgaacttgttttctggatagtaaacggcaataacttgatttccgccgaatttccgaccattcattgcagcttgagcctttttggaaccttcaacatccgagtattccagaaatacctaattgcaccagagaattacagtaacatcaggagtttgaatagagtagaaatcaccaagtcaatacattcacttgccaataccatggataagatgaagacaagacaatgaccaaataactacaaaccaaagaaaaaaatatatactatgttacttggaattgggtgtaaatgttggccacgggtatgtatccaacatagatatgtccaagtttttccatttatttggagattttggaggatcgtatccccataccatgaccaacaagtattagatagcagtacttaaacagaaagttagaaaaacacagaagaaaatgtaaaaagcctcaatactgaccttcccgacnnnctggggc

SEQ ID NO: 8826 - DNA, 656 bp, Gossypium hirsutum
gtgatctgtttttgtgggttggtatgagtttgtaaatgagtgtgaatgaaacgagtcaaagaatgttatcttcatggcatgtactgtatcaacttcctccttatttggttcttcctaggcatgtttggcaaaaccttagttgtgtctcttttagtttaaaatatctttgatggtatctctcttagcaagaatgtcattgatgttatggttttctttttctttatgagacttcaaaaactgtatctagtcacgtattttatcaaaggctttaaattattgatcaccaatatatcttggtctaaagacagccataaaaaagctagcttctacagatgaattatttgctccggagattgaactgcaatgccccttagatgttacatggacatttactacactacatttagattttctttggtaattttcatacagatggtagatagagattgcctaactttaactgttttagcagtggtcaagatttaaacttgtaaattatattattgcttgcatggagattttagcctctattatgtgaatttcttaagacaatgttattatgctttatagcgcctttcctttccctctatcttttaataagaatataactacattacctggtttggccttttacttattgccattctccctggaat

SEQ ID NO: 8827 - DNA, 649 bp, Gossypium hirsutum
ttttccagaggatcgaattttgacaaattataatagagaggttaacttttccattttcataaagtaaatggtaaaattcagaagtaaaaatctaaattcccattatcttggttcacaaaaacaaaaagggttaatataccatttggtacctgactttttcttcaatgtttaatttggtacttgggttttttttaatttagtacctgagtttactttaatgttcaatttagtacctagattaaacaacataacgtggtttgataagtgtgttctgattaaaaaaaaggacttaattgagtaaaagcgctcaagtaccaagttgaaaaaactcatgtaccgaagtaaatattgaatccaaaattcagcactaaattgaaaaaaaaactcaggtaccaaattgaacattgaagccaaattcaggtattaaatagcatattacccaaaaaaaagggagaaaataagaaatttccccaaagaaactcggcacgcacgtaaaacttgtacgtgtgttttaggaccatttttatttactctcttcggcttccttttgtttcctgaaaaatcagagagctccattcccattaatgaagaggttttcaagttcgaatcactctatgtagcttacctaaaaactcttcgatctccaact

SEQ ID NO: 8828 - DNA, 607 bp, Gossypium hirsutum
  misc_feature (61)..(61): n is a, c, g, or t
catttgtgccgatgccagttctatcgtgcaatacctcccgaattcatgaaattgggaaacnttttatattcatcttgtctgagaattgtcatcagcgtagatagaaacacatgcatctgcagcaccagcagcaagcaatacttggtagggatggaaggtaaggcagctcacagaaccaatcttctgggccatgaaggtatgttggtatcgaatgatgcctagttgctcaccttccagactgaagactttgattagctgttttgctgacccactggcaattatcggggcgtgtctatgaacagctagagctgtaagtgagcctctgtgcacatcgattgtaaggtaagcatctctttggtttctaatatcaagaaactgaatatcacctgcctgggaagcactaacaatctgaaaaacggagtgaaaatatcaagtttagtgttgccttgatcaaaacattgatgaaatgttcaacgaggaaaaaggatgatgatgatgatgacatttgagcatatcccgagcttacctttccttgatcaagtccaggctgaaagccaatacccacaactctttcaacttgctgggtatgtggtctagttgcacaaac

SEQ ID NO: 8829 - DNA, 663 bp, Gossypium hirsutum
gtcgacgttttcaaggttggtctaaaattgaaggctgtccccaatggagttattagcaatgaagacatagaggaatgtataacccaaatgcttagtgggccggactttgaagggttcaagaaaaatgctgcagtgttgaagcaggccgcctgtgaagcagtcactagcgggggatcctcagagcggaatattcggctgtttgtgaatgagattgctcggagatcttgatctctttagtttattgtgctaaattgtaagtaaattggaccatgcaggtacgtgggttggttcagtgataaaatttgtgaaaattttaaatgagtttggtttgtttgggggtaagactacaaattaataaaataaatgttgtattttttaaatagtaaatgttaattttgtgaaaatttaattttatttatatccttttaatagtatgatgattaaatctatccatttaataatcaaaggattaatctgatttatccctatatataaggacctaaaaggtaattttaccaaaaagtacaggtaatgttttgatcattaattttttttaaatatgtaactaaataatttttattaattaaataaatagaaacacatatttatagttcttctataatttttaaaagaaatcaactattaatctaacgtcactcatca

SEQ ID NO: 8830 - DNA, 664 bp, Gossypium hirsutum
cgagaaatggaaggtgaagatttgactcgtgaaggaccaattggcggtaacccaccaggtctttctaaactgtttcttttcctcgcaggctcaatttctaacccaccagtggttggattatcacatgttttaggcaagtttgtggtaacagttattgatctgttgtcctttttgtttcctctctcttgattaatgacatgaacatcgagaatatgacgaacaatactggaatctgaaccatgtaagtcctctgcacgcttcaccattctttcattattaaatgaggaaactatattagcctcagttgcttttgctatcgaatgttggtgtgaactgatttcaccagatttctcgtgccaatcagattcccaaggagtagtcgactcatggtcacttcttgatggatatgcttgcttcttttcaatgctagaactcaaaccagcaccttcattgagtctgggaattgggcactctttcccgaaatcaaaagattgatttggcgactcaaaagatgtgatctcaaacttctctccaacagactgaggcgacattagcactggctcctcattcaaagtcttttgttcctgcatggatgccacgtcaaacatatcgatatccaattgatctttatcgaaaaacatttgcttgtaagcttcgacttcca

SEQ ID NO: 8831 - DNA, 645 bp, Gossypium hirsutum
ccctctctacacaatccattaatcattgtgcaatatgtgtaaaagttgggttttagatcactgactgagagttgaagaaataatttctttgcaacttcgacatggatagctttgcacaggccatcaatcaggatcgaataagagatgatatcaagttgcaactcactattccgcatttcttgaaaaactttcaatgccacttcaagttcatcacttttgcataaaccatccagcaaaattgaataggtcaccaaatctggaacttgtccagaagcaagcatctttctccaaagttcacatgcagttgaaactctccctaattgacacgaaccatgcataagagtgttgtatgtgacaacatcaagttcaataccttgttttctcatcatgtcaacaataacttcagctttagaaaccaacatttcttgcaaagcgcattgatcaatgtattatacgtgaggctcgatgccttgctttctcatcatgtcaacaataacttcaggtttagaaaccatcctgtccttgcagagcacatcaatcaatgtattatatgtgacaacattaggctcaatgccttgctttgtcattctgccaacaataccttcggctttagaaaccattcccttcttgcagagagcatcgatg

SEQ ID NO: 8832 - DNA, 582 bp, Gossypium hirsutum
  misc_feature (10)..(12): n is a, c, g, or t
  misc_feature (539)..(540): n is a, c, g, or t
  misc_feature (543)..(544): n is a, c, g, or t
tttgcccctnnntaataaaatagcaaattagatcctgtatattaaatcaaagagcaactggtcattattttcatccatttctattgttaaaaactgacctgactgttggaataaccagacagttacatatggcacgccacgtataccttatgctgacatacaaggatcagttttcaacagtaaaaatggatgaaagttttaatagaaggaccggtttgctctttgatctaacgtacagggactaatttgccctttttttttaatagagggagcaaaatgcaatatggcctttagtagaagggcctccattatacttttagcgctacatagtaaaataattagtgaatttcatatccaagaaatagcgttttaaccttgctgcaagtaattcaattgccgacttctcagcatctgacattctcttgcaagcttgtaacggattctttctgttaatattttgtccttgaggcacctcctcaaccgcctctacaggtttctccattatttcatcacctacaaattggagcaatttaattatnncanntcaatgtgtaataacgatttaaaccatatgaatctaaa

SEQ ID NO: 8833 - DNA, 641 bp, Gossypium hirsutum
ctagcattgaggagcctgtggtcaaaggtctgctaggaaaagggaaatccagaattattttcaatttaacattaaatatggctcatgctcagattttgttgatgaatgaaaatgaaaccaagtttgctactttgtcgcaagaaaatctgcgtactgatataaaggtctgcctcagttgtttcgcagttttacccaatcttgccttagttttaatgttttattccttcccttttctcatctcaacaactgcattttttctatttgaaactcagttacctgtttttaaatttgatgtttatttttttaatattaaaacttctcttttgtttaaaggtgttcccatcttcttttagtatcaatgcagcattgggaaacttgagaataagtgatgacagcctccctagcaaccatatgtatttctggatctgtgatatgagagatcctggaggcacatcatttgttgaggtatttaattttgccatcttctactaaccgtacaaagaaaaaatatttcatctgttagatttgtggatttgttgcacaagttgtttcaagatcattttcttttcgagtgtaactggttttgtttggagttcttcgtaacgacagaaccctaatgtgtgtacttgtctgaatttgtg

SEQ ID NO: 8834 - DNA, 528 bp, Gossypium hirsutum
  misc_feature (55)..(55): n is a, c, g, or t
  misc_feature (499)..(501): n is a, c, g, or t
  misc_feature (512)..(515): n is a, c, g, or t
  misc_feature (517)..(517): n is a, c, g, or t
tggcattcggattctttgcatgctcgtgcatgaagttgcagcagataccacattntcttacaaagtacacagccaccagaagcacgtgttttgcattggataccatggcggaaaagccccttcactttacgacaatttgggtattggcagtgcgcggaacgacattgtgatgcatgcaccaaaaggtcaagcattttcctaagctgcaaatgccaagaaacaatcatattagaataacacatttggaatcagccatatttggacgcagacagtcacttatttttccaacaatctatttgccaaatcggaaggaaaaataatatatatatttaggtaacataaatacttcaatgcgagttagcatttaacatattggatattcaagtgcagagggctaatagaatctcataatatccaattagagagttgtttagtcaaacattaccaggtcttttaggttcaataagccccgagaaagaataaaaaggggtcttgatannngctatcgtcannnntnaaccattgctg

SEQ ID NO: 8835 - DNA, 610 bp, Gossypium hirsutum
ttgttagattatgacaacttcgtcacttaaattttcattgcgttgtgttttcattctattttcgagttcaatgctaatataaaaagatatagttgaaaaaaaacatggattatcttcgtccaaaaccaatgatggacgatcatgataccctgtcttaaagatgtgagatcattatctaatttaactccaaaaatgtctaatgttgttccgaaattcaatggcctctttagcccaaaaggtaaacaaatgaaataattgttctggaatagaaatagtagccagcttcatttggccaaattgacaacgaaaaagaagctcatattgaaactttttaggccacaataaattctgttttccttttgctcaggcaattgaaaacataaagaaagacattggaacttccaattctttcaagaacagcaagaaaacaacaatgaatacatttagcaaattcatcaccaggttaaaaaaaaaaatctcgatacacttactttgccaaagcatctattgtaccattacttggtcgatgaataattgcaatctgaaattgagccaactggttagtgccatagtcaatgcccccaaacaattcccataatgaccactgatg

SEQ ID NO: 8836 - DNA, 617 bp, Gossypium hirsutum
ttcgattttttatttgggtttttatttgtcgagaactttctttggtttctccgttaaaaatcatgcacctattttccatcttagctaagacggtaagttcttatacatttgatctttctttttcctcatttggattttggttaaatgggaagtgtaggaaaaaagtagctgaaagttctgggttttgcttggttgattttctttttgtttcacattttcctactgacaaaacaaagggtaaagatagaatgttattttccagtatctatgaggatttgcatatacaatttacttcagtatttttcttcttcttcttcttatttagggtgcgatggcggtttttttttggtggaaatttgggtttgaatactgtattttagatttctaaagtttcttttagtagtgtaaatctgcaattcgttgtgatgtttggatcgggaccggggatgaatttcatgtttgcttcaatatcttgcagatttgggatgttctttcaaacaaagaagtgatagatattatagaatctgccccagcttgttcgtctgctgctcgaaccttggttcaaacagcagttcgagcatggagatacaaatatccgacttcaaaagttgatgact

SEQ ID NO: 8837 - DNA, 637 bp, Gossypium hirsutum
acagattatcaggctatggtaggaagttatattgatacattaaagaggctaaagggaagtcatgtatgttagaggccaagcatcatagttaaccagcgtgatggaagaccaaaataaagaaagtggatgaaaggtaaacctagatatgcagatgaaggcattatcagtttatctgtgacattatccaagttgccaacaattgaatcattatgtacgaggggcagaccttgaattatcggtaggagccacaacgatggcaaaagcctcgggcaccattacctgaaaataatttgagaaatgtcatacagtggcaataatcttaatagctgatgagtgaaacaactatcatcacaactgcattttacaaacgtccaataagaaattattatttttgtttcctaaaaaatttctttaagaaataccagaatacgatacataggttaaaatatgttatataagactgttagcccacagaggaatacatagattggagtctaggatgatctaaatacccaatctttgagtaatattgggtgcataggtgattaacttcattagtgcataggtgattaacttcattacctgatacgagtattgagtatggagatctattgatgacatgaaacaactctgagaa

SEQ ID NO: 8838 - DNA, 610 bp, Gossypium hirsutum
  misc_feature (544)..(544): n is a, c, g, or t
  misc_feature (575)..(577): n is a, c, g, or t
  misc_feature (587)..(590): n is a, c, g, or t
  misc_feature (598)..(599): n is a, c, g, or t
tgattatattatgaaaatttctgtgactctgcagacaaatggatcactggatctctgtgtctatccatatataggttttgatgtgggcatggtaaatctcaacatcatgagtagagtgtattagtttttaccatctctgtcacttgtaccatcatattcatttttattggcttttgaccaggggcctgataactctgcatttttgataaacatacacgaaccaattatatggcgcatacatgagatgatgcagaaggtcaatttcagtaggttatatgatgctaaagctacagctgtatcagttgatccaattattcaaattgggtatgtgatgacctttcttcaatttacgttttaaaaatgtgctttgctctgtacatgattacttggcgcttactacctgtatttaactggaaatgcagggttctcaacatatcagaagttcgacttaaagtgtcaatgactatgtcacctagtcaaaggcctaggggagtacttggcttctgggcatccctaatgactgcactagggaacactgagaaantgactgtaagttttacattcaatccccttannntcctcattcnnnnttcagcgnnacctcattcca

SEQ ID NO: 8839 - DNA, 583 bp, Gossypium hirsutum
  misc_feature (572)..(573): n is a, c, g, or t
tattcaattacccagcaggatgtagaacacttaacaaacaaccacaagtagactagaaaaattaaaaattttcaaaagggcttcaagccttcagcgtactcaatttacagagttaagcaccaaaacaataaaaatacaaggaaattgctggataaataactagataatccgtcaaagacaataatttccaatttttagtaaaactttcttttaagaaagtaaaattacttatttttcttttcagatagctaaaatttatgcttgtcagctaaaatcaacgaaatcaaacatattattacgtcaagaacctgataacggaattcagatttagattctacaagaatgttaaaaaaccagaatgaaatatcaattaaagttcctatattcatttttttttataatagtttcaagtaaagcccataaaggcctaaagcataaccccaatcttccataaatttcagcagaaaatggatgaaaaaaaaagagtgaaaatctgcgattaagtacctgcatccatttcgcagtgtgattactgatttggctgctaacaaggctgaaattacgagtagtanncccaaatacg

SEQ ID NO: 8840 - DNA, 607 bp, Gossypium hirsutum
gaaattaggaaatccaaatgtaacaacaaagattataatccaaaaatcccataataaagaaactcttccattgcttttccaaagtatttggaaggcaatcatcaatcaataagaacagcttcagctctaattaatcataataatggatgtacaataccaaatcccctttaaggttaaccgagaagcctccagccgcttggggcaatcagccagcggaagaagttgtagcatctcaaaacaagccataaaaagtaggcattgaaaacagtaaaacatgttgtcagcagtttttgaaacttctctatcaacctctttctaataagagtgcaactctttaacaattcgtctccaagttgatgtcttgattttcgcattcctaactccagtcatgcttaaacctgtaaacaaaaaaaggtttttttctattactgatgaaatgttccaaattcctcaggcacaataaaattaacttttttttattcaaacttattgtgtatattattttaaaagctctaacccgttttgtattgtataaccattttttaaaaatctaagactatattaaaaaagaggaaacacaaacaaatatgatggtgactgctacggg

SEQ ID NO: 8841 - DNA, 665 bp, Gossypium hirsutum
ttcatgtaagtaaattatttacatcaatatgcaatatatgtgcatcctgatatgtaatgttctaattttattttttatatcctaataaaaaaatagtttgttctatagttttcgacccgaaatgaaatcttactaaattatgattatcagttccaggctgttactggaaagcttggatctatttctgtagtcttgataacctggattcttgtttctaaattcatggaccattgaaactacacatgatggctttcccccctaatttgagaagtggttcaggttctagattttagaagttggacttggtcaaaggtaggaacaaaggctgtggaatcaccatctccactaaacatagccccatgtgctggccattcactggttagtagataaatgactttctttattattttctttttgccttgcaaaaagcaattctctgatggaaagacgtacatctctttagaatctgttttctgaaaattcttgtatttgctattgtcttactgttatcatttgactctgtttcttcttatcttctttccccatagataccatgggggaacaagcttctttcaattgctggccatatgaaagatccttctgaaactatccagggtacttgattctgtccccttatagtaattttaaagagttgatggctttat

SEQ ID NO: 8842 - DNA, 650 bp, Gossypium hirsutum
agacgatgatgatgcaggaggcgatggccttggatttggaacacattttggcaaagaaaatatggcggaaggactgtgcggaggtgatcaatttataaacactgcatgtataaaaatattaaatttggaaaatgaagtatgggtttggaaaatgatgtattgtttgttaaattattttttaatttttttctaaaatgaatggaaaaattaatattaattttactgatatggttttcttataaaaatatatatgtatgtcacactaacaattattttttaaattaaaaaatataaaatttaattatttaataattaaaattataataatattctataaattttaatattttaaaaaattaattaattgttgacatgacatatatgtaaagttgagggatgtcgaaggcagaactagtgactggagtgaaattataacaaggtagctgtactggaagatacagttggatcacctcctttttagggggagttaatgtttgttgggtattttggtttgacactgcttcacaccaaaaaagaagttgctacgtctgaattaaacttagagatagaagccttctttcgtttctctacggtgaagtaagaccaagcgcatgagcttattatcctaggttggaacagttgataggatc

SEQ ID NO: 8843 - DNA, 586 bp, Gossypium hirsutum
agcagctttttttaaaatgtggacttggatctttcagacaagtcaatacagtgaatatttaattttaaaactctttctttttttgaacttttcaaacacagaaaattttcttcatcacttgttctgagcagtcaatctacattattattattattattatatttttggagttgaaacaatctacattattttacagctttaataaactatatatgtatccagaccaaaataggctatatattgtatacgttaagatcaggtaaaataataattcaacctattaagtttaaatgagtttgataagaaaaaaaatgtttttatacttatttacaaatataattcatgttaaacctaaaagatataatatatattttaatcagaaaagataagatatatattattatccaaaacacgtaaaagaataactactcatttggacgtaagaaaaagaagagagagagaaatggaggcaattcaataaagcttgaaaagagcaaaacagttaatggaatatttccacttttagggacaaaaggaaataacttcagccgatataattttattactatataagaggcaagcaaca

SEQ ID NO: 8844 - DNA, 676 bp, Gossypium hirsutum
ttatttgcttggaactcatttgcacatcgaagataggtgggggcgaatataaccttaaagatagtggcttaatacacaccttggagcattgtcctttttcttctttttttgttcgagttctgttcgtgtgttcgagatttttctcactggagttttgtactaacaatatttacattgaattcaaatacatattctacaattaactttaatctcactgttacaatacttaacctcactaaattacttgtttaacatgattatcgtgaatttatagaaagaaaaatcacgaagcaaatgcagatgcacttatgtttaaagtgtttttaattgaacttttattattttgaaaaataaaagtataataactttttttgcattccaactttataaaagaattattttagctctttatttatttcccttctcttttagtctttgaacttacattttttttgtcaaaccatccaaaatgggtgaaaaagttaacgtttgttaactttgttgacatgacatataggtggattaccacgagtatgtcacgttagcaattaattatttttaaaaaattaaaaaatattttcttattattttttaatttttttaatttttttaatgtttaaaatattttttaaatgttttaaaattttaaaaaataattaattgcttatgtggcata

SEQ ID NO: 8845 - DNA, 492 bp, Gossypium hirsutum
  misc_feature (331)..(331): n is a, c, g, or t
  misc_feature (334)..(334): n is a, c, g, or t
  misc_feature (343)..(343): n is a, c, g, or t
  misc_feature (348)..(348): n is a, c, g, or t
  misc_feature (353)..(353): n is a, c, g, or t
  misc_feature (357)..(357): n is a, c, g, or t
  misc_feature (359)..(362): n is a, c, g, or t
  misc_feature (365)..(367): n is a, c, g, or t
  misc_feature (370)..(370): n is a, c, g, or t
  misc_feature (372)..(372): n is a, c, g, or t
  misc_feature (374)..(374): n is a, c, g, or t
  misc_feature (378)..(384): n is a, c, g, or t
  misc_feature (386)..(390): n is a, c, g, or t
  misc_feature (396)..(396): n is a, c, g, or t
  misc_feature (399)..(413): n is a, c, g, or t
  misc_feature (416)..(431): n is a, c, g, or t
  misc_feature (433)..(433): n is a, c, g, or t
  misc_feature (444)..(444): n is a, c, g, or t
  misc_feature (446)..(450): n is a, c, g, or t
  misc_feature (452)..(464): n is a, c, g, or t
  misc_feature (467)..(467): n is a, c, g, or t
  misc_feature (472)..(472): n is a, c, g, or t
  misc_feature (475)..(477): n is a, c, g, or t
  misc_feature (479)..(479): n is a, c, g, or t
  misc_feature (482)..(482): n is a, c, g, or t
  misc_feature (486)..(486): n is a, c, g, or t
tagggctacaaaaatgcctgcaacggagaaataaaccaatataaaaatccagaatattgatcataccatactctgtttctcataaaaacgtacataatactatgagaacaaagtttttaacgttaaaaggaataatgatcaatcaaattggaattaaaagggaaaataattatttttaaccaagtcctaagtacgtggccaaatcatatttcactcaagaatcaatagcatgagaaaaacaccatcagccgataatatcactgcacaggaatctttgtcatctgtcctaacagccatgatgatagagctattgtttttttttttttaaacnccncaatcaaanaaaanaagtnaaancnnnntannnaantnantgannnnnnncnnnnnaaacanaannnnnnnnnnnnnnnaannnnnnnnnnnnnnnnanatttttttaangnnnnntnnnnnnnnnnnnnccnaggtnaannnanaanaatntttaaa

SEQ ID NO: 8846 - DNA, 678 bp, Gossypium hirsutum
ccttctcaaatagagagagagcagaagaaatctccacaagtgtctaccaacagatcatgtttataagcaaactaaatcttggaaatcaaaaaatgaagaactcagtctaaagactcattccagtagcaatgcaagggactgctttgagttgttgattaacatttgctaacagaaaaagttatgataataaataaataatctagacttaattggctaaccatgattgtcaatgatttctttgtaccagataccatttcaaacgtaatatactttctagggcataaagagcctccttaaaattgaatgtcattcatatgaatagttcaagccaaatgaatttgcatcatctgtgtagactcaattgtctaattatgaccgttgagaattctttgcaccagaatgaatttcattcacatggatggttcatgcacccattccaagtgaattttattggcatttatcgtcatgcccttgtagaaattatgatatatataatatttgttttttcaaggtattcttcactttcatatgcagtaggccaaaaaaatccccagcatgaaatcagaggcaggtcaataaaaaagggccctgtgcctactgtccagataaatcaaaaaagattctgcatggatgctgtaccgaagaataaaacatacttttcagccactgcacataaac

SEQ ID NO: 8847 - DNA, 626 bp, Gossypium hirsutum
agtgtgtttcttctttggatagtttgatcagtgagggactgattgttccaacaagtgaatatgtttcctttgattgatttcaactactcaaaagattagtaactagtccatctattaattgctcatccacgatctcttctcgatgcttcttacattaacatcatctcaagatttcataagcaatattatggattttcggtggagggtcctgcgggcctaaagaaatctaaggtccaaccccattgcgtggcacaaaacacgacacaagcccttttgacgttaaattgtccttaggtttcctcttgaggagacattgagcgacctatttgcctgatggccatacaccatgacacctcacatgccataggatagctcacttgcattaaggaggttccaccagctaatcaaggcgaggggcagtgggaagttcacattgtttcattatcccctaaatagcacaagagcttttacagctccaccctcgtgaaacactttttctttaaaagttcccacaaggaccatttttttaaaaattttcttaaggaaacactaaaatgtttgaaataaggacattttttcttacttgcccctccaaggacatcttgaggaatgaggctctccaagca

SEQ ID NO: 8848 - DNA, 617 bp, Gossypium hirsutum
  misc_feature (110)..(110): n is a, c, g, or t
  misc_feature (572)..(586): n is a, c, g, or t
  misc_feature (603)..(605): n is a, c, g, or t
ttggttgtcacaaagattaagcaaaaaaggaaaatgaaaataaataaaataaaagacaatttctgtcatcattattagtctaatacgagctttcatttcacatccgaagntatagcttataatttgataaaagtattatggaggtgtttgtattaagagctagattgaattgtcttctttaaattaatccttataaatcaaattaaagaacaaattaatcatttctataaaaaatttaatctatttatactattaaaaattggtactgttgacaaaataactaataatgacatttgacgtgctacgtatacatcatgctgatgaatatgaactaatttttaactacagaaatgaataaaaattttaacaaaaagactaattcactttttaatccaatgtacaaggactaatttgtctatttttagaataaagaagataacctgtggccaggaattgccaggagctctactttgtgggggccgaggaagcaactctaggttcacaatgctactacatccatggcggatggatgtccctatgcaatctgtaccagtgtcacctccaccaatgannnnnnnnnnnnnnncaatctgtaccagtgtnnnctccaccaatga

SEQ ID NO: 8849 - DNA, 553 bp, Gossypium hirsutum
  misc_feature (494)..(496): n is a, c, g, or t
  misc_feature (498)..(498): n is a, c, g, or t
  misc_feature (505)..(507): n is a, c, g, or t
  misc_feature (509)..(509): n is a, c, g, or t
  misc_feature (522)..(523): n is a, c, g, or t
atttctccgacgagatctttcatacagaagaatacaattcaactaactgtttgaatggtcaaaattctcagaatgacaaagtttcataatgtttttttttttggaaaaaaaaatttccgaaaaattgggtcctcccccaaaatttttttttcccaattttgaagggggattcctccaactttttacccccttttttttccaggtggaatttccccccaagggaccccaaactttgaaggaatggaaacgtttgaaaaaagggaaaaaaaaaaaaacccacccaaacaaaaaaaaaaaaaaacccccccgggttttttaccaaataaaaatttaaattccatttaattttaaaaaaaaattcccaaactggccccccccccccttttttttttaaccttttaaaaaaacccctttaaaattgggatttaaaaattaaaaccaaaattttgaaaattttaaaaaaaattttttttgaaaaaaaaattttgaaaaannntnaatattnnntnttttaaaccattnnaaaaaaaaacttaaaagggaattttttttt

SEQ ID NO: 8850 - DNA, 614 bp, Gossypium hirsutum
aatgccgtgcctatttctaattataatctcttctcaatctttaaatagaaagaaaaatgtatttaagcgtgtatttaaatccacatctttctagtaattgtaatagcagagttattttttaaaacttaaaaaaacatattaaagaatataaatcatattactacatgtttaaaaaataaaaaatatatttttcttttttgcttatctaaatcaggatgatgtaattttcaaatgtatggagttagttataaaattttccttgtaattcatttaaacccaattgtcggccaaatacgtatatttcccgccttttaagtataaaaaaggtagggtcagtcgtcacctccaaaatctagtaccaaatccaagtcgctcaccgggttctagaaatctcagtgcattacaccccaaattaataaaataataagtaaaaagaattacttggtatttaattactttggactttgaaggatcccttctagcggtggtttgcaacctggcaacaatgcaagctctcacctttactcatctgcaactacaaccttcgtccttccatcaccacttttctcccattttcatctgattttgttttctgggtgccatctgatcttaaa

SEQ ID NO: 8851 - DNA, 575 bp, Gossypium hirsutum
  misc_feature (531)..(534): n is a, c, g, or t
  misc_feature (536)..(537): n is a, c, g, or t
  misc_feature (543)..(543): n is a, c, g, or t
ctttgtctctagtgagacgtgataccaaacactgcgctcacgcgcgtcaaacttaggaattgggtcagacattccattctcttgtccgaaagccactactatcctttcttactttgaccctgttgtgttggcactcttcttttattatttattatttttaattatttttaagaatactatgttgattttttggttatatagatttgagtgagattttggagtcttttgagactattgtccttacattaattaaaacatattattgttactgtaattataattcgttaaaaatgttggttttgtcatatactactcatagctatgatttcatttcactcctcttctttttcctcacggctcaacaaacaagtacgttctcaaattattacaaaatgattccccctttcatttacaatgcatgattctaacctaattatcaccttctttcatatattatcattaccaatatatacatacacaccaaaatgcatgccgggcgagtaataaataatttaactatttttaaataannnntnngagttntaaaagtagaaaacaatcttagaacaacttgc

SEQ ID NO: 8852 - DNA, 543 bp, Gossypium hirsutum
caggagctggttaattcaaagagaagtgtggattgtttttctgttgttagttctaatgcactttcagaggcagttatggagcaaaagggagtttctcgagttgaacatgaaactgcaacaaagacttctttatgtgattggatgtctggtaatgaaacttggcagatgactcctaaatgtgatggtacttcacaagctggatgtaaagaggctgaggattcatgccttcccttacccagaactggttctcagcagccatctgtgaatgtaatgtttgaaagtcctatgccgatttcagtttacagtagggggaagaaacggtggggcagcagcagcagcgctagctctattgttgccaacttttgtgcacaggagcatgttaattcaaagagaagtgcggattgtctttctgttgttagttctgatgcactttcagaggcagttaagcgaaagggagtttctcgagttgaacatcaaactgcaacaaagatttctttatgtgattggatgtctggtaatggaacttgcaacatgactcctaaa

SEQ ID NO: 8853 - DNA, 603 bp, Gossypium hirsutum
tcattatcatctcatcagctcattcaatctttattttaagactctaattttttggttgatattttgaaaggtttccacattccatttctttcatttcaaattcatcatcaattaatcttcataaccaccatgaaaaaaatgttttaattcattttattttcatcatcaattattttagtgcgatgagaataaaaaatagattctaaaagcatagaatttattttaagtgcaagcgatatactaagcaaactttgaacactaaccttaagtctctttccttaaaaatattataatagcatggagtccttcgagtttgtaggattcatctagaaagagagttgatggtagttatatgcattgcgttatgaccgagacaccttgacttaggtgttcaactctttgattaatttgttgatctgagtttacgatgcatgcatgcagaacatacaagtgtaactcttgagaattttaattagcattttccctcgcatagttttggtattcaaaccaaaagtaaagactaaagacaaaggaaggattctcaatctgccacttgcattcatataagtattttatgtccgactagatgacttcactcatggg

SEQ ID NO: 8854 - DNA, 628 bp, Gossypium hirsutum
tcggtgtcattcaccgtattgatgctttattgtgtatattttctaagttccaagaatgaatatgatgctcaaaatccatgcattattgtaatgtgattcattttgatgttgagcttttcatgatcagttggcgtttgccgtttggtcattttgtcgaataaaaaatgtatggtaaactctatttatcttggattttctttttcaattttttaaaatatttttattggacatatattcgagatatatgacatttttaaatgaaatatttatatttagcacctaagcattgtaaataattcaaatttaaaattaatgtccggtttgatttgttaagtgtattaaaatgaggaaatgcctatttatcggatagtaataaaatcgctataagcatcagtgataaaatatcgcttgtctttagtgaaaggaaaaatatccaactttttttttttaaaaatatttaaaattaattaaaaaaaaccaaattttccatttttaaaaaacctaattttggttttaaaaaagaaaaatttttaaaaaaatttaaaaatggaattaattaaaaaaaaccaatttattttttttataaaaaaaaaaaaaaaaaaccttttaattaaaaaaccttgctaaa

SEQ ID NO: 8855 - DNA, 650 bp, Gossypium hirsutum
ttttgtcagaaattatggaggtgtagttaggattgaatttggaagtcgacgaagaggagattttttgggcccaacgtgcgcaggtgaattggcttcaaaatggggacaaaaatactagcttctttcacaaaatgggcacctctcgttattatcgcaataggattgtggggttagaagatgaaaacggtcggtgggtttcacaaatagaggacttgttgcatgtcgctttaaagtattttggtaatattttcattgcttcagcagctggagatgatgacagactgcttggtttggttgagcaaagaatttctgcaagcatgaatgatgagttgctctagccgtttacagaggatgaaatttggcatatcgtaaagactatggcacctctaaagtctccaggtaaagatggttttccagctatgttttttcaaaagtactggcatatcatgggagttaatatttctcagtactatttgtatgctttgttgggagagtttgatatgggtgaaatcaataaaacgcatatagttttaatccctaaagtcggaaaaccaaagaacttgtctcagttttgacctataagtttatgtaatgtgatttataagatcatctcgaaagttttggtgaataggatgagtgccatgctggag

SEQ ID NO: 8856 - DNA, 788 bp, Gossypium hirsutum
  misc_feature (611)..(612): n is a, c, g, or t
  misc_feature (614)..(618): n is a, c, g, or t
  misc_feature (628)..(652): n is a, c, g, or t
  misc_feature (656)..(657): n is a, c, g, or t
  misc_feature (659)..(665): n is a, c, g, or t
  misc_feature (667)..(670): n is a, c, g, or t
  misc_feature (672)..(677): n is a, c, g, or t
  misc_feature (679)..(680): n is a, c, g, or t
  misc_feature (690)..(691): n is a, c, g, or t
  misc_feature (696)..(696): n is a, c, g, or t
  misc_feature (701)..(704): n is a, c, g, or t
  misc_feature (706)..(708): n is a, c, g, or t
  misc_feature (711)..(721): n is a, c, g, or t
  misc_feature (727)..(749): n is a, c, g, or t
  misc_feature (751)..(762): n is a, c, g, or t
  misc_feature (764)..(766): n is a, c, g, or t
  misc_feature (768)..(768): n is a, c, g, or t
  misc_feature (778)..(778): n is a, c, g, or t
  misc_feature (784)..(784): n is a, c, g, or t
ccttgggcttgtttgaaatggacggtcggctaaaccaagtcaacttcccctcctttttgtttttctttttaggtcaatatcttcaaaaagtccttaaactaattacacttgatttaagcaggcccttatattgtttttgtaccctaacttatgatttttaaccatgaaagcttttgattttaatattaaagtataatatcttttaatttttaaactaattttgtactagtgatgatgtgaatttaatgaaaataatttactaaataaataataaaatatatttttaaaaaagtactaaaataaaataatattttaaaatttatttaaagtgtttatatccataacacagttactcttttgaaaattttgattactaattaaaatatatataatttccactgcattaacaaaaacttagataagaccctctttaatattaaaatcaaagacttttatgagttaaaatcataatttaaagacttatttaattacaaaaataatttaagagctcatttaaataaagtctagtaatttaagggtttttcagcatattatttgcattgaaattgtaaagaaattgttttatatgtgaggagtacgcaaggtgaggnncnnnnncaaaggaaannnnnnnnnnnnnnnnnnnnnnnnnaccnncnnnnnnncnnnngnnnnnngnncctttaaccnntccgntattnnnngnnnacnnnnnnnnnnncctaannnnnnnnnnnnnnnnnnnnnnnannnnnnnnnnnncnnncntcccttaaancaattncata

SEQ ID NO: 8857 - DNA, 645 bp, Gossypium hirsutum
ttagcatatagcagcatcgaaaggaagtgagaactgtgttcttcttttgctggattatggtgcagatcctaacagcaaaggtactctccagtctgtcttgttgaattttgttttcctctaggcaattcttgcggttcttagttcattactctcacaggtacccttgatagctaatgtggaaattcttaacaaatattaaatcattgcatgcacatcagttacttgtcaattcattttaacatttatttatttgtataatttagatgaataatggtgttatgtgttgacttctgcacatgctagggggaaaataatcatattacctatccaaataaaaaaacaaaccccatatgttgatttattaacccacattacacctccaaaactgaaaagctcttctactttgaagccggtttcctaaaataactaaggagttaaaagaaatgttttactttgctttataatgtctggtacaaataccttttgggttttttcttcttcttttgtacaaatggaactgcaacttgagataggggaagagctgcacttgcagatgttgggatttgaaccccaaacctgttggatgtcaccattcaaagacaattgtataaaccaattgagctaagctctgaattctgctcttca

SEQ ID NO: 8858 - DNA, 668 bp, Gossypium hirsutum
tattcatggcagtcagctttcggttcaccgtctggagacgggaagcttccttcctctgcttttctcgacatctgtttaaaacaaggaaaatagttcatcaaactcattaattaaatgcataaattagcaacatattgatacagggatacaaacgaaagaactatccaaataacatatatctctaaataaacatatatatgtccacatacacgtataactaatcttaaaccaaagtgtggcacagtggaaaacatacaacagagaacaatctacaagtctctagagacaccatgcagatatgttttcggaatcgagacgagacatggactcgagtatttaccaatacagtacgcactcgagtatttaccaatacagtacgcttaaatttttaaagttttttatatacatacttttacagcttaaaagagatgcctaaaatgctacaaaaagaaagaaaaagtaaagtgctagggaaaaagtagatttatatttgatgatagtgtataaatccagtaaaccatatcatgtcacctcattaaaaggttttaaaaacaaatatatatattcttctatttttcaatgatgcaaaataatctagtttagcgactacatagattcggtgtacaaatttatatagttaaatataaatctggaaaaaagaaagcacc

SEQ ID NO: 8859 - DNA, 581 bp, Gossypium hirsutum
  misc_feature (6)..(6): n is a, c, g, or t
ccaccnagtagggttagggtttgagcctggtggggtggtcaatggtggtacattagaaacaggtgttgaaacaggattggatgggtttgagggttgctcatcaagcattcttgctgaagtggagaaggcaattgtgaaggtgagaagtagtgcagaaatgagtttataggtttccatctgatatgtttctggcaaggaagaacaatacaagctcaggaatttatatttgtcttgatgaactggagtttcatacacatacatatatctatatatgtgtaaatgtgtaaatgtgtaaatgtgtatgtgtatgtgtatgtatggagttgttgaagttttatagaaagtggaagataaggaatggttggaatattgggtgatggtttagctctaaggaaagttcatggcacctttctcatttataaaaagactttatgttacttcaattttttctaattatatattataaatatttgaaatgtcttatatccaaaatacttatagaagtagatgtcgaatattaatatatttttaaaaaatttgaaaagtcgaagcaaaattagattttaaccagaaagtcagca

SEQ ID NO: 8860 - DNA, 602 bp, Gossypium hirsutum
tatctttaaccgagtgtatacacaattgattgagacacttacttgccaagttgaaggaattttaaacaataagcgctcaggaggaacatcaatctcattatacaacttcagtaagtcatgaacctgcatatcccaataagcttttagcatcagacagcatatccgaaataaaagggaataaactactataacatataaaaggaaaaagaagtgtgttcaataccaacaaagtgaaaagttttcaaaggcgacttcgctcatcgtataaaccatgttctattgaggagcatagtgatccatataatacttatatttatgtataacaaataagtctttcactacatttcttatttcaaaagctaagagaataacctcttgtcaacataagacaaaaattcatgggcaaggaataaatagttcatgtcatcaatgataatattcaattaaaactttcaacattgcttcttatgcataagacctaatacaatttttgacaatgaaaattggcaatggttgtgataccaaacaacaatcaatggcaaagaataaaaatggagacataagaagagccagtaccctcctaataataccatgtgtatcag

SEQ ID NO: 8861 - DNA, 646 bp, Gossypium hirsutum
tttgtcattcttaaactttttcactttattagatctaccctggattgggttcatgaaacactatgtaccacaagggtccatgttcattaacaacataccatgcctgaatacactagctttacgcttttacctcaatcaattgttaaccccatcccaccattagaacagtaaatagaaaaagctgttaaatatatatatgttgcaacaacagaagcaagaaggacaataaataagaatattcatttctaaatcaaagaggtgagagagagacaggtggcaaaacaacaaaagaaagggaaagacatggcttttgaagagaataaagaaaattttgtttacctcttgttgaagggttcgctccacccaaccaacaattcgtcctaactgtgaattaatccatcgcatcaccactgttccagaaacagattcaatctgaaaaaggaaaaagaatatggatcttaggaggggaaatatgtacgcactattctgaccggaatctttttcctatcaatattaacagacaattctttcaagatgatctggtggtaatgaaagaaaaaactacttcaatcatatagtcccaacggagaagcaacatcattatgtactcaaaacagcaacaatgatggctgcccaagcatgaaca

SEQ ID NO: 8862 - DNA, 651 bp, Gossypium hirsutum
tgttgataatactccacagtctttgctggctttcagtggaaaggagaatgtacatggtttgtatgagattttgttaaattatcggtgagttcatttctttaattcacacaaattgctcagtaaactaatatatgatttcaagttctcgtttgatcatgttgaaagagatagtagttcccttttattaggggtgtgcatttagtagtttggttttatatatcaataatcgaataagccatcaaaatggaataaactgaaccaactctattgccaaaactgaattaattgaaccaaacttctttggttcagtttggtcagggttttaggtttttgtcttttaaaaaaaaagatttatttataaattaaaataaaaaattatcattgtaatttacaaattttagaattataagatttatcattatgcaaatgtcgattgaattcttttattgtttgattataataaataaaagaaaaaggcaacaaatttgaggaaataaatgtattatcggtttttacaaaaaatgctatattttattaagcatgtattataattgatacttatttacaatatttgatatttaacatttaatgcattggtcaggtttttattgtttgaattcttttatcggatgggtttacaaggatggattt

SEQ ID NO: 8863 - DNA, 614 bp, Gossypium hirsutum
ctggcgggaagttttggcgccaaatagagtacacgtcagcttttcctatccggcttctagcttttggggtaaactacaaatataatcactcatctatacctttagttctatgttggtcactcaactattatttttttcaatttaatcactcaactttttgaaattaaatattttagtcgctctctgttaatttatattagaaagtaaaggaaagcagatttgaacttttttattggtctaataacaaaattatccctctaaagtttacatatttttatcaatttgatcctaaatctaaaaatttcaataaattttagcccttaatgtttgcaaaaaatttcattttattctaattctaaaaaagttaacagatttagccctaaaaatttacaaaaaattttcaattaaattctaattgtgagagtttaaaaaattaaaaaaaaacatttttggataaaatattataaagaagatttaagaatctaaaaaagtataaataaattataaataaaaaaccataacatatgtattaaaagtaaaaaagagaaaaatatatcaaattattcaaaaagaaatgaacacgaaatggattgataggttatctaccttggttt

SEQ ID NO: 8864 - DNA, 627 bp, Gossypium hirsutum
ccaaaattaccgatattattccccacacaccccaagtgaggtgactcgctagagtatatttctcaacatcttgaagcagctgctgcacttcagagtctctaggtttcttacctgcaataaaaacatggataatatcacggatccctgactatatattaaattcagagttatggtcacacatcaagttcgaatatataaattgaaagaattgccttaacttctttttaacacaagaaaataagtgttaaattagtcctttggcaaagtatataagctaaattggcagcagaatacaataattatggacagtttaaacgtaaaagccgctatgccaatcatgcttgcagaaccaaaattggaattatcagaaaatgaactactcacaattgcagccaccatgtaaacaattaaaaagtcacagaatgtcttataagcaataaacagttacctgaagaattcaggtatacacgcagaaatcttaggcgctcttccaaacctatgaatgccacaggactaaaaaacttttttaccattcagggaatatagcgcattttataaaagaaaaaaatgagatccaaaaggttcacctggatatttactataatccataacatggggtgtttctgg

SEQ ID NO: 8865 - DNA, 417 bp, Gossypium hirsutum
caaatatttacttgactattattatcctttttgagattttcggaattgccgaccaaagaccaacaatggaaaactgaagttttcttagaagatggtgtcaactatggtcatagtttttctttcttcttagtggttcaaacatgaaacttgcatggagcagttaaccatattgtctttttttctttaatatatatataaactcctcgccaaccgttaaatagaagaaaaatgcacttaaatgcactcgaactcatatcttcttgattgcttcaatagcaacggtgcctagttaaggctcaataattattgataatatttgtttgcttgcagtttgcaagaagcccagaagagaatgaagataaagaagcctcctcacatcctggtcatccatttaaaacgattcaagtacatgagcag

SEQ ID NO: 8866 - DNA, 651 bp, Gossypium hirsutum
attcgttttctgagtcagatttaaccgggctcaaaaaatagatttaaaatttttcccaagtacagcttatataaaaaaatgctaaacatgaacctagctcagctcgcccgtattaattttttgtacaaaaataaatttaaaaaatataacccatcaaatacattaaaaacattaaataaatatttctcaacaaattaaaaatacattgaaaaaagattttatacttaaataacattaagatagttgcaacttagcaaccaaatgcctctaaaataatagtaaaattaataataaaacaagagatatacaatatccaaataataacaaaatcgtagtaatataattgcaaaatggtagcaaaacaatatcaaaatggcagcaaacaataataaaacaatagaaagcaatagtgagaaaaatttagacaaattcgggccaagcccgggtcaaaaaattcttacccgaggcttaacccatttagaacaggctttatttttgtccaaccatatttttcaaatttatatttttatctaaaccctcttaattttctgagtaaacctttgaatctggatgaatgacccaaccatgatcaaatctaaaaacaaattaaggagttaattttcttttccttttcttccaatccatcatcac

SEQ ID NO: 8867 - DNA, 535 bp, Gossypium hirsutum
cttgtcacttatgcctcacataaagttcttgaagtagtgcagaaactgcctctaaaactgtcgttggaggaagcacttcgattgagcatgtggcccactcagttcatgaaaagccatgccactgaagataatattgcgctctacttttttgcaaaagaacttgacaggtttgtggaaatgtttctgtgtagaagagctaattttctttcagataactcaggttattttacatgcttcttgtgcagttatgaaagaagctataagaacttgttggataggatgattaagtatgattttagcctcaaagggaactttggcgggtttgagcttttaatattcccctcgaacctacttccagaaaaatctcagcgtaagagtttgatagttacatttcgcatgcatcatataaacaaaatgaaatttgctttttcattgttggactaagtcttacaaagtttgaacattgcaggttggaataacatgctgtttttatggggtgtctttagaggaaaaagggttcagtgctcagaacaaa

SEQ ID NO: 8868 - DNA, 569 bp, Gossypium hirsutum
  misc_feature (512)..(513): n is a, c, g, or t
  misc_feature (516)..(517): n is a, c, g, or t
aactcgttgtagttcgaaattgtcaatggaaccagccatgttattttagctgtattcttttcttccattgatgaaactttaagctcaacattttgtttgctttgatttttatttaaatctccttggtttgaagtgcaacactgtaatgagtttaatttgcagccttattagtgtctaaaatgatctcgaactagtatctttgatatgaagctgaacttggagtttagcttggttggttcataccgtcaccgttatgagatggcatctcgaattagcatttgatctagtgtccttgttctttttgcatctaaattgtctcatgtcatttgttaaagagttacaaagctgaatctgaacccggaatttagctcagttgattcctacaatcactcttgaaaagtgacattcttgaagctttcactttttcctcgttcttgggctctattttgcttttattctgggggattggtttagtggtattccacaacaaagatcaataaaaaaatggggtnntgnngttcaattacatcaattacgttttgatcatttaactttaaggcaatctcata

SEQ ID NO: 8869 - DNA, 361 bp, Gossypium hirsutum
ccaccaaataaggaaaaggatctttctccaaactcggcaagatcttcctcccctggcatttgggctaattgatcctccttccagggcttgatggtcgggttaatgagctccactgtatgaacttgcctgttggcttctgtagatggaaagctttgaagttgagagatttaccacattgctcgttccactccatatttggtcatccattcccaagttacaaacatccagcccttttaggatacctttccagatccaagagttagatgttttaggcatcagctcctctatactttggatttacagtattttgcattcataactctctcaaggagtgagtcagtgtgacccttaggactctgtg

SEQ ID NO: 8870 - DNA, 588 bp, Gossypium hirsutum
ggagaaagccaaagaataggcctcaatcctttcttatactcgttctcccggctactatctttacgccgattactactctcagaactcatggaagtagatattctcaaatctcttatcctcctatgatcatctgttgccacaatctccacagaatgtctaccaggttttatctgactccttgatggagagtctcctaataagtcactcaccttttcatcaacacggaaagaacttcgaggtggcacaatcttcctctgcacttcatgctttgtctcctttttcctccatccaccaaaccatcctttcttttcctgcttagtctctccatttttaaaaccattggtttcctcgataggaatttcccgagactcataaccgctatgctgatgtccaataatgccatcttcactctcattggacatttctgaagaatccaatttaagagcaacttcgagttgtctcctttcttcttctgtcaaaatctcatcaagctcttcactctctgcttcgttttcattggaagttaccaaaaactcatcatctgtcaaggccccaggcaccctccttgatttgatgctaacaacagcg

SEQ ID NO: 8871 - DNA, 681 bp, Gossypium hirsutum
  misc_feature (193)..(193): n is a, c, g, or t
  misc_feature (277)..(277): n is a, c, g, or t
  misc_feature (298)..(298): n is a, c, g, or t
  misc_feature (304)..(304): n is a, c, g, or t
  misc_feature (316)..(316): n is a, c, g, or t
  misc_feature (328)..(328): n is a, c, g, or t
  misc_feature (404)..(404): n is a, c, g, or t
  misc_feature (419)..(419): n is a, c, g, or t
  misc_feature (533)..(533): n is a, c, g, or t
  misc_feature (606)..(606): n is a, c, g, or t
tcaaccgccgaattgctttgaccttggttgcaagaatatctagcaaaggcgagagttcttcagtttgcagtgggaagttcggagaaaggcaaagaataggcctcaatcctttcttatactcgttctcccggctactatctttacgccgattactactctcagaactcatggaagtagatattctcaaatctcntatcctcctatgatcatctgttgccacaatctccacagaatgtctaccaggttttatctgactccttgatggagagtctcctantaagtcactcaccttttcatnaacacngaaagaacttcnaggtggcacaancttcctctgcacatcatgctttgtctcctttttcctccatccaccaaaccatcctttcttttcctgcttagtctcnccatttttaaaaccnttggtttcctcgataggaatttcccgagactcataaccgctatgctgatgtccaataatgccatcttcactctcattggacatttctgaagaatccaatttaagagcaacttcnagttgtctcctttcttcttctgtcaaaatctcatcaagctcttcactctctgcttcgttttcattggaagttnccaaaaactcatcatctgtcaaggccccaggcaccctccttgatttgatgctaacaacagcgttgtgcatatcat

SEQ ID NO: 8872 - DNA, 646 bp, Gossypium hirsutum
ttcgggtctctacagaagaaacaatgagttcaacaacgtgaagagaaaatgaattgcagcagctaaatacacacttagataccttgtaatgaacaaaattttgtagccataagatatctgtaaaattccactcttctcaatttaaataaaaacgatattcaccatgtatatacatacacacatggtaggcctctttaaataaaaatatttacaggaaaacaacaaacctgtgttgcaagataaatgttgtttaaatgaggaggccgtgcttgtacaatagcacgatatgcatttcgtctgccctcagaactctggatcattaaaagaaaaaagagcagaacaaaaaaaggtaagccaaagattagggggcgcatactaggtcaacaaccattaaaagcatatttctttttatcacaaagcaataaatcttgaaggtgcgtccaataggaaaataccccaaagtcaaagaagaagttagaacaatcaaccatgaacaactccagagcacttcttcgtaggagatatctatgacaaagataaaacaagcaaaatgagatgcatagcatatgataaagcaaaagcaaagtgaaagagaaaacttaaaatgcagcatattcagcaacaaggatattaagttacggattac

SEQ ID NO: 8873 - DNA, 650 bp, Gossypium hirsutum
attgagaaaaaagagagaataaaagacattaatttataagtttaaataaattcttcggtatttatttttaaacccttgttatttttttagtttattctttgataaaatgttttgttacgatttattaattttgcatgagactcaaatactcataatgtattaaatattaatttttatatataatatattttcattttaaaagtgaagcaataagagacaaattgtatgcaaggttggaggcaggcaggcaggcaggcagttataaagaaagtctttttttcgttgtttagggaagcacatttatgtatttgttacctcattcggactctcgtgctctcgttgtataagatggtagaaaagtatattataaatacatcacatacacaaatatataaaaaatatatatctaaataaataataaatcaaatataagttcaaacatgtaaaagtaattttggttaaatgataagtaataattttcttaacatcgtaattaaaggtgttcattggttagatcgggcccaactaaaattttaggcctgtttgatcgatttgagtccgacccggcctgaaaaatggacgtaaaattttgtttaagtccgattcagataaaaatgctaaaatccggacccaacccagcagcatgtaaa

SEQ ID NO: 8874 - DNA, 426 bp, Gossypium hirsutum
atggtaccaacttcatcagttatatatagcctgaatttttcagcataacacttcatcaatgagtctcaccttttagcctttcaccttaagtatcttccttttttctatttttggcagtggtttaacgcaatcaaactacaaggaactcaatgttttgtatgaaaaatacaaaaaccaaggtctctgttacacttttctttaaattgtagacctcgaatgaactgttctgtgtaatggtttgaagcttataaacattggagtgcagggtttgagatattagcatttccttgcaaccagttcgcagggcaagaaccaggcaccaatgaacagattcaggaagtcgcatgcacaatgttcaaagctgaattcccaatttttgataaggttataaatatgtttgattgagtgccttatgccagcaatcac

SEQ ID NO: 8875 - DNA, 602 bp, Gossypium hirsutum
tctatctggtatggatacgaaggtgaattcggggtggtttgaagggttaagagagttcaattcagggtgaactatagtgatcgagaagccctttgagtgcaagatagtagctagctggagcatgggagttaagtggccttggaagggtgccataacaagcaccaaatgaccggatttctgttgtttctccatttttgttctctctttctctggacttactggtggaggactcgaagactaatggaatcaataaataaaaagagattagatcttaaaaactaattgttcctttgcttctggaaaaggtgtcaatcagaacaccaaatttgacccttacttttgtcaaaaatggctgctttagtctttgtttgagtggaaaataaaccggaacatcaattcgagtaggaaatttacgaaaatatttttttatatatcttttatttttgaaaccaaaattttattttaatataatatttatattttaattcttttatgcatgctttattattttcatctgttgtatatattgataatattattaattgagtttatgttacaagtagacctattcatgggtcgggctgggtagccgcccgataagt

SEQ ID NO: 8876 - DNA, 511 bp, Gossypium hirsutum
tttttgcacacaatggaacgtgttacggtgaattttggctgtcaagtctcgttagaaaaattttatgttctctggaaagcagataatgttactctaaattttgggactggaatgcggaaattggaatttctactgtcgtattgtagctcaaaatacaagcttgagctcttctatgagaacatctggcagattgagctgcgttgtcctcacagtcaaacctcaaagcatcttctgattcaggttgctttgctaaactttcatcataaattcatcattagtctctattgtattatcctagcttcctagaaataagagttcaacataacatccttgcctccagataacaggcgtcctcagtcagtcagctgcatatatcatatttcttttgctgatcattagtcttctatgaaatcattgagatgccaacttggtaattggatgacattgtcatatccatgtaaattatatagagttttttcatttctgttgatctggggcgctagatcttttt

SEQ ID NO: 8877 - DNA, 589 bp, Gossypium hirsutum
  misc_feature (546)..(546): n is a, c, g, or t
ttttatacaaaaattaaacatttgagttacgggcatttctaatcctttaaatatcatcttaacaactctctaatcacaggttaacattttcctaaaacaaaaattatcgttagggatggtgagtaggcacaactggcaacagatttgttcaccagtcagctcttccatcaacctttgaattttttcaaaccctttatcaaagtttagttaggaaagtctgttatactaatggaataaaaaataattaaggaatcaaattgaaggaataaccaaagtctaacgtgcatacacgatcgcagttaacatgttttttaagtcataattatattgataattaaaaaaactcacttctttgctaataaattcagacttaatggttcgtcacaattggcatgttgaaacaaaaccaaaaatgctgttattaacaccgaaacctaatgttataaatacgtggaagcaaatcccaatatttattacagtgcaatttacaaaatagaccccacaaacacttttttgtattctcggatttcataacgcatgttatancttttaatccttttctttaaacagcttgcttttgatgataatc

SEQ ID NO: 8878 - DNA, 646 bp, Gossypium hirsutum
ctattagatcagcatcaatgactctctggaacaccagtaaataaaacatgtatagaacaacagttagtgttgccttttaagatcaaaatatagcaaagaagaacacactccagctaaaataaacaaaacttccaaacaacagaaatcatgcatttttagcatcgctttagaacaacagttagtgttgccttttaagatcaaaatatagtacaaaagaatataactcagctaaaacaaactgactaaaaatgccataaccaacaaaatttgatacaagcattcataaccaacaaagactgttactttccactaccttttcataatcactatatgatcttgaaaatatattttcaattatgtgaatcacaaatccacctacatcagtcactaactatttgctaagccatccctgataacaagaatccttaaaccagggatacccagaaaatcttgcaacaaatcacctgccagcaacccctatgtcgtcattctctaagcccacagacaatttctcaaaccaacatcatatctttaaccattaaattaaaaggttaaccatgtaataattccatgatcgattgagaaagattggtgtttattgagttaaaattacattcaacaacgaaaatggagcttatgactgccc

SEQ ID NO: 8879 - DNA, 643 bp, Gossypium hirsutum
ttatgaatgcatgacatgaaaaccataagccagaagattaatgaagagtgtatcacaagcaatatgatgaatatgttgtcgagcatacataatatccaaacaggtataggaagtaaacaaatttcttttccatgctatattatataggacactccattgtagacttttctacaacatttcaaagcaatttgacttctaatcaagttattaatacacatcacaagttgaagcagaaaataagaagttatctgtccagcaaaggttagcaactttaccagttacacatttagcaatgccttaacaattcataactgaatgaagtcactttcaagatgatttcttgatgacataacaaaataggagacatcagattaccggaaacttaaaccatttgcaatccataccaaagataaggatgtgaacctgataagccactccattttgtgatgacgaggaaggagatccacatgcaccagtttctctagttgaatcacctcttcgatgaattctaagatttaaacttccatgaaatatgttggattcaacatcacgcccttcatcacctgatattaaagtttcaaaatctaattccagctcctcatcaaaatcagagtcttctctttcagatcttggaccatcttgt

SEQ ID NO: 8880 - DNA, 573 bp, Gossypium hirsutum
tgtgcttccgtaggtaaaaataaaggaatgtgaggagagagtgaaaagtaaaaagaaaattagtttcgagtatgttttatagaaaacaatagtgagaggaaagaaattaagaaaggttgaccattttctatcttaattcataaaaatcaattcttttaaattaaaatgataagagaaaaagttgagagagaaatacttcttaatacaaattatgcatttttcaatttttttttttacaactctaccaaataataaaaggaaaaagtatttatttttttcatctttcctatcaagcacatctatgaatatatatatatatatattctccatcattttattttctcaccccttcaattttccatcattctaattttctttccactctatcaaacaaagcagcattctctcttttgctaagctatacagcgaaaacaagttgctgaaacaataaaatgtacaacaattactatttactgctggaaaaagaagaaagaaaataggggaaacaaagtgaaagaaacttgtatttatgatgttgctataatctcgttcttcatataaatacaactccga

SEQ ID NO: 8881 - DNA, 636 bp, Gossypium hirsutum
gatgcttgtgaatgaagatatagctttgattggttttgaagattttaaatctctgataatgcttggtttaatattttaacagggatgaggagtatgaccgtggtaagaggaagaagataagacaaaataagcatcagtttggtggtccaaatcctttccaacaaattgccaccaagaaaacacagttaaagaaggacaaatgggaccgttctagctctggaaaccgaccattcaggatatgaaggactaaaaccatatcgaaattggaacaatttttgacctgtctgtatgctgttatttaatattatatattgtaattgttgctgtcttgttagcaggagctaaattgtatcatgtaaatctggagagtgttgagagtggagaacaaagaaagaacattcaaacaattaagcttttatgttttcctttcttggaatttcttcagtagggataaagaaacatgccatttttattgaagggtattgcaatcggggaggttaatctccagttaacaaaagattagggcatctctttaatgtacatgtacctggtaagtggtaagtgagcaaggtggaccaactgtttttctataaccgcggggttttgagtttgatcttcaatatagtccatacagaa

SEQ ID NO: 8882 - DNA, 584 bp, Gossypium hirsutum
  misc_feature (536)..(536): n is a, c, g, or t
tcattgggataaggtggatagaactatttgaatactgatattttatctttatcctaaacaaattatgtttttagctcaactcatatgaatcttttacatgcagaggggtaaaaagtacgtcaaattgaataatggtgaacgtgttacagctagtggaaaggtactttttactgccaatattatttgagcttgcctttctggatgttcacttccctttagtttcacctttcaagcttattggtttaagttaaattggatgctttctctgtatctctactatagtcagtgaactattctggtgcttaattgagcttgatggccatgctcgttctttcattcatatacatccctagcatttggcttcagtctgcaatgacctaggtccactgctttttttcccattgttcactgtggtgcaatatgtatcaaatttgctccacttgttcattttaaataacttctccttgatgtttttgtattcccgacttcttccgccttccaagcctgatacctgttgtttagcccaaacctcttcnaattgatcctagcatctatcttctaactgcatcacgaatctctattct

SEQ ID NO: 8883 - DNA, 655 bp, Gossypium hirsutum
  misc_feature (297)..(297): n is a, c, g, or t
ttctaaagccctgcaaaatttaatcaggcaataagatccataagctcatataggatatcataaaacgattcgaagcacagatatatccctaaaatatgtaaggaacacagaaggctgaatgatcagctctgctttactattagtgaaatcagagaacaagaggttaagaattaaagctcccaaagggatcagcctgcatttaatcttttgcagatgaagaaaaagaaaagaatcttataatatatgaataacatattagtagaaaaataggatttttaaaagttctactaggtatgnatggtaagccatagaattgctgtgccccaaaaaacaagcattacccttatgcaaacctcgaattcaagagggcaaccagaaatttatagcacctagcaaatgcactataaaatttattccttctatgttcaattatgagctctcggcatgtatgtattaacaaaccttcaaattaagctttgacaaattttgaagtatcaaaaccaccactaaaacaaattaacaaataatacctgactgcacattctggaaccttgtaaagaacatatgcaattcccttggaacgcttagtgtctttatcaataacaagatggacttctgagatatcaccaaatttgccaaatagttccgtcaactc

SEQ ID NO: 8884 - DNA, 679 bp, Gossypium hirsutum
gtttaggcaaaaaaatgaggcccatttagaaaatgacccgggcctcgggcaccactttttttgccccgggtccagcccggccggcccgaatataataaatatattttttaattttaaaatactttttattttttatttttaaaataaaattttggtgattattaaaaaaatgggccgggccgggctcaggcttaggaattttttcccgggccaagtctggataaaattttaggcccatattccgggtcaagccaggctcgtgcctaggacgcgggctgaatttttttggggcccgacccaaacccggcccggcccatgaaattatatatgtttaaaagttggttatttctttttcggatttaattaaaaaaataagtttgaaaaataaaaaaatcgattaaaatataattagagtttaattttcaaaatgcagtgttagaattcaatacgacttgaccaaggaatacttttattttatgacttcggcacttggaagaaaataccggtttatcatctctttatagttataattgttggttgggtgtgtgttcattattgaattttaatctaattaatctattaaaatttaattcagttcaattaattataaaagtaaaaattcgattatagattgatttatctgaattaatcaaaacttgaatacttaaatccaaggctt

SEQ ID NO: 8885 - DNA, 658 bp, Gossypium hirsutum
catcagtagcttcagaatactaatgtaatatctcctaaccattcttaacatagagctcttctacatccactccaacataatatcaagatctggtatgacacaatgaacatggcgtttcttagaattaaaacggtcacattgatgtctatcacattaacaaggccatattttaaccaaccagccccactaaaatcccataaaacccgtgatcaactgataagataatgcattcaacatcaaataatttgattcatacattaccttggctgtcagatccttcagagcagtgactataacgtcaaaaacttgattcttgaatgatgtattccgtactaaaatcctaggaccagtcactggagtgaaaggcacacaacactggaactttgggtaatatcttgctccaaaactataatatgcatctgcccaagaatgatcgaaaacaaattcaccataggaatgactgcaaacccaaagtataagagatgagaaaatagcaaaccgacaaagcggttaaacaaaagattttgagaaacatagtgaagaaactgcaagagaattttcagtatggagaacagaataatagatgctaaaccttttaagatagagaggagcaacacctaaaatattttcagattcatccttagcaatgatatggctc

SEQ ID NO: 8886 - DNA, 578 bp, Gossypium hirsutum
tggagattgtaaatttggtgcagtttgtagatttcatcatccaagagagagagttcttcctgcccctgattgcatattgagtcctataggccttcctttacgtccggtgagttacataaactaccatttactttcatgaccttttcttcatgaaaaccttggcttcctaattgttgagttttatttgtagcttaagctaataattctttttatgttaaaaaatggatattttccttgatactcttgctggggaattgatagtttgttgtttctacagaaaattttaaattagagtagaaggtattaacttaaatataagttgtcgtgtatttgggacaaaggatgatctccttacatgtttactgggtttagcaaacaaggattttagaggtttttttttggatcaaaagttcaatgactttggttgtgatttgactgaaaagtgatgcaaaaaaggagtgtattggctgcattgaagatagaaagtgttttgccatcaattctaggattgataatagtaatgagattagctaagataagctgtcaacactccccctcaagttggtgcatagatgcca

SEQ ID NO: 8887 - DNA, 619 bp, Gossypium hirsutum
  misc_feature (616)..(616): n is a, c, g, or t
tctaaaaccaacaatttcatcggacactccaaagcaaagtgttggtacaaattttaaggtaaaattacttccttaattgttttgatccaactatatctggtggttgtaatgtagttcaaactgattgataaaactacaaagctttttatggtctccattctaatagagaaggttttttaacattaatcttcatcataaagcatttgtacattttccaatcctttgaatgtcatatattattaagtgtttttggttcttgtgtctttttcttgggtatttgacatgaatttccctttgaaatcttttacattactttggcaatgccggagtatctaatgtagtagtatgaatattggtgtttactgcacaatggcatactttgtagatgtttaggcttttcttctgtactcgcagggccaactcttcaaactaatgcaccagttggaaaatacaaaacctcactttattcgctgcataaagccaaattgcaagcagctccctgacatgtatgaagaggagcttgtcttgcagcagcttagatattgtggaattttggaggttgttaaaatctcaagggcaggatatcccactcgaatgacacacctggagtttgaanaaa

SEQ ID NO: 8888 - DNA, 422 bp, Gossypium hirsutum
agttgcccctcctcccccacctctttccattggtatgtcacaatcatatgatggaagagagagagaccgaaagggtaccatgatgcagcgtgggggttacttggaggaaccagggatgaggattcatgggaaagaggcaaccggcaagatggctcgtcgagacccagacccgtatccttaatgtgagctaaattatttgtatatttgtttgagcataactgcatatgttgtcctgtgaaagttgacaaattcgtgtgttatccgagctgcatgttcatgcaaagaataaatgtgagcctagtaaattttggccttcacataaactgttgccctattgcaaatagaaaaaaagctatttccttaatgaaagtttagattgtatgatcgggaatgggacgatgagaaaagacagagacctgagc

SEQ ID NO: 8889 - DNA, 667 bp, Gossypium hirsutum
tgcgtttcaacaagctaaagagcacggtctcaccatagccagaacttgggctttcagtgatggtggagacaggcctcttcagtactcgcctggctcctacaatgaacaaatgttccaggttcgaatcaaaatacttgtcaggttaaaaatctggtccgtgatctggttctcatcatttgtttttttgatttccttgaagggattggattttgtagtatctgaggccaagagatatgggattaagctggttttaagcttcgcgaataactatgatcaatttggagggaagaaacagtatgtgagctgggcaagaaatgaaggacaatccattggctctgatgatgatttctttaccaactctgttgttaaagaatactacaagaaccacatcaaggtcagtctctgttttctcccccttctctctctttctctaatagtttaatttaacattttaaacggttgcccttccatcttttctgacacttatagaaatggcagcgataagattttatattgaataattaatttattgtaattaatttattgtactaatttagacataggttgatgaacatttccggggcataatataactggtaatagtagatatgtaattaatacaagagtaaactctcttatttattttgggcgtaccaggctgttctta

SEQ ID NO: 8890 - DNA, 617 bp, Gossypium hirsutum
tttcgaaaattttagccgtagatcatagaatattggctgaaatatgtccgaatagagaagaagtataaatcgagatctacgtatagcgataatgtttgagggtaaaggttttcgaatatatatagtcaaatttttcccagtgtttgccgcattagtgaaaacaacttgctaaccaaagtggtgcagaaactcaacatgcaaataaggtagacctgtcagttctgaccctaacctaatcccaatccaacccgatttaacaataaaaactcaactgtctgaacctgaattgacccaaacctaaaatagcccaagctcaaaaccaaaatgactttaacctaaatgacaaagcaataaatgatctgagcccataatggccagactcgataaacccaaacctcaaatctgaaacgatttgaacatgagatgactagacctcgaaaaccatcttgaaaaaaaaattaaaatccaaattgacctgatcgagaaccaattcgacccatccaattgacaagtctaaagaaggaaatgcagcttactgtgaacagaaggaaaatgaggactgcttacttggagtgatgttaagatattagacagagcttgcgcataagtgtcatgag

SEQ ID NO: 8891 - DNA, 617 bp, Gossypium hirsutum
tctttactctcaggtgacctgctgaaattttacatatgctgttgaatacttttaagagcatcaaatatttaagtatttgtatgttcaagtgagatttaacaacatcatcaatgatatgaatgaatgaagcataaataattacttgaaaaaatgttctccatagcttggtaatgaggcaggaagtagcattatcttgtaaacttttattattggctcatccaaatgcttatacatgagcctccttttaaggtgttgagtatagtcctttgcaattcaagtacctgaaatttaaacaaagttgtctgacacctatacttctttttgcagcaaacctggaagaatgcttcaagatctatgaatccgttattcatggatccaaacaatccctcatggggatggagttggttggaacgatggatggcagcacaaccacaggagggtcgtggtacaacagaaaaggaacagaacgaccagtcatccataaggagtgcacgcagcaactttggaggagaaatcagcaaagcttatgctcgctaccaactcaatttggataagcaatccccaaaggctggccaaaagccaaaccaaacatcaagtctcctatccgcttcaactct

SEQ ID NO: 8892 - DNA, 681 bp, Gossypium hirsutum
cttgcatagagaacatagcgtcagcttttacctgtccccatgaagccaaacttcttgcaatgagccgtgacagactatcgagacagctgctacttaaactaggatgattcaagagagcattttcggatgtcatgtcaaatatcaaagtgcaaatgcttgaagccatcataacaacagatgggtcattagttttctctgcaaacaaattcaggaatcgcttcaaatcagcatctggacttcggaggcagagggaaatttagagcataagttacatggagtaacagcaaatgctattccatgaaaattctacactgaaatataaagataagataacacaattgcatgaacgttactacacaagcagtagacaatgtagtctaatttatttatcagttatcacttcctgtagtattttatttaagtaagatgtcgaagacaattcaaatgaggcggctctatctgatgactaaaatagtacccgtccaaagtgccaatgctttcaagagactaataaatgttgattcatcttctgaaaaggtaatttgctccatctgttgataaaagaatgggagtcagtatatttcataaatgtagtatattatgaccaaatatgataaccaccacctttaaaagattcataattgtatcacacgccaagaaaatgcaaccattattctcgac

SEQ ID NO: 8893 - DNA, 722 bp, Gossypium hirsutum
  misc_feature (651)..(655): n is a, c, g, or t
  misc_feature (663)..(664): n is a, c, g, or t
  misc_feature (670)..(671): n is a, c, g, or t
  misc_feature (673)..(675): n is a, c, g, or t
  misc_feature (681)..(681): n is a, c, g, or t
  misc_feature (685)..(687): n is a, c, g, or t
  misc_feature (689)..(692): n is a, c, g, or t
  misc_feature (709)..(710): n is a, c, g, or t
  misc_feature (712)..(712): n is a, c, g, or t
  misc_feature (717)..(719): n is a, c, g, or t
ggaaatgctaatccggatggtaatttccactatcaaaatctcacttcagcattgagttgctatttatttaattgaacaatctttctaactttttggtgttcggcaggttatagaaccattggtgttattacaaaggtgcatctttcaacgtgaaaatctcctttctaattatgacaaacttatgtttaagctgtttttggtttctgattagtttcggcttacttgcatatgaatcagttggatataatggaccgaggtactgatgctcgtaacctgttgcttggaaaagtggttcctcttcgacttggttatgtaggtgttgtaaatcgaagtcaggaggtaaccatggaacctaacagaaataaagatattaattcatcaatctgtattttataaaacttttcttaataaattatttctagtacattgttaatgcggaaggtttctcatttttacagttattttcttaaaatttttgccatacttattaattcaagatgctctaaaggcagttttgtctttcttcatatttcttctttggattaagacatatgtgaatctttttagtcatttttcattttgagatcttcctgtccatttaagtgtcctgtcattttgtttcttgtggttgtaagtcactcaactgccatnnnnnaaaaatcnnacttcnncnnngagttnctannnannnnattgaacaatctttctnncntttgnnnttc

SEQ ID NO: 8894 - DNA, 625 bp, Gossypium hirsutum
gcaaggtagaaaaatatatcagatccaaaaaggaaaaacaccgttctattgaccataagagtcaagattagcatcttgatctcaataatgcttattttattaatgttttctgtgtagcttactaaaactattttgttatggtcactaggggaaaacataagttaactgaccaatttgatttagtaggctgtggcagttaaatcagttgtagggtcgatttatttggctatgtcggtcaatcattgattatcaaatttcataattgaatcaactaacttaaaatttttgatgtttttaattatatttataaattataatatataagttacgttggttaagtcacttaaatatttttttttcattattttaaatatatattttataatattttaaataagtcagttaaccgacttaactgaccgaaccaactgatataatcaatggccatctttacctgatataagctcctttttgccaccttcagatgatatacgataccactgaattgcacatttggaaagttctggagcaatatcagagcaaggtttaatccgcaaatatgaacctaaaacttcagcaccatccagttcatacaagtgagataaattttcctcgactctcttgt

SEQ ID NO: 8895 - DNA, 562 bp, Gossypium hirsutum
  misc_feature (547)..(547): n is a, c, g, or t
  misc_feature (549)..(551): n is a, c, g, or t
  misc_feature (557)..(559): n is a, c, g, or t
actcttctggatggccgtgagtttgaccgcatagataatccacaggtttggcttaagtttttgttggctgtcttgccgattctccttgctacttggcttctgatgcactgtaaaacacactttacatattcaactaattataatgattaagattgtatttgagatgtttttagtcaacgcctaccataactttttcctaatctcaagtatacttacaagcataaatttgtaaatgttgcagaaaggaaactgaaactttgattgcagccatttttatgtggtatttgttcatagtgctatgtttgaaatctagtataggccttattatctatgcaatattcttggatgatatatagtgccagttctctcatccagataatgtttctgacagtttgagggttacaaatttgacccacatggagaatatgtccgaaggtggctccctgaacttgcaagattgccaacagattggattcaccatccatggaatgctcctgaatctgtactccaagctgctggaattgagctcggatcaaattaccctctncnnnatgtannnata

SEQ ID NO: 8896 - DNA, 582 bp, Gossypium hirsutum
gtagtactcgaagggacacgtcgagaggaccgtttcacgtgacgtgttcggtcggtactcgtttttttctcgacgaaccaatcgcggaaagcggcgagctgctgcttttttgcgtgcagcttttcgtccgtgaaaagatcagaaagcggggagtaatagtcgtccttgccgttggtcttagcaacagctggcggcttaaagtctttgggagctgtccttgagatcgtgttattgcagtcattttcagcaaagttgctcgttacatctgctgttgtagtggctgatgtttccttagcgagctttttctcgtgatccaatagttgcttcgtagacgcatcgaacccacgatcgggaaattgcctggggaagaagtaagtcgctcgatgaggcattttcacaccacacgggactcacaatatcacacttttttttttatctcttttacttcctcggttcttccctccttccccgttcgtacttatggaaggaactagtttctcattccgtacaactcctgccaatcaaaggaccccgaaaactagctctaaagaaaaaaaaaaaaaaaaaaaaatcaatgaatcg

SEQ ID NO: 8897 - DNA, 612 bp, Gossypium hirsutum
atgaaagctcctcttggtggaacaggaagtggtacagatgatcacaagatttcattgatatcttgttggatactcctgctggatatttcagaaggaaaaataattctttgaaagagactttccccaacaacactatctacaactcattaaacaaaggaattaaatatttgaaaccaataacagaggaagtctcattaaatttcaaatggcagcaaaatggaaacgtaaacagcactaaaggggctaaaaacatactgactgcctgagcaaaacgaggtctgtcatgagatggcaagcaggagcaagctagcccaagccgtactatgagacaaggtcggtgcatgagatcatatccatgccagaataccatgttcgcccatgtctcaagctcttctggagaaagaattctatatgtctccctccatttgattgtctttttaattgatgataggaaaactacaaagtcaccatttgcagctgtataaaatctacgtagatcttcataattgattctgcataaacactactatgtcatggtctgctgcaaggaagaaacaaagcaatcaaaaacgaatatgcatatgccaaaacaaggaacaaatcccagaaaca

SEQ ID NO: 8898 - DNA, 574 bp, Gossypium hirsutum
tgcttttgcaaagaagacaaggcctaacatgctttgcttggagcctttgagaagttctttaaattacatggtctaaatggagtaaggcattctgcaactaaaaaactttaattccgatgtaatataaattagaggccatcttaaaagatgttcagtaggctaatccttggaattttagtacaaggaagcctcctcctgaaacaatgtcaaaggatttccatggagcaacaaataagttattggtaatatcaacttgcttgccatagctaaatgaccggtaacatctcatggcatagaatctaaattgcagaacacctactaaaccctataaatcatctagcatcatagcataaccctcaagatactgaatagtaaggagtattaatcggatttgttgcttatataacccaaagctatgagagttgagaaactctaacatgaatattacttagttagtttgatttaggaaaaaaaaaataaagcatttgaaatagaagtggagagaattctgccccccaaaaaaaatcctaaaatatcagtttcaattaagtaatagacttctgccaccaaagtg

SEQ ID NO: 8899 - DNA, 641 bp, Gossypium hirsutum
gatctcccgctcctatcatagtggaccgaaaatcgtttcaggtcaccaacctcagaaaacaattcctatatgaaaaaacaaacaaaacgtcagaaaaataaacactaacaacacaacactgatcttaatggaaaaggatcaaattcaagattgcgttgctagacttttcttcagctaaatattttttgtataatgaacatttaatcaattttagatcagcaaagcctaaaattaagtagaacaaataattcaaatcaaaattactctttaaaataatacaaaatcgaagcaggatagaaaatcttaaaacgaaaaataaataaaaatacatattttctataaataccttgatgtcgtcgtttgaaacaccgtaatctaaattagagatatagagcttcgttccggtttctattccagaattccgacccgctagtccttgcaacgccgctcccttatcggaaaacatatcctgctgccacgtcgtctccggagcctgggtttttttaaaaataaaaccgaaaataattgataagaaaatcgaatcaactcgatcaaagcaaatcaaataatgaaaaagcaaaaagagataaatcagatctaaaaacgctagttatattataccttagcaggagcatacggtg

SEQ ID NO: 8900 - DNA, 590 bp, Gossypium hirsutum
attacccattccatcagcatcagcattagcatcaccactgctattattatccttatcttgaccagaaccattatcgtcatatgctccatgattcttaccatctacatggcgatccccatcagcttcatgctatgccaaaagtttattataacgaatcatcaaaaacaagtcatattagcttgactaaaacattagtttcacttcttacagtatgacaaaacgtataaatgcttcaatctcttaataaagtctcaaagcattttccataaattttcaactttctctataaacaaccgaaagttctattccactatgtttatgattatttgagggtttgaaatagcagtgacagcaccatccgccacaactaaagacctcaatagcaaatgttaacaaatttcacatcaatgccacaaagagcagtgcaactgtgttaacaaaaaaaaaatctttcgactcaaatagaaatcttccaagttaagttttagggtttcaatattttaccttatttgatttcatggtatgtcgggaactcgaaggcaagagagcacttgtatcacgcatggaagaagatgagagggaccaaatac

SEQ ID NO: 8901 - DNA, 678 bp, Gossypium hirsutum
cgctgatgtctaaaaaacaagaaacaagaacaagaatcatgtgatcagtgttcacattggctgagaacctcctgcaagattcaggatgcaaatttgatctaaagacactgagaaatttagatatgacaggcaagaatttggataatgcacctggttttggcaggttttcggcgaatcacagtagaactgatcgataatgatggggttggcaacatcttccatccttacattttcaaaacgcaccccacggacataaccggaaccaccctttataagagaaccacaagaacatactaattgtgtattaaaacttttagagagagagaaaaaaagggggggggggatgaagtcaaattgtgtgtttaacatattcagggaaaagaaagtcatgtattgaacccaccatggcactcatttcccgcttcctccccaaagaagaaaatatcaggcttcatatcttactcagaaagagcatctaattgttaagtgtgctataatattgatattttaaggtattgacgtattgacgactgaagcccctttatagtctttttactttctactttcctgatactgactaaatgcatattcttatcaatacatggtgctagattcagaatatatatgtcatcaaaatacctgccaagttttaatcctgacaccatttgtagtctccct

SEQ ID NO: 8902 - DNA, 625 bp, Gossypium hirsutum
ttttgtaccttttatttttagtaatttagtctttctactcttcagatttcaaaatttaggttcaattgttaatacaattaaaattattgtgttcaattcaggttttttagttacattgctaccaattgcgcatttttttaattttaaaatgtcaaactaacaaatttaacaaaaagaacttaacaatgttaacaattggacatgaatttgaaatttgaaaagtggagggattgaaattcctggaaataaaagtacagagactaaattttaaatttatgaagagtacaaggacctatggcatattttaaccttagataaatagtccttgagatgtaagatgcgttgtttatctgccaaaatatacgagagagaagaacttgaggtccgattttgtttttgatagcttaaaaaaacttttacgaaggtcttcgatgaggcatcctcgaaccctcattttgaaacctcggcctgctgaatttttgtccggctcctattcaaattgctgccaagttctctcagagttgaaagcgaatgaggtttcggttttgtctttgaactgaatcgtgagtttcctctggcttttgtaggaacatatgcgctattttcgttcaaggacagccaagga

SEQ ID NO: 8903 - DNA, 596 bp, Gossypium hirsutum
ggctagaattttatgaatgctagctcttataatttgtgctgatacaaaaaataaataaattaaatcattatggttttattatgtccttaacataatggttaacatggaacaatttggtttagcagcatggaaatcctaatcctgcaaagtactgtatctacatcaacatttcaccaacacaatacagagcaccagatagagatgatctcccacagctgacatgcaaaccaacaccaatacaccaaaataataataataataataataataataataataataataataataataataatggtaagagaaaagcagaagttttggccattcagccaagctagttcattttagcttaaggactgggagagagaaaatgtcgatagcctcgattttatgaatgtcctagctttggcgaatcttcatgtcacttggtttactacccctaaatgctgaaagggagaagaaggaccttgtccctgaaagaatataaaaggcaaatagtattggaattgcaaaggaaaaagaaaataaacattttattccagaagataaaagcagaggaactggattaataatgagatggatgtagacctttg

SEQ ID NO: 8904 - DNA, 643 bp, Gossypium hirsutum
  misc_feature (614)..(619): n is a, c, g, or t
  misc_feature (626)..(629): n is a, c, g, or t
  misc_feature (632)..(634): n is a, c, g, or t
aactctggtttgtatgtgaccttaactcatatcctcataatatcccatatatatgtgtgcgtgtttgactttgggtttctccatttgtatctctgatctatatataattttgtgaaacagatttatgttgtaattgggatctcctacatatatacatagtatcatgctcttgctgcatcttaaaattatgagcttcaatagttcaattatgaatcgtgattagtatatgaggccaggccattaagaaagcaaagtaaaaaagaaaaaaataatgaatggcaatgatattgctcgagaaatatatatattttttgcaggtttgctttgacaatcatttagaacccccattgatccctggcaacccttcttgtaagagatccaaaaaaccagcagccaatgtccaaggagtggatcacaacatggggtacatggcttaaaaccagacaccccaacaatgtcttctttcggacatgaaaaattattattataacattttcttttacttacaaaacaaacaacaacgaaaattcatggaaatataataataaaaacacatttgaatactgatatcaaatggcatatctctcctttgaatccctgtagtaaaccacggnnnnnnacctccnnnngtnnngtccctttt

SEQ ID NO: 8905 - DNA, 567 bp, Gossypium hirsutum
gcagcggtagaaaatgtcatcctcacatccggtattagggatataatccagtaatgtggtgagtcttgttgagtgcttttaaggtttgtaaaggacaccataactgtgaaacttgcaaggaaaataattgaatttgaaccccaagaatgcaaataagtggctttctagtgtcagcgaacagatgcaacagtaaagtgttaagaaggaacctgatctgagttgtatttaggttagctctcatcttaagaatcaattaaccaagcaaggttgaaaagattttggataaagaaggaaatttaggtatgttgctgagaagcctactcccagagccaaagggagctcagcgatgaactatcacagataatttaccaatcactttcagacttactagatcaccaaacctacctcctgctacggtgaatttgaaatcctgccctgattatcacatgacaattgtaactcttgtcaaaggtggacatgagggaaataattcctggagatctaattactgttttgttgtttactatatggttcatgtagagactactagtaggcgcaagatataag

SEQ ID NO: 8906 - DNA, 606 bp, Gossypium hirsutum
ttattaagaaactcttttatacagaataataaatattattttgggtgtatttttattttttaatataaaattatatatatatgatgagtaaaagtaatgtcactataataaaaattaaattgtattttatattatttacttataaaatgagtaaattaattcctacacgttagaccaaagattaaattaagtttctttgtaaaaaaaattatatttgtactgttaaaaactagtgtgattaagaaaataatcaaacaatgacaaatagtgtgccatatgtacatcatgtttatgtacataatcaatttttaatagtaaaaataaataaaatttttaatagaatgattagtttattctttgatttaacatacaaatacaaatttatcttttttcaagtggaaaagataaaatacaatccatttcttcatacaaagaatttttatgattttttttattatatataatgatatttgaagttaaaatatcataatttttaattattaattttactattttgggcttatatcaaaattttaaatacatttattacataatttttaccatagatatactctaatctaagaagtagtaatggacatactcgtt

SEQ ID NO: 8907 - DNA, 634 bp, Gossypium hirsutum
tcaactcccttagtagacagagacccttcaacgtattactacgtgacattagaggccatcagtgtaggagacaaaaagttggcctacggcagaggatcagcttcatcggcaacagaggaaggcaacatcatcatcgactccgggacgacattgacgttcctggaatcagagttctacaacagccttgaatcagcgttggaggaagcaattgaggcgaaaagagtgagtgatcccaaggggcttctcagcccatgtttcgaagccgataaggacatggatcttcccattatcacgtttcattttagcggtgcggatgtgaagttgcagccatggaatacattcgcgcaagtccaagatcatatggtgtgcttcaccatcgtaccttccaatgatatagccatttttgggaacctgtctcagatggatttcttggtcagttacgaccttgaagagagatctgtctccttcacgccaactgattgccccaaaaatcattaggctcgatacctaaataaatcagtgattaaataaatgtgtgtgatatgatgatctttaatcaatatatgataagtaagtcattaattgtgcagctgaccattgggtgtttggtataatgtgatatatacacatggct

SEQ ID NO: 8908 - DNA, 573 bp, Gossypium hirsutum
tcatgttacgaacgaggaagagtgccaaggagatgattcagctgatagtgatcttcactccattgaattaaacgtggacaacaatgacatgagctacaaatggagctacgcttacagagattatgttgaagatggatcgaagaaaacttgggtcgaaaaagaaagcaagggaaggaaatcactttctgagatgatttcatggggaagtatttgcttagaaagaggaaactcaaactctaaaggttgggattttgaactcgaaatcccagaaaagttcgagagggatgggacatacaatccaccgtcgcaagtccaggcacacgattacgaagacgagattaaaagatatagatcagttaagagtctaagagatcatatattacatagtaataaaatagctcccatccaaagttttcctagtccgaccaggcaatggagccatttcgagacaggctcgccggtgtcaaagggggatggttcgaagcctaagctcatcggtacaataagtgaaggccgaacttcaacaagctaagatagaagaaacttgttatttgtttatttgtttgtttgttt

SEQ ID NO: 8909 - DNA, 662 bp, Gossypium hirsutum
  misc_feature (654)..(655): n is a, c, g, or t
acatcagtaagatattccctttgtctataaatccgtaatactctttttcgatgtcatgataacgttttagttgtttatgccccagaactaaagtggcaaactatcatgctgagatgcctttttaggttggatcgattgattttttaattgtttattttgctgttttggacatgtttataaggttgttggcacggtaggttatgctgcccctgagtatgtgcaaactggtaggctaaccgctaagagtgatgtttggagcttcggggtggttctatatgagctcatcaccggaaggcgaacactagaaagaaatctacctcgaagtgagcagaaactcctggaatgggtgaaaccttatatatccgattcaaagaaatttcaccttatcatagaccctcgccttgaaggacagtattgcataaaatctgctcagaagctagcatcgttggcaaacaaatgtctaatgaaaaaccccaagtcccgtcctaaaatgagcgaagtggttgagatgctaggcaacatcattagtgggacatcgactcaagatgaaggtatctctcaatcaatgagtgaaagtgacgatgtaaaggaagaaaccagagtggaggtcaaggtcgaggccgagtctaccaagcaagggcacattacctgagnntgttctg

SEQ ID NO: 8910 - DNA, 528 bp, Gossypium hirsutum
  misc_feature (360)..(361): n is a, c, g, or t
  misc_feature (402)..(402): n is a, c, g, or t
  misc_feature (404)..(404): n is a, c, g, or t
aactatctaccaagtatacatagattattatgtaaactatgatataaaattttactaattcttttcaattttcgtttctaaaaaaaaaaaaaatttgactgattttgatatccaaggactaaggggattaaaaaataatttaaaatcaaaatgataaaaaataaataattgtcagggggccttaataatttatactttcccaattaatttctataaaactaaaacagggatttttatcccaattaaataatgaaaaatgaaaaaaatttaaattgaaaaaaaaaacatgttaaagggttggaggggtttgtgaatttttttttttgaataaatatgataactgtcactataataaatttnnttgtggtgagctgttttaatttgttgctcatgtagatttancngtatttgattgtgaaatacaatgaaaaacaaaatcttttacccttcataattgtgcacaattaatgtattaaatatcattcttttataataacaaattatttttagaatatttaaaataatttt

SEQ ID NO: 8911 - DNA, 384 bp, Gossypium hirsutum
gcagtatctcacaaggtgctcaacacgggaaagaaggttttggagatagtgaagttgatgatgcagcctcctatattgatccgaacaactttctcagtattcctcttggggctgcaaaatgtgtttccaagggcatgaaggaacacattatttgcagagcatgcaacgcaaaggaggtgtccattttgttgatgccatgtaggcacctctgcttatgtaaagactgtgatttatcaatcaatgtttgccctgtatgccaggtaacgaaaactgctggtgtccaagtgtacttatcctaaacctgtgaagcaaattcttgaaaaaagatgaaaaatttatacccttacgtgtgtgtgtgagagacatccagcattcccccccccc

SEQ ID NO: 8912 - DNA, 617 bp, Gossypium hirsutum
attttctcctctatttttggagtttttgagtaagagcgttggagatgtcgtgatgccccatatctgatattattgttgggtcgaatacttgacattacattacgctattaaagcaattcaaactatttcaattgattccaacaataataatgccattcaatcacattacataacatatatactcaatttaatgaataattatgattaattcatgatctgtcacaattcattgtagcaaattgagctcttttcgacacttaatgagcttgtatttgagtaatttgttatcgtttatttagtttttcgatttagtatgtttatgtttaaggttaataaaatgaacattttagtgtgttaaatgacctattaggccaatttgagcctaagggaagactaacatgttgattgtgtgcggccgatgagtcaatggactgcctaggatgtcgcaatagccaacttaaaggctacttcagaatattaaggcagtaatgctgcgacaaccaaacctcaatgtcatgacatccaacttcgaagacaaggaaattatattcgaaatccaaatgtcgcgacaacaatccttgaatgtcggaacatcggtttgatgaggccatctctgc

SEQ ID NO: 8913 - DNA, 658 bp, Gossypium hirsutum
tccttcaatttaacgaaatgattttcacatggaatttctacatgttttctaagcacagcacacacgtaattggaaaagggaatcccataagccggatatatcacattcaaaaaacatatacaaaaattaagctatatgtattatgatattcatcatgacttacgtttgtttgatcttcttttcttggcggcctccggtttgccaaaaacaccacagaaaccacacccggataccttcggagaaggagggtccacgttaggcgatgctgctttcgtcgtgtggtacatacttccgctacctccgtcggatcggcttcgtctcatcataccgtgggacgaccctcggttttctttattttcttgatggttgccgttagccctcatttggttcaaatctcccgataaatacttatcatcccataccaaccctgacgacccttgtctcctaaacgacgtcgtagacctctgcaaaccatccatcttcttcttcttctccttctcccttcttgttctggaattttgtggggggtagggggggagttgttagagggtttttattggaacaaggtggagggacgttgggtccaaagatgcgtgatgaaatacgactttttcaatgtggtgttgtaagtatataagagagtaggagaaaggaaatg

SEQ ID NO: 8914 - DNA, 664 bp, Gossypium hirsutum
gtcttccatcaattgctcataattttaattggtataatgataaatttaacttttgatgtttaatatttttatcattttagccattgatgttacaatagtagaggcatcaaatttaaaaatgattttatcaatattcatattattggcaaggtagagtccatctctaagtgcccaaagttctgcaacctattgatagagtggccaataaaacttataacatcttatgacccaattaccacgatgatatcgaatgatagtatctgctcccgcaactcttgagttttcaaaggaagacccattcatattaagttcatgatagttgataggaggagaagaccaagtctcctgaatggaggaggggtaagagggtctcttatccattacgcaaagcccatgacactcgatagccatagaaatagctctggaggcaatgctgtcttccttggagggtttttcaaagacaatgacattgcgcataaggcaaagattttcgaggaagaatgcaaaaaccacaaaatttaccagtggttcaactgtttgaccaattggtttaaattggattatgtggcattaataacacaatcaatttaaaatcatgcagaaaactatggaaaaaaaaagtatcaacttttactttgattctttgaataaagttgacgaatct

SEQ ID NO: 8915 - DNA, 668 bp, Gossypium hirsutum
  misc_feature (661)..(662): n is a, c, g, or t
agcttcttgagtaaactagaacaaaacaatagtttaaatcattgttgctggaaggggatcaaatcaataatcgattgatatatcagtccgagcaaagagttgaactggtttttaagcgaaccactcagaatcggttgaaccaggctaaaaattcaattgaaccaattttctctatttttaataatttatttaattaaaatcagatgaaccagttgaatcagtaatttgattgattcagtgatttaaccaatggtccgatttttaaaaaccttatttaaataccaaatggatcaaaataaagttgaagtatggtaaaagtaccatggaggcccctatactaggagtcatattacattttgtcccatttactcaaaaaatgggtaaattagttaatgtacgttaaatcaataagcaaactggtcatttctgttaaaaaatttatcaattaaaaattagtgtagataacaaaataactacatagttacgtgtgacatgccacatgtacttcaagttgacgtacatgaattaatttttaatagtaaaaatagatgaattttttaacagtaataccaatttgctttttgatctaatatataatgactaatttgttcactttttagtagaaaaggaaaaatgcacctgactcctagaacaatgacannatgaca

SEQ ID NO: 8916 - DNA, 336 bp, Gossypium hirsutum
aagaacttcttagaaacctagaataagagaatgtggtaaatgtctactaagttgcatttttagatataaattaaaatgaaaataaaacaagaagagatgctaaataaaatacctctataaccatcctatctatttcacatatatcaatgtggtcaacagagctgtgccgagaaatctctgcaagaaccccaccatcaccacctcccacaaccagaacctgtattcagtatctaggtaaagttaacacaaaaccactttgaagctaaagtaaaatctttctagaagtctggaactaaggtcagataaataaggtttttgataaaagcggaaatttgt

SEQ ID NO: 8917 - DNA, 639 bp, Gossypium hirsutum
taattcgcaactgtacctcctcaacttagttcttactagttaaataaagtataatgacttataaacaagatctcaatatctttctttaagaatgttggatttggttctttcgaaatctctcaaatttttcaatagataatacaacatgtataactcaattgaagggtatcgccaactagatcatttgaaaggctagtatacaatattgaaactcgtcgactcaaagatgtaatgtgatgttgccattaggggagtttaaaacaatgttatactcatttcttttagttaatgttttgtctcacagcgttttcctagtaaagatttttaatgactcagcttgtagtgagaaattgtatactctcttccatttattaggttttaatcccacatggttttaattaataaaattttaataagacacgttttcattggtggacatccaagagaaatattgtaaatatttcatatgtgaatgttatttcaattctcataatcccaaataatgatgtggatgacctttcaattcctaaaactctcaagaaaattatagaatacattaatttttttatttatgtatttgtaatttatgagagttaaaatcctaaatatagacaacatatataagtttccatcccatct

SEQ ID NO: 8918 - DNA, 632 bp, Gossypium hirsutum
tggccacaatctccacagccgattgataaaggttcccatcatatgctacatcgaaactaatcttcacaaactgatcaggtgggtgtttccactttctgactcctgttataatttttggtactttctcttcaatcccattaagttctgaaatgtaactattgatgtaacttactatctcttccccagttctgttggccttcccatgaactctcttgttcctttctcctcaaattgcccaaagagcgcagcaaaagatcctacattaaaggaattattctgttcaaaaacccaggtgagccactgttgaaacttcagatgagatgcttgtagtaactccgaaaatgataactctttccatactgatgttgaaataggacactcgcggaatagatgattcatggtttctgttgctcttccacacccaagacagattgtattgtttgatagccttctatgtagcaagttaacccgtataggtagataattccatgatattctccaaactgtaattttgatcttataaggtagattaagtagccaaagatttttgtaaaatttcctatagtcagtttgtaaagcataagatctaggatcaatttcaatgccctataatagtttataggcactacaca

SEQ ID NO: 8919 - DNA, 637 bp, Gossypium hirsutum
ttattttctttctcacatagtttattttccttctcaataactcagatttatcactcttactataatttattatgataacattttttgagaacggttcctaataaatttaatggtattcttatattgataaatgtaagagatgactaaaaactaaaaataaaatcataatatatagttaatataacaaaaactataaaagatacagataaaaagaagtaacaaaattgtggataaaattatgataatataggttgaaataaaaaaaaattcacaaacataatgttgaacaaggacattactatcaacaaaacaaaattttaatttgaaaagtagagtgattaaagttttctacagagtccgattgctaattgggccctcgaatttagtaatttcgatcccaaaacttaaataaaaatttaattattttattattaaattaaaataagaaaatctattaattaaagaaattctttttcgccaaaatcccattatatccaacacgttgttcaagtcaaaaaggaaattgggttaatatagtacttggtatatgaatttcgcttcaatattaatttggtatttgagattttttttaacttaatttgatacttgagtttcgctttaattttcaatgtggtgc

SEQ ID NO: 8920 - DNA, 663 bp, Gossypium hirsutum
tccgtcgcattaggcagagtttgacaccaaggacggaactgcagtccgtggtatcttctataagcttttctttctcctttcatgttggggggaattggtcattgaaaaagacaagagatatgtacctggagggttatcattgctacattatctggtaaaacataggacggatccatcccagaaaaggatgagacgtgggaattagtccatccatctccttcctgcaaaatgttaaaccagacattcattagacttgggctgatgtagaatatgcaaaacaaaattattcagcttattgctttcacctgctgagtaaaggctaagagaaatggagaatatatctcctgaccaaatgatcgacgccacttagctgcctctcccagaggatcgattctgaggtaatatttcccaacgatctattgaaactagatttgttagcaaagatctatgcaaaatactacagtctttctgcaaagtaagatcaaatatataaccaacatgtgcttacagttagtccactgcacttattttgaacacaaactgtttcatttagggcttctgcaacacctctaccatcatcgtgaagcaacctcctgtatgaagaaagtaggaccaaattttagagttgtatgaaatgaatggttaacttatcggtgtatctgt

SEQ ID NO: 8921 - DNA, 554 bp, Gossypium hirsutum
cccttgctttgaagatcaacagtgtctatagcaagaaaaagcttcttagcattcacgagaatgtgagggtattgcgttatccagatcacttctctgctggtgtctatctatggtatgcattacttggagaattgggtgtgcactggcattttacttttatatttcagactttgacatgtatttcttttacctgtaggtcccaccatgaaaagcttgtgattgttgattaccaaatttgtttcgttggtggacttgatttatgctttggtcgctatgacacatttgaacacaaggtgggcgataatcctcccctagtatggcctggaaaagactactataacccacggtaatcttttagtaagcaaaggttctcctcaatttttgagaaatttgtttagaagttgacttacattctttttaacctttcctgaacttgccacatttcagttgccataagttataatatacttattttatacacatttcgactttgtatatagagatcacaagttcaaaactttcaagattttgtgactgtgtattcagtgttctcc

SEQ ID NO: 8922 - DNA, 579 bp, Gossypium hirsutum
aatacattacacctgtgcatagcattcaacaagatgagcaaccatgtgatccaccacatttgatgcaaaatgatttaccaggataaatagagatacatttgttggagaacttcatatgatccctattaaaataactaatccccaatcacgagtagtttctgggttttaaagatagatttataccatttctgggttttaaagatagatttataccgtttctgggttttaaagatagatttataccgatctccttgatcgacgcacacaaaaggaagtacatattcctcgagcctagaggtggaccttgacaaaataaaaaaataataataacggagacgggaaggcttaactactcaataatgtaaccacaacacgtttagaaaattaaagagaaaggatatattttatttgacttaagatttttcatgatttaagagctcaatttagttttagttcagctaggcagtttgtacataatattggctccttcctttcctcttttaggatgcatgaagtggtcaacaaagttcaattaaatttgcagaataaagaaaagaaaatggatatatactcaccgtg

SEQ ID NO: 8923 - DNA, 600 bp, Gossypium hirsutum
gggtctctgagctgatggaagctttgagagactgctttttctttatgcatagccggcaggcactggtttgatggatactatgcatgtagggtttgatttggtgaccacttggtcagaaaaggtgattgaaagctccttggaaatggctgaaatggaaaatgcttcaccccatgaagccgagaagtggattcttactccaaatttgtctccaaatctgtaaggaatttgtgcatgtgttctatatttattctgaaactgagatcggtcctgcaaatttatcttcttgtttttatggtcctttttgatttgttagttccttaatgtctttccctatgacatatctgattatattgattttttgtatgaagtgatagttcaaaaggagatcgaattggatttgcttcccagttgcagcttttggttagtgcactggatatgtcatttgaagctcaatttatggaggatttcgtttcaggtcttaatagctctatctgcatcttggcatatatatgatgctgcggatgtattgaagtcacctcgaaatttattttaaattgtgtaacttgttcttttttgtaactcatgcattttgttactagc

SEQ ID NO: 8924 - DNA, 592 bp, Gossypium hirsutum
tgtcttcttgaatctacaataatggagaatggaggagtggctgaatctgccaacccgtccaccctaatcaaggaggcaattcatgtcatcagctgtggctatgaagagaagactgaatggggcaaagaggttggaatctcaattcttgtttattatacaagacttcaaccgctttagcttaatatatagtttggtcctactcgctttccggcatgtctgacatgtcctagccaaacctgattcattcatccttgtattgacaaagttaacatttgctaattgtgtggtctcagattggatggatttacggttcagtcactgaggatatcttaactggtttcaagatgcattgccgaggatggagatcgatttactgcatgcccttaaggcctgcattcaaaggatctgcacccatcaacctgtctgatcggttgcaccaggttcttcgatgggctcttggatctgtggaaattttcctgagcaggcactgccccctatggtatggcttcgggggtggtcgtctaaaatggctccaaaggatggcatatatcaacactattgtctatccatttacatctctcccactcatagc

SEQ ID NO: 8925 - DNA, 628 bp, Gossypium hirsutum
gtgtgagattagaaatgctgcattgagatggactcctttagggcctttcatgaactaacacactgcactcacttcatacgaaatgctaggctgtgtttgacaaacagattacttttcccacaaaatgttgctttcctttgcttgctagttttccttccatagactctcctaatctatgatttgacttaatatgtgtgtgtttaatggtctacaaccaagattaccgaagtagaaagcgtgctgtggtgttttcagtttttgtcaacaatacgactttatatctttcaatcccatgttaaggttgccgatgtttttatttagaggaaaagaagttagtctggttggagatttgggtttgtactttccttatcctaaaaagatgctaaacgtgcaaccgaaaggatgaatgggtcgaggcttttgagaattaaatcagtgtccatatggccaggtttaatggtcattcaagcttttggagaaaagcaaagctctcgaacatgcaggggaagtagagaatccatagaatatgttggtaaaggagtgtgaagctatagtggaagaagaatatttggaaaggttagataaatgtgttgttggcacagcaaaaaaggttattgaggtcgaggac

SEQ ID NO: 8926 - DNA, 638 bp, Gossypium hirsutum
tcgctggagcaggcattgagcccactttatggaaaaatttaatctgcattgcattaaattcaaataaagtagtgtaaagactagatgatcgttgcataaaagtaccaaaagaatgtacctgtgcacgacagtgcgcaatatggtaagacagatgttacataccaagcagcgatgtgaatccggatactcagcatccaaccttagcaattgctttacagccttcaggacaaagaaaataaaaagagaacaaacatatgaagatgagttcacaaaataattaagtacaactgaacactgataaattacaaaaactatcaaattcacgcatatttcattgacaccatgtttggaaagaacttaactagtggatctggatttagtttgccataaaaacaatgagtaaaatgcatgtactatgaacaaattatttaaatttcaacataagaggatcaacttcaaattcaaaagtacctaaagattcactattaaataggtacccaacaagtcatataaacttgaaagtagtcatggacgtcatatgtacatgcgttttaccatgattatatcaattttcaaatccaaatcacctattctaaattcaagttaccaaataaaacttgaatgaatagagacgttgg

SEQ ID NO: 8927 - DNA, 662 bp, Gossypium hirsutum
cataaagagaaatgaagcgagcactgtgagttagtgagaaaacaaattgaaggcattacagaaaatcaggaaataaaaggcatcatcgacaagtatattacgaagctaaccatatctttctcccagtagcaccaatccatcccgagatataccagaccctgaaagcatataagcaacaaataaataaaaaaatcaaacatgaaacctggatggacgtgacaattgactaaaggtgttagcaacgaaaggcatgatagcttttaccatcatccaccactttgacatagctgctcccaacacttagaaagactgacacctgaaacaataaagaaacggcgactcttaacacagagttcccttcgtagaaattatttacgagttagttgttgaaatttacgacctttgtcgcagcagcatcgaggctgttgaaaatgagctcctccacaaccctagtgaggtcaaacaagatagtggcagaacgcactgtactacgaacagcatctggcaagggcttaatactccccattacaagcctaacctagctcatgtagaaaattaaacaaacatacgcatcaaaaccaatccgctttaaatacaccaaaaagaaaaaagagtactccgggggaaaacgagtaattagcaacaaattaggattgggaaag

SEQ ID NO: 8928 - DNA, 195 bp, Gossypium hirsutum
aaggcacataagaatttcataaaatttctataagatccaagctaagattaaggaattcaggttagttacctgaaaaagataaagaggaacctaccttgaaagatgatgctatgcagttacaagcttcaagtgacaagcttccacgggcagccttaagccaacatgacaagtcagtcatagaaaaggtaaaaaaaa

SEQ ID NO: 8929 - DNA, 588 bp, Gossypium hirsutum
  misc_feature (69)..(69): n is a, c, g, or t
aattgctttttgaatggctccgccagcacaatttccccgaattgacattcgagtgttattatattctcnccctttaatgaaataattaaattttgtatctaaaagttcatgctacaatattttatttcttttttaaatttaattttctttattaaagtttttattaagtgcttaaatatgtaaatgttaacatatcccatacataacacgagtacaaaactagtattatattaagaaaataatatcttatcatttttattgctaataaagtttaattttaagccaactgacttttaacccttaactcaattgacattgacattattgtcaatacagaagaagatgaatttaaacatattgaagctcggtttcctttctatttaagggttatgaaaaaattacaagtagtttcaaacattgtataaaaagttttaatttaaaaaatgagattaaaaatccaacacacctcctcaaacctaaataaaaaactaaagagtgatccatcatggagctggacagtaaaggtatggtccaaattctgagtaacaaaaatggaggagtcgtccattaatgcgctggttggggcta

SEQ ID NO: 8930 - DNA, 656 bp, Gossypium hirsutum
ggtcaaaccaacatgagaaactgatgatatagagtagttgatatgattaccttgtcagcagcacaatgttaataatagcttgttaatcagatcttgttgctattgtttagcatcaaaaggtgattccttacaagattgttcttaaatgatggtagtgtagtcattgatgttgacttctgttgctgtacctatgctttctaggtagtttatctcagttcaggaagatctcttttattcatattcttgattatttattgctgctttaaattagctattactatgtctgcatttcggtggttttattgcttttggtgttattagctggttttagttccaaaaaaaaacaacacgtgtgcacaggcttagttaagtatgaagtagatatatctacactagcttagctgatatgccttgatttgaatcttggtttgtgagaaaagtaccttctcatattatcttttaggaaaacccaaactaacaaatatctgttgacgaactagttaagtaaaaggataattgaataaaatgatacaataaatcactgagttcattaatcaattaaaattaaatgcttcctaataaatttgacattgaattgaccccttcaccttcggtctcgattgaattaaaaatgggttattatgatctcgagcaag

SEQ ID NO: 8931 - DNA, 638 bp, Gossypium hirsutum
agaatttcgtagctcttgcgttgtgtagacccagtttcagtaggtttatcccacaagttggttcaggggcaatcaatttctaacccatgttttttgacacgatacaaattttatcataatacatatttataaaaatattaatatttatataaaaatattaaattattaatattgatataaaaaaatacaaaaatttatataagattagaaaaaaaaagatacaaatataaaaaaattgaatttataataatctttaggaaaataaagatttattaatgtcaacaaattatattattaataaaataggtctgaatgtgaataaaaatcatgtatgactttccttttaatagtcatattcggaatatcaatatgggattcatgtttgactcaatattttccattaaaattacgtaatggaagtgataaaagctcaatgatgtaatttgattgaattaataaaaattagcccagtttgagtattcctcccttcattttcccctttcttttcagaagcacaagtcttttgagtttatagcattgtgataaaagataatggtgacattacagttaatcatggacccgtgcaggttaggtttcgagattatgttgttctttactgtaaaccacgaattgtgata

SEQ ID NO: 8932 - DNA, 592 bp, Gossypium hirsutum
ttgagctgacttgcccttgtgttggcgttcttgtgaccacgaagttcctagatatgcttcgccagtcacctttcccgtatttttccaaaccaagaagaaataacctgtttttcaagataagaatatagagtgactaaacatacctttgaaaacataatatgacaggcctaaaacaaactatagattccgggttacggacatttcctcaggactaggagaaggtattatagaccaaataaagctaaagaatacgctctctgactatcaaattaagcgatgctaattcatcaagagaaaggatacaaaacattaaagaaaagaaagaaaaaaaaaaaagaaaagttaacaacgcccttagctcttttagtcatgtgccttttccaatatttcaattacttaagtacggtaaattcttgtgcaatgatggttctttatataattcaatatactgtatatgtcaatgatcaccatgcacaaactttgacacaccaagatatatttttagtgcatacaaaattcatcaacactaagttaaaaggaagtttaagataaagcttaagccttaagcatagacagagaatctacttcacat

SEQ ID NO: 8933 - DNA, 627 bp, Gossypium hirsutum
atgcatgtaggtatgggcggttatgaaaccgggattcttggccttgttggaagatccttttgacacaaagcttttagacattattgtttttgatgtactaccaaccaagaatgaagatgtgaagtctcaggtctatttagcagaacagataaaagaacataaccctttgtactatgcatttagggtaagctatgtcgatgcatctgaaacataaatgtgtttaccagttatttctactacttttggatgacatcaagtttcttttctatcaatattagctaaatgaaagttccctttatgttaaaatctaacaatggaaatgtgaaaaggtctcttgtggaagttggagcatggacttgagagtcacgagtagtggtaaagccaaacaatgggttgctgccattaatgatgcaggcataggggcccctgagggctggtgttgtcctcaccgtttcagttcctttgctcctccaagaggtttgaatgaagatggaagtcaagctcaatggtttgttgatggtaaagctgcatttgaagccattgcttcttcgatagagaaggcaaaatcagaggttcatagcttcctatgcctattgtttgtatatgtcaatcccatttagtcttcga

SEQ ID NO: 8934 - DNA, 644 bp, Gossypium hirsutum
tggcactgtctttggtcaaaaaagtttgtgatttcttgtaaccaattaagtagaataagaaccttcatttgcttgaggctaaaagcttttttcctttaggtacctcccttttctgagcaggagtattgttttcttcccatatggtgcttttgcttctgtgcctccttgcaatcaatgaaatcaatgtctttgtaattgttatattaccgattaaaagcttaaagaagcataattcatttgctgtcttttcagtagcgattgccatccacccaatttttgatgaatactcaccttcattacattaaaataaagaaaaaatattttgataactgaaagtatggagatttgactctggaacttttcgggaaggtgtattctaattggataatgccagtgattatgtaattcttgattcttgtttgatattatgtactttatggtctaatacacctcaaactctgcatgattttataattccaggttatcaattgccatgattcagttatttaccttctagcgcctttgagatatgccaccatttatggatgctctgatgctactatagttcttggagctgttggcaaggtatcaatcacctttgtgctgttgctatttgtgttgtactaatttcataatcagaggaa

SEQ ID NO: 8935 - DNA, 656 bp, Gossypium hirsutum
taccacattaatgaccttggcttggaatggaactgtccactttcaatatcatcagccagctccgcaccaccacctccactagcggcaactgctttgttttcaatatctgtaacttctttgccctctccgtctttgctcttaccaatatctgcactcacttcagaagtgtttgacacacaatgcttttgaagccatctatcagtttcccacaggacatgcatgatgctttctcgagcagaatagccatggctctcaaagggtagaataacaaggcgacagagagctccatgacccttcagggcattgaagaaacgatccgactgcatcgtatggatatggccaacaagtaggtaagcaaacaaaggaagagatttatgataagcatctaaaaagaaatgtgtaacaggttctgtttttctatcaaggagacggagagggctatctaaaatagcataattcatacgagggtgtgggaagccatatacctgcatggttaatgttcccgggttgttgtcttcttctccatggataagcaagataggcttcttgattctgtttgcagacatgaatggactcatctctacataagtattagttgcctcccaaagtgttctatcctcattctgcgccaaagagaggaaggaaagcataaatcc

SEQ ID NO: 8936 - DNA, 634 bp, Gossypium hirsutum
atgatatgcaataacaaaagttgtacgtaaagaaactttagacgaaactagcataacaatgtcaaagcattaaaaggtgtgtagccacattactcaggctcggttgagcatcagacaaggtatgtacctgacacaggtctgttagattttgaccaagattttcatgtattcggagaatcataatcccatacctgtctggatccatatcagatatgggtgctggacataggtacttcaaaaaaagaaaatgaatagccgtagcagcataactgataatagcagaaagttgacaaagtgaccttctaatctagaagttgttattatgtgaaactcctagttaagtgagaccaaacgtggcaattcataacagagcaatagttacagcttcaaaaacttcttgatgcagtggctagacaggcttatgtctcatgtaagcttggattcaagtcagagcaacccctcataacaacaacaacaaaaaaagaatgtgattgttacaactaaaagagatatttaactagagattgtgcccaataaatatggagctagtcagaaggctaacttttggattatttctttattttcctgcataaactaataacaccagcatgtgctactggtggacaatctgaaa

SEQ ID NO: 8937 - DNA, 555 bp, Gossypium hirsutum
  misc_feature (542)..(545): n is a, c, g, or t
agcccagaagccaccaaaaacaagagaatgtttcatgttcctgttttgaacaaactgctattgaattgaacaaatgctgaagcttacattatataccatacagaaaaaaaatatgaaatgatttcggatatcaggagaaagagggggagtgtacctaattaaggtttgtggtggggatcacaagggaacagtgacaggcctatgagcacccgtgccttgctcacatgttttacttaagggtttcatttgatgtgaacttcaaataaacttgtctttgctgctaaatgtccatttatggttatacaggcttagactcaacgttatataagtgggaaatttatttattttctatccacccttaatattagtcactttagctttaatggagagttggcttgttgctaaggactaagtgatgagtccaagttaagtgtttttttaatctaagatttggttgtgtgccaaactctggtttttgtcagcaaactgaaacaatgttcgtttaaccaatattattagaacttcggttgcttttggcgacnnnncttgggctgc

SEQ ID NO: 8938 - DNA, 453 bp, Gossypium hirsutum
tgagtaaaaatataaacaaaaaaatgggcttagataaaaaataaaatctgtttaaaagacgggtcgaacctcaagtaaagctttttttgtccgagcttaacctagcttgaatatgtaaaaaaaattactttctttttgctcactattatgttgttattatttttttatacatttacttattaagttattcctatctttgtgttatttaagtatacatatttttaatttattttcaatttgtcgagaaatatttattttaatatttttaatattttttatttattatattttaaaaaattagaaaaattaaaaataatataaaaaatttaatacgatttagctcaaattttacatttttatttaaaccagacttgagtaaaattttaggcctattttttgaactaaacccaaaactaataaataggcctaaaatttatcaaacccgacccaact

SEQ ID NO: 8939 - DNA, 672 bp, Gossypium hirsutum
ctagggtttagtgtgtttttttccaccaaaatgctataaagcaactatctggattaagaacttataaaatgctagaaaactcggaacctagtccttagtacaaaaaggtcttacatttgaccataaagctgaacacatcaaatattaacactatagagtagttcaaagctttgagacagttgctgggtttgggggcctagccatcctaagtagtgcttcttgagtcaatgatacaacaagctgcaaatcaacacatacaagtatgatgattgggttggtaacactaaaatgggatttggcggaaaaaggaaaagcaactcaagataaaaaagggaaggaacaacaagataaagaaaaagaagggtaaactaaatacctctccctttctgttgaacatttggcccgaaacaaagcctcgggtgacactggctgtaggactaacaatctgcatgacaatgattccattaacgattttatttcattaagaaagtgaaagacaaatttcaatgctaattcatacgtgaaaatagagatcatcttaaacctaccacaaacaataaccagtcatcagccctaagacgccggtggaaccacatcctggaaaacacgaaggaaagagtaaataatgtcaaaacgaagtttgggttgtgggactgtgacccacagacgata

SEQ ID NO: 8940 - DNA, 638 bp, Gossypium hirsutum
gatgcagaaagaagttgagagggaggttaaagtttaacatttctgctagtacttcattgtcagagaagaaactgattgcaaaagattcaaatcttaagaggtttctatctgctaatagggatatatttgatgatatggaaaagaatgaaggcaaggcttcccttatggtaagacctaaggttgtaaagaaagcaagggctgaaggggtatggagaaggtcagaagcaaaacaagctctgagagatagaatagtgaatctgctgaaagcagctggttggaaaattgattacaggcctaggattaagaaagagtacaatgatgcagtgtatgttaatcctgaaggaaagactcactggtcagtcaccttggcctacagggtgcttaaaagctattatgagaatggcggttgtgactctaaagttggtccaaatgatttcatatttactcccattcctgaagaagaacttagcatcctaaaaagagtagttctaaagagaagggtcagaaagaagatgccaaaaggggaagatgatgataaagtggatgatggacaagttcaaaataaaatgaataatcaaaaaaggaaatggaaggacattgagaaaaagaaaaagaaaaaacagaaggtgctcaaagag

SEQ ID NO: 8941 - DNA, 430 bp, Gossypium hirsutum
tattctggtattagtccatatactttaagaaagttgtggatttcatttgtgtactctaatttggttatttttagttaccataattttaaaattttaaaattttagtctttatcaaatgataattgttaaatttattaagtcctactatttctctgttggaacatttttaaatatttatagtattgcaataactataaatgaatgtgtgtaattaatcaaaagatgaatattttggtcattggtcaaaagttatatcatttaatttttgaaaaagaattatatctattcaaacaatattacttaaatagttataaaaaattaaatgaataattattattatttatttattcataaagacacctattaaaagatgtctttacgaaaagacataaaaattcctataaataggaatgagattttatttggaaac

SEQ ID NO: 8942 - DNA, 609 bp, Gossypium hirsutum
gggcttcaattttggatagtcttatgatcgaagggtatcatgttgtatagaagtaccttgggcttatgcaccaactttagggaatcctttgttgtttcatttttgtacctgaattatgtgaatctcatttttttaaccccgggggttctcaaatccgtataatccctgcttttggtctatttggggtgtaattgcttacagagaaagagagagagagagagatacagagagcaagaaacagtatatctaagttttctagttgtggaattttgaagctatttgtttacctttaatggaaatatattcttgttctttttttggtctcttgtatgtcctctcttatttctatgttctgtaacatacaacttggatgactactttatggtgaactgctttcgttcgtcgaactaagacccaaaaataacaacttggttcgaaaaatgttgtataagagaagcattagatctttgtgtaatttttgtttcaatatttgccagattatgttagtaacagaaacaggaattttaaggaggtttttgtctgaaaatgaggcaaaggtgaagctgataattgcagatgtttcgtactttcattagccatcgaaattag

SEQ ID NO: 8943 - DNA, 580 bp, Gossypium hirsutum
gtatgagtaattaatactattttctattattatctttatagtggataagatgtaatatttgaatggaacgctagcgctttgaataaatatttcttatatattcttttcctttaacatctacagattgctccaatttatcttatatcatgcatgaagcacgggatgattctgttacagatattattgtccaagcaacctgttcaagataatcagttattgctgaaggtcattgattcattttttttgatgcctctcatctttgccattatcattttgcttttccctattgtgttggatttcaggggcttataaagtagtttattgatgatcaaattctttgttgtatgcagagcatagagatttgccgcctttatgaactccatagtgtaacttcaaatattatgaaggtataagcatccatgaaggcataatattattttggtgatggaaaacatataaagcttggcatttgtttttggaaacagagtttcataaccggtagagaaatattttgttagacatgatgattgaatgtgttagcatgtcagtcaaagattctcactgtccatgtttagatgct

SEQ ID NO: 8944 - DNA, 618 bp, Gossypium hirsutum
attaatttcttcttttataagaatgtttgatgccactatttttatcactaatttggatatcctttgtcatgttgacagattccttgtactgcggaccttttaaccaattgtggcatggaattagccttaatggttcagcctctggcccctcttcacccatctgaagagcccattccggtatttcattatttcttctgaaattttatgtgctatttctggtattttctgtagctcaggttttttttttattcattcttcagaggattaaatagaaagccattatttatttctcttatgaaaagtttcatggcacaaataccatacaaaaaatttctcacgaacaactagggactgttgaattaagttaaaagacctcccattctcatcaattattgaaaatttattgatgcagtgaattttggtacttgtgcatgacaggacctccacattgttctctggaaggacttcttgccttttaggctatttgtgtttgtatatacttgcatgttggttgttgacttgtctcatgggtgattttatctccacctttcttgtttgccatgaaagcttttatcctaaagtcttacctaacctcaaatcttacaatgaaactctctt

SEQ ID NO: 8945 - DNA, 631 bp, Gossypium hirsutum
ctggaagtagaaagaaaggacatctcctggtttagccttgttcaccatcttattaagtgcatccttaatgtttgcaccagtatgcggaaccggcgaccctggcacatcgatgagcacattaacatcgcttaccttaaacccaaagtttcaggatcacatctgttatggctttcacatcattgatgcatccatgcaagctgaactgggtcttggggtagttgcatcccaccagaacagctctcttcgtacccttacccatcttgctttggtaatttgactattttgtgttgcttgtactgttgtattaatgtgcttccactttctcactaagaacctatatatatagacactaatttacagcatgagtactgaccataaagttgacgacatgtaggtaggtaggtaggtacaacacttttgtttgtcttttgtgtttttggaaatgcatgcgaaatccatgcatatgcaaacattttgagcaaggaatttgcatatcagtactgcataaaagagtgactctgttgttatgcaattatttgataatattgaatgtgaaataaattcaaaataaaagagtgggtcgttaatccgaattgggaggaggacaggtgttgtgatggacaaagaggaa

SEQ ID NO: 8946 - DNA, 590 bp, Gossypium hirsutum
atgatgagaactgctggcaccttttggacaatgagttatgccgacaaggtgagtttgaaggtgatatcaataatgaagacgtaaaccatgggagtttggatgatgaactgtatccaccaggggggcttgatagcaacagttctgctggagctcagcttgatactgaaatggctgttgaagatctgactttggagattgtaggcaagacaatttctcgagaggcccctaatccgattcatacctcaaaagaggaatcaaattatcattttgacaggaatgctgataaaattaaaagtgaagccatgaatgttgagaagatatcagtagttgaagagaatgcaaatctggaggaagtcaatagaaagttacctgaaggtctttcaaagatcgaagatccttcctttaagagtgagtcaataacaagttttcaagagatccctgcccagctgaatacccaaaaagaggaaccagactctcaaaatgacaaggttgctgataatattaaaagcgaaatcataaatgtagacaagaaattggtgcccaaagaagatctgcagcaggaagtaggtgctggaaagtaccaaaagctt

SEQ ID NO: 8947 - DNA, 659 bp, Gossypium hirsutum
tgaaagtgatcaggtgagtaatagtagacacaaggtagaatgtgtaccaatatttactgaagcaagttttgcataagtgtacaacatgttaaatgcacaagaaacaaaaacatatagttagacaagcctagtaacagttacaactgttggcatgggaattgttgaaatagcattattgccttacctatgaacgcaccattaagcactgtatagattaaacagcatatttcttttacttttaagtaacttagtggtctactttcataattctatacaagggaataaaagggaaacaacaatgaacccatagtcttcatctggtccgtacagttgcagtttaagttttaagagtggtgtgtactatatgtgatcctggatattccttcgattggatgtttctacataactgattatataaatgagcaaacagttacttattcctcgatagttcaagctttttgtctgaatcaaagctcttggtatgatctgattagatgggggtgataaaagcggttcagaatcttttggatatatcagaagtgacagcattgtgggtttagtgaattcacatatttcttcttaacctaataagcaccgaaaagcaatgccattttctatgaattcttcatcatcaagattttccttgggtttctccagct

SEQ ID NO: 8948 - DNA, 642 bp, Gossypium hirsutum
  misc_feature (12)..(12): n is a, c, g, or t
gaatcctagtancatttaataactaaaacaaagctaaaaatatggagtcagttaatataattaatctctatatatcagagctactttgaatattttatacctcaagatcatgtgtagtgtcataaaatggagcatctgtgactcccccaacattttcagcaaaaccttcatatgcctgaaccatttgtaaagatccaggctgcagttgaaggaaaccatcacatccataaccatcatcttctactcctttctgtaaaagagaagaaaagacagtgaaatgagtatacatggtactatttcccaccttgatttaggacatagaaatcaagcattacctgaggattcaagtttttacttccttgttcctgaaaagaaagatcaaacatatcagaatcaatttgttggcaaccatcagatatcccttgaccaccatgttgatcttcttttatcctcaatggttcaatgtcaaaggtttcaaggcctttttcactctgcctcgacagcaattgaactgcatcagcttctctccctgagtaatgtttgtcaacagattctaaattctttgagcatggcaaaccatttgctgatgattcaggcacattattagattgtttcaagtttaggttaactgaatatgcagag

SEQ ID NO: 8949 - DNA, 660 bp, Gossypium hirsutum
gagggtttttagggttcagacttgtaccaatagttgtgttggtagaaggtgcagggtagaccaaaaattgctcattgacttggttgtattggtagaaatccccctaagtatcggttgaagtctgatgcttggcttgaaatgctctgacttacttctaccggtagaactcaacccaaatatcaatacaactggagttgtatcggtagaagtctagaagaaatcttggggtggtctctgacttggttctactgatacttctatgcacttgtatcggtagaagtgtcccaaagttgtaaaatttgacttgaaacaatatttttctaaggcattttataactttaatcatttgatgagtttacaaacacttgaaaataaatttacaagagcttatattaattgattgcaaatttggccaaggagaatttataatttgactttgttatatcaaaacatttgaaaaactagggctaacatatagatatatgaatgcttatccctctggtagcagttgtgtcttttagttggcatatatctgtgtttttattaatacttttaaaattcatctgtagtagctataaagaatgatattattgtaaatagtctttctatttatcaggaaaagaatgaaatcgttcagagccaattggagctaaattcaaa

SEQ ID NO: 8950 - DNA, 689 bp, Gossypium hirsutum
  misc_feature (572)..(573): n is a, c, g, or t
  misc_feature (575)..(576): n is a, c, g, or t
  misc_feature (578)..(578): n is a, c, g, or t
  misc_feature (583)..(585): n is a, c, g, or t
  misc_feature (601)..(601): n is a, c, g, or t
  misc_feature (604)..(604): n is a, c, g, or t
  misc_feature (606)..(608): n is a, c, g, or t
  misc_feature (610)..(612): n is a, c, g, or t
  misc_feature (616)..(616): n is a, c, g, or t
  misc_feature (618)..(630): n is a, c, g, or t
  misc_feature (634)..(642): n is a, c, g, or t
  misc_feature (645)..(645): n is a, c, g, or t
  misc_feature (647)..(651): n is a, c, g, or t
  misc_feature (653)..(653): n is a, c, g, or t
  misc_feature (663)..(675): n is a, c, g, or t
  misc_feature (677)..(686): n is a, c, g, or t
tcagtgtgacggcaatggtgctacaccgccggcgtctctttttgagataacactggggtcgggaaatgaacaagatttttacgatgttagccttgtggatggctataatttgcctatttttgctgcacctcgtggcgttcatggctcatgcaatgccactggctgttcttctgatcttaatctgcgtaagcactataagaaactaacttttattattcgcacaacttttctttttcctttttgtgatttgatactgattccttttgttttgattaactttgccctccattttagttaaaatttagtctacagtccacgaatgtttcactgccaacgtgatgaaaatgtatatggattatcacatgaactttcattaacattttaatagcacaaatagtttttttttttaaattgtttaactaaatattgaaaatcaacaatcaaagtgataaaaaattataactaaaactgataaaatgataaatgttaagggttaaattattattattattatgcttttattaattgattgtaataaatcattgttcttaaaaatacccccaaaaatttannanntntatannntcttttttttttttgnaanannngnnncccnannnnnnnnnnnnngggnnnnnnnnnaanannnnnanattttttttnnnnnnnnnnnnntnnnnnnnnnnaaa

SEQ ID NO: 8951 - DNA, 636 bp, Gossypium hirsutum
gatttctggttgtatatttgctttagtttttattgtcatttttggtagttcttctgtctgtatgcttctgtcctctactatgatggaaaagcatggttgaaaaaactgactttagagcggttggtcagattggttcaaccggcaaccaatcacttgtctggttctgtgctatttaaggaactgagggttccttgaaccagagctggttcaatctgtaaaaaaccaggaaaaaatttagttgatcttttataatttatttcaaaaatctttttgtgagttatggaatttaaacccatagcctcatagaattatattaaagaccttagggtaactaaatgcatatttttttgtttattataaacaatgtttgatatcttttaatattaaatctaatgtttaaatgttaaaaaaaaaaattgaattgcctggtttaggtgcttgaaccctaaattggagctctgctggtctgacctcctattcgttcttttatatttaacataccttgcggaaatgtgtctttcagctgctcatctttgatatactaatttcaaagggaaaatgacttgtttacaaaagcctgcatcatgatttttctctatacaaatttcaaaggaaaaggttaaacagtaagttgtt

SEQ ID NO: 8952 - DNA, 334 bp, Gossypium hirsutum
gacgaggagccccgccgaagatcggtggccggaaaccgaatggattcttgagttctagggtgcttctcattaatttttgaaggtttttgggtcgttttaaccccaaatccgggctctactcgagaagagaagcgaaaaaaggcctcggaagattttccggccaccgtggacggcggcgccgccgtcggtggccggtgaccggcgtgacggttgatggccggtccgatgaccggaggaggggaagggttgagagagttgagagccttctctctattttgaaaaatgaatgtagggtggtagggtgatgttttaactctttttttgttgttttttt

SEQ ID NO: 8953 - DNA, 647 bp, Gossypium hirsutum
catttagtgttggacctactgtgtttgtgtgtgaggcttaacaattaagacgtcggagttcggtatgtatgaaataaatgatgtaggctcggatgaaaagaacagaaacgagaagtgcttatatattgccaagttcattggcaaaaaaggtttctaaaattgttgtgacatgtctggatcatgtcgtctttgtaaatttttctgtctaagccgacgcaggtataaaaatacatcaatgaccttgttgtctttcatgtctttcgagagtgattaagggaacaagaattataaaagtcagaataagaagttaagatctgaggtgtttttttcttgttttatcatcgtatggcggagaatccaaaagctgttactggaacctttttcccttttgatatcgtcgaagctttttattttttatcaaaagatattgtccaagagtttattatatgataaattaataattcatttacaccttgtttgcctttaaaatataatataacctgtcaatcacccttttatttttggtaattactttcactttaattactcattttatatgtttgtcatcattttatataaattcttaagtgatgacatagtacaatcttagaatctcacgtacagtaattcaataattggacaagtgg

SEQ ID NO: 8954 - DNA, 488 bp, Gossypium hirsutum
  misc_feature (166)..(166): n is a, c, g, or t
  misc_feature (195)..(197): n is a, c, g, or t
  misc_feature (298)..(300): n is a, c, g, or t
  misc_feature (387)..(387): n is a, c, g, or t
  misc_feature (395)..(397): n is a, c, g, or t
  misc_feature (419)..(420): n is a, c, g, or t
  misc_feature (431)..(447): n is a, c, g, or t
  misc_feature (450)..(454): n is a, c, g, or t
  misc_feature (465)..(467): n is a, c, g, or t
  misc_feature (474)..(475): n is a, c, g, or t
  misc_feature (477)..(479): n is a, c, g, or t
cctgtaagatgagcctcacctcataatatgttaccccacattaatcctgaggcttttggaggggacctttctatttcctggcaagtcgtcagcttttacatcaacgtaatttgctcatgtatttgttttattctatttcccccactgtagtagaaaataactttanttggaatagacggaaaaaaaagtaggctnnnggaaaaagaattataaaaaatgaactatccctaaaaatctctttttaccctaaaatgttgatgtcaaaattagccgcttagttccaaaattgctaatatgnnncaaggattctaaaaagagtaaaagtatctcaaatgaaaattagtaaatcgaattaaaatttaataaagggaatcaaactgaatttgnatatacgnnntgaaactggatttaaaccttgnnactccctaatnnnnnnnnnnnnnnnnnccnnnnngatgacccggnnncactcanntnnntcgaggtag

SEQ ID NO: 8955 - DNA, 636 bp, Gossypium hirsutum
gtgtaaagcatctcattttcacggtatatgatcaaaccataattctccatacctccaccaaaaaattcagggacagcaaccatatctagcttagggagtggataaggcattgagaagtacctattaaaggtaaaatctccgtgataagtgttaaaaaccagttcaaaacaataatgatattgaaaattgagtttaacattccggttgcagacaatgaccagacactaacagctaacaagtaaaaaaatcattgacaaaaggatagccaccaagtggaagcaggttcctcattatatatccactgttaggtcagtgtttgaggagatggttgaattgttcaaaaccacaaagaatatgaatctaagacatttatagtgcctttgtgttttggcactgagattgctgggtggaaaagcttcactctcttttagatatgtgactttatcttacagaccctcagacattgtctatgaaaagtttaaagttcttcaaaagatcatatttttaaagcaattcctggactgaggtaggtgtagaaccaaaaattccaataaaataatccttcttttttcattgcttgcttatttgattactgaagtctatgtatcttgaaaggaaaggaaatgatgaccagtg

SEQ ID NO: 8956 - DNA, 629 bp, Gossypium hirsutum
aaagaaggaaaagggaataaattatgaaaggtggaagggaatgaaacaaaagaaattgattggaggaagggtatgatcaaaggaaattatggagagagaaagagtaagttttagaaagaaactttttttttattttttacttttttcggaaagaatgtgccatgctgttatttttattcgctaaaccttatttttagcatttgtttaataaaggactaaattcataaggttttggtatttaattgaaaaaaaaattaggtatcaaaataatatatatattttaaaacccaaatcatgaattaagcttttactaatttatttaattatgtcttagtttgacgaggtttgccatacaaccgaaatattttagtattatcatgaaacctatatcttttaagattttaatttattaatcgaattttgattttcaaagttctattattaaattttatgctattaagagatttgtaaaattcgttattcaagtatctattcaatagattaagtaagtaacctagtattctttttgtcgaaaccatttttattttgaaaaacggggatcgactttaaaacgagatatggagtcaccatcaatcctttttgtttaggtgtgattgggtcaccttatg

SEQ ID NO: 8957 - DNA, 776 bp, Gossypium hirsutum
  misc_feature (678)..(710): n is a, c, g, or t
  misc_feature (712)..(720): n is a, c, g, or t
  misc_feature (722)..(773): n is a, c, g, or t
cgaagagatcaattaaagcatccctgttttcatcccattcttccatgattactggctttatttttgaccagttctctaaaatatcttcaacagttagtccttctgcaaccttacaaattgaaccattggctttaggtccagaccaatattatagaaagaaatctaattaagaataaagtaaaaatgaatcatagtggatcttagatactccatatcgaaaatatagcttcaaggtagagtcatgggcattatttatacacccaccgaagttttccgaatcgaaggtaatctactctccaccaacaacctcacaagtagcagattctcataccccgtttcgaccacaggtcgcacctgtgacattataagacattagtttcaacatagcaatctttcataaattccaatttttagcttagacattaactatcgcccaaaaaatgaatagcctttttaagtttcaatatacaatactgtgtagcttatctcttttcagttttacaggttcttcaagaagttgtggagactgcaaggtgaagtgccaaaagacagcttctcttaagcttgatacctatgattttttcccctttcttctgagatgtgtactactgttaaactatgcagcatagcatgtgaaatataggctaccaaatttctgtttggattacatggacaagnnnnnnnnnnnnnnnnnnnnnnnnnnnnnnnnncnnnnnnnnncnnnnnnnnnnnnnnnnnnnnnnnnnnnnnnnnnnnnnnnnnnnnnnnnnnnnccc

SEQ ID NO: 8958 - DNA, 645 bp, Gossypium hirsutum
catatgggaattggtagagcaaaagaagggtaattacatccattatactgcaagtataagttctttctgggtatactttcagatgttttaacctgaccatatctctaacagtttcctttctttttaggttctcggtgtttggaatcatgaacaaggtttgtaaagttactttaattttcatattattgtatcttttctcacagtggaataattcactttctctttaaactcagtgtgtgacaccaatggggagacgtcttttgaggtactcgatcgaactcgagaaatctgttaaattattgctgcttatattatatctaatctaatccaaacacttggacaatggttttctttgctatagaaactggttcctcaggccaatactcgacctggaaaacttgaacaatcgtctcaatgtcgtatccctttattcttcaatcatatctagaaagtgcttgcatttcctgaataaaaaattcattatggtggcatttcaaacacataatatcagaacctccactatcgtgaggaatcctatatatggtcttccagctataatcttaatctgttattatcaaaactcatagcctttaacaagattaagatatcattctttctttcttccgaagaactgatggtttctct

SEQ ID NO: 8959 - DNA, 536 bp, Gossypium hirsutum
atctgagttgagcttaggattctaataacaatatttattttttaagttcaaaattcaatttaaaataaaaactaaattgttgaaatcattcgattaagatcttttagaagaatctcttgaattttatttcttttggcatctattacaagaggtgggttggtattctattaacttaattatccttataataaacaacttttctcattaactaccaatttttttttctaaattttgacagaaaaagtacaattctatcacactaattacccccgttacttttgttaataaaatattttagccgattacatgggacaagtgatactttttatttaaaataaataaaagttagattaaattaaaaataataagtaatgactgataatggaagattataagcgggcaggaaaaaatatacaaaataatgtatgcctatatttatattaaaataatacatcaaacacgaaaatacataaataataataatacaaacacgattcacaatgcatattggagacgaaggatgaggagttgttccc

SEQ ID NO: 8960 - DNA, 598 bp, Gossypium hirsutum
gattagattgtaatggtggaactcaaactcgaactttgagtgggcatttgatgttttcctatgttatgattttaatggaatgtgatcgatgaaaatctcattattgaaaaagttactttacagtgttttatatacattggaaaatgtttatcagaatcctaaaaaagttacaacgatactttacaaaattacattattaaataaaatataatattaatgtatttcaatattttcaataaattttattattaacaaatatttgaattaaatatttaataatattttcaacaatctttattattaacaaatatttgaattaatatacaatgtatggttttctcatactttggttgaattcatagcataaatacatctgaaaaataactagtatattaattgaagattgtgaagatgtaaaatatacaagatttttcttgttacattgtaagcataaattcaaatatatacatatatggcttgaaattgttatcatactaaaatttgatatcgataaaaaatatattttaaaaaataaactgatacaaaaaacacttaagaaaaaacaaaataaataaataaatgacccctaaatgaatcg

SEQ ID NO: 8961 - DNA, 598 bp, Gossypium hirsutum
ttaatggcaccatatatactggttgtacaacaaacaaaatgagatttgatatatatatatacatacttatcatttctcaacattgcataactttgtgtaagtacctatgaatgatattaccaaaataaaacataaaacttgaaaagataatcagaaatgagaaatgctaattgtcaattgtttagctataaaaagagattttctagggtcccaagacggatttccaaatatttcgggtaaagaagtagtagcttcatacttgagatatccacaaagcatgttctttggccacaggttgactctcccatgcatggggatcagggtatgtggtgaaagctccaaaaatttgtaacttgtttggaagtattcctacataaaaagtagaaatttcttttaggaacaatgttataaaaaagcctcaagtagaagaaaagcccctatactctaaacaactcctgagctattctacatttcttaagtaagcccctatacttttatagtaacaagatgggccatttcttccagttgtacccaaataacttcctatttcaaacaaaagattgatttatattttgggcttatttgtgctatgtactcc

SEQ ID NO: 8962 - DNA, 636 bp, Gossypium hirsutum
ttcaagtccatggttcaagatatttcggattgactcaaaggggacgatcattcacctcactgctagtggaaacggtggggaaaatagcaacaatgaaacataaggaacaactactggtttcaaaagtttttacctccggaatgaaatcaataaggccttctggtaaaattattacaccataattaaatcctagttccatgcgtttgcagattatatctgcaatataatttgtaacattcttcattgtcaacttcttggcagcaacctgcatcaatggttaaaacgtttgtcaaaactatgaatagggagcaagcattctagaaagaaatgattggaattgagagacgtgtcatgaaaatctatggaaaccacctatagtaaaattatactagcagtttctataatgttaatactagtatgatgcagaaaagtgttctatgtaactgcatagagactattcttagttttgaaactgaaacaatggagaacatcagattaagatacctcttctcctataatagcaatgttcgggtgagtctgcaaagcacactccaatgtaatgtgagaagctgcacgtcccattagccttatgactgacaaaacagataattaggaaccttgcaaccaatcactgac

SEQ ID NO: 8963 - DNA, 555 bp, Gossypium hirsutum
atttctttggtcagtggtgtttcttttttaatttttttttcgaaaatctaatattgaactttgaattgcttttccgattcgtcattgggatctccgtttatgattgccctttgagctgcacagatctcgttctggctttgttttttttctttaaattttatatttttcatgttgaattatatactgtcaaattgaattggttttgataggtcaatttgggggttaattcagattttaaaaattttgaatcattttgggttctctctttttctttttccttttattttttttccggttgggttatctttaggaaacttaggcgtactttttcggttcattttggatttgggttatttgagtttgattttttttaatgttaggatgatttcagattcgggtaattttgggattgggttgtgctagttcggctttttgcctttttgtcaggttgggttggtttggattcggttaattgggttgggttttgattagggtcaaaattgacattaaattataaattgttgagggggatcggcgcctctgcgagtattcctc

SEQ ID NO: 8964 - DNA, 546 bp, Gossypium hirsutum
atttctataagtatgcttacacgtaattgaaagaaaatgtaattattaaaataataattatattttttaaaaatataaaaaaattataattttctagagtatttaactgatagagtataattccactataagtctttacgttatgtttgatatattacacattgtaattacataattgataatataaagaaatattaattactataaaaaattattagtatgataaaaacaattctaaacaagtaacaaaaattaaaattaaattatcatatgcattatgttagtctaaaaaggtagttaataatacgattacagataaaaaatagtaagaaaacaaaacctcatatgcaattttttttaattgttctagtttatatttgttgggtttttctctttttaatgtttagtatatgttcattatcattatctatcggtctttggtcaagtttatcatcatctaaatttgaatttgtataattaaattgaagtttagtatatatcattttaattccatctataattgaaattatgaaatatgcaacatgc

SEQ ID NO: 8965 - DNA, 624 bp, Gossypium hirsutum
cttgattccatcaaaagacaagctcaagtctttgcaatgctccaaggatcttcctttagccacccgaatttggtggcttctcttactaattccaccaacagacacactcaactccttgcattgttcctcggcgttgcctttagcaatctgaattgggtccttctctaacccttcaaaactctcatttttccaagtttttctcttcccgacaccgccgacaacaggttggcctttcttcaagctcaatcttttagtaccaccaacaccattactgttttcttcagtaatggtgccagcattgaaaaccttaattccatctttaacttcatcactcttcattctagtttcccagacagagcctgcaacaacactgcccttagcttcacctcttctgaaactcaaatccatctctttctctcctatttatgttgccccgttttaccctttctcacggtaatcgagtgctaatgcgacatggacgtaaataattggataacaggagactttacgatgaagaaatggaggttggtgggttggaacattaaaatcttcccctttgtaaacaaaagggggattggggtttctttatccttttcctttctctctctctctctctctccctct

SEQ ID NO: 8966 - DNA, 683 bp, Gossypium hirsutum
caatatttacttcaacaaaaattttattatttttggactgattaaagaagaatattggcatataatgctaatgttggatatcacgataaaagtaaagaatccactcaactattaaaaaaagataactgaaatggagatctacaatttttcatcacacataattgaagaaataaaaaatacatgagaaaagtacttgggaagaaaagcaacaagaaagcgatgtgtgaaagcaaccatatctatgtccaaacaaaaatagaccaaacaaaaatagatctaataatgccgaaataaaagaaaagcaataagaaaacaaggtgtgaaaccaaccacatctatgtccagaaaaaaaaggaagcaacatgtaaataaccacatcatgacaaaaaatatcattaaatcaaaaatgagatattatccttatcagaaaaattgtacgggattaagatgaaattaaatagaatttggaatttctcctataaaagtagatgaaggaagcctaagaagggcattaaagttagttttgaaatattcctctaagttacttctcatccaccatcctccactattttgtaaaacctttcctttactactagtttcattctgtaaatttgtattaccatttattgtctccataatctccttataactaaagatttaatgactagtttctatttcggcat

SEQ ID NO: 8967 - DNA, 575 bp, Gossypium hirsutum
tgggtcaccattgttagaagagacattccaaagcatcacaggaatttcactaattttcaccgaaagcaactcattgattctaagagatttgctgaaaactgtcagcgagaggtatgtatgttgttttatgtgacctcaagagcactgtaggatagtagggctcctgtgatgttatctcttgaagctttagtgacaatctaatttcctatccaggtgaaattgaaggtgagtagatcactcaaatttatgcggggtgctgcacttcgcacaaggaaattggctagagatatgctgttgttttggaagcgagttgacaaggagatggtatttttcttctccctttctaaagcactatgctctgtgaatgtccttcaattttaagaatggaagtcattttgttaattgcatatttgtaatttatttttgaaaggatgaccaagaattggccaattatcagtggtggaaatatgaaagggcttattggatggttcattttgatagaccagataataacgagggtagttgggttgggtactttttgctactagtatttatgattgtgtatttgtgtgcct

SEQ ID NO: 8968 - DNA, 636 bp, Gossypium hirsutum
aggagaagaaaaatcagaattccctagagaagatgctacatgagacattcttcaagcaccaagtgactgagtatgagaactctcaaagagacggttatcattgactataagaagtatagtctgttgatgcaaaccttgtgtagaagttactaaagggcaaaagccattttgaaacggaaaactcatatcatcaaaccgaacatggtgagagagatatacccgactgtctgtagctaagcatcgataccgcttaacattgggagcactcccaagaaaaacacacatttgagaccgaaactggaacttgtgcttattgaaaggtctcaaatcagggaagcaaacacagccaaatacccgaagtagctcatagttaggcttttgcttatgaagagcctcataaggactcacattatgaagaactgttgtaggtagtctgtttttcaaaaaaacagcatgtgcaaacgcaaaataccagaacttcagaggaatgccagattgggctagaagagacaatcccatgtcgacaatttgtcgatgttttctttcagcagtaccattttgttcggaagtgtagggacaggtaaccctatgatgtattcccaatcgagagagctcccttggtcacacacgatacta

SEQ ID NO: 8969 - DNA, 557 bp, Gossypium hirsutum
  misc_feature (546)..(546): n is a, c, g, or t
  misc_feature (548)..(548): n is a, c, g, or t
gtctccggtgctttgattaccctgaactatatgaaggttagaaactatcttacagtacagtctatatccacattgcacaaggaaatatcatttaaggccatgtaatataaaacatcacagaatgactgctatgaatatccttactaatccaccagtgcaagatgtgacagcatgctcatcccatgctagtggaattccatcataacggttatacagtcctccatgtccttgagtagttccaatacgatgattgattactatgtccgccattgctctaactttgtacttcttcagtttttggagcaaagctttcaattgctgctcagagccatatgaagaactgagtaaatataggttctggggaagataccctgcaataagacgaggaaaacagatacaaatatatacatcatggtgaggcatgcgcttatctgctaagaaactagctcatgctttgaaaaaaatttctctctaaccttccggtgaaaaagaattaattgctggtggcaaccatacagatgtaaacccagattttgcaatgtcagnanctttctttt

SEQ ID NO: 8970 - DNA, 677 bp, Gossypium hirsutum
  misc_feature (643)..(646): n is a, c, g, or t
  misc_feature (649)..(671): n is a, c, g, or t
ttcggttcatttgctggatcctccaagatatctcccttcaatcccaagaaagataaatattggagagagataaaagagaatcacgttaagtaaatcagacaaataagacttagttgccaaacctcgtggctcaagtgccataagttcctgtctctgctgtatattgatttctttgtcactggaacaggcacattatgcttcttagcatattcaatagcatcttctctccctgtaatatcccattctctccaaggagccacaacgtttaattccggatttagagcaaagaaggtgagctcaaaccgaacctggaagaataaatatgctagtcaatttatgaaagtaaagtcatgtttgatgaaataagagagttattcatagctaaagctttggttgaaaggcatgcctgatcatttcctttccctgtgcagccatgagaaacggcatcggccccaacctctctagcaacatccaccatggcctgtcataataagcacattatcacaaaaggtaaagaaaatacataaaagaaaatgatgctagtatcaaaagctttgcttgatagagtggaaagaaaattagagatgaaatattgaaggagaaaaactgggtaaaagtacaatggaagcccttgtactaagannnnaannnnnnnnnnnnnnnnnnnnnnntttttt

SEQ ID NO: 8971 - DNA, 618 bp, Gossypium hirsutum
caaatactgtgactgacacaacttgattttggaatgtggaaataatggaatggaaggaaaagtaaaagggaggtctttatcaacaatattttaatattattttttaaataataatattttaaaacaaaaaggtaaaagagaaaaagaaagaatcaaacaaaaacaaaggaagagagaatcatgaaggtgaccactggcttaaactagccactctggcacccactattcttgatttaatgctattataattttttttacatttttaattattaataatcgattgatatgaatattattgttaatataaggaaacgtagatttgagtgtactaaaatatattatcttcttttttacaaattgaaaaaagaaactataggtaattctaaacatgtaacgcagtttgaactcttgttaatactttaataatatttgttgtgatttaaatagttttgaagatatgggtgggatttgtgtttgttattaattgaatttattaatgaattagattagatgattatctgttaatttcaagagtttattttcttttcatttctttcataaagcaaagaaagtgggtccaggtgggttttgtctggctgattagtgtttgtgaaaaaa

SEQ ID NO: 8972 - DNA, 666 bp, Gossypium hirsutum
ctcctcgtttcttatttttgagatttttgcatgcttgtgtctcgaggatatgttacttattttgtacttttgctagtagaactaaagcaatatattctcatttgtttgtagttttctctttccaatcttgcttaccatcttgagtgtgtttgcagattgtcaaactttcttagtgactatgcacattaatgttcacagcatttattagagtgtgagttcctcccatgcctttgcttttcttcttttaacctactttataattgaaaattctccaattttgctccaatattgcactcatctaactatttgtgtgtatatatatgcatgtagctatgtatttatgcttatgatatccactaatatagctatttacacatcatgttcaaattatgtaaaacaagtatgatttagatattatataaatcttaaaatatatatttatatccaatactcctactcaaattacgttaacttagataataattgcagctagtgggcaaaaagcttgacattctatttgaaaaatgatattttaaaactatatacaattgttatcataaaaatgttttagggtatcatatttgaattgaaaccatttttataggttgagatagaaaaaaaaatctgatggtataatattctagcttcaagcatgaaggatatact

SEQ ID NO: 8973 - DNA, 386 bp, Gossypium hirsutum
gtaggctgtgttcatgcaatgcttgcagaaggtatacaacccaatattgtttcatataacacactaatggctgtatatgcttcacatggaatgagtaaagaggcagctgctgtttttgatcagataaaacaaaatggatttcgtccagatgttgtttcttatacttctttacttaatgcttatggaagatcgcagctacctgaaaaagctagagaaatttttgatatgatgaagagaaacaattgtaaacctaatcttgtaatttataatgcattgattgatgcctatggatccaatggtttattacctgaggctgtagaagtcttgcgtcaaatggagcaagatgggattaagccaaacattgtctcaatttgcacccttttagc

SEQ ID NO: 8974 - DNA, 632 bp, Gossypium hirsutum
atactgcaaggaagcagttagatagcagaagagtttcaccacagtgtctctaatctattatagctttagatctcatttaggccaatgcagaagctatatttctgtattaatcctcggctgtcatgaaataattttctctatttgtggattcaacagagtatactttattaatgtatgagtatttttactgtatataccaggtatgttttttgcctggtactcttgcgcttggtgtcacaaaaggcctcacaaaagagaaagcaatgaaagacaaccttcttacatttgaagacctggaaaacctgaaacttgcagaagatttaaccaagacatgttttgagatgtattcagtaacttccaccggtctggctcctgaaattgcatacttccatactaaggttggtttcagtttaacttgtttctcgaaagcagtgacttaattttcatatgcaccaaaaaggttcatatttgcttattcatctatgtatgaacacacttctttttgcttatagtaatgatctgctgacttgatctgattaaaacaggattattttgagagtggtcttgatggcggaaataagagttcagaatatgtaaatgacataataatcaaacatgcagaccgtcacaat

SEQ ID NO: 8975 - DNA, 629 bp, Gossypium hirsutum
  misc_feature (51)..(53): n is a, c, g, or t
atgggttcttttaggatttgtcatttgttaaattcagagttatctccagannnatgtaggatgaattcgaaataaatttgtttggatcaaaagattaacaaatctaatggcactttacatgaatattcaggaacatacagaaaagcagacaaagattttatcataccgcaaatgccagatagttcctaaaagagtagttagttatatgaggcaggcccataaaaggttatcatagccaataatggtaaggccaaatcaaatgtcagccccctggcctggcccataaggcaagcagccgaaaaccctacaagaagaaataagaaattcgatcggctatcgctctgtccctctttgttcaaacgctctttgcctctttccatctctgcctcgtctctctctatattccattcttctcttgaatctatcaaggattctatttgcgggtgttgggtttttatttatttattttaaacttttccctatccttattctgtttcagtgccttttgggtttaaaagaaatgaaaaatgagtaaggtcatagtgtgtgttagagggtgaaatgtggtgcgaaaatgaatgatccctgtgatgaaacatttagtaatcagaaagtgagaatgaagcaca

SEQ ID NO: 8976 - DNA, 665 bp, Gossypium hirsutum
caggccgagtcggtgtgggcctcctgcacttatgtttggacgtgatcaggtggacaggtgtctctccctcaagtgtcttttagtcttgtccactagacaaatggtgagatggggatgaagagtttgactttctagcaaagtcaccctggcaaggtggtcacaaccgccaatagatttgaccaagtgaggttcctctgactgcgcagggttagaatctccagctataaccccgctcagtctgatcatttggtcaaacctgttagccgtcatgacacctcgctagaaaaaccctgctgtgaccaacttgcgagagagaccctgctagaaagcatagaagttaattccgtaccagccggaatattctgttccggtaagaaaccaggacacatccaaaagttttgtttgcttcagaattcatttggtacaagttgtttcactttgttccggccaatttcgtccattctgctggaatttagggtactgggcagtaccaaaatagaaactgtttttctttatgtttttcagatttggagatgacgaggttggctctcgttactcaccatgtttcatttaaactgtgatgaaaaatgaccatgcatcagcaatcttacctgccacggatataagaggaaggaaaacaaaatagaagagaaggcaggagctat

SEQ ID NO: 8977 - DNA, 590 bp, Gossypium hirsutum
tgtcgtactttactcgaatatcgctaggaaaatactatagattccgctttcaaagtcaatccatgaagacatccaggtatgaagaggggaggcaactggtgacttttcagtaagaagtgcctataaactattacagaaagctacaattgatcctagtgtttatttacagaccgatactaaaaatttctacagaaaactatggaatttacatatgccctcaaaaatcaagattacagtatggaaaatagcgtggaattacattcccactttctccaatctgaagctgcgaaaagtgatggttgaggatcgatgttcgagatgcggtcaggaaggagaagatagtttccatgttttccatctgtgccctacagcaaaggaaagattgagtcacttaaatttttcatggatactcaacaacaggcatttggatatttggagttggcttacctgggttctcaaccaagggacaaacgaacagtgcaggggtttctgttgcgggctctggttaatctggacaaacagaaataatttattatatgaaaacagatcaaacactagctgggatatctccaaacaaataaaaagctata

SEQ ID NO: 8978 - DNA, 612 bp, Gossypium hirsutum
caaaagtttccttcatggtaaaacctattctcaacaacgcaatcaccaccatcaacctctgccgacaagcttccatacccattttcttcacttgccactgccacaagtcccccgccgattgcagcatgcatagggagtggtgggacaactacctcatattggacgacaacgttgattccgagctgttcccggcgatcggacgctgtcgaaacctgatgatcaggtggagaagaacacgtacagcggatttctagacatatgtagccaccctgttttggaacccttgatggacaccgacgatatatcccctgcacctcccactttcgttatcagcaccaggttgaagtaggattgtaggaatgtccatccatggtgggcctaatgcctccatccatgatggacctaatgccaccttaaagatcgtgatgatttgaattgggttgtaccaccttctgaagagaacaggaataattttagctcgatattccgcaatctgcaagaatgccggttcgaccaaatcgaagtgttctcaaggggactgcaccagccgccattgtcactagataaagcatagttagggggacaaaagttggtggtcgtcacggtcatggt

SEQ ID NO: 8979 - DNA, 532 bp, Gossypium hirsutum
  misc_feature (24)..(25): n is a, c, g, or t
  misc_feature (438)..(439): n is a, c, g, or t
  misc_feature (453)..(460): n is a, c, g, or t
  misc_feature (465)..(469): n is a, c, g, or t
  misc_feature (471)..(472): n is a, c, g, or t
  misc_feature (475)..(475): n is a, c, g, or t
  misc_feature (479)..(495): n is a, c, g, or t
  misc_feature (504)..(509): n is a, c, g, or t
  misc_feature (512)..(514): n is a, c, g, or t
  misc_feature (516)..(520): n is a, c, g, or t
  misc_feature (522)..(524): n is a, c, g, or t
cttttgggacttcttccctattannaggcagtagaaatttaggtagtcttgtggatgagaattctcgatacccatggatttcaattcttgtgctacgactccgtacatcatttgaattgtctgcgcctgaaaaaaaaaaaaaaagaaaactaaactaagcaataaaataatgaaatattaagcagtgactagaaataatgatgaataatctgttagtgtcaatgagtttgattttacactcttcttctccgattctaggttacataactattactgtaaagcacaatcactgtttcattctagtaataaacagttcaaaaaggggaaaaaaaaaaaaaaaaaaaaaaaaatcaaataacctgccaacagaatctctcttgcgcggaagcagaaaggggccccccctcgccccattgtgataaaaaaataaaccccgannatttttttttcccnnnnnnnntgctnnnnntnnacngggnnnnnnnnnnnnnnnnnattttcagnnnnnnaannnannnnncnnnaaaaaaaa

SEQ ID NO: 8980 - DNA, 544 bp, Gossypium hirsutum
ttttagtcctccacatgatgatctcaacaaaaggaaactagcatacaggcatcgacttatagccaacaagtataaacaagtattccatctgatgcctttcaagcctaatataaattgtgcttcctgttagttgttttgttccaccagttactgtttgtatttgcttgtcatagttattgccacacatgttgatgaagtcaaggtttagcaacaggtaccaccgttagttggaattttgtggggaattgtcacagaaaatctaatatagcttaatctgaatcatgtagtttatatcagataataccttatggtttagcaatgagggaatattaatggtaaatagatctatctcctagaggtactcactgttgggtccttatctgggatttaatatttatgtaaaaggaaatattgtgcttatatcatagggatttggtgctcgaaagcacttccttgcacgacataggcaacttaatctttatttttcagtttaaagcttcatcttttgtatttcctcatatatacctttgtttaccgacggcaa

SEQ ID NO: 8981 - DNA, 615 bp, Gossypium hirsutum
catattcctctatagtacattagcttgttcatgtttcattccaatgttattaatctctttttccctcctaaattcaagggtattgttttggatatggccaaattgcttacttttcctcttccacttttggcaagtgctcatcaacaattggctcttggtactaatctactagattattttcaatctaagtccattggttttggttcagagcaacttttatttcttagcttcttaatatgtttcctttttcagggtcttcacttggtcatggagatgataataccccattgggtcaggttgatacttgtaattctattaatggaactttcagccacatagaacccaactttaaatgaaacattaagattcctttgcttgaagggggaaagatggagatgtttctctaatctaaaacttacttttatctatatgattgatcaacaggtttgggaccaagtatttggagtgcatactgttgatgctgccaatgctgaacgctacaacccagaggaacttgcaactcaaatcacagccaaatcaaaaactgtgaaccgagttggttttattggtcttggtgcaatgggatttggaatggcaacttaccttgtgaagtca

SEQ ID NO: 8982 - DNA, 644 bp, Gossypium hirsutum
aatgagaaagtggttcccacataagtaaaaactcaagagaggacaaaattgtttatggtgttaggtcttttcaagatcttggcatttgatcttttcaagtttattttcgacaagtcagtgaagtgagagttctctatatgtttggtttgtgggacttgtttttgcagggaagagtgttgaagtgtgttgaagtgatgaaagatttttcattgatcaaagggcctgctaaagtaaatgcggatgtgggacgtctctcagcttcttcagcagtgccccaaagccccatcggggtgttggatgctgctacatgcttgagctgtaaaagtgatgaaataaaagttgtgccttgtgcaaattcttcacattcatctaccccagacattaaaaggaggaaattagaccaccaccaccacaacaactaatcatcccaactggatttcaagtcatgagatctgaatttgccatgcccccttttcacaccctttttagtccaaaagatcaatttttggttgaatgggaattttggtgtggttttgaagcacaaagagagagtgaaaatgggaatacaaaaaaaaattaagaaaaaaaataaggtgaaaaaattattatttcaagtccttccatgcttaaagcagaaaagagag

SEQ ID NO: 8983 - DNA, 655 bp, Gossypium hirsutum
aattcgatgttatcttagattgtcagacaacccaaggtttgttagtcaagttgatcatgctgtcacttgtcaaattttggctttaagctcaccctctttcttgaggactatgcttaaatttacaatttcttttgcctgtctttgtaatacagagcttgtgatgcattaagaagttgccttcctgatatgttacgcgatgccacttttagtacttgtcttcttgtaagtactgcatgtttaattcatattttaaaaaaaaaaattgctattgtcaaacccatgttatttaaatttcattctatttttcatgatagttgaaagttgtatattgatcaatttgttagacatttttaatctactcaaaattagacataaatgagggtggcttgttaaaatattaaccatataaaatgttattcacgtgcgtcaaactaatttaggtgtacacatatagaagtgagtttagggaactgtggaagttaaatgcttgtagacattaaattgactttaattgtctttgatactaataaatggaaatttgttttttgctacgtcaaatggtattaataataatactgaagaaaaatactactacctatggaagttattgatctctagtattttatgcacttaagttgatccatccttgacatat

SEQ ID NO: 8984 - DNA, 583 bp, Gossypium hirsutum
ttgaggaataatggtgtttctccctacatataattttgtgttgaatttgtcaattagtatttgtacatgtgataattgacgcattatgagattctcatctggttatttaggattgatcattgcattggttttattgaatgatcctcctagttctcatccttttagctctttagcaaatgcaagttttctggctgatgctttgtgctttaagattgttaagatagaagtaacagactcttatggaagtttaatggctaggttatgtagttcctcgcctccaggttaaaggtcatttatatttgggctgtgatagatgatagcatgtaggagaagaaaggcatttaatgggaagaggaagcttggttttgatatggcttggattggatggggtgcattaggaaaaccctcttgggataacaatatggtattaaatgggctggtatgagctgtgaaagtttaatccttgcttttgttgttttacatttaaatatgacacaaggacattgtggaatttgtaatttcacaagctggttgtaaggaccaaagattgataccagggatagctctgtgggcttggttcttt

SEQ ID NO: 8985 - DNA, 665 bp, Gossypium hirsutum
gcaggtccataaagaatataagaaactactttctactacaggctacaaaatggctccaacctataatatacttcttttaatatgaatgataaaagtgaatgcctagaaaaattattaccaatgaactacgtacttatttgtaagattgtatcaactgttccaactttacaaaaatgcttcaggaaaatgtttagaacaggaaaaagatttatgctaatctaatccttgtaacagaggtgcccagaaactccacataagtaagccagttataccagttctaccaagtccactctatcaccttcacttttttcggcttacatgtatacgtacaaacacacataaaaaagaggaatctagaaagcaacatcctctccagtcaacacgtgaatgctcaaaatggaagttaaaaagcaaaccttatttgtatctcatttgcattctcataacactaatactttcaagcacaacaaggacagcaaagaaagaaaaaagacaagtaagtaaaatgcattaggaagcaaaatgccaaccatcattaattcagatccgatcgaaacaaaccagaataatttcaaaagcatctatatgaatcttacgagtgtcgtttatgcaaatgttatcaaattaaaaataaaacgcgtactcctccgctatactgcctcaca

SEQ ID NO: 8986 - DNA, 619 bp, Gossypium hirsutum
  misc_feature (65)..(65): n is a, c, g, or t
  misc_feature (67)..(67): n is a, c, g, or t
  misc_feature (534)..(535): n is a, c, g, or t
  misc_feature (549)..(552): n is a, c, g, or t
attttattatatgcatgatcattgaaactttaattaaattgataaggtccacttgttgctgtaanantaaattgttttcatttttcattgaactggataaaatttctctccaaatgttttacaaagcttgtacttgtttggtatggaactgtttctttggtcttgaagttgattgctctaataccaagatacatgtttggatcattcagattgaaagaacttaagatcctttactcaagcagtgttaagatccttgtcaatgtttgctaaacttttgaagtatttattccttttctaaatccaatacgaacatttaacaaattttctatctttaggggatatattgaggcaatgagggaaattgaggagcaacttcagataagaagcaacagagtaaaatttgacgatattgttgtagcatgtggcaggttctattctactcaaatattttcattgtcaatgaatgacttttcagatttgatctttgacaatacttagcattacaagaaataaacaaaacctttctttcatcannaactttgatgactnnnnctttgacaatacttagcattacaagaaataaacaaaacctttctttcatcagaaactttgatgactc

SEQ ID NO: 8987 - DNA, 641 bp, Gossypium hirsutum
tccttctggttggtgatcctggaaccagcaagtcccagctactccaatacatacacaagcttgctccacgtggcatttataccagtggaagggggagctctgctgttggattgactgcttatgttgctaaggaccctgaaacaggggaaactgtatgatatgcttttcttgtttaccttggtattaattggaatattggaaattgatgattgattttcatttaattttgaataatctccaggttttggagagtggagcccttgttctgagtgacagaggcatctgttgtattgatgaatttgataaaatgtctgataatgcaaggagcatgctgcatgaggtcggttatgctttgcctttcttattccctgttatgacatgatatgtgcattgctccaatgctgaagataagaaaattgtagatgctaagagtgcttaaaatcccaagtcttgcagttctaaatattaggctatctgcaattttgcattattaagttgttatgtgctttcttctcttgggagtagtatttcaccagaatgagttgtcaaatatttaaactcaggacttaaacgctttccatgttttagccatttgttttcttcttatacttgctattaaagttgacaacagttgattcact

SEQ ID NO: 8988 - DNA, 560 bp, Gossypium hirsutum
  misc_feature (530)..(532): n is a, c, g, or t
  misc_feature (536)..(544): n is a, c, g, or t
  misc_feature (546)..(548): n is a, c, g, or t
  misc_feature (550)..(552): n is a, c, g, or t
tgtatgttgttctttcatgaaatatgaagcttctgcattcatctttccttagtatttctcaaaggcttaatttgaatttaaactttttttctttctttttctacattacacagggcaagcctccaaaaaggctgtgctaactaatctaacttatttaatccatctaggactatgtagcaacccgttggtatcgtgctcctgaactctgtggatcctttttctccaaagtaagttcttttggttttgtgtattaggcttttcatctttatattcttgtttccagttgctgagattgctcaaaagtaggagatatatttctgtttctattacctagtcattatatatattgctttgatttctctaaacattttcgtcccattgtcctccggatattaagaatttcctaattatattcctgtgtcccgttgcggagatagcgctcaaaaaatgagatatatttctgtgtctattacatatacacctcatatattgcgttgatttctctcaaaattttctccccattgtgcttnnncttnnnnnnnnngnnnannnatagtggt

SEQ ID NO: 8989 - DNA, 472 bp, Gossypium hirsutum
tcgtattgaaccttctcatcttattttcatatcaagaattattttcaaccaaagtaattcacatattccaagtgtcatttacctggattctgactccactcttgaccttgtcgctacattttgctttttactctccaagtcactagattgccactttggaatgtacaatagcttgaagttggtctcgtgtcaactaatggtctgatgtggtctccgtcaatataagcttctagagtcatgcctcctcctttattgaacaagattccttttccaggattacgttttaaatactgcatcttgataggattgtgcataagttggctgactacactcatagcaaatgcaatgctgggtcttgtatgtgccaaatagattaatgttatgacaaatgtttggtaagaccttttatctacaatagaatcttctgaagcaccacatagtctatgactgaattcaatttgtgtatcattca

SEQ ID NO: 8990 - DNA, 591 bp, Gossypium hirsutum
  misc_feature (51)..(54): n is a, c, g, or t
  misc_feature (57)..(57): n is a, c, g, or t
  misc_feature (443)..(444): n is a, c, g, or t
  misc_feature (454)..(456): n is a, c, g, or t
  misc_feature (476)..(477): n is a, c, g, or t
  misc_feature (493)..(493): n is a, c, g, or t
  misc_feature (506)..(511): n is a, c, g, or t
  misc_feature (515)..(516): n is a, c, g, or t
  misc_feature (519)..(523): n is a, c, g, or t
  misc_feature (525)..(541): n is a, c, g, or t
  misc_feature (557)..(562): n is a, c, g, or t
  misc_feature (564)..(579): n is a, c, g, or t
  misc_feature (581)..(583): n is a, c, g, or t
  misc_feature (586)..(588): n is a, c, g, or t
aagcttgttccaggtttggtttggttctgttaaagaaatccttttttcagnnnnttngacaaaccttgaaaataaaaatccaacccaatggttgtttcttttcttgttttgtgtataacagaatctctaggatttttttgttgtatatttttgttatccatgattttatatatatgtaggtatgcatttacctatttatgtctatatttgaagcttgtagtggctagggtatgtatgtgagctcatgattgagtttaacttgctcataaaacatagatgactgacctctccaggctcattgaatagataaatacgagtttgaatttatgtgaactttgatcatttatcttccactaacaagcttgataagcacttcctaaccaagctccacaacatcatgtttatccttttaactagagcccgtatatgccattatttcttannatttcatagnnnaactacatatcatgcttaanncctgctgcatgacttncactgatggtgannnnnnacanntgnnnnngnnnnnnnnnnnnnnnnngactgatgctgatacnnnnnntnnnnnnnnnnnnnnnnannngannntgc

SEQ ID NO: 8991 - DNA, 648 bp, Gossypium hirsutum
actctctccagcgttcctacactaatttgttggattccacttgtgaagctgttatcagataggtcaacatatgtgagtgaaccacctgggaaactggttcctatcttgaaaacatgttccattgaggctgttatgttgtttgagtgaaggtccagcactcccaattcctggaaatctgcaactgaagctggaatacttgaactgagatggttccttgaaagattcaaggagtagagttgagtgaggcttcccatccatgctggtatcccaccagtgagatcattggctgataagtccagttcctgtattggacttggagttgatttcagcatgtctggtatttgtcctttgattccacatcctgccaaatagattcgggaaagagatggcaattttgctacccaccttggaatggagtttagagttaaactgttgaatgaaagatccagtgtttgcaaattttggagagcagacatttcattaggcaatggtccttgaattgagttatgagaaagggtcaagagtatgagatgtgagagttgaccaattgactttggtataactccagatagcttgttgccgttgagatacaactctgtcaaagcttctagattacctaaactagaaggaattgctcctttcagcttg

SEQ ID NO: 8992 - DNA, 595 bp, Gossypium hirsutum
actcttgctgtttgctctgatgctgaatcatctgcagtttttgtcttatagcttttcttttcctggaaatctacttaaaatactttacatttcaggaagaaaggaaatagttgcagattttaaaagcttgctttcttcgtttcccgaggcaatgagttcgatgcagagtcaattaggtaattacaaagaggctgctgtggatattcattctcttcaggctgatgtgcaatctctttccagtatttctgatatgaaggttggtacttttataagttgtgtggttgttcctggttttctttaagggcatagacatcttttttctttttctatatgggcttacaaagaattggtaaataattatctgtgatcagatgaaagagtgtgaaaatttatccatcagatctgccgaccaagttgctgagatacataagttgcaagccatggtatgattgggtaatattactcaattattttgattaaatctttaatcatgaaacctgtgatacgaatattcttgttcaagttcaaggaaaagatgcctaattttaccaataaaatatgctcttctcagtctttatgcttttttttttttggc

SEQ ID NO: 8993 - DNA, 622 bp, Gossypium hirsutum
attcaattcatttgcaatttgcagagtttgcaaacacttgacctttatgaatgtaggggaattgaagatttaccaaaagacataaggtatctaaattagccttagaaaattaatggtaacaacaaaacagacacgtttgcaagagaatggaatatcgtgcttaagttctcttcggactttgggtttttttaaatgtgaaaatttagaaaatttgtttgaagacattcaaaacctcacagcccttcgagaattgtacatcgatgaatgaaacaacttggtttcattgccacaaggtttaaaatacctaactacattacaaactttggcaatttcagattgtgaaaaccttgatctcactaatgggcagctggatcttgagagaaaagtagatggtagtctccggaaactggcgattggaggatgccaaagctggagtcactaccccaatggattcttctaggatccaccaaacattgcagcacttgttcatcagcaacttggagaatgtcttgacgttaccaacgtggttccaacatttcacatcccttcaaattctttacgttagaaattgctcaaagttgtcgtctctaccagaaggaacgcatcaccttactgcacttaa

SEQ ID NO: 8994 - DNA, 589 bp, Gossypium hirsutum
gttcctaaattagtaaagtatttttttttacagtttcatttaaccaattccatcttaattttgggtggttcctctttttcttctttagtaagttttctaagagattctctttatttctcctactttcagtagtcctatttatctttgagtaaacacttctctgcatgttttttataactggaccagtggtcgaaccggtcagaccactggttcgctggtccaacgggtctgactggttcaaccggtccaattaaaaattattaaaaattcaaaataaaaaaataaaaaatctggttcccgggtcaactggttcaaagcccctttctagaccggtaccccggctggttcccagtccgtccggctggtctggttcgaacatcattggttttctgtggatgtgtaatattttattctccgactagcatccatatgttgacttttgagtagttgtggtggtgctgctttgatgcagttcggattataagtggtgtggaatgtagtcttaaaattcaacacttcatattacatttgtaataatttgtatcatgaaatatctgattataatcaatgaagcgcatcttgggcattt

SEQ ID NO: 8995 - DNA, 617 bp, Gossypium hirsutum
ggctttcacatatttgcctttgcttttggtggggaagtggtttttcgataaaaattaattgaaattataaaaaatttgtaaaaattaaaataaaattatatattttttaaggtctggaattagattttaatggggactaaagtgcgaaaataatttgagttggatggggaatcgagtaaagattctaataaataatgtatttaatgtttggtggtttaaagtaaatgatgagtaatgattttggttgagaagagatgatcgatctaagtggtaaagatagtttacagaatggtacagggcaataagtatgaaaaaacaaaaaatcaatagtaatttttattaaaaaatttaaaaattatttgaaattagaaaaatattataagttcttgaaaaaattataaaatgcatgtcattaaaaattattaaatgttgtaaaaatttaaaattaattctcttttttataagtttttattatttttataatttttgataaaatttatataatctttaaaaatcaattaagtcctcctaaaatattttaaaaatcaattaaaccctcaatgtcaacattttttcacgctagccgatatattgttaaaattttcatgtcaagcgct

SEQ ID NO: 8996 - DNA, 642 bp, Gossypium hirsutum
gtcactgacttttttattttcctttttgaaatgactacagattgttgaatatgaatcgatgtctgttcatgaaagagaattgaaagagaagaaacagactgatgaatctgatccatgcattggatgatgagaagaaacacgatacatggaaatgcagatgtttctatatgattgaaacttgcacctcaagcaacaataaatatagataagaagaaccttccaatagaaattttgaaataaattgtaaacagaacagagaactgttattgggatatcagtgttccaacctcttcaaaatggttgcctaatgatttcaaaactctatatatactttgttttcctcaggccccaaagcaatggagcgaaaaaaaatatagtactatatggaactaatatcttacatggaactctgaatctcttgctgaacaagctagattttttaccctctttgccaacgcagaaaaactttaaaatgtgagcatgcctgtgctcttatcaatgagaagaaagtgaacatcaaaaatatacattacaaaatttgcaaatcaatctcactttatacacatgtacactgaggcaataggctattgggccactcacatctttgctcgttcccgaatgcaggtctaagccatccacctt

SEQ ID NO: 8997 - DNA, 653 bp, Gossypium hirsutum
cactggaacgatctttggggtatataaccggctcaaagagctagataatcaaccgacggaagagaaggcattgctgaattcgctacagagcggaacaaagcttgtagctgctggctatgtcctctattcatctgccacaatcctatgtgctagctttggctcaggaacacatgcatttaccttagatcattcaacgggagactttattctcacacatccaagcattagaattccgcctcgaggtaaacgtactggaatcttgagagttaaaatgttatgctcatggaattcattgagatatctgatatttgcttcacaaattcaatgttatcctatttggattttcttactgatggtcttcattaacagtttgattaaatgggaactctttatcatatgaaagtatgaaattaatattgttttttttatcccattaataattcaagctcggcctacttgatgattccaggtcaaatatattctgtcaatgatgcaaggtatttcgattggcctgaaggtctaaggcaatacattgatacagtaagacaaggcaaaggcaaattccctaagaaatattcagctcggtatatatgttcgttggttgctgatttccataggaccgtgttgtacggtagaatagcaatgaatcccag

SEQ ID NO: 8998 - DNA, 679 bp, Gossypium hirsutum
ccagtccaacttatagctttaaatattttattgctttgctttggtattgacaattaggaagttcttaatttttgaagcaaacatttagaataaaaatgagttatttagaactgaaattgagaagttttgtagatttctgaaaattggtggaagggaagaaaagatttaaatgagatatgttattctatactgttgttactatcttttatatccccggttaatgtagtatttggtgagaaagaaaatggagaaacttcaattttccgctgttaagttccttcttagttctaagtaggagaaaagaagggactttctatgttttcatgtcaacttttcacagttgtattgtttgctgtggttttgaccttagcaagtttttatctttgattggtgcaaatgcatggatgattgagaggaagttatagcaaacaatgtttgactcgatatgggttttactggtgaatataccagaggtgtttgggactttctatgttttcatgtctgcttttgagccagttttataaatcaagcaccatcactaggtgggaccactacttctcttgctcaaatgttcctaagtataagaaaactgggagaagtctctcattttcagtgatatttttcttcatcctgttccaatcctagttaaaactttacatatcttattgctttgcttata

SEQ ID NO: 8999 - DNA, 642 bp, Gossypium hirsutum
agatcaacgggcatgttacaagacaggagtacatttcaagacatgaataaagctgaataataggaactgacccatataacaagttcgtttttggtgtcaatccctgagatgccagattccaagaccttgagaagcacgggaagagcaccattgccagcagtctcaaggacagtgcaactccttaatgtaacaccagcaggcagcaaccctttgctttcaacgaaatttttgaggttattaactatagtttctgtgggattatgagcaatcccttgaaacttcttaaatccggttacattaatagttacagcctttggttcttgagatcccatgtcttggacactgatgcaattcccaattttcggtggacactattagtaacgcctgtctatttcaacctacgattatgaaataacaagcgcaagcaaataaaccagcacaatcagatagcaaaatagaatcaaaaccactacatattataagatgaatacggtcctaaagtatgcaacaagaaccactaaacctttggacaaacagaatcaaagacataattggatccaaatccagttaagagaaagtaatcaaatctttggtgggtagctcacttgaaagaatgttcaattcaaatcaggagttcgaaag

SEQ ID NO: 9000 - DNA, 634 bp, Gossypium hirsutum
tggtctgtcatacagatcacactaaaccaatgagttctataatcaattataaagatcacactagaccagtgctctatttgatattatatttcagtaaacaaagcaaaatgcgtgctcctattattcctgttacttttactcttatactccatctcgacataagttttagacatcatgtactacctcaaatctgtcatttgtgcgattggatctcatttttacaagttctaacaccatagcagtattaaagtttccaaaattacaatgcctttgcactgtcatcagagagagcaagagaaagaaacaaaaggttggagggtttactgcaaagcagaggaatgggttgaatttacatttcacctctcgctcatatttccataagaggaaaataatacaattactaaccttgcaaaagtatttttttcttagtctgattgcagtacctacgcaccttctgacatggacttttagaagcttatcattgaaaatctgcaataagtgtgcaaaagaaaaaggattgaaatcagaagaaacatctgtaactattgagatgtatggggacatcaaccatccatctcttccgtaacagtaagccacacatccagaattaatgctgtactcattagagtgaaag

SEQ ID NO: 9001 - DNA, 637 bp, Gossypium hirsutum
tcgagtcctagcaaccctactggaaagtctgaccttccaggaatcgatgtatttgtctctactgcggatcctgagaaagaaccacctcttgtcactgcaaacactatcttgtcaattctagccgccaactaccccgttgaaaaacttgcttgttatgtttctgatgacggaggagcacttttaacgttcgaggctatggctgaagcagcgagttttgctaatgtatgggttcctttttgtcgtaaacatgatattgaaccaaggaatccggaatcttacttcaatttgaagagggatccttacaagaataaagtcaaaccagattttgttaaggaccgacggcgagttaaacgtgaatatgatgaattcaaggtccgtaccaatggtttgccggactccattcgccgtagatccgatgcctttcatgcaagggaggaaatcaaggcaatgaagcttcagagacagaacagaggggatgaacctatagacagtgtgaaaatcccgaaagcgacatggatggctgatggaactcattggcccgggacttggttgaatccatcaaccgatcactctcggggtgaccatgctggtataatacaggtgatgttgaaacctccaagtgatgaaccactacatg

SEQ ID NO: 9002 - DNA, 647 bp, Gossypium hirsutum
ggtcagtatatagggcgaatgttgattccttagaagagcgaagcgaagagcgaatggtgggcgaagtaaatctgaaagtttagctattttctttcgtcttcgaggttggtgagatgaaatgtcgaaaatgaccttatcattttatattaattaataaacacttcgacttttaattattatttttattatttttattattttttaagataattatgacattgatagtctgtggtgcaagaactttgatttgtatttatttctcacttgtatttatatgtaaaatatgggttttttactgaaataatttaaaaaagaattatttactaaaataagttgtcagtcggattatttattaaaatgggttatttttttatttttatattaaaaaaatattttttaaataaaatattatttttttatttttattaaaaatatttaaatatatatacaagtaaaaatacggtctaacgggtcaaaatatggataaaaacggatcacgcctgtcaaataggcgcgattaatcgaacctgacaggtaggctcgaatgggctgcccgcacagtccccctcctgcagcagcagaccgcccaccctgctgccccttctacccacacaatagatctcctgtagcctctgtgtgcatgcatc

SEQ ID NO: 9003 - DNA, 651 bp, Gossypium hirsutum
atacttttaaaagttaccaattgctttaaaatagttaccaattcttcatttaattacaactactatttattaattattgagtagagcgataagatatattatattcttataaataaaacataaatttaaatctcagacacattacaactatgaaaccggaacattaatcataaaataaaaaaacataacgccaccacatggggcgaaaagaagttgcttaatatcaacacctcaaaataatcgaagtagactagcatgcctacatgaccaatcggctaaccacgtaaaagattcaaattggtgaagaattgaagcagtggaccagtagttttggtccacatcacattgcgaatggacccaaaagccagcccataaggcatgccagaaggcgacaacaccatgtgaaactgtacctcctttttatttattttcatccattttcgctgcttctcaagttgttctccagtctgcaatactagtatttaaggcaaaattcataaaatcaaatcctaatcatttttctttatgttgacgcttggggaatttgttccttcaaacaattataataaatagtttgattttaatttaaaaaaaaattaatatgtcagtatctgtggggataccaaaagggagggtggaaggggaagaagg

SEQ ID NO: 9004 - DNA, 557 bp, Gossypium hirsutum
gctttggccttataagcttggcagcagggaagccagttcgaattttcaagaacctcagagtttgcactgattgtcatatgtttatgaagtttgcatctatgattacagacagttataatattaagcgacaattataggtttcatcactttaataaaggtggttgttcatgtggagactactggtaatggaaacgttctcagtgcattgtcattgcttcgttgtatgcttctactccagttcatccaagtcagtgctattatcaaagttcaagcggctcatatcaattagattctgcgtagtacgtaataggtcccacttcctgtcgaagtataagtaatgtatatgattgtccgatcattttttgtttaattttaacgtttgagattgtattacccaagtggattaggggctacatggttaaacccttagaacgcatctgcccttttaccgtctttacaggatattgacggcaaagcatttgttcggaacctacgtatagaaacataggctgaatatcaagaacaaactcagaaaatttatttagagggctggaatt

SEQ ID NO: 9005 - DNA, 632 bp, Gossypium hirsutum
tccctgtaagttatttttttttctcttcaaaaaagaattggcccaaactaaaatcaaattttcgattagatttgtatccttaattgggccttatgaaagtttggttaagtaactatttatagtaatttctagataaagggaaataatataaaaatattttttaattaaaaactatttttttatacctttctatctagagttgttcgtgggttgagctaaattcggatcaattcaagtaaaaaaataaatctaaaattttatttaagctcaatccagataaaaatgttaaagctcaagtctagctcagcccacccatataaaaaattatatcattttttatataaaaataaattttaaaaatataatacatcaaatacactaaaaatattaaaataaatatttccaaacaaatggatatacttaaataacaataagataagtgcaacttaagaagcaaatacctttaaaatagtaataaaattaataataaaataaaaattatacaatattcaaacagtaacaacaaaatagtagcagtgaaatgatagcaaaattatgaaaagcagagacaaagccttaaaaaaaatagcaacaaatttttttttgtaaattcaaatcaagtcgagtccaaa

SEQ ID NO: 9006 - DNA, 616 bp, Gossypium hirsutum
ttaattctatcatttcgaaagtgagtaataaggataattaattacgatgttaatgttttttatcaattatacattgttttgattgatataataataaatttagtccttaaagtttatatattttggaaatttactcttaatttaataaatttatccgataaaattgtgagattgaatttgttgaatgtttaagaattaaggtcaaaatgacaaaatatgaacattaatggttaaatttattattatatcaataaaaatttattattatatcattaatggtcaaaatgagaaacatgaactgttattgttacttgataaaaattaaattgcaattttttttgaaaggaactaatttactgaattttgaaatgaagaggactgaaaaagttttttaccaataaaatacaaaccccaatttggtttctgggcatcactctcatcagcattcagcaagaaaaaatggtggttagaagtccagtggcgattttgatggattaagatgagtttatttgggttctggccatcaaagtattgttgcaaagatcattttcatactcataattcaacaaaatcaagtttatcatcattatctgggtttcaaccttggcacaccaag

SEQ ID NO: 9007 - DNA, 572 bp, Gossypium hirsutum
  misc_feature (537)..(537): n is a, c, g, or t
ggttcttatttttctctaaactctattccactctctttttctttatattacctcaaattcttttttttttttatcctttttttagccaatacaatattaatctagttgaaattttattaaagaattgtttatttaaaatgaaataaatatttttataatactgtgttttatattattatataattttttttaaaaaaaccaagaataaattactgaaaacttatcacatccaaattcttactaaaatttcatttgttttctacacaagttatttatattagtgaaaacaaaattatgtttaaaaaataagctaaaagggtgaagttgaaaaccaaggtatcttaaattccaatctcatatgtgtgtaattttttatattttttaatttttaatttcacaataaaattaaaattaaataaagtgtatatatatattaaaaaagaaatagagtgcttatctcagaagtcctaagaaaggggctagctagttacgtatagtgggggtagtacacatccttttctttggggtaatcatccntaattgctgttatttctccgccatatctgcaagat

SEQ ID NO: 9008 - DNA, 605 bp, Gossypium hirsutum
ttggacctgtacacgtggttggttgaacttaccatttggtttgtccatggaacatgagatctacaaagcatccaatacgttgagaagctattgccaggtaagatcctacatttcattgttcataaacgatgatagatttatatgtccaaaactttaattgatgttgtaatcacacttctcaactaaattaagcgttcacatagatggtttgcaccagtaatcatctaccagaagacatgccgtagttaaactaatcttttgtatgttggatttacacgaagagtatgttttaacactgtgagaagcttctagtaacatttgttgaattggacaggttgctaggttgaatccagagagatctataccatgggctgtcttgagaggagccaaaggtttagctattttaactgttgttaaagctggagttcttgttgcatataaacttgggactggtcttgttattgctcgaaggtcagatggaacatggtctgccccatcagctttgtgctctgttggtttaggatggggtgctcaggtaaactaataatcaagaaaaatatacctgccctagcccagtatacatgtctaggccaggcagctaagtc

SEQ ID NO: 9009 - DNA, 668 bp, Gossypium hirsutum
tgcttacaaacaaggtttatatttgtctgtaccatttttttcaatgttaataatatgcctgttatgtcatacacaaattattggttggaaatgatcgggttttcaaaaattgaagggaggggggccctgagcttccattgtcttctggctagctctttttggctcaatgggtcttggcagcatatccataatggtaatttctaagaaacccccaaattctcactcatatgcgtgtctgtgcttcatatagaattttattttcaaattcattaaatgtatgttgccattgccgacatattaatatatggaaagaatattgatagtacttaatttttaatccaaatcttaggtgtttttttttaatggatgtttagcaaaacaaaaacaaaaggattaaacataaagtaaattaattgaagctaattgaagtttgtctaattaagtccaacattaaattcaaaatctaaaaataagattataaaacctgttcatatgctttttacacgactggtatattaacaatataattgtatccatagtaaaccttggaatttctattgtgactgataatagtttttatttggttaagattttttatgaaaaaaaaatgatggtaaaatgtttttgtatatggaacaaataagtgaatccatatttacccattgaca

SEQ ID NO: 9010 - DNA, 592 bp, Gossypium hirsutum
  misc_feature (580)..(582): n is a, c, g, or t
taaaaatcctagccggttgaatcatcacttctctttattccatttcaggttttttacatgttcatagctctttactctatttccaattatacaccaccgatcggaccatcagttcccacttcaactggcaagtccaatttggttttgacaatgctaaatctgagtaagattgatgaaaaagactttttgtccagtgcaagaggaagacactacgaaaatgtacacataccatacttccggagaagattgcgttaaggttgcctgtattggttaagtcctgaataaaaccaaatatagaaagttagcattgaagatttagaagataattaaactagaaattagattagcgcggaatgaaatcaaactttaattaaatttgttaagagtattttaatattaacgtgaacatacctttagccgttgttcatctaaaccttcaattttctctcctacagcaagtaattcattcttcgcgtttccctctgttaaaactccgttcttgtagctgctcttgattagctggagtttttgcttttcggtttggatatcagatcgcactggccattgcgttttgattgcnnnagaggccgag

SEQ ID NO: 9011 - DNA, 583 bp, Gossypium hirsutum
ctctcttttttacttctaatctctcccgccatttcttctaatcatcagcgaatctcagccgttgatctcttgattgcgtatcactctgttttgcaccttctcttctcactgtaatttccttttgttctcttcttctgtattcagttgggattcttttgaaataaaaagaatccatacccaagcaagtattgatgattaaagttcgattttattgatgcattttgaatgtaactttatgggttcttgctaagagctttgagtaatttagaccgcaatttgctcattggtttgttaaatttcattcttaaaaaaaaagttaattgtatatgtatcacttttgcttttacatgtatttatgcatctatatttatatacgttcctggtatgatatatgcatgtaagcatgcatgtggatatagcttttgatattttattttgtaggataattgattttgttaagtttcaagttattggggagcggtttatagaaattgggatatgtgaaattaatattgaatgatgtgtaaatttatgttaaattgataatggaagagctggttttaatataacttcttgtttttga

SEQ ID NO: 9012 - DNA, 648 bp, Gossypium hirsutum
taaaaaatcgaattactaaaaagtacccaaaacttcagtttttaaaataaaacaatatttttgccttcaaattagttaatacctatgtagtaagtaacatcagttcagcattaaaacgtgaatcactcttattcaccatttttgaggaaaatcgagaacagtatttttttgaaaataaaataaaatttggttaaaaaagcatatctattcatggatttggacttgttagtggtccaataactgtaggacaacgagagcccaagaatattatcagttccatttttaaaataataataaagaacaacttctgagatgatattttattttactgagatcttgagatatttttaaaattaacggctgcgattaaaagaaaaaaataaagaggttgtagtgatatgatcaaatcgggttaaaatttagaaaattatatcggtcacctagaacttattgcatcaattatcgaatacgttgatttttttaaaagaatcaatttctctcctttaatgttgattaaaaagtaaactcacattttttaatgtaaatcatacatgacatgatcaacttttttttttcatttttacttcaattgttggtttaaaatgatcttacaagatctctactacaatgtgatctttaaataggtgc

SEQ ID NO: 9013 - DNA, 549 bp, Gossypium hirsutum
  misc_feature (6)..(6): n is a, c, g, or t
tgattncgatcaattgggggatccgcaagatacatcaaaattgttagaagcaaatggttagtagttctgggtgcttatagagtcttttaattgacttctaggtcatagagctaatgtgagtgtgactctgtgttgctccactttctatattcaggaactaatggtaaaggaaaaggcgaccatcaaaatcagcagaatataatacggctaaactccagggaaaaggtgtgtatgtgtctgaacatttaactccaagtatgctgagatgctatacatttgaatccaagtgtagactatagatggttgcagtaatgtatgcttttcaatctcgtgagcaaaagcatatgttggtattgaaattataaatgtcttgccaattttgccagaccatctccttttatcaatttgtaccacaattccctgtccattgtatttaaattgcttcctactaaaattagattgtatatttgttggattgtaatgcaagaactggtgaagcagtgtgttgtatccaaaatctgagccataccagaacacactatgagaata

SEQ ID NO: 9014 - DNA, 604 bp, Gossypium hirsutum
atgatgctttgagcgtgacaacccaaaatcacagacctgaatagccaagcaaaacgtgttcagacaatgcaaccaacatcttttagaggaaataaagcaatctgtaaagttgcttaaataaaccatgaccaaaatcaaggaagacttttggccagaaaatagatttgagataagcacctttacaacccagttcttatcaacaaggagatttggtgttttcaaatctcgatgcactatagtaggattgcttgtgtgcaaataattcattcctttagcctgcaaacaatagaaaagcaatgcttaaatagaaactacaaccaagaatggaagaagagtgaaagggaaaacaggcggagatactttatacaagatatgaagcaaaagaaaataaataatttatttacttgagactcttaccacatcaagagccattcgcattcgtctcttctcatcaagttgatgattgggtcgatgcagtagcttatacaaacttcccctgcataacaatgagggaggagcacaaaagctgtaagacaggttggccaactttggcaattagaattaataaataaactttttggcagaaacgacagcaacaacagag

SEQ ID NO: 9015 - DNA, 629 bp, Gossypium hirsutum
attctttgtcggatgccttaaagagacaaaataataggttacaacgcatttatcttttaacttactgttcaaaattccttttgttggctgaaatatttccttgtttagcttttatagattttaggccatttctttttccaatttatcaaattgatagtaatgttggagtaccgctagttggtgttctaccgaggtttcgaacaacctttttaggaattgaaatgtaagttttggttttgatggcttggcttgagaacaaggagatactagagtgttggtttgtgcaattgagataactttattagaattaggaaaagagtcacgaagttgagtctgcacattctgtatcaactgaatgaggatcagttttcctcatggaaaatgaaattatgagtttgcattagctcatgatttgtctagtagtgaatgcttagtatgcatgaatattctatcttttatggggtgattactcattgtaatggagaatcatatccatgctaatattaagccaaggtttgtagatctctgatcatttcaacgtagttaggagtagataactctgttttggaatatcagatcttgcaaaacctaccttgaccagattatttttctgttttgacagacttcca

SEQ ID NO: 9016 - DNA, 607 bp, Gossypium hirsutum
  misc_feature (58)..(58): n is a, c, g, or t
tttctcatatgtattatttattttagttttgattctaaatttttatttttactttacnatttacgacaacttttctaacttttggattttaattgtgttattaacttattattttaaattctaaaactaaattcattaatttttatatttagttttaaagttaaaattttcatagaaaatttaatttaaataatatttttttatccttaaagtatatttaaagttcaaatttaaaaaataaaacataatataatatttatcataaaaataaatattatttgattaaaataatctttttaaatgttatatttttagcagcgtttttgtgagaagcaccgctaaaggtatcgagttatagcggcgtttgtggaaaagcaccgctaaaggtcgtgagctatagcggcgtttgtgagaaaagcgccgctaaatgtcttgagctatagtggcgtttgtgggaaaagtgccgttaaaggtcttgagatatagcggcgtttttgggaaagcgccgctaaaggtcaatgtctttagtggcgtttgttagagaagccccgctataggtcatggtctttagcgtcgctttccaaaaacgctgttaaagttagcgacg

SEQ ID NO: 9017 - DNA, 611 bp, Gossypium hirsutum
aaaataaagtttgatgaagcacattataggcatatcatctggaatgtataccttggttccataaattacggcatcttcgagttttcccttatctaaggctgttttagatgattctaaaagttgtcttccataagcagatgagcatgctgcttgctgaagagaaatagaacgcaagcaagtacaaaaccatgataaaatcaacaaattctgaaacagagttgaggaaggagaaaggacaatgttcaagaattatttataaccttatgtacaggaaccagactgacgatatctgatggttggaatgggctagcagaatccatgtcaaaatcccttggaaccaactcaattcctacctaaaagaagcaaaggagagaaaaggaaactcatacttagttttcatgctccatcaacagccacatcctatttttggtaacacgcaactagactatgatttataacctttctcttggcatgcaaagtaccctacatagccatagagaatgttcccttattctgaattttgatcagaaaaatttacattttaaccaatttgatagcaaaatccatcattaaaactctatttagagaaggaagctggcccaagtatatgc

SEQ ID NO: 9018 - DNA, 593 bp, Gossypium hirsutum
acaaaccttagtagtcaacacatattgcccactcttccacttgccactcctcacaaaccgatcactctcacagagcttcctcaacaccgccaacatcaaaccgatcgccaaatccgccacgtcctcagtcaaaacgtcaggggtgttggtaactcggatacccttttctttacacttggccaaatctatcttatcaagccccacactgaagctggcaacaatctccagcttgggcaacgcctcgatcagcatagcatcggcaccggcaaaggcgtttccgacgaccgcctggattgagtccttgtgagaagccagaaaggatgatttgtccggcactgtccagaatctgaatagcttgaaacggttctcgagttgttgctcgaggtaagagttcatggggcaagccatgagaactccaatggattccatagtcgattgaattgtgagagatagtaaggtggaatttccaagtccaaaaagcctggagagtgaaaagagagcagtgatggggattgattgcgggctgttaaccagttgaagaaatgaaaggcagagaatgctcagaaaagggtaggtggggctgttggagtaac

SEQ ID NO: 9019 - DNA, 667 bp, Gossypium hirsutum
catggtctcattgattcaatagcgacacaacaagaaatgactatcaaaggatacaaaggtgcaaagattgttttctatgcttttctttgcattgcctttagaagttgaagcttaaaaggaggaaaagaaaaagaaaataaggttagttaagtcacaataaagtataatataaacaggcatgcaatttctcacataaccaaagggataaagagtagaaacttcagttgctcatacaaatgcaaagagaattgaaggatgacgtcaaggttatatctacctgctcttgcttgaaccaggaagctttattagtgattcaatgccagctacatgaataaaatcgtaagtacgtgggtatgttgagaaaggttcacacctgcaaacagcaattgagctcatcaggtaatcacaagtgttttccctataagactaagcacatcacataatcccacaaataaagaggaatcaagaagacaagcaaccacaacaatcatttaaggagaaggttaaggattacacaagtatctagtttgaaagttaaacactgcacagtacaaaaccattgctacaattgaataattgcacatccaactaaattacctaaatccaagcaagtacagttttcaaagcaggttcgatcaaacagggaataagcagtagaagtttgctt

SEQ ID NO: 9020 - DNA, 664 bp, Gossypium hirsutum
tccaaacctttgtaagaatcatttagttctctcattacataattttatttcttcataactttctcattttgtaaaaatttactagaggcttccagatgatgaatggattactagcgggtttacagcggctatacttgttcatttttgttgccaacattacagaaaattcacaaaaattgcagaattttttgtgattcacacataaatttctttctttttttttcctttattttttctacaatgacagagatttacagtccctcaacaaatgtacctttagtgtccattcaaacacatgaaatagaatttgcatcaaatacagaatcatgcggttccaactatctataaagtattatgcttattatgtagttaagctcagaaatctattacaataactcatagattctgcttttcagataaaatatttaaatccccctgtttttcacaataatttaatttaaagtacacccgtcccatttgagttcagaacgtctgcactataaaaaatagcattgtgattatagaggtattaatatcaccacagtaccaattcaataacgtatagtttacacacataccatggaatgaagccaaaaagaaaagaacagaaaagagcattatagtgtttatgcacataccatggaacaaagccacaaagtaaagc

SEQ ID NO: 9021 - DNA, 581 bp, Gossypium hirsutum
  misc_feature (473)..(473): n is a, c, g, or t
  misc_feature (539)..(543): n is a, c, g, or t
  misc_feature (555)..(559): n is a, c, g, or t
  misc_feature (573)..(575): n is a, c, g, or t
cacttcccctacctgtccactggcatctctagtcatatcatgactggtgtcatcttcctggtctttcggtgaaacaccaaatcctttggcaaacaatgcagctaatatatttgcaagtccatgagtaactacagaaacctgaacagaagaacaaaaatcaagtcctagaaatatccagctggggaaccttttgctgctttttctaatagttaaaagattgtacaaaagaatacattaaattctataaacagaattgcataaaagttttgatggcaaaactaccaatccaatttcctacacattttattaggagatataccaaaacagaatgcataaaggattagatgggatgaaaatatagtaactgtgatagctcaatcgctctagttaaatactttcaacatacaagttatgcctcattacaatgtggacagacaggaaaagcaagatacataaaatagatcggattgatnctggatgaacttactgattgatgtatgcctaacaaatattccttgaaggtatctatcactattgcnnnnnattacgtccagnnnnntatgtatgttcttnnngtttgt

SEQ ID NO: 9022 - DNA, 627 bp, Gossypium hirsutum
gccaatataaagcttagtggcttccccagcaccccccgtgaggaaaaagaacaagtaaaatattactgagtcttaaataaaaaatagcttagtaccttaatatttcagtagttgtatcatcattctccacctgtctgtgtcttttatttttacaacgggttgttggtcggctcattttatcattgaccgaccctgctgtgggcacaaaaatgagattaggtcatataatgttgtttaaggaataaaggcaaaattgcaagtttaattgagagtttcaggctctgagcatgagcattaaattcatcctcataaaggaccaaatagaatcaattatcttcggaaagagccaatcttaggacagcacccagcatacatttgttagcaaacggttcccggccgctatttcgccgtcccacacagctaaagacctcaataccggtgtgaacaaatttcacgtcaatagcggcggatcacgaccaccaatagcagagtaacgggaaatagcggcgtcgcaaaatcgatacctttaaaaaaaagttcttctcaccaaagtaaacagggagagaatatgatgagacagagtaacgaggagtaggatgaaaacaaaaacaaaaaaatctaatatag

SEQ ID NO: 9023 - DNA, 697 bp, Gossypium hirsutum
atcaaaataacgtgccattaccatccatgactataaatccaaacttgtcatcagactctaaaagctcattcaaagcttcagtatggaacttgttatcacagaggtacaaagatgcattaataggtttgaaaggttcaaagtcaattgtcaccttcttttccttgccatcttcagtaacaattgtcccagtgtagagcaccagcccgttagggggaaccttgttatagagcttcaacctctgttgagcagaagtaatggcagccaacacagactgacggttgaccctacttttgatgttcgatgcagttccaaattcgtcacctaacatctttgtgacacgggatatttgatcacgaggaggcataatgagggatatcatgctggtcccatttcccctggcagattctagtgccttgattagcttttttattttccaaatctcgatgttcttgtcagtttcatgaccatctgccattgtgtcttgtgaagaagaaaacaacctgaaaacaacacatacaaaaaaggcattgagacgctgagttatttgattaacacaggagaggggcaacaagaaaatgcaattaggctttagctggtaaagaaggatagaaaataaagaccgcttcataaagacgaaaaaagtgaaaaaagattatcattattttccccacattgcttggtaagttggtaggaatga

SEQ ID NO: 9024 - DNA, 587 bp, Gossypium hirsutum
ctcgaataatgatttaattgaccgaaaaaaatttaaatatcagtagacaagttcaaacactgattttatatttaatcctttacaaaatagtcattaaaattttaatttttaaattttgtagtttttatgatttaattcttaaaattcacttcttccttttttttcgattttagttcctgaaacagaatctacttcttctgaaaacagcccaaaatttccatatttttataacagaccatttctcccaaatttccaaattttgaaatctttacaatattgatccttagactcaaaatcttatcacataatctcacttttctaatttttcaccatacatatagttaaaacaataaaattccagatttacagttttcaacatttaaatcttaaacttttaaaatttccagattttggaggtctatatacagagagctaagtgacccgataaacactctactactactaacttcagttgtgtcaatttaagggggctttggctataaatagaaaccttcctaccctcatttatatcatcagtcatcgagttatttaatagactgagagcattttctttcgctttttttttt

SEQ ID NO: 9025 - DNA, 489 bp, Gossypium hirsutum
  misc_feature (431)..(433): n is a, c, g, or t
  misc_feature (435)..(436): n is a, c, g, or t
  misc_feature (472)..(475): n is a, c, g, or t
  misc_feature (477)..(477): n is a, c, g, or t
  misc_feature (479)..(479): n is a, c, g, or t
gtcttttggggggtataaaaggctggccttatctccttcggagttagttttacctttcttttgtaagcttcttgatttcatttattaaatgtccttgattctttttaataattctctatgcagattcctcgggcatttccagcctcagcctggtaaacctgcactttgggagttgggttcctaccagcattataggggaagaaatggggaaacaattatggaccaagatggaaggtaactttatcttgatctacatctctttacggaatcttatcaaaattgatttgttagacgtgaggtcgtgtataattggttttacatggctactaatatatatcattgaagttttaatttatcaaaacaatattcttggaagcactgggatgggttgatgctgctgcgtcgactgtgtggattctgccgcttgtgtnnncnnttctgaaaataagactgtgactggtgttcacagatnnnngntnatctcttaat

SEQ ID NO: 9026 - DNA, 647 bp, Gossypium hirsutum
  misc_feature (57)..(57): n is a, c, g, or t
gaatttcgctctatgctgccgtgaaggctcgccattcatatggtccgcaggggcatngtgggatgagccttctgatttttgagagcacagcaagaggttatttagaagctgagcgtctgcataagcattttgctgagcaaggaacggatagagaggcttgggaacaccgtcgggtcttattttatccaggtgggacgcgccaactctatggttacatggcaaacaaggaagatctggacatcttcaaccaacattctcaaggttctctcctactgaagacaatggttatttgcatgcagggataaactgcgagataactttattgcacgaaaagtttctttattattttctgccgattcttatgcatttaattcacttgtgtgtaaatgttatgttgattaggaaaatctaagctcaagtttgagatgagatcttatcaagagatggttgttaatcaaatcaggcaaataagcgaggccaaccaggagcttattttttacaagaacaagttcgctatacagcaaaggctcaaaactgcccttgaagagtcttttggtattgtgagcgaaaagctccggaagacaatggaggagaacaggattgtgagacagagaaccaaaatgcagcacgaacagaacaggaagagt

SEQ ID NO: 9027 - DNA, 631 bp, Gossypium hirsutum
tgtactgccaaaatgtaggggaattataggtaccttataatacactttcccctcttctgagtaatgtatgtaaatagcagcttagcaaagattgtaataatgctgtgttccacatatatatacatatttggattcaagaatttgacattgtttagggaagttttacttttaataaacaagtggagtactttttgatcagtttgcaaaggaaaacttagcatagtttactttcatgaaactgttgaaatgatagccaaacataaatagaagcaggagataaaaacttatcagacagaagtgaagcactttgccatatttaaaacttgaaactaagaataagatctgaaaaagggcaaaaaagtctgtcgagttgcttcattttcccattctatttctgcccaccaatcctcatttccatcaatagtgattcaattcccttttgcactgtcagaattgaggggaagcttcttcagttcaggacagatgcctacaaaaatgcatttcaaacatgggaagggtaggacatcccaatatacgctcttcaatttccatagactgcataaaacaagtttttcaagctttaaaaatggtatagggtatggaactctaacatcagccacttcaccaactt

SEQ ID NO: 9028 - DNA, 604 bp, Gossypium hirsutum
ctttttctttattttcaacgcaatgatggaagatttgaaggcaataaatcgcaaggaaatgcaaaaacttaaagaaatttaaacagaaatcaacttctaaaaattttgactgctttctttgtattcaatatgcgttcgtcctcttttacactgattttctcggccttttatagccgatttacaggataaatagaaaaaggaaaaaaaaactctaattttttgctgtcatctgctggtttattttctgttattggggctgttctcgcaagttctatggagaaacggccgtacgaaagaagccgctcgtggtgacatggaggccgtgagtggaaaatccctcgtgaaaacccgattccctggctgcagtactagcgtgttctagaaacctctaggtttttggtattctcaagttgttgggcctttttgggccattttggcaatgggctactgtgacttggaccagggattaagttgggggattttgggtgtaatgggactttgggttaaggtctaggtcaatagattttgggtttcaattttgagtctcggggttgaatgtaaaatttgatatttaattgggccaaaactgggcttgttgtaattg

SEQ ID NO: 9029 - DNA, 603 bp, Gossypium hirsutum
  misc_feature (591)..(592): n is a, c, g, or t
  misc_feature (594)..(594): n is a, c, g, or t
tgcacttggggccatacttattattgtgatatcttaaatcaccattacaaagtttatcactgttctccaagtcaattgaaatagcttgcaccagtttgaacttttgttcacctggttaaagtgttgccactaaacgatgtggaaggcacctacgccctctacacataatcatgttggtatgttttcatcgatgaaacaacaacaacaatgttatgtagacagggcttccgcacaaattacaaatattttaaaagtaaatacaattatattaattacacacaaccatgtcaacaacataccaccttcactagtttatcgactaattttcatctgatcaaagtaaggtttattagataactagtatgatttaagtgacttttgaatctgttcaaatattaaatgcaagagacatgataaatattcataatttaatacctaatgagatattaaacattttttttttaccttcgaataagtgagaacttgtatgatttagaagggacgaaccataattgtgacatttgtatccatgcatatacttgcaaaagctgacaataaatgtttatttcattaatattacgtcgagatgcnncnaaatttttt

SEQ ID NO: 9030 - DNA, 601 bp, Gossypium hirsutum
  misc_feature (45)..(45): n is a, c, g, or t
tgagttccatatgctgaagcacattatcctcctatttaaaagttngaggagaaactatggataattctaaacatgataatatgataagaacctataatgatattaaaattcaaaaaaatataaattatgtgatatacaagtgtaaataatttgtatgaaaatttatgaaagtagtaaggttttaaactggactgtgacaaaatgataataccaaacacaatgcataaacaaatactacactttatcataggcatatccataatctctaaaatgatatcataacattaaaatctctgaagattcagtacctcttcaaaatatactaaagaaaacagcacttccaaatgtttaattcagttcaccactgatgttttgccaaaaaaaaaaaagaaaaccaaaaaaaacccccaaaaaaaaaaaaaaaaaattttaaaacccccccttaaaatttttaacaacttctatggggaggggggaaaaattttcagggggacccccccccccctgaaacccgggtttagcccctttggggggcttttttgggcaaaggccccccccctttgttttacccccccccttgggttaaactttctccccctcc

SEQ ID NO: 9031 - DNA, 498 bp, Gossypium hirsutum
acccgggtatagccgccttgaaggagggtgcggaccagccatgaccctataaatccgttagctccggtcacgcacacagcttctttagggtttgccgcagcagccattctcaacctgaactttgattaaaagattttaggtttaattacatataaattctcaaactctaattgatgtattttaatatatatatatatatatgtgattactttttacaaaataattatgggtggcaaaatgaaaatagtcactgaatcaaaatacttgaattatttcacttttttgtgatatatttgaaattattcgaatgttaagaaaaacaaatatttaatactcaaaattaaatcatcttaataacaggctaaaattacttcaaggctaatttatctgaataagaaaactctggaaagtatatttttaagacaaaataatgtcattaatgatgaatttaatggaagtatagtgagttctttctcacacacattctgtgagcgggag

SEQ ID NO: 9032 - DNA, 660 bp, Gossypium hirsutum
tatattggatattattatagaatgagagagcaaacaaacagtttgaagcaaaattcaaaggccatcaaagcctataacttaaattgcaaccagggagataaaccaaaattaaacaaaatttatattcttcagtctacaactgaaaacttttgccagaagaagaaagagtggacctgaactaagttcaactctacaaattgtcctaactacggtggaacatttgttctaagcacttctttattgcacatttttgaacaaatatgattgtccacccttttcctcccttcagtgtattattaactacccatctgacttattttccgttacaaggtatgccgagtagctaagtgctaaccgtgcatgaataccccaaattcactcaaggggatgagttaacttgaaattaccttgaagtagaaactactttcctctactttgaggttttggtttaatggcttgacatgcacatctgtcattgctatctgtagtcgagtttgccaagtgctgtgaaaaggaagcagcagtagcctgttcactcttgaatagtgcttcagcttccaacgcccgagtagaagaaattttgggcaggcaatctgtttcaaaattctggtatgccacttgatcttgatgagtactcggttaccaactttagaaacatgg

SEQ ID NO: 9033 - DNA, 572 bp, Gossypium hirsutum
gggggggggtacatgggctattttaagaagcaggttgcatctaaatgactgaagttggagggttaattctttcaaaaagtggttgccttttaagtgccaaatgttaggtacattgcagaagtcatataaggatccgtgtattgtggtttttatcatttaactgtgtttttttggttattgagttaatagcttgcaaagacaaattgttgttgaatttattggttcaagttaatgagggtctttgtgcctttcttctgttgtttacctccttgctattgaatttacccgaaataggaaaaaagagctccaatttgtaagatatagcagagtttggccatgtatgaatgtacacctttatgtggttatatttttgtatcaatttcatatatatatcagaaagagtgtcagacactttcactgaaatatgataaagtagacctgttctaccctgttagttgacaaccaaaatccattttttttaataagagaaatatcatacaatataaaagttcatgggttaacaaactagaaatgtgaataagtacaaactaccatgtcgtgtaattgcatgt

SEQ ID NO: 9034 - DNA, 583 bp, Gossypium hirsutum
ctcgagacaccttggatcaatacactggaatttcgatacagagctgtttgattctcgccacgaatgaactgtaccgaaactctaacaatgttaaaagctaccttgggagaccatggcggctatattccacagcagtttttctagaatcctacattgatgacttcattgatcctaatgggtggagaaagtggtctagtgatgaaggcttagacaccctttactacggagagtacaatacttacggaccaggttcagtcacggatgatcgggttgcttggcctgggtaccatataatggattatgagagcgcttatgatttcgctgtctaggagtttatcaccggtgaagcttggctggattctacttggtttccatatgattatggtatttgaattttaccagtctacattattgtgatgggtgatgagaatctagcagataagccaatcaaagagtttttcacttttagaggtcaggcccacgtgtatgtcgagtcctgtctcttagtaggttccagttttcaaagcattaatttgtaccttagaagtgtaacaagtgaaaaatgccaagcagaatttgttct

SEQ ID NO: 9035 - DNA, 632 bp, Gossypium hirsutum
aggaaaggaattccaccatgggaacaactgaaagatttagtcttggagctcgagcaccatcaggaaggtctctcgaatagaccatcattggtcgtggcgaataaaatcgatgagaccggggctgaagacgtgtttcaagagctcgagaaaagggtcgaaggcattcctatatatcgtgtatgtgcagttctagaggaaggaatatcagaggtaaaagctggtcttaaaatgcttgtcaatggtgacgaaaattcaagctcactcaatatagaaaacattaggtgttgattagaatcctgctttggatgatattttagaaattattttagtcgatttttttaattttatttttagaaatatatgcgttgatgaaaaaatattattgttaaagcatattgtgttgatatcacgaatttattgttctgccctttaatgggcctacagaatgcggaagattaattactgagcttgttctggtagatactttgagaaagaaaaaaaatacaattttatcattgtattagtttatctttataatctatgattattagagaaaatcgaaagtaattattataaaaatataaccatcaaaacaccattaacaattatataaaaaaaggcagagggctatg

SEQ ID NO: 9036 - DNA, 490 bp, Gossypium hirsutum
ttggggattgttcagtaacattgccaaatttattgagccatgccctgatccttcatgtaatgaagtgcagaatcgaaaaccttctaaagctaggggtggacgaggaagtgggaaacgaagcaaaaaccgagctggtcaaaacagaaaagaatcaagtgggctaagtaacactttaaccagttgcctgcgtctgaagattaaagtgggcaaggaagttgctccaagtaatgtgaatactttggttgcagaagtggttgatccatcagttcttattggtacttcttttagtaattatgggaaggaaaccaatttacaatatcctacagtagcaaatattgttgaagataaagtagaactgggtagtgaaatgcggtttcagtccaaggaggatcaagaaatggtgaaaacatgctctgatgtttttcttacagaagtaaaactagcaaataaggctgtcaggtgttctgaaaatcttgagaggttgtctgag

SEQ ID NO: 9037 - DNA, 627 bp, Gossypium hirsutum
tcaaataagacccactcttatacatcaaaagcattcaccaagccatcaactaaaaatgaaacagcttatttaggaaattttcaaacatctgactgcatcattaaatatatataaaaaaagaacagaaaaaagagaacacctacaggcaattgagacgatgctgccaaagatgtcttcaagattggaccaccctgccaaacatcaaggttttcttttccaagttattttgtataaaagatgccattctatacactgttctgttaaaaaatcgcaaaaatctgagaagccagatgatgcatttatatcattgaacaacacatgcaagataaaaggccttctttggccagataaaaggccttgttcaagtaccaagaagaatcaacaagccttaatcccaaatcccaacatatttgggactggctacaagaaccaagacataggaatctacatcaaaccacatacttgaatcctcctctgatcatcccccaatcaaccaccatcgcttcaagttctaataatttcatataattcattacctgcacccatatcttttttagtctaacctttaaacctttgcaagtttaatgtgctccatccttcttaataagtgcatcctcgatctgtgtc

SEQ ID NO: 9038 - DNA, 634 bp, Gossypium hirsutum
atgttacctttttggcatacaatttaaagcacattgtcgtaatctgatttcaactcttccatggttgtgttccatccacgtcaccggttctcgtggtttatcggtggccaagacaagacccagaaaccgccgggacgaagtattctatgaacttctcgaggagatataaattccacctgaaaagcaaacaagagctttatatattgtttaaaaataagaactgtagaaaaagattttagggtaaatttcacacaatgtcacacaattattagtatgttttcatattagtcatttaatttcaaaagttacaatatgatcactgaactatttgaaaattacaagttaatcaccggccctcctactttgtaacagtcagatgttgtcattaagttactatgcatgtatatataatatttctagatttatgatgtttttttatatacctaatacacattaaaaatataataggaatatataaataggcaataagggtggttagcccgcgcgaaaaataaaattatttttagggactaattttaaatttttgaaaaaattaaaatacaatttaatcattctactggttcataatcgaaattatacaaaatattttccctattaaagaggcaaggcccac

SEQ ID NO: 9039 - DNA, 584 bp, Gossypium hirsutum
  misc_feature (564)..(566): n is a, c, g, or t
cagagagccttcgaaacaaaagaacaaataaaatcaatgatgcaaggaacaacaaagttaagcataaggctaacatgacatatatatatacaaagacacttcaacgtctccatcctcacggcttaccgactcaatagcacagaaaagccgtcggaacattccctgatgcctgtagatgtgacgtgtgccaatgaacggcatttctgctagctcagttccatggaacctacatacagcaataagataccaaatcggtaagcattcatttgattaatagtccagatgcatgtaatgcacccatccaacaagaagtcaggtgagtgtgttttgataagtgattccagtcttcactatgtttgtttgacatttttatgggtccaaggggggaaagtgcagcgctacagatgctaaaatgttatttacctgattgatgctgcagaaattatttcatcgcctctctccagaatagcagtgtagaagccactataattcagccggttgaaattcgatcttgaaagataaaagcagcaaaagcaaatgaaaacagttagatatttgatgtcnnnaaaagaacatacgacaac

SEQ ID NO: 9040 - DNA, 608 bp, Gossypium hirsutum
caggaattttattgcaaaaacaaataaaaaagacttcttttttaagttgcacatgcagctagcccaaagccttgtttttgcaaggatggccgtaaaggaaaaggaaaaaattaacccaaatatataaaccatgaatcgaacttagtggatgttgaatgttcctataatcttgttccaagagatcgatccttcttccatagaacacgtatggctatgaaaaatataaacaaagaatccaagacccaacatcctttccctcgcccagtactttaattaaactatttccgtatgtgctttacacgtcgagcttcaagcccggctggattttctctcgaatgcttatgatttcaaaccggctggaaaaatattagaactcaagatggcaattgaattgatgggtactcgagaagaggaggcgccattggttattgatatttcagaaagagaaaccccaaaaaaccgaacaagggatattcatattttgagttgtgccttcttggtcttcctcgcttatggagctgctcagaatttggagactactgttaatgctgtgagtttcttctaccgattttcccttttattcatttgatgaacttccccatctgctg

SEQ ID NO: 9041 - DNA, 627 bp, Gossypium hirsutum
aatgatcagagtcccccttacacaatgtgggtccacttcttatcctggaccatggatctaccaccctcaccctcactctgcataccatatattcacacaatggaatggctttaataccaccgaatagtgactactcttggacgctaatatctgctcggaactcaagctttctggggtcctaaactctattaattaaggtattaacatcggattctaacaacagcatttgacttgggagttaatctatttgtctggtaaatgatgtacatataataaaagaaaactgaatacaaaaagaataagatggatcctatgcaaataattgggcttggggatggtgggtgggggtaatatttatatactatatacaatgtatagaccaatgggattagatttttggaagattttggtgaccccaattggctatttgttcgggattatagttttgactgtggaacacaaaaagattcaggttgactatagagtgagtcgtttagttccaaaaaagaaaaaaaaagccatacaatctgagcaagcaagcatgtgattgtgatatgatgggggcgtttataatttctagggtagaggattttggcagctactgcacaattcacacccaattaaggt

SEQ ID NO: 9042 - DNA, 603 bp, Gossypium hirsutum
ctctttacaccgattcgcttttctttgcgactgctgacttttatgcgaaaagcaatcgactttgccattcattttgttgcctgcatccccatttttcactatgtcacttgcttcctttttacttttttcttagttcaccaaattttgaatctttcttgtattgtttcttttgcagtaatttttgtttttccttgttatttgaattttgttggtgtattttcttgaaagtcacattttacttgatcagttagtcaatttgctctcagttaattaatcattggcaaatgcctacaaggggaaatttgattgcttgtgcacttaatctgtagagttctaaatttgagtgtgcgttgacatgttccctaccgtgaaacattgacgggtttggcttctctattgggatggccatgaaattcaaacatatgccaactgttataaaatctcatgattaggggtttaaaacgcgttttctctcttcattctcattagtgatatatccggtacttgatattttgacttggatacttgtgatcataattcatatatgaagtgttaatgatttgaatacatttagctgtcagtcatgctgagatgtccgtatga

SEQ ID NO: 9043 - DNA, 543 bp, Gossypium hirsutum
  misc_feature (537)..(539): n is a, c, g, or t
ataattaaacaaaactacaactaaatagctaacaagataattaatactcagtttaggaacatgaatttggatttcattgatatgtaaatggtaaaaatgaaaagcataaaaacatggatttagcaaattaaaaaatattttaagaattcgaaattcactggtcggcatcttaacaaattcatagatttaataaacattcatgaaacgctacataaaggaaatggaatataaacattcaaatatcttacgagctgaaaatgtcctgaatattgacccccattcctcctctgcctccgctggcagcatgctgcttcaggccctcctcaccatacctatcatatatgcccctcttttcgctatccgacaacacctcgtaagctaatcattgtcaaagcaattaatcgtttaaagaagaaaattcaatcaaatctatcactcaacttatttttcaaaaattataataataaagaacaagttttttttttaccgttgttaatgtcagcaaatcgcttattggcctcttcattgccggggtcnnncagg

SEQ ID NO: 9044 - DNA, 637 bp, Gossypium hirsutum
agaaacaagcatcaatgactattcgatgaagaacataaaatataaacaagacccagtcatacagaaatttctattctattaatactataaatggttgtcttcaaaactgataataagaacacttacagcttcatattcttcttctgttaattcttggtaagcacttctgctaccaatggggacttcaccattctctatatcatgggtactcccaatgcacttaaagaacttacttgtgttttttgcctcctttagaacataatcagggggttgcgatctacaacattaaaaccacatatataaaaggcttcacaacaattgcaagaatagaactgactgaacggatgataagtgctaaaatatcttcttttagggtgcttggtcaagtggaaaagtggaaggatggaaggaggaagtacaaaagtagaaggaaaataaattttgagtgtgctaggtagggaagaaaagtgagtaaaataaataggggagatgaccattttcaatcctaatgcaaccaatctttccaaaattggaatgataagaggagagaaaatgagaaaagggtatctgttagctcaaaattatgaatttttaaaagcttcattttctttcctcgcatttttcaactctaccaagc

SEQ ID NO: 9045 - DNA, 564 bp, Gossypium hirsutum
attagatgaacgggtccccttggtaacgaccacgctctttcatcttcatcttccagtttagccaaaccttcccaatgaaaacaaccttaattaatataaaacgcatgtgcttcactgtttgattcgtttaccgatagatttgagtaacaactttttcatcttgacgtgattttattttattttattttaaattaaatattttattaaaatttaaccataaaaaatacataaatattaatataacattcaacttcttttaaataataagataaattatttgaatgttttggatgaaaattggatttaaactttgggtgcttctctattcaccataaaacaacactggaaattgtaggtttataatcaaaacaaaaccttcaatttattgtcaatatgttaattcaatcagttttaaaaattaaaaagaattgtaaatcgaaaaatataaaaaaactcaaaccaaaaaatattagttggattccaactatttatatatattttttacataatttttttcatttattcaattaaattaaaaatgggcaatctaacccaattcactaa

SEQ ID NO: 9046 - DNA, 674 bp, Gossypium hirsutum
  misc_feature (657)..(658): n is a, c, g, or t
ctttgcttgtgaatttgaaacaactaactgaagaacagttctgtgtattgagtgacaggtaaggggaattagaaattgttaatggtttcagggaatgaaacgtggaaggtagagtttgagcgtgtattttttgtcactgtttgggcaattctgcaaacgctggtggatgagtgtgttgatatcttttaaagtttaagctttgttgctttttgagagattgttagaagcttggaacgaaaagtgacttgtacgtaaaaaaagaaagctgaaaagctaatacttttgttggatccttttcgtatagcatgctttgattttgtttggttcattgctttttttgaaatttgtttgagaaagttactgcgtttgcacatgttgtaatccttaagagggggtacttagatgttaacgtctttatatcatcttttgagctgttgattggtgagaactaaactaaacacatatatgacacatggtgaggaggaagagtgagtgataagactaaccaatgctaatacccctaaagtattcaacttttggaaacatgaaacagaatcttcttgactgttggaacccccaatctcattgatgtctacattggtttggtctatgagaaattttgcccttttatgcagtgggtgtgtgtttaattctcannaatcaacagctcaaaa

SEQ ID NO: 9047 - DNA, 646 bp, Gossypium hirsutum
tcagaagcagccttttgtgccatttggatcaatggtttgcttttgctaggtaaatgagcattttgcttggtggtactcgagttaatagaggaagtagttgaagagccttccaaagctagtctcttgtttattttgtttcgtctcgtaagttccttttctttcgccttcgactttgcagccaaatgacgtgatcctttgcaatgcatctgcataaatcacttcaacaatcaagaaaacaggataaactatattacaaccagacaggaaaggaaaaaaaaagtctcaactgaagttcaaatttcgtaagtaaaccttaaagtttacgagtttggtgcctcagaaacaacttcccctactcttccacccaaaatcccagtgaaaaaaaggaacaaaacaaagtccatattcccaattcaagcaaaacaggcaaataattcaatctagagagaaaacatagaaagatgtattccattctcaaatggctacagagaaaaggaagtgacatagtatgttgatattcctacaactagaattcgaggactatgaaaaatcataagaaaaacaacataacatcatacacatatccatatccatattcaacgttagactcaaaacgttaatgggttaattgcaccggatgtccaca

SEQ ID NO: 9048 - DNA, 521 bp, Gossypium hirsutum
  misc_feature (486)..(488): n is a, c, g, or t
  misc_feature (508)..(511): n is a, c, g, or t
  misc_feature (513)..(515): n is a, c, g, or t
atgctaatagaaacagacacattgaggatgattgtgaatgtccagctcatccaagatggataaaactgaagaagttgcagggttatcatcaagacagaacacactgggcggatgacaacgaattgccatgtccaatacttgagaagctttagtgtatggtggttcagcctaactgttcgaggctgtagtttgagcaacagcaatgtgtcaagagatctgattaagagtgtaacttctaacttatttaagtgatatatattaatttaaagtagcatacctgaaaaagagtcataggaaatgaatggtgaatctctctacctttaatttcatcaggtacaatatttttactaatagatatattcaagtaactatacatcaaagccatgaacttagcgatcacctagaaccaataacatcaaaaagcagcagtgaataataataattttaacaaaaaaaaaaaaaaaaggcgccaaacccaaacccaannncaaaatttgggcaaaggggnnnncnnnaaaacc

SEQ ID NO: 9049 - DNA, 657 bp, Gossypium hirsutum
tagataaatttcactaattctttgatataattgtttgaaaagattgaaaggaaaaagattgtagctagcttgctggtagaacagctcaaatatcctttgatttagttttatgggtgaccatcaattactcttgctcataaacaataattctcgaatttgttaggggaaaaaaataataagggaagaagttgaaaatttccgaaatgcagtcttcaaatttttcaatatgaaaatgaaaggctagaaatagaaaggagcagcttgctacccctttcccaattcaccttccttcaagtttgaacctaaatccgtcctccgtaaaagaaagaaaagcaccataaggctactaaacactcccctcatgattttttaccaggattgtttagctcaaatcacttatcctgcacttctatctgtttaaaatatttcaaagcatatattcaacaatgaattatcagcaaaacaagcaatcataatgaagcaaaaaagataaattaggtaatctacataccatcctgcgtcaaatcatcaaacatagacataatgtccaccttcaaatgaggtgcttctacagtagcagcaaattttccaagatttgtcgcagcagatctcctaaccatgggcatgtcatcttggcaaagtgaccgtataatgttc

SEQ ID NO: 9050 - DNA, 588 bp, Gossypium hirsutum
  misc_feature (585)..(585): n is a, c, g, or t
gaggtgagtcttggatacggtatattcaaaacaggtatgctcaaatttttaactttttcttttatatattttaaggtttatattcccgtatccatataaatatttgaatagatgtatggggttcttcaaattttaattagtccaagtcacaggttttgagcctttggtaatatcaggtcttgtcaaacgatgttagtgcaattaggagtccgagatagctgactcacattgaggttttcaaattggagttagttatggatggaaaacctgaatcgtctatggattttgaatcgagtggttacatatggagtggaatttttttttgaaaagtggatgtggagtgggatgtgattgattttttttaaaacagtgagtatggagcagctatggtaattacttgcctcgtcttgcattgctctgttatataatattatcatattattcttatatatataacaattaaaaaggtaaaaatgtaataatgtattatagaaaaaaatttatatattttatgttcaagtatttttctgaagaattatgttgaaatatttatttgactttaaaatatttaaaatattaaaatantaa

SEQ ID NO: 9051 - DNA, 479 bp, Gossypium hirsutum
  misc_feature (416)..(416): n is a, c, g, or t
  misc_feature (420)..(424): n is a, c, g, or t
  misc_feature (433)..(434): n is a, c, g, or t
  misc_feature (436)..(437): n is a, c, g, or t
  misc_feature (443)..(448): n is a, c, g, or t
  misc_feature (453)..(457): n is a, c, g, or t
  misc_feature (468)..(472): n is a, c, g, or t
ctacattgagcaatttgaaccagatgcttctaaacatgacatggacgcccaagtggcattaaaaccattaataggtatgctcgcgaccgtgatcgtttttctatctctttctttcaacaaacttatgaaatgaattgaacggtggaaaatcccaaatttggcattgccggaatcaaacctaaaggactccccaggcaggaaaaaacctacagccttcacataaaaaaccaacccccatattgaccccctccccaagaaattcccccttttatggagccacctttcattttggtttttaaggctatagtaacttgggattaaggaaaattaatgtaaaaacctggaaaggaataaattaaaacctccaacatacaaatgctggagaaatcagaagaattaaaaatatttctaatttnacannnnnagtaccacnntnnacagannnnnntgctnnnnncatacatgccnnnnntgcatga

SEQ ID NO: 9052 - DNA, 640 bp, Gossypium hirsutum
tcttttttgttccgaatccagcaccactattgcagatacagcttctccataatccttatccggtaagccaaacacacagcactctgctatatcagggtgctgcacaaaaatgaaatttttagtctattgatttgacaatttcacctccatcgagggggtcttttgttcatttttcctcaaaaagcaatcaaagaacaaatattgaaaacaaaaagaaaggggttccaccactcagaataggaatattgagcggacaggtttacctgtaaaagaactgattcaatttccaaggcagacaatttgtatccaccaaccttcattatatcagcacttgtacctgacgaattacacacaaaaacatgaaacaagaaataagtcgcaatccagatttttacaggtttggatgttgcatgaaataacgcaataaactcacttccagacaataaccgtaaggaaattaaattcagagagtagagttaaaagcatagaagaaggaataacagaagagaagggcgagtcaggaagtgcataccaagaaaagataaaaactacagaatagctttgacactttgtcatctctagaccaacaaaatcagaaaacacctgtaggattttcttatctctcaccctctgacaaaca

SEQ ID NO: 9053 - DNA, 641 bp, Gossypium hirsutum
atttttatcatttaactattaaatttttttatttagtaattaaattttttataattaaatattttaattattaagttgtttacatataccattaatcaaaattgtgtatttgtccgaaataaggtgtaaaagcaaaataaaaataaaaattaggggctagaagaagtaagttgtataattttataatagttaaaatgtaattttatcattttaatagcttagatctttgtaatcttcaaaagattaaattaaatttgtatcgttttgaggatcaaagtacaaatttattatatatttggtcaaaacataaatttaccattttaggggggtcgggctctactagccctttgttgtaacccttagacaaagggatgagcatttgatcgaattgagtgaatattttcgaattagtcaagttgacgagatttattttatcattctaaatcgatttaagtttttttaaaatcgagtcaaataaaattaattttgaagcgaataaaataaaatcgatttaatcatgaagttagctttatttatattttagtctaaaattatttttcaccatattaacttaaataagatcatacaacaaactcgtcctttatttcattgtcacattcaaatccaagttaacccatcgt

SEQ ID NO: 9054 - DNA, 622 bp, Gossypium hirsutum
ttccgagaaattaacttgaaccatgagctgtaaagttagctaataagaatccacttaaaagttcaaaaatacgaaatagcaaactgaagtacctttttcttttctttcttctgtgcaggagtcagatttttgctttttcttattgctgagaccaacatccttgtgcaaaagataggagaaatcgtacttgtcacatgtcagaactctcagaccaattctattttgacaacatgtaaataacctagttcataggcgccctcatttaccttccagataagatttctagcagactgttgaactcattacatgtcttttggtgcacgaaaatgcagttgctcatatgtgcattcgtgagagccagggatttaaatagcggtccgttaccgaaatagcggccgttatatagcggtaacggcaccgtccgaaaccgttactgccgaaacccgctatacccgcaatacacaataagtaatgtaaaattcacgaccgcgaaacccgcagtgaccgcaatagcgtccgttatgtccgcgaccgcgacaaacgcgacgcgaccgaaaacgcgaccgcgaccgcaatttaaatccctggtgagagcatatgtgtgaaaagaaaaggaaagaca

SEQ ID NO: 9055 - DNA, 657 bp, Gossypium hirsutum
aaattcccaaaggatcgtcaaggtctatcttcggggtatctttaacccctaaagtattaagctgatatccaagagcagccaatccatatgcatattgcgcaacattagtccgatccagacaatctatgcagttggtcctaagcacacctctttggaaagtgggaggcttgacagaatgatttccattagcagtattattatcaccagaatgattcccctccaatctgtcagcaccctcgttaacattgtcacagtattttgggggtgacatgtcaccatcatcaatattcctgctcatattatgagaatcaaaatccatattcaaaacatagcaaaaaagaaaaacacaaataaataaataaataattctcaccattactgtaagataaaaaagccataagtaattcataaaaccaagtatttacctaatacaagaatctaagacctgacaatttgaaatactaactcatgacggggtttaaaaaatataactacttaactgagagagagattgtatttgctatctggactacatgctcttttcagtcaagttattttcccacatcaaaagaatcataactagaaagctaattacaaccatatttccaaacatttcttatacaaaaatggaagttagtaaaaatgaaaagcatactc

SEQ ID NO: 9056 - DNA, 622 bp, Gossypium hirsutum
gggaaaagagtaattctttgatgcaacagaaaaggtttaatataatttattattttagtctacaggtaaaccacataattagttagcaaggtatatatatactcattttaaaatattgtcgaaggaaaacacaggtccaatatgattggacatcagatctttaagaaagttgacagctctaagctttcatacatcaaaatttgggagcaaaactgttataaggatattgaaagcattaatcattttaattcaagagtttcaatagaactcaatgaaacaaggcaaaagtacactaacacacctcctgtgtagccttattcagactacaccatggtagtgacacttaaatcaatataacaggtaaaactacacatgaactttgccctagaccacatatcaaaactgcctagaatgaaaacacaagcacacaataaaataatgaaaaacaaaagttgcctctctatccacaataacgcaactaagcacacaataaaagggatgaaactctagcttccagtatcaattctatgtgacatagactaagggcctgaatgattctcgattcaatccattcctataacctaagtccagtatttttctttattttttcttgtatgatagg

SEQ ID NO: 9057 - DNA, 428 bp, Gossypium hirsutum
acttcgtggcggcacccgccggctgtggagaagtagaagagaagggccttacaaaaacggtggtaaaacctggaggagaagataaatgatgaggctttagacgggatttataagagagggataggcgttttaggagaatgagagggaacggagattgcgccattttttggtaagttataataaacaaagtcataaaccctccgccatggatgaacaagaaatcaggaggaggaggtgaggaagcttaaacccttgcggggaaagagaagaggaaatgaaaattcaagcccaaaagagaggaaaatctcatttagggtgttttcaggccatatgagaggcccattattcataagggaatttcatttagaaataggcatatacattagccggcccaaaattcgtattggaccattattatttacttctta

SEQ ID NO: 9058 - DNA, 632 bp, Gossypium hirsutum
gggacaggagacatgggaagctagccacgtgtcaatgcattcgacgtggaaaacatgttcgcaatgcggtatcgttttaagacattgattctcttcaaactcgctcagacaaatggggcaatctatctgatacttggcattcccacggtaagaatatacgggcaatgaccgaatggtcgtcgggtcaagtcctttgcgtgaagccgagacaagatgaaaatcagaggggaatggaaatgggtcatgggggccaccacggtaacgtcttctacgagatagatgggccgatgggtcttccgagaaacgacgaatgaagatagataaaaagcccatgaagaagagcacagtgaggagaacgacgcaagtgagagccatggcggaatcaaaaggagggttgtagggaggtgactttttagatgaggacggcggagatgaggtggcgttagtggtgttggggaagtggaggggtggaaatgaggtggtggaggaggagtaaggagagtcatagtagaggaagagtttccggttgtagggtttcatttgaagttgaggaaacagaaaaaagggtaagataaattattatacaaggaactatggagataaattattataaaatgtatagaattatagat

SEQ ID NO: 9059 - DNA, 631 bp, Gossypium hirsutum
tttccatagaggcaattgtctcatgcaataacatgctgaaatggataaaactatataattagatgatgtatgtatatagaaggataggaacctacttgataatgtgatccaacatgctgaaatggataaaactatataattagatgatgtatgtatatacaaggataggaacctacttgataatgtgatccgaccctgccacataaggcttgaacctccaccattactgttatgtgaaagtgcttcacaatcagcatttccagttttatcatcatcatagatctaatatgtgagaaagagaaagaaacgtagccaaagacaacttgccgattatctcctccaacaaaggtttgattcatttatgtattaaataattaacttcccgttcccatgaacagttcaaaccattaacataaatagttttgagtaattaacaagtatcaaaaaacaactcagataagtggaagagaaagcctagccggcaaatcatccttggctgcactactttacctcattcccacatgctaaatcttagatgaagacagtatcgatccagcaatggataaaaaactttttcctcaacgtattagcagcaatgtagtttgcagagtggaagtttgaaaatctgtgg

SEQ ID NO: 9060 - DNA, 583 bp, Gossypium hirsutum
agtatgagattgatcctagtgaactcgacttttctaacagtgtcaatatcacaaaggtaacctatgaaccttgttgttttgtctgtcaattgctgtagtttatgcttttgatgcattctgatattactttctctaccttggtttacattatcattgaacttgtgacgagaagtacatatgcttgtgtgctagagttaggtgttaggttatatcattcttcagaaacctatggtgccttttctgtttaactaaaatattcttcatctaatgcattaagacatgtatccttttcaattctaataagaacttccatagttttaatcaaaattgagtttaattcttcttgtataagtgagttatttgagagacttaaagttgttataatgctgtcttgaagttgtacacaaacttccccatctttatgcatacagtgcactttggtaaaatccttttgtataggatactgtattgatcatgaacaagaatgctatatcactaaatattaattgttgaatgttaacacagggaacatttcgtgtagcttcttggcgaggcattaaagttgctgttaaaacactgggag

SEQ ID NO: 9061 - DNA, 606 bp, Gossypium hirsutum
ctttcctccttcctcaccttcaaaaactcaaccttgcctacaatgattttaatctttccaaaattccatcctagttcggtcggttttcaaggctggtgtatcttaacatctaaaaaacgttatttacaggaaaagtcccatcccaaatctcccactcgtcaaatttggtttcacttgatctctctcataatgttttttctcaccaattaactcttgataaaattctttggagggacttgttcacaacctaactgaggtgacacatctttttcttgttagaattatcatgccttctattaatcctaatgttttcatgaatctatcctcttctataaagtctctcagtcttggtggttgtgatttgcaaggaaagttctcaagaaacattcttcattcgccaaacctcaatttgctcaacttaggatacaaccgaatccttagtcttgatcttctgaagttcaatcagagcagtaattttgaacatttggatctgtcatggatgtcctcctttacgaaattgattgatttgattgacaacctgcatgtcttgaaatatttgtctctctctaattccaatttacggggatcaatttcgagatcattggg

SEQ ID NO: 9062 - DNA, 678 bp, Gossypium hirsutum
gtaatggaaggtttccttgaatatgacgtgtaaaaacgacggaacgtgaggttgaattatcttaaccagctttctacactacactacagtagatattataagttcattactatgacttgattaacagaaaattaaaatattagataataattgactggagcctcttgtactaatattgctaaaaatcaattgcatgggggcgaaaggtgaggaaaatcagagaaggttcatataagtgaaaatgtggttatatatgatttagggactatgagaaagtaaaaagtataatattccttctgagtttatggtttttgttttttttttctggtcaaccttctgagtttatgttacggcatagaacagtcaaacaattcttgggggaaccaaaaattttttctccattcatcgcttttgattttaacagggtccaatgtccatttcaataaatgcatgtacttggtaagagtagcatagccgttggattgcatcttgattggatttcattacggaggtttttataatttggtacttaaattggttaagttattcaattgatacaattcgatttaattaaataaattattaaattttttaaaaaataataaaaattcggtttattcgagtcaattgatttaatgattttcttcaaactaattttttatccaactaactgatccg

SEQ ID NO: 9063 - DNA, 616 bp, Gossypium hirsutum
  misc_feature (606)..(606): n is a, c, g, or t
tcttctactatgaagacataaaccagattaagttcatgtaaaatcacttattcaatgcacaccaaatcagtagtggcacttatccaaactctggctttgatttatgtactctatttctagtgttgcagcaaatggaacaggttcaagtgcgaagggttttagagttatggtttgctctgaatcactagcttgttctgtgaggggaacagacttcagggctcaattagaaatctaccacgtcagatattaaaaggtttagcaaccatcatattgtgagagctaaagattcaatgataattgtacaagcttctgacctgaaaactattggtcatacgctatactgatgaaagccacaacatgctgctgtggcatgcatgcatacaaacatacatacagatcatagaaagaacgtttggacaagatatagataagatgtttagaaatataattatgttacctcagaaacccattgtcccaatattagtgcaactttccggtggatgatgcgcatagttggatgatcattagaaagttcaagggataaagcaccatcaaacctgcaatccaggattgtttgagaaaaagtacttcctaccgaaactaagnagatcatacc

SEQ ID NO: 9064 - DNA, 651 bp, Gossypium hirsutum
  misc_feature (591)..(592): n is a, c, g, or t
  misc_feature (647)..(647): n is a, c, g, or t
atgtcattgaggacatatctagatgctgcttggaaggatggaaaagctccaattgatccatcaactctggtattcattcttttgtgacacaactttcttttttttacctatatagtatatggttgttttcttgagacaagtgttactcttttacttttcttgtaagttctaagtttgtttttatcaaattaagctactcagttgctaaactgcccttttgtacaaattatgcagttcttgtttaagcttatttagtgtgaagtaaacctttaaataaaagaagggaatttgaaattggaatcctcttttgcaattctttcctttaaagattaatttccaacaaaatctatccaaaaaaattacctcttaacgatgattatgttagctcttcttttatctttaagctcatcctacttgaatttgtatatcttcttactgcttttattcttttctatcttacattttccaaaaaaaaaaaaaaaaaaaaaaaaatgctttaactgaaactctcctatcatgaagaactgatggttgatcttgtagcatttgctctccgctctttccattatgattataggagaaaaaagaagnnaatgatgcctatgctccaaaggatttgataatcgtcacagctggatcccaccagntaaa

SEQ ID NO: 9065 - DNA, 610 bp, Gossypium hirsutum
gaccatgcttacgatctgatttttcatgctaggatggttatcgagctgttcgctttaatccttatctatggccttctggccaacaggtatcaatcgcaaaatctttttcagctattaggccacaagatgtctcttctatttgaattattaaaatctaagctgtgttcattaaaaattcaatccatatatgtggtttaaattggagtaactgttctgtccgtagaataaagccaggtaaacaactgattgaagaaacagagctttcaccgaattagctgagaaaattctttacatcaaaccccttcttaaagtatttactgaaaatgttaggaaaggtttgttaagatatgtaaatagaataatatagttgattattagggatttgattttatttactttcctgagagagtagactcatacttgtatatatatatatgtattgtttgatgatgaatgataaatagaatttcattctctctttcttcttttgcctcgttaattattctttcagtatttcgttcataaatggtagtgacacttcaaggggaattatcttaggtggactgtccatatgaactaaatatcttatcataaatagacatgtaaactt

SEQ ID NO: 9066 - DNA, 607 bp, Gossypium hirsutum
  misc_feature (40)..(42): n is a, c, g, or t
  misc_feature (535)..(536): n is a, c, g, or t
gcttttctggaagcaagggtaatgtgatatcaactcactnnntctttgttctcatatatacatacatatatttacatatgttgttgatctttgatggagttgcaggccctcgatttagttccggggaagatacatgaacgatctccggttttccttggtagctatgatgacgttgaagaaattaaagcactctatgctgctgctgatgctgcaaaataggaagaagaaaatgctgcataaacttgtagactttgtatcagtctttttaagctttttaacatgtggttccttaaagagtactaataatttaatccctgtactattgaagaatcaaatatgaccaaattaaaataaaataaatatttattatttaaaaaacatagttttatatataaaaaaaatcaataaatagcagacaaataaactaactacataatatttcgaccatatctcgagtgagcaatagaagaaagtattagcacctctcttggaatctcctcaaaaagtcttcaatctttggtttgttaccaaagcnnttttagccagtcagtagttttgttatattctctaggaagatgtttaattattcaagatcttacctttccca

SEQ ID NO: 9067 - DNA, 667 bp, Gossypium hirsutum
aactcagataccgtccattatttccttcactgaagtggtgaagctgacttttcttactatttattttaaaacttaaaacatattctaattttattaagtataaacttactacaatttaattacgttaaaactttgttaaatcatcaaaactcttaagcttcaacatccttcaaacattaaagtccttcagaaccaaatatagatattgccaatcaaaagtgaacatgtatttttttcctctattctttatctattctactatttgttttctttttaattcattttctccatgtgtaatttttaactgatttttgtaacagattagccagggaagtagtgagctaatgtctaatgatgacttctcatttcaaactttgttttattttgaaatagattagtaagtgaattgttagacttgaacaacaatttgagtttataaaacaaattatattaaaatttatctaaagtaactatttattatatattacataaaatttcatttatattttacatatatatttttatatgcatgcgccttattttactctggcgagtgcttttattttgtgtcttgtgccttgggccatacagcagacttagagagtgcacctagtgcctttgacaatggtagtttgaagatatagtcgtcgaatgctgttgaaatatc

SEQ ID NO: 9068 - DNA, 436 bp, Gossypium hirsutum
  misc_feature (316)..(316): n is a, c, g, or t
  misc_feature (319)..(319): n is a, c, g, or t
  misc_feature (323)..(323): n is a, c, g, or t
  misc_feature (325)..(325): n is a, c, g, or t
  misc_feature (328)..(328): n is a, c, g, or t
  misc_feature (336)..(341): n is a, c, g, or t
  misc_feature (358)..(358): n is a, c, g, or t
  misc_feature (361)..(363): n is a, c, g, or t
  misc_feature (374)..(374): n is a, c, g, or t
  misc_feature (387)..(388): n is a, c, g, or t
  misc_feature (401)..(402): n is a, c, g, or t
  misc_feature (404)..(405): n is a, c, g, or t
  misc_feature (413)..(414): n is a, c, g, or t
  misc_feature (416)..(416): n is a, c, g, or t
  misc_feature (418)..(420): n is a, c, g, or t
gccctgctacttgtgcttttgttgaaggtttatctgattgaaatcgcttgatttgtcctacaaaatttagaaatagaatcataatcatatctcctccattctaggattaagttgttagtttgatttatttcaatttgttactgctgcatccttatctcttttatgtcaatttattattttgaattcaatttgtcagctggtacctatgatgaactagttggttgtgaagcatctcctctataaattgatgatcatcgttggtcattaacaaaggatgttccatttcctgccttcttaaaccttttcatggaataanagnctcntntcncttcttcnnnnnncttactcctgctgcccnccnnnaagacataaanacctctgctgttnncaattctgatgcnncnncttctatnntncnnnttactccatatactca

SEQ ID NO: 9069 - DNA, 594 bp, Gossypium hirsutum
  misc_feature (422)..(422): n is a, c, g, or t
taatgttaaaggctgacgttcttggattatagtttagtagacaaatttgcaaggatcaaagatcggcattttatatgtttaacttcataagcttcattccgaaaaacaaattttccccaattctcaaacccaaaccattttagaaatgaataactattaaaatacctttggatccttaggctggtcgtttgtctgaactgcgtcaacctgaaccgaggtttcaacttcaacatcagccttgtttgcagcagcatgatgatcagattcatcaacaacctctgctttggcatcagcaggttggaccatgacagactcatttgatgatccttctctcacaagtcgaagagcaatctgcaatccaccaacatagtcttaatctatccagattccacacaattttgagagattatatgactggaaanagggtatgtgcatgtgaatccatgtgactgtttactgtaatgcttcatgattgaaacctagtaaccgttgcaaacttaagatgggcggttgtgcaaaccttacgatagatcttttctatgtgcttttgaaggtttcgaactcctgctctcgacagtagtgcatgcacgacct

SEQ ID NO: 9070 - DNA, 658 bp, Gossypium hirsutum
agcaatcagttctcggtttcattttggatgagtttattgattaattggataccaatccacctgattttcttgttttttgttttctatcaatttttcaatgcaggtggttttggatcttatctgttgggtttaaacaggaagacatatgaacaagcaggagttgatgccgtaggtaataatcctgggagcattaaggaacctgagatcggttggatgactgggtttctctttgtgagctgctttgttgggcttctggcattggttcctctaagaaaggtatgcatgtttcttctacttcccttcctttctattctgtgtttccaagataggttgatgatagttcatctgctgtgatatcagtgactcttagtcggtaatctgggtcttaattttctaattctaatttttgctatttcagattatgataattgactacaaattagcttacccaagtggaactgctacagctgttttgattaatgggtttcatacccccaaaggagacaaaaatgctaagtatgaatctactgttccgaactcttttcttttctagttagaaatgaaacaggttttgagtgtggcgtaactcaagcttgtaatgattcatcttcaggaagctggttcatgggtttctgaaattcttttcatttagtttcct

SEQ ID NO: 9071 - DNA, 638 bp, Gossypium hirsutum
atactgctaaataacaagttctatttctatcctatcacaacaaaacaagcacaaattcattttatgcatggaatgaaagaaacaagtatcatgcagtaaaaaagaacacctaggaaaaagtaaatatttttgttgggttttctaatataaaaatctaaatacacaaaaactaacgtgtatatgcagggactaattgatgttgttgaaaagacagaagcaggtgcagagaaggtaagaaaaaaagaggagaggtgtaataaaaagcgagaaaccaattcccttgatttacgatgagcctagccttttgtgcctttggaggaaattaaaaataaaaacaaacaaaaaaacaaaggtaaccccctcctccttccttgcaatgcgtgttgcttggcagtgactgcttagcttcctggtccacatgcgatccaatgattacaaatatataaagggagtgtgaagaaagtatccctagagggaagtttcaaccatcaataatagaggcttttcttacgatcaaagtttaattatatttggttggcctaaatttaaaattaaaacttaaaaaatatcgaatttctaatcttaaatatatatccaatttttaaagtttaccttaaaaggtctaaacatgaacccat

SEQ ID NO: 9072 - DNA, 611 bp, Gossypium hirsutum
  misc_feature (56)..(56): n is a, c, g, or t
  misc_feature (304)..(304): n is a, c, g, or t
  misc_feature (550)..(561): n is a, c, g, or t
gagaaaggaccccatttgggaccagctaaatgagcagcccaaaagtacagagaacncccttttctgttaaaagtttacaagaaagagcaagtcatttccctctagttgtagaagctcttttagaattagctgcattatgatttttcatggttggattaggagatggattctgtcatgtctataattgtatacagcatattaatgctctcactcatcatgtgataaggtaaaagtaccatggaagcccctgtgttatgaggaagaatgtattttgtgtcatttattaaaaaattggacaaattantccttgtatattagataaattcatccatttcttttattaaaaactgatgtaattgacaaaataactaaataagtcacctgtaccttatgctctgacatataaagataagtttttaaaagtaaaaatccatgatacttttacctatgttaggaccatttggcttcattttagtgcaaggctttaaaacatcaaataccttggaggctaaacaaaaattgtttaacctctcggggcagattttccaannnnnnnnnnnnacaaaaatggaacaagagtgagaaaggagacaaacaggaaaagaagaaca

SEQ ID NO: 9073 - DNA, 634 bp, Gossypium hirsutum
attaaactttaaagtacaaaatgttaccaaagtgtaaaattgaatttttaaaatgctaattgtataaaaaaatattatgaaggtgtaaagtttagttctacaacctttgtaatttgacataaaattgtttgatttaattattcatatgaaactaaaatatttaaatgaattttattaagaactagcataaaaactccactaaatagcatacagaataatcaatccatgaataaacagaagcatcaaaggtaaaatgttttgaagttcgtcctttcacctcttcaaattaaaaatctgagggtggatattctactaattaatgaacttggtccagttagattagtccaacctgtatgagtaaggacaataaattttgtattatttaattatttttttatcaattttaattataaaatatattagatttctcaaataaatttttgtgtctatttatgagttatctaattaatgggtttatttatgagttaggaagctacgttttgtccattgacaatactctccaccagttcatatacatactacctaacaatgttaaaagagggtttttttttttctttttgctaaaaaataatacaagggcaggtttaaaaaaatgcaaatggggggccaaagg

SEQ ID NO: 9074 - DNA, 639 bp, Gossypium hirsutum
ataaaggctcaaatgattgttgacactaaaattattttaaaacgttaatatattttgcattgagacaaacagcactgacatgaacgctgaattcgtggcatttctaatgtccaaaattagaagtcagcggtttgaaaatagatctattcttttttgtacgataatggacatataatttggcttgcatattcttgattaaacgtggcctaaacgcctagctcaatttattataattttctttttacattaacattccttttgtactttcaaacagaaacattcttgtataaataagtagggattgcttcaattggattatagaccaaaaattaaagcgaattgaagatggttagatcagccataaaactgttcctactgctgctctctcttgggtacatgatgctttggttcatgatgcccacgaagttatattttgaacattggttgcctaaaatccgtgccaagaccaaatccatatactttggacaacaaggtataaaagcactccatattgcagtttcatttgaagttctttttctgtttggaagtatttttctgtcttaaatgattatatatatatatatatatgcaggttcaactatgctgatatgtacatttcccatcctcttcattgctaca

SEQ ID NO: 9075 - DNA, 637 bp, Gossypium hirsutum
  misc_feature (595)..(595): n is a, c, g, or t
  misc_feature (603)..(603): n is a, c, g, or t
  misc_feature (606)..(611): n is a, c, g, or t
tgtgacacactggtaatttcactgcaataatgttgagtaccagtttgaaggatgcttacgatgggttttgcctctcccttgcttgctttgatttttaattaggttgggaagaatcttcatgtgctcagtcaaatagagggtattgaccttgatatgtacaaagagactgttcttccccgtgtacttgaacaggtcggtgtcatgcacatgcacgaatgcacttaaacttaactcctatgttctgtcttggagcttataataggtaatttttgcttgctaaccatcaagcatttggttgtgtaaaatatcttgccaggttgtcaattgtaaaaataaaatagctcaatactatctaaggaattgcataattcaagtctttcctgatgagtaccacttgcaaactcttgatgtattattgggggctttcccacaacttcaggtgtgtcatgattgtgtgcttctgttattgtctatttttcctaaaacttttctgtaatttgcatcatctacatatttcttcttgttcctggagtgtggatcaacatggatgtgtatctccacttaatatttatgatataaatgcagcatcttaacnactccctncannnnnntaaatgcagcatcttaagcacgccct

SEQ ID NO: 9076 - DNA, 649 bp, Gossypium hirsutum
ttgcttagtatggaaatttatgttctttcattggtaaaatgttggtttaagatttgtttgtttactttcttcaccaaactttatcgataatttacccatggaaatactggttttggtagatggactgtgacttttgctggcatgtcccatctcaaacatcataatacacctaaactggaaaaaatgtgagatgtaccattatgtgtattccggcatcgttgtcaaggacgacatgggcagtagccgagagcaagatcagactcctgattgctcttcgatttccattagttaaggttgctttccatattgtcagagaagttcaaacggaagggatcagatcccattgtaggttcagacacctctggacggaggtagaaggggccatctgattgccaacatgaccagagagatgccatgttggcccgtctttgtgtagaaaaaaccaggcagccacttctaaattgttagctgcagatcacagtgaaacgagtcaatgctctcttatcttagcaatgacagctatgtcactgcatcacagcattgaaattgagcatgatgcatgaattgaaatgataaactcaaaacataatcatccacttcctaaaatgactgatggtgaaggaaaaggacaaatacttgagcataatga

SEQ ID NO: 9077 - DNA, 644 bp, Gossypium hirsutum
ttatgggcttagatgcacatggttcattagcagcaagcaatgcttatttatttattgtcaatctgaggattttcccagagctgatcaatcaagtttttgtcacaatatttgcttgagattatgcaagtagaaatgaacgtctttttgttgtataaagcattagaatagtatggtttgttggttaacaagtgactagcgttcgtaatgtatgcttttacatagacagggcaaaaacatggacagtgatgacggagtgtgtgggctgtcctcctccaattttttttcttaaatgaattgcctggaaaatgggtattgcttccacttacgtttgttgagaacagcagagcattgaattgaagtgagtctttttttcctctttattctaacctacttaacacgggattactaaatatatatatcattactcatcaacacatgatctgattgctctagatttcttcaacacgtgatatgagtgctgtaaaaagaaatcagaattcgaaaatgtatcgaatgcgtttgccgggagtcgaacctgggtcaattgttttgaaggcaattatcttgtttgagaggatatataggaattcaataactgtagaaaattgtcggtcaacagtaaattaagatattatcctgaaaag

SEQ ID NO: 9078 - DNA, 643 bp, Gossypium hirsutum
  misc_feature (4)..(4): n is a, c, g, or t
  misc_feature (6)..(6): n is a, c, g, or t
gttncnccttcctacctcctgttacaatttttggtactttctcttcaattcccttgagttctgaaatatagttattgatgaaacttgctatctctttcccggtcctgttggccttcttatgaactctcttgtttctttcttcccagattgcccaaagagcgcagcaaaagatcctacaccgcgaagaagtgttctgttcaaaaacccaggtgagccactgttgaaactccatctgagatacgtgtaataactccaaaaatgataattctttccatactgatattgagacagggcattcacggaatagatgattcgtggtttctgctgctcttccacacccagaacagagtgcattgtgtaatagccttttatgtagcaaggtagtcattgtaggtagataattccatgatattctccaaactataatttttatcttagaagatagattaagtagccaaagatttttgtaaaaattcctatagtcggtctgtaaagcataagctttaggatcaatttcattgccctgtaatagtttataggcactatgcaccgtgaattctcctgaaggcactctgctccaggccaaaaaatcatcgtggacctcttttgctaacggaatatagagaatcttctcagttacatc

SEQ ID NO: 9079 - DNA, 559 bp, Gossypium hirsutum
atgatcttgcgggcgcattttattctaaaacatttgatcaaatacttgccttaattcctttgatcttgacagaattcgaaactggaataaaggtaagcgccaagaacaccacatcagtacttattacattaaggttcggtcttaatccttgaattctttggttttcaatgtagacactatatgatcaaggggctaagaatttctgggtacataacacgggacctctcggatgcttagctcaaaatgttgccaaattcggaactgatccatcgagcctcgatgagctgggatgtgttagcaagcataaccaagctgctaaagtcttcaatctgcaacttcataccctctgtaaaaaattgcagggccggtatgcggactcgaacttcacatatgttgacatctacacgataaaatggaaccttatagcaaattattccaaattcggtatgtacgattcagtactttggagagttccgaattcattttcaaagtaacaaaggtagatgagaagtagaagtatggaatcaaaatgagttggagttcttactgtttgcaggat

SEQ ID NO: 9080 - DNA, 667 bp, Gossypium hirsutum
ggggttggctttttttgcagttatggagtctgggtatgcaggaatccattgccaaactcataagcaaaatggatttttttcaagacctctttgttactcaaggagaagtagtttgaggaatctgtcatcatcatcatcttcatctttttattgttcttcggtttcttctccaaggtctggtaggttttgtgatgccagatttgaagaccatcagccccatttcttggatgcttgtttcctttgcaagaagcctattgggggtaacagagacatcttcatgtacaggtcagtccatttttcttttgtattcacatcggtatgggttctattttttttccagactgaaaagagaataattgcagaaagatctgatgaatctattagttttagggattaaatccatgaatctgcccattgtttgatcttcgataaaagatataatttttttcctgcacgctttaagtatgaaagtgtgtcttaggaaccaaagattgattttttttttatggatttgattgctgattgctgattggtatttggttttttgttgttggaaatcttgcagaggggacacacctttttgtagtgaagagtgtagacaagaacaaatagagattgatgaagctaaggaaaaaaaccataacctttcatccctcataaagctttg

SEQ ID NO: 9081 - DNA, 659 bp, Gossypium hirsutum
ggctttatatatttcatccactgaactatagaatgtgtccatttacggtaaaaatatcagatacttcaaaaatatatataagtaatttaatctttgtaaattttagacagaatatggaatttcaaccccaactttatttatatttctttatttttatctcattagtcttgttttaattccattttgtattttacgttagcataaggaggtttttttacgtccaaccttcctctctttttccatttttatttaaggattgaattgcacttgatcaattaaattaatttttttttgaaatttcatttatttttatggttaaaaataagtttttatatatcagcataagatatacgagacatgcaacatattactgtttggtttttttgtttgacataacaggtttaaatagtaaaaatagatcaatttattttttaattcaatgaataaagattaatttacctttttttagtagagttacaaaatataatagtatatttacggcacatttagtatcttggattcattattccgattttggtttaattttagatatgattggaaacagcaatcaaaattgtctcaaagatgtatattcaaacgtagaaattagatgttataaaataaataccctaggaaacaacaaataatatgacatgcga

SEQ ID NO: 9082 - DNA, 638 bp, Gossypium hirsutum
gaaacagcaaggtacggtcgagcagtttcaagacctctttgtagggttacttaatcaattgcatttgccttaacagtatgctcttagtatatttctagggaatttgaaaactgaaataggccattatttagatctattcgctccatcgacgttaatggaagcctttcaactagctaaaaaaattgaaatcttagtttcccattcggggaaagggccttcgacattgggagttaattcacccaaaacttttagcagctctcctgctatatcgaggcactctctttttcccacgaaattagggggtagtggtcagacgggtaccaagatctcatccacaaattcggggtctaggaatatctccccagcactgataacggaaaagagacagaagggcctatgttattggtgtggggctaaatatcaggcagatcataagtgcatgaaatcgcagctttatcaagtcttattggaaccttattcggagggagagagcgaggagttccaagaatgttctgacaagttggaagaaaatgagaatgatggtgagggtctaaaatctcctaccatttcactgaatactcttacagggttgcaatgccataatactatgaggatggctgctaaagtgggaactcagt

SEQ ID NO: 9083 - DNA, 404 bp, Gossypium hirsutum
gggatccttgagagagctaaaggtggggaaggcggaggtttgagtagtttagagcttattctgagaagggataagctggaagtcatagccaaccgaaatcgaaagctgaaactctgagggtagggggtaaaatcttggatttcaattagctcatatcctaaaatgaagtcgaaatcgtctttatccgccattaaaaaggagtttataggacgaaccggcatacggcaatctcttagttccttcacccagagctatggctttacattttttttatcgtcttcttcaagtaaggcccaggctaatctgttagttattttactgctaaaatttaataaaatttgaataaaaaaattattaaattaatagtacttcgaactgattgaaacctgctccatcatacagag

SEQ ID NO: 9084 - DNA, 682 bp, Gossypium hirsutum
  misc_feature (89)..(90): n is a, c, g, or t
  misc_feature (650)..(663): n is a, c, g, or t
  misc_feature (666)..(666): n is a, c, g, or t
  misc_feature (672)..(672): n is a, c, g, or t
  misc_feature (674)..(675): n is a, c, g, or t
aaacttgtccagaagaagcattaatgaaatacataaaaccagcattgacaaatgaagtaggatattgtaaacaccaagtaagcgctgtnntctttaaacttgtccagaagaagcattaatgaaatacataaaacaagcattgacaaatgaagtaggatattgtaaacaccaagtaagcgttgttggttacagacatataaacaagtcatcatcacattctagggagcagaaagaaggttttcatgtagcattctttctttttatcaaacttctaaaatacaaatgttactacagtggaccatgagatcaatgttaccgcctgcaaagtaatctatatatcatcttcaatgcatgaaatatttataagatataccatagcaaggttttaggaagtttttaagaaagaggatgattaatatttataagatataccatagcaaagtaatctatatatcatcttcaatgcatggaatgttactacagaggctggtctatactagaagcaccgttttattgaatatgggaacaaaatatgaaccatatactaaaattgaataggatgattaatcttttcgtctgtcatgaacacacgaaagcatagatgtaaacttttattttatttcaacacttttagacattgagataacctnnnnnnnnnnnnnnatncttttngnntgtcatg

SEQ ID NO: 9085 - DNA, 635 bp, Gossypium hirsutum
acaatgcaagtctaggcttgagtatttcataccacattaacaatcaaatacaagatgctcaaaggttcatgtttcttatttctgaataattgatctcattgacaagcaaaattatatcaaaataaggaaaggagttactattgcatggttattttgaaaccctgaatcagtaagggtgcattccaaattatgctttggatttcacccctcgaggaatctcaagtggtttctaccttagacaatccctctaattcacctcttagatgtacataaaaagtcagtttcttttcaggtgttttttctcaaaaacctaacaatatgtagctctaataacatcagaccaaagcaacaaagccttcaacaattgttaagaccagggaacttccagattctcatttagaacaacaacaatcaatgatacaagaaataaataaataaaagctaaaagattaagcacttcaaagaattgggtgcatgctaatttgctgaagaacaaattcataattttaccagaaagcaccaaactgagattacctgcctgataggttctggcacacgaaatttgcaagtcatgtttacaatctcaacggcagtttcaagtgatactctatgaccactgaacaatacaggctcag

SEQ ID NO: 9086 - DNA, 685 bp, Gossypium hirsutum
aggatgatttgtagctgattttaagagggccatcctagcatcaagaagtggctaggatgtctctgaattcattgcatttgggtgtttcatgcgctcttcatacatttttgctaccaatgcacttgcatttgactaccctagtattccatcagagccagttgcatttacatgaccacctaaagaaggatgattaggatccctgcgttgcatttaagcttgacgcatcagttggaactactgcatctgcaactgttgttggtacttttccttgatttgtaatgggacaaacccaaaagtcaaattcatacttccattcaaagaggcttccataaaaaaaatataccgtgcttgacatggtaaatcacctggaagcaaaaaataaatcatcattcttagtaaaactgaaggagcagagcgatcacaaaagaatgcaagtttagaaagagaagtaaaacttcttaggaatgagaaagttgttaaaataaggaagttagttgttagtcagttaatgtgcagttaataactgcttttcatgtattgcttattaaataccctgtgtatattttcttgatgatgtatggaaatgagttttatctcaacatggtatcaagagccatagtgtttctggcataattttttttctctcagtgagctgtgcgcatggctacagatggtgtttccagta

SEQ ID NO: 9087 - DNA, 602 bp, Gossypium hirsutum
  misc_feature (549)..(549): n is a, c, g, or t
ctggccacatatttgagacttcacctcacgtaatcaatgctgtaatggaagccatcgaagggatgagggtagccttaggtgctgcaattgtgctgaactactgtctccagggactcttccatcctgctcgtaaggttagggaagtgtattggaagatttataattcactttatattggatcccaagatgctctagttgcagcgtatcctattctagaggacgagcagagtagcgagcagaacaacatatatagtaggcccgagttaatgatgttcgtataaattgctgctatgataggcagatatcacttttggactgattttattagactttgaatgttctcctttactactgccgtaggtagttaaaaagttagaactcttacgcctataatgggattgtgacattgtttattagtattaattttggactgtgtgatgtagttgcatgctatgaaatgaaatgataatatggcaaactttgtgttgttaccaatgcattccaataaatttgttgtttatatttgctagttcttcaggcagcaagccnttgaacataatagcattttcaaggtggttcaagtgacaggtgctcactcctct

SEQ ID NO: 9088 - DNA, 621 bp, Gossypium hirsutum
aaaacgccgctaaaggtcttgacctatagcggcgcttttcccacaaacgccgctaaaggtaatgaaatttaaaaaatatatatattataaaagtcatgaaaaatataaaaaaaattgaaattcattatcaaaatattgagaagaataatatccatgatataaatataaaaattttctattaaaattttaactaaaaatattaaaataaaaataaaaatttagaatcaaaactaaaataaataataaaaattagattaaatataaagatatcaacgaaataaggacttaaatcataaccatgtaaaatataagatattatcatcaagatttacatcctcatcttgctcaaattttggtggcttgtaccctttcttgaaccattcatcttgtagaatttcaggaatagttatacgctgccaaaaaaaaacatgcagaatttcaaccaaaatgcacgcgctaaagcttatactgtgatcaaagattgcatgtaatcacaaattttcataggatgaattgaatttgaaatttacgtaagagggtttggatcaagaatatgcttaatcaaattcctaggaccagatgaaaaccatgatggacagctgaaagaagcctcctagatct

SEQ ID NO: 9089 - DNA, 650 bp, Gossypium hirsutum
gaatggccatagaatcatttgaacttgatttgtagattccataaaaatgtttcctaaattaatcatataactttttgaaaatttaaagattcccaaattggaattttagaatttcaagtacctggaataggatatatgtaacaaattcaatactctatgaagtcttagcatgtggaggggttgtaccctccacaccttgttaggattttttagtggaagcttgttgggtatttttctcaagagtaagctcctctgaattgagctctctctccctctgttagtttgtcaagatcgttaatcagcatctctaagttccatcactatggcagtaatgtttccacaaatgtctttgtttcatgatttaaggattttttttttgacaacttccaagtgataatcgactaacctcattcaacttaaacaactggagataagcttatataattttaaataaatgaatccgaataaaattttaaaattcttaacaaatataaattggatatgaataagcttaaaaataaacaaaggaatataaatagaaattcattcatttaaactcagttcatttaccattccaatctcataatgtctaaatgagtagaactataataaactgaaaagtttgtatatggtctaactcggcctcatga

SEQ ID NO: 9090 - DNA, 606 bp, Gossypium hirsutum
  misc_feature (19)..(20): n is a, c, g, or t
acccagcatctcatacatnnattttttaaaaatgcaccacctagtcaggtaacaaggtgcatatatttgtcattcacacatattcaataagccccactaattctgcctacacaagtatcaatataataaaggcagagaatgaatgcgctttaatcagtgtcatcataagagtaagcaaaagtggatcaactaatatcgcttatgtaatatagttaaagcaagagcagagaactaaaaaggagttgtcaaatccactaaggacaacaaatttttatgaagaaaccaaagaactctcacttgcttagttcacctgtcacgtttcccatcaaaatcttgactctgagtaagaaaactagtagactcctctccaacttgaatatcttcctgcattttttatcaaatgaacagttcaagccaaagacaatatgatgaaccaggaccgtagaggtacaagtagaataaatgtagcaagaaagtgaaaggtaaaaagcatgagaagaagaacaaggggtagactcttttttctcaacctccacctcgccttactatcaaatacaataagcacagtgaaggaacaagagaagacaaaaggggctcacaacctcc

SEQ ID NO: 9091 - DNA, 641 bp, Gossypium hirsutum
aatgtgttacctagctcagaaaaatgtcatatgcctggtctgattattgtatataagtatgtttcaagtggatcttgttctcttggatatgtttgcacttttttttggtcattgacatgtttagactttattacttggtaattatgtccaattctttcccccccccttttttccctatctctttattaaggtggataactttgttaatcagtaattatcatcgactcatatttggtaaatttcattgtggtgtttatcactctgttataataggttaagacaatgagggctcttcagtattttcctaccattgaagatccaaatacgagaagaacattgtttgaggtttaaactttcctgcatggttcttgtcttctattaaggttatttttatattaatggatcttgaaggctgatttcaggtcttacaatggatattaatgggaacagatgttgtgaagaatgttaataagaataatgcatcacatgctgtcctctttgaagcccttgctctcgtgagttcacttcttcattctggctctagctcttgaaatttattatcgaagacaatatttgacgttaagtgattccaggaagatttattctgtcgaactaagattgtcactttatgaaagtcctgc

SEQ ID NO: 9092 - DNA, 669 bp, Gossypium hirsutum
gaagtttgaatactgatcttcttttggcattggttaaagatttacttgttcgaagacttgatttaaggctcataataatgtctgcaacggctaatgcagatcaactgtcagactacttcttttgttgtccgatatttcatgtgattgggagaaactttcctgttgatattcaatatgttccttgtgcaactgaggtaacttctggttctggtatggttgctccgtatgtttctgatgtcttgaggatggctgctgaggttcataaaacggagaaagaggggaacattcttgcatttttgacatcaaagattgaagttgaatgggcttctgagaattttgaagctccaaatgcagttgctttaccattgcatggaaagctatcctttgaagaacaatttcgtgttttccagagctaccctgggaaacggaaagtcgtatttgcaacaaatatagcagagacatcacttactattcctgggataaagtatgtgattgattctggtttggtgaaggagagtaaatttgaacctggcactggaatgaatgttctcaaagtgtgctggatcagccagagttctgccaatcagagggctggacgagctgggaggacagaacctggaagatgctacagactatatgcagcaagtgattttgagtcaatgccctcta

SEQ ID NO: 9093 - DNA, 648 bp, Gossypium hirsutum
ttgcccttcgtaaagcgttcaagcttacattgctaatcatgaaaacaatatatcttgattcgcattataggttagctatgtgtatatgacctactacagttttgctgatttggagatttgagttttgtaattttatacctacactgagtgcttttggttggtatatgatgccctttgtgcatctgctatgacccaagcagcatttactcacaaatttaatgttttaccccttttcgtggcggaactctgatcttattgccttagtggctttggtttagtttattggtgacctctgttacatgaaccaaaatgaaccctgaacttgtgcaaattataggggaaaaaatgcctaccacaaagctgacatagtggcaactagttgattgatgtaccatgttattggaagacggttaacatgattttaggcatgtttgaagggaatattaagagtcccaatgataaaatgtaatttggggttaatttaaaagttttagctacttggtcgtcgcttttgttgcacccaccgcatgaaaaacaattgaaagcaggaaaacagtagcactaatcaacccaataagcactccaattagtacattggagattatcttaaaccaatttagggtaaaataatgttttacaagcagagaa

SEQ ID NO: 9094 - DNA, 658 bp, Gossypium hirsutum
ttcaacaccatgtcaagggggcaatccacatcagagaccatacccccacaaacaaatagagaaccctcacgaggaatcgaaacacacctaaaaccatggggacaaactttgtctttgcacggcatcgctgggatggtatgccatgagaagtgagtaaggtcgagaacttgccattggattttccctgtgcatttgtggaaggcgaacacaaagagccaagggtctttgaaaccgagttccttccttcgagtgaaaaatcgctctttattaccaagcagaagatgccatcgcttgcagacgactctacaagctccatggttctcaactggaagccggaggagacaattaagagccacatcatcgggaaggcccgggataagtggttctccttgaagagacaactcaaactctaatgaaggattcaacaatgaagactgaatcacagctaatctaaatttgggggataatgtcatctgagaatcccctaacttatgaacgggcgccttttgggacgaaaaccgaaccctttgcatctttctcccggaaacaacaacgatctaaaacctttgaaaagactacccaaagaaccttgtttaatcttcaaattcccaactatccttacttaagatttcaacaacataaactatcccttggtctt

SEQ ID NO: 9095 - DNA, 659 bp, Gossypium hirsutum
ttttactacctaacggctaataagataattatctttgattagattttttttcttcacagactatttattagatataaaatccttgaatgtatctcttttttctcaaaaatactttctagtgagtttctgattttttttcttacacccatatttttctatttatttcttttataaggttgaagtttaggtttagattcatgggccataatgtttcttttgatggtgcgaagcccaaaccttcatcacaaggcttaagcttttcgcaactcccaattcttctttggtacttttcataattttcttttatctaaagtattgaaactttttcattttaaaaataataaaaattttatttataaagatataatattttaattttgtggattattttattttaaattttttttcaaatatttagctgatttatatatattgtaatttgttaaataataaattttaaaccaaactaaacatatgatgttttatactatctaattttacatgatgttttataccatactaatttttaaaataaaataaatgtatgctataaaatcctatataatctataatttataattaattatataactaaaaatgatatgtgaataagtatatagaaagggtgagatgaattttacttaaacccactgacccaa

SEQ ID NO: 9096 - DNA, 668 bp, Gossypium hirsutum
gacgagttccaagaccctctttgaaatttgataaagaaagcaaatggcaagaagaaaatatctctgccactcgagataataataaaagtggaatggaaaagatcacaaaagagtgaaggtaaccttaatgttggacacgtgtacaaaatacccatacgctttggtccacttccatcatcatgtatttttatgcttccctcctaaggaaaattcctcctcatttatcttattcttgattaaaagtaaaactagtgggattttttaattaaaaaatgaaaatggtgattagaaaatgaaaatccaaacagccagaccttggggagtgcaaaagatccttctaattatattaatattgttattaataatagataaaattccaacatccaaagacaaagttcatagattgaaaaactttttctgttgttgtttgaccacttcaatcctagataaatttatagctcatggaggacaaatccataatccttttttggtactttaaacagcaatgcagttggttggacaggttggaaagggcaacaaattctacaaatcgaatggcaataaatctgaacacccccatgtgctatgcagagaaaaaaagaagcctttcatttcatcaacatttcgtttctttttccaacaaaattcaaaaacttattgacccaaac

SEQ ID NO: 9097 - DNA, 632 bp, Gossypium hirsutum
gcaacaaccaaactgtgaacgccggacaaaactgcaaatgtctataaagagaaaacaatgtgatataaccgaaagatttgttcactcaagaggggaaaaactagaattgcattattttgtgatcatgagattctcataccttggcgtaagatcctgcctccacaaaggatcctttaaagcctttctttttaatcaatcctgaccctaagacagacatggaaagagaaaaattaaagtatacacctgatttcaggcacacaatgagccacagaaaaaagatcagatggtctagtcgaaaatactgcccaaaagaaagctcagccactattggtcaagccctaaccttgaaacaaaattttcaggacattgaacatgcattttaggacaaccaagaacctaaatgaaagcataaaatcctacttctcacacaaaatcaaatacgtaatagctcaatcttttaaaagtctaaagttctcaaaagggttaatgttcaagcttaaagacagaagccaaaggaaattattcaatctaaattacaattagaaatgcataaaaacagaataatccactgttcagatataatgactatcttctccactcaattactatcaatattccatcggtacatacaa

SEQ ID NO: 9098 - DNA, 616 bp, Gossypium hirsutum
tattttgttgcataggttgaaactgataccatctccgcacccatatccctttcaacacttgtgcactctctcttgtatgtcatttgcagatagctgattgtataaattacttcaataattatgaataatatgcttacaagctatcaaaattgttgtaaatgactaaacaccgaaaccaaggaaatactgtttcatagttggtatcgatgcttacgaagttttattactagttctataaatggtcaacaaggactatactaacacacacctttgaattgctttacttcagagcgggcaaaaggacctatgttctaactcttttaatttatttcaatacatttccggacatagttatgattataaccctcaattatcttcgaagatatatggaaaatctttataaaaaaaaaattaaaacatatctatatttgatagacttaatcatataccaaatcacatgctcaagcctgaaaactcatctgaaaagtgggagaatttgggataaaatataaacgtgaaaaatagacttaaagaaaaaaataagatacattttgtaaacagaccgaaccttaagtaaaatttttgacccgacccgacccatacatacatgcatttg

SEQ ID NO: 9099 - DNA, 610 bp, Gossypium hirsutum
aacggttaaaacataattcagaatcaaacactaacaatcaaacatgatcttagcatactttggtgggagataatacacaactccaagcagaatcaatcaccagaggttttagactagcagttaacatcaatggacttatctcaaatggttggagtttcttacacacacatataaccatatatatatacaaatatacatacacatatacatatacatatacatatacatatacatctacatatacatacattctttcttaatctcaaatatcaatttaattgatctttttctcctttgtttctcagcccaactgtcacttctgtttatcacctaaattataaagactcctaactgcaaacctatgaccctaaagtcaactttttactatgcttatctaaccaagccacaagataaacacaaagaacataattgtgaattatagcaaagacccaaaatttcatgaaaaaaacacaaaatgggaaacaaacagaacattttaaaaactaaaaacaacattacctcattaaaattgaaaaccccagaactgagacggccaataggttcttgagagttcttgatatctctagaaacattgggagaacagttgatc

SEQ ID NO: 9100 - DNA, 571 bp, Gossypium hirsutum
  misc_feature (501)..(501): n is a, c, g, or t
ggtgcaacagctggttgaatcaagaagttcagcaggatggcaaagttgtgacaagtcgtggacctggcactaccatggaatttgctgtaacactggttgagcaattgtatggaaaagagaaagctgatgaagtttctgggccattggtacgggcactttttactacagtagttacgttctttttaggaaaaaggaaaagcaatcaggctaattggaagctcagtggatgatgtttctgattaatggcgccactatttactaaaatggatctggttatcttcaggtgatgcgtcctaaccatggtgatgagtatactataacagagctgaatcctctggaatggaaatgcaataatgttccgcaggtgagattttagtgttgtttattctatcaagttttgtataatatttgatgcataaatcttcattcttaagtacatctcagtattctgagtggttaatggtggattttcattctcctccaatactctgattaggactnaaaaagagttccaattcttgattctaaagagtttcaaggacacaacgagtttctagtagaggagttcaga

SEQ ID NO: 9101 - DNA, 635 bp, Gossypium hirsutum
ttctttttttctaccttttatgttctttatttatttacctttggatagtagatgactggttattagtgagatggtatacctagtcaagtagtcattaacaaggcttgaccatcctgtgctggccctgcaacattgttttggaaagttacttggtatacattttccatgctttgtctatggaatggaactttcaattctaaaagcatatttctcttctagatacctttcagttttgtggacaatccactttgttctttacagctctagccttaatacctgcttattgatccacaactaaaaacagaagaatgtaaatacatttactgtgtagcatgctccagatattctttacgaatcatttggcttgttattagccatccttcgattcttgtatcagaaataaaattttgttttccttttagttggatatacgtttatctgtttgtccttcaattcaatactgttcaaagaagcctctttgtgctcttgtgagatttagaaggaatcaatgatttgatgtactctggttacagaatttctttaacactgagggtagaatgtcaaaaattttgcatcaaatgtctttgcatttgttcctataaccttctgacttctacaagcagaaaggattccgt

SEQ ID NO: 9102 - DNA, 660 bp, Gossypium hirsutum
tcacaatctccctttgaagatgattcagtcttcaccatagagactacatctgcaaatagccctagtctgtttaatgaaaggcttccaccatcaccaccaatttcgagcaaatcgagtgcttccacccctttcggtgaatctgcatctagcagtgggagcaatcatgaaagatatctatgatgatggtccaatgttttaaccctgtgatggtcgatgcttgttgatcaacttctggtcaatcattttatcttgaattggattcatgtcgagttctatgaaagatttgggaagtttgataagcaatactgcaccatgcaatgaaaattcatcatgttcttagatgatgtttgaatgatcactgtcaattaggaccccctttttttcatggttatcaagtaggaaacacggaatcaaatcatatcaaattagtcattctcaatggatatctattaaccatcttcgtcagggatagcttttaactaagttaacatgattgcaaagttatatctgcttgaacctttttctttttttgaataaatatctgcttgaactttgaatgtgacagtagtcttctcttgaatagttgatttacaaatccaaaacccagtgaacattttgtcctaccaaacactatgttatttgacttgaatgtcggtgtcg

SEQ ID NO: 9103 - DNA, 686 bp, Gossypium hirsutum
taataccttgttgcgtgctgagctcgggtcgagttttgcttgagaattacagcacactaacaacaaagaaacaatatcacaagaaagaaaagaaagaagaagcagacaagagaagaaataaaaatgacaattaagaaaagagatacttgtttattttcaagcagatattccaccaacaccccatctctgtctatttaacggagtcttggtgtcgttacaacccagataattgttatgagcagaaaagttagcaggagacatttgcaaagattaagtgaaacaaggagttttgggaattagtcatacgggcgttttgcgttttttgtttttaacagaatagttcacgttattctgtttgtttgtttgtttgtttttctttatattgtatgcattgcatggtaaaacggttatgctaaatatacatgataatttttcctaatctctgaattctcctaaattcttctctcttcttcaaattcttttcttcttcctttactcttaattttgttccgtaacaaaggtatcagagctatcacgatccctttcgatggctggcgaaggcatatcgacgaggctgcaaaaagaggtgagtaatatgcagcaggaaatctccaaattccaagagaaatttgtgtatctggaggtcaagatggaatcccgactaaaggagcttcgaacgggagtta

SEQ ID NO: 9104 - DNA, 694 bp, Gossypium hirsutum
  misc_feature (615)..(615): n is a, c, g, or t
  misc_feature (617)..(619): n is a, c, g, or t
  misc_feature (621)..(632): n is a, c, g, or t
  misc_feature (635)..(651): n is a, c, g, or t
  misc_feature (655)..(667): n is a, c, g, or t
  misc_feature (669)..(679): n is a, c, g, or t
  misc_feature (685)..(691): n is a, c, g, or t
gtcgagaatccattttccaatccatgcctgataacatcattgccttaaattcttgataactgattcggtcatcctacaaaaaggcatcaaattgaacgcaaacaagaatgttattattatgggctgtttattagttaaacaaacagtttatgaatcttacaacatcatgaaacataagatcaaaaaccttatcttcgtctacatcaagcatgatgtctttgattaatttttcattgttgggaccagggtcgtcttgtagtagagcttctttaagttcttcgacttcgatgtaaccggattggttcttgtcaaagtactggaaagcttgagagagttggtcgtcgctgatccttttgagatgaaccgccattgttatgaactcctcgtagcttagtgttccacttccatcaacgtcagcctttgggagaggaaagcatagaaacaggtttcagacatgaaagcaaagtttaaagatatcgtttttgttatggtatttataatgttttggaatgggtacaagttgatattagcgtacagagcaacacgactgctatgaactgataccataatagaaacggtacatggtgtaataatacaagggaacgggtatgcgancnnnannnnnnnnnnnntcnnnnnnnnnnnnnnnnnaatnnnnnnnnnnnnntnnnnnnnnnnntacttnnnnnnnttt

SEQ ID NO: 9105 - DNA, 641 bp, Gossypium hirsutum
acaaggtactatattgggccagcccttagttcgtcattcacgaatgggttgggattagggtattcaaaagctattgaattttgagccaaccttaaaacttttctaaagtgaaattgttttaattttgagctaagcttcaaattttcaattttaaaatcaagcgacaaagtttccagtttaattgatactaaaaaaaaaaagttaatgatgcatagttaaataaaaatataaataattatagaaagaataaaataaaatgcatgattaatatggagaattatacaagaatccgtattacaccttctaatcatatatatgtttggttttttacttgataaataaaagagcaatcgtgcacgactgcaggctatagatttttcctctttggggcaaagcttgagatccctcattattcattatattgaaattttcctgctttatattagtgtaaatatgatttatatttatttaatttgattctttatattttatgcttatttaaatttgttatattagttgtttgaatatgtatatagaaaaacaacagtttcgatgagcataatacaaatagtgagttaatttgaaattttattgcaccaagagtgtaataatatatattacataaataccaaaaatccaac

SEQ ID NO: 9106 - DNA, 557 bp, Gossypium hirsutum
ataattaaaaaactcagaaggtcaaaaagaattggtccatcacctttgaagaatactctattatttcacaatctatgcaaactcttcaaattttttaagcatctggatttgatactcgtgtttgatgtatatctcaatttaagtacggagatagcacttgtttaaaatcctccaaatatatacacacaaaaattttagtaatacggctatgaattgggcattaaacacacacatcatcatctcaagccagcaatgtttatgatagaaaattttggtgacttgaatctttgggggaaaaaacaaaaaagaaaaaagcatcttcaacccgggttttacgagttgttgcaatactagggaaataatcaaaactgaaaaagaacaattggacctctcattacttaaaatttcttgaccacaagctaggtgatgaaatgttacagtatgaacttactaaactatgcaaccttgtgttcataaaaggatcaaaatatcaaacttcctttgacttaagaaaaagttagtacgttaccttaggaaagaaatgaggaaatctgagg

SEQ ID NO: 9107 - DNA, 380 bp, Gossypium hirsutum
tttactgcatttaggttttgaatgccattttgatagctcctgctttcttgcaactgaaaagagacaaattacaatgcttctcattcccaaaccaagattatttctaaaaatcccaagcggttacaatgctttcttgccacagagaaaatgatactatatattgttcacgttttacaagtaccatcagaagcacaacctaattcttatgagaagtagttcattcaagtaagttaaaaagtaaaacagggaaggtaaccagaaagctctattggccatgcacttaaaaatcagatgggcaatagcctttagttcaattagaaatcaaatcatgacattcaacattgatagctaaaaagtacctcaagatacatgcttgtcaa

SEQ ID NO: 9108 - DNA, 579 bp, Gossypium hirsutum
tggatgaccgttgtataagaatggattgaaaaattctatccacaagtaatatgaatagagactacttggttccaacggaggaaagatcgtcttggctaccaggtcgaactgaactccctgcaactgtagtggatacatatgggttggaaggggtaggggtcatagaacccatgggtctcgacaatggtggtcttgggactttaatgctcattggaggccttgcaaccgagtttgcaaagtttgttgcaattctatttgcagcatttggtggcggcattgctctagaggaggaagctggtaagcccagtcgagcagcaattatctgtgttcgctcatggtaaagcctttgccttgacctgtccaattgctccttcaccctaattacaactccctccatctcatcgaagaaagataatttggcttccttcttatgtaactggattgagttaaagcttccgaaaggttagatattgctccagttggatgtgcataggaaaaagagactgcatatatttagcaactaacctacctgcttttctattaatgatgtggtaagttatcgatttggtcctcttcctg

SEQ ID NO: 9109 - DNA, 589 bp, Gossypium hirsutum
  misc_feature (58)..(58): n is a, c, g, or t
  misc_feature (265)..(265): n is a, c, g, or t
  misc_feature (279)..(282): n is a, c, g, or t
  misc_feature (284)..(308): n is a, c, g, or t
  misc_feature (310)..(389): n is a, c, g, or t
  misc_feature (392)..(399): n is a, c, g, or t
  misc_feature (401)..(418): n is a, c, g, or t
  misc_feature (421)..(456): n is a, c, g, or t
  misc_feature (459)..(460): n is a, c, g, or t
  misc_feature (462)..(462): n is a, c, g, or t
  misc_feature (464)..(491): n is a, c, g, or t
  misc_feature (493)..(509): n is a, c, g, or t
  misc_feature (512)..(520): n is a, c, g, or t
  misc_feature (522)..(524): n is a, c, g, or t
  misc_feature (526)..(568): n is a, c, g, or t
  misc_feature (577)..(577): n is a, c, g, or t
gattacctgacagtagtagcctacaggagaagtttcctgtgacatacacactgagtangattaaagactatgtggatagaaaccaatcaaatggcatgggctcctatgatcttgccattccttatcctcgcaggttatttggtgatcaaggtatgactgtgcattttacatctttaaaatcaatgtggcttatttagttttttctcagttcagatattgcattactttagctgaactttgcccatcccaagctggtatcaagaancatattgcaaattnnnnannnnnnnnnnnnnnnnnnnnnnnnngnnnnnnnnnnnnnnnnnnnnnnnnnnnnnnnnnnnnnnnnnnnnnnnnnnnnnnnnnnnnnnnnnnnnnnnnnnnnnnnnttnnnnnnnnannnnnnnnnnnnnnnnnnctnnnnnnnnnnnnnnnnnnnnnnnnnnnnnnnnnnnnttnntngnnnnnnnnnnnnnnnnnnnnnnnnnnnngnnnnnnnnnnnnnnnnnaannnnnnnnngnnnannnnnnnnnnnnnnnnnnnnnnnnnnnnnnnnnnnnnnnnnnnccccccccnaaaaaaaaaatt

SEQ ID NO: 9110 - DNA, 627 bp, Gossypium hirsutum
tctcttttgcaccagataatctccaatatcagcaaccaggttatgcacttgacagatctcgttcactgctaaaatcttatattggtcacaaggcagaagagatgtatgcatacagatcattacctcttggtcaagatcgtagaagaaatagatactggcaatttactactacatcttgtaacgatcctggttgtggtaggatcttcattgagttacttgatggtcattggagactcattgatactgaagaagtaaatttccatctcaaacagcttttaaattctgacactgctgtatatgttttttgatgcatgttttgtcgccttacatatgttagttgcttttgtgtgttcaattgcctctttttcctctatgcatgcagggttttgacgctctgttgtcatttttggatgtgcgtgggatcagggaatccctcttgcatgcaatgttgctgaagattgagatgtcctttaaggaagctgttgcacggaataagctgcatgtcaatgagaggcagaaaggagacactgctaaggaaaaagctaatgaaatggcttcaggccttgattggagtgtctattctgaaagtcctagtagcattttatgtgggtctgattctgatatgtc

SEQ ID NO: 9111 - DNA, 663 bp, Gossypium hirsutum
ctatgaagttgccattagcttttgctgtaacataaatgctctttatgttctgttttactttgacaagttaatgttttgcattcttatgtaattgcttcttcacccgttagaagtgttggtgtgaatttgtcaggtttttagaaatcttgttgaaggatcattttattgctggctgatctatgatattcttcttgcagcttttgctgtgtcccgtgaccacaagccagatcaaagtgatgagcgacaacggattgaggatgctggaggatttgtcatgtgggctggtgcggatttacatctagctgtttctctttccctctattatcatcctctattttctttataagcttttcatcgtgttaaatttcttcctttcgttgtggtggaaattatctttgtaggaacttggagagtgggaggtgtccttgctgtttctcgtgcatttggtgacaggctcttgaagcagtatgttgttgctgatcctgaaattcaggtctgtttggaagattgggttgtcctaattaagatagaagaaacctgtaatgaacgagacccagcataaaaattttgcaagtagcctttcttgttagatttctgccctatcgcttaaaaactttataggatctctacttaagagacggtaatatgaacctactcaaactc

SEQ ID NO: 9112 - DNA, 621 bp, Gossypium hirsutum
ttgttcccacggtattcaagaacctagaagacaaaaaaaagaaaagcttcactgccatgtaaatatttatttccgttttcagacaaccagaaaatgctaatgttcccatcgttcaaaaatacaaggtttgcagggattctctacggtgtaaaatgtcactgcccaataccaagttgtccaggatcctgttcgaatgatttagttgctatctgaagatatgttgtgcctggaaattttaattagaatcccattccacatgcaagataaaaacagaatcgcaaacattattttcagctttaatctaattactatgacacccactttactcacatggcttattttgggaaaaaaggaaaaatttttgtttagtttgaagcagtcttatttttaacaacagttttactcatctttctaatttcaagttaaaatttgtactaactattctttattttatgtctaactattgtaatacatatgaaataaataaccttattccttatattacatgagtcaccaaacgagtcattaaggttttttatatcagttatcaataaactattgaaatcaaaaacccaatgcaaccaaaacaaaatgaggcatatgtaaatccctccccaaatc

SEQ ID NO: 9113 - DNA, 564 bp, Gossypium hirsutum
  misc_feature (550)..(551): n is a, c, g, or t
ctggactcggtccaaaatacctcttttcgtaattgtgttcgtgtttttattccaaataaattgtgttttgtattgagtttttaattttttttttccttgtcagatacatataaattgaaggtaaagcctggaaaaacatatctactgaggttaatcaatgctgcactcaatgatgaactattcttcagcattgcaaaccacagtgtcactgtcgtggaagccgacgcatcgtacgtgaaaccgttcgtgactgacacattagtgatagcaccgggacaaaccaccaatgtgctcctaaagaccaaatcgccagcccctgatgccgctttctatatgttggctagaccctatttcaccggcatgggcacattcgacaacacaaccgttgccggcatcctcgaatatgaaaacccgaaaaacccggaaaatgctccattgtttaaaccaagcttacctgccatcaatgccacaaatgttgtagccaatttttcaaacatgttcaaaagtttagccaccaacaagttccctatcaatgtcccacaaaaagtgnncaaaaggttcttt

SEQ ID NO: 9114 - DNA, 733 bp, Gossypium hirsutum
  misc_feature (438)..(450): n is a, c, g, or t
  misc_feature (452)..(452): n is a, c, g, or t
  misc_feature (454)..(455): n is a, c, g, or t
  misc_feature (462)..(462): n is a, c, g, or t
  misc_feature (464)..(466): n is a, c, g, or t
  misc_feature (468)..(477): n is a, c, g, or t
  misc_feature (479)..(482): n is a, c, g, or t
  misc_feature (487)..(490): n is a, c, g, or t
  misc_feature (500)..(511): n is a, c, g, or t
  misc_feature (518)..(525): n is a, c, g, or t
  misc_feature (527)..(530): n is a, c, g, or t
  misc_feature (534)..(542): n is a, c, g, or t
  misc_feature (544)..(554): n is a, c, g, or t
  misc_feature (556)..(563): n is a, c, g, or t
  misc_feature (568)..(580): n is a, c, g, or t
  misc_feature (592)..(609): n is a, c, g, or t
  misc_feature (614)..(643): n is a, c, g, or t
  misc_feature (648)..(648): n is a, c, g, or t
  misc_feature (650)..(677): n is a, c, g, or t
  misc_feature (679)..(680): n is a, c, g, or t
  misc_feature (692)..(692): n is a, c, g, or t
  misc_feature (695)..(703): n is a, c, g, or t
  misc_feature (714)..(715): n is a, c, g, or t
  misc_feature (728)..(730): n is a, c, g, or t
ataaatgtttgaattctttaaactgattcaagaagcaataaaataaaacaaaacagttatgccttttctttggacaatagaatctagatttggaaattttcttcacaattaatacaaacaatccttggtacattaccatcatatatccttgttttaatgcattttcatatgtttgttttctggtttctggaacaaccagccaacctgacttaggatggatgagaagattacaacaaatactcggtcggaaacaccaacgtaatctgcatgtatgcagcaatatctatcccatctaatttgaatattcatatatagttgtttcttgatccctttacttttgttgtataggcaatatatgttcttcatcctacctttcacttgaaagccacaatttttgctctgcaaatgtttgtggacaatgtggtacatctaaaaagnnnnnnnnnnnnntngnnttaaccntnnnannnnnnnnnngnnnntttcnnnnaaaccttttnnnnnnnnnnnntaaaaannnnnnnncnnnntaannnnnnnnnannnnnnnnnnncnnnnnnnnggggnnnnnnnnnnnnnctaaaaaaaatnnnnnnnnnnnnnnnnnnttggnnnnnnnnnnnnnnnnnnnnnnnnnnnnnncccanannnnnnnnnnnnnnnnnnnnnnnnnnnntnnttcccccccccnccnnnnnnnnnctttttctatnnttcccctttcccnnncca

SEQ ID NO: 9115 - DNA, 350 bp, Gossypium hirsutum
catcaattccgaaatagcaggaaggagagcaatttcaggtaacagaggtcacaaataaagtaaatcaaataaatatacagcgtatgtggtacaataatagagttgacgccagacaattaacctcaccttcaaacgtttctgatcaggaaaagatataccataaactctttgtaaactctcacgatctttgtttcccctccagtatgcagaagaagcctgaagatagaaattcatgagtagaccaggaaatggtggtgaacatgaattgaaatatctccaaaacatagcttagatctaatcatgtatcgtgttaccttcatgcatgcaaatgcctttgcaaaagaagtatt

SEQ ID NO: 9116 - DNA, 550 bp, Gossypium hirsutum
atttatatttattttccatcttaagtatttcatttcatttcttttacgtatcgatcttttctttttgtttcttttaagttttaggttttgttgaattttcgataaaaaatttggaaaaaaaaccctagttatggatattgataacgagatcgccaaaacccaagaggagcgaagaagaaaggaggaggaactcgcctcgcttacctccctcactttcgaccgtgatctttacggcggaacagacagggatgcttacgttacttctatccctgtcaacgatgaagacgatgccaatcttgattccatggattccgaggttgctcggaagctcgcttcttacacggctcctaaatcactcctcaaagagatgcctcgcggtgaagatgaggataacgcgctggggtttaggaagccagcgaaaattattgaccgtgaagatgagtataggaggaggaggttgaaccaagttatttctcctgatagacacgatgcgtttgccgccggggagaagaccccggatccctctgtgaggacttacgcggatgtaatg

SEQ ID NO: 9117 - DNA, 495 bp, Gossypium hirsutum
tattatatcagtgagcatgtcacttcccaagttgggatcagaattttccagcacaacatttgcagatttgctctttcccctggctagagctaacttctcatatccctctgaaaaaatatatatatatcgagagcatggttaataaaggttattcgatatatacacctgcccttacaaaatcacatgtcaatattagcataatggagagatatgcaaaaagcagacccaattatgcccatttctaatcctaaatggaatgtaacgatgtaggggtccatatgtaaacatggtatctatttggataagctcgaatgaccccttctcataatgagaaagtatataaccctattcaaatctggtccgatatggaatgaactcaaaatcgtggaattgagttgatcatcaaattatagattataagttcatagccccagcccattcccattttgagcttaacagatttactaattctttgattccagttagtaaaggggt

SEQ ID NO: 9118 - DNA, 611 bp, Gossypium hirsutum
tacaatcaaattctcctaaatttcggaagcaccaaacactcacaatcatgtccctaaagacttcaacatgaatctatcatttaaaatggtatctagatcaattatctttacctcgataaagaggccacaatcctggcttgtgcctgaaacattccaattttttgctcaataagaaaatgcaaaggaacatgaattttaaagttcccatacaaaagaacagaaaaaaggatgtccaaaaataaggaaattaaggattaaagaaatacctcatctccttttgataacgcctaaatcctgagtcactacggacatgaatgaccattttatagaaaaggttgtcacttgacatagattcagctttgtggaagttatgataacatttgaatgcagctggaaaacgtttttctttcatcaaacgaatcatttcctggattaaaaaaatcatattattattttgcatgtaaattatacctggaagcacgatatgaaaaccaaaattcaatggatgaaggaagctaaattggctactcaaaggaaatgcttgctgccaccacaagaggcagaaccatagggcttcaatttctgctaggtcggttcctaaacgaagatgg

SEQ ID NO: 9119 - DNA, 648 bp, Gossypium hirsutum
catttaattgaagggtatctctggggaattttcctgagggggatggggaaggggtgggctttggttttggttttaggtttggggaagggcaagaaccgcaagcactgacctaaaaaaagaagagaacattgagcgcaaaaaaaagggcaactctttttgaagccatctttgcctaatgtacaagttatagaattgggagtgaaggaaggtggttttatactgttttaagagcacaactcgattgtatcataatgcaagcttagttgataaaattttaccataaatcaatttaatgtttgcaatttgaaatggttaaggcagaagattgttcgtgaactttagacgttggagatttacaccaaaatattcgcaagtcccagcctctaacagtggaagaaaatgggagcctcaaatcacttaatctatctatatcattaatcctaatagcattattatcaatctaatattgggacatattttaatggttttctaaacaaaacttaacgtataagtcgatttcgtccacttttattttacaaaatatcttctctattccgaaataggatagttatgttagagtaactaatataactaataagttagttaatagcagttagcagttaagagactgttaagcagttggcagtt

SEQ ID NO: 9120 - DNA, 624 bp, Gossypium hirsutum
gcgattcttaagtcataaacatagcaggagcatttgtcaacccgaatggcataactaaaaattcataatgaccgtaccttgttctaaaagcagttttaggcacatctgactctttcactcacagctgataatacccagatctcaagtcaatctttgaaaaccatgtcgctccttttagctgatcaaacaaatcatcaattctcagtaatggatacttgtttttgattgtcaccttgtttaactgtcgataataaacacataatctcatagaaccatcattctttttcacaaataacacaggagcacctcaaggtgaaaaacttggtctcacaaagcctttatcagtcaactcttgcaactgtgactttaattctttcaactctgttggtgccattctatatggagcaatcgagatcggagctattcccggtatcaaatctataccaaattctacttccctgactagaggcaaacccggtaattcttctggaaatacatccgcaaattcacacacaattggcactgattcaactttcttttcaacttcttttgtattaattacatacgccaaataagcttcataaccctttctcaaatatctctgagccgacatcgaagaaatca

SEQ ID NO: 9121 - DNA, 498 bp, Gossypium hirsutum
tgggtatggagatataattctccaaatatatggaaaagttttttaaaaaaattgggcatacttttgaaagacacgtaaccgtatccgacactcaatatgagtcggaattacataccaaggagctgtgctaatgagtccagcacgatcggttcgacagctaatctgggtgttctcaggtttgtgcttgtatacggtagttgaggttaaaagttgagcaaataaccacgtaattgagactgacaaaaggattgaaaatctgccacagagggagcgctttgattctaaataacgaggaagaaactgcaaaatcatgagaaattcagtgaaatgacttatcaacagcaaaacagtataaacatttggattatttggttaactatgaagcttaagagggaatttgtgaagcttttagttctttagtgtttgacaaattgttttctaaagaataaacatacctgtgaaataaaaaccatgagaataatccctggaaggccaact

SEQ ID NO: 9122 - DNA, 603 bp, Gossypium hirsutum
  misc_feature (488)..(488): n is a, c, g, or t
  misc_feature (498)..(504): n is a, c, g, or t
  misc_feature (536)..(537): n is a, c, g, or t
  misc_feature (539)..(543): n is a, c, g, or t
  misc_feature (546)..(558): n is a, c, g, or t
  misc_feature (598)..(599): n is a, c, g, or t
cttagctaagcaattcagaggagggcttcttctcccttatctccttgcttacaccccaaccttagttatggcacatgtaccgtcaaatattattctcttgctgttccttctggtttctttccctgttaatgtcatagctgaagaagacgaggcaaacattatcaaacccggttcttcactttatgccggaaaacagcctagttcgtgggcctcaccttcggggaattttgaatttggtttctaccggcaaggagaaggatatgcggccggaatatggcttgttggtcgaccagaaaacaccattgtctggactgcaaaacgagatgacccgcctgtctcctcaaatgctactttggaattcactacacaaggcgtattgcttcttcggactgaggacggggtggaaaatgtcattgcgaatctgtccggagtgcaatttgttgattcagcttcgttgctggacaccgggaatctagtgctctatgagnacaggtctgnnnnnnnggagagctttgatatcccgaccgacacaatcnnannnnnccnnnnnnnnnnnnntgacagtgagttgatttcagtgtgtcaagttcaaacactnnactg

SEQ ID NO: 9123 - DNA, 440 bp, Gossypium hirsutum
tggtcgcattaggtcagcaggattgaacctcgactgtctctttcaattcaggatgtattttacgttgactttttaagctgtcagaatgataaaagatcaaatcaagccaatcaaaaataaaacttgtgtaacatttcaatgttataaaacaaggcttttagtttcaccaggctttttaaatggaaacattgttcagaaaattagtgccattttttttatcacatatattgtaaaatggcgattttaaccaaaaaaacaaatatgttaattttttcccaaatgataaaagttagaaacgttgatctcaatttttttattgaatgacatgtcatcaaatcggcctttttacacatattataaaaatattgattaattacttaaataatatgaaacgaaccgtgcatgattaaattgacatcaaattgtcagctgccatcaat

SEQ ID NO: 9124 - DNA, 550 bp, Gossypium hirsutum
cgttgatggctttattcggggtataaaaaatggatttttcatggaaagtgtacacctcgtagaaccttttcaatgattaatccaacatatcctcataatgcttaccaccagtctgttaaagaagatgatatgaaaggtatgttacgagatgcatttaatatgtacagtcatggtttgcaatcatttccaccttgtcgaaaccacttttttgaaaaaacaaatatttagttgtcgacttattaaaatgaaaaaaatggagtcgccacagatcttttaatgaggtgtgatcggatcacattgaaaacgattttaggtctacgaattttgagaaagtaggttcgggattcggttacgcacgaggaagggttagcaccctcgtgacgcccagaattggtaccgaattgattgtttaatgtcttagtgtcgagaatttgaaaagattttaaaatacgatcctttgaaaagaaaaattgaataaaatgaattagatgatgagactcgcttattttaaagaaataaattatcacactcagtaagttagagtgcaaca

SEQ ID NO: 9125 - DNA, 641 bp, Gossypium hirsutum
cacagcgggtattttgggcactacagttgcaagtgtttgaggtgtttttcttggtcgtaggtgaaaccagaagctttacatggtgacgggtagttaaggactttgaaatggaaggttttgcgagagagtcagtgtagggaaatggaaaggcagccatggaattgaagctcaactgtagttccaaaaatttctgccgtccaagctaacaagattctaatggttttagggatcgacaattcgtagcatagtatggagtatgtatgaagtaatcctcgaattcttaaaactacaagtggattataataaatggtatcaactaccatgtgaaatattgttatttgttagtcagaggctcataggtttccaattcttagtcgaaatcagagtccattccgcttataaattctattacaacaattggaatatttataatatagccctttaacagatgaggtttcctattcttagtcgaattcggagttaataataataggtacttttccattacgccaccattgttctgattggaatatttataatatagccatttaacaaatgagatttcctctttctaatccaatacttctaaaccgcctttgtcgtcttataaaatagtataccgagaacaaaaaacttcaaaa

SEQ ID NO: 9126 - DNA, 579 bp, Gossypium hirsutum
tactttttttcttacagtgatcatagccgattgatggtgaaagatgcagcaaattcaatacacaaatgatcggattattcggaaaatcgagcacaaactaaatattcttgtttgcgatttgttcacataagctatggtcacgtatgaatacgagaacttcaacaagtcggtactaacaacattttgagtaaagatcatttgaaagtgataaatattctataggatcgaacttgtaagagtgttaaatcaaatttgatatcataaaagatacaagagtaatgaaaaaaagaggaggatgaattgtttgtggtggaaattacacagtatattaaacgaaatgagaagataaaagaaaattagaataaaaacaatattcaaacatggccatcaatgatcaatttgatgtttactcccaaatatattggcaatcttccactgctttttcacaccaggcttacatggatcctttatacccactactcctaacaaggtcaagctctttccatcaacctgtttcttctcttttaaatcatcatattctttttcttgaacttgtttatgtgcaaacgcaatgcagct

SEQ ID NO: 9127 - DNA, 468 bp, Gossypium hirsutum
tagatagaaccgatatgattgtgcttttacttaaattaagcattaaatggcatgtattaactgcttgtccgtgaataacagctccttcctatcatcaccattcttgtttttggttttgcaacaagaataaagccagaagcgagactgaattcaaaattaagatataaaaactctataatcaaataaaagggaagatgatcgagtgaaacaatcaagcaaataaagcaagagaaaagaagaatccattcaaaataataataataataaataaaaatgcaaaagcgaattaaagcaatgcttcacgagcagaaagatcatgaataaagcagaaaacactaaacctgaagagaaatttggatgttgatgatggtggagagggattaaatcgactaaatgctaggggacaaaacgataatttcaagactgctccgccgttcacactgttgctaaggaccacctgaaattttt

SEQ ID NO: 9128 - DNA, 669 bp, Gossypium hirsutum
gctcactgcctgacttgcatggtattcccattttgctcaaggataacattgctacaaaagataagctgaacaccaccgtttgcattgctcgggtcagtcgtgcccagagatgcaggggcagtggagaaactgagaaaagctggagcaatcattctgggtaaggctagcttgagtgagtgggctaattttaggtcaactactgcacccagtggctttagtccaagaggtggccagggaaaggtgagttaaatgaataattcccaagattttagctagtgtgtgaataacacgagtaataaggcctgttctgtaatgccgtgcagaatccttatgtcttgtctgcaactccgtgtgggtcaagtagtggatcaacaatatcagtggctgcaaacttggtaacagtatcattagggactgagactgacggttccatcctatgtccctccagttttaactcagtggtgggcctaaaacctacagttggtctcaccagagccggggtcattccagttactccaagacaggacaccattgggttaagttctcttttatgctactccatttttactgttgttttgggtgattttgattcttctttatgatgttattaatgactgaaaactccaacaaatgtgcctcagccctattggtttctataataatacaata

SEQ ID NO: 9129 - DNA, 542 bp, Gossypium hirsutum
  misc_feature (539)..(539): n is a, c, g, or t
gcaattgttttcagccaaagaaaaaaaggaaaagcattttaaaaatcaatataaatgatctcaagaaataacattcatatgtcacgaagctagaacattcacggcccctgacgcatgttctagccccgtgacgcatacatgttcaagcttaaaacaaagtagtaagatgatgcgatacatgaatggccaattctatataaacactaggaagaagggacaaaatttactattttatttagggtgatggatcaaatttattttccatctttgcaagtgtgcaaattgtgcttctaattttattgaaaatgtcaaatttacaattggggtattctacagaatttttcttgccattatcattaaccttttttaaccaaattcaggaacttgggaataataatattcgaaagaggacacaataagaaggatatcatcttggatgaataaatgcaaaaagaagttaatgaaatcaaagatagcatgcctgtaactccactaaatctattgcagagcttttcaacaagtgattccatttgtttgtnatg

SEQ ID NO: 9130 - DNA, 601 bp, Gossypium hirsutum
gatagtatgctcgggaatatgatcccactctgaagtactctgggaaaccttattataagatggttgcactcgaacagatgaaacggcttgctcctttggaacacgcaactgcaccttttttaacaccaactaacgttgattaaccaaccataattgtttaaatttcaacaaataaaacaccattaatctgtggtctgggtatcagataggaaaaagtgaaatcatactcgacactcatttgataactcatggcaagtgtccataattcccctctgttaatttattaattgttcatgtctgaacagtttactttttacatgaatgggcatgtttcagtaatgcaagaccggatgttgtatgcaacacacttgagtagaattcactgaattttggttacattagggacaaagaaagtatatactcgttcaggtaaaatgatagtaatttaagaagtaaagaataggcaatgagaaacctaaaaaaagcaagagtcataaacatacataacttgcataatcagcaataggggagtacttccaatagaggcatatgttttccttggaagctccccaacaggttcctccaaaggcatagcaaggat

SEQ ID NO: 9131 - DNA, 499 bp, Gossypium hirsutum
actttgtcctggtgacaataatgttaagggcattaacttaataatggaagtgaaaattgctctaagttgattgcatttcatataatatagtgggtatatttaatattttaatatttgcacaaactacaatgcaattatgtttcataatcttaaagattgagggtgggtttggatgggtgattgggtgcggtgcgtttagtttactttttgtctcacactacagtatcgctacagtgcctaatctcaccgccaccgctgtttttacactaaccacaggtaaacgcaccgcccatccaaacttacattgaattttatttcttaaaattgtgtattagaattggtcaagtatttggattacctctaaaattgtaaggtcaaataggttaaacgggtaatattttgtgtgaattatgatatttagtacgagagtcagctttagtgtgctaataatgtgttgtatggaacaatgggcctgatattggagttatgaatcccgcat

SEQ ID NO: 9132 - DNA, 525 bp, Gossypium hirsutum
ggagaagtgaaagtggacaacactgtgcatttcaagaatcgacttaattatacatacgacgacgaaatgtgtatccaaaaaggactaattatactatcctttgacagctgaaaggctgcgccaactatacaaatatcgaaaagataaaaatggggtaggtgatgaagcagcagctaaaatggcggaacatccattggttgcttatctatccggttctcagtataataaggataagcttaagtttcagctcttttcgcagataaaaaatcgatactccattgttgtaagacggtattcaacagcttttactcttagctataaacttgttagcaataatggaaattttgtcattcacatcattgtatttgtatggatggaacatttcctttgcttttccattattaataataataaaatttatatcaaaagtcggcctctttattgaagaattaaacaaagtaaaaagataaataaataaaccaacaatcaaaaggaaaacacgaaatgaaaaccctctgccatggg

SEQ ID NO: 9133 - DNA, 687 bp, Gossypium hirsutum
tcacacattaaaaaaaattaaaaaatttattatggatgtaaacaatttaataaaaaaaattgttttataaggtaaaggttagtgtaagattaatatttttaaaatcaaaagttttttttaaccaaaatttgatttttagatagtatgatttttattatgctcacaactctaaattttttattgttgtttttaaatatgctaaattaaaaaaaaatcggaaatattattaaaaattaggaaaaatctgaaaaaagttaacataaaattaattcaatttcaatgtatcattaaattaaaagaaaatcaagaattgtttagactcgtggttaaaattcgaagattttgcacgaaaaataaaataagcccaaaacattatagtcgattcatctgattttatttgatttttttgtttttctatttatttcaatgggatttatttcaatgggattttgttaattttctaattgagtttcattcaaccaattgatttaatttcaataacactaattttgtacatttttatattaatcttgaaattagaagttaataattagatatttttatttttaaaaaaataaaataatgagataatatttaatatgtgatgacatgtgagaataaaagaaagtttactttggtttatgaaattaatagaacaataaatgccctaataattgttaaagggtc

SEQ ID NO: 9134 - DNA, 813 bp, Gossypium hirsutum
  misc_feature (206)..(206): n is a, c, g, or t
  misc_feature (208)..(208): n is a, c, g, or t
gatgcaaggactgatccgaacttcagatgtgccaaacctcccaaacaggtcctttatggccactgcaaaccgaagtggtaataccaatgatcttaatggtagtatcggatgaagcagtagctgttagagtatgtgaatattaggttgttagtctgttaacaaagtctggtatatgttagtagattagttagcagcagttaattacnanatgcaaggactgatccgaacttcagatgtgccaaacctcccaaacaggtcctttatggccaccgcgaaccgaagtggaaataccaatgatcttaatggtagtatcggatgaagcagtagccaacaatggcaacatcatggacggtatcctcatggccagtctcaatattttgtgcaggcatctttggaactccaatatgcagctccttatatcttcaaaattcgacaatcaaaacagaccatattcaaacacccaaatcttttacagtaactctcaaccattttgttttgtatgcaacaacatataacattgtgagcagttctaccaaattagaaattgataagactctgattattcttttgtttcttgcatttagtttcaacataacagcgcatttagataaatatgcagctcctcatatcctcaaaattcgacaatcaaaacagaccatattcaaacacccaaatcttttacagtaagtctcaaccattttgttttatatgcaacagcatataacattgtgagcagttctaccaaattagaaattgataagactctgattattcttttgtttcttgcatttagtttcaacataacagcgcatt

SEQ ID NO: 9135 - DNA, 457 bp, Gossypium hirsutum
tcaagggtctttgttccaaatttatagtgtgataaattaatatccaaatacagtttttcaaaactgggtttagccatttagggacttaacctgaaagattactagattttgggcatcatacttccagggcccaaccccaacatatatatctttttacggaaaagagcgcaatccattaatcaactttgtcgcttttcacaagtttagctaaagcagattgaaccataaaacattcaagtttacatttacatattaaaactaaaagtttcaataataaaattccttttcatcttttcctcttttactgacaaataaatagttaggttgagatgggtttggttgatttggtttttttaatcgagacatttgattttttttgtttttattttatgaaataagaaatcgataattattaaactgtactaaatcggttcagtttgaactttcatattatttt

SEQ ID NO: 9136 - DNA, 608 bp, Gossypium hirsutum
tttgtttttatttttataaaactcgaaggcatgggttatccacattacaccaaaatcaccacttattgtaagttttattggaaatgaaacatatctaacctgaaagtggttagaattgaatgatatacatggatcttagaaattttactttatttactgattactctgatggccattaataataaataaatggctctgttcctgatgctattgttggcaaaaattgaatgttttacttggatcttcttaaaaatcttgatttatatatactgctggctctgtgggctttaatagtaggatagtaagtctaatgttaagttgtttttaaatacaagtttgatcttaatgttctataacaaaaagcagaagttaaataaattgtaagatgtttgttgatggttgctatatgtatggtgaaatgtcaaagttactgtagcttttgaagaatttttgcttctttgattggtaacatataattttccattttattgactactgaaggcatgccttcttccttcaactaattgaaagaatttttgcttctttgattggtagcatataattttccattttattgtctactttaggcatgccttcttccttcacct

SEQ ID NO: 9137 - DNA, 578 bp, Gossypium hirsutum
ttactttcgcattcccacaaaggctgctttgcaggtttgagatcaaaactgagtgtattttccttaaattttaagggaaaagaaaagaaaatgtggagaaagaaaaagctttgatgctctaatttgttgtgtctttttaggaggcatattcaactccaatcttgccgttagatgttcttgcagaaagacctcctgagaagaagtttgactgggtaagttttgtgtgaatataccagaattcatggatcataactattcattatcttttttccttttctaatggtactaatggctttccggttttggtttttggtgggatgtgctttggtggtgactgaatattgaaggctaaggtataaatgattcttgtttatctttttcgaaatgatcatgcttctaaaatttggatggataagaactgagatgcttgcagagataagcatatttgattcaggaaaagataatatgcatccattttttgtaacattttttctcttcgtgttactagtagtggttgggttttcttgggtggacatttaaattaaaaggaaggctgaagacccttccaatttcccggc

SEQ ID NO: 9138 - DNA, 441 bp, Gossypium hirsutum
ggacattcttccccatttcaagcattatctcggtgggtgggatattaccaaccggcattactgggcggtaaagtcttggctatgccttgcattcttgttagtcttttcattgatcattcttgatattgttggactgtgaatatcgtatttttgtaaagactctatccttaagctgaaattagaatctatgtcaaatgagaccagaatcttaatacatgtagatctaatgcagggaaacatataaaacttgaaacagatagtgttgtttggatgaaagtttaatgtattcaagaaaagggacaaattttttttatactcatttgggacttaaaagctagagaaatatgcacttcctattatcctgactcttcctgtatttgtattggagtcagagatgtttttattgatcttttacacgaaggaatgtagtgtgattctttc

SEQ ID NO: 9139 - DNA, 456 bp, Gossypium hirsutum
atttatcaataactgaatgaacttttttcctgacatcatctttgcatttgcaaagatctataatctatttcagaacattgaaagcatataggttagaagttacctacctaaaaatttcagaacttgatattccaaaatgagaaaatgtaagtacctgctcaggtgcacctttgctagcacgatgccagtttccatcataatcaatgtaggttagagcagttctcttgtctacagggttgaatggtaggaagtgaatctctcggacaccagcccgtgcctggtcaattattatccaaaatgactaaagaattcttgaacccaatcctaaatataatagaagaaagacatgcagaaaaaaataatttacctcctttggatctgcaagcattcctacaattgcagcatcaatagcatcctgattttcagtccttgaagcccttgctgcataaaaaaaaa

SEQ ID NO: 9140 - DNA, 557 bp, Gossypium hirsutum
cagaattgtgttcattctggtctaatacttaagtttggaccattttgggtaacttgttcccatggtttttaagttcgagttgtttgaagttgtgatcatgtttgagctttgatcatttcgaatttgagttgttaaatttctatgattaaataaatttgaatctgatatgagtttcaattaattgggtttgtgatcattgacactagtaaatgggtttttgttaaacaattgaaggaagtgaagacatggaccggctaataacgacagtgccaggcatggaaacttatcttcgatgtcgagatcttcctactttttgtcgaaaacttgacattgaagattcaattatgaagctagtcgtaaaacagacacgaaagagccttcaagccgatgccttgatactcaacaccaccgaagagctcgatgggcctatactatctcaaatacgcaccaaatgccctcgtgtctatgccgttggacccttacatgctcaattaaacactagactcaatgtaaaacatggagagtcatatgatcacttctccatacactttgagaaa

SEQ ID NO: 9141 - DNA, 401 bp, Gossypium hirsutum
aattgaaagcagcacaggatgaggcgaggatggacacatccaacatccatgaaggtagtagtaattttcaatattatatatccaagcttgaccctggagttgtttgagagtccagtcgcctaagacggaaatgggcaacaaaaaaattttctgcttttaatgtgaggaaaaaaaatattcaacctataataaattaattaaatgtctatggttttcaatttttcaccataaatgcttcattttttatggccccaaaaatttttcaagttttattatattatattttatatatattttttaaaaggtacccaatttattattttgcctaaggtccaaaaacatcataaacgggcctgtatatatccataacgaaaagcggtgaaggatttagcaatatccaa

SEQ ID NO: 9142 - DNA, 671 bp, Gossypium hirsutum
gatgtggtatgaccattgtcgagccttcatgctttgatgaggctacaaagaagggctgttaaaaagaagcaatggaaactgaaatgaaaattatccacaaaaatgacacttgggaactggttgataggccagtaaacaggaaagttattggtgtaaaatggttgataggccagtaaacaaaaatgacactttgcactagttgtaaggttagataccataaggctgttgtttgccttagctgcttagaagcagtggaaagtgcaccagctggacattaaatcagcttttctaaatggatttctcaaggaagagatctttgttgagcaacctgatggattcaaggttcttggtgaagaacacaaggtctacaagctcaagaagaccttgtatagtctaaaacaggctccaagggcctggtatgacagaattgatgcctacttgtcaaggctggggttcgagaagagcattagtgagcctacactttatgtaaagaaggctgagaaagaaaccttactgattgtatctttgtatgtagatgatctactggttactggttgtagaggtaagttgattgaaaaattcaaaaagcagatgcaagatgttttcgaaatgactgatttaggcttgatgacctacttccttggtatagaagtgaatcaaagtgagcatgg

SEQ ID NO: 9143 - DNA, 419 bp, Gossypium hirsutum
atatcgcatccttcttacttgctgacaagggcagtccggacacaaagtccattgtgactcgatcccatttccactcgggtatcatgatcggctggagtaatcctgaaggcacttgatgttccgctttcacttgttgacatattaaacatctcgaaacaaagtcggagatgtcccgtttcataccatgccaccaaaattgacgtttcaaatcgttgtacattttcgtactccccgggtgaattgacattcggctacaatgggcttcgttcagaatcatcgaaatgagttccgaattccttggaacacacaaacgatttctgaacctcaaacaatcatcatcatcaatttgaaactccgattcctcgttcggaaaacacttagcccgttttgcaaccaaatcatcatcgacttactgagct

SEQ ID NO: 9144 - DNA, 614 bp, Gossypium hirsutum
tgtatgtttagatcaatatgcagtcaaggggagggagctttgtattttcttcatgtttgtctatttaattatgttaaaattcaatgtatcctatgcttttatttgtgttctaatgaaaaaatgtatactatgcttttatttgtaagtatagaaatatttatgtacttttatatttttgtctcttttcatttttgagctaatttttttccggagatatttgagtttcaataaaacttctgcgttaagggaaaaatgctaacttgcaatgtctcatttgagtttaagacaatgagatagtgaacatttagaagtacataattcataaataaatgttaatgatgttctaagtttgcaaatagattgcatgattcatgaaatatgttttctagtaaccaaaaaacaaaaaattaactaacggtaaaaaacgtaaataggaaattatatatatgcatttgaaacatccatttcctacatattttattaactataaatttcagttcacaatcaatgattttaatttgtatcattcaaaatattaaatttaattaatcatataagatttagtattttaaaatttttcctccaaaaaatcaacatcttggtcatgtaagtct

SEQ ID NO: 9145 - DNA, 616 bp, Gossypium hirsutum
tgatcgcttagataggattttgaaaaattaattgaatcgaattttttaaataaattaaattttagctcaattatcaaacccaaaatcatcccaattatagcgtttcaaagacatacatttacttatcggaaaataaaatatttgaatactgatataatctttttatcttacatttaacttcattgaaataaacttcagaaatgtaaaagatatagaattttcattttttaaaattgtaaaaagcttattgtttgagatgatataatataaagataaccttaatattcaattaggatttacaaatcataatcttaatgtttattttatgtttatgttgttgttatttgtttgtgcttatatatttttctattatgttttcacaaatatttttccttttttctatttttttccaaattaaatttcaatgtttaatataaattatttgggtttttaactcaaaccaaataatgttgggtttaattactttttttactttttgactaagttaattttgatgtgaaattagaaaactactctttttatttatgactgttttttttttaatttacatgatttttagtttaataattcattttaaaatttttatatctcatat

SEQ ID NO: 9146 - DNA, 417 bp, Gossypium hirsutum
tcgccctcaatcagaaacaactgaaatcacaatttcaaatcttcagaaattatagtccaaacgcctgtaaaaagaaaagtagaaagttgcaagaaacaaaccgcagggtgaccggctacaaagtcatccagctttccatacttcttcttgtaatcatgccagtgtaaaggtgcaagcattttccccaacctatttggtagctgcaattgaaagatacaagtcaaaccccattcttgcaggacctggtatcttagtaagttgaccaatgaaaatttattagcagaccaaccgtggaactgatccgaattttgccaccagttggaatcgtgcgaacaatgcaagccaacaaagacctctcatcaagcagagctgtctctgaagtcttagctgatatcaggttattagtctggccagttg

SEQ ID NO: 9147 - DNA, 345 bp, Gossypium hirsutum
attgatcactatggattaattaaagcaagcatccctttggatggttgaatttcatgaaagcacaaaccatgaaaaaaaagagccatggtatcaattgacttcaagtcatctttagatgtgaaatgccatacaagttcgtcataattattatgtccaaaacttttttattcactctaatcgttggaatctacataaataaggacgaaataatcaaattataatcaaattataggtgattgtgtaaattttaataatactaaactctacaaaattgggggagagccaaaacttcccccatagatcattatcattatcttcctaaaagcacacacaacaacataaaaa

SEQ ID NO: 9148 - DNA, 643 bp, Gossypium hirsutum
gtttcaagcaaacaagccaagggattttaattttgtttcattcatcagcagcaaatgagagaggtgaacttttagtaactctttttatataagcttttggggatgatgcaagctaaaacagcaatggtgaccactctttaccatcgaccgcaccgccttctcctcgatacgcaaccgaacgcatcgccatcgctaccgaatggaagcaggacgcgcaacgctttcgccaatgaagccaactttgacaccaacatggtgatcatcctagcggctttgctttgtgcattgatatgtgctctaggactaaactccattatgcgttgcactttccgttgcggcagaaggtttggtttggacgccacggaagagaccgcggcgcgtttggctgccgcgacgggcctgaagaagagcgcgttgcgtcggcttccggtggccgtgtatggttcagggatggatatgaaggctactgagtgtccaatttgccttggagaattcatgggtggtgaaaaagttagggtgttgccaaaatgtaaccatggtttccatgtaaggtgtatagatacatggttgctgtcacactcatcttgcccaacttgcaggcagtcattgttggatcaggcaactagcagcagtgatggtgcag

SEQ ID NO: 9149 - DNA, 549 bp, Gossypium hirsutum
tgttttacattttgggctgcgttgtgctttgggccagggataaatgtttgagtaatttaggttaaaacaagttgggccacgttggtttggtctgtattattttttagcttgtaactatagacgttaataataataatatttttatattggttttattatctatagtgggccgggcaaaaatgggctcatagagctgttaattatgatatccccacaaacccgaaggttggcctttacatatttcataccctgaaaaaacatgcattctgttactctacaaaatgatctggtctttaaaagataagagagctactgctgcctgtgttttttgctaatttttatgtaggtacacatccatcaagtgggtagaacagctcgtactggaagatctgatcttgctatctcactagtgaatcagtatgagctgggtatgccacatttgctaaacttgtttacagaatgttagttgatgagcagcctgtccagcacagtaacctttttttttgttttctgtattccagacaataaagttacccgagtgtcctgctt

SEQ ID NO: 9150 - DNA, 417 bp, Gossypium hirsutum
agatcagagagcaacatatcagttccctagagcaactttaattaactagaacaactagatatattagatagtatactaaagctttctcttgctaagatctcagattcagaatccataacataaacattaagaagactcagtaaacataccttcccatgttggctattagtgaccttcaaattttgtgtgatggacccatcaccgcttgcaggcaaagtgttgctgctagctggatctaagtgcaactgaagaaactgcataaaagcagcaaagtacatattaaaaggagaagcatgcaaaacccaatgtaacaaatagaaattcaatggttatttttagtaaacgtagcaacttcatatattttgtgaaaatagtgaagcctagattttagaaacccgccaaatgcagttaaaatag

SEQ ID NO: 9151 - DNA, 441 bp, Gossypium hirsutum
tgaagggggaaggacacagaatcgggggctgtggttttattgtagtaccttgtggggactcagtgagtctgagatatatagaggaatgactgttttttattgggttacaaaatcttggttaatacattttcattgtcgagaatttataaaaataatataattggttaatgtttttgttactcttacaccacgcgttgctccacacgtcctataaaggtgaatctctcgtcacaagcgaatttctagtgtcgaacctcgtatcatggcgtagtggcaaacttgcataagatcatcttcggtagacatatatggaatgtatgtggtggcacaaactcattaatcatcctgttgtcttagtaagttgtattctaagacttcacatcactgttgctgcaaggaaacaatgtatgaccttactatcagcaagctttagacatatag

SEQ ID NO: 9152 - DNA, 384 bp, Gossypium hirsutum
tttgactatttatggacacatgctttgaattcagatgaaactaacaagggaatccacacctatggccactattttaatgacaaagatccaaaagagtgcggtgacttcgtaatcaaagcctataatgagcctggtgatattgatggatataacatttatgccccactttgtcagcaagattcttcatcaataaaaagctcatatgatccggtaagtcatcttactttgttacattaatggctcctcgttacataactggattttggaatttgaaattcatttttctcatcatccattcatttaggttagtattaaacacaataaatattttgttgttcgaatttgtttttttcaagaagaaagaaaaagggattgcaagatata

SEQ ID NO: 9153 - DNA, 421 bp, Gossypium hirsutum
  misc_feature (409)..(409): n is a, c, g, or t
cttgtgtatcttgcccctttgtttttctttctacagggtggtaaatggtgctcttgattatctatctaaggatctgggaattgctcaaaatgctgtcatgcaaggcatgcatcatgatctttagttaccatgcttcaatctctgctttcttttccgttacatttctttgttgttgttggttgttttttttttcctgaaatattttacgtgtgtattctggtgtctgataagtcaaattcccatagcacatttagtgccgaagatcatttagtgaaatttaagtgaaataaaggtcattcaactaacacattccatccatctcttctggtgtcctttgtttataacagtgaagtggcttcacatgtaatcattcatgcaatgtcacaagttgttggcttgctgttttccnctcttctttcac

SEQ ID NO: 9154 - DNA, 572 bp, Gossypium hirsutum
caagttgtgtagaaattgaaatgtgtaatgtgatatagtatgttgataattttattttaatgttaactattatgtagcaaacatagcaccggaaacgtcatcgaagaagggaaaggagaaagtaaacaaggatattgagtagactcgagaattacggtttgtatttctataaccaaacttagtagttattttgatacatatgattgatattatgtatggctactgaatttaaagtaagtattgatattgtggtattgttttgacttatgactagttgaattgagatgtatattgattgttgatgatgaattaagaagtgaactggaaaccctattaacagtgtcgggctagtcagatataattgcaatgccataggattagaagtgttcagggatattctaactttgtgtcaatgagacactattagtgtcgccttactgttactattccagattcgttccgatgaggtactctctgtaccgttactattactattactgttactgttactgttacagtgtattccggctctggctgatgaaacactatataatatcccagtgtgtgggttg

SEQ ID NO: 9155 - DNA, 670 bp, Gossypium hirsutum
ttccgtccaaatctaaggactttcttccatggagacactttcaaaaataccttatcaccaacttgaaactccatttcttttcgtttcaaatccgcataagatttctgtctatctgaagcagctttcaaacaatctcgaatcactttcaccttttcttcggtttcttttattaaatcaactccataaatctgattttccttgagttcagtccaatacaatggcgtccgacatttacgaccatataatgcttcataaggtgccatcttcaaacttgtctgataactattattataagcaaattctaccaatggtaagtacctttcccaactatcttgaaattccaatacgcaacatctgagcatgtcttcaagaatctgaattactctctctgattgtccatcagtttgtggatgaaaggcagtgctgaaatttaactttgtacctaatgcctcttgcaacttttgccaaaaccgtgaggtaaacctcggatctctatccgaaatgattgacaaaggtatcccatgaagtctaacaatctctcggatatacaattcagccaacttattaagagaataatctgtacgtaccggaataaaatgagccgatttagtcagtctgtcaactattgcccagatggcatttttcttccctggaagtaacggcaacccta

SEQ ID NO: 9156 - DNA, 535 bp, Gossypium hirsutum
  misc_feature (41)..(44): n is a, c, g, or t
  misc_feature (59)..(60): n is a, c, g, or t
  misc_feature (161)..(162): n is a, c, g, or t
  misc_feature (483)..(483): n is a, c, g, or t
  misc_feature (488)..(490): n is a, c, g, or t
  misc_feature (492)..(495): n is a, c, g, or t
  misc_feature (510)..(518): n is a, c, g, or t
  misc_feature (527)..(531): n is a, c, g, or t
tttagcttagacatgtagcactgatttaggtataaacactnnnngaggtccttgggttnnaagttatttagtctctctcaaaataaacatagcaatttagttccttttatacatgttccgggggttgggttttgggagagcttaaacaaaaatattatagnntcgaaaaaagagttttgagctaataaataagctcatttaaatataggttgggtttagtttttaatatcgaaagcttgagcctagtttgattttcaagtttataaatgttttttgtgtacatattgaaatttacaaattgggagagggatgacaagagcaaggttttaactttggtccttagggtgcccaacaaagagtcttaatcttttcattcttaggttatatcatattgaaaatttaatatactatctcataatggaaacgttattttcaattttcaataaatgtccagtcgatttccttcaaaaaaaaaaccctaanttttnnngnnnngtttttcaaaaaaannnnnnnnncaattccannnnntaaa

SEQ ID NO: 9157 - DNA, 691 bp, Gossypium hirsutum
  misc_feature (562)..(562): n is a, c, g, or t
  misc_feature (651)..(653): n is a, c, g, or t
  misc_feature (663)..(665): n is a, c, g, or t
  misc_feature (680)..(682): n is a, c, g, or t
  misc_feature (686)..(688): n is a, c, g, or t
caaagctgacatgcaccaccatttatcttctagcttgtgtacaatgttatgaacacatacatatgggtttcaaatatggattcatccacatccgtacatgtaaatcatacatgcatcgttggtcgagaagaatgattccaagtttccaaagacaattccttcaggcaagtcacggattcgtactttagacattccaggaatgaagttgagggtttcatcttctcgcccaacgatgcctgtataatttacatgtacagatgtggataaatccatatttgaaacccatatgtatatgttcataacattgtacacaagctagaagataaatggtggtgcatgtcagctttgaagtcattgaaatgagatatctatctatcggccaaaggtagattatttaagctatagataatatactattttttcttcaaaatgtttcccttattttgcagctctccatttttttgacagatttttaaagtacactttgatggaaaatgcttaaagttgaaacttaggtgagaaaagaacaaaaagaaagggtagttacctccaacaccaaacnttatcttctagcttgtgtacaatgttatgaacatatacatatgggtttcaaatatggatttgtccacatctgtacatgtaaattatacnnncatcgttggnnngggggatgaaacctnnnactnnnttt

SEQ ID NO: 9158 - DNA, 415 bp, Gossypium hirsutum
tctattgccagatggattcagttccagatcttactgaacacatacataggacaaccgcaagagtgctgctccacattaacgggtaagatcattaaatatctcttttgatggacaaccacgattggtttctcttgtagaagccaaaaaacaaccaaaagagtgcatatgaacaaaagctaaaatctcttctgacagatcatagattttcatggaaaagaaaaaccataatcttacttctatgaatcattaagattgattacatgataatattagaaatttctgcattttgatctgtgacttggcttttgctttatggtaaaatttgaatgaaaatgcaataaaaaagcaaggagcaaaagagataatcctttgtttcttatgattttagacgttgatatccatgtatgcacgtcta

SEQ ID NO: 9159 - DNA, 363 bp, Gossypium hirsutum
acatctatttctatattaactgttggaagtaacattaggatcctttatctggtgctcttgagctgacaagtgttaacactttatccattttactctcgttgaccccactttggtggatcttacctcagaatgttgaagattagtaataaatgtgtataaagagctaagcaggctgatagtgtgcagtaaacccttactaacatcgtaacatggaactggatgttcaatttgtgaaaagtatattggtagttagaatctctgataaaggtattgatatgaggattaactttgcagaatttgatcatcttatattatgttctaagtcattaacttttagactgacttatcttggattttgtagga

SEQ ID NO: 9160 - DNA, 639 bp, Gossypium hirsutum
cctagttggaagacgtttaaggtcatacttagacgaaataataaattggttctcttttaaaaaagttataaaatgtaatatatttatggtgaaaattgtaatgcatttggagccctagtaggtgaagcatttatggtgaaaaatctaaaaaaaaaatatttctcatgttaaaagttgaaaaaaataaaattttttaggcccttttagcactgggccctcgacagctgcactctcaaacaatccccaagaccgagcctgatcttacccttaattttcatgtttgagtataggttaaattttgttatcaatccatatatattacatgtaaattacggttttattctttaatttgattattttaagtcattgtatttctagaattttaacagttttaattctaatcaaagctgttaaattcatttagttaaattctgctattttaaattttgaagtggcaaatatataattgcttgtgtagtgtcatgtaacttactatttttatatattactcacaaaaaattaattaatagatttaagaccattgtttacattaagattaaaattttgaaatttgaaaaatatataacaaataagaacaatgtagttggacataggatagggtgcacgagtatgcctatt

SEQ ID NO: 9161 - DNA, 677 bp, Gossypium hirsutum
  misc_feature (552)..(554): n is a, c, g, or t
  misc_feature (595)..(596): n is a, c, g, or t
  misc_feature (600)..(604): n is a, c, g, or t
  misc_feature (607)..(608): n is a, c, g, or t
  misc_feature (627)..(629): n is a, c, g, or t
  misc_feature (649)..(649): n is a, c, g, or t
  misc_feature (651)..(652): n is a, c, g, or t
  misc_feature (655)..(657): n is a, c, g, or t
  misc_feature (662)..(667): n is a, c, g, or t
  misc_feature (670)..(673): n is a, c, g, or t
ttaagtaataagccaaggcatacatatcccagagagttttatgaaatgcacagaatctcagcatataaaagaaaaaaaagaaagaaagaatgcgacaacccaaacgaaaacaatttgttgggcttatttatgctgaatgcattaggaagaaagaacaattaaaacattttatctgaagttctctccataagcaattactgaatatgcattttacatggctccctccaagtttaaaagtgaaaaaggaaagaaaagaaaaatagatttttttgaaacttgtactcaaattctatcccaatctttgctctatttcatatattgaaatctcaactccaatttcaatgccaggagacgtaaaaacaaataaagtagttggcctcacccactgcatcaccgtgttaaattcggatagcatatccatttcaaatatgggtagaagaacacaagagaaagtcaactcataagtattgaaatgaatgcacattatgcaagtgaagtgagtggtaaaagggaacctaatagcaaattacctgggattagcttaacggaagnnnaatctttcttcaaaatttgaaataactacccctctcttcannattnnnnnggnnaatttacttcattaatgtnnntcttgacttcttctcccctntnntannncaacnnnnnnacnnnnttgt

SEQ ID NO: 9162 - DNA, 605 bp, Gossypium hirsutum
  misc_feature (591)..(591): n is a, c, g, or t
  misc_feature (594)..(594): n is a, c, g, or t
  misc_feature (598)..(600): n is a, c, g, or t
aacattaaggggagcgtgctccaccattgtgtaaagaggtaaatacttcaatagattttggtagcagtatttgtttattttaggggctcatatttctttgttcttttccttcaattttggtcatagctatcaaagtgaatttactgtttattccttgtttttcaaagtgttatcttcaacagacaaaacatacatgaaaccattggcttggaagccatctctagtgtgttccattggttcctttgtactctcaaagtctcaattgttgcttttgtttatgcaacagaagcaaatagtaaaggaaggccaggtgctttgctacatcgaacaactaggctgtgaaattccgattgcggtataaatctcaacttaacaggaattacgatgtggcttctgcatgttaacaaatggaaatgagggtttatttcacggttcaccctacttgtctttctagttacttttcttgtatgcttatgtttatatgatcaatcaatctggattatctctaattccgatcactgttttacagtctgatgtatccggggaggtcataaaaattctacaagatgatggtggtatgtctttgccatnatntcannnacatt

SEQ ID NO: 9163 - DNA, 612 bp, Gossypium hirsutum
gttggccggtgctattttatatcacgcctcccagaaggctaagtttcccactatgattatttgcagctacagcaacacattgatattaccactactggcattcgcatcactgctgtcttgtgcattactagtaggatgtggatgtttacgcacgcaccttttggtttgattcaatatgtgcttgcaatttgtttttcgcttcgttaacgtactttctctccgtaaaatactcaaaaatctctatttatattcttaatggattgttaatcttcactttttcatgattctgtatttttaaccttctttaatacttgcgtaaacagaaatgcataaacaattgtataaatatcacaaactaaagtggatggtttttgaattcaggatatagtctaattagttcataaataattattttaacaagtaatattaaccggatttgtgactctaattttattattattggagggttttcttgtataccaaaagaaaagaaaaaaaaacctgacgatgtaggggaaactcccccgagtaaagaaactgtgcatgaagcatgcagattggcaggaagacaaatgcaactttgtttttgccagcactgtcaacaaagtaaaa

SEQ ID NO: 9164 - DNA, 405 bp, Gossypium hirsutum
ctttctgctaatgaatctaccaggccatcagcactggattttacaggtaataaacctttttaattttcttttatgtcctcaaaaaataaaaaaggaaaatactttagaataatagtctgtttcctgtatccaattttttttagaattaaataattttaagagaacgtttctggttgctttcatctctttactatgagctgtactgcaaattcaggggtcatcgagttgctgtgaaaagcaaataatcatgcattaagtctctttttatcgtaaaatatggacttcctctcaaaagacagtggcattgtttgctttggatactgatgtttgtcctgctaattggattaatttattgaattttgtgctatatttcaggctctccatttttccgggatgacactaggt

SEQ ID NO: 9165 - DNA, 627 bp, Gossypium hirsutum
tgtgttccaatgtgtttgtcctggccaatttttataagtgataataattcgtgaattttataatgttattgttgtttaatttctgtgacatttcctttctacccagaaacaagctgccaagcaggatgtatatcaattgtttgctgagaaagttagagaccataaagatttgaagtctagatgggctgtcttgcaagaaactcgtgtcgaatattttagggggaaggattttgtaagctttatgaaaaatcatcctgagcttaaagaaatactggaatcagatagagatcttgaaactgaagatattgccaataatttgttacaaaaaaatcttttggtgcggtgtgaccgtgtggtgaaaactgttcgtccggggaagaaaaagttgtctacctggcctgcacatttagaaatctttcctgtaagtattttatttgtgtaacattaaaatatttgataaatcatttacttatttcacttttaggtagtatggctgcttgagattcttatacaaaaatttctatatgtctatatgtaatgtgtattattgtttactttgttaatatattaaagagttatctcaaaatgcagactagatctgtccaaactttttctggataaacctga

SEQ ID NO: 9166 - DNA, 391 bp, Gossypium hirsutum
  misc_feature (63)..(63): n is a, c, g, or t
  misc_feature (65)..(65): n is a, c, g, or t
aagggcattctattttttttttctttttcccccaaagcagcccacatggggaaaaaggatccntnaaactctgatttatttatttttctaaatttcttttccccaagttgggtctcaaaacattgacaaatatattcatttaatatgaaaaaaataaaaataaaaaaaataaaccccaggaggagcaatttctaataggaataacacccgtttaacatgcttaagtagttgaactatgggggagggttaaggctgaggcaaacaatagttgttttaataaacaattactttggcgtctgaattgctttccatcgagcttacattatgtcactttacagggagtcaatcttcaccttttgctgtatatgcatgatactgaaggggccaaaaa

SEQ ID NO: 9167 - DNA, 634 bp, Gossypium hirsutum
  misc_feature (351)..(352): n is a, c, g, or t
  misc_feature (445)..(448): n is a, c, g, or t
  misc_feature (466)..(466): n is a, c, g, or t
  misc_feature (474)..(475): n is a, c, g, or t
  misc_feature (500)..(504): n is a, c, g, or t
  misc_feature (507)..(510): n is a, c, g, or t
  misc_feature (585)..(585): n is a, c, g, or t
  misc_feature (592)..(594): n is a, c, g, or t
  misc_feature (607)..(609): n is a, c, g, or t
  misc_feature (617)..(620): n is a, c, g, or t
gtcatattgcaacatctcaattaattcacaaaaattcacatcaagcttaatcaattgcctttcacttccaaatgatccttattcaaatcaacctcatgaactaccaaagaactaaaaccgagaaaattcaattacccaaacacctttttgttttgttaccaaactttaaacacaaaaagaaccctttcccatcaatcatatagcaataaaaacccataaacagacttttgattccatcaaatcaaccctaaatttcagatctttgatcaacaaaccatcaaaagagatataaaagaaagttctttttttttggctaacttggcggccttcccaggttttaaaagtccaaannaacccccccccgggataagctcccccccccaattcgggccaaggggggggaaacccgttcatctccaaaaaatccaccctttccccttccccnnnnttaaaaaaaaaaaagttnaaaaaaannggttttaagggggaaaaaaaaaagnnnnnttnnnnaaaaagaaaaaaaaaaaaaaaaaaggggggcccttttttaaatttggggtccctttttttccactttttcccctnaattggnnngaaaaatttggannngcttttcnnnnctttaaaaaactta

SEQ ID NO: 9168 - DNA, 586 bp, Gossypium hirsutum
atttttccaatgcaatggtatcacaaactgatgctccgatcaagagtcggttttcacaagattctttatcctttttggattagatatacaacaaagacaccaactaggcactggcatactaagttttcaagatacgaggcagtaaaacggatcagcatcgttctaggaacttactgatgtatcataacaacacaaatatggctagatcatccttgtaccgattccagtttggcttactagatcatgaaagttcatacagaagatgaatgtaccaaaagtaaaacaaaccatatataacatacagcttggttgaattcggcaagtaaaagtaaaaccgaagcttaccatcttcaaaaactcatgaaaatccctcaaattttttgcattttcattgaaagagcatgttggggcttgggatgacagaatattggttttagaccccaaaaacttggagcataccacatttagaataacagaagcacctttaggagaaaacttcatatctttatgagaatttttaaattgtaaaatattcatatagtccacttatttttcaacttttttcagataaaggcttctttcacat

SEQ ID NO: 9169 - DNA, 553 bp, Gossypium hirsutum
ctttctctttatctctagtcatcagttcttatatagtctatttctggtgtgtgtgagtgcactatgtctgggtatatacttggttacttgatttaaattctatggtaactttaacaagtgcttgcagcgaataactatagccgactagcatagcattaagccaacttcctatttgatatttattctcacttctgtaaaatattgttgaaattgaaagggagacaccaaaagttttcctaatttatcagtgtaactattgattgaatttagtataatatgtttcacgatcttaattttcttcttcaaagatgtgcttgctgagatattagtttcttacattgttaagacaagtctgtagtaatcagatatttcaacctaatacacagataaactcatgcttctgtatctactgtcaagtgcacttcattttgttttctggtattttatgaccagtaaagaaaatactaagagaaaaggtgccaggaggggggaaaaaatattttgatggtgttacactcttaaatttttcttggagaaagggggggtttaaggg

SEQ ID NO: 9170 - DNA, 579 bp, Gossypium hirsutum
atcttagttggcgaaatcacatgaaaggggtctgaccggtatctccttaacatggatacatggaacatgtcatgaatcttttccagttcgggtggcaacaccaaacgataggctaatggtctaactctttcggtaatctcgtacggtccgataaatcgtggactcagtttacctttccgacgaaatcttaatacctttttccatggagatactttcaaaaataatctatctccaacttgaaactcaatttcctttctttttcagatcagcataagacttttgcctatctgatgccacttttaaagaatcccgtatcgctttaactttttcttcagtttctttgatcaaatcaactccatgaatctgattttcctttagttctgtccagtacaatgaagttcggcacttcctaccatataaggcctcataaggtgccatcttcaaacttgtttggaaactattgctataggcaaattctaccaatggcaagtgtttttcccaactaccctgaaattcgaggatgcaacaacgcaacatgtcctcgagaatctgaatcaaccgctcaaactgaccatctag

SEQ ID NO: 9171 - DNA, 502 bp, Gossypium hirsutum
tgtggttctcattccatagttaatgccccgcctgaggaaccattctgcccctcccccatgttgttcgtgtaatgacagctggtgcagccccacctccttctgtccttgctggaatgtcccagaaaggtttccgagtcacccacacttacggtctctccgaaacctatggtccttctacagtgtgtgcatggaagcctgaatgggactccctaccacctgaaactcaagctcgtctaaatgcacgtcaaggtgtccgatacgttggtttagagtgcctagatgtcattagtactcaaactggtcagcccgtacctgctgatggaaaaaccattggagaaatagtgtttcgcggtaacattgtgatgaaaggctacttaaagaacccgaaagcaaatgaggaaacatttgcaaatggctggtttcactccggggatctgggtgtgaaaaatccagatggatacattgaaataaaagataggtcgaaggacataatcatatcggg

SEQ ID NO: 9172 - DNA, 611 bp, Gossypium hirsutum
aggcgaaagctcatgtgttgaaaatgcaacaaatgaagagttatcagtgaaggattccaaggtttatcttgaattggaggatttgatcaattggaaaccctctaacttgactggattggtcaatgatctgctagtggaacaaactggctgatacaactatatatccgacacaggtttgttctatttcatcctctatgtaccatcatatctcatatctatatctgtatctgaagtaaacaaggatatcgtacatgctttcttaatgtagatgccattggttgcaggaaggtgactgcaagtgtatcgaggcttgaagctgatagcaacaaaggtttatatagctctctatattactgctttccttaagattgtgaaaactttaaatcatatataacagtatatatatacaacaatgtctagtcctttttaacatatatatacatatatatagttatataccctttaccctttatttatcaaattctgctacttcacttaaaaggttaaaaattgaaatcaacggtgttacatattttgatgcttggcttacttgcaattcaaggaacttatggattttgtacctccctcttacttgtttatgtgttcaacac

SEQ ID NO: 9173 - DNA, 612 bp, Gossypium hirsutum
  misc_feature (574)..(576): n is a, c, g, or t
acatcattgcttaatgccgataaaccatccagtagcattggaattatctacattaaaaaaaattttggcaagtgaaataaaaaactttctcaaagagtataatatatccaaaaaatagccataaccttttgcaaaaagttcaatactaaattccaatactaaccttcttggtgtcacttaaaacaacaattaggggagtatctataataacatgtgcagaagcccgaaataaaaaaaacctgaaatcacattgcagtttagtgagaaatcaacccaaattgaccaataaactttcatactatatcacggggtcaataacaatgtcataagtgctcgagaaaaatgtagctactaagtagctcaataaaaagctattaatttattattttgtatcttggcataaatcattcaagcatgcacaaacctggacaaaatgaaaataggtactatatacataggcataagcgcacaaaaaaataaacatcacaaaaccattaatgaaaatagatcatttttaccttgagagtggttccaatttcataactagagattgcaaaacaggcattattgctgnnnaaaatcgttgcttatatagaggtcgtattattgcat

SEQ ID NO: 9174 - DNA, 601 bp, Gossypium hirsutum
attttattttctcgcgttttctcgctctcgacagaaaaacaaaaccaaataaatcttttttcatcgttgattgtttgaattggttcgagtttccccagtttctcaaccgccatcaatccgaagaaaaaaatcgattttttttgccaaattcgccaaatttggcaaaatctctgtcgattgcgtttcgcgggagtgaaattagggaatctttttgttggtaatcttttaaccttaatgtggatttgattatttctcaaaccaggttttctactttgatctatattttttattgaaaaaaattgaaaaatagtttatttgacctgcttggttcgtcgcaaaccctagttttttattaggtttagttttttttgagggattcaaaaaataaaaaaaattgtgatttaggaaatttcattgattcttttttgtgtataggtacagaagttagattatgccactatttttttttgtttcctcttttagaaatttttagttgatatttaggttttcttaaggaaaaactctgaaatttttggtgcgttgttttagtttaccatccaaaatcgcgggtttttatttttgtttcatttaattttagctg

SEQ ID NO: 9175 - DNA, 600 bp, Gossypium hirsutum
gcctctaacacatcaaatccaagcgaggtactcgccaaagaccagcccagaggagcttagggaaatatgcagacagtaactcctaactttgactttatatctattgtgctgtttaccttattttttgaaggattattggttgtctgaccatatgacatttgtagtagtctaacatttatttactgtgttatttaatatttagcttgatatagctttaatgcaatatcctggttgatattgaatttgatgtcttagaaattgagtcttaatcatatttcagggccaaatcaagtcttatccctttgtttgagaaaaaattgactgctagtgatgtggacaccaggaatgggcgccttgtgttaccaaagagatgtgcagaggtaggtttttgcagattattatttttcttttaatttcttcaatttgtatgcattggaaaataaagtaagtttcttgatggagattgtgattgagcagttttttaatgcatcatttgcatttactgtaatttaagtttctattattattattattattattattattagtactagtactgctgctgctgctgctgctgctgctgctgctgctactactact

SEQ ID NO: 9176 - DNA, 521 bp, Gossypium hirsutum
  misc_feature (365)..(368): n is a, c, g, or t
  misc_feature (417)..(425): n is a, c, g, or t
  misc_feature (427)..(432): n is a, c, g, or t
  misc_feature (434)..(434): n is a, c, g, or t
  misc_feature (451)..(453): n is a, c, g, or t
  misc_feature (462)..(464): n is a, c, g, or t
  misc_feature (476)..(476): n is a, c, g, or t
cttgatatcatggaattccaagcaacaagatttttgtcatgcatatctgagaataaacgttcagccatacccaggaaaccacatttcgaatacatatcaacaagggaagtagcaacataaacatcatggtgcaaaccacttttgataacatatccatggatcatgcaccctgaatctacattctccaatcctgtacatgcgttgatgacacttgacataatatcagaatctggtcttactcctccatctaccttcatttttctaaaataatctaaagcttctctgaacttcctattttgacaaaaacctgatatcatcgaaccccaagcaaccacatccttttccctcattgtgctaagaatgannnngaaactcatagtggttgcttggggttcaaggatatcaggtttttgtcannnnnnnnngnnnnnngnagctttagattattttnnnaaaatgaannnagatggaggagnaagaccagattctgatattatgtcaagtgtcatcaacgcatgtac

SEQ ID NO: 9177 - DNA, 513 bp, Gossypium hirsutum
  misc_feature (13)..(13): n is a, c, g, or t
gttctttgctagnaatgttttcttttgttctcagtggaatcccctttcacattcattctatccttttctttttgtgcctggtgttcaacttgatatatcttttattaataactagtgactttgatttacttttgctgtatgattcttgaagcttttatcaaaatacttagttaatatactgatgcctatgttggtagaaattgtttaattatggtactttgttattgtctattgcaggcagtttgctcaacgctcaagagtgcgtaaacttcagtacatagctgaactggaaagaaatgtacaagctttgcaggcaagagttagtcaaaactgaagtttttttttaatcatatacttacatttgaaattgacttgaagttatgaatcagtatacgccatataataatgaagtgttaattgtgtttcttattttataggctgaaggatctgaagtttcagctgagcttgaatttctcaaccaacagaatcttattcttagcatgagaacaaagc

SEQ ID NO: 9178 - DNA, 521 bp, Gossypium hirsutum
gcatcttttgcagtcactcctagtgattttgacgttgagagatggaacataacgaaactctatatcgaagtcagactcgttttcttgcctaatattcacgttgtaatataaagccatggcagtgctttgattttttgttttgtattatgatatgattttgaaagtaaagaaataatacatttatagataggtgttatagtaaggaattcaatggacttggaagttggaattcaataatgtttttatatgatttttaaaaaatgttgaacatgattttgagaaaaaaaaaacctttctggcattgccattaataaaacctaaaactccgaatctaaacatgattttgagaaaagaccaatttggtcgcttacagttttcatatatcatagacatcgatataacaaagaagcacacctcatcccaattctttacaaagatcccccatgtgcaaccacacgaaaagcaaagagcctggtatgcccatggccaagtaccctggacaagctccttatgctcaaaca

SEQ ID NO: 9179 - DNA, 626 bp, Gossypium hirsutum
  misc_feature (618)..(622): n is a, c, g, or t
aaagcagtttgggaatagtgtgtaataaagaaaaataagattaggggccctccactgtagtaataggttgagtagctaaggaggtatttgtttgctccatccatcttctaagtcagaagtattagctttatgagtgaattccattccacttgtgacatgattgaatactcgacaattcaatgaatgctccactatgattgtcaagttagagaatcatgtgaagagctgggtattctaaaagaaatatatataaggggccatggttaaaaagaaaatcgagttcaataaaagattaaccaagtaaattaagagatatttgctatagtgaattagcatacaggagtatgtaggattttattcttagggaaatattttctgtactgccattgctaaataaacttaggaaacttcaacaaatttttagacatagaagattgttgagaattgaagtataaaatgttgtctatatggtttggtaatacaaaaatggttatgtggtcatggcaattcttgcattcacgaattcatgaatgcttttcttgagggaaagtaataactcaggtttgagggtgtgataacttttgaaaagagttatatttcatgcccttagacttagtnnnnngtct

SEQ ID NO: 9180 - DNA, 410 bp, Gossypium hirsutum
tatttgtcctccacagacacagccaagtgtagtcctgcatcaggtttgatccagtttctctttgataagatacttgatcccccgagattttcatgcctagcccaggtgaaagtactatgagtcagttctgaaaactatcttgcattagaaaaacctattccaattctatattcaacaattggggaattacaactaaggcaaaagacaattcactatttattgacataaacatctctttgcctattacttcctgcaatcactcaccccgtcacaattgaaattcttagtaaaagtctatagtctacatgcttagataagtatttttaccttcattttttcctgcacctttttagcatcaaactgctccccctctgtgaaaatgtctaatgaggccattgatgccatagcaa

SEQ ID NO: 9181 - DNA, 567 bp, Gossypium hirsutum
acagcacggccaaacagataatggaaaatagtgagcatgaatgattgatcaattaagacaagcgaaggagaaacctaacaagcagtggtcaggtattggttttttctaccggttattcagacaaatcaatattggtaataaggcactgggatccatagccaaatgcagacttcgtgcatgattttccatcttactcggactatggtgttttccagatatgccgtggtgtatgttcagttttttgttattttctagtttttctatgtttgaggggttcttgggaagtcacatcattgtatccatatccaaatatgcattggacacaggtacttcaagtaaaatgaagttgaaataacataaattaaaacttaatacgtaacctagcatcttaggtatcaagcatgaacgaaaaataaaataccatcaaactttcctatgtaaatccataagatcagttctaaaaatgccacaattggattacaacaagatgtacttgaagtctgaagaaacttatggaaaggtgaaataacctaattggtgattggtggctaatatacaattcttacg

SEQ ID NO: 9182 - DNA, 660 bp, Gossypium hirsutum
ttttttcttttctaagctgaatttctacgttctgaattagagctgataaaaattttccctttggatgttactttttgtcctgcttatggtagaatgtgtttgtttctctttactcatagacaaagaacattgtatagttgtgtgatcgctaggggaaactgaatagccaatggcacacttccaaatgtcaggaataacacctcttgttttttcccctgttttatctgtgttattacataatatttttctgcggggtttatggcagaatcatgtttccttcagtagtctatgggaatgcaaggtgttgtgatgtttggttccgctttgtccaaaatatgtttcatgtagtattaagttttgttttgttgaggagtaagatctatgctttactatttttaggcgatccccattcttaggatgatatttgcctgggtattcccaaggggttcaatgctatttgttacagatttctgaaggtgctttaattttcataacatgctatgatgagtaaaaaaggtattgcactttcaaccattttgtgcgagtatgccatcgctttttcacattggcattgctaaagaatagaaactccatgaacaattctagtgtagacttctttctgataaggaaaaggtgcattcaaaagttaaaacacaggtc

SEQ ID NO: 9183 - DNA, 462 bp, Gossypium hirsutum
tacgaggattaagacttaaaaaaaaaatgttttcttaatccgcctttactaaagatcaaggagtatacttgtactccggctaataaaggaaaggtattttttcatttaaaattgaagtttgactctgattagatccttagcgcaagcgctaagtaagcaagctaccttatgtaatgtaaaaaaaaccgaggaaaataacgtcaagtaaaaacgaacaaggtcttacggcacgatcgatcactatatcttttctttttttttttttttttgggaaaagggggaaaaaacgggggggggttaccctaatctttggggcaaaaaaaacaaaaaaaacccaaattcccccctggtttttttttttggggctaaaccccaaaaaaaaaaagaaaaaaggggggccccggggggaaaaaatgggcccaggggggttttaaaaaaccccttttttttttttttaaaagg

SEQ ID NO: 9184 - DNA, 458 bp, Gossypium hirsutum
gagaacgagggcgctgtaatgaaaaacaaattattacttgtttacacatcggttaagtacttgatcgtgtgcatatgtctaaattacattttaatctaacttataaaaattaatctattcaattttttaataaaaaataaaatacaatttaaattatttaaataaacgaaactgactatttttttaagcagattgagagagagaggatgtgataggcagctttacttgtatgcaaaacttgatatttagagacggtatcatgaggcaaatcagattgaaggtggcagcgcagttggaagccattcatgtcggctaccggcgcggcgcagtttttggtgttgccactctcaatagtattactaattctggctttctggtggaaagcaaaatccaagtttaagctgcgaaggtgttttgaataaagatgggaatgggggtttttgaagctagtcgtttgc

SEQ ID NO: 9185 - DNA, 357 bp, Gossypium hirsutum
  misc_feature (280)..(280): n is a, c, g, or t
  misc_feature (299)..(301): n is a, c, g, or t
  misc_feature (305)..(307): n is a, c, g, or t
  misc_feature (309)..(310): n is a, c, g, or t
  misc_feature (315)..(327): n is a, c, g, or t
ttcttttttgcttttctcgctactggttgcactttattgcatcccttgttatccattaaaacttaaacagcttttaaacccgcacttctgtttactcagattctttcttttttctgtaaaagggttcctctaaatagtatacatttccctataaacctatctgttttcctctttcactttttttttctttaaaaaaacactttgacggctacgtattcctaatataaattatataaaatcaaggctacacaaactcaggtctgcaagaatatctcatctnacggacaatgcaatcccannnagannnannagggnnnnnnnnnnnnnagaatggtaaggattcacaggctcatccct

SEQ ID NO: 9186 - DNA, 643 bp, Gossypium hirsutum
tatactcacaagctattactacaaaacataaagtgcccaagtcttaaacataaaggacaaaatttcctgctcaataatacatttgaaagtagttcgttgttaaataaaaacggaaagagttatccatacccaaagaaatatagaaaatccttgtgtggagaatggccacagctggataatccacaggatgtgttgtgttcagaaaagctgagctccaagaactttccaaatgagagaaaacgtgcagcagttgaaattagcactcttttcgtagattttgacattccattctcagattgacacttgccacagcgactccacatccagagttttccctcagcttccccaggtaaatgcttaggaagccgtttaacttgtattgttagctgcttattatgatgtgcataatagtagaagtgagcttctgggagttcaccgcatatagaacattggcttctctgcaaaaagcaaaagtttctatcagcggaaactggaaaactcaacagtaccaaggattgagaaaagttatgttttcaaaagcagtctacagcattatagagttaagcgttagctaagttttttaaaagattaacaagaaactaaataaccaaataagtagtcgaaacatatcttcaacacttta

SEQ ID NO: 9187 - DNA, 645 bp, Gossypium hirsutum
ccgagttcaagttgattatgtttcgcctcttactcggagaaagacgatcaaacaattcccaaacatggtccttgcggatcgaaattaggtttatcgttggatgaactgcattgctgatattgaccccgcgatcccccgattggatcgggggcaaacgcctacgaaaagatcgcttggatttaagaaagagtcgtttggatttatccatggtcccttttctttctctttatgatttcttatgataataaatgacctacttaactcagtggttagagtattgctttcatacggcgggacagttctccaccttaacgacagaaaaaaggattgatcaaattctattgagtctgactcatagtgatcatttttagcagaatggcggatattccttgctcattatcagacaatcacttattcacaaactccgtgtggggctaatagttttcatttcccgtctcgatgtaattttcgacctaacaagagcggaatcacgctctgtaggatttgaacctacgacattaggttttggagacccacgttctaccgaactgaactaagagcgctttcttatcataataaataagactgtaaaaaagaggattcttttattttataagctgggctaatcctaaagcagaaggagaa

SEQ ID NO: 9188 - DNA, 404 bp, Gossypium hirsutum
tattttttatttaatttttcagggttcttcttcaattgttttgtttgatccaatggaataaaaaagggttcttcagaggattcctcctaataccaaaaaaaagggaaaagaaaaatggaagcatcctctgagtactcttcatctcaaggtcctccagcaccaacatcaggttcatcaccaaaaagctcttcgccgtcgtcgtcgccgtcaaaatcgccttctccgccttcgccttcgacatcgcgttcgccggcgtcacctcctcggtcggtggcttctcaaaagaacgatggtaattatcaatctcctccgtctggtaaaagtagcagcggcgacggccacaaccaccattctcctccacctcgtaaaaatggtagtaatcatcataaaggatcagcacatcc

SEQ ID NO: 9189 - DNA, 462 bp, Gossypium hirsutum
atctcagggtcaggcgctgatgagcacattgaactatccatgtggctgagagccctcacagcccaggcacaacgacgcaattatcaggggcgcgctctaccactgagctaatagcccgtcgtgcgggcctcccgctgggggcccgctatgccaaaagcgagagaaaccccatccctctctttcctttttacgcccccatgtcgccacatgggagggacccgggggcgtaaaaggggatcctatcaacttgttccgacctaggataataagctcatgggcttggtcttacttcaccgtcgagaaacgaaagaaggcttccatctccaagtttcattcagacgtagctcgcttctttttgggtgtgaagcagtgtcaaaccaaaatacccaacaagcattagctctccctgaaaaggaggtgatccagccgcaccttccagtacggctaccttgttacgacttc

SEQ ID NO: 9190 - DNA, 380 bp, Gossypium hirsutum
gagagggcaaaggtgaaacatatagtattttataaaaaagggtgaattttcattattcaaacacttttgcacattttatatataccaatagtatcaattggaactttgggaggcaggggcttagccagcgggtggcatgggccctgatccccttaaaatgtaaaattatattttaggttcttaaatttttttaaaaattttaaattaataaaggtaaaattacactttggctttctaaaattataaaaatttaatttaatcatttacaaattataaagatataaactatagaaaattaaaattttatctgggctcctaaacaaattttttgacttcgccgaggggtgttgttttgcaaagacagtttgcgaaagaaatta

SEQ ID NO: 9191 - DNA, 410 bp, Gossypium hirsutum
  misc_feature (403)..(403): n is a, c, g, or t
cttgtagtatggtgctttttaacctttgggatatggtatggagttcgccttattatcggatacccttttaactatgttagaatactctggtttaactcggattttcgttattcaacatactggtcacaggtacctatcctacaacaaactttctggagtaataccacatgaaatcattcatctcccccggttgacatccttgtaagttcattgttagacattgttgatacttctgtttactcacattttacataaagtgtgtatgaggaatagggtttctgtgtattaaaccaaaaagtacatttattttgctttttgaacttaacttgctctcttcttaaaagctacgagtattaaaacatccctcgttgcctctttcatactgtatttgcatattattccntttttat

SEQ ID NO: 9192 - DNA, 627 bp, Gossypium hirsutum
  misc_feature (620)..(620): n is a, c, g, or t
aaaaaggaagaaaaaatcaaattttcagggagattagatgacccagcatcttttttatcaaatataaagtatagtttttactcacttctctcccctgaaattattcatacatgccctttacttatcggttcgtggccacactcatcggctatacagcacagcttttagtgtaaaaaacacattcatgaaataaagcccttactttttaaactctcaaccgcatctttgattatctgctccatgggaataaactccaaccccaagtccatcagctttgtacctccattcttagcccttaacagtccaggttgagtatcccttggcaaactatgcacacaaattacaatttaaagttaattttgacagtaaaaagtgttgcacctctattaacaattgaaaaaaaaaaaaagaaaaaaaaaaataatttttaaaggaaaaaaccaggaattttaaaaaaaaacccaaagggcttaattttttggggggcaaaaagaaggaattttttcccgggaaaaattattttcggggaaaagttcaccaccctgggccccaaatcccccaaagggaaaaaaacttccaccccccaggggcctcccggtggcgaaggggttcccctaaanaaaaaaa

SEQ ID NO: 9193 - DNA, 656 bp, Gossypium hirsutum
aggatagttcatgagtctccaagattggcaatggagcactctgcaaccagtattagttttccgattaaaatgcatgtcaaattggtgaaaatcaggagaaataatactgcataaatcagattccgagcatcgagttcctaaaccgcggtttcttagtgggaagctactggttccaaggaaacatctaagggaatgcaaagaaatcggcaaatgatttgtgttcatcaatgaatgcaacttaaacactttaaaggaatgtacagaaaataacttttgcttttaggttggaacataaatgcggtttatcagttcgaatttttctagagccaaagcaagttcttccttggaatcacaggtatatgaaacaaacattaaaaatttaagacggttaaattgttatgtacctcgaggatccagccgatgtacttcacattattgacatgctggttgacatccaaatcactccatctaggctgcaaattagacataaactttcaataagaatgcttataagtggtgacaaccgaaaccaagctgaagaagagtgataagagcagctggacttacagttaaacctttttgtacaaattctgcactgctgtcatcgagtttcactaatttacggccatcctcggcaacaacaagttcggaattca

SEQ ID NO: 9194 - DNA, 561 bp, Gossypium hirsutum
agaacatttccctggaaaattgggtgactttccgggaaattactctactctagccttccttattctcctcattatcatcatcaccatcagtttcttcacccaatattttaccatcgccatcatcattatatgaactcttcaaccctcattttgaacttcaaacattaaaaataattattcattggacgtttgccaaaggattatttactttgttattcctactccttttggctctttctaagcctagtttcttgccttgggcaacaaaaaacaagtgggggaaagagccaagttcttgagtgggggaaaaccgacatatctcctttaaatgaatacaaaagattcttatttattttattagtataataacaagtaataataattaatcaataatctcttcttttacatgattaaagattttgccttacgcgtgtgccaacgtaatttatacctacaagaacacaaacaccaaaagacgtgtcttgtgttggctaatttgtcggtctatgaagctttttctttctttctttctttttaatatcaaagagttggatatgacat

SEQ ID NO: 9195 - DNA, 785 bp, Gossypium hirsutum
  misc_feature (396)..(397): n is a, c, g, or t
  misc_feature (411)..(412): n is a, c, g, or t
ttcttattttctaatttcaaatgaagaactgctatagtttcctcccaagagaatctctcaaagtgtatcttctccatatcgatatcgggcttgtaaggtatagggatctctccagttttctcaagaggtaaagttaacctcccaaaaacaggaacatcaacaatgagatcaactttcagcctatatggaatgatgctgccaggcttaatgtcatcatatgtacttttgatatcctcatatattaaagtaactggtattttgacagtctcctcaccatgagcatggatggttccagcatctggaatcaagcctgaaatgagttttctaccatcactttcaatgaggtagtcaatgtcgacgaggggattggaacagggtttgggttctttatgatgnnatacaaagatctgnnatagcctgttgttattccatcttcgagtcgagtccggatagactccctcggctaagagacttatctgtcacttctgtaacttctctttagcttcttaattgaattggccagtagttcgccttatcagtaaaagtcattcttaatttctaatttcaaatgaagaactgctatagtttcctcccaagagaatctctcaaagtgtatcttctccatatcgatattgggcttgtaaggtatagggatctctccagttttctcaagaggtaaagttaacctcccaaaaacaggaacatcaacaatgagatcaactttcagcctatatggaatgatatattaaagtaactggtattttgacagtctcctcaccgtgagc

SEQ ID NO: 9196 - DNA, 361 bp, Gossypium hirsutum
ctgaatgctctaactttcaccattttcaatatagtcttgaaactctatgcaaggattagaaatctgccatgtcaaaagaaaagaacaaataccccgtaactagaatctcaaaacttctctcctatgacatgtctaaacccaattattgtggttaagctaatccacaaacaaaaataacaaataaagcctgtacaaaaagatacgtgctatacttacgtctcttaaagcaggttgagggacttgctttgatgactccatggaatctaaaatgggccttacaacagctggtaggaagagacctgcataattttcacaaaaatatcaagcacacaacaaaagagataaaaaggaaaaaaaaaaa

SEQ ID NO: 9197 - DNA, 609 bp, Gossypium hirsutum
ctttctgcagtaattgatacattaagcaatctaaatacaagtgaaatgtctcaattgattttgaaaaatttgcaaccttatgttatggctaagtaagtacttgctctctaccttcaccaacctagtttatcagtataaaatgctcttatgaaaactctatctttcacatgcgtaaattttatactaaattagctcaacagataagcctccatttattcgcattcaattttcattctccatctaattatccgctcggtttaattaaaatattattacaagatctataaaaaaaaaagtgaatatatattatataaaaattggttcaattcctaactcgatcgatttatggattgatcaattttttttctagattaatatatcgaccggttctcaatccaatagaccaatctaatcttgtttcaaccaaccttggtctttttaatatattattatttttaatttttaattaatattgaaaattttcattttgagttagaggtgtagatgagacattagtacttataaactatttgagtttgactcgaacaaaattcgagctcaattcggtaattatcgagtcaagctcgagctattaatcaagtgaatcga

SEQ ID NO: 9198 - DNA, 914 bp, Gossypium hirsutum
  misc_feature (195)..(202): n is a, c, g, or t
  misc_feature (232)..(232): n is a, c, g, or t
  misc_feature (239)..(239): n is a, c, g, or t
  misc_feature (252)..(252): n is a, c, g, or t
  misc_feature (455)..(455): n is a, c, g, or t
  misc_feature (499)..(499): n is a, c, g, or t
  misc_feature (528)..(528): n is a, c, g, or t
  misc_feature (645)..(645): n is a, c, g, or t
  misc_feature (655)..(655): n is a, c, g, or t
agctatgcattttgtggaagtgatagtaacgtaatttcatcccaacaaaataatataaagtgattacgtttttcccattacgactacaaaatctgttttgaattttaagtgatacaaacgaacgaagatgttccatctaatgccggtacacaatcattacaaagataagcctttctgcagtaattgatacattannnnnnnnaaatacaagtgaaatgtctcaattgatttngaaaaanttgcaaccttatnttatggctaagtaagtacttgctctctaccttcaccaacctagtttatcagtataaaatgctcttatgaaaactctatctttcacatgcgtaaattttatactaaattagctcaacagataagcctccatttattcgcattcaattttcattctccatctaattatccgctcggtttaattaaaatattattacaagatctanaaaaaaaaaagtgaatatatattatataaaaattggttcaattnctaactcgatcgatttatggattgatcanttttttttctagattaatatatcgaccggttctcaatccaatagaccaatctaatcttgtttcaaccaaccttggtctttttaatatattattatttttaatttttaattaatattnaaaattttcnttttgagttagaggtgtagatgagacattagtacttataaactatttgagtttgactcgaacaaaattcgagctcaattcgataattatcgagtcaagctcgagctattaatcaagttgaattcgagcttaataataattgacttaaacggcttgtaagccttatcaagcatttcattttttttattatcaaaccatgttattaccctgaatatatattattaatcgtaagcttaatttatcagtctaatttaagcatg

SEQ ID NO: 9199 - DNA, 633 bp, Gossypium hirsutum
ctcttggattccccgttggtgactcttccggcggcggctctgtatcatctgggggtggtgagctaaaaaatggtggaaaatttaacaatggttgcaaaatttggtctattaaccatagacaagggaaccgtggcgaaaatttattaggttgttcagttgaatgataatcattgatagaaaaaccttgtcccaacaacgtggctgggaaagacaaaataaataacgaagttaacaaaacaccattcatatcgaagaaattgtgtaaagattgacaaaattgaaagaaagaaaataaaatataattttgtaatgcatataactaatagaataagcaggtatttatagtaagaaaattttatcttaattttaaaataattatacagtagatgagatatataacaaccttatcaattaattgtaaataaaaactactttttgaaatgaaataattcaatgcaaatcctaacctcttttatctattagcaacaaaattagaaaaaaaatgaaaaaaaatacatttataaattaaataagttttttttcttactaattgaataaattttatcaatatcagatatgtgaatataaagaaagaatttgtttgcaattgtttatcctagttgcaacgctttc

SEQ ID NO: 9200 - DNA, 523 bp, Gossypium hirsutum
attgaagctccactctttctaatttacacaacaattcctgtaatattataaaatcattaaaaaaagttgataaagaaaactgataacaacggaataaaaatcccagaaagtgtgaggacgaagaagagaaaattttgaaaaaagaaaggatatttgggaaggaagaaaaccgagaagcaaaatcccgagaaacaaacagaaaacagtgagattcaaatattaatttatatataaaataaacataaaaaataaagaaaatacactaactcacctatcagctctccaatgaaacaaagatgaacaaaccaaagaacgccatcgaaagttaacattatataacccccccccaaaaaaagagtttaaaatcaatacaaatacagaaacctttatttatagtagcattacattgaacaacttcaaacttctttttctgtgataaaaaaaacgtatatataaaacaataaatggaaacacaataaaaaggaaagcattactaagatttccgacttacctaaacggaaat

SEQ ID NO: 9201 - DNA, 472 bp, Gossypium hirsutum
  misc_feature (57)..(58): n is a, c, g, or t
cttcctgataagcaattgacctcattgatgaagctggaagccgagctcgtattgaannatttaggaggaaaagagagcaagaaactgatattctctcaaaagcacctgacgattattgggaagaaattagaactgttcaagccatgcatgaagtggtaatatctttgaccttgtgtgtacgctagcttctgatgtgctttaagaccctaacctcctttcgacaattctgtcatgaataggtcattgccagcaggttgaaaaacaatgccggtgctttcggtgtggatgattccagtgaactcctagaatctcctttgccttctacttcagagaacgatgagtatgttccttttttttctcttgccgggtcatgctgaaggttagatatattagcttcttggtcgtctagctttggctgggttcctacttattttttttcaagggattctttcaaacctatatggggggaact

SEQ ID NO: 9202 - DNA, 422 bp, Gossypium hirsutum
ttatgtgccaaatcaagtagaatagttcacttggaaatatcattcagcagttctgccaaaatggtttaaagctttaagtgaaagcttctttatttttttccatatttctcaaattattcccttaaaaagataaaaaaactagccgcattcaaagcttgggttgcggtattgttgaccatctaaagctattatagtactctgacctctttgaggctctttttgggctggagatggaataggagtagttggtatctgggtatgctcatctaaagtgaagtttacttgtgttccctcatcagcttcttcaaatctgtcacagtagtcacacaaattaagctattattcagtcctcagacattctaatgaattattaacttaaacctttgccagcattgcatggaaccaaccagttcaagttacct

SEQ ID NO: 9203 - DNA, 553 bp, Gossypium hirsutum
  misc_feature (548)..(548): n is a, c, g, or t
aaatataaaccaagcagccaagttttgcaaaatccaattatgtccaccatttgtgacccaggacagggtaccctcccacatgcggtgcccaacagagatttaatggagtcgtaataaacttcatgccttaatttcaggggcattattcccaagttacaaacaatgtaagtttagtggagtggagaaggcataaaaagaaattctacagaagagtaaaaatcagaaattaattttaatcatgtttagcagcagtttccctgccaaaaagaaccattaaatccgcaccgactctacccagtgaaagactaaaagcgccagggacacccacatgactttgttctttccctttccctctcctccaattattattaaaaactactttcaataccaatttttaacctctcttgctcttccttccctccactccacaatatatagaggcttcagctcctcttccaattcccaatcccactgctctttctctcctcactttcatttctatcacctcttttaactcattccatttttttttacctttctctccattnccaat

SEQ ID NO: 9204 - DNA, 470 bp, Gossypium hirsutum
tcgatatacatctgaagcttcttcgtccaaccgattagtctgcaagatgtattttccaaggccgatggccatttcacgctgaccttgagcacacaacagctttgcttcctcaagctgccatcatacaaatatttcagcaaaactggatcaaagttttattggaagacatttatggttacccaacatgggcatgctatcatccaagaaaggtatggaagtggctaaatgttaccaattgaaataagacatcttcaaaatatgcaaaaaattttcctcctctttgctaaaaataagtcatggaagtggctaaatattgctgattgatattaatttattgctaactcatatactaaaatttagtgaaaaaataacactcttacccaacgtagcattggtgatacaagtatctttcatcaaatttaactgtaaagcaatacagaaagaaataggaataaattaccctgtcaagc

SEQ ID NO: 9205 - DNA, 539 bp, Gossypium hirsutum
tagtgggagaatcgggggtgcggccattgccagccttgaaggagaatgtgaagagagtgatgttctactgttagaatggatgagtggagtgagagatttgcaaccatgaatagactagcttttttcagatgattaaaatttccttgtacagtttaaatgaaatcattgcaaagtcttccaaagtttagtttgagataaaaatgtgaaacgtgggaggaatgatccacagatgccagaatgttaaaactaggttattatctttatgtaaagaaatgttaatttagaagccttaatcatcttattctcaatttaatcttgtctgaatgttaatactatgctattacaaacaacagtctgatttataatggaatgtatttggatttaagcagaataaatttgatttaagaatgattcaagtatgagattcgaatatcagatgaattatgctgataaataactgcaacattgtcattctccacaataattttcctaaagcccctatcccaagctaattggagtccctcagccttagccacttc

SEQ ID NO: 9206 - DNA, 616 bp, Gossypium hirsutum
ttataatgtaagaaactgatgtgtacagttccaggtttaatgagttggaataaaccattattatatgattaaaagtttagcgaacgagaggaccatacccttgtatttgcagatcacattgagtccttgaagaattctgacttgagaatcagcacaagtaaccattactttacttgaatcttgtggcaaaaactgcaaagcataatatataatgagcaaaaactgcacatctcagccattaagacaaacctatagcaaccaaaagcaaggataagggtaactacctgcaagccagttatccttttgcaaggtgacctctttttcccatttaagtatatatgcgcatctagttgcaaatgactatctgaataaagcaacaaaaaaggattttgagaatccaccctactaaaaatgcagcttcataatagacatgtttctaaaacctatgccaaccatgaaaaatcttacctacaacatttttcaagaaacaaactaaaagtgctcctcttaataacagtaatcttcaattatcttatcaattgtgtatatcatttataatactgataaatagcaataggccattcacatgaatatttatgaattcctttcagtgtga

SEQ ID NO: 9207 - DNA, 351 bp, Gossypium hirsutum
attttaagttctctgtgtgtcaatgccctcggctgtggagaaagcatcgtctcacatttgggacatacctttaacttaacaagggatccaattgaaattattacattttctttaattgaaaaatacaatgaaaaaatcataagtatgacacgtgtcctcagcgcttaacgttagggaaacgcgactcctaaaaccttgattctgtaccctttggtttcaccgatcaaaatccccttctcatcaattttctatctcgaagatttcatgcctaaccacctttaatcttaaccaacggaagagacgaggcgtgcaatttgactgttccaatttccttttcaacgttcaattaaa

SEQ ID NO: 9208 - DNA, 597 bp, Gossypium hirsutum
caaactctcgcaggagcaaaagattatgcgcgactatttggcggggggaaaagtaagggccaatatagtaaagaactcggaaaccagtttaacgagtgacaaactcccgctcaaactcccaattattaatggcaaaaagagtaaaaaagaaaaatcccaattacttttggtcataatatgaaaaaggttaaatatgctattagtctctgtatgtatttagaatttgatatttagtccctatgctttaaaagttaaaaattcaatcctcttatttttctgatttaaacattctactcctataattatcatgtttgtaaattctgtcataatttatcaattaaaatgtttttttttgttaatcatatgcaatatcacatgaaacagtctaatcaacatgtcatgacaaattttggcagaaaatattaataatgttatagggattaacttgtttagttattcatatgcctaatgttatatgaggcaatctagaaaatactaataatgttacaaggattacattttcaattttgtccaagtacaaggactaataaaacatttatgcaatatgaaatgaggcagtctactcagcatctcatg

SEQ ID NO: 9209 - DNA, 437 bp, Gossypium hirsutum
ctaaacctacatatcagcttgttctacttggaaaggtaagtttccaacgaacagtgtctttgatcctgtagattgaacttgaggagttgtgggagtttggggctgcaaaaagaacctcattagattcccacatgattgacaaaatgacacaaagaagcaattgagttaagatttgaaagaaactggagccgaaattggcacttacagctttcttcccagacttcaaatcctccagcttggtaattttctgtggtgttgtagcatctaccatttctacatcagtctcctgattccaatatacaaaatttcattagaaaatcatcatatcaaccttcaaaaagtaaaaagaagaatacagattccaaagacccaacctttctcttaagagtttcttcatcactttcctcatcatcagatgatgattcttcagattcctc

SEQ ID NO: 9210 - DNA, 375 bp, Gossypium hirsutum
gacgggcaattccctgcacaaatacggagtggctctctaacactatatatatcaattctaatcgatacattagggacatactctcctatttgcagggttgccattccacgagcatgttccaccacctctgtacaaaaaagtccataaagtataaagaaaaaaaatgaaaaaattattaatctttaccatgaagacatcaccatgagcatccttcgatgtcttccctgttcggttgtaatattcttggcgactttatccttataaaaaaatttaaagtgttcatcagctagaagcctctattttaacaaaatttctaagcaaataatgacctgaactaatctcatgcttacaatgtctctacggataagctcttgg

SEQ ID NO: 9211 - DNA, 547 bp, Gossypium hirsutum
tgacagacaatggtgtaattattgtcttcctgactgatagttttctggtcattgcctgagttgcttttatgattcaaggactgctctacacattgtccaggtgttgatggcaaaacctgcaaatgtgacaaaaatgacaaaagttaagtctataatgtaagctacgcataggcataagaaaaaagtttcggttttacaaattaaagttgacaagaggcactaaaactgataatgaaactaatgctcctttatcaggctggaccgctaaatgaagtatcacacattcatacacacaaacaaggtcttcgaagcatttttctagaagtgcattcattcaaaattgagttctaaaagtttcaaatgaaaatgaactatagatgaaatattagggaatgaaggatatgttcagtcaggtgtctctaagtcttgggctataactttaaggcctctctggaagctcaccagtaaatcttgtgattgttgtttctggttttcttctggtagctggctatgctgctgctgtggctctattctggttccatgatct

SEQ ID NO: 9212 - DNA, 672 bp, Gossypium hirsutum
tgccgtaggaaagttgcaagcagttattttacaagacaaagtctcatgttccttaaatactacaggtaaaacaaatatgaatattccaagcaactaagacaactttatttcaaaaatacatttacagggaatgaaatcaacttactttgctccaatggaatccatggtgcaaatgaaaggcttgtcttcatctcccaatccggcaattactggttggcaaaagtatggaccaaacctatggggaaaaaatgtcataaaactcatctcttgcacgcataaaaaggacacccttttcaattgcaattcctacttcaaatctaacacttccaactaattcctttcaaggttgacatatcataaagtaagggcttgaaattgttaggaaaagatgaaatccatcttttagatttcaaggctagaaaataaattatgaaaagagaaagtcaatattatccttgatgctcattgctcagtttgttctcaaaagctaagtaggtcatttctcttcaaggacatatgtaaggtttttcacatgacatgtgctccataaacttttcctcccctgagctccatttcttttaaaagaaatacatttgcttttagccatttaactagtattattcaaaagcattgttgctccaactctttaatttttttgaagcactcatgtct

SEQ ID NO: 9213 - DNA, 371 bp, Gossypium hirsutum
tgtttgattcgagccgacgtgttggaaaacaaagacgaacgaagggacattgttttgttttccatagttctcaaagacagcaacgctaactcagggtcttcatttcctccctgaaagctgtaaaccgccacggaattgtctcggatatccagggtgatttccacatacccctcatcttcatcgtcctcagcagcagagtcgggcatggtggtgatttcaggtggaagattgaatgttgcactctttttagagcctcttttgttggaaaatggagcagcattaaggggtaatggttcactaaacgttgtcctttcacttgctatactttctgtatcggaattgttctctgaatatgctcctctccattcaaa

SEQ ID NO: 9214 - DNA, 364 bp, Gossypium hirsutum
aagtcaccatggttatctatccccttcgacatcattaaaattcataatagaaataatgatgtagatttctattcgaaattatcagtatttgttttgtcaataaaaatccaaatgtaaacactatatggaatttgtttacctattctgtaaattacaaggggagaatcaatcaaagctttttattctaatttactacaagcttcgtgcaaattacaatttggcgggtggccaaactaaatgcttgacaggtaatccaacaaaattcccaaagttcaaaactttttctgtttgcccatgcttccatggtagatcaatcactgtgctaattctcttgagaaagaagaacccaaaatcagagtaaaaa

SEQ ID NO: 9215 - DNA, 399 bp, Gossypium hirsutum
tttgatctagattatcttatgggggcgggtttacaaaatggccaacagccagcacccctagtacaatcaaggcctagtggagcccaatacacatcacacaggtgaaaaaccaaaaaactttctacaccctcactaagcaactttttcctttcacttcgatgccaatagcatcgcaattttccctgatataatgataaatccaatgtccttgtccactttatttcgcattagtaagcagtataacatatttcccctgccactttagtaggttcgaaagtatgtgtgtttccattttatctcacttattacttttagtctgtaaacaaataatttttcttagaatcagaaagtagagagacctctggcaagatcatgtcagatcaaatgagcctaaaaaca

SEQ ID NO: 9216 - DNA, 634 bp, Gossypium hirsutum
  misc_feature (26)..(28): n is a, c, g, or t
  misc_feature (224)..(224): n is a, c, g, or t
cctgcatgtacaataacttaaacttnnnggactccactacaaacaaattgtaaatggcaagttttaactttcaagtaaaagtgatccctgattatcttttgatactctaccttaacattgtaatctttcatagccattggaatgatttcagatccaaaatcattggcttctggataatgccacctgaagaagcaaaaataatacatagaaacatcatctcttgntgctgcacaaacttaagattaccaccatatacaccaaaatggtccatctttcacatctaaaataaaaacaatcatctcttaaacaacatgatgcattgttgatctgagaagaacaataatagtatatctttcctaattgaatcaaatcagaacattgaagcagtttatggtagatcctttgcagcttaagccttcattacctgagtagtttcagtagaacatctgtcttgaataaatatatacccattgatgcaatgtatggtgttttctttgcatcttgagctgttaatccgagaagagttgtatcgacttgctgttacggtaagaagtatcaataatcaatttaagagttaagagctaaaacaaaatttatgcataagaacaaaggacaagtaccaaccattgacctc

SEQ ID NO: 9217 - DNA, 620 bp, Gossypium hirsutum
ccaacggaacccaagcccaaactcgtaagcaaccttcattgacaaaccaactaccttagcgaaaacatcatgagttccaacctgttctctaaaccaaccttgctccctcggaccaaattaccaacacctccttcttccttattcgaccctttagtcccacccctctctttttaactgcctccatttcggagctttttaggaaattcccctttttaaaggtaaaccttaaaaatttagcccttaaatattcacttttctctattccatcgaccctcgaagataacgccctaaatctagacccgcccccatcgttagcctaaaatttagccaccggtttacgagcttcctttaaattccgtcgaggatgtctttcaacgaccatctacggaccaaacttattcgattcaaccatcgggactcattgactccgattaaatctttcactctggtctggaacgagcaaagctacttaacatgaccatactgcccgcaagagaaacaaatagactgtaaggattcatattcaattgacatttcaacgctatccattcatttatccttaaatcaaacttttttagtactacgggcaatttgccgaacaaccaccgccattctcatgg

SEQ ID NO: 9218 - DNA, 613 bp, Gossypium hirsutum
aagaaagatgtcatttaaaagccttataaaatcaatagagtaaaagacagctaatatgaactgccaaccagaagaggatagcataacattctaccctgttggaaagttttacacctcaagttctcgtcttagaatagagataggtaaggaaactaaaattgtagaaggtgaaaagggaaaagtacaattttaacatacctccctaagcaacattttctgagatttttcagatgtgatgttaaggtttgtatatggatctttgaaccatttaatagatttggcagctgctgtgcaccccattgcatgtgcagaatatgaatgtccgtgcaaaagagctttaagctgaaagcagcaaaccacatatatgtaagtaatttatttatgttttataatgcaaataaatagatggattatggataaatgcaggtgccttgagatacaactagtgtttctcccacaagaaacaatctgaatccgcaaagtacaaaaattccaaacaatagttctaaagacaatgaataacaatataacacctttgaatctccagtaaatgaatcgaatatagcatcagttgccattgtcgcagctaatgggatgatccctccagtcatga

SEQ ID NO: 9219 - DNA, 515 bp, Gossypium hirsutum
gaattgatataaaaatgagactgttgataacagtgtccaaagttttgctgcaataatcgagaggttgactgaaaggacttacctgccctgataacccaactcgaaaagtaaagctccacacgtcttggcttgtcacgcttttgcaaatcaggatatggcactccctgaaacaatttatagcttgttttagcaccctcatgcagaaacccacactggattacatataataacctatttctttcctctacacgaaccataatacacacacatgatattaaaacaggctcaacagacacgggtgattcaagcatcttcagaagctatgctactcagactcgggtatgagtatcttaaagtatgtgtttggcacaagtatgttcatatttttccaaaaattttcatgtatttagaaggtcatgagaggaatataccctatatctattagacatgggtgtaaaacacagatacttgacaaaaaaaacaattgaaacaacacaatttgagagtacttcatg

SEQ ID NO: 9220 - DNA, 593 bp, Gossypium hirsutum
  misc_feature (244)..(244): n is a, c, g, or t
gggaaagatatatcaaaatcatccatcatccattaaatccacacaccagtgattttcagttgcaagaaagaaaaagtactaaccgatccatgccactcagcacgatgaactgttccaaatgagcctgcaaaatgagatttgaaacaaaaaagtcagtatgagcttcactgtttatcttctgagagagccaatttttaaaatgcttgaagataaggaaagatgaagtatatttatctccaaatangaaggcctaagagaagtaccagcaccaacacgctccttaatacgcaattcatcccatgatatctcaagccagtccattgcaagagaaggttcaagatgtagatatctcgggatggaaacagtggagaacctgccttgattatcaagttcagctcctatctcctctagatctgactgactaggtaagttaactttcaactgcttttctctttttaccactggacttccagataaaccaatttcttctttaagtgtttgttctttggcaactttatctctgcaatgtctagaattcattgttgatccagctgctgtttccaaaggcatcccctttccagaagaatctcgat

SEQ ID NO: 9221 - DNA, 404 bp, Gossypium hirsutum
tttccggcgaatatgacaaaaatgcttcttccttttttatcatcagcagaacacgctttctcatacgtgtaacattttaattgaaaagaagcagaggatatttctagtttatatcaacctgctttatttttgagccgtggtgtattactattcttctgttccaatggattgcgataaagctaatttctttttttatttccaatggattgatgattcaaagacatgagctttgagacgtttcattgttttgaaatgtgaaaacaaagcaatagaggatattaaactgttaaaagtagcaacaaatcatgtgcttcaagtaaattgataactcagaatgtaatatacaatttacaagatacaaacaatcatacaaaatgagggtaaataacataaagccaatccca

SEQ ID NO: 9222 - DNA, 651 bp, Gossypium hirsutum
  misc_feature (428)..(430): n is a, c, g, or t
  misc_feature (626)..(627): n is a, c, g, or t
ttttttctcttctctggcttagttttcttttagggactaagaacaaacaacccagatcagcataagaacaaacaacccagatcagcatgctggaaacttcaattgccataagtagcttcatatgtcatatggttttccagctttggttttctatttttaggataatttcactgtcatagcctctaggaaaaactttttactattttacaacactagggtttaggattccaaaactgacttttaaccatttcaacaatgaaactaattatggtggtggtggtcattaataattgtttctttgctgtatatggtggtccactggacttgagctatagctgctatatattgggaggtgattctgtcggtccactggacttgagctatagctgctatatattgggaggtgattctgtcctatctccaaggannnacatattcacctccaatatatagcagctatagctcaagtccagtggaccgacagaatcacctccaatatatagcagctatagctcaagtccagtggaccaccatatacagcaaagaaacaattattaatgaccaccacacataattagtttcattgttgaaatggttaaaagtcagttttggaatcctaaactagnngttgtaaaatagtaaaaagttttt

SEQ ID NO: 9223 - DNA, 427 bp, Gossypium hirsutum
aatgaaattttaatttgattcaatcatacatatttaaagaaataaatacatcaatttatttttatattgaataaattaattacttacgtatgcaatatgtaaaaacaaaatgatgttatgtaagtaattgcgttaatagtttgtgagacttggatcaaatcaaaatattttattgtataaaattacacattagactaaagttcatgtctaatttctgagatttatccctttaataaaattttatatactacaaatataatatatacttgtaacgggatgaactggacaaaatatatttgaattagattttgaatgaaccgttcagaaccaattaagttgggccaaaaaccgattgaattaattttattttattttttttaaaatttatgacttttaaataattaatttaactagaacccggactgat

SEQ ID NO: 9224 - DNA, 551 bp, Gossypium hirsutum
  misc_feature (69)..(69): n is a, c, g, or t
  misc_feature (430)..(430): n is a, c, g, or t
  misc_feature (433)..(433): n is a, c, g, or t
taatgctggcttgagttatctagtgtgtgagtgtcatatatttatcgctatttgattgtggtacatccnctgactgtggtctcaaacatgtctatgaagtaaggcctgcaagattattttgacttcttatggaatcagtaaagagaaaagaattatggaattagccttgctgctatcattacagggtttgtccaacactgtaaaacttgtttagatattttgatcaggctgttgtctgtattgctgggtcatagttgattcaataaatgattttgtgtgcataggttctgctctggccttgtgatgataaaaagaactttgataggctatgctgctcttttctgtgtctctcctcattatacacgcatgttaatggtttctgctgacttagaacatatctgtataggttgttgctcaaactatccgtgcntgnatgaatgagctgcctggtttccacaaaacacagattggatttattacttatgacagatccattcatttttactacatgaaagcaagtaacttttgaaatcaaaaaaaaagttcttcag

SEQ ID NO: 9225 - DNA, 570 bp, Gossypium hirsutum
atttttgtgaggatgagctagttaaaattttaacggtaaaagtactatagagacctttgtactaagagttgaattgcattttgtcccctctattaataaactgccaaattagttattgtacattagatcaaagagcaaatgggtttagttgctaaaaatttcatccatttctactgttaaagtcaatccttgtatgctagcttgaggaaaacatagcacactatgtgcaaaggtctgattattctgttagccatgtctgtttttaacagtagaatttgatgaaatttttaacaaaaagaattagtttgctctttaatttaacatacatggaccaatttgtttattttttgaataaatggggcaaaatttgatatacacctggtacttttacaaaattttagcttatggtgcacagttcatttctgccttacccatcatcgcgagctaaaacttaagtcgtataatgcaatacgtccttacatggcctcttttttctttccaatggaaaaaaaaaaggaacttttgggggaaatttgcaagggtgaactaaaaaacatctttccttctaaa

SEQ ID NO: 9226 - DNA, 626 bp, Gossypium hirsutum
gaatgctaacaacacagatcatgtaaattctcttgcttccatctcattattaagtcgcacagatcatgtaaattctcttgcttccatcgcattattaagtcacacttacactgctccatagaattgactgttggtcaattatctgtgacatgttaacctatattgccttaaagctcagaaacacatatactggattcagtaatgaagtgcagtgtttaagtgactatctgtgctaacttcttgttacatgaatcatgttatcaataacaataatagggactgctacattagtaataccgatgatgagatctgatcaaataaaagatatgccatttgataaaatgcctctgtaaaatatggttagtacctaaacttcttcatgaccagctagtgttctacttcttgtcttgcttgctcgtactgtcttattgataatttcatcttattctgatattggctatcctagcctactacctagttagattaaccaaatgacactgccttttgaatcttttacattcatagtttgatctataatgataaccggtccagacacaagtacagaatttctatttgaatttcattggaaaccaagttcgtatttgctaaattaagctgtggccctc

SEQ ID NO: 9227 - DNA, 550 bp, Gossypium hirsutum
ttaggccgtgcgagggatatgtgtatgatcctagggcagtaatttgattggttgacaaaaatagtcacttccccattgtcaagaattattcaggttgcaaatcttgtaaaccaattttttagaatttcaagatctgggcttttagattgttaaggatacaatcatagtctcccaacgaaataaatgaagttaatgagcacaaacaaattatcatacaagattatttacggaaaatatgaaaatgagcaagtgcaagctcgtggaatttcaaaacgttgggtcgtacacagttgggcagttcccggctatggtcccaaatctccatggcaccaatcatcaagcaatctttcttttaccttggttgacgtggtatcctaacaagaatcctaaaacagacataagaatggtcgagaacaatgcagcacccaattctccataccataatgcaacttctaattctagccaatttcaaatgttgaatgcatggcttcctccccaataggtggtctaacaacagatcagtatggctagcttatatctcttccaagga

SEQ ID NO: 9228 - DNA, 560 bp, Gossypium hirsutum
  misc_feature (284)..(284): n is a, c, g, or t
  misc_feature (526)..(526): n is a, c, g, or t
  misc_feature (560)..(560): n is a, c, g, or t
atccatccttttaggccgtgcgagggatatgtgtatgatcctagggcagtaatttgattggttgacaaaaatagtcacttccccattgtcaagaattattcaggttgcaaatcttgtaaaccaattttttagaatttcaagatctgggcttttagattgttaaggatacaatcatagtctcccaacgaaataaatgaagttaatgagcacaaacaaattatcatacaagattatttacggaaaatatgaaaatgagcaagtgcaagctcgtggaatttcaaaangttgggtcgtacacagttgggcagttcccggctatggtcccaaatctccatggcaccaatcatcaagcaatctttcttttaccttggttgacgtggtatcctaacaagaatcctaaaacagacataagaatggtcgagaacaatgcagcacccaattctccataccataatgcaacttctaattctagccaatttcaaatgttgaatgcatggcttcctccccaataggtggtctaacaacngatcagtatggctagcttatatctcttccaaggn

SEQ ID NO: 9229 - DNA, 605 bp, Gossypium hirsutum
gattggtgggttctcccctggttccccttccccaggtcaaccatttgttaatggagcacaattttacggaacgacagtaggaactgggcaacctgcctggcgaaaagatgctcccaatagtaggggcttttagttttaagttccaacttttttgtaaatccagcgtttatgtagctgttttatttagacgcgccctagcttttgtatccttctataaatcttttttcattacatagcgtctttgtttaaattatagtattatagacaatattagctgtttttcatgcaagcttgaaaacatttgtggttcgtctttatgttttgttgatattgatcattcaaattatacccatttctctgatatttgttatcagagggatgttcaactctcataagttgtgaaactcaagttcaaacatggaattgatactaatctatacaaatctatacattaccacttctaagagttacaaatatagaaaaataaatacacgttacactgttgcatatcgaatctcaacccacatctctcaagaatataagaattaaacaacaatagatgagaaagaaaacaaagaaccaaaaaaaaaaaaggttacgggggg

SEQ ID NO: 9230 - DNA, 645 bp, Gossypium hirsutum
gttgttctccagtcccgcccatcagtatttgcatgtattatagatgaattcattgtcaacatatcagcaacatcagaaagaactgctacccagtcaggccctgctgattcttcactctgcttaattccacatattttacgcaaatctctttcattttgaaatgactgctgcctctcttcccatttatccctattgcattggaaaggagatctttcttgtcctgccacttccacatttgtttttttcaatatctcattacaaggctcaaagtcaccatcaggactccgacaatcatattttaaagttcttggcaagtctgttgctagatttggttgcttatcaagttgatcactgctagtttctttggatgaactatcattattgagacatcccaaatgttcatcaacttttgaagctccctcactagtattagattcatgaccactccgagcgactctagagttcaaaggttccaagaaatgatgcctgaaacaaacctcaattaggacacatgaaatcatgaactaaacagagcaatgattagttttaccttttaaccgaaaacctggattccctatggcaagtgatctgtggggaaggaaacaaagatgaaggggacaaaaaagctagtgaactgaaaccatt

SEQ ID NO: 9231 - DNA, 482 bp, Gossypium hirsutum
ttttttagataagctgacagaagttatatgtttttatgagaactaaaatgcaatttcatcattgtattgacttatatcttcatggtcctgttaatgactaaaaaagattaaattgaatagttgggtcatcattttataatttttcatagttagattatcataaaaaatattaataattgagtgaccattttataattttttatagttgttatttactaatagttggattaaatttacactaaattagttgaattttattaatgattagtggaatttagattccacataaaaatttattaataaaaaaaacctaatatgtctagatacttaaaaattaaaatatcccaaaaagaaaacctaaattaaaaataaagttataattctcaaaaaaaagaagaatatctaattggttcttggatcggcccattcaaccctcaatatgagactatcatatccataaccatttagctttcataccgcac

SEQ ID NO: 9232 - DNA, 411 bp, Gossypium hirsutum
ccattccttactggatccgaatgcgcaccgacaacaccattaggtctatatttgcttcattttttttgctcaaacatgcttacaagtttatgtttttgtctcacttttaaggtttattcagattatttattgattttttttttcaaatttttgttctttgattgaaggtacaatgctaagcgtaggcactggcgccgtaccaagctagggttctaagttcgatgggcttatttgtttccagtattttctttaagttttctaagtttattttcggacttattttatttgggatttaatattgggaaccatcgagaatctttgtattagagattttgatgagattgttagtttcttcgttttagtttgattttatattatctcatcttaatttgagtgcatggtgttgaaaag

SEQ ID NO: 9233 - DNA, 621 bp, Gossypium hirsutum
tctcttttttcttcttcttcttcacaacaaccaccaccacctaaacaatcccatataaaaacatagcaaggaatctgcgtttcaatggcgtctctgacccctatttcccactcccactcccactcccttcttaaaaggcccaacgttagacctcctcctcctcccagtttcttttccagtttcatcctcaaggatttcccatattccaaaactctctcccttaaacttcccaggatgcttactaggaacgtcgttgtatcagccacgacggcggagaagcccaggaagaggtatcctggggaagctaaagggtttgtggaagagatgaggttcgtggctatgaaattgcatactaaggagcaagccaaggaaggagagaaggaagtgaaacaacctgaagagcggcccgttcagagatgggagcccagcgttgatgggtacttgaagttccttgtggatagcaagttggtttacgatacgctcgaaggaattattgataaggctcctttccctagctgtgggtaccctttttctatttttattgaatctgaattctggctcctacatatgtttgtttttggttttttgatttcattagatcatagttgtgcatgttggaat

SEQ ID NO: 9234 - DNA, 406 bp, Gossypium hirsutum
ctatacctcactcttttacagatttatctgaatcctcaaaaaacaaccaaatactttgaaaatagtattatgaatttggtatcatcctcaaatacaagcacgcaaaaggttagttcagtggcttcactgaaatctaaagtaggacgtaagaaaattgcgtcaatagaaggtgcggaggatatgcgtatcagtcctagtaacaccgataccaccatcgaagaatctagtgaggaaggaggctctactatcatgttcgatcgggtacttgatcttttgagtcgaaggtgggatagaatcaatggagcttatgcactcaaaatcttaccgagggagactaaactacaggtatgtcgtaaaatcttaagtccttcacaaacgttaattttatactgtcatggacatctaa

SEQ ID NO: 9235 - DNA, 443 bp, Gossypium hirsutum
  misc_feature (40)..(40): n is a, c, g, or t
  misc_feature (404)..(405): n is a, c, g, or t
  misc_feature (409)..(410): n is a, c, g, or t
  misc_feature (413)..(417): n is a, c, g, or t
  misc_feature (420)..(427): n is a, c, g, or t
  misc_feature (432)..(433): n is a, c, g, or t
tgagaataataaaaaagaacaattaataagcaaatgtaantttggccaaaaaccaaccaaaaccccaagtcccacccacttagaaatgcaatattacacagtttcttgtaactatcataacataaacaagaagggaaacaacaaaagaaccttttgtggacccaaaatagagatcaaaaagatatgaactttagggggggggggggaaaccccaccggggtttttttttttttctttttttaaaaaaaaaaaaattggccccaaaaaaaaaaaaaaaaaaattttaagcaaataacccccccaaaaaaacccccctttttttccccttttttaactttttttaaggggggaaaaaaaaaaaacccttgggaacccatcccaaaaaaaaaaaaaaggggataccnnacanncgnnnnnaannnnnnnnttttnnattaataacc

SEQ ID NO: 9236 - DNA, 652 bp, Gossypium hirsutum
attgctggcaaaaatagcagggctgagttccagctccttgccgcaccacgaagtatcctcgagaaattccaccattgccttggtacaggagtgccattcctcagatggcaatggctggatttcttccatttagtgctatttacattgaactttactacatattcgccagtgtttggggccacaggatctatactatatacagcatcttgtttattgtattcataatccttctgattgtcacagcttttataactgtggctttgacatatttccaacttgctgctgaagatcatgaatggtggtggaggtacataaactttatttttgtattcatctctccgatgctttttgctttgctattttgaaatattataaaaagtgcaatttcatattatatcttatctctcttctactgctccccctgtttgtgattcatgacaagtaatttgcacgccaattagcaatttcctgagactttctcagcttctttcatttagcatggataaaaagttgaagagaagcaaagcaccaagtccctttatgctttgttatggaaaatttgttaaccaaatggttaagttcataattactttcctactttgtagctcaacctttaaattaatgaatcttccatcctcacttgtgtccttaa

SEQ ID NO: 9237 - DNA, 467 bp, Gossypium hirsutum
ttgcttgttggtatccatacagaccatattgtgaggtacttcatttattttatgcttcgtttatctttttgttttgttagtatctttaaattttgttgtaatacttgagtctagaaggttgagagttaacttcagatactcgcttgtaaatttgcttatctaaactatatttaagcactttattgagttggtgtcacccttaaccgggtcactaactcagctatgaaattataaaaatatctcttcttttaaattataattaatattattatgatgacacttttttattttcatacttttgtgttatctttaattaaaagattaaaaattacaaatccaaggactgaacacatgttcaatagtattaaaatacaagttcattaccactccacttatattcattattgaataattttaacagaaaatatctttaacatacaatattttcattcatcttctatactaca

SEQ ID NO: 9238 - DNA, 433 bp, Gossypium hirsutum
acagtgattatcttgatgctgctgatacacctggatggtattgtggtcccaatttctattcaactgatgtcttgcgtgaatttgccaaaacccaggtatgtttttgtctgttctttttcaaaagatagtccaggagaaatgtttcataccacttgacttgaatcataccaaggctgctagctaataattttgtttctttggcttttactttgcagatggattacatccttggcaaaaatcctcggaaaatgagctttgttgtgggttttggtaaccattacccaaaacatgttcaccatagaggtgcatctatccctaagaataagatcagatataactgtaaggggggatggaaatggagggattcaaaaaagccaaacccgaatacgcttgtgggagccatggttgctggacctgacaagcatgatggatt

SEQ ID NO: 9239 - DNA, 563 bp, Gossypium hirsutum
  misc_feature (555)..(556): n is a, c, g, or t
cttggattagatgtttataaaccacttgttagaactcatcatacacttaaacttctttttgttgatatcatgaagtgaagtcccctaagaaaatacaacacaaacttcgaatccagagtttaaagttcaagaaactgggattcgatccatattgagataaaaatgccactccaaataaaagagagggactgtatgaaatgaaccgaatagagggagagtatcgtgacttccaacaaaaagtgtaccgtgatgtaagagtttaaagtttgagaccttagataaggcaaagagctgagagtgcatgccgctttggtcacggttgaaattgggaccaaggcattccatcagtgccacaaaacaccaaaatgattccgactcatcctccattacaagcaaaatcggggatagaagatcgctcataccctgtaagatggatagaaaaagagatgaagcacaaaaccaaattcatatagatgataagtgctacaatggatataactttggagaaactgattcatgcattgaaaatgtaaacatgctataagcctaaatgtnnacgtgcc

SEQ ID NO: 9240 - DNA, 361 bp, Gossypium hirsutum
cgcatagttacaacttggcaaccttcaatcaatagtcccacccgctgggaatcagatacatcgtccatgcagtgttggtagttcactgtctcgtggagcttcatatatagctatattacaagggtcctcgggaacggctttgaagtcttctggccgctgctggagatcaccgagcaaagctgatggtggacccatggaaacaaacgaagtggcattgaatgtgctgaagaaaattaagttgatgccgagtagagttgcaactctaggtaaccagtaaggagcaaagtcatggattatccagttgacgtttgagtttttgaggaactcagttaaagggtctgggagattgtcatatgactta

SEQ ID NO: 9241 - DNA, 434 bp, Gossypium hirsutum
gaacagcaggcttctggaaaactttaataagtaatttaacctcgtccggttcgaactcgaagcaggtgcgcatagttacaacttggcaaccttcaatcaatagtcccacccgctgggaatcagatacatcgtccatgcagtgttggtagttcactgtctcgtggagcttcatatatagctatattacaagggtcctcgggaacggctttgaagtcttctggccgctgctggagatcaccgagcaaagctgatggtggacccatggaaacaaacgaagtggcattgaatgtgctgaagaaaattaagttgatgccgagtagagttgcaactctaggtaaccagtaaggagcaaagtcatggattatccagttgacgtttgagtttttgaggaactcagttaaagggtctgggagattgtcatatgcctttttaag

SEQ ID NO: 9242 - DNA, 576 bp, Gossypium hirsutum
gggctcgttgacaggttcccccctgtgcccctgctaaaagctttcttgaaggatgcaaagaaggcagcttcatctattttggaagatcccaataatgccggccgggctgcggtatgccattctttagttgtactgataattggttttattctttactatcagtgatattcaattatccttttctttgcgtaagcagagtgttctattctcttgtttgattgctgtcatatattctttgtggcggttaatggtattgaggctcactttttattgtgaggattagggatgtgggattttctctagatttcatctaagaaatattcataaaagctctttgcatacctttttatctcctaattaatgccaaaaaccatgaaaccggtggtattaactattgacaaataggtgggagagattgattggtcatggtcgtctataccttaaagtattcttcatttctagcagttatgtttctactaataagtagtagttcttgatttatacagcaacttgctgcacgcaaagagcaatcagcacttcgggcagtcatgaagtgcatcgaagagtacaaacttg

SEQ ID NO: 9243 - DNA, 611 bp, Gossypium hirsutum
ttttatctaaaattcttttgagaattgaaacgagattaagaagttctttttttacaagaatggttggattattattaaaattaaaacaaagcccacactatctcaaaaacaagacctaaaaataataaacaacccaaaaagatttcaacggtcggacttaacagcgatttaattgaattttaaaatttttgaaataaaaatgaaagtgttagtgattatttcgtacaaaacagttaattgatgaaatagttgaattgattcaattcgtgaaatatatgaagaagtttatctacttaagactctcatattgtagataagcataaatctcaatcgttgatataaatcaatccacaccattaaatttaagaaagcttaactacaaacagaggcataggcattaccctcgcttcgttgtaaacttttgtagtaattgaatagcatttaatcaaacacttaatgcttattatttttctatttgtttgtgacttccattcttttgagtttacttctgctttactttagtattttaaagaatttttattttacaaatataagattaatttagacaaatttaaatctaaaaaattgacctaacaccacacaaagattgc

SEQ ID NO: 9244 - DNA, 548 bp, Gossypium hirsutum
gataaacagagaatgagacatgagaatacaacatttcagtttgctaacaccatattacatgcagcaactgtaaagagcttgaaaagctatatcttttaaatgagcctagcctagctagccttgatcaaaccatttaagcgtcaagcacagctcaattgtcattagtatatatgctttatttatatatcatatccaatacaataaattttagtttgaatttgggagaatagccagaaccttggacaagcaatctgagactattttcaaaagaaatcaaaatatgacctaatggaagatatatagttcaaaagaaatcaaaattgcaatacagccgaaaaatctgatactataattgtcaaaacagtgttctgagtggctgagttgcaatgtattcatttgtagcatgaaagatgatattgtaaaacacagcctaacctgcatataaggcgagaatagaatttgccttgaaaacaagggctggtctgaccaagcttattttaaatgacatgttatagatgccatggaaaatctcttcgctaagcaccacc

SEQ ID NO: 9245 - DNA, 588 bp, Gossypium hirsutum
agagctctcttcaacctgctcatggctagatcgatcggtttcgggtcaaataggaagaactagaagattccacctctggaaagcgcctacacctaatggcttaagccgctgttcccatttcctcgctgacccatcatgcaaaaggtacgccgttagagtaagtgcgctttactaatatcaagtaaaggctctaagctccgctccttcgactgattgttcgcatcggatctcaggttctctattgcactccctaaatagggttcttttcacctttccctcacggtacttgtacgctatcggtcattgaggaatacttaggcttagagggtggtccccctttctcgcgtaaaagcgatcagaattcgaacacgccgcgttttactgggaaggatcgaaccatgggaacgaatctacagggctatcaccttctttggccagatcttccaaccttttcacaattacagttcactgcgccctttactaaatagaaagtcaaggggcttgctggtttttccatcatccaatccacaacaaatcgaatgaaacctggcgaaaaagaagtgaacactttgctgaggaacgaaactt

SEQ ID NO: 9246 - DNA, 465 bp, Gossypium hirsutum
  misc_feature (118)..(118): n is a, c, g, or t
  misc_feature (120)..(120): n is a, c, g, or t
  misc_feature (163)..(163): n is a, c, g, or t
  misc_feature (173)..(173): n is a, c, g, or t
ggacgagagttcgggtttttacagatgcagatcggatgctctgaggaaaaagcgttgtgcctgaaagggaacgaacactccctgtgccatttcttaagtcctacatcacagattatangnggcattaacacttcatatatcccagagatgtgggaacacttgncagtaacttnacatcaaattccaacttttgaacatgccattgcaactctaagctcttatttagaaatccaagtttaatacctgagacccagaaaatttctgctacaacttctggataatggtgatgttctatttatgatgataatgaagacttaagaatatcgaagttgaaagtgcaattgtaatatataattatactctctacttcaatgacactattcctagccctgagcagatgatcaagaagaggaattcgttttcatgtgcaacaagcagagtccacataggaataacaatctatca

SEQ ID NO: 9247 - DNA, 380 bp, Gossypium hirsutum
ttttttgtaatattttgagatgatatttcttagttcatactatttttttaataatacagctttagtagatgagattaaggtgggagataattgccacttagagctttgaaggtgtacttaaaatcgaaacaattaatgttaagaaggacaaatgctgaatatgaagttttgttaaattaaaaatagagatgaagatagagccagtatacataactaacaaagatgcttagagtcgatatccaatgtttctgtttgacaaaccctagaccctgatgaagagcttgagcgtgatgtcttggcacagggttagaacaggttggatgaacaaaagaagtgctgcatggatattatcttactgtgattgcctgtaggttgaagaa

SEQ ID NO: 9248 - DNA, 625 bp, Gossypium hirsutum
  misc_feature (454)..(456): n is a, c, g, or t
  misc_feature (459)..(459): n is a, c, g, or t
  misc_feature (587)..(593): n is a, c, g, or t
  misc_feature (595)..(597): n is a, c, g, or t
  misc_feature (600)..(601): n is a, c, g, or t
  misc_feature (605)..(605): n is a, c, g, or t
  misc_feature (607)..(607): n is a, c, g, or t
  misc_feature (609)..(609): n is a, c, g, or t
tttcctttatgtttgacattgcgtgattggttgattcatgcagacacttggaataggacacactttttcttcatttatttggctctgcggtccaataactggtcttgtggtaggtgatgtgaaccatgttacatataattcttagatatgcttctatttttatactattgccattttctttattgacaatttaatatggtaacttggtaaatcttataaaacagcttgtgcttctttttgagctaactcataaaagggttagcgaagggctgactttcatgcctccttgatccttatagaaggtggaaaatgggtccctagaagatttatgaataggcttgcataatagtaagctactttgtttttgcaaatttttattgtctcccttcataccctgggaatgttgtagtacttttatcccactgtaaacagttgattgacttcatggtctctnnnccnacctgtctacgggggaataaaagtactaccactttcccagggtatgaagggagacaataaaaatttgcaaaaacaaagtatcttactattatgcaagcctattcataaatcttctagggacctttttnnnnnnncnnnagnnaccngngnggcatggaaactcccc

SEQ ID NO: 9249 - DNA, 646 bp, Gossypium hirsutum
agttgggtcgagtttaaacaaaaaattttatttaaattgatatatttaaaaaatccatcatatctttgtttaaacttattttttgaatttatatttttatttaaattcattcactttactagtgaattttcaaacttaaacgaaatggtcgaccattggtcagatgtagttgatattcatttaacttttgtgacgaatttcaccaggaaaacatgtcttcagacttcaagaggaagttgtatggcacaccatatttgggttatagcagacgagaagcggagaggtttagaatttaacgtaaacgacaacaggcgataaacacgtcaagagacaaatcagaagtcagcagcaacaagttgattgacgccctttaccagcaccatttggatgcactcaatttggtgatcatcacatgtggctcctcggtttacacgtcagcctcctttgttacatcgatatccgttatgatgtttgtccctgctatttttggatgagcaacgagtggccctaaacacctcactcacaataacccccttcactccccacggatcaaatcgagttcatcaaactcttaaaccctccgtaaacccctgttttggccaaacattcatattttctttgtgtttcaattcaagatggctacttt

SEQ ID NO: 9250 - DNA, 639 bp, Gossypium hirsutum
  misc_feature (598)..(600): n is a, c, g, or t
ggaaaagattaaggtagtaaacatatattaaatttaaagaagaagaaaaaaagggggaaagaaaatttgggacctggatgcagataatatcagcatcaaaggaattgagtaatttaaggagagaaccgaactgtgagactctttgcctcagtccatttacgttgtaagttactatcttcatttcttcataacttaattttccccctgattttccttctcttttcttttctggtttgaagcagataatatcagcgtcaaaggaattgagtaattttagttttttttttgttcagattggaaattatcaaaatattattatttatatctattttattatttaagtttttattgaattggtatatataccttcttaactgaaaattacaaaaatactttttataattaaaatatttttttctattgtttaagaatattttagtctttttattttttaaaaatcaataaaaatataagtaatataatatttaaacctacgttaattgcattattaaaaatttatcactcaactaaaatttcattttgatatattttatatatatttattttaatatgtacaatttattatctctttcagttnnntatcttaataatattattaattgagtttggcgtacaagt

SEQ ID NO: 9251 - DNA, 611 bp, Gossypium hirsutum
  misc_feature (593)..(595): n is a, c, g, or t
tcatctttgcttttgtcttcctctgtaaacaattggaagacttgaaacctacttatagagtattcgcattggattgaaaatgtaattcttctccaatatttagaccaaatttcaattcgaaaggctttacataaataccatgtgcgaccgaatataattaccccataattattaaaaaaattaactcaaccatcaaaaaggatttaggacttattttaagttgcttaaatatattccctttacatattatttttcttgttttaagggaagattgactgtaaaagagatagtatgttagtaagtctcatatatttatatattgaggagacttgtataggtaatgtattgaattgagaaatattttattttgttcattgtgggacacttatttgaatgcattgagtgaaataatcaagtgactgtcttagtttatgttttaagtttttaagagaaaaatttaaaggggatatttacaccataattacaaagataaaaagtctaaatagatgtatgttagagcttgaaaactcttgttttacaaggtgataagatggtaaaatattctctctaagtaaaaccccacaaatataagnnnactgaactaagcatat

SEQ ID NO: 9252 - DNA, 498 bp, Gossypium hirsutum
aggtctgccgttgtaaggcttttaatgacaagttccatttcagggaaatgctgcttttaagggaaagcaatggaacaaggcagttaattattacactgaagctattaagttaaatgggacaaatgcaacatactataacaaccgggcagcagcttacttggaactaggatggtatgctgtctctaatagttgttgctaccaagttcattacattgtttcacattcacatacttccgaagggatctgacttttgaaaatgcagctttcagcaagctgaagaggactgcaacaaggcaatatcacttgacaaaaaggtaatgaaatatcttcttttttttttttttcaatttaaaatggggaaattttgaaaaacttaaaaaaaaaatttggggggggggtttcctttcgggtttggggggggggggggggggggggttaagggtttttttttttgccctttttaatttaaggggtgggggggaatttttagggggttgg

SEQ ID NO: 9253 - DNA, 364 bp, Gossypium hirsutum
gcggcaaataagtgctcaacaaataaacaaggtagaagagctttggaagacaaatcctgatgcctcccttgaagatcttgagaagcctggtgtagatgatgaaccacagcctgtggccttgaagtatgaagatgcttatcaggttcccaatttgcaaagattgcatcattttttctgtgctttactattgtggaaagacaagaagtttcttgttataatgtagtttactaattaagttgtggcctttgcagtatcaaaatgtttttgctccacttatcaagcttgaagctgattatgacaaagtatgtatattgtgttcacacttcttatctccatctaagtgcccttagttcaattgtctgtg

SEQ ID NO: 9254 - DNA, 546 bp, Gossypium hirsutum
tatgtgtcgaatttgaggccattagagcaggctccgaggatatgatttaacttttgtacacccctagatatgtcttcgatacgcaggcgggagatatcagggagtttgctatctcttcttgccatcttcccatagtccatctgtttcctgccaatcttatgcagaaaatcgaacattgaactattgcttgtagaatctcttcttcctccattttcaagtgcaaaatccaggaccactgatttttggcctctcccaaaaggaacaatctgatttgataccggtctcctgcctccattaggcctgttttgtgagtttccagctctagaaccaatctgaatgaagccaaaacatgaaactaaatgaaactgctatatctaattgtctcttatatgtaactgatagcttgtgtgcatttcagttttcaactatggaaacttacagttttgagtgtgtttggttccctggatgatttatagcctgttttggagtaagcatatgcatgatctgctcaaacatgcaacaaaagccaagttaggcatacgttga

SEQ ID NO: 9255 - DNA, 430 bp, Gossypium hirsutum
aaagtagtaatggtagatccccactggcatgaggctacaaactagaattgccctacatgttccaatcagggtttcattggattgcgagaaaggaaaaaaaagaaggggcggtgttgttgctgactacttcagcactggtaatcgccatttgctacatcattgtcaaattaccccctctcataaaacaaagattggcaccgacttctaaaaaggaaagagcctcatctttgacaaaagcttccttgattccatcaccctttgccttctttatgctgctcagctcatcatctactccacatgatgctttgtttaaacatatatgctgctaaagcctaaaggacggtcaaaagcaaaagctttaaaaagaaccctaagaatctttaactgtcatggtatttctaaaagaaaaggtcttgtgtctccttctagg

SEQ ID NO: 9256 - DNA, 507 bp, Gossypium hirsutum
tagcaaagctcattccttaatcccaactagttgctcctatcaacttttggtctgcaactgctcatgtatgctaataactccaaacttggtcctgaatttggtgaacataccaacagacagaggcttggtgagcacatctgcaacttggtcttttgttggaacatgaccaacaagcaatgtgcctactgccacctttttttttgcacaaaaaataagtcaagctctacatgcttgaactttgagtgcagaattaaattcgctgagttatcacaccatacaacagccttaccactaacttgaacttgcaactcaatcaacaaggactttagccatataacttctatagtggcatgacctaaactcctatacttagcctctgtagtggatcaataaatcacatgttgctttttagagcatttggaaacaagattgcctcataggaaaatacagaagccagtagtagaacgcttgtcatcaaaatcaattccccaattagcatctgagaaa

SEQ ID NO: 9257 - DNA, 374 bp, Gossypium hirsutum
  misc_feature (147)..(147): n is a, c, g, or t
  misc_feature (149)..(149): n is a, c, g, or t
  misc_feature (158)..(158): n is a, c, g, or t
gatgagttacagcataagaattgaagcatatataggttgcctccaatctgctgtcatttaacctatattcatctcttagctggtttctggcaattgcaaaccaacacaaattttgccacaaggaattggcatccattaggatattancntgaatcgtnaaaaacttatattgttcttactaagcatgagcatcaaacacagatatctgtttaacacgttcgagttttaccaaaattttcatgtatttggtgagtcatttgaggataatatcaaacacaacctttatttttgttaaatctagatgacattacttgattttggtcatctttgacatgcaaataaaaaactaattatgcaatgatgatcccaagaaa

SEQ ID NO: 9258 - DNA, 626 bp, Gossypium hirsutum
tacagggttagtacttgtaaagttgatggataattatgaagaaattgaaattaattcccattgtgtgagctcttgtatttatggtagctttgaaagttaaagatgtgatgatttctgaatatttacttgggtgattaatgccttttcaaggacaattggtagtttctggtgggagtttggtgagaaagggtagaagtgggacaagcatggaaccttaatattaaccaagtgtggtgatagtgtatttaaaagtaaaggtgtgatagaatttggtgagaaagtggaagatgttggagaagcatggaatcttagtattaactaacaattcttcatagacattacactctttaaaaaaaatacaaatttaaaatttgataatattattaagagaaataatcataaatctcaaacataaataataaaataaacattaaaaaaataaatcatcataaaagaactcttaaaattttcttttgtgtatgttctaaagggtaaattatctagttggtcgctcaatgttttgtcatctaaaatgaaatatttacaatttagtcatccaacttttaaggcacttacattttacatccccaaacattaaatctctaatggtagtgtgcacaccactt

SEQ ID NO: 9259 - DNA, 645 bp, Gossypium hirsutum
atttcctgtttggattaacatgatttaattaaagcttacctgaagcttctgtactttgttgatgttttttaagttcttcaattatctccttaactgacttatttgcgttaaagcatgaagttatctgaggcaaaagcgacttcaattgagcttccgactcagggtcactgctgtattttcccaacagtgttgtaacatccttgtgtggatcctccgaactgtgaaaatatacatattcatatattagaatgctggaaagaaaatatacatgcaagttattgaaaaacagaaacaaatctgaaactatcttatcagagaaaaggaggcaattgcaatgcaacctacaaaatgaaataaaccaataagataaagaattgaagatcatagttcacgaattccagcccaacatggaaacatcaagtcatggcgtacaaaactgatttgatttggaatatcaagtcggaaatacttttctcccaattctagagaaatatttgcaagttgtctcaatttatattaatggcgagcaacaagagagagaatacgatcctaaaattattgatttccactcaaaaagaaagccaaatagaaagaatataagagatatacaaggtaaagaatataagagatatacaaggtactggt

SEQ ID NO: 9260 - DNA, 518 bp, Gossypium hirsutum
agtgatgagatgagatgacattcactcacttatgagccaaacaaacattcagtcagactcaagacattggaaaagagtacataattccaaggtaactgcaagaaaaataatgctcgaactgcaagaaaaataatgctcttaggaaaagaaaaaaaaaataccacaccatttctcacagtcaaaaacccacaaaatgctacacattgacattgattgatatacgcttctctcatttaagacggcaaatggtattaaggtacaaacccaatatccttcaagtattcatgctcaagagcacttctagccgtaattcttttgcttggatccatgcacagcattttctgaaacgtgatacagaccacgacattgtcagtacaatattacacctacttcatttctgtgtataaattcattcctacgtgatcatcaggaattggtgatatgttcaagccaacataaactgctctatatcaaaaaatcagctgcctttaaattaggatgttcaaccaaaaaatcaa

SEQ ID NO: 9261 - DNA, 452 bp, Gossypium hirsutum
cagatgcagcacttgaaatgttctgtccagaacccaaacctcccccaaacactcttgagtccatcccagggactggtatagttgatgcagctggcagattaccagtcccaagttggctagccatcatagaggctaaaccaggatttaaagagaaaccacttattccatagtttggaaatgatgactttgcaccatcaccatgctgatactgagcaggtaagctgcctccgccattgagagtggaagtaggagatcctttcaagtaagaattgtttgaggaggcagcagatttctggaactcagctcgcctattattcttaaccaaaggcatatctaaatggccagattcagacttcttcaagtatgcctgctgtttgatataattctgaccatcttgcaaactgaacaaataattttggctattttcagcatcttgttcagtctgggatggt

SEQ ID NO: 9262 - DNA, 635 bp, Gossypium hirsutum
  misc_feature (626)..(627): n is a, c, g, or t
gtttgaagacgaataaacctctgctagatccagaagaggaaaaaaattaaaagaaacgcatattctcagaagcttcagagttcagtgagcagttagacacacatgtagtctaaatgaaagacacagcaataaggcaaataatctcattctctttcaagaaggataattcagagtactaaccttaacacctgattcaccagtgaagggttgatcaaaatcatgcaacaaccttatgtttcctttcttcccaaagctggcaacagccaaatttccaacttccaattgagacatggcacgacaaacagtcactaaagctttgacagcaacctcactacaaccactttctgccatactatgagagtcatcaactgcaataataacttggtaatctcgcttatttggcttggttcgccttagccatattttatctttctggtagtgactagctatgtatggaatgacctataatttccaaacacgtagaaaaataaggttttgcaataaaaaaagaaaagaaaagaagaaagagtaggtatacactcgacgtatcatacactctaccttcttcatgttaatccttttgccagtcttataatccccttggagtttgctggcaagagtgggtnncataacaa

SEQ ID NO: 9263 - DNA, 657 bp, Gossypium hirsutum
gatttgcgccaatggaaaccataaatttcatacacaatagaaggatatggtagatctagcttttttagatagtgaacggacgaaccccattctattcactggtacggatcgttgatactgaaaaagttgtttcttttttctcagcccatgatctgaacaagtcgcacatacaccctagtacatgttcctcggcgctgaggacatcccccaagagcaggggatttcgtgacatttctaattggctgtcttgcatttctaataagttgtttaatagttggcatactgaattatatacataatagactggtttagatcgatcctaaccagatgattctgaattacttctttttctatttaatagattaataaaatattaaccccttaggctttaggcttaagttaagaaggaaaggaagaagagggattaaatcaatcttaattaaattgtggattggtgttaaatcgttgctattgctatttgttatttaacttatttaaccgctacaagatccacaattccatgagcttgggcttctgttgctgacataaaaacatctctttccatgtcttcggatacaacccataggggcttgcccgttctttgtacataaacccttgtgaggctttcgcgaagtttcagtagttcttccgcttccc

SEQ ID NO: 9264 - DNA, 515 bp, Gossypium hirsutum
cagtacagatactaagctccgccaatggaggccggaaagggctactgaccgcttctcgatcatctggggatgcttcagaacttgttaaaggtaaaacttctactagaggaaggggtagaggcagaggcagaggcagaggcagaggcagaggttctagcggcttaaaccagacaactcttgatgctacgttggggtttcgccattctcagaggtgacacttcgatttaacttgttgacaagtaatttgatttatgactagagaaataagtatcgggtacaatccgatatcaattgtaggaaaattcaaccttttctaactgcaaacgctcttcttttattgcttgaatcctttttgctttgtaatactggggctgccaatgttgctgctacttgaaaatgaaactactgagtttaccacaactatattaattgttatttgaagtattcatattctctattccactaaagttttagtttttaattccttaaaagtatggaaatttgtcatcactgga

SEQ ID NO: 9265 - DNA, 554 bp, Gossypium hirsutum
ccacccacatctcatcgttttgagcttcgagatgtggccaccacatatgaattttcatgtaaatcattggcagtgctgtccgggcatattggttcagtttcttgcttggctttatgtggggaattcatcttaagtgcatcacaaggcaaggacattatagtgtggcaacaacctgatttgaggcagttcacaaagttcggccaaggtgatggctcggtgaaagcgcttgtggctgtaggcaataaggtttttactgcacatcaagatagtaaaatcagggtatggaaggtgtcaacaagctcggagaacgtctttaagctgatcaacacacttcctactactaaagactatttgggaaagttcatgaagcaaagcaattatgtccaaactcgtcggcatcacaagcgattatggattgaacacgcagacagtatttcttgtttagcagtgtataatgggttagtttattcaggttcatgggataaaacacttaaagtatggaggatatctgatttgaaatgtttagaatccattaaagcacatggatgatgcac

SEQ ID NO: 9266 - DNA, 541 bp, Gossypium hirsutum
gtaacatgtttcgttcattatcgtttttttatcaacaagcgggttgcttgttgatagcagccatgcatgaagttcatgcaccaatgattcttttggctgttctgaatttatgcttatttgcttatttgtaatatgcttgtaacaaagggaatctgatgagtaatgcctctgcaatctgcataaggttgaaggaatggaggtggggcttacattaggcttggagaatcatgaaggaactttgaagctgtccctcttggagagcggttgttatgtgaaagaaatcaccataaaattggatggaggagcttcttggctttatcaagggtatgttaatttatatcaattgactaattttgtcttagttgtatccaaggttcgttttgtggtgtcctaaatcattttgcattatcagaagtttttaaaagaactgttcttctgtatgattatatcatcattgggctgcttttcctttcactaacagaaaaggattctggtgttggtttatgtcttcaactttcttcagtgagaaaataatggcctc

SEQ ID NO: 9267 - DNA, 655 bp, Gossypium hirsutum
cgcaacacgatggactttacctaggttaagaatggaccaattattaaatctcgggtggaaatttcttttacccatttctctcggtaatctattattaacaacttctttccaacttctttcactgtaaagaaaaaaagaatctgagattcatgacttggttcaaacaagagaaagaaacaaacataaaattattcatagatattcacgatatgttccctatggtaactgggttcatgaattatggccaccaaacagtccgagcagcaaggtacattggtcaaggtttcatgattaccttatcccacgcaaatcgtttacccgtaactattcaatatccttatgaaaaattaatcacatcagagcgtttccgcggacgaatccattttgaatttgataaatgcattgcttgtgaagtatgtgttcgtgtatgccctatagatctacccgttgttgattggaaatttgaaacggatattcgaaaaaaacgattgcttaattacagtattgatttcggaatttgtatattttgtggtaactgcgttgagtattgtccaacaaattgtttatcaatgactgaagaatatgaactttctacttacgaccgtcacgaattgaattataatcaaattgctttgggccgtttaccaatgtcagt

SEQ ID NO: 9268 - DNA, 592 bp, Gossypium hirsutum
cttaatcaatcttttagtaatttcttttgcttgaaattattaacaactcctctaaatgaacatttaccttcaatgcgatagttttatgaacaacaaaaacaaaagacgaggtcaggattttctattggttagggctatagagccagtctttcaaaaatgtttttcacttatcccaaaaaccccaaaataatttaaatttttaacaaataataattaaacttaaattaaaaattagttatcttttcatgaaaaaaaaattacaatcaatgttaacaatagaaaaagattattggttataaaaaaattttgatatgaaaaataacagactttattttacatatgaaattaaattatattaatttccatgtccatgtccttttctttttaagctgtcgtgtcagcggtgctcacgtcatagtatacttatgcatgtccatgcttcatagattttatgtttgcttatggcacacacaaacaattgtatttacttgcatgaaaatagctacttctttttaaatggacatatgtatcttgacagcaaactgaacaaaatgaataagcagtattgagagcaatcgtttcacctctacat

SEQ ID NO: 9269 - DNA, 433 bp, Gossypium hirsutum
aaaaagtttaggtaccaaattaaaaaaaaatcaagtttagataccaaaaattatattaagccttaaattaattgagagataatttcataatttaaacttttttagaagtctttaaaaataaattatattctttatggattatttatctttaattgatttaaattatcatgagaaaaataataaataaatataataataaataaatattttattatataaagattttacattttataagaactctcttctatttgactgaatgggtcatctccaagccattcaacgcaatttcagaagtttaaaagtctagaagtttagaaatcaaagcttggagagaagatgctaaaaactagagatcctttccaaaatctcaagaaacatttgaagaacttgaaaaacttataaagaatgacgcattagtcttgaaaaaagc

SEQ ID NO: 9270 - DNA, 622 bp, Gossypium hirsutum
  misc_feature (54)..(56): n is a, c, g, or t
tgagacaggatttagtccaaaatcaccccaccggtaacaagtagttgacatttnnntttattatcgtgttaatgtgttttggcagtttactgtcgtcttgctggtcaaacatctctttgctgtgctgaatggcgaaactgatcattatccatttgcacttcttacagtatgtaccctattccttttctccgtatgatcctaagaatagttttgtagctttttctaatctatgtttgttttttttttgggctttttttgcaaatttggtttttaaaacctccgggatttatacggccaaggaacatatggtttcgggaaataaaagtttttcgaaaaacctttcgggaacggtggctggccattcccctatccctttaacccttttaaaacttcaacgaatttttttaaaaaatctgaactttcaataaaaaaccacaattttcacaggtaaccaacaagaatttccccaattttaataataaaaacaaggttaaccactttcaaaaggtcgaaaaacctaacaatacatataaaaaatttttccaacccttcccccctggaaaccaaaattcccccccaatttttttaaaagaaaaaaataaaaaaagccccccaaaaaaaa

SEQ ID NO: 9271 - DNA, 478 bp, Gossypium hirsutum
tctacctaggaacactcttggagtaaagcatattttataaaaacatataaaatcactgcctgataaaaacatacgatttctgaagtgaataatcagtgatcactgcgtaataataaataaatatacaaaagcgagagaagaggaaaaaaatggcagtcagtctgaatcaacttacaaagtcaagcagccggacaaaactagggcggtttctagcaacaatgacatgggtcccaccatgtgaaactaaacccttggctaatggagccttttccactgattgttgattatttaagttatcaacatctgatgcagaagatgatggagattcacctgaaagaagccatcccagaaaaagaaaaactaaggttgcatcttaaccaaacaaaaagcatctgttacaataaatattttatgctggatccattaaagcatgatatgcaacaagagttggggctccagcccatccaggaaataaaaa

SEQ ID NO: 9272 - DNA, 415 bp, Gossypium hirsutum
gcattcaagtatactggcaaactcgtttaaaaaccgtcccatcatactccttcaatggtgatcaactcaagcatgcattatcaggcaacccatacttccatcacggtgcaccccaaatttctgaggatggtaacaaaaacctcaataatgggaatgtacagaacgacattaattttacttcgtggctggaacagtttgagcaaattcaacgacaacaccacttgcttgcgaaatcacaagcacaatctcgaaacaactcattattgaaggtatacgagttgcttgttacatatgtcggtaatttgttaataatgtaaaaggttagaacttggattcgggtatgttcaattgtttcgaagatttgcatgcatttcgacggtctttagaagatcgtatttctatacatgtcaaccgg

SEQ ID NO: 9273 - DNA, 467 bp, Gossypium hirsutum
gagtttccattgtttaatctgtctccttcacacatttttcttcacctatttattaacaaatgagtatattttatacgtttttaagtgatattttatatataaattcatgtagattatattaaagaggtaattaatttttaattttttttgttaaaaattttatttatttgtattgttaaaaattggtgtagttgacgaaataatcaaataatgatatgtgacgtgccacttataccttatgttgatatataggaatcaatttttaataaaaaagaatagataaattttttaacaaaataactaatttattttttaatctaaacatatataaattaacttacttattttttaaataaagaaaataaaatataatttaattcttaatacagtgcttccataatacttttacttattttaaagcatgcagccatttggatactattatgatcactttagctcgcattagg

SEQ ID NO: 9274 - DNA, 616 bp, Gossypium hirsutum
gctggcaggcagcgagaagccctaccccaggttagctgtgcttaagccttcatggtagtattgcatgttttatctccttgacttgattggtatatatattttttggatgcatcggtggattgacttaaggttgttccgttgatttgtgctaagtttcatccctctaaataccaatttttaactgaaatgtttttaaatgttttggttcaaaagaaaatcttgatgttttcaaatttttatgctgaagatccacagaaacacatgcatggatccacacgtttacacatagaaatacatgcatggatactcacatttaacttcgtaaatatcaacgtgtgaaggtttatacaagtactacgatttgaatgatacctttttggatatacaattttaaggatggttaccacctcttttaaggaaaaagtatgacttttctttggatgctaaatcagtatagttcagctccttcccgaatgttggcaaacgttagaagtaatagagtttgaacttttaaatgacttatctttcatatgcatactataagatacttgaaaaatgcttttggaatggcagttaccaccttgtcattacttgtaatagatccgctcatggtaaa

SEQ ID NO: 9275 - DNA, 578 bp, Gossypium hirsutum
gcatttcacaatttagtctttattccacaaaacacaaaatacacaaagtttggtcacactccttaagggccgaatcttcctagtgcccatataagtccatacatctcatttatttcacctttgagtccttcaaaaatttgtttttgtaatttagccctaactactcaaaatcaccaaaaacttcaacacaaaacatattaaccttttatagccgaaaaccatactcacccccaaaatcgaaatttcaacatggtttacaaaaatcacttgataactcactcaatatcaactaaaatttcaaaagctagtacatacttccttaccttaatagtgacttaaaatgaccgattgctcatgttaccaacaatattcaagatttgaacatgggctaagtaagggacttagtaactagcttaatacattcaacaatttccaaaagctaccatgcattacataccttattcaagactagaaggagtggccgaatgtcttacttccccttcccccttcttcttagcattttcggccaaggatgataaaagatgaacaaatttttttctttcttctttagaacatcg

SEQ ID NO: 9276 - DNA, 386 bp, Gossypium hirsutum
acatcgttttactcgtctgtttggcaccttcctctccccccccctctctctctctaccttttgtttggttgcgaatgtcttcctcttctctcccgaaggaaggaaatcggggacaaatgaaaatggaaggaatcgaaggcgacgccacggtgggaggagcagggcgttacatattgaatccgacgagaataaacagcgaggacataatattttgcgttgatgtggacgcagaatcgcttgttgaaatgaaaacagcgggagtcaccagattggattccataaagcaagctatgcttctctttgtcaattccaagctctctatcaaccccgaccaccgcttcgctttcgccactctctccaaaaccgcctcttgggtaatttaaaaa

SEQ ID NO: 9277 - DNA, 651 bp, Gossypium hirsutum
ctcagcatggaactaacaatcttcatgtcttcacataaatgaccttcgattttcatggaatttccctttaaaagtttctactttcatttgctcttaagttatagttattcttcatacctcaaatgtgggaccaaagaacctgaaactcctgaactagtttgatcactcaggttgtccaattttgtatactgtttttagctgtaccccttgattttttagcagttctccgaactggtataacaaaacttgggagttctacagcactcccccccttctggggggaataagagaactccaatcataatgttctttttcttatttccccttttgtcatatatcatgacatccatctgattcaatattctcacaagtgatgattttgcagtaatgatgacccaatatttggcaatgtaagttttggtagtgcttatgagttatggtcctcatctaaagaggtaacagacagcccagggaaatcctttcctactaccttggactctcctagcgtagggattggagcattaaagagcacatctgaacctttggaaatcaaaagtgagtatgaggagcaagataaccagttatttgcccttagctatgggaaaccaggtggttctacatctcatggtctgcacaatgaagaatttcctg

SEQ ID NO: 9278 - DNA, 602 bp, Gossypium hirsutum
gttctctaataatcaaccagtccattactactgttctacaaaggatatcttctgaccacatcataattattaccatccatcataaccaatcttggtatagtttcacattgttattacaatttctttttgcttaaactacatcctgtctttttgcagggcctaaatttcaataccgccgaggatttattttctttcaacctgttaccagaaatagtaatattcgcgaggatttttatttaaattcattcacacgattcaatcaaaccacatttaacgagtaagattattaatctcataacatgtagttcattataaaatcattgagtaaaatgatttatgtaagtgcgttgcattgaggaatatctactaagctattataatttgattggaatgttttgatcaaaattgtttcgatttataattgatgatttatgagaatttttagcactcgtaattgaagataattcaagcaagaattaagaaaagcaaagatataatcaaaatttttaatgtgataggagattttatttgaggaactgatttgtagtataaaattgtataattaagttggcgtgtttatcatattacattttcagcacgtt

SEQ ID NO: 9279 - DNA, 611 bp, Gossypium hirsutum
tcatgttagagggtacacacctggtatgattttgatgtgaaaccacaccagagaccaccagcacctaaaagaatacccaacacctttttagcaatcaaattgcaaatccatcaatactaaaccgaacagcgtacacatacttaccactatcaaacccgatcacgcgcacagattagactgattgagcgaaaactgcagtctcaactccttctcctgcacaaaacgtttacagagaattattttcccttacaacttacactaagaattcaagtgaaaaggagaaaccccatagcttactgaagatgaaacctatcgacaagtgaaagcccccacttatctgatcacacgaaaaacactgaaatcccaaattgcatgtgaagaacaaaaggagagtacagattgaaaagggaaaattgaaagaagaagagaatagtggagaaaagcaaaaacgtacgtcagaaattttggaagagagagaaacgaaattagaaaaaaataaaataaaataaacaacaatatctatcctaacctctcattctttcccactcgaactagtaagtttattttaatatgagttaataaagaatattacataagcctacccagtagag

SEQ ID NO: 9280 - DNA, 480 bp, Gossypium hirsutum
tttccatttccttggtgcgtaggataagcattgtcaccgcaatgtcgcaatttagcattcatagaatcagaaaaaaatcccagtctctaactaactaactaacaaacaaagttttttctttttatttttgcaggtacaactatgatattgtcaaggatatggcagtcgacggtcgataccagtgggttcggttaaagccctgaaagacagaagaagagagatgctagagttacacaaagtagcacggatttttgcgttagtcacttaatttgtacagttaagaagcaagcctttttttgtttatttttttcttttgggtaaaacaatagtaaaaaagttttaattatgtccatagtgttcatatactttggacttttacttttaattttataaatttaatctttttatttatcttatttaaaatttagttaccggttgagttttagcttagttgatattagtatcgttgctagggataca

SEQ ID NO: 9281 - DNA, 497 bp, Gossypium hirsutum
cttcatccatctaatatgtatatattttgctcttacggcaacttgtttcatcggcctttccctagaaccatacaggttcgatggctggtgttgtcaaacttacactgacggatcctgtgtgggcatcggtaatggggagaggttatgctgagatcgtggctaatactcagtttaacaatgtgtttctttgtaaatgattataggtctcatcaccaagtttgatggagccttacttaagcacatctatatggatagattggcgcaactagggaacttgttagggatattttgtttatttgtagctaaggaattcttttgtatcctactcttgtttaatttacgaaatgttgattttggattaaagaaaaaatctgtatagcataaccataatttttaattgcaaaatataagaaggaattcaaattctcacattacaaaacaagtgaagaaaaagaaatcttcaatcagtagaagtcaaaataagggaatggaatgtg

SEQ ID NO: 9282 - DNA, 501 bp, Gossypium hirsutum
ggatataggatacaacataaccgtagctcttcataaacagcacatacaacgggagaaggtactagaatatagttgctagatccagaagcctccaaggcagctaacttggatgacttcccaaaggcagagcttttaaatggagaaggcttctcaggagagggtttaggtggggatggaggtggggtagcagcagctgcttcattcattggttcagttgggattgatggggctgttgtaggtgaaatgttagacatgggagcttttgtggcaccaacattccgcttcagatgcatttcgaagtctccaatctgtcaccatgaaacaaataactgattcaacaaatattgtactttgtgggaaaatgcaattcataaaacaaactgaaaatctgaagatggctagctgcactgagacatatctttgccaaacttttcaggttaattaatgagacatgaaactaagtttagcagaagcatgcaagcatctgacatgataagagaa

SEQ ID NO: 9283 - DNA, 633 bp, Gossypium hirsutum
ccacttctcaatccctacatcagacaacttggttcatgtgaatacacgtgttagcccttaagagttagatttggacaaaagtgattgattcctaagattgatcttttgcttcttcttccccattggtgggtagggtaacccttttttatttcattcaattcaaacctcgttaattgtggtttgtggatgtaattcaatttcaattctaaaagccaaacctttcttttccattttttttctagcttttgggaaagaatgggaaaagttaaatttcaaggggtttatttctagattttgttttaaacttttttttagggtgtcagggcacatgcaaggcatttgagaggtgggtgcacttgaaaaatgtagggccatggaggcacatggtggtgagaagggctgcttcatcgagggcaccttctgtgactctgttttgctcataaacacccctcaattcaactttttttttctgttttattttttcaatttttcatatgcattttactgtctatgactaattttctgaaatttatggttactcctcttaacaatgtcgtcttcacgattcaaacccgtatttttcccttgaaatataatgtgccttactattacacctaacgctaatgatgtttt

SEQ ID NO: 9284 - DNA, 639 bp, Gossypium hirsutum
cattagtcgttatatcatagaactaacttacaacctaatcctaaccaaacaaagactcacagtttgcaaacaagtctaggattttactaacaagccttgagtcgagaaatttaagcaaacctaattaacttcactagaggaatggttacttgatatacaaatagacttgtcatttgatgaaaacttaattgctcaacttttctgaattttttttctatgaactttttgtctgcgcaaagtacaaggttaatgagttaacaaaacattttcaaattcttattgagagtcttatttgcatgaatgatgatttttccaaaagattgctttcttgacgtaggaatattactaatcatatacaaaaaagattcttcatattccactagtctgattgaaatagagtagttcatattgctattggatctaaagaaacatatttccaaaagttcataatgttcatgcttagactgaaatttatcttctgtgtattatgattagtaaaactactgttgtcaaaatatgcatgaactgacgactgatgctaattattagctagtcaatctactttgtggggatgaatatatttcttttctcatagatataatggcttgattttattataattcaaaaaagaagaggctg

SEQ ID NO: 9285 - DNA, 611 bp, Gossypium hirsutum
  misc_feature (603)..(605): n is a, c, g, or t
  misc_feature (607)..(607): n is a, c, g, or t
aggcatttcgatacgatccttatttagggaagttgtttttggaggaatacgatcataaaggaatgagggaaacacgaaggagagcgatagagaaggcgaagagcgctaaaagttgggggatcgtgttgggtacattggggaggcaaggcaatccgaaggttttagagaggttagaagggaaaatgaaggagaaaggatatgattatacagtcattttgatgtcggaaattagtccggttcggattgctttgtttgaagatgcagtggatgcttgggttcaaattgcttgtcctcggctttccattgattggggtgatgcatttttaaagcctttgctgactacatttgaggcagagattgctcttggggagatatctgggtggtgggagaaagacggttttggttcttgtggaaatggattgagttgcagggagagtaaatcttgttgtggtgatggtaatggaatgaaggattttcatggcgattatcccatggattattatgcacaagacggcggggaatggaattcctcttatgtgaaaaagtcagttcgtccggtgaggagaaacattgcaccttcctccggcaatgctgctgccattnnntngctg

SEQ ID NO: 9286 - DNA, 528 bp, Gossypium hirsutum
tgcggttagtgtaaaacggcagtggtggtgagattagatattgtaacgatactttagcgtgagacaaaaagtaagctaaacgcaccgcaccgcaccaaatcgttcatccaaacccaccattagaaaacatagttattgaaaactctctcgatatatatatatagcatattagcatgtgaagaatagtggtgacctgaaggttgatttatctgctgctgctggttatggttcatcttcgaatctagctcgaacaagcgggaaacaaagatatgggttttcaagaaatgagaagaaagtaatttctatggaggaaactgggatatcgtatgtgtatatatatgtgaaagggaagagaagagcgcaaagggtataagataaatatcggagggttttccaaagcgacgtttcctctttggaattgccgtcggcggccggcaccgcgccggctggacgggtgggtggtggtgataacatgcgaccaaacgtccatttacacgtctccctcccaggggctttattttaattata

SEQ ID NO: 9287 - DNA, 360 bp, Gossypium hirsutum
gcatttatatacttttttcctttagtcataaattcctatgttgttccacaaaacagtatcaagatagtagtaaaaactgtatactgattgataactttgtttctttattttaggtcaacagttttttatgtgattcctctaattccttgccttacacactctgtctattttggtggggctcttgttcaattttttattgagaagattggtatgatgggttctcttccacctccttacggttagtttttctggacgttgatacttcatagttcatagataatttcgcttccacaagatttgtatggatctgacagaaggacttggcttaatgggaattttcctcatatgcttgctgattta

SEQ ID NO: 9288 - DNA, 654 bp, Gossypium hirsutum
gaatagatggttcatccccaatattaaataagaaattgcataaattttaatattaaatgttaagcataaatctttgcatttttaaccaatttcatacatgatgtcctattcatacaattatcatgtaataaggtgatcatgtcggaatgttaccagcattgaaagccaagtcggaagtgactggatcctaagattcagacacagcatccactgccgaagttgtgttaccattgccgccaatgataacactattcatactgctagtgaagtcgtatacatggcccattttagctcgtttggtcgccaagtaccgcttgttgtcctttgtaataggtgatagtagtggaacccgacctgcaattgctaatccgtaacccttaagtccactgtatttagcaggattgttcgtcataagcttcattgttcgcacacccagatccctaagtatctgaaagaaagaatcgaaggttagagttagacaaacttcgttgtaaagtacaaaggaaacagaaagatgaaccagtcatttggggaaagctaaagcctttaagcaagccgcgatcctttacacgaatgtaagatatgggtatttcaagagaaatggaaagacggagctactcggagtggaaaattattaccaatgtaccaacaaat

SEQ ID NO: 9289 - DNA, 627 bp, Gossypium hirsutum
tcgcagaagattgtattatatcaaaccataaatcaagacgactaaactactagcaagctactaaaggctaaattgtaaaatgtgcatgatgatcactaaactaactataaatacgaataaggcaagtgcacctatcgaacaatagtatagtcatagtgagtagagaatatcgtatccacgaggactaaaagtactagtaattactgtttttctattatttaattgataaattgaagtgattgttattaatctaaaattactaatctaatttaactacgaatgtaatagagaatgaaatgggaaaataatagaagataaccaaagagaaagataatacctaggaaagaatcaagataaccaaagagaaagataatacctaggaaagaatccacctagacttcacctattattctgaatttgaattaaacgatttattcacttctgtcttgatccatagaaatccctaaattatgttaatatctctttcgggagtaagaacaattgactctaggtttgttcattgaaatctctttctaattaaaacccctattgtcacattaactcgatctatagattcccctattagattttactctaatctgatagatttatttcgtcttatttcta

SEQ ID NO: 9290 - DNA, 605 bp, Gossypium hirsutum
ctggatccttgccggctctttcgatattgcatccaaaatgctcttcttcctctcactcttccttttcatgtcactggtaattaattacccatgggccataatttactgtcaactcagatattgtgatctaaataaattgacatggtactgtttgttgttgagacaggtttgcaggccgacattgtttaaggtatcgatgaaaaagttcaatgtggcgtggtgggcatactcctttcccttgtctgtgctggctttggcttcaatggaatacgctgaggaagtcaaaggcagcaccccacatcttctaatgcttcttcttttaacattctctgtcttcgtctccatttgtttggtagttttcgcactgctcaactccaaaatactactgttcttacctcaatgttttgatccgatttcaagtttgatttcgcgtgccatgtgttccacaccggagcaaaatcaacaacggccacaaactgtttaattaattggatgataagtgtgcaaacaggacatgaaaatcatggtcgatgaaactgaacttttatgtttagtaaagacttgatattttcagttaaattaatgtatgtgctgtgttcgatgat

SEQ ID NO: 9291 - DNA, 551 bp, Gossypium hirsutum
gaatcgtaaagggttcaatctgagcaccaacatgcttatctttgacctataaaatcgaggatttggagccggaatgaattcccactgttgagtacttggtttacaaatataaaaccagttttctccatatattctcgggctacataaaaccaaaccttcattgaccgctgctacaatctgagcttgttcgggtaaaaaattaagaacattccgagttagttttggctcgagccctgaattggctattgacacaaagttggaagtaaatcgatctctccaaccgtaaacaaagattttcatacattgaagtaaatatcccaccattgttgatgtcctttgagaatgtggccggataaaggtagattcgtaagtgagatccttgcactctttcgaaaggaccctacactttttcattgttttcaaatcagccctcgagaaaatttctaataaaacatcgttgctaaaatcataagacgccatcaatctattggtcaaaataaagaaataaagaaataagcaaaaaagaatatgcagtcagttgaaagtgaaga

SEQ ID NO: 9292 - DNA, 637 bp, Gossypium hirsutum
tccttcaagttggctattgtgtatataaccaaaggaaaaagagacgtcgccctattatctgcaaaaagattatttctactcctgcggcatgatataagtttatggggacctaagaccagccgccctattatctttttgttcacttctattcttctacgtggtattgctgatgaagtttgatgttggtgttgtgtaattttatgagtatatttttttcattattatgtagagatatttattcatccaatgtcatgaaagggacttgttactgttcttttttgagtacatattttattttgttttagttgatcattcatatgagattggaataagtttgggttccaatttccaaagataatttcttaatgatgttgtgaaatctagtctctgattctcattttatgtttgatcattgcatgcattttttaaaaaagacaatgtgccaacctaatttgccttggatgatctaaaaacctttccgcgggtggattactaataaagatacgcgtattttattatattttaatgtcacaattgtgtttgaagtgataactcagtaataattcggttttttcttttctttttaaacaagaatgtaaatgtttaatcataacattttgtttgtgaggctttctgg

SEQ ID NO: 9293 - DNA, 426 bp, Gossypium hirsutum
tactgcgattaaaattccatcacagcattggctggagcacgcgttttaagtaccatttcctcatactccttttccggatctgatagggcaacgatggcccctcctgcacctatagttgcttcattttcatgtatgacaactgttcttatcacaatattaagatcaaatgtctgattataggaaaagaatccaatggagcctgagtatataccccgggagcagctctcgatggaatctaaaagttccattgatctcaacttcggggctcccgtcattgaaccgccaggaaatgctgccttaacgcactcaacagcgctaacatttgactgctttttcccccggattgtactcaccatagtatgaacagttgcgtaagattccacctccatgagatgtggcacatgaacggtgcccggttcacagaca

SEQ ID NO: 9294 - DNA, 623 bp, Gossypium hirsutum
tttagctcgcagacattttgaccaagccattggctgccacaaggttcgagtatctgaggaaggaaattggagcctgctactttgtagccaatgaggagtgttgaaagttggcaacaatgcagcagcatgcatgcaacatgcaaatgtccatggtggatttcagtcattgaacttttgtaacatgtgacttatgtttgatttgattgtaactttttgttttgctgaggttcagccatgtacttagcagatttagtaggttctatgttatcattaagctgattttacagcttggttatttgcacaagcaatgtttattttcttccaatgtaatagaactatttatgtatatgttatgttacttattcaagtaatgagataagtcatcttcttctctcaatccaacatacgatttttgcttctatttttcatcttttaaacacaaattctttgttttgattcttgtttaatgatttaaatgcaacagatattttatttagcaaattcaagaacgattgatgttttaatttgcaggcatttgtgaattcaagaaaaagatttgatgttgttatacctggaaatgaaatcccataatggttcagccaacagagaggcggctctgtaat

SEQ ID NO: 9295 - DNA, 614 bp, Gossypium hirsutum
gagtcttatgtgacacctaaggacttcccacagggatacctcttgtggcaaaacttgcaaacaaacttcttctcttgagtttgttccatttaagattctaaattttcaaaaggaagatcactgaagaaaatagaaaaaaaaagaatacccagtaaatgaaacgagattagtagcttatttcttacctccaatattcaaacaattttcatgatgtttgatatgaccaaaaacacatctttcaatggtgaagaagcaaaatccagatcaaggaggcaatgaaaacagatcacaaagtttcttgcttttgaacttgagatgtgacagttccttggttcaagaataacaaaaaacaaaccaatcaaaagttctaatgattattgaattttttttttaaaaaaaaaatcaaaagtaaatcagaaaaggaaaaagattaaacgagatgggtcgctaacggtggcgatgaagaggcctataagatgaacaatgaaataaaaaaagccatgactgtttcttttctccttggtttttgtgttgtagttgaaggagaattccatgcatgaaagcaaaaagattcaaaaaagtaaagaaaagataaaagcatcccgggtagtcaa

SEQ ID NO: 9296 - DNA, 648 bp, Gossypium hirsutum
cacttaaatctcgccctcaatatttcaacaaatatggacaaaattaaacagtttgttccaattatatgtcaaccgattctaatttaaaaccaaataaaataaaaaataattactatatatcttggcctacaaacaaaatcaagaagtcaatatgaaggttaactaaacaatttcatccaatttgggacagctacgtgtaaaatcaattatcaatcgatttggtcgattttgacctcaaaagtaagcacatagacatacttgtctttgacaaagttctgattgatgttaatttgtatgagtttagtgtgtgaacaatggataattcatgcctcggtttttcttaaactgatcttctttcattaattaaatatgcttcttaaaggcaagaaaaagaaaatcatatatttcaccaattgtttcaacgtaaaagtttttacggaaaaatatttttaatttttttttatgttcatttcatataaaataagatgttcaacgtaaaagattttttagtcaacgtaaaattacctatttattttgttaaaatgtcttaccaaattttgttcgtaagatattttccaaactgataagactttatttattataacacccctatacctgatccgaacaataagccaaagcaccgggatg

SEQ ID NO: 9297 - DNA, 499 bp, Gossypium hirsutum
aatatggtgcctcaatgctcttatataggagttacagagctgctaccaatttgtattaaaacacctgtagatgggaataatatgatttggaggcctcaagtaaaactacaactgacagaattagaagaggggatgaataagtagaagaaatgatctacaataagaaagctgaaaaggtgaataaacgtaacagcaaactggaaaataattcaaatttaatcaagaagacaagttggaaaagaatagcttcaatggccatgatgaacagaagaaaagagggttatattatgaagaagaggaaatccccagaagaaggaaacgaaacttgctgtacaggaatttcgtacaaaaatagagcaaaaagatcgaaacatggaaaaatagaggttcaaggtgaagctacctcaggtgtggtgattgaaaacatggaccagagtaatgttccaaactttataggatcgacagctttcaaaaggcaagccgaccggacacaatgaaa

SEQ ID NO: 9298 - DNA, 642 bp, Gossypium hirsutum
actctagttggaggtacgcgtttcaaagttgatcagaaacgtctcgaatcagaaccatgccaggttagcctatgttttaggcttggcaattcttttagcattgtaaatgtttctagaatcttctgcatcctaatattagaagataagccttttccaattttccgggttaaaactttcctcagataattgttgcaacacctgggagattgctggatcatgttgagaacaagtctaccttgtctgtgcgattgatgggtttgaaaatgcttatacttgatgaatctgaccacttattagacttgggatttcggaaagatgttgagaaaattgttgattgtttgccccgtcaaaggcagtcattgttgttttctgcaacaattccaaaagaggttggattgctcatcaaccttattttttgttgtagacaaggctgatttccttatatgaatcaactcagatctaaattgtgcttgattatgcaggttcgtcgtatatctcagcttgttttgaagagggaacatgctttcattgatacagtgggtctaggctgtgtagaaactcatgacaaggtatgaatgggaataattgcacacatttactttaaggaaatacaatcagcttcatgcttctttgtaaacaacg

SEQ ID NO: 9299 - DNA, 625 bp, Gossypium hirsutum
ttttcaaaccatttttgggccatctaccattcaaattccaaactaaaggcttgtattgttgctttagcttttatgtcttgttgtccaaattgttaatggaagaggaatgtgggttttgttactaggaaaattgtaattttaataatattttaacaagtagatattgcatgttaaggaagtctgcgggaattatattattgcaataattaagcctatcattaatcttgaaatgttagaaattccgtatcgatggtagtggtttttgagaaaaagtttcccatgttagtttcttcaaaaattttctggagaggacctatctactttcgctccaaaatcctaaatctctttcatgaattttcataaactctatagtatcttaaaatatttttgtacataaaagaactttcagagttattttaatatgctcgataattgaaagtaatatatattttaaatcaattctatcgtatatggatttcaatagaaatattttttttttcttcttctttgttttatagaaaagatagaccacaaggtttgtataagataatgaattgttggtttgagagtgttactctgggcctttagaaaatgcatcttaacgatgatgacatcaactacctag

SEQ ID NO: 9300 - DNA, 463 bp, Gossypium hirsutum
tctctttcctgtcccttaagaaaggctgcctgcgtcccctcccctcgaaggagaggatgcaaatatctttggttttagttggaaattgagtctatgaagacattccttgcagttcaatctgaactgtttttgttggttatgtaattaaggatgacttgttgtgtctattctaaatttgcaggtgcttacggcaggagccatggaaccataatgcccgatacttgcttatccttaatcttttacagaaagcacgtgaagagagatttcctgtaaacatctgtattgttcttgagcgtctcataagtgtggctctttctaatgagttctattctggaaaagaagccatttgtcaatatcagaagtttcagatttatttatgtgcttctgaaattcttttgcaaagggggaatataatgggctgtattgaccaagccaaaaatgcttcagcactttctcttccgga

SEQ ID NO: 9301 - DNA, 531 bp, Gossypium hirsutum
attgattagaataacgaaataaatcaaatgtaaagagaaaataaactgaaatacttgaatagtataaataaactcttgaatcaaaattgattccaagaggaaaaataaaagagttttgaaaagctgaaagaaaattaatctaatcctactcctaaactactaaggtttttgaaggcatctaggatgactttatcaaacccctaatctcttatttatagaaatgttggtagccaaaattagttcttcagaaagtcttaggtcttcgtataaaattaattgtgcagacgaaaataacctcattattcttgggtagcacatcgacctatattgcgccgcaaaatgtctatggtgtgacacaacatgcaaaatatgccttctgtcgttcattttttgctttgacatcccgaaaagcttgtgcatcattctctcttgcttccacatcaattgggctttatattttcatcctacacactcaattaaacatatttgcacaacttgatgccagtgtcgtcctattgggtcacaacaatt

SEQ ID NO: 9302 - DNA, 511 bp, Gossypium hirsutum
aagaaaaagagtggttagatatagcttaactccccaaaaatagaatagtaggtaactaggaagagcgtggagaagaatcggaagaaaaatttatataatgttaaaaccctgctacaagtgaacacttaagtatacatggtcgttttcaagttaccttggagagaacaccgagtccagaacaaggggcatccaacaaaactttaccagatttcattggactactttcctacaaattttagaaaagggatagatgtaagaaatttctgattagctgaaaattttaagcttttaaaagagcaagaaattacagcaaaagtacgaagatcggcatggattgtgtcaacaacaccatcaactttttgcaacttggctgtctctttaagaattctcaaacggcctttgtttatgtcaattgcatgcactttgcctgatatacaaacgaggtttcacaacattgatttaaagaaaatttgcttgctcattccaataccaacactcattccaataccaa

SEQ ID NO: 9303 - DNA, 426 bp, Gossypium hirsutum
ctagctgcctctggcagttctgttgttgaaaagagaatgaagtctccatctgaattaccagctgtgcatatgaaagattctttaccaaatgtggttatggaagctggagctttagctgatgaaagtcatcatgcggcagatgattcttcaacattgaagggtactaaatctacagttccaactgcaaatactgggcttgcaccttcattgtctttggaaaataaacctgttccaaaatctaaaggaggaacctcaaaatcttctaagacacctgaacaagatgcaggaaataaacccactccaaaggccaaaagcagcacttctatgtcttctaagtcaattgattactgtgctggaattccagcacagtaatcaattgacttagaagacatagaagtgctgcttttggcctttggagtgggttta

SEQ ID NO: 9304 - DNA, 549 bp, Gossypium hirsutum
tgtgttgtatgtcaaatcacctcaaaataaataaaaatttatgtatgttcattttgctggtgtggcatacatgtagatgccatgtcagtaattaattaattttttaaaattaaaaaatcaaaaaaataaaattactaaaattatttaaaaagcataaaaaatattttttagtttttaaaaattaattgataatgtgacatacatgtggattgtcacatagtccatgtaaattcacattagcaaaatgagcaaagctagctttccatccattttaattaatttgacaagtaacacaaatttaatggttaaaaaagtaaaaaatttaaaatgacttttttgtaaagaggtatataatgcaagtcaatgtaaatccaacatggtttttagtgttagtactccactggatgttcaactaaatatgggggacatgttcggggtctctgttgcgaagaatccaggcacatatttggggatcccaagcctatgggggaagactagaatgaatgctctaagctatgtaaaggaaaggcccattagcaagctcaaaaa

SEQ ID NO: 9305 - DNA, 773 bp, Gossypium hirsutum
  misc_feature (245)..(245): n is a, c, g, or t
  misc_feature (383)..(383): n is a, c, g, or t
  misc_feature (516)..(516): n is a, c, g, or t
tgctcaattcggataattcttttaataatttaaaccatttaaatgatggtgattattattttaaaatagatattttatttaaatttgttgtatataaacatgaatgtatttttaatttattaaggtataataatttttttaattttttaattttataaaaaaaattattttagctttttatttaatattttttctcttttaattcttaaatctgtgttgtatgtcaaatcacctcaaaataaatnaaaatttatgtatgttcattttgctggtgtggcatacacgtagatgccatgtcagtaattaattaattttttaaaattaaaaaatcaaaaaaataaaattactaaaattatttaaaaagcataaaaaatattttttantttttaaaaattaattgataatgtgacatacatgtggattgtcacatagtccatgtaaattcacattagcaaaatgagcaaagctagctttccatccattttaattaatttgacaagtaacacaaatttaatngttaaaaaagtaaaaaatttaaaatgacttttttgtaaagaggtatataatgcaagtcaatgtaaatccaacatggtttttagtgttagtactccactggatgttcaactaaatatgggggacatgttcggggtctctgttgcgaagaatccaggcacatatttggggatcccaagcctatgggggaagactagaatgaatgctctaagctatgtaaaggaaaggcccattagcaagctcaaaaatcggttgccagt

SEQ ID NO: 9306 - DNA, 508 bp, Gossypium hirsutum
  misc_feature (452)..(455): n is a, c, g, or t
  misc_feature (483)..(485): n is a, c, g, or t
tcttggtaaacgagatcacagtttgttgttttccaggcacccttggatctttctttgggttggctccatcagtttctcctacaatgtagtttaatccaggaagaccttgcatgattatagtattgttaacaccattcaactccaaggcacttccattgaaggaatacatcttttgaaaccctcgggtcgctttatccatttgtaccgcagcaaaccaatcggggaaggcagtttcatcccagttgaatatcgtgatcctagcactccaccctcgggagtagtcagtaagaacatgccagttcatgctgacaccacaattgtcaccacatggcattggatttggcactgttcggtgtttaagatcagcccaagcttgggccatagcagttcggttctcaaaaggaaagagaagtgcctcgggtggaagaagaactgctggagctgttgtacannnnttggatgaagcgacccgagggtttcaannnatgtattccttcaatggaagtgc

SEQ ID NO: 9307 - DNA, 446 bp, Gossypium hirsutum
  misc_feature (364)..(365): n is a, c, g, or t
  misc_feature (367)..(368): n is a, c, g, or t
  misc_feature (374)..(376): n is a, c, g, or t
tgtcagcgctttagttgtgcctcgatcaattcttttctatttggctttgcgatttgggttacgtgaagagtgatattttatagatttattcaatttctttgatttgttattgctattttgaacattcctatcattttggtgcctatatggcttttacatacgccttaaatttatttgaacatgcttgttcttgtccaatgaatgtggatggtcaacgtaaaggttgtggagggttaatttctttttcaaaatttagaataatttttctccatttgacattttatatgtttgattctgataatatattctttagaataaggttttggtagaggaagaaaattgatgcactcattgaccaaattanntnnatttgnnngcgttctacctcattacatgtgattagttgtcggataaggagttggtatcttttgccaaagtacctggtt

SEQ ID NO: 9308 - DNA, 580 bp, Gossypium hirsutum
tggagaaatgggaggtaaaggctgcaaaggcgatgttcagtctaaccgttgcgatagaggacgaatacttgcagcagcagcatatacgggatgccgagactctgaaggaagcgtgggatactctagcaacattgttcacaaagacaaatgaggcaaagttacaagccttgcataatgagttaatgaaattgcaaaattgcctctggaagaaatgcccaacgaggccagattgcaaagaataataattcacggtttgaacacaaataaataagaatctggtacaagtgcttatacaagcaaagactgatttgcctagcctggccggccttattcccctacaatatcaattttttacagcattgctgctcccattgaacctcaaaattagttagtatttgtgtactctatggcttatatatggtaaacacgatatatacatgctttaatattgtcatcatttctgtatcaaaacaatggatgaggagaccatttgaaatttgcaggtcgatatcaagctcaacgagtacttaagcgaatgaacaaaacggtgaagaagatgatgatatggaggatgggagat

SEQ ID NO: 9309 - DNA, 612 bp, Gossypium hirsutum
catggtattaccaaatcaggtatgaccaaatcagctgcaacattaaatcaacgaaattgcaaaaaaagggaaaaaaaagagtctaatagctgatactgtaatatgaactttcaggatatacaaagatcccaaaagaagcataggtcccattaaaagggtaggctaaggtgtttggaggttcaactttcaaatccgcccttcttcatgcatgtggtgtgttgtgtcactaattatagggaaaagtaaagggcatggagttattatatgcacctcaaccagattttgtatctgagaaactcttttctgaacagattctcgcgtactaccatcactaactatgtaggtagaatccttggttatcacaaccttagtagcagtacccagaacttccttcccaaccctatctagtgttatacccatgtcatctctgatcacagtgcctgaaataaaagaaacatacaagtctacaatgaataacataaagtactgaaataagcagaagtttctatatagagaaggatacacttttattttctcaatgaagtgattttattaagattcatatagaatgaaataaggttcaagacaagaaaaggcgcctgcaataaggtc

SEQ ID NO: 9310 - DNA, 640 bp, Gossypium hirsutum
atgtctctcgtgctctgttgagtgtcatatggatatgtatctgacaaggattcattcaattttttcttagtttgtccttgtagttgcatggtcacatccccatacacatatccgaaaatgagtataatacagatacttaggaaaaaaactgaagagtccgaacgacataacgtaaaaaaactgcaataaactcgcatcatttatacatactatggatatgggaaatagttgtagaccttcttgttgagaatgttgaagattacatttaaaaagtacctgcatacatagattgagagagaaccatgaaaatcaataaaaaaagcaccattttagccagataaaaagggtgtcaattttaatttgttgaagcattttatcatattgctttgggacataagaggcaggggaaggagcttaactctttcagtcaagaacccaccatgaaataccagataattcatggggagcaaaagcaaaaattatggttcattcattcatccttgtatgaactcaaaattaatcaaatcccagattttggtttctgaattttaattacatttagatgcatacgcacatacatacaatttccgcttttcaaagaacaaggatggattttctaggatagcttaccacataaaga

SEQ ID NO: 9311 - DNA, 408 bp, Gossypium hirsutum
cttatattttatacaatacatgttatattaggtataaaaaaattattttttaggtaccgtgtaccaaatggtcgaaacccattttcattttttttttacaggcataatggtgaccgacactcatcttcaaaatttttgaaaaaaaacaatgcatcataaataaataatgggaaaagaaaaccatatagcatttttcacaagtacaatagaagcttctctttgaaagtaagcaattatttctgacatcttacagttccttgccaattaatagcttaccttatttgcttattttagaagtacaataacagaaattccaccttatctggaaaaccaaggaaacaatttgaaacaagagattgaatgaaatcaaagcacaatcttgtaagccttcgtcttatcaatccaaga

SEQ ID NO: 9312 - DNA, 610 bp, Gossypium hirsutum
gagattgaacaaactcccctcagatttttcaacggagttcaagcctccagtgtagtgagttaataaacttttagccttactttttaccatgtttttttttatccgaaggtgttagaagtgtttaaataactattagttaaaatatgttctaagtctttgtactatttaaaattttgtcctttaatttttatttctaagaatttagtttttttttggagttaaaaatcctgatccaattgtttacattattaaaattattccattaaattcgatggtgtgattttttgaaataaaaaattactcacttgatagtcctataataaaaaaaaggatgttgtaatacatcgaaatttaacaaaaaaaattaacaatattaacaaattctcttgcatttttaaataaaaaaaagtaaaaggggttaaatttataaaaataaaaataaaaaaactaaatttcaaatgtataaaaagtatagggacttgaagcattttttaacctaaaatacacaataaataattacatccataataacaataaagacaaaaaagtattataatatttataattattttattagcaatatacaaagtcaaaaggtacagggatttgg

SEQ ID NO: 9313 - DNA, 505 bp, Gossypium hirsutum
gaataacatcctttaatggccgaggtgtctcttcaaccttcccagcaaggaacatgcacacagtagcaatggtctgtcaagcatggaaatgaagttaggcaggtgatgataaaaaatgttaagactcactgctctctttcttattaaaaatctacatcagaaatagaatgattggttaagttgacaaaaggaattatgttaaaagctaatattataacacttttcacccctcaaccattctaatataccaatcaacactatgtcatccaaaagaattgctaagtgaataaaaattcataatgaaatagaatcgaaagacaaagacagcttagatttctaaaacgaaacacatgctatctagaaaataaagaagttttaacaagattaaccagacaatgataatgataactcacccttctatcattctttgcatgtgattgtcgaataaaaaaccgatgacaaaagataattgccgtagctattgttacctgaggcctatatatca

SEQ ID NO: 9314 - DNA, 417 bp, Gossypium hirsutum
ttttgtttaacattgtaacaatttgttgtatttgtactattaattaaatagatgattgagtttggtatcaaaattcaagtgatatcaattcaatcattaaagtgattaaaaaaaacttaatactttgtggatcaattagggtttttttttcacggaaataatataaaaataataattaattaaaaaaatgggccaggaaaattggctgttttgaacagttttcgcagttgccaattgacacaccagcagcatcaccctccttttctctcaatcatcagccaatttttgattttaaaatcttttttgttgtcattgtattaggtgaaattggttttttttttaaattcccaaaaaaatataaatgtacaaggtaactaaaaaaattgttttttaatggggccgtcagtttgtaaaaaa

SEQ ID NO: 9315 - DNA, 468 bp, Gossypium hirsutum
cttttgcttctatgacggatgtgcgtgaggctgatcctaaagaagttatgtatgctgagaggttgacaaaaatcaaaggaattttgtctggagagacctcaatacagttgactttacagttcttgtacagtcataacaagtgaggcattgatttcttttgtaccatcttttggtggaaataaattcatatcatgtttctttgtgatgcatacaagatattaactggttactcttcatcttagatcggatctattaattttgaagaccataaaacaatctgttgaaatgaggaatagcgtttgtcacagtgctacaatctatgcaaatgctataatgcatgctggaacaactgtggatacattcctgagggacaatctggtaaaacattcatcttgctgtttcttttttgctcttttagactttatacttactattactattctgatcattaggactggctgagtaggg

SEQ ID NO: 9316 - DNA, 678 bp, Gossypium hirsutum
gcaagtaaattcatcaattattactactcttttcatttgtgaatgtacttccttttttttattggttattgtttgattttgttgaggattactgaaacttgagtgtaaggttaaaggactggattggtagagatttaggaaactgttctgcaagtaaacctgtcaattagtggtgatggaatacattttaaactatcaatgcatatagttaaaataaaagtattctaatcaaatacaaatatatataattaggcaataattcaaggagcgaaagttacattcaatagaaatttcaaaagacacaatacaatcataaattaatcacaaaataacacttaaaataacaatgaaagaatgtcaaaacattcaataattaacgatagcgtttcaatttaacaattaaattcatttaacaatttttgctcaaataacacaaggaaagacatttggactgtgtccaaccgaacaccaaacaatcgatgaaaatggcataagcgccaacaatgacaatactctgttgcatgataaacgtgacttaatcaataaccaaccatcacactaaatgcgcaaagtgcaacaataacaatattcctagatggtcaaagcagtctaaacaatgaacaataagtaaatgtccaaacatttaataaattattaaaatagtccatacaggctaca

SEQ ID NO: 9317 - DNA, 482 bp, Gossypium hirsutum
tgattttgtatacagcagtctatgtagctttgacacttcatttttcttagtattcatatgcgatagtcatgtccaacacacatttggacatgagaatagggacatgatctaccaaatatatagaaaaacttaaaaaagaatagaacactctcgtgttggacacatacaggcatccaacactaatgctgaagactgagttatatagccagcaaatgccaattgattggctgctttagccattacattttataattaaattggttttctgtgtttagaccagaatcctgctgtattttcctttgcttcatattctattcatgttctttttgcttttgccctaccataaaagcctagctcataatcagaagaaaagctaaactttactatttttttccttctttgaattttaaaagttcatagtagattgatcgcacttcggcttctttttcgttacagctgatgggcttgtattaatggacaaa

SEQ ID NO: 9318 - DNA, 461 bp, Gossypium hirsutum
ctctatgttgcttctaccaacgatatgaaatggctgctttccatctacatgccccaaagttgctcgacgtcgacgtacgagaaaccagttaaggttaaggtgtggtcttgcatcgccgccgtcaaaatggggcgtgcattggaagatcgcgtccgggcggtgaaacaactggcatcacttgctgagcaaaacgatgagtataagaacattatttatgaagaagacggggtaccgtctttacaaaagcttttaaaagagaagatatctttggatgctcaaatcatgactgtcaaaacactttgccttttagctaacgaggaggaaaagaaaagggttattatgaaggaaatggtttctacaatcttaagtcgtttatcaagaacatcagcgatttctgatcaaattcaagcagccaatttggttaccggcattgcagagcataacccagaattgaaggaata

SEQ ID NO: 9319 - DNA, 470 bp, Gossypium hirsutum
agatgcgacagctataaaactcaaagaacctggaataagtgacatattttcttcgacagacagctctctacttggcaagctgaaaggtgaatctacagtgcagaagccagatgctgacttgtttcagagaaatattggtatgtgcatatttgggtgtattttactgctaaaccatccttttcacatttgattttaactccttaaattgtttcttttaaactggaaaaggattgatttctcacttgtatcgactcatatacttgattgtcgtggtgcaatgtattgcatgttagattcgctgaagtttctaattatctgcatcttctgccattgcaatatgaagcaggtgacaatgacataaaggatattgaaactgggttactcgagccattattacatcccagtgtggaagtgccaccttcgtctcaaacaataacagaaactgaatatagaggtactgatgctggtga

SEQ ID NO: 9320 - DNA, 191 bp, Gossypium hirsutum
gctgcaatgtatcatattagatcggtcaacttctaaaactcaagaagccaaaacaatccataaactgaatctaggttcaacagggtgctactatgtttgtgattaaagtttgatcaagaagaaacccaagtctgtttcgttttatctctggttctaacgatttccatagcagataccaaaaggtcaaaaaa

SEQ ID NO: 9321 - DNA, 495 bp, Gossypium hirsutum
atgagctctctacccgggctccgcccccgtttaagtgaaagtaaacgctacgccttcgtgagttaactcgttcctccgcacaggctagtgaatactttcgggttacatatgacttatgctttcgtgagttaacttgtccctctgcataggcataagtaaatgtaatccctcgaattgaactcgtgagtctgtgatgggctatgaccgaggcttcgtactaatcttagcagatgacagtatggacaattcgagtacctatctagaaccaaaaccgcatataataaaccatacgagccacctaactagagccatgccgaacctccgtccgtttagtagtcaccaaaataagtgcacgggaggaacgcctcttgccttttgcattttcactttctatacaaaggggattgggtctatttaataaactagatttgggtagtttgattcgttaaattttccatattttttctgtctgtatttaattactaatcaagggtg

SEQ ID NO: 9322 - DNA, 630 bp, Gossypium hirsutum
ccctataatctgctactaagatcatattcaaaattcaattttccacaggaaccatatttgatggtgctagattagaaagagaaaatgaaaataactttattaaatctaaatgataccttgaaaaacgaaaatcactttattaaatctaaatgataacttgaaaattcttttaaagaaaagttgtcaatttgtctttacaggaacaaatattcaagttcaatgcatatttcatatgctcaaatggcaacgctgaaaccataagtacagcaatcttattttgcgttcatacttttttatttggattattcctagaattaaaataatactaagaagagtcaacaagtaaacaagttgaagagctaagctttacagagaattgattagccataacaggtgaagagtcgcaagttccaggaacaatttgccattgtctgaactcgcctctgaaacccctggatatactcccactcctgcaacacaaattgccacaatcagatgcataaaaccttccagcagtacaaaccaaaccatttagctgaaccacataaataccccattcctcccaatggaactccttgagatgcagatggcttgcaactttcacgggtgaaagggtcaataggtgctttc

SEQ ID NO: 9323 - DNA, 599 bp, Gossypium hirsutum
  misc_feature (593)..(593): n is a, c, g, or t
caggtagtaccattcacccaagtgtaactgcaactcatcaatagtacaaacatggtctttaggagtattaatgggtgcaaccttccatgatcctttcaagcgttgatcattaacagcctttgatagtgaatcactttctgctgatgatttcttgacatcactagttgtcgagtgtgaccgggaagatcttgaacagtgtctctccttcactcgagtttttgtgcgaggtgcagatacaaatgaaccctgatcctgaaccacacatgcatttatcctgactactggaagcatggttcccttcactcctctcacagcagaaggcttaatttgattcgatctactaatatcattgcaatcatttctctcttcagcaattgagaaggcccaaggagggaggtcaagccttttgctatgagaaggatagtacagatcatctttcatatgccagcgagggtcctcatacccagactttggcataaggcataaagggtaaccatcattaagaacaagttttttcctcgaagatctatcctgagtagcttcctcattcctcttccagtccccacccttgcatgaccatcgaccagaagacnagtcac

SEQ ID NO: 9324 - DNA, 658 bp, Gossypium hirsutum
gtgaaccctttgctgttgctttcccgtgttcttcttgaccttcttcctttccactctttcctttggctttagtggtgctgaaggtgtttccatagttgtgccagtaattggtgcaatttctgcaacaccaaatggttgagtctgttgatgagaggcagatggtgggggttgagtagaacttggaggttgggacctttcttgtatagctgttggagaatcttttggtgcagacacgtctcgaagtgatggagaagagggttgtggagatgtttgctgagaggccaaacgggatgaagattgttgcttggagactgcctgcgctattgattgaggctgagaaaccatgcgagatggagatgggggcacagagatagcccttgctggtgaccacgtttgagaggtagcctgagtttgaactgttccatgagatgctgataccggccgagacatcccttgcttgtctgttactctacgagatgctgatggtggaactgaagaacctctgattttatgtcgaggcgttgatgttggccgtgaagtagctggacgtgatgttgcatctggctggggttctgtcttttgccctggcactcgagcctgcgtaggagcagtctgtactggtgcgatccctggaggccgaaatggtggctgttggata

SEQ ID NO: 9325 - DNA, 369 bp, Gossypium hirsutum
ccatctcaaactccgattttgacgaaggagataaggactccgatggcacatttttagaggtaaacccctcaccttctttttttattttctcatgcaaaagaactacataaaagaccaaagagaaaaaacaaactgaaaagaaaagaaatggaaaccgagatcaccttccaataattctttttggttgctttttttatttctatttagtatgcgtaagtaatcttttatagtatacaatcggcctccttttatagccgaatagagatcataaattaaaaatacaaatttttatttttctaccgttggcttgttgtagtctgtttctcttttttttctcgcaagttcgactgacgtatagatggccgtacg

SEQ ID NO: 9326 - DNA, 593 bp, Gossypium hirsutum
tatactccggtcaaatgttccaacatctcaatcgtgatcttttttccttttacacctttactcttattttttctccattttactttgttcttcattttatcttctatttcaataattttattaatttaaaataataaacagtttccccattattttataacaaacaaactaatatacgttattatcaaaagaaattttaatttaccattccttaaattaactacttttagattatttattttaatttttaaaatttaattattttgatttaaaaatgttaaaaattcccattttatataataaaatatcaaagatacattttaatattttattaaatgaatttataaattcacatatttttaataattttattaaagtaaaataatttaaaaaaacttctattatatattatttctaacctaatgtccttaatagtcattttctgttcttatcttatcgctacagctgcatttaaatctaaacacacatcccaccgttattttaatctcaccactacagtatccaatatcaccactacattaactaatttcaccgccaccattatttttaacctcatcgaaggtaaacacacc

SEQ ID NO: 9327 - DNA, 639 bp, Gossypium hirsutum
atggacatgctagggcccagcttatgggatgtttggaactcttcagggcaagcgtgagtgacatgtcttattaccttgttaacactccatccctgccctgcttcctttttcttatggtttgcttattcagaaatgagagacaacataagaggaagcactttattaagtgaaattttgcttcattcttatttgatagatttacaattgtttttagttttgttcagtagacaggtcgaagaaacaaaaatactccattactgtttaccatttcttctttccactagaaatatattgagagtatatgttcatgcttgggctatctaagttatttagtggttgccagttggggagctatgtttactctcttcacctgttttttgggaggagtggggtggtggctattttaagaataacaaactaatccatccatctaacaaacccaaaacccaatgctaaaaggccatgaacactcatacacaactctaggaagcccttatccttagaatcaatacatgtttggggttttcttcttaacccttcaccgcaaaagaatttttatgcaagttttttttttccaattttatcacgttttatggaacatttggcacctcctaatcctttgtgtaaacgttgaaactg

SEQ ID NO: 9328 - DNA, 556 bp, Gossypium hirsutum
attcactggttatggatggatttaactgggcgcatgtaatcatgatttcaaaattttaaattattgctctttctgttccctactgttagtctctcgtctactttcacaaagttttagaataaggctgaagactttggtttatataatggtaattttttacttttttttaatggcaaaaagttaaaataataaaaattatgaaaaatagttttggaagatatagaaagaggatttaagtcttcaaaaacgaacaacgacatagttttgggacatccaggaaaggaaaggtagacaaatagtgtgacagaggagtataagttttgcttgtatgctcattataagttgctttgtttctaagtccaaaattatttccttgcaacaggaacaaaaggtagttactatatttagcgccccaaattattgttatcgctgtgggaacatggcatcaatcttggaagttgatgattgcaagaatcagtcattcatccaggtttctgtttctgtcctctatgttcccctcctccttttcctttaactatcaatgcatgcccatttg

SEQ ID NO: 9329 - DNA, 425 bp, Gossypium hirsutum
  misc_feature (384)..(385): n is a, c, g, or t
aatgttataagtagaagccgaaaatgcagtggtcgacaggtaaattgataatattacacattgaaagtgagggatagacatgggagtcaaaagaacaatagtaataatattaatgccacaatgtagccaaaagctgagaagttaagaacatactgtcaatgcccaactgattaaccgccgcaacaaacttgcgatgcaactccactgaccaaacaacacgaggtttcttttgggctgatgggtcctcgttatcatggccattctcgtcacgctcgtcgtcctcgtcttcattctggtctttccgctttttgtttaacttcccattgttatcaacattccctatccccgcatcctcgccactgtctggatgaggcttgtatttannaacatttattatcgatgtttcgccgctctgttcagttcta

SEQ ID NO: 9330 - DNA, 661 bp, Gossypium hirsutum
gacaaaggagcagaaaagagaatagttgctaagggaaaagaagaaggtctatttgaaatagaaaagaaccttcattaaaaaaataaaaaacatgcttggaaataaaagccctgccattatcatcaagacgcctataacccttgtgagtagaactgtacccaagaaatgtacacagtttagatttaaactgcaacttatgtttattgtagggtctcaaacaaggataacaaaaacaaccaatgattttcagaagactataatcaagcttaatcttgtatagaatttcatatgaagacttattttgcaacgcaaatgttggcaatcgatttataagatgaatggtagaaacaaatgcataggaacaaaacttgagtggcaagtgagcttaggctagtaaggttaacctcattttgattatgtgaagatgctgcctttcagttatatcattctacttagaagtagaaggataactcactctcttttagatgccagatcgggccaacaaagaagtgagaggcctatattctctaccccaatcactctgaaaggctttgattttagactaaaactgaacttcaacataattttgaaaattttgaaaacattctacaacttgagatttattatttaataggtacaaccatgtaaacctattatgggg

SEQ ID NO: 9331 - DNA, 594 bp, Gossypium hirsutum
  misc_feature (507)..(509): n is a, c, g, or t
  misc_feature (525)..(527): n is a, c, g, or t
  misc_feature (529)..(531): n is a, c, g, or t
  misc_feature (540)..(552): n is a, c, g, or t
tccttcatgtgatttttttgttttaatgttttgtctagaaattgaagcaactttttgtctttctgggttttacgggtttcactgataatattggatacgagtacggggatgtctcagaaacaatgtattcggataccttgtttttgagtgtatatatattgcttgaactttcaagtgagctttttagatgtttagtgtgtagaaatggaagcaaccttgtctttctgggttttaagtgttttatgaaaatatgggatacgggtagtgtaggtattcctatacctgtttttgaggtttctttgttgtagtttcaagtgattttttgagattttttatagcgtggaattagaaagcaactctttttttcccgggttttacaaggttcatggtaaagtgtgattcttgttatgggttctcagtgggtttattatgctggcgttgctcctgggttgtaatcagaatacatgaaaaaacattatacctttttaggtgtaaatccgcatatannnttcgcacgcgaattcnnntnnntgttgcccnnnnnnnnnnnnntttgtctgtgtttgtgttatgtagcatgggaataaggtagtc

SEQ ID NO: 9332 - DNA, 377 bp, Gossypium hirsutum
tttccagtgccttatggttagtaattgggtgatttattgaaaattggttgtaaccttttgcagttttgcataaaaaagatattaaccacattatcttatctctgctctagcttttatatttatgcatgtataaacaattgtcatccaccttactgattttttgcaattctttcttctctaagaacgtgttttttttttcttttaatgtttgaaatatacctttgactaaaagttaggagttttgtgaactatttctttccaatttgtgtctttgttaagggggtaaaaaaatattgctaatatttctctctcaattgtagcttcacaagtggggtctcctcaagcatatcatggattataggcatgaatctattgat

SEQ ID NO: 9333 - DNA, 409 bp, Gossypium hirsutum
tacttttgtagcataatcatctagagttgccttgattcctttccagatctgatcttccccttgagaatccagccacagtgaatattgcaaatgagtaagcttgttcctctggagtggtgattgcaagtcgtcagggcctcgggaataaagatgatgaagaataacacttggaggtaaatcttggagaagaggagatgctcctagttgagacgtttccaagaagataagcggtcggaatgctctaagagctcggtatggtgcacctagttgttctacagggaacaaattctggcccacagctaattctagctcagccatgtctctggccattctcagcttgcctgattctgaaaggggtctgacaagagaagcatgcctgataaagaagaagaggtggatttggctgtgg

SEQ ID NO: 9334 - DNA, 546 bp, Gossypium hirsutum
attcaaggataaacttgccactaatcttaaaagagtcaaaggataacgattggcttgttagggttggaaggattttcttgttcagttactagaacatttcaatggaagctaatatcagaacatttcttttcaaccctcattatagctaatatcactttcaggcgcaaatcctataatttgtggcagttacctggaagctagaaaatctataacatgcaatgtctgtgaaatgtaaccagaggatgtaggccagcctgttgtgccatctcgactagcactatgttccattccattttgggagccaggtgctgcatgaaggtcaatgatgcactttatgctatagtctctgcatcaacatatttacgtacttatcaaattaaatgaagagctaaaatcatagcactctcaacaaataataatgaaaaaaaaaaaaaacttactctgcccatgagaatgcattgtcaagagcttctaatgtccctccaatgaatggggctggaggatcaggatcgtaagcaatccaccaaccaacagggatccttacag

SEQ ID NO: 9335 - DNA, 596 bp, Gossypium hirsutum
gtaatttcgtatttccatacctttatataagatttaaggttaatatcaaaattggtcccttaacttttacccaatctgcaatataatacatatacaaagtaaatctcatatttaatacctgtactattctttcatgtcttttcttgactgatcaagtaagaagtatgtaagccccatcatctccagaggaaaagaacaagacatgatatctgtgtttaatctgaagatacttattatcgatctgtataaagtttgattcaagtattcgtattcgatacaagcaattagttagtttagtgtcgattatatttacaattacgataaacttaaaaagaaatgaaaaacatgttcgagatcatcaaaattcatattacaaaccgtataacatttctcttcttttcgcacatgagcttaggctgttgatgcaaaaaattagtgttaaatgtggaaagagacaagtaatttcgtatttccatacctttatataagatttaaggttaatatcaaaattggtcccttaacttttacccaatctgcaatataatacatatacaaagtaaatctcatatttaatacctgtactattctttcatgtc

SEQ ID NO: 9336 - DNA, 610 bp, Gossypium hirsutum
ttcgttttcttgagtgtttgtattcgacatttatgttgaactatgcatatttggatatgaatgtgaaatatttatgtcaagcaatgcttattagcacacttgtatttgagtccgtgtataatgagtaatattagatttcatttgtttaactgcttgtggaaaaatatatggtaattttggacataatacggatatttttgaatttcgacattgacggttaaatgaaattgaatcttaagtattgttttttattcgttaatggctttaatttacagtattgatcgtcaaatcattttttagagttcatcagtcaaactttttaaataaaaaacataaccgctcaataatttaaataattttttttgaattgttaagtgatttaaatgaaaacttttaaatagttcaataattattttataattttttaaagttaagtgcgtaaaacataaatttgttaataatttagtaacttcgagtgtagtttatctaattatttataacacttagtagtccgaattagttaaaatgcgttgcaacaaactcccaacacatatagaaggagagcacattcaaatgtactttgaaaatatccaaactccatttgaacaga

SEQ ID NO: 9337 - DNA, 605 bp, Gossypium hirsutum
  misc_feature (602)..(602): n is a, c, g, or t
cctttcttgaactgcacactgacaagtcaggatggaaattcctttctaggtttcatttggtagggatcatactgtggttgctacatgcattacttgaatccttttactaattgattgacaattatgctgtaaactcaaggtcctgccttatatctagtatagggttgtgagactgatgaactatgcagtgattaattgcatacgatattgtccacgcaatcagttacatgttaagcttatttttaatgtcaacaattgtcagcccacaaggtattgattagccacatccttcacacatcaaacagattaccagttttctcaggttggattggcatcagcagggattttgctgctgagttagcatttagagaattggaaatggttactactgctgtacttacaaaacaaaacactatataaaagacagtggaaatcagatcatcctaaaatctatcaaatctctgaggtttgtgcgtttaaaagaaaaaaagatggtccatttgacactcaattatctgacatcttacaaatgcttttccaaagaacttatgttttctccattttgctattcactcttagaatctttgctcattgctctacgnaaa

SEQ ID NO: 9338 - DNA, 644 bp, Gossypium hirsutum
aaagattcacttcataattttagtggtggaaacttatggtgttataacttggacttactaatacattataaaagtaaagagatcaaaattatgtcaaattaaagaagagtgattaaatatcaaatttcagcacaatagaaggactaaaaacagaattagaccattttcctaagctagcttgtactgttgggtttgccaaatatataggcttcttttttatttcgaagcagcttctagggtttttcctttgaatcctttcccaagttttgtctctaatttagaaccaacttcaattccctatatatatatacacatacatacatatacgtgtatgcaaatgtgtttcaaagagaaagtttaagaacttcaaaatccttcaaaaatgacggttagtcattacaactctctctatggatctacatgcaataatgcatataatcccccatttgtgtttaaagttttttagtaatgtattgtaacattaacatgtatatttttcgttgcagatggtagaaatgagagttcatatggactgtaaaggctgcgtagctaagataaagaaggctcttggaaaactcaaaggtatacatatgcatacatacatacatacatacatacatatattcaacttctttactcgaaag

SEQ ID NO: 9339 - DNA, 526 bp, Gossypium hirsutum
aaaaaaaaataatttgtaaaatttaagatatttatagaaattctaaaatatatatttttaaaaaattataaaattctaaagaatatatggaaaagttaaaaatttgtctaaaataataattttgagacctaaataaataaagtaacgattcaagtttatcatactaaaattttttttcttattttattttcaaagagctttcaaatatatgtcctctaacatgaaaattttcaaatggataaaatatagcttcttaactcgaaatttattcactcgattcgatcaaatgttcacccatattaaattctatcttattcttgaaaagaggaaatatttagtacattgaaatttctagacttgacaaacaaggttaatgaattgataaataccctataagatatagtaaaatatttaaataaataaatattttaaaaaaaaacagacatataacagtaagctttatttttcagccaatgagatatgactgaaatgagaggagaggggtgtaagaggaagaggaggcaaa

SEQ ID NO: 9340 - DNA, 503 bp, Gossypium hirsutum
ttacttagatagagcattagttgatttattgtaataaaactaaaaactcataagttccattcatccaatattaacaaaccttcaccaactcttgaagcagagaagttgcacgtgcatagtcccctaattctgttaatgtaactgctgctccctgcaggccatcttaaattttaaattgtcacaggctcatagatgctgaagtagagatgcatttatttgtctacttaataataagtatatatatgcacatatgtttagatctgaacatcaataaagttactataaaatcagagtatttcaacgagcattttgaaattgagaagaaattgaaagatgaaattattctcaattgtgtaatgagatgaaagaatacataagtacttatacaagcaatataggtttatttgaggaaattaataaattgtacataatccaaaaatccctaataataatcaattcaatccctaataattagtaactcctaagatcatgtcgtttgggtc

SEQ ID NO: 9341 - DNA, 549 bp, Gossypium hirsutum
gattaaatgaactaaaaaataatataagtttcaagcaacattcaatgtcaagttctgtattaaaggcactggtatattacctgcaacatgagattaacaggtccttcattagccatatatggaaattctccagttccgcactcaaagagagcaagaccaaggctccatatatcagcaggataagaataactctcatttcgaattcgctcgggtgacatgtatgtaacagttccgacaaaggtagcacactggtaacaagtccgaagcagttgttagacatttatcatagattttaataactgattatcatctttgagagcaactccagcaaagacatctctttaataaactaaaataatcaaacgtaatgatagcaaagaaaaaaatcaagcatgaactgattaatatctaatcactaaccattgccattgaattatctaggccagcacttatgccaaaatctgttattttgggctcccctttaagatttacgagcaaatttgcaggcttgatgtctctgtgaaccaaatgcctaactccatgcaagta

SEQ ID NO: 9342 - DNA, 468 bp, Gossypium hirsutum
  misc_feature (384)..(384): n is a, c, g, or t
gggaagtggttaggtttcatgctgtgtcttctatcagtcgaacagtttatcattggaattttctgtcataattggtgcttttgtttctaatttaccgatgctgcactcatttaataattggcatcaccagtgcttaattacagcttcctgctgtactttttcattacagtgcttcgagtctgggatgtgctcctctatgaaggaaatcgtgtcatgctttttaggacagcacttgctttaatggagttatatggtatggggtgaaagacatgagtattttgactttaatgatatctttaaagtgacaaataacctgttttaaactgaacaatgtaacttaattttcttacaagtcctgttttgtatacaactaacgatgcatgngatgctgttaccttgatacactcattgcctggctcaacattcgacagcatccaacttgtattgacagcatgtagtattgacagc

SEQ ID NO: 9343 - DNA, 505 bp, Gossypium hirsutum
  misc_feature (467)..(468): n is a, c, g, or t
  misc_feature (473)..(478): n is a, c, g, or t
  misc_feature (480)..(485): n is a, c, g, or t
  misc_feature (487)..(487): n is a, c, g, or t
  misc_feature (489)..(490): n is a, c, g, or t
  misc_feature (497)..(497): n is a, c, g, or t
  misc_feature (499)..(499): n is a, c, g, or t
acgttgagatttgggcatgcatatattctgctgacaacaaacaaggatatcttgtcgaaacctaaatattcttcaagcttggtagccaatgttcctctcttgttgccaaacattgaatcatctacaagaccaaggttttaccgatgtcctaatggtcataatagcaattgtcatatgttgttgggtttttgacagtagaggaagaaaacagagaacaaaacaagacaatgaagcaagatgccagaaaattttttacttgcacataaatgtgcagcaagggagtttatggctgatagctcattttgctcttcttttcaataagaaaatacatttatagccaaatacattaccaaatattcaactaaccccactaatcaacattgagagtattaaaacttgcttgtgcaagtatccaagctgttaaatcagcttaaagacaacctaaatgactgctaaatcagcatacnntcctnnnnnntnnnnnnangnnctgtcancnagatgc

SEQ ID NO: 9344 - DNA, 669 bp, Gossypium hirsutum
tggatgatgaaaactgacgcacatggcctgcagtaaaatatgtagaattggttaatagaaactggtacacactatttttaattttatgattttccgccatatttatttactttttttaaaccagttttgttaaagcattaattgatctgaatattcatcattctgttgttactataaaacctagatttgattattttcattgattatacccatttggtagtgaattgcacttattttccattatggtttaactactacttagagactgcctggaaactcttaaaagagaagacacgggcgacaaaacaaaatgatgattgtcatatgagccaagtttacttttctggtcttggtcaaactaggaaaatttgaagcttttatgctcatgttttgctcatttcattcgactagaaaacatgacaggtttcctcaaattccaaatcctagttatagcctttgttggtctgtattattaacgatcattttattgcccaagaaagttgatataatataacgaggcaatcatcataacttttatggcatagtcaggaatttttcctggtaatttggtgactaggaaaaataaattttgatttgtgattaatggataacttactgcccaagtaaagagtttgaattatgttttatctacaatctattcaaccgctg

SEQ ID NO: 9345 - DNA, 652 bp, Gossypium hirsutum
caagctaatttctcctgcaagtcaatgttactgattctaatttatacccttgtgtctatgatctttgtaactataatcataaaacctaacttgattccttaaatttgtgttacttcatttgcttccttttctgctcagacttaagtgtttcactatatgtttgtgtctgtttaatttatgttgtcacattacccaacaccctagcaataatacatggatttgcagccccattgtttcaattccttgaatgaaagaagcatgtgtgatatgtacatgtgacatgtctggagtgagtgcttttcctataatattgtaagttgtaacttgaaatgggaaaactagcatattgggtgtctcatgctgaaggggaacaaattcgtcatcctgttgctgttgtattggatctgcatgtgttgagcagggatttaaattgcggtcgcggccgcgtttttggtcgcattgcgtttatcgcggttgtggacataacggatgctattgcggtcattgcgggtatcgtggtcgtgaattttaaaaaaaattcacacaacgtattgtaaaatataatagcggtttcggcagttgcggtttcggacggtgccgctaccgctatataacggccgctatttcggtaacagaccgctatttaaatccc

SEQ ID NO: 9346 - DNA, 645 bp, Gossypium hirsutum
  misc_feature (92)..(92): n is a, c, g, or t
gatcgttgaagctttattgactgaagctctgattttagtgcaacctgaatcgggtaaagaatttgtgatttatagtgatgcttcgttgattngtttgggatgtgttctaatgcaagaaggaaaagttgttgcttatgcttcgagatagttgaagccgcatgaaaagaactatttgactcacgaccttgagttagctgctattgcgtttgccttaaagatctggcgtcactatctgtttggtgagaaatgtcacgtgttttctgatcataaaagtctgaagtatttaatgatgcaaaaatatttgaatctgcgacagagaagatggttagaactgttaaatgactacaaacttgtgattgattatcacccgagaaaagcaaatgttgttgctgatgctttgagtcgaaaatcgttatttactttgcatgcaatgaatgctcatttatttttgtctaatgatggttcagttttagatgaatcaaaagcgagacctttgttcttacaacaaattatcgaagctcagaaggttgataatgaattaatagcaaaatgaactcagtgtaattctgattctgattctgaattctgaatagatgttgatgactgtctgagatttagaaatagactttgtgttccaagaaattc

SEQ ID NO: 9347 - DNA, 356 bp, Gossypium hirsutum
tgtatatgtatatgtatatgtatatgcatgtcacctgaacaaataaggcaatacagttcctttttctctaaggtctttccttttttttgttcttagtgcctctcaaagaatcagagagctgctttagctgaaataactgatgttttacgagctgtatgtcatgcgcatagcttacctttggctctaacatggattccttgtaattacaccgaggaagctgagaatgaatatatagaaatgcgtgttagagagcgtaataagagttgggatgggaagtgtgttttatgtatcgaagatacagcctgttacgttaatgaaagagagatgcaagattttgtgcatgcatgtgtggaaca

SEQ ID NO: 9348 - DNA, 358 bp, Gossypium hirsutum
caggatgaccacaacgggaatgataatgagatatttccatatattcccggaaccagattctgaaggttcttcaggaggtggctctccaggctttgtatcagtctccagggtaggaggcgtttcaactggtggtgatggtgatggtgatggtgatggtgcagaaggctgttttgccttcggcacagcagggaagctcccactacttcgggtagtcgggagagaaatgatctgttcgttagacgacataccagtagcaggcacagctgggaggttctttgactgcgcaagcagcctacgacgtgcaaaagaggcaacatcctgcatgctattggctatctgttgctcagatgattatact

SEQ ID NO: 9349 - DNA, 535 bp, Gossypium hirsutum
ctttttatgatcgtataacaagcagtcaaatatggaaattcaagcttcttctttttcttcattttgtctgcagtttgcagtcgctttaaaatggaaggagagaaattaaggatgatgaagaaggcctggtggtctaaaatggtcccttgtttgtttgcttcaattgtgggcttcgtactctttgctatggtggaaaccaggcccttccatggccacaccaccaaccacgtgggtttactttttgacccaccatttggtctccaatagaaatgacttaatgagtcaatcaaacataacataattgatgaaattatttaaacaaaaataaaatattaaagtaaaaagtatatattataaatatgagttggtatttgatacattggtagtgtattttttctataacacaagcagtgttaagaaattttcatgtatttttttaaatatttattttttaaaaatattttattatatctttataggatacttatcaacctcctaaacttgtggagtctaagaactccactagcaatgcatc

SEQ ID NO: 9350 - DNA, 434 bp, Gossypium hirsutum
tgcggtgaattactaatctcaaacttgtgtgccagatacaagtatatacatttttttccaaatttttaatatagcgctttttccaaaagagcaagggaactaaccagtgtccatagcacgctctttggaaggtattggctgccttgaattcaatccattcacagttgtcgagtccccatggccgacacttgcaccacctccaagactaagtgagatccaatcatcggtacagatgccgttcgatacgtcagcttcatctctgaaaccagactctgctgatgcacctgaaggatgcgttggaagaaatatctgaagtgagggatcctctccaccaaagagggtagtgtcaaccaagctgtcatttagatttgtatcaacctgaccaatggaacaagtagggactagagctgtagatcccattgttgtctcaagag

SEQ ID NO: 9351 - DNA, 484 bp, Gossypium hirsutum
  misc_feature (4)..(4): n is a, c, g, or t
gaancttatcttcattacaaaaaacaaagaaagccagcacataatacaattaatgttgcaaaccgaggctgtcctggttttgtgtctctaaatggtattgtgttttgttttggcccatagaaaaaccggtattattggcagtgccatacgcccccatacctatttagctatgtacgaattctttaggcatacggcatgggctggcttgcattaaatattctcaacctccccctccccttctttgattatttatttttgctccttcactgtacggatattaaaaaattatactcatttaaacactagctattattttaatcctcacaacttgcttcatgcacgtttaccagagtcatgcaaacttgtcgtgtttaatcaattgggaagaaaatgtgtgagaaatttcctggtcagagtttatgatatttaactatcacccaacttgctaagacttaaatacagcgtcactcactctatgatccga

SEQ ID NO: 9352 - DNA, 607 bp, Gossypium hirsutum
ttgtccccattcctaaagagccatgtactgttcatggaggccgggtgccttgaccatacgtagacgtacgaccacccaccaaaagatgacgtatgcgtcttgtccttggtaggatctgaacctttgacctatggaatacaggtcactcgattcacgaaggggtcaccttgaccatacatggatgtacaagcactcacgaagaggcaacgtgagcgtcttgcccttggcaaaattcaaacccttgacctatggaatttaggtcaccacatacggttgagtattcccaagaaagacactttgaagacttctcccagaagagttgatctcccctcaacaatactttaaattctaaaaaaattataattaatccctaattcctttaaagtaattttctaacttaatcgaaaatatattttattgataaaatacaattaaaattttattcttttaaatattttcacaaatatctattcttatttgactaaactttatggtgggaaacacatagacttgggattaattcaaccatatatgcttagatgtgcccctcacaaattaattaatggcaaaccatttttttctttttcttatgaaaaaatagggaaat

SEQ ID NO: 9353 - DNA, 592 bp, Gossypium hirsutum
aatgagatcacaggccccccttctttgataaagtgcctcatcctgttattgggatcctaagtagcagatagatagtatctaaatatgaggtatgagcaaattattaattacagaaagatgaaaattcttgttctaaaagtacaataggtgctatattataaatgctaaattagttatggtccacggaacctctaaacatgcagaatcaaaatgcagaaagctagctcttgattccaattataaattcaaggacattcttcatgttatactgttgtctttttgcatctctagaattgtgagttaatggcaggaaagaaagttgttctctttttctttaaacaagttatgcttccaatgataatcactgaattgtcactaacagaaatataaaaagaaaacatcgaatcctgtgaacaaaaaaattagtaaccaaaagttgctcaagataaactacattggcacataaatctaaatggataacattattttgtgttaaaaatacaaaatatattacaagtagccagtagggtatgagtagcacaaacccataaaatacaaactatagatatgattacatctaaggtagcccatc

SEQ ID NO: 9354 - DNA, 602 bp, Gossypium hirsutum
cttcatcgggaaggtaaaagctttagcatatatatccctacggcactgtcaacattgaacttcaaaaacactgctatcttgtgtttcatggtgcaaaaatgactagaaatataaatcacccacgtttcacagttggctgggttttgtagcataaatctcgtggagaattttagagatatggtttagtaccctaagtgaagaacaactaggaaaagataagacagtgagagagaaagagaaagagataatggaaggtggttccaatagcacttcttgcatgttggcttttggacacaacaataatacttgtaatggaccatgtcatgtgtctatgatgccatccatgtcttcccatcatcatcatcatcatcatatggactcgaataatcctttatttcttcctttacctcccaccaacaatcaagacccgaaccataatagcaccagcggttcaccctctatgatcctcaacaatacagggtgttatttcatggagaacaataataatgatgatgatggcagctcttcttcttctatgaaagccaagatcatgtctcaccctcactatcaccgtctgttggccgcttatgtcaattgccaaa

SEQ ID NO: 9355 - DNA, 465 bp, Gossypium hirsutum
catgtgtggtatgaacggaattacttttgatgggactttgatgctgcaatacatgttataatattgcttttaaatgtgaacatacatgattgctgtggattttcatttatcagtcaaaaatcaaacttaattcatctattatgttgatcagtaactcttcctgtttagttcaactagtggctatttaatgacaaatcgcatgctgttttaatttcgtgactgagaatgtttaagcaatatacttttgtgtcatgatgtctccaattcgattacatctagttatctgcaatgataagttccttggttctgactttatcaagtattataagactaagaagattatatttcatccctcggatttgatatcctgctgtctatgggactatattagtgaattctttattatctcactcatcatgattgtcttttgttcaacttgactcagattttatttccttgattcct

SEQ ID NO: 9356 - DNA, 727 bp, Gossypium hirsutum
  misc_feature (695)..(698): n is a, c, g, or t
  misc_feature (700)..(703): n is a, c, g, or t
  misc_feature (705)..(714): n is a, c, g, or t
  misc_feature (716)..(724): n is a, c, g, or t
tctctttaggtggtagaaagccctgcatatacacagcccctgtcgcggtttctctttaggtggtagaaagccctgcatatacacaatcccgtgtcgcagttagcatccaattgcatcatgttcgacctttcggcaaagccaaccttcaacttcacaggaagtgagacgtagatcaatttcatttcagttttaataaagaatatgaatgaatatttagcacttgacctggcaataaagatgaaagagagcagggaaagtcttctccttggcaagatcaccagaggcaccaagaacaatgattgagaggcatcctgtttctgccacattatcattgctccaaaacgagtcactcttgtaactccattcactcgatctcatcctctaagctttgtatgatctgtattcaaagaaatgtcatctatatacaaaaaaatagtgaatttgcctctttttttatcatgatttagcttgcccaagctctcaaaactaatattcaattctcaagttgtaatgcttataaaaacaagaaattaaaattcctttatcttctcttggatttaccaaaaacatgcaaaagaaacttatataaaaaatgcaaacttttatagcatggatccccaccaaaaaaaaacaactttccaaatgcaaacttttatagcatggatccccaccagaaagaaacaactttccaaagnnnngnnnngnnnnnnnnnnannnnnnnnnatt

SEQ ID NO: 9357 - DNA, 633 bp, Gossypium hirsutum
gcactggcttacaagtgaacatccaacctttaaaaagccgaccacaacctctacacaattgataattcttgctatgaaagctatggaggcgatgttcatgtccttcacatttaggcatatcagaaaccaaagaacatcgcaaacaattacttacttggcatttatcacaggtataggcaaagccacttgtaaaatatttgcacattttacattgaaaaatgcaaccagaagtaagtttaagaagcttttggcaatagtgaaaccaaagatgcttcttaacaggtaatgcagcacaagctttgtggagaaagaaatcacattgtgaacaataacaataagaagtatcgatgggtagaaggcaaccgtcgcattgtttaaaatccctaatgtctccactcagtattaagttatgtggatgaatttctctcaaatcgacaggttcatttgagtccgtctcttcttctgtttctgtagagtcaacctcgtaatacaaacgactgtaatttgttgcacactttacatggactatgtaattgcatttagaacaaaagtaactcccatgctttgcgttcacctccttcaagcaaaatctacattcccacgattcagattcattttggtccaggaaatatg

SEQ ID NO: 9358 - DNA, 580 bp, Gossypium hirsutum
gataagagctgtcctgttgttaaaaccggtaacataaactttattcttcccgttactgattatttttttcatgttttttagtatggagttgttttcctgttttcggagatttagaattaggggttaatctaatgtcatcttaatcgaattgccttaaatgtattgtttcagtatttcttctcgaacgatgttgattattggagaatcggtgaaagtaacaaggaaacttattgtgcttgtgttgcaagccagattagtatcagccggtaacctgaaagaaatagggacgaatatagaagaacagtgaagaagtataagataacagattgttaggaggaaactataattcttggatacggaattcttgtcacaataatgtttctgacagcatgtatataggattattattctgtacactgccagtggagttttatttaaacttcacaagtggccttataattgtaaactaattaaccatcattctagacttgcactttggatattgttaatgcttgtaacttatttgtcttgtcggacacttgatattcaagtcagctgttactctgctacttgggtctgg

SEQ ID NO: 9359 - DNA, 464 bp, Gossypium hirsutum
ccaattatcatctacacttgctccttacctaatgatggttccaatggggttataaatatattatttttctcttcttttatttatttttaaatttattatttcaatttgataaaaaaaaggtaactctaaaaatagtcgcttttatttgtcttaaattacattttagttatttatatttgaaatattacgttttaatcatttacgttatcattttgttacggagtagtcactttgccattaagatccgttaccttcttaacgaagagtgttttatcatttgggtgattgattcttagtttagttgacattgacattattaccaatgcaggaagacgtgggttcgaacgtgttgaagcacatttatcttcctatttaaaggttgatgatgggtaattctagtttagatttaagcaagtaacattattgttcggttaaaatatgtcataagttcctgtaactcctca

SEQ ID NO: 9360 - DNA, 475 bp, Gossypium hirsutum
ttacagggccaattccatcagaattgggatcgatttccagtattgcagccttgttcttaggagacaacaggttttcgagttcgataccggaatctttactgaacttaacgaatttggagttcttggatgtgagcaaacacagttttggtggggagattcaaaagatttttgggagattcaaacaggtgaagtttctgttgttacatggaaatgcatacacaggagggatcgatacgtccggtattctcaagctacagaacatttctcgattagacctgagtaataatcgattctctggttcattgcctgttgaaatttctcaaatgccaagcttgaatttcttgatgctgtccaacaatcagtttacaggtagtataccacctgaatatggaaacttctcacagttacaaactctagacctgtccttcaaccggctttcaggatcgatcccacccaacctcgggaaactgaaatc

SEQ ID NO: 9361 - DNA, 613 bp, Gossypium hirsutum
gtttcacaaggatttgggtgcaaaggaaccacgacaagcattggtctaatgaggctaaccaaagggtaacattttttctagggcttgcatttctttatgggttacctgaactggtggaattggtgttattattccttcctcgtatttggctgaattcgaaagtatttgacctgctatcatggtggttccatggtgactgttacatcggtcaaggattgacggaaggtctggttgatagaatcaagtacgtcctattctgggttttggtgttaggtacaaaatttaccgtcagttacttcttccagatcaagcccacgattaacacaacaaaacaattgttggattcaacaattgcagactatgagtgggactggcaagccatctttagtgtcagcaacaagttcactattgggttgttgtggttgcctgtggtgttaatttacttggctgatactcaggtttggtactcattctattctccctttgtgggggctgccatgtggttgctgcaactgttgggtgaaattcgaaacatcgagcagctgagatggaggtttcggttctttgctactgccattcaattcaatttgctgcgacaagaggaaataatgat

SEQ ID NO: 9362 - DNA, 455 bp, Gossypium hirsutum
cacttcaattacaatggtcaggtagataaaacattaacactgataaaataagaaaagggaaaattaagaaagaaaaggaaaccagacaatgaaaatggagggtaaatcatatgcaccaaaaaagctcaatgccaatcaaggcatggcatcaatctgacagttgacggagcagatttcacaacctttctaattggtgaccagtgaccaaaacaaagattgtagttttatgtatttccttaaagtctggttaattgcctcattgactgttcgaattagaaaaaggggaaaacttagctacaaggataaaacttgggataatgtgtaatttgtacttcttgtaagctagaagcacatttaagtaacagatagaagtttgacgctgattagtaagtttaaaatagcacagcagctctgcactcttccctaacaaattctacacgtgaaaataaactgtc

SEQ ID NO: 9363 - DNA, 556 bp, Gossypium hirsutum
tgcattagactagtaccttaatttccgagctgcatccacaagaactcaaaatacatagaggtacatgtaaagttcctattcattctataactacacattgtaagattacaatcatataaacaaatcgcaagaactataaacaaagatcaaaggctacaatagttcaatcaaccacagaaatcactcaaattcttatcttagccatgattctctacactgacacttacaattttgttcacaaacaaaagtacatactttgagtatacataaaaacacaatcaaaacaacatgcaaaagatttaaacatggaaagaaaaaacacaaaaggcaaaaattaatagaaggaaacatactttgatggaagaagggacatgaaggcgagaaggacgagcaggaccaatggttttaacagtaatttccaccatattttcatgttttccactggtttcttcttctacaatctcttccatctccatatcattagctgatctgtgatgggtatgaataaatttaaaaaagagtcaaagacccattttttttttcctctctgaggctc

SEQ ID NO: 9364 - DNA, 395 bp, Gossypium hirsutum
gatgtgcttgtgtgtttatatgcacctagttttcaaaatcatgtgctaggaagaagtgacaaacaacatatatagttcaaagacccacttattgaattaatttgtttttcttttctcaatttggtttatgatggtattgctaatccatttttctttatataacctttccatgcaagcttttgattctctccttcagtaacatctatcaatatcttgcagctgctattgagaaggacttatgggccactggagctgtgaatgaggagtatctaaaagctctgaactctttatttagcaactttccacgtttgagagcaactgagcctgctacactcagcattccccatttggttacatcactcaaaacaggttctgaggcaactcaagaagctgct

SEQ ID NO: 9365 - DNA, 592 bp, Gossypium hirsutum
attaaggtatgaacttttttgagaatcttcttaaggtatgtgaactttggttaaggaaacgaaaggtatattactatttcgcgaatcttagaaaataaaattgaacacgtcaactcaagcatacatgaaacttaaatcaactcgttaccaatattacatgataaaatgctttggtttaaaagaaaatgaggttaatgaaacttttaatggctaaagttctcacttagacacaattttctttttaagaatcttctcaaggtatatctcacctatggttgctttaaattattttattagtattaaaattcctttctcaacatgtggctccagcgactgaagtcgctaaactataagccttctactgagaactggatgacataggactgcctgctgtgcatcttatgctccataggggatccaaacaaataaggttttgttttcaaaaacacacccctaagtctatcccgtttccacctggctccaatcaatacctaatttatatattttcaaaagataagtatatattaaatacaaacaatcttctataaatatgaattaaagaggtaatttgcagaaaagacattccctttgg

SEQ ID NO: 9366 - DNA, 603 bp, Gossypium hirsutum
aatgatgcagtagggagtataagaactgttgcatccttttgcgcagaggaaaaggtgatgcagctttataagaagaaatgtgaaggccctatgaaaaccgggataaagcagggtttaatcagtggaacaggattcggagtttccttcttctttctgttttctgtttatgcaaccagtttttatgcaggggctcaacttgttgagcatggttatacaacattcagagatgttttccaagtgagtttaactggaaactgtgtactgagttaatgattatgcccctatgatgctgagattaacatctactttgcaggttttctttgctctgaccatggcagctataggaatttctcaatcgagctcctttgctcctgattctggcaaagccaagagcgctgccgcttccatatttgcgattattgatcgcgagtctaagatagaccccagcgatgagtccggaatgaaactagaaaacgtgaagggagacatcgaacttcatcatgtcagctttaagtatccatcgaggccggatattcaaattcttcgagacttgagcttgtctattcgttccggcaaggtaactggtccaaaagccatcctcgt

SEQ ID NO: 9367 - DNA, 472 bp, Gossypium hirsutum
taatgtatattgattttttcatctatttttagattatttaacaaacaattcaatataaaaactaaaaaaataaaaattgaaagattaaatattttttatataaatttagagccgaaaataaatcaatatgtaaaaatcaaattgaaaaacacatcacagcattttgtacccatttatggagttttttttcttttcattttggtacatgaataaataacaggaataccgccctaactcatcatgctccagtacatgctgaatcccgacctaaaattcccaatagtctggcatcctagggtgaaataaccgtatatgctgatttttaatcaaaattattggattaagctagattttttaaaattcatcagaatagctcgattttaaatagagtgtgaaatatatctaattggatgtattttcaacggattttgcaagaaaacgcttttagatagacgtgctgaccatagaggtg

SEQ ID NO: 9368 - DNA, 496 bp, Gossypium hirsutum
atgcttcctattgtgattgccaccgtcaggcatcttttcagattctgcattttcagcatcagcgtcttggataccatcattttcatcatcattgggaagggttcgataagtaagtttcatcataagatatactttgaagagatgtgtcaaatggtccgatgtccagtaagccttcaaaaataagagcataacatcaatgtgtataaaagacattaaaaaatctgatgtaaacactcttgcatagacacgagaaataactataaaatgctagttaaaaaacctaatgttatctcactaccatagtaataattgacccatgttaaatgccaaagacaaacaaacactatagtttgtgagctggaacaatcaatatcacatttttaataaataacaagggaacttacaaacttagaaacaaacaattcatacaatccttccaaatgcatgaactttacaggaacttggctaccaatacgatctgcctcaaaccttcaag

SEQ ID NO: 9369 - DNA, 660 bp, Gossypium hirsutum
agatcaagcaggttgaaataaacttcagaacacaagaaacaatagcttctgaagcagttggaacagttagaattgaaaatatatctggaacaagattcctttccctacaaagtagggacacaagttgcaggctccgactcatagccaaaaagcaagagaacaaggagcttggtttttcactactagaaccctcctgcttgaaggcataaattaagggtttcaaagatgtaaaaaacaggtcccagaattcagtaccaaaatcatggtcctcatatttattgagaacaagagaaacaattttcaaacatagagacctcaaatctttgaactgcttgatgcccgtcccaatctgagaaagaaataattaccgtcatcaaagcttaattttctcaataaagaatctgattattttgaaaagtttgttagaaatcaaaggagggaaaaagaaaacaatgcaagatgctgttacattattaatggaattctaaagttcatctacaaatagtttaacttatttgaaattaaaagagataataaaatattcaaaaagaggaacagcaattgatcaaatttaagaaaagaaatcttttttcctcaacataaccggaaatattaccttcacatggtttgcctctgcactgtctttgtcatcagaaaaaa

SEQ ID NO: 9370 - DNA, 354 bp, Gossypium hirsutum
  misc_feature (54)..(56): n is a, c, g, or t
ccatcagcttcacatgaagatgttgcaatagcaggcatcattgtgggaagcacnnngccatataaattgttattaccaaaaagagcagaattctgggcaccggagttgccaatatctggctttattatagcatcttttccaggaaacacttgtggaagtgatgtagagctaccaaaggcatttacctctgaatgggtatacttcggagcccaggaccgctgtgttaactgcccaactagcattgactgaccggatctggaaaagttcaaaagatttgcactgctttcaggacataatgaacccaacatattctggacaggggggactgatcctgagaactttcctgagtctata

SEQ ID NO: 9371 - DNA, 501 bp, Gossypium hirsutum
cttaaatgaacaagcagggaacccattaaattagcagagataataaaaataggggaggagaaatttagttacagcaaattataaagaccggaatatgaagaaagggcttcaccttcagagttctcccaagaatcataaagagcagcaaacactagaggcctaccatccttgaaatgaatgtagtatggctgtttcttcgaaacatctttcttccactcatagaacctgacaagagtaactgcttctttattgaacaagatggaaataaaaacaagaaggaaattaggaaataatgacacaaaggatgaaagggtaagttcttctggtaagatcacttgcacaactacaagaacggagccttcatgacaatagaccaacttcagttgaagggaaaagaaataccacagtaatctttttttttggccagagtaatcatttaacttagaattactaatttccttttaaaacaagttttttactcatacagtcttacaacgtggc

SEQ ID NO: 9372 - DNA, 485 bp, Gossypium hirsutum
  misc_feature (369)..(369): n is a, c, g, or t
  misc_feature (371)..(373): n is a, c, g, or t
  misc_feature (379)..(381): n is a, c, g, or t
  misc_feature (383)..(400): n is a, c, g, or t
  misc_feature (403)..(407): n is a, c, g, or t
  misc_feature (412)..(412): n is a, c, g, or t
  misc_feature (415)..(417): n is a, c, g, or t
  misc_feature (419)..(427): n is a, c, g, or t
  misc_feature (431)..(442): n is a, c, g, or t
  misc_feature (444)..(446): n is a, c, g, or t
  misc_feature (448)..(452): n is a, c, g, or t
  misc_feature (457)..(464): n is a, c, g, or t
  misc_feature (467)..(480): n is a, c, g, or t
acctaaggatagcaatatcatcactaaaaaatgaaacaaagaaaaagggggaaaaaagttggctaagaagtttttaccttaggccttcgccacaagctacaagcagcttagcgtccttgtcaggaagagtagcttctacctcttggacgaaattaggattgatcatagtaaagttttggccagtccacaagccaatgtagccaaaatgcacccatttcttcaaaagagtaatggggctattgtccatgtccttgacgaagagtggcacatgaagtgaccctttaacatatgccttttctcgttcccactgcggtctaatgtcgagtaacttgaaaccctcggaattcagggccgtggctgcgtccttancnnntatagnnnannnnnnnnnnnnnnnnnngtnnnnnctgangannntnnnnnnnnnttgnnnnnnnnnnnntnnntnnnnntgtannnnnnnnagnnnnnnnnnnnnnnatttg

SEQ ID NO: 9373 - DNA, 606 bp, Gossypium hirsutum
gcaggcaagtctttcaataaatatcttttgcagctggaagggccctttcacaccacaaactagagaactttgcgttaagccctttaccactttccaaccatgatactgcaatatctagagattcactgcttctagaagcaagcccttcactctgcccagcaacggtacctcgacgaggttttcttttaccaatttcagtttcatctatacacctacgctttgcagagagcagcccatgtagaataagctgactagaagacagccatatatctaaagttgggagttcaggcgtggtcaaagtcttcgcagaggcggctgaggcagttgaggcagcggcggcagcggcagcaacagccaccataccaacaccagcagcagggccactgttggtgttagcaaccagtccccctcttcccctcaaaatatctgactgcttgtagataaattccttcaaagatgatagatcctctttgtttgaactctgactatgagtttcgagcaaaaacgaatctgacgttgcttttccattcaaaacatcttccacaagaccaatggcgaactccagagattcccttctcttacatgttgacttgtcaagaagtacca

SEQ ID NO: 9374 - DNA, 469 bp, Gossypium hirsutum
ccacatttctaaattttctttattcaattaatgtttttctccttttatttacaactagagaggctgccatattttgtattattgaaaggttaattattttatatgatatacttatttaaataaaaacaattatttaatatacaaatgaaaaaatgtgacaagttttaaatttttctaaataatcatttttttaatttacactttctgatgcaatatcaattatttgttttcaaaaaataatgtaaaaaccctccggacttcaaaaataaaaattaagtctttgctttcttttttatctaattgggaaactttttaaatacgtaaaaaagatcctggaattttttttaaaaaaaattattaagtctttgttttttttacttaattaaataatcaaactgccaaaattatcaaataaatcatttttaataaaaacaatgataaaaaataaaaattaagcaccacgtgccac

SEQ ID NO: 9375 - DNA, 440 bp, Gossypium hirsutum
gaagatgtcagcatctccctgtcgaagaaagtaccacaaaaacagatcttgacattttagataggttcaacttcaaaacctcaaaattaaagaaaagaaaactatactcgaaacctcaaaattaaagaaaagaaaactatactgccagatgctatcaacttgcattatgattttatttacataatgatgctagaggttcatagataaggaaagatgtaaactagccctcatatctcagtttgtagagttcgtcacttggaatatgggaaaggttgtggactcttcgttaaagctgaagagctttgccaagagttttccacaagatctcagtcttcagcatcatttggagatatatttagttaaataattttatagtccattgaaaacgtagtactacttttcctagttgttgagctttatccagccagagaaagctaaca

SEQ ID NO: 9376 - DNA, 201 bp, Gossypium hirsutum
  misc_feature (195)..(197): n is a, c, g, or t
tttagattttaagacagaatgatcagcagacataatctactctagattgaaattaatacaaaaagagctacccagaagcaatataatgttgaaatctcatactgttaacattttaactcttaatattctggaaggaactgtggcacacttgattccaatattttatatacatcgagagctaaattctggtgaccnnnattt

SEQ ID NO: 9377 - DNA, 593 bp, Gossypium hirsutum
  misc_feature (552)..(552): n is a, c, g, or t
agagatcaagaagccgatgaggtttgtttaaatcttttccttcatttctttgttgttagtattcttagggtctggttctggatttagatctgtgtttcgatgctaagagaaacggagggaaacagaagcgaaggaaatataagtgaggctcctttaaattcattttcctttttttttagcttataaaagctattattgttgattttgctgaatttgttatggtctttgtgaggatttagtttgtttaaacttatactatgtttcttcatggagaattccatgttcagagtagaaatttgatttttaaatttatgatttgattctgtgttttgttttccgaccttcttttgtgaattggagtgttggacccttagttttagtaaccaaggatcaaacccggcaatctcaactatccaaagaaggaagatgaatggtcaggatcttaattaaacccagcttggccagggaaaatgaacttatattatggctaatggtatttctcgtttgtgttggacgcatgatgcatcggttgcctatctatgtcaagtgatnttctgcctctgcacgcttcgagggtgttattttgcaagaca

SEQ ID NO: 9378 - DNA, 478 bp, Gossypium hirsutum
atcttaagactttgggtcacaacggggataagcaatgacaaatgattgtatgcaattgtaattttatgttatctctatccttttttaataggaagatgacaaatcatatttctagcatttttagttagattgaatttttttagaaggaaaaaacttaaaattaagaggaaaaaaaattatatattatcttatttaattcatttaattaaaggaatataaaatataaattaaataataaaatataaattaatattataaatatctaatccctcaacatcaccaccattatcttccccgctaccacatacattttagacaactttcctcctttgattatccctttttgtttttttttttatttgagtaatttttgaagttcgaatgagggggatgaaaaaatttcatttccaaaagtcaaaatgaatttttttcaaaaaattataataaaattgtatatatttttatgagagttaaaatc

SEQ ID NO: 9379 - DNA, 601 bp, Gossypium hirsutum
cttgggtgtgagtgtcgaatgttgggtatgtgtatgatgtggttatgtttaactttttcataagttttccctgtatttgggggagtatatccttatacccaggtcccaatgtgtctaatatgggtcctggacatgggtacttgaagagaaataaagacctggagcagcataaatcgtcattgttgtcatcatcatcatccttcttgttattattattgttgttgtggataattatggaaaccaaacttacattggtacatggtattgtccagattgatcaagaactggaatctggagaatacttcttgagtgagaaaaagaaattagcgaagaagtgggaagagaagcaagagaagcaggcacagaaaacagctgaaaacaaaagaaaaagagaagcagcatttgttcctcccaaggttcgattttgaaacctactgtggctcacacgtagaatcacaaagtccaaccatttttatcaagtatttatttgtttcagcagtaatataatttacctgttgcaggaacccgtgaagcaagattctaacaagtcagagaacaaggaggaagatgttgctgcccttgctaagtcctcgaaggtaaa

SEQ ID NO: 9380 - DNA, 632 bp, Gossypium hirsutum
ttgaaggttaatttttccatttcttcactatactttttaagcaaccagcttagcagggcagtccactatagtcgtgtatttcttatagcttcaattattgcacaggttttagtaccggacatcccgaatctaggatccattctgcattattttaacaaacatgctttccattctgagaataaaacagaaaataaaggaagcggctagttaatctgcatggatagtgatgatctgtagcaatgttgttgaggcgtgagcctaggcactgcactttagtgccaaaacacaaaagctgcttggacctttttgggtgaggcacattgattaggtgcatggctattgcagccaagcgtctccctgtttgggttgggcttggccaacttttaccaatcttgaacatgtgaaaagctttattggagttccaaagttatatttaaacttagttagtttaatttaactgagctttcaaacccagctcaagctgctaacaagtttgtagaaaaccacaacaaaaatggcattgagctcacaaatggtaaagctgtagtcaatgaaatcacaagtggtagagccacagtgagcagacaatatttaggctcactttttgtgaatccagcatgtaggttcctgtc

SEQ ID NO: 9381 - DNA, 585 bp, Gossypium hirsutum
  misc_feature (565)..(566): n is a, c, g, or t
ggacatcagatcagcgaattttgtggaatagtgtatatcctaaaacctcattgcactgcttctggatctttaaaccttgttcagtcctttcatcagttggacctttgcatagaaaatcaccgaataaccacatcccaatcatttagtattacttactaaacttaccatatgttgttagttcagtttaatacatcctgcctaaatttgttgctgtagtgaacttattgctatgctgcaaaccagggtgttaattgtatgtgtaagtttaaaggctttaatcatagattggaatgttaattgtgtgtgtaagtagttttagggactttatgctttatatgatccatatgtttttggtaaacaagatgtgatcctgacactaaatagaatcaaaacaatggctacctacttaatctgtatttaatggacgtggtgtgttgttgatttaaaaaaatttctagttcagtcttacctttttacttcatcttcaacaaatttcaggttgatcttatgtatagtaacccaaattgcaggaaagggcaatggtgagaagagttgatatcggtcnngaaaaaaatttaattccgt

SEQ ID NO: 9382 - DNA, 581 bp, Gossypium hirsutum
tcttttgcatcaaatatttgcatcaagcaattcactccaatcactgttccatgcttgtccaaactttataaatttcgctcactggtttctaaaatgtaataagcataccgcctctaaacatgccagtcgtgtaaattttttttaagtatcaatatatagctaccatttccttcaatgatcgcttgtttatttacaccatctacttatacgccaatgacattttagctataccaccagcaaattgcaaaatccgtagttcacataccttaatgaaaaaggattacgccaaattacaatgaaattgaggataaaattcgccaatttcttcattaagaaaaagaaaattgaaaccccatgggttcaggaaacattagtctcgaatgcatttcaaaacatcagtagttccgaataaacggcagtcagaaaggataaggctttagcagccagcgttttcgaacaaaaaaaatgtacacatccgccttctatttcccttatttaagcaaagaaaaaagcggggccgaagtgctcttttacactcttgaataacatcattaaacataaacaacaaacccccaaaataa

SEQ ID NO: 9383 - DNA, 596 bp, Gossypium hirsutum
catctcatgtatcgcagttgacatctactaatcaggctgagaagattcatacaggccagcatggaggagcaagtgtaaatgctcctatggcacgccttgaaccgagaaagaaagttagagatgaagatgatttcttggttcctgtttttgttaattcagagacaggtttacaacatagcaaaaataaggaagggtttgatgggggaaaagctcgtaatgttcatgataatgatccaaatcggtgtagctcttctggtgtcggttcaagaaaggaggtaagagatcagagtgaagggagcttgcaagcatgctcaagtagggagcgttcaataaaaactgctggagattcatcaactagagaaaacattgatggatgtgccaaagagttcaatgtgtcccctgatcaaggttgtggagagattccagcatctagattaagtggatcacatgaaaatgatgcttgcttggtagaaaagttgagagctggcagacaaccggttgataatggatgtactgatgatgatgttgccttggtgaaagtgattggtgacggaactctttctcggaagagaagcctgtctaattcagagaggaat

SEQ ID NO: 9384 - DNA, 671 bp, Gossypium hirsutum
ggtaccagtatttacaatctttacttctctattatattgctcaatacgttcacggataatattactaatttcgtcggctctaatagttaccatgagtatttcctaattattttttggaagaaaaaaaataatgcctacaatctacaataaagtaaaaggtaaaaaaaagggctaatcagttatttctttcatcaccccaaacaagccaatattagcgctaatggtgcgtaaatgtaactcgttgtttaaagaactattcagagttcctagagctccttgtaaagcttgttggaaaacccgttgtcggacttgattaatcgctctttgttgttcaaaataaatggtttcatttttgtaattttctaattgttccaaaatcttataagttgaattaatcaaattcaatttttctcgttctatctcagagtatccattcactcgaaactgatccgcctccatttctactttccgtaagcgggcccgggccttttccagccgttcaatagcccccccgcgtagttcttctgaatttcgaatagtattcaagatcctctcttttcgattatctaataaatcacttaatgaaagtagattatctttccattcatttttttttatttcaaaaattccatgatcccttcccgaaccaaacatgaacctttcgattcatt

SEQ ID NO: 9385 - DNA, 380 bp, Gossypium hirsutum
  misc_feature (160)..(160): n is a, c, g, or t
ccacaagtgaaaggcacatacattatataggattaaagatggaattataatgactgacacaagttagggattttctacaactccttcagcactaattatctgtacgttccaaaaattccagtttcttttgaagagatcagcattaacttgcatataaacngttaatttcaataatacccataaatgatcaaatgcacatagaagaaattaaagaaaagtgaccaaaataaacggatttcctaggtccagaagaaaaaggacattcttgcaaagttaaggtatggcttggctcttcaaaagaggaaaacatttggatcatcacaaacttgaaaactagataaaacaacgagggcatgtaatgtaatcgcatgactgcatcc

SEQ ID NO: 9386 - DNA, 663 bp, Gossypium hirsutum
tgttacatgtcaattcttgcaaccatgctttcaactcttttaactctgtagaagccattttgtaaggtgctatcgatatcggtgatgtttccagtacaaattttatagcaaacttgacctctctgatcagcggtaatccaggtaactcctctagaaacacatcaggataatcgcaaactactggcactgattcaagctttgactcagactctttagtatccaatacataagcaaggtaagtattacaacattttctcacatagttctgtgctaacatatttgatatcacaataggcagcccgctcgaattatctgattcaatacaaagcatctcactattctaaaatttcaatacgataagctttcgtctacaatttaccacagcatcatgcagagttagtcaatccatgcccaaaaccacatcaaattcattgaatggtaatagcatcaaatcagtcgaaaaactgtaaccccaggtcatcaacggatagttcttgcagaccttatcaactaacacatactggcctagggggttcaatactttaaccacaaatttaatggactcaataggtaaatttttactagacactaaattcatgcaaacatatgaataagtcgatctaggattaatcaaagtagttacatcagtatcataaagagaga

SEQ ID NO: 9387 - DNA, 601 bp, Gossypium hirsutum
ttattgtagatgacattggctgcatgtagttaaagggcaaaattataccgttttcatcattgccattcactttcaaaatgcatataaaacatgaaactacattaccttcctcagagtataaaaagattcgagatatttggaaatggtgaatgcatcggatagatcatgcaagggtcttagaagatccctaagtataacaacatcagacagagcaacagtcattccccctccggttatagggtgccgcatgttgagtgcatctccaatcaaaagcgcaccaggagtcaggtgtggagcagcagccatgattttattcggcattattcttatgttacccttcttctctattgcagatataaaggaattgtacacttcaggaagaacctgaaagatattataagccatacagttagtccataaattaagccaaattcccctaatgaatgaataaaataaagatctaaatataccttgggagccaccagagttttcaagtaacatgccatttcaccattggaaactgaaggtaccttttcactaggaacattcaccatgcaacgaatttcagtgctgctaattggatacaatatgattggtgaag

SEQ ID NO: 9388 - DNA, 366 bp, Gossypium hirsutum
  misc_feature (276)..(276): n is a, c, g, or t
ttgctaatccgaaagggattaagtgggcgtatactgggaaaccgagtaaggtttcgagtccgaaatggaatgatttgaaggattctagccccagtaggagtcaacctgtgcctccagattggtggttcgaggacgtttcgatccttaggaccgatcatttcgtgagggttattacggcgatcaaggtgaagggtatgcggttcgagttgatcggggcgtcgatcatgcattacgcggcgaaatggcttccagggttgataaaagatggtcagggtncaggggccagcggatgatatgagtattagtaccaatagtaatagtagtggcggtactggtagtagtagtggaaaggcggactacatatga

SEQ ID NO: 9389 - DNA, 360 bp, Gossypium hirsutum
  misc_feature (317)..(317): n is a, c, g, or t
ctcctcatcttctattacttgcctccccctttactggtttgaggttcggaagggcttgttaggttttcattttttattaatgaaatgtcatcgctgtgtcacctggtaaaatcgcatatgatcattggtaaaattgcatatgatcataccttgagtatgatatttgatgttaaatcatcttttcctttacttcgttttttgcgatcattcgtagtactgcttcatcaaaatcatgtagaatttggggattacttattctatctcatgttttctgccgctcaggtggaataaagaaagagcttgcggctgcaaggaanaaggtcaattacaatcatctattctttcaggcaaaatgttaga

SEQ ID NO: 9390 - DNA, 631 bp, Gossypium hirsutum
ggttgttctaggtggtggacatggcccatgatactttgcttcagcaaattcattactttcctgacatggaaaggagtgaaatttgtaagttgggaaaccattttcagatatcaaattctgcttttttagggtttaatctctttgttgaagccactatgcatcccactactcagacaaaatccctacattttatttccccctagtcattggaaatgattttgtttttctactcatcattgtcttttactacaatttaatttcaaaaataaaatgattttaaattttttttatataattcgaaattgaaataatttgattaaaatatgacccaaatttatttaagtattgaatgatctaaaatctaatttattctaataccttaaaattctttttaagtttatgtatataaataatacaaatcatatcaaaatttatataatatttgctatacataacctttcccaaagatgatctcgacagaaaatgcatgtatgaaagagaggattcaatccaacaactatttgaattgtattaaatagaaacgttatatctattacttttaacgttcacacttaataaaccaatcaagtcatttaaagtcatattaaatgtgcccgtcactcttatcacc

SEQ ID NO: 9391 - DNA, 658 bp, Gossypium hirsutum
gcgttaatctctgttttgttggaagatgaatttatatttttccattcagttttaatatagatatgtaaaatatgttacaaaaatctaatttatttttaatcgagttcgagcagctccattacatcttgaactcgagctcaagcttaaagatagagctcttaattttgagtcgatcttgagcttgtcagtattggctttattacaacaaccctagtatcgaatccattattatagtttttaaaaacagtagttcattatctgatttcttctccttgatttcattttaatttcagtaacaggaaatggcagtcacattcaacgacttgggttctgctgccggcttgaagaagctcgatgagtatctcctcactcgcagttacatctctgggtaattttttactttaatgaaatgttctacagtggttaggtttgatcttgttcggtttaggatttttgtttatttgtttgtttttgcaggtaccaagcttcaaaggatgatatcaccgtctacacagctctatctggggccccatcgtctagctatctgaatgtttctcgatggtacaaacacatcgatgcccttttgaggatcttgtaagttctacttttatttgtgattatttagaagtttattatgtgggatttggatggataatag

SEQ ID NO: 9392 - DNA, 803 bp, Gossypium hirsutum
  misc_feature (556)..(562): n is a, c, g, or t
  misc_feature (567)..(573): n is a, c, g, or t
  misc_feature (580)..(582): n is a, c, g, or t
  misc_feature (586)..(588): n is a, c, g, or t
  misc_feature (590)..(594): n is a, c, g, or t
  misc_feature (603)..(605): n is a, c, g, or t
  misc_feature (610)..(610): n is a, c, g, or t
  misc_feature (618)..(622): n is a, c, g, or t
  misc_feature (626)..(631): n is a, c, g, or t
  misc_feature (639)..(640): n is a, c, g, or t
  misc_feature (642)..(645): n is a, c, g, or t
  misc_feature (651)..(660): n is a, c, g, or t
  misc_feature (665)..(666): n is a, c, g, or t
  misc_feature (676)..(682): n is a, c, g, or t
  misc_feature (684)..(684): n is a, c, g, or t
  misc_feature (693)..(700): n is a, c, g, or t
  misc_feature (702)..(707): n is a, c, g, or t
  misc_feature (712)..(714): n is a, c, g, or t
  misc_feature (716)..(716): n is a, c, g, or t
  misc_feature (718)..(727): n is a, c, g, or t
  misc_feature (731)..(734): n is a, c, g, or t
  misc_feature (737)..(738): n is a, c, g, or t
  misc_feature (747)..(748): n is a, c, g, or t
  misc_feature (750)..(754): n is a, c, g, or t
  misc_feature (756)..(760): n is a, c, g, or t
  misc_feature (769)..(774): n is a, c, g, or t
  misc_feature (776)..(780): n is a, c, g, or t
  misc_feature (782)..(782): n is a, c, g, or t
  misc_feature (784)..(786): n is a, c, g, or t
  misc_feature (788)..(790): n is a, c, g, or t
  misc_feature (792)..(800): n is a, c, g, or t
tttcttacctgctctgcaactctgatacattatcttccccaacaaaaactttacatctgtgtaatttatattattacttataaataaccatgtactatgttatatattattatcgtatatagagaaatacaaatacaatcatgtcttcccctgctctgttcttaaaaaaataaaaatgaaaaagaaagaatctacgtacgtatgtatataatcatttccatttgaatccaggctgctcctgttctttaattctcttcaaaactccatcaatggcgatatcgaatgcatcctttgtattgtttaaacccttttcgggttttgcataaactaatttgggaatgtattgaatcactttctccctcatttggtttatttcttgtttgctgtaactttgaagaacggttttaatggaggaggtaccgtttttgactaagtcacggtggatgaaaacagagtatgatttggggtcattgggtaagaaccattggtattgaaggtaagctgttcgatgccagaaaaagaccgggatcgaaccggcgatcatacagtcaaaaannnnnnnctccnnnnnnnccgcccnnntttnnntnnnnnctcctcccnnnttttncctttttnnnnnttcnnnnnnttcttttnncnnnncctacnnnnnnnnnnccttnnattcttttcnnnnnnntnccccccccnnnnnnnncnnnnnncttcnnntntnnnnnnnnnnctcnnnntcnntatcctaannannnnntnnnnncctagctcnnnnnntnnnnntnannnannnannnnnnnnnaaa

SEQ ID NO: 9393 - DNA, 446 bp, Gossypium hirsutum
agagggaattcatagaagatgaatacaggaaaaagattgaagaagcgaagaagaaggaggaatctctagagaacgacttagctaacatgtgggtgcttgttgctaagttgaagaaagaggtatctgctacacttgagagtaatacagataagcaaaatagtcatggaatggataatgttgaagatccaaaagcaaacaacactgagagtaacaatgtcctgaaagagcgacaagtttcagaagtgtcatcaaaaccagccaatgaaatacccaaggaagaacccctggttgttcggctaaaggtttgttctcatttctcatgtaccaccctagctcatttccttcactctgctactcacttataggctgttttaagattctctgatatatagcatgtttgcccctctttttgtgctaaactcagtcaactaacatgcagcacatca

SEQ ID NO: 9394 - DNA, 277 bp, Gossypium hirsutum
tttttttatcattttaaattgatttaaaattttcttaatgaaataaaatttgaattaaatatatttatttgagatgaaaaacataatattaatatataggcaactttaaacttacgttcaaagtctcaaaattattataaatattcaatattaatatattaaagttaggactgaaaccgataaggatagactgaaaagaaacgctttaggcaagtgggtttaacacaactactactcttatcttcttcttcttcttcttctttttttcttttttttt

SEQ ID NO: 9395 - DNA, 446 bp, Gossypium hirsutum
cttgtggaagacaattaaaaatgctagggccaccaattgtgttactagtctacctagctacatgtcaccagattacaaacattgttaaaaaggcattacctcaaaccattttcaagaacatgaaatccatgtagcacatgatagacattcatatcccaacttgagggggtgtcaaaatcaagggatgtgaactggtgcttggtagagatattttaggagtatttgttgtattttgtgcccattataagggcttgatatcatgctttgtggttgtttcttgttttaggatttttaccatgtatatatagagtttattgtaactaacaaaaaatgacaaaataaaaattcttttttctctaaaagattctctctcaacattgagaaacctttgccaactctaaacattttaacaataaaatgaaatggataacaggatgcaaatcgac

SEQ ID NO: 9396 - DNA, 573 bp, Gossypium hirsutum
ccagatttacgaacccacattgttgaatttagggaacatcataacttgttaggcataccttccaaggccaaattgacagtgtgacagcatgaacattgaacacttgtggctccacgaatgtacatcaataaggtatggcagcctccacaaactatctgggccatttctgtgcctgtaatttctaactttcgattaacatttttttcgtttgacagatataagaataacttaaaacagaagaaagattcagggtatgaagtgaatagcagatgatgtaccaggaggtggtacagctgttattgcattgcaaacagcacaacacacagaggttgctccagctggatacattaatagatttcggcatccagaacatacaagctggctttgagcccctgctcacatagatttggctacaatatcagttgataatggataaaaaaacatagtaacttttgttgatttagaaagataggttcatattatgatgagaccaagcttgtcagaaagcaaactagtgtttgaaaactaaacttgaaccattcatttataccctaatgcactactcatatcctg

SEQ ID NO: 9397 - DNA, 659 bp, Gossypium hirsutum
gggcttgtttagacaccattgctgtatgtgtataggtgatgttagctcttccatatgtgaaataaaaaaccacaaatgtttaccaatgttcatatgctttgattttaattttttttggttctttcgaaattctcttgagctaatctcaaaatattatttcgcttatttcatcataacaattttttattcctttgcctcttatatacatgtaatttttaacattaaaatctcaaaatcggattggagatcgaattggtttattttacggtccaattagtttaattgattgggttgattggttttgggtcagaccaatttagatcatgttaatttgaagtttttaaaatttcaggtttttttgtcatgtaagtttcgagtttggatcattttgaatctgatttaattgtgtttaaggtttaggatttttgggttgaataattattggtatagatcattttggattttaatcacttcgttattcgcgctatatttaagtttgaatcaatttaggtgtgattggagaagtttaagttgtttttttgttaacaaattaggttaatcgtcggggtttaggtttgaattgattgagccggattttaatatattttttataaagataaggatagcctaaaagatgaatttggagagaatgtcgatgg

SEQ ID NO: 9398 - DNA, 868 bp, Gossypium hirsutum
  misc_feature (222)..(222): n is a, c, g, or t
  misc_feature (244)..(244): n is a, c, g, or t
  misc_feature (324)..(325): n is a, c, g, or t
  misc_feature (355)..(355): n is a, c, g, or t
  misc_feature (361)..(365): n is a, c, g, or t
  misc_feature (372)..(372): n is a, c, g, or t
  misc_feature (375)..(378): n is a, c, g, or t
  misc_feature (381)..(382): n is a, c, g, or t
  misc_feature (414)..(414): n is a, c, g, or t
  misc_feature (425)..(425): n is a, c, g, or t
  misc_feature (432)..(432): n is a, c, g, or t
  misc_feature (494)..(494): n is a, c, g, or t
  misc_feature (517)..(517): n is a, c, g, or t
  misc_feature (529)..(529): n is a, c, g, or t
aggataatttctagggcttgtttagacaccattgctgtatgtgtataggtgatgttagctcttccatatgtgaaataaaaaaccacaaatgtttaccaatgttcatatgctttgattttaattttttttggttctttcgaaattctcttgagctaatctcaaaatattatttcgcttatttcatcataacaattttttattcctttgcctcttatatacatntaatttttaacattaaaatctnaaaatcggattggagatcgaattgctttattttacggtccaattagtttaattgattgggttgattggttttgggtcagnncaatttagatcatgttaatttgaagttttnaaaatnnnnngtttttntgnnnngtnngtttcgagtttggatcattttgaatctgattnaattgtgtttnaggtttnggatttttgggttgaataattattggtatagatcattttggattttaatcacttcgttattngcgctatatttaagtttgaatcnatttaggtgtgnttggagaagtttaagttgtttttttgttaacaaattaggttaatcgtcggggtttaggtttgaattgattgagccggattttaatatattttttataaagataaggatagcctaaaagatgaatttggagagaatgtcgatgggaaaatttaaatataaaacttttgttatttcatattgatttaatcaaatttgaaaaattacataaagatatcctaaaaaaacatcgttcttatttggttttttttttgccatttaaccttactgtaaaaaatttaataaaaaggttacccctattttgtgaatggattttccaaaaaaaaaaaaaaaatgttctat

SEQ ID NO: 9399 - DNA, 451 bp, Gossypium hirsutum
attatagatgaaaaagatggcaatactacaaaagaaattgcacatgtcttctatttcaactcagaataaatgaggaatatttataaagaccttatttatgagattcttctgcacaagtttgagtgatttaacctcctcttctgacttgcacatggtgattttgccctttacaacctccaactaaaaagcagttaggcggcacttttagatctgtatcactctagaaaaaccttccaaaagaacgcactcaatgctaataaatgacatacacttttccacctcagacttacattaagattatagcatattaagtcaaacatgatggcaaagtcactgatatacgaaaaaaaaagaagtatgagctactgtaggcacatcagcatacaagaacctaattaaatgggaacctaaaagtagaaaacaattgtccaaactgaatgatctactcatg

SEQ ID NO: 9400 - DNA, 584 bp, Gossypium hirsutum
  misc_feature (532)..(532): n is a, c, g, or t
  misc_feature (538)..(550): n is a, c, g, or t
  misc_feature (553)..(574): n is a, c, g, or t
  misc_feature (577)..(581): n is a, c, g, or t
gcagaaataatagggtgctcgagcgatgatgatgatgcgtgggagttgcctttgatggcactgatggacccatttggccgctaccttgctcaccatcttgtttcaccctctgtctcggtttaggagaagattcttcagcaatacccccgctgccatcgaacttgaatggttcattctcgttatccgactcatcagagctagaagtctctcctgtagcttgtgcttctgtgacctgcattgcaagcattgaaagatataattcaattaacctacattatactcgatcttatccaaaacgcagagaaaggtaagataaatacacttcaatattagctattcctggttaccctacctcagttaaagcagattgaagtagtgtatttatcttacctttctctgcgttttggataagatcgagtataatgtaggttaattgaattatatctttcaatgcttgcaatgcagatcacagaagcagaagctacaggagagacttctagctctgatgagtcggataacgagaatgaaccantcaagnnnnnnnnnnnnnggnnnnnnnnnnnnnnnnnnnnnnctnnnnngag

SEQ ID NO: 9401 - DNA, 315 bp, Gossypium hirsutum
tgattgacctatagtactaaacttgtaatgcatggagcttgtaggtgcttgttccaggtgtaaataagggatggttctgtcattgtctaattatagcttgaacctatattcttaataactttcctggactgctatttgagagcttgatagaaatgttatttgtaggagcaagcaaagttggcctggggagaggaagacatcccttgcatatctcttgccacaggtgcatctgcaatgcataaacttcggtaaattgcaaaccacttgcttttcacaggcatccgctttttttattcctgaacccctttggatctg

SEQ ID NO: 9402 - DNA, 458 bp, Gossypium hirsutum
  misc_feature (140)..(140): n is a, c, g, or t
  misc_feature (165)..(165): n is a, c, g, or t
  misc_feature (180)..(180): n is a, c, g, or t
  misc_feature (184)..(184): n is a, c, g, or t
  misc_feature (235)..(235): n is a, c, g, or t
  misc_feature (329)..(329): n is a, c, g, or t
  misc_feature (369)..(369): n is a, c, g, or t
tttgattaagcattttattttacatttgcttttgtcaatagattgctcattgagttatgggttatgcctcattggtttagccttcatgattgacctatagtactaaacttgtaatgcatggagcttataggtgcttgttncaggtgtaaataagggatggttctntcattgtctaattanagcntgaacctatattcttaataactttcctggactgctatttgagagcttgatngaaatgttatttgtaggagcaagcaaagttggcctggggagaggaagacatcccttgcatatctcttgccacaggtgcatctgcaatgcataancttcggtaaattgcaaaccacttgcttttcacaggcatcngctttttttattcctgaacccctttggatctgtcgaagtatatactaacagtttatgttgttttgagagcagtcctcaaccatcatggg

SEQ ID NO: 9403 - DNA, 618 bp, Gossypium hirsutum
tcttaattaaatcgtctaatcccccaagctgatacagaaataccagcaaaaagtataatgtggctgaaatacatccataaaactggggtcaaccttactactaaaggttttcatgtttgtaattcccagtgtcaaacattatgcacttcaaaatcaatacttaggttataatgtgaaatgcaacagttcaatagtggatttgcaaaaactgaataaaggaaagtggaagcccccatactccaatagagcaactcaacctacaatgaaaaaggcatttccatggtcactttgtaaagcattagttaagccatgatgaaaatagaagagtaaattaccgtttggtttgaattgaaatgaaactgagcttgtctcacacgcaccccaacatatttccttattccatttggagcaaccgattagtaacctcgatcacttgagaattttgcacattctgtacgtgcgtgatcaaaagaaacaattataaagaaaggtaaaaccaacgttttcaaaagtaaaacacttcaaaatgattgttaccatttcatcgaacatgtgttttatggtagtgttaaggtcgccttcccactgcagttcaccgtcttcatctcctggtaaatg

SEQ ID NO: 9404 - DNA, 513 bp, Gossypium hirsutum
tcgacttgtaggtgactcagcagcagcccctgctgctcgcggatgcaaaggggtgacagcaccactgtgtatcctagagctgggaccagggctcgtcattctgggactaggtaaaggagaacactcagggctacacctgctttgtggccaaagcaactgccctgacatatctccaccaacagaattatggcctgaaccaggactagagcattgtccagatcccaggaaaactatgtcagagaaaggctttccggtaccaggaccagagttccaaacttgctcaagaccaaatgctctcaatggacttctagaaggacttgacattgaactgtccggggcactagacaaagcaccacgctgaggtatctgtaaattctgcacatgattgttcattgatcctcgcttaggtgacgtggatgggtactgattattaaaagatatattagatggcttcagtatctcttttgactcctgactgacgtcagacaactgatccatgtgctttgtgctaca

SEQ ID NO: 9405 - DNA, 549 bp, Gossypium hirsutum
agtagccagaatgccttcacaggactcgctggcactggattttctacttcttcattctcctttggatctgccacaaaggatggtcctacaggtgcttttggttttggtctttcaacaaatggaaattcatccctcttcaacacatcagggacttcaattgtttctaagagtgagggaagtggatttcctgccttgcaggaggttccagttgagacaggagaagagaacgagaaagttgtattctctgctgattctgtgctgtttgaattcatagatgggggttggaaagagcgtgggaagggagaacttaaggtgaatgtctcaacagctggagctgaaagagccaggttgctcatgagagctagaggaaattacaggttgattctgaacgcaagtctttacccagatatgaagctgacaaatatggacaagagaggcatcacttttgcctgcatgaatagtactggtgaagacaaagagggtctgtctacattggctttgaagttcaaggactcttccatagtcgaagagttccgtgttgctgtaatg

SEQ ID NO: 9406 - DNA, 259 bp, Gossypium hirsutum
  misc_feature (111)..(111): n is a, c, g, or t
cagtgatttagagcaaaaacaatctcaatggtgatattccatatcaactacctcccaatgctcaacgcatgtaagtcagctgatctaagttaatcagcatgaaagctttantttttttttcttcttttctttgcaagtcatattcggaatataactaatggagttccccagtctgatcttaattttgtggccattggttttcctgttttaaagtcatgttgcttgcagcttttaaaaatggtgtaaattattatttagt

SEQ ID NO: 9407 - DNA, 717 bp, Gossypium hirsutum
  misc_feature (599)..(599): n is a, c, g, or t
cattcaaagccatatcaacctgttaaaaaaatattgcgcaaattgaatatttgagatgattgatattttggtcatatgttactcgggattgagtaagagtgtcagatacgggtatgtaagtttttccatgtatttggtgggtctttagaaaatcatgtccgtatacccatttccgtaaatgtatcggacatgaatgtcgaatatgggtactctaacaaaaatgaaagtctgaacaacataggttgagatacctaccagcttcaaggaaatttttggatcacaggaaaaatcaatttgaatgtcaccaccaatatctccggttagacatggcagatcaccatgaatgaattccgaaacacttgcagaatagatctgggaacacagtgaaaaatattgttcacacaaaatacaaggctattgaataagacaaatgatgctctgaaatggaaatacacttggatatgtatccaacacgaaaatgattagatttttctaagtttttcaatgtatttagaggatcctttgaagtcatatccccttaccaatgtgtcaaaaacaattttcaaacatgggtacttcaaagagagaaattgaagcanaaaacccatgtttgaaaattgtttttgacacattggtaaggggatatgacttcaaaggatcctctaaatacattgaaaaacttagaaaaatctaatcattttcgtgttggatacatat

SEQ ID NO: 9408 - DNA, 415 bp, Gossypium hirsutum
cttaattttttaaccatctgaaaggagtgaacctccacagccagtcacatcgaattcagtaaatgaaaatggagtaacgacaggtttctctcttttcttctataaatatcttgttagaaagtggaagccgcattaacagaatctaactctactgcaaattgcttagcaatatcttatgggaatatgtagggatagatagcgtctgatttaaaatatacaaagaaggctaaaaggaacagttggttctataaggttgagcgtttgctatctttattggttttacatagagcagctaggaaaattgaaacttgatacataatgttgtttctactaggttctgtagaggtatgtattccaagaaccacctgctggcaaaatgcatagatcaattttgggtgtatcttattgttctttg

SEQ ID NO: 9409 - DNA, 557 bp, Gossypium hirsutum
  misc_feature (548)..(548): n is a, c, g, or t
cttttttttcctataaatattaggacaatttaccattaaaagtcttttttttttaaattttaccgaaatgggcccagtattttattatttactggaatgggcccttttcccctaaagcgcgtccacgttagcgcgaagttagggaacgtgtcagcaaatcgcatccacgtaacgcgatttgagtcaacgtcagcaaagcgcactaacgtagccgcgatttgttgccatgtagcgcgcccctagggacacgatttgctccgcgcgggaacaaagcaacggtcatttttttgaccgttccccccccaacggtcaaaaaaaaatctataaatacccccaccctttttttttcacaaactaatcctctctcaaatttcctctcaatttcctctaaatttcctctcaaattccttccaaatttctctgaaatccatatttaatcccaatttgttcttaattccccctaaattttccctaaaacccctatttttaaaaaattttaaaaaattgttttttaaaatttttttaattcgaaaaattttgacaattcnaccaaggga

SEQ ID NO: 9410 - DNA, 665 bp, Gossypium hirsutum
gaataggaaaaagagtggatccgcaggatcccaaatgaattggcttattcgaaaaaagccttgttctttggaagatctatctcgtgcctggtactgcatggttccactctgcaagaacgccgaatcattctcttgaagctcatccttttcatcataaatgatccgcttgccccgaaatgacccggcccaatagggaaatcccaattcatttggcctttcgatacaatcaaatagaaagccccaagggcgccatatcctaggagcccaaactatgtgattgaataaatcctcctctatctgttgcgggtcgagtactccttctccttccccttcttcaaactccgattcgtatttttcatagagatttctctgatcaacgatagaacaagatccattttgcatcatatataagggattccccggctcggaccgaagaagcaatgtcactcgatcattatcaaactgaccgcaatctttttctgtccgtgaggatcccaccagagcgccttctacttctaataggccatgaactagatcagaatcattctcaacgaacccataagaagtgatcccatttttttcatcgggtccgggtagagaccaaaggtcttgagcgaccgatccggcagaacaactcaaaagataaagaagtatcgttaatttct

SEQ ID NO: 9411 - DNA, 499 bp, Gossypium hirsutum
tagaaggcaaacgaagaaaaagaaaagaacaaaatcatatcagtgaaaattaaaacaacagaaatttcagggatgaaaggttttaccaggttaacgaaatgaaatgaagaagccaaacgttgttttgatgaaaaacaagacatgcaataattttggcggtcacccaatgtaaaaaaaagaagctatcggctgctagcctacttggttcagatatttattcttttacattttttgttggttgagatgaagacgaccactaatccaaaaagaaacgggccagtaaacataaatttctattagacccagtgtctcagcccatgttattaggcctattggctattaatattattgattggtaggtttcgtaggggtcttaaattctcttctaattccaaaccctgaatttcccttcttccaaattcaacacttcattcactcggcgacgtcaagcacttaaaggttagtcttccttagttttcctttctgctattctattgct

SEQ ID NO: 9412 - DNA, 545 bp, Gossypium hirsutum
tcaccctctccatccccagcactcatacgcaggtttttttcttcgacaaaggccatatcatagtgatcacaaggtatatggttgtgaattatgcaaggaaaaatgtaacatgtttttttatcaatgttatcatcttggttgttggttttccattgacatcaaatgtgctaaattatcttcttcatataagtttaaccaaccatccaaacatgacatccaccaacatccattaaccttcatagaaagtcccacgtcgaccatagatgtacccaaaagatttaactactcctggtgtcatgaaacattgatagatgctatatatttttgttgtgattgtccattcatcattcacaagaaatgccttgatgagttacccactgaaattgatcaccttacacatcgcttacaccctcttattcttaaccgtagtgatagtgattacttgtgcaacccatgccaaaacaaacattccggacctttttacggttgttctctttgccattttaacatcaatgttgaatgcgcttggccgaggtctactgttg

SEQ ID NO: 9413 - DNA, 676 bp, Gossypium hirsutum
aggctggaaatagatttgtctcgatgcttcaaattgcttctcgattttattcttcgagcattgtctacagagccaattttcgccctttgtgcgaatctgttgaaaatagtcaaaattaatcaaaattaactataaaattaattaaaattcatcatgttcatatttttaacataatttaattattttataatattttattatttttcgacaagaatttaaccgaaataacatgattttaagttaaaaagggcatgtaaaaacacataaattttcgtgtttctacaccccaaacttaattcattgctcgtcccgagtattgtagaaatttgaaaagaattttttgagaaacactttttgaaaaaatcgttcagaacaacattcttcccaaaatcatgaaatcaatatacttatgctcaaaaacaagaaatttgataattatgctactcaagtatatatatcattcaaattaatctcaacaattagtacaatagaaaaattagactaaatgtttcttaataaagacatgttaatccctaccaatttgattttaatcccttattcaaaattaaactacaatcattaagcttaactgatgtcttcatatgttgaacagaacaatttctctccactaatgtaggtaacattggaactttgaatcaacaggtcttaaacaagg

SEQ ID NO: 9414 - DNA, 478 bp, Gossypium hirsutum
  misc_feature (37)..(37): n is a, c, g, or t
tcttactgatttgtttgtctttgattagcaaacacanggattccaacaataaatcatggttttaaatttaacaacagaaacctgctatattctcaatcatgcacatgaaattaaaaaaaaaagaaaaaaagtgtattgcttgaactttctttcaaatcactttacaataccaaaaagaaaaagaaaaattgatcacacagcactaagaagaatttcatcctaagtaaactgcacactgtaacttgaaccccaaaataaacttctacaacttctcttttgtttccctatgttcacagctttaatcagaactaaaccaaattgacttttaaagcaccacaaacaaataaaagaaagaagcagtgcttcactactcacagcaacattacaagacaatagatttctggtgtgtgttggttgtgtgcttgctgcttaaaaggggtcctggactttaggcacccaccaaacccttataaattgg

SEQ ID NO: 9415 - DNA, 467 bp, Gossypium hirsutum
tgtgctttcaacagcagttttctgtagtttttatttacatatatgttttttggtgatatttttatgtttttactttaagcaggtataccaattatgaaagtcgaaaggcctgtgagttatctgaaaatcctcatgcatcacttcttttctactgggatgggcttcaccagcaggtaggacattggattttggcttgtgattattcattatgaacattgaacgacttttgttgatgtgaaaattatcttttgaagaaagtaaagatgattcttctaaaaaaacatggctcatatttgaatatatgagtaacttctgcatgctaggattgaaattattgaagtttacctatttcagataccgattatctatcatttccttttctacacttgattttttttgtgggaaacatgtcatggtggactttaggatttagtgcggttcatgccaactgttgaaatcccttatgt

SEQ ID NO: 9416 - DNA, 532 bp, Gossypium hirsutum
aagaaacccgaatctgtgccggtggtttgtgaatacccggatgtttttcctgaagaattaccgggtttaccacctgttcgggaggtagagtttggtattgagcttgtacctgggactacgccgatttcgatagctccgtatcgtatggcaccaactgagttaaaagagttgaaagctcagttgcaagaattgacggatagaggtttcgctcggccaagtttctcaccttggggtgcaccagtattgttcgtgaaaaagaaggacggaaccatgaggttgtgcattgactatcgtcaactgaataaagtgacgataaagaataaatacccactaccgcgtatcgatgatttgtttgatcaactaaagggggcctcagtgttctcaaaaatagatttgagatcgggttattatcagttgcggattcgagattcagacgtacccaaaactgctttcagaacgaggtacggtcactacgaattcttagtgatgccgtttgggctcactaatgccccggcagtatttatggattaga

SEQ ID NO: 9417 - DNA, 491 bp, Gossypium hirsutum
ggaaacatacccgactttcttaccccttagaaaatttccactcagatgtatctggtaggagctttcacaatggacgtttcatacaaaggatgcgggagaaagcagcttctcttcccaagtttgacttttccttctttagatattagtcaattgtttatttgttacgttcctcatattcattgctcaaactttttactatttaaaaatttgatgcttcgatgtgaatctttgaactgcctaatatagtggtgttgtaacaaatagtgatttaatatcaaggtacttgtaccttttccccctctttcaccagtgtacgtttagagcaagggacggttacttctttacttgaagaaaaagggacaatcagaggagtgcagtacaaaactaaagatggtcgagaattgacagcctttgcacctctgaccattgtttgtgatggttgtttttcaaacttgcgtcgctccctttgcaacccaaaggtgagttatctg

SEQ ID NO: 9418 - DNA, 634 bp, Gossypium hirsutum
cctctcgagttgacttgaagagattggttttcgctgttttaaatcttagccgcttttattaatctgggtttcgcttcaatttgcttcaacgacttgctatatcattgcatctcaaagaaagtatcctggcctaggcgcctcgctgaacctgaattggaattttctatttctcatctgcattttgcagaaaatcactatcgacatcattgatttggttgtcattttaaacttgctatcttaataaggggttcaatcagatatggattgccaacctggcaagtaataagagcattttaaatgagttgggttgacctgaacatttcctacgggttatgattggtagtttagtttatttatgctttaatgtaggtgtttgtggaagataccaattcaactcaaaagaatcaattgttttagcagaaagctaaccgaaggcatagaaattaataatggagaaggatgatcaaatttattaactaagcaatgcttatacatatatgtgactcaagctaataaacacaatttcctactcttactaacaagctaacgaacttgcctttttactcctaataaactaacaactactaaaaagctaacaatctctcttgaaacactagcattctcctcctgattc

SEQ ID NO: 9419 - DNA, 189 bp, Gossypium hirsutum
ctcctggtcctgggtatgcccaactccgcctttctgaacacaagctgaattcacttcttcctcctcagcagcattcacggttacaggagaagcagcagctgtattaccaccattgactgccacaagaaataatataacttcaactacagtatagcttttccttttttattttcattccttgactcacaa

SEQ ID NO: 9420 - DNA, 653 bp, Gossypium hirsutum
gaatagctgaaacaccttttgtgtgcccactccaagtgtgtactaatctctttggtatataacaatgatcattcgttgcttttgcatccttaggaggtgcaatccaagaccttccttggtagtctcgctcctctttgccatgaaaggtagtcttatccaccacgtgctcgcctttctcacctttatggcctttctcttctttcttctttgcatactcctctgcatacttcttttgctcctctgtcaactctgtttgcaccccctcttttttacctgcccaaggactccttttattcttcatcaaccaaacatcagtagctggattatcgatctccgttggatcaacctcatcctcatccttctccctctcaatttttcgcttcttttgctcatgttgtgggatgttatagactgaaatggcatcattcttctgtaaagcatccaaatcaccaatatagttgcttcctgaagggtcggccgcataaccatatttgtggaaggtgttgtattgctcatcaaaaacaaaagagtcgatggaggcatcctcaacaaatcccagcttgtggttgcgcatgccctgggcaatgccatccttagcatatggatgagctgggccataggtaggagcccagagttggtcataggttggattg

SEQ ID NO: 9421 - DNA, 657 bp, Gossypium hirsutum
ccaactcaatccttcttttgttcctcattgacttcccaaccgttttgagagctaatggcaaaccgccgcattcttttgcaactgcccttgctagtggattaatgcttggtacttcaaccacatcaccagcattttgagcaaacaaattccaagcagcttcttgttttagaacatctaacttgatctcttcatctgtcatcattgctcggcagacatcgagcgatcgagttgtcaagagaatcttacggttggcttgatcatcagtttgtggaactcccacaatgtccaaatcaatatgctcccaaacatcatccagaatcagaaggaactttttcatcatcaatcttttaagcagcatcttagccctttcttctatgacctcattgggatccaattccaagttcaatctcttggctatctgagattgaacctttttcaaatccaagtccttggacactgtgatccaaatgacaatatctattgattccatcaacgaagatgactccagctcgttgttcaggttccggaccaatgtagtcttccccactccgcccattccccacacagctatcctcttgttttcgtcccctttcaacaattccattagtttttctatcatctcctcagcttctctctgaccggctagagacggtcctt

SEQ ID NO: 9422 - DNA, 513 bp, Gossypium hirsutum
cagcaaagatgttgtaatgtaacaattttgtattttataattttttttataaattattaatttttttatttctttgaattttttgcatataaattttttttataaattttaataaattaattattttataggcttgcactcattttgaatgaatttagataaattgttgtccaagttcattctaaatatatttatcaattttaaaatatttttttattttttttatttttttttaaattgtcatgtcagcaccctttgcacgacagcacactaaacggttaaagcagtcaattgacagtttccattaaatgaaaggtctagttgattatttcttttgtcattgaaggtgaattttttaagggcttaattgatttttttttattctttttacttagggcttttttgactcttaagccttaaattatcacatgtgatgtgtaatgaataattgacttttctctataaatgtgattaggactcatgatttgaatagaaacaacatgaacggacatg

SEQ ID NO: 9423 - DNA, 536 bp, Gossypium hirsutum
ttttcttctctctttttgtttgtgttttcacccgggtttttcattctgttttatagagacctgaggaaaggaaatattaataataattaatgtagaaaggtgaggcactttccccggcatacgaaaaaaaataaatccaggatgacggctttcaaaagacgagtaagagacggggagggggaggctctcgaaaccaagcgagactaaaaagaacatgggaattcgcaccattcctatgagtgctttttttcgaaaagccaacaaagggacagccctctttctctatctcggtctcggtttagcatcatcatatatcgatccggagataatttggattggttgtagtgcggattaaggagctgctcctccatgctgtggctgtggaggtgggggctgccgccgcctgatagaggcagaagccggggccaccggagctatctgcgtcgagtgtgtcgattgaaagaggaggggagacaaaatgaattccagcgaaaaaatagaaagagtcgtgccgttcacagtggaattcgtctaag

SEQ ID NO: 9424 - DNA, 440 bp, Gossypium hirsutum
catggaaaggtttggatgtaaaggaatgggaaacactaaaataagtacagaataaagagattggtgttcaatcaactatccaaacatgttgaagacaaacgaaacaacaggaaaaccaaaacagttttgggatttttagtcagctcagacacaacgacagcaacaatcttgttattcctatagatctgagtacaattactagactatgaattagcaatttagcattgaatacgacccaatataccaatcccattcactcataccctgagaatctgaagcttggtggagaaggcgatggcaacccaatcaggctgggaagatgaccactgtaactgctcgatttcagccccagcggtgtaggcaaggatggggtcaagcccaccctccacaggctgactcatggaggacaagtcccaaatcaaggcctgggaatcatcccc

SEQ ID NO: 9425 - DNA, 623 bp, Gossypium hirsutum
tggcatccgagaagccagtggtgatcttcagcaagagttcgtgttgcatgtcccacaccatcaaaacccttttctacgactttggtgtcaaccctgcggttcacgaactcgatgagatttctagagggcgtgaaatcgaacaaactctttcgaggctcggttgcaacccttctgtcccagccgtcttcattggtggtgaattcgttggtggagctaatgaggtcatgagtcttcatcttaatcgatccttaattccaatgcttagaagagttggggcactttgggtttaatccaaaaattaatccactaacttgcatgccaaggcactaataaaattgtgattattatatattattatatataatcacataaattagatccatgagagtgtagatttcaggtctaattaacagtgagcactactaattaacgacttctcttagtgagtgggtatgttatctatttggtaatgtactaattatgtttttttgagtaataaaagttgcgatttacatttacattagtcttttgtctttctaacaaacggtaaataatcctttgaaatttgagacttaaaaaaaagtttaaattaatttaaaatatcaaaatattcaaagatcgag

SEQ ID NO: 9426 - DNA, 575 bp, Gossypium hirsutum
gaatatcatcgaaggtgaggaaaaaaaagatcagattgcatccccgttcctacctttctgccttgagttaaccgaagtttggggtattcctttaaaactgacctaacctgctgtgctagttcactccatttctgtatttttaatagagaaaatttctgtgtaagcaaacagtgatttctgataataagatgataatagtaattgctattgggattttaccttttcatcaacacaacggaagtgtactgaaagacaaaacttgttgttctcaaccttagctcctggagttgattttgtagtatcaaccaattgtttgtaaacctggaaagttcacaaacaaaaatgaaaattaagctctttgctttaattcccatggagtggttgaattaatcaagactgtgaagaacaccaacctcatcaatcatgggaagaaattcactagctggttggaagagaacagactcaccatcctgtaagtgcagaagcacaggataaacgaggtgaaagagttgggaaaagtttatgttccttttaaccattaggtacaagcactgaaatgcacgagcgagttaatc

SEQ ID NO: 9427 - DNA, 650 bp, Gossypium hirsutum
  misc_feature (34)..(36): n is a, c, g, or t
  misc_feature (578)..(582): n is a, c, g, or t
  misc_feature (612)..(612): n is a, c, g, or t
aaaaataaaagttgctaactcaaaaccaaatctnnnaaagattttggttgcaatcaatatagtaaatcaatatagatttttagtaatagtaaataataagaataagaataagtaatacaacgatttcgaactctatttaaaatcaaaccaccgtacggtattttctttaagtatcttgtaggatactgttgttccagccacatttctcttttcgctctactagtaatttaattggagcttgaacccgagtttcggtgaggttgaatccacttttttcgttctaccttccttatttattttatctaattcttatctaattctaaaaaaaaactaaaaaaaaaaaaaagggggggggaaaaaaaaacccaaaaatttttattggtttcccaattaatttttttccccccccccccggaaaaaaaccccaaataaaaaaaagggaagggtaacccccccgggaaaaaaaaattggttctttttaaaaaaccccctaaaaaacccaaccaaaaaagtttttatcccgggggcacggaaaaaaatttttttaaaacccccatttaaaaccccccttttttttnnnnntaaatttggggaaaaaaaaaaaaaaccccnggttgggggggaaaaaaacccttggatttttttttttt

SEQ ID NO: 9428 - DNA, 669 bp, Gossypium hirsutum
  misc_feature (663)..(665): n is a, c, g, or t
tatgtctcttgtccaatttcctactaccaatataaaaatatatgtgttttctcgtttgctatacactgtcaaaatcaaaattaaaatcactaaataaaggagcagaaccgtgagcaatcggcttcctccaaacctcttccacatattttttagctaaattcttttatatatcaccatgctcatattatttgtggtgccaaatttacaaattctctggaccagttctttgttgcgtgggaaagaggagttgtggaaatatacatgtattcacttgaaagcagagcctagatactggaccttgaaaacactgctgctacagtgcttattattccgtaaactgtgaacacttatttctcctcaacgttgagcctcacattggatttgcatgcaagtgatttaatgtgtcccatatgccccttggcttccaaaacagaaatcgggagagtgaatttagattgtgaaatattctcatacggttaaaatgattgatgtattctaataaaaaaaatccaattaaactaaaaataaaagatattgaactaatataaatttgttataaaataaaaagagataggaagaataaagaataaagaataaagaaaatatgaaggtaatagagagtatactttattgatcaaagtgatgattacaatgcttcatcannnactg

SEQ ID NO: 9429 - DNA, 546 bp, Gossypium hirsutum
actctcatttgagtagaaaaatccatagctttagaaggccattaactcaaagcatgccagtcatcatggacctcaccaagacggccgtgattgctaagcggaaaggaggtagaaatagcgaagggtcgatgaaggaaatcaaaagccgcagtacccagaaagatactggaagttgttcaaataaacctgctgaaaacgtttgtgttaatgaagttgtgccattcccatccactccattgttagaaaaagaaaccttgtccactacagccattgaagatcgcatggtactggatcaacatggagaagataaggagagaacaacccatgttgtacccagtccttgtcacgacaccgttgttgaaggaatgttgggttcaagcgaggagagagagagcctggtcagtgaggaaggaaccatagagaattcaatgcagtgccctagtggcaacgctgagaaagggactggtattttagcaccacatgagagtattgatagcagtgagatagagtggtttaatgatatcctggatagtgaattgctacagc

SEQ ID NO: 9430 - DNA, 686 bp, Gossypium hirsutum
caaacagcgatgacgacgacgatgactcaaaacctttgagtgcaaggcttaaggggatctcaagccagggcaataaaggggtgagcacttcaactcctgcccagtcacagcgattggtaccaaaaattgaggtaaaaggatctgctgaagatccagatgatgatgctcctttgtctgcgaggttcagcatgaagtccaatactgggacatcgagcagtaagccgtatggatctcatgagaagaaacctctgccttctaaaattcagcagaatggttctatcatgaaggacaagcagcaaaagtgttccgtgttatcagataagagacctcttgataaaggcaattcatcagatcagtcttatgctaagaagccaaagatttcagatactcctacaacgatgaaaaccaagcaagttactgtgaaagcagaaaaagatgatgaagatgatcatattccaatttcccaacggataaaaaagtcggtttcatcagtcagtaaaacatcatccgtgaagcaaaaggcaaccaaggttgtatcttcatcatttaaaaagataaataagtcgaagaaagatatgaaaaaatctaaatatagcaagtcaacaaagctgtcgcctagttctggtgatggacagaaaaaatggagtaccttggttcacaatggtgtcatattccctccctccata

SEQ ID NO: 9431 - DNA, 395 bp, Gossypium hirsutum
tgtcaacatcttgagtgggtgagattcttttctaacaagcatttcataagtttaatctttcttagtctaatatttaagtgaaaacatatttttctttcttctatttttgtaatttgtgatagcggcattggaactcaggattgaatcggatgggaagattcaacacgttcagtttcctcgggagcgattagaataatttagcagatgatatgagtgtttttatgttcatcataatttctaaatttgtatttgtgggtgttgtgtaattatgtttaaatactccataaacttaaactgtacgtgaagcaaatattactgtatctgttaaattcttattgtatgaattccaatgctaaattcttgttgttatgatggagttcaaaatgaattttgtt

SEQ ID NO: 9432 - DNA, 585 bp, Gossypium hirsutum
  misc_feature (23)..(25): n is a, c, g, or t
aaagagagcatgtagttttagtnnngaaaggacaaatattgcacattaaatcctaatccagcaaaaattgcttgagcttaatagaaaatccaactgtttttatctcttcattaaggaagagtgcgaggaaataaaagttcaaaaaggaaggagccaaagatcatataaaatagtgaccttaaatagttatatcaaaactaacattttcttttccagagggccctacactgatcagcttgtagagggtaagaacaccatggaggtccctgtagtaggtgtcatattgtattttgcccctctactaaaaaaagggcaaaatagtctctatatattagatcaaagagcaaactagtcctattaaaaatttcatccattgctattgttgaaaactggtccatgaacgtttgcatgaggtacacatggcaccatttggttattttgttagccataccagtttttaacagtagaaatggatggaatttttaacaaaaggaccaatttgctctttgatctaacatacagggactaatttactaatttttttagtagagggggtaaaatgcaatccaatcctagtacaaaggc

SEQ ID NO: 9433 - DNA, 450 bp, Gossypium hirsutum
tggagggcccatagaatgcccgatagtttgtccaaccatccgcctttggcatcatacactttttttttcaaggcttgaagaatctttttgttggtagctttagctttgatggttcgcctgggagatcttaacagaagtgtggttcccacaaaattctttaaacaaataaaattttgttgtttgaatttaatccatttcatctcatgccaactgctaaattataccacactttgatttatatctctgtatatattaggaaaaaaagatgaggaggatacctccctaataacttacacaattgcttatgtcgaccctttcacctctttttaaaagataaaaggcctttaattagaataggagagaatgactaattatggctatatatttctttaatttggagttagaaaaaatatttattttatttctatgcaaaatttccaatttcatgca

SEQ ID NO: 9434 - DNA, 628 bp, Gossypium hirsutum
cccttttggctctcccataagtcatataaattaggcataattacttttttcttctatctttttctaaaaaaatcattttacttctttatttaatttttttactttttttaattcttatacttacattatctatcaaaacatcttaaaatagaaaaaaagttaaaatttattaactttaccgttgtggcattaacggctaattaaaaatttaaaaaattattgctgacctggtggcatttacatgtttgccacatcaacaaagttaataagtattaatttttccatctactttgataaagattaaaaaaagtaaaaaattaaataaaggaataaaataattttttttataaagttacgcctattatatattaattattgataaggcaacttaagttccaagaataaaacatttaatttaaatgttagtatttgatatacaaggagtttaatttttttattccacaagtaaacttaaaaatttgtcacgtttatttttttaatattttattatactactatagatcacttgtcaacccctaactcagcttgtgaaatctaaaaactttactaacaaaatattgaatattttcccttaatttaatttaaaaaaatcaagaaatgggcttaa

SEQ ID NO: 9435 - DNA, 654 bp, Gossypium hirsutum
  misc_feature (647)..(649): n is a, c, g, or t
taatactggaacttggttaatctaagagtgtttcatgtgaatcatgtgcaactggaaggaaagtttaaatttgttcctcaagaggcttcaattgcaaggatgtgcatcgataactcttccttcttatcacttttgtcctcaaaagcttgctgcccttactctaacaaggcaatgatatatcattatataagtatatatatatatacacagtctactttcttctctaattcattatataggtttgtggcaatttataagctgggtacttctccatatgcaatatgtgtttctttcaagttgcagaaaacttgatggccatgaatccgcgtggttgcccttatttggcttaacagttgggactttaatttccttacaccacttggatacaggctgttcaaaccttgctgaatttccaaatgatgtcttgcgatgaaaagtctggacaatggatagactccgaatgctattattcggcctatttggaactgggaaactaggtagccaacagcatggctaattttgggacaagtcttcgtgccgctccacctgattctattttaagggtcttacaagatgattgtaatggcttaatatattctagattgatgactccgtaacttcttttcttctctcccttcgattaaaannnaatgg

SEQ ID NO: 9436 - DNA, 647 bp, Gossypium hirsutum
atttggagttactgctagtataccttcggaattataattgcaatcaatattttaatattattataattaaattattacatgcacaaatgaacaaattaaaatattttgattaagatttatatattgtaggatttaaattaaaataaaatctgagttgataattcacgcaggctagatttacataataaacctagaatttaagtacttaaagttctatgatgttgactttttttatataattatatgtattttcattcatcttacggtttaaaattaattttatttgaattgaatgatatttctataactttcgtgacatgatttttcccttattttcaatttatccaccaaacaattttccattcaaattgttttcgtttccctaaattaaaagataaaacagatcagtgatcaatcgtgaattgatagtctaatggttatgtggcagtgcaaattctgctacctaaatataccaaaaatataaaattttgataaatttatgatattaagttgaagttaattcaatgaaaaaaataagttaattattattagattaatatttaattataattgtaactattgcaatggtattgattgtaattataatttccacttaaaagaacgatatgtgaggctggtgctcatat

SEQ ID NO: 9437 - DNA, 403 bp, Gossypium hirsutum
tcatattccccctcatcgcctattcattcaatattcccactcaaagcagtaaggaaacaagaaatctaggcctcagttggtcttaaaatggtttcaagttaggattcaaagcaaacatacattgcaactgtgagttgtaaagcatggatgatatgagacttctctgcttgcatagcaatactcctacttgctagaatcttgatttacagaaaagtggaagaaatgaaaaagactatcaaatatgggaattgacaagagacagtgtcaagatatataattagattagcaactcaaaccttacaccgtgcacattctaactttcttcataatacttactttacaggattattaataaagaaaagtgtcatatttccagggagaaagttactccttgtggatccct

SEQ ID NO: 9438 - DNA, 642 bp, Gossypium hirsutum
catcgagttctgatttttagccaatggacatcaatgcttgatatcttagagtggactttagatgttattggagttacatataaacggtttgatggaaggtgttgcttacattctgcttcattagaattttctttgtcctcctttatgggataaaagttttgttgttttcttttaaattgctggttccaattttctactatgaggcttaactagtgcaggcattttttacgggcagataaacatactgttccagtttctttttcctatacattctctaacattatctgtgcattgaatatatcttactttgagcagtactcaggtgactgataggcagactatagttgatgatttcaataatgacacttcaatatttgtgtgcttgttgtccacgagagctggagggcagggtttgaacttgacaggagctgatactgtaattatccatgacatggattttaatccacagattgaccggcaggctgaagatcgttgccatcgaattggccaaattaggccagttactatatacaggtgctcagaaatacccttcttttcccattttgtatttcttcttcttggctcatcaatgcattgtgaagttgtagatgcaaaattaacatagtttcgtatcatttgcag

SEQ ID NO: 9439 - DNA, 651 bp, Gossypium hirsutum
cagcagatatgatggatctcctccctggttatcaatcaaacacaagaaaaccagaattacatatcacaaaccaaagtaccaccagggatgggcaatgtgccatgactgaattggtgagcagtcaacctgttgcacatggatcttcaaaactacaacctgttacacctcacaatttagttgacaaagaaccttctatatcagtctctgtaagtatagctccacttacttggaaattctttcactataatgttgaactttcataagaatgatcctcttgtttctgaaactttctcagaatttgaccacagacagtgcttcaagtaggcaggcatttcgccatggtgctgaagctgctaattgtcccaaccacaagtcagcagaggtaacggataccctatacttatatgaaaggtcgaatttcgaagatatgacaagtgtccaatcacagccttcagttgatccatatgattgcaaggtgatagaatcggctgttattattgaagatgttactagtaacacacctgctgacatcccctcgtcttcgactgttgtgccacatattcaacatgtgaccagtggtgaaactcaaactgctagaggatcaaaggaagaaaaaaaatctactcgtaaggtagcatatttcgtcatcta

SEQ ID NO: 9440 - DNA, 460 bp, Gossypium hirsutum
gagggacttgacgaagggaattttaactttgaatgtgaattagtcaaccatataaaatatattttgttttcctatcggtcaggctcttgagttttttcagtcatctttagctaagatattgtggaaaacaagggaaattaaataacttttaagtatgcaggaaaagtttaccacaatcctcctatttgtgaccgtcactactcactacatgagttttaaaataacattaattccatgatttctttgaccattttaccatatattttccgctacctctatttcctttgtcctaccgttcaacatgttctgtttctactccttaacaatgagtctctttctctttactcatcctcttcttttggtgcttcaactattcctccctatcttcatcttaggactctttgcccttattggatgaacatttgctgcctgtgttttggccgaacaattgtttgggcag

SEQ ID NO: 9441 - DNA, 515 bp, Gossypium hirsutum
ctacagaagaagattctactttattgaaagcagtctttacctcagagtaacttgttggcatcagccccagcacacttagaacattcctgattatcttttctaaagcagccaccgattctatccgcgttgcctgcttcttcccctgaaaggattccttatatcaattctaaagaataactggcccctaattcagaaggactcaacagttcaatatgggttcatcttccattcatccctggaatgggtcaggttgtggatagtaatttatgattctgtgtttggggccatgctttgcttatggttaaactacagataagctgtttgaaattgaacataaatgcacaaaattaatcatcttaaaacctgataccttacgcgtatgtagtagatcattgatggttttcaatgggtcagataatgctgccaaaacaactggagtatggagatcatcagacatggaagttgaaaagtcgttatggaacttgttgatgacattcaaagtctcaggcggaatg

SEQ ID NO: 9442 - DNA, 670 bp, Gossypium hirsutum
gcatcacttggtaagaaaaatggaaaaaaaaaggtaataagttttttttctttcgttttattgattttttaccttctctatcaagtaaaaaggctcgtatgaataatcctttcttcggattttgaagtttttgaacctctggatagagtaacgtaaacacccaatacccagggtgaaattttattaagcagctttgtaatgtatgccatttttgtatactcgaaattgagaattctacttttctgaactatatttacgtatattattgcaaagatggccgtatgtatatttcagcttcagtatattcccccttattgcaccaccatgttctcatgtttctttcatgataaaaagttaaaaatccaactcatcgattaactcgaatgaaaaaattgaaatgatttaaatttaaaatttaattaagacttaaaatgatttattattgtaatttaaaaaatttaaattacaaaatttaaatatcattctcaaataatataacctaaaataacctaaaaaatttaaaggcgattgacatatttatacagtaaaacggctgccaactcgaaccgttgcatgttccctcgtctctgagccgacaaagatacggtcaggtcgggttagacttagaagctgttggcaatagcattagggagtctctaacgtattcctc

SEQ ID NO: 9443 - DNA, 627 bp, Gossypium hirsutum
gcattgctgctgctgcatcgaaagggattccacaaggaatagtggaaaccggctgtttcatgggagcaaaacttataatattgctgttggagctgcaccggggtggtggtggttgttgcttctggttcactatcggttttggctctgattcaagtgaaagctttaagcgcttagctgccccaccaatgggaagagaactctgggcaatggctttgacatcgtaccggctcatctcgaagttggtcaccgcattgacacctcggaacttgatggctgcaatatcatatgcctctgctgcctcctcttcagtagctgtgaaccatatagaagatgaacattatcagtttcaaacactaatcttacagtagttaaatgggagagtttgttcttagccagttattgcaatcttaccaaaagtcccaaggtacaagtccttgtttcctgcaacccgacctatccttgcttgccatcggccctgttgatgatgcctgcaaatgtaaacaacaaactcatgcttcggtcgttcacaagataatttagttacataattgaacacatcatagagatagaaatcagacgtcaacaatttggattctgaacaaaatgttcaaaccttgtgacacctct

SEQ ID NO: 9444 - DNA, 673 bp, Gossypium hirsutum
tttaaaggctcactacgaatgctccgaaaagccaattgtctcctagatttgacttcatttttaggttgatacatcaaagtcaatgctaaaattaaggtccaccttagaaacaattatcattagaattaccaaccatcataaacagcttcattagccatacatcatttgtttttaatttttttgttgacagcatcatcactgtgaatcgctttcttatttgaccaactattccattcccatgccaaggcaacaaatcaactttaatttccataaaaatttatctcataataattagcttgatccctcacttttacaacctctaatcatgcagccgagaaagtttcttttttgggtataatcaaaatatttttcatgtctattctacagttcataaaaactaatactttcggggttgtgcagccgagaaatatttggggaaatgcatgctagactgtggtgggaagagaaccgaaccaggatacatgaacaatacttgtaatttgaccaaatcaaatgaggttagccacaccagcgactagcttttttttgtttgtttgtctaaaattgtggggtgtgtgtaactttttgttcctcgcattttctacttctgccatacttgttgaatccctttctactcaaatatataagcagggggatgctgtgtttgggcaat

SEQ ID NO: 9445 - DNA, 463 bp, Gossypium hirsutum
ttgcctccgatgtacacacattctacatattggctttgggcagcaggtttgtgcttctcatccatggcctccgagattccaaatacatgatatgagtatgcatctctaatgtaaatcttcactcgcagcattctatcttttagctaaggtagaagaagcagaggataaagtaatatacaaatggacccatcatattgtgagcggacacacccttaagcacttgtgtgctgccatggttccggtgtttttgacacttatgctggcaaagaggacgactgaaacaaacaggtattattcttgtttgtaccctcctctggtgtcaaagattctaatttttttttgcgtaataactgcaataaaagcctttacagtaaatatctctgatgaaattccaatttggcatccatttttaaatctaaaatttgtgtttcagatgcttgcctcctgacataatgtttcacag

SEQ ID NO: 9446 - DNA, 660 bp, Gossypium hirsutum
tttgattcttagtaaaggtggacacaggaccaatattcggtttacgggtttttacggccatgcagattcaaactttagagaccaatcatgggaaattctcaagagaattggaagagcagtcaaagaagaatggatagttgggggagactttaataccattttggatgatgcggaggaggagggagagaaaaggaagccgagagcacaaatggaggccttcaaagaagtgttagaggagctaacattagtcgatatcaaacccacgaggggttggttcacatggattaataatagggacggtaatgctttagtaaaagagcgtctagatcgacttgtgatgtcgtctaattctgcttctattttcccgtttatagatgctgttgtagtcagacagactaaatcggatcatgacacggtgctgctggacacgttagggaaaaagcctaaagagaaacgcagagatcctaggcttgcctttcgttacaacgtgtgttgggcaaaggataaaagagaaaaggagatcataaagaataagtggtgtagaaaggacgaaaatactctagaaaaaatcgatggaatgcatgagattttggggccttggcaatttaaaaagtataataaaatgaaagctcagattagtgtgttggctgagcatattga

SEQ ID NO: 9447 - DNA, 411 bp, Gossypium hirsutum
tttgcaagcaacatttctagtgtaggaattctcacctgtttcagcacaaacctgccatcttgcctgtatgatttgaatgatacccaaggcttcccacaattcccaatactaggaatgggtggtggaaattctcctatactttttgatcttcttgacctaatcatcctcacttctccctgccttttatctattatgctgcttcctgtatctatctcccctttgctgctttgccgctcttgtttcatctcaccacagctctccaaatcaattccttcagtgcacagttgcaggctctcagtgtttaatgagtagctctttttatggcctatggtctttggggtgcttgagcttctagtgttttcaccctccctggagtgcttcaatattgcggaaggaaagggtaattcaaag

SEQ ID NO: 9448 - DNA, 427 bp, Gossypium hirsutum
  misc_feature (407)..(407): n is a, c, g, or t
gcccatcataaacaacaataggaaggaacaaagatcacataaagcttaatgtaacacataaggagaatggatactgatgtggtgagatgtaacaaaaatcaggccctgcttttccgttgcatgcatctttcaattgtaggattttaacaagattttatattgaaaatttgaaggttttcaaaattgattaaatcaattaggttattgattgttggttcgattattttatatggtttgattaaatagattatagaaataataaatactaataaaactttgttcaatcaattcaaatgttgattcaatccgtttcttaactcgatttaatcaatttgtattaattcacaaatcaattaatttgatgtcttttttcgaaatgaaattccagtcgattctcaatccaacanaatatccaaaatactaccat

SEQ ID NO: 9449 - DNA, 510 bp, Gossypium hirsutum
  misc_feature (403)..(404): n is a, c, g, or t
  misc_feature (498)..(499): n is a, c, g, or t
ttggtgactacatcatcaatgacatctattatcataaccaatcatgtcacttgtctagagctgttagttttgataaatatgccatttgcagtcattcgatccgtaatatatcccttccatccgactggttttttctcccttcgctccaaaataaaacgtttttgttcttcaattgcaacctgtcgtcctcgcgcgaacttccagggtacaatattcattgtgctgctaaaaatgaaagtaatgcgacgttggcactgtttagtaacgatcctatgttgaatttcgcttcggaatattgtgatacaagggtggtggtgcctgtggcttttaccagcggagagggaagtcttgaaggcatactgaatagagggtttatggtggaatggataacgagcaactgtannattaggtgcctgtggcttttaccagcggagagggaagtcttgaaggcatgctgaatagagggtttatggtggaatggataacgagcaactgtannattaattactt

SEQ ID NO: 9450 - DNA, 593 bp, Gossypium hirsutum
tcagattactaaaattcattataaaatgaactatttacttttatttttttaaaacattaaggtcaaagctgaaagacatggaaattacatatattattcatgcagcaaataaacaacaaatattcccagaaaataaatcagaccttcgagggcgtcttagccattctaggattcaaagcatattctgcatagtttgaatagccaagtaatcgagcaaatttgtgacgagcttgaacctatatcacaaaagaaaagttaacttattggtcttttatactcaatgcaaactaaaggctataatgaaacttcgtattggggtccacatctagggacattgcagcaataggcactcaagaaagaatgaatgaattaatataactatcctaaagttgctgataagttaaaactgttgaaaaccaagaatttgtcaccacttactagaacagccattacattttaatttataagttttaggtgctaccaacatggtattatggtaaatatgatattcttaataaaaacttaaatcatagaaactcccatgtcaatatgttcatcctacacttttcccacttttcctggtaaaatgagat

SEQ ID NO: 9451 - DNA, 604 bp, Gossypium hirsutum
  misc_feature (535)..(536): n is a, c, g, or t
  misc_feature (542)..(546): n is a, c, g, or t
  misc_feature (549)..(554): n is a, c, g, or t
  misc_feature (556)..(557): n is a, c, g, or t
  misc_feature (567)..(580): n is a, c, g, or t
  misc_feature (586)..(586): n is a, c, g, or t
  misc_feature (594)..(601): n is a, c, g, or t
tgcaattcttgacctgagctgccgtagcaggaccagatacttggcgtgcttcaggaccagtggatatctgccagaataaaacgtaacatacacattatttatatgtgtgttttcattgtgaaatttatgtactatgtaacacaggcacacagttctactagttgatatactcctataagatttgtaaagacttgggttttgaggacagataacctagagaaattaaaaaatgggattaaaggtgtcactaacaatcaaatcaagtccttgattacatcaaatagtgttcgagaaaatgctaaaggcttattatgcattactatcacttcatgcctatgatatatgcctaaacaaattaccacacaaaacagaaaattttgtacttgtaagacacagaagacatgacatacagtcagaaaagctgaaaaaaagaaagggaaatgttttaaccagttagcttcagtagataaatcaccgtagtattgcataaaaccttattggcagaaacacattgtatgctatatatatctctcannctcacnnnnnaannnnnntnntatcatatannnnnnnnnnnnnnagaganttgtgtannnnnnnngat

SEQ ID NO: 9452 - DNA, 468 bp, Gossypium hirsutum
tgcaaaggggagatgaaattaagaacattgtttgactatgcagttgactcatatacttacattcctatgtcttcgagtttatcagttggatgcctcaaaataaattgaccgcagtgcttagaagacaggacataagtaatcttttggagttctcaagtactgaaacatagttcaagcatttagttaaagaaaattttgaagctaagtcagaacctaacattgacggaaagtaagagtgctcaagtattgaaacatagtttaaacacttagtgaaagacaattttgaaactaagtcagaacctaacattgacagaaagtaagagtgctcaagtattgaaacataattcaaacatttagttaaagacaattttgaaactaagtcagaacctaacattgacagaaagtaagaggtccatagccatacttgcatgctcaataccatggctaagtcaattggcaactacgaaa

SEQ ID NO: 9453 - DNA, 649 bp, Gossypium hirsutum
tctgaactgatttagcatgaataattagagacacatacatcataatgaaaacctacatcatcatcatcatatgtaagtccctaaagtagccacatttcccacttttcttataaccttttgaagtcaccattgcctctcctttgttcatatctttttcttgtttttttggttctcacagctttgagaatatagtatttacataaatgatgtctccattgattagtgctttatgcttcaaaaggaaacattgactgtactagaactagacaactcctttatatgtatttatcagatttcagtttattgttgtattaaagggggaggggggggggatgctaacgactgttgcttatctaaatgaatctgaagtcgagataagttggatcttaaagttttttcaatgttattttctccattcacaagaatcaaacacaagaccttatgtaagagacattaaaattcatattactcaatttaatccaaagtgcgtacagattgttgacaaattaaacacatttgccaaaaatgttattaggtagaaatggttatatttacgtacaaacacacacaaatgtatatatatgataatatatattgtatctcaaacaatataagagttctagttgttacattaggcattcatgggaag

SEQ ID NO: 9454 - DNA, 644 bp, Gossypium hirsutum
taatagtattaaacctttgtttgcatgttgccatgaaagaggcaaacgttggttatgtgattcatggatcttattatgttagccatgtggtagagtagctaagtggttttacatagtaaagatctttcttttttagtaatcttctgacgttcatatatgcattgctgcatagaagcagaggcaaaagaagtacataatataatcacagattcatgaaattggttgtgcctattcaagcctcaaatgctttttggaactaattagtttgcttcaagcttggtttcacctttttatctgagtcagcttgaacttgttcatgagtctgtataacagactattgccttattggttgttttctgttggacttgactagtatattgactagttttgatgccatttgaaagattggcttattggttgatatcttttggacttgattggtatcttggaaatgttttgatgccatttaaaagaaaaggtgggaggccaactatttaatttttgctaaacaatgggagctcaatttgctggtagaaagttgaccagggatcaagctctcatttccaaagcctgaatttatcttcttcaatacttcaaagttctaacttcctagctctgcaattttggggatgcaccaaagtcta

SEQ ID NO: 9455 - DNA, 643 bp, Gossypium hirsutum
tgtttttaaataaatgggagaatgcaacgccgctatggaggcggtacaaggattgctctatactgcttcgtcttgcattattttaaacacatattataaaatataaatatgatttattaataagcatagtttaatatatataacccctttttttagaaaaagaatgcataactaatatatataaattatatgtaacattagtatatatctagtatgtaagctaaaaatagatagggatattaaaaatattttaggtgttaaaataatgattttaaaagctagttagcaaaataagcatttatccaaatcttgccttccgtttcaggttaatatgtgaatcggcatccaaattataccctttctagtgatatttgtagggcaaatttattattaaatacttttctttttttaaaaaaagaaacaattagtacagtactttttatcaagtgaaccaaagcgaagagcttcagagggggacaaaattgcagtggaagagaaaaaaagaaaagaaaagaagaggttgtaacatttgcatgctaatatgtttccccactaacagcaaacgcagaccttgaatgccgggattttttagatagtactaaattattttaaaaaataacttagtttttactgtgtcaaaggg

SEQ ID NO: 9456 - DNA, 688 bp, Gossypium hirsutum
  misc_feature (28)..(28): n is a, c, g, or t
  misc_feature (102)..(102): n is a, c, g, or t
ttttaaagccgaatgaggtttttcttgnactaaacggataaatttagcttaattcaatatgtattttattcagtttaacctaaatatacatttagaaaaatnacaactatcccctatacttttaatttttttcaatttagtcccaagctcataaaaatggaatttcatgcaattcatcctcaacccatcatagtcaaatatcaaataggtctcaagaaagccctatatttcatttatttcaaaatttcaccatttatatttttctatttttgaatttaatccctatttgacaatttcatcaaaaatcacttaacaaaagttgtttacctaaaaaaactaatcattttattccataaataaaaaattatacacattcattaatggaaagaccctaatagtttaacagttgcacaaattagtccccaggctagctaaattaagtaacaatgataaaaaaaacatagaaatcattaaaaacgggataaaaataacttataatgcaagcactcgaatagccgaaagccaaagctaaaaaataatggtgttcttgctttataaaattggtggagaagatgaatacatgaagaaaaaattgttttctttaatttttaacctttatttacctatttactcgaataccctttaaaaacattaaaaatttcagttataccaagccatgtacatccac

SEQ ID NO: 9457 - DNA, 565 bp, Gossypium hirsutum
  misc_feature (540)..(541): n is a, c, g, or t
ggagtggaaggttagatgagtttctttccttgagagcaattttcatgaaaatcgaagcacatttgacatttcattgcattgctttacagtttatggtgtagagtatgcctttggagctcatgactacccgacaagcggtgtctttgaggtcgaacctcgacggtgccctggcttcaagtttaggaaatcaattttcatggggattacatgcttggaccctgcccagctaagagagttcatagagcggcaatctgggagttacaatggtgatacataccacttgatttttaagaactgcaaccatttctgcgaggatatatgttacaagttaaccgggaaccggatgccaaaatgggtcaatcgacttgcaagaattggtattatatcccatatgtgctttattgagcttaaagttcttttaggtctagcttttcttggattcttaagtatccatgtcatttagttcatcactgtccctaacttcacttccgatgctttaagacacgcactgaagtacgctacttcaacgcccatttatcnnctctgcttggtcagtacgttactg

SEQ ID NO: 9458 - DNA, 570 bp, Gossypium hirsutum
tttttaaaaacaaagggtaagagaattaaaatgcctaaaaaaaatatttgtgttaagatgttagcaagaatgagcctactggttctgtggtaaggtcttaacttacccataagtcccaaattttaatcccttgagagcttttaaaccaaaatattttattttttttttacttttttacctcatgaaagcgccaaatttttgaaatatcccaaccaaaaattgttttaaaaaaaaacaccttcaaactattttctttccaaatcaattttcaaagcaaaaggagtcaaagtttcaaaatcatctctccctttcaagtggatctctaacctcttattccaaattaaggtttttgtgtcttcaaataaagtgtgggatatattggaaaatcaggttttgaaaacgcaacggaaaataaatttagggaaaaatcaaagttctaattttccaaaacaagaacttggttgtgatatctaaagtaataaacacttaatcaaaattgtaccttttcgattcatctaggatgaacattttgactgagtagtcttttctactatcctcaagctcatgtct

SEQ ID NO: 9459 - DNA, 517 bp, Gossypium hirsutum
actcgaacctacgttttcctgcattaacaaaaatgctcaaatcaatcaagttaagacttaatcggtctaattaatattatttttaaaataactaaggaagtaaaaagagactacttacaaaataaaagaaaatctaatatataattacaagccgagacttttatataacatgacaaattttatttatatgctcacccatgttaatgaaaaaatttgttaaagaatactataaataatttgaaaaaaataaaataaaaaataatctaattattttattaaaaaaataaatattcattcaaacacaaaaaaaaatagaatacatacataaataatagaaatatttcataaaattcatgtcatttttaataattttaaaagatataaaaataaatacaattaagaatattaattattgtcgattaactcttggctcgattggcataaatattgttgtcaatgcaggaggatatgggttcaaatgcattgaaggaggacgtgggttcaaatgaggttgaaa

SEQ ID NO: 9460 - DNA, 653 bp, Gossypium hirsutum
tgcttatcggaatacagctttgtcgagtcatattaatttacgtgactaataatacaatacatgaacatggcggattaaacatcttgtgttttgtatcagttaagtttgtagtgggagcttcataatggtaacattccttgcaggcagaggttgaaaaccttcataatcaggaacacagattagatggacaaataaggttaaagcgattacggcttctgttattcttacctcagttaaatcgatttcgtttgctaaagtattaccgatttttctataccgtacagagagatgcaaaaaagattgagggacctaagtgaagacaaaaattaataacaagtaaatctttacttaccctcgagatattatttttacattttttgcatgatttcagaagagtattgcctttttgttaccaaggaagatatcaagagcttaccttgtttccaggttttttttattgcttgaatgtttcattaatgttttcgagttggtataaggtcgcctggcattgctaatgccgttgctagggatgctttctactttcggttgttaactatttgtttttgttgccttgtttagaacgaaatgttgattgccattaaagctccgcacggaaccactttggaagtccctgatcctgacgaagtattctc

SEQ ID NO: 9461 - DNA, 606 bp, Gossypium hirsutum
  misc_feature (583)..(589): n is a, c, g, or t
cccggcttcatgcaagttagtgtacatgtttgaacttgagttgttattgttgggcccctagctaacatcataaactgtttggcccaactataagagattttaataacatcaatactactccaagacgtcccctgaaatagaaaaagattgtgatttttccatatttgccatatgaatatcccaaagaagcatttccaggtcaaaccaaaattttcaataaaaaaaacctaatacccaaattgattaatcttaataactctgatcttacttttcattccaatttttttttgaaaaaaaaatcaaaaaccctaatactttaattactttgtgaaaagaaaaaaatgggggttatttttattttaataaaataaaataaatctaaattctaaaatttaaaactatttattttaatctaatgattaaaatcattttaattctaattgattaagtgattaaaaattttaataaagaaattaaaaaaatctgtatgaattaacttatttgctcaatcttaattttaattatttgcaagtgtactacgttatgcacatttgtcctattcattgtctagctaaataaatannnnnnngatggattgaagtccag

SEQ ID NO: 9462 - DNA, 459 bp, Gossypium hirsutum
tctccaatatcagacagtgggtttgttttagctgtgcatatagaaaataaattaaagttaattcttctggaatgggcatattttcgatgggaaaggcaagtacttacgtccagatatattcaaattgaccagtcctctgctcaatgtatcagcccaaactgctgacttgggctcaaatttatccttcgagggttgcggaactatagcaagtgctcctattgatgagggagtagcagtctgtggcgccactgaagtgttcgatcctggttgtgaaaaaaagcctcccaggacatcactgttattatgtgcacctgaatcgtttgtggtttgaggagcactctgcgactcaactggcacagcagaaccctgctgtgaaataaagcttccagtgttaaactgagtagctggtgcagcaggacttggaggttgagcagccatttgtgaacagagaggacaatt

SEQ ID NO: 9463 - DNA, 632 bp, Gossypium hirsutum
tggtcaaaaacatgatttggtaagttacatatttctttatatctgtgttaaatagagaaattaatcttcatttctttcgtggattggggatgacttggaaatgacatctcttaagttctctatctttcaaatttcaaagggattgagaatgggaccttcgtacttagttggttttttgttcttcctgagatgtttgcctagcaacactagtgcaaaagcatgcacattttcattttcttatctagtaggattcagtgttgaccgagtctagcctcctagatgatagctgtcttctgcttttggtctttcacattttcatcccatgcaatgatgcatttgtttcatcttttctttgatgtaaaatttgtgattaattcttggacgacatcatgttcttttcttatctagtaggatttttggtgttggtgtgcttaaaaattagttggtgtatttgaaactgagaattcagtaatttctgtggagactaaaactaaacttaaagtggaaattgttggccattttcttggaaatgaaataattttgttaaactgagaacagtaatctttcaatggtgggttaattttgtaggatgaattatggatgcattttacttatactggtaggatgtgcag

SEQ ID NO: 9464 - DNA, 675 bp, Gossypium hirsutum
  misc_feature (670)..(670): n is a, c, g, or t
tgcctttcaccatggttctaattggatcatttgtcatgctacttggactcattttagacaagccaaaatcagatattttgactacatattcctcatccagcaaaatgttagtgctcttaatgtcctgatgaatgactctatgaactgctcctaaatgaaggtaatctaattcacgggctacaccgatacaaatttccaatatttgtttctaggtgagaagagcttttttaatgttatagagatgatcacgaagagttccattggtcataaactcatagacaataatcttttcattgttcattgcaatagcgataagagagacgagattaacatatcgaagctgagaaagtagttggatttctttccaaaactctcgtgctcattgttgggactgtgacttgaatcgcttgattgccatttcacattttattcccttgatgaagcccttatagacattaccaaatttgccgcttcttataaagaaagcatggtcgaagttgttagttgctgcttggatttcagccaatgtaaaacacttgcatagttggtctggtaatggtgaagcttttcttcgttccattgatttttttctataataataacgatgactttttcaccagaaaatcaagaaaaatagaagagaaagtaatacggttattgtgcagcctanggaaa

SEQ ID NO: 9465 - DNA, 556 bp, Gossypium hirsutum
gcctttatgcgatttagtcctttctcgcgattaagtttacaatcgttaaaatttgttcatcaaaattttcatgcactcataaaatcatactataacacataaaataatattaaaaaataaaaagaatttctcaacctcggatttgtggtcccaaaaccactgttctggttagccccaaaattgggctgttatattttttgaaaaattacatcatagaaaggctggaggggccacggatggtcccgcttaagtcctaatctcctagacagagttttaattaatgtaatgaacaaaagaaaaatttatctaagtccaccattttattcaaatgagaaaaaaaaactaaaaatataaaataacgatagagaaagtgaagagaactccctctattttatttaggattttcattgaccattatggtgtcaaatggccatttgtcataccaaccataatcatctaggaagtaatcgtattctttcccatcaaatctatccaacatcttatcagggaaagaaaacccgtaatgacctttcctggttgccttgtttaaatacct

SEQ ID NO: 9466 - DNA, 580 bp, Gossypium hirsutum
tgggcttagagactaaattgaataaaagtaaaaatttaggggaaattttgtaaaaatgtcaaaaaaccaaattatatgaaatgaattttttttattgtataaattagtaaattgaatgaaattattaatttagatcaagatcgggtggaaaatcgaggaaaataaaaaattaccaaaatgcccctgaatcttggtatttttgcaatttagccaagtaagttcgtacagtaaaaatttaatattttttataagttgattaatggtattatttatttattctatttttggaaatgaattattattagaattataatattgaattggatttcggtttgatggaacgcgggatttgagtacattcctaaattgttgtatgatggtattggaaggagatatcgacatattaatcaagtaaatcggggttcagcatttgttgcgaattctcgtgttttactttctatttggagtgattgggtggaccagctcttacgagcttctgttcaactcttataagcttccattgacgtgttctagtggaccagctctatgagcttctgttgatgatgtactcttatccgta

SEQ ID NO: 9467 - DNA, 423 bp, Gossypium hirsutum
  misc_feature (44)..(51): n is a, c, g, or t
  misc_feature (352)..(362): n is a, c, g, or t
  misc_feature (366)..(369): n is a, c, g, or t
  misc_feature (379)..(382): n is a, c, g, or t
  misc_feature (384)..(400): n is a, c, g, or t
  misc_feature (406)..(406): n is a, c, g, or t
  misc_feature (409)..(413): n is a, c, g, or t
atcttcttattttattactaacatatattttttatgcatatcannnnnnnntctatcagaattgtgcttcacatgttttgaattgtttaatctaaaaccgatgtcttcattatactttgacctagttgccattgggaataagcttcttggttgtttcatcctcagctggcctgtcctttgcaatattttcttgaatatgcttatttagtttactaatagttcaagcaaaatgttaaactcttaaatggatcttgatatgaattaaacttatttggaaacttaaatagctggagttgtcccttctctgatgtcccctgtcatattaatgtaactaagagatatttcttttttnnnnnnnnnnngctnnnntttggaatgnnnnannnnnnnnnnnnnnnnnttctgnttnnnnngggggggggg

SEQ ID NO: 9468 - DNA, 596 bp, Gossypium hirsutum
ttttggcttgatgagatcggtgtggcagattccacagcacataaccttaacgaaaacatcctcaggaccagtgctcctgcaaacagaattattattacagcaaatcaccatgttcgaaccagaaatgaaccttaaacaaaattcaaaaacaaaacagcaaaattagagaatacctaagagtgtaagtgtaaggagacaatactcctgaaggatctctggcagcccatcctgttgttgttctctcagtttcaaggccacccattttcaccgtctgatcaaatttctctctttttttttacagtgggtgtattagagaagagacttgggataaatgaattctccatccatccaacagcgcgtatgtatatatatacaaacagggaaagtggaactgataactccatttggggcttcaccaagactcaagacatctcagcaacgtgtagggcccagtggcccacatccacaatggttgtagtaggtgaattctggaggaatgatagcctatatgccatttctggtgctcccttttagaagtcaaatgttattgatccaggtcaaaaaacaggacatgttgagtttgatcctgcgccatg

SEQ ID NO: 9469 - DNA, 478 bp, Gossypium hirsutum
  misc_feature (57)..(59): n is a, c, g, or t
  misc_feature (446)..(448): n is a, c, g, or t
  misc_feature (465)..(469): n is a, c, g, or t
aacaaacccaaagccatggggttaccttaaaaacatattctcctcttcattctatcnnnggtcgcccaagtgagggtccgaatctggcacgcaggttgtttaaggttcgagtaactaattgcagtcttgggtcatcttctggaatttcgcgtccctgcaatataggagaagagaatatgtaaatttacaaattagttaaattatcagactggacaggttttagttatggtgtagcacttcaaccgaaccattgtttgttcttcaccttaggagaatggagattttgaacaatgaaattgaaaggcaactaatattgtggctgacatcagcccaagcagtaacagtaattttaggggggaaaaatattagaccaaaatcaaactgaatttaaaaaaaaaaaattgaagcaaatactatggttcaaatcagtttccggaccctactgnnnaccattgattgttcctnnnnntacctaaca

SEQ ID NO: 9470 - DNA, 643 bp, Gossypium hirsutum
gatcggttaaggaggcggcggatcgacaaaagtcttatgccgatctgaagcgtaaggatattgaatatgcggtaggggacatggtctttttgaaagtttcgccttggaagaagatattgagatttggtaagaagggtaagttgagcccacggtttattgggccttaccgaatcattaagcggatagggccggtggcttatcagctagagttacctccagagctggatcgtattcacgacgttttccatgtgtccatgctaaggcgatatcgttctgacccaactcatatcgtgccagttgcagaaatcgaggtacggtcggatttgacctttgaagaggaacctgtgcaaatacttgatcgcgatgtcaaggtgttgagaaggaggtcagtcccattagtgaaggtactttggaggaaccatggcaaggaagaagctacttgggagaccgaagaggcaatgcgtcagcagtaccctcaactgtttggatcaggtaaatttcgaggccgaaatttctttaaggagggtagagttgtaacatcctgattttcgggtttttcgcgattcttgatattttaagtaagtttctaaaatttggtatgtgattatggaattcataatttgggtatgtaaatgggctatgg

SEQ ID NO: 9471 - DNA, 240 bp, Gossypium hirsutum
cgatcttcaactaatcttcattaccgactatatatgagatctgcaccaaacttgagcctgtcatataagccactgacctacaaaaatcatcaaggaaagcctaaagccataagaatacgcgaaataacacgatattaagaatgaagatattcattaacattcggctggcgtgcttatacattaactctccattctaaaaagctctataacataagcgttatggttgataaaaaaaaaaac

SEQ ID NO: 9472 - DNA, 659 bp, Gossypium hirsutum
gcatgttcaaatcccttagaaatattgcaaaatgatttaaaaaaatgtattcaagctttttgaatgttaaatatggtttttaaagaattctttatgaagctttgaaataactttcttaaaagaaacattttgtacgagctaaggatgtgttccgatagcatctctcattcataccatacgtcgggacgagtgaagggtgttgaagtggagtgagatccataatccatgatcagtattgatattttaagcactactagtgaccacatctccaatcttgaaagaaaaaaacaaaaagaacgcatcattgaccatatagtatacaacaaagtacatttacattttaatggggtgttttaacttccaccctctattccctatgactacaaaggagaggaccaaaaggaagttcacaaaattgggaaatttatgattcactcgcaccccctcaatttccttcttataaaaacacaaacctaaaggaaggtgatggagagaaaaatagttgttcaaattttgtttctactctacagttatttcaagtatagtggtaagtctgggctttttatatctccgaagaagtaaagaagagcacaccacgcttacagaggaaagggccatacaggcaccagctgcccatggtggcaactttatccctaatg

SEQ ID NO: 9473 - DNA, 606 bp, Gossypium hirsutum
  misc_feature (43)..(44): n is a, c, g, or t
gtgtgcatggcggtggacacggcggtgagagggaaaatataannggaaatattattcaacactaccaacacaaaaacccaaaggaaaataacagcaacaaaacaagtttatttttataataacatcatcatcaacatgcatatatatatatatatatggcctcttcgtcctcgatctttaagcttgattaaatcccgaactcgaatatatttcattttcaagggcatttgggtttgcccttgttgttcaccttatctctgtagcaaggacactcgtgtttgttcccgtaagtaccggacggaacgcattgacactcctcgcaacatatgccgcaatatttgaagcaccgatcccaaaccgccgctttattgcacctccctttgcatttcccttcacaaaaagctgccattccccccccccaaaaaaaattacatcaaagattaaaacacacacacacacacccaaggcttagattatgaaaaaaatatgtttgcttacgtgaacgaggctgagccattgttggtgcaaaaactgaagaacatagaagaagagaacaaagcagcaaagttagaaacaagagcttcattttttctttcctttttatga

SEQ ID NO: 9474 - DNA, 544 bp, Gossypium hirsutum
  misc_feature (521)..(521): n is a, c, g, or t
aagttcaagaagctgtccaaaaatgttcaaattttcaaggtccggagatatgtgctaacagatctgcctccagtgatgaaactacctttgctccaactccttccccaactaaatttatatctaaaccaactaccagcaagacacatcctaaaaattgcctccctgcaactccagtcaaagagtttaatccatttaaaacagaagatgaatccccgataaaagctggctgtattcagtccactcctgtgaaacttgcttcaactcctgctaggctgatgactgccacacctaccttacaaccgcagaagagatgttacatgagcccagatgaagtttctgctacttcatcaaacaagttggtacgccgaccaccacgtaccaggtccttgaaatttgacactcctatgaaggaagagatggatgttgatgacacgcaagagatggcaggcaaaccagttgataataacaaagatgatattctttccattttgcctgaaagccttcgacattcagtaagcccnacttatgaattctttttgctttc

SEQ ID NO: 9475 - DNA, 503 bp, Gossypium hirsutum
caaagcctggtatttagtttgtgcagcagctgtccattcaagactctgaaacgcttcttatatggaaactggtcccttctcagtcatgacagaagagtacaatttaggcttgtagacgccacatttagacctggtctgcataggatgagtgttcacagtagtccagatgggagcaacagactgaatgagagagaaaggcacactttgtccatcagatgaatcagacgactaaggtgaggaaaccaaatgaccaatggcagaatttctggtagagtaacccgatctagggatagtcatagaagatgagctgtcaagggtagtcaaagaagagttcaacagaactggggctgtaactagtggaatgtgagactgctgatgagtttgctgcccgaagtcaactagagctttagaaggacggttttgctgaaatgggaactgagtctcatcaaagacaacatgtcgagacacaaaaacacgaccattgtcatcaagacacttatagc

SEQ ID NO: 9476 - DNA, 507 bp, Gossypium hirsutum
  misc_feature (489)..(501): n is a, c, g, or t
gttccatggtcgcttgaggttccgaggtaggatttgcattcctaaggacattgtggttgatttagaaaattttacttgaggtacatagtggttgtttgtcaatgcaccccagaagtacgaaaatgtataatgatataaagaaaatgtattggtggctggggatgaaaagagacatttcggagtttgtatcaaaatgcttagtgtgccaacaagtgaaagccaaacacaaagtaccttcgggtttacttcagcctatcatggtccccaagtggaagtgggatcagattactatggattttgtgacaagtttgttggtaactccaaggaagaaagatgccatatgggttgtggttgattgaatgaaaaagtcagctaactttatcctggtgtgaacagacttctcgcttgataagctggccgacttgtacatttctgagattgtgagccttcatggagtgcccttgtcgattatttcagatagggaaccannnnnnnnnnnnnagattt

SEQ ID NO: 9477 - DNA, 562 bp, Gossypium hirsutum
ttttcttttttctaaattacatcattaggataaatttttgttttatctttaaattatttaaaattttttatttaagtcactaatttatttgatagtttctgtttaaatcattaagtttttttaaaaaaattaagttctgctagcaaactcttaagtgataatttaatgatcagtacggtagaatagtacttatcaatgagtagaagagcatgtcttaaattcatatcaatatgataatcaatattggagattagagaaaaaaaattgtttgaattttagtttctaattttgtgacgttcaaagctatttcataaaaaacaagctaaactgtagaagagaagaggaaagagagttttcgatttgatgcaaacaatgtgaatagagaaagtcgtataacatcgactttaacatttcagtgacttaaataatatattttgaataatttagtaaccaaatcgtaatattttttaattaagtgatcaaaacaaaaacttacccataatttagtgactagtagtgtaatttattttttaaaacctaagtaccatcaaatgacttgtac

SEQ ID NO: 9478 - DNA, 507 bp, Gossypium hirsutum
ggcacagtaaatcccttggtagtgcaaaccagataatacagtcggcattttcatacgcaaatattaaatacagcaccatcacatcaacatacaaaacattaattaatcaaaggctaggattacaaaccattaatattctacattctttatagtaaagtcataaataaatccataaagaaacatagggttggctacttggaaacctaagctctttgcctttataaatgttcatgtcatttctcttatatttctcacaacaaatttagagagagcaacaaagggaaaaaaaaaacattcatggctactaaaaaacatgatgatcatgagaattatccaactgttgtggttacaaagacagttaccgtacacccaaaacccttgttgcatcatccacaacagattctccatctttccaatttggacaggcagtgtccgatgttaatgtacgtggttttcttttacaaaccttgttttgcttaccaaaactcggttctgggttccatcttc

SEQ ID NO: 9479 - DNA, 415 bp, Gossypium hirsutum
ttcttccggtgaagtattcaggtttggctggctgttcccctatattttccatagaggctgccactccgttcatccttttttccttttatatctttgctttttctagctttctctcttttgccctcttcattctctcatttatctcaagaacatctttctaggatctttgcaaatacttgaccaccaacaaattaaaacttatgatttagtaagattttctcttgcgcaaaggttttcgacatcacctatggtctcccatataaaaatatattaaattgcatgtactagaaattttcacttgtttcttttaagattttcttgaatgattaatgttatggagaaagtatggataacatatatgattgaaattcttgggttgggtgtatgaatttcctttagatattgttccatccta

SEQ ID NO: 9480 - DNA, 418 bp, Gossypium hirsutum
tttaaaaacgaatacatgttttgcagtaaaaaaagacacaaaccatgagatgcaagacacattatgtttgcatgcttcaagaacttgcttaatttacctaaataaacaaaagaaagaaagaaattgaggccagaaaaggtcaaagaattaagtaaattcaaatcaattaccggcctaaagtttggtggtgacaagatatgcaacaaaggagatatcaagtcctctatgcaggactttgttgataaatgtctagacatgtacggtggaattttctggtgccaagcccttaaaatatctgtcttttccatcagcatagtacggtatctgaagcattgcaccaaatacagtattatcgactgttagtcctccatgtttggcattgggttcttcagaacttgggcatggagtagagattacc

SEQ ID NO: 9481 - DNA, 613 bp, Gossypium hirsutum
  misc_feature (480)..(481): n is a, c, g, or t
  misc_feature (513)..(514): n is a, c, g, or t
  misc_feature (519)..(520): n is a, c, g, or t
  misc_feature (551)..(551): n is a, c, g, or t
  misc_feature (585)..(587): n is a, c, g, or t
  misc_feature (599)..(601): n is a, c, g, or t
gattttcttttagattcataagtaatgtccatgtaaaagaatatacctgctacacctataaaaccaaatcaaaccagcagaagataggaaaacacccaaccatgcaagaatgccaaatccagctgtcaatttcggcaaatttgatgctgcaattaatatccaaagccacaaataaaaaggtaatatagagacagagataggtacggttttgatggtatggcacaattaactttcatgaagtcatgttacttggactcgagtatgagtatcatatccccataatcatgtccaaacatgagccgtaaagggtacttggagcaacattgtcatgaagagatcaagagacgcacccattatgacggaatgaatataggtcatcagatgtaccacaataacgcagcaaagaactggtgcaagtcctaattatgggttgttgatctcaacatgggaagggtgactttgaagtacgaaattctgctnntggatcacaacaccagatttgcattgtggcannttaanntgcacgcagttcttgtgcatatggatctggnggatgaactgctagggatagataacatgccttcnnnattaacagatgnnnagaataacgtaa

SEQ ID NO: 9482 - DNA, 447 bp, Gossypium hirsutum
  misc_feature (395)..(396): n is a, c, g, or t
agaggtgatcatagcataattattatctattgaaaaattaggaatatactcgatcttttgcttcatttattcgctagattttgttttaacactttgaaaatcaaataatgggagtttcatctcaagatttactatctacaagaattcctgacatactagaatttgtctaacactcatatgggttaaaccttttcctcaacagttgatgtcaattgcagcttccagtggagggaaggacttaattttagcatgtatattgttaattaactaccattttttatttttctacacaggctcattttgtgaaagatagacgttgtaatactgcaaaggctgtcctttctttggaatccttatacaaatgggctttgagtggcactccactgcagaatcannttggagaactgtactctttggtcagtaacattttatagaaattgaattgca

SEQ ID NO: 9483 - DNA, 418 bp, Gossypium hirsutum
tggagaaaggctgcctgatccctgttttacaaaagatgaaacctgattcatagagctcaactgccttgcttcttgtagctgctgaggatttggaaactgttgcctttgaaattcctgcatttgcttaagaatagaatgttgctgtagcagttgtgtgccagtcatccctgattgctgcctcggtaaaggctggatcatgccaggatgctgtccatttacgtgcggttgcccaccaagaaagttgcaattaacgggagatgcagtagattccaacctcaatgaatttttctcatgaagatcagggccactttctatatgtgaatcaagaactggcaagcatctagatgctgtatccactcccaaaaagtttgtattattctgccttgcctggaaaccctgatgcacttgcatatagaaa

SEQ ID NO: 9484 - DNA, 629 bp, Gossypium hirsutum
ccgttttgcatagaagagatgaaggctctatattaacaccaaataagagatggctctgtggatcagtaccccctgcttggtctatcgagcactccctgccaggaaagggtggcaacgaaatagaattatgagaaatgtttgtttgggtgggccccaactgttccacctggggcagaacacattgtggagatccagatgacagaacttcaacagcagcccgcttagatggccatgcagcagatgttattactgggttggatctaggcaagttgagcagactggacgattcatcttggggaaaggatcccaaaagaccatgcaagggagatataatagggctggtcatggtgtgcccatttgagtcagaaaaactctgttgttggcatagtgaaggtatggcttggaaaggtgacgaccgggactgtgaggccggagtatactgtgacatggcagacactccagtagaaatatgctgatgatcgaccagttgctggtgttgctgtgacagcggatgctgtaactgctgttggtgttgatggttattaaatgaattctgctgctgcaattgttgctgaacaagaggcggttgggtttgagcctgagtctgagactgatgttggttatcttca

SEQ ID NO: 9485 - DNA, 642 bp, Gossypium hirsutum
  misc_feature (633)..(635): n is a, c, g, or t
gacattaaagttcaaggacatgatgttccaaaaccgataaggatgttccgtgatgctaattttcctggtatttatattttcattcctattcactttcctttttaaagttaaaatttggtttgatctgagtttaattttatttttaaaactgtgcattagattgctgtcttgaggtgattgccaatttgggttttgttgagccaactccaattcaagctcagggttggcctatggctttaaagggtaaagatctcattgggattgctgagactggttctggaaaaacactggcatacttactgccggcattggtgcatgttaaagcacagccaccattgggttagtgccattaatcagatcattttgttttcaattatcggatacaattgctcatttttgtttctatacttgtatagtgcatggtgagggtcctattgtattaatattagcacctacgagggagttggctgttcaaattcaagaagaagctgcaaagtttgcgaataatgctagcataaggagtacttgcatctatggcggtgctcctaagggaccacaaactatggatctcacactttccataaggcactctacaaattgatgccgctctctataactcggaagctaagtttnnngatatta

SEQ ID NO: 9486 - DNA, 462 bp, Gossypium hirsutum
gtatatacagggcgcaactcatcaggtttatgagcaaagaaacagactttacgtgtgcaaccagtctcatctttgcaaagtctagtccgatattgagcaggatgaagccatgactcgaacacaccatgcgcatattcacaagcatcacccttagggcatgctcctttacgaaactctggacaaggcacacagctgtatggatacttcctcgggtccctcctcctcgcgttctcaccaggatgaacgaaaggacactcggtccaatcatgagagtatgccctcgagcaaggcttcaccttaaaggtatacatcctaaagtcatcggttccatatatcccgttgttgatatcaggcaacgatatatcaacaggatattctttcttcagaaccgtcttttcagattcttcttccaggttaagaccaccatcaacatcatcccctttcaacaacaactcaatcaca

SEQ ID NO: 9487 - DNA, 666 bp, Gossypium hirsutum
tagtggccaacttattgagtagcagtgctgaagctgagcgtttctttgtgggttcagattgttgtggtttggcacattcggtgttggtgacggcattactatcggagtttccgctggatgaggaagcgccgctgaccgtcacctgatctgcacccatgttagctaagcgtttctttagatgagcgttccagtagttcttgatttcgttatctgttctatttgacaagtgcctggctattgctgcccaccttcaccaatataaacttatatataaatgaatatcccattaaagaaaaagaaaaaagaaagagtgatggagatgattgtgataatgtaaagagaatatattatataatatatgcaatattctagagaaagctaaaagttaaaagattttaaaaacaacttgagagcgctgtgttggcgttgtgagaaaaaggaaagggtaggtttggaaatgcaataacctgttgcctaattcagcttgaagtttaataatggttttatcttcctcaggagtgaaatctcctctcttaattccaggtcttagataattagcccatctcaatctacagctcttcccacatctttgaagacctgcaaaaccgaaattcgaacttggacataagagtaaaaaataaaacaatgcccatataggaaggaaac

SEQ ID NO: 9488 - DNA, 580 bp, Gossypium hirsutum
  misc_feature (331)..(331): n is a, c, g, or t
  misc_feature (348)..(348): n is a, c, g, or t
  misc_feature (365)..(369): n is a, c, g, or t
  misc_feature (382)..(382): n is a, c, g, or t
  misc_feature (384)..(384): n is a, c, g, or t
  misc_feature (387)..(391): n is a, c, g, or t
  misc_feature (393)..(396): n is a, c, g, or t
  misc_feature (400)..(406): n is a, c, g, or t
  misc_feature (409)..(436): n is a, c, g, or t
  misc_feature (442)..(442): n is a, c, g, or t
  misc_feature (444)..(447): n is a, c, g, or t
  misc_feature (449)..(464): n is a, c, g, or t
  misc_feature (468)..(483): n is a, c, g, or t
  misc_feature (488)..(494): n is a, c, g, or t
  misc_feature (499)..(560): n is a, c, g, or t
  misc_feature (563)..(576): n is a, c, g, or t
ccatttctttgtttcatctagttgatagtctttcatcgaagcaaaagttcgcccaatggccacagcttcctgttaaattaacccaacaaagaagaaaacatgaaaacatgaaaaaggtccatttagaggcagttaattaatttcctttgtgggtgaagatggatagtaaagaaaagatagcgtaccgtcaatgctatcatacccgccacaacaccaatctttaaacctttaagaagatagtcaccagtgaaataaatttgatttaccgatgagggattgattcctttctcaatgtttttcacctgcatatatgagaaaacattcatatagnatgctgcattgtagttnttgattattattagatnnnnntgatgactatctncnctnnnnncnnnnctgnnnnnnntgnnnnnnnnnnnnnnnnnnnnnnnnnnnngatganannnnannnnnnnnnnnnnnnncccnnnnnnnnnnnnnnnnttttnnnnnnnttttnnnnnnnnnnnnnnnnnnnnnnnnnnnnnnnnnnnnnnnnnnnnnnnnnnnnnnnnnnnnnnacnnnnnnnnnnnnnntatg

SEQ ID NO: 9489 - DNA, 539 bp, Gossypium hirsutum
tactgatattgctagccatgctttgactgctttggaacaaagctctataaggtttctcacctcttcctttgaatcaattgcataaatcttttagccatttatcagatctttaaacttgattctattacaggaaagtatatctggttggaagacgtggaccagtccaagcagcctgtactgcaaaggagctccgagaagttcttggtaattcctaagagaatgggtctaggggatgcattttgttcgtaatcagtatgtctagaattgtttaaattagtgtatgctgtttggccagcaatatgagatgctgctaatgctgaactaaagtttcattcactgtagattttcaattggcaaaccgataatttcatttttgaactgattgtgttggattatttgtatttgtcaacctgatctttgtttggaagttggacgtggaatacttaaaattgtatgctttggatgagtggtgcagtttttgtgtcaatgcattgatccatttttaacactccatgctgggtagtttgtggtcatcaata

SEQ ID NO: 9490 - DNA, 410 bp, Gossypium hirsutum
aagtttgactccagcgttgcataaatcatgctttttaaaaaaaaagaaatttaagtggagatatattttcgattatttgttatactttgtaatgcttcattgtgattattgttaatttagatatatattacacgtaatgaggagggtccacttatcagtgacggaatcaaggagatgctgataagtcccgactcctttaaaatgaaaagtttttttatttaaattttttataatttataaaattttaaattaataatgattaaattacactttgatcctctcaaaaataataaaaatttaatttaatactttaaaaattataaagatatagattataaaaattgtaaaattatatttttactatcgtaaaaatatacaatttaattttgcccccccaaaaaaagtttcta

SEQ ID NO: 9491 - DNA, 881 bp, Gossypium hirsutum
  misc_feature (372)..(372): n is a, c, g, or t
  misc_feature (802)..(802): n is a, c, g, or t
  misc_feature (862)..(862): n is a, c, g, or t
tgtacatcctctgcaaaatttatctgccatacatacatgcatgtaaaactagggcaatatatgcagtatatatcttactttcgtaatagtgaaaattactatatgaaaatatattatatatgagaacaacctaatcaaagcttataggcctagagaaatgttcagtcattggaatcttgatatcccaagtttgactccagcgttgcataaatcatgctttttaaaaaaaaagaaatttaagtggagatatattttcgattatttgttatactttgtaatgcttcattgtgattattgttaatttagatatatattacacgtaatgaggagggtccacttatcagtgacggaatcaaggagatgctgataagncccgactcctttaaaatgaaaagtttttttatttaaattttttataatttataaaattttaaattaataatgattaaattacactttggtcctctcaaaaataataaaaatttaatttaatactttaaaaattataaagatatagattataaaaattgtaaaattatatttttactatcgtaaaaatatacaatttaattttgcccccccaaaaaaagtttctagctctactaccgtcacttatacaattaatattttaaaaattcaattgttatattttatatttcattcatatagattatgcatgttaatttggcataaattaatttttttaactattttctttatgtaataaaaatttcaactgttcagtaactaccaatatatataatattttagatcaatatgatagatatatcggatgatcgtntaaatattaatagtacaaaactataattagaactacccataaccccccctctccagctantaataagagaataatacac

SEQ ID NO: 9492 - DNA, 607 bp, Gossypium hirsutum
ttggtgtctggatgttttaagaattccttaaacagataaatacaaacaaaggaggaaggaaacaagaaaggagatcatccaaaccggtcgtaatgggtatccatatatattcaacggaacatggccaaaggatccacctcggtgttttggatggtggaatttacaggaggcaccaaatttacaggttccagtttttaaataaaactgcatgcgtcaaaaagaattaaaaaatgggcaacttaaagaagagaaaaaattatcattctggcattaattagcaaaagggatagataaaaacaattttgcattatcacatagaatgaaattattcctttacctgacatgcaggttccccaggtcgttcagggtactcccctgtagctcttacagcagcctcaacctaaatggcatcataaccaagaatgactgaacactcaaaagaggcttaagccatagtacaggaaaaatcttatctcagttctaaaccacaaataatgagaagacctaagtaagctttaaattctcttacaccatcctatctataacttttaacttgacatgagtccaatgaagcacaattccatggtaaaatctcccgttatttgct

SEQ ID NO: 9493 - DNA, 656 bp, Gossypium hirsutum
ttgcgattctgctcatcacataatatgaagcagcactgtcaagcccactagtgggttcatccaagaacaaaagcttagggcgtgtcaatatttcaatgcaaatgctaactctcctcttttggccaccgcttaatcccttagcaccccacccaccaatcctagtatccatcgagtcttgcaaacccatttctctgatcgtcatttcggctctctcattcttctcagatttggccattgtatccggtaactgaagctgagctgagtagtaaacagcttctcttacagtcagtgttgaaatcaacgcatcgtcttgggttacatatgcctgcacggtagtaattaattttatttgcatgaaagaagtgataactttttaatgaaattccttacagatgttccataagccaagacttgtttacgtccattgataagaatatctcctccttgccttgttttgggaccctgtctccctgctaaggtatcaagaagtgtggacttgccacaacccgaaggacccataatagccaacagctcaccagggtgggcgtagccagccagtccctgaaggatcggtcttccaccagcaaccgtgacccacaaatcgtcccaagtcaagaacactccatcctccatgaacctgttacttcggctacatg

SEQ ID NO: 9494 - DNA, 448 bp, Gossypium hirsutum
gatctttggctcttgcttgcatgaatttcctaaagtaggcactaagtagacagtcatatactttagtttcatggtttagttaacacagaaaacatgatattgttgacatataagtatataactatacgcatcgaatgcactccacaaatacacgcaactcaagttgctttttcttttaaccctacaactttattattgccataaattttttagatggaaggctagacctagacgttgattagaaataaaaattggtcttctatgccctaaatccatcactacaagtctactactactacaacttataaataagaataataataaaccgtagctctgtttgtcctctctatctgaaatctagttttactaatctaaattaattagttttcattcatccaagcatgacacatttattaatcagttaatttgtgtaataaaaaatgagtgt

SEQ ID NO: 9495 - DNA, 614 bp, Gossypium hirsutum
tgtaggcatagtcctagaactactttgtgtatcatagtttggttagcaatttaagtcgatttcttagtgccttttctaatttgtttcaactattgtaatgagcctgtttcaactttttagaacatttccccacattttcttttatatgaaatcatttttgggtttatgtgaccaaatgcttaaattaaaatctcaaatcgattagacttgtttatagattaaactattcattcagctcagaaatttgatcctagttttgtttttggaaatgaaaactgatattagaaagacaattttttaatattatttttattaattgagcaataaaatggacatgtgactttgatgcaaccatggtaatttggtaattttctttttaccaaggattagattaagggtataatcgagtagagttgtttaaatggtggtaatttcagcctctaacttgacttaagattttgtattcagttcgagcttaatttgaacattaatttttaaatttgagtttagtttgagacataattaaactatttaagcttgagttcaattgagtgtatttattaatttttatactcaaattcgaattgaatttgattaaacttgtccgtattcaa

SEQ ID NO: 9496 - DNA, 647 bp, Gossypium hirsutum
ctgggaagtgatcatctgcttacgcttactttttaaaataagaactgaatacaggtcttttagtgttcctggatcaagaatctattttatggttgcaatttgaaggcaacattcatgggaaagaaggggtttgatcttttagaaagaaagagtcatatcacctgcatgatatcttctcctcctatcagataaatattgggtggaaggatgtccactataatttattgattccagtcagatgcatggatttatctgcaaagctaaaagagagaagggaaatgggaaactttggtaattggcaaagattataggaagggataagtagtgctactggctgttgccaaaaagttatgcaataaaaattttttttttggactgtgtgttgggcatggttgttattgatattgcatgtatccatatattccaagtcaagcactaaaatagtgcatgctatctgtctaggaattcaaaattgtaattgtgtttatatggttttccatggtctgttatgcctctgattccccctccccgttctttttgttgagagttttaatgataaaattctaaacctttcaaatatccaaatctattggtgatgtatatttaaaaaaggctgagttcaacagggagcctttgtaccctaaaat

SEQ ID NO: 9497 - DNA, 524 bp, Gossypium hirsutum
tggtttggctggccacactttttttcatcatttcaagtaccgttttcttttggtacactctgttgtgatataattaagaagccttatgcatagtaaataatactattaaatatcaattaagtacatttgttaacctcttatcaaatttgaattcattatttgtaatcaaataattattttttataaataatacatctaaataattacaatcaacataaatttcaaagtataatcatactataactaaaatatattcgaacctatcaaccattataaagcacgattgaactaataattcaaaactaaatcaaaatgaaattagacaaggctcacacatgataaaacttaagtgaaaattagaaatgttcataagttgggttacttatccaagtctcaaggccaatctaaaacatgggatggtttgaataaaaatataagatctaaaaaatgggtttcagtaaggtttaagacccatattctatttgggtcaattttggataaatgtttttgtcatatctagttcg

SEQ ID NO: 9498 - DNA, 594 bp, Gossypium hirsutum
  misc_feature (586)..(589): n is a, c, g, or t
aaagatcttcttgactcttgaattgagaaaaagtcaatttgatccaaaaaaacatctagggaccaatataaaaaagttgcaagtttaggggctaattagtatgttaaacctcttacttaaaagttaaatgaatgtgttataatattctaattcaacacatgaaatttaaaagccagaacaatattttctgcctaataaaattactagaaattagggtttttttctttctaaaatcaccctttagtaaatgtttcgggaaatgacaaaatagcactatgaagcatgctatattaaaaaaaaaggttattttttaaaattttagttggcattttcaataaaacatttttgctagaagtgtttttcaatttctcaggaatcccaagcttagtcttattggttataaaacgtatttttcaatattttgtgaatcctagttttgtttgatttttttttccaacattttaatttgtgtttcaaattcggttgtagtattcttgcttataagttgcaatgcgtgtttttcatccttgcacttgaaaaaatattgctcatagtcgtcggattatttccactcttggaaatttgnnnntttcg

SEQ ID NO: 9499 - DNA, 663 bp, Gossypium hirsutum
tagtggaggaagaaggagaggtgagagtataaaattatttttattactagaaatatggtcgaaaacatctaagttaaatatctaaggtccatttgaggaaaaatgagttacaccagcaacaaaattatcgaattgttgtttcaaggcttgatattataaatattcatcataatctgatttagataaggtgatagatttgactcatctttatgtatgagaaattagaagcggaatagtcctatctccttaaacttgggttaaatgtgcaatgggtggattattgcaagagaatctcccatgtaaagcccaacaaatttcacatatgtgcccactttgatcatagtaggtgctatgaggctaagctctctccttcttccttttttaccatcgccttgtgggcttgtatcctaaatggttagcatagatgattatacctctcattgagcttaagttaaggagatgcgaagtagtcaagcagttatctaatcaggaataggaatggttgagctagtattaatatgattttcatcgaagctaaatatgtacgcaatccaatcagagccagaaccataaagaatttatccctttacttctcctgatacccaaatttcttgataagaagcataacaacattaaactcatccttcaacaattcaacttgac

SEQ ID NO: 9500 - DNA, 677 bp, Gossypium hirsutum
cacatcagagtttaaattcaacaccaactcttgctgccctctgttaccaaaataaatgctctttgattgccatgagtttcgaaccgtggacctccttgccaactctataaagccaccttgccacttcaccacaggctctttttgtgtcatattttatccccaattaattataaggtctaaaggccaaagttcaagttcccttaaaaaaaaaccagaataaattgcaagagccaaggcttgaacccaggctcccatataactttaattacgccacaaccactagaccacatgcttccttgtgtcatttatttaacacaataatttaaaaggccttcatccaagcatccagatttttttcacttaataccaaattttttgctaaagcccaggtttgaacccaagatttctccaacacttctcagggctattaaccactaaagaagacatttaattgtgtcatttcattgcacaattaaatacctaaatacaacctccttacgcacccacactcaaggcccaaaatttctaggcccaaattcgggctgttacaatattcacgttggggatcccagtttatcattatcatattttatcttgttgttttcaagttatttcttcaacaacaatttatcttatttctcttcattcattgcactcagatcaagcttggtgttaca

SEQ ID NO: 9501 - DNA, 611 bp, Gossypium hirsutum
ataaataccactacaaatctgtctaaatacgatctaaagattatgttcatcaaatccataaatactataggtgcattagttaaaccaaacggcatcataagaaactcatagtgtctgtacctagttctgaatggagttttcggtacatccaaatctttcactcgtagctgatagtagacagaatgaagatcaatctttgagaatactgtggcacctttcaactgatcagacagatcgtcaattctaggcagtggatacttattcttgattgtaaccttgttaagctgacggtagtcaatacataatctcatcgattcgtcatttttcttaacgaacagaaccggtgcaccccaaggtgaaaaactgggtagaataaaacccctatcagttaactcttgcaactgtgctttcaactttacctgtaatagtaatcacatttcatatacatgtattattcatttcatatatcaatgtatcatgtaacatcactttcatgtatttcatgtaaatacctgtaatagttcatatcgaactcatataatctcgtaacaaaactttgcccgttgaaccatttaaaatatcattggatactagggtagcacacacgaagt

SEQ ID NO: 9502 - DNA, 590 bp, Gossypium hirsutum
acccttggtaaatcgggcatattccatgattgtccaagaagaactcaaaggagtttttcctctgttttgtcgcatgttctcgatcctgtggctttatcttccactgcatctggcaaccgtaagaaattcactagtacctatgatttttgcaagttgaaggggcataaaaaggagtcatgttaccgcctaattggattcccacctaattttaaattcaatcggaagaaggcttcttcaattgctgttgctgtttcctctaatgactcttcacttaatcctcagagtgcccctaccttcattcctcaacagtattcacagatcctggacttgctgaataagagtcaagctactactgcacctgctgtgaattgtgcaggtataccttctacacctttttcagttgaccgtaaattttcctggatcttagacactggtacagctaatcatatattttttgattcgaagagtttgcatttgcctattgcttaccctcttaaccctcgttttgttcagctttccaatggtagacactcttctatcactcattttggttcttttgctttatctcctactattacccttactgatgt

SEQ ID NO: 9503 - DNA, 724 bp, Gossypium hirsutum
  misc_feature (451)..(451): n is a, c, g, or t
  misc_feature (461)..(466): n is a, c, g, or t
  misc_feature (469)..(469): n is a, c, g, or t
  misc_feature (471)..(478): n is a, c, g, or t
  misc_feature (481)..(493): n is a, c, g, or t
  misc_feature (502)..(516): n is a, c, g, or t
  misc_feature (518)..(519): n is a, c, g, or t
  misc_feature (522)..(527): n is a, c, g, or t
  misc_feature (532)..(532): n is a, c, g, or t
  misc_feature (534)..(537): n is a, c, g, or t
  misc_feature (539)..(541): n is a, c, g, or t
  misc_feature (545)..(547): n is a, c, g, or t
  misc_feature (549)..(549): n is a, c, g, or t
  misc_feature (555)..(557): n is a, c, g, or t
  misc_feature (560)..(571): n is a, c, g, or t
  misc_feature (576)..(577): n is a, c, g, or t
  misc_feature (579)..(588): n is a, c, g, or t
  misc_feature (590)..(590): n is a, c, g, or t
  misc_feature (592)..(596): n is a, c, g, or t
  misc_feature (611)..(619): n is a, c, g, or t
  misc_feature (636)..(644): n is a, c, g, or t
  misc_feature (653)..(653): n is a, c, g, or t
  misc_feature (655)..(660): n is a, c, g, or t
  misc_feature (665)..(668): n is a, c, g, or t
  misc_feature (671)..(675): n is a, c, g, or t
  misc_feature (680)..(684): n is a, c, g, or t
  misc_feature (690)..(697): n is a, c, g, or t
  misc_feature (700)..(704): n is a, c, g, or t
  misc_feature (707)..(714): n is a, c, g, or t
agaaaagaagatctcactcaggataaatcgagtggtaacatttcttattaatcaatatttgtattgatgcacttagaatccatctggtttatgcttttgttacatgccttttgctttctatttattttatagcctttttctttcttatttatatttttctaaaaaagaaaaaggcaaatggcaaaaacataaatccaacagtctattttttattttgtgtgtgtgtgtgtgtatttttagagaaaattttagtctctttgagtattacatgttcagcttgctttttatttatggctgtaagaatcattagaggaaacaaagtgctcaagaatggctacctaaataaaatataggttcactgttggttcatgcattaaaggtaagcaataagggaattattctttttggctccgtttgcattacatgaggttggccaccttgcatgactaantatataaatnnnnnnccntnnnnnnnnaannnnnnnnnnnnnttccatgtnnnnnnnnnnnnnnnannggnnnnnntgaanannnngnnntccnnnanatttcnnnttnnnnnnnnnnnntcacnngnnnnnnnnnncncnnnnnctgcattgtccatannnnnnnnnttccataccccccaccnnnnnnnnncccttttgnannnnnntaatnnnnccnnnnncacannnnntctttnnnnnnnntcnnnnnccnnnnnnnnctttcccccc

SEQ ID NO: 9504 - DNA, 527 bp, Gossypium hirsutum
cgagttgttcgtgcgaacccgaacactccacctccctcacttcctctgattcctcagtatgccccggtagctccgtaaggcacaaacatgattaggagggagaaacctatagtggataagattcagagataaggggccgaggaatttcgggctagtatagatgatgactcagaaaaagtagagttttggctagaaaatgccattagggtatttgacgaactatcatgcacacttgaagagtgcgtgaaatgcatagtgtcgcttctacgagatttggcttatcagtggtggaacactctcgtgcctatcgtattgagagagaggatcacataggaattcttccaggaggaattttgaaaaaagtatattagccaaagattcgtagaccaaaagatgaaggaattcctagaggtaaagcaaggtcgaatgttagcgacggaatatgaacgtgagttagtgaggcttagaaagtatgcgcgagagtgcgtatctacagaagccaccatgtgtaagaggtttaaggacgg

SEQ ID NO: 9505 - DNA, 593 bp, Gossypium hirsutum
  misc_feature (542)..(542): n is a, c, g, or t
ctaggtgattgttttgtctgctaccccaaaattgagtgactgttggtgtaatttacccaagaaaaaaattacaaaggcattttattaagaaagttaaatggaattataagattgaatggtgtaacattctcaaaatatttataataagttataagtgatttaaaaattatgtcacttgattatcaattaagaatttttactatttataatgctgagttgtatgttgttgttaaaaattatgttacttgattattaataaatagtcataattattcaagtagatatccattaaataatgatgtttattgcaaaaaaaactgtgattatccatttgaatagatatgtctttatgaaaaaatataagaatttccataaataggaggcaaatttcatttgcaaggaatattaagacaccaaaaattcagaaaaagaaaaggtttctttattgtcctccatgttctaatatttaagtattgttctataaagaattactataggagttctttataaaaaaaattgttcttgttatacttcacttaatncttagccattggacttcattgtatcctcgaagtttatttttcagtaacttt

SEQ ID NO: 9506 - DNA, 661 bp, Gossypium hirsutum
tgttcccaaattggctgagcaggatgcggtatgtcatgaattaattattctaaattttatcgtttattctaaagtttttctccaaattgaactctgtgtttttgctttatcgactattgtgcctggttttgtgacattggcatgttttgatgtttccagaattctggaaaaattggagtggcatctgatttgacttccacaatatcttcttcaccatatgaatcttctggtgcaaaagctgagagtcatcaagacttggttggagaacctggtttcaatcaatctactagctttgaaaattattactacccaggttagattatatgacaatccttcatgctgaaacacggcatttgtacacaatgttagaatcaggatagccatggattttattgcaaatgagatttgctatcattctatctttcattgttgccatccatttgttagaacatttgcatgccaaggtcatgatgaaacacattgatattgtaggtgttttaaatcatatgaaaaagcaattgttgaaaagtgttcctaaattacctaattcatattccccaataaaggataaatgttttgaggggaacaaaacttttaggctttagttcctgactctatatttattgtgcagattgtcattcttttcttcttttgcagtttg

SEQ ID NO: 9507 - DNA, 485 bp, Gossypium hirsutum
  misc_feature (252)..(252): n is a, c, g, or t
  misc_feature (360)..(366): n is a, c, g, or t
  misc_feature (368)..(368): n is a, c, g, or t
  misc_feature (370)..(383): n is a, c, g, or t
  misc_feature (385)..(385): n is a, c, g, or t
  misc_feature (389)..(389): n is a, c, g, or t
  misc_feature (393)..(396): n is a, c, g, or t
  misc_feature (398)..(400): n is a, c, g, or t
  misc_feature (402)..(410): n is a, c, g, or t
  misc_feature (412)..(417): n is a, c, g, or t
  misc_feature (419)..(422): n is a, c, g, or t
  misc_feature (426)..(427): n is a, c, g, or t
  misc_feature (429)..(429): n is a, c, g, or t
  misc_feature (433)..(434): n is a, c, g, or t
  misc_feature (443)..(447): n is a, c, g, or t
  misc_feature (449)..(449): n is a, c, g, or t
  misc_feature (454)..(455): n is a, c, g, or t
  misc_feature (457)..(463): n is a, c, g, or t
  misc_feature (466)..(468): n is a, c, g, or t
atatccccacatggtgtgatgggggacggagctggtgtgtagcgaatggataatttggatgggattgcattgcatgtttgatgatttctctttgaatgcttgtttttcatcgagggttgtacacactgagtttgcgaaaactcaccccctcttttattttattttcaggtgatgctcagtagaaggttcgatgtttggagggactctgggtggccggctagcaaaataattcgaatttggtttttttaaacntttaattttttatttctttttaaatgggttcaaaataaattagaataagggtttcattatgttattgttacttgaattattattattttttttgtaaaaaagataaannnnnnntngnnnnnnnnnnnnnntngttnggtnnnntnnncnnnnnnnnntnnnnnntnnnnaatnnancacnncagagtgtnnnnnangaatnngnnnnnnngannngatgaataaaagtgtgg

SEQ ID NO: 9508 - DNA, 724 bp, Gossypium hirsutum
  misc_feature (509)..(513): n is a, c, g, or t
  misc_feature (515)..(517): n is a, c, g, or t
  misc_feature (697)..(704): n is a, c, g, or t
  misc_feature (706)..(707): n is a, c, g, or t
  misc_feature (709)..(709): n is a, c, g, or t
tctccattccatttgatggacacagaaaatggatattttctagtcaaattccagaataagcttgattgtgagaaggtcttttctaggggtccctggattgtgtttggccaatacttgacagtacaaccatggaccaccttcttcagtccaatacaaaatttttcgaaggtagtaatctcatggatcaggcttccaggtttgacaggatacttgtataaatgaaagattttgtgggaaatagaaggactgattgagaaggtaccaaattgcatatgaaaactgataacagagtaagaggctgttttatctggatagcggtctatatcaacttggagaggcctctggtttctaaaattttaattaatggcaaagttaaaaaatttgaatatgaattttttctgatggtttacttttagtgtagaagaaatgaacatgttaaagaaatgtgcaccttcaaggcagatgaacacaataccggagatgaatcactgctgattggtttatcaccnnnnnannnagcagtgattcatctccggtattgtgttcatctgccttgaaggtgcacatttctttaacatgttcatttcttctacactaaaagtaaaccatcagaaaaaattcatattcaaattttttaactttgcattaattaaaattttagaaacagaggctctccagttgatatagacgctatcannnnnnnngnncntatctgttatcgttt

SEQ ID NO: 9509 - DNA, 628 bp, Gossypium hirsutum
ctgcttctttaactggcgattgaaggaggccagtaagtccctgaaattaacaggaaaataagattcaaccttgaaaaggcatgcagtaacatctctatccaaacacgctccccataaaagacaactgttaacaagcagctttatttctttccagagggtttactgctgtggtgcaatatttaccatccaaatagaaagagctcaaaagataaaaagaagaaaagatattcatacctcaaaaacttcattaattatgcctttactgtgtgaagcctcccctttcaattgcctttccattcttgcaacagcctgctcatcaaatgtaaatgcaacaataccctgcaagcagtatagcttttcactgtcaatcaatgatatttgactgaatataattcaagtttctcatagataataacattaagaaataaaaaataaaaaataaaaccttaattaatcagaacaaattgcatctagtgataccttgtgtgcagctttactgaattgagtagcagcatcacttagtgcatagaccgtattgctcagaagactagtagtaccttgagccatgcctgtgataagtccagtgggactctaaaagacacattcctatttcagccctcagccatta

SEQ ID NO: 9510 - DNA, 483 bp, Gossypium hirsutum
tttgagggaagggattcaagttttggtagggacaggtactcttcgaataggcagtcgtcctatgatggtccaaatggagttggttcttcgagacctctgcccaaagggaaacgggtttgtaaattttacgaaagtgggtattgcaagaagggagcatcatgcagttactggcacccttgattagtcatttaacttgtaatctgtgacagtaggtatcattcaagttaggcccgataataccatatcatttcagttcccaggatataatagcaccttccattgtaggttgtcaagccctagcctaactctttcagtgaaataggtagttgatttgctacacagggttggttggtagtggtaaagtgctatatatagtattttacttactatgaagcatcaatttttgttagaattatttatagaagtcgtatgaactcggatggatttagggtaatggattatatgattgttgcttaaggtcca

SEQ ID NO: 9511 - DNA, 511 bp, Gossypium hirsutum
gaagttgttcaacaacttcacaaggcaagttaaaaatcttatctctgttcatcccaagcctttggttttatagaaataattaacattctttgtctctgcatctttaggttcttcggccgtttctccttcgtagattgaaatcagatgttgagaaaggtttgcctcccaaaaaggaaactatcctgaaagtaggaatgtcccagatgcagaaacagtactatagggctttgctgcaaaaagatcttgaagttgtaaatgctggtggagagcgtaagcgtcttctgaacattgcaatgcagctgcgcaaatgttgtaatcacccataccttttccaaggtgctgaacctggacctccatatacaacaggagaccatcttgttaccagtgctggtaagtttacttcctggaagatattgaattctttggtgctgaatgaaaactgaccttagttatttatttccaggtaaaatggttctcttggacaaattacttccaaagctgaaggagcgtg

SEQ ID NO: 9512 - DNA, 567 bp, Gossypium hirsutum
gtatccaattgagtgtccataccaaaatactttcccaacatcaagctatttaaattatgtgtattcaatgagacagtatgaattttaaatatccaaccaaaagaactgggaagctaatacctttacaacatagagaatgaaacgctcaagctcaagacaccgcagcagaaaatgtgctccaacaacaaccataacagggcgaccttcactgtccactcccccgcgataactgacacaaaacaaataaactaacattgtattcaaaccaggagtaatctgaacatttatgaaattaatgtggttcatactaaatgaaccatggtctcacaaagagtaaaagccaacaaataaaaatgagacattaagaaaacgacagggagagtaaactgtctcaaaacttcagcagcttgtttattatcataatgtgcttccagtgactgatagtgaagaaaaccaattaaccggtgaaaaatcaagagtttaaccaattctaacagataatgaaatataataacaaggaatgctaattcaagatgggaaaaatggaaggagatctgcatgataaac

SEQ ID NO: 9513 - DNA, 499 bp, Gossypium hirsutum
gtgaagttcctgaaagaagctgtgaaaggtgcctggctccaatcagtcttgactagacctcctctagtggcccagtcatcagcattccagaggctacaatacattctcatgggttggttttttgggtatggaataccaactgattccaggtttttgaactctctaattggtctatcatctacatagaaactgaaacaaagacaataagagtcaattgcaatgtttgagataaaaaagttgtaaggagttagatggcatgttgatttatgtacacttacataacgtgtccaggattccagagaatcgagtaagtgtgaaaatcggcagttgggtcgaaccagaggtagaattgttgctctcttccacctttccctttcgtataaacattagtgtgaacgacataaggatcaccacttaggttccccaagaattcaaaatctatctcatcccaagacgaaccttgagattttaactgtagcaaacaagaacaaagctgtcg

SEQ ID NO: 9514 - DNA, 631 bp, Gossypium hirsutum
tccgacatactcttgctgagatttcatgagcttacagaagctgtaataccagaaagaaacctcagtttcaagctgatctgtagcttgacgatgggagtcggtggtcaggtcaatgcttatatcagtcacatgattcaactgctgtgaaataaggtgctgaactcgatgacatttgtacatcattttccacatctccatcagcctgtaataaagaagattagacaatttgagtaaattctatcctatataacccatgattcaatcctcccatgttgataatgtagcaatgtgaccaaaatttacccggatattaatgtctccagctgggggtaaagttcctcatcgatgatctccaatatagacgaacaggacgtgcttattgaattttgcaggtgtcttaggacattctccagattctcaacgcttgattggatcttctctgtcttgctccagtcatggttttcgtcttgcttttgcagcaacatcaatttcctttcacgctccaatttggtggtttcttcctcctacaaaagttttatccatgagaacaaatggacttatacagaaccagaaatggaaatataaactgaggcaaagactaatcataaaatagtcatcacacacacacaac

SEQ ID NO: 9515 - DNA, 545 bp, Gossypium hirsutum
tgaggatgtttgaggacatacatgagatggacactgccagtattgaggattctcatctagcttctattgactttaagggccatttgggcatgaggcttggcaaccatggagcgtcatcctcaactgggagcatgacttcactatcctctacgaatactccaagaggaagtcactttgattctttctggttggagcgtaacaatccttctgaactagaggatgtgcaacaggtttgttgatcttgaggatctctcattttgtaatttgacattgtcatcctgtcttcttgttgtgaagaatatttataatgttttgccaaaatgtgaagatgctgaatgaatttctaaggaatcttatagaactaatgtgtttctcatgcaggtctgtcgagtagaaatccttaagttgtatattcacccaattcaaggcctaattaaatggataacaataatctggctgtatgtttttgacaaatctatgtacgcacatgcatgtgcctaaatatatactttctttcaatcatttttctgatattatgttcgcaa

SEQ ID NO: 9516 - DNA, 626 bp, Gossypium hirsutum
tccttgtctaggacagttactaaagttcttcaaaattgtaatattgattcaaagaaatgtaaactgagctccgtttgctctgcttgtcaacttggaaagttacataaatttcctttttctccctcaaacactgtgtattcagctccctttcaacttgttgtttcagatctctggggacctgcccctgtagcttctaacggcagtctctattacatctcatttgttgatgcttactctcggtatacctggttgtatttgatcaggaataagtctgaagctttggccaagtttcttcagttttaaaaacttgttgaggtgcaatttggaggcaagatacgagctcttcaaactgactggggaggaaagtatcgtctgtttcaaaaaatgctgtgtcaacttgggattcaacacaggctttcttgtccgcatacttcagaacagaatgggttagtggagaggaagcatcgtcatgttgttgacactggtttaacgttacttgctcaggcgaatatgcccatggttttttggtctcatgcatttgttagtgcagtataccttataaatagacttccaacgcctgttctcaagggaaggtcacctcatgaagttttgcatcaaactattcc

SEQ ID NO: 9517 - DNA, 362 bp, Gossypium hirsutum
  misc_feature (304)..(305): n is a, c, g, or t
  misc_feature (309)..(309): n is a, c, g, or t
cagccaggaactgaactgggttatagacaagttctgcttgtgagttttggtcttggggcattggcattagccagtgtgctcgccaaccttgatatggagatggatcccaaaacaaaagactataaagcattcactgaacttgttcctctaatgttggttgtggtaagataccatctattcaatatcaatatatatatattggtcccattcattttccaacaacaattattaactcacatccttttgctatgttgcagtttatatttatcgtcctgttcctgccattcaacgtcttgtatctgtnncgancattcttcctcctcccctgcttgtgcctgtgcatatgcactcctctaactcta

SEQ ID NO: 9518 - DNA, 507 bp, Gossypium hirsutum
tatttccctggcatatgctacaaagctgttgttgtatgtagcattttaagacacaagcagacagaggttaattggcatagaattgtgtctacttttaacttatcaaattcttttatccatttaccgttatcttccaaatatattattactttggatcataactaaaagtgtctatggacggggccagacccaactaaaattttaggctcgattggtatatttggacacgaaaaaagagtttaaatttttgtctaaacccaattcagattataaatactaaacccgggtccagttcatattaattttttgaaaaatattttattatgtaaaatggttttttaagggaacacaagatcaagcttcaaagatgagtgccgaaaatatttcttgaaatgatctttaacaacagtagaaaaatggaaattagtagagggttcaatgttgcttgacagaaaaaaaaggcatgtcttcattgaaaagtaagatggaagcaatgcaaatatcatc

SEQ ID NO: 9519 - DNA, 681 bp, Gossypium hirsutum
attagtcaacacataaacaaagaaacagtctaagctaaaactggaatccgatgaaaataatttataatgttgaaataataaaatattttatttctaagtacgcatgcgggaatacaagattttgtttaccaaattgtctaattcctaattgaaacgaaagatacaaaaaataattaggggtgacaccaagaaaacaaagcctattggaggctttgtttatgaaagaaactagaaattaatttttggttgaggaggtcaagataaaatataacttgttggggtcaaatctaaaagttttacggtaaaaaggttaagttgaattgataatttttaaaatgagtctaaaattgcaatataaccattttatctgagggggctaaggccctccctgaatgaaactttagaaaatatattaaacaattcgtcaacaccaatttcaagtcctaaaccttaaaagtcttgattgtttctccatatccaaatatgtatatgtatatgcatatgcatcaaagtaccatataaaaacatacgtaatctgtatctcaaaataaaagtaaatgcagagctttgacttttgatatcaagaaattaaagattttcaccttatggatgatgacatgaaaagagacttgttcaatgagcaaccttttttcttaaaacatctttgtaactcccagaact

SEQ ID NO: 9520 - DNA, 512 bp, Gossypium hirsutum
cttcccatatgcaatgtttgctcggatggtgtcgttgaataggacaggctcctggctcaccaaacccatctgctgccttagccattttagctgcaactttgagatctcaattccatctaatgtgatacgacctgcatctggttcataaaatctttgcaacaatgatatgaatgttgacttcccacttccactttctccaactagagcaactgtctgatataaataccacagcaattagataaggatttgcttgtcagattcaaaatgttctaaagatcattataccaagtaattctaagctcatttcgactcaccatgccggcgcgaatcgtcaaacaaaggtctcggaatattttaatatcaggccttgaaggatacctgaacctgacatgcctaaactgaatatctcccttaacatgtttcgatctttttccgcaattctgactggggtctattttggatctctggtccaggatttcaaaaatggaagctacggaaaccttggcttatct

SEQ ID NO: 9521 - DNA, 541 bp, Gossypium hirsutum
ttcccgccttcccatatgcaatgtttgctcggatggtgtcgttgaataggacaggctcctggctcaccaaacccatctgctgccttagccattttagctgcaactttgagatctcaattccatctaatgtgatacgacctgcatctggttcataaaatctttgcaacaatgatatgaatgttgacttcccacttccactttctccaactagagcaactgtctgatataaataccacagcaattagataaggatttgcttgtcagattcaaaatgttctaaagatcattataccaagtaattctaagctcatttcgactcaccatgccggcgcgaatcgtcaaacaaaggtctcggaatattttaatatcaggccttgaaggatacctgaacctgacatgcctaaactgaatatctcccttaacatgtttcgatctttttccgcaattctgactggggtctattttggatctctggtccaggatatcaaaaatggaagctacggaaaccttggctttactggtgtccggggcgagggagttt

SEQ ID NO: 9522 - DNA, 510 bp, Gossypium hirsutum
atgctagttttcatcattgtcgttccataaaagaaaattgagaaaaaagtgggcgacacggagcaagagaagaagacatcaatatcattacatgcaagatgcaacatgtaaccgagtgatggagtccattgacgagtatattccgcccgctttgatgggtcctgatttctaatatccatcttcctaccaacatcattgaccatggtaatagtataactccagtaagctaactcaactaagtatcagctcttttacaaaatgatgatgatgatgcattgcgagtaggacaaataatatttgacaaaatttaaattattgaagggctaaatacgatacatactggctccaggtgttgatgttagaaaacatggggtcatgaaactttatcttttgcttttttccatttcttgtcaaatacagtccataaagtgggcatccatatatggctaacaattacaatttaaacaaaaaaaaaagttaaaaaaaggctgcttgaaaaatacttacatg

SEQ ID NO: 9523 - DNA, 626 bp, Gossypium hirsutum
caggcggcagcaaattagagaaaaggcaaatcaaagttagaacctgaaaatataagagcattgatgctctttgtaggcacgaataaaggaaacaaatgctctaagccctttctccatcacatcacggtctttcaatgcagcagaccgtatctgaagcaagtttaagaaagaaaattgataaagaaatgataatacagttattgtagcaaagatgttatcaaaatacaaattttctttacctgaggaacaacatcaacaacatcatctatgcatttcctttcttgaagaggaacccttcttatgcgcaaaaattctatataagcttcctcctagaaaaatgcctcaaattcgatcaaaccattaaaatggtggaaataaacacagtgatctacattaaaattccaaatcagaaattaaaactttctgtataagcttcctcctagaaaaatgcctcaaatttgatcaaaccattaaaatggtggaaataaacacagtgatctacattaaaattccagatcagaaattaaaactacaaaaaccacacactcaaacaaggaaagatcgcatataatgcaccttaggtaataggaaaacaatggcacttccttgtctacccaaacggcagt

SEQ ID NO: 9524 - DNA, 533 bp, Gossypium hirsutum
  misc_feature (478)..(480): n is a, c, g, or t
  misc_feature (482)..(482): n is a, c, g, or t
  misc_feature (511)..(511): n is a, c, g, or t
  misc_feature (515)..(519): n is a, c, g, or t
  misc_feature (522)..(524): n is a, c, g, or t
  misc_feature (526)..(529): n is a, c, g, or t
taacttcctctttcttcttgtctaaatatcattttctgacataattctttcagaaatcaactcagaagaaatcccatttaatccattcttttgataccatagtagttaaagtcaaatatcgatgaataacctcatcttttaataatgtcactacacatctcaaataatcttcgaaaaataaactcttcatctagaattctctgtgtttgctatcaagtattaggctctaactgaatcaccattcactttagttctaaactcttcagcttcgccctttcagatttaatcgatagaaatctagtgaatattctgtcatatagtactttgaggacaaaggggtagagatcgtagagctaccaaaatttttttcagacatattaaacatattatttatcattaataaaaatacaacaaaccttttctctataattatataatttcagcacattaagagtagctctttaatcaaagacttcannntnctttcaccttcatcgaaatcagctcggtnggannnnntcnnntnnnnagaa

SEQ ID NO: 9525 - DNA, 542 bp, Gossypium hirsutum
  misc_feature (509)..(513): n is a, c, g, or t
  misc_feature (520)..(520): n is a, c, g, or t
  misc_feature (528)..(528): n is a, c, g, or t
  misc_feature (530)..(530): n is a, c, g, or t
ttgttgttagacagggcatagaagggtggttctacgtttcttggaaattgataaagatctagttcgtggaaaaggaaagaatggtaagacacctttgcacatcataagtgaagttggaaacaataatggtctgttggatagattcctaaagatgtaggatgacagaaatgcaaaataaggaaaagaaaatggtttgatcgaagcctcttccatgttccacggtaaaagtgaaccatagctgcaaaacgaagataagcacctttgaaagtggaaacctctccacgttttatgcttaaagtgatctgtagcttcaacatgaagataagcacctttcgacttgactggaaaaatacaaaccaatccattcttatataaaggaaaccattctcctctttcttcctcacacaagggaagaaaaattaattcctctaagtggcctttaaccctttcaatttttttctcctattttgaaattgttcctttgtttcaaacatggaccaaagtttcannnnnatttttntcgtcggngntgtcatgaaatt

SEQ ID NO: 9526 - DNA, 610 bp, Gossypium hirsutum
ttattattgatggcgtgatttgcattgaaggttggcaatatcattgagcgattctccgtgcccattaacttcattttcgttttgatcgtggcctcgaacaggtcgctacatctttttatctcaaaatttacatcaaaatctataaatatcttttcctcataatattacttgcaagtcaaaatccaaggtatttaaattaatatgttaaatgactgtgtttgtgtttatatgttttgacacagtgctatatttctagatgatgaatattaaagaatagcaatatacaagtacaaatgataagattttgttgatttcatcgttaacattgattgtattgaaggatggttgtttatccttgagcgcttgtacctttttgaaattttgaaacagaagtacttgttttaaataccgatgtaattaaagtaggttgtaaatattttaagttgaattttaaatatataaaataatatgttatgctaattagttgagttgaaattttagaatgatttttctcaatcaaaacttgttttgaatttttcattcttaaatctagacaatagaggtgcttataaaatgaattaggttttagttgacctaaaaatatgaattt

SEQ ID NO: 9527 - DNA, 650 bp, Gossypium hirsutum
tttctttactcaatgcataatccgcaacatgacacctaaaaagtaaataaaccatgaaacatacacgaatgcacagagttacttaaaaactgttattcaagttggtccagtcctcattaacaccagttaaaattaccagtttaattgcattaaattggatgaaaatttgagctaaagtgtgctattagtccctggggtattaattgcttctttctcaacttcgattttcttataattccagcatgaacataaatggatgggatgcaatgattgcaatcgggttcaatgctgctataaggtgcgtttctctccatttcctgcttcctccctcaatgaatttgttcaaatgaacttacaaatgatgatggtggtaatagtgtgagagtatcaaacgaacttggacgtgggaacgcatggcttgccaaattgtcagtgatagttgtttcaatcacatcagtgagcatagggattgtatgcatgattgtggtgtttgcaaccagaggttacttcccttacttcttcactaccagtgatgctgttgctgaagaaacgactaagctagctatattgttggggataacggtcctcttaaacagcctccaaccggtcttatccggtaagtatcgcctcccactcttcaagtttctatg

SEQ ID NO: 9528 - DNA, 526 bp, Gossypium hirsutum
tcagtttcgcaacagcacccgctgctctagctaattgtccaccccttccaagtgtgatttctatgttatgtatggccgtgcctaagggcatatcggttgaagtagattcttctttttgatcgatcaatcaaaaccccttcccaaactgtacaagcttcttccaaagcatacggctttctggatgtagatgatgatatctatacagatggattcgtataattcttatcgtataattcttatatatattgtacaatgaagtaccacatgagtggatatataggaatccaaatctgtcgaaccactcatgttatgatcttctacatcctaggtcttcccgttccgtcatctggcttatgttcttcatgtagcattcagaccgaatgactctatgaaattacgtcgatacttccacatattatgggtaacgtaggagacatctctatttttcccccggggaatctttagaattaccactgcttagctttcaattcgcctctgaccatcaaatgaaatgtgaataacccgt

SEQ ID NO: 9529 - DNA, 603 bp, Gossypium hirsutum
agcatccacatgacaagttgtatgctgactaactaattaacatagtacattaatagatttgactttcgccaattaaatagtgatgaagaagaacttgtgttcaaagtattcaattagcattaatcattggacctttaataaaagaaatatacttaaattctattatttgcaaatttttttccttatatccttataatatacttgtctaatttagtaccaaaatttgcactagcttcccgtaaaatatattttgcaatgtatgtattagttagtcaccaattaggagatattttgataataaatgagtaatgttatttgtaaaaataaaaccttgtcgccattgccaccaaaattgaagatcaaatttacccaaaaattatggaaagttgaaaaaaattaattctaactaaaaaaagtagtaaattgtatagttttgaaagctatatcacacttatcatacatgcataagaaagctatatcacaagaaaaatgcctattcagaaaaaggttgtaacgtattaagagacacttctttttccctttcaaacgtatggttttgtttttattttttcttgcttgcttgaccatggaagacatcaatgt

SEQ ID NO: 9530 - DNA, 654 bp, Gossypium hirsutum
tttcctagatttgttttgactcattctaataagttattagagaaaaactgagaccaacttgcttctggcacaatcaatttccacatatctttagctaccgaatactctcggagaacatgtaagatgtcttctgcttcatattggcacattagacgggctccgttctgactaataccttgtctaacccgttcaaggttagtaagcaatcgttgtttatacactggccataagaaaattctgacttgttgcaggccttggaatttctagacatccttccattttccatcatactcattccatgtggtttcttttatcattcgatacacacatttgaccgagaagcccctgttggacgtatgtatccaaaaaaattgtttgggcttgctagagggtgcggggggaataatgcttgcaatctttctgactatttcttctggtagccaatctttgaatgcctccaaattccaggcttcctcttctgttgccatgtctttgaatagatagtttgtatgtgatcctaccatcgacactgtatgtgttttaagccgacctatttttgaaacctagaggtcctcccagcattagattgcgaaacttgttccagtggaccaacatagattttcttttagtaatgaccatactttcactattcgt

SEQ ID NO: 9531 - DNA, 436 bp, Gossypium hirsutum
aataaattgtatgaaattattaatttaagatcgggagaaaatcgagaaattggtaaattaccaaaatgcccctaaatcttggtatttctgcaatttagtcaggtaggttcgtataacttgaatgagcatgtaaatatgtcaatttaaatattgtattgtattttatatgatgtttgaattcaatatatgaaatgtatggatgttggaatgaaagaaataatacatgttttgaaactacttgaaagggatctgtttgaatattgggttccggatggatataggtgatttcccaaatgaaagagttcctgcatgtgttgcagaaatagataacccgaacggtaaatctgacaaaagccttatcgagaatataaagtggataggattcgttcctgattcactataatatttcaaagtggataggattcgttcctgattc

SEQ ID NO: 9532 - DNA, 710 bp, Gossypium hirsutum
  misc_feature (651)..(659): n is a, c, g, or t
  misc_feature (662)..(666): n is a, c, g, or t
  misc_feature (668)..(671): n is a, c, g, or t
  misc_feature (676)..(676): n is a, c, g, or t
  misc_feature (681)..(687): n is a, c, g, or t
  misc_feature (694)..(694): n is a, c, g, or t
  misc_feature (696)..(705): n is a, c, g, or t
tttcttctcgctaattatgtgtgtatatatacatgccacacgcttcttttttataccttcatctacaattatgaagagatacaatttaacccttttcgtttttaagacccctgaaaagtataaccattttcatcaccttcctactcctccttaacctcacagattattttatgtaattcattaaaaaatatatttttatttcaaaattaatattatttaaatttttaagcataattaaaaaattttaattaacttgatcattataataaaaatttaaatgttaatgtaaaagcgtaatgcaaaactaaatttacatatagtaataaagcgatacaaagtgtaattttagttttaataaaaacatattttaatgataaaaaatttactaataaaaataaatattattctgaaacataatttcctagatatacatgtgaaagtagcagagatatacttattagtcatgaggaagacatgcaagaaaccctccttttggctattgtaacagtaataaagtgccaaattcatagatatatgtacctattcacttattatactttattttgagatgaaattttctgcaaaattatgtttttcttaaactgattaatgcaggacgaaagatgggttgtatgtagggaaatccctttnnnnnnnnnttnnnnntnnnnatatntatannnnnnnttatacntnnnnnnnnnnttaat

SEQ ID NO: 9533 - DNA, 593 bp, Gossypium hirsutum
  misc_feature (551)..(554): n is a, c, g, or t
aattctcagtggatgatgtttcttcatcatcttcctgtatcagttgctccatggaatcattaaccattacgtcctcagaaacatcaacattcatgactttgacttttaatccaggaattttatttttaagaaaatttatcacactttttatcccttcctcggttgctccctcaatatttattcccttctcatcacttctttctgttttagcttcatttccttgaacatctataacagatgcattctcaacttcggaagtggatggggtttttgtaggcctggaagatgagctcgtactattcatagaacttcctttagcacgctgcaaataaactacctgcaacagattgtattagaagactttagatcactttacaggagatatacatcacacactggttaagagatgccgaagactaacatgcaaatagatacataacatgtgtatatgcatgcagaaaccaacttacggttatataaaatgaaaatatcatgttccaaacttacacaggaataacattatacgtctaagaatagccatgttcaggcannnntaccacagtctaagaatagccatgttcaggcagatttac

SEQ ID NO: 9534 - DNA, 484 bp, Gossypium hirsutum
tgagaacaatgatgatttaagaaggtacctagcaaatacaaaacaatcagtcatttagaatcttgctacctcagagtttgaccaaaagccaatcaaagcaagttgttcaaaccacagacagtgaaaagtgcaatcatgaaaaatctagggaaacataaataggtccaaacacattcctacttgcagcatattgaaaagaatacattctcgggaaatttttgaaagaagaaacagttaattactcctcgtgataaatttcatggaaaaatacaagcccatctatgcaatttgtaagaatcggttttacgccaattctatgttgcagttgtttcttggtcatctgaatggaactaccttttgctagctggttaccatcatggtgaaacttcccaagggaaaaaacaacaccgcgaaagtcctccctgaaaatctttttaaaactaaagttcaaacctaagatttagccttgtttgtttgccaactt

SEQ ID NO: 9535 - DNA, 514 bp, Gossypium hirsutum
tatagtagggtagtcatggtcaaagtagattgtagttcattcaactgttgatatcctttatatctataatgctaacttgaatccacattcttcctcatgattttctcctataattccaagtttatatatattccccattaaaagaagagagttattttctgagaaatcttcattcacttgactaactgacctgttattcctgtttcataattaaggctcatgaaggagcatttacaactgtataatgcaaatttaagtacagttatatacaagaaacaggatagttgcttgtcacattttatttaacttcaacattttcagtattgctggaaagcttccttcatatcagtttccttttacttagaagttaccttttatcaaaccatgcctcctccatgtgaatagagaagtaccaagtacattttcaatattgccaatatactattgagtttatcagtgttttaagatgctttaggtggtttttggtatactatattaatcctctagatgattg

SEQ ID NO: 9536 - DNA, 648 bp, Gossypium hirsutum
tcaaggtgatactgtgatattatactatatactcagttgcagggaagtttgcccttaccaaataggagaaaccaactcagttgtactatacatgaaaaccagcaatatttatctcttaaacctcttccttctcaatgcatccttagagacggtttagattgctaaagaaaatagctgttttgaaaacctaacatacaagagactttccatcctcggcttttgtttggtgcagctttccatcaccattagcagatcataatagttttacacactttactacctcagaatttaagcacttatggcaggaagaaaccagtttattttttaaaaaaatcccaaggaaaagatcttatccttcttacacacctttccttagattcctgcaacctttaagactggtactaaaatcatgttacctttacatactcacctcagcaatcaaatatgagtattttatcaacacctcaatgctccatataacatttctaaccacttaagtccgtggacaattgccattgtctacacaatgaggcgccgtttaaaaactacggtgtcttgaccagagatccaaatgaactatagtcaatgaacataatttcaacctcagctacaagtctgaattcagttaaccaaaaagaatcaaatcag

SEQ ID NO: 9537 - DNA, 363 bp, Gossypium hirsutum
ggactttagtatccatctcacttgcagatgacaaaaactggaatagaggatataaaatcaggatgccaattcagggactgtgttaaataaatcaaaattcatatagagcaatgcacctgtgagaccagatcttcgcctcttcttcagaatgcctaagaattaagtcgatgaaagccctgctattagtatgtgatgaacatggtgggggatcaggatcaacactccaaagtcgatttcttgcaaatccatgttgctcaagagagtcgagatttccgaactgcatggctagaatggttaaatttgaatcaaagatataaaaattgcaaaaaggaaaagatatagccttggagcacatacttgaga

SEQ ID NO: 9538 - DNA, 379 bp, Gossypium hirsutum
ccttcttttatctcttaaaataaatcatgatgctgaaagaactaattaaaatacaacctaaaatatcatcaaattatcaatgtcaattttttgaagcatataacattagatgttgcatttgtgttcatatgtggatgctgtctaggattgaaaatgaaaaggaaaatctaattaaaagacaaaaatccactaaaataagaaatccctaatccacatctaaaattcccaataacaacaaaaaccaatcttaaaaccaaaaacatgcacaaaatattataattcccaacctgaaattggtggattatctcaaattttggattttaagagttgtagaagaagattttagagtgggtttagggttgaagaagaaagatttggg

SEQ ID NO: 9539 - DNA, 697 bp, Gossypium hirsutum
  misc_feature (529)..(535): n is a, c, g, or t
  misc_feature (545)..(548): n is a, c, g, or t
  misc_feature (551)..(551): n is a, c, g, or t
  misc_feature (553)..(560): n is a, c, g, or t
  misc_feature (562)..(562): n is a, c, g, or t
  misc_feature (595)..(609): n is a, c, g, or t
  misc_feature (611)..(613): n is a, c, g, or t
  misc_feature (618)..(625): n is a, c, g, or t
  misc_feature (630)..(632): n is a, c, g, or t
  misc_feature (636)..(636): n is a, c, g, or t
  misc_feature (638)..(638): n is a, c, g, or t
  misc_feature (641)..(642): n is a, c, g, or t
  misc_feature (653)..(660): n is a, c, g, or t
  misc_feature (668)..(673): n is a, c, g, or t
  misc_feature (675)..(681): n is a, c, g, or t
  misc_feature (688)..(692): n is a, c, g, or t
ccgagatctttgaagggaaactctttctcatgaaatgtcacatgacgagacacatagagtctgccatcactagcgcgacaccggtatccttgatgacactgagagtatccaaaaaaagtgcatggcgtcgatcgatattgcaacttgttcttattgtaaggtcaaagattcagaaaacacaggcatctaaaaacccgaaacattgagtatactgaagacttttgaaacaacttttcatatggggaaatgcccaacggagaagtcggtagtcgatttatcaaatgaataacactgctgaaagcatcattccagtagctaaccggcatagacgcatgtgctaacatagacagcccagtttcaacaatttaacgatgcttgcgctcaaccagtccattttgttctgtggtgtatggacatgtgaaacggtgaacaattccttgttgggacagatagctcttcaaaacttgaaactctcctcctccatccgtttgcaaggctttaattttacaaccaagcattctttcaaccnnnnnnnccgataatcnnnntcnannnnnnnncnatccgcctcaccaatatgaactacacttgttannnnnnnnnnnnnnngnnnggggnnnnnnnntcctnnntccncnggnntttgttgggannnnnnnntgtttccnnnnnntnnnnnnngaacccnnnnnccatt

SEQ ID NO: 9540 - DNA, 616 bp, Gossypium hirsutum
aaagcaccaggttttgatggctttcaagcggtgttctttcaaaaattttgggcaattgttagtgaggatgtcacaaaattttgtattggggtgcttaataggaaggacagtttaaacgaggtaaattccacaattattattttaatctccaaagtctcagcgccagattgtatgacgtccttccggcctatcagtctatgtatggtactttacaaaattatcgcgaaagttattgcaaacaggtttaaaagagttttggaagtatgtattgacgatgcccaaggagcatttgttcctggtcggcttattaccgaataacattcttacagcttatgaaatccttcactctttcaaaaacagacgaaaagggaagaatggttcttttgctttaaaattagacatgagtaaagcatatgacagagtcgagtgggattttatagtagggatgatgaaaaatatggggtttgctgaaaagtgggtggatttgatttaccgttgtatcttttcggtccagtatgcggttacagttaacggaagattgagtgagtatttccaaccaggacgtggtcttagacaaggggatccattgagtccctatttgtttcttatctgtacg

SEQ ID NO: 9541 - DNA, 634 bp, Gossypium hirsutum
taaaacttttgtcccttatgcgatttagtctctttttttgcatttgaacatgcaatcgctaaatttatttcaccaaaattttcatgcactcatacaaacatgctataacacataaaataatataaaaataataatttctctgacctcgggttagtgttttcgaaaccactgttccgactaggcccaaaattaggctgttacaaactaatttaactaaaaatatttattttattccagcaaataaaacgcaagaactaaaaagatagatgagttaaatcgaattaactagctaagctaaactaattgatttattccagcaagtttagaaagcataaaactaaaataaactcaaaacgagcaaacgagctcatagggctgcaaacgagctaaattgagctcaacgagctggaatcgaactaattcagctcgcaagggattacaagcaacgcttagggagctggtccaagagtgtgctcagggcgtggccgtatcacttcctataaccaagtttgagcattgcttagacttggttggtgttcattgttgaagttaaacctttaaggggttttatggaagaggtggagaacttgttcgttgagagttcgcgatgaagaacttgttcattgagaattcg

SEQ ID NO: 9542 - DNA, 543 bp, Gossypium hirsutum
tgtctcagttatgatttggtggtcggaacgacaaattagaccataggaggcagaaacattgtattttttgaacttgagtcggcataaatttatgagtcgatggttatgattttttttaattacgtcactaatttttattttaatcacttacttaaaaatataatttaatcattaaagttttcaattgtttttcacctcggtataataatagttttattttttaatttttgtatttttctcaatttcactttaattatatataaaaatataaaaatataaaataataaaaaaattttaaacccttcaaattttctctctatactatttatatagaaatattagatactcgtttttttttaaaaagagaaaaataaaaacattaagggaaattattcattctttatttttatcttttctgtttcattataagaaaaggaaaaaaaaattagaatgtattttgtactttttttgctaaaaaaatagcattaaagtctattttacaagtttttataatatcagttttagatgttctttaggtggcat

SEQ ID NO: 9543 - DNA, 597 bp, Gossypium hirsutum
aagtttagcaacactgttaaagttgcataaaaactattctacttgtaattttatatgcttgcctttgatccaatcttacatcaaatacaccttattatattcaaaccttaggtttaccttctagatataaaaattaacccccctcataatttcacctatataaattcatccttctctgtgtgtcagaatttgcatttaatacagatgtacattgaaacttgaaagctaaaggcttgaattcataactatgtttgatgccaattttaatgcctctatctatctcttggatcccaaggaaacttttttagctgaattccaagattcaatttgcatcgtgaatttgtaaagtgttaaatcacttttgggtttgaatttgatattatttttgaatttttttattaaaattagatcctgaattaggtaattttctcacattggggcttaaatattttttttccaagttagtttttgaattcgacaattatttttatattggggcttaaatttggtaattgttctcatatcgaagcctgatctctagggttttcaaagactaacttgcatgaaaaaagttcaagtcctaatgtgggaacattt

SEQ ID NO: 9544 - DNA, 590 bp, Gossypium hirsutum
attctctagactgataactagagtcacgaaaataatcaaaatgacacatgcgaataattcatgatgattaaaaacaaatctaatgtaacatcccgattttgagtctagtcagaacagtggtttcgggaccacaaattcgacgagaaaaaaattattttaaaattttgacatgagtttcattatgataggaaggttgcatgaaaatactgatatgaaaattttatcgatttagtgattaattaaggaaatgacctatttgtataaaatgtagaaattgaattctagaagctagaagggttaaatagctatgaaattcaaaactagaggtccttatatgaaaaatagactatcaatcaaaagatgatagatttttatggatgaatcatccatagaatttgagaaaaaaaaaggactaaattcgaatttggggaaattaaaagatgataattaattacatgaacatatcatctttttctatcatcttcttccccaaaatttacatggaaaccctaggagagagaaaagacactttcttggcataaattggtaagtaatcatgtctcgtttttaataaattttatatttttgag

SEQ ID NO: 9545 - DNA, 527 bp, Gossypium hirsutum
agcatctggaaataatagtatacatgaagaggttaaagcttcacaaaagcgagctataaatgaagtgatggatcattctagtgcttcaggcatgattattcaaagtgttagtgccactgaaaacaatcattctccattaaagccagaccagtttctaaatgatcagatgggcaacagtagccaaaattcagaaggcagtggaaaaggtgatatacccattgatggtcaagaagaacctggcttagtgcccaaacaaagagaagttaaaggtattgaagctagtcacacacttaggtgtgcgaataatctaggaaagaggaagataggtcaacagaaagaagcaatgctgggaaagaaacggaatagaaagacaatgtttcttaatttggaagatatcaaacaagctggccctataaaaacttctactccaagaaagcaaaacattccaatgccagttgttactcgcattgtgaaagaatatcacattggtgaacgaattggcgaaaagcaaggccggccaataaatg

SEQ ID NO: 9546 - DNA, 563 bp, Gossypium hirsutum
gactcgtaatcgtaagaaagtaggttttttagcgatgggcctagcaaaagaaaaattaggatagggccctgcgggatccccccctcaaaatcggacatgagagtttcctctcatccggctcaagtagttacaccaaataaagataaagtaaaggagttctcgctttcaaattctagaacccccccaaaaaggtctactctttactcaagttccaagaaacatttcattgattgattcttcttttattgatttagattttcttaattctttattcaattcaaaattaggacataaatgaaatgtgaaattcttgagtagtctacttcccctcgaatgctgaatcctcttaaattaaaggagtgtcataagggatttacttgtctatgtacccttccattcgatctcttaggtcctgcggtacctcgacgattataccacgatgcccttaacttaaagcctaagcctatatgcgatgtatagactcctgcaaccatgacatatttgtttccttgaacataatttcatttctttctaaaagaactaaaagaaatgagaacggttaa

SEQ ID NO: 9547 - DNA, 388 bp, Gossypium hirsutum
aactacgcttggtctgtcctcttagttgtgaaagtaatgtcatataaaaaatgtacgtttgtacttagttgagaaagtagttttgttttttggttactgttatcatgaatttgtaatatgtgatgcctagaatgtttaatgcatttattttttacctaaaaaggaagtatcaatgtctgaagtgcctcacattggtaaaaagtaacgagactccatatttatttgctataaacagtcgatggcatctccatctctctaatgctaccaccaggccggctcaggcggctgacctagcggttgtcctgacaaatgaggttaaggatcagaagatcttacagaactatgttttctatcccaacttctcctactaggtggaggaggggggggg

SEQ ID NO: 9548 - DNA, 652 bp, Gossypium hirsutum
ttgtgcgggacattgaaaaaattacttttttgtgatcctattagcctgaggaatagctactgcatcaaggtatgtacctcttcaacaggatttatgaattccgtaaaagctgaccagtattactatacctgattatgcatttgtttgcctctcaaaattctcaattttcatactctttatattgttcccaatcttgattatgcattctttgttaaaactagttctttagtcttgttttttcccgtgcccatagattggaacaggcagcgttgtatatttggctgaattttttcactcatcccctgcaagcaggcaaagcttgctcattgttgtcggctgacacaatcagtttgtaacagttctgtacatttgcacgtggggcacaactctaaatttgtcctacaagattgatttatcttacagccagaaagccttgaatcataatctgtttttgatatagaaataatctggaaatcttatatgtagtaattcaattaacgcatttctagtttcttctttcgttttcctctcaaatattgtcctaagcataaacttgttggtaataactgttttcttctttctttttatctttctactactaagtgtgacagacctaataagtacttggatttttcgcttcttgaatgctcga

SEQ ID NO: 9549 - DNA, 516 bp, Gossypium hirsutum
tcattcaacaccaaagatctgccgccatggttttccagctcaggaagaatacaggggaaagagcagatttttatatggagagtcaatgggtggtgcagtggccctactgcttcatagaaaggacccttccttttggaatggtgctgttcttgttgcacccatgtgcaaggtagcagctactattaaccttattaagaatcatgatattttgtttgtttttcagcagttctaatcgtacttggaaaaaattcttgatagatatcagagaaactgaagccacatccggtggtgataaatatattgactaaaatggaacaagttatacctagatggaagatagtaccctcaaaagatgtaattgactcaggattcaaagaccctgttaaacgtgaagcggtgagagcgtatactccaatttaaaaacggggtctttgaatcctgagtcaattacatcttttgagggtactatcttccatctaggtataacttgttccattttagtcaatatatttatca

SEQ ID NO: 9550 - DNA, 565 bp, Gossypium hirsutum
tatgcatcataccaaaatgtcacacacaaaaccaatttgtttctcatatattcggcaagcaaattaactttaaaatttataccattaccagcatttaatattaattaaaatatatatataacaattcatagcctaatgcgacatccatatgtcactttgtaactacacatgtgattaataaaatttacctgtaacaaattcattgattgacatttaacaacctaacctataaagtcaatataaagtcaatacataatcaacattttacctcattaccaaaccaaattatataattatccaccacccgaattataccatatttcatagttcaagattataccatatttcatacttccaaattgaactaaccataaaaccgaattatacctcatgcttaccatttatcaattcacaaaataaattcattggtataaccaactaatataataaaaccacacccaaaaacacatccatcaaccacattagtatcactcaaactgatttcataaaaccatacatcacacaagatataccatgaaaaatacgtcccaaaatgagcttacac

SEQ ID NO: 9551 - DNA, 645 bp, Gossypium hirsutum
atccttatttcccctgttgtacatgttttcatggtaacatgttttctttttcggtttattgtacgattcaggacggacggcgagtacgtgtgatcgaaagggacttaaatgaacccgataggattgttggtgaacttttacaaccagggggatatcttaaattgattgaattaggccttgaaggtatccgagaacgtcatgtcggttgttgtgaggtaaaagtatcataaatgttcttctattagaagtcagattgtatttcgtcccttgtacgtcagaatggacacgtttattctgtcagccatgtcagtttttaacaataaaaatggataaaaattttaacaaaaatgaccaatttgctctttgatctaacatacaatgactaatatgtctatttttttagtaaaagggacaaaacgcaatctgactattagtacaagagtctctatgatacttttacgttgttgtgatctttgctctctctttctctccttttttgggtatttaacattggcctttggtgttgtagattgcgtagatgagattgatgctcaacgagttttcgggtacgctttgttcaaagatggaaagaatacgaagttgtcttatcctttggaaaatttccattccgatgttgccggacga

SEQ ID NO: 9552 - DNA, 408 bp, Gossypium hirsutum
aatcatacctccttgtcaatgccgaaagttgggaaattgggaaccgaccacagattctattagagccccaagattttcttagctcggatggtgaagaacacaaagtcctgggttataagtcctttagtgaaacagtacttgatctcagatcggtttccatgccaaataattgggattacctcaataccaatggggatgtcaaccccattgtctctcccggcacaccctctgaagatttacttaagcaacagatatcatggtcagcacgccctacgtttaaccccgatgcaaagaaacttccggaagagtcaaaaacatatgagaatgcaagtgcattgtcattggcaacatttacttcacttttgattgaattcgttgtaaggttgcaaaatgttgttgatgcattca

SEQ ID NO: 9553 - DNA, 435 bp, Gossypium hirsutum
gagtaaactgaattcattgattattacagagaaacactagttaagtatttaacaccacaagtgaataactaactgttaatagactcataacaactaactcgactaactagtttgactagtttatacaattaatatttctttcattccataacatggcctatgcttctcgactttctctgcttctgcatgtcatcccctcctgagcaaataactcttaagtttgtttctgaatttatcaaacaaaccaactgacaagggcttggtcagattatcagcaatctgtttctgtccagatatatggccgacttgaagcgatccatttgccaccttttctctgacaaaaaataagtctaattccacgtgtttgaacttagaatgcaggactggattgcttgcgacagcaaccgcagttgaactatcacaccaaaccaaaag

SEQ ID NO: 9554 - DNA, 689 bp, Gossypium hirsutum
tgtgtccagctctttccttcacttttgccaacaaattttgctgtttgattcacattgaaaggaagagtggtatcagaataattaaataaatattccaacatcactacaaagaatgtatattacacagaaaaatcaagctatacagaaagttttaagaatcacaaacccattaaagcagacttagctagcaaagccattgatgatgggccaacctttacctttgaaaacacctacgccaaaaatctcggagaattaaagatttatttcttaccaactaacagcgacaagaaagaattacctttcttgaaattgacatgtcactgacttcaatactaggagcttctctcgtcagaaatgaaagcaagctgtcctctataatttctctcgctagcatcttgatatggcacaagaagtggtgtaatgtcatttccttatgtatttcgcataaaagaaaaagacttcacaaccacacttactttgggatttcccccaagaataatgtcagttcctctgccagccatattggtagaaatggttatagcatattttctcccagcttgagcaataatttcagcttcccttgctgcatactgatagaatagagggaaaaaagaaaattgctggtgaacgaagcttgcataaacataaaaggtaaaatgattgatgccaaggaagaaccctgcacatac

SEQ ID NO: 9555 - DNA, 631 bp, Gossypium hirsutum
  misc_feature (627)..(628): n is a, c, g, or t
tttccagaaggcgaaagcattttcacatggattggcacaattgagggtggaaagggaactatgtacgaaggtttatcatacaagctttccttgcatttcacgtcagaatatcctttcaagccacctcaagtaaagtttgagacaatgtgctttcatcccaatgttgaccagtttggtaatatttgccttgacattcttcaggtatcatttcgactttgtgtatattgtaaaactttatgatgccaatgattgtatgatgagattaagacaaaagaatatttccagtttccgtctcttttactttcatgtttaccgatgttgttgtgataatctcaaattctttgtttatataattacaggataagtggtcttcagcttatgattgtagatccattcttttgtcaattcaaagtttactaggaggtctgctagctcatccctactagtttgattctatgttactcggactcgggtatgaatgctggatatgggtatgtatccaacatggaaatgctcacttcttttagaagtttttcccatacctatatacagatgtgttggaacggataatggacactagtgcttcgtgaaaatgaagagagttagagtaacataggtttgaccaannccc

SEQ ID NO: 9556 - DNA, 637 bp, Gossypium hirsutum
aagatggtagtcttggccttcaaattagctagagagtgatgctggaatgggatcctgatttcctgtgttcaaggtaatcgccatatggtactgaattataagaagggctcaattgtttcatgttcactgctatgcttgacctagatgcttaaatggacatagtggctgataagtttgatgcaggggagcttgtttacgtattcgttttacaaacaatgcctattaacatccttgtaccagcatgaattgatgatgaagcttggaaaatattgatttacaatctaattactactattcatcgtttttgctcctatgtagttgttttctgttgacatttcccttaactttcttagcatcttaaatatctttccaagtatccatgttggccttataatcctgttttaccattcccttcttgaaaaactaaagcctcgtttatcagctttgttgggcctgcttttagatcttgtatagtttgttttgagagcctcaaaacaatcttaatatgttatatgtatatatctttcacccatctcattttctaatcttgttagaacaataaatggtgacatctctgcctactaatgaggactatttttgatacttaagcctgcccaaataaataactcattggctg

SEQ ID NO: 9557 - DNA, 606 bp, Gossypium hirsutum
gaggtttatattgtatcaatctacccttgtgtgcgtgattcctgttgaagcatatactcgggggtgggtgcagggcgaacgatttcaaagcggactccccattcattagatagagaagatccccaagatctcgtgatccgctgccgaacttattccaattcaatgagcattctcaatattatgccttgaagaggactcgaacctccacgctctttagcacgagattttgagtctcgcgtgtctaccatttcaccaccaaggcatcttgaaagtgaatcgtattccatgaatatgatatctatctagtgtgatgtatggaatatatgacaaaggtggagtgttggagtatttctattgatcggtcatgtcatataggcccgagtcggacatccaattgcttcgatttgaagtatccggaggatgtctatattaagattatattaaatatatatagattatattaaaaagatggacaatcaaacctatttatttctcgattcaatagaagaaaaaaagaaaagaggtgaatagggtcccaaataacgagagatatgtaaaaagaaggcccgattacgcccattcctaatcctaaatggaatgtaacga

SEQ ID NO: 9558 - DNA, 574 bp, Gossypium hirsutum
  misc_feature (107)..(107): n is a, c, g, or t
aaatcttttgtttctcaaagcccctgcaactgtcgcaatggctatcggcaatcctgcacatttttcgactactttcttagctataggtttccaatcacaactttcancacagtcgccagccttcttcttgaacaggtcccaggcttccttttcatttagaaaccctactgcataacatttctgagcatccatcccatttgataaaacattgagctctctagaagttaatagtaatttgcatcccttgtgttcatctcccaaaggaatccctacttcctcaatatctatttctgcccaaatgtcatccaagacaaccagaaccctcttctctttcttcaatctttctcgtagtcgaagtgcctttacatcggtactctgttcctcaaatttcaagcccaataactctgcaattctgttctgaattttctcaatatcaatgacttgagttactgttgctatgacaaccgaatcaaataaattgcccttgacctttctagcgatttcttttactagcgttgtttttccaatgccgcccataccgtgcaccccaataacgctgacgctatcatctttt

SEQ ID NO: 9559 - DNA, 675 bp, Gossypium hirsutum
aattcacaagcaggactcatccttaacttacccaactcaatcttgagtcaattggatctggttgacacaaacaatttcgttatttattactctctatatacaattttgtatgacttttcacttttagattacactaccatggcttatgtaactattattattttatgctttgaccttaggggttgccattgggtttcttggtcttctcttggggatagtattgtggtgttggatgctgaggcaaaggcaaatttccaaattaagagaagctaactttcagcaaaatggtggcattttgttgcgggaacaactttcaaaacgacaagggtaccgtgaagatgttaaagtatttacagctgaggaactggagaaggcaactaacaattacaatgaaagcagaattttaggacagggagggctagggacagtgtacaagggaatattggctgataatcaaatagttgccatcaaaaagtcaataattggagatcctagccaagttgaacaattcattaatgaaataatggtgctctacaaaatcaaccataggaatgttgtcaaactcctaggatgttgtttggagacacaagttccactgttagtttatgaatatatcaccaacagaaccctttttcaccatttgcataatgatgatgctacatcttatctttctgg

SEQ ID NO: 9560 - DNA, 403 bp, Gossypium hirsutum
tggtgaaggaaaaaattgtaactctgaacttactggaaagtaaattcgatgataatttgactgagcttaactgtcattgtttcttgaattttcttaccgttttgaggtttagtcaactttactactgccacagacgactcctgatacctcagcataagttgtagatcttagcattagcgcgcacccctttgagaccataaatatatatgagacttattctcgaatttctcaactttgtgtctataaaccccctgagataacctctatttacacctatatctctatatgcgttttgggtgttgtgcgcgagatgtgtatactcgaaatttcctccccccccttgagagcgcacttacactgggcacgggcacttgcgtttgcgcaaaggggatatctcaatcac

SEQ ID NO: 9561 - DNA, 487 bp, Gossypium hirsutum
attgccaactcaataatctgtggcaaaaaagaaacagatctagcatgacctgagaacttattatcgtcatcatttctgacgcaacaatgtgtttcagatgaagctggaaaagaagagatcctcgtcaatggataagataatgaataaactgagatcagctcagaggagagcccaagaaatgagaagttcgatgttatccaatcagtcccatcaagttacaaggacctcccgtaaggctataccgttccatggaacctcattgactgattgcttcacctgccttactttctaatgtctcggttagctatctttacccgttcaatcgggcctgaaatgcaaggtaacttattatgctcgcaacctctgtttctttctgaaatttttgctttgcatttttcaagtagaaagtttttgcaaaaaaaagcattaacatgacattcagtgtggcacaccccttgataaggcttaactgtctcaagtggactga

SEQ ID NO: 9562 - DNA, 617 bp, Gossypium hirsutum
cagaggatctcatccgtgaatgccatgtctgctctttgtgaggcaaccggggctgatgttacgcaggtctcttatgctgttggtaaggacacaaggattggacccaaatttttgaatgctagtgtcggttttggtggatcctgcttccagaaggatattctaaatcttgtttacatctgcgagtgcaatggccttcctgaggtggcagagtattggaagcaagtcattaagatcaatgactatcagaaaaaccgatttgttaaccgtgttgtttcctcgatgtttaacaccgtttcaaacaaaaagattgctatcttagggttcgcctttaagaaggataccggtgacactagggagacccctgctatcgatgtatgcaaaggactcttgggagacaaagctcgattgagcatatatgacccgcaggtgaccgaagaccaggtccaacgggatctttccatgaacaagtttgactgggaccatcctcttcacttgcaacccatgagtcccacgactgtcaagcaagtcagctgtgtgtgggatgcttatgaggcaaccaaagatgcccatggaatttgcattctgaccgagtgggacgaattcaagaaactcgactt

SEQ ID NO: 9563 - DNA, 670 bp, Gossypium hirsutum
ttgatcacaaccaggtacaaaacacacatgaagctgatcactaagaaccttttcataaacaaaatgcatatctaattcaacatgctgactttagcatgtagaaccggatttgcagctaaggaaacagtgctagcattatcacaccaaatgactggtgtaagtctcatccatcagcaagcaaaaccacatcaactcagatgtggcatttgctaaactttgatattctgcctcagaagtagaccggaatacaacactttgtttcttcaacattcaaccaataagattatcacgaaaatacaaacaaatcccaaggtagacttgcgatcttctagagaactagcccagtataatgcagttactaagtagttgtaatcagttgtgtataaatatgtatactgtgtatgaacaatatatggatgaatttctcaattcttgagatttcaacatactgtacgtatttctttaacctcccttttctccatactagtttgtcactcatttcctagtggctttttgttttagtagcttatacataggacgatgacttcatcctcacatcctgatgattgtgtgtaagcttactttttttcatctttctccttgttccgatattcaggtacgatgctggagatgttttgctcgatgatattgctggccctgatggagatcc

SEQ ID NO: 9564 - DNA, 618 bp, Gossypium hirsutum
atgcattggataacgtgaatgccaggctttatgttgatcagaggtgcttatatttccagaaaccgcttctcgagtctggaactcttggtgccaaatgcaacacacagatggttattcctcacctaactgaaaactatggtgcgtcaagagacccacctgagaaacaagctcctatgtgcacagtgcactcatttcctcacaatattgaccattgtctgacatgggctcggtctgagtttgagggtctactggagaaaactcctgctgaagtgaatgcttatctgtccaacccagttgagtataaaactgcacaaaggactgctggcgatgctcaggcaagagataatttggaacgtattcttgaatgcctcgagaaagagaagtgtgtgacattccaggattgcatctcctgggctcgtctaaggtagttcttttgatgttcgatctaattttatgttcattatcgacaatagtgtttttgttgcatttgtttgactttatccttcttttctgctcagatttgaggactattttgtgaatcgtgtaaagcagctgatttatacatttcccgaagatgctgcaaccagtactggggctcccttctggtctgctccaaaa

SEQ ID NO: 9565 - DNA, 460 bp, Gossypium hirsutum
ctgatgacgagaagttacttgagtaaactttcgagtggagggtctagagaaaacaaaacttcggagtcagaggccaccacagaacgttttgaggtgtgcattatttgtgagatagaagtaacaatttagctgtctggtagtttttcttattggtttggtgctcactggttcaatcacattctagactcttcctgcgggatttcttttgattgccactggtcttaagaatgctaagttgcgctcagactatcggcatcgcttgttatctttgtgctctgatgtaggcttggcagctgaagcaaaaagtggcaggtaaatattttctgattagcaatatatttgtctttccttataatttatgtattttgctgtctctctgttttatggcttgctttctgcaaacttctttttttgctatcctcataatacatgttccaaatattttattttcagtatctca

SEQ ID NO: 9566 - DNA, 461 bp, Gossypium hirsutum
ccagcttcgattagtccaatgttttattccacataaaatattgtccttcctcattttactttaaaaccaattctagttcattacaatctaaaactaatcgaaacaaaaaaaaaatcaatgataatttaaaatagactattttttcattcacgaaattttttaattttataaataaagttaaaaaatcttcatatatttctttttttttttcttttatttttcagttattaattaaaaagatgtgatatcttcttaacctcacagatcatctatatatcaaataattatttattttataattttaactccactccaaatatatcaaataaaatttgaatttaaaatttaattgatatatatatgacatttaaaggattatttgtcatagtcaagaattaaaattgaattcataagagataatgtgaatttttcagagaagaatcatggaaaagtgaaggaaa

SEQ ID NO: 9567 - DNA, 451 bp, Gossypium hirsutum
catttccttggcaactacccttataattgctatgtccaatcttgcactcaacagatactttgtacaagccgctttttaatatttgtgtcagcctgacacgccatttcttgatgtaaatctgagaagaggaaggaaaagtagggaaaaaaaaatgaagaaagtatggagggtgatagtatgtttatcatcaccagaacaaggcctgactgggatctttggtttgtggttgttgcttctattccaccatctccaagccagacaactggtttcagcccaaaagcaaagcaatgatgatgtgattaagttgatggctttcaagcgcatctccgtttcctctgacccccacggtgtcttagccaattggactgaagattctcccagtcccagctcatggcgtggcgtctcctgctctcctgatgatggccgtgttactgccctcaacctcaattaa

SEQ ID NO: 9568 - DNA, 637 bp, Gossypium hirsutum
  misc_feature (558)..(634): n is a, c, g, or t
ggttcagacctcacattgttcaccttccagtattggttgttttccatgtcattaaaatttctccatggaatatgttttataggtcatattggtaccttcagcttttaccccggttactggtcaggcacattgggagattcttcttcgtgctcgcgcaattgagactcagtgttacgtatggaatccattgcctttttccaccgtactttttcttaaatctgtttctctatattgataaatttagttcattgatgagccaatctgccaagaattcattattaggtcattgcttccgctcaagctggaaagcacaacgagaaaagagaaagctacggtgacacactaataattgatccatggggcacagtagttggccgattaccaggttagatggagtttcccttttggtaattgaactcttgtgtggttatttcttttgttacacgaaatcaggtatgattatcagaaatggttatgtgtccgatatgggtatattcaatttttcttagtttcttcatgtatttggagtcttggagggttatatcttcatacccaacnnnnnnnnnnnnnnnnnnnnnnnnnnnnnnnnnnnnnnnnnnnnnnnnnnnnnnnnnnnnnnnnnnnnnnnnnnnnnttt

SEQ ID NO: 9569 - DNA, 646 bp, Gossypium hirsutum
ctgaacttagcaaacaatttcttttctcttaaaatttgcaacacagttcttaagtgttcggcatgcttggactcatcccgggagtaaatcaggatgtcatttataaacacaactacaaacttatccaaatatggtaaaaaaattcgattcatcaagtccataaaaatggctggagcattcgttaaaccgaaaggcatcacaagaaattcatagtgtccatacctgattctaaaatcgatttttggcacatctgactctttaactgtcaattgatagtaaccggatctcaaatcaatctttgaaaacactgtcgcccctttcaactggtcgaacaaatcatcaatcctcagtaccagatacttgttcgttttagtcactttgttgagctgatggtagtcaatgcaaagcatcatagatccatctttcttctttacaaacagtacgtaagcaccccaaggagaaaaattcagtctcacaaatcccttatctgttaactttttcaactgagcttttaattctttcaattcagtcggagccattctctacggagcaatcgagattggtgcagtcctaggcaataaatcaatagtaatttcaatctctctaaccagaggcaacccaagaaattcttctggaaacacatctg

SEQ ID NO: 9570 - DNA, 668 bp, Gossypium hirsutum
taacaatctcgtaataagactggcaaattcaaatgtaaaagcaaaaggaagtctgtcagacaactgcgtgacctttccagcggcacaaggctaactgagaacgaccttctgtggtcgaggtgaacctgcaagggctccaccagactagcaatcacgctaagatcacacaatcgtaattcatcaaccagataagaaaacctgtctccttttaacttaaagatacaaaggtacgagcctataaaatagatcctgttcaagtaaggtcgtattcttgtggccgttagttctattttaaataccactaaacattatatttcctttccgatgtgggatttggttccgtgttttatcctacacgtgccttccatattgtctgtctggcacaatgattgggatccaatgaacatggtttaatatatctatttaaccctaaacagaacattgttcattatatcatcctcactattacaatatttcttaaaatgattgcctacagattaaactaataaaagaaactatctgaagcagtttattcttcagacaaccgatgggaggtgaatgcagacgcagcagtcaatgatgatggtaatttggtatgttcttatactatcgttaggtgattggaagatggtatgataagtttgtgaaagaaacctaaagatcccaag

SEQ ID NO: 9571 - DNA, 413 bp, Gossypium hirsutum
tttgaggcgtgcatttgctatttgaggagcccttgaacctggaaaataaaaaacctcagcagcataagaccaggaaaaatatggttgttccataagcagcaagaatggcatcaataaaagcagtaaaacagtaagaatgataactacctgaagcactggttgaaattttctccttcttaagggaaaagcgcattaatagagtaaactcaggaccattgcaagaatgcaagttggtggttgcaatttcaccgccttgaatttcagttaaatcaagaccattaacctaaacagcaacaatatcctttattactcccaaaatgacttcccacacagtccacaacttgactattaggagtaacaacaaaagccatgtcaaaattaataagttactgccagattactaaacctggaac

SEQ ID NO: 9572 - DNA, 549 bp, Gossypium hirsutum
ccgaagttaaccatttgtgtgaaacatgtacctgaaattatctaatgttaaaagctgagtcatttctctatataactcttcattgtcctgagcaaaaactttcaagtccttcatcaggatatccaaagcctttgcacgatcatttctgatgcaacaatcaaccaattgcatgtaaaataaatgcttgacgcgcaaaattgcatgaagatgcttatctaaatgcttatagaagagaaccaatatccctcacttgtccaatgcctcaaggaaattcagctttctgatttcaaaataaatcttggtcgagtacttgttgtcattgatgcttgtgaaaccagaaagatatttctcgactttattccactttccgttcagcaccaagtcttcaaaaaactccaggtcaaagtaacatccactctcacgctcaaatctacaaatcaaatcagttccaagcatcaaaacagaagacatagaagtaaaacatccattctagaacatgattgaactgaaacttacatatgagctgttcgtttatatccttcatcgatg

SEQ ID NO: 9573 - DNA, 575 bp, Gossypium hirsutum
  misc_feature (521)..(522): n is a, c, g, or t
tcagaagacatagttgcctgcaacgtcctatagagtgtagaccgtgtagcgagttatcttaccctcaaaaagggaaacaatgctgagagctaatgccacagttatacatctcggtagaattgaaactgtcagacttggttctaatccaacaagacgtccaacaagagcagttgaatacaaagaaaacaaacttgacaagatgattgatatgaaaatctcagctgcatgtctcttgacaagctgtaaaagtcaagtgcagcagttattagtactcatcaaagtatttcattagttaggacttatgttactcgtactcgatggtaggtatcaaatatgagtacgtgtccaactttggtataattattatttttaattatccatatatttggagcataaggcctgccattaagttggatatttcataacggtaaagttgacccttgggattaaacttattgttggcttatggatcattgatagtgtgaaagggagatcatgaaattgtgttgtttgctgaattnnaagggcggtaagttacctttctttgttgaacatgagaaagcaaaagaaagaag

SEQ ID NO: 9574 - DNA, 492 bp, Gossypium hirsutum
tttttgctataaaaagcggtgtggactcagaacagataaaccacagcttgaagaaattctttaatgaagttttgcatgaactcaaactcgaggcaacatcactagagcttattcgaggaaagagtaagccccgggaaaggtttgtcttaggtttgtttttatctattaaactaagtgggaccctggtgatacgagccccttttaatacaataaatggaaaaagaagctgactcttccttttctaattgatagaatgggaaagaaaaagaagactttgtctttttttctgactacgctgtttacgatgatcagagtttatgtggcctacgctttctgctgctcttcctatcgggctgagcaagacactatccggttcttttctttaggcatctgttctacgccagggcaaaagacttcatcaaagcctatagacccaaggactactcccaaaaagaaaagctaattcaaatctatgtgaatcggctgcctctg

SEQ ID NO: 9575 - DNA, 422 bp, Gossypium hirsutum
tgttgcaatttgttcccatcaaatcgacattatcagcatagctccccctccccctcacactcatattctttacatgaatgtgctatgaacagatgcttgccagactctgaaaatacagatcaattactggacattagcatcttatttgtgtgctttcctcttctgctgctgctactactgttgattctttcagtttccttttttcttgaacccttttttttctcaattaaatttccttttggctgatggggcatgtcatgggtaaagaatagctttccaatgttacagattttggtttcactcatgcatgacctatgtcattttaaaacattcatctgcaaggctatcctatttacaattttttgctttcttcgtcttatttcaaagtatttactttttatcttctcttctgaagcgcattg

SEQ ID NO: 9576 - DNA, 458 bp, Gossypium hirsutum
atctcgtaagtggaatactgttgttccatcagagcaatcttctcgaatggatggagctcaaaataccaaggaatcagaagattctgctatttttcgcccatatgctcgaaggaacaggtccaaaataaatcgagatggagcacgatctagtccaaaagatattgttcagggtcgaggtggtcatggcccttgtttacctgctcatgtagcatcgaaggatgtgaaggctttgacttctgaaacaaataaccaaaagggaaagaacatacactgtgtcgatgccacaaaattgacaacttcagatggtgatttggcttcaaaaatgataacttctgataatcagttcaacatggcgtttgatggtggtcaggctacagaagaaacaactgatcaatcaaaaggtgatatatccgaaagcaaggttgacgtcacattttctaaaagcttgatcgatgact

SEQ ID NO: 9577 - DNA, 637 bp, Gossypium hirsutum
atctcaggatgcattgaaatttgtcagcaggtgaatttttggtgataggtgtcgcatgctggttttggttaatcttgtctctagtttatggtaccagacttatgtagatgattgaaaattttgacttgatctttgactatttgaattctcattttctagggagtactaatggtaagattcccgatagggtagctgaaagaaagcaattatcctcagtgtctactgctttacttctagcaattttgattggaatctttgaggcattggcattgtctcttggctctggattatttcttaagttgatgggagtaccctcagtaagtttaggtttattttaaatttattttgctttatcttttagtcatccttctcctgatccttctttgttgaaatactgctagttattgatgtggaagcttcttttctggttttcctcctcttaacagacatcagatatgcatgttccggcaaaacattttctttcacttagagctcttggggctcctgctgtggtagtctctttggctcttcaaggaattttccgtgggttcaaagatacacagactcctgttttttgcttaggtaagtattttgtttgacattgaagggcggtgcatgtgatgagctatgtttgtgt

SEQ ID NO: 9578 - DNA, 480 bp, Gossypium hirsutum
tatgttgtccgggtagtccttggtattcatgtatatgagggggaggaggcaagggataatagggggaaagatgagaggtttttggaacacatttggggagtgaagtcttgatggataggagggagagagacacttctggcatgttagctagaatggaatagagttatgattgaaaatctattccatgggaatgatataaatttgtaacataatgtaaaaatataacaattatttagttgggtggaatgcaatggaatgagcaaattgtaataatagctttacacaaaaaatttagccttccatttaaattttcatctttttggcagttaaatttgtattgtttgtcaaatcatctcaaaagagatggaaaagttaattaattgctaatgtggcaatacatgtgtatgccacgtcaacaaagttagacgttaatttctccgtttatttttttggggggtgttttgacaaacaatgaaagtt

SEQ ID NO: 9579 - DNA, 674 bp, Gossypium hirsutum
aagcgacattccttctttgtaaaaacagatgtacaagtgttttccaaaataagatagattagtaatattttaataatgaaaaaaggcagcagcttcaaataaaatttactgaataataagatagaatagtgttcaccatgaaactagagtgctattaccagaaagtatggcaatcacatttggcattaagtgaatgaaaattgcaccaccaacctcagtaacacgcatgttattgtatatgtctggggcatacaagccacatgcttgaggatcttttaggttggaatcaatatccacgacatctttcgaggctcctagtttcttgcaagcctcgttttgatctgcattatccaatcaaaggcaacatttttaggggctaactgccaacgtgacttctacacagccatacatacaatgaggttatccactctactaataccagtctcatattagccagtttagtatttatcatgaaactcataaaaatgcccaattttcacaaaagggttccgtccgttaacatgaatgaacattttgatccaaaaacagaatagtttttcttattgcctgttaaccttagagcagtgttgacaccttattcttccaaaacggaggtaagacatttcttagatacccgatggttttattttcaaatagaggtatgccattacaat

SEQ ID NO: 9580 - DNA, 612 bp, Gossypium hirsutum
ttctttatcttacaccatcagcatttgtctgagagacacgttcactccctgcgaggtctacaagattctgcaatatttgtcttttggtcaaactaatatttttttaccaagaatgtaaaaaacagcacaacaaagaattattaaacataccaaacttgctaagaaagacttcacacattccgtattttcccgaagactactttcaattgtctgcaaagagtaatgatccaagcacagtaatatttcacttcactcatggaatataattttcatgcacaaagcatgagcaaaatgtgcaagcttgtaggtgagagagagatagaggctctttggttgattaaaagacaaatctaaaatataaactttgtatccatataaccaacttctagtaggactgaacataaaaaaaagtcgagaaaacagaagatcgatttctggtttggtttttagttcataagttaaaaagaaggtaattattcgaaccaaactatttttttagtttttataatatcaaataaatcttttattcctaaataagttaaagaaccctaataaaagtttaaaatgaaggaggaaaaagaaatagttctgtcttaccagcctgataatctg

SEQ ID NO: 9581 - DNA, 566 bp, Gossypium hirsutum
  misc_feature (511)..(511): n is a, c, g, or t
  misc_feature (514)..(523): n is a, c, g, or t
  misc_feature (525)..(527): n is a, c, g, or t
  misc_feature (534)..(539): n is a, c, g, or t
  misc_feature (542)..(551): n is a, c, g, or t
  misc_feature (554)..(555): n is a, c, g, or t
  misc_feature (557)..(563): n is a, c, g, or t
tattttattgtgagttaagcattgcggggttccatagaactcaatagctttcaaaaagtcaaacaaaattaaatttttggtggggattgaaactcaatcaataaaaagggggaaaatcgaaaattggaacaataaacaattaatgtaaataaaaaactcaaaacttttaaaagtaattacctttttttgagagggaaaagatttgatttttttttgttcaattgcttgaatctggttggtgagtttccattttcgttttatgaaatttccgctttctttgttttcaaactttcacttgtttattgtctgcttttttggtgtatataatgcaaaattttgtaattccattttgttatgcattttaaacttatattcatttcaccactttggagaatgatattttcaaactatggcagaaatcttatagatatctaagcaactaaaaccaaacataaactcaacaattctctaaatacacaaaccaggcaatggctaacatctcaaacataanaannnnnnnnnntnnnccatcannnnnntgnnnnnnnnnngtnncnnnnnnncct

SEQ ID NO: 9582 - DNA, 551 bp, Gossypium hirsutum
  misc_feature (197)..(197): n is a, c, g, or t
  misc_feature (199)..(200): n is a, c, g, or t
  misc_feature (297)..(297): n is a, c, g, or t
  misc_feature (439)..(439): n is a, c, g, or t
  misc_feature (461)..(461): n is a, c, g, or t
  misc_feature (507)..(513): n is a, c, g, or t
  misc_feature (516)..(518): n is a, c, g, or t
  misc_feature (524)..(527): n is a, c, g, or t
  misc_feature (529)..(533): n is a, c, g, or t
  misc_feature (538)..(538): n is a, c, g, or t
  misc_feature (540)..(546): n is a, c, g, or t
cactccggatcaatttctgtttcatccaatgtcttcaactctgtactactacctatgcatttggataatattattaatttctagtatttaattgtagtttggaagctaatttataattattcaatccttgtttttttttttttttataacacaattataaataatttatttgactttggttgtttttaatttatgangnntaataatgtagcttaataattgagaataataatatatttaattgatttatttaattataaataaatcattgcaaaatatgtaaaaataatttaaaanataaaaatttattaaaatatattaatatatgtaaaaataatttttttggaaaatattttcaggaaatctgccaaacaactaaaaaatatttacacagattcaatcaaacaccacaaaatattttccagcaaattattttaancaaaaataaaacatttttcatnaatcattttactgaaaacattttactggcagtcaatcgaccccatnnnnnnnacnnnataaannnngnnnnnccccnannnnnnntaccc

SEQ ID NO: 9583 - DNA, 662 bp, Gossypium hirsutum
ttgatgatgtgatgtttgtgcttttattaggaacgctttgaccctataagcgactctggatcaagtaaaggtgatctcattccatcaatggtatatgggtaagcaatattttattcttgtctacttaatgtttgctaataatgtagcactgaactcccattaagtcagctctgtgaataatatcaccaaatggtattgcaggagaagtgtgaaggaccaagattttggtggcatgtactgtgcaatgttaactgtcaagtgagtctctcatcttatttcatcaagtttcttttcagtattatctttatagagtgagggcagtatctgagtgccctgaatctttcttttcctatcatgcagtcaagtggtggtgtcagctggtatttttaggatatttgggcaggaggtggctgaaattcccttagttgcaactagtaccgaaggtgaaggacaggtaacattcactgcttgtgaaaaaacatttcccacccaaccaagctctttggaaatttgtaactaaaacaagatttgactatgcagggttatttccaatgccttttcacttgcctagaaaagctgcttgggttcctaaatgtgaaaaacctcgtgcttccagcagctgatgaagcagaatccatatggacgaagaaattcggattcag

SEQ ID NO: 9584 - DNA, 610 bp, Gossypium hirsutum
aggccagaaacagagcagacaaaagcagaggattgggagaaggatgagatggccaagatcaaagaacggtaaatagagtatttattgctaacttattaagtagtattgaataataataaccaatcagcaccaatatattaaaggaagaaagcaactaaactgcattgaaacaacaaatgccatgcaacataaaattgtccacttaaattcagaagcaaataatatcatatcatccacttcctaacagatagattacaggtataagaagttgaatagcactatacttgcctgggaggaaaagaagaagaagaaagccaagaacaagctggacagaacagaggtgagacttattttcctttccttaaatcaaactaattcttagaaactaatagcttatttcttgaggcatcagagtggattagagcgaaagagagcacgggcattactaaaatttaaaaatgaaatggaatatatcaaacaagctgtggatggagcaagagcacaggcagaggcgagccagaaaaaagatgagcttaaagcaaaggaaaaggcaaatataattagaaaaacaggagaggttccaagggcatgcttctgctgctgaatgtac

SEQ ID NO: 9585 - DNA, 488 bp, Gossypium hirsutum
  misc_feature (435)..(441): n is a, c, g, or t
taagaacgttgaatatataactgaactgaattgcttcatttcttgaaggaaatggtatcactaatctttctagtgctggatcttaatggggaaaattttcattaaacctattttatttcttgaatttatgggctgtggtttctttcagccatgtacaagaagtgttgcatatgcaaatatcattaagaagagttgcaaatctcatatatgtacttggaaccatatgaagttgcagtcatcagtaaaaatatccaagtaaaattggctttttcttgctctggaaatacgtagatattctacatccacttcactgatcttgcatttaatatctttttctagcaaaggccaatccttacatatgaatacttgaaaaggatacctcaataatagatatcgactttcaaaaaaagaaagccttatctatcaattctcagnnnnnnnacacatgagggggagagaggggaggatcatataaacatagtccactc

SEQ ID NO: 9586 - DNA, 620 bp, Gossypium hirsutum
tagtgagggtatggtgaaacgtcaggatgtatgggtcacctcaaaactatggtttgcttttgtgctttaatacttttctttataagttcttctcaatggagtccgttactttgcatatctaatatgtcattgcgttgtacgtttaggtgtactgatcacttgcctgaagatgtaccaaaggcattgcataaaactctgcaggatttgcaacttgattatgttgatctctatctagtatgtcttaacacttactttattgaaatgatatatatgtatatatgacatttgtggtaactgcgatgaatgttgaagatacattggccagtgagtgcaaaaaggggagcaattgctgtgaagggtgaaagccttacacaaccagacatcccagctacatggaaagcaatggaggcactctacgattccggtaaggctaaagctattggagtgagtaatttctcggcaaagaagctcagggatctattggaagtggcacgtataccgcctgcagtcaatcaagtggaacttcaccctgtatggcagcagccaaagctgcatgaattttgtaaatccaagggaattcacttgtcggtaagaaaacaggccgcttcaggttcatatca

SEQ ID NO: 9587 - DNA, 496 bp, Gossypium hirsutum
gaagatgattggacatgccctagttgcgggaatgccaatttttcatttagaactacttgcaatatgcgcaattgcactcaacccaggccagctgttcataactcagtaagtcttcatatttattagccaatggcgttcaaaatattcctgagtttttgaatattgttgaaattttaattgctttagttttggctcgtaggtttcgattttctgttcagattggaattgtttttcaacagaattagtaatagaagagcggattcttcaaaatatgtggcttagccagttattttgttaatacctggttctgtgctgaaagaccagagtatattatgtgatacccaatgcttgcttcgttctagtccgtttatgtcctattttttttcataactctgtttattataaaatcgtaaatcttttctactgtttgtttctccctttagaaactgacccctttacataaaaaaggggctcgacctgccattacaaacttgag

SEQ ID NO: 9588 - DNA, 583 bp, Gossypium hirsutum
cggatgatgaaatcaagaggctgtttcgaattcgaaagactgtaatgcagatgttgaaagataggggttatttcgttggagattttgagattaatttgtcaaaacaacaattcatttccaaatacggcgaaaatatgaaaagggaggatcttgttatcaataaaaccaagcggaatgataactctgatcaggtatcccttaattatttctctaactttgaaccacaagtggatttcaaatccatttctaaattgctttttttaatgtattgtactatagccatgttgagtctttgggtttcaagctatttttgaattgcttttgaatgtattgtagtatggcatgttgagtgttttagaacttgttattgttgttcttggattttgatcagttttcttctttgattgtcatctatctattggaatatggtgtcttgaatgtttaagaacttgttggttttgaatttgggtttatattcatctttgtttgttgacttattaaattatgtgttttaaattttgcatactagatcaatgtatcgaaatatggtgtgttgaatgtttaaaatcgtgtctttgctctt

SEQ ID NO: 9589 - DNA, 451 bp, Gossypium hirsutum
gtatatgctttagttcactttagaaggagcatttacttatgtttaagtgttccaaattccaaattcccagaaaattagcagaagaataaataatagacaatttcgatatggctgctatcttcaccttccttttgtttttttcactactcatttcttttttctattctgtttacccaaaatggaggtccttattacatgcattgttggtcaatggccactacatttaaagcttacaatgaagtcatcatgcttgcaaacagttctcccactgcgtttcttttaaatcttgttaaaagagttctgggtgagaacttcattttcttcccatggtaggactgtttacgctttataaaccaaacctatgaaaattaatcgtggtagtgtaaagatatattttattcatataaaaatcattttaggctggagaccaagtctgtatcctaactgtacc

SEQ ID NO: 9590 - DNA, 693 bp, Gossypium hirsutum
ctgcatttagcattgggtaaacctcatacaataactgtcttagctctaccgtatcttttgtttcatttcttctggaacaatcacaaagacttttttgatcatagacgtcctaccagaaattcaatgcgtaatcttagcattcaatgtgtattcctgaataatctcattattcaattattcaaccatttcattttaccaagttcaatgttagccagattagtcaacatctatatgtttcgatgcaacaacaatatgttatttgtaacaagtagttttgttggttggttaattggtcatattttattgatgaaatgggttgggttggtattagtctggatacaacaaaataatttaattaggtctaatgtacttattcgatctaataagtatcttgtatcagaatttagaaattctatggctcgaatctttagtattctgttatttattacctgtgtttactatttaggcagaataccgtcacccattctaactaagaaactgaaaggaatttccgaaccggaagaagtgggggaaagtgaggaagaaagaaacatagaaatagaaactatttccgaggggggaggggctaaccagaaacaggggaccgaagaaaatacttcttcttcccttttttcggaggaagaggtggatccgagcaaagaaacagaaaagctacgagtgactggaaagaaa

SEQ ID NO: 9591 - DNA, 596 bp, Gossypium hirsutum
  misc_feature (585)..(588): n is a, c, g, or t
tggaagactaaaacctatatgtttgataaactgtcccacacatatctaggcaaaccctttaaatacaaaaaaatctaaataaaaaaaatcaacatacacataagagacgcatatctaagtagttttgtaaataaaaatggtttcagctagaactaagcaaacttcagtaagaaaaagagcacttggattttcttaatcaagaatgaataaaagaagttagaaaaaaatttggcaactctggtatgcttttcaaggattctatgttgttactgtagggaggatcagggtatgccaaaaacatcaaatttcagaatataatggtgcataacgtgagcaatcctataatcatagatcaaaactactgtgatcatcataaaatgccatgcccctataaggtaataagaaaaactcttaaaaccatgaacatcggattcagaagaaaagagcagagcaggtgttaatggcaatgtatgtatgtatgtatgcatgcatgcatgtatatgatctataaaagcaggtatcagcagtgcaagtgagcaatgtgatttacgaaaacaacagaggaacaagtgcctccaatgtgcnnnnaatcatca

SEQ ID NO: 9592 - DNA, 604 bp, Gossypium hirsutum
gttgtttgtcaggcacttgatggaagatgcttactggctgccgctcatgttgcatacattgagacactaaaaagttcaggaactgcccttaggaagtttgtcgagcttgaagctccagtcgagtcttccctttacacttcaactaatgctacacctgagccccttgctttaaccgaaaagtctctttcccacttttcatactcttctccgtctttctcacgtgttgatgcacctgaaaccttttctccatcaccttctcctcccacttctagtcattttcaggtgaaccatatgaggtttggggttacatcttcgagaaaagtcgaagagaagccccctctacctgatatcagattggtaacctcatcaagtactccacagagtaccactcctcgttccactgaaaaaccagaatcatcaccattcgaagcttcttctttgccgtcaggaacaccggaatgggatttctttggtctttggcatccaattgaccatcaattgtcatttcaagaagggaaggaggtgaaccaaggtccagaagccattaatgattttagacgacatagggaagaggaggttgttactgagctggaagatgaagagg

SEQ ID NO: 9593 - DNA, 617 bp, Gossypium hirsutum
gtacattgatcaagttaaaagttgactggactgcatgtggatagaaagagtgcacattcattgaaatatcaggcatgttcagaaaaaaaaccagtcatcttttaacatttatgaatgaaaccttaatgatttatgattcctgagcatctctcaattcaatcttttgccataaagaaaacgattattgtgtttcactcctttcaattaagccccaccccaacacacccactgggaaaaaagaatcaaccagacagttagaagtgaaaaaggtatcttactgtcagacaatttcttttaattatttcaatattcttttgaaaaatataaagtataaaaatgcaataaaaaggaaccttctttcattgatgccaattgccatgattcagagtacctggctataaggtccaatgcaacttggtgcccagcatgaaatactttgaacatgcaaaactcttttgctctgatcattggccactagaacttcaatatacgctctccctaaacccgcttgaattaaaggaagttcaatagtacttcgcgatggaacaccaaaagggcatttatcctgggtaataaatctcacatatgtctcatttgcctgagtgaactgatccata

SEQ ID NO: 9594 - DNA, 559 bp, Gossypium hirsutum
  misc_feature (511)..(511): n is a, c, g, or t
  misc_feature (530)..(534): n is a, c, g, or t
gataaaaaataaaacatgttttctaaatgggctggtcctggccctaatcagcgtaaactttcttttttgctactgttttgcgaccatttcactattatattattgtaatttcgttgttattatttgaatattatataactcttgttttattattaattttactactgttttagagacatttgcttgttaagttgcaactatcttagtataatttacttttttagtgtattttcaaattgttgggaaataattgttttaatgtttttagtttatttgatgtattatatattttttttaaaattacttttatataaaaaataatctaaaaaatttaatctgggtcggcttgggtagaattttaggcccacttttaggttgggcccagaaaaaaggcttaaaattttgcattggccccgaagccggcccaacccatgatcaagtctactaccaagtgagtattttttttattttaaaatgccacactaacaaatttaaaaaaaaaaaaaaaatnttgagggattaaaaaaccnnnnnattttttttacaaaaaaaaaaaaaa

SEQ ID NO: 9595 - DNA, 576 bp, Gossypium hirsutum
gatgaatgtctgttggcttcattttttttctttatgttttgatgtattttcttgtttcaagtcaaaactttttagtgctcttattctagctattaagcatccaacttttttccttgattgacattttacttttaccattttaagatgtcgaaattggatatcaaatgaagttttagtaaaaaattataaaaatgttaaatataaataataaattagtaaaactattaaaaataactaagattaggttaaatattattttgtggatgttgtctatataaaagatacgaaaaacataaaatgataaaaaaaatatatctttaaaataatataatttattttacaaacaaatatatttttatcattatttaaattgatacgacttggaatgtcaacttgagtatatattcatatccaagttcaaataagttagatttaagttcttaaataaatgatattcaagtccaaccaagttaatccaaatctataaaaatcaattttatttatttatttaaaattataaccaaaatcaaaatcgaaatattacataataagaccctatgcatcaagaagtaaaca

SEQ ID NO: 9596 - DNA, 398 bp, Gossypium hirsutum
caagtaactatcaaagcaatgggtcttttttcttctaataaaatgaaaacatggaaaggcaaaagaataatatggaccaatcaatgaagttctacttttgtttttgtcgtacattagtgacggaatccaggcttcttaactgcaagtgatgggttgggttgatgtttgtgaaccacagtttataaaaagatatctaaaccattagtcatggaggaaacttccttccaattctctcatcgtgggaccttttgacaagatgtcaaactcacgaaggaaaagaaatagtgtaggaaacttggtgcttgacttacagtcaggacatgaacttatctcacgtcttcttctgtttccgataattattctctgtaacctgtactggtttcgtcttcagtttcaaa

SEQ ID NO: 9597 - DNA, 365 bp, Gossypium hirsutum
gccgtatcgaacactgtgttcgacacgtattcaaacatgtgtatagggatgctccaaatttatggaaaaaccaagaaaaaaaaattaaacatacccgtatagaaacatacttgtatccaacgccaagtccgggtaacatagatttaatatgtaagacaacaaataaaatggaagaaacagaatcagataatgaacctctatagtactttcaacagtcacatccaatggtaagacattaaggcgttcagcaaactgattttttaattcaagaagcgctgttgccttagtaggattacgacacgtggcaataacatgcccttttccattcttttccagcagttgtttaacctgaatcgacaagtgca

SEQ ID NO: 9598 - DNA, 503 bp, Gossypium hirsutum
gctacaagtcccttatattcgagtgataaatagtagcaattccgcagtgcaacaaaagaaaccatatgaaacaataagtacccacttttccagcccagaagagtaaaagaaaaaactatttacttaagcaataatatttccctcttaaaatcctgaacaatcataccagacaatgactaaaaaggtctcgctaacaaactaacatctgtttactagttcaaaacatttcttccattaccaatttaccacaaactacctacaattccctgtcacaacccgaatatcaaacaagattggatggtaaactagattcacaatttctcgatacacgtaagcaatggctacatatgagaaaaattagccagtaggcaagtaattctacacccaacttattacagtacttcgactgagtaaactggattatcatagtgcgattgtcactctacaatgacatcgaaatcatggtttatagcaggaaacaagcatattgtagcaaaccgtga

SEQ ID NO: 9599 - DNA, 631 bp, Gossypium hirsutum
ctcggtttagcaactcccttccagcgagcgggaggcggtcaaagattcgtgtttgccaatcttctcctttcgggctagactccggtgtcgaagactccgattataacatcagaaccataatcggaattcgaccaaagcccgtgttggtttcgcaggcccaggaactgagaggagcaagtggtgtgaagttgtcggtggcgattttcgaaaacagcaagcactaaagggtggttactgagggaagcagcatgggtttcagtcaaacaggcagagaagccgtggaagacagtgtcaaaggtgtggaggattcgagttggctcagcgaactcggaagtgtaccagtgatagtgtgtggggaaaatggacggctttgattgagaatctacacgaaatatgaaggttttaatggcttcatcagtggaaaatgacttcgaaaaattagagaaaaacaaaagaacaagcaaaggaagaaaactgtagagtaaagtagccattgatgaagagagaagtgaactagagtgagtttcaggagatgagagtgttatgagagagagtatctcattattatctcttattattttcccttaatttaaaaactttaattaatcaacgacaaaactgccttgtttga

SEQ ID NO: 9600 - DNA, 650 bp, Gossypium hirsutum
  misc_feature (645)..(646): n is a, c, g, or t
tgccatgatccctattttcagccatttgcttccttggaaaactcgacccatcaccatttctttagttttcttgtaacataagttgaaagaaaccagttatggctatatgttctgaagctttatcgacacaaatgccaaatgaaaactacgcacctttatacaagcgtgtgtatggctcttctaaaagtctggtttagattcttccttaatgatggtttatgatgctttgctgtaaagtgaaagatttacttccacaacttttttttttcaattgttaaacagatcggattaaacaacgaaatggccaatattttggacacataataacaccaggtagcattgattactaaaaagcttgaaattggtaacccttcaaatacaattgcattacatcatactactgaaaaaaagtagacatcgaatgagatggttaaaaatacattagtgctaatctgcttggcttttgaagctttcgctttcatggcaggggggaatccaaagctgaacttggttggtaataccattctataccttttttcttatcataagttcacctttgcttaatatgtcacccttaaaactttattcattgtttgtgctttcttcataagagggctctcctgattctccttttcctcattgcanntttc

SEQ ID NO: 9601 - DNA, 555 bp, Gossypium hirsutum
tggagatgctgctagtaggtccagtagttcaagtagctctagcagtgattctggatcttcttcaagtggtaatatgatttatttcttacttgattttagtcggaataaattgtgttttattgttctaacatatataattgtttgttgtagactctgatagtgaaagttcctctgcctctggatctgatgctggacattcacctagagcttgagtgtttctcgttcaggtatgctgaaatgtccctgtatcttacaggcattcatgatttgatttcttaaagttgctcaggtgtatgtggtcatttttaaattacctctttagctgtagaattgttaacatttttatttctattgtggttctttcgagtgatgtgattgatgtttagtgatgatgtaaatggtggtgaatatttttgcctggtagcatcactatgtagtgagcgcacataacttctgttaaaatttggatttgtaaacaattgtgggtcttgagaccctgagtcaactcttcaatgaaatttcaacttgtaggtttcagatgcaaatactgaaagg

SEQ ID NO: 9602 - DNA, 549 bp, Gossypium hirsutum
acagcttctcaccaccaacttggtagtagtaagggatcgaatggacaacatttttctctttttgggggaaggcccaagctaagctaagctaaggcctttgtctctttttctcttcttctttgtttcccctactcagagtcagtcagtcagacagacagcacattaactgatacgagatgagttgagtgacctactactaccaaaccaaacttcactttggttgggatctccgcttcattgtgtgtcgggcccaccgatccaacgccccatatcactccatcttcttttttaggtaaaatatattaatagtaatttaattatcagtgaatttccattttgggaaaagttacaaaataaatttttaattatttagttttattattttatttaattatcttaaattattgcgtgttgttatttttacactagtcaaatggtgataaaaagataattaaataattttgtgatattttataattttttataattaggtgacaaaaatattaatgtatctttttttagaaaaacgtgtaggttgcacaatgaaat

SEQ ID NO: 9603 - DNA, 433 bp, Gossypium hirsutum
atagatggacctcgatattcagaatggcgtgagacgccaaatttagctgcaccccctccatatccaccccgacgatcacttgaggattgtcctctaccaccatgagcaagctcaacctgcatcaattacaatgaaaagcaaatcaagaaaaaagttgtatgtcaataaactacacatcaaaataacaatagcttattattaccctcaaacgacacccatcaaagttgtaaccatctcgacccctaattgcgtcttcagcatcccttgaattgtcaaactatgaaacaaacacaaagagaaagacattgttacagtttagatacacatcctctgtgaaaacataaaagatgagatatatacctcaacaaaacaataacatggagggcgtggagggatcttcaattcgatatccaaaatacgaccatactgtaaa

SEQ ID NO: 9604 - DNA, 542 bp, Gossypium hirsutum
ctgagaagaaagcattcaaagcaagataaatagaataggatttacagttcttagatgatctgcttgtgttgatagacgccgtcccatctcctgcacagcttttctcaagagacaagccacatgctgatcaagaaagttaatgtcatcatcttctcataacatgatatccatgtatatgaacatgcaaacaaatgtatatatgtaaaatgttaagtccaaatgtgcacatcaggcataaataaattatagccattagttcatcatataccatacatgaggtatttcgctgttcattgtttcagcagtttcatccagaattccatacacaacatgtaaaagtgcctgagttggggcactctgcatacatgaaatgtgaaaaaacgtcaaacacacatcactaaataacaagtttttggaggattaaatggtagaagagtagccaaaataaattgtaaaacatgataaatgttgacaacttacttctaaactgtttgactccatcatctctaaaatttttgtcacagggagatcagcataacatg

SEQ ID NO: 9605 - DNA, 426 bp, Gossypium hirsutum
cggccactcgttcccctgcccgaatccgccgctccttcgccatggctccgccatgaacggccatttgagccgacaagaatacgacagattcccggtaggtcccctttctttctccttttattctttactcagtttatgaaaacaaattaaaagaaaaaaagaaaaataataaagaagagaaaagggaaaatcggaatcggaaatcacctcaaaagtatgctatatttgctgtttttgaaatttttgtatctttgtattgttttccttttttctttttttcttttttgcagattctgaaaaacggctttatatagccgaaaataaaaattacaaaagaagaaaaatatattttgctctcctctctttcttcttttcctctttttttcccttttgttacaaattttaattcgctgtaaatctgttgca

SEQ ID NO: 9606 - DNA, 648 bp, Gossypium hirsutum
catatggaaagatttgagtatcagatagctgagaaatcatagaattgttgccataaattcactaggcattaccgtgaaaagatggtataatccgtagattacagtgtttatatttagcactggtttccagtcttcacgcaagatgtttaagcaaacatttccttccaagtcaatatttggatggtagaccttggtttataaccaaaaagcaaataagaccataacatgaatgcagtaaaggaaaaagaggactagaagtgaataagatgagccagtctaccttggtcttgcatttaacttttggtgcctcgtgcggatagatgggagaaacttggaaggagaacaaaaatgtgccaccgctacaaaaacggaagccagtcagttgaatacttgtttgtgttattaagaagagaaatgaatgtatatagaatagcatctctttccctgtaatttggaatgaaaaaagttccttacaaataatatccttcatcaggtcgaattgaaacctcgaaattcatcaggtcatcctttccatttggaaatgatatggaacatgatttaggcaggttcagctcagaaatgtctgcaagtaacatgaagctcacatttactaagtactaattcaatcctagatcaaacacggatctt

SEQ ID NO: 9607 - DNA, 622 bp, Gossypium hirsutum
atattgttgatgaagttccattcaactctattataggccttgctcatgtcaagcttcacagccataaagtatttttcccctgcctcttcatgttaagcgtatgaagaatttcgtaagccaatagtatattgtctgatataaatatttctggtacgaaagcactttgggccaaatcaatgcatttctcaattactctcctgagccggttagcaatagcttttgcaacaattttataaatcacattgcacaatctgatctacctaaattgtttcatatcaaacagattggctacttttggaatgagtactatatgagtatgattaatatgtttgatctccttaccttcattaagaagctgtagacaaaaaataattacttcatttccaacaacgtaccagcacttttggtaaaataaagccggaaaaccatcctcccctagggcttttgtgggtctcatcacaaacactacttctcggatctcttctagtaagtacggagctgtaagcctttggttatcctcctctgtaatgcatttatctattcctgacaacacatgatgatctcttcctcttgcttctgatgtaaaaatattttggaaatatgatcgtgctatcctttcatt

SEQ ID NO: 9608 - DNA, 540 bp, Gossypium hirsutum
tttcccggtactaactcaatagaaaattcaacttctctgattggtggtaacccaggcaactcttctggaaactcattcggaatctcacaaactataggcactgattcaatcttcgattcagacgcttttgtatctaaaacataagcaagatatgcttcacaaccttttctcacacatctctgaactgatataaatcaaaatcatagtaggcaattcactcgacttatctaattcaattcgaagaatttcactgttctgacatttcaattcaatgatctttcgtctacaatttacaatggcatcatgtagagtcaaccaatccattcccataattatattaaactcatcaaactgtaatagcatcaaatcagccaaaaaatagtaaccccaagtcattaaaggacagttcttgcagactttatcaactaaaacatacttgcctaaggggtttgatactttaattacaaactcagtaggttcaacaagcaatttcttactagacactaaattcatacagatatatgaataagtcaatcccaa

SEQ ID NO: 9609 - DNA, 602 bp, Gossypium hirsutum
ttcgatatttttgttgcaagctagtataattttctaatgcatagttcgcataattttctactactagcataattttacattttagggggctggagcccttaccaaaccccctagatccgcccctggcttttttaatgtattttaacagtttaggtaacctattgagtgtaaaaaaagggcttaattactttttttgaaaaaatatgaggacctttttaatgtattttaaaaattcaagtacccaattgaattaaaaaaagcaagggcttaattgattttctctaaaaaaaattgaagattttttacacccttaagtcaaaattttaataatgacattctttatttgtatttattaatagattgagtaagggattacatttaatactttgtaaatgaaaggcattgaagtaattcagatttgttttattagtagaaataatatgattatgcaaaaaagaagtaacttaaatttaatttaatttggaaaaaaagtattcaagtaaatatttttagaagattaatatatcaagttcctaaaacaattaagttgtaattttttaaagttatggtaccaatttatttaatttaggggaacaatgtga

SEQ ID NO: 9610 - DNA, 490 bp, Gossypium hirsutum
aactttctacccatcaccgttacacaccaaaaggagttccctgaactcatccatccaaaacacaccaacatatatgtggacgaagccaccaaattcgcagacaagctaccagtacatatagttgtggacaaagccaccaaattcgcaagccaattgctaaaacatgtaggttgtggataaaccaccaaatttgcaaattattactgctaaaataatgattccattcaattcactaattctaatagaaaaatcaattcattgtatgcaattaagtcatttttgatattttacaaaattgcccccaacattttacttttatataatttagtccttaagcccaaaacatgcaaactaaccatttttattcaattaatcccattctagcatttaaaataattaatttagcttataacccataatgaaagtttacaaaattacccttaaagtttaccctttttataatttagtccctaaacccgaaacttacaaa

SEQ ID NO: 9611 - DNA, 455 bp, Gossypium hirsutum
ttccatagtttatgaatttttttgaccaaaatggaactgggaactccgagtaatacatcctgaatggtattaactgcttcaagactgtcagtttgaattaaaactttctcaaaatcctatttctattttttttttgaaaagttacaactgtttcggtatgattaattattataaagattggacagctaattaataaaactaaatttgtaagaaaacccatatattttcaaaaattgatactcgaattcaagattttaaagtttttattattgacttttagcttaaataactttttacagttattacgacagttttaatacaactaattatttgaaatgtgaaattgaattagtaacttgaaaaaaaatttacatattagtatgagtactgttatcaatgtatgaaaatggggcccaagggctctgaaacgcattatctttctatttatgagtggg

SEQ ID NO: 9612 - DNA, 407 bp, Gossypium hirsutum
  misc_feature (169)..(169): n is a, c, g, or t
  misc_feature (179)..(179): n is a, c, g, or t
  misc_feature (200)..(200): n is a, c, g, or t
  misc_feature (255)..(255): n is a, c, g, or t
  misc_feature (257)..(259): n is a, c, g, or t
  misc_feature (261)..(261): n is a, c, g, or t
  misc_feature (266)..(266): n is a, c, g, or t
  misc_feature (269)..(270): n is a, c, g, or t
ggttttgtcagaggcaacatagttagtaatcagtttaggattcttttctgccacccctttggtggaaggtggcggggcccaggaccacctttttttttttaacccggaactttttggggttaaccatgttaaaattaaaagccaaagggccttgccttccattggaaanttttgtccanggcaggagggaaacctccttncactttggtaatttccttgttttaccaattggggaaaggagggaaaaattaattncnnntnacctnctnnccaggagggaggagccaggaaatcctccgggtaaaaaaaatgggaacccatttcaaatccaagatacatatttcttaaaggggattaaaagactggtaatgttgggtgaaagaaccaaagaggaagcagcagtttag

SEQ ID NO: 9613 - DNA, 503 bp, Gossypium hirsutum
aatgcatatggacactcattaaacttcttcccaaccttcttcagttcttccccaacaaaggtaggatagcagtcctcagttgtaaattaattttactagtaaatatttttccaattattttaaccttgttcgtgagtttactgtttagtatcaatttcgttgctagatattataatttttactttatattttcaatgatgtatgtaagattagttgccacagaagtctggtgttttagaaacacaaatgatatcaggttggcaacacttttaggtagtattaaacttatgataaaaaatgccatgtgatccaggttggtggctctgaagatgtgtatcttgctgccaaatccttactcctctcgatgggaaaaaacgcaattttctgtggtggaccaggaaatggttcagtaagttctcttaagacaatgaaaatatttccttttgatttcctcgatctctctctttgcccctccctccctcctccgtacagaataacaaaaa

SEQ ID NO: 9614 - DNA, 606 bp, Gossypium hirsutum
ttgacgggaattcacatttcaatgttcatatatataatctgaatgcttcagagataaactatcagtctaatggtctaaatgattctcgagaacctggtcacgataaacatttaaaagatgtagaagatggtgcctttgctcagattctgcgttctcaacctacatcatctagttcatgctttttgattgatgatgattttgatgaatgtgtagatcatgataggaagaaacgtaagaactctacatttcttgatcagaaaaacaatgtggatgatttacgagcaacggttcaatccactcgagacaaaggcattcagtttaatggggttgagcttacaagtgccgcagatgaaggtggactgaatttcttgaatggaacacaaaagaacaccaaagaaataaaacaagaaatcgaacccggtaagctcctggaacttaatgctttctttatagggtgttcgtaattgactttttctcatctctaattcattgaaagatatagatgaatacaagtcgttaggcaaattcattgtaaaagaagagcttccagccatgaactccccaagaagcgatcataagaaacggcgagatgcaacggcagaagga

SEQ ID NO: 9615 - DNA, 603 bp, Gossypium hirsutum
  misc_feature (116)..(116): n is a, c, g, or t
  misc_feature (598)..(598): n is a, c, g, or t
ttgaagaattatcttgtacaccggaagaatgtatgaagtgtgtggtctcacttctcagagattcagcttatcattggtggaagactctcgtgtctatcgtaccgagtgagagggtnacttgggatttctttcaggaggagtttcgaaagaagtacatcagccagagatttatagatcagaaaaggaaggagtttcttgagctaaaacaaggtaagatgtccgtgactgaatatgaacgcgaatttgtcagacttagtaagtatgcccgggaatttgtatccaccgaagccaacatgtgcaagagatttgaagatgggcttaatgatgacatccgactatcagtgggtgtattggaaatcagagagtttgttgttctggtagaaagagcttgtaaagtagaagacttgttaaaagaaaaagagaagagcaaagctgaagctggagcgcaggatacaaagaagaggcaaatgagtaaatcatttcagtctacgtctaagagatctagggagctctctagcggatcacattttccacatatatattctggccgaagcagaagtagaagattcgagggttttagagctcaaaccactacagntgcaa

SEQ ID NO: 9616 - DNA, 495 bp, Gossypium hirsutum
atacctcgaccaattccctatctgaccggccagtctggtttcggttcaaacagccttgaccaaggccaaaagtataagattagcgtaaacattcaagcaaataaataaaggttacatccagtttacctgaaaatcctaaatcagttcaaaaacagaaaaccaacacatcataaacacggcaatctttcatcattactagttatcagtccctgcttgctatattaggcaatatctttggatacaacatgtttcccttgcattgcaataaaaagtaacccaacccaaggtttagctcaatggtccatgcaatgacctttaaaaggtatcaacatttacaatctctccaagataccgtctcttttttacccaaaaagaaaaccaaccaaatacagaattccctctttaatttatatgctaaaattgatttaaagaggctgttcaagattagcaagaccgtttgtgccatttcaaatggatgtcacaaaactgcctagg

SEQ ID NO: 9617 - DNA, 544 bp, Gossypium hirsutum
ccactgtaaagaaggtaagaaaatgcagaacataccacagtagcatctttttctaacctagctcaaacactactactggaattcaaatcttggtcaaaccacccaacttcaaaagtcaacacctttgaaagcatcttctctcttatcgtgctctcccatggaagaaaaattggtatgctggataatattaattagtaaatcatgtgatggggttactgtggacgcagaataatgaaatataagccacagtttgtcattagaagtgatcatgggtcgggttggatccaaataaaattttaagcctattttttaggctcgggttcgaaacatggcctcgttttttttacccaacctaacccgaaaggaaattgttaagcccgagcccgactcggccagactcgttttctaaacgggtctcgtttttttatctaaactcatatttcgaacctatatttttatccaaacctcccatttttcaggcgggccgtcaggccggaccagataacctaacctatgatgacctctacttaccatcaatgatcgg

SEQ ID NO: 9618 - DNA, 724 bp, Gossypium hirsutum
  misc_feature (540)..(540): n is a, c, g, or t
  misc_feature (554)..(567): n is a, c, g, or t
  misc_feature (570)..(570): n is a, c, g, or t
  misc_feature (572)..(578): n is a, c, g, or t
  misc_feature (581)..(585): n is a, c, g, or t
  misc_feature (592)..(595): n is a, c, g, or t
  misc_feature (602)..(609): n is a, c, g, or t
  misc_feature (630)..(631): n is a, c, g, or t
  misc_feature (636)..(637): n is a, c, g, or t
  misc_feature (653)..(654): n is a, c, g, or t
  misc_feature (660)..(662): n is a, c, g, or t
  misc_feature (666)..(667): n is a, c, g, or t
  misc_feature (687)..(688): n is a, c, g, or t
  misc_feature (691)..(693): n is a, c, g, or t
  misc_feature (698)..(698): n is a, c, g, or t
  misc_feature (702)..(707): n is a, c, g, or t
  misc_feature (710)..(710): n is a, c, g, or t
  misc_feature (714)..(718): n is a, c, g, or t
  misc_feature (720)..(720): n is a, c, g, or t
ccttgagtgctagagttttcctcaccaatccatctctcacaaatggataacttagcaagtttccaagggatacattcactgcttcctgaaattatatataatacacccatcgtcggttagaaacttgtgaaccaggacttaacccagttggttcatacaatctatgctagtatgttcaatcaaggtgatattcccataatcatgactccatgtgtgctagacatggatatatgtaactcgttttctatcccgagaagctgagatttaaggtataccttctcacaatgtgtacattgaactcccaaaggctcgcccccgtgttctgcttgaaccttggtcttagcaggcattccaatcttaacccaatcttctatgaaatcactgcaattctcaatcagattatagttagtaaatgaatcagttatttaattagttagtaaatgtagaaagctttttttctttttgaaaagaatggaggcccttactaaaaatgtgttccttcttatggaaaaaacttgattcttttaattcccccccagnactggggcccatcnnnnnnnnnnnnnnaanannnnnnnggnnnnnttgctcnnnnaaaagannnnnnnntttctacatttactaactaanntaatnntgattcatttactaannataatnnnattnnaaattgcagtgatttcatannagnnnggggntagnnnnnnatncctnnnnngnacaa

SEQ ID NO: 9619 - DNA, 545 bp, Gossypium hirsutum
  misc_feature (478)..(478): n is a, c, g, or t
  misc_feature (503)..(503): n is a, c, g, or t
  misc_feature (514)..(514): n is a, c, g, or t
  misc_feature (519)..(519): n is a, c, g, or t
  misc_feature (521)..(521): n is a, c, g, or t
  misc_feature (534)..(535): n is a, c, g, or t
tttttgttgagtttttgagaatctgtaagaaaaacggtgaacaaagttcaagagatttggaactaccgttacgtttcgattcttttttggaaataattttgtctttcttcgatttttcttgtttgacagatgcatttggaagatagaagagctacttcggggagaaatttcaactgaattcatctgcaaataagcagatcaattgctgacatattcaaacattagaaccttcatcacaatcacaagagagtttcggaggaataggctgcaaatgtcattattttgttgaaaatttgaagtagatttgtgtttatagactagaagaagcaaagttgtaacggctaagcctgagtaattcaggtatgagataagatcaggaaactgactatccgaataccgattctagttccacctaatgataattgactctcgccattgatatggcaagcttttggtaaaaaaaaaaaaaaaaatcacnggtaatttggttccttccccagctnctattttaaancactnanggtcctaccaatnngttttctcta

SEQ ID NO: 9620 - DNA, 671 bp, Gossypium hirsutum
tttctcctcccattaactagtattttattagccttattccttatttcattttgtaacataaaattattagcataaaatgttgacacaaaataattataatatgctttagtccataacatggccggccaccatctagaatttggccaatttgacatgcaagtacaagcatttttaacatacatcaataggccactttaacatttgcctatcacatttctaaattttctcacacaagtcctattttataaaattcacttacaattaacaaaattcaaacatgaaattttcacacatgcatatatacatataataagcttcaaatatggcggttaattatttttatgactcggttttgtggtcccgaaaccactttccgactagggtcacattttgggctgtcacaagaacaataaaataaaatatgataatgataaactgggatccccaacatgaattttcaacataatactaagtgctcacaaggtataaaagtataggtaattgttcatgcaataaaattcaatatatatcttactaagcgttactcctctgtttaatgtcagacttaaccatgcatattaacctcacctttcgatgatggcactattaagaacaagtggactaaattcctctaatcctcactcaacttccattgtaatgcttgttggctc

SEQ ID NO: 9621 - DNA, 644 bp, Gossypium hirsutum
aaatttcttgattgttgccatagttgggctgcaatggactcgagctgagctcgaatggcataaacgcgacccttgagcttgattcgaaactcacagctcaatacttagcttgagctcaatcgagtatcattttctaaacttggcttgagattgcatttgaaaatctgatggaatatattatttaacttggatttgaattttaattctaaaatctaatgctaatattaaacatattcaaatttaaagcaattatgcagtctcggatttagataaaaaaattacagatgtctaatccaggtaaaagtatcatagaggcccttatattaggagttagattgcattttgccttttttattcaaaaaaattagtaaattaacccctatacattagatcaaagaacaaactggttcttccgttaaaaatttcatcaatttctactgttaaaaactcgtcactatacattagcatgaggtacacataacacgccgcgtgttaccatctagatattttgttagtcatgtcaatttttaatagtacaaatatataaaatttttaataaaaaggatcaattcggtctttgattcaacgtatagagactaattttcccactttttgagtagagagggcaaattgcaatctgactc

SEQ ID NO: 9622 - DNA, 559 bp, Gossypium hirsutum
gcagcctaaagcttaagcaaaacattgcctgcatcaccatcaagtatatggttcaataaacaccatcccaaatacgagcaaactcctcctctacccttgatgacaacgagggctttgttgggaagagacgtggattatataaaatacaacagataaaaaagacttggtagtttgtaccttgttaggagcgacatccctaaccttatgaaacatcgggtcttttattttggcatttaaggcagactctgcctcctgtcaaagatttgagaaatcaaatgcggttaaacagcataaataaaacaatgaatgattaacgataagttttcacatcctatggaccttgccaaatgacttggattcaaagtggcttatgtaaaggtcaagataatggtgggagagaatgtcattgatgtggcggactgaaaaccaacaacacgtagtaggtaaaagaatgaaatgacccaagacttctaaatccaataacttggccggaaaacctatgaagctattgaaacaagttattaaagaaatataaataactgcaaagcagacttactga

SEQ ID NO: 9623 - DNA, 550 bp, Gossypium hirsutum
taaggtgcttaggcattgcgttattgaagtaactgttaactcacagggcaaatgaattaaatttctggattttgaccaatctagtaagttcctgggtacttgcttcatcggttatgctgaaatccaccattctctagacttctagctccaaccattggttccatgtcattgagtgattaaaagcttgcaaatatatgtaattgattgcactggccggtagaattacttcgtgtgactaataattttattccaactactggtcaagcctctgttgtatgtattcttacaaatagggaatgaataaccataatcattttatttatgattgaagccttaaggaggtataaatgctccatcaatttctactgctacttcaattgtactaattatcacaacaaggctttatatctcctgttttcttatttcttccttcttttgtctagagattcatatgtagctcacagaatgggatgaattcactggagacacgtgtgcatggtctagaattggctttggatgagatctcgtatgacttggctgtatcaactgg

SEQ ID NO: 9624 - DNA, 664 bp, Gossypium hirsutum
  misc_feature (67)..(67): n is a, c, g, or t
  misc_feature (70)..(70): n is a, c, g, or t
cttttggattagcatttatccatattttaaagaacaaaaattgtaatagttaacctttttatattanaantgtatttaagattattatataaattttaatttaaaattttgtttaaataaaattgctagcctatattcttcatatttttatattatatttatattttgctataaattaattaactaaatatagataaaattccaatctaaataaaagatagccactcgattataaaaaaattattttaggcaccaaaaataaattttttttgtaattttaacacccatgttatataattttgttattttgatcactctcgttaaaattacaatcggcaagttgacatggtagttaaaaaagttgataaaacaacatatttaaccctcaacttttacatattacaacaatttactcataattttaaaaaaataactctcaaaatttacaaatgttctcaattttattcaaattctaaaaaattcaaagaaatatataaaaatacataaatattttcaaaaaaatataataataaatttaaatataattaaaaatatttttatattaatatcaaatactaataattatattaatattaaaaacccgtcaacgtcaccatcaaccaatcgacatccctcaactcgctgagtaagcttctgataatgg

SEQ ID NO: 9625 - DNA, 616 bp, Gossypium hirsutum
gtgaaagatctaaacaaacaccaataacttaactttagaaataacaaatttcaaagatccaaatttcataatggagcatgagtaagtatcagtaccttcattggggtgacattataagtagagacaccagttatgttttgaacttcggttttcatcagtataaaaagcaagagcactttctccaggcttgactctcacctagcagaaaaataaaaaaaataagaaaataattgataaaagaagcactctacagtgccctaaaacaacagagaagttaagaacctctctttgagttggaacaaatttctacagcattccatccgccacatcagcattgaattgcactactatctctctaaaaggataagagaaaatttctcaaacaaaggcatagaagtacaagaaagatcatatcgtgatgcgagtctaacatattcataatagcatctttagaaatgcatgaattgaattgaacaaacaggctgatgtgaaatgatgaatgatactaaaatttaccacctcattcctatttgttacccttttgtaaaaaagtcgcatctatatataaataaagagtataatcggaagggagtgataccctgcaatcaatcttatg

SEQ ID NO: 9626 - DNA, 622 bp, Gossypium hirsutum
  misc_feature (457)..(457): n is a, c, g, or t
  misc_feature (470)..(470): n is a, c, g, or t
  misc_feature (520)..(522): n is a, c, g, or t
  misc_feature (563)..(567): n is a, c, g, or t
  misc_feature (570)..(574): n is a, c, g, or t
  misc_feature (594)..(597): n is a, c, g, or t
aatatataaccggagtgatgtagagatagaagatgattcaaaatcagttgttacaaaggtaagaagtttttgactgatgtagtataaaaccgctatcaaatccagatatgtatccaaccttattaagttgtccttgcaggaggaaaaagtagtggaaaaggatatcactgtcagttgtaatgctgatttcggcattgttttgggttcaaagaccattgtttcagctcgtaaagagacttcatctcggtggtcaatggtgttttcagtgcatcactcacgtaaaccatttgctgttggttttcgggtagctgtgatgttaatcttgtttatagttttgattagcacaccaaaggccttgtaacttgatgctacttattgcgttgtgtatagttaacagtagcaacaagttagaaggcctttggtgtgctaatcaaaactataaacaagattaacatcncgctaccgaaaancaacagcaaatggtttacgtgagtgatgcactgaaaacaccttgaccacnnngatgaagtctctttacgagctgaaacaatggtctttgaacnnnnncannnnngaaatcagcattacactgannnngatatccttttcactactttttctc

SEQ ID NO: 9627 - DNA, 620 bp, Gossypium hirsutum
cgaggtttgggcattgaaaaagtatgcagttctcttattgcgagatgggcaaccatgtagcaatgaacccatattggaagctcaactcatagcttatcaaatgtgccaactcaccgaagctgcgaccttaccaaagctgtgaagtcatcaaagatgcaagctttgttaggcgaggtcattctctacaagtttccaatttgttctgaagcgataaacttttttgacaagatgttttggttgctgattatattaaaatcaaccaatagagaagctagttgtactgtacaaattccaagacttgccaagttataattaatttttattattttcagcttatttaagcatggttgtccacataaacaaggtagttgcaatgaaacagaagttcataacttgattgcttcattttttattttttatttttattttttgctttctgtctcaatccatttgatggttcatgaaactaactaatattttagctaaagcaagcgcacctgtcgattagtagtataactatggtgagtccagaatatcgtatccacaaggacttaaagtactagtaataactatctttctattatttagcctaacaataaaaaggggttttaatctaaaat

SEQ ID NO: 9628 - DNA, 643 bp, Gossypium hirsutum
tttttcgctttcccctacccttcgaagcgggacgtgtttctctctctggtctcggcttcttcaacgactctttccgcaagccctatgttgtaagggatggaaagtgcaatcgccaaagccgattattcggaaagtaaggaggtctttctctgatcctgtatctgctcccggctctgctcaaagccggaagctcatctcaaagaaaagctatagaggggaggaaagccaaggaagacttagcgcaaccgcttagcggaaggaatattctgaaaccactagctgcaattaaactaaaggaaagccttgatcgatatgatattaatattttattaatgggctcaagcatgcgaagaaagctcttcgagcttcccttatattatagaaaggtttgtagaaaggggcaaggaaggagctatgaaggatatccgctgatatggttagtagtcatataatatagcgtatatgcgacaatttttcccctactgaaggtatgatttctcagtcgagtgacattcccgtcttgcttgactcgagtgctagctttcttcttctgtcagagacggatcttgggctaccggggaccggctttcaaaaagcacctttgggcggagctttctggatccactaactgacttaggagaca

SEQ ID NO: 9629 - DNA, 632 bp, Gossypium hirsutum
tccacaatttgaaatagaaaggaaggcattttgtttacttgctaaaatgacacttcccacaagcataatgatgtagtttccaagtgacaagtcaataactgatttaccgatttaaagcgactattgaagtcttgatataactgacatttgtgtaataatttcgttgtcaatgctcaaattcatcagtatgtgaacctgtttctgtgtaaactttatgtttttccagctcttatgattaaaagctgctaatgaagccatgaagtttcatgtcgcttaacctcttctaatctttaatgaatttctgtttcttttagattcattttcgatttgcttattttgtctacaatttcagggacttaggcaggaggttattgctgacttagtggatcagtgccgtacttacaaattaagagttgtacaccttgttaattccacatcgtaaggatactcacttttactataatttcccagtggcccttagtaattgtgttataagtcgatgactctttgttctcatctatttccatgttcctgccattcttgttctgtgtgttcatttatgatttctgtttgtactgcctagacttagtgtgttatttcaatatgcttgataaaatgcttgaccaatttga

SEQ ID NO: 9630 - DNA, 535 bp, Gossypium hirsutum
tttggtttaattgtagttttagtccctttactatgctgacatttagatttcaatcttttactttaatttgctataattttgatccttaatgagttcaaattgacaacactttaattgccattttcttttaaatggtttcagctgaatataaatttattaatcgtctaatggtaatttcaactttctactttagtttggcatattttgatacttatgtcgaaattgataacacagttgtgactgtgaaagtgattgacatgagtttctttaaaaaatagcttttaagcattcgggcggacttgtaaacctattatttgttaaacttattattaaacttattatttgttgaacgtagttgattggattttcatatgacatgactgtgaccgaaccaaaaaaaatgtgtcattacttgaatgcgactaaaggtgttgttaatgttggcttactaaaagtagaggactaaattatgtcaaaataaactaaaaagattaacttcaaatgtcagcagagggacttaaatcataattgtacc

SEQ ID NO: 9631 - DNA, 610 bp, Gossypium hirsutum
atcctggagcttcacaaagagtgcccagcagtgccccgcaatggccatttcgttcctccatttccatatccgccaacacagagttgagaacaatagaggccagcaccaaccaccaaccgccgcttcttaaaccatataagataaactgtccaccaatctgcaaaagataaaagaatcaagctgcgcaacaagctcgtcgcccaaaaaaacgcctctacaactctcgagccgctctacaatcccaaagaatatgaataacatcctctcgcacacaaccacaaagccaacatgcttccgtgtccggcatattcctggccacattagtcaatagcctatcctgccaaacaagccagacgaacaacttgatctttgcctgctctggtatcctctataactcaacattgatcgagtccgacacatcatcccaccccatccaaagttggttagctgatctagactgaactcaccagaactcgttcccaaccagattaatctatcctcgtgctccaccctaattcggcccggattggcaagcacttgaccaactatatgactcggcagcattgtgttaatcataggcaaaagtaacgaagaaatctccccgaaactc

SEQ ID NO: 9632 - DNA, 680 bp, Gossypium hirsutum
tcaacaacccctaattgtctgtcaagattttaactgttatatagagctagttgtttatacctataacaatatagaaatataattattgtaaacttacaataaagttcatattgtgaatttctatcaaataaataaaatgaaaattacattaaaaaaaaagaaaagaaaagtgagaatcatattaacaaaattaaaaaatgtatagtaggtgcatgcattattacttttacgcatattttatttttctttcttttacatgattaattatgattatcaatctaacaagtttaattaatcagtgtgagttatcaaattaaattaattaatttatcatgcattattaaattcaagtaatcaatttataagtttatgatgtttcatattcataatagaatattaaattagggaacttaataatttattgaattgatttctttaattcctcccattgaaaattattttcatttaataaaaatgattaataaatattttcacgtgaatgttaaacattttatttaaggcttagtattttgtccactgcaaattgaattttttaattgcacaagtcaggtttgctacatgacacatgtctactctaatttttttaaaattttttttaatattcctttaagactcatggagattttacccttacttttttaactcgattggcaacaaac

SEQ ID NO: 9633 - DNA, 451 bp, Gossypium hirsutum
gaaaaagatgtactaaaatgaatggcataaaatgaaggaattatgtgaatgaagctttacatgaacgtatggagaggaaacaatactgaaaagcaaacttacaactcagcctatactttgttgatgataacgttgagatttcacctaactactggaaataatgattagaaagtactgcattaattaaactttgttaatgtattgtacatgttcaattacttgaacttgttttcctcaaaggacaatgtttccttggctgaaacaccaatggacaatggccattagttacttgccagtcaaaggggatgaattctacaatttccagcaaattataagaatgagagcactacattttcttagataaaaaaaagcgtaaattaaactaacctattttatttaaattccagtccaagagcgggatcagggcgaatctagaggcggatagaggctc

SEQ ID NO: 9634 - DNA, 652 bp, Gossypium hirsutum
atctctgtaaaagtattatagaggcccctgtactataggcaaaatagtccctatatattagataaaagagtaaactagttctttttgttaaaattttattattttttactgttaaaaattgacatgactgacgaaataaccaaatagttacatgtggcatgccacttgtaccttatgctgacatacaaaaaccaatttttaacagtaaaaatggatagaattgttaactgacggatgaatttgcactttgatctaacctacaaggactaatttacccattttttagtagagggggcaaaatacaatttgactcctagtacaagggcttctatgatacttttacccactgtctcacgctgaaatgcctgattcaattactgtaatgaactatctgaccctagatgcttttcgataataaacattgtaaactagaaatatcgtcccataaagtgtatctacttcattcacttttcaataaaaggacattgtaaactagaattaccgtcccataaagtaaatccagctaatacaatcgaacttaatctaatcaggtttcgtaaatgagattttatgatgttaagtgaatgagtaacaatggattaatataggaaaaggaaaatacaaggttaatatattggcagtgcaaagcgaa

SEQ ID NO: 9635 - DNA, 464 bp, Gossypium hirsutum
  misc_feature (399)..(399): n is a, c, g, or t
  misc_feature (401)..(401): n is a, c, g, or t
  misc_feature (433)..(433): n is a, c, g, or t
tgaaattaaggggcagggggggttttccaagtggagggcccacaaattggggggggcattggggtatgaatataagaggcatggagggtttaccaagttgatggcccaacaagtcggctggtcattaacttgtttttatttagtagtactttgaattccaacatttgatattacaagtccacccatttggttgtgtttctttttttttcaattgaaatgtatgtttccactgccactgcactccgtttgaacactgcaaattacataaaataaactccccttctatctaattattattaaaggtctccttgcaattaattagcaactactggaaaaattttaagcatttgaaacccacgcattaaaatgcattggattgtggtttgcaattacccaacntnccaccttttattttttttttttgggaaatccnaggattggattggggtttgcaattacccaaa

SEQ ID NO: 9636 - DNA, 622 bp, Gossypium hirsutum
tcgggtaggggtgttacattttattggtatcagagcccggtttagccggtcctcggaatatgtgtgaagtgtaaagtgtttagaaatacatgccatataaatctgtgatagtgtgatgtgtatgatccgatctaatctttgttatttttatagatactctccgattataaagatgtcaaatttacctgaacgtactgatcaagaagaagttaacagtagagcacagaattctgaacaaagagcaagcagtgatgttccgatttcccaaatgcgagagcatgaattaaagaatatgatttatgggattatgaatcagtggtatactgaaatgaggcaagaaagaaatcaggctgaaccacctcctccccctactgctccatcgatggtacccccggttgctcctccaccttctacaacgactgaatctagtaagcgttctccattggaaaggcttagaaaacttggagccgaagaatttcggggaaggactgatgatgatcccgtcaaagctgaatattggttacagagtttgataagaatttttaaagaaatggcttgctcaccagatgactatttgagatgtgctgtgtctctgttgaaagaagaagcttatagttggtgg

SEQ ID NO: 9637 - DNA, 597 bp, Gossypium hirsutum
atcagtcatcaaagttgcacctggtaacatggagcttgttgaggttgctcctagacttgacaagctcaaatcaattctctcagagaatctttacagctctgatgaagcgtcaacggcaatgggggatttatataaatgggatgatcttataaacaaggttcaagctagcgatgatgaattaaaggctggattacaagctctttcagccgtggagattgatggatattggagaattgtggatgagaaatacatggacgtgattcttaggatgcttttgcataattccgtgttgaatgactggtcgctggactcacttgttgaagataaagttgtgagtgtattggaatcggatggatttccacgcaaactcgtgtaccattgtttgaatgtctatggtagtagggtggaggaggccatggacggaggtgtttggagactggatgcaagacgagtatgcgtgcattttgcaaggggaatattgagagaaggaaagaggaagatggagagtttcatggaagaatggttgcggatgattccagaagaaattcagcccagttttgatttgttagaaggtgaagtgttgactgagaagcttgg

SEQ ID NO: 9638 - DNA, 523 bp, Gossypium hirsutum
tctgaattagttattagtgttagaatagtgatctgaaggcaagttcggagttttctgaacaggttctggctgaagaaggaaaagccaaggctattgcctttgatgaaattgacaaggctcctgaggagaagaagagaggaattacaattgccacggtaggtaacttttaatactattgctctcttgaattgtttcccccctgcaaggttatcacgcttgatttggttttgcaggctcacgtggagtatgagacaatgaaacgtcactatgcacacgtagactgtcctggacatgctgattatgttaaagtaagctgttaacttaatatggtaaatcatgtttccggaatcttttcctgcataacctggctggatatgttgcagaaatgttgtacctttcatgattaagaagcatgctattttatgtaaatgaaactataagtgttttctttagggggatggggatactagtttttggactttctaatgttctctcattacaacttcagtattacttctgctgg

SEQ ID NO: 9639 - DNA, 584 bp, Gossypium hirsutum
cagacaacatattattaaaagaatacaaatttctaacacccatattatcgaacactttgcgggcgccaattaaatcgccgcaactagaatacatgttgatcaaatgattggataaaaaagtaccgggctttttcaatccggttagttttaaatgaaggtgaaggaatttgccttctttgagacacttggttttggcgcattgttgtaagagagaagcaagagtttgaaaaggtaaacgaataccctttcttgttaagagctcgagcgaattggttgcttgtgaaagacgggattgggaagtgatattgagaaagggtttcagtagacaacgagggtatctgcgattcgaacgaaatggggagcgcattgggaagagaaaccatgtgaggatttgaaatgggaaaaagtgggtttttcgttcttcttcatgtcagcttagctccaacgaggcatttcgttgccggttcgcggtgaacggcgtggctgttggtttcacggggcaaatttgaggcatctctgggtccattgggagatccatgttttctagttgtcgaaccaaacccaaaacaaaccggttcggctcc

SEQ ID NO: 9640 - DNA, 502 bp, Gossypium hirsutum
tctttaaattatataaatcgttcatgtcttgtcccttaattttttatgtttgtctgccccttaatttgacaatggatgtgaaagaaagcagtatatgtttttggtgaattatcaaatcttatacaaaaggcaacattatttgtctagaaaaaaaaatcatttagggtttaagcaaacttcaatatccaccatcaattatcgaagttaggcatcctaaacctatcagactacctagattctgaattgaagactaaacactccttgcactcgtaggagttgaatgctgaaattatttgacttatttaaactttaaagtggatcctgtttgctgtgctgccgaccataaatttattcatatcttttggcatttggtcaatgtttattattgtttgtctagttataagactggtgtaaattaattcattcatcaaaaaacaagaataaaattttgagttcaaatattgcagacaaaaaaaaaatggggtttaaaaaaagttggccg

SEQ ID NO: 9641 - DNA, 672 bp, Gossypium hirsutum
gagtttcattgtttttgagttccattttttgtaattaaatatttttcctcaataactggtgttaaaaaggagagcgaaaaggttgtaatattctcctgcacatgtaattttctaggcttaggcaactcttcttttagcttttacttttttagatttctcaactttactagtttaaatttttatgttttcattgcatccataaagttcttaatattttaattaaatttgatatttaatcttttaaaaagacaacagagtgctgcattgtctttttagttaaacattacacaaatttaagcatttattcgcatggaacagttctttctttaattttatttagttatactatttatattgatgaagtcttgagtgagttattattagttaataggatgtgcaattaattaaaaaaaaaatcaaaactttcagaaacaacaaactttattacaaaggtatctatatatttcactaattttatagtttttaattaaataattataactttaaaaaaaattcaaaacgaattaatggttaagataaagtgccgctcaatccttgtcgttaaatttaatatatttttatattttttctgctcattagatacttttaccttttcttacctttaaacttatgtaaatacaataaaaaattaacctgtctcatgaacttgaa

SEQ ID NO: 9642 - DNA, 653 bp, Gossypium hirsutum
  misc_feature (595)..(597): n is a, c, g, or t
aaactataatcaaatttcgtctaacaatagcaggcagtacatgccagaacaaatctaagcacacaacatatagttcatgcagtaaattgaatcttttacacttgcttttttaacaagtacaataaagttaaatatttgactggttaggtatctaagggattgagataatactcttgagcagcaacaataggcatgcgaggccttccaggaacccggcgaattaaaacagaagtattttttgggattaacattgcttcgtcaagatattctgaaattgaaaagagaacaagtctataaaacactagaaacagactaatccatggcggacaaacaattactaaatatccattcaagaaacaaagtgggccaacataaagatatatttggctaaactccaaattgacatttctatgctaaatttatcaaaaatgaaaactccctccaggaaacaaaaaattctttctattgacttggttcaaggaaccagtttgcaacccgacttttgaatttagaaccgacctccacgcactcaaaatacagaaagctagtcatggttaaaaccatctacacaagagaaactctacttgaaatttgnnnaacccagtcgaagatacataacaaccaaatttgaaagcttaaacaccgacgagaac

SEQ ID NO: 9643 - DNA, 512 bp, Gossypium hirsutum
aagaaaagaaccaaacagtactaaaagtgaagcatctgtctgtcacacaaactccctttttcaaggcttaacacctaagtaaagacaaatctcaatattaattattaaaatgaaaaagggcaccatctagaaggcgcttccccctctgccacgccaaaccgcgttttctgccgtcttagaagccaacatcattttcatcttacttttttaaaaaccaaatgcaagataatttagtggttataatttggaaattagatctaatcaaaatccaggattttagaggaaaaagttcggtatttgagataaatttaagattttcttttttagttttggtaatatatatttttactgcccacaatgacacgcaatctttattctacctgcttagtgttagactcccccaaattcactcactttctacgaaatttcccatttctcccttatttaacactcacctctttacctaatcttttctctctttattatacttctctttttcttttgctttctct

SEQ ID NO: 9644 - DNA, 639 bp, Gossypium hirsutum
aaatcttttatttgttgtttgtagaaatcaatggaatcaactctttcaccccatagcccgagaaaacctatctgaaagtggaaagcattcagggcatcaaatgaccgggtccatgaaatattggacaaattgtaagttgataaaaatctcaaacaaaaacataaaaataaccatgaaggtctgtataagcataaactaccttttttgttggtctcttctccgggtttctttcaaacttcaattgattatagtccagccaattttgaagcctatctcttttcctcaccagtgaagcgaatttgtttgcattatatactgcctgcataaaaaaatgcagaaactataacgcgccatgtaaagccccacaaagatggacaaggatgtgttatatgtaaattatacatttgattacctggtgacaaagataagtatcagggtgatttgttttaaagaagtggtctagagaatctgctattgagtgacctggaatctgcggcacattcctcacagctacctgcaaaattcaccaaaattttacccacaaatgtttgaataaactatttgatagcaaatattgtaagaagtgggactgacatggttactagggttattcaagtgaataaaagaaaaatctatcct

SEQ ID NO: 9645 - DNA, 425 bp, Gossypium hirsutum
tctaaaatgaaataaataagatatccgtcatcattctaactccgcttgtaaaatccgatcttctttaagtttcgaaaagttatatttctttttgaaaaaatatgtgtatatatatttcttaaagtaagaagcaaaaggaattttttttttgtttgttccaaaaacgaaagggaaattttatattctacaagtagaacaaaaaggattgagaaatgagataaattatcataagaatacaccagaggaaagagagagagaggggctagcataagggataaacatgtatgtatttgtttgtgtctatacattcatacatacatgcatatatatgtgacatgaaataacacaagtttgcaagtgtaagtcatatattttataagaaaaaaaaatcaacaacaatattgaagaagcaaattatgtgagtc

SEQ ID NO: 9646 - DNA, 460 bp, Gossypium hirsutum
atgcagcttctgtcctagctgatctattcagtacaagaaaagatatatgcgatagtcttgtagctgatgaaattgtacaaccttgcatgaagcttttgactagcaaggctcaagttgttgcaactcagtctgctcgagtgttgggtgccctttctcacccaagcaagtctaaagctgctaataagatgtcttacattgcagcagcagatgtcaaacctctaattaaattagcaaaaacttctctcattggggctgctgaaaccgctgttgctgccttggccaatctcctctctgattctcatattgctgctgaagcactagctgaagatgttgttttggctttgacaagagtgctgggaaatggaagtttagaaggtaaaaagaattcatcaagggctcttcatcaattactaaagcattttccagtcagtgatgtgctcataggaaattctcagtgacg

SEQ ID NO: 9647 - DNA, 603 bp, Gossypium hirsutum
  misc_feature (369)..(370): n is a, c, g, or t
  misc_feature (373)..(375): n is a, c, g, or t
  misc_feature (404)..(408): n is a, c, g, or t
  misc_feature (417)..(424): n is a, c, g, or t
  misc_feature (428)..(429): n is a, c, g, or t
  misc_feature (431)..(431): n is a, c, g, or t
  misc_feature (436)..(436): n is a, c, g, or t
  misc_feature (442)..(449): n is a, c, g, or t
  misc_feature (451)..(451): n is a, c, g, or t
  misc_feature (453)..(456): n is a, c, g, or t
  misc_feature (460)..(460): n is a, c, g, or t
  misc_feature (462)..(462): n is a, c, g, or t
  misc_feature (470)..(470): n is a, c, g, or t
  misc_feature (477)..(485): n is a, c, g, or t
  misc_feature (487)..(487): n is a, c, g, or t
  misc_feature (489)..(493): n is a, c, g, or t
  misc_feature (496)..(500): n is a, c, g, or t
  misc_feature (504)..(506): n is a, c, g, or t
  misc_feature (508)..(514): n is a, c, g, or t
  misc_feature (528)..(530): n is a, c, g, or t
  misc_feature (534)..(558): n is a, c, g, or t
tcaagctgaaatgaacatctaaaattcatgggtacttgactctatgcacggcatatgtatatcttgatgtttggtctggaattgagagatgtgcaaaaccttaaaatgaactttacaattttagttatcaaggaagcaaaagtaggaaggttggtttaattgttcatttctggaaatgatgggagttctgcttaaaacatgggttaaaaatccattcatcttctaatcataacacctttgttatttcgtacctaaagaaataaaatctgcaaccaagtttccatatattgaggaatgttacaggccttgttatttccctgtccttgaatcagtgacataatgatatacaaacactgcattcgcaagagnncgnnnggtttaagtggggactttgagcgtgattnnnnnaatctattnnnnnnnntgtnngntgtgntgctgnnnnnnnngncnnnntatngntggatcangtgcatnnnnnnnnnantnnnnnctnnnnnccannnannnnnnnatatgtttgaatannntttnnnnnnnnnnnnnnnnnnnnnnnnnctcaatgctcagtatcatcccttaaactggagttttctccttatc

SEQ ID NO: 9648 - DNA, 690 bp, Gossypium hirsutum
  misc_feature (12)..(12): n is a, c, g, or t
  misc_feature (14)..(14): n is a, c, g, or t
  misc_feature (681)..(681): n is a, c, g, or t
gtgtgtatatgngngacaatttcaaggaaaaccccattttttcgggtaactgatgacatacttttctatctagaaaatcatgatcaagcacttgatgaacttctccataaatgacgagtctttccgttcatggtgtattgtaaacatgatatttgactttcacttcgtagctacgagggtagatgcggatttccaacgaacttcgatgcaaactactgtaatgcattgggttatgctactggaatcctcctgcattctgggaaaactggactgatttcatcggttcgtgtgattcttgcctttttatttctttacataccatacaaaatattttcttggagaaggatgagatccaacatcctgttttctagtgacattaaagacattagcatcttctgttcaggtgggtaatttgactgcaccagtagatgaatggactgtcggaggaacagcattaacatcattaatggatgttgagcgccgacatggtatatcaccgtaataatttgttcatataactaaaaaggacaactgatattccaaagggcacttgattttgcttgtaataagtgcaaacttagctaatatacatgtacttatatttctcatcatgcaaaagcatcaatgagactttcttttttctcactgccagggaagttcaagcctgtgattaagaaggcnttggtggac

SEQ ID NO: 9649 - DNA, 664 bp, Gossypium hirsutum
  misc_feature (453)..(453): n is a, c, g, or t
  misc_feature (477)..(478): n is a, c, g, or t
  misc_feature (550)..(551): n is a, c, g, or t
  misc_feature (617)..(619): n is a, c, g, or t
  misc_feature (635)..(643): n is a, c, g, or t
ctaatctttcagcattccgaccgtgctctgaatggcaattcagagggtgaggcaaagaatgctattcagcctctattcagtggttagtgggaatagaaaactaaacagcaacatccgtaataaacatttcattgaaccaaacaagggtttatggtgggcttacattgaaccaaacagggtgcttatattgcagatgcacaaaagtatttctgagaactttagcagttgtagactccaccatattcacagagaaggaaatagagttgctcacctcttgactcttgaaggcttcgacggagggaaagggttttctgggttgaggaggtccatcctggtgtggaaccggtggtgggtgggcccacctgattagctgtgaataaaattgttgaagcatggaggagatggcgatgttattttttgaggcccatctcttcctccttatcccctgctcanaaaaaagctggcatcctgttcttnnactgcttttccacctctgattttctctgttaattaacttttctatcaactaatgtacagatagactttgccnntcacagttgtacctacatctcttactactgcactggacgttagcctgagcaatgcatccctggttnnngtatctgttacttttnnnnnnnnngtttgttaactcttctgtact

SEQ ID NO: 9650 - DNA, 462 bp, Gossypium hirsutum
caatccaattggtccttagcaacttatttttcactgtaacttttccttgtcagcttacaatagtcgtagcacatgaagttgcccaccaatggtttggcaatcttgtaacaatggaatggtggactcatttgtggcttaatgaaggttttgcaacatgggtaaatttaagtcctgaagtttattacggtggacattttactagatacagcatcaatttgttacatgtatatcaatacatacaatatatttttcagattagttatatggctactgatatcatgttcccggagtggaaaatatggacacaatttctccaagaaattaatggtggcttgcgtctggatgcacaggagaaatcacatccaattgaggtgaggaataatcagttttcctgatataacagattgctcatcaaaattcaaactctagtttatgttatagctctatgtcaatggttatcca

SEQ ID NO: 9651 - DNA, 644 bp, Gossypium hirsutum
ttatctttatcacaagaagaaggaaaaaatgattttgtacccaaaggaataaaaaaggaatacacagaacaaaaaaggaatgaatcttgtgaacatcagtgtcgtttactcaactaaatccaaagagattcagggccaacccttgaacaagcaatcaccttttttcacattttgtttgtattgtgatgacagcaacccttaacaaaaatgggccctgctacctaacccacagcatcactcagttaaagcgaagccgtggaatttagagcccaattccctcgatccaatttctttcagtgttggaatattctttgacttcaattgggattcatgtaagagggaatagagcttttaccattatgtaattcacttcttatgttccaaaagcatgacaaaatcggaagcttcaataacaacaacttaaaacaaaatgttttcactgtggaagttccataattgaaaactaagaatctggatattaattattacaaataaggtgtatcgattagatgctaattgttaggtccaaataacattttagggtatttaatttgccttattatcaatttctagatgggtaaatgagatattcatgttcgtaaattatttgagttttgattcgaaaaataattgaatttgatttg

SEQ ID NO: 9652 - DNA, 672 bp, Gossypium hirsutum
ccggatgtggtggcttacacagcattgattaatgggtattgtaaaaatggtaatatcaaggaggcattccggctgcatgaagagatgctggaatcaggattaaagccaaatgttttcacgtgaagtagtttaattgatagcctttgcaaagatggaagagttcaggaggctttcagctttttcttcttctttttctctgttaaaggggggttttttagggtttttttttcaatttcttcatccaatgtggcaagttaactggccacatcagctagttaacttgccacatcagcggttctgttaagatactaactgaaactgttagtcaatgactgttttgtcacttttttataacgttagtgaatgttttgtaactttttgaaagttgagtgactgaaatgaaacctgagtgactgaaatgaaacttaggtgactgttctatcagctatcccaaagttgggtgactgttggtgtaatttacccttaaaaaaatcaaaatccagacatgcaaatttccctccaagttttcttagaagccaaacataacccagaaaaagaatcccatctttttgaaaagaaaagaaaaaccattcaagatctaaacttttccttatcctttatccactccacctatgtcatcacccaactacacacacaagccaagttaaaaac

SEQ ID NO: 9653 - DNA, 427 bp, Gossypium hirsutum
  misc_feature (7)..(7): n is a, c, g, or t
tcattgnatgatggcttgcgaagggctcatttttatttactttaccaaaatgggtaagttcctacaaatgtagagtttgttttctttataattggtgtctataatatcccttatttgatccgataatcaatgtgatgtgaataagtgatgtcacattgacatgttctttataattactaagtttttttttataagaattatatttaatcaattcaataaaatctcttaaaactatatgtaacatttttaaagttttaaacacatttaaaaataattttcttttaaaaaaaacattataacaggtccaatttgtccagcccgttataaactaaattaaaaaaccaaattaaataaagtccaaaataaaacagtccagtccatttacatttaaagtccaataaaccccaaactccacacaaaggccgag

SEQ ID NO: 9654 - DNA, 491 bp, Gossypium hirsutum
ttagcctgtctctctgttgcaattcctatatggatccgcaatggctaccaattttgggttccgcaagttcagtgtgcaggttttgccggaaatcatcgacattttgggacaaaggaggtttgttctgccacttatctttatttcctgccagcaacattgttttagtgctcctccttaattcagagtcatcaagcatctttcaacttgccttcaggatctttcattttatggattggctctgttattctttcacagtttatatgactagatttttagcttttggcatacgatcaatctattggttttctgcttgtaattattttggtgcaattgttaggggaaatatatattaagaaaagttttaaactttaatgggataggacctcaagtagtgcaaacagaaacaatgaaagaaaatcaaaatggttgctgaaaaccagagtaaaaggaaaaaattgatgtacaattgaagttgggataagaacactaag

SEQ ID NO: 9655 - DNA, 538 bp, Gossypium hirsutum
tcttgagagattggggaacttctgaggtagtagcagtggggtacttgtaacagcggtgcagcagtgcattaaccactgcaagaagtctctcctcaggcagagtaacaaaccttgaaccaatttcggttaagagaacctgtgaagaagtaaaggcttaattttataaaattaaatagagattgactgaacggtgtgggaaagagcaaacatcacagttttgatttcatgggttatctatgtttaacattagtggaaaatcactttaaataaatgcaggtagctggtcatgaaacagaatggtccttcacttttaatcaagctccactcttaatattcatgagatgcgtagcagtaaactgaattctggtttgttatgaagatctgatgtatgccaaatcataaaagggaaactaaaaagtttagaacagaatttctcacctcaagctcaccagccaagttagcatgcttgcttctcaaggcctccattatatccttagcggcatcaaatgcactggcagcagatgcaacccaacctaat

SEQ ID NO: 9656 - DNA, 585 bp, Gossypium hirsutum
  misc_feature (531)..(531): n is a, c, g, or t
  misc_feature (534)..(534): n is a, c, g, or t
  misc_feature (541)..(541): n is a, c, g, or t
gacgtttatagacgccaatccttgatcaatcaagcttaattagactaggagttaaaaaaactagtgtacagagatttttaccaggaggatcttgattcttatagaaattttaccctcccctaatcttttaggtttgaaaggagcagcctatagcttttcagcattgtagctcaggtggattctgtttccctcctctgcatgagtatcaatttttatctgttgaacttttgcttctctatttacaattttagagtgtagaggaaacaaaataaaattggaccgcttcgatagtccccaatttttttttaaaattaattaggttgcatgcttaattaattagttttgaaaatggagttcacatttctggtttcaaatccgaatctagcatttttttgtcttctgattttggcggctataatcgactatattttgttaaaagaaaattcctttgtctgcgcatatgggaagagctctttgagtcaaaaaggcacatgatgtattgccttctaattccatggtcggtagaagacntanaacttgnatacaaattttacaagaaaaagaaaacaaaactaactgtatata

SEQ ID NO: 9657 - DNA, 563 bp, Gossypium hirsutum
ctttcttaggagccgagctgcctcgttggtttgtcggttcatcaggcccgttgggcaaatgcggcgacgcatgcgccaatgcttcccgtatctgccaaatgcaatcgttccctgatagtaattatgagcagtaaacacaaacacaatatagaaataatcaaaatattaaacaacacgagaaataataaaaataaacaaatttgttaaaatttatttgaaaagttattattgtgccaaaatttttatattatatattaaatatgattatgactattgaaaagaaaattaatacgaatagatactaacacaaacatacatgacacaaaagattaagagtgattgtaatagtgtcaatttcgccattttcatgttttcttaatgcatttatattagttttataccatgtttatattcatgttatttttatgagtttagaacattaaattatatttttacatgctaataatttatttatatagaatttttattcgtttttggatgcatgtcttgtttatgttatttttgtgtcacattgtgttttaatgagctatcatggtggctta

SEQ ID NO: 9658 - DNA, 644 bp, Gossypium hirsutum
gttgttgagtctgcttagccgccgagaggagtagagcagccacctaggggccgacgacaggctaggggtggtaatggtttggagcaaggtcagagagcacctagtagaggagtttggccgactgaggcaaggcagcctgcacttgtctatgcggtacgtcgtcgtgaagatggagatgctccaaacatcatctcaggtacattttttattcttaatgtaccttatgttacactgatagacataggctttacgcaatcttatgtttcatgttctgtgtctgagaccttggggattttgtatgagagtaattctagtgagatttttgtggtgagtccgttggagcagaccattagggttagtaagttgttcaaggacgttccgttggaagtccaagggataatatttttggctgatctgatgaaacttccgtttggggagttttacctaattcttggtatggactggttagtgaagcatcgtgtaagtctggattatgctaaaaaaaggatggttctgaggactgaggaggataaagaggtagtcctaattggagaacgacagaattatttgagcaatgtgatacctgcgttggtagcagagaagctggtgaggaaaggatgtgaggcatacttggcctacatcag

SEQ ID NO: 9659 - DNA, 682 bp, Gossypium hirsutum
gttggtgaaagttatttggggaggaaaagaccagtacatgagtgcacagatgtgcaggtatggttttttgccatcaatattaattatgctttttccatgcaaatcctaaatctgaaagaccactaacaagttcacatataattatcaagtgaacttatgcaattcaaacatgagtgtggttcacatgggcaccatatgacatttaggcggacccgtagaaatcattgttggcatttttataaccgtagatgacatgaaccctttcctggcagcatactattgaacttgagtggtgagattgtagtctggcattgtttctgatgtgcagagagcatcaccattactttgtctcatattgtttcttgcacaagggaattgtttaccttccatgaatggctcatagaagcctttcttcattgtggtgataacagaaacatatatgagagatattaatgttttgctttttcaacttattgatatctctatcatgcattgattattgtgaggtctaactagatattatgatatcttttttggggtggactagagtaccaccatattctgaagtttataattttatcacgtctctttatttgggaaattatccatattaatcactgaatcatcttttattttttctgttttgggttgtgtgtaagtacttgttcaaggtcatctaatg

SEQ ID NO: 9660 - DNA, 608 bp, Gossypium hirsutum
catcttcttttctcgagatgaccctcttttacacttaggttgaaattgctcgtcttgtcttgtcttttggttcaaccaataaagagtccaaagagataatatttccaacccttaggcttggtgagttctaaacaatagtcctatttcaggttcttgtattatttagaaacttccagagtaatatgcagaacttcttttgtgaaagtattattggtccattaatcgttatttcaatgcaaaatgctcgaaaaagatcaaaacaatggacaagaaggaaattgattgcgagcatagctcgaaatgaataaattaatcaaagtttgcaaatgcaataaggaggaaattaactcaaaacaaataagttaatcaaatatagaaaattcaaaatgggtaaaatgaaaaactaggtgccccagatatcgcagcttgagcttctctgtaccaacttcttaaggacttttccgagctcaatacgtgtttaggggattcaaagtactttgttgatgccccaagatgtagcatacttcttcattgttaatttaggtatagcaagactattatatgccccacttcgatccaaatttgagccaccctttcctggtttccac

SEQ ID NO: 9661 - DNA, 523 bp, Gossypium hirsutum
gaggagagttggaagggtatggaaggaggatgagagcagatggcaaatatgattgggttgacactttgaatattatcactaacccactccataggcgcagccctcatctcttcccacaactacctccttctttaaggttctttccctctttgctttaagcttctcataaagtgatgtttacttaatatttaatggatgtcatcatcatcatgatgcagaagtacgatggagtgttacttatcggaactccaaaagcttgccacaaaacttattggtttcatgggaaaagcattgaaaattaaagaaaaggagatgatgaagttgattgatgatgggatgcaagcggtgaggatggcatattatcctccatgtccacaaccagagtcggtgatgggtcttattccacactctgatatgactctcctcactatcctacaccaacttaatggagtggatggccttgaggttaaaaaaaatggcctttggttccctttcaacgtcaacccagatgcttttgtggtca

SEQ ID NO: 9662 - DNA, 600 bp, Gossypium hirsutum
  misc_feature (549)..(549): n is a, c, g, or t
  misc_feature (573)..(573): n is a, c, g, or t
cataacgagatcaaaggcccgacaatgcggtccaaactaaatgggaccattcaagagcttgttagcaaggccttagatgcatacacgagagaacaagaaaatcaagattcactttcttgttttcaagaaaatcaagaaatcgaatcttggcccaattttgctgttcgaagagatttcaagaatcaagaaaatcaagatttcaaatcttggaaatcttggtccaagaaaccaaatcttgcagccaaaacgcattggatctccattacgagcgtcaacgacccaattttggtaggagatggatcacgagcccaaattcttgaaggcgaggcccaataaccaaaatccagcccaatcaagaaatttcttcatacttagttgaaaatcaggccaaaatgtcaaagggcccaatttgtaaacatcttacttgtttaatttaattttttaatctttaggagcattacatgtaaaattcggcccaaaacagcccatataagtgcatggccgaatttaccttgttattttattaattaggtttaattttttttaatnacctgggaaaataagaattggtgnaaggccaataaaaccttgggccacccc

SEQ ID NO: 9663 - DNA, 545 bp, Gossypium hirsutum
tactagtgtgatatcttcttcagctttgccaattcaaagttctggtaagtaagttttctgcattctggttttgttttaattaagcaaagacaacgtttgttattgttgttattattgtcttcggatgaatcgttggaccttagtagttatttgtctgtttctggtatttgttgttatatggtggtattagtaactggtttggtggtgagactgagatttgagagagaaggaaaatgaggtcatttcttgaactttgaaattcaatcttgataaaagactaaaatgtttcaaaagctaaaggaaaagagaagtggatttacagaatggaaatcatgatcgattcttgctttttgctctaaagttctttttcacaaagataagtcttttaactttccaggctactttgtatttagactttttaagtcaggtcctctaatgttgtatttgccctctatcttggatcatgttatagacttgcctgaaaatcccagtcctatcatggaagaatctctggctccagctccagctgcggcaccaacaggttt

SEQ ID NO: 9664 - DNA, 658 bp, Gossypium hirsutum
tttattttctacagtattaatgagattcgaatacacatgtgcttcaacatttataaggctacctcttatgaaaaacaacactttgaaacctaccttccagtataaagaaatatgagtaggttgccaaaagatgcagccttttaaagcccctaacgttgcatcaaaccccaagctcgccgtgccaatggcctctgaagaagaaaggagaaaacagtattgagtttaaacagagtccaaactcttcctaggggaagagcacaaagaagaaaccagaacctcctcagaatcaccccatctgcaaaaagcagagaatgactgtaaacgagcccagatgtactgaccacccactgcagcaacacaataccagatcttttgagcaaaagttagcccaggtccttccaaacctgttcttactgcagaaagatatgcagtaagacaaactaaggatgtaggtaaggctacatgagagaaaggagagctaagaaaattctaaccaaggtaagtgctatgcagatattaggatgaactctttaaaactgacagtgttaaataaggacaaatgctccatcttctaaaatgcagtaaaaagggattatttcaaaaaggaatagatgtaattttgatacaataactgataattcagtcgctgataaagtca

SEQ ID NO: 9665 - DNA, 638 bp, Gossypium hirsutum
  misc_feature (28)..(28): n is a, c, g, or t
attttccgtttcgattcatacgattggngatttatattggacatggaacaggatggcctacttattggactaaatccaaaagtaacaatcaaagtttgctctgatttttgaggggttagatttcgacgtgttgcaccaagcccttttaggagtcattggtttcagctttcaacgtaaaagtatactacatatgaatatcatttatatcaattgataggctcgttctgtttcaatcttgaagtttcaagaagctcgttatttcattttgatatagtaagtttgaaaagtaacaaaagttaatcaagaaaaattagtttgctttcttttaagtctaaacaagattctctaaacttgacgcaaaatcgccctctccacttaataacaaattattaacaacaacaataaatataacaatctcgaagccttcgattttcgttgatttatttttgtcccatgattttccttgaaacttgtgcaagggaataatttaaaaaaaattatgtttattaacatctactgcgtgtcagtcacattggtacttgtagctgtaggtatcaaaaactcaatgttagcggcaacgtggcgcgttgcttcaaacttgaacagctacttgctctcctaatctttgatactggttc

SEQ ID NO: 9666 - DNA, 602 bp, Gossypium hirsutum
actttctgggaagggcattaaatacccaaccaacatatttattttggccacttcactctagagggatcatgggccgagtttgagccgggttcagataaaattttaggcccgttttattagcccggatctgactcggtctggcccaaaatataggtataaaaatttatctaaacttggcccgaaaaaattactaagcccgagcctaactcggcctatattaattttttaacttatttcattaaataaaaaatttaaaacaaatattaaaataaaaaaacaaataaaaaatgagactaaaacaattcttaaaacaatacacaaattgaaaatataataaaaagtgattatattaaaattgaaacaaattagaactaaaataattaactaaattaataataaaacaaaagtatatttgattaaatatcaaatatatatatttaatatataattcgtgccaggtcaggccgagtctggccaaaaaaaattttacctgaggcttagcccattttctaaacagacttcattttttgacctaaacttatatttcaaacctatatttttatctaaatctttttttttcaaatagattatcgggccaaact

SEQ ID NO: 9667 - DNA, 560 bp, Gossypium hirsutum
tctttgaggagtgcttagttatatgctttttatgtttcttcgcgcttctttatttctaagtttttagttattgtcataatttgttttactttctgaatttaagttcacgtatggttttatcgtctaggttgcttgattttcttcttctgcggtgtcctgagcttgacatgttttcgtcactaaccgtgttgaattaatgacactgcgtattattgcaatctgatgactctctgtttgctagtgtatacttttttatttatttgtttttcttgtctatttaaatccttctttcggaaagagtactgtagtgtactatgcctctctttttctgccactggaattgcacccaagaaactaaaaattatcactaaaaatttttgttttcttgattttgttaatgctggtatttcttaatttatggaggagaaatgcgttttatttttttattttttgtggattgaggccgttggccttagccgttagatagtcgactcgcagtgaattagggctttgctctatgaaaaacagattatatggttaaattgtcaaggggtagtagt

SEQ ID NO: 9668 - DNA, 422 bp, Gossypium hirsutum
tatgagattgttttgttgatgaaaagtggagcagtaattagtaaatcactgttaaaattgtaaaaattgtaaaaatggttgttgtagattgaatatacgatccttaattaaggatcaaaattaaattcaattttatgttgatttttactctctttttactgagattctttatatctggcacgaatatgttttggaacatgtctagcttatactacaattgtccagtgtagcatgaataagatatgcctatttgcaagcacaaatttaataagccatagggagagaattaacatgtatctatgtacgcaagtgtaaatgtggcagatttatgaataggacagcattttggcaactattttttcgtgccttctctgttgcaacctttatcactagaactagtcaacgcttagaaatttgtatgg

SEQ ID NO: 9669 - DNA, 622 bp, Gossypium hirsutum
aatggaggagatggtagtgaagataaaaaggtagattcacctgtgacataagaagagtcgaagtatcaaaggagaaagaagaaaggttggggagactgtgctaggataaaatgcttaaggttggtgaaaagggagaaaaagatcatcctatcatcgtgtgtcttgaggtatgtataaggggaaagtccctatgcttaatggcatcatgtcacaaaaaatacagatggtggttattcgttacacattggttttcgtcaagcatggtactgctttgacattcctttgctgaggtaataatacgagattgttatatctcagtagtcctttaatagtccccttttggggataagtgtatattcactaatatcgagtagcctaaaagagagtctgctattaaaggatggcctgatggaggtgtgaagcacccaagtagctagtcaaacccaggtggtgtaagacaaaaggtcatccatgagtacttctcaagtcacttctcacattatcacatgtcttgaccggatataacataatttattacaaattcaacatttgatttccataaaaaactttttaaaataaaattataaagtaaaatttaaccgatctctaaatgcccacatat

SEQ ID NO: 9670 - DNA, 620 bp, Gossypium hirsutum
tatgcagattatgcagatctcagaaatgccagttcaaatgcaaaggtttgattttataatcagctgacatatcttgatatagttacctcaattggtaagtctgatatgtgagtggtatttgtagactggtggaacccttccaatcacagctagaaccttggaaaccattattcgtctgtcaactgctcatgcaaagttgaagttaagcagaaaggtaatgatttcttaaaaagaaagcagccctctacttgtaatctgatggtattgggatttgtggccatgttcatatagttttcttttctggaacttgcttttatttctctttaatttccatttttattctttagggtcaaccataattatggtgatttcatgtttgtctttgaattgcatgtttgcctcttgtggctgcttcattatatttccttttgggcttatgtgtttattcacacttcgattgcatgataatttatcatggcagattacgaaagttgatgtcgaagctgctctgaaagttctaaattttgctatttatcataaagaattgactgagatggaggatcgcgaacaagaacgggaaagagaacaacagagaaaacaaagagctgatcgtcgagggt

SEQ ID NO: 9671 - DNA, 607 bp, Gossypium hirsutum
ctttatatgtaaactgacccacaattgataatgttgaagcatagaaaataatatggtgaaaactttcgattatgcaaaatttcaaagactgatgtaggccttcacttttgctttaaataaagaataactttgttacataaaatcaatgttctgaacacaagtttcaactaactcggatgatgatgaaagctcaactagccttaaacaactttaaatctatattcatgtttttgtattaaaagcttttcaaagttcattgagattttgatattagtaccaaagcttcttcttcttcttcttttttaatatatgtaaattatttgagcaaaaatggaaaacatgggaatagtattaacaaataatatattacttctattccatttcttaagcagaagacatacaatatggtttatacatcactcctctgtactggccccaacttcaaagttgaaacaaaacaatcacatatttatacatcaaatatgtacacataataaagtagaaagaaaaaaaaaagcaaccctattaattacaacaaaatgcaagcaatatggaagttgaacctttctatttcaacttgttggaatttgaaatctccaccacccct

SEQ ID NO: 9672 - DNA, 504 bp, Gossypium hirsutum
  misc_feature (491)..(492): n is a, c, g, or t
taaaaagaccattttgtaaagaagatataaaagtgtcataaaagtgtgatttagtggaaattgtgggctactattgttatgaaaatgattcaggtaggcttaaagtacaaagaaattgaatgaaaatcattttacgagcttagggacaaaagtgtaaatatgataaagtttaggggcaaaaacataatttttccatagtatgatttttggatcacattgactaatgtgactaataaatagactaaatgtgatatgatagataaagaaaatgaggttcggacctagaatggaggaaaaataagaaattgacggttaagtcctttttcaccatttttggtatcgaggtaagttcatatggcaatattgtacttgaatgttaatgcttgatattacatgaattgtaagtttgtgtgtaagtaattcaacaattccattattatgtatttaacatttgatatcatatgatatatgtatgtatgctctaatgaaanntgtttgtgatga

SEQ ID NO: 9673 - DNA, 624 bp, Gossypium hirsutum
tctttcttattaagcaagtgttataacacaaggattcatggccgaaacctatgcataacattattcaagatttaaactcttaaatgtcattagcaaataaagccatacacacacaacttataagtaaattccatccttgcaaagcctatagttcactcggccactcaacccacaacctatcgaaacttcaattcaaactcattagccgaacatacatatacttataataagcacatatgacatcttcttcaagacacattcggctatggcataatttccttataaaacccaattaatcaatccaccttaaccgaaacttaactcatacaaaacctatcttcaaaccataaaataggtagaagttaaactaatcatccaaatggtgcataagtttttccaagaatgacattgaacttaccttactttaggtatccaccttagccgaattttcttccccaaaggcttttcttcctcttctttctctagttacggcaatggaggagaaaacataggctaactttggtttttcctcccactaacttgtattttattaaccttattcattatttcattttgtaacataaactattagcataaaatagttataatattatttactccata

SEQ ID NO: 9674 - DNA, 419 bp, Gossypium hirsutum
ccattttagatacatgcttatgcgacttcacatttagttaggatgtagcggagaaggatttttgttctttttgtttcagtgctgtgttgaaactaagctctttctttcatgcttctgtgttattttgatgtccgatgccatgtttcagcttatatgtcgtatggtctataaatatgtttattactgcaatttggtgcatccttgttagttgaagtctcgtttagccaaaaccacacaaactagctctctgcaatattgttaacaatcttacatatttccagacaaactggcgaaggcccaagggtattgactctcgtgttaggaggaagttcaagggatgcactttgatgcccaacatcggttatggctcagacaagaagactcggcactatcttcccaacgggtttaagaaatatcgt

SEQ ID NO: 9675 - DNA, 647 bp, Gossypium hirsutum
ggtcgtattggcttctgacactcctcgtgctaattgcctcgctgctaccgtacttcacttactcggccatccaaatgcggttcttcccattgtatcatcagatgatacagtggattcgaagtgatggacaaaccaacgaccctgagtattgtcatatggtgcgacagagatcactaagtcacacaacagtaggttatacggcacgtttcgaagcaaaatcgaagagctcgaaagagagagctcgggatcattgatgatcgtcctggctgaaacgcggattcattcatagacgggtgagagaatttaaactgcaacttatcgtattacagtggttatttaaatccttttgtttttatactgaaaaattgctgtatattgctcctgctacaagagttccttttaaatgtacataatacgcagaagatcaagatatataggctctgagttgtatttctgaggccatatcacattttgcagctaaacctgtaattttatgaaagatgtaccttttatacagagagagagattcagttcagtatgattggtgttaatatttattaatatagtgtaacttacaaatatactttaaagcttctattgatttattaatttaaatttaaagtagaatttaaggcaccaaccttaat

SEQ ID NO: 9676 - DNA, 369 bp, Gossypium hirsutum
acggtgtgagcatccaaatgtaagttgtttatagcctccatgatatccagcaacaagaattccctgcaaggacattttatttcaattataacttccagttcttttatgcttactttcacggctggtgcaaggccatctttcggaatagtcctatttaattccgaaccagattcatggaggctttcatcaatgtcacaggccttcctcttgtttatccaaggcttcttgacactgtcaacttttctgttttcgtaattatctgaagtctgctccaccacatccaggcaattccttctaggccttgcctcaaactccattgaattcttgcaagattccaactcttctatccttgcttctagctctttcagg

SEQ ID NO: 9677 - DNA, 603 bp, Gossypium hirsutum
cattaaaggagattcaagcaacttagttgatcctaatttttgcaattcaactcccaatcatttcatttatttttccaacttaattaagccttctagaagtagctattaacgttctccatgcatggaaagcttcaaggaaccttcctccaaaattctagaattttcaagctactttcttggctcttaagaatgcctattcgattgcccatgtaatgcctataaattcaggctgaaatcactttgtagaggacttttggaacctttgattaatttttataacattttgtgattttttcaactctattatttcgttttagactcaagctgacttatctagcttgccagtggcatctgtcttgtttctttgaacttatcactcaatcccgagtgtggcattcaaccccaatacctttggttcctatcttttaatagatagtgggtcaaggtcatttctatcaactttccatcattttaggtgttaataagtctcgggtcaatactcactaatagtattggttcattcttaaccttaagtttacctatccattcctgctatcttcattgccttactttgtttttatccttagccgagccatcacctat

SEQ ID NO: 9678 - DNA, 523 bp, Gossypium hirsutum
cacttgcctgagctaaccgagctcactcctagctcatatttagctcacgagctaaaccttagctcaacttcagcttaggagtttagcctcagctcaactttagctcacgagctaaaacttagctcattttagtttaaactcggttttgtctttaatacattaaataaaatttgcacatattcatttaagcattaaacttgtcttatattaatatttgttattaatatgtcattgtcattatataaattgattatgttcacatagccgaattaatgcatgacattaatgtgttcacatcatgccgaatttatgagtgttcatgagatgtcttaatgacttgtttatttcatgtaggtacattcctttggacggtacaatgtatgaatgaagaaacatctcttttgggcattccacactcatgaatgaagaagtattaaatgctggtgcatgtacggctagatgcaatgtttctacaaattcatgcatgtgtcgaatgcatgtatggacattaaaggctagtcca

SEQ ID NO: 9679 - DNA, 392 bp, Gossypium hirsutum
aaagggttcagtatgataatttcaacattgatctgattaaacatctaccaagagagtatctccattctacacaggcactccatcttagaataacttttgaacttaaaacttaatatgttgtcaatagttaagcttagtttagttccaaaacctcatagttttcttttgccgaagcaccatcacctgaacttcaaatatccatctaattctaccccaacttgtagtgttctctagcctacagttcaccattaatacaagatttgtcattcccactttcatcttcttcacctctttctttatctacatctgagcaagggaaaaggagaaagtgctaggaaaaaaggggcactaaaaagcacatagtatctggataaccctaagcctacccaacc

SEQ ID NO: 9680 - DNA, 504 bp, Gossypium hirsutum
  misc_feature (60)..(60): n is a, c, g, or t
  misc_feature (481)..(482): n is a, c, g, or t
tcttccctttgtcatacacttgtgagcatttgcttgcagtacaaacactcttctataaantacaccttcactcatgcagaaagggctagtgtcaacatttggagttaagggggatggtttctctttaagaattaaattttctacttctaaaaacaattaacttagtttaaaattatttgcttagaaaccattgtattgtatttgatggtctagtactatgcaaagaaatgatcatgcaggcaactagagaagtaaatgttaaaagtgagaattgatatgaataatatgttttgattgcaaggggtttcttccagtagacattgaagagcttaaatgctaattgaatttttttataaagctggtggggctgtgaaacaagaattaataaaaaaattaaagctaacttggaaaatccaaaaacctgggggcatcataatcctgggggcctttggtttatctctggcttccaaaaattgctggnnaacggcatgcggaaagacaaaa

SEQ ID NO: 9681 - DNA, 621 bp, Gossypium hirsutum
aattgcccacaccgaacagttccggttagtcttctatttattttacaatattggagagaagagtaggagaataaaaaggtttaaacccgtgtgatttaaatgttagagaaagctttatcgagtgctgcaagactaatacaaacactactatcaataataataggagttggaagaaggtaagatctgatttatttatattagataaaaatgtaaattaattttttctattaaaaaattatctatttgtattattaaaaactggactgaataatcagatgttgacatgtgatgtgccacatctatgtcatactaatgtatagaaaccagttttaaatagtaaaaatagatataatttttaatagaatgaactatttactctttaatctaacgtataataattaatttaaccatttttgagtaaagggaataaaatttaatttgattcttattacaaggactccataatacttttacatagtaaacccaataattttaattaaaaaatgttgatgttaaaacccaataattttaattaaaaataatggaatatgatggagattcaagattaagaacacatgcatcttattaatgcatgttctcaaaataaggttaggtgctttc

SEQ ID NO: 9682 - DNA, 601 bp, Gossypium hirsutum
tttgaacctgaaactggagcctgtaaaggaagcaaatgaagcttagttaatagaaattttaacattatcaaactgctgaagcatactcaatttatttgtgtttaggatgagttgcaagaaatatagaaagcagaaagcctgattgtaacttttacctccaaaaataatgccccccttgctttgatatgttcattgatcaatttagaagtggcaacatcaaccgttgaaatgtctacatagctgtcaatgccaatgccattccatatgtcatcaattcaagtctggaaacctttcaactaactaaaggaagaagacggttttacactaaaatgctttcatatgagaatatgggagaaaggttacccttttcctggacccattcctctcacagctccgttctttccacaggcaacatcaatctggtacaaagcaacaatgagttgccagatcttaataataggtcaagcaaaaaatatgtagcaatgaaatttataacagaaacatacgcactgcactttcaggatcggcaagcatggcaaaagtgacatcacagtttgcagctacttcctcaggagaggacctatacctgcacaccaggaaa

SEQ ID NO: 9683 - DNA, 643 bp, Gossypium hirsutum
tgtttgtttgtgtttcgtagcattttttgtagattctttcctttatagatgctttagagtaaactttgtagcaaccagatttgggtgattaggccttattgaacaatatgattataaaatgagtaagagcctattaaggatactgtgatatggccatgcaaggggagacaactttttttcttcttattatttttaaataattagcctttttttcttttgaacttctcagattcgttgaataggtgaaggtgacaactgttttgttgtgtgctacaggatattaataaaaaccgtagcattcaagaagcacttgcttatgaggagcagttctttcatgatcatcctgtacttttcatctctcaaatagaattttgccttcaaggtcacctaattcccgtaaaatctgaacatgttgctttttcttgaaacctatgtattaaaggtgtataatagtgtttctaatcattgtggcattcctcaattggcaaagaagctaaatcaggttggtttatgacagtttttcattgagctcctaagtcttttaacaattatatatatcttatttcttattgcacttgttatacttctcgatttttgtgattgatttatcgctttccagattctagagcagcatattagaaag

SEQ ID NO: 9684 - DNA, 414 bp, Gossypium hirsutum
agagagaaatggcactcaggagatgccaacttattgaagaaggtgctcgagtcaaagtagctgaaacctttcaggttgctaatgaatctttggcgaagactagcactgtaggaactttagcagaatttcaggatattcagaccaaatatggagtcctggaaaaagaaaataatgaactcgaaattcaaatagaagctcaaaaggaaaacttagagagggaattgagaaaccaagaacgcaaacttgcaattgtaagatccctttccaattatatttctgtttttaaaaccatgttagagtcgggtgtgagtctgacaaaggtatgttcaaatttttggtagatttccatgtatttggaggggatttcccttcaaatatcccttcgcaaaaccatttgtttagcattggtgttgg

SEQ ID NO: 9685 - DNA, 791 bp, Gossypium hirsutum
  misc_feature (520)..(523): n is a, c, g, or t
  misc_feature (525)..(528): n is a, c, g, or t
  misc_feature (537)..(548): n is a, c, g, or t
  misc_feature (582)..(582): n is a, c, g, or t
  misc_feature (595)..(596): n is a, c, g, or t
  misc_feature (619)..(625): n is a, c, g, or t
  misc_feature (627)..(627): n is a, c, g, or t
  misc_feature (632)..(637): n is a, c, g, or t
  misc_feature (639)..(639): n is a, c, g, or t
  misc_feature (646)..(655): n is a, c, g, or t
  misc_feature (658)..(665): n is a, c, g, or t
  misc_feature (668)..(672): n is a, c, g, or t
  misc_feature (674)..(677): n is a, c, g, or t
  misc_feature (682)..(686): n is a, c, g, or t
  misc_feature (690)..(695): n is a, c, g, or t
  misc_feature (702)..(708): n is a, c, g, or t
  misc_feature (710)..(710): n is a, c, g, or t
  misc_feature (712)..(727): n is a, c, g, or t
  misc_feature (729)..(729): n is a, c, g, or t
  misc_feature (731)..(731): n is a, c, g, or t
  misc_feature (734)..(742): n is a, c, g, or t
  misc_feature (750)..(759): n is a, c, g, or t
  misc_feature (766)..(766): n is a, c, g, or t
  misc_feature (768)..(773): n is a, c, g, or t
  misc_feature (776)..(788): n is a, c, g, or t
accccaattccagataaaagaagttaaaacttaaaagtgacaaggttaaagcacagcagcttacagcatatttcatgtcatcataatttgtgtaatctacaatccctgtcatgcctgcaaagaaattgctataatatttagaaaacagccacataactttcaagataaaaatgcaggttcaacttgcaatgtatcatgttgatataaatacaaagaatctaatttgtatagccctatgattctcacaaaaccaattcagtgtgatgctacagaaatctgagctttttcaactaatagtaatggaatgaggtgttgatgcaataaatagcatgataagaattattcttcttacctccacgatcacgaaacacttgagagaaacaaacatcccccgctttgcgcatgtgatcctgatcatagggcaaaaaccatataacaagtacaaaccagatcaaacgacctacttctatgcatttaaaatacctttaagcaaagttcctttactcctccagatggaaannnngnnnngatagtcannnnnnnnnnnnttaaacaaaaccttcatgaatccatttttttagnacttttctttccnngtaaaacttcctagacatataannnnnnngnaaggnnnnnntntgacctnnnnnnnnnntcnnnnnnnnttnnnnntnnnnatatnnnnntatnnnnnnaattttnnnnnnntntnnnnnnnnnnnnnnnngntntannnnnnnnntatttaannnnnnnnnncactgancnnnnnnccnnnnnnnnnnnnnttt

SEQ ID NO: 9686 - DNA, 810 bp, Gossypium hirsutum
  misc_feature (662)..(699): n is a, c, g, or t
  misc_feature (701)..(711): n is a, c, g, or t
  misc_feature (715)..(721): n is a, c, g, or t
  misc_feature (723)..(726): n is a, c, g, or t
  misc_feature (730)..(737): n is a, c, g, or t
  misc_feature (739)..(780): n is a, c, g, or t
  misc_feature (782)..(791): n is a, c, g, or t
  misc_feature (793)..(798): n is a, c, g, or t
  misc_feature (800)..(805): n is a, c, g, or t
tgatgatcttggtgagtggccacagccacccacaccaagtgggaacaagagtggtgagaggttgaagcttgacttatcatcgattcagcggagtaatgataagaatggcgggcttatgaaaagggaaaagattgctttctttgataaagaatgctcaaaagtggctgaacatatttatcttggtggagatgccgttgcaaaggatagggaaatactaaaacagaatgggattactcatgttttgaactgtgtgggatttgtttgtcctgagtatttcaaggccgactttgtgtacagaactctgtggttgcaagatagtccatcagaggatattactagcatactttatgatgtttttgattattttgagcatgttagggaacagagtggaagagtttttgttcattgttgccagggggtatcaaggtccacatcactggtgatagcgtatcttatgtggagagagggacagagttttgatgatgcctttcagtatgtgaaggctgcaagaggaattgcagatccaaatatgggttttgcttgccagttgttacagtgtcaaaaaagggttcatgctttcccattgagccctagttccttactgaggatgtatagaattgcgcctcattcgccttatgatcctttgcatctagtccctaaannnnnnnnnnnnnnnnnnnnnnnnnnnnnnnnnnnnnntnnnnnnnnnnntttnnnnnnntnnnnatannnnnnnntnnnnnnnnnnnnnnnnnnnnnnnnnnnnnnnnnnnnnnnnnntnnnnnnnnnnannnnnnannnnnnttatt

SEQ ID NO: 9687 - DNA, 375 bp, Gossypium hirsutum
aaatttgattatatttagaaccaatcttctgtgcataaaccatgaatattatctgtattgaacttcaagaactttttaaaagaatattgatatcaaaggaaggcatgatgttatatactgtagagacaacccgtcctttattctctcttttaactcggaaaactgatactaagcaaaattccctataatgtttcgttgaagttgcttcgaaaactcaaatttctggtgatcgagtcagtcaccaattttcctgaatccaaagtaaacttgtatagttcatctgcatctcaatgcttgtggaatctttatgttgtccttcaaagcctcaaggtaagggtgtctcttttaatggcagaatttccatgtggaaaccta

SEQ ID NO: 9688 - DNA, 562 bp, Gossypium hirsutum
  misc_feature (550)..(551): n is a, c, g, or t
gctcgaaacactgagaagatctcagaaattgttgatgaggggagaaagaaagttgtagatacttgtacatcaacatgggatgttacagagacaggaaagagcatttccaagtatgtctacttcactactacattgcctctatttatttttttaaagtacagatcaactactttgggagtgacaatatgccttaaggactggagtaaacatcctgtgggttcatttctataatcaagcactcaaagataccttcagtagcatgctaaaagtttccagtcagacattttgttctctgttcactcacattcacattcttccttcagtaacagctttaaatgattgcagtataatgattaatttaggagatattatgagcctcctgtcagattgtgttggatttgccttttgtcttttctgtagatcttgcctaaaactgcatcgaacttatcactttaaacaagcaaatcttagtctagttaggtgaaaggtttttctgaagtctttcatgtcatcttctcatatcagaaactgatcaatatgagaggacatnngaagaaatgaa

SEQ ID NO: 9689 - DNA, 590 bp, Gossypium hirsutum
gagaatgttagggatattgtgttacatgattgttggggtttggaggacgatgtgtttagccttgcaagtatttgtaggtacgagactcctttctcatttccaatagcattttttcttttacttggatttatgcttcatgtgatatatccatctataggaggatcgagttaaattagctgacggtttcctgtgttagattgtttgcaatcattgattcctataagctaccttttgtttgtttcataatgcattgctattgtgtaggaaactggtaattttattagagaatagcgtgtcaacagagctgagaggtaaaaattagtggatgaggttttgaagggtttcttcttttaaacaagggacccttttagtcttgcgatttgtcgagaaaatttaagtctttgatggttgatttaatcttatagtcatctgcactaacatagcaattaaatttccggagggttcagaattggattccttccaaatgaccatgtaggcattcccttcctcttgatgctgaatttgttgaaatgtctcagtcatctgccatggcatggctttgaaatcccagtttgttcctgcctgttgat

SEQ ID NO: 9690 - DNA, 299 bp, Gossypium hirsutum
ttagttaaaagttgggaaacaatcacatcactttattaaaaacacatgtaataaattaaaatttattactataaataacacaaagtctcgatttaaaaaaattttaaattttcattgagcaataaacttattttctaaaccgaatttttctaatagagataggattgctttcccatcgatctcttcctctcttgtaggccttgtcacaacttaggatttgtaagctgtccctgtttattcattgttaggggtgaaaggggtttttgccgggtgcctatttctttctttctttttttttg

SEQ ID NO: 9691 - DNA, 1040 bp, Gossypium hirsutum
  misc_feature (444)..(444): n is a, c, g, or t
aataaattctattatttgtgaaacttgagttaggtttctagtttataaagagatttaatttttcctactaaaaaaatgaaaaagtttcattgtgtgacttggttcatattattaaagtttacactgatgattcgagaatagcggaaaagattgtgttagttaaaagttgggaaacaatcacatcactttattaaaaacacatgtaataaattaaaatttattactataaataacacaaagtctcgatttaaaaaaattttaaattttcattgagcaataaacttattttctaaaccgaatttttctaatagagataggattgctttcccatcgatctcttcctctcttgtaggccttgtcacaacttaggatttgtaagctgtccctgtttattcattgttaggggtgaaaggagtttttgccgggtgcctatttctttctttnttttttttttttgattgaggattcaatcgtagtgtattgtgaccaaccttacaatagttctttttgttatttgtttgttttgtggtttgtttccttttcttgtttttgaccagggaaggttctacttgttgagaaagcatgggatctggatcaagtatattctctgtatcatcgtggggttgcttggattgtgtggtttatgtctttgcctttgggcttgattctccctgtacttttattcctaatgatatggtgcaaacctttgactttaatctcgtcctgttttgtttcatttaggccgatctggcttttcatcatgactatgcttatgggggctcttcgattgccctttctttgtgagaccacatgatttgaagatgggtgcttgttgcacactttacctttgttttgaagggtttggggtcttgtctgttcaacctttcggacttttctctaaatgcgagcctatggggctctttctttaggcctttcttttaattttttttatgaacaaaaaaggaaaaaaaaaataaaatttttctttgattgggacccggttgaaaccaattccaaaaatccaaccccaaaaaaaattt

SEQ ID NO: 9692 - DNA, 400 bp, Gossypium hirsutum
gttgttcatggaacgagtgaattatggccgctgccctctttgccaacccttcaaacagatccggggcagaatgccgcattgtagcgaatgcaccggcaatgttagcaacattctgagaattgaactctgtaaccttagccaatgccacctctgcaactcgatccatttcggacaaaaacaacatgtcccctccaatcttggacagtgcccacgcaacgttcgacacaccttgtgccgagcattctggaagagcagtcattgcaataccaataagcattgacatttctctttgtcgagtgaatgccaacctgcgagtgcttggcatcgatactttctccatgctcttagcaattctacgaagtgcagtagcaatattcaaaggtgaaagtggcgaagggct

SEQ ID NO: 9693 - DNA, 549 bp, Gossypium hirsutum
gttcaagatgtttgcagatataacatcgctgtacgaggaagcaatttttgaagcctcttctgctagtgcagctgcaacaagaaaaagacacattagatcaaaatttaatatttctctcatctttctcaaacaaaagcagccctatcaccaagttagaaattcagttttcgatacttgatgaaaagcaagaatagcactcatacataccgggggtaagtacattggctggtgagttcacaagctctcttccaaatactatggcagaagaaacatcttcagcatacttgagcttcttctccaactctggtccagttccaagaccaagaatatccaaagatttaagctgtggtttctttgactctgacttgtatctattatcttcgtgtaatcccaacaccgttcctatgagaatgcaaaccattcaacatcgatcaatctcaatctttgcaaataataacatcagtcatcatattaagaaatcataagagcactaccagatgctattgctgaagcaaacccaagcttggactcatttgagaggccttcaga

SEQ ID NO: 9694 - DNA, 326 bp, Gossypium hirsutum
  misc_feature (21)..(22): n is a, c, g, or t
tggaaaggatatatctaaccnngaggtttccatcccatctcatcagggcaacggaaagtagcttcattcgcagcttgacgctcaacagcaaatctacttgcaccactattgactccaaaatgtacctgaagaaacattgtaagaatgaccaagatatgtgagccttcatttgtcagacagagagttggatttcaccaaagactagtaattaagataacaactgttgaaatccctaataaacaatgaataaaaattggcctcacttattgcaaaagtgcttatttcatgtatttaagatatcaaagaaagtataaagaagatggccg

SEQ ID NO: 9695 - DNA, 522 bp, Gossypium hirsutum
atccactcttagacatagccagattggggagccttgaaatgaaggaaaaatttgttgagacgtcaattttgctttagaaaatatggactcacgggaacaaagtaatgcatgacggcatcaaattaatcaaacccgatagcagtaattaaggaggcgtaagtgtacagacaacaaattcacgaagcgttcaaagattacgaaagtaatccacctcagatagggagcagagatcagtaggtgaagaatcccagaaaatcaatagacatatatccttattacaattggttggcgtggaaaagatgataacattgcatgggccttgcatattaggaatccaagaatgctctattggaattaaggataggcttattgacagtatcatcagaaagaaaaccatatcagtgcagtgggagcagaatccaatcctggatgacattcacttccttagtgagcgaattaagatcgacttaatacacaggaactaggttacattctcaaaagcttggcgtttgggaaataatg

SEQ ID NO: 9696 - DNA, 623 bp, Gossypium hirsutum
ttagaaacaaaggatgagacccaattaatttaagcaagtaaaaggtacaaaagtcaggtcaactaagcaggttttaccccccaatatatatgatattgaggcaaaggagtcaaccccacaggcatcaatattgcatttagacagtgtttgggatgatgattattggctgccaaacccttgaagtaattatttaactttgaaatgctaatttgcagcaacacctaattgcttttgacattcaaagacggtcctaagttattcatacaattttggatttcaaactatgagctatattttttttatttaaatatttccattcaattagtttattttagtcatagtagttgggtttgattaatgggctaaagcagaaaacttagggcagcccaacatatgagcaaatgttgtatgtggatgtgtatggtcaaaatatgcaagacattggttcatgtggctatatttaaacgaatcattgctcctgtttcattctcatttttattttccggttcaagtttcataagaagctaatgaaatgtaatttacaaaattctctcaaagcaggtatcatctattgcaatgtaatatctatagctacaaaatttagaggcgttgggatgacttaa

SEQ ID NO: 9697 - DNA, 355 bp, Gossypium hirsutum
atgctgattcaccccataccaggactttccatttctgatttttatttttccttcattttcttgctttccttgctctctgtctaatttcagtgtttaatttccatgaatcgttataaacttgaaatttcatgtttatctgtaaaattataaagtatgcgtctacgtaactcttttcattttatctttatttttttccaaagtatttcattccatatgatttttttttctcaattaccaacatgaaaatagtcatatatatctttgcgattgaagtgaaataattttaccataaagattaaagaaaagctttagatgtgaagaggaatttaagattttcgtaaaattatcatgaaag

SEQ ID NO: 9698 - DNA, 649 bp, Gossypium hirsutum
  misc_feature (624)..(625): n is a, c, g, or t
  misc_feature (627)..(627): n is a, c, g, or t
tctggcggtgatcactactggaaaacaattcagcagttttttgaaaaacatgtgccgaaaactggatatggtattggtaattaacctttttcccaatgtaactatcgctggatgatatttgacaggattagcctttttgcctcttgatgatatttatttttcctcctctatctcttgcattataaatttgtctgcttaagctcgaatttgcatccgagcctagcagcaccttgtgaacaacctagtttctgcatcttgttgattgtcttgcaaaaatatactactgttggaagcatttcttaatgtcatgacactaaggctacattgtttaatattatattcaacggtgaacatttccacatcgaatctttacatgccttctttctggtacatgtggagggcaaatctgaatatagaaattagaaacaaaacaacacacctatataactgtgcttcattttcactgttctctccctcttttgcttatctttttttttttttttaaaaaagggaaaaccggaactgcccaaaaaaaggtaaataccccttatttttctttttaagggacccccttcccccccccccctttttttttttttttttaatggggcccgagggtgcttnnanaatccccaaaaaaaaaaaaaaa

SEQ ID NO: 9699 - DNA, 674 bp, Gossypium hirsutum
tctgaagcccaacggccaacaggcgaagaagaaaatatgaatattgttaaagtagaaatagaagacggaactggttgaagatgataagataccttatcactgaaaatgcgaaaaacatctagtccaatagctttgtcaagttcgtaacaaaaggtaaaaacacgatttagtacgcacacaaacaacaccagcaaaaaggaaaataagtctcaggtcttggttttcaagtgggaataacatcattgacattcaatgcatctggggagttatcaatatcagagataagtttttgacggtgttcatccttcaaggcttcacggacttcattggaagaagctgcatgagagaaaattgtagatataaatagtagtgtgaagcgaattaaccagattcagcatcaagacagtttgtctaaaggttctctggctctaacatcatatagataatgaaaaaattttgatcatacaagctagttatcttaagctggaaggcatttaagcttctaccataccactcaatctggtgtacaatgagcccctgggaatcaatttatggaaaaatgctttgggacctgacataaaacttcatgcagaccaaatccagctaaaagcaatgcaatcggccaactataaaatgcaaaaaatattctaccacaagtccatcacaataccctc

SEQ ID NO: 9700 - DNA, 592 bp, Gossypium hirsutum
  misc_feature (252)..(252): n is a, c, g, or t
  misc_feature (551)..(551): n is a, c, g, or t
  misc_feature (553)..(553): n is a, c, g, or t
  misc_feature (581)..(581): n is a, c, g, or t
tgaagcttcatatcgtcttgatttgctctgacatcaccgctgccttcagtcagatcattgtatatcttgtcgtctagaaaacaaagttattaaggtaggaaacataaaggatattaatatttacaactgacaagtaaaaagctgaggattttataagatcatttatcaacttgcagcaattacctgacagaagaaagtcttcaacatcaaaaaacggcagtgacagaagatcctgtagaaaaagagaatcanatctgatccaaaaataagcaatttgaatttaaaaaatatatacaggccaaaacttactggatcaacattaagccccttttctagtgagtctacttcatgataaccctgcaaataaggagagaagtacacaacattaagccccttttcctactcaggactttggggtgtgtttgactaatatttctatgattgcgtttatctggatttgattccaattcattgaaatcatccatgtattccttgaatgaacgtacaatctaaaacccataagaaaaaggacataaaaggatcataatacntnaaaatccgaatctttaaactacaaatanttctgtctgct

SEQ ID NO: 9701 - DNA, 502 bp, Gossypium hirsutum
gataaaaggtttaccgacggtatgaccgaaaatcttcctctcacattctttgttgttatttcagaaatatagacgggcatctgtttgagatcggaacgtaaatacgattatccatcgcaagtcaacatttaaacaacaaaggagtaaaaaatgcatcaaagaaaactagagatgagttaccaagtaagtgaaagttcctactgtgaatcctaatgatagtcttccaaggtcaagcaaccaaggggtcttcacaaatcacaaaacaaataaaaacatcatgttctgaaatgaaagcaagcaatgacaaattgatcataacagcttttactaatcttgaaaatcctctaactgatccatcattgtcttaaagcccggatcctagtttatctccaacttgatacatgaatagtgcatgaaagaataagtagaagagctgaaacctttgcaaatgctatggcaagccagccaccgatgtagaacaaattcaaaatccacatggtct

SEQ ID NO: 9702 - DNA, 584 bp, Gossypium hirsutum
ttctggtgccttttctatctgaataacaataacctgtacttattcccagctacacagttccaacacgccaccgggcctccacccctctctagacaaaccaaaaaaattaaacgaaatggtaaaagctgcaaactagatgagtagcctgtagctttatatgaattttctgtagcctccatttacttcttgcttttgcttacaatgcaaaatgaaatttgattaacatgtaatcactgaaatgctatactggtcgtaacatatctattttatatgaaagtaatactttttagttttccaaaaaaaaggaaacaattcccctcttccaaaaatatttctggctttttgctccaaaattgaaaaaaaaatagtgaaatcagcaatgacttgaactcttaattttgtcctttcattaccttattgctttaaatttatttgaactaagccctttatggagtcaggatatggttgtctttaaaccacaaatgtccagccaacaacagctgcaattgcagcagcagcagatgcaaccccagttacagcagcagcaacagcagcagaatccacagctgcaacaacagcagctc

SEQ ID NO: 9703 - DNA, 591 bp, Gossypium hirsutum
cttaacaccatgagtaccaaaattatacctcaggaaaagcctgttgactctggggtttcttcactgaagaattaccatcaagaatcatttcttcatacatattaacagcaactttacttgatccaattcttctcttctccattatcaacctgttccattgacacacaagaaaaacgtattacatatatataattaaatactgaagcaaaaggcctggaattccaatataaattattctatataatcaaatttacatattattaacatcccctgaactgcaacggggttaaaaaatggcaaactgaaaggaacagaaagttaaaacaaagtaagagattgacaacttaccaagaaattgtgggttgagttagaacataataaatggcgaccggaaataaaacctgtaaataaattgtgatttgtagaagaagaagaagcaagtgtttgtggaatgagttagactggctaatgccaagtaaatggaataaaagataaaacggctgacaatcagacgcagagaggacaatagtttgaatcctgttgattggatagtattcttgtatgcaacgctagccatatatatacacacgc

SEQ ID NO: 9704 - DNA, 385 bp, Gossypium hirsutum
aaggttcaatgatgccacaaagtatgagattcttcagtaagttactaagttacgagtacgagtaaacacttgcattcttttatcttaataaagggactgaaataaaaggattttgctgtgtgctatatatatatatattatattagcagattatcatggtatttgtctaatatcatgggatatatactgtagtatattaacaaattataagccaaaaaaatcaagcattaaacagtgaatagaaataacctctttaggactaacctgaagggtataaagcagatcaactcaatcaactcatgcttgcgtgattgtgaaagtttgtacttgtttcaaggagctctagtgtaactgtttgattaacttcactaagcatggtcccaag

SEQ ID NO: 9705 - DNA, 712 bp, Gossypium hirsutum
  misc_feature (512)..(513): n is a, c, g, or t
  misc_feature (573)..(587): n is a, c, g, or t
  misc_feature (589)..(597): n is a, c, g, or t
  misc_feature (599)..(600): n is a, c, g, or t
  misc_feature (609)..(618): n is a, c, g, or t
  misc_feature (620)..(627): n is a, c, g, or t
  misc_feature (631)..(641): n is a, c, g, or t
  misc_feature (643)..(647): n is a, c, g, or t
  misc_feature (649)..(650): n is a, c, g, or t
  misc_feature (652)..(652): n is a, c, g, or t
  misc_feature (660)..(662): n is a, c, g, or t
  misc_feature (664)..(665): n is a, c, g, or t
  misc_feature (675)..(687): n is a, c, g, or t
  misc_feature (689)..(692): n is a, c, g, or t
  misc_feature (696)..(700): n is a, c, g, or t
  misc_feature (702)..(707): n is a, c, g, or t
gcatatacatagtagtcactgcatggatcgaaatttgccacctgcatcatattaatggaatatcattactagacttatggtataaaattgttcaataatgttcaatggtaactgttgtttgtgtgtttttaagtcaacttacggaaggctccttgggacggatcgtgagactggaattatggcataaaggggcatagatattatatatatcaacatagtaaatattctggcctgcctcatcagtggctgcatcacactcgctactggactccgagtcatcctcgggtgcgaaattacagtgtttttcaatcccatttgcagtttcatctgaaatgagagcatggcattgctaggtaatcatggttacattagggacaaagaaagtatatactcgttcacgtaaaatgatagtaatttaagaagtaaagaataggcaatgagaaacctaaaaaaagcaagagtcataaacatacataacttgcataatcagcaataggggagtacttccaatnnaggcatatgttttccttggaagctccccaacaggttcctccaaaggcatagcaaggattnnnnnnnnnnnnnnngnnnnnnnnngnnttcctcccnnnnnnnnnncnnnnnnnncccnnnnnnnnnnngnnnnngnngntccccccnnntnncccccccccnnnnnnnnnnnnncnnnncttnnnnncnnnnnntcttt

SEQ ID NO: 9706 - DNA, 404 bp, Gossypium hirsutum
gttgttggctttctccatcaacccggcatcttcaaatgcactcaaaatgctgttacaggcagatatatcgaactctgtggttgtcaactgtttccactgattaaaaacttctcccacttccttcatatgcccaagaatcagatacgatgaaagaatgcatatgtagtttctgcttgtcattttttgtttcgtcattcttagagatttccatatctgatcaattttatctttgttccccaagcctgcatacagcatgacaagaaagtcgtacgttatccattctctttgtgtgatgcctttctctatttcgataggagagatcgaatcggcacttgtaagacagctggcagttacataaatatttacaaggttgatatatctctgccaatcatcattgcaacaaa

SEQ ID NO: 9707 - DNA, 460 bp, Gossypium hirsutum
aacttgcccgctcgccaaactgttgcacttgattgcttaaatcctaatgattactattatttacttattggactaataggatccatggaaacctgttagctgagatgcctttcattggcacccggtatgcttataggcgtcaagggatgtgtcgccggcttctttgcgcaattgaatctgtatgtctgaatcagtgatccctttgttttatttttagatttgcatttctctattatattgctgaagtattatattacttatttaaaatttggacatttacaagtttattttatacgtatgagatcatggcacttcctgccacagtttttctggaaaatacttacgaattagattatttttccaaaagagaaaaccagaaatcaattttttcctcaatctagtgacacaggataattcataggtaaccagtgtttattcaaagatctgtaggtaagcctga

SEQ ID NO: 9708 - DNA, 696 bp, Gossypium hirsutum
caatatcactatcaaatgggacgtaataagttggaccccagatggctatgttgtaagttttaccgagggtccattttcttttacatacaaaagacaaatgacttcaacattgaaaggagcatctactttctaccagaagtttaaagatcaaagcattctttttactttttctctgtttgctctaatttaaagttcttcaaaagacatcacttatacatacatatttacttgcgtcttgtatacaactgccttttaaagtatggaacaattgatgccatgtcgctgtttcttgttttcccttttcttttggaagcacactaaaagtatatactcttattcaacacttatagaacttataacacttaggctgaaattttaccaattcagcattgcagttccattatttttcattttgaagttaaaaaggtgttattttgcttcatatgatttataatattatttatcctccttgtgaatttggcaggctgttgttacaatgtacaatttccaacagtatcgccatattcaggcacctggttggacattggggtggacatgggccaaaaaggaagtaatctggagcatgatgggaagccaaaccacggaacaaggggattgttcaaaatacaaaggaaacgtccctcattgctgtaaaaaggatcccacagttgtggatttattgcctggaactcctta

SEQ ID NO: 9709 - DNA, 649 bp, Gossypium hirsutum
tgttccttgaagcgtgttggtggctacttaaaaggaaaatctcgatgatttatttcctttctttttacttaaggggaaaaaaaccatgttgttgtacaatgggcaagattacttttccataaatgatgacaagaatttacgtttgttctttgaagataagataaccgaaatgaccactaaataagatttgattgattgcttaaccgaaatgaccactaaataagattgattgattgctctttcttttttggggttatgatttgattgatgatcgattgccttgaatattataacttctggagaataaatagagtgtttctcaaattggtattgataatataactaggaacggtaataactgtaataaacatgaaatattttcattttcgagacagcatcttcaacagtggacatttcacagcatgcattttacacgtctctgataagtcaatattcttgcagcaaataaaataaggtaatctataaaaatagtcaattttgtttgtctcaagttatattttaatcactttatgtttgaaaggttacgttttagtcacttatattactattttgttacgaagagatcactctacagttaagtttcgttttctctctaacggtaacggtaatcctacgtggcagtccaact

SEQ ID NO: 9710 - DNA, 598 bp, Gossypium hirsutum
ctttgccactcccatgagtcttgagctggttattgagatgcttcttgattgtgaagcatgaaaattggctttattgactgatatgcctctacaagccaacttggtgtctcgttcacagcaaggtaatctcgacaacttgaaatctgattcaggttctagtcgtggttctaatcatggacacatgggtcaagctcgtgggtggtttcgtgctcgtgctcgtggctcgagctgagggtggtctcgttctaaaccacaatgtcaattatgtggtaaaatatgacagttggtgcagacatgctatcaccgctttgatgagaatttttctggccctggttcaagttcttcaatgtcagtcaattaccatcatcttggtaaagctcctacgtcctactgttatagctcgtgttcacagcctttcacggcagctccttcatcatcttctccgtctttgtcttcctccttggctaatcagacttggtaccctgatttcagtacaattaatcatattaccccgaccatgactagtcttaacaatgcttctacttacacaggtacaagtcaagtctctatgggtaatggtgagtcagtttccattgct

SEQ ID NO: 9711 - DNA, 722 bp, Gossypium hirsutum
  misc_feature (62)..(62): n is a, c, g, or t
  misc_feature (586)..(586): n is a, c, g, or t
  misc_feature (590)..(604): n is a, c, g, or t
  misc_feature (607)..(637): n is a, c, g, or t
  misc_feature (640)..(640): n is a, c, g, or t
  misc_feature (643)..(655): n is a, c, g, or t
  misc_feature (657)..(663): n is a, c, g, or t
  misc_feature (666)..(677): n is a, c, g, or t
  misc_feature (679)..(684): n is a, c, g, or t
  misc_feature (689)..(695): n is a, c, g, or t
  misc_feature (699)..(699): n is a, c, g, or t
  misc_feature (704)..(706): n is a, c, g, or t
  misc_feature (714)..(714): n is a, c, g, or t
  misc_feature (716)..(719): n is a, c, g, or t
cagtctagggcaacaacccccttatagttaaaaagctctcatttttcaaccaaatccaaccnttaaactgcgcctctcccgatttcttcttcttcactttgaggtttgagcagatcgtatggtacgttcatccaactatcttcgtctcttcattattcaatctaaacccattcttttttctaaattttttgtgtttttttgtaggcaccaaagaaagacaaggcccctccaccttcttccaagccagcaaagtctggtggtggcaagcaaaagaagaaggtcatttatcctttaaaattcatttaatggggtttgatttttatgctttttagagttatatatgaaccgggtttcctttatttttaacagaagtggagcaagggaaagcaaaaggagaaggtgaacaacatggtgttgtttgaccaggctacttatgataagcttttatctgaggctcctaaatataagctcatcactccctcaattttgtctgatcgtatgagggtaactttttcaaatttacctcttcttttatgtttattatttgtttttttttgggttatgtgctttcctggttggggggaanttannnnnnnnnnnnnnntcnnnnnnnnnnnnnnnnnnnnnnnnnnnnnnntcnttnnnnnnnnnnnnncnnnnnnnccnnnnnnnnnnnntnnnnnntcccnnnnnnntcgnttccnnnttttttcntnnnnttt

SEQ ID NO: 9712 - DNA, 538 bp, Gossypium hirsutum
cattcagcatacggcaacagcatagcacctaaatgaagatgttagctataaaataaattttcatttttaacattgtaaatccaaatattctgcttaatttcagtgtgaatatgcatgattttgcagttgcataaaagggtaaaattttgtactgcacgacaccattaccaaattcttcgtgttacataacttttttttacctccttgattatagtcttctttatcatccttgatatgctgtgagaattatgaagagaaggaagtggatattcatttcaaactcgaaaaacacaaacttgaactactatagaaacagaaataatagaaactaacctcgagagcacggcagacatgctccatttctgaatgaaaattgggtttctcttttgtagtcacaagttcaagcacagcacaacaagacatctcgggaggctgaaaaaccggtaagccaatagaaccacggacttcatgattgacggcatgtgtaatccgcaagtactcagccttactgtaatggattacattggaagtccactca

SEQ ID NO: 9713 - DNA, 640 bp, Gossypium hirsutum
gagttagaaacactgacagggagatattactaagcagtttcagggaagaactttcaagcgaaaataatctactccactatataatttcttaattagagattacgggtaaaataagttgaaacttgaaatccaatgtattgacaaagatggaaaataattaaaaatggtaatcggagtgatattatgactgacattttgatgcagaagtcaactcaagacgcggttgttaatttgctaacaaagccaatggaaaattcataggaaaaaacaaaaagggaagacccaaccactgaatataggtagaagtttttggcaaaagggtggtaaagttgatattcaattggtgggttttcagacttttgagcctttctgcattttaagctgaatcaatcagcgggccgagcgtttaacggatatcaacaaccgctacatctcaagccgtatcttgtctcaagtctcaatttcatgtcgacagctaccccttgttgtcaacttgtctgtaaacaatctatgtcttgaatgcatagattgtgagactgaaatgaatgtggactgtggagactagaagatcaagccaaaactttaagtgataatggaagaagaatctaatattttataacatgtcacatttggtttgtgt

SEQ ID NO: 9714 - DNA, 610 bp, Gossypium hirsutum
ctgtgagttagatttcatgccaaaagtactactagaaaactgtctgcttcttgtgtctttgacagtcatctcttgtcccatgcttcctagattgcctgctaatttggggagagtcacagctttgaagtcattgaaaattggttggtgtgcgatgctagacagtttgcctcatggattagcaaatctcatctctctagagaatttggaaatcatcgagtgcccttctttggttactctgccagagcaaagcttagaaagattgagctctctccgatccctctctttcgaaaactgtaatggctttacttctttgccgagaggaatgcagcatgccacggcccttgagcgcctaacagttatgtattgttcgaatctggcttctctacctgatggccttcaaaatctcttggtgcttaagagcttgaccattttaagttgcccggaattagcatctctcccagacggagttcaacatatgaagatgctacaaaatctggaaatccgtatctgtccaaagatcatggcactgccgaaggtaaaggacctcatttctctaagatctttggcaatttcagactgccaaaatataaagtctcttccagaaggcatc

SEQ ID NO: 9715 - DNA, 543 bp, Gossypium hirsutum
  misc_feature (484)..(487): n is a, c, g, or t
  misc_feature (495)..(495): n is a, c, g, or t
  misc_feature (497)..(500): n is a, c, g, or t
  misc_feature (505)..(511): n is a, c, g, or t
  misc_feature (517)..(523): n is a, c, g, or t
  misc_feature (532)..(535): n is a, c, g, or t
ataaataaaaataaacatgattttagaaaaaatacatatttatattattaaagtattcatattttatttatatatagtaataaatatttattattgaaatattaatgtaaaatttttcaagaatattacttaaattttaaaattattattaatgttaaaatttattgttacaataaaattgtaatattaaaaaattattagaagacttaatatgtcattcggtattgagtttgacattttttaatatgatatttgtgttttttttaatgcggtacttgtatttggcaacaatgatacattttgataccaaaagataataatattaatttttttagtttttaattcagattttaagattgattttatgaaaaataattgataatattattagattttaaatttcatgattttattaatagaataaatttgtgttaattatgaatttatttaatttgtatttaacttggttgtgactttttttctnnnnttagggtngnnnnaatgnnnnnnnatttgnnnnnnnatttaatgnnnnttttcatc

SEQ ID NO: 9716 - DNA, 842 bp, Gossypium hirsutum
  misc_feature (457)..(457): n is a, c, g, or t
  misc_feature (524)..(524): n is a, c, g, or t
  misc_feature (719)..(722): n is a, c, g, or t
  misc_feature (730)..(730): n is a, c, g, or t
  misc_feature (732)..(735): n is a, c, g, or t
  misc_feature (740)..(746): n is a, c, g, or t
  misc_feature (752)..(758): n is a, c, g, or t
  misc_feature (767)..(770): n is a, c, g, or t
  misc_feature (796)..(796): n is a, c, g, or t
tttaaatttattgttaatgaaataaacacaacataaattatgtttgtttcaaaatattacagaagtcatttttcctttcagaaccaattttttattttataataagatgataatttataatttaaaaaatattttatataaatttaataataattaatacctatttaaaatttaatttaaaattacatatgttatacatacgtgggaggataatgaaacattagaactaaaattgataaataaaaataaacatgattttagaaaaaatacatatttatattattaaagtattcatattttatttatatatagtaataaatatttattattgaaatattaatgtaaaatttttcaagaatattacttaaattttaaaattattattaatgttaaaatttattgttacaataaaattgtaatattaaaaaattattagaagacttaatatgtcattcgntattgagtttgacattttttaatatgatatttgtgttttttttaatgcggtacttgtatttggcaanaatgatacattttgataccaaaagataataatattaatttttttagtttttaattcagattttaagattgattttatgaaaaataattgataatattattagattttaaatttcatgattttattaatagaataaatttgtgttaattatgaatttatttaatttgtatttaacttggttgtgactttttttctnnnnttagggtngnnnnaatgnnnnnnnatttgnnnnnnnatttaatgnnnnttttcatcaaatcgaccctcaaactncaataatatataattttcactaaatacatgtaccgcattagataaa

SEQ ID NO: 9717 - DNA, 350 bp, Gossypium hirsutum
ctattcaatcacatatacaaaggtaagaggattagcaagtttgatccaattagctgtcaaaataacagcataagattgaaacaggtgtaattaaggatgactcctttccggtgtcccatgcctttctagcatactattacaggcaaagtagaatcacaagttttagtgcctgtttaagattcagagactaaaaggctctataaagctcctgtacaagaataaaaatttggcaaaccagggcagcaaatattgaggcaaaagaaaactagaagaaaaaataaaattccagtcacaattaaagatattcaaatccaaactcaaaattattttctcaacagcttttggggaca

SEQ ID NO: 9718 - DNA, 457 bp, Gossypium hirsutum
gggtgccatggtcactggaatcattttcttgttcgctagccaaggtttgtattttatcccctccgagcccatggtcatgtttgcacttgtataagttaactgttctccacttgactgctgggaaatggaatagaaaggggaaaaaaaaaaaattagccctaaaataatcctaagaaaatttaacccaacattaaaacactggccttgaaaaaagggtgaggcgtttaaatctgggtctaaaaaaccttgcttgcgccaccctatgggcgccctcacaaaaaactctttccatactgtgaattttgttaaaaggggtgtgtgtaaaaaaagagtcccttttttcccctttttgggggggggtatttgggtaaaagaaaaaaaaaaaaaaaattttagggggaaagggaaacctaacgggaaaactcttctaaaactcttttttatgttcatattggct

SEQ ID NO: 9719 - DNA, 515 bp, Gossypium hirsutum
tccatctttgtaattgatggtcgtaaaatgttttaagaaattaaatttgtatatgttctcatcactgaaccagaagggaattttcatgatatcatggtttagatgctactgactcttatgggaccaatgctgatgaatccttgaatcagaggttgttaaacctaactaggtcggattgctttgttgaatgagtaaaaatgaaccaaaaaaattagaaatgaaaaaatactgggtgcatatcaaccgttcatcattcatatttagagccagaataaatatataacctatgaaaatactataacattaatgagaattaatttcctttgatatggaaagtgatgcatgattgacttagcaaatacgcacttaaaatcttgaataaatggctgccaagacgacaataagaagcgggtcaattgtgtttggccgatggccaagccctagtgcaactccttttgactttgagaccacctaaacccgcggtttcattttccctacaatattctcccatgtca

SEQ ID NO: 9720 - DNA, 499 bp, Gossypium hirsutum
actgcttctggatctttaaccttgttcagtcctttcatcagttggacctttgcatagaaaatcagcgaataaccacatcccaatcatttagtagtacttactaaacttacactatgttgttagttcagtttaatacatcctgcctaaattagttgctgtagtgaacttattgctatgctgcaaaccagagtgttaattgtatgtgtaagtttgaaggctttaatcatagattggaatgttaattgtgtgtgtaagtagttttagggacttcatgctttatatgatcaatatgtttttggtaaacaagatgtgatcctgacactaaatagaatcaaaacaatggctacctacttaatctgtatttcatggacgtggtgtgttgttgatttaaaaaaatttcttgttaagtcttatctttttacttcatcttcaacaaatttcggtttgatcttatgtatagtacccaaattgcaggaaagggcaatggtgagaagagttg

SEQ ID NO: 9721 - DNA, 548 bp, Gossypium hirsutum
gagagtgaaacctcattgtcttttacggtgaatttgaaagtgctaaaagatgttatatatatttatatatatttgattgctgcaaatattgcatgtctacggtatagaaaaaaagaagttgaattcaagtttttgtgactggcagaatacggagaaaagcgcaaagattgatgctactgatttcaagtcgtctttgccaccatggaagtctgatgatatcaaggtaattaaatctatcattatgttccataaaagctacgtactggaaatggcattgttaaagaaatacttatttttcttaattattttcttatcttgaactgaagttattgattgttcatgttatcttcagtcatggatatggatgcaacaagcaatgcatccagagctgaattacaacagctgttttcgaaagaaatgggtaggcgtttacaatacaatctatataggtgtttaattttgtgggcgaggggggaaagaatcatactactcagaatttatttttagcataaatcctcgtgtatatgctctcaaagccctggaaaaaa

SEQ ID NO: 9722 - DNA, 460 bp, Gossypium hirsutum
cattgcaccgatagtcagtacggatccaaacattgaatactgcaaatagacaacaaagtttcaatgttttgttgcggatatttatatacaaaactcactcctgaattcgggtaacattaagaaagagataaaactaatttcttgctcatgtacctcttcagaggacattccaagttcctccattataccttgctgagtaggcgaagagtatcctatctgaaaaacaaagaaaacccaacaaaaaaatgatcagctcattgacaaacaataattgaaaagcctgttaattggctaagatgatagagaaacttacacttgagccaaactcaaaagagcccatcaccgcaacaaatgtgcagagaataaccataaacagattaccattatcgtgagagttttgttgtttttcatctttatgaaaaaacggctgatacaagctgccacttgatcctttctcaat

SEQ ID NO: 9723 - DNA, 407 bp, Gossypium hirsutum
actaagtttgaagaacattgaagagttggtgcaacacaaagaagcaatttgagttggagagacatgtcctcccataacagctatatgaatggctaagcctccaacacaatgtgcaactacatgtaccttcatgcttggaccatgaaattcacagatcttgctgattactacaacaaaataagtagatgaaacgtaagttaattaccactcaaaagtgtaagcattgctacttttttgtaagttttgttaccagctggtatgtcatatcttccaagatcttcaatggtgaagttgtttgagggattcaatggatgcaatcttggttggagtaaccatatttcatgcccttctgtcaataaagtcctgattaaatcatttggttcagttggcagacagaaactctcaat

SEQ ID NO: 9724 - DNA, 635 bp, Gossypium hirsutum
gacataaagtctcagtagttgctctcctttaatataaagccttttctggatgaatctgtttatatttgaagatactttcgtatctcactttggcttcttcacagtggaacttgttttgtgtttcattaatttgagtggaagcacgagttctcttgcgaggcatgtttaactacctttttttgtaaaaatataataactctagaaaaataaaaataataataatgaaggaaaatatggaaatttaaaaggagggttggagggtttgtggcttagggtggataaaaagagaatgctgcacaagcagctagggcgtgctggtgtggtgcgtgtaggagtagtgatgtgcagcagggctggaagcaattagcaacacgggcattcggcagcaggtaggacttgggcacgcgcaggatggtatggagggcaggtatcgcgcgtagagtgaaggcctggtacgagctgaggctagggcagctcgaggcaacgctcgcgttgtgtagacgggatatgcgtgcaatggagttgggtgtgtgctggccgactgcttggtgctactgttgctaggggcttctcactttggtgttttggtgctttgggttttaagtgttagatgaatgggaaaatgggtggtattt

SEQ ID NO: 9725 - DNA, 558 bp, Gossypium hirsutum
  misc_feature (171)..(171): n is a, c, g, or t
  misc_feature (452)..(452): n is a, c, g, or t
  misc_feature (494)..(494): n is a, c, g, or t
  misc_feature (497)..(498): n is a, c, g, or t
ccgaaatgatttccttcacatagtgctgggtgttgcaagctattttatgctaaagaaatcgcctcttttttctcttttcttggttttttgatgcattgtcaactagaccttctaacatttttggtttttaataatttataagctatcttaaatatagtgatttcctaatgntgtatttttttgaatacaatatcttatcatcctttataactgatgaaaaaaattaattttcatctctgaccttttgcaactcatagatacatcataatatatgagattctgtatcagtaccttttaattagtattttccaaatagttgcaaaatgtaaattaacttctagcatagaaaaaaattaaaataaaataaaagagagtatattttgatggttttgtttgttcaaaatgaatttgaccaggagttggagggttctttgaatattttaactgcattnctgtttgagacaagaaatgttacctttgctgttgggaccacnaannacagaattttcataatgtaaaatttgctgtgcaatatatggtcatatggtataaataaat

SEQ ID NO: 9726 - DNA, 629 bp, Gossypium hirsutum
  misc_feature (221)..(225): n is a, c, g, or t
ttgctctgctttgttttcttctcttgctttggctttgctttgctttttttttctatcttatcagaatggtttgagctctggaaagtctaatttgatttttcattcaggatagctcctactgctttgaggcaatcctctagtgcttgaaagcttaaaaggcactcaggagaaggtaccttggtttggttatttggagctgtttttgatgccctaaaaacctnnnnncagttcaaatattagatggacctcgatattcagaatgtcgtgagacgccaaatttagctgcaccccctccatatccaccccgacgatcacttgaggattgtcctctgccaccatgagcaagctcaacctacatcgattacaatgaaaagcaaatcaagaaaaaagttgtatgccaataaactacacatcaaaataacaatagcttattattaccctcaaacgacaaccatcaaagttgtaaccatctcgacccctaattgcatcttcagcatcccttgaattgtcaaactatgaaacaaacagaaatagaaagacattgttacagtttagatacacatcctctgtgaaaaaatataagatgagatatatacctcaacaaaacaataacatggagggcgtggcgg

SEQ ID NO: 9727 - DNA, 650 bp, Gossypium hirsutum
aataagccatcttgtatgacgagcgaaccttgatataacttcttcatcgccctctattttttaaacatattgttttccgaaagaagtaaaaaccggtacttcaaaacaaagacaaaaaaacaacgaaagtgaaaacaaagtttgattccattgaatttttatcgaaaagaaaagtgagagatgaaggcgattctaactctaggcagccggagcactgaaaaaggagggagtgtgcatccatggccaatgaaatgagactgtttattgcagtttatgtttgactattacaacttggggaggtcggtaatcaataattgggagtgcaatgcaaggaatgtttgacacttggtccccaaggcatgaacagcatgttcaattgtttatatgtaataataataaaaaaggtcaaatacagccagccaaaaaaggcgatctcgattctcagtctccaaataatttgaataaactaactcctatgtcactattacttcaatacttttgtttgtctgtttttcaaatagggtaattaatcttcatttatgttttgtttattttccttacgagattgtggagggaaacaattgttaaaagtaattaacatgaatcaaatgaattaatgttagggactgtagaaccccaaatatctccaa

SEQ ID NO: 9728 - DNA, 640 bp, Gossypium hirsutum
tggaagtttgaagaccgtgtggaaactttccctaccaaggatcctgctctatcattctctggtcagaaggctgcccaggttgaagaacctgacccacaagtggatgtcacacttggtgcttctggccctgcattagttggagagagatttctgctaccagttaccatagcctccagggaccatgccatatacgctggtgaaatgaagataaatctcgtggatgtgagaggaggtggcctgtttagtcctagggaatctgagcctttttcattggacactcatcatgttgagcttcttggcattgttggaccagaaggagaagatgaatctcaacgggcctctgataaaatcatgaaaattcaacaatcttttgggttggtttctgttccatttctaaacattggagaatcatggtcctgcaaactagaaatcatgtggcaccgacccaaaccaattatgctctttgtatcgttgggctactcccctaattccaatgagtcgaatgcacaaaaagtcaatattcacaagaccttgcaaattgaaggaaagaatgctgttttaattagccaacattttatgcttcccttccgcagggtttccttgctgctttcaaagatcaagccggttcctgattccaatc

SEQ ID NO: 9729 - DNA, 454 bp, Gossypium hirsutum
ccccgctgtctctcggtttggaactgctggcggtgtgatgactgttttgattccgaggaacaccaccattcccaccaagaaggagcaggtcttctctacatactcagacaaccagcctggtgtgttgatccaggtgtatgaaggtgagagagcaaggacaagagataacaatttgcttggtaaattcgagctctctggtatcccaccagctcccagaggtgtcccacagatcacagtgtgctttgatattgatgccaatggtattttgaatgtgtccgccgaggacaaaaccactgggcagaagaacaaaatcaccattacaaatgacaagggaaggctttcgaaggaggaaattgagaaaatggttcaggaagcagagaagtacaagtcagaggacgaagagcacaagaaaaaggtggatgcaaagaacgcgttggagatctacgcatatcga

SEQ ID NO: 9730 - DNA, 524 bp, Gossypium hirsutum
ggctgattacttacatggtatgtttggaaggataaatctgttcctcacatgctaaaatacgccctggttcaaccttgatgttttgttttcaggtccaaatagtcaaaagttttctttaagctgggttcggagactgaaaatagctgttgatgctgcaaaaggtaagtctggtattctgtttagcaatgggaaaatttcatgttttctggttcgaacttttcatacctgcatatgttaacaattttttcttcaaacataatgattataagatcctaacatagaagcaaccctttcttgggattaatatttgatgcataatcttcttgtttaccacaatgacagattttcacattttatatctgtttctttttgaagggctggactacttgcataacgggagcgatccaagaataatacaccgcgatgtcaagtgcagtaacatccttttggacgctcaaatgaatgccaaggtctgtgattttggcctctctaagcaagtaactcaatccgacacaactcatgtc

SEQ ID NO: 9731 - DNA, 546 bp, Gossypium hirsutum
cttccaatctcagcatctaatagagaactttcctctgccattctttgcacatgatcgtttgtggctagccaaggaagccctgcaccattaccaaaagaaggtagcatatcccctcccctagaagccatacgtgccattctttctggcccaattggttccttaaagatatatactgggcccatttcagcaaataaagggcattgaggttgactgttctgtaagctagccgttgtaggaggggggcttgttccaatgcaacaaaatgcaagtggcttagagatgcgaggaaactcgaaaggacgactttcatacaaggatccatcaatatataatctcaattcattctctgctttaccaataagtccctgcctgcatacatgctccaatccaataaaataccaacactgtggcttgaaaggatgagtaaaatgtaaagaagccttttttccttttccattcccactttcaaccactaaaaactgtgcatgaaagtatgcctctattccctgattatcagttgataggaaactaaataaacgaggcata

SEQ ID NO: 9732 - DNA, 664 bp, Gossypium hirsutum
caccattgtccttagcaaacttagaaacagacaataaatttttcctaatatcaggaacatacaacaaatccttaagcaacaacggactagaatcatcagccaaaatagatgaaccaccaacatatgtaataggtagagaaactccattattgataacaaccttaccttctccattgtacaagcgagcatcgaaaagttaactgagtcattcgtcatatgagcagtggcgccactgtctgaataccacgccagatcgacaactgttgatggaatagcaagcccagaagatctagtcgattttattgcatggccacccattgaaacagtcgactgagatatgagccccaatcgacgatgcatacaacctgaaccagaaacaaaaaacccatgtaatgtctgaccaataaccgtaggcatgtgaaagtgaggactttgaccatgctgagttgaatctatttcattaagtgtgggttgaatctgttgaaagggcccacatattgctggatcaggtgcataataagaagaatgtaacctatcatccacacaacacatatatgtttgaataagctttcgacccacacgagaagcagatctagctcaatgctcagtatcatcccttaaactggagttttctccttatccatcagacgtcgaatcatatttg

SEQ ID NO: 9733 - DNA, 431 bp, Gossypium hirsutum
gatggtatttttctttttacataagaagataaaattaggataagcgaagccaagttattccataataatcattatttagtggttgaaggacttcatcacgagtgttgtatgtagatataggcttttttacccaactaacccccaaaaaataaatatctataagaatgagtcaacttcaaaaacaatcatgggaatgacttaaaatgaacagtgccaggtagtgtcgacaccctatggccgacacccaagtcaatcatcccccaatcattagtagttgattgatgggagtttaaaaacaaatattttttttggtgttggcactacaatggttagcactggaaaaaaaaaatttccagcatttttttgtgttggcattgtgggggttggcacccgtggcaggaaaaaaaatttaggggttggctttccttcaa

SEQ ID NO: 9734 - DNA, 509 bp, Gossypium hirsutum
  misc_feature (24)..(25): n is a, c, g, or t
  misc_feature (60)..(61): n is a, c, g, or t
ttctttctggcaaatgtggctggnntgcacttgatcactttatcttcttttatgtttcannttatgcagctagttccaggttcacagaatggtcaattttttgcttgggttgttgttgaaggaattatgcttaaggttcctataactgttccaaaagtgttctatttgaactctaaagcaactatatcaaaaaattttcctggaaaacgggtaaacaaggttctgcctcatggaaggcaaagctataacctatttgaggtaagtattttggcatttccatatttaatgctaaatcctgcctctatttattttacatctatgaaagttttgaaatttactttttttgctcttttatttggatttaataggttataattgatgaaaatcagtttaggagggagagcaagaagcttgctgctcttcttgctgatccaaaaattgaggtgagcatactatgtcctatgtccttgtatatcaatcattttgagacacaatgcacacatatagat

SEQ ID NO: 9735 - DNA, 602 bp, Gossypium hirsutum
  misc_feature (542)..(543): n is a, c, g, or t
  misc_feature (596)..(596): n is a, c, g, or t
cagaggcagaaatgaaggaggcgaacctgaagaacctactcctccaccatatacccttgaaacagcctttgaagatattgaacatttcttgtcaaatctctccaccatcttgaaggagaaggaggaggagaagatagagaaggagaagaagaagaagaaagaggaggaggagaaggaggagaagaagaaagaggaggaggagaagaaggaggaggaggaggaggaggagaacgaggaggaggaggggaaggagaaggaggaggaaggaaaggaggagaagaaagaggaggaaaaggaggagaaggaaaaggaggaggttgaagatgaaggtttagagatcccggagttcattgaaaagtatttggatcttcttgaagagaaaatatctaagcttgaatccactgctgctgagacaaaagtgaaggggcaacaacctcctgaggatgatccattgtttttcaaagttgttaggcagatattaaagctgtataaggatctatcagcacccatcacaccggagtccaagcagggccctttaatcnnccgcatttgtgggatccattttcgtgctttgtgttatctggaggacgatttcntgtatc

SEQ ID NO: 9736 - DNA, 409 bp, Gossypium hirsutum
caccatacatgtaagaactcataagaccaacaattgaggaagaactaacaattaattcccaatttaatgggaattttatataatataaattatagcaacaaagagaaaaatgatattctatcattatcatccttgtagaagaatacatccaacattagaactatttctcctgcttctttcacaaagccttttgtgtcaaacataacaagaagcatcaaatcaaggccttttcgtcaaccaacaagaataagaattatacaacaacaaaaacaaaagagttagttttgcctgtaagctatgtaattagccaaagcaatcaaaggggcagctttctcagaatcaaatccttggagcaactccaatgaatcacttctcaatttctctgcaaactcctttgacttctctattc

SEQ ID NO: 9737 - DNA, 635 bp, Gossypium hirsutum
  misc_feature (616)..(616): n is a, c, g, or t
ttgggagtgaggttcttacctcagtccctcatgctgccccagttttagttacagctatgaataacctgcacaaggctcttgtagctgctgatctcaattttcaggttaaagtttcaaccccgcaatccatggacatcatccccaagccttttcccccatctacttctacctttaattcctcttggaactctacaatataccagcttcttcagtttttgaagaacacgaactcctattacatgttaaatgcctatccgtattatggttacactaatggaaatggcatttttccaattgattatgctcttttcaaacctcttccctctgtcaaacaaatcgttgatccaaacactttgttccactataacagcatgtttgatgcaatggttgatgcaacctattattctatggatgctctcaatttttctgtgatccctatcgttgtcacagaaactggatggccttggcaaggtggatccaatgaacctgatgctaccgtggaaaatgctgagaccttcattaataaattgatccagcgagtttccaataattcaggtccacctagtcaaccaactattcccatcaacacatacatttatgaattgtttaatgaagncaagagactgggccctatc

SEQ ID NO: 9738 - DNA, 414 bp, Gossypium hirsutum
gggtatgtacatgaaattgatttaattctacatctctctcccccagtcaaattcttttttaacttgcattttgctttcatttgagtggagctgttgaatctgggatttattttgatgcagacaattggtcatatcaactgtatcaaggtcttctattgattgctttaacagttgtacccctttctagctattctgatgttattaattatgctgattttttgtatttatttgtcctttttctttgaactactagtagatgactatatcaaacttgagttattctttcagttaatttatacatcagtgttaatctcggcctattattgggcttcaggatattgatgtggatcagattgtctcagaacattatcagtcaacttgtacacctcaaccttcagtttctaaatttccacc

SEQ ID NO: 9739 - DNA, 605 bp, Gossypium hirsutum
atgatgtttctcatgctgccggttaataatacagtattaaagattgatatatcaaatcaaaagcttctttcttcttggggattcatgagagagagcaagatctcaaggtttggagagatgggtctttctcttttggcttgtcctaagcaaatatgaaaatgttagaaaactggacaaggttggtacttttttgaactatctctccctgctttcgataattttaaagaagaagtttatgtcaatggaaatacaaaataacagaagacaggcaacagcagggaattcaggttatctgacaaatctgtattaaatatgaatctactgtatggcacgaatgcaagtaaagaaaaataattacaacacaatccgatatgaaataataatttaaatataaaattttctataaaaacaattattaaaaattatgtaaatataatattttaaatacaattataaccctttaaaaaaataagaacatgacatgagttgaatcgagttttacctgatctgaataccagcacttaattttgtgacgtgatcatggatgcttttaattccttaactatgctttttgttaatatatataaatatataaactgcaatcc

SEQ ID NO: 9740 - DNA, 482 bp, Gossypium hirsutum
ggtttggctttggttaccatgtgttaacaaatgttgtataaatttctcacaaacaaaagattgaaaaacaacatgcatccatctagatcaggtttatcaactttgttttattatattaagtctatggtttctgcttttgtctaaacaaaagctcccaaactacctataagtagctgtgattggtaaagggaagaaaaaaaattaaaaagaatttacttttaaataaagcaataaagtaaagagtagactagagactttcttaattgattcacttttattaaagcaacttgatataatcaagaaccaaaataacaagcaacatggtactaaatctttaatttcatctccataaatatatatcttatacaacttgattaaggaggtcggtcactctttatcttttgaataaaatggtttcaaatccacaaattttcatcttagccctacaattttctctgatgtcacaaggaagtcacttggaa

SEQ ID NO: 9741 - DNA, 637 bp, Gossypium hirsutum
ctggttctttcatcctacaacaaaaccatattaaccagaaaattcagtaaaactgaaaagaaaacaaatgtaatgcatataataagataaaccatccatatcaaccacaaccttggaagcatgtaaatgaggatgttcaaagtaaagactcttacaaagatcaatcgctgcgcattagaagatgtatgcatgatttctgtcactcggtgactattgggtgtcacaggaaaaaaattgaggaaaatagagtctgcttctgaaataaactttttaatgaactctggatcaacgtccttcaacaaatgtcgaacctgaaaaccaataagcattatgcactcatcaaagtagtgaaggaaggtctgatatatatataaggggaaggggtaggccactccaatgcttgattccgctctacactttaaaagaatatttgagacttgaataatagtttccaaaaccaaaatactcttccagtaatatagcaactaggatatattatatattaacacatgaaacaaattaggagatattttccttcatttttccttcttcatatgcaagtaacaacaattttccttgccaagaaagctgaattagagccatatctattataatatcataatgggtctatagaagg

SEQ ID NO: 9742 - DNA, 664 bp, Gossypium hirsutum
ctgtacaggctcctacgagataggggcatgtgcatcagtggagtctggccatacaaagcctcatatggagtgagttgaatcgaggagtggaacgacaaattataccaccactcaacaagtggtagccattgaaaccaatgcgccggggtttcactagtcatgcattgtagataattcttaagaaatctattcaaaacctccgtctggccatccgtttgagggtgataggctgttgataaaagaagtttagtaccatctcgccgaaataactcctgccaaaagctactaacaaagattttgtctctgactgatatgattgaatttggcatgccatgaagcttgtagacatgattcaagtactcttgggctacatctttagctgtatacgaatgagacagagctaggaagtgactatacttggttagatggtccaccaccacaagaatggaattcttcctatctgagttcggtaatccttcaataaaatctaaactaacaatagaccaagttctatcaggtactggtaatggctgtaggagaccaggagaagttactgtctcactttacatctctggcagatcacacattctcgaatccattttgtaacatcggtggtgagacctttccaatatagcaatctggatatgcgcttcctagtaacatg

SEQ ID NO: 9743 - DNA, 512 bp, Gossypium hirsutum
tttcattatttcatttgtgcatattattaatcttttactctggcattgaaggtctcttttaaaaaaactatttgtctgtttaggaaatgcaattcaaggagtatccaacctatcaaagccactgctacggaaattcctactacaattgcaagtaagtgttttatatgatagggaagggtaaaaaggagaaagcggcttaatttatttctgttcaaattaatttagaacttgtatggactgattctctgcttttgacttatttctaatttaatttgactagggtcacggagcagtggcaagacaaaggttggaatcaatggtatgtttccttgttttgattataatcatgcttttttttggtagttgtacgtatcttcatctttttgcttcactgatctccatagaaaattatttcaccttcagttagtgtgcatattttaagttgatgctagtgttattgcaaatagcagagaactagcttactgagcttagcttattgcgttagtgtggaa

SEQ ID NO: 9744 - DNA, 566 bp, Gossypium hirsutum
ttcacccatttcctgatttttctcagttattgccgcccaaaatatctcctttaggcttatttacactttaggtccttcctcatttgacaattgagctattaaatccttttagcaacttttacacccttttcaatgtagtcctttttatttaattaaccacccaaacgtcaaaattttctaactaaattttattactacctcaccaacactccataaatatttctaaaaatatttatggctcgatttataagtcgaggtttcgatacatcattctcgacccaatttacctaattaattcttttaaatcaccaaattcactaattcaaaaatgcttttatatttacatttgactcataggtattaatttattaaattttcaactcacccgtcggatttagtgatctcaaatatctattcccgataccactgaaaattaggctgttacaatgaggctcgaatcgagtgaagcgtcggagttggccgagtcatcgacaaggcttccacctatgggagaggtgggtggtgcatcgaacttcaaggaaaaagaagtgatgcatgtgggacag

SEQ ID NO: 9745 - DNA, 351 bp, Gossypium hirsutum
tcctttgtgtcaatgtgtcatatcactgacttcaatctggtacattttaattgtaaccatttggctgttttacctcctttttatttcacagcataaatgtgatctgatcaacatgagctacggagaacctacattattacctgactatggacgctttgttgatcttgttaatgaagtaagaacaccaaattttccttataggcataattgtttagtgtagtttaccttcattttcctctctctctaagatgttatgggtgtcatctttgggtctaatttaggtcgtgaataaatatcgtttgatatttgtgagtagtgctggtaatagtgggccagcattgagcacagttg

SEQ ID NO: 9746 - DNA, 761 bp, Gossypium hirsutum
  misc_feature (377)..(377): n is a, c, g, or t
ctatcatttgcacttaccatttattggaggcaactgatagcttcataggtaaaatgtaatactggtggagcagtactattgaagagtaatgtgtcaacttatgtaatactgtgcaacatgatcatacggataaatttttcgggggtcagactatcttctacaacgccatttaaaaccctcacatgatcgaacttatggctataagagaagctctttcatggcttaagaaattaaatgttgaaaaagtgatcttggagtctgattataaaagataccttgggtatgaacctttctaagttctagactttaatccataattggggtatgctaaaaagtcattttaataatttgtctttcctccgaacacctcaaaatanaaaaaccacggggtcaccaggtcagacctctcatacttcgctgtctcaattatatatgaactatcattaacctttgtttgaaggaaacattaacgacattcttcctgcctacttgatctaccctgcaaaatgacttgcgtagagtgaacgaactcctgacacgaaattggttgtgagatctctcaagtccccctatgagcaaatttccgaccaccacctttcatgtgaggagggaataaccttctccataaccccgctgtctctgaaatccccacgtccgggcccccttaatttttttctcttttccttcccttttctttcttccgctccccacttacccccttccgctcttcctccctttttcacccttcccccctccccccc

SEQ ID NO: 9747 - DNA, 371 bp, Gossypium hirsutum
cgacacatctccttttcggaggctcttcaagcagctcgaatcgatgctcctaatgcagcacatcaccctgccttgaaaagcaatggaagggtccttagctttggcctagatgcacccatttgtgattccatggcctctgtcttaaaccttggggagaaaaaggttttgaatggtgcccgaaatggatttcatggtcttgaagaacaaagagtttcggttccaaacagaagggaaaacggtgatgattgctcgagtggatcttctatcacggtttcaaactcaatggaggaaggtggtagaagttgcattcaggaaaataggatgggcaacattaatggcttcccttcaccaattccttgtttacctggtgt

SEQ ID NO: 9748 - DNA, 514 bp, Gossypium hirsutum
ctaagctttagctttccttggttttcctatcgtaaggaatttatcgtacattgctcaaatttccttacaagtgccgttcctaagaaaaagtaaaagtcgcatgttgaagctgaagtctcttctttgttgcgtaagcgatattgaatgggctaccttattcaaatatttgtctggggttcttgaggtcatgcatagtgaacttttgatacacactctatgaatgaagtagaacataactttgttttttgaggggaacggaataaagcaaactcgaaactgtttaatacaattttatctgcaataccactttgaaaagtaacatctaacttccagttagcatttacccattactctggttttcaaatcctcttgttttttgtttttttgtttgtgtttttatgtgctcaagaagtttatcactcctttgtatgctagtgcatcctaatgtgcttttgtgggtttgtctctgtttttgctcatgctgaaggaactgatctttgaacactcaaattcc

SEQ ID NO: 9749 - DNA, 599 bp, Gossypium hirsutum
aggaaacaactcgttctcatcattggaggcgaagcaatctctctctagagataccctcgagaacttttgaagactcctctcaagagtctgtcataataaagatgcccccaacgccgagtctgactcccaggaaagtgaattttctcttgacaccgagtccatctgatgcaagaattagtggatccccaggtccctccacatctagaggcaaatcatccttgaagagtctcttgccaaaactaagcttcaagcagagaaatgttaattcagatatcgaaaatgctgcaatctttgcgcctgaatcttcttctacttcactaagagagaagccctccattgcaaggacattgtcactttcaaagatttttactcctaggataaaaaggacagcgtcactacctgtagtaactcaaattgcaaatgcgaacctggaacctacgagcagtggaagcctaggtggctctgtaaattctagtgtaagtttttgcgatattttgtggatgaccatatattattgggtccggatcatcttttctaataatgagcatggtgaaatttggagtatatattattgggttgacctagttggatgctctgtt

SEQ ID NO: 9750 - DNA, 369 bp, Gossypium hirsutum
caaaattcactcaacattgaatacaacctagacaatctggttctttaatgttgctatccaaaaattagttttggctttctcttctggggtgtgtaagaggctgagtgtcagattctttaaagaagacgccatacaactaggaacatacaatcattagtcatatatacaatgcctctccaagcataaattatcaggccaagttcatcttttaccttaaattgagaaaaatctgcggaaatcatccatatcatgcacgtgcacactgcacactgcaccatatggcagtaacaaagaaaaataaattttaagaataaaaaggagttgattagttaaatacattacctgattaggattcaacttcaactccat

SEQ ID NO: 9751 - DNA, 730 bp, Gossypium hirsutum
  misc_feature (525)..(525): n is a, c, g, or t
  misc_feature (528)..(528): n is a, c, g, or t
  misc_feature (531)..(533): n is a, c, g, or t
  misc_feature (551)..(551): n is a, c, g, or t
  misc_feature (554)..(569): n is a, c, g, or t
  misc_feature (572)..(574): n is a, c, g, or t
  misc_feature (576)..(576): n is a, c, g, or t
  misc_feature (579)..(580): n is a, c, g, or t
  misc_feature (582)..(594): n is a, c, g, or t
  misc_feature (613)..(617): n is a, c, g, or t
  misc_feature (619)..(623): n is a, c, g, or t
  misc_feature (625)..(626): n is a, c, g, or t
  misc_feature (635)..(642): n is a, c, g, or t
  misc_feature (644)..(646): n is a, c, g, or t
  misc_feature (649)..(655): n is a, c, g, or t
  misc_feature (658)..(659): n is a, c, g, or t
  misc_feature (662)..(662): n is a, c, g, or t
  misc_feature (668)..(672): n is a, c, g, or t
  misc_feature (676)..(677): n is a, c, g, or t
  misc_feature (682)..(686): n is a, c, g, or t
  misc_feature (694)..(696): n is a, c, g, or t
  misc_feature (699)..(700): n is a, c, g, or t
  misc_feature (711)..(712): n is a, c, g, or t
  misc_feature (715)..(718): n is a, c, g, or t
  misc_feature (720)..(721): n is a, c, g, or t
agacctcacaccagacttcttcacttctcgatctgtttccctttcagatgaatgtactgcttcttcagcttttttctaacagagtatacgacataaccctgaaaagaagaaacaaataacttcatcttcatcgatgttttttccaagggaagaaactacggcgcctcatattttcatgcacatttaacaaacaactcaaagatggattaacattttcgcctattccatagtctcgtaaaagtaccatgaaagcccttgtagtaggagttagattgcgctttgccctgtctattaaaaaaaattagcaaattagtccttgtacattaactcaaaaaagaaaattggtcatttttatttgtactgttaaaaactgatgtaaaaactgatgtggctgatggaataagcaaatagtaacatgtaacgtgtatgccatgttgacgtatagggaccagttttcaacaataaaaatgactaaattttttaacaaaaggaccagtttgtactttgacctaacgtacagggacnaanttnnntatttttttttatagacnggnnnnnnnnnnnnnnnnctnnnantannannnnnnnnnnnnntttttttgggggtttttgnnnnngnnnnnannggggaaaannnnnnnncnnnttnnnnnnnttnnaangggggnnnnnaaannggggnnnnntttttttnnnttnngaaaaaaaagnngannnntnngtttttttt

SEQ ID NO: 9752 - DNA, 675 bp, Gossypium hirsutum
tcttttatgttacactttcagcacatttttgacattgtaagtacatggtaaaatctcagtagcattttagccaattttaagaccatatttgttgaagcttattcatttttcctcttatattttgctgtgagtaggtacaacaaaaccttgttgggagatgagttggggaagtttcctgctcccttgttgatgaatactatccacttcgcatttcaagctttattatcaaatgcaataaggtggtattggtctcatagatttcagccttcggttccaatgtcatatagggattacttctacagaggtgagtgtatcaaacatatgttcttttctgcttctttataacgttaatatggtgcttgcatgtggtccattgagtaaattttttgtaattatatgtttaaaattgcatcattagccaggtgcatcgttgcacttagatttaaggtttcaaaatgctggtctcctgttcttctacggcttttccacctctgcatttctctgttaattaacttttctatcaactaatgtacagatagactttgcctttcacagttgtacctacagctctttcaactgcactggacgttaacctgagcaatgtatccctggttttcatatctgttacttttgcaacaatggtttgttaactcttctgtactcttcattgtgatg

SEQ ID NO: 9753 - DNA, 628 bp, Gossypium hirsutum
tcaaggtttgtaatgctctgccagagcatctggacatttgaattcctgtaacctgtaaaaacaaaacaagagaaatgtaaattaaatatcttgaaatgccgaaacataaaaatagacgttgataaacatacccatgtagatttgttcttgtctccaataatttagctattgtctccattgcccttcttttcatatacacatatgtggtatggtctgaaccaacattttgcatcaagttgtgtctgtctaaatcattccaaatatcattttcttgaacctgaaacatatacatatttagaacaatagacatcagtaatgtacagtttctaggatacataatttcctgtattatacatgtgatattatatgaaattgaatatcatgagatacccaaacattgattgacacattatgagcaaaaaagcttgaaaatctcaagttacccacaaattcatatcaaccaacaaaccgaataaaaagctcccatagctaaaactacaaacaaaacccaaattaaacaaacagaatgaatacaaaatcataataaaagatgcccagaaagcaaagttaaacaaaaacaaataaatacccagaaaagaatgggggataaaagaattatacctgagaa

SEQ ID NO: 9754 - DNA, 496 bp, Gossypium hirsutum
caaagtaaagtgttctccaagaatcctggtttggccactgtactcaatataaaggaaatttaggaatatccttaccgtttctgaatgtcacaaagcttacatcaaaagcaatacaaaattgtgtgctcagggccactagagaaataaaaaagaaatccagaagtaaaaatgtaagaacagagaaacaagacctactcaattcacaatctgatttttcatctatccactctaatctcgccaaaacaactctattgctcaacatttacccttaataccacatatgataacaaatccttatatttacctgcatacttgtttgaagtcaaatccacaaccgattggccattgtcaccagtgctaaaagacaaggtctcacttttactaatgttctcaatatgagggaagtgatgtctgatggcatagtctgccaaagaacatacaataccaaggtcctcttctcccttagaagcatgtatttagaatgaaccataccgca

SEQ ID NO: 9755 - DNA, 409 bp, Gossypium hirsutum
atatacacacgtgaacaaagccacaaaatgtaagtaacaatgacataaaaaagtctattattcttacataacgccaattctaaatattccataacccaaaaccttaacaataactagaacagagtttgctaggataaaagcctaaagagaacatacattggctgcactgctcctaaagttgactgaggaggatatccaacaccaagtggccctggcatcaatcctcccacaagctgagtagatgggatatccagtttggccgcttttgatggagcttcttcttctgcgagaaatcttattttatgaattaatagcaaatatgaaatcacagtcaatatgcaacagcatcaaacttgttaattaaaatatttgcaattataatgtaaacactccaagcacaagtacatca

SEQ ID NO: 9756 - DNA, 679 bp, Gossypium hirsutum
  misc_feature (338)..(340): n is a, c, g, or t
  misc_feature (355)..(361): n is a, c, g, or t
  misc_feature (389)..(392): n is a, c, g, or t
  misc_feature (410)..(410): n is a, c, g, or t
  misc_feature (412)..(414): n is a, c, g, or t
  misc_feature (418)..(423): n is a, c, g, or t
  misc_feature (425)..(427): n is a, c, g, or t
  misc_feature (439)..(449): n is a, c, g, or t
  misc_feature (451)..(453): n is a, c, g, or t
  misc_feature (455)..(459): n is a, c, g, or t
  misc_feature (463)..(470): n is a, c, g, or t
  misc_feature (475)..(487): n is a, c, g, or t
  misc_feature (489)..(494): n is a, c, g, or t
  misc_feature (503)..(510): n is a, c, g, or t
  misc_feature (512)..(513): n is a, c, g, or t
  misc_feature (518)..(520): n is a, c, g, or t
  misc_feature (522)..(526): n is a, c, g, or t
  misc_feature (534)..(542): n is a, c, g, or t
  misc_feature (550)..(555): n is a, c, g, or t
  misc_feature (559)..(565): n is a, c, g, or t
  misc_feature (569)..(572): n is a, c, g, or t
  misc_feature (575)..(577): n is a, c, g, or t
  misc_feature (586)..(588): n is a, c, g, or t
  misc_feature (591)..(608): n is a, c, g, or t
  misc_feature (610)..(620): n is a, c, g, or t
  misc_feature (627)..(629): n is a, c, g, or t
  misc_feature (632)..(634): n is a, c, g, or t
  misc_feature (646)..(656): n is a, c, g, or t
  misc_feature (662)..(669): n is a, c, g, or t
aaagaatccctttgaagtggcaactttagtctttcctcgtacatctttgttgccatggcattagcagttccagcaggctgacgcatgagagagtcattcccaacaagtccatttgtactgccatttaggagatgagacccatcccttcgttgttggggctgttgcggctgctggggagactgctgctgcggctgctgttgttgctgttgctgttgttgttgttgttgctgctgctgctgctgctgttgttgctgctgctgctgctgctgctgctgctgctgctgctgctgctgctgctgctgctgttgctgctgctgttgctgctgttgttgttgttnnngctgctgctgctgcnnnnnnngctgctgctgctgttgctgctgctgctnnnnatgctgttgcttgatgcngnnnctgnnnnnntnnntgctgctgctgnnnnnnnnnnngnnntnnnnntgcnnnnnnnntgccnnnnnnnnnnnnnannnnnncccccctcnnnnnnnncnnaaaannncnnnnntttttttnnnnnnnnncttttttnnnnnntttnnnnnnncggnnnnctnnnttttccttnnnttnnnnnnnnnnnnnnnnnncnnnnnnnnnnntttttcnnnttnnncccccccccttnnnnnnnnnnnttttcnnnnnnnncccccccccc

SEQ ID NO: 9757 - DNA, 623 bp, Gossypium hirsutum
cattgtaattgcgtgatctaagccaggtagcatatgtcgtctcctcatctaatggctcttccctgtggtcattgttttcgtccaggatcatcaaggaatatcaaacgtggcaccaactgatgctccattgcgttcaatacccatcccgaagacggaaagcagccttcagctagagacagccaataacatcatagaagctagaattcatgattgtataagcaaccttcggttttcaatatctccaacagcattttttcaggttaggaccttgagcctgagttcctttcttttctggttgaaacgtttttggtggtaaatctggataatttgcaactgcaactctattgcaggtcaatactcttgctgctgagaaattatactcacttgctggtgagtgggctggtttgggtcctgataccttactgtttgatatatgctgtgggaccggcacgattggactcacgttagcgcatcgtgttggtatggtaataacaccatccaattccctcccttcatcatgcacgattgagactctacatccctgaatatatgacatagattgagctccatgttggataataattgaaaagagttactatgctgaggcttgttgatgttgtact

SEQ ID NO: 9758 - DNA, 633 bp, Gossypium hirsutum
atccatgtcattcaagtgtgatcatctacaatagttaaaaaataccaatgtccactatgtgtagaaacacgatatggcccgcaaagatcaatgtgtataagggaaaaaggtttgtcttcaagagaagtactaataggaaatggtaagcgagtttgttttactagagtacaaacaccacaatgttgaatatgattattatgggagaaattacaatgtaattaagacattttagacaatgtgctcatagatgtatgcccaagcctagcatgccatagtgtactaccattaaaatgtgaagaatatgataaacaagcatttgattgtgtaacatgtaataaggtctttgaagaagaaaactttgagaagggtgacgactacaagatgtatagacctcctctaactttaccagtccacttcatctcgccactgcaaaggtcccgtagaagacaaaaatgtggataaaatattacacaacaactgagctctttggttaattgtaaaatagacaacaaattgtagtgaaaatcaagcacatgtaaaacattggtcaagatatgagtaggagacaaggtatctgtgccaaagtgtgcaattttggtggttttaccattcagaaattgaacgaacaaccga

SEQ ID NO: 9759 - DNA, 376 bp, Gossypium hirsutum
ttttcgacattgtcatcttgattttttcacttacagtgatgcgtatcagaaaccccaagttcaggctcacctctgtcaccgtcgaggatctcacggcagcccctagccctgtttccttcaacatgaaactcagcgcccaagttgtcgtcaagaactcaaacttcggccacttcaaattcgacaacaccaccatttggttcgattacgggggagttggagttggggaggcatttgttgcaaaaggaagaagcaaggcaagatccacgaagaagatgaatgtgaccgtggagttgaactcaaacaatatacccaataattcaagcttggaaagtgagattaaagcagggtttgtggcactgacaggccattccaaata

SEQ ID NO: 9760 - DNA, 466 bp, Gossypium hirsutum
gagtttaaaacccgtgacaagcttgagatgtaatgatcctcctccaatcattctcaagtcagtgtaactggaaacatacataaaaccgcgtgcaacctgtcctgtatgttgtcttatcatattaagtttctactctgttatcacaattgaaaagtagctatcaggcgaatggtacttggtaaagttcttgctgtttttccagttcattaatgaatttacccttgaaacctaatttctaggcaacttgtcctagaatgtggaattaccattgttaaactttaaatcatgcaatagaaaagtctaaaaaccagacaaactgtttatcattggtttcctttcaggccctgatgtagaatgtcgtctactatcttccaagtttcttgggacatggctgattcatggcatgatggttgacctgctaaaaaaaagtagctttagaagaaatttgtatgacttggtaatcggg

SEQ ID NO: 9761 - DNA, 535 bp, Gossypium hirsutum
ttcaagttctccagaaattccgaaaatggatttccaacttctttgccttcatttgcttcgaaatattcttcgatctttaccgatgtagattcacaaccccgaggggatctattctcttcaaatatataatctgcaacacattcattcttttttgagttcattaaagaaagagtatgagaagcatcaaatagtgaaaccaataagcaaatttctcactcgtcttatgcgaccctatgaagtccatgtaagccggattgtgcagtacagcattccatacattcggatccgcagcaattgacgcaaccatagactgggagcaaaaccaaaaccatcaataaatagagttatatgttcacaaactaatcgaaagataaaaggttctggaaaattgacaaccaactactataagcatcatgtaatctctatccaagtttcatattcaaaagtctcgaaaaccaactcgaagacaagatatgatcatgaagacacgtcaaaaagtgctcaagtcacaaaaacccgatggaaactcatctac

SEQ ID NO: 9762 - DNA, 665 bp, Gossypium hirsutum
tcagagtctaatcatgagtggaacataattgttccaattatcttttcgtattagagttgtcatgactcgaatcgagtaaatcatcccgatcaattgaaacctatatatgatttaactcaatctgatcataaaagattaatgacctaaagctatctaactcgaattcaacctgaattccgattggctgtacctaaaatcaaaacaattgaaaactaaaataacaacgatccgagatgatttaaacatgcaatgactcaatcagctaaaaacaccctaaatttgaatgattttgtacttataactcaaaacttggaataatttaaatttaacatgtagcacaaatttaaaattgacccaaacccaaatttacctggctcattcgtggtcgatctcgagctgaaagttgaacacaagcagcagcacaagcaaccatacgaaccatctcgttgtggtcatattcccttcctaatttcggatcagccaaacagtcgaagttcccatcatctaaagcttttgtgagcaaaggtcttgcctgtaaatcccaaattgtacgtttcacttaataatgattctaagttgatttaagaaattgaacctcggtatatgcaattaattcatgaagagggatgaaaaagagaaaataagaacttaacccaatcagctaa

SEQ ID NO: 9763 - DNA, 639 bp, Gossypium hirsutum
aatatgatcaatggctgggaatttgaatcctactcatacttcagcttaatatttatttattcaacaccctatctgtaaattattggtatacatgggtaaaagtaacattgtattgagataacatatttcattgaggacaacatgtttaagaatagaactataaagaataatgtcacattttgtagatgtaattttatgaaatgtttaacgtggtatttatattttaaaaatatttaatgtgatatttgatctatcattatatatttaattatggtatttataattttataatatgttcaatatatgtttcatcataaaatgtatattaatagtttaagtaccatatgggattttttataaaagtataagtatcataataattgatagttcaagtaccacattaaatattttttaaaatacatgtaatatattaacattttgtgaaagtacaagtaccataataaaataataaaatagatatcggtagctgatgtatcacattggacactttataaaattaaaggcatcaaatataagattatcccaattataaaattattggtaaaatgcagtcatgaatgtaataataactacgtcaagacattgactttactttgtttggctgtatttagggaaaat

SEQ ID NO: 9764 - DNA, 533 bp, Gossypium hirsutum
atggcgttaaagttttaagcaagacaaaatttaaacaaaagacaaaaaatacgatcaaaattaactatttactaaaacaaaattgttaatttcaatcgtactttttgtctttaaataaaaatatcaaatgataaatacaaaaaaaaagtatgtatcaagagaaataactgatataatatcgataatcataacagaaaataaatttaatcactttttaattcaactcgattttaaatatttaatctcaatgtaactatcgaatatcgaattaataagatgtaagaaaacaacgaaaaaaggccgacatttaacgtactttttcagctttttttaatattaattcattttctcgcccatataaaccacgcacgtgtccaaaccttggttccgccagcaaaggcaggaccgttgatggatccacgtgcttagggaccaaaccttcttccctcatataccctaatagacccaccgacaatgcttcgaaatataataattgtttggttaaaatttgtcatcagtctccttactcttat

SEQ ID NO: 9765 - DNA, 417 bp, Gossypium hirsutum
actgttgatagcctctacagttctatttatccattctggtcaaatataatttccagttgtcaatcaaatttcatctctgagaataaatataagttgttattgtttctgatgttatcacgaaagtagaagccctcataccttgttggaatccattgagtcatcaagataaattttaaagcctctgctggttctctttttgtattataatgcaggaatcttttcttgccttaaataggcttagagaagaagtagatgctgaaaagagtcgatcaaaatgggataatccaggtcgtgacaaagatttggaagtgtccattagagcgaaaaataatgcttgggccattgctcgtattactggagggaaggaactttatatggttttagagaaagctaatgaaactctcctctatgcgtcaa

SEQ ID NO: 9766 - DNA, 664 bp, Gossypium hirsutum
cataatccatcgtatgctcccgatagcttaaattcagcagttgaacagattccaatttttcgggaaaatctcatcttctgtcttccatgatcatccctaataacactaccagatgacatttgaccagtctctaacatccttgcaccatatgtgttcactttgtaccattccaccttcggtaacctccaacaagtttccctactatgtttaatgaattgtttatcaatgccatttatatgttgttgcatctccatcaccttctcaaaaaaatggagaactttttatataatacctttaacgttcagataggagctattaaagaaaacatcattgtgattcttccacaagcaccagcaaatggctccgaacgtgctaccctaactataatcattacatgcaaacttagaagacccaaacatgcatgcaaatgtccattcttccattggaagatgcatgaactccaataacatataagatctaacgaggagagtccaaactgaagtgaccaagaaacattcacaaggtacatgactgatagtttcaatatgattcccacaaagacttacatttacaattaatagtcatatgtttgttggctcttacctcgttcgtaaaaattttattatatgtggttaaccaaagaaataccttcactcgttgaggg

SEQ ID NO: 9767 - DNA, 754 bp, Gossypium hirsutum
  misc_feature (63)..(65): n is a, c, g, or t
  misc_feature (567)..(568): n is a, c, g, or t
  misc_feature (574)..(574): n is a, c, g, or t
  misc_feature (582)..(589): n is a, c, g, or t
  misc_feature (591)..(601): n is a, c, g, or t
  misc_feature (603)..(605): n is a, c, g, or t
  misc_feature (610)..(616): n is a, c, g, or t
  misc_feature (618)..(638): n is a, c, g, or t
  misc_feature (663)..(666): n is a, c, g, or t
  misc_feature (669)..(671): n is a, c, g, or t
  misc_feature (673)..(673): n is a, c, g, or t
  misc_feature (676)..(677): n is a, c, g, or t
  misc_feature (679)..(690): n is a, c, g, or t
  misc_feature (692)..(692): n is a, c, g, or t
  misc_feature (694)..(694): n is a, c, g, or t
  misc_feature (703)..(705): n is a, c, g, or t
  misc_feature (708)..(718): n is a, c, g, or t
  misc_feature (724)..(725): n is a, c, g, or t
  misc_feature (728)..(729): n is a, c, g, or t
  misc_feature (734)..(740): n is a, c, g, or t
  misc_feature (742)..(743): n is a, c, g, or t
ttctctccaaacgcatctatgcaaagtacaacaagaaaggtcccaacgtggacaaaatcaaannnatgtaatattcagaaaaatgtctagaaaaatgaaaaccctggtttgcctgcggtacctccagctttaacaatgtcaacaagatcatcttgaagaatgactagaattgaacgggggattacaccaacacccaaaacctgtgtgctttcttgaatttttatttcctggtaatcatgacagaccgtggtattttctatacagaggaatttagtgccttcgcaaggattggacctctgttataaacaagtaatctgttaccaaaatctgaagtacgatcacatcaacatatatagaaggcaaaatactttcaaaactacattttaagctaaaaaaagaacaaaaggaataaaacccatgcagcacaagttaaaggaagtttaaggcataataataaacctgagaggggcagattgacggaagtgttattgagtttcttgtttcaagttcaggataaagaggaaacctgcaaacattttcacagtcagcttatgccttgaaaaactnnactggncttcaccnnnnnnnntnnnnnnnnnnntnnnatttnnnnnnntnnnnnnnnnnnnnnnnnnnnncttttttttcccccccccccccccnnnnttnnncncannannnnnnnnnnnnancnttccacttnnnttnnnnnnnnnnntttttnnacnnttttnnnnnnnanntcttttttttt

SEQ ID NO: 9768 - DNA, 687 bp, Gossypium hirsutum
tagataaagggacctcaggtaggataagacttccaactaatgtcttaggtgacaaatggtggaagatatacaaagatggtgaagataatgcaacgatgaggagagatgggcgaaggggcttttcaggcttaggaatagaaaacacaaggaatggcgacgcaagagatggtgatggaaatataaagttgttaagatcttcctgaaagaatctagatggtggggggatttctgttatgacatcttccatttttaaaatttaaagctcaagctctgcgcattagccaattaagcaaaacagaaatattatcagtatcaatctccagatctcagggagataaagaaaacagttgaacctagttctctagccaaaatgtacgaggttaataaaatttcaaaatttcaacaaagataataaatgtctaagtattaaagttcattgcttttttagttagaataaactatgaacatcatcatttggcatttctcagaaggatggatagtccaacatcaatgaaatttcatagcatacttcactaaaccagtaaaaagtcggttacttccataatcaaccctaatgtaattttcacccccttacagtcattaaatcaccctttttcccctcattcaaagaaacccaaatttccttagtgtcattttgtcaaatatttcacatgcataacccaggaa

SEQ ID NO: 9769 - DNA, 602 bp, Gossypium hirsutum
  misc_feature (582)..(599): n is a, c, g, or t
ttctgcacatttgcatgaaaattggcctatcttttgccatccatatcatcaagaaactagatgctatccacacagggaccaagcttaaaccgaggcattacctgaaaggtggtatcctggtctgtccatacaggttgttgcatagaaagcggtgtccttgttgtgaacagaaacttatccaacttttgaactgtaattccaacacgtgttgctagttcttctttggaaggacaatgatttccttctcgaatgtatgatctctttgccttcactactttgcccaagaggctgtatgcattctcctgaaaacattaagtaggttctttgctggtatgatgcttctcaaatatataaaaagttatatgcctgacttaaacatataataaactcatatcatctccagcaacttgaagagatattgtctcatccattattattatgttagcaaaaaaactataaactttcaatatacctacaataccatgttaaggtagcatacatgatatcaagcataaacacaagaaattgtaattaccggcaaacgaatggttctggaatgttgcacaatagacttgtaatgtnnnnnnnnnnnnnnnnnnttt

SEQ ID NO: 9770 - DNA, 609 bp, Gossypium hirsutum
ataatgagaatgcacaactttttctttctttaacatcattaggggaaaggaatagatattcaatagcaagaataagggaaaatgatctttaaagtcttaagtaacctttttctgggctcatatttatagattcaaatatgtcagaggtccctgtactcttcacaaacagaatttagtccatgtacttttattttcaggaatttagtcatcagcttttcagatttcaaaatttagggtttaatttttaacatttgtttgtttgtttaatttgttggttgacattttgaagtaaaaaaaaaattcatttggtagtaatgtaactaaaaaaatgggttgtaatgaacttgaatttaacaaaaacattttaacagtgttaatagttggacttgttttgaaatctgaaaagtaggactaaattcttagaaataaaagtataaggactaaattccaaatttatgaagagtacaaagactcatggcatattttaaccgtatatttatgttcaaacttagtaggttagggttattgttgttggaaaattgtatgtatttatatgttcaaacttgataaaaggtagagttcacccaaaaagggaccgaagtttatctt

SEQ ID NO: 9771 - DNA, 564 bp, Gossypium hirsutum
ctgaaaataaatccttttactttttcaattataatttctatgaaacattagaattttttaaacaatttttaaaaatatatatatcatataatataaataaattcaattttcagacggatactacatggatcttatattaatagataaaagtaatggagtgtgtatcttaacccccaatttacaaatcatatttagtaaggaattccataatttgcgtgtaatataaattttttttttctatatatgtatttatttcactttacattttccataaatttttagatatcaaaagaaaaatataaattatatatttcaattttttttattatttatattcgatttatcgtttttgttcggtgttccacaataaatggataaagtcttaacttcattagttgtcctactgttttgtccctttctatttatggtgtgatatgcaattactcataagtctcccttttgcattaactattgcactatttaagttaatatttgactttgaacacctttaatacttaatttactacgtaaacgaaagaatcagcctgctagtttgatcacata

SEQ ID NO: 9772 - DNA, 645 bp, Gossypium hirsutum
ttcagcaacttgtcttcctaacgctgctcgattggttggccattggtaattgtttctagcaatcctctcaatgatttcataagccttgttataagacttagaaaggagagcaccgtttgcagaagcgtccattaccatccttgtgtgagcattgagaccattataaaatgtttcaagttggatgcaatgtgggattccatgatgagggcactttcgtaataactctttgtatcttttccatgcctaatacaaggactcatcgtccatttgttggaaggtagtgatctcgttcctcaacttagaattcttgctaggcaagaaatacttcataaggaatctttctgctaactctttccatgtggaaattgatttaagtggcaatgagttcaaccaggctcgagctctatccctcagtgaatatgggaatagcttcagtcgtaatgcatcttcgggtactctggctaatttgaaagaatcgctcacctccataaatagtcttaagtgtaggtgaggatctttcgtaggcattccactgaattggcccactgtttgaaacatctaaaacatgattggcttcagctcgaactattgtgcctcaatttcgggtctcctaatactcagattaagatcatttaatactggcac

SEQ ID NO: 9773 - DNA, 589 bp, Gossypium hirsutum
  misc_feature (510)..(514): n is a, c, g, or t
  misc_feature (519)..(523): n is a, c, g, or t
  misc_feature (532)..(532): n is a, c, g, or t
  misc_feature (543)..(545): n is a, c, g, or t
  misc_feature (548)..(548): n is a, c, g, or t
  misc_feature (559)..(561): n is a, c, g, or t
aatttgagaagggtcaaaccttgaatccgccatatccagttcaagtctctgtttaggggtttcatctatttccaactcaaatttggttgaggattaatgttattatttgatattaagaaatattaaggaaaacaaatatttttaaattcacttaaagtcaaaattttgagttaacaataccaaacagtttcaattatcatctaaattttaaattagttccaatttttgaaataatattattttatagatgtagaacatttttaaaatacatgtggatataataaaagacaaacataggaaaaaacttttaaggtttatagaataactatacatatttttacaatttaactcatgagttctgttgagatttaacacaaaattttagaatttttagtgctattaatccaaaatatttgtagcagaaaaaataaaaaaagaggaaaccaaaagctggttactttcatcacacaagattttaatccagggatgtttgtaagaaagaagaaaaannnnngtttnnnnnactcgcgcnctaatcctctnnnacntactaaatatnnntgaacttttagcttttcctttgtcctta

SEQ ID NO: 9774 - DNA, 144 bp, Gossypium hirsutum
  misc_feature (50)..(54): n is a, c, g, or t
  misc_feature (118)..(119): n is a, c, g, or t
  misc_feature (122)..(122): n is a, c, g, or t
  misc_feature (127)..(127): n is a, c, g, or t
  misc_feature (129)..(129): n is a, c, g, or t
  misc_feature (132)..(135): n is a, c, g, or t
atctggatgtaaattcatcactgttttgggtgttgattttatgtcagaannnnntcgggcaattcttgatcaagctggctttggagaggtatattttctttctttgcttttcattttnnatngagtntncgnnnntggatcata

SEQ ID NO: 9775 - DNA, 536 bp, Gossypium hirsutum
gggattgctgcaattctagaaccatcagatgatgtattaggggaggagaatggtgacgaattgccagaaaatgatgagaacacttcagactcagaggacttgggtaattacttttgttgaatatatgtgtcaagtcatttcacatttactcactaaatttcccatctttctattatgcccttagcaatgtctcacttgtttttagcctcatttgatctgacatgatattgccagaggtctctctactttccgattataagaaaagttatttgtttacagactaaaagtaataagagagataaaatggaaacacacatactttcgaacctactaaagtggcaggggaaatatgttatactgcttactaatgcaaaataaagtggacaaggacactgggtttatcattgtatcagggaaaattgcgatgctattggcatcgaagtgaaagaaaaaagttggttagtgtgggtgtagaaagttttttggttttttacctgtgtgatgtgtattgggctccactaggccttgattgtatt

SEQ ID NO: 9776 - DNA, 407 bp, Gossypium hirsutum
  misc_feature (379)..(388): n is a, c, g, or t
  misc_feature (396)..(397): n is a, c, g, or t
gagaggaaaggatggaaggtgaagatacatgatctgtccggcttggctgttgcggcagccttcataaccactccctttgtgccatcaacaggttgtgattgggttgccaagtccaacccgggagcttggttgattcttcgtcctgatgttgtgaggccagagagctggttaccttggggaaaacttgaggcatggcgtgagcgtggcttcagagacgccgtatgctgccgatttcacctcttgtctgaagctcaagacggagcagaggttctcatgtctgagatacgtattagcgctgaaaagggtggggaattttttatcgacaccgatagattaatgcggcaagcaccaactcctataccaagtccaaagatgagtnnnnnnnnnngctggatnnatattttgtg

SEQ ID NO: 9777 - DNA, 400 bp, Gossypium hirsutum
tgaggcagtaactcaaatgatggtacagatgcagaattttgagaattttgagactggtgctcatcgtgtgaggaagtagttgagtgatcctgagatgaggaagtgcaattgatgttagaaccattattctgagagttgaacggattaaaaccagaatttggagaatgagatgggtgagcagtagatattggtgattgcgacttagattgctgcaaggaagaacaaaaattagtattagtagttaaatcaagtaatgatacaataggtaaatgtattgtagtaaatggagtgcgtgaagaaggtgaagaagtgggcatttcattctttattgaaaaaggaaaaatatcttcctgaaacttaacatgtcgagatatataaattcgaccatcaggtgcaagac

SEQ ID NO: 9778 - DNA, 509 bp, Gossypium hirsutum
cattaaattatcaataagtttatattttgattattcaactttaaaaaagttataaaataattattaaattattacaaaattttcatttaagtcacaaaactattcgaaagtttttatttaagttattgggctattaagttttcctttttaaaaaggtctagttagtaagcttcaagtggcgattcgacaatcggtacagtagatcaatactcgttgatgagtagaagaacatatattagatccgagtcgatctggctaccagtgtcaaagattggagaagaaagttgtttcatagaaaaaaaatgaactattaaagagagagaatgcgagcttttgattggtgcaagcggttagaatagagaagactagaaagccacgattttaacaacccggtaacttaaatgaaattttttacctaatttagtgaccattttgtaactttttgaaattgagtgaccaaaatgtaaacttactaataacttagtgacattttgtgtagtttgcccttc

SEQ ID NO: 9779 - DNA, 650 bp, Gossypium hirsutum
attaatgctgagttcttgtggtcacatggagtcatttcagatgaaactctccttttgagtaagactgtatgtaatgcatcaaggcaccttaaagagtccattcaccagaatctgtccaaagaatgcatacatgtgcttaacaaactagaagaagaaatgggttcatacactgaccctggagacctgattttgcctatttgcttctcaccaactctactcggccagactttttttcagggaacacacaatcggttacattggaaggtaggtaattaacagcattaacacaaaggcatgaaagcgactggttcttttccagctaacaattgtctttgattattctagcagctggctatgagctcggctgttgccactgatccatgccgtgtagatgagatacgtcagtacctcaacacacctaaagtacaagaagcacttcatgcaaacacaactcacctctcttcagtttgggaattctgtggagggtctctctttctctcaattggtaatttggcatatgcttctgcatgtatgcaagcaaattaaacaacttgttataattgcaggcatctttcctatcaaagagagagtatagggatcaatatcataccccttctgtcaaaactcctcaaaagaagtattccagttct

SEQ ID NO: 9780 - DNA, 603 bp, Gossypium hirsutum
ttgggttccgggaaggatgcttgtacgttttctttaacccaattcatcgcccgatcttctcctgtgctcatttctttcaagtacccattgggaagtccaactatgacttctataccagaaccgttgaaagccgtaagaactccatgatcagcatcgtagattcgaatgtggtttacctttgcggcttttaggagggttactacactttctggtgccggtaaattgtccgctattctcccgtagtttattccatatgtccatgtcactgaatgttttgttgatactgcacaacgtaaaataagctttcataaacacacttaactaaccaatatatatatattgagacaagcatgctgaagaaatattggtgaaaaaatcgaatcaaccatatcggtgattgtgaacaagagacttttcacctacatggattttttagctaaaatattcttatggataccaatgatgtggaatgatcttaaaaagaaagaaaaaaaaagaagtatcccacattcaccttatgtcaagtaattaagttatcttccatattcaataagtaagaaaccaataaaaaaagaaaaagaaaaaaaaaagggcccttcccaa

SEQ ID NO: 9781 - DNA, 633 bp, Gossypium hirsutum
ttaaaaaaatcagtatataatccaaaggatttagtagtcaagagttgggtataatggcgtacagtcgcataacatggagaggctttagcaaccaagctccagtctactttggtatcaaatggcttgtagcagaagacaccaactaaagagtcagatgtagttgcactctgcaagaacaaatataaaattaaggttggtccaatactatgagaaaagaaaagtaaccaatcagcaacaagaacattgtaaccaataaaaaatgcaattctgaagaatggcaagaaattaaacctcagcaagaagaccattgggagatgataattgatatgatcccagattcacgtcaaatacttttgtctctggataaagcttaatggagcaattgaggccttcacatgataattcagcaagacatgtacgggccccatctagaagctttgaagcattacgtttcatgtgaatttccagagaagtctgaagaatatcaggttttgcattaatcataagtgactgatcatcatcttccttataacctataattttgtttaatttctcccagtcctcttcactgaaactgaatgattcactgtcatctttaaaagattgactggccctggattgtaaatgattcac

SEQ ID NO: 9782 - DNA, 605 bp, Gossypium hirsutum
tttctttatttcattttaattcctcttaaattaaaaaacatatatttctccattattatttcttcccatttaccctattttcaatacccaaactcccatttttctctttccctcattcctttctctttactctgagaaattcgctacttggggcgacgaattttcgaatccaaaaacctaactgaacaataagatgtggagcatcggaaccccttattccctgtttggctcttcttttttactctaaatgctcttttatatgaagcctcattggctatctccattttttccggtatgttcatttttcccaacccaaattcggattcaatctcatattaatctttcttcacaataaaattaaagttattttcatatccgattccttttagcggtacctgacttttaaatggatttttttttcttttgtaattacatttggtgtgttgctatttttcgcatctccgtaagaaaattcgtgtcttttcttttttcctgttataaattattgtactttgcttcgtctttttatttactatgtttgtgggttttctggattttgcctttttttggaatatcgattaaagctgatggcgattcttgtgtct

SEQ ID NO: 9783 - DNA, 472 bp, Gossypium hirsutum
ccctcctgtaaagtaatcaacacaatttacacctttctgatgggcatccagagtaaaatttgggtcaggggagccaaggttccaaatctggaaatttcaaagagagccaagactgatttagcaaaggttatatcaaatgaagtaagaaataaaacagaaaaaaaaaatacatacagaaaggtgtcctttgtacctttatagtacggtcaagagatgcactagcaaaagtattagtgtccttcggattaaaggtcacttgcatgacataatgggaatgtccctcaaatatctgagtacacacccaacccttatcccaatcccaaagctttatgagcatatcatcagatgatgacaacacataaggaagagtaggatggacagcgacacatctaatgtaatcggtgtgtgcctcaaatactttgaccttatccattgggttgtaattgtatactcaaataaacatgtcttcaac

SEQ ID NO: 9784 - DNA, 453 bp, Gossypium hirsutum
  misc_feature (23)..(24): n is a, c, g, or t
gcattgagcaattaaaggaaagnnaatctttgccatcggctccaacaggcataaactcattccggatcaacccttcctctctccctccattaatgaacaccttgacaagcacttccgcaaccttcaccgctgccatccccacatcgctgccatcgccaaccaccatccacgcgtgcctatacttcccaacaacagctctctcactcccacccttcaccaccgccacactatactccttggttttcccaccaaaaaccgacgccaacctctcatcgaccgccacgtcatcgttctggacaaaagcagcggcggtgaccgatccgcactggtaagaactcgaatgtggggacgaggttgggcctcggaggcaacgggaacctaagtccacggtgacggagagagtgtagttgtccgagcatttagggttttgagaggtcagtcttgtaatttcgg

SEQ ID NO: 9785 - DNA, 644 bp, Gossypium hirsutum
ctagactctttttggctgctttaaataagcaaaattgcagcaatgcatgaatctagacagaaggctaacaacaaacatgatatctagccttgtagatgcctagtagagcagacaacctacaaggcttctatactcaattttatcaaatctttcatgattgccattgctagttaatttttcaccttgagccactggtgtgctaacaattttgcagtttgacatgcaaaattcgtttaggatcttcaaagtaaaggcctgctgacttatcatgatagcttgattagtctgaattactttcatgccaagaaaatgtcatttcccccaagtcagtcatttcaaaaacatcctgcatctgcattttgaactcatcaatgagctctctcttgcttccagttactaacaagtcatccacataaagtgacacaatcagcagagtttcactctctgatttcttcactaaagagtaggctcactgacacttttctcgaactcgagcctagacaggtatgtatcaaccctatcataccagacccttggtgcttgcttcagaccatatagggcctttttcagcttgtagactttttcctcttcatcaggaaccttgaacccatctggttgttcaataaagatttcttccttaagga

SEQ ID NO: 9786 - DNA, 424 bp, Gossypium hirsutum
tgtatgtcaagagaatagaacactttcaccttcaatccaaaatttactatcacgtgctaggagtgggaaaaaagagagaatacaaacaaaggaggaactacactcaccctaattgataaggcagtgaaatgaccaaggtctgcaaacatagcttcggtgcctgatgaaacccaaaaattgcacatgatcactaactcaaaccaacaaccatctaagtcaattaaaataaaagttatgctgtaatctgttgatattcaaatgcaacctaccagttactgaaagaaggatccctcctagcgaaaaccagccatctttacctgtctctctaaagaacttgataatataatatggggaaattgcacgaacaatctttgggttccaaaatattatgttgtacaagccaatggaaaaaattgataccagc

SEQ ID NO: 9787 - DNA, 422 bp, Gossypium hirsutum
ctgcaacactgaagcaaaatcttgtcattactacgtcagtttttctttttggccaatatacaattccttgatataaaaaatttaccagtatagaattaaaaacaaatgactaagattcagagttaggagtccagattttggacagtaacctttacccactattgtttggggttgcagagattgaggacaaacaaggaaacacgtttaaggtcgtttagacaagaaattacaaaatttggaaatgtcttcatgagaacatgtggtttaatgagaaacgaagacagcagaagtcattcctggaaactataaaggaaaagaccatgttttcactgagctcactgaggatattgtcataaacaggaaacagtggcagaacatgatagagaactgagcatggtgagaaaaggcctagttcatggttc

SEQ ID NO: 9788 - DNA, 656 bp, Gossypium hirsutum
cttcatcactgtgagagagtgacttttttcagggggagttcatatttgttgaagtgttttgactttgatttgtgttccccaaacaaaatcaacagtaagaactgctgaaaaagaaatttttttttacttctaactggatattttcccattattaacttttaagattctgagaacaaatcagtactcaaggtggttcctgctccatgaacaagagaagcaaacaatttcgggagacagtagcatacagttacatacagaagtagagaattagttttcctgaatcagataaccacaagtagtaaatttaccatcataaacattgccgtccacactttctgattttgatgctttcggaaaacataatattctccaattgctgttaaaatattcgtcatgttctttaggatggtcaccattgctatatttatgtatttcaaactgaaatgaaaaacacagaaaattgagagttggagtccacttagcttcactttttgagtaaataatatacgaggaatgcgctggaggtgcagtctgtaacatacctatacattcccgacacaagcatgccaacaaagattatatttacagggagccaaaccctgatcagcttccaattcagcttttcgactgaaactgctccacacagtcccaatata

SEQ ID NO: 9789 - DNA, 536 bp, Gossypium hirsutum
tgacaagatatccaagccaaacatttccataataatttgctttttcctagatttttctccatcctttaatcatgagatttagcaaaaggtgaaattcagattctatcaaacatgagatgagactcatatgaaccccaccccaaaggccaagccccatagcagctattaccaagaaatttgcagtgagaatttcaaaatgaatgacttacagaagggaccaactttcactgctctcaaaacatttcttcaaatgcatatccttcatttcttgaggccgtatacggatcgtaagtaatcaaggatctctgcacactctacggcacttgcctcattacaaaatacttcatcccataccttgagaagatctgttcaatagcaactcaagtcagcattctgattcacttctctaccttgttcaaataaagagattttttttcaggttaattgcactaggtagctccaaactaagagctaaattctagtaggtcctttcatcagtttagctatctgacattaaatgctgcttggatctaaca

SEQ ID NO: 9790 - DNA, 642 bp, Gossypium hirsutum
  misc_feature (300)..(300): n is a, c, g, or t
cccatgtgttattgtccttatcataagcctccccacaagtgagctgattgttgtgctcatctctcccaccaatcacataaaacttgttgtccatgaaacaacctgagcaaagcttcctcttctgatgcatcctaggcagcaactcccacgatttcgtctccgggttatatttctcggccgaattcgagactctagtatccatcccaatcccaccagccacaaaagaaaaggtgccacaggttgcagatgcaaacaagcacctaggatcaatcatggaaggacccttgaaccatttacctntttcgagttcaaatctccacacaacagaaccaaatgtttccctgccggatacaattaaatggctcccagcacaaactgattccttatctccatttataaagcatatatccaatgatggtaactctgggagcttcctgcaagacttgaacagcccatcacatgcccaccaacagttttggccactaggtgacatgaatatggatgattctttgaacccaatttccttcctgattttgttcaactcgccactctttagaagatccgagaaatgcttgtttagcaagtaaagtttccaatgctccgacctcggaaatcgagccaagatcaagctctctagctcat

SEQ ID NO: 9791 - DNA, 624 bp, Gossypium hirsutum
gggaggtttgtcatgcaaatcctcctattttgcactcctatttatttggccacttcaatttagcctatagcattttcaaacattttcacataggtcctatttcataatttcactccctttttcttatggaacaaaaattaactaaaattaccgggttttatcttaagcttgggccttctagaggcccactaacataattaaacctatgccaacatttacaggattcccgaaaattggggcgttacaagtaaacagacttataaagctatgtcctcgagtgtgattgtacacgcaccacatggaagatgaaaagtgtgtgtcttgggcctccatctttccaccagtgcgctgacgagtgtaggatcaagtttgtagtccccaagcgtacgagacacatgcaagaatcttgcatcttgcaaataaccacaaatttcgatgtctgggctctttgacaaactatgcatgaacctttccaaaatatgatcatctgcctatctatatcaacaaaataaaataattttaaaaaataaaaaattttaaatttaaattaattgaaaataacaaaatttaaaatttctctttaccattattgcttgagcgacgtaaatgtgcttgccatcgaaa

SEQ ID NO: 9792 - DNA, 694 bp, Gossypium hirsutum
cgtattgttctagggctccatctcggtattcttcgtcttgggcttctgaagtttttgggctttctagaatcttttctattatgttagcctgacatgccatatcaagccaccattgatcctaccctttagagggcctttcatcaaattggtttagtccacttatgacggtggataagtctggttggatttttgaaagtctttctattattttttcttcctttattatatgttgtctggtggtggccccgacgtataagatcatgtcttttttatgcttggccttcttttggagatcttccatcctttttattagttacatattccttactcgcttgttttagagttgtttttccaagaggagttattgttctttgtgttttataatttgatcttggaatgctgcttttctgtcgaagtttctattcctagttgaggattctcatatccttctgtccatttgttcttgagtttctctgatacgttatatttatgtctgaggtatatctggacatctttgtatgcagctgacagagagctgtattttttatattttgggtttttttgggattttgtataatggataatttcggtccattctttgtatattcgtttattgtctcatgtgaataagatatagcatatctcattattatggatgttatgaaaatataaggagagcccattaaagataggc

SEQ ID NO: 9793 - DNA, 651 bp, Gossypium hirsutum
tcgcttcaaagagccaaaatgagatagataagctgaaggctcagttgaatcaagagttcgagatgaaagatctaggtgaggccaagaagattctcggcatggagataagtagagatagaccgagaggcaagctttgtttgaatcagaagcaatatctgaaaaaggtattacaatgttttggtgtaaatgaaaacacaaaacatgtaagtaccccacttgcttctcatttgaaacttagtgctcaattatctccgaaaactgaagaagaaagagaatatatggcgaaagtcccatatgctaatgcagttgggagtttgatgtatgcgatggtgtgtacgaggcctgacatttcacaagctgttggagttgtgagcaggtatatgcatgatcctggaaaaggacattggcaagctgtgaaatggattctacggtatcttcgaaaaaccgtagatgttggtttaatttttgaacaggatgaagcacttggtcagtttgtagttggatatgttgattccgactttgctggtgatttagataaacgtcgttcaactacggggtatctgtttactcttgcgaaagccccagtgagttggaagtctaccttacagtctacagtagctgtgtctactaccgaggcagaatatatggcag

SEQ ID NO: 9794 - DNA, 315 bp, Gossypium hirsutum
  misc_feature (247)..(247): n is a, c, g, or t
  misc_feature (307)..(312): n is a, c, g, or t
atttaattccatatttttttcatcctctaattcgatttccacaatttatggtgatttttcaaagttagcctactgctgctgtccaaaactgttttagtgcaagatattaattaccaggttataacacccttattttctttttttacaccatttctcatcactttctcttattttctcttcactaacatatcaaaaacataggaccttatgtaagaaaactctactataacattatttccatgctttntcaataataacaaacttaaaaacatattgaaatcttgatatacttaccttgttctatgannnnnntct

SEQ ID NO: 9795 - DNA, 610 bp, Gossypium hirsutum
tttgaagaatgtattaacgacctgcataccataataaattaacaacatttgtttatttccaactcatactacctgataacttcgaacatgacatgagaaaatacataattaatacacaacacagttctgtaattatgaaaattatatgaatatatggattaccaaattaggttatgcccatatctctaaaaaattgatgattacttacagaatcatcaatataatactcttttcgagtttcatcaccatggggcaccatgagtaaaggtgctaatttgtcacccattaagaaaaactctttatctcgtccaatcaattttctgtgaaatataaacttcaatgtacagttagattataatgatcacttcatatgccaatattaacttatcaaagctagcacatacccaatcaactcattagtttgccatctatttagtcgtttgttctccttgcctgtaaatctcgagactaaatatgcccgaacatcctaaagaagaatttaaaaaaaacaggaaaaatcttagatgtaaaagccttaatatatgcataacagcaaagagatgtgtttaaggaatggaatgaagtatgaacctctttacaccatgatcct

SEQ ID NO: 9796 - DNA, 355 bp, Gossypium hirsutum
tctgaactgattaaattaaatccagtgtcatatattatatagatatcgtgattagcatggtcattcatagattaagacaacacttattaagccatccgcaacaggaggaacccttttcattttatacattaatattatttaatataatgaagatgagagccagacatctggatcatctcaacaaggagaggaatggggaccatctaatgatggcttttcatcttcataaatattaaaacaagtaataaataacatggaatctaagctgtcactggtgtctccactgtaacctggccagagtaattgacttcagatttcatgtctgtttcccaaagctctggtaatgcctgcttta

SEQ ID NO: 9797 - DNA, 400 bp, Gossypium hirsutum
gtttgaggaggtggcgaccacttttggcaggaattcatgaacttgctactgctgatggtttgaatcctcttaacgttgatgatcgtgcactggctgctgatgcactgccattagaggttgctacatatcagtatcattcttaactccttaaaatagtttcttagtttagggttcaaacttgtctttcctagtgttagcagtgttaactccctgtcctacaaatgtgtttgtgcatgcatgcttattggaaaatttccggagttgcttgttgacctttttgtacatttattccctttccatctttttgttattgtttcattatttaagattcactaattgtccttttctttctttttctttgtttttcaggcagctcttgcaatgatctctccatcttggg

SEQ ID NO: 9798 - DNA, 537 bp, Gossypium hirsutum
gacgtgccagtttaccatctcaacataatattagtagaaaagtttagttattttagttaatgaatttaatgtttaatgattaagtcaatatccaattttcaagattcaaaaaatatagggactaaatgatcaaattagataataaagattacatccataacttaaaaccaatagcaagactttccctaacgaatttaacgttacccatttaactcatgactaaaatttcaaattttaaaaaagtaaaaaattcaaaattaaatgattcataagtacataaactaaaatttaccaaaaaaactaaatgaaataataacaaaatttgacctaatactaaagatctaggaaacactatcatacccaaaggacgaagcctagactgtcaattagaaatgacagtgagatcttagttgcatagaccagacaaagatatcatagatcagacctatagcttggttgtctgagtttaaagaaaaagaaaaaaagaaaaccgaattcttcaacaagttcgagttattgaaccaaccatgttcaagt

SEQ ID NO: 9799 - DNA, 409 bp, Gossypium hirsutum
agtgcagacaacggaaccggatctggtgtaccggatgactgcccaaagctcaccatatagccacggggctttaaacatgccaacgagccctaacaaaatataaaacttttagtagaatgctacaaagttcagtgaagttatatcatttgtcaccgtggatattgtaatcctttaatggcttaacttaagaatagattcatcctaaaagtaagaacgagcaaagtagacgatagagcatcagtctcagaaccgtgattacctcaaaggtatctttccctacagaatcatagacaacttccacccccttgccggatgtcatctcattgacacgggaaacaaaatcctcttccttataaattataacatggtgacatccgtcttcctttgcttgagctgccttctctttggt

SEQ ID NO: 9800 - DNA, 671 bp, Gossypium hirsutum
cttgatcaaaggtcccatccatagggatccgagctaaaacactcatcaactacttatggtagggatataagagtctttgcttaatttcatttccaatggcaaagatttgtctctttcccgctccctcaatcaccatacccaacctccctcccaaaatcaccctgatattcaaacgtgggctgttttggacctacccaacgctcaaagcaatcaagatctttattggccgtctcagtcttagtcgggtcaaaggcaaaacaaaacgtaccctcttcctccacagcactgccgacgaaaagaaggcttcctgtgcatggtctaatctcagcattgatccataagcagcaagctcataagttatactaagaaagctgacttaatcggtttcgaatgagacttaggcatccttagggatccttacattaggcactaccttccaggttggctcccaagatattccttgaacgataggaatctgggagaaaaaaggtcaataacgattaatgagacctcgtcaaaaatcttgaaactctgaagagaagctcataacggaatcaatgtcctttggcaattgcactatgctgtcaaagggcaagggcttagccaactgaatgaccttcgacaatgaaaaccatgacaagtacaactagactaattgatccgccttcaca

SEQ ID NO: 9801 - DNA, 688 bp, Gossypium hirsutum
cttgtccttcatgtatgtcttagtcatttgttccttactgatttaaataagaataaaaagtgttatcgaaaatgaagagaagaatatatatgaaaataagaaaagaaaatatactaatgaaaattacttgtatttcatttctagggatagtttgcttatatacaagtttacataatctaaataagaaataaaataaaatctaatcctagaattaagcctaagagtctgtaacaaaaagcaatgattgtgacttgttagccttaaggttaagggtaattatttggtacactggtggtagaaatttttaattccacatgcggggttgagatttttccacatgtcctatttatttattttaaaattttttaaatacaatttaaagatacatggtaaaatctcaaccctgcttgtagagttaaaaaatttcacaccaccggtgtaccaaataattatcctcaggttaattacatctgatattcagatattgcaactttttgtttctcctccttaaaattgtcactaacatcaaatttaatttaggtccatgtgaatgtatttcttgttcctctcttgagtaattcgttatacatttgtttgattttcgttaatgttggtccattgtcatgtcgagcttatgagagtataaagcacacaatgaataaatgctgtgtttattgaggaaagcatg

SEQ ID NO: 9802 - DNA, 405 bp, Gossypium hirsutum
tctgtgtaatttatggttgcggagtttgacgaaatatttcataaccgtggttgctgcatatttaaatcgggtttgtgaactgaaactattaagtttgcagcaaaagttagttgaataaaaaattggagacagaggtgggttgggattcaaggcaaggcaatgccagtttcagataatagaaaatgcaggcatgaattttgttaaaccaagatgtgttgattacattagatgatgactaattcatggatatatatatatataatattggcttgtcttttatcttttcatctgtcactgtaacgtcttgttatggaattaatggtttcccacaaaggtaagctatgtgagtacgtctcgattgaggttgggcagtcctgtctacgtgaggatgtggtatgcatataa

SEQ ID NO: 9803 - DNA, 474 bp, Gossypium hirsutum
tgatctggccggaagattcaggccattcagatatttcataacaatcaagtaaaataaaagcctaacataaataaccaagctggaaactattgtttaatatggtaacacagaaaaccaatgcttaattaataatttggttgacctatcagtttgagaaatataaaaggataccctttcctatttaaatattttgaagtcattatcagcaggaaatgtcagcagaatcaatcatctaacatcccagggccaccagagcaaatatccattgaaacagagatttttttcaataagataacaaaataaaaaatttcattataactcaaaataaaagaccttttccagtaatagcacaaggggaacatatgtacctgaccagagctaggtaaatcaccattacttccactctcaagttgatatgtgaagttaaaatcatgctgctgaacaggggatctaaatatagtgcatccatctcac

SEQ ID NO: 9804 - DNA, 670 bp, Gossypium hirsutum
  misc_feature (39)..(39): n is a, c, g, or t
tgtatacacctcaaacctctgtccatttacagcaaaaancaatctttgttttgttgttgtatccatggcattcttcttcttcttcaccatttatcaaatctgattaaaaaaactgaatattgattctgatattgaactcgatttcaacgctaactggtacgcaaaagataataagtttaatctatttattttaatcaacgttaggcacaacaacttattctataatagtccatttgtatgttgaaacatcaacatctattatttttatttttattacagtcaaataaataattagtctttaattaaatctaaataatttttaaatattaaaacttttatctaagtaataaaattttaattccttaaaaaagattttaatagttgatttgtatttatttaaaataaaggttaaagaaaaataaagatttatttgaatacaaaaaaaacccttatgtaataaacatgaaataattcaagatcttaaataataatttgcaaaagaaaaaatatataaaagaagaaaattcttactccatctctttcactgcattttgtcttaattgcaaatggttgatatttcaataaaaattattatatatattattttaatgtctgtttttatcatacatgtttgggattaatgtgtttttgtaaatgggtaatcagacat

SEQ ID NO: 9805 - DNA, 359 bp, Gossypium hirsutum
  misc_feature (54)..(56): n is a, c, g, or t
  misc_feature (58)..(58): n is a, c, g, or t
ctggatacaggcttgctgagggagcagaaatggaaatggaagtcattccaatgnnntnaaataatcatgagatatcaaatgcattcagaattgcctcacctttggttgttgatgaggctatgctggaaaaaatattgggggtaataattcctcattttactccttttatcaggataatcacctttatttctttttatttttttggagcggccttatgattcacttttgtaaatcttcacaaccggtgcatatcataaaacttaaattcttggaagggggcatatgtgaatatgtttatgcttactgtatgttgacttcatgttctttcagaacatgtcctatcaaaacatgccctagga

SEQ ID NO: 9806 - DNA, 620 bp, Gossypium hirsutum
tagatctgaatcctaagtggaggcaggagaggcatcacatagtcattccatctcttaaagaccccgatgagtgcaatctccaatactattgccttatcgagctgcctccaatcaaggataggcagccggcctcacctgcaacaaccactgttatactacgaagatttttacttgtctgagcagaagccgagggaaccctcaatgttataaaagatacaataggtgaccctaactccggaaacaactcacaacgaagcagcaacgcaattcaaaggtaggggcaactattattattagttctattaaatttttttaattaatttttttttaaggaaattttgggcagagaactaggtctgcttgcttatatagttcttaatttgtaccatgagcgagtaatagtagccaatacccgtctataagtatttatttaatctttgaagccttttaacgaagccatttaattattattaatttttagggatgcctataactcttgaaagattgccctttacatagtggccatctttttcttgtcagtcttgagaattttggacttgtaaaagaagaaaatataaagtagagtcatctagaatcttattcttaatgaaaccgccctc

SEQ ID NO: 9807 - DNA, 613 bp, Gossypium hirsutum
ttttcgcatggcttaaagtttacatgccaaagttcaaacacaacgtaatagcttatacatgccaaaatgttcttctaagccaactaagaagaaagtaccaaaacttgctatccggtgtgatgacttcgatgacggcccgaccccgcaaaaatagatgagtccaagcaacctataatgggtgacaaggaaacaccgagtgagtttataactcagtaagtcataagcaatgcactaccatccatcaataacattatcacaagaggaaacaaaatggaacgagacaatttactccatccattccgaaccataccatagttcctccaacctatcgattcaatttcatatcaattcatgcattcacattccatatactcatcaataggacattgaagcattttcataaatcaatttattttcgttacaatcaaacgactaaacggcctttcacccatcctacgataaattttatgtacgtgacttcaagtatatttgtcacataggttcaaacttaccgagctcaacaccaagtataagcatagcacctattagccatgtactcaagacacttacccgatccgctgtccgcgatcgactcaatagtgtcgcacacata

SEQ ID NO: 9808 - DNA, 622 bp, Gossypium hirsutum
tcagcgatctgtaaatttggccgtttacatataaattcatagctctcacattcaatttttaaataataggttaatttttttatctattttttaaaaaaaaatttgagatccaaatgataatagctaaatccgtaaagttaaattttattgtttctaaaatcttatgcaaaccataggtgtcctcatcggtttagtagtcttcctatccaggccacctaacaatgttaactctagaatttgaacttggtcatcaaccacttattggtagagcttatatacgtcattttagttgatagatttaacggctattgaattgaaattttaaaattcacaaaaggtaaagattgaaaatattagagaatgtgaattaaatctacaagtcatacatagtatgaggcgcataacagaacttaacctaatagttttgattggactttttaaattaagattgatattctaaaactaaaaaattaaaattaatcaaactatatccacaacttccaataaaagattagtgttacatcaaaaaataaaaaaaagtaaatagagttcttcatatggcattattcaaaggaagagttatggaattaatagatatgaaatgaaaatgagttagtttatc

SEQ ID NO: 9809 - DNA, 621 bp, Gossypium hirsutum
  misc_feature (429)..(431): n is a, c, g, or t
  misc_feature (436)..(438): n is a, c, g, or t
  misc_feature (471)..(471): n is a, c, g, or t
  misc_feature (479)..(481): n is a, c, g, or t
  misc_feature (489)..(489): n is a, c, g, or t
  misc_feature (528)..(530): n is a, c, g, or t
  misc_feature (533)..(533): n is a, c, g, or t
  misc_feature (551)..(556): n is a, c, g, or t
tgtgtgtgtgtgattttaaatccttatacctacttttatttatttatacatttttgaagtttttatctcattatttcttgagatttgtaacttgtgttctttgtttgtgagagcagctgctggtttggggaactatgtggaggcacttgtgcggaaacatgatgttgaattcaatgtatgttgtcctgcttcaaaacagtatccttacttggctatatgaatagtcttaggctttatttgttttaggttcttcaaataatatttgattgttgcatctttctattgatttataaaattatttagctagtcctatttttagtgaactttttatttattttccagagcagaatgagtttccaccttaaacttgagttttaagatacaatgcaattgttatctttctagcagtggttccttaagaaatttacnnnatttnnnatcataacacttgcattgaatcttaaaactcangtgtaatnnngaaactcnttctgctctggaaaataaataaaaagttcctaaaaatannnctntctaaataattttataannnnnnacaaagatgcacaatcaaatattatttgaagaactaaaacaataaagtctaaaactattcatata

SEQ ID NO: 9810 - DNA, 523 bp, Gossypium hirsutum
atttaatctcaccgttattattacatgaactttaatataatatgtgcaataacgagaaattattttatgaactattttcaccacatcatttatggtctatttctaattatttaatggcattttaataaatttttttcatatcattgacacataattttagtaatttttttaccttaaactctgaaccttaaacctgaactcagaacccttttagggttcaaggtaaaaaaaaattattaaaattgttgaaatgtcattaaataattaaaaatgaaccatagataatatggtgagaatggtacataaaataagttctcatgcaataacatacacgaattttaattttgtataattttatatataaaaattttattcactaacaatattatcgtattagtaccatttaatggtttaaattataaattaaaacgtaaatatacattatttgtggcgaacaaaataaggtaggcgtaggataaaaacagtagaaaaagatggaagtaggtcaatttcagattctcat

SEQ ID NO: 9811 - DNA, 635 bp, Gossypium hirsutum
  misc_feature (604)..(604): n is a, c, g, or t
cttgcataattggtaccgccacaacaaattttaatatcaaaaagattttttattttgctctttaaaatgagccaatcgtccctaattctttacttgttctaaccaaaattccttttcggttttgctgccaaatgttgtaacaacattctacaatgttatatataatcacaaaaaatatcaactattgtatttaatatgatattattctaaaaatttattcaaactaacttccaaaatatttataagaataatagacgattttaagagtttgtttctaatgcaagtaattttcgattacataagatgtttatagatcaggttcggtttaatcatgatactaacacattttattttttctaaactcgactcgatttgaagtacgagtctaaaatttagcttaagtctattcatatttataaatgactaactcaaactcattttaggtccaaccatattttaatttttttaaatatttatattatattattttttatttaaaaattatatatatttttcatttattaaaaaatataaacaattaatatttttttaaatgtttacattatagattacataatatattatattatagatcattaaaatngatcgggcttgtgtctcgaatgtttgacttg

SEQ ID NO: 9812 - DNA, 406 bp, Gossypium hirsutum
acttccggtattatcacacaaaacaatctttcctttaactagtttactgtccacacatgattcgctgcacaacctgtaaggaaagttaaatatttttggttaagtcactgattattgtttattggaacaaacgaaattaaacatattttgttaaattgcgcaaacctagcatcatcttcagagcagatacttgaaacttcacgtccataaagtaaaggcaacttttttccattgaaagtatcgggattaactgaaaacccctgttggatcaaagattatgttataaagcttatgaaagagcatgaaattattgatgagcaagaggctgagtttaagatgctgcttacatttaaggtcttgccattcccgagaacaactttggtggataatctacggtccgtggaac

SEQ ID NO: 9813 - DNA, 364 bp, Gossypium hirsutum
  misc_feature (345)..(345): n is a, c, g, or t
cgccgatatcgatgccagggtttgctattgctgtggttgtggtggttttcaggtactgatgctgaggtagcgggctgtgattggtcaggtccgctgggcgtagaggaagaagacgatgaggagactgcttcagatgagctctgcttcattgtccccgctctccttttttctttatatttttgtttgggttttccatccgcccccccaaaggtgggttttattaccaaaaaaaattttgttctttttttgttttttagctctgtttttttaaaaaaaaaagaacagagagggggagggggaggaatactcttctgggcggggacaaaaagggggcccctcccttcncccgctgcttctacggggg

SEQ ID NO: 9814 - DNA, 503 bp, Gossypium hirsutum
aacccaaaggaaaacaacagcaataaaacagtttatttttataataacaccatcagcatgcatatatatatatatagcctcttcgtcctcgatctttaagcttgatgaaatcccgaactcgaatatatttcattttcaagggcatttgggtttgcccttgttattcaccttgtctctgtagcaaggacactcgtgtttgttcccataagtaccggaaggaacacatttacactcctcgcaacatatgccgcaatatttgaagcatcgatcccaaaccgccgctttattgcacctccctttgcatttcccttcacaaaaagctgccaattcccccacaaaaaaaaattacatcaaagattaaaacacacacacacacacacacccccaacctaaaattaaaaaaaaaatatgtttgtttacgtgaacgaggaagaccctttgttggttcaaaaactgaaaaacataaaaaaaaaaaaaaaagcaccaaagttaaaaaaaaaaaa

SEQ ID NO: 9815 - DNA, 674 bp, Gossypium hirsutum
accatattcagccccacttcaaccaaaccagcgattttattttttatttttataattttataattatgttttctcttttcttttacacaatacttaaaattagtaaatctctttctcaatttataaataaaagaataatatgtttcagtatactcaaatttacgttttcttgtattgttttattctaataacataaaaaatttatggtcctgtttaggaattagctgattattgattgccataattggtttgataaaacttagttgatagataaaagttattatgtgtaaaataacaaataaatgtatgacaaataatattgtattaataaaattataagttgtattcttaatgataattatgtcacactctgaataaatttgtcaagtagcataaagttgcataagaaatcattttacacaagtaaattgaaaataaattaagagtacataaatattcaataaatatatacatatgataaatgagtaatttttgagaaagcatggttagatatgtcatttcacatatctcattcccaattaactgtgaaataagttgcccattcttacgttttttttgttttgaaggttttagctcgacaagttcttgtaaatcttcatttatcaaacattacaattagagaatttgactattcgatcctccatttgtgtcta

SEQ ID NO: 9816 - DNA, 552 bp, Gossypium hirsutum
  misc_feature (484)..(486): n is a, c, g, or t
cttgaagatcgaagaagaaactgtttggattttagtttacaaattcgtaatatccaaagttgtttcatgaaaaaaaaaattgaactataaaagagaagggaaataagagtttttaattggtgcagacagtgagaacatggaaagtcatacagtagctattttaacagctagataacttaaatgaaaacatcctaataatttagtgaccattttgtaacttttttgaaattaagtaattaaaacataaacttactaatagattaatgattttgaatgtagtttcctccaaattttattataaaaatgaaatgtggttttgataaagttgagtttgtgaaaattatggtgtttgaattctatgattcctattatgtatatatttttagatttctcaaaatatgaaaaagaaaacataaatactcttaaaataatatttgttattttgtaaaatgaacaagtttttggtaattttacaatcaaattnnnacctagttaacaagtaacatcaactcaatctataaaaaattgacataaaaattaaacgtggttttg

SEQ ID NO: 9817 - DNA, 498 bp, Gossypium hirsutum
tattttcaccggaaagggattagaaaaaccaccagactgagcttttctcagtcacttaacagagcaaaggaaaaatctcagaggggggaacaaaaaggaaaataataataaagaaaaacagtggggaggagctgttttgatagatgagagagtaaagagagaagcaaatgaggcaaagttttgaagtgaatacggaaagttgagctattttataggatcccaagccagccgtaaaaaaaataaaaaaggcatttagttttatttttactaaagagcggggtgggctctatcggcgatattgagattccggcaatggggagatattttacgaggcgccgcataatatgatattctgagattttgacacgtggtaagtggtccctataaaacagaaagattcaaggagaagggtgaaaccagggggaatggctgagtcagccaaaagattgattctcgaaatcagggatttatgtcacgtgacaccggacactcaggtaa

SEQ ID NO: 9818 - DNA, 550 bp, Gossypium hirsutum
tttgcattaagtaccataccatgctatcatactggtttttgctttaagacttagatgatgaaatagaatgcttattagtaacgatttctgaccatcaatatatagtagttctctcattagaattagatgatgaaatatgaagttgatattgatttaattatatagcaaaaatgatttagtaaaattgtgttcttaggtaatcttacattttgtcaatcaaacaacaaaattttatattctagccaaatgaactaatcagagtaatctaaaatacacagtaatatgtttaagtactcttacattttggtaatcctattaccaaaggtaatcttatatttcgtggaccaaacacttcccatattgttcttatgtcaggctgctccagatcatgcggctttgccttcgcatgctatgccatatccttgtttttcaaaattcttttgatgttatttgtacgtatgcatgcactagaattccccaacccaaaatgaccctcctttgaaaataccaagctggaaccagatattttgttttcatattatctttctgt

SEQ ID NO: 9819 - DNA, 471 bp, Gossypium hirsutum
actattagaaaagataatgtacagaacattatttaacattatttaacattatttaacaaaagagaaaatgatattatacagaacattatttaacaaaaaaagataagcttttccagtttaaagttcattgtacggaaatagcactacaaattaacaaatcagttaggtcgatgcactttcattttccaatctgaaattagattatgaacaagaatcatgaatgtacatataaaaatctgtaagttttaatattgctactgcgtttaggtatatcatgattatatatataactagtctaaaatcattatagtaatgagattaatataaaaaaaaccataaatacatacttctggctggcagaaggcatgaattgagcaagatcttctccatctaacccaatcaaatcctgaaagaaataaaaaaaaaattgttatccaaagtatatgtataaaccacttgttccatctgcac

SEQ ID NO: 9820 - DNA, 558 bp, Gossypium hirsutum
ccatgaagggaactactggattaatctattcactttgacaaacagttctttctccttcattcattgagttgtcctattgaatatagaacttttttcaggaatgagttaaaattgtttaccgtgtaaaggaaagaagtggtcatgttttgctggttaattttaaaaaggagaaaattttgcagtgagttattgagctcaactaaacatgtccatgccttcaaattcatttcaaatttagaatagtctgaaatttttagcagtttgtttgattatgtcaggttggttccactcaattcctttttccaacgtttgtatcttttttcttcctagtaatctaactttcaggatattcccaacatggagctcaacatgaaatatatgattaggagattgcaggccttgaaatcggcttgttactggttttgcatcaaactagagggtaaacatgcttgcaaatgttaggagttttgtttggagaaggatgcacaaagaatgtccagataagcaagtgattacagcgaggcagttctttcctgcatgaaatggtctaaagggtgt

SEQ ID NO: 9821 - DNA, 407 bp, Gossypium hirsutum
  misc_feature (401)..(401): n is a, c, g, or t
tagtgcgcttgtgcactgcttcaacaaataaaaaagacaaaaaatatcaatattttttacacatcctatcatgtgccaagaaattgagtactaatatatatgcttagcaacagccaaaagattatgcatgaagcctagaagattcacttcactttaaaggattgagtactctatcagacactagaatataataaggaggaacttatagagcaatcatcagttgagttcacctttggcaaaatacaattacattacactccaataaatccaaactatcaggtaacaattcaaccaggtaagtaagaggagttcactgagctaactacgcaatatacaacaagctgcaatcagagaatatgtaagttatttgaacagaaggtctatgaaaggatgatcagaanatttgt

SEQ ID NO: 9822 - DNA, 612 bp, Gossypium hirsutum
tatgatatattataagactatgccggctgtcgaaatctttaacgaactgcttcattttcatctccgcacccgaacccgaacctgtttcatcttcatgtaataaccctttgattgcttcaggcataggttgatctttcatcacacttctccagtattcccctggttcttttcttgcatggttgagatttgcaaactgtccaaaaaaaacataattaataaaccaaaaaataaaaaaataaatgatttttattgaatattttgattgaaaaaaaatataaactataccaggagaagaaagcagaaaaaaaggatagcaatgaaagtcttcattatcttttttgctattttgttttgtaaagctttgcaattcagtaacccgttttatagaggtattaggtaaagggacaaggaagtgattattataacctttttttttggttccactgttttattgaacaatcaattaaataaatagtattttttttataaaattatctttgcatgataatttgctgtgaatctgtcggtcagggaccattgatgtaaagtttaatataatataaaatagagccccaagattttagagtccaatggcaacattttcaagggttt

SEQ ID NO: 9823 - DNA, 560 bp, Gossypium hirsutum
catacttcaaagcgccccataatcccatcaccactgcttctttcttcttattgaaacccatctctctcatgtctgtctctctctatatatattgtcatccatgtgaagaaaaaaataagttacatatatattcacgtgaaaatgaaataaactatacatattttcttttgtcttttatgtccaaatgaaataaaataaagattgtgcaggaattgtgggaatcttcagaaattaaatacttgtattgaacaatgaacaccactgccagccaaattcaaaaattataaatatatatgaagtacagccaagccttttatgtttgttggtggttatttggatatcttaagagtcgtgcattgacgatagtgaatgaagattttgttattttgaatattataatttagggataagtaacatagagtattttgatttctccactaaaaaatacacaaattagtcgatacatattagatcaaagagaaaattctattaaaaatttcatttactcgtattgttaaaatctgacgtgcttgatggaataaccacattgtgatatgtgg

SEQ ID NO: 9824 - DNA, 805 bp, Gossypium hirsutum
  misc_feature (713)..(713): n is a, c, g, or t
  misc_feature (715)..(719): n is a, c, g, or t
  misc_feature (726)..(726): n is a, c, g, or t
  misc_feature (728)..(729): n is a, c, g, or t
  misc_feature (731)..(737): n is a, c, g, or t
  misc_feature (740)..(751): n is a, c, g, or t
  misc_feature (753)..(759): n is a, c, g, or t
  misc_feature (762)..(762): n is a, c, g, or t
  misc_feature (767)..(771): n is a, c, g, or t
  misc_feature (774)..(774): n is a, c, g, or t
  misc_feature (776)..(780): n is a, c, g, or t
  misc_feature (783)..(784): n is a, c, g, or t
  misc_feature (787)..(794): n is a, c, g, or t
  misc_feature (796)..(797): n is a, c, g, or t
tcgactatagaagctcagcatggagatacaatttatgtcaacgtttataaccaaggcaaacaaaacatcaccattcactggtatgtctccacttgatcaccaattcaatgaatatatatgtgtatatatatccttgttgctagagaatgttggagcaaatcattgtgtttatgtaaatcctgggacaggcatggagttctacagccgaggtatccatgggcagatggaccggaatacatcacacaatgccctatcaaacctggaggaagattcaggcaaaagattatattttcaaccgaggaagggaccctatggtggcatgctcacagtgactggtcaagggctactgtttatggagctattatcatccacccaaaggttggaactaggtaccctttccctaaacccgatgcagaagtgcccataatattaggtgaatggtggaaagaagatataacaaaggttctccagcaaatgcatgacgctggaggggaccctaatatctctgatgcctttactatcaatggtcagcccggtgatctttacccttgctctaaaattatgggcacttctgcatcgggtttagggaaagggtacctagttccaacctttgggtggatgataatagctccataaacagtagcccttgaccagtcactgtgagcatgccaccatagggtcccttcctcggttgaaaatatattccttttgcntnnnnntttcttnanngnnnnnnnctnnnnnnnnnnnntnnnnnnnctnattcnnnnnttntnnnnnacnncannnnnnnnannaaattttc

SEQ ID NO: 9825 - DNA, 500 bp, Gossypium hirsutum
aaaattattagattgtacatctcacacatcatcaattaaaaagatctttttgcaactcgttaaacaatcctacttttgcaattcctcggttaagagttaatggtaatttcacatctcaaaccttaaaagtcaccgcaatagaagtgttgagcatcatgcccatgcaaagtatatttaggttaaattttcaaattcgagttcgattcaaaatatgagtttatttttttaatccaaactcaacctaatttaaaaaaggcaaactcgggtccggctcggtccgctcatatttgattttttagattaatttttatttaaaaatatttttttaaaaaaatataatgcactaaaaaacatcaaaataaatattttatagtacattaaaaatatttatattaaaaaatactaccataaatataataaatgttttattatattaaaaacataaataaatataataaatgatttattgtattaaatataatttttaaattttatatttt

SEQ ID NO: 9826 - DNA, 904 bp, Gossypium hirsutum
  misc_feature (538)..(538): n is a, c, g, or t
  misc_feature (604)..(604): n is a, c, g, or t
  misc_feature (653)..(653): n is a, c, g, or t
  misc_feature (701)..(701): n is a, c, g, or t
  misc_feature (813)..(813): n is a, c, g, or t
aaattttgaaatttcaattttgatacaaacgacagtcgttaatccgttaactggatttttagtaagcaatattcaaaaataacatgttgataaggcacattacacatatgtttgtcatagcagaatttagaaataacagaacttaatttaataaatttagtagttatcttttagtgaaaactgaaattttaaattttaaaaatacaaagattaaaaataaccaaattaaagtacaaaaataaatagcaaaatatcacacgttgtcacgaggcagaagaaattaattagattgtacatctcacacatcatcaattaaaaagatctttttgcaactcattaaacaatcctacttttgcaattcctcggttaagagttaatggtaatttcacatctcaaaccttaaaagtcaccgcaatagaagtgttgagcatcatgcccatgcaaagtatatttaggttaaattttcaaattcgagttcgattcaaaatatgagtttatttttttaatccaaactcaacctaatttaaaaaaggcaaantcgggtccggctcggtccgctcatatttgattttttagattaatttttatttaaaaatattttttnaaaaaaatataatgcactaaaaaacatcaaaataaatattttatagtanattaaaaatatttatattaaaaaatactaccataaatataataaatgntttattatattaaaaacataaataaatataataaatgatttattgtattaaatataatttttaaattttatattttgggttaggttatttagctgagtaagttttcttttangttttgggtaatagatttatttgtattgagttagtgacttaatataattataaacacatataaatattatttaacatatataattaatata

SEQ ID NO: 9827 - DNA, 410 bp, Gossypium hirsutum
ttatacagcgtggaagttggttagccccgttgtgaagcaatatagggtagtgaacaatgagcagaccatgcagccttgattttgttctgctattaaagaaaattatattcaatttaaaattactacgatttacacttgtttcaagttattattctattagttgtacgaacaagatgagaaagcaaaacaaagtagttcatacgagaatttataaatttattaacccaataaatttattaatgcagttcggatttctcaagtttatgtttgcaaagctatgctcaaaaaatgatttttattcaataatttatcagtacatttattggtttaattaagcccaatttatcctttacaatgaataattgtagccttaaaatctaactcaaatggtcacaatcacttccacgctg

SEQ ID NO: 9828 - DNA, 440 bp, Gossypium hirsutum
gtaggtgtggcctgggttgattggtaggtaataataacaatgacattaataccatacgcataccacatcctcacgtagacatgactgcccaacctcaatcgagacgtactcacatagcttacctttgtgggaaaccattaattccataacaacacgttacagtgaaagatgaaaagataaaagacatgccaatattatatatatatatccatgaattggtcatcatctaatgtaatcagcacatcttggtttaacaaaattcatgtctgcattttctattatctgaaactggcattgccttgccttcaatcccaacccacctctgtttccaatttttttattcaatttaaacttttgctgcaaacttaatagtttcagttcacaaaccccatttaaatgtgcagcaaccacggttatgaaatatttcgtcaaactccgca

SEQ ID NO: 9829 - DNA, 609 bp, Gossypium hirsutum
ctactccatttcctcattatatgccaaactgtttagtctgatgtatttatacgtaaactgtataatgtatgaaattgtgataaaaacctagtgtcattgttagggtggatgggaaaatgatgagacggttcatgaagcagcatgtcgggaggccctggaggaagccggagtgaaaggaatacttgatgtaggtttggatatcccttcttggcatgggcatcactatctcttcttacagattctggataccagagttatctgacttactctccttttaattatcagagttattaaattcacgtgcatagttcatgttgttgacagtcatgaacagtcttttctaaattgtcattagctattggcttaaatacctagtatgaaatgaggaaatactcgggccacaaaaaaggaatttaatttgttctagtgtgctcagtaccttatctgtttccttgattcatgaagctaaatatctttgagcagtgctagctggtctcggatttggttgatacattattctgagatgagttcttcaaaagcatttgactcgtttcaattatagtggatcaatattggcaattgatgaaaatcaggatgtacttatgaatg

SEQ ID NO: 9830 - DNA, 647 bp, Gossypium hirsutum
aggatccattcgggaataagctcggagttttcacttgttgaccccaacaagaaatcatcagttttgtcattggccaaagtagcaccaactaaatcttcttcgtttctcttagtagcccttttatttcgcagtttgtaacaatatgccttgatgtgacctaacttcttacaattgcgacatctcttgtctcgcttccttgattctaccaaaatcgagacttgcctatctaaattgctatttgagccaaactcattgtcgagtttgtctttgctcaacagatgacccttcacatcctcgaatgagagattatctctgctataaattagggtttccctgaaagacttgtatgaaggaggtaaagaacacaataataacataatttgatcttcatctttaatctgaacatcaacattctttaaatcattcaaaatagtaataatttgactaatgtgatctctaagatgcttacattcattcatgcagaacgtgtacaaccgttgtttcagcactaatcggttagctagagactttgtcacgtaaaggatttctaaccttttccataatgtgaatgtcgttttctccatcaaaacctcatgcaacacattatttgttagacataattgaatcgtggatagagcctcattaaa

SEQ ID NO: 9831 - DNA, 370 bp, Gossypium hirsutum
aatcaacgccccccctgagccggtggatgcgtatcaaaaagtggaggtacgagaagggcatgaaacccctcattagtctttattttttttttgttggaatgtgcaatttatttatttattttttgctgggattgtttaattagtttgaaaaggcaaagcaagatgatgccctctctggtttaagcgatctactgggagagttgaagggtatggctgtcgatatgggatccgaaatcgagaggttagtttcgtgtactcaagtagatcacgagataaatcaggctttctattttttaattaatatcggaaatcataattcaaaccctaattgcaggcaaaaaaaaattctaaagggcccccaaaataatga

SEQ ID NO: 9832 - DNA, 672 bp, Gossypium hirsutum
agctcacggacgtgttacatggctgtgtgacctaactcagagagttacacgagtgaggacatgggctaggacacggccgtgtgtcccttattttcaaattttgctacttttcccaaatttttctaaattgattcaaattggtctcgaattgtttctaagctatttttaggacttcaagggctcgatttagggacaatatacatgtgaatgaatggtttatgatgtgattataatattgaatgatataatgttcaaatatttttgattgttttgtaatactctgtaaccttaatctagtgacggagataggttaggggtgttacatctacagaattgagacctgatcaaaaagtcatgttgctagatggtttgaggagatccataacaccccgtacccgagaccattgccggagtcggacacgaggggttcacagactaaattcacttactatcacagtccattttaaaaatttccaggcagttgcctaactgcgtcactgtcaccttaaaaatcatatcttgagttccaaaactcaaaaatcagtttcgtaatttttacctgaaactagactcatatgtccatatacatatttttttctagaattgttggtcaggccaattagtacagtttattagttaaagtctcccctgttatagggtacgactacactg

SEQ ID NO: 9833 - DNA, 636 bp, Gossypium hirsutum
ttccttcttattacaagatttattctaatcttttgttctgcaatcttccaatatatttcatttcatttgtttgaaacgcttcttatttttatcattctttcatttttgtagaattggctttagctttggtccaacaatggagaaaatgttaatgaaaatagtggagcttgtgttttattttccttcctctaccggtggaatggaaagatccattttttacccaggattttggtgacagcgccgtgaaccgttgactgttgaaacatgtcaaataatgactggaatgagaagggaggtgttaaaaaatgagcaacaaactccgtatatttaacaacataatttggttggtatcaatcaatggaaaacaatgcatacatgtttttcttttctccccttaatccacagaaataggaaccaccaatgggacatatacaaagacaaagctggataaatatggcaaactatttgaacttgtaaagactgcacttcaagttcaggtcaggtctccaccattggtggatcccgtgggcttgcttgaaatcattggaaggactcagattcactgtcaaatttgcagaaggaagcagatgcagtggtttcgcggtttccacaccctttcctacgacactcataaaa

SEQ ID NO: 9834 - DNA, 654 bp, Gossypium hirsutum
atctttagttggaagaataagttgttatcgaaactgcggcccaagctttaccagtgtattgcaggagtgttttcctaattccattggatacttgcaaggcactccgaaaaatgatgagctcattttggtggagctcagaatcgggtacaagaaagggtattattaggcgtcttgggacaaggtatgtgtttcggaaaaatatgaaagtatgggtttagttatgcaacaatgttagcgacttgtttctaattccgattctcttcctagtagaatttacaaagccaagtattacgctgatgggatctttggctgctgacgggattaatcattatcgtcgattatgtatggccatttacttcatttacttctttaaagagtacctgtgacaatgaagattagttattgttgttggcggtagatttcccgatttcaaccaaaaaaatctgaaaaactttcagtatttgggttttaattatcagccaaatctttgtggttgttaatgggagcaaaaaggaagaagaagagcaacagcaaaggctgttagattttgatgcatggcgttcgatggtggcgttggaacgatattccaacttccagtactattgaatcaaagtgaatatatttcttttcatttttccaacactgagcagcaaa

SEQ ID NO: 9835 - DNA, 449 bp, Gossypium hirsutum
aaggcggtaaaagaaggtaaccatagaccttattcatctaggacaactacgacaagtaactgaacttatccactatgcatgcagacaaataaggcattaatggcactctgctgttctcaaaagtaccctaggaattttcaatggtacatgtaggcaaatcaaatgtcataaaagtgcccacaacattctcattttttaactttctcctttccaacagcaacaaagagaaatattccactaaaagtaaaagttggctctattctcccaatattgttacattaaatcatgtgaatataagttaagaagtaaaagaagggagaaattctaaacaatatcgtcttcatgcttcataacaaagaaaacactgtaacttcggagctgaaactagtgataactaacaaaatatcaagttattttaataaatacaacacccgtcattaagatgataa

SEQ ID NO: 9836 - DNA, 701 bp, Gossypium hirsutum
tgcacatgttaagcatatcgtcaggattcatcttgagccaggattgaactctccatgagattcatagttgaatcagttataccttctttgtttgtagacaaaactggttcagaattgtctttcattccaaggcataacttgtatccatgtgtttcatatttgcctggagttcactcccagaaatatagccatccgtgcccccttttgtcaatcccacgagcctcttatccattcttatttgatcaagaaacatgtctagaagaagaaatgaaaatatctcaccaaagatggcttaaaatccttggttactacatctttccaaaagcagacaactcccatcttaatttcccatgggatgattaaaacacgagatgtgacataacccaatcctaggtcatttcctattttgtaattttgtttgtttttatttttgttgtaattttattttcacttttgtaaaagctagcatggggattctcactggctgtctttatctttatctttatctttatattttctttatttatggtgtcactattcattaatagtggcaagtttgtccactagtccttgggtttgcctacaccaagtttttgtgtaagaaaacctttgtaagaaacttccttaacaaaagtatgtgtttctaactctctctctctctctcttcgattactctctttctcaatctttgggctagcaaa

SEQ ID NO: 9837 - DNA, 479 bp, Gossypium hirsutum
attaactccttcaatctatttaccaaccaaattttaaataaaaaataattatacccttattatttatttatatattttctatttcatttattcattttttaatttttaattaataataataaaattttaaccccacattaaaatgttataaaattaaatatatgtcacttttctataaaaattatatatatttgatttcaattaaaataaatattttaatttatatttaatttaattatatattaataagttaattcattaaattattttatgaaaagttaattagttaccattgttttcaaatcctaaccagtccattaggttgggaactggttggggtaccagattagaatgagacattcaattgattgatccgtaaatcggctaaactaggtagtcagacaaattgaactaattttctatattccttttaatttttaataatttatgcaattgaattgatctaatccaccaaatgg

SEQ ID NO: 9838 - DNA, 508 bp, Gossypium hirsutum
gatggtacgcgaggttctcgcacatccaagcaccaaggtgccgatggtgctcgaggctcccgcacgaccaagggcctaggttgccgacagtgtccgaggctcccgcacatcatagcaccgaggtgccgatggtgcccgaggctcccgcacgaccaagggcctaggttgccgatggtgcccgaggctcccgcacatcgaagcaccgaggtgccgatggcgcccgaggctcctgcaataccaagggcttagtttgccgatggtgtccggggctcctgcacatcctagcaccagggtgccgatggtgcccgaggctcccgcacgaccaagggcctatgctaccggaacggttcaccggagcaccgacgggacggttcgccggagcaccgccgggacggatcgccggagcaccaccgggaacctaaccggcggtgggggggcaccgacgtccgggcatacggtgggcgtgggccgtgccctgggcaacccctgctcgctcaatatcacctcc

SEQ ID NO: 9839 - DNA, 560 bp, Gossypium hirsutum
ctgtatgctatttattaacaactttattaatatatacaactgataaatgtaataaagtatgcataatctataatatatatatattataaaatcatgagtttaaaaaagtatttgaatcgacgagaatactctttatttttcatcatattactaagttgacatttaaatttaattataaaatatgagtttagaaaatatttgaaccaacaacaataccttatattttccatcttatttctaaactaacatttaaaattatttgttaaaaaaattgacataaaataaaaggtgtgataattatatatttaaaaataattacaatttaataaaaattatgatgattacacatttaaaaataatataacataatttactattattaattaaaaaagttcgatataaacaaagtttgaaaaaacgacaagttgttagcgacacttgggacacaagtataggctggaaggttgccaacctttcagggttggccaatgacgaggttgagactagtggctgagccaagatgttaaccttgggaggccaaactaaattagactgttacg

SEQ ID NO: 9840 - DNA, 390 bp, Gossypium hirsutum
  misc_feature (197)..(197): n is a, c, g, or t
atattgcattattgcgaaggcatcctgaacctaacatgagaaaacttaaagagtttgaagctttttgtcgcaaacatggtctagcattggatacttcctcttctggtcagtttcaccaatccttggaaaaattaagggaaaaactcaagggtgattctgttctttttgatattctcatctcatatgcttcaaaaccnatgcaattggctagttacttttgcagtggtaacttaaaagataacttgaatgattggggtcattatgggttggctgttcctctctacacacattttacttcgcctctacgtcgttatccagacattgttgtacatcggacattggctgctgtaattgaagctgaggagctatgtatgaagcatagaagggtgc

SEQ ID NO: 9841 - DNA, 571 bp, Gossypium hirsutum
  misc_feature (559)..(562): n is a, c, g, or t
tgaaaaaacaggaaaagtttagagctaaaatgtgaataaagccttaaaaaacatgtattgatgccagatgctataatgtagagttcacgcgacttgagacatcaagcattgtgacgcatccactatttgtcttcatttttgccttcggaattttctttcttttgaaagaaagcttttggaatctaatattatagtattcacgatcacaggcattggagtcgccacgagtttgagatttcataatttgacttaatccctgcctagttgccatattcttacccatgcttgctttgtttataaggacatttcaaagtgtgagtcacaagattgaatatcagggatgtgacacctttttttttgtttacctatcttttttcttgaccaactcactgctttattttcaatataaataataatttgggcctgaaactatacacctactgcctttgaatgcatacgttacagcttaaaacagtaaaatctaacaaggcagtgttgatcatgaaataattagagaacacgttggaattatttaaaaaaaaaacctcatttacacaannnngactaaaag

SEQ ID NO: 9842 - DNA, 292 bp, Gossypium hirsutum
  misc_feature (44)..(44): n is a, c, g, or t
  misc_feature (92)..(92): n is a, c, g, or t
  misc_feature (265)..(265): n is a, c, g, or t
  misc_feature (267)..(267): n is a, c, g, or t
gagtcagactgagaaccaactggggtaccagtccagagagaganatcagacccattgacctgtgaactggcacaaactagttgaaccaggtnaaaaaagcacttgaaccgttttttttttttattatgaaatttttaatgatttatttaattgaaccgtacgaacaggcaaactggtggcctgaccggtttgaccaccgaaccggttctgtaaacctgggcaagaagatggattgactttcctttcaaaacttgtcaaacttatntnaaaaacaaggatgaggaagaaaaca

SEQ ID NO: 9843 - DNA, 568 bp, Gossypium hirsutum
  misc_feature (523)..(525): n is a, c, g, or t
  misc_feature (527)..(529): n is a, c, g, or t
  misc_feature (537)..(547): n is a, c, g, or t
  misc_feature (549)..(552): n is a, c, g, or t
  misc_feature (554)..(560): n is a, c, g, or t
cacattgcatgcatcatgtatgcctgcagtccatgcatatacatccttgcacaaccatgaacacacgggttgtagttgaccctattagtaggaaattgttttaggttaggttaatatcatttgcataaaatttagtaagctgagttggataaaattttgcctcaacatttacctcatatatctaacaatgtagtccactttcacgcttatatttgtgcctgaattttacagtttgctgagtttttttttttatcctaaagcacatattttccataatctgatggacaataacctggaatttaggtatatcatttccttcctcaaagaacatagcaaggaggtgcaccttgaagttcgggcagcgtacattgatacaatgaataaggtgaaggcttttgacctttgatttctctcaaggtccatcttttttgttatatattttttgttagaaaaaggataaaggttaacctcttaacccaaaaaggaaaaggggataatcaacttagggggagtggatttcccnnntnnnttttaggnnnnnnnnnnnannnntnnnnnnntttttctt

SEQ ID NO: 9844 - DNA, 636 bp, Gossypium hirsutum
cttccactctttatgatcttcatcacaatcccattcttaggcacaagtgcttcaagtttcttcctccatagttcatctttatcgaacaaacccttttcctttgcgttcttcaacgaaatctcggatgctttaaggtgttcgacaagttcagaatctgtgtacttgaacaaaagatcatcatggataaatttttgtcgagggataacacgaaacaagtgaatcaaccgctccacgacctcgccgacatggcctcgaacgacgtcgcggctggtcgaggcatcgaagatagcgaggttcacataggcgttggagtaagccccgtggaagaggccgcaaaggcaaacactgcgaggtgctttccatatctttaggatgcgatatacgtcgaccaaatgctgtaaaaagctgccgtgttggtgggaacactcgccggcgccggcagaacgtaagacggcgagaaacgaaggtaagtttccatctacggattcgagatcgcctcgaaggaatggacgtacggtgtctaagagggattcaaggtattgagagggcgaagaagatgccattggagcttgaaaaaaacaaaggttgactgaatgaacttgtgattgttttagtcgatgtgggatatatggggag

SEQ ID NO: 9845 - DNA, 380 bp, Gossypium hirsutum
attgttgtaccttatccatgtttggaacaaggtcttgtagtttcctcattcgctcgcttattttggttcttctcacctgaacatcaaacataatttaaagttaacatcttaggttttctattttcagcaaacaaaaaggtcattaacttgcatgtaatgtcattaattatgtgtatatataaagagagacaaagagagtaggaatttacaaaactaaagttattatcttgatttgaataaattgaaaatattcgatatatgaaactttacctgtacaattcaatagaccacacgtatacatgcaaaccctaaccaaaaggaaataaaggaaaaaataaaaggaaggaaaaaagttaaaaaataaccctctcaccatggct

SEQ ID NO: 9846 - DNA, 695 bp, Gossypium hirsutum
  misc_feature (632)..(636): n is a, c, g, or t
  misc_feature (638)..(640): n is a, c, g, or t
  misc_feature (648)..(652): n is a, c, g, or t
  misc_feature (656)..(665): n is a, c, g, or t
  misc_feature (667)..(669): n is a, c, g, or t
  misc_feature (688)..(691): n is a, c, g, or t
tggctagttccaaggccaactgtgaacaaaaactgcttatctacgttttgaggtacgctggccggggaatgtacagtagctaagccgtgcaacttgttcgcgaaatttgctatgaaggaagtgttacttagagcaggtaaatttggtttaaacggggaaaggttcttaactgagatgcttgaagataagctattgggtgataattcatattctaaaatgccagcaactgttgaattattaaatgtggctgaccctgtcacatacggtcgagcggccatgaagaatgaggcatttggatatgttgtttggtcttaagaagcacattcgtggtctggccagaggcgaggaggattgcttcggtctcaaatggtttaacgtaaacggcatcagcttcaaccactgtaagggttgaagaagagttgatcgttgagagccgcattgataaggtggagaaggtatgtcttgccaggcttcaccttcagcttgaaagtatctgtcatgaatgataataagttctccagctgagttaaatgactcaattagctcatcatattgtagtactagcctttttgtacctttggcagaacagttgtagaatggtcctggatgtccattgatggtgtaagcatcannnnnannnggatcagnnnnntttnnnnnnnnnncnnncaaaagtacaaaaaggctnnnnctac

SEQ ID NO: 9847 - DNA, 445 bp, Gossypium hirsutum
  misc_feature (18)..(18): n is a, c, g, or t
  misc_feature (62)..(65): n is a, c, g, or t
  misc_feature (371)..(371): n is a, c, g, or t
gagatatatcaaggattnaaagaaaaacatcgattgttcaatgctattgaaagcatcccttnnnncagtaagaaggctaaatgggctatggattggattcagaggtattactttcatgtcctgctctctggggacttaatatattaagccaaaggagaaatttggttaaagaattctcaacatgttggactagaagttcaatagaacatttttaccaaggtttttctagctttaattgatcattgtgcctgttagatatatttaaggcagaatttttgtcctagatatggtagaacttgatttgcaatgatcatggatggatcgtatattgatctctataaccttggctcctttctgcaccattgaatagntggaagttgcttgtccgccatctttgaggttctcaagcagataggtcatcatctttgtggttctcaagcatata

SEQ ID NO: 9848 - DNA, 419 bp, Gossypium hirsutum
tgaaccaagctaaaaaatcgattgaattgattttttaaatattttttaataatttattcaatcaaatcatatgaatcaatgaccagaccagttcaactaccgatttaattttgaaaatattgcttagagtatattttaatttttaaaatttttctccataatttgatataactaaataatcaacccatttcgaaaccatgtgtaaatcatactaatataattataccaacatttttttttctcttatttcaattataaaaaaaataaaaaaaaataaatcatgacactaaattcaatatataactttgacaataatatttaatatatataatgcattaattttttacaagttattttaacattataattttaattttttcctacattttatttgattggattggaatctgtacttctcg

SEQ ID NO: 9849 - DNA, 560 bp, Gossypium hirsutum
tcataatccaatatcaaagatgcagtaacaaagtgtcctaatataagcaaataataatcttcccatctgaaaatttgcatgtcctttttgttgtttttcaaagtgaattagtttcaaatgtaaggtcctacctgtcctcgtccctgttcttgaattgccttctggaaaatttgttcactttttccagtttcaatgagccggtcaattgtccaagacaagaacacgttttggcaaattaaaataacattgatataagttagagccaaaagttccaacatcaagcttcagctcacctgttcatctggtctagtcccggtaactgtaaaaacaatcataaaagaagaataattactgattcaggaaaaataaatatcagattacttttggagttctggcaagttaaacctgtaataacccttctttctataacctcccgatattcatcctgaatcttttgcctaagagtctgaaacagaaaatagaggtaaggaaacagatagtatagaaaaagcttaaaacccaaatataatctcaaacttcaatgaaaatgaattaagccc

SEQ ID NO: 9850 - DNA, 495 bp, Gossypium hirsutum
ttcgtccgactttggtgtttacatactttatttctcgatttttgcagtccggacttgctttgcccaagaaattgaagaagggttacaagttaaccaaagcaatactggcttttaccttgccctgcttgctgctgctgattcaaccagtacaaggggcttccaaaaccccaactttacagtatggcacatttgggaggaggaataatgctccttcgacacaccctccacctgttaatgacccgacaaggggttgcaatgccgctaacggttgtcgccagtttactctgagtcttgaaaaccgcaggtggttgaaatgaaaatccatgttaaagttcattcattttcccttcaatactgttcccctgatgttgaaagtgttgatacagaggaactctagttgaagctgttggcaatgttacagtggcggagggaactttgaaccacagagagccaggtaccgaggccatagctgctgggattgccacttggttcttg

SEQ ID NO: 9851 - DNA, 640 bp, Gossypium hirsutum
caaatcaagccaagcttggatgataaaaaaaaaactacttatccagagtgtaatctagcccataaggcttcaattttttttaatattaataaattaaatttataaagttaaacgtgttttggttttttactttgatataggttttctttttaaaatttcccataataaattcttagaaaatgcattttttaagcacttcaacattcagtaaaagatttctgatctttaaatttcatgggaatcaaagatgggacaataaaagagttactttcatataggttttctttttaaaatttcccataatagattcttagaaaatgcattttttaaacaccaaggatgttaagatgtcgattttagcttagtatctcttgcacttgtaggtatcaagtttcattttagattttaactcccattggcgtccactttagcttaatatttgtttatcttttttttatgaatatcaactctgattgatgtcgagtttaatataacattttaactattttcttcttataaatacagaacacaaaacattaactataagctctctaatggtttttcttcaataaaagactcaaaacttgagaaaattgttcagagcttagctatatttatagatgaaagcattgctgtatag

SEQ ID NO: 9852 - DNA, 572 bp, Gossypium hirsutum
agtccgatgtaaatttaggtcctttatattacggtaatagtcaagatcatatttttgttttatctgatgaagaaaatacttcatctgatgagtcgtcatctatgttaaaaattataaaaaaacataaaaaaacgtaaaaaaaaagatgataaacaaaatgaatatgatttccagtcctataaaacacttatagaacatcggaaagaaaaatttactaatagtaatgatcaactagaaagagttgaatatttaaaactaattgaagaactttatgaaaaacataaatatctttttagtatgtttaattatcattatatgttaaaatatgatgatagtagtagttcgagtaattctgaaaacacagaattattaaagaaacaatctgatgaagaaaaaacttcaaactatggacggatggaataagaatattggcatttccaaatggaaacatccaggaggaaagaaatgaagaatctgtgaagctgttaaaaaagattgttgaaatggagatagaagactttccatctcacatcacagaaaaaatcaaatatacatgggagatgtgaaactca

SEQ ID NO: 9853 - DNA, 444 bp, Gossypium hirsutum
gatagtagtaatttttcaagtctcctttttgttgaatacacaatatgttatttggatttgacgttaaatgtcaaacataagtgcatatttaatacatacctgttaattttttaagtttcttttcatatatttaaagaagggaagtatacaatatttttagaaaaaaaaagagagtgtaatttcatgtagtaattgtcttgactctattgaaagcacaaatcgagagatacatcaaacaagttaagtgttgtccttaatcgaaagtttaagacaatatctaatttatatgatgttcctccaataaacttgtaaaattctttatagagttgaagcacgttaatatacttaaaactcaaccggcattatctatattaataaaacagaaaatgcaattgttagtgaattcctcgcgcgcgtgtgtatattacctgaacaacgtaagta

SEQ ID NO: 9854 - DNA, 603 bp, Gossypium hirsutum
caaggatctaactagggtcatcttataacatacgtactaaaagctgaccaacgtagttagctaattcttgctccttttatttcagaattgcgcctacactcgtcaaccaatggcaggcacataaaactttttaaagccctttaaagaatcaatccacagtcaaaggtcaatggtttttaagaacagaacttgtatctccaaacattcaaagttgacagctttctaagaaagataaataccccttctaagatttcaatataaaccaaaggcactcaaagtttatggtgtttagactttttaatttttatgaagtatttatatccaacacttgtatttgacacacggatatagagatacgacttttaagattttcctaatacatgaattaatttagaaaaattaataatattgtgtcagatacatactcatattcaacactcacactcgaattcatataacataaattaaaacagaaatttttttatattagaaggctgagtatggccaagagtgacgccagcgagagtgtgtgccacgaacttggctcttaggagaacacaaagaagcaagtggtaagtaaaatctaagcgtagacgaacaacg

SEQ ID NO: 9855 - DNA, 461 bp, Gossypium hirsutum
ctacttctgaatcgactgccgctctagcaaacaacacttcgaatagcaccattccgaaagaatagacatccaacttctcagtcaatcgtaaacgcttgtaatattcggggtccatgtagcggaatgtaccttttaccactgttgtaagtggaacatttgtcatgctaattggactcattttagacaagtcgaaaccagagattttagctacatattgctcatccagcaaaatgttggtgctcttaacgtcccggtgaatgattcgatgaattgcttctgaatgtaggtaatctaatccacaggctgctccgatacaaattttcagtctctgtttccatgataggggattctttttcgtgttgtagagatggtcacggggaattccatttgccatgtactcatagacaagaatcatctcgttatcgtcgcagtaaccgattagagacacgagaatcacatat

SEQ ID NO: 9856 - DNA, 588 bp, Gossypium hirsutum
ttcaaattccagctctatttgcagaagcctgttattttgagctagcctgctcattgcagcaagacctgaaataagaaccaattattgatgatgaacaatgataatacaatgaaacaaaattttattccaagatttgcttatagctgactttcaaatcttcatccaatgattgctattctctgggtcaatattactgatcttaaagagttttgagcgccaagtaaagcgcagcagccaaattctttaggtgaaactagatcattgtttcacatttttgtagttgataaagccattcttccataggacaatttactaggacaacagagcaaagagcatgtaaatcactaggaacactcatttctatcatctcatgaatcatcgcaatgtaaaccgtggagctttgatcactatttttgtttactcctaccatcctataatcaagtaaactaatcatcactggcaacccctcataaaattgacctgcacaacgtgtggattttttagggatagtttacgtgcatgagagattactatatgcataccgtcaattattctgtaaagagctgaccaccatctatctctgggaac

SEQ ID NO: 9857 - DNA, 594 bp, Gossypium hirsutum
cccatacctacatccagggaatttatgtgtgaatagttcctcaatacttatttatgatcaaaagatagcaggatatgaatagtagggcaaaccttagcagtgttatcatcagaaccggtgattagatagggcttatcaccaccactaatgtaatcaacacaatttacacctttctgatgggcatccaaagtaaagtttggatcgggggagccaagattccaaatctagaaattcacattgcccaggcaaatttagcatggttacgccaaaatgtagtaacatgaaaagttacaaagagaaagcttgtttatacctttatggtacggtctagagatgcactggcaaaagtgttagtgtctttgggattaaaagtcacttgcataacataatgagagtggccctcaaatatctgagtacacgcccaacccttctcccagtcccagagttttatgagcgtatcatcagatgatgacaatatatatggaagagtaggatggacaaccacacatctaatgtaatcagtatgtgcctcaaaaactttgaccttatccatagtgttgtaattagataaacaaataaacatgtcatcggctc

SEQ ID NO: 9858 - DNA, 552 bp, Gossypium hirsutum
cccactgtattcagtactcacggtggatcctgattaaattctgagttgagtaaaacttaaagctttttcaaaattattttctctatccataatactcaaatcaaaactttagtgaatgttattataatttatataatttctaggcttaactacaaaattagcccaaactatactgttttcctacttagatatttaaaggtgttgttaggtcaaaagtggtatataaactatcaaattcatctcattttattcaaaaagtgtacaaaatttaataaaaaacatgtcatgtgtcacatttttattggctagtagtgtgatctaggataaacatcaacattgaagagaagctagctatttgcttcgagttctttcatagccaaacatgatctacaacattgttttatcccataagctatgatgcttggactctagggcgagtgagtgtcggatatggatgttccagatttgagagtatgcttaaattttcccatgtttttccttataattcttaatagtatgcatctaacagatttaaggttcgaataacattcc

SEQ ID NO: 9859 - DNA, 475 bp, Gossypium hirsutum
atctccgttttgaactcctgaaaacgggagtccatcttggcctccaattgagcaaattcctcttggattttggaaattccctgctgtaaggtgctcacctctttctgcaatcttgttgaaactccatcaccggccattaaaagggatcgtggaagctctgatacctttgttgcgagacgtaatttcggataggaaaatgaagaagaaagacttgtagaagtaagagttgagagaaattaagagataagaaattttctgtgtattttttgcatacccgttttgcatgcaatgcatgcattataaagaaaacaaacaaaccacatgacgtggagtattcagttataacaaaaatgcaaaacgccccgtataacttaaaacccaaaactctccgttttacttaaaattcccacttgtttcttgctcactttatcagctcataacaccaagacataacaagagagttatcagaaaccca

SEQ ID NO: 9860 - DNA, 378 bp, Gossypium hirsutum
ccaaccattacaaaatgcgtataaatttctctgttcttttatactaatcatttaattgctttgcaacacctgcataaagctccaatggcacgcatgctttggttacgtatagggaatagcagaaatttgaacccataatcttactattatatgcattgctctataaattctccttgatttcagagtatctggaaagcgatgtttatttttatttatttatttattgaattgaaaaaaggatacatatttgcaagacatatggcatgagacatagtgtgggcacaatctcctttttaaggttactctaattggtttcttgtcaactacaacaaagacagagttggagaattgaagacatattgtgttcaagcttccaag

SEQ ID NO: 9861 - DNA, 682 bp, Gossypium hirsutum
tccttgtcctcatatgcaacataaaacagaggaaaattaaagaaagagaaattaagagcagcagaatgtgatcactggatctgtttaagttgagcgacgagtagtaagtatgccgtaattagctgttctgctagaccttggcagatacactactgattccgagacagcacaggttcttttacaagaagagtagagattaataaatcccaacctgtcactgatactccttgttactttaactccactccataaattgcttcctgattcttcatcattatcatctttgcaacattccaccatcgccgcgaaaaatggatccttcccgcctgcattcgatgcttttttccgggctaaaatctcttcaaagttgttccttttggaggtgggtggagtggccgggggaggtaatggcagcaactttatggaccctttttgcttctcatcttctagcttcttcttaggaacccctggcaaatgctcccaagaaaagggtacaccggaaaatcggagtggtgtagcaggactcagaggtgaatcctccggaaaatacaaagatccgagtgaagatgacgacgaagaagaaagtgttcgtcgggaggaatggtatttggctgccggaatgatggtgtcacaatcttttgaagccatttggtcacggccactttgagttggaggaggaatc

SEQ ID NO: 9862 - DNA, 568 bp, Gossypium hirsutum
ggttttaaattagtacaatgaacgttaaaatggaatatggaatgaaaatatgtgaaaaagaaaaaagaatacccggctaatgaatgaaggtttgaaagcaaagtccataaacgacccatacttagattctggattcagaaaatctgtttgaagttagatagaacaaaggcaaaacagtttgtttgttgttggttgaaatctaaggcaaaaagggactggatttatagacaaacatagggggacatggtaccaggtggcaacaagagaaacagtataagattctgccttcgacgtgtggaaatagattaagcaccgtccagatagattagattaatgattatcgatcaacgatccaagtgatttaaaaacccttttttattataattgttaatcgccccttccatggttagatttgtttaattataaagtggggaaggttgagcatgtgtttggatgattaaaggtcggtgacacacgcccttgcccacatggatccaaatgtaagactccaagtttttgtctctttctcttttagctttgtttcttcctcccttggagttggtgtatg

SEQ ID NO: 9863 - DNA, 464 bp, Gossypium hirsutum
ggtttcaaaggaaatggagggattagggaggaaagagcatctaggtaaatggaaaaggctgagaaggtcaggtgtagtagtgtaagcaccggcggcagcggtggcggcagcatcagcttctggggatgaagaagatggcagcacattgaaactttcccaatgggactgatcataaggaaggtcctgagttagatagggaatcaaatgggaatgactgttggtagtattatcaagcaagtagtgttggtggggttccatatccaaggcggcggaggcatcctcatggtgatggtgattgtaagaagagacattaagggtgtcttccaaactgttgtgacagttggtgggggtgggccctggcaaccccatcagttcctgacaatctgggatggagtgaggatcaaagcaaccactctcctcgtacaccttcattgttgttcttctttctggtctcaaagtatccc

SEQ ID NO: 9864 - DNA, 423 bp, Gossypium hirsutum
acggttcgaatcatcaatttcgagtacgaggtaagttcgtatgtgataaatgatgttatagttatactttaatgctttgataatacataaattgtataaatatttgattacggtttgagcatgatgataatcgactatgtttggcaccaagtgtacagttcaaaatagctacgactacaaatggcactaagtgtgcgagttgtaatagcttccgatataagaggcactaagtgtgcgatactgagatagcttcggtttattgaaatggcattaagtgtgcgagattgttacggcttcgacaaatcactgatgcactaagtgtgcgaatctttaaagcatggaaagacttccgaatgaattaatgtatttgaacgagagttaagaatgaaatgaataaatacggcaaagttctagtatgttcga

SEQ ID NO: 9865 - DNA, 689 bp, Gossypium hirsutum
agctctactcgataattattgaatgtataaatataaaaaaagaatggtacatttcaaaatatagggatttacagcttagaaaattgtttttaacactatattaaaagcctctatggttgaagtggaactagttgttagattaacgattaaaaaaaaataaattgacaagaaatcatcaaaagtaaaaaatataaaaaattactggagtcgtgttaaatccaaattaacttgaacataaagttaatccaaatatgaaacaatttaaattcaaaatgactcaaatagctaaacttgaaaattatttaaattaaaattatccataaattttaaaactcaaatttactcgatttaagataaccctaatccaaaaaccaatcgaatgtgcgaaattgatatatacttgggacttgaagctttacaagtcaacttttgcgaatagaccaacaacttgttgagagacatgtcaaaatctttaaccactaatatcttaaaatttataaactaaagaaatgtatttaattcatctattttaatttgatcaattttagtctttatattttttgaattggtcgattttagtctttatactttttcgaattttgaaatcttagttctaactcaaatagtaacagttaaattcgtttggttaaatttagttattagttctgtattatgtttaccggtcgtag

SEQ ID NO: 9866 - DNA, 517 bp, Gossypium hirsutum
ttatcagaatcaaagtcaaagcccgcataatagggtttgactttgtgacaaaaaaaggaattgttgaaaaacaaattatgtggataattattattaccattatccgatattactaatgagtaaacctctagcaacaagataaaaagcgaatttttccttctgtgaaatgaaatttgaaattttatcttactctattgcgtatgtatatataatttaaatagagaaaaaatagaatagaaatatagagttttgcatctttctgtatctcccgaaaattctatttttactaataatccttgttcttggaccggattctaacgaatcgaatctttcgacaatttgtaataaactatttctttattaaatttaaaaattcaaattaaaagacaagaacaatagaataataaaaaaaagtaagaataaagaaagataataaagaaagtggattatcttatcatatacacctattttatttgatttaaaaagatgggcaagtcatttaaaaagatgggcaagt

SEQ ID NO: 9867 - DNA, 563 bp, Gossypium hirsutum
  misc_feature (67)..(69): n is a, c, g, or t
cggcggtcgctccggtgagcaccggtctgctcgtccctactgccggcgatgcgctcctggccttctnnnccgggtcgttcctccggcgctgttactttgaagaaattagagtgctcaaagcaggcctacgcttgtatacattagcatgggataacatcataggatttcgatcctattgtgttggccttcgggatcggagtaatgattaacagggacagtcgggggcattcgtatttcatagtcagaggtgaaattcttggatttatgaaagacgaacaactgcgaaagcatttgccaaggatgttttcattaatcaagaacgaaagttgggggctcgaagacgatcagataccgtcctagtctcaaccataaacgatgccgaccagggatcggcggatgttgcttttaggactccgccggcaccttatgagaaatcaaagtctttgggttccggggggagtatggtcgcaaggctgaaacttaaaggaattgacggaagggcaccaccaggagtggagcctgcggcttaatttgactcaacacggggaaccttaccaggtcca

SEQ ID NO: 9868 - DNA, 641 bp, Gossypium hirsutum
atttatgcaatatcaaagcatttaaacacaattataataaagctcattgcataggaacttaccttggatgcaaaaacagctgaactgatagattagtcgagaactttatttttcccccgatctagatccaagtttcacttttcttgatctatatgtaatcaaaattaatttatttaataatctctctattcaatttagtccaaaatgctcattaatgcaattttacacattttcccctaatgtttcacaacttttacaatttagtccttatttcataaaaacacaaattcatgtaattcaaccacagcccatgctagcaaaattacaattacgtccctaacagcccatattttccatttatttcacattttaaccttgaactttacacttttcacaaattaatccctaattttcattgtcactaaaaatcgcttaaaaaacatgtatatctatcaacaagcattcataatctatcaagaaaattcaaaactcacatatattcatcaatggaatcattcaaaatctttaacaatttcataaaatataccctgggctagctagacctaattgcaacgatttcaaaaatatagaaatcattaaaaacgagacaaaaatggacttataattgagctaaatacctt

SEQ ID NO: 9869 - DNA, 615 bp, Gossypium hirsutum
cgtataataaatttttaacatataatacaaaatagacatcatgacttatttgaccctccaactttacaaaaagtcattttagttctccatttaatttttcgcctcttttaatcattaaacttgtgttttttttcgaattatcccaaaattgatggaaaaattaatatatgttaactttgctgatgtggcatacacatggataccacgatagcaattaattaattttttaaatataaaagttctaaaataatatttaaaaagtatcaaaatataaaaaatgtttttaatttttaaaatttaattaattattgacgtgccatacacttgggcatccacatggatgccacatcaacaaagttaatagacgttaactttttatcctttttggagtgatttgataaacaatacaagttcaaaggctgaaagaaacaagaaataaaatggagggctaaaataattttttctgtaaagttgaaggaccaaattcatcattatacttataaaatattaaaagttaatacattcaacttaaccggtactttttgacaattatatatttcagttattacaacactaattattacaagggattcaattattagcaggtcctttgct

SEQ ID NO: 9870 - DNA, 632 bp, Gossypium hirsutum
gcacccttctaaagattaaaagaatggaaatgaatcaaagaaaagagtctagaattgctcgttcataaagaagaatccacaatcagagctggagcttgctttgatatccataatcacattgccatccacaagaaagagttgaaaatggaaacctcaacaaacttcaagaattgttctattctttctaattctcaaaagtctttaaaagcttctccctttttctccagaagtcctttatttctgatacaaaccatatatctatagcaggaggctaaaaaatattaaatgtccattttccctattaaacattgcgacccccaccctcacaacgttgtgacattgtcgaaagactcctcattggctaatgtttggtatcgacttcgcgacttcatggagcataatgtcacaacattgcggcccaaagttgagacctcaacatcacgccttcgatcaactcatgtcatgatgtcaggcttgagaatcaactcctcattttcgacaatctttcaagtcgcgacctcatctcctagcattccaaaacagtaacttaagttgcaacattgaccaatgtcaagtcgagacattgtcttgtttcaccaaaatctctcaagccttgcttgtcatgatcctcc

SEQ ID NO: 9871 - DNA, 628 bp, Gossypium hirsutum
agagcagttcaataatgtaaggtacgtattttgtatagcattcaatttggaatttgagttttactttttcaagggcgaaaccagaaatatttttaaggtgttagaattgaattataaaatttttaaaaggtccgaacttttttatgtagtaatttatgatttcattatttttaaagagattaaatatatatttttatatttaaagggaccaaaatataattttatcataaattaatttacaattttattattttcaaatagattaaaataaaaaaaattcagttttaggggccagccccagccagcgcctagcttcacctctgctttacgtgattctataaatcatttccgtaagagactacagtaaaaaagaaaaaagagagagcaaattctcacattctttacaaagtaaaagtggtttaattatgtttgcatttcctcgtttatacttacttttttttgaggtgtttcttaaagaaaaagaaaccattataattggctttaacaatagtagctctagagaatatcatgctggctatcaatggtgattgatagattttaacattaggagtttaattaattttttaaaaaaaatcaaaattttttttaaaccaagactgtggctcat

SEQ ID NO: 9872 - DNA, 635 bp, Gossypium hirsutum
tttatgttggaatttcaacatgtaaatttttccgtatttttcaaattatgaactaatttttgttttaaatgagcaacgatggataggaattcttagtagaagcacacgacctcaagagccatttctacattggtcgcttctattaactgacgtggtcgttgaacagcctattatttatctggttttgcccttcttttgtatctgatgacgcaattagtagttaataaaaggttaaaatgtgccatcggtaacaaatttggaatttagtctatttttttttatttttaaaaattttattcttttactttttaggttttacaatttaggtctaattgtttatactaattttttttttgttaaatttgttgaggtgacatttaaaaaaaagtactttcttggcatccatttaactcaaaacatgttgtaatgaatgtgaatttaataataattttaattgtattaacagttagatctaaaatttaaaatctgaaaaaataaatggattaaacatttagaggtaattggctctcatgacttcttgcacaaggtttaaagtcttgcacaaggtttaaagttggtaggttgccaatgaggtacattggtgctccttttgtttctcggaagctttctcacat

SEQ ID NO: 9873 - DNA, 513 bp, Gossypium hirsutum
ttatggcggtgtttgttatgctccattttgacgtagattagaattcgattagtttttgattgatctaatttgtaaaactacagaagagaaagttgcagatatgtacttgtacttggagaagctttgtattgtacgaaattattttattcttttaatggacatgtcatgtgggttgatcgtgttttttatattgtaataaaaaggacaaaagttccagatataccgcaaaaaccttaaaactgatgaatctgtgggatgatgtccggtcccatatccaggaagtttcttggtttaaccaaaattcaatgcttccttgtatatatacgtagtttgaattatgattcataaggaaggaggcattactttttcaaaatcaaaacaaggaaagcctaatttgacatctactaacgtactacatgtttggagtcttaactcccccaagttcttagcaacttcctatatgaattgctaccatttcaaggctttaaatccgcctaaaacttttctcatata

SEQ ID NO: 9874 - DNA, 546 bp, Gossypium hirsutum
  misc_feature (4)..(4): n is a, c, g, or t
gcanccgggcactcaatgcatccacgtttagaatttgaagttttagatgggattttgttcttcggggccttatacgtacgattatcatcgtcatgcaaacaagtcttttcttgttcattaacaagtttcccaacactggggccaggatggttagtgaaagaatctggtctcatcctttcaacagcaagcttagagctcaccttacttcgtttgcaattgatggtaccggcattttcggccaaacttctgtggatatccgatgaagagttctggcccgggaatgagttaaaatgggacttgtataattgatgacgagatttcttgttctgtctttcgagcccgtacacaggtttgaaggttgcattctccatataaggatcctgagaacttgtctttgaattatgtacttcatttacctacaagggcattagatgaacaaaacgccatatcataagactcttgacaggatttgaatatgacacattaacatcatagttatttcaaataccgattgaaccggtaaaaatgaactcttcctagttgtca

SEQ ID NO: 9875 - DNA, 453 bp, Gossypium hirsutum
ttatatcaaaattaacagatatgataagaacttatgatgaaattaatgttaacaaaaatcaataattatgaggctacattttaattaaaaatttttatttttaagtatggtttacttattattaacggtcaataactagttgtgctttctcttttacaatgactattctctcattgctttgctccatccttccttttcaagccgacaagtcagtacccttaattaatcacatcattaatgaaataagtatttttttttgaaaagtaaatttattaattcattcaatgaatggtatcatacaatttaaagaggaaaaaatagcaaatattagtcgtagatggtgaaggacaaactctatcaacacaacaaaagctttaacctcaatttcaataaaacattataatacattgacaattgactttgtcacaactcaagcacaatatatctggagtg

SEQ ID NO: 9876 - DNA, 576 bp, Gossypium hirsutum
ccaaggtaacgttacttatgctatagttaatgcctaatcgttcatggccaaccccaaaaatcatatgtgtgctttatatattttgaatatcgatttaattatgttttgtatttattgatttttttaaagagtgtttattgattttagttataattatttggatgtgttatttatatttttgattctaatttttttaggataaaaaaagttaaattaatggcttttgaatggtataataataaatttaatttttaacgtttatattttttttaatttaactttttttttatttaaatttagccataaaatttctaaaaggaattaaatttgatcaataatcttttaaaaatagttgaattgttgtttttaacggaaatattaattaaaatattaaatttttaaacatagtagcctgcttggtatatcacatgcacttcatgctagtattttgaatttttatgaattatttatatttatatttttgaatattttataaattttaaattatatattgacgtgtcatatataacgaatggtgtcatatcagcatgaagtacacataaattgtcacccatc

SEQ ID NO: 9877 - DNA, 734 bp, Gossypium hirsutum
  misc_feature (619)..(647): n is a, c, g, or t
  misc_feature (649)..(649): n is a, c, g, or t
  misc_feature (651)..(662): n is a, c, g, or t
  misc_feature (664)..(672): n is a, c, g, or t
  misc_feature (677)..(694): n is a, c, g, or t
  misc_feature (697)..(705): n is a, c, g, or t
  misc_feature (712)..(721): n is a, c, g, or t
ttgaggaagagaaggtatttactataaaagtaatttagttaagtaatggcttgtgctaaaggaactgagggatgccacgatctttagtatttctgctatcccaaagagcggggaagcctagaaggaagggattgagcttgaaggctttcacggattgatgccgagactagattcgaaactagacttgggcttgggtaaggccaggtattcagtgtctggttcgataggaccaggaagaagaaggtttggcaagtgaaggggaattccgctataagagaaagagtgcctcgagaataggctttgagcgagaatccgattcaactcgttctttttgggtttggtacttcggccacaggatctcatctcgtctttttttaagaaatataggccttgtaagtagtaaactccttaagccgaagagtcgttaagccgagaaagctaacaaatttcttgccttttcatctcagatcaggaaggtagtttgattaaaaccttcaaggaggaatcgattgaatcatccctgtacttctactcgatagagtgatcgaatcggacgctgtgccattgatttcatttcgctaatcgaccgctattagatagatagattcgcctcgagggnnnnnnnnnnnnnnnnnnnnnnnnnnnnncncnnnnnnnnnnnncnnnnnnnnnctacnnnnnnnnnnnnnnnnnnctnnnnnnnnntgccctnnnnnnnnnnttcccgcctctgc

SEQ ID NO: 9878 - DNA, 643 bp, Gossypium hirsutum
gtgtgctatatctttgctacgtgattctacttattattggtggaatgcattggtttctgttgtgctgagagagcgagtgacatgggaattcttccagatcgagtttcgaaaaaaatatatcagtcaaaggttcatcgatcagaagcgaaaggaatttctggagcttaagcagggttccatgtcagttactgactgtgaacggaaatttgtcagacttcgtagatatgctcgagaatgtgtatcatctgaggctagtatgtgtaaacgttttgaggatgggctgaatgaagatataaaaatgtttgttggcattcttgaaatacgagagttcgtagtacttgtcgagcgagtttgtaaagccgaagaacttagaaaagaaaaacaaaaagctgatgtaggaactggagaatttcgtaaaagatcttcagtaaagtcttttcagcaatcatcgaagaaatttcgagatgattcaggccgagtaaagaacacttcgggtttttccagacgagaccgcgatcgacccccagtgagtacatgagccacttcagttgctagtgttggaaataatcgttgggacagaatagagtgcaagtgttgtggcaaatggcattcgaggagttgtagatttcgtgatcgctcctgt

SEQ ID NO: 9879 - DNA, 558 bp, Gossypium hirsutum
caattctctgtgaaggtgggctcaatgatgccaaagaatctatcccacggagctctggcgataatggcgcgcacatcatcagtgagtcagacctgctccaacgcaacccaatcaatgcagtggcctaagctgagtggacgtactcgaaggagctgaataaatcctcctggggtcccaccgaaaataagagaaaggggtggcgagcctcggcagatgcgctcgagaaggaggttgctcctaggccctaccactttttcgaagtggggacaacgacctttgatttgccttgtatgttcgtcatggtagcctgaattaaagcgctcaaataagtcaaattgatgaaccaacaaaaaaaatgcacactaagaaagaatagaaatctaagtgaagctccaaaggtgatctaatataaaaatagatgtggaacaaaataaaactaagaaactacatgcaataccaattacaaactaataatgaataagaataaacatgttgaatcatactagcaattaaaacaaaaatcaaaccaactaaactataggcatgcatagtactgcg

SEQ ID NO: 9880 - DNA, 624 bp, Gossypium hirsutum
  misc_feature (26)..(26): n is a, c, g, or t
atttagcttatctaattatcatattngttcaatttggtccaaaaatcacactatggaaaaattactgttttgccccataacctgtcacatttttacaaattagtccttaggctcgtaaattgaaatgtattgaatttctttgttacccaagcctaaccgaaccatatacatgctcatatctgcccacatttttcattaaatcacatttctactacccattttaacaacttttacaaataagtcctttttatacatttcactaaaaatcacttggtaaaagttgtttatcgcaccttaaacatacaatatcttccatcaaacatcaaaatacatgcatgtcacacatgggtaaatttctaaacatgaaccctacttcaaaataatggtagaaataggtaaatcgggttacgaggacatcaacaatgtaaagagcattaaaaaggggctatgatgtacttacaatcaagcttgaaagttgaagaaaatcctagctatggtgtcttgtaaaatgcctttcacttaaaactttgaaatttcacctaatcatgtccatttttgtccataaacttaactaatggtctaattatcatataaggacctctaatttaaaatcccataggaatt

SEQ ID NO: 9881 - DNA, 636 bp, Gossypium hirsutum
  misc_feature (614)..(622): n is a, c, g, or t
  misc_feature (629)..(631): n is a, c, g, or t
ccctaatctggttgactatcaatgattgttctcttttgatacaccgattattaatttatctcatcaaattgggatttttttttctctattttgtgaatggattgcagtgctttcgctttttggcttgcaaactttggtgtacttgtaagtgattatcatctcctcgttagtaaaagtattatagactcccttatataggagtcaaattgtatttttttccctaaatataaaaaatagaaaattaattactataccttaaattaaagagtaaattaattttttttgttaaaaattccatccatttctacaattaaaaattagtttttgtgcattagcatgcagtatacttagcatgccacgtgttattatctagttgttctgtcaatcacgccagtttttaactgtacaaatagataaaaattttaatataaagaaccaatttgttgtttgatctaacatataaagattaatttatctattttttgagtaaaaaagataaaatacaaacttaccgctaatataggcacctctatttacctctcctcatccattatatataattgtcatcaaaattaacaatctacaattacagattcgtggtgattgaatggatnnnnnnnnntaaatannngtgcc

SEQ ID NO: 9882 - DNA, 554 bp, Gossypium hirsutum
tggtctatttaggggtgtcatcgagctgagccgagcccgaatactgtcaagctcgagcttgagctcaactcgaaattcaaaactcgatactcggcttgagctcgatcgaacatctatttttaagctcgagcttgactcgagatataattgagttattcgagcttgattaagctcatttaccaatttttgtacccaagcatgaatttgagcttgactcaataacttaatttaatattaataatatatattaagagcaataacgtaatttaataatataaaaatgtgaaaagctcagtaatgcttgtgagccattcgtgtctagtattattaagcttgaattcagctcgatcttgagctcggctcggtaattactaaatcgagtttgtatcttttttgaatcgaagaatgcagatgaatagagagaagagacagggaaatctcattcatatgttttcttttctatcaatagtgtttcttatatttcctcacttgcagatagtcatgtgcttcctcaacctcgaacccaaaggtcgacaccatcgacaggagatgag

SEQ ID NO: 9883 - DNA, 642 bp, Gossypium hirsutum
tcaaaaacaaaacaatatatatatattactttgaaatatttgaattgaaatttttatattaaaattttattacttttttgaaagaaattttcatttaactcaaagactagaagaaattaaattaaaattttaaatattaaaaaattaaaagaaataattatatcatttattcaaagggttgaagtttgtatctatccaaactagtcccataaatatacgattttcattttttaaacatcaagtacaaacaagaaaataaaataataatgataaatttagtttttaatatttatatttttttactaatttaactctcaatcttttaaaaaaagtcaaattgttttttctaatacaaatattgattaaaacgttaaatttttataaatagtagcccgcatggtaatcaatgtgcaagggcgaagccagaacaaaattttagggggcacaatgaaattttaattttttatactctatatctttataatttttaaaaaattaaatcgaatttttataattttaagggatcaaagtacaattttaactttacaaatttaaaatttttaaaaaatttaagggcctaaataacaattttacattttaggaggggttggggcccctgctagccccctaaatccgcttctg

SEQ ID NO: 9884 - DNA, 631 bp, Gossypium hirsutum
ctcacatttgctaaatttagcaaacaattgtttatctcacagagtttgcaacacaatcctcaagtattcagcatgcttagactcatctcgagaatagattagaatatcatcaataaatacgacaacaaatctgtctaaatacggtctgaagattttgttcatcaaatccataaatactgcaggtgcattagttaaaccaaacgggatcacaagaaattcatagtgtttgtacctagttctaaatacagtttttggcacatctgaatctttcacttgtagctgataataaccaaaacgaagatcaatcttcaagaatactgtggcacctttcaactgatcgaacagattgtcaatacaaggtagtggatatttgttcttgattgtaactttgttgagctgacggtagtctatacacaatcttatcgattcgtcctttttcttaacgaatagaaccggtgcaccctaaggtgaaaaactaggtcgagcaaaacccttatctgtcaattcttctagctcttctttcaactctttcaactcagtaggagccattttgtaaggtgctatcggtatcagtgatgtccccgataccaattcaatagcaaactcaacttctctgatctacggtaatcca

SEQ ID NO: 9885 - DNA, 594 bp, Gossypium hirsutum
tgttggatggctgccttcgtttgctatgtggaaataatcaccaaatattatatcctatcgtcctttctgccatttgtattaaccacaatatttttaaatgccatttaagtatttaattggctcttcttcttttttttgcctgagcggccggacatgttgcccacatcgaaatatcagtctcaccatcgcaatccaaccccattttctttttcctttacgttacttatgatgtacagaattgaattaaattgtaatttttataataatataaatctagtcttattattttattattttttatatttataaattttaaagaattaaattaaatttttattatttttaagaaggttaaaatataattttatatttactaattttaaattttaaaaggtttaaatggaaggggacgaaatgattatttaaaattttattaggtcaaattttgttatgaaaaaattatagattatttaaaattttattatttttaagggagtcaaagtgtaattttacttttactaatttaaaattttaaaaggcctaaatgaaaatttttccattttagttatgccctgtttgtagattaaagaaagg

SEQ ID NO: 9886 - DNA, 560 bp, Gossypium hirsutum
tattatacgtctttgtaaaagaaaattctgacttatgatatgtattagatgtcatattttgaaaaagtatatttatttttatgaatcaatggaatcacgttgaactaatacattaagactgggttcatataagccttccaaatatatatattttttcctttgaaatttgactttccacagagccaaaacaagaaaaagggtgagctacgtgtaggacgtttgttgtaaaaatgaagatgaggaagtaagagaactttgtgacgtagagaacaaacaatctctgtttgtctctaatacaaagcaaattagatacaatttgcattgggttgcatgtttatgtaccaaataataacacttctaaaaaaagtgtgaattaactataaatatgtgttctttcttcttcttctttttaataatttgtttatttatatcttttaaaagtattttcatttcggtcaattatgaaaaatattattataatttcgtcgctacttttagaaaattttatcattttagtcacccttgatgatgaagatgagcacatgatggtgatgaagtta

SEQ ID NO: 9887 - DNA, 553 bp, Gossypium hirsutum
tcagtactgaagtgctggactcttagttcccatggtcaagcattaaaccttaacaacctcaattatcaaactaataatgataatttgaaatcaaacaattcactttccaatgctaatcagattataaataaaggacatttcactcgtaatctaaccttatgaccaatcctagctcagaaatcagcataaagatacataaataaattacttagcatattgctgattgctaagaaaagcaatcacttcaatacttaaatatatgtattccatactaaaacaaatatcagttagtaaagctcaatgcagcagcatcaataaaacttcattaagctaataacatgaagagacaaaatactctcctatatccccagttttcatagtaatcagacaaataataaactaaaatggcaacaaaaataaacaaattatgaaaatgcgaacggggatttaataacattggtttaaggaagaacacctttttcacttcaaaccatcctgacccttgatcatccactgctgattcttcactgttctccatcatctccaaacaaaa

SEQ ID NO: 9888 - DNA, 471 bp, Gossypium hirsutum
ctcaggaagagtcgagtcgtatgtaaattgcccgatcgtctacgagaagttacgttaggtttagttgagttgaagatatggtcaaagtagaaagaggggtacgaatggaatggtaggaatgaaagggtaggaacaaaaggatatgaacaaattggtcggtttaggttcgattaggtaaagaagaaagaacgggtttgaactactaaaggtactttcaagaaccaataccgaaatggtatcgacccgttgattaagccttttgagttcggttataggtttggtaagggaaaacctcgacccactatctaacaagataggaacctcggtatgttgaacgccacactatgaatagtgataagttcgggtacgacaaagaacacggttgacacaactagaacgctaggaacactaaacgaatctttgaacgaaatataagaaaagtttgcctcacaatttcggcagcataacata

SEQ ID NO: 9889 - DNA, 529 bp, Gossypium hirsutum
tggaggacttgcattttggaggcactgctatgattatcaatgctgacccaagtaacttaacccatactttgtttacacttaaatttaagctctattgcctttttaattacaacatggtttcgtgtttgtttcaggtttcctcgagtgtcggtttgttctcagtagaatggagaatgttgggattgtttgagtacaatgtaggatgtgtggggtctaattgctaagtggaatgtctggtttttaccctttattcttagtgagtagttgtggtgtaaggcatgtagcaagtaggagttagaagatccagtttatttatcctatgactcatttgactttgattccgtatataaatgcccttttgccttgttaatattgatctcttaacaatgttaaagagtttatgtgggccgtaaagtccataaatggacatttaggagatatatcgccctgaagtgtccattatccaacagaagtgattgggcttactatagaggcaggtcatccctccaaaacacccagttcccaatat

SEQ ID NO: 9890 - DNA, 488 bp, Gossypium hirsutum
  misc_feature (58)..(62): n is a, c, g, or t
  misc_feature (427)..(428): n is a, c, g, or t
  misc_feature (440)..(440): n is a, c, g, or t
  misc_feature (443)..(444): n is a, c, g, or t
  misc_feature (469)..(469): n is a, c, g, or t
tttgtacgggatggtacaggaatgtgtataaactattttagcattgaatcaaagatannnnngatgaaattatatcgttggggaagaagaatatgaaaggttgtttcgttagtaagctttaggttgttttattcaatttattgaattatattggggaaattgtattagttttatttcatatgaccttactaatctttatagcttactttgtttatttttcccgtgttttatagtgttatcgagctagcttggattcagagatctttggagatcgcatcacactatctacctatcacttggtacctttgaactttggtatattaagtatatggcatgtatagggattttgagtcattttggctatgttttggtagtgatattggccatttgaattggcctgtaaatgcttatgttttggtttggaaanntagccatgaganttnncttaatttggtgaatttggttatgngcatatctgtgcatatatg

SEQ ID NO: 9891 - DNA, 382 bp, Gossypium hirsutum
cattactaaatcaactttgggccaaagaaattctttggggacgttggtttggttttggagaaaagatgagccgatagaagaactatgatggtcaactagtgtttgatcttgaatctcaagcggagaggaaaggagatgcgttgaatccattaggaagacagtgtatgtggacgtagggcaagaaggtgagagagttgcattaaatataggtaatagactcccattacaagctattatcaaattatttggtatcatgtgcagggttcgaagatcaaggaatttttttttaatggaaaaagttgcaaatgcaactaagttcatttttcaaataattttataaaacagtggatcgtactctgtccaggtatcaactccttaagaa

SEQ ID NO: 9892 - DNA, 586 bp, Gossypium hirsutum
ctataacactttagccataaaattggctaattacttcgatataaggattgattaaatataaaaaaaagtctatgctaataagttagggtaactaagatatccacatataagcattaccaaatcaacttaaaccatgactcaaattcataacaaaagctccaagaaaatttcagaaacttggagaaatcaagagaacataatatttcaaaatcaagagaaattataagcacatcgtagaaatgataaagggctttcatttttttttaactgacagctatggtcatatttgaatagaatcaagattatatcatgttcatattatgaaaaaggaaaatcaattaagaaaaattgaattggattgaattgaaagaaaaaaaaaacttacatttgagtgggtttcttcatgtttttcagagccttccattaatcaaaattcagtgtcgcgaaacagaagataccgctgatgctggaaacgattttgtaacaaattggtttctttaaagtttaaagcggcggtgccacacggtagatgacaaggtgttagctcaaatgtataattctaccctcagtccctgtactgttggcc

SEQ ID NO: 9893 - DNA, 420 bp, Gossypium hirsutum
agttttatggagtggtggtggttttattactttgagccatttccaagcaacttcacatccttttttactaatagcaagtccaaatacagcatcttgtttgtaaacctaaacaacattgaagattgaaaatttggttttttataaaagacaaattgctaagttttgaaccaggaattctaataccttggaggacaatacaaagtttaaagcttcataaactacactcttatcaagacaagatgctaatgaacctacaaacagagggaaaaaatattatagatttgaatagtctgctagtatctaaaggattttttacctaaaatccagattactctcgccttgttttgggtcccaaccgaagttcctgtaagaaaattacaacgacaacaggtttggttttggtcattacaaacttcaata

SEQ ID NO: 9894 - DNA, 629 bp, Gossypium hirsutum
  misc_feature (53)..(53): n is a, c, g, or t
  misc_feature (446)..(446): n is a, c, g, or t
  misc_feature (520)..(536): n is a, c, g, or t
  misc_feature (538)..(555): n is a, c, g, or t
  misc_feature (566)..(566): n is a, c, g, or t
  misc_feature (568)..(568): n is a, c, g, or t
  misc_feature (570)..(574): n is a, c, g, or t
  misc_feature (576)..(577): n is a, c, g, or t
  misc_feature (580)..(582): n is a, c, g, or t
  misc_feature (586)..(593): n is a, c, g, or t
  misc_feature (596)..(598): n is a, c, g, or t
  misc_feature (605)..(608): n is a, c, g, or t
  misc_feature (610)..(613): n is a, c, g, or t
  misc_feature (618)..(618): n is a, c, g, or t
tgttcctatcaagttcacccacggccatgtcgcacggccgtggggatttatcncaccccgtgttttggggaaatcatgtcctgcttcaacacggccgtatcgcacgaccgtgtctcttcccttgtttggtcacggctttaggcacgctcgtgttcttagccgtgtgtgctaaaaaactttgcaattcaaagataaagttgatgatccaaagtgttagaaattaattaaaaataaagaaatcaaaaaatgttagtgctcaggttgcctcccgagaagcgcttatttatagtgtaagctcgacttacctctccgttgatttatcatggtgggttgaggagttcatactcctcgttcgtgctatcaattttaaaacaaggttttaatcgggtgttgtttaccttaaaagtgccgaacttgggatgactcacctttaccgtaccgaatgnaaaaatactgagtactgtgagagggatttcctcattcggtgtggtagtgacaatgtgaggatcaacagcaactnnnnnnnnnnnnnnnnncnnnnnnnnnnnnnnnnnncccctctctcntntnnnnncnnttnnnctcnnnnnnnnccnnncttcctnnnncnnnntttcnctccccccccc

SEQ ID NO: 9895 - DNA, 559 bp, Gossypium hirsutum
  misc_feature (21)..(21): n is a, c, g, or t
aagctaagtgcatgagaagangaagtacttgacttggggagatcgaaagcttcgaaaagctaagtgcttgagaacacaaaatgctttaagaaatacgtgacttgggggaagtcaaaatatttggaaagttaagtatcatgttcgattcatgctcaccgcaccaattattaatacaaaaaaagttgtgatgatttgtggtggttcacctaatgggtggagagctgtaggaaattaagatgttcagaatgtagatgccaataaataaatgaataggagaggagaaagttgtgaatgttataggaaagagtgccttggccccttttcacgatgcctgtaagccgtaaaatttttttatagttctcaaggtatcaatgttgcccatttattgatttcaaactccccaaaatttaattgaactattaaagccttgtgtcatgtgttatcatgtctaggaaattgatacgtgtaatgtttgaatgatagatattttgtttgtgtcaaatgtatggtcacattggtttaagtttgcgaggttttttcgttaataaatcgcatgtat

SEQ ID NO: 9896 - DNA, 787 bp, Gossypium hirsutum
  misc_feature (61)..(63): n is a, c, g, or t
  misc_feature (209)..(210): n is a, c, g, or t
  misc_feature (425)..(425): n is a, c, g, or t
  misc_feature (462)..(462): n is a, c, g, or t
  misc_feature (464)..(465): n is a, c, g, or t
  misc_feature (499)..(500): n is a, c, g, or t
  misc_feature (543)..(543): n is a, c, g, or t
  misc_feature (547)..(547): n is a, c, g, or t
  misc_feature (662)..(726): n is a, c, g, or t
  misc_feature (728)..(735): n is a, c, g, or t
  misc_feature (739)..(740): n is a, c, g, or t
  misc_feature (744)..(744): n is a, c, g, or t
  misc_feature (747)..(750): n is a, c, g, or t
  misc_feature (752)..(754): n is a, c, g, or t
  misc_feature (759)..(761): n is a, c, g, or t
  misc_feature (763)..(767): n is a, c, g, or t
  misc_feature (774)..(781): n is a, c, g, or t
caccgaatactaatttatgcatacatataccctagtaaatgttatgcatacgtagaaagannnttttttagaaaattctagaactctaatccttaccctttaatatcatagatactaaattcgaaaaccctaaatccataaatataacctttaaatctaattaaaatgaaaaaaaaatatttttattttctctttataacaacaaaagnngtaaattaaggagtacattttactaatttaattaaataaaatcaaaagaaatagttaaacttaaataccaccatcacattattatttcccatctatacttaagcttcgtactaatatttaattttatttgtgtagttatatatattaattaaaattgatgtaagttaattcaataaatgcatatataatattgatttaaaaaagagacgtgggtngatgttcaaagacaaataaataattctacattattgncnnatgttaataattaatctcaccaacaaagaagcannaagctaaggttgttttggactgaatgtctttaaataagaaagngtanaaggccttgaaattggttcttgagaatgaagttaatctcacaatcttcttttattcccaaagagatggaatttcgagaagcgacaaaactccactggaaattgggaagtgatctnnnnnnnnnnnnnnnnnnnnnnnnnnnnnnnnnnnnnnnnnnnnnnnnnnnnnnnnnnnnnnnnncnnnnnnnntttnntttnttnnnntnnncctcnnncnnnnntcccttnnnnnnnntttttt

SEQ ID NO: 9897 - DNA, 356 bp, Gossypium hirsutum
acagggctcttatcttattgcatataaagttcacaagattaaacacataggatttgcatgtaataacctagggttcacatgtaattcataggggtttgcatgtcataaacatatagggtttacataaataatatatcgattcgcataaataacaatgggtttgcatgtaatattagtttgtataagggttcacacaaataggggttcgcatgtatgttctaggagctcacgtatttaagattatatggttttacatatgagttcacaattggggttcgcctataagggttcgcataccaaaggctagcctataaggtttcacatgcaaagagggttcacctatgtggtctcccagc

SEQ ID NO: 9898 - DNA, 426 bp, Gossypium hirsutum
  misc_feature (418)..(422): n is a, c, g, or t
ccaatccaaatcaagaagtagggcactttggaattgaatctacttaattaacttttgaaaccttttttttaaagaaaagagctttattggtcgagttcgacaatgctgcattattgggcttcaagaatttaaacgcacaacatttcatccaaactttacttcatttcgaccttataattgtgttttccagaatacaaattgacttgcattttagtttcaatcgtatatatactttactccccaaattaacttaaaaatctctcatctttaatatttaaaacataaagtatatatatttgcttaaagcaagtctagatagaaaatcaaactcaagggaaccgaacactacactgcagaaatagttggcaaactacgcacgtgtgaacacaagtcattgcttcattggagagggattcgnnnnntcag

SEQ ID NO: 9899 - DNA, 648 bp, Gossypium hirsutum
  misc_feature (631)..(645): n is a, c, g, or t
tattaggtgttattgtgcactagaccaaaacaagaaccaagttttctcttacagaattcttgtgatataaagtgtgaattgaagtagtttccaacaattgcttctgtttccactttgtaattagtgaatgctcaatttttggtgcctggaaattctctccaaatccattcattaatatctatatcaggtaattcttccaaaggacatgaaggtgaaaatcagaacatgggaaatagaaacatttatgaggaacaacgagttgaaccctgtcatttaagttcatcgatcttctacggtggccaagatgtatgcttcgatcccaagagtagagaggacttggaattgaactccgtggtgagtagtactagtgatctgacattttatttaggaatctgctaacttgttttcttaatttcttagtttaacaaggatattggagaagatgatccagggtttgcatcaagaggaaactggtggcaaggtactgtataattgcttatttggacaaaaacattccaattcaaaggtttaacatgtttgttatttctgcaggttctctatattactaatacttgtttgccaatcaggatatatacttataaaggtaccttggctacttaatcaaaacctnnnnnnnnnnnnnnnaaa

SEQ ID NO: 9900 - DNA, 698 bp, Gossypium hirsutum
aagcttatagtggacggagagagacttgtactatttatgggaaaagtgagagaggggataccatgggcgttggtcccatgtatttgcttaaactacctgcttttttttccctttttcaggttctgagcctttgggcttccaaggtgcgattgttttgaaaaacgtaagagcctaggcaaaactaaagtgtgaaatgaaagagggacagataatgtcatgcgttggcattatgggacacgtgtgatggaaccaaaccaatattggtttttgttcttaattgtcctatttttattttttaaatagtgaaagagattaattcaatcacatttaaacatgtattttgaagggtgttatgctcttatcacggggcacggactagatcccacgatcttttgcccaaagatgacggtgttagggtacgacagcctactatatcataacaacgaccaacggcatgcatttaacatttaactttttaacttttcatcacattatacgattccttacacaatgctataaaataagaaacagttttctataaaaaatttgagtgtaaaacagaaaacttctttttcgagattcatcttcaccctcttatcctttcttcccttcttctttccattttcccattgccgactctttgttttgtataagcgaactgaatctcattttttttaccttctcctctttggatgaac

SEQ ID NO: 9901 - DNA, 610 bp, Gossypium hirsutum
caaatgacacctacactagctttaccatatttaacatcgaaagccccatcgcagtaaatcttaacccatccttctggtggtctcccccaaacttcttcaacagtaccctcctgcttaaaatccctctcagtcgagcattcattcctaactgctatatattcttgagtagcagattttattatacagatgaccccattaataactacctacttaccaccaagaaggacctcacacctcatcttccaaataaaccagcatacaaaaatgattctagtggcaacatttgacaaattttaaacataaacatttctaactaaaataaatttaataggtggctaattacaattatgacactagagatggtagtaaacaatgttgcaacatcggatggactatagtcggtgatagtactcaatgaggaatgctacgactctagttgaatgagtgttgcaacggtcaagactagcaatacccacattcttgaaggcagtgaataacatcgtgatgtgggatatcttattgtcacgatagaagaaaaaaaattgaagtataaaatgttttagactaaacagcatgttgtgactgtagaggtcgggtgagtgtaaagagt

SEQ ID NO: 9902 - DNA, 474 bp, Gossypium hirsutum
  misc_feature (55)..(59): n is a, c, g, or t
  misc_feature (344)..(344): n is a, c, g, or t
  misc_feature (421)..(422): n is a, c, g, or t
attgccaagttcaaagcaaagtcaaatcccacacattattattggcacaagtatnnnnnctgcataaccttttctttaagtaattttcttttacacatatatatatacacacatactttgttgtctccctcctactgccctgtaatgtagcttttgttacacaagattctaattgggattgcgcagtgctgcttttatgttgctcatattattctttaagatgtttaagtgccccaatttcaagtgaaccagttctgcaacagcacatccatggggggtccagagtctagacagaggtaagagggtacattgctatatgctgctctctttttttctttttacanaaaaatattttcaataatgttgcttaaaaaattaattaatttggactttggaacctatccatgaaaaattatggtgnnaaatcaatattcttgttactctgtttcattacaatgaaaggcatcaaaaaaa

SEQ ID NO: 9903 - DNA, 565 bp, Gossypium hirsutum
cgccatcagagatatttgacggttggtttcggaattatgaatcttttttcggtcggagtttgtttagtagcacagtttcaagaaaaaagtttttttttccctaaaacctcttctaaaatttgttgctgttaaaaattatgaatttttctgaatgttcattggtttttgctcttccaggctactgttcaggtaaaatgggctcttttcataacatttatggtgtcaatttttgttggacttgaataaaaaaaagtttagtattgtgacattgatcggatttgatgaaatgagtggaaattagtgaatttacaaatccatgttttgtactgctttattctcccttgaacatagtcaaacaaattgtaaagttttttacttcaagggtatgtcttgaaattatgaactgcatttccaaacaaagctcggtatttgttctttaccacatttgtttattgaattgtttatgttatttgttgcaggttttggcgttacctttacctcatagaccccttttccctggattctatatgcctatttatgtcaaggtatgacatgctgtccactt

SEQ ID NO: 9904 - DNA, 785 bp, Gossypium hirsutum
  misc_feature (614)..(634): n is a, c, g, or t
  misc_feature (636)..(641): n is a, c, g, or t
  misc_feature (645)..(649): n is a, c, g, or t
  misc_feature (651)..(652): n is a, c, g, or t
  misc_feature (655)..(676): n is a, c, g, or t
  misc_feature (678)..(680): n is a, c, g, or t
  misc_feature (687)..(694): n is a, c, g, or t
  misc_feature (697)..(700): n is a, c, g, or t
  misc_feature (702)..(704): n is a, c, g, or t
  misc_feature (706)..(708): n is a, c, g, or t
  misc_feature (710)..(723): n is a, c, g, or t
  misc_feature (726)..(731): n is a, c, g, or t
  misc_feature (733)..(734): n is a, c, g, or t
  misc_feature (744)..(754): n is a, c, g, or t
  misc_feature (759)..(770): n is a, c, g, or t
  misc_feature (778)..(781): n is a, c, g, or t
gagagagaagagtggggtggatcacatgattctcactcatttcacttcttctctatcaattctattactactcttactacttttttctttctttcttgacaatggagattgtgaatttattgcacaactccagattttgttttagtgttaatatttcttctttgaattatgcataatttacttatttcttccttctccacttttcatttttgaagttgagtaatataggggttaagagcttttaaaagataatataataataagctcaaagtattttttggtttctaattttctattgggtaaattgcactctaggttattagattattagtaaatttatattttagtcacttaacttcagaggttacaaaatagtcattaaactattcgaaaagttttcgtttaagtgaaattgagtgactaaaccatagacatactaatagtttaatgacattgggtacaatttaccctttttattatagattagtgattttcattatgttattaatattattaagtgatttccatcacctaatataattttatcacacaaagaaattcaaaaaagaaaattgggttctattttgaggaaagcaacacataaagacacagannnnnnnnnnnnnnnnnnnnngnnnnnngttnnnnntnnttnnnnnnnnnnnnnnnnnnnnnntnnntttttgnnnnnnnngtnnnntnnngnnntnnnnnnnnnnnnnnttnnnnnntnnttttgtgttnnnnnnnnnnnttttnnnnnnnnnnnnggtttttnnnngttt

SEQ ID NO: 9905 - DNA, 501 bp, Gossypium hirsutum
ggactacattccaacatatttcacctcttgtaggaaaccattaatgtttatgaaataaagggtttttgttttaatttactttcatgagagagataaaaacattgggtgggttggggtgacttttgctcactaccaacaatgagctagcttagctcataattatgataacccttgtcacctttttaattggagagttcatcattttcttttacttttcttttttcttttaacatcttatcctttggttttggttattcttctctttctaagtttatttatatattggttattatttagagatgatgaagttataaaaagaatggtaaatatggtgaatttgatgcagtagcaactagagttatgatggagtcaagtgtcccaccaggattccggttccaccccacagacgaagagcttgttgggtactatctgaggaagaaggtggcttcccagaagatcgatcttgatgttatcatagacattgatctctatcggatcgaa

SEQ ID NO: 9906 - DNA, 614 bp, Gossypium hirsutum
ggacaagattcaaggtactcttcattctgacttagcaatcactatgccacatgttggggccttttccgtatggggaaaccaaatctatggaaagattcctatttcaatatccaatgcctcaaatctatatcaacttcaacttgatgagaacagacttagtgggaacgtgccttccttagaaaagctagaaaacctgtttgtacttaacctatacaccaaccacttgggacatgggatagaaggtgacttgaacttcgtttgcactttagtcaataataccaaattaggaattctatctatacacaacaataattttggaggggtatttcccaaatgcattaggaatttttctagaaccttttcagtattaggaatagaacataacaacatattgggaagaataccggatgggattggaaatctcaactctttggaggtgctacgggcatcacaaaatcaattatcaggccccattccctctgatattgggaggcttcagaagctaaagaaattttacgttgatagtaattttctctctgggattattccccattctattggaaatttaacaatgttaatcgaactagctttagatgttaacaaacttaagggaa

SEQ ID NO: 9907 - DNA, 651 bp, Gossypium hirsutum
  misc_feature (632)..(638): n is a, c, g, or t
ttttgatgtgttacagttttctcgaagattgattagaggtcgagatattattagttgtaagtgaaagaggctaatgtgcaaaaaacttctttcaagactcagtatgggcactacgagttcttagtgacgccctctggtctcacaaatgctcctaccgcattcatggacctaatgaacagagtctttcagccctatctcaatcaatttgttgtgatcttcatcaatgacatcttgatttactccaggtctgagttggagtatgagaagcacttaagtctagtccttcaaaccttacatgagaaactattgtatgtgaagctcaataagtgtgagttttggctttgagaggtaatgttttcggggcatgtggtatctattgagtgtattcacttggatccaaagaaatcaaggctatcctagattggaagcaaccaaagaatgttagtgagattcagagttttctcaaactttttagctattataggaggtttgtggagggattctcgttgattgcggctccgatgactaagtggaccaatgagcagcaagctagtttcgagaagcttaaggcagttctgagtcaggcacccatgttgatccaacccaagtctgggagggatatgtggtctacnnnnnnnctgggagggatat

SEQ ID NO: 9908 - DNA, 576 bp, Gossypium hirsutum
gagttagtcatgccagatgtttggggactaacacacaaccgatcagatggctttctctactatgtttcttttgttgacatgtatagcaaatatacttggctgtatttcctaaagaataaatctgaagttttaagctgttttctttactttcagaagtttgttcaagtttagtttggttgttccatcaaaatgcttcaaagcaactgcggcggggaatattgttctctctcgaaggaactctctcgattaggaattcaacacagggtcacatgtccgcatacttctaagcaaaatggagtagctaatgatcattttaagattcactaaatcagactacgatcacgataaagacaagcgcacctattgaatggtagtatagctacgatgagtctagaatattgtatccacgaggactaaaagtactagtaataactatctttctattatttaacctataattaaagggatttgttttaatctaaaattaactaaactaattaactaatgaacgcgacagagagtgaaggaaataattgaataaaccaatgataaagacaatacccaaggaagaatcca

SEQ ID NO: 9909 - DNA, 672 bp, Gossypium hirsutum
gtttgagaagttgagttcggtatagagttagtaccaggaatgactccgatattgatagctccgtattgtatggcaccaaccaagttgaaagagttgaaatctcagttgcaagagttgacagacaaaagttttgcacacccgagtttctcaccttggggtgcaccggtgttatttgtgaaaaagaaagacggaactatgagaatgtgtattgactatcgacaactgaacaaggtgactataaagaataaatatccgttgccacgaatcgatgatttatttgatcagctaaagagagcttcagtgttttcaaagatcgatctgtgatctggctattatcatttgagagtcagagactcagatgtgcctaagactgctttcagaacgagatacggacactttgagttcttactgatgccgtttgggctcactaatgccgctacgattttcatggatttgatgaatcgggtgttcagacagtatttggatcagtttgtggtcgtatttatagatgacattttgatttattctcgcgacgagaatgaacatgccgaacacttgaggcttgtattaaagattttgcatgataatcagttgtacgcgaagtttagtaaatgtgagttctggttgggcgaggttagctttttggggcatgttgtatccgcatcaagaata

SEQ ID NO: 9910 - DNA, 564 bp, Gossypium hirsutum
ggtaattggtatcataactctaatacaagaaggtagacccggcagcattaaacaggacataaactaaaatacagaacacacaaaatataacatgaatacatgaatatctcaaatataaaataccttaaagtaacatgccaaaatacacaaacatgatacagtatatgtatgaaagagtaaaccctacatttgatgtctaaactatgttgctgagtatatcaagagcaatgcctacactcttcaaattaaagactaaacaaggccgaaagcgaacacttcaggaaaataggaatagaaagactcatggttcccaactaaaacaactaccagggatagtttggaatgaatttgggaaaataagatgtagggttcaaaaggctgcttggctattcttcaatcatatcttggctttcccaggttttattcatggtttaggttgcaacaataggactattcttatttggactgaattatatacattaacaaaaaagggccaaggggaaaaaaagagatataaaatttgagatgaagatagaaaaaaaatcatcaattataataagaaag

SEQ ID NO: 9911 - DNA, 695 bp, Gossypium hirsutum
cggtctcctcaaggctcttactataaaacttagatttgattaaaaaaaagttaaaaaaaccttcaaattttaagttaattgaatcaatttcttcgagtcaatttaaattcgagtcgagttaaattttataatttgaataatagattggtgtaaatactcatttgctttctgtcaattttaaaaatgagtaaattgaactcttttaacaaaaattaaaaaaatttataataatttttaaaattcaaaatatttatggaaatttaaaattttatatttttcaaaaaattctacaaattttaaaaaagttttttgaagaatatataaagaaagttaaaattttaaaaattttctaaaataataattttagagatttaaataagttaattaatgattaaagtttatcatactaaagtattttattttatttttttgttattttgctttgaaaaagttttcaaatatatatggttttaaatttatgtgctctaacatgaaattatttatactataacaagattttaatttgacacgtttaattttttaatttaactagaacaatgtaacttgaacaatttcactcgattcaattcgaaaaaaattcaaatcggattaagataataaaataagactcatcaactcgattaattcgaaattttttcactcgactcgatcggatgcttacacttactcaccaa

SEQ ID NO: 9912 - DNA, 413 bp, Gossypium hirsutum
  misc_feature (58)..(60): n is a, c, g, or t
  misc_feature (379)..(379): n is a, c, g, or t
  misc_feature (382)..(382): n is a, c, g, or t
tatgcccgagcatatcggattctttctatttcggttgaatcatcatccggatccgggnnngtgtctcgtaaccagcccatctcgattcgacctctgttaatattctctggaatagcgcccaaaagctcgtagcataccgctccctaatcaccagattgaacagacccggtgactgcgtacccgtccaccggcaatcccaattgcaaattcacatcttccaaagtgatagtgcactctccacatggaagatggaatgtgtgtgtctcggatctccacttctcaatcaacgcactgataagtttcgggtccaacttgcatccccggcctaccgtcgccacgtgctaaaaacttgcctcccgaatttaattctctaccaganggnagagaggaccatgcgtaaagagaaaataaag

SEQ ID NO: 9913 - DNA, 135 bp, Gossypium hirsutum
attgattgacaccaaaaatcaaatgtgaaacaattgtacactgacgaagccttgagcttgaaccttgaaagaagggatagctttagcatctctatgattagttgtttgcctagtccctctcgatgagctaagcat

SEQ ID NO: 9914 - DNA, 432 bp, Gossypium hirsutum
tttgtcatttactaaaactaaaattaaatgaatgggaatacaattttttttttatagaaaatggtagattaaaagagatttaattctatcatttgagtgtttggtagattaaaattatgagtgtgcacagataaaataaaaagatttaaaaaaattacctaaattaaaattaagggttttaatgggtaaataccacatattaaagggttatttaattataaaataagtataaagatttaaagggaaataatgataaatttagttattaatgtttacatttttttgtcaatttgacccttattctttttattttagttaaatttagctatcaactttttaaaaaagagttgaaatgatttttttaacgagaatactagctaaaatgttaaatttttaagcatgacagcccacatgtactccatactaatttca

SEQ ID NO: 9915 - DNA, 613 bp, Gossypium hirsutum
ggcgtgtggctagctgtgtggcccaagtcaaactcgatcatggccaaggcacatgggcgtgtcttgtagccgtgtgggtaggtcagtaactgtgccctgttttgccaaggcttagacacacgggcgtgtctaagaccgtgtgaggcacacggcctgttcacacgggcgtgtgaccttttaaaagtagaaattttttttttaagttctgaactttcaaatgttatcgaattgatcctaaaagcatgttttaaacttcgtacgatcattttaagttcactttgaatacgaatgatctatgtttattgtaatggaagaattttttatatttgatggttctgaactgtgttatgagtccggtaatgcctcttaacctatttcaacgatggttacgggttagggctattacataatgattcagatgtgccaaagactgcctttagaacaatacagacactaggaatttcttattatgccttttggattaacaaatgcacctgcgtttttatggacttgatgagccggatattcaggctgtatttagactgattagtagttgtgtttattgatgacattttgatttactctcgagatgaatcggagcatgtcgaacatt

SEQ ID NO: 9916 - DNA, 620 bp, Gossypium hirsutum
attgttatacacaacatatttcttaccagattctggttgaattaaaatgggagcttctgttaacacatatttcaaaatttcaaaattgggcttccatttgtctccccacttacaaggagcattcttcctcagcaacatagtcaatggtgctggtatcaaggaaaagccctcaacaaaccttcgataatacccagtaacacccaaaaaactctgaatttctaaaacattcttcagttgccttcaatctaggatagcttcagcctttttgggatctaaacgaataccttcagttgataccacgtgacccaaaaacatcactttaaccaaaattcacacttagtgagtttagcaaaaaagtttcttttcacggagcatctgtaaaaccactctcaaatgctcatcatgctcagtttctgtcttagagtacacaaggatatcattaacgaaaaatatgatgagctgattaaggaaaggttgaaagacacgatttaaggtccatgaaagcagctggcacattagtcaacccaaaaggcatgacaaggaactcgtaatgtccataacgagtccaaaaagtagttttggggatatcaaaatctttcgctttgagttggtaatatgca

SEQ ID NO: 9917 - DNA, 671 bp, Gossypium hirsutum
  misc_feature (660)..(662): n is a, c, g, or t
gcaggaaagcttatcacaagaaatgttcaagaagacagcaattcctctccatgaagaaggaacacaatgaaggaactttctcatcctaccatcataaggagaatacaaactatcatggaaaaagctacatatattaggataataataaatagccgttagcatggtagcaaatcagtgaaatcacattttcagcaacactcaatcattactaaatgccgagggatatgaaatgcccactaatatcatcattaagcaacacattaaataataattcttttctcatttgagctaaactttgtagataaaccacatgtcattttgaaagtgaagtcaatagttaaacaataaaggtaatcaatttaacaaaaatgttggttcacctctctgacttgtgcaatcaataaacatttctaatgaatttgaaattaatgaaaaaagaacatataaatcaaatgctattcaaacattgaaatctgaaagaccttgttttctcctttttgcaaaacatatttctcccagtaaaaactgctatagggaagcaaagaattatttagctaatgatgcctttattccatatggtgatagaagtcacaaagatcaacacctcaagcaagccttatgcaaaacgtaattgctcatacatcaaggtttcaacagaannngtttcaaca

SEQ ID NO: 9918 - DNA, 654 bp, Gossypium hirsutum
gactttgaggattgagcatctaaaaccatgtactagaaaaagaattaaatttcatgaaattgttgataaattattcataatctcttactatcactttttatcttgtatttttaaagaggctaaaatatgctaaaagtttttgtactcttcataaatttaaaatttagttcatgtacttttatttttaggaatttagtcattctactttttagattttaaaattcaagtctaatcgttaatattgttaaaattattttgttaaattttagtccattacaacatctttttttttaattcataataccacatcaacaaatttaacaaaaaaaattctacaatgttaacaactgaacctgaattttgaaatatgaaaaataaagagacttaatttccagaaataaactatagagattaaattccaaattccaattttataaaaggtataaaaaattaaaacatatttagagataatgtaaaatgagaggttggagtataaatcactatcaaatggcaatgttgttgttttttcttgttttgggtatcatttttatacaaaattaaaagtaaattatgtttgatgtgaaactcacctactgacatgtgaaatccacgtttcatgtgattaataaattaaatacaaccaccaatttgcag

SEQ ID NO: 9919 - DNA, 640 bp, Gossypium hirsutum
aggaactctaaaccatgaatatacaatattctaactgtaacttacaaaatgggaaaaaataaaatactcctataataatatctattgcttggtcgaaatgcaaaaaacaaaaaatatttactctttccaccgccgggcttcgatcccggaaatacaaagaagaattttaaccattgtgctacagtgggtccgatgctacatatctgcataatactttatataagctatctacaaattcactttaaaggtaaaaagacctttctagtccttctcaattttgatattgagcaaattggtctctctcaaaaaaaattaaagcaatttaatccctttcaaattcaaaagtgagcaactaaagacaattaatcgcaacattaatgtttttcatcaattttacataaatttgactggtataataataaatttagctcccataatttatacattcaatcaatttggtcatgatttaacaaatttagcctacaatacttttctaaatgtgtaaatgttgagtctaaatttgttgaatttttaagaatcaatactaaattaacaaaatatgtaaacatcaaaggctaaaattgttatcataccaatcaaaattatgcataattaatgaaagacattaaccccgtgatta

SEQ ID NO: 9920 - DNA, 363 bp, Gossypium hirsutum
tctagtgtgcttggaaagttctagaagacaatggaagattttgtttggttgctgagaaattcgatgggaaactgatgaagagaggagtggatttgagagcatatataaaagaaattttgagagagaacgcgggaatttcgaaaacttttcaaagattaaatctggacggttagattgtattacatgattcatcaacggctgtggatacttttagagtttacgatccgtgtgctgtgtgaatgaccaatagttttccttttttgaaattgtcacggatcttgaaccctcacactggttggtaattacctcttcgttgtgacactaatttgtcatttaccctttcctcctcaaatgatccaaaga

SEQ ID NO: 9921 - DNA, 594 bp, Gossypium hirsutum
  misc_feature (54)..(54): n is a, c, g, or t
  misc_feature (56)..(57): n is a, c, g, or t
  misc_feature (60)..(60): n is a, c, g, or t
  misc_feature (559)..(563): n is a, c, g, or t
  misc_feature (568)..(573): n is a, c, g, or t
  misc_feature (575)..(576): n is a, c, g, or t
tttaagcaacgaaaacatttgaagttggagatcttgtcctactatacaactcancnnttnaattgtttcctgggaaacttaaatcacgatggtcaggacctttcgtaattcaatctgttcttccatatggcacaatagaggtaagtcacccatcacacggtactttcaaagtaaatggacatcgtctcaaactttataatggtgagaattttaaagacgatggaaaggagctacgactccacaaaccgccctgaataaaccaacaaggtaacagtcgagcttagactataaacaagcgcttctcgggaggcaacccgagtactaacggttttaaattatttaaatttcaatttttaaacatttaggtcactaacagagtctttgaagcacaggttcccaactccacacggccaatcacacggccgtgcttaaggccgggggaccaccacggacgaaaacacggccgtgcaaaagggctgtgaaaaaatagggaaaaagttttcttccccaacccgggaggcaaaaaggggcccagggcggggaaccgggccggggtaannnnnccaannnnnncnngggcgggagaaaaccccg

SEQ ID NO: 9922 - DNA, 642 bp, Gossypium hirsutum
atgggtattgtggataagcaaactagacattgcatcaagacactacgtatagacagaggcggtgagtttgtgtagctaaagtttaatcatttctgtgaagaacaagtcctaagaagagaattgattgctccatacactccggagtagaatggtgttactgaacagaagaatcggatagttgtagaaatggcaagaagtatgttgaaagccaaagggctttcagattaattatggagagaagttgttggaactacagtctacttattgaatctatcaccaagggttattcccaatcaaacatcatatgaggcctggtattggaggagaccttgggtaagccatttaaaagttttggttgtgttgcttatactttagttgactcacataaacgcagcaaacttgatgagaaatcaacaaaatgcatttttattggttactattcttagtctaaagcatacatgctgtataattctattggtggcaagataataatcagcagtaatgtaattttcaatgaagatgcaagatggatttgggaaaagagtgtaagtgatgttaaatttgaaattgcaaataaagatgaagctctacaaactgaagtattacaacctccttctccaaatctttcatctcctctaactt

SEQ ID NO: 9923 - DNA, 653 bp, Gossypium hirsutum
acgtgcttaattgagttagtgccataagttcatcgaatattagttcaattgaaaaatactaaaaactccctcactttacaaaataagaaatgttattttgaggatgtatataagatctataacaatcaacaaataatgagatttagacaaatttaatttaaatattctgtgttatttaagtaagattataattggaagattatttaaacaaattgtttacttttctttccacgttttaatcaaacaaaatatgttaaaattttttctttttattttagttatccaaacaagaaataaatatttttttaactttctgaagttgtttaactggaccggatcaatcgaatcgggaatcgacccaagtattagtctggagaagggtattgaacctcttgactaggaaaccagtataaaccaattgaactaaatttttaatatttttattttttaaaattttaataatttatttaatcaaaattaattgaaccgaccagaccaataaattgataacctaactaattcaaccaccggtatcattctaaaaacctttaactttctttcacttccttctttttgttttctttcctttattattaattattcaaatatagagtaaatagattgtttacaccacacttacatcctaaacatca

SEQ ID NO: 9924 - DNA, 558 bp, Gossypium hirsutum
cacctacatataaagtaaataattaatataattggtttatcaatatagaaccaatatacgaattaaaaaaaaagaagaagagataagtaattaccgaatcatcaatatagtactctaaccgagtctcatcgctacgaggcaccatgagtaaaggtgttaatttctcgcccattaatttaaattcctcgtctcgtccaatcaattttctgcgaaataaattaaagtttttgtgaaacataaactgtaacatatatatatatagttatattataatgacatccaatattaactcatcaaaactgccaccatacccactcaagtcactcattttccatttatttaatcgtttttcctccttctctgtaaagcttgaaactaaatatgtccgaacatcctataataacaaggaaaaaaaattcacaatgtaagagcactaatatatgcataaaagtaatgtatataaaaaaattgaaataaagtatgaacctctttacgccatgaccctttctccttcaatgttttctcatcatcagactcggaggatgagctttgaaactg

SEQ ID NO: 9925 - DNA, 617 bp, Gossypium hirsutum
  misc_feature (610)..(614): n is a, c, g, or t
aattctgtagactcaacaggcatactcatactagatacaaatttcatacaaacatacaaatggattgatcccagatcaatcaaagcaacaacatgagtatcatagagagaaaaagtacccgtaatcacatcaggagatgaagcctctttgcaagtgcgaatggcatatgtcctggtaggtgctctagccttggatctcacagctggatctctaagtgcactcttactactcgctccatttcctggatttctttgtggtctccctctagaagtagtattacccgatcttgcactctgaatttctatttttcaaccatctcgaggcaatctctaatgaagtgatcttgggaaacacacttgagacaagattgatcattcacccaacactcatcggggtgatgtctatcgcaatatggacatttaagtctactaggtcgagcattacccacactcgctatcgaagtagtctgagccttataacccgaatactattttccatggtttctttttgaaaacccaactgaagcagttgatcgagtattaaactctctcggtttcttagatgagaactgaagtgacttacccatctgtcttttcttcgagtctggaannnnnaac

SEQ ID NO: 9926 - DNA, 657 bp, Gossypium hirsutum
agatgtttcaactttgaaggaacgaacccaagttagggtttttaggatttttattattgaagcacaacctgaagtagagaagtaactcaaaacgaaaaacgctcagcctgcaacgaaacccatttattttagctttgtttagagggttcaggccttcttgacatgcccaggaaaaattagggtttttactgcttatgggccattaatctgcacaaaactttgattgggtaaaatgtgtgggcttttaactttctttttccttgatttttaattttaaaagtgtttactaacatttattttaatactatataaatattaatatatttatactttttattatgtttaaacggtaaaataagttgagattaaaaaacttaagctcaaatccgatctaacatcgaacgagttactcgacctatgaacatttctaatatcgagttaatgtactttcaattctcgattcaccgttatttttattttcatcaaaactaatcctaccaatcataaaaattaaataaataaataaaccttagattaaaaatctctatttttgtagtgttgtgggtcaataaggattttgacatattaactaattgagaaatagttggcaatgaactactaaaagactgtgaaactgacctaaatgaaggttctgcg

SEQ ID NO: 9927 - DNA, 695 bp, Gossypium hirsutum
ttgctatcgtgttcgctaagaaaaatggttcgcgaatgggtaagaattgcatcctacgattccacgcctcggtatgctccccatgcatcaccacccaatcgttgttgtccttcccctacatgttcaccttgtgcaactccttcaagacttgcagtggcggtaaaatttgttgcctctaccaaaactgccacaacacttggttcaatttgtgttttttcaccgttgcttacactactaacagcacattggtgtcccacatctgccgattgtccaacacttccgatgggaagatatgaaatcggtgtcagtgtctgtgtacagcatctattcaaattgaaaagcaaaattataaatatcggttatgtatgaattttgttttacaaatcattatgtaattaatataagttcgaatgaataagtaactaacattggcttccgaacgttgatctaacaacagctaaatatcttctaactcctcaagtagtcccacgtagctcaactcatggttccacctatacaagcgatgtgttagtcgaaacgtataataaaaaaatttattgtacagactacgtatttgtcaataaatgatgtttaccttgtcaccaataagaacatatattggtcggtcaccttatgacataaatatggtaatcgccaccaagccaataactacagtagtagcaaacaaccaccga

SEQ ID NO: 9928 - DNA, 610 bp, Gossypium hirsutum
  misc_feature (32)..(33): n is a, c, g, or t
  misc_feature (396)..(396): n is a, c, g, or t
  misc_feature (467)..(473): n is a, c, g, or t
  misc_feature (476)..(479): n is a, c, g, or t
  misc_feature (486)..(488): n is a, c, g, or t
  misc_feature (490)..(490): n is a, c, g, or t
  misc_feature (492)..(497): n is a, c, g, or t
  misc_feature (521)..(524): n is a, c, g, or t
  misc_feature (554)..(554): n is a, c, g, or t
  misc_feature (558)..(558): n is a, c, g, or t
  misc_feature (561)..(561): n is a, c, g, or t
  misc_feature (564)..(568): n is a, c, g, or t
  misc_feature (571)..(577): n is a, c, g, or t
  misc_feature (580)..(580): n is a, c, g, or t
  misc_feature (582)..(585): n is a, c, g, or t
  misc_feature (591)..(597): n is a, c, g, or t
ttgaagacaattaatcacaaattaaattactnnctttttgaaagtaagcaattgaagacaattaatcacaaattaaattactttgatttttttaaaaggactacagaggttgttttagccagtttaattgttaaattacatgttagatcttatgtgacatgatttaaaataattttttttaaataaatattgtaaaaaatagatgttttataaatattaattttgagattttcgaagtttttacattgtttaccttttttttttaattttacttaaaattgtttttatttttaaaaatcatgcaacatcattctatttatttaaaatttttattttaaatttcgttacataatatttgatgtgtcatttaatgattttaataacaaaaagacatanatgattaatagtttggatgtaattaaaacgtagggaccaatttaaatcccacttcaataattttttttttnnnnnnnccnnnnaaaaaannnantnnnnnnaaaggggggcctttttttcaaaannnnaaaaaaaaaaccgggggggcggggaaaacnaacnacnccnnnnnttnnnnnnnganannnncccttnnnnnnnccacccccaaaaa

SEQ ID NO: 9929 - DNA, 609 bp, Gossypium hirsutum
  misc_feature (51)..(53): n is a, c, g, or t
actaaattaaaaattaaattttaataataccattttacttgtaatgattannnatgaaacatggtgaagaatttaccctttgggcaaaggattcatttttagtaaatctaaaagtgtaggaccttatgtctccatatgtttcaaaaaaaaaggaccttatatctccacaatattcaactaactaaaaactatattaatggacccaaccaaaacatagtatacaaaaaagaatatattttataacataaagtcaaccattatagttaatacttgaaagtcattatatacaaatgttatccattagaaaccatgatttttccaccacctattccatttttttcccctttactaccaaactataactcttagcaaccattgtgggcaacaaataataccaaattccaccattttcacatacataaaggctataaaccgttaaaattactatggagatcgcaagaataggatataaaatacattttactctctaaattcaaaaattgaacaaattaattcatataagttaaatcaaaaagtaaaataatccttttgttaaatttttcattcatttctactgttataaaatttttgtgcatcaacatgacgttc

SEQ ID NO: 9930 - DNA, 427 bp, Gossypium hirsutum
cgaacgaccatatgagctgtaggttaggagataattaaactcttgtgaaacagggccagagtgatttctggattccctgatccgactttggaaattcattataaattaactagagataattagaagtcatgctatatgtgcatagattcccctttgagtctagtttctatagaaacaaacgaaaccagtattgaagccctgtacagggagatatccaagtcgtaatgcgaaaaggtcagtgtagtcgatccctgtaacatgggagactttgactaataaactgtactaattggcctgaccaaaaattctagaaaaaaatatgtagatgggaatatgagtctagtttcagggaaaattcacggaactggatttcgagtttcagaactcaaggtatgatttttaaaacaactagtacgcacagcgacag

SEQ ID NO: 9931 - DNA, 639 bp, Gossypium hirsutum
taggttaagctgcaacgaactcaaaaatgtagaaattattaaaaacgaagcaaaattgagcttacatgcattccattctccatggccgactgcttcaagctataatggctttcttcttcattaaatttggctagcatgatagaaaagatggactaaattcatttttattttgttttattaacctttaatatccattttacaaaaataaccttgatgaacattaataagtactccatatgccatgccactaacttccactaccttataaatgggttaacaaccacataaggaccttaacttcatggttctatagctatttgatacttttaactaataaaatataaattttatgctttacgcgatttagtcatttttaccgaattaaccattcaaacggtaaaatttcttcatgaaattttcacacaattctaatatcatgctgtaaatattaaaataataataaaataaaattttcaatttcggatcgtggtcctaaaactactattccgactagggtctaaatcggactgttacaataactcctttaaaatcaacttggactcttgaatcttggtgggaaattgcttggaaattggctttaatggtgttctcaaggaaattttaatgctctcccttggt

SEQ ID NO: 9932 - DNA, 489 bp, Gossypium hirsutum
ttcacaaagaaagtgtcagtcagtagggatgtggtatttgatgaaaagtcatgttggaactgggaaaaacatgaacctgaggaagtttcagaaggacttgcagcagatcaagctgagccagatcaaaatgttcctgaaatggacattgatgatgaaccagttagaggaacaagaccattgactgagatttatgaaagagctcatgtagccatagctgaaccaagcaattttgaagaggctgaagctcagcaagagtggaagcaggcaatggctgaggagattagcatgattgagaagaaccagacctgggaattagttgaaaggccagtcaaaaggaagataattggggtgaaatgggtgtacaaagccaagcaaaatgctgatggtaccttgaacaaactgaaagcaaggctagttgtcaaggggttcagtcagaggtatggcctggactacctggagacctttgcaccagtggccaggctagacacc

SEQ ID NO: 9933 - DNA, 641 bp, Gossypium hirsutum
agatccttcacaacaagaaggtgcctatcaatcacgtttatacagtactgcctagaaaaccagcaattgcggaatcgttgatcatccctctcacaaaagaagtccaggtcatcgtccattcaccaccaaactcgaccctatgtttatgaaaaagactcaccgtagcaacttgtccatcaccaaagagtctttaagaggaagcaccaacatctaaagaccctacttgccggcgacgagatccgaaaaggatcagggggcgaagcaaaactagagaaaagaaatcatggagaccaaagaagaggagcccaaaccagaaaaagaatggctcgagttaggagaagaagcgatgggcaataaggctacatgctacatcaatggcagcctagaagagaagcaacggtgaacctcacttttaaatcttctagtgaaatttgcgacccttcgatgaagaggttgagaaatcaagtcatcaaaggaacaaagatgaagtcagaggctatgcagtgcaagataacgtaaattgcatgcccaaagttatttttattgataattgaattgggaaagaaatttttagggattaactaaataaattcttatgacaaataatataatattttaataaaacaatgcattgaggacga

SEQ ID NO: 9934 - DNA, 615 bp, Gossypium hirsutum
ggtccgagctatagttaaaaaattattttcccatttttaattttattttaacaataattataaaaatatatttaaaataaataaataaaatcatttgcaacaaggaaaaacaaaaaatttgcaactacttttttcacgtccaatcttataaaaaatcacaatcttaaacctttaaaagaaacattaaatacacagttactctgatcttactcgtttcttatttgcttcgttgttttacactatctttctttacctttttttttctcttttttcatgcaaatttgtgtccggaaaaatgaagaatttaaagaaaaaataatcactttacattataaatttaaaaattctaaaattgaaagttactaaaaaatccaattaatctagactctagtaattggaattaaaaagaatgatgggtttaaaaaagaagcagcatactttgtaataaatgtttgaaactttatgaatggcttctcaaggtttcattctttccactgtgaagaagaagaaaaagaaaaatggatgatgactcttaaattttaacttaattaatcataattcattaacattaaccttaaccttaattacctattttgatggatgatagtggtctat

SEQ ID NO: 9935 - DNA, 665 bp, Gossypium hirsutum
  misc_feature (8)..(8): n is a, c, g, or t
tcctaggnattacgtccacctttcttttcactagaagagagaatgtcattaaaatctccaatagccatctagggacaaggcattagacacagttgattttaaacccttctaaagaagtcttctcttccttctatctagactcccatagacaaatgtgataaaaataggagatttctcataattggagattacactaatcagtagaaattgtatatgattatggataatttcaactcgttctgagtccttccaaccaacccaaataccaccagaaaaatcaatagcttctatacggtgagagaattgaaaacgcagcttagcaatgactcgatttgctttactttcactaactttggtctctaacaatcccatggtatcatgcttaaacttctttattatactcacaaaaaattcgatgaaacttactattcgcacatccttgacaatttcaagaagaaattgacaatttcataaattaaaattaaaaaatattgagagaaactaacctctattgttcaaggttgattgactctttttggagatctccaagggtgcttgaattagcttttccagattttgcctcaagttgtgtactaatcagagcctcgtactcagcacgttgagcccttccattcaccaaaacttgagggattcatggcttatca

SEQ ID NO: 9936 - DNA, 672 bp, Gossypium hirsutum
ctctcatgcacatgttttaatggtaaattatatttttgatcacttatgtatgatttaaattatattttaattactaaatttcaaaaaagttatgatatggtcactgatgttattgatttgttacattttgatcactgatccattaattgtccttgacattataacagttaactaatatgtcatgttaaatcatcatttcaaacaaggatattgtaactattactgacttaaaagaaaatatttgaaaagttcaatgaccgttttggaactttttaaagttaaataaccaaaatgtaaacttaataatagtttaataaccttaagtatacccttatataatttttataaatctaatagattaaaaataaacatataacaatattatcgttcatgttataactcaacccaaactactaaataggtataattgagagtcgctattaactagccttacttatcgcatctcctctcaatacatttcaccaccttaacttgggttctttttttcaatttctttttctctatataaagccaaaaacaataatcattttatcatattctctatatgaagcaaaatatttatagaaataacaaaaaatggtgaaaaatagattgaaaaagttggctttgtcgcttttggcaataacactattgttgattatatttacgccg

SEQ ID NO: 9937 - DNA, 491 bp, Gossypium hirsutum
ttttcctatttctaatgatgcttatttttgttaggcactaaatctgttcttggtttcttaatttgcatgtgttctagatcaatttgtatccatgttgttcttttgttaaaattgataaatattgagggcatgcattcttgtggtgaaggttaatagcaccttgctagtttctcatctatcaattataattgttaagcatttggtggtttctctaataggctcgatttagtcttgtcgtgtttgacccttaggcacttgcattcttaccaatgcgtgacctacatttatgtcatgtgctacgtctatatcaggaatacaattctctttctaatggttgaaacaattcaaaagacttgatttaatcatctttctattgactcgaacaatttcaaaagacttttaccaagttagctacacagatttgttatgtagagcatggtacatcttgcttttcatgttaaattcctgaaacaccaagatgctctgcttaa

SEQ ID NO: 9938 - DNA, 638 bp, Gossypium hirsutum
gggagaatttggcagcaactaaggaggatgatgaccaattttgtgttatttttcccattttatttcatttaatatccaaatgaccaaaatgcccctccttactaaactttcaaaattccttccatgtcctaattttgtccatgaacttaaaattggtaaaattgccatttaagacctcctaattaatatttcaatgcaatttcatactaaaaacttcctaaatggaaattttgcaacttattcaatttagtccctactttcaatttaagcactttaggcatagaatttcatcacgaaattttcacacaatcatgcaatcatatcataatcatcaaaataattataaaataattatttttatcttggatttgtggtcacgaaaccactattccgattaagccctaattcaggatattacaactctcccccccttttaaggattttcctccttgaaaatcttaccggtaaacaggtgtgggtattggtttttcatagttttttcaggttcccatggagcctcttctaccccatgcttttgccacaacactttcacaagtgcaacacttttattttttagttgtttgacttctcaagctaaaatcttaatcggtctcttcttcataagtcttacccggcct

SEQ ID NO: 9939 - DNA, 599 bp, Gossypium hirsutum
  misc_feature (556)..(557): n is a, c, g, or t
  misc_feature (565)..(565): n is a, c, g, or t
catgattctctattgatgatcctgaattttgacatatgaaacaggggtaccatggctattttgaatccatggttgccgcatgaacaggttctatgacctagggtgtgaggtgttctcacctcttagacatcataatctcatggccaagcctcccaggttatctcttccccttattcatgaagtttatcttacttatcggtattaaaacctcgttgttatatgggtaaaaatttcaagttcttacttttgtcagaatcaatacaggcagtataacctaaagctatatttgaacatgctaattatgccatactagtaactagagctatgttacatgaacacaatgcgagtgtgggcataagtatgtatccaaaacatatgttaagctttttaatgtttttccatgtggttggtcggttgattgttaaattccaatacccatatcaaaatagacatcaaatacatgtattttaagaaaaacgagtcaaagcaagacgagctagagtgctcattcgttataaccatttgtttgatctcttcgactactctcccatcactnngatggagntatggactatcagcgttcagatgaacccacagcc

SEQ ID NO: 9940 - DNA, 253 bp, Gossypium hirsutum
ttaataataaaaatatttaaaataaaaagctcgataattattaaatttagttcaagtttttctcaagttaaactcaaatagtttgtaaatattattgtatcacgtacacctaatttttgaaaaatatataatagaaaaaaaagaaaagagaaaaaagggaactgtcaccatgagaaccagataagaaaaaagaaaagcaatcgaataatccaagcaaagtaaacccatttctcacaaagtaaacccatttctc

SEQ ID NO: 9941 - DNA, 616 bp, Gossypium hirsutum
cctccagagcataacattgtcaactttgtcattaattttagccaaatacaaccaaaactctggctaccatttcagtttgaattcaatttcatccctcattaatgccttcgtatgtgagaactgaaaattttgtcattgaaaaatgatgctataacatgtgaaatatctgccatttttgtttccctttaatttggcttacattttccacattttgcatactatagtacaagctcagccttaaatatatatatgtatgtatatatatatataagttgtctaccttctcaaagagaaacaatactagtaccaccattgccattttgatccgtgaatgaatacgaactggtattatcaaatgttgaggacatgaacgaatgcagaaaagtgtcaaacccttcgccaactccctcgtatatcctcgatggtttcaaaacttctggtaattcagcctctccgtcgagatatctcacagcttgcctcatgttaggtcgtgccataggcgcatcatttgagcaaattaggcctaatttaagcaccaacaacatttcatcttctttatacttgtcattaagcctaatgtctaccacatcgaagagcctcccttgtggtaacttct

SEQ ID NO: 9942 - DNA, 458 bp, Gossypium hirsutum
atgattttttttttatcctttatttcttctttatttggttttccaaattgattgattgcttgctttgcctcttttaccaccataactcctgaggtatgctatttatacagattcttttacttctcaatttcatctttaattagtattaaaaaaagctatattacaataagttatgcaatgcatcatgttaataatttatatgtgtttttaacagtttttaatgaaagatttatagattggatccgaatttaacgagtttttaatttatattacaaatttaggcctttaaattttttaaaattttttaaattagtaaaggtaaaattacacttcgccccctaaaattataaaaattcgatttaatcatttaaaaattataaaaaaaatagactataaaaaattaaaatttcattcggcccccttaaaaatttgttttggcttcggctgatgatttaaat

SEQ ID NO: 9943 - DNA, 709 bp, Gossypium hirsutum
gataggtttgtgtaagaaaaattaagttgatttaaaatatgagtgagatttaatatttaaaaaattaattcaattcatttttttcttttatgtattatgttatttattattatatgaaaattaaaatattatatcaggggggagatctatttacatcagtgtaaaattctcttttagattttttgtataattaatattttaacgattcaatcgtcatatttcatgtataaaatttttattattataatatttacgagcacatatcgataaaaaaatattaataaatttaaactaaaatacattgtaaattgaaaattatatagcaaactaagaccttgagtgttgatggttttagatatttatgtgattatttaatatgaagaatatataaaaattggtagtatttatgaaatagaaagaaagaaggagaagggttgttttaaacattttgagtaattgtttgtcgacttctatgagggaccggagctgctgcctctaatatacacatcaatagttgaatccataattttaacaatcaccgcccctttaaggaatcacaaagtaggtaaaaaatacaaaagatatattttctatttttttctataatttttaatattattggtttagttttatatttatttaataaacaatgtaatagtttcaaatttttagtgaattaaatattcgatggatgttgctttctggatta

SEQ ID NO: 9944 - DNA, 636 bp, Gossypium hirsutum
tttatgaacatagcctaccacagtttttaacaatacaaatggactaatttactattttttgaataaaagggttaataatacttttaccctcataaattcccatgattctatatatgttaaattatgattttagtcccttactatactcaaattttaaaaaattgaactaattgcttgttttttcttgttctatgaaaacagattaaacaaattggagttaggattttcagcattccttttcctatgtgggtgctttgattttatgtacgggaagaacaattacttcatatacctttggctacaaaccattaccttcttcattacaggcattggctatgtcggcaccatcatttgatcattttgtcagtttgtttttctgttgtttttttattctaaattttctcgcctgccaaacaagcaaaatataggtccattttcaatagagtactgtacagaggacaaagctttagccatctttctttgttaatggagagtttctttgttatgacagatttaaggacaatgagatgcaaaaatgaagcttttttggtgaatagtttgctgtttttgtttcttttaattaattaagtttaattaaaggagctaaaatttcccattttatcgagttgctatcac

SEQ ID NO: 9945 - DNA, 631 bp, Gossypium hirsutum
cctccactcaatttaatgctctctaaacttaatcttagtatagtggaaaatcaattatagtcaagcatatattcatgccatgttattatactctactggatcatcattctgatattttaatttgaaaattactagaaaaatctttaggataccttttcaattttttaaaattcaacttttcaaatattttgtaaaaaactatatttctttatttttaattcattaacttatatatttagatttttttatctgaaaatgattttatctatatataatatagatgagaaaaattaaataaaattaaaattttatcatatgttcatttattatatattatattttaattaacagatttagaaaacgattggattcacatcaaagtggttgagaataggaactatttagtctaattaatataatagtatcttcaatttatttatttatttatttggtgataaagtatcttcaaattttaaattaataaaaatttgattgtttgtggggcaggaagtataaaggaaggtgaacctcttttgactttggtttctgggtgtgctcttctcttttaattatgttttcctttaattaaataagcttgtacttgttttgtcttcagctcaggtttccaatt

SEQ ID NO: 9946 - DNA, 674 bp, Gossypium hirsutum
  misc_feature (606)..(606): n is a, c, g, or t
ctcccaactctcgaattttagtagtaggtaaataaaactaaaatttataaagaaaatttcaacaccaaaatcaaaatctggaggtttaagaaaaaagaaaaaataaaaagaaatgccgaggctaactagggttccagaccatggattctcctaaactttctaagtccccaattccctctgcttctgcctttgcttctgcctcagcatctatttcttcatcttcttcgccagttcaagtaattaattaatttttttttcaagaaatgaatggatgtaatttatgttccttgtcatttcagtctttaagtttttcttctacacccttttctgactttgattttctaatgcattttcttttgtaaatttgcttcttgttctaagtcttagatttgtgtttcgggaggtttgtatttgacaatttgttagtaaatatggttaaatgtattgtttaagtgatactttaattctattggtagagttgtgatttgtacttggtttgacttgaattcctctaatttaatgagtattggtaatcctttttttttagaggaattggggtaggagttttgattcaatgaattggcagaatctaaactttgtactagnatatattgtcctttaattggatactggtttagatttgaatttgtctttgttgatgctattctgtcact

SEQ ID NO: 9947 - DNA, 638 bp, Gossypium hirsutum
tcagtattatttctggccgagccaaaattttgtttctcaactctatgaagaacttaagtttctaaagaaaccgttttatgatgcgatttatagaaagggagtaagaagattgtgcatggctcacgatcacctaccacctctcctctacttacccatattgtataggttgggggctcagtaggtgaccatgcgtcctaacgatattatcaccctgtaaacacacgtcttagacagcttcttcaagcatctgggctccccgcaaagcaaggatacaaaatcccaactcaactttagaacaatgataaaatttctttaaaaaaaatcatcctcttccccacaatcaaaatagcttcatcaaaagtcctaaactcacaaaccaccaaaagcatgcatctcttcaagacaacaaaaacaaaatctaaaacagagctaaattaaagcttaccgtaagagaaggcattagcatgtgaagaagggtgaagaaaatcatcaagcagccaaccaggaattgtttccataaaatagtccgacatattattggtggttgaaaccgaagtattgtcactgttactgtaattatcttcaacccccaatggtttctcaatggaagcagagcttaagatttcattgttagaagc

SEQ ID NO: 9948 - DNA, 607 bp, Gossypium hirsutum
atcagactttcatctgcatgtcttctttatcaccacaaaatagggatgatcaaaataacctttgaaatgaggatgcggtaccccgagattgaagagatcgaattcctcccgggaacacacgaaacaaagatatgaactgggtcaaatagaaagatcggaaattgaaaatttacctttccattgttattttttacattgaggtcggtaacgttggtgaattaggttaagataggggtacggaaagagagggattcgaaccctcggtaaacaaaagcctacatagcagttccaatgctacgccttgaaccactcggccatctctcctatataatcttatgattatgacccaaaaaccgcgagtgaatagcgagtcattcatattcttgcagtaaaggtacggcccaatccattagaaatataaaacttttcgtcaaagaaagatcttccttcgaggctcgaggaaaaaaaacaattcttcttgttaccattaaaaacaaaagaactatttctattcatgtttgtcaagacggcgatcccgtcatattatgatatttataccggatttaaaccaatgaattggaacgaatcaactactcccttcccctcc

SEQ ID NO: 9949 - DNA, 651 bp, Gossypium hirsutum
  misc_feature (7)..(8): n is a, c, g, or t
ctgcaanncgccaagtttctctctaagaaatttaaatttgattcttggtaagggctttgtaaaatatcagctaattgaaatttagatttacagtacttgatgtccacgaaatcaactaaaaattcgacaaaggcaagtgcaactatcaattaatagtatagctacagtgatcacatatatcattcccacaaaaactaaaagtactagtaattactgtctttttattatttaactgataaattagagtgattgattaaaattaaaattaactaaagaacatgacaaagaacaaatcaggaaaataatcgattaacaaccaagaagtgaaacaatacccaggaaagaatctaactagatttcatttgtcattatcaatctgaattaaacaatttcttcacttagtaccttgattcgtaaaaatccctaaattatgctaatatctctttcaagactaagagtaactgactctaggttgattaattaaaatttctttctaattaaaaaccctattgtcgcattaattcaatctatggatcccctgatttgactctaattcggtagatttatgtcgtcctatttctaggattgcatgtaactctactcaattatggtgaaatgcacatcaaacatgggatcaatagtccggaaata

SEQ ID NO: 9950 - DNA, 411 bp, Gossypium hirsutum
  misc_feature (369)..(371): n is a, c, g, or t
  misc_feature (373)..(378): n is a, c, g, or t
  misc_feature (389)..(393): n is a, c, g, or t
  misc_feature (395)..(403): n is a, c, g, or t
  misc_feature (405)..(406): n is a, c, g, or t
ggcaaaggatgatggaaaggactacttcaaatatgtcataccaagcatggcgccaagagcctgaggtaggtttctgaagactgaattattaacgttcttccataatatatgcccatgaatacttgtatgttctatctttattctaataagtcgaaacctccttgtggaacattatagcttaaggaaatttgtactttctggttttatgtactgcattgctctgagatcttatgagcatcatattatttagtcaagtagcatttgaactatgaatgaatgtaagctattgttatttatgaaaatttcacatgttattaggtccaactatgcaaaatgcctgatagcatacatgatactgtttcaaaatgnnntnnnnnngtttccattannnnntnnnnnnnnngnnatttg

SEQ ID NO: 9951 - DNA, 390 bp, Gossypium hirsutum
  misc_feature (364)..(367): n is a, c, g, or t
  misc_feature (370)..(371): n is a, c, g, or t
  misc_feature (374)..(374): n is a, c, g, or t
ctggtggttgctagtacattccaagtaagtaattgatccgacaggtagcccaaggaaccaagtacgagctcttccttgcagggaataaaggaaaagttgcatcttcaaagcatcattaggaatgccttgttgactaaagaaaacacaaatcaataaaaatgatttaagatgttttcatgcattttcatgtggcaatctaacatattgcccattagaattcaacatttgaaacattactggcctgagttcaaaatttccaatttggattgctggcctaacagctcccggttgtaagtcatccaagacaggtactagaaagtctcatatagtcctattttttatttgagcgtcatgcagtaactgnnnnggnnganttacaaccgggagctg

SEQ ID NO: 9952 - DNA, 460 bp, Gossypium hirsutum
gggggatgggatcggcgataggggagggacgaatcgaagcgacaaagggctgaatctcagtggatcgtggcagcaaggccactctgccacttacaataccccgtcgcgtatttaagtcgtctgcaaaggattctacccgccgctcggtgggaattacgctccagggaggcgcccgcgacttgtccgccgcggccgctgcacctacgacacgtgcccttgggggccagaggcccctactgcgggtcggcaatcgggcgacgggcgcgtgcgtcgcttctagcccggattctgacttagaggcgttcagtcataatccagcgcacggtagcttcgcgccactggcttttcaaccaagcgcgatgaccaattgtgcgaatcaacggttcctctcgtactaggttgaattactattgcgacgcggccatcagtagggtaaaactaacctgtctcacgacggtct

SEQ ID NO: 9953 - DNA, 558 bp, Gossypium hirsutum
tttatttctttggttgagaaactcacctataaagagttttcattgattgaaaacactgaacatattttccttggtttgaaactatgataaagctttcttccttgctcaaccaataaagatttcttcttttgtcgagactcgagacactaaacttataaggtttccttgtttgaagtactcgacccataaagcttcctcttttcattaaataacctaaccaaggacaagaattaacatatatatatatattgaattaactttatgttatcttataaatgagagtatatttcaacatttaaattcacaacttataatgagtagttgcttgattgatttcatgttttaaccgattagaattttaattgtttaactttttccatcttgaaaatggtactcaacaccttgttaaatcatttgtagaaatcacaacttatattgctgtgttgttttcattgtctttcatgttacacttagttatgttccaaaatcttctctgtatttatttctttgaaatttaccaaatgctgctgggtgaattgactagtttgcttgaaaaaa

SEQ ID NO: 9954 - DNA, 670 bp, Gossypium hirsutum
atttaagagaacggagcaattcttatattctaaattaaattgcattttagttttcccaccaaaaataataagcacaacttgattaggtgggtaagtgaagagataaagagaaaggagtggctaagtggaagaaaaataaattttaaaggtatttgattagaaaagaaagaaaatatgagggataatcattttttatctaatgtattaaaattaattcttccaaattgaaaagataagaggagagaaaatgatagagatgcatctgttagttaaaaattatacatttttttaaatgttttattttttttctttttttcaactctaccaagtaatgaatgaaaagaaaattacatgttctttccattttttcatctttcctaccaaacacacttacggaaaaaaatatatgtttttcatctttttagttttctattcttccaattttttatcttttcactctcccaagcaaagcctaaatggagataaataattcctcattaaaattgtgttattcaatactcttgatgtataggtaagttacccattttttaataaaaagataaatatgcagtctaaaatataatatagggattgttatgaaaattttatcaaaaacactgtccttcttctttgtactagtgtaggccatttcgcagtgaattcggttaat

SEQ ID NO: 9955 - DNA, 453 bp, Gossypium hirsutum
tctcgctgtttagtccaaatacaagactggattgatgttgatgataaacaaccattaacgccgcataagatttcagttcccatcgcatgtgcgtccacgtcggttcttatccgcccccacgttttccctcctactataaaaacgagtcacgtaaattgtaatccacaacgacgacgactcaccgagtttctaaaattaagctcaccaaaaaaagggaaaaaaatggctggaattacagcaagaatttcattgaatcaccgaaacttaacgtacggttaccaagaattcaagttccccgaccaaccggattcaagtttgtcggacatggaattcggatttcttgaagacggtgacgatgggttcttcttcgaaagctgtaatggcagcgccgattaggtccggggcaatgaaatggtgggtttagggtttggtgatgacgatgaggatgaatgg

SEQ ID NO: 9956 - DNA, 812 bp, Gossypium hirsutum
  misc_feature (663)..(665): n is a, c, g, or t
  misc_feature (667)..(676): n is a, c, g, or t
  misc_feature (698)..(699): n is a, c, g, or t
  misc_feature (708)..(708): n is a, c, g, or t
  misc_feature (710)..(719): n is a, c, g, or t
  misc_feature (722)..(722): n is a, c, g, or t
  misc_feature (724)..(727): n is a, c, g, or t
  misc_feature (729)..(729): n is a, c, g, or t
  misc_feature (731)..(732): n is a, c, g, or t
  misc_feature (734)..(746): n is a, c, g, or t
  misc_feature (751)..(758): n is a, c, g, or t
  misc_feature (762)..(762): n is a, c, g, or t
  misc_feature (765)..(780): n is a, c, g, or t
  misc_feature (785)..(785): n is a, c, g, or t
  misc_feature (789)..(795): n is a, c, g, or t
  misc_feature (797)..(797): n is a, c, g, or t
  misc_feature (800)..(809): n is a, c, g, or t
tcttgttcagtttaccatactctgttctcattctcttgacctacaattgagtaagttcatgggtccattaatttacaatgtataaatatttagcatagtttgcatcaactaattggacacagaaacagcacaggttgcttacaaagtcataagtctgattaatatgattggtccggtagaagttctccacaccctgttgcctctcactttcaacatgataatctctgttttcgtaaataaagtagattaatgaatcaaccaatcaatgataagacctttggtcagcaaaaaaatgcaggcctgttacatttgttttataaccatagataaaactgatatgccctgacatccaaaaactctccaaataaatcagcaatttcagcatgaaaatctatgtaacattacaaatccatgccataaacagatatttataatcatctagtcttgtgtctctctcatctatcggtattgacaaaagcagatccatgttttccggctcggaccaaaaagtaatcggatttaggttcaaacagacaatttagctgcaatctctgtagacaatggcagggtaaagggaaagatttcctttgtcattatttccttgatgaggaaataaattagacttgatagatttgaatttatagcatgtacactattccgtannntnnnnnnnnnncctgaattaagaaaagattgannaaacattanannnnnnnnnnctnannnntncnntnnnnnnnnnnnnnttaannnnnnnncacntannnnnnnnnnnnnnnncccantttnnnnnnntnttnnnnnnnnnnact

SEQ ID NO: 9957 - DNA, 407 bp, Gossypium hirsutum
tcccacttagacgaagagtttccaatttagtgagccttgaaagccactgaaaacctgatttatatactatacaattagttacttatatatattcatgatatgataaaatcaaatgacttattgcaacaacttttccttcaacatgaatttattttaaagaatgctattcttcaaataattccaacttatatcaataatttccaatttaatgagccattgaaaacctcatttatatattatataattagttactacaaaacttaaataaataataatactccatttttgcaataaaaattcactaaagaaaatacatttgaagtctgtcattgccttttggaataatagtcagtcaagaaagttactacgcacaaatacttataccttggtttgagatgctttcaatg

SEQ ID NO: 9958 - DNA, 663 bp, Gossypium hirsutum
cacagatttactgagtgtagatcgacgccccatggatgattcgttcttctcaatgatcaatacttcaacctgtgcaacagataaagtaattacaatctgaacaagttcaaatcagcctaaacattaaaaattgaacttcaaacctgatttgatggctcctttttgcatccgccgaatgcaacaagaaaatccttatccttgtgctgcacgagtactaggctaaatccctgcaagaacagataattttagaataatacggtcccatttcatatcactgaggagaagtgtcatttattaagggatgctttctagctaaataactcggacttaggagtgtcagattaaatttcttctaaactttgcatgtacttggagggtcaaatcctcattcctatgaccggatatgtgttgcacacggttacttaaaacaaatcctatcataatttcttaacttcaaatctgtgaccaactagaaaaccggatgataatctctatccatgaagtttgcaataattttacaaaaataacgcatacaagaattccaattacatataattcacatcatccagtgcaacagcatcaaatcatttaaagaattgaccccttcttgcaaaacaataaattcagtaagttaacattgttagcggagatagaagatggaag

SEQ ID NO: 9959 - DNA, 619 bp, Gossypium hirsutum
ctcctttactttacttgctgtggaactaagcaaaagcattaaatcactttttgggcctcaactttttcttttcagattaggcaattccacattagatcttaaacttttatttagtccaaattaagccctaaatttggaaattgttcccatattagagtttgaatttcttttgtctaagttaatccttaaaaccctaaagtttaggcctcaatgtgggcacatttatcaagctcaagccctagtgtggatataatcattaagatcaggctttaatgtgagaacaattgttaagttcagggattaatttagacaaaaaaatttcaaactccaatctaggaacaattatcaagtccaaacctcaatgtgggaacgattgtcaaattcaaggtctaactttaaccaaaataatgttcagactccaatatgaaaaaaattaccgacttcaaacccaaaatggtgatttaatcttaagcaaaaataagtaaataccgaccgcttcatgcttatagtaagtgaaagtgttatggtttatgaatgttggagtatcatacaatgtgaaaacttgatttactttgcactcatccatcgcacccaattatatctttgtgcattggtgtac

SEQ ID NO: 9960 - DNA, 540 bp, Gossypium hirsutum
  misc_feature (518)..(520): n is a, c, g, or t
  misc_feature (522)..(527): n is a, c, g, or t
  misc_feature (531)..(533): n is a, c, g, or t
ctcgttatttcaggttaactggctcgaatttgactaaattttttccttgctattaggttgttttgatgtcattttattattatattgctattattttgttattattatttgaatattatataattcttattttattattaattttgctactattttagaggtatttgcttgctaagttgtaactgttttattgttattttaagtataaagatttttaatatatgttcaatttattgggaaacttttattttaatacttttagtgtatttgatgtattatatttttaaatttgtttttatataaataataatataaaaaaattaacacgggagggacgaactggccaggctcgggcttaacaattttttattggacttaagtaaaattttaaactaatttttcgggttagactcaaacctaaaaaacagaacaaaaattttatattaattcaatccgaacccgattcagtttgacccataatcaagtttaattgacccatacaatgtgggtacgagtgnnncnnnnnncaannngacttct

SEQ ID NO: 9961 - DNA, 576 bp, Gossypium hirsutum
  misc_feature (75)..(75): n is a, c, g, or t
agagctacggtgcgaaacaatgaagaaacacaaacgtaaacgtcccgtccagatcctacatcgaaccgcgaaccntgaaccgttcacgtggcgcaatgcctttcgcttgaactaaagttccaaattccaatgatatgatggtttaagcaccgttaaaagattcaattcatatcgccattgatacggatacagtcgaggtcacttcatcactgagtgaaaaatggtgacaatttcaatctctccagtagcggctcaatctctttacattcgcaatgcacgaaatgtaccctttattcctcttcgacacgcaccgtttcgagctactacgaagctttctactctcgctcactcttctggttcgatcagtttcagtcctctaaggtaagttcattacttgattcgaatcgatttggggggaaatgaagggaaaatttttcgagttcctttaaacttttgagtttttgaaattgtagattttcgattaaggataaggaaataaagaagaagaagaagagtagaggatcgagtgcggtttgctacgctgctcctctctcacgtcttaatctccagtgaatc

SEQ ID NO: 9962 - DNA, 613 bp, Gossypium hirsutum
  misc_feature (419)..(419): n is a, c, g, or t
  misc_feature (443)..(443): n is a, c, g, or t
  misc_feature (536)..(536): n is a, c, g, or t
  misc_feature (545)..(545): n is a, c, g, or t
gtggacaagagtgctttactgttgcagacgaaccctgttcataagaaaatccctgttcttatccataacggtaaacctgtttgtgagtcgctcattcaagttcaatacatcaatgaggtatggcatgacaaagctcctttgctcccttctgacccttaccaaaaagctactgctagattctgggctgattatgttgacaagaaggtacgttctttttttaagaggcaatatgtgaaaataagaaaatagttttagttcagaaattcttatcaaatttctctctggaaaaaggtgaaggcaaacaatgaaaattttgggtgaaatttatgtgtaaaaagatttagaataaaaactccagtacacaatatttgcccctttcccttttttggtatttttattcatttttcacttacaaaaanacatattgaagaaaaggacggcgncttcctaataactctgtattatcttaaaaataaaaaatttttggatttacaaaagaaatggttatcccgaagcttaaatcaaattcctttaanatgtgtaantatatcatagttttttctatcaagtttagattatggcattacatattttgtcttgaccgacatcatga

SEQ ID NO: 9963 - DNA, 684 bp, Gossypium hirsutum
tgaattggggttagagattcatttaaaaaaaaaaattggattttcattcaataaattgggtaaatgtctaatgtgagattttattatagtgaaatcttacggtattttcttaaaattattggttgttgtcaaaagacaataataagtagactgtagtcgtttgatcaagtaatgtcaaaaacgggtaaaattgtgctgatgattggaaacttgttaaatcagttatcaaatacattgattttctttgaaaaccagtttctctcctttttgtgttgaaattgattaaattggttaaaagataaactcatgcttctaatgcaaaacggtggattgatttttttttctcacttttcatttcaaccattgatttaaaagaatcctaccgaatttcactataatgagatcttttaaatagatgtcattgaagaaattgttattttgatgtatcaaagatttcgagataacaaagtaaatgaaagtaagcttagatcatttcataatccaccatcaaccaataagtggcagagtgtaatggcaagagacattgcattctcaaaggaaaaactcaaatttaaatcttaaaaacgacattattaaaagtgaaaaccacgaaactttgaatagattaatctccatgaactataacatttcacaaattatcatccaatgtttttccttctacca

SEQ ID NO: 9964 - DNA, 804 bp, Gossypium hirsutum
  misc_feature (80)..(82): n is a, c, g, or t
  misc_feature (299)..(299): n is a, c, g, or t
  misc_feature (389)..(389): n is a, c, g, or t
  misc_feature (581)..(581): n is a, c, g, or t
tcaagctacctcataacatcagagaggcagaaactaaaaagcaaactgaattggggttagagattcatttaaaaaaaaannntggattttcattcaataaattgggtaaatgtctaatgtgagattttattatagtgaaatcttacggtattttcttaaaattattggttgttgtcaaaagacaataataagtagactgtagtcgtttgatcaagtaatgtcaaaaacgggtaaaattgtgctgatgattggaaacttgttaaatcagttatcaaatacattgattttctttgaaaacnagtttctctcctttttgtgttgaaattgattaaattggttaaaagataaactcatgcttctaatgcaaaacggtggattgattttttttnctcacttttcatttcaaccattgatttaaaagaatcctaccgaatttcactataatgagatcttttaaatagatgtcattgaagaaattgttattttgatgtatcaaagatttcgagataacaaagtaaatgaaagtaagcttagatcatttcataatccaccatcaaccaataagtggcagagtgtaatgncaagagacattgcattctcaaaggaaaaactcaaatttaaatcttaaaaacgacattattaaaagtgaaaaccacgaaactttgaatagattaatctccatgaactataacatttcacaaattatcatccaatgtttttccttctaccaaagtgcaaactatccttacaagaagaatcccttgttcttttgttgaatatatttgtacttattgaccaactttg

SEQ ID NO: 9965 - DNA, 624 bp, Gossypium hirsutum
gccttggcttcaaaacttgtaattctgtaagtagtctgcaacaatttatatcctctgctctcaaattgaaagatctggcatacagaaactttactctaaactcatttgttcagtgttcttacacgtaacatgtttacaccatttctgcgtttagttgccatattacgagccagaattgctggtactctttgaatttcttgtttatgaacaacaaactaatgtcgtgtttcatgatgttgctatgcagagattggttgcaatatctggatgtggccatctaccacacgaggagtgtcccaaggcattgcttgcagccatctcacctttcatacacagattgctacataaaccagaatagcaaagtcagtaggacacctctttctttaacttgcattaccatggttattatctctttctttgggctttctatattttttctgtattttcgtttttcccttttattttcaagcaatctttccccgaaggatgagataaatcagaccctcttcttttgggtaattttgatgtgttctgagcctcaccctaaccctaattctctggggtgcttgtagagcctgtatttttaaatttttttttatactgatgtttgttttaacagtccta

SEQ ID NO: 9966 - DNA, 583 bp, Gossypium hirsutum
actaccacgcacgaatatagtaatttaatcttataaaatgcataatatttagacagagcaatcttagcccaaattttcaaacctccaagaaacagagaaaagagacacattcttcttttgacataaatttttgtatatattcctgcaatatttatattattttgatattatatcattttttttaaatttacataaatatatataattcccgaatccatagaattaaattattatagtataatcgggtataaaaatgtccgaataagtagaattaatggtaaaaataaattaaaaactaaaaaaaaatgcaaaccaacaataaaattcgaaactcacagaattgtttttaaaatttgaaattatattacatcgtatggaaataggtttttgtctgaaacctacgtttccaaaggttgattgtgtttccgaaaacagctttcctacgctgactttgagctaaataaaatgacaggaccacatgcaaaggatcagatgtaattaatactgccccatttttattaatttgttgtcttgcattattgattattgcataagaatcctggatctgcttcaattcaaccac

SEQ ID NO: 9967 - DNA, 218 bp, Gossypium hirsutum
actctaacaaggctggacattaggagctttttgccacccggaacctgtgtactctgaagcaatcaggagattcaaaaatcatttatcttttctccccctactcaaaaagaggtcaaaagtgaaagtactcaaatattggacaaaaagaatcacttaggtatcaggagtagagttctgatgagggaaaactcaatattggggacggcatgctgactaca

SEQ ID NO: 9968 - DNA, 570 bp, Gossypium hirsutum
  misc_feature (510)..(510): n is a, c, g, or t
  misc_feature (512)..(514): n is a, c, g, or t
gttttgtctgttgtctgtaggaggaacaatgggaaagatgtttcgaaacttatcctgttggaaggatagggtaccctacagtttacagttaaactggttataactatggtaatttaatgttgccctctgggattttgatgataagtcccaatcaaggacggggggtggggtgaatttgggcacatggttgtaatgagcaggcaatgaggcagggaccattttccttagttaaaagccgctggcatttgcatagggtgagcagaaaaaaaagtttggtcggttatgattaacccatctctaatatatgttcttcttaattttttaaacttatattttatgtaaaatccaaagtctcttctattagtattttatgaatgatgtaaatttagttgggttaaatcagttaaggtttaagtttgattaagatttaagttgattggttaattgatttaagtttttttttctatttttattttttttaaaagtagaatgtaaaatatcattataaangnnngaagaaattatccaaattcatgtttccaaataacatggcgtttctcttatatcaaa

SEQ ID NO: 9969 - DNA, 583 bp, Gossypium hirsutum
gtaaaaattattttagggcgaaaataaattttaatttttatgatattaaaaatataatttttaaaaaattaaattaaaattttattatttttataaaattaaagtataattttttaaatttaaaattttaaagaattaaaataaaaaaaaattattttagagaaatggagacttgtgccaactcctaaattcacccctaatcataaggttgatgtccttgcttaactttttttctttaaaatatttcaaaattctagttttcttttcattagaagtaataattgattaagtaaattacattaataatcatccaattataaataatttttatttttatcacttaattataaaaaaaattatttgattagtaacattttgaaaaataattttttttcacctcggatgttaaattccaacggaggcactctttcattggtttaataacaaagttagtccctcaaatcaccactcataaccatggcaccccttccccacgcggcgaagacgtctacatggccaaactcactgagcaagtcgagcgctatgaggagatggtcaagttcatagagaatgccgcctctgc

SEQ ID NO: 9970 - DNA, 674 bp, Gossypium hirsutum
cccacataaccaatttgcccctcactcacttgatttttatttttcttttctacttaagccgtttcagccttttcaattaggcacatttacactttaagtcctcccatatttttcttttaagctatttaatcactatttcatcaattagctagttttgcacatttttgaatttagtcctttttactaaattaactatcaaaacgttaaaattttctaacgagactttaatactaactcaatgacactctgtaaatatttataaaaatatttacggctcggtttataaaattgaggtcttgatactttgatttagaaactaattaatttaataaatatttctaaagcacaaattactaattcataagccttcctaaactcataatttgttcacaaacactaaataataaaatttttgaactcactcgtcggatttagtggtctcaaaccactatttccgacaccactgaaaattaggtcattacataactaccttgttagtacataactaacttgatatcccaataaattgggtgtacaataccttttgtataacccaatttacccacaagtcctcatcattcttaccaatcttttttttctttacaacttaccacactcaaagaacaatccttgcataataccctagcgtcaactatgcattcgacctatacgca

SEQ ID NO: 9971 - DNA, 559 bp, Gossypium hirsutum
tttttggaattagttcagtgtcagtgagtgtaccttgattttaacgaaattttgttacaggtattgctttccaggggcattgaatgcaacattagtgaaaggaaagatcgttttttgcgagtacttcaccgattacgaaggtgtattagaggccggagcccttggtgccgtgtttcaagatacaggaaacaaggatttccaattcagttaccctctacctttttccaccttgaatgtgaatgatggaagaatgatcatcaattacttgaatacaacagagtatttttctatttccttatataatattggtttaatcctgatttggcccctctagtatgctcaatttaggatataatcattatataatttggtataatctggtctttactcattggttgttctaaatagttaatctagttagaatgctgacttgaatttttcttaaaaacttccgttttgataaaaaaaaaattcatgtcacgttggaagggtgcttttaagaaaaagaaatccatgtagcattttaactagaactgcaaaaggtgaaagtacctaacag

SEQ ID NO: 9972 - DNA, 469 bp, Gossypium hirsutum
atttctgggcctctaaatgtaatgaaaagtaaatgaacctccacacctaggcctctaaatgcaatgaatgttttcctttcttccttgaatttttcataaaaggtaatcattttgagaatcatgttttgaggttgaaaatgatcaaatccctatccacacacaacaaatcatgaaaatcaaattccatgggatgtcaccttaaaaaatttcaaaatgattttataactcgtaaattaaattctcaaatgataattcacttcacaaacttggtactacggatttcataaatccacccttgaaacataaatttcttgcatcgagagttaactcgttaattcttatgaagctgaatttccttttcctgactttggactgttccagctgtgaaccctgtaccatgctcttttgcaaaattgcatcttgcagtaaatattcttcaatgtagttcctttctcttgctctctctatt

SEQ ID NO: 9973 - DNA, 416 bp, Gossypium hirsutum
ttccaccctgctcttgcattgatgtacgaagcaaccatctctataaatgttaattatttataacacttcacctcgatttttactcttttagaccctacatagtttttcatttaacttgaaatatgatgattgttaatgttaaagaaaacggaaaaaatgaatttacttaggtttttatggttttcttctttaaattattttatttataaaattattattttaataaataaatatcatcttagaaaatgagagaaagatatatccatttatgggttaatatttgatatattagtagtgtatttttttatttggtcttaaaaatttgttacatttctcttttcttttaaatatttatttttaatattttatcatactcctataagacacttatcaactcctccaccttatttacagaa

SEQ ID NO: 9974 - DNA, 287 bp, Gossypium hirsutum
  misc_feature (267)..(268): n is a, c, g, or t
tgtacttattggctaaccaaattctgaaattttatggtaagaatatatatgagtctagattcagggaaaattatcggatcttaattttgagttctgtagctccagatataaataatttagtgactatgatgcagatggacagcttggatattccttaaagtaaataataaaaattatggataatgttacttacaagtgtgttatctacattaaggatgtggaatggagaggaggaggaggaaaaatatgtatgaatattcatctagnntggctaatttgcatttttt

SEQ ID NO: 9975 - DNA, 681 bp, Gossypium hirsutum
gatcgtgccctactgtgctgggtatcgatttttcgttgaaccaaatagttgggcatccttttgttattttcgaattacaaattttcgaacgtcgaaacaagaagatttttggcaatggactcgggttattcaaatgttattaacaagaaccacatttcaaaaacatttttaattttagacaaaaggacagtatttaatcgatttggtaccaattttgggcgtaatgagggtgctaatcctttctcatacgtaaccgactctcgagcctattttctcatgttttcgtagaccaaaatcattattttagtaaaccaaaatgttttattcaaacaacccaaatttctaggtgatccgatcacacctaaacaagaaaagattggtggcgactccattttcgctctccaaaaaatcgatccatcatttttaaatcgaaaaaaaaaatggtttcgacacatattttctgtttctttctccaaaatcgacctacttttctaaatataaaaaaatgatatatctccctaaatattttttaaaataagcattttctctaaatttaatctaaatagtttaccctagattttattattttgtccaacaaaacacctaaaaaattaaaaaatataaaaataaatatatccaaatccgagttttagttaaaaaaattgccgaggagcatgacac

SEQ ID NO: 9976 - DNA, 664 bp, Gossypium hirsutum
agaaggttgttttttaaaccacaacttttacatccactgcgacgaatccatagcttgcttagcacatatgaaattgatcatcaccgattgcgatcgaaggtcagttgcgggtcttaaccacggttgctcgagattgttaccgagctccacggctccctttcttaatcccggaaacaacgataccgttgtcatctttatcgatttacaatatctcgagcacccgaaacaagctcacggccataggatgcaacacttacggatacttgaagggatataccgggaacaaaagttatagttccgggtgtgtgtcattgtgtgaccagttggatgaactgattaatggatcatgtactggattcggatgttgtcgaagaaagtcaatttttgttacgtccgcaatcacgattacgaattttttatcattgttgttgatatcgatgagtgagaaatttcaagttgataatgcaatatgcaaaaatttaccagggagtttcaaatgcatttgtaaagatggatatgaaggccatggcaaaagaaatggaactggttgtattcctattagtggcttttcttttgttaatacttttttaggtatcaatgttttttgaattagattggtgattaaattaattagactattagtttgtcggtctaatcatccatt

SEQ ID NO: 9977 - DNA, 606 bp, Gossypium hirsutum
gatgagagcagatttacacaagttgatgagttccaatgcgttccttacttttcaaggcattcttggggcttgttccgccatagaaccaaacttctttgccgcaagtgtggcaaccacattggaaatgcttatgatgaaaaaacttcaggctaccctcttgtattagacaaatccaattcatcccctagtaatgaagtttctagccatagaaaatatgatgtcagaatccgtgccctacaaccctcgtcaactcaagaacttggtactccgcattttatgtgatcatatcgtttatggtcttccacgtgcattatactgagagttaccttgtgtggttgttgtttatagcttgttttgagtcattctttgatgtttttcatggtcactcatgtacataaattctgaagggaaagaaatttggagtgtttgttgaaagagttgagcaaactattgcgactacccaaacttaaatgtaatcatattcatgtaatatctttttgaaatgaaagtattttttgggacattgaattgaatcttggaattactttagtattttggctatgttaaaccatgtgatggatatagagcagatcttgaagcacacac

SEQ ID NO: 9978 - DNA, 656 bp, Gossypium hirsutum
gaaggccattgtactaggagacggattacattttatctcttctactcacaaataggtaaattagtcaatgtacaatagattaaagagcaaattgatcattctgttaaaaatttcatatatttctattgttgaaaacgagtccataaacatcgatataaggtacacgtgatatgcaaatgtaactgtttggttattttgtcagttatgccagtttttaacaataaaattaaataaaaattttaataaaaaattaatttactttttgatctaatatttatagataaaattactttttcattttttagtaaaaatgacaaaatgtcaaatacttttatggtagttttaccttcatttatatatgttatagcagcgcgaatgcgacaaaagggggttcacgtatggtggtccatcctcattcttggacatatcaacctgtatatatataatgcttacatcacttttgtttttaaaccctcaatgcacacgcgtacatatatattttaatgtttatatgtgtgtgtttgtaaatggattctgatactctgcaccaaacaagttgccatggatttttacactttggataccgccaaggccaagcaactcatcggtgctgccaattcccatatatttattgcttatggaaggaacagaaactg

SEQ ID NO: 9979 - DNA, 602 bp, Gossypium hirsutum
gatcaagattgggtggaaatttgagaaaaatagaaaatttctaaaatgtccctgaattttggtatttctgcaatttagcctggtaagttcgtatgaactatattctgtataattttaattgaagtgaatgatatttggtaatgaatattatatatgtgtgtgtgttttattattggaattgaattattattggtaatatgtataattatttgatgcattgaaatgattatcggaagctcgattgggttggaagcttgctggagatatatcacattatccattggttctatcgataattttggatgatttgattctggttataatggcatgtacaagtgaaattggttaacgctagctaattaatgttttaattttgattggttataaatatgaacgcttgatgaaaagaaaagtctgaaaattaattagtaaactctggtaatgctctatagccctattctggcgatagatatgagttaggggtgttacagtagttgattgatggcaaagtgttgtcattgacatagggataacaaaatcaatacgtgagtatgtgttagagaacaacatactagactgacctgccatgaatatgtttcttg

SEQ ID NO: 9980 - DNA, 606 bp, Gossypium hirsutum
catcactggtttaaatcctacgcgtaacgcgtaaagacaaacatcacatgggagaatatctctcatctccacatctccaccgtctattattattttttactacgagataatatttgatgtattatcgatgcatcattaataaatagaagaacacgacacattattattaagtaaaataaaaataaaaatttaaaaattatatttaaataatattattaatattcatacataggctgcacgattaaatatttcactatatacataaacaatagactttctaaattgaaagagattgtgtttataggttcgaatttatactttctaaaactttacaataaaaactgttgatatttttctgagctagatcgatggtctgagttaatcaatatattaaaattaaaataataatttcatcgtattaaaaaaccaaatgtaaaaatatattttgaaaaaacactcattccataatatatatacataataaatcaatatataataaatcttcacttaacgttgattaggcttaagttaagttaacctcgttattattataacaatttaagaaaacatgaatttaaacgtacttaagcgtgtaatctcttcctc

SEQ ID NO: 9981 - DNA, 648 bp, Gossypium hirsutum
ctatcataggtccctttacttttcataattttagtatttagtccatatatttttatttttcaaaatttaatccatttacttttcaattttcaaaaatcagatctagttgttaacattattaatttttttgtttaattttttagtatgacattatgaaatgaaaagaatactcacttggtagcaatataacttaaaaaatgacgttgtaatgagtctaaatttaagaaaataattttagcattgttaatagttggacgtgttttttgaaatttgaaaagtgaagaaactaaatttctaaagttaaaatacaatgtcaaaattaactaataatttagcaatcaattttcatcaaataaaccctaagaccaaaattaaatcttgtatttggcaaattaaacgcaaaattagaaaaattataattaactctaaatttattctattaacaaaattacgaaaaatccaaccctaataatattagcaaataacttttatcaaatcaaccttaaaacttgaattaaacactaaaaagttaacattgttatctttggacatcaaaatatataacttttgtcaaatataggtaccaaattggtccccccaaaaaaaccacaaataccacattaaaaaaaagtatcaaactcaggtacc

SEQ ID NO: 9982 - DNA, 550 bp, Gossypium hirsutum
  misc_feature (540)..(540): n is a, c, g, or t
  misc_feature (542)..(543): n is a, c, g, or t
gatagatgagctcatattggcgggcgatatctattagttgatcaataatggttaccatacacgtcaaacatacctgatgtctctatatgtatggtagcctatccacttaagtagggttttcgaaatgaagtttggacttggctagacttctttctactttaattttctttaattttttctacatttgggtgtagcagagtttctgaagctggctatcatatcgaatgacatctatattatattagatgtttatattccgaggtcttttgccaaaaccttttactagtttcatgttttaaatttttttgttacatcttatattatacattcctatttggcaatttgcatagctaggaaatatatattcatgacctacctacaattacgacagggccatgtatgtcctgggagacatcagtcttcattatttatctttggctaaactagtgaagtagaatgaagtacaactaacctgaatttgggagctaacttttatcattttgaatttggaccaaaaaagaaaaaaaaaaattatccttncnncactaaa

SEQ ID NO: 9983 - DNA, 584 bp, Gossypium hirsutum
cctgataaggaagaagagaatggtgcatccgatcccgactttccgaaggatgcggtcgtcgagtggcctgcacctaagcagatccactcttttcattttattaggtatcgcttctacgaagatccggctataaaagccaaacttgatcaggctgataaagagatacaaaagtggaataaagccaggtttaagcttaccgatgaattaaaagcaaaaagggtgagtgaaaagttattaatttcaattagatgtatagcatggtagccattaattgtcatacttttaagataattattagccctatcattatgtcattacggtgtgcttattgtaatatgatgaatgtaggggaattaaacccggaagcatttatttgaatgtttgaaatttatgtccttgaaatgtaatgacacttacagatatgctattggtataatgattcgttattgttgtgtttgccttcagaatttgagaaaaaatgtgaaagaagtaaaaaataatggcgctgtcagttggctaaattgtgattatctttatgctaatgcaggcagaacgatcagagatgctttcgcaagtgagagcgc

SEQ ID NO: 9984 - DNA, 534 bp, Gossypium hirsutum
ctccaaaacatattattcccatctaccgctattttggcataattcaatggtgactctgaactactagtataagagtattgggacgccttctttttgaagagtgcattaaatttcatattttccttccaaattaaatttgattctgcttttagtgttacagagtatggaggatgatctttaattttattcttttctgtaggacttagccgaagacaacccttgaaatcatgccccattcttccacatccaaaacaaaacattggtaatttttcatatttgaacgagatcccacgatttatttatattatctattgaaacaaaaatacctcatcgaaggggttgctgcacattaagatttatcctgagacgacatgaatcaccaataatttcagatttaattacacctccaaatgtgactccaataacatgcaaaagatcttttttttttatcaaaatctggtaaacacgaacctatcttaatctaaaacagtgaagaattgagccgaatctggttcctttccatcggtttaatta

SEQ ID NO: 9985 - DNA, 607 bp, Gossypium hirsutum
  misc_feature (513)..(513): n is a, c, g, or t
  misc_feature (596)..(596): n is a, c, g, or t
ttactacaacccacataaaaaaatttaaaagtaataatcaaaactgtaacataaacaatgtgtgtggcttcctccgagcccctcgcagctctgatccgtctaaggctggaaattacctgaaaggttaataaacggggtgagtttacaaaaactcagtgtgaaatcccctactatataaaaggaacagtcagtcatataaaagaattaaaagtttggccccagccctacttacagtttcagtatcaattgggccttagcccattataacagacagtaccagatgggccttagcccattacagaagaagaaacattatcagaactagaatcaaaatgagaatcagaatcagaatcaggtgacagaatcaaaatcagaattaggcgacagaatcagaatcagtatcaggtaacagaatcaaaatcagaatatgaatgcaatcccaacccaatccagccattacaccacccgtaccagcccatcacaccatgtggggaataactcaacccatccagnccatacaccaatatacagcaaggctgctaataacagaacattgtggtagagccaccaaaatcagataatgtggcaaagccacntaacagaatac

SEQ ID NO: 9986 - DNA, 548 bp, Gossypium hirsutum
  misc_feature (63)..(65): n is a, c, g, or t
  misc_feature (444)..(449): n is a, c, g, or t
  misc_feature (487)..(487): n is a, c, g, or t
  misc_feature (504)..(509): n is a, c, g, or t
  misc_feature (511)..(513): n is a, c, g, or t
  misc_feature (516)..(518): n is a, c, g, or t
taaatttattatctcttattaaaggcttcatatggtgattaaacttatttctactgaaaatannnctcattaaggaatctatacatataaattataactcataattccttctgtacaatttttaatgaatttctaaagtcagaacaggggacttcaaaaacattcttgccctgtttcactaaaattcaaatatctaaaagtatataattcttttgcttactccacttcttttatatgaaagtagactctttcagctttaatttcatatctcactcaacttctaattctatttccactatttttggtgatttttaaaagttacatcaatgctgctgtccaagaactgctccattgcaatttttaaaaaaaaattcaaaaaaacccctttataattgtctaaccttccctgcaaataaaaaaagtggggaaggttgagcatgtgtnnnnnntattaaagggcggcgacacccgcccttgcccacatgtntccaaaagtaagactcnnnnnntnnntcnnnatctcttttagctttgtctctacctccctt

SEQ ID NO: 9987 - DNA, 550 bp, Gossypium hirsutum
  misc_feature (525)..(525): n is a, c, g, or t
  misc_feature (527)..(529): n is a, c, g, or t
  misc_feature (531)..(536): n is a, c, g, or t
  misc_feature (538)..(540): n is a, c, g, or t
  misc_feature (542)..(543): n is a, c, g, or t
  misc_feature (546)..(546): n is a, c, g, or t
tctaccatcttcataatgacttgggtatttttaaacgcaaccatcactgtaacactatcatttcaccaatgctttgcatattactatcccaacgccacctatctactttttccttattaactccttcatctaaatggctatctcaatgtgtcgttcaaaggttacgactgtaggatgataatattattttctcacgtgcttcagaaatatataattatcagctctatatctactcccagtataaaaagaatatacatacagtttctagtttgttttcaaattatcatactcaccataaactctcccgttggattagtataaaagaatatttgaatttttttgaattaggatcaagttgagaatattgtaaattttgagggttattttttaaaattatgactaaatcgatgtaatatgtaacaggtgagagctaagttgttattaaacaattcttttaactaccacgttagcttgctttttgtgattttaatgggagtgactaaaatgaacgaactatataaccgngnnngnnnnnncnnngnngtnaata

SEQ ID NO: 9988 - DNA, 730 bp, Gossypium hirsutum
  misc_feature (653)..(653): n is a, c, g, or t
  misc_feature (657)..(680): n is a, c, g, or t
  misc_feature (682)..(683): n is a, c, g, or t
  misc_feature (685)..(702): n is a, c, g, or t
  misc_feature (712)..(715): n is a, c, g, or t
  misc_feature (719)..(724): n is a, c, g, or t
aggagatgacccagtcaactcacttctcgaagccggcgaggagaaagagattgggaaaaacgggttgaagaaaaaactggttaagcaaggtgaaggatgggagactccctccaatggtgatgaagttgaaggtaatgatcttcttctttttcttcttcttcattccttgatttggttattcttttgtttgactttctttgagattttttagttgttgggtttgttgattttgattattgttttccttcttttgaagtgcattatactggaactttgcttgatggaaccaagtttgattccagccgcgatagagggactccttttaagttcaagcttggcctaggtaaataattgtatgttcagcttcatttttttgatgaatttagttagtttctctgttaaatctggtgtttttataataataacaatgtaatgaatttaataagaccgttgaatttcatggtaatcatgaaacattgagttgaatgacatgtgaatcacttttttatttctttgagaaggtatagaagtgcttgaaaattactaagagaatatattttaatcacttcaagcagaattaatcattacaaatgcggcagatttaattatgaataagtctagatagagcccagaaatgctttatatatgggatncttnnnnnnnnnnnnnnnnnnnnnnnntnnannnnnnnnnnnnnnnnnntgattaattnnnntttnnnnnnattaaa

SEQ ID NO: 9989 - DNA, 603 bp, Gossypium hirsutum
  misc_feature (490)..(490): n is a, c, g, or t
  misc_feature (495)..(495): n is a, c, g, or t
  misc_feature (500)..(500): n is a, c, g, or t
  misc_feature (504)..(504): n is a, c, g, or t
  misc_feature (507)..(507): n is a, c, g, or t
  misc_feature (510)..(510): n is a, c, g, or t
ttcaccgctttgataagtatctaaacttctcaaatcctcatattcccctaaactttgatcctaatgcttgcgggtgggcatatggaatgaatatgtttgatctcaaggagtggaaaaagagggatatcactggcatataccacaagtggcaaaatatggtgagtcgatggaaagaccatttatctgatttcattttatttattttctcctccttcatccatgtatatagattagtcatttagttgtttagaggtcgaatcaacgagttcttgaatcatcttgtattattctagctgacatgttgcttaagttattcatgttattaaattgcaggataattgttgtctgttctgatttcttttctttttttttttttcccctttaaacggggttaaaaaaaaaaaaaaaaaaattttgggaaatttgggaccccccccccggggggaaataattttttgggccccccccccccccttaaaaaaattggggnttttnccctntttngcnccncccccggggaaaaaaaaaaaaaaatttaaatggccccatttttcccccaaaaggggaaaaaaaaacccggggcccgggtgaaaaaaaaaaaaa

SEQ ID NO: 9990 - DNA, 680 bp, Gossypium hirsutum
ctcttgacctatgacaagactattatgttatgggtatgaaaatttgggtttgatcccaagcaactcattcctcacccccaataaattaagtggatgtagccgtgtaggaatattaaagaagaaaccctggtttatatatgttcagaggtctaaatgaaaagagatccttgttttgattactttgcagaaacgtcactacatcgtagtggctttcaacttttaaaggtaatgcccaatgtgatggctgtttaatacagcatacgaaagtaacgaaatcggaaagaatagtggatgcttatctgtgtcatgcttccattaataacatgatgtcgaattgaaattgttgtagaattttaaagaggtatccaatcataaaagccaaatggagattggtcacaactcttgtttcaaggggattgctcatcatgtggtgcaggtatagggcctatgcaacagccctgtgtcccacaacgtatggcattggctaacataaacacatgctgaaatctgcctcctgccccaaaaaattccagattcagttttgctaaaattaaattcatatataaatgcattgttgatggcatttcactcattacaatccaagtttatatatcaatctcttttggctttgattttagttgagagcttctaatttaagtcaataacaatggagggtgctg

SEQ ID NO: 9991 - DNA, 564 bp, Gossypium hirsutum
ttggatgcctataaatcaaggataaccaacatgattgatagttgtacgaaacataagaaaagatctaatgcttatctttaataataatattaaggtttataaaagctcgccacatcacaactaagctcccccctttaccagagctctctaacctatctttgaattcaaaacctagcttgcaagctatttcagaatttattttggtggcccaggttttcgatagaaaacataagtcaatgccataaaggcaagtaaacttgtagcattccaagaatttttaaggttgacctaatcttgaatattccaacacaatgttcttattgctctggggcaagctattgtgggccagcctgccaaagcccatcaacattggtttgggtgggggcaatcttcagttggaaagatatttggttggtggcgctcatggttttgataatttgaaaggaattctcctagagtatgtaatgttgaatccatgaacctattcactccagatcgatggtcttgcacactatgatattgaatacgagatctgttggatccggtgccttaagtgtagaattt

SEQ ID NO: 9992 - DNA, 696 bp, Gossypium hirsutum
  misc_feature (107)..(107): n is a, c, g, or t
  misc_feature (133)..(133): n is a, c, g, or t
  misc_feature (144)..(144): n is a, c, g, or t
  misc_feature (185)..(186): n is a, c, g, or t
  misc_feature (204)..(205): n is a, c, g, or t
  misc_feature (217)..(217): n is a, c, g, or t
  misc_feature (223)..(223): n is a, c, g, or t
  misc_feature (228)..(228): n is a, c, g, or t
  misc_feature (231)..(231): n is a, c, g, or t
  misc_feature (235)..(235): n is a, c, g, or t
  misc_feature (248)..(248): n is a, c, g, or t
  misc_feature (275)..(275): n is a, c, g, or t
  misc_feature (282)..(285): n is a, c, g, or t
  misc_feature (288)..(288): n is a, c, g, or t
taccaagacatctatattttgagcaaaaaagtggctttggaatattgattcccatatcgactgtcatttatatagtcttagatgcccataaatcaaggataaccaanatgattgatagttgtacgaaacatangaaaagatctnatgcttatctttaataataatattaaggtttataaaagctnnccacatcacaactaagcnnccccctttaccngagctntctanccnatcnttgaattcaaaanctagcttgcaagctatttcagaatttnttttggnnnnccnggttttcgatagaaaacataagtcaatgccataaaggcaagtaaacttgtagcattccaagaatttttaaggttgacctaatcttgaatattccaacacaatgttcttattgctctggggcaagctattgtgggccagcctgccaaagcccatcaacattggtttgggtgggggcaatcttcagttggaaagatatttggttggtggcgctcatggttttgataatttgaaaggaattctcctagagtatgtaatgttgaatccatgaacctattcactccagatcgatggtcttgcacactatgatattgaatacgagatctgttggatccggtgccttaagtgtagaatttagcctatgtacacttgagtttttttaaatagatcgctttgaaaaacattatccat

SEQ ID NO: 9993 - DNA, 527 bp, Gossypium hirsutum
  misc_feature (49)..(51): n is a, c, g, or t
  misc_feature (469)..(470): n is a, c, g, or t
  misc_feature (517)..(519): n is a, c, g, or t
taaggaatctaatgtaaagttagtcaatgataagtcctcactccttacnnntaaggaacttatataagtaaatgaaaaccaggatcaaagtgccccttttaataacatgatctgctcgacactaatttgaccattacaatgtctggaacgcaagcctaaatgatttaagttaaagtagaaaatgagcgaaaataaccaagtcataaaatgatttcaccaagtaaaagcacctttaaagagagcttaaaagagggggagaaaattacccataatccgtggatagaagtgggattaccaatagaactagagagaccattttcatataaaacaatctacaacaaaagtaatttttatccaactattacttgtcttaccacacttttatgtgcattttgtgtttttatcataggcttaccagatccttaaataaccacccccaccctggccaaatgctttttagacaaaaagnngaacattaacattaccaaaggttgataagaaaatgctgtctaaaagnnncactcgac

SEQ ID NO: 9994 - DNA, 649 bp, Gossypium hirsutum
aaagtaaatccatgatattaacttagtatatgaaataataaagtttatagtaatatgctttacttgttgcctctgcatgtaatccaaatacttacgtttaatgctggataagaatcacagccatttgcttttatatgccatttcctgtcatattcgtaatttttttttcatttttttatatcgtaggtaaaatttagttttggtccctttattatactcaaattttaaaatttaatctttgtacttttaattgatatgatttgatacgtatacttttataatgtcattaataaaacaatttcattaaaaaaaatagagttaatcatgtcaaaactaaagtatagaaattaaatctcaaattttggacatagtagagggatcaaaatcacaatttgacatatatttttgtattttataagtttcaagataattttattttgtatgaatcttgaccttttttttgtattttattctgataatatatatgttgatctaattataaattttatcatttcacttttaaaaaattgagaaattaatccaattcggtaaaattgttaagtttttacattgaattgttaacttaaaattttagcagttcaacaatttatatatgtataattgtaaaaattatctgtccaaacaattc

SEQ ID NO: 9995 - DNA, 444 bp, Gossypium hirsutum
  misc_feature (388)..(394): n is a, c, g, or t
  misc_feature (402)..(403): n is a, c, g, or t
  misc_feature (405)..(408): n is a, c, g, or t
  misc_feature (439)..(439): n is a, c, g, or t
aatgcaatcaacccaacacgaattaaattcaagctaaactgattaaattaaccattccaacaacataaatattcatagatatgttcatcataacaacaacaaaaattaaagagatagggaacaagaatcaaatccggtgtttttccgtggcttgactaggttgctccgtccttcctccttggtggcccccccgaaccagggtgctaagaaaaccttaatggttcccccaaaagggtgaaaaaaaccccttttcccaagggaaaaatccgcaaaaaaggaagggaattttaatgggaaaaaaaaaaaaaaaagggaaaaaaaaaaaaaaaaattggaaagaaagaggggtgatttgaaaagtcccccaagggggtttttaggggtgttnnnnnnnccaaaagnntnnnnaaaattttcaaaaaaaagccccccccttgtnccccc

SEQ ID NO: 9996 - DNA, 390 bp, Gossypium hirsutum
gctatgggcaaattatccttaaagacagtttttacatgcctcaagttttagtactcgaattttagatttttatttttctatccattgatacaaaattgttgtcttcaagatgttagtccaagtgattctttggcaaagaagtcttttatgaatttggcaaatgaaatcaaagtagaagagacttttcaatccatcatttaaatgaataattcatacccttgttttgcatgtttagaccatctaatggccagccttttaagtgccacaatctcaacatatatgatgagttcttttaccaaaatatttattgatttttaatggttttttttatgatttaatatttttgtgtaaatcattaagatacaaatattggacataaacttgtgcatg

SEQ ID NO: 9997 - DNA, 654 bp, Gossypium hirsutum
caatcccctccccgccgaaatataagtcaatttaacataaagccttaaatagaaaaacaaaaaagtttttttttaaaaaaaaaagaataaagaaaataaaagagtagctttgataggagaaggtattagtaaccatgtctacatagtcatgggataaaaatagtaacttcattttacctgtgctaaaataggaattaatgcccctagccaaatatcgagtaccaggatgcagcccgcttcgacgagctgtgagagcaacaataccttctacctgacctgaacttccaaaacttcgactttttgcaaacccctatacaataatatcaagtaagaaagaattattaaaatattaaccaaatctagacattatattatcatgttgttaccaatattattaaagtaggttagacatagaaaattgctttaacaggattacaagatattatgatgtagttgtaggcttacttttaggagacaaagatgtgaagacaaaatagattaatcatgctattttagatgctcagaaacaattaaaggaacaccccaagttcccaaccccaaccaaaaaaaaacactacccagaacattgttctgatagtgaattttatgggcaaaatttttttcaaaatgaacaagtagcagcaataaaaaaag

SEQ ID NO: 9998 - DNA, 650 bp, Gossypium hirsutum
acccttcaagtctaacatggagcatgagaaagtcgattttctagataataattctagacctcagaataacccctacaacaaaaattagaatctaggatagaggaatcatctaaatttctattggggtgatcaaggaaatcaaaggtcacaaccctttccgggtttttaataaccttatcagtaagaaaagaagcagaatctggaagagatgttaactaaatctattttagtgtcagaaactagattctataacactaaaatgactttgaggaatcaacaagcatctattcaaggcttgagaattagattatctagcttgctaaattggttttagagagacaacaaggtagtttacctagtaacactgaaaccaacccaaaagagcaagtcaatgcaatcactgtacgaagtggaaaggtgttagtcgagcctgaaaagaatttaaatctacaagctgttgagaaaaataatagggttgaagaatgcaagaaagagcataaaccggtggtcagaaaatacaaaccaccaattcaatatctggcaaagttgaaaaaagaccgcatggatgaacaatatggtaaatttcttgaacttttttaaaaaactgcatattaacttactttttgttgaagccctttcgcagatgtcca

SEQ ID NO: 9999 - DNA, 589 bp, Gossypium hirsutum
aaaaaaaatacatgacaggtttctcgtctttccatgtaccaaaatcaaatttaatttcttactaataattcatcgaatctttgtccatcttatagagaaaggtgaagaaacaaaaagaagttcctcaacgccatggccaccgatttcaaatccatcccagtcatctgtaaattatatattatcccattatttttccgaaattatctatccaatatatatatctgattaattttgcatgcccttctttcgattaatacaatttttcctttcagaaactattgggttttgattcgaattcaagttctaagtttgattgaaatttgaacctccatcttaaatgttgagtctgggtttgaagcaaaagaaagaagggtttgattaatttaaactgaaagcataaggaaaatggtcaatgaagcagtgtaatttgttaattgaattaaaggattttgattaagggtgagttttgatgggagctgcgtttagctacgtttagtgtaaaaatagcggtggcggtgagattagatactgtagtgatactatagtgtgggacaaaaagtaagctaaacacaccgcactgcagttaatc

SEQ ID NO: 10000 - DNA, 587 bp, Gossypium hirsutum
  misc_feature (550)..(552): n is a, c, g, or t
  misc_feature (560)..(560): n is a, c, g, or t
  misc_feature (563)..(565): n is a, c, g, or t
  misc_feature (577)..(577): n is a, c, g, or t
cacagcgcaatctgactccaccgcccacactttaccctcaaccgcctgtttccgtgacagagaattacagcctgccaagattctcctttacaggctcccaggaaatcagcggcagcagcagatcaaagcgtgcagatattagtgtctgatattggatattattgttgtttgctactacattcatttttcccatattcgttatgcttggcatgccgattcttttatatcacttgtatggggtttctgggttgggtttcgcagttttactggatgaatgtatacatattgattgctttccccaatatatagcccattctttcctatctgacttggcttctttcacaattaagttagagatttcatttctcaaaataattgttttttttaatacaatacttacttttgctcaatctctcaagaaaaattgtgcttaaaggcgcctgaactcttcctaattatcaattaaatattggcagtcgtttcttttacttaacgccaaaatgctaagttttttttttttttaaaaaaaaccccgggggcaaaacttccnnntttttaanacnnngttcaaaaaaantgggggggtt

SEQ ID NO: 10001 - DNA, 626 bp, Gossypium hirsutum
  misc_feature (546)..(546): n is a, c, g, or t
atgaagaaataaggccaggttcaattttcctttagtgaagaaatcacttgcaaacttccaaaggtcgtctttaagtagatcccacgttgccttgaagaaccccaagttgaatccgtctggtccgggggccttgaagctatcacaacaccaaactgtttcttttagctcatctaaagtaaagggattatctagtagataaataaaatatatattttaatactaagataaactcatcataaattttaattcaatattgaattttgcgtttatatatgattgattgaattttactagtaaatttttattttgaatttccttttgagattcaattttaaataatttgaaaacaagactgaattaaaataattattttaattattttattttaacatttaaaaataataaattcgttaacgaaatgtttactttacacaaactaaatttagttttttttttgttttttttttaaattttcaagttttttttactaaacaaaaaattatttattttattaatgttttataaattgatttattcttaattatnaacataaaatatttgaaatacttttttggggttgaatcaatattgaagggaaaattttaattaaaaaataaaattagggg

SEQ ID NO: 10002 - DNA, 657 bp, Gossypium hirsutum
ctcacaagtagagcctagacaggatactaacacctttcacgtttgtctaggcccctgacccggcacaaaatatgggcaatatcattcgactagatccaaccctaattaccaaaagggagccatgcttggtccaacacaacccacccaaattctttttctaattttatttaactggcagtcaagctttactttgtttacttattgttcaaggttatcgtagtccttatcaatattggcatttttacatggggtatccatcaccgacaaaaggacatcattttactaaatcttcacttgcctataggtaatgacctcgctctggtattttaggcagaaacattatcgtagtctaccaacttcctaagtaggaatttaagcctttgtttagatcaggatatatatatttttttggaagaaaaaactagaagcaactattgggggtaaggcaagacagaacttgagttctagttctctaaaggtgctagaagcctcgtacccatttaaaacaacaaatagagcatggggcatagtcctaataaaactgagtcttagtaaaaggaagacattttcacacaatgcaaatccgacgcctgattcgtctactctgtaccttagcattactcaagttttatacaggaaggttcaggctccctatca

SEQ ID NO: 10003 - DNA, 378 bp, Gossypium hirsutum
  misc_feature (63)..(63): n is a, c, g, or t
  misc_feature (364)..(364): n is a, c, g, or t
  misc_feature (366)..(366): n is a, c, g, or t
catatttaaataaatttaatttttttatctaaactcattttttaagtttaatatttttctttnaatacgacaacacaaattataccatatgcaattgtaattaaccccatttttatctttttgtacagaaaaggggaaacattttgcagaagtcttgaaccaaacacaccaaaaaatgacgtgacttcaatttgtcatggtctgaaactttttgccaaaagacaaacaggaatggtaaataaaaagacaaaagaatcatgattttacataaattcaataagccattagaaaggctttatgataaaaaaactacattaattatataaaaaagtcttcttttcttttttttttttgggaagaaaananaaaaaaaaaaaa

SEQ ID NO: 10004 - DNA, 636 bp, Gossypium hirsutum
cgggatgcaacttctgaggagcaaaactatggagatggaaatttttagtgttgttgaatctctaaatttttctttttgtttcacttctagagcttgtaacaaggtggctgactgggttgcaaaaagaactaggttatgttcttgcctaaatacaaaagaatagtaaaagaatcttctataaaaattcacccattgcaaaaggataacataaataatcattcccatttgtttctaacagattgagtatgcttaaaatcatatgtcaatgctaaactcccatccattcttctcaatgcaaacctctccaccaacacataccacccaaatcgattccactcaccatttgtttccattttctccacccttttaaccctttcttgcctttccttcccaccactccacccaaacctttcttcttcccacttcattctctcaacaatggacaaacttagcccaatacccaaacctcctttgcggaaccacatcactctgtcgaccgtttcctgatcgtctaccgaaatctccattgtcccgttaactttaaccacttctttttcaaccgtcgtgtcaacaactactacattgtcttcgttatagtcattgttgtaggcaaaaagttgttcccatctttgctca

SEQ ID NO: 10005 - DNA, 573 bp, Gossypium hirsutum
ctcatgcacaagtgcaggaatagctaaatggtttctactttcacattcaaccttcaaggattcatccaattaaatcctttatttagtaatagcccagagtatataactatattgtttctccagtttgtttattaaataacttgcatttccatcaaaaaaatggtaaaacagcagactgtggtttcacttcaactatagaaggtatctaatttctaacgacactctcatcattcatgagcaagggtgattctgtgtatgaagagaaggagaagaagaagcaatattattcatcatgaagtgacaaacctgggaggcaaatgaattaaaacttatgattggccctgcaatgtaaagcggtgcaaacaccagataactgaggtatgttgtaaaggaataatcattgatatgggcatttctctcctgcacaggacatgcattttatgagaaaatgaagtaatactttcaggcaatagtaacaagagtagggatccaatctagttagcaagtaacctgtagaatttgataacagttttttcctgatttacaaacatggcatctttggatatgcttctg

SEQ ID NO: 10006 - DNA, 615 bp, Gossypium hirsutum
tcttttttagattttctatatttagaggaaccttgggaggattgtattcccatacccctgtggccatgtcctagaatgggctggacatgaacttcaaacataggtacttcaagaaaaatgaagtgttgaaacaacctagaggaaaagaacaaactagaagagagaagacttttctcttcgataccacaaaagaacagaagaacctctgtaacacttaactgcaaaacaactcatacaataataactctttccaagagacaaagttaggttaaaatatatttgtttaagtctgcactatggtaagctagatggttataatcttttgagagaaatcataagagttataaccaacctcattccatggcaaactgaagtgaccaaatgaaccaacagactttcaatttcttcattggatatatgaatcttaactaattcattcttcaagtttctaacacccaacatgcagaaactgcatgtgcctggcctgtagcctacatcactccaactcttcattttggttgaagtaactatatctaaaactcatgtccacatggatatggagatacgacctccaaggatcctcatacaaatggaaaaatctgatcatacctgtgt

SEQ ID NO: 10007 - DNA, 578 bp, Gossypium hirsutum
tgatattattaaaaaaaaaagttatggaacccaatagacattaaaaaaaatacattgatttgcaagagatgaggtttggtaaattatatctagattcattaaattattagtaagtttacgttttttgttacttaattttaaaaaattacaaaattgttattaaactattcaaaagttttcatttaagttacttaattgttaatatcgtttttgtataactttctctgtttacacaacatgtaccaatcgaaaactcttattttcattctcttctagattcaattttttttcataaaataactttgaacgttacgaatatacgaatcaaaatctcaataatttttttctctgatttttggcagtgattatcaaatcgacttgaatctacaatatattctacttatctaaactactaatttaatatatcaattgtcaaatatcgctaaggttaagtagagaaattttttaaatttttaaataataatttacccaagaaaggaaaatgattatacatttctggtaagtctgagtatgatcaaacaaacaacacgaaagaaagtgggaccagacgttttaac

SEQ ID NO: 10008 - DNA, 469 bp, Gossypium hirsutum
ttcgtcatgactaattaaatgattgtagtactctcaagtggccaaccaaaatagaatttgaaccgtacacatgtaaaaagccaaaattaagagaaaatccccttcacttaaatcatgaaaagattctatgtatctccatcacaccctcaatactaaaaaaattagaaacctagctgtccacacatcctccattgtgagtaccgtctccatctcctccttatccctcaagtaaatgttatgtgggtatgctcgatggcgatactacatattatgcactgccaaatggagagaatacatgtttgtatatatataacattgcagtttacacgtatttcacaggctattttttaaaaaatttacaaggtaagtttcattcaagctttatttgaaactataaccccaaagaagaaaagaaaaaaaaaactccaaaaaaaaaaaaaattatgaagtaaactacctaccaccacca

SEQ ID NO: 10009 - DNA, 606 bp, Gossypium hirsutum
gagcttacggtagatgatcacttcgtaacaaaatgataacgtaagtgactaaaacataacatttcaaacataaatgactatttttataatttacccttataaattagatcaattcttatttaattaataatagtttttaaaaattataaaaatatattatttaaaaaaatttaaaagtaaacacgtaatttaaaagtattacttcgatattaagacttcctttttggttttaatttttattttcacatggtgtttctgcatttagaagggcggcaaaaagcatgatgctccacaattcttaattcttaattacatcacccaaccatgggtgaatttatgtatatatggtgaaaaaaaatatttaaaaaataaggttgatttttttttaaatttatcgatttatgttgttttttagagagaaaagaaaacatgtcttgtatgacacgtttttactaccatattagtgaaaacgagccacataggacgtgttttcaggagagaacaagaacgcgctctgtagaactcatttttctttgaatggcaactttttcaacggctagtagggtccaacaactataaaaatttctatataaacgcctcaaacct

SEQ ID NO: 10010 - DNA, 506 bp, Gossypium hirsutum
catggacccttctcttatttctaatataaaataaataaattagttaaattaagttgattaagtcgtgtagttcgattatgaaatttactaaactgacaactaatcgatttaattgaatccataatcaacataacctgtaaagctaacttaaccatcactaaattaaccaaatgggctggtttagtcagttataatcgatttttgctcacccctaactaattagtttggacccaacctggttggtcaccccaacataaataaatatttttttagtattggatatatgtatataatatttaattaaatttatagtttattattgggaccataattatcatgtttctaaagtttcatctcatgttcaaacattcccttgttagacgtcatgtttttttcgtgtcaggatagctctttgaacaattgtttgaacttttcttcaaacaaactaagtgcaatataaagttgatatttttttacttttattttcatggtgtgttgcactaata

SEQ ID NO: 10011 - DNA, 645 bp, Gossypium hirsutum
acactttatttttcttaaacaattatcaatttagcttccatcattttttattagtgtgcttgaaagaaagatgaaaatttaaaagaaaaaataaatttttttcctttcattatttgatagaattgaaaaaaaataaagaaaataaaacttttgaaaaaatacataattttcaaattaacttacatttttttttcatgttatcatttcaatttgaaattatttattcatttataagattttataatttcaaactaacatgcatctttctcccatgttaccatttcaatttgattgtttttttatataagaattcaagtacaactcacacactcacattcacacattaataagttgccacacaaattatgttacggatcaatcacatatttagaaccggtgaatacccttgatcaatggacccaatattaaaattcaattatttttatgcattaaaataaaaaaatatatattacctcttttatttttatggacccaaaaaaccattcttttccacctttctattttttttaacttttccattaaccaaattataaatatatatatataagattttcgaatcatacatggcatatgaataaagatttgcttgagtgtgtattatatatatccgaaatggagagaaca

SEQ ID NO: 10012 - DNA, 340 bp, Gossypium hirsutum
acatgacagccatcgaaggaaggtatgcggttgatttccatgcaaagttgtccgcattacaagcgttttccatttgtgtcgccatattgcacggtagtgaaacccccacggctaccagtgaaccacaaaccaatcatttgcccgaatgcaattcactgaaatcatttctcgaggatgaagtgaaattcttagttgaagcggtcacggaagaggagaagaagaaaaaagccggcaaaagagcggtaccaatcccaccatcctacgtgattaaccctcccttctccccaatcgctcgtgtttagacatcgaaaagcaaggggttactgtatagggggatatc

SEQ ID NO: 10013 - DNA, 626 bp, Gossypium hirsutum
tcttgttggattctttaagatgagaatggcttacacttccccgcttgggagaagagattgctgctttttcttgaatgctgaagtcatcatccatgaaatgccaactttgaacttgagaagcaacaccattcacatcttcaagcatgaatgagtcatccatctgatgattttgttcgaagccatttgaacactcatcaggggagctgatattgaaatcttccttgatactttcatgtaactcgttgaatctctcgtgatcgaatttgatttctttagcaggggaatagaggttctccaagtccaacaaatccactatctcatggtcaaccttggcacatataggatctttgtcatcatctgcattatgaggggcagaggtagatttctcagagcaaacaggctttgagaagtccagcaaggaagctttaatatgctggagcagatttggatcctccggaaccttaagaattaagaattttcagagaaaataaaaagtaccataattgcttgattccttgataagttctatcgctacatttaccaagatccaaaaaggaacttactagttcagttacacctagctcaataacacctcctaggtagggaaaactaccacagtctgcaca

SEQ ID NO: 10014 - DNA, 627 bp, Gossypium hirsutum
  misc_feature (623)..(624): n is a, c, g, or t
tgtatggtaatggaagacaaggtcatgtatgacgggactaatggacaaaaggaagaagaaaatactagcaggacatgaatgaaatccaagcaatcactactcgccaagaaagaaacaatcaatgcccttcaatttgataagaaacaaaagaaaagaaaaaatcctaaactggaaaccaaaagggacggtgccgttttaagcagatggaaaatgaaccacactaaactgctgcctcatgttctcacaggacaggaccggactacttcctaaaccgaaacccaacaaatttcctacaaacaacagcacaaatcgctctatctctgtacttttcctaatcggctgcttgtattttcccctctccacggagccaactacctcctacgccatgctttcatcactcttcagactcacctccctccgctcccgtaaaacccctgttgggattacctcatcctggtcgatttttcgtcagaaatggaacggcacggaggagtacgaccacattagggctgaagtgaactgtcctcgatgctctaatcagatgcccgtccttttctctaaccgcccactctccatcaccgctagggagccaggccttttccaggctctcaatctctgccgtnnatg

SEQ ID NO: 10015 - DNA, 599 bp, Gossypium hirsutum
  misc_feature (60)..(61): n is a, c, g, or t
agctgtcacttaaacccttccctccgttctaccccactttcatctctcatttacctcganngctccctctcttccgtcgacctctctcgcccttccatcggccgtattctcgacatgtgccccctcctccttacctccgaccctctccctcccattaacttcctcctccacgaagtctccctccctttccctcatctccctctctccctcacccgttgccctcgcctcttagtctcctccgtccccacccaactccgcccaactctccttttcctcacttccctcggcctcgtcctgaattcccatactacccttctcttagtttccaacgtggaaaacaccttgaaacccaaaattaacttccttcaatctctgggttttgacgagccggaggtgaaccggatggtggtgagatcacccgggctgttgactttgagtgtggagaataatatgaggcctaaagctgagttttttttggaggaaatggaaggtgacttggaggaattgaaaagatttcctcagtatttttcgtttagtttagagaaaaaaattaagccgaggcatagagctttagtggaatatggggtcaaattgccatt

SEQ ID NO: 10016 - DNA, 648 bp, Gossypium hirsutum
gaaagagtgtttgatgaatgtctctaagtcttaaagaatgtgttaaatgtgttgtttcacttctgagagatacggcgtatcatttgtggaaaactttaatatctgtggttttgagtgaacgagttacgtgggatttctttcaatctaaattccgaaagaaatatattagccagagattcattgatcagaaacctaaagagtttctcgagcttaaacagggtcgtatgtctgttactgaatatgaacgtgaatttgtaagattgagtcagtatgtccgtgaatgtgtatcgaatgaagaaataatgtgcaaaagttttgaagatggactaaatgaagatatccgtctgttagttgggattttggaaattaaagaaatggtagtgctcgttgagcgagcatgtaaagttgaagaattaagtaaagagaaaagaaaagttgattctgaagctagagatgctagaaagagatcttcgagtagaccatttcagtctatatcaaagaaatcccgagatgatcaaactcgtccaaatgctaatgtgggacatccaaacctagatcgagctagatcgcattcaaacttctgagttcctgctacttctgttgcaagtgtcgggaatgtctgatctgagagacctgaatgtgaacact

SEQ ID NO: 10017 - DNA, 651 bp, Gossypium hirsutum
agagagaaagtaaggagggtagtttttgtttttaaatcaatatggattattagcttaaataattattttgtgtgaattcatttggaacgcatttaaaataaataaataatttattagggaacggataagataatagagattacgaaccgatattctttcttcagattatgatagtacgcattttaatagcaatcacggttggcatgaaggttaccgatttactattaatggtttatgagatagcattaatcatgtgattatccaaaagatttttatcagtgtatttttccatataagtgaaatacaaaaaaggaaacaaccatatcgaataattttccttaccaggtatcgagtgaattggaggaaagcaaggaagataataccaacaacagcactttcccacctccactgctcatttatcagtttataaaatcagaattttaagcagtaaataatgctgtaattagttgctgagtaagttaatgttttcccagatcacagacctcgttcctatggcggaaaactgcaccaaggaccgaaaccacatcagtatgagtagtgaaatgtattaaaccaaacattcctttcaattgttgtaggcagatgattatagcagtccctcccatgaaaccagtgatggtagaatgagat

SEQ ID NO: 10018 - DNA, 598 bp, Gossypium hirsutum
tcatttcaaagcaagaaagagtgaggaaaaaacaaaaattcgttctttggggaatagcaaagctgggcgttttatatatgaaaagaaaatgaaaataagggaaaacatttaattaaaacaggcgaaattttaaataaattaaaaaatgaattttacttttggtaaactacataattggtcactcaactttcatagattctcatttggtgtaccatttgctaaaagggcattgccgttaacaaatattttcattttggtcactctcagttatagaggttgacgaaaattctatttggcacatcaaatcattctttttattgtccacataagtatataatttccacctcattattctggctctgtctctttcaatcttcaccctctaacgcatttcctccactttgctctaactcaaaccaacttccatgaaacccaaaatctcaaccactgatcccatcatccacaaccatcctcaattaccaccgtcaaaaccaaccatcacccacctacaccacataaatatagttagaaaccaatgccatcgacgacaagatttgtagattgaaactgttttcaattatgacttaaggggtaaact

SEQ ID NO: 10019 - DNA, 691 bp, Gossypium hirsutum
gctcctgcatgaatataaattaatttcatttgtagtactcaactattagtgtttttctattttatcaatctttcaaaaattttgatttaatcattaacattctcgatattttatattttggtcattttcccgttaaatcatcaacggagtgttaacatgaccttatttattggcataataacaagttcagcaccttaaagtttaaatattgttttcaaaatcaaactataatcgaactgatcaggttattggcttagttgatgtgattaaaaacattaaaaattcataaaataataaaaaatttaaaaaaaatctcgatttaattggatttttagtcggttcaattgatctattccgatttgcaattcaacaggttcaatattgttatctagatcaaaaccttagtcggttttcaccgattttgtccaattcaaacttcattaagtttaaaagtggttatctcaatactaattctcctacacaacctattcacaaatcactgttcttcttagagatttatcaaaattaagttaagggcatttgcttaaaataatgtaaaattacatttggtaataaaattatgaaaatatgatattacgagatggaaagtcagatatgttacaaagtaatattgatccaaaatatgagaatacgaggtctaatttaaggtaacgtgaatcaaacacaccct

SEQ ID NO: 10020 - DNA, 612 bp, Gossypium hirsutum
tgcactactactttagaaatcaattagatttgctctcttctcacatagcttggagtcactcttcctacacaacctgttatttatagtgacaatgttggtgccacctacctcttctctaatccagtcttttattcacacatgaacatgtggcaattttctattactttatttgggatcaagttcaattaggcgctcttcgtgttactcatgtttccttagtagatcaactttccaatgtcttaccaaaccgcttccgtgaaaacacttccaagaattaaaggtcaagattgatgtctcctttggagctccatcttaagtgaacttattaaagaattaattccgagagattttctctatattataattagttgtaatcaattacttttaatcccctaattctagaatagttcctatttatgttgtccaatttatatatatataatcaatggaaaatcgagtaattgtttctaatacactactctatagtctcaacaataaaattatcattattcaaaaccattgtgaagcttaataaacataacaatttagataaaaatcatattaataaacaataaaaaattgtgaaaaaattagaacttaccttcacgaaac

SEQ ID NO: 10021 - DNA, 700 bp, Gossypium hirsutum
  misc_feature (25)..(26): n is a, c, g, or t
  misc_feature (636)..(637): n is a, c, g, or t
  misc_feature (639)..(663): n is a, c, g, or t
  misc_feature (667)..(669): n is a, c, g, or t
  misc_feature (673)..(677): n is a, c, g, or t
  misc_feature (681)..(686): n is a, c, g, or t
  misc_feature (688)..(691): n is a, c, g, or t
atttataagctgtaggaatttaatnntgacttaataacatgtaagaaaaacacaattcatcatgcataattaaatccaaccagatttgagacaaattaaatagaaaaaattatttgagctgaatttgcaagttttgagctgatttgagctcattgagctaaattggaagttaattcagctcgtagtaaaatgcatggagtgttctttgagttggtccaagcttcttcgatgtgcccaaccaaagtctcaccccaaactttgttaactaaagccgaaacagcctccttgaattgtttggctcgtgatcgggtgatgggaccttgaggcagctccaaaggctccttgctcgagctagattggacttgaggcgtggccgtatctggccgttccccattccttcttcggctcgtagtgagttgatcccaccatatcatagtgtaatcggagaattctatggccgccaacttcacctttttgatctcggaataattatgacaatcaaaaaccaattcgatcttcttctcccattccaagtaggcttccagatcagattttccttgaaaggatggaatggatagtttaatgtttcttaagtcgtcatccatgcgtctttgattccgattaccttggttcatnnannnnnnnnnnnnnnnnnnnnnnnnntttnnntttnnnnntttnnnnnncnnnncttttcttt

SEQ ID NO: 10022 - DNA, 656 bp, Gossypium hirsutum
cataccaggatttagttcccacactggtctctttctcttccaagaaagatatttatcttagtctaggcggaaaccctgtcctcattgaaggtggacggaaggtaatttcgtcctttctctgtttctcctttaggttttttcttctttaaattgtattgaaaaattcgttagcatttttatataatttaatttacatttaggacagataagttaataatttgaaatttttaacccaaaaatgaaatttagatacatgcttcgtattctaaaagtaaaattatacagtaaatatagaggtgctcataggccgggtctagtcgggttcaggtcgggcctaagtatgatattaacatactttatatttacccaagcccgccttgacccgaaatatgagcttaaaattttgcctaaatccgcttatatttgcaaaagactaacccaatcctgttttaggccctcccatattatttttaatttttttaaaaaatatttatattatattattttaatatttaataattttatacattttttatttattgaaattttttatatactcatcttaacattatttttttaatatgttttaaattacataatatattaacataacataatataaaatattataaacttaaaaataggtcgaaccgggt

SEQ ID NO: 10023 - DNA, 424 bp, Gossypium hirsutum
taccttactcgatttattttagtatttcatcaaagtttgaaattattttataagtttatcgccttgattctattttatcaaaaaaaatcggtaaggattccttctcttttttttggttgtccattacttagtatattatacttatttcgacttattttatacttattatattatccttattacttattctattataagtaaatcgaaaaaataaagggttctgaaaaatctggaaaaatcgaaactaagaatagaaatctttgacgaacgggtcccggaattgttattatttcgacacaagaacacaagaaaagggtgtgtaaaattccttttcttgtgtcgaaggctagaaagacgaagaatactccctgtaattatttgttcccctcatttaatttatccttcctttctattctccacttac

SEQ ID NO: 10024 - DNA, 574 bp, Gossypium hirsutum
aatttataaggttaattacatcatatgttctcgaactatggtttagattctcaattagtcttctaacttcaaatgttctaattgattcttaaaagtagaggtgaagctaataatcttttaaggggccaaaattaaattataaaattttataagaattaaaatgtaattctgtcaatgtttttatattaactaaatcataattttatcattattgagggtaaagtgcaatttcctattttaggggagccaggcctgcctgtccttgcttactagtatctatactgtattacttagatctttccatcaattaaccattgatttgagatgctcgattgatttgaagtggaatatatttaaagcacgtaaatcaaattataaatatgcatgtctattgtatggacaatttgaaaaaaatagccctattaaattttattggcttttttttaacacaccaaatccaaattgtttataaaataagtatacatgtttataatttgatctacgagttttaaatatgcttcacacgtcaaatccaaacatttaacatctgaattgatgcctagattgatgaagg

SEQ ID NO: 10025 - DNA, 625 bp, Gossypium hirsutum
acattgcacggtatatatacagtcatgcatggattttaaatatgatgcggaagatcactggtggaagggaattaatgaggcccagaattacaagattcgtggataattatcttaccttgaggtccattgtgattcaagaggacaatttaaaacacatgttctctcattcagagtggttatcatccatttatagtagacgttctgacgctcaggctattaagtcattactgtatttagaaagattttggaagtctgcacgtgaagctgttagtgtgtctgagtcactggttaagatattacggattgttgatggtgacatgccggctatgggttatatgtacgaaggaatagagagagcaaaaggtgctataaaggcatattataaaggtattgaagaaaaatacatgccaatatgggatataatcgatcggagatggaacatgcaacttcactcaccgttacatgctgcggcagcattcttgaatccttcaatattctataacccgaacttcaagattgatttaaggatgaggaatgggtttcaagaagcaatgcttaagatggctacgatggataaagataaaatagaaatcacaaaggaacatcccgtgtactaaatgcacaa

SEQ ID NO: 10026 - DNA, 582 bp, Gossypium hirsutum
  misc_feature (524)..(524): n is a, c, g, or t
  misc_feature (542)..(543): n is a, c, g, or t
aaagggtcaaagtgagaatttcattatactaaaggggccgaaacaggtttaaaccttaaattaaactcccaaaattcctagggtttcggtttcggtttcgaaatacagaaaggggaaaatttgcagaaaaaagccatcaactccaatggtgtgcgagaagtgtaagtttttcttactctgcaattaatttaaactagtttttgtttaatttgatctaatctgaaaatttctgatgggtttgattaatttcatttgtaggtcagaagaagctatcaaaggtgatagtgccagataagtggaaggaaggcgccagcaacaccaccgaaagcggtggccggaaagttaacgagaataaactcctatcgaaaaagcacaggtctttgtttctttcttttaattgtttttttttgccctccttcttcaagttttacaaagttcatttacaaatttgcaaaacatgagcaattgggtttctttttatttaatccggcagaaattttaatttgagctgtagcaataacttnttggtcagataatttctnntaaagcatgacttgattattagtgtaaattattgataat

SEQ ID NO: 10027 - DNA, 422 bp, Gossypium hirsutum
aatttattccggtattgatttcattggtttcttgttttgggttccaatcttccatagatttaagtagcatttcttttatcaaatattattggcgtgggagaatggaagatgatgggtttctattattcagtgttagccttgtatatttgcgagattttatctttctaacgtgtggcgtcttttatgcctcggtttgaagcgtgacatgaatactcgtggattattttacttttcctatactaacatgtttaggaatttgaatgaaattgtgtaataaaatgtgaattaggattaagtgaatgaattgtgtggaggtttccatggccttttagatttggcatatttttttgggtagcaaaaatggtcatgatgagaatggaatttacagcagatgagaatggaatttacagcatttaaagcat

SEQ ID NO: 10028 - DNA, 367 bp, Gossypium hirsutum
  misc_feature (361)..(361): n is a, c, g, or t
cgacgccgttaaggccagaggttgtggggtatatgttggatagaggttcccaaatgtggagcctaaggaaagccaaagccaattttcagagagttttggctacttttaagtgcttttccaatgctcggcaatggttcgatgaaatccgcaagtggaataattcggcagcaactgttttagtcatggcgatctactgcattatagtttttaaaccagatttgatattaccaacaatgactctttatagtattcaagttaggatcctccaatggagaaagcgaccgaggcatccaactcatatcgatgtgaacctatcggttgccggatctgtgacagccaacaaattgaacaaaaagtttgntacttt

SEQ ID NO: 10029 - DNA, 690 bp, Gossypium hirsutum
cttggtagtttaacggtacagaatagtttgtagcggtaattttatcattattaggatcttttgtgctaattctatcaaacttttcgcaatttctctctttttccaactcccattaaaattttctcacgaattttattaactaaatttttggataaattggaaattaaaattaagggctaaaaaattaaatattaattttaaattataaaatctatttggaatgttccttaaaagttaaaaggcatttcactccaaaagttgcatcttctttcaactttgtattttttatgggtttttcttccaatttgtcattatattagtacttttttttgtaattttttgatgacaatataatctaaaatttgtaataaatcatgatttattatccttaccaaaacattattattattctcgcccttcgttagaatagtcattacattcattttaaaaatgtcatcacaaagataccatttaccgacattataaggctcaagcaaataagaagaggcaacattattattctcatccttcgttacaatggtaattacattcattttgaaaatgtcatcataaagataccccttaacaacaattataccatttttgataagtacaaatttgtcactttcgaagaccattttaaaaccatttttgctcgataacgatccagacgcaaggttcttcctaata

SEQ ID NO: 10030 - DNA, 645 bp, Gossypium hirsutum
ctttcaagctcgattgtaagtctattcttgtcccattttttatgatttttatatttttgagatcgttgaaacttgattaatctatttcaaggactaatttgaagaatgattaaagtctaaaatttggcccatgttgaatatgcttgtattttgatgtttgatgatagaaaatgcatgtttgttgtttgttaaacgacttttgtaaagtaattttcgataaaaagtcaaatagggacttattcttaaaagtctataaaatgtgtagaaaagtgtgactaaatagaaaatgtgggatattatgagtataaataatattcggctaggcttgggttgtaatgaaattgaatgaaattcattttacgagcctagggactaaattgtaaaatgttgaaaagttaggggaaaatgtaaatttttccataatatttttttgggctaaattgaataatgtgatgattataagttaaatgtggtattatagatcaagaaaaatgaagtttgggtctaaatcgagggacaaacaaaataagtgacgaatagatcctttttggccctttttgtaaccgaggtaagttcgtatgttaaataagttttactataattgtatttttttaatgctttaatattgtaggaattgtataaaca

SEQ ID NO: 10031 - DNA, 442 bp, Gossypium hirsutum
cttccaagtcccaacttaattgacaggttatatacttaatttcaatgttcaaacaagtaattcttgcacaaaaaatgacaactcacccactcatccatcactcgacaacagagttactattttttggtcaattccgtaaaggttaccgactaatgctctacattgaggttcaatctacaatatccaaatttaggttcagctaagtttcaaattctctctcctaattctgtggatatattatctcatcaaagttaaatttcataggtccttgaaatctaacaactaattcttcacttaattaagcaaaaacaaaagaagctcatgcaaaaaataaaactgttgcatcagaagttccatgcttcttgcatcctaatcaaacagagtacttaacaactaagaagtgttcgtgttagtagaaaagttctgcaaagcatcctatgac

SEQ ID NO: 10032 - DNA, 619 bp, Gossypium hirsutum
agaaaacgagtagtaaaatgatcaattttatatattcggtgcaataataatgagagaatttaggagaaggggtcttacaactttgagacgattaaggccatcagcatcaggtttacggtcaccaagaacatgcaaaacctcgtcccttgctttagtctgccaatcaggatatcttgctagtaaaaccatagtccacaccagtaagaccgaagtggtctcttggccagcaaagtaaaacagcttgcattcctcaatcacatcctcaatgctcatccccttatgctttgcttccatttctctgatattggattccacaagtatgtccaacaagtcctcattgctctcttcccctgctttaattgccttctctcttctctttatcatttccctaagcgactcttttatgtctttgtgtttcatcttcaactccctgttagtctttgtgggtaaaaaccttcaagaaaacaaacacccgagattcgaatttcaacatctgtaacattttccttagaactcgaagataaagttcaggattacctccatcctggaatgtaaacagattgaaaaactttgattgtgagagaggttaggtcctctaatagttggaaaattcctcttc

SEQ ID NO: 10033 - DNA, 505 bp, Gossypium hirsutum
tatagtaaactctttatacaaaacttaataaactaggatctatcatgtcaaattatcaagaacaaaactagatgttgaagcgtacctaaatccattgatatcttgaaatcttcgggtcttaataagcaatttagagaaggtggctctctattttctgaagatgggatatcaaaaaaattacgtatatgtaatttaaggaccataaccctaatatataattttttcacattagtcttaatttttaatcagtccatcatcaattagaaattagttatgagaatatatacacatatttaacccatattttatttattaactaaaacccgaaaaaatttaactaaattagattatttttaatttagactaatattttatgatagtaaataaaaacatgtaattatatttattatataagtaagatccatatttttttaacattattcactcatggataaagatgggatcttttctatgtccatgatgattatgtcccagcaaagcaaca

SEQ ID NO: 10034 - DNA, 638 bp, Gossypium hirsutum
ctcttcctattttttatcccctacatcacaaccacgtgttgcttcatccattccctttaatcattttgggagtaaggtgatcatgggagatcgtcagctttgtgcttactaaactatactttttttttcagacaattttcattttggcttttaaatttttttatcgctttggtttcaattactttttattactttggttacctatttttaaattttaatcaaattgtttttttaataatttatcaacattaatctgacaaacattttatacgttctttataaaaaatacgtaaaggcaagattataaaaaaagtttaaaattttcataaattttttaaaaaaaattcatgtctagagggcaacactcttctattctacattataaaattttctgtattaacaatgttggcaattttcttttgccaaaataacgtcggcaatttaatcacgtgaaataaaataaaacaagatatgaattaacaatgcatcagatatgaaataattcataacattattttccgtatcttatttcatatcatgtgattaatcaagtacaaatattttaaatctaagaaaatcccttttaatttaaggtactcaataacagatgtctaaagctaatattctagaggaacggg

SEQ ID NO: 10035 - DNA, 699 bp, Gossypium hirsutum
cctaactcatcccaatacaaatgtcaaatttgtgaaatgaattttaattcagttggattaattataattataataataaagaaaatatgattaaagtatatttaaacactttttttagaattaattattatattggtcaaagttaagtattgtagttataccgttagccacaaaattatagataagtttttgttttagtcaattaaaaaagtttttatttaaattattgaattattcaaaagtttttgtttaagtcattagataattaagtatttaaaaaaaaagtttcatcaacaagctccaagcgaagattcaacaactaatataatagatcaatacccatcaatgagtaaacgaacataccttagatccaaatcgatctgacggctagtgtgaaagattgaaaagaaaagctgcttaaattttggttcacaaatttgtgatgtctaaagttgtttcatgaaaaaaattaaactgtaaaaaagaggggtttacacacaaattttgagttgaaaagttggcttgaaaattcggaatcaaagttattgataacttcgaaagaaagttacaatatctgaaaatttctcgaatacaaagaaaaatatcctttgattcttcttttcaatttgccttcgatccaaggatcatctagacttggtcttggatgaatgcaaattgcttcaagtatcgtgacgactt

SEQ ID NO: 10036 - DNA, 686 bp, Gossypium hirsutum
cttcctttcaggttttctcatactctctctaatttcttctctttttttccttaaaattttcgattattcttttagcttatgtttaattttattttacaaattttcagtagaatttaaggggaattttttttggaaaataacttaaaagatgagtgaagttttcgaaggatatgaacggcagtattgcgagctatctgcgaatctttccaagaagtgtacggctgctgttgctcttactggaggttacaattcaaatctttatacggataaacctcttttttgaattatttttgttaatttctttatttttttgctcctaattgcggatatgtggttgcataattcgttatcttctttctaatttggcgtgaggattctactgattttttttccttttttcagatttatgctctgattacagattgtatttgatatttttttctctttaaaaagaaaacttagaatgcttaattgggagatgtgagaatgaagaaaagaagatccgatcttttttctctactttgagttttatatatattaattgtttaattagttaataattaaaattaatcaagattttctcagtttgtaagaattcttttgaggcattaatgtagataaggggaaaggtcttgattttggaactttaagttgaatatatttaagcaaagagtttaaacggtctg

SEQ ID NO: 10037 - DNA, 625 bp, Gossypium hirsutum
ttgtacagagggagtagggctagggctccatgaggggtagttccacacctcaaatttgaagattcctttttgaaccctaaacaagctaataaactgctttctaaaatttatatattccaatgggctcttcttttagctgatttagttacatgtatgtcaccaatagccagttactggttcaagtgagaaaaggaataaaggaaaattatttataaagcttgataactaggaaaagaaaactctacaatttgtgattcaagttcttcagttatatattatagatatggtgtctgtctatttatggtaattatttgaatttaaattaattgatatttgatgcatatatccctttttttcattattttgattgagaatagttattttttaaataatttaaaataaaaatatcaaagcttaaaatgaaatgaaggaaaattgaacactttggattaggctttatgattttatatgctctggacttatggcgtgtttgataaaaaatcgaatctttttagtgaattgaaaaggaatatttttttagaaaaatgttttgagaattttcaattaaaaaatgttgaatagtataagtagatagataacttatttatcacttcggtgctgttgg

SEQ ID NO: 10038 - DNA, 601 bp, Gossypium hirsutum
ctcgtttccttgaagattcatcctcacatactaactttgatagaatcttggtttgatttacttgaccttcgaccttgttgttgggccttgagataatgtaagtcccatggacctgaaagtgagcattgggactcatatcaaaaaattatcttactattaatttcctactgaagaaaggattattatagttaaattatgctaatagttcatgtagtatgtggttttagtggatttggtttgcattccattttgatcaactttaatattttggacattttgaatattaaaattttaaactttacttaaaagacagtatttggatagttaagaaaaatgatatggattttttgtaattttttttctcagccaatagtaaaaaaattattaaaagagaaaatagcccactaaatacaatggactaaaactaattttcatagcaaaaatgctattcaaatattaaaaatggcatattaatttattttatactcgagcaattaatttaaccaaaaataaaataacacactaaatttctaagccacactaaagcaagggatggttaaattgtttatatactttagttttccaacatttgtggagccta

SEQ ID NO: 10039 - DNA, 652 bp, Gossypium hirsutum
tcttgaaactcataaaactaaatttgtacacatagataagctgatttaatcaagtcaatcagcacctaatcacaacaaaaatcttacttagttcaaatgtaactaagtaacaaaaaaataaccaaagtcagcatgctgtcgtgctgcaacaagcatgcaccaaaaaacagacttagctgcatgtaagccatttcttaacaaggtttaagtgttgatactgagggtgtagataccgttggtgaaggtgtaagtgttactactgatggtgtagatgatgctggtattggattagatgctgttggtgagggtgcaagtgtagagatttgtggttctagtagtgaagctggttcaaaagaagaggcattcttagttgatgtacacgtaggcagtgatatggatgagaaagtagaagccattaggaagaaagttgttagacaagaaaagcaaatttttgaggataatactgaaggtgatagtggagatagtaatgaggatgatgctaatgaaggtgttcacggagagagaaaagtgggagtggacatggttgatgatgatatgatcaaggaaaatgagggcaagctagaggggcatgaaagtgactatatagacagtgaagatccgggggaatatggggatagtgataacccatctg

SEQ ID NO: 10040 - DNA, 551 bp, Gossypium hirsutum
tagacgggtgcactgcagataggggtgtagcctgagtgagagtggtaagggattcggttacttctaaaataattttttttatttaaatattataaaacttttaaaattttaaattaataaatatataaaattattaaaataataatattctatttttattatcgtaaaaattataattttggcttccaccctaattataaattctatcatgtattttgagaatagaataatgacttgaggtgggtagtatatcagatcaatagttgtgtgtttgatttcacattaagtgctcctaatgaggacaaataaattggaccagtcgtaacgaaagcatagtaaatcaagagacaaggttgagcacccaaacgagtgggccaagagattagactaactggaatgagaggtgtgtgcatcacaagaatgagtaggaaaagagtatcaccgaaatatcttagaaatttgataatattttcccgaaattatgtagactattattcttttaattaaataaaatttaccttttcttttcaatttgctttctaacccatccc

SEQ ID NO: 10041 - DNA, 694 bp, Gossypium hirsutum
  misc_feature (617)..(618): n is a, c, g, or t
  misc_feature (622)..(623): n is a, c, g, or t
  misc_feature (641)..(645): n is a, c, g, or t
ggtgttgttgttgttgatggtagtttgaattgggtagccattggattacaacgatatgccgatagaaaggtcgtgatttcttttgatatgagaagggaagtgtttaagacaataccattgccagcactgactcgaattggcaatgttaaagtgatgtcttacatgggattattagctattgctgtataccctttagtttttgcagccaatggtaataatatgaaccgtttcgagttctcagtattgagtgattgcgaggatgggaggaaacattggactaatgttgttttggctgagaatttctcaaagtttttggttccaatgggaacttggagagatcgtgaactgatgattaaacaaatgggtgatcgagacaatcacccgaagcttttcttgtatgatccaatcgacgaacgaactaaaaggcttccgatcgattgtgctgatttatatttacaatgttacagtcatgtggagagcttggtatcagtcgatggaagaaactaagatgctgttgaagcaaagctttcaagactttaggttgggcttgaaagcaaagctttgcttcaacagcatcttagtttcttccatcgactgatacaagctctccacatganngtannattgaaatataaatcagnnnnntcatcggaagcttttagttcgttcgtcgattggatcatacaagaaaagc

SEQ ID NO: 10042 - DNA, 628 bp, Gossypium hirsutum
ccctttggacatcaacatcattaaaaaattggaataggtaccgtttgtcccctaaatccgtaatgcaaattcctccaattggatgccaaaggtccgccatcgtattacgtagagacgagaaatgaacaacactgtctgtaaggcatcgccccaccaaacaaaactgatagttccgctctacaaccgttatatccccttggaatgcctcctcatcatccagcaagttcaagttggctaactcctcctccatgacagccttcaatccgaatcacacagccaaaacaaaacagaaatagagaaaagcaagaaaaggaaaaccagcagaaaacagcgtgccaaaaggcagacagagactcgtgccaaaaggcagactaactttatgatggaactaacaaattttgaatggttaaattatagtaattacatttttaaatttcaaaatttaaatttaattgttaatctattaaatttgtaattcatttgatatttataactaaacaaaaagagttataattaacttgaatttaataaaaaaacctttaacagtgttactaattaaatttaataataagtaattcatttggtagttttctcgagttgctgcccgtgtttagtggaacaggctacc

SEQ ID NO: 10043 - DNA, 613 bp, Gossypium hirsutum
gcagtcaaactatgtaaagtaaactagaaactaaatggaaaaggatatcttctattagagccatccatgactaataaatctctcacttgttcattgtatatttcaatcatctgcaccccaacttcatatctaataaagtctgatctctccttgtatatttgaaacaggtcacgtaaagcacggtagtttacgccccatgtttgctcggtagtcatatctgggccactctatgaagaacaaacaacaagaaatcaagaatagcaatttccgagttgaattgatagaatattacagaaaaggtttgtccatcggaagaaaagaagactctatgcatttgcatacgcaaatagagtggatgaatataccatggtgtatgtctttcctgatccagtttgtccatatgcaaagatacaaacattaaacccatctaggacagatctgatcagtggttgagtgtcgatatatatttgttctgcacattacattatcgattatgcaaaatgtaagtacaaacaagtgaaggataaaaacaacttaagtgaatggataggaaataccttgtgagacattttgtccaaacaccttgttaaaggagaatacttttcttgcatcc

SEQ ID NO: 10044 - DNA, 648 bp, Gossypium hirsutum
cgatttgctatttgctcccttggctacttcctcaattaacttgctttttgcttcactattgacttcattatttcaaagttgctgccgattgcttattcaatagattctgccgattagtgggctgccatcttcttctatttccatccaaatcctggctgctctttctttgttgtggtaagtgttccgttcctttaaatttttgcttgtatcgatctagtgttttactatattaacttgcttttgagaaaggttaattagatgattttagattaggatgaattgagttcaaatgttaataaaaaatgtggaataaaaagaatatttctttttattaatggttaatttccaatttataatttatgttggagttatcggttttaataatatcaattttaatatttcaaacttgataatttgtaaccgtttaaatccatcgttatccatcaatctttgaagaaattgttttaagagtttatttaaaaaaagattattatcttcatcaaattgaaaataaatctattttatcaattgatttcaacatcttaggctttaaaataaagtagtaaagtggggagtgggcacagagatttaaagaaggtttaatagaatatgtgccactgcattttctcgatcccgacgaaagatgag

SEQ ID NO: 10045 - DNA, 643 bp, Gossypium hirsutum
atagacactgtccgccatatcattaatcaaatccaaaattggtatctgattattacttgacaacttgaactgatttaaaagcaaggatttaattcaaggatttactctctaatttattccttgtaatcatggattggatttaggacagattttaggagagattagaagcatatttttaagagatatagcaaattttttaaatatattttattgattatgtatttaatttatttccctaattaacctagattatgtactataatatacgtacttttctcataaaatataagacaaaattcagaaattctcttttcaatttctagcacctcttttcagccttttcagtttacaataagtggttacattcttagttttgagttagaaatagaatgtttgggagttgaatgatccttccaaaagattataatagacttttaagcaacaataattggtctgcaagggaggaagatggatagttaaacattcatgggaggctcttttcatggaggaccttgaatggtttttattagagtttatagataagagaaaagagaggtaccccttaggctaatctattaaaagactttatgggagggtccttgaattctatgtagttaggaggagatttagttccctggattct

SEQ ID NO: 10046 - DNA, 629 bp, Gossypium hirsutum
aaaaagtttgaacatgaacacattgtcttagcatggtaggtttaaggctgcatgtctctaattctaatggcctgtttatccggccggtggtagagattttcatcgatcaatcgtcagataaagccggaaaaatcctggcacgatctctcttgcccggcatttcattgcttttattgcagacaagagggttactgttgatgcccaacttcatgcatgtactaaacaaaaccattttgtgtaatttgggttaaattatgcttttggtccctttaatttagcataattaaataattggaattttttgtacaaaatattggggtgggaaagaacaaaaggaaaatatctaaggacctaagagtccctttctaagtgaaaatttagtggactgtagtagggagcataaagacaagtatgttgagaaccctaaatatttactccaaattattaccctttttctttttctttttcttttctcgtatggttccatttgctttttaaaaaattaatcagaactgtccaagggacagtggcacatagaaaagtacaagattctatggactatggtacaatttttttactttttctttcttttctttatagtttgcgattttatggtggtatgaagagtc

SEQ ID NO: 10047 - DNA, 585 bp, Gossypium hirsutum
tagaaggaagcctatcaggaacaatcatccaagcggtaatcgcgtgccgtattgtattccaaatacgagctgctccatacttgtagcacaacttcacctaacaatgtcaccattttgcttcttgaacaaggataggatacaatgttccttagttcaagcaaagcttcgagaagcacaggctgcctcgtaacgctcatgttttttcattgaattagattttaaagtaaaatgggaggcataaacttcattttaccaaggtccagggacattgactagatttattcataaatcaaattttctcattttgcaggaaggaagattgttcttcaagcaagagatgtatataccaatcactgaatcaaatgctcggtacttaactattacgaagaatccgacttgcacaagtaaacttgtgatggcaccaagtgagtacttgagccagtatacacctaactgaaaccaggcagctaaaactcatttgctgatattgctgagacatgttcaatctgtttcggccattaccaaactaccaggaaaagtttcatggtttcaatctgacagccaaacgtgctccgataggtcatt

SEQ ID NO: 10048 - DNA, 615 bp, Gossypium hirsutum
ccttggccatgcatgtataacttttatttttctaaaattttatattttattttttttattgtttttcgtttattgaattttcatatgtaatcaattttatttaatgtttacataatagtattatatgttactaatgatttattctttttgttataaattacataatatagtatattataaatttagaaaacaaattgagctagcttgaatttaagcttgaatatttgagcttggattgaacttatattttaaatgggtttaattttttatttaaactcattttttagatctaatagtttaacttcaactattttgaatttgagtaaatcttcgagtttaagtgataattctatcctcaaataggtctactattgacctaatcttaccccatatatttgcaaatgagggttaataatagttcttattaggatataaatactcaagtataaatgtaagagtgcaattcttcaaatatataaaagtattcatattaaattcttgaaagaaaaaagagaaactcgaaacaaaagtgactaagatactatcagtctttgtactttattttagtatcataatttttcttagtccaattgttgacactaaaaacattgatgg

SEQ ID NO: 10049 - DNA, 613 bp, Gossypium hirsutum
tttttttctttttatttattttttgaaatatagtttttagaaccagatctgttttatattctgttatttacgctagttaagtgttttttttaattatgctgtttggttgctgaaaaaactggaaggaaaagaaaggaataaaaggagaaattgttgattaatggttattcagctgtgtagttttttttaccgtgctatttttggtaattcaatagaggtttctttgtgagaactccattttattttattgaatttgttgtttggattattcggttttgatttaaattgaagtgaaaaaaaaaggggctgttgttgaaaaaggttgcgaaaaccacagtggaatatgcgcgatttgtttagataaaataatgttgcaggaaactgcactcgtgaagggttgcgagcatgcttactggtttgtctaaccctatctcttatcaatatttgacattaattgctatctggttttacttggttatgttcttgtttccatgcttcttacacttttgagccttcttgatttcactcgaaaatttgaagtttagggttaaattaaccgctaggttgacggaacggaaggacttggttatgttctgtttccatgcttctaaca

SEQ ID NO: 10050 - DNA, 630 bp, Gossypium hirsutum
cagctagactcacacgcgctacgttaatcctagaatcaactaaaatgtagctctgacactaataaaatgtaacactcctacccggtatttgtcgccaaaatggggttacaagacatttccgttaatattacaattcagaacaaactttcattagaaggtaaatcatctaatttttttaaaaaaagccaatctacctgtttcgatacattatttaactaattcttcaaatccgtcaactcaattcaaacaaataaacatagaaatctaatacttaacttttaacccaatacaattcatttcatatccaaatgaaatatacaacttaacattcaaaggatacgaatgatttatatataaatgaatttgtcaacttgcaatttctattcaccaacttaaattaataaagtcacacgtcaccatgcttcatataaataacatatatctcagtgtccatttcatttatcacatattacctaacattataacatacattacttaaccacaattattttattccacaattataacatgagcatataagcaaatatatttatttttatcacatttgccgaaccacataggttatgcatgaataagtcaaattaacatacctaacttgtctggaactta

SEQ ID NO: 10051 - DNA, 675 bp, Gossypium hirsutum
cgtgctttctatttgatggaagctgttgtaaagtccgagtgccattgttaaggcttcaggcttaagcttaacaccttacattcaagttgttgcacagcttcactaatagtggttggttctgttgaagctaaaaacacttatggcttgaatataccggcctttcccttcataatcatagaatgggtatttgtgacaaatggtttacaactaaagaaggctaagcttcaatatgtattctgtgatgcattttgaataagtaactaaaaaagcattgatttaagtatggaatttgacggccataaaactctgtgtgctttatctttttttcaccttctttttattatttttggatcactttcactctcgaccttaaaattctaatcaaattaaatttttggatcgctaaataattatcaatgaaacacacaacaactatacaaattatcatatcaatgtcattaaaattttaatactttggtcaacttttctattcaaagaagatcaaattgactaaattttgaaagttaaactaaagtatttaaaaaaaagcttaaaaccaaaataacaaaaatagtaaccggaaataataggaatgtgatcatgctttattagttgaaacattcttagctaaaagtgttgcaaatagtatgatgtcgactgcaaataggaagtggc

SEQ ID NO: 10052 - DNA, 658 bp, Gossypium hirsutum
tctctttgcttagctctttggctttgtaagctcattcaaccaatacaacaaattcttttagttccaagattccaactaataatcagatgtcctcattcagcccttcttcgaaccttttacacataatagcctcgaaggaaacacactcttgggcgtacttactgagtgtgataaattctcgcttatactctgtcactgacattcgaccctgcttcagctaaagaaattctttacgtttctgatcgatgaactgcttactgatatatttcttttagaattcctcttgaaagaattcccatgtaaccctctctctcagtacacaaatactagtgtcttccaccagtgatatgctgtgtccctcaataatgagataacacatttcaaacattcttctggtgtacataataacttatcaaataccctgatagtattcttaagctagaactcgactttctcagggtcatcatctacattagccctgaatttctcagcttattgctttcgaatcttatcaaccagaggcttattcagtcttactaattccacatcttgaggagctacgagaatcggttggggataaagagggggtggaggatgttcagcattcagatttgtttgaacaaactccaaataccactcattcatcatacggaggaag

SEQ ID NO: 10053 - DNA, 712 bp, Gossypium hirsutum
  misc_feature (634)..(634): n is a, c, g, or t
  misc_feature (636)..(636): n is a, c, g, or t
  misc_feature (638)..(644): n is a, c, g, or t
  misc_feature (653)..(656): n is a, c, g, or t
  misc_feature (658)..(658): n is a, c, g, or t
  misc_feature (672)..(675): n is a, c, g, or t
  misc_feature (680)..(684): n is a, c, g, or t
  misc_feature (686)..(693): n is a, c, g, or t
  misc_feature (695)..(699): n is a, c, g, or t
aaaacttggatatttcttatgttgtctccataaaacattcatgcacaagttttattttgtctatttatcttgatgtgatcatttacaagtcccctaacatgttatctaaatccattgtcaaacctgtttgagttatatatttgttgatgtgatccggcacccgaggatggatataatcatatatattacagtacaaatcaaatattgtttttattgtcttctttaagtatcattgaaaaaacatagccttcttctgctacacccagtttctacttccaacgaaagattcaattccgctgacaaaaactgtgaactctcaaacataaaacgaagctggagccatcagagatcaacgacgaatcacttttgccattccattgattgtattgatattctcttgagttgttcgactggactgagtaggatttggtagagttgaattctgtaaaacaaaaggttagttagagatgtccgaccttgtgctcctaaatattttttgctacttaagtcaccgacgggtgccgtggtatagaggaggaagcaaaagagcttaagatatagtaagtaaatggtcgagtgttaagatgtgtgtcttaaggtttttatgcctgatttttgggccttctagatcatngntnnnnnnnaaaaaaaannnnangctctttttgcttnnnncttcnnnnncnnnnnnnncnnnnngggacttaagtag

SEQ ID NO: 10054 - DNA, 609 bp, Gossypium hirsutum
tgtttggtatgaatagtttgaatattaatattttaaaagaaaatttcaagaggagctcgtgcagggatcaaacaaaaaagaaattgccgttgattttgttttgagttacacaataaacccatcttatcgtctgccattattatcctttgttcagaaaaaagaataaaactttttctaaaggcatttttgcttaccgttcaattggctctaagatggggagcaaactgaaaagagaacttaagataagaccaaatagtatctgggtggtctctaattcacttgccttttacaatcctttggaatgaatttcttgctttttaatgttaaaggcaatttattttattcctcccaaaattagtttccttgtaatgtacttaagctctaagctattgtagaaaaataaaaattaatgtagccacttaatttagcaacttcattttcgttttcccacgcaagactggaattttttctttccctacttgatatagacatcttaaccgttgtggacataaaatagataaaagaggaagttggaagacgacttcatggatttaaaaaagtttaggcaattttaaatttcataatctcagtatcagtgtatgtggcact

SEQ ID NO: 10055 - DNA, 491 bp, Gossypium hirsutum
atttaccaaaactaaatctaacattcaaatcttcattagtactttcccaagtaatcaaacactcttaagctacggaaattccaagcttcccactttctcagtacctcaagaaagaaaccgaagaaaggtcataaatgaaaaagataaggcaaaaaaaaaagtgaaaggaaagtcctccaaaccctagaaatcacaatttcatcacaagtatagcacaaacaagtcatagaagcataaacataaacaatttgatatacatataagtagcagaaaattcgcaccttgcttggatttcttgaagccgccattgccgttcaaggcagcctcgggcctcactctcttgcgtccaccaccaaactccattgggcgagcaacgaaatccaagagaaagaaacaaaagtgcgagaatatgggaagctagggttcggagaagaagggaaagcgcggaggggggaaaaaggaaaagggggaaaataagctaggtttaaagg

SEQ ID NO: 10056 - DNA, 651 bp, Gossypium hirsutum
tagatttagatggatgactatagaaaaattaaaattaattctaaaaaataaaataaatttcaaagataaaatgcttttccttacaaaattccaagttttttccatataaaatttaagtttttcctcttattgaaaaaaaaactaaatttaattctaaaaaaagggaaaaagaatttaaaaaaagagataaattgggttttcctctgaaaacctaggtaattctctataaaaccccaggtttctttcttttactaggaaataatgaaattaattttaaaaaggaaaaagaaaattaaaaagataaaatgagtggtcaatataaaaacttacaaaaaaaattgaataattaaaatgagtgtacaaaatgaatctcaaattgaggcctattgatcgagtattatcttccacaaaaataacatgagttcgaatcactattatatcaaaggagaattgtttgtaataacaaattaacaaagagttactaacattataaaagtataaaatgattgtggcaaaatttttttttttatgtctaaaatgaaagcttatggaatttggatgatgaattgtagaatttacctttaaaacaaatcttaaaatataatttaaatttatttattttgaaaaaaaaaaaaagggaagttggtacgg

SEQ ID NO: 10057 - DNA, 642 bp, Gossypium hirsutum
atccttttctgtgctcattttttacttttcaaagatggggagaatcgagaaaagatcagcaaaaccaaaaatgaaggtataaaaaaggcttctttgctattggatttgcttttttttctttcttcctttccttatgcatatctccttttaggcctctcagccaacccaagtataacttttgtagatagttgactcgcctttttagcttcttttgtctgtttttcccccaacagaccaccatgggaacaagacaatattattactacttaccattaagtcactaacttattatatgctcattgaaagaaaaaaacaacttattatatgctcattttccattaatccataagtaaaaaaataaataaataaaatgaaaaacttcaattttataatctaacttagatgttgtatttaagaatcatcggatttggatgccattgattgaatttttttctcaaagattaatagtaaaactcaacctttgtccaaactcctcctcagaaagagccttgtctgtcttcaccgcatgtgattctatgttttgagtgcttatttgttgaatgcaaccctcagagaggtgacatgttggactttgagcaatgttttctttgacttgttaaggttacttcaacaagcctctac

SEQ ID NO: 10058 - DNA, 602 bp, Gossypium hirsutum
aaattatgattgtgtttgctgttttttttttaatttatttttgattaattgatgccattttatgatctggggtatttcgttattcttattttttgtctcttttaaaaatgaatgaaatttcatgaattgggttgccgttttagttggatcttaatatatttctattgttatacgatgaaatgtgatttaaatgatttgtttaattcgtgagttgttttgatgtattctgatttatcagtttaatataatgattgattttgacataatttaattgtaatttctcatatacttataacagtgtcgtgacattttctataatatctggaagtaatggagagttgttgttgataaagcaataaacttatgcatcttttctttgttcggtaaacattaatggcaaacattgattttagggaataaaataaacaatttagattttattggtaaaagtgttaataaaagtttttatattaagaattaaattgtattttttattaaataataaattaatttttctacaatttacttctactattataaattgatttttctatattagcatgagatacatgtaatatgtttagttagtttctcactcatgc

SEQ ID NO: 10059 - DNA, 634 bp, Gossypium hirsutum
gagcatctctgagtttggaagctaatagtgtttgttttcggattttatttgtaaagataagattgggttttgggagtggcaataaactacaacttcactacgaaccccccaaaaactatataaaaatataaattcacccgaaggaataaagatggtaacttagatttcttatttgcaatcacagcttcccaaattgaaatatgtttcaagaaataaagaacttgtgcatagcttctgagttcagaagagcacgttgtatcatcatagctgataacaagtcaagtcttccaatcaacattttatacaaaatattctaagcttgatgagttactacagtacaaacacgatgataatatgaaagagaatgttatgaattatgatgagaaaatcacttcggcgagttttggtccgatgtccttgcagccatagctgctccaagttatgtcagtctagtctaactcttcatttctttctaggacccatactgaaatttttaaaaaataataaataaattaaaaacatattcgtatcctaggctcaaccccaagtccggataacataggctctaggtttcttcttctctaagcaacaatgaacataccggtgaaaggctccacccacaatgtcccaagtc

SEQ ID NO: 10060 - DNA, 598 bp, Gossypium hirsutum
  misc_feature (8)..(8): n is a, c, g, or t
ggcagatntcagtttcaccatggttagttttatgatataatccaaatttaaatatttattcatatttaaaatatatcacaaaattaatttgtaatattttacatcaattttaatttgataaaagtttcgtagagttgggctaagaccaggttagagattaccgcttgacccaaatgaaagggagagtcccagcttcccactgatatgttatggctaaaacgatagaagaactccttgcgtttttcccttctcttctgtatctaaacaagtcttttaacctgttggccacaattttttttttcttttacccttttttttacttttaatttatatttgaataaatttttgaatggataaatctcaaaattacacatgaattctgatttaatatataatttgatacaataactttaatttggtgcactcacacacatgaattttgattttaattcaaatgtataaatgaaactttaattttgattcaattgtatacatttaaagaaataaatatattactttaaaattgtatcttttcgatagctatcctcaagctcacatgtgttgagtgccaagtgtgggctcgcttcaaatcaaattt

SEQ ID NO: 10061 - DNA, 521 bp, Gossypium hirsutum
taagctctccactccccaactctccgctctcaataataataataataataataatgacacctcgatattagtaaaaagattatataataatatataaaagctgccgtcgaaattaattatattcaaaaccattaaattattaataattttatattttgttcacaaaaagtaataaaatggtcattgaactaattaaatttttttatttaagatattgaactatttttaagtttttattcaagttactaggttattaaattttttttaaagtttgactagtgagctccaagagacatttcgataatcggtatgttgaataaatacccattgacaagtagaacatatcttatatccaattcaatttgatggtcagtgttggatatcagagagaaagttgtttaggtttgggttcctaaatttgtgacgttcaaagttagttcataaaaaaatgaattgtagaaaaaaaaaggaatgagaacttttgactggtgcaggcggtgcgaacagagaaaaccatacaa

SEQ ID NO: 10062 - DNA, 632 bp, Gossypium hirsutum
aaagaaagtagtaaaaaacctggctagcttaacacccacgatcgatttgacatggaaaataacaacttccatcttcaatatacacactaaaataagaaaccaactttatgcaaaattaaagcacaagtaatacatcttaaaacaaatcaatctatcaaagaaacatgctaaccacatatctaagaatccagatacccaaaaacaactctataaccataagcaacgcatccttaaaaggttgtaaaaatcacttcaaagttctatctcaagcaaagaaaataaacagagaagattcaaaatacgttactcggactccggtgtgagtgccaaatatgggtacggttagtttttctctatattggaaggatccttggaggtcatatcccaatatccatgtgtcagacacaagtgttagatatgggtacttcatgattcatgaaaaatgaaaagtccgagcagcatagcaatatagtctttaattattaaagattaacaatatttattattgtcaaatgattttttctcgatcttcaactaatacccaaaactttaaatcaagaattaaatcaaattacatcaagtaaagatgataataccttgaaatgaaccctgaaactagaacccttgcctta

SEQ ID NO: 10063 - DNA, 623 bp, Gossypium hirsutum
atattagtatactttatgcttgtttaatttgatccaatacgaaatatagacttaaaattttttaatgtttacattatagtaatattatataccactatagatttaatttttatatgttataaattatataatatgtatgtatgtatgtatgtatgtatgaaatattagaaacttacaaaaaaaaaattgaattcaagttgagtcgagcttaaaccttaaatgtttaaatttaagcatagtcatatattaatcgagtctaattttttactcaaatatattttttaggctttatatttttacttaaacttttttaaatttctttaaatttaagtaaatagcttaatccatgcaagtgcgattaaaaccaaaagtttgaaagaagatgcaaattacaaaaaagccaaatcgaaaatacaaaaaggcatcattaatgttggcccttgaatgtttgggaagctaataataagatactaaaatctttgtttttttgccagttttaaggggccgacctttgataattgcctaaaaaaggaataataataaaaaattaaaagtgaaaggggtaccgtgacggcgacactcttgtcttcattgaaaagaggttggtcgccggaggcagggtc

SEQ ID NO: 10064 - DNA, 656 bp, Gossypium hirsutum
ggtatttgaactacaacaggtcctctaagaatacagttctagataccaattgttgggtttagaacagaagcagacaagctcagcttgtgtcttgtgcaacaagcctcgatacttgctgagcaaacaacttgtttcaagtaaaaataaggaagaaaaacaagaaaatgaagagattattgatgaaaaaattttgatttcattcataaaaatgagcaatggcataatgccaatacataaaccaagcactaagcttgtcaaaattagcaaaatgtttacctaatggttacctaacaccactaagcattgaaacttgaagtaattaacttgtacatacaagcaaagctgaataaacagctcatcaatcagcaaattacatcaatcatcaacctaacatagttgaaaatgaactaagatacatttcattaactaaacattacaaaatgaacaaaactagatcaatttaagcttgctgcagtagcttctgccttgctcgatcttcatggtctgcatgttggctggtgtggcagcatgctggccaacttcatcaaagagacatgaaattaaacatccttgtagttctattttgcaattaccccacaaacaaatacccaatgaatttcccacgaaaattggcaggttggattctccctactatc

SEQ ID NO: 10065 - DNA, 442 bp, Gossypium hirsutum
ttctaatttgtagcgaaggtttatccaccctcatgcgtcttgctttgggggaagggttgttaaaaggtgtgaaagtaagcagacaaggtccctaaatttccaacttactttttgctaatgactgtccttttcggggaaacgagtgagcgaggtgcccaaattttaaagggaggacaatgtgtcacctataataaatctacgaattttatagctcaaatactcgagaattagatcgtgagctaatttcgcaatagttgagagtgtgttacttaaacgactcggagaggtacttggacttaccaaatatggtgggacgacaaaaaaaagttacttctcaaacattaaaggatagaatcaagaagaggattgatgggtggagtacacggttcctttctcaagggggaggtctttataaaattggtgttactagccatccaaacct

SEQ ID NO: 10066 - DNA, 559 bp, Gossypium hirsutum
actgcatggtgactcccctccaccatttttttaaaatcaattttgtatactgtgaaagttaagtttattaaattttttaaaattaaaattaaaatgaaaatttttataaatatcgagacataaatttgttaaattttttatatctaggatcaaattgattgaatgtgtaaatattagagaactaaatttgttattaaaccaatacaaaattcacgtcaactttctgtcactcatttaacagtaactaataggagagtgactaaaatatttaattttaaaaaatttagtggctaaatcgaaaaaattaatagttcagtgactaaaatagaacgaactcaatagtttagtgatcatttttgtacttttcctttttcaaaaaaattttatacgtatgtttagcttttgttatgtaaaatggtatcgggacgaatggtgttaacttttgacttaaataataaaataatacctaaactatactattttctccaagtacctaaatttttttgaagtcataagtgctaccttgacaatactctgttatccaaattactccaaacag

SEQ ID NO: 10067 - DNA, 676 bp, Gossypium hirsutum
ttggctttccaagaatccctattaataagtgttttcaattcttggctgatccttcattgttttgggtatttccattttagatctaattgattctaagtttagttttctgtttcatttcagatccgagtgtctatagctttcgtaggagttttttatgacttgacaactaaatcttggtccgcgcgcaaccttctatcatggagttttgtatgctgtctacaatgcccataaagcgtcatccgattgaaagaaccaatctttcctcgaagtgtttacaaccttctcaagattgttcttaatttgttgatttgacacttcggcttgtccattggtttgtggatgataagtagtagtcattctatggttaactctatatctctttagtgcggttgccacttagttgtaatgaaagtgtgtaccctaatcactaatcaatgcctttggtgtactgaaacgggtgagtatatgcttgagaaaaacttttagcactatcttcgcatcatcctttgggactgcaacagcttcaacccatttcgagacgtagtcaacaactactaatatataaagatttctaaatgaactcgaaaacggtcccacaaaatccataccccaaacatcaattaattcaacctccataattggctgctgcaacatttcattgcatcgggatataaag

SEQ ID NO: 10068 - DNA, 588 bp, Gossypium hirsutum
  misc_feature (543)..(544): n is a, c, g, or t
  misc_feature (551)..(551): n is a, c, g, or t
  misc_feature (559)..(559): n is a, c, g, or t
  misc_feature (561)..(561): n is a, c, g, or t
  misc_feature (573)..(575): n is a, c, g, or t
gctaaatataaaattcaatggggcttctcactagtataaatagaaagacatttgttatccatccttcactcactatatcttcttttaatttttttacattcttaaaagagtgtttgcaaagctttgagagcagccacatttggccatattaaaagctattaatcttggtagtcatggcaagaaaagaagaatgaaggaggataaaagttagttgtgtctcatagaaccaccagaaacgatttagcatttcttttacccttcaatctttttttttgttcaattcaagaaacatgattgcaactcagttttctacttttaacataatcatgattgcttgaattttgttggtgttagaataatttaaattccgtagcttagattatttaattttgttaaatatgttcagtgcatttgatctgtttattcactcagataaaatcaagaacatgttactcatgcattataaatatagagatgcaattgaattagttattaaagcagaactagattgtaattaatggacacaatatctgaatgatgcannagtggcntgttctgnanttgatttgagcnnnttgaataaacaaa

SEQ ID NO: 10069 - DNA, 685 bp, Gossypium hirsutum
cattttgggttaggtctaaaattttaaatttcaaaagtagagggactaaaattgacaaatttgaaaattataaggaataaatttgatcaaattaaagtacatggattaaatccacacctttcgcaaggtacatgaactaataatagaatttaaccaataataaaatacggaaattatccaaaagaaacgtagtcttgtctatgcttatgttttttttagatatctttcatatacattttgtggtccatatttagtgtttgtgactgtccttctcaaaaataccatttctaatatttaaactaacatctctatttgacattgcaatttaccttaacactatactcaatatttgttgatattttactcgtgcttaatgacaatcacaaagtcctcttatgaaagaaaacattgatccaatgcaattagatcataacgaactttgtttgcaagcatctcttatagctttgaatttacttaatgtccataatctattcacacttattctatttaaggatttatagagattttgtaaaactccctttagcttttcagtcctaaaatttgaaactatgttaaaatgggtcaaagaaaaaatattcaatgagcaatttaagattttatttaagaaggaaaaggaggtggaaataaaatagaaattcatttatagagattttattgaaatatc

SEQ ID NO: 10070 - DNA, 476 bp, Gossypium hirsutum
gatccagaatgagcagagttttagctcaaaaacaccgcccgagtttttgaggaattgtcatgcacaccaaaaaaatgcatgaaatgtgttgtatcactgcttagagatttagcttaccactagtggaagacacttgtctcgattgtaccgagggagaagataacatgggaatttttccaagatgagtttcgaaaaaagtatatcagtcagagatttatggatcagaaaagaaaagagttccttgagctgaaaaagagttccttgagctgaagcaaggtagaatgaccgtaattgaatacgagtgtaagtttgtgagactcagcaaatatgctctggaatgtctgtcaactgaagccataaatatgcaagatgtttgaggacaaattaaacaaagacatttggatgtttgttggtgtgacagcccaaaattgaccctagtcgggaagtggtttcgggaccgctaaaccgagtcataa

SEQ ID NO: 10071 - DNA, 640 bp, Gossypium hirsutum
ttgttgtttgatagtgttgtttagtttaaacttgaagaacacaacacccccactttactctctcgcctttcaatatttccaaatttacagttaaaaacactgcaaccccccgcccccgccctaccaaaaaaaatgataggcggacgaagggaaggtgggttgatgagaaaggcatcgcagtcagtggtgaaatcaagaatattaatagctgttgccattgggatttccattggttgcctcttcgcttttctttatcctcacggtttcctctctttctattcccctgctttccactcccaggttcctttcattttctgcattttcaggaattcaattcacttgctctttagatcaaatcttgatttactttatgccttaattatgtaccctttacttcaattttcattcctttgttaattgggatgctaaatttgttatttatttatatttttgctttggactgaaactggagaattctgtatcgagcttttagcaatgttaagtaaaactcctctatgtccttctcaatctcgatattggtcaaattgatccctctcaaaagattagaacaatttaatccctctcagttttgaaagtgagcaactaaggatagttaatcatggggttaacgttgtctgtc

SEQ ID NO: 10072 - DNA, 606 bp, Gossypium hirsutum
atgcatgccagagaaagggggattttctttttctctttggatctctggtagggtgaaaagttacatatctgttgaggttcatacacgcacccaacacttgaatgagtttgctaacatttgcatcattggttattattatctctcggagtctttctttagggattctgactgcttttcttttatggtttgaagaaagtatgaagagatttgtgcaccaagagtggaagaattttgcttcatcactgataatacctacacaagagaagaggtatgatcttctttagttgcttaatcttgcaaatagcagtcattgacttgtgctttgccatcattttctgcttcttagaccatatgcttaaagtaaagagtaaagtaaaaatgtgagtgagtgaattctgtattgattgacataagttgggatatacatatggggagtaatcagagtcctcaaaactaataggataaaagaaaatcaaatgttaaaacaaaagatagaatcagaaaattggatttaaaaataaatgagataaaaacaaaaattcaaaatttaaagacatttgaaaatgtcaatcctctttattctggacttctagacttccttgactc

SEQ ID NO: 10073 - DNA, 617 bp, Gossypium hirsutum
attcaatatcctaatcaccgtagattccaatgttagagtaattatatgaataactatatgaaatcagtgaagaaaatggcgtgtggaatagttgaaatgatggtccatgggctaaagattcaaccctggactgtgttgagtaagctgctgatggcgactctgttttcaaggtgaaccattagccatgatcaaccttttaatgatagcagcaatgtcaatggaaagggtgatgtggttggactttgcttctcaaatcttttgtaaagaaaagaaaaagaaaagttaaaaatgaaaaattgctaaaagaaaaagtatagggattagttatagaatgtgatttataatttatgtctaaaatgatgatagtaaaatgtaatgttagcttatcgatacatctttaatgagagttaagggaagatcgattataacataataaaatgatagccttaattattatgtaataagtttttttttaaagtttgatgactaaaatgtaaatgtacttaaacataagtgactaatgttggaatttacccaatattaaaacattaattgctttttgggatacaaagtttcgtttttgagccacacgccatttctagtgtcttgaaccaatg

SEQ ID NO: 10074 - DNA, 412 bp, Gossypium hirsutum
tattaaattgattcatcaacaaaatgaaactaaattaaaattgttaatttctaaaaacggatacttgtttatttccacgaatatgcaaattgatgttgatgaatgcaaatgcaaaaggtaacagatttattttacaaccttaccacaactagaaaccattaaccatgatattaaattgatatgcaagaatttttaaaagaaaaacctaacgcatcataaacaaataaataaaaaagaaaaccacaccgaattttcacaaatacaacaaaagcttctctttgattttcatggacaatgttcaccaattttcacatatctacttgtaaagtgtgttgtgactttgacaaatataaacaagatatctactctttctagaattattgaattactggttactttaaccaaaaaaaaa

SEQ ID NO: 10075 - DNA, 546 bp, Gossypium hirsutum
gtgcaatctaggtcctgatggtaggcgtagagatgctgatgagagacctgagctatgtaggggcactgttgaatttgttgccacgaaggattatatggttagttaattaaatttgctggctctacagtaccagaaattaaatgctccatttggtttaaggaaatagatgtcatttttgtttttgtttttttgaaaattggaaacgctgaagaaagtgtgtttgattgaaaaaatttaaaaatgattttatgaaaaatgaacatatataaagatttaaaaaaaaataaaagtttttttcgtttaaaactgaaaaagttcaaaataagggtttttgactttaaattttaaataatgaataagccttggttcaaacccatgtaattttttttctttttttacagaaattactaaacatctaatctcttgcctcggtttgaagtttctttaaaagggttaatatgcaaatttcccactatactttaagtggaaattgaaaattgccactatactttgctttgattgatatttgccattggtcttatgaaa

SEQ ID NO: 10076 - DNA, 650 bp, Gossypium hirsutum
ccactaaacccctctgccaaatcccctctctaatcccttcaaatcggctaactctatccccctctcaaatccctaaaatctctccccttatccctccttaatccatgcatttgactgattcaaactctcttccacagagtttcgttcagctttaaactctagcatgcacaaagcataaaaattagcatcatatttgccatcatagggaatagaacccaggtcccccaaccacttacacgccacctttttagctccttagtggcgtcacttagccactttaccaggggctcttttgtgatacattttacccacaaattttaataagaccacctatccaaggcccctaacttcttaagtccaaaattcaaaaattctaccaggttttggccaacacatgggccttccataagcccatttacatattcaaattatgaatttcacaaccaaataccaaattttaaaaactttaccaaaatatcaagaatcgtagaaaaacccgaaaatcaggatgttacatgtgactacatgtaagaccacgtctgggacgttggcattgtacgatttgtgagattatctgagtgtcctatccaattctgaatggttcatcgggaaaaggtaaatttagtttgaatgtgtaaaatgagccatag

SEQ ID NO: 10077 - DNA, 579 bp, Gossypium hirsutum
actagaagaatgactcaattagagccatcaaagtgtgggtccatatccaaaagttggaggcaaatcaattttagccatagatgtagcccctcattttctctttcaattttctaactctttttttattaacattatatcaaaaactaagtatattattaattaggacacgtggtataatggttgcttatctcatctcttaattatgtggttggggttcaatctttatttatgggagccatccgtttacttctttagagaacacttacagtaaaaaaaaataatccttaccatccaatatggatatcttaattaccacaaaaacattatttgtatccaatttttttctttattaaattattattttcatacctacatccacttgaattatagacgcttcggccacacttgaaactatctataaatagccccacaccacacccctttcctccactctgcattaaacaactctaagcgcataataacatccctattgtgcttagcaaaaaaataaaaaccccattgtaaaacagcctcactttgaaagattttaagagaaatggcaaaattcccagtgatcaa

SEQ ID NO: 10078 - DNA, 536 bp, Gossypium hirsutum
tgtaggatggttaaatttcaatttgatccctatatttcgttcaaatttgagattcaatctatatacttcaattttgacataatttgatacctcaacttttataatgtcattcgttagcctactttattctaattgaaacgataatgtgaatttttaagaattgttaggacatttaaaattctttattaaattcaggttcgttacattaatgttattttttgttacatggataccaagtttattttattttattttcaaaatgccacactaatagaaaaaattctaatagtattagcaaatggacctaaaattttaaattcgagaagtagagagattaaattcttgaaaataaagatatggagattagattctaaatattcggagagtacaacaactttgagtaaattgtaacatttaaaattttacattataatttagtcaagaaataaataattaacccgacgtgaagcatggatggaaaccatactagtttaagattatttttagctttaattctacccattcttaccgcttta

SEQ ID NO: 10079 - DNA, 577 bp, Gossypium hirsutum
  misc_feature (490)..(494): n is a, c, g, or t
  misc_feature (497)..(500): n is a, c, g, or t
  misc_feature (504)..(506): n is a, c, g, or t
  misc_feature (524)..(527): n is a, c, g, or t
  misc_feature (529)..(554): n is a, c, g, or t
  misc_feature (556)..(574): n is a, c, g, or t
actttcggccttatcatcaccatttttaggcgaagatgacgatgacttgtggcgtaaaacgaatgttttacctcgacggtcgagatctccctcttttccaagagcatgtaaggatgacatatccaaaattcgcaaccctgaaaaaaccgagaagcctgaatggtggctgaggactttagcctgcggtccatatctactagctttgcatatttccgatgccggatattttcttcatcccttcctagaacattacgaaatgttcggaaacttgatttatttcgtcccgggagccataaacagattacctccatggttctcaaggatatattgctactttggatatgctggaattgtgaagaacaaagctagtagatatggaccgcaggctaaagtcctcagccaccattcaggcttctcggttttttcagggttgcgaattttggatatgtcatccttacatgctcttggaaaagagggagatctcgatcgnnnnngtnnnnagtnnnttgtgtgaccctccactnnnntnnnnnnnnnnnnnnnnnnnnnnnnnngnnnnnnnnnnnnnnnnnnnctt

SEQ ID NO: 10080 - DNA, 623 bp, Gossypium hirsutum
atagaacgaatcacacttttaccactaaactatacccgctacaatgcgattattgtatttattgtatatttattgtatataaatataaagggaccctttgtcaaacaggggaattgggcgtaatcaagataggattacaagataggagcctaaaaaatcctgaaaattagggccttgccaccttttgaccttttgtcagaagacttgtgttataggatttttgatagacaggattcgacaaaaggacttagtcataacataaataacataaaaatggattgtgcaaaaatccatagttttttttttattatttattctagttattctagtaaaataaaaaaaaaaatggaaataaaaagaaataggaagaaagaaaaagaatagaaataatattttgattctatatcataggaacggaaataggacttcttccgcttctgattgttgattcaatgcaataacaagatttttttgttacaacaagccagatcgcagaatcatagaaaaaatgagttatttgagttgaaaataaaaaaatgagcccggccgggtactgcccaggccggtccgtggaaattggaaatttaaaagtcccttttgcgcgaaatcaaacgaatttccac

SEQ ID NO: 10081 - DNA, 620 bp, Gossypium hirsutum
  misc_feature (15)..(15): n is a, c, g, or t
  misc_feature (17)..(17): n is a, c, g, or t
ccttctcttttctananaaaaatgcctgattggtccgcaatcagttactgatgctttgttgaatgaataagaagcttttttcaagattatttgttccttccggctcactcctcaccgaaaccagaaggcacactaccgggaaagtaagatagcttctcctctgattataaatcaaataaacctcccaaaaatgcgtgttgtactgtattaagggaggcagtgaaagccctatatttatatatatataacgatataaagataaaaagatagatggtcatggtttattatatattggcccgggagcggagttccgtgttccagaaatagcgctgttagttacagcggatcgagtctaaggctctgtgactaacagcgtcttttacaattataataatcattggtaaacattggatttaaaaaaaaaacacacacattccaacggatggataatgaataataagaaagtgttgggcaggcccatctctaagacttgcgaatcaaaatcaggcttttctaaaggggttgacaggaggggtccggtactcgcttagggcaaagaggttcactcaacaattaaatatgggcaggattatgaggagacgttcacccctgttgctaaa

SEQ ID NO: 10082 - DNA, 558 bp, Gossypium hirsutum
ttccactacaatattttttatgccttaattaacttagtttaattaatttaatctagtttaattagttttaataacttattaatatacataattttattataatttaaactaagtgggacaaccatcatcatccactatctataatttaatattagtttatttaccattttggtcttttggataatagctatctaagttctcaagctttttcttaattaaaatttaatagtgattggacttttacaatttaatctctaagctttaattaattattttctcagttaaattacttatccgaacattattatattctcataataacttcgttaatattcctattttatatttacgggctctgtttacgaaaattgggttccgaaatcgtatttttcaacaccaaatgttgctgctacagtttgcctcttttgttgccctttgtcgctaactagtctacatcacaattgttttttccgcctcgattgcaaaagttcattattcttctccctcgattctcatcacccataagggaaactttaaggatcgaagtcactcgtctat

SEQ ID NO: 10083 - DNA, 631 bp, Gossypium hirsutum
catcatgatagcaacgagtggtgccacaacatgatgcgattgagatcacatcaaagtgattcgtgttgcaccgaggaaggagttgtgcacacgtgtaaatcctactaacacaagaaacaagaaggtgttagataacgtaacggaagaataaaagcaaacaaatgaaaacctacagctaagaatcaataaaaattgctgaaaacagaaaacccgaaaaactacggagtaacttgacaacttcgttcgaggtgttcccgatctctaaaaatcacaaaattaaatctggaatgtccttaaatattgaatttttgatctggaaattttgggctccaaattcaacccgctgaatctttttttaaatttttattgaatttcgtattttttgatttttttgacttttttgactgatttttttgtgggaataatttttttatattcaatagcagtgccaaaaatatgtatgtaaaatttcagatcaatcggataacgtttacccactgaaatgaattttttttgaacaatttttctgggtaaaactgctgtttatgctttaaaaaatagagatcagtttagaaatcaaccaagaacacccaaaacgcccaaaatctgataccaaatgatagaggaatgc

SEQ ID NO: 10084 - DNA, 513 bp, Gossypium hirsutum
agtggaatgccatcaaatgcattgcatgagattaagtgttaagaataccaacttttccacttagaagcttgtttaagagaattatacacacccgtaaacaaacatttgctgcgtagtagtcagaagtttggaatgaatcatgtatgctcttgtattctgacataatggaaaatgtgcaagtaaataataccttaatggtagtatttttaaaaaaaattaaagtaaaaagacctctccagtccctctcaatttcaaaattgagcaaattagtccctctcgaaaaaattggagcaatttaatccctttcaatttcaaaaaaaagcaattaaggactattaatcacggcatcagtgtcttccatcaatgtacatcattttgattggtataataacaaatttagttttcaatttttatatattgtcattttggccttaattctgaaattttcaacaaattcagcctcaacatttacacaaatgttgcgggataaatttgttaaactaggaccaaatg

SEQ ID NO: 10085 - DNA, 547 bp, Gossypium hirsutum
ttttgaaccaacctacttgggattgatcaaggtgaagctaaaatcccttagttttttagccaaatctacatctttagccatagagcttgtgttacatatgttgctgtccttgaaaaattctccactaacacctttaacatgtgggtgtaatgcaacataacatgtagtggcagctccctacaaccataccaaaacaaaagtaatacatggacttgtgcttgtatccatcttctaaagaatctcacaacaatttgtaaagactaatatacctgtggaatacttttgaggaaatattttccaatcaaatgacaaaagcctgctttgaggaaatgtatatgtgtttttagactcgagcgtaagtgtttggatacaagtgaactcgaagggattaccattcatgcaatgatcgtggcgcaaaatattggtcagtattcctccgggatgaagtgaatttgctgtaatctccaccccatcttcctgtttatgtacaacagaaaaaaagattcctcagatctctcacttggcgtgttaatgccgtcttaactgt

SEQ ID NO: 10086 - DNA, 671 bp, Gossypium hirsutum
caaatttatatggcgaataaaaaaaaacggaagtaatacaaaataggtgattgaaatacagcgcaaaagaggaaggacttatgttagaaatatccctcagtgaccaaagcgcggatcctgtccgggcatggccgggtcatcgggtcacagctcatggaacggtgtcattttgtagccattgagattggcttaaaacgacgtcgtttcatacatcacatataaacaaagattaagaaaccctaatctaacccttagccatttgaaaaggcactcagccgaaccaaaaacactccctttctccctctcattcggccgaacccagagaccccctccgactgccctccgaccttcatgtttggtcatcggttatcacacaaaaggcctaatccggccccgtccaaccgtgagtctaaggttccgttcgaaagccttagaatcctcgccccaaacttcgattacgacgaagtaagagaggattcgagggaactgaaatggaggtaagcctcttttctttatttcttttataccccgaataaaaaagcaagaagagaatgagaactaaatcggaaaacaaaactaaaaaggaaatcacctttttaaaattttctattcgaatgctttctattgcgttttttttgtgattgtattgtgtctgttcgtgtgtgaaatat

SEQ ID NO: 10087 - DNA, 666 bp, Gossypium hirsutum
cccagtaagtggttacatttgcattttcataccctgtactatttcatatcaatcaccaatcccatttcattttatttaaatccaattccatttcatttactagccatgtataccaattttatcaacattaaaatcatgttcaaacatagttataatgcgacaccctaaagaggaccaagatggaccggcatgaattcaaagcgttacattagccacctaagtgactcactggctaactgtaacacccctaacatgtatctgtcatcaaactagggttatggagcattactggagtttttaattcaagcaaactcaaatctcaaacatttcaaatcatatagataatcatataaaaactaattccaaatatacatattgtcccttttatgacccttcgaggccctaaaatgatattaaaaatattagccacctaagagacacgcccgtgtcttaggctgtgtggacattcaaagtagggacacgtggccgtgtctgtgctcatgtaactcactgacttgggtcacacttccaagccacatgctcatgtgccaggccgtgtacccttcgaaataaccccacatgcctatgtgccaggctgtgtaacagtctgacttgcaactcttttaaagttgtagggaacacataacagtttcgctaggtcgtgtg

SEQ ID NO: 10088 - DNA, 589 bp, Gossypium hirsutum
gcaaaccaagagctcaaacgtatcctagagaaaactgtagagtcaaataggaagggttgggcgataaaagtagatgacgctttatgggcctatagaactgcttttaaaactctcataagaacatctctttacaaacttgtttatggaaaaagttgtcatttactgtttgaattagagcacaaagcattctaggatataaaattcctaaactataatcttaaacttgcaggtgagaagagattcatgcagttgaacgagttagatcaatgaggagagaatgcttatgagaactcatgattatataatgaagcgacaaaacagcaccatgatgctcatttgaagcagcccaaacaattcgcagcaggagatcttgtccttttatataattcaaagctcaagttgtttcctagaaagaagctgaaatcaagatggtcaagtccattctagtacaaaccattttcccatatggtacgatagaggtaactcatccagaatatgacacattcaaggtaaacaatcatcaacttaaactttatagtggtgaggattttaaaaatgatagagatgagcttcagctccgtaaaccttc

SEQ ID NO: 10089 - DNA, 646 bp, Gossypium hirsutum
cagaaccttctttccataataatcggaaaacatccaagcaaagtgatgaatgctttttcacttgtttgccaacttactttttttttagcttttagagacaaacaaaacatgattaactgtttgttagactcgtctgattaaacacggtttacgccatataccatatatgataacaaagaaattctccaatttgatccactcttgtgctttctttctatgtgaacaacaatagttaatatattcaatttcacgaaactccgataaaattactgcaaaagtttatcgagaattaatttttttatagcgattttcatacggaaaattctaattcaagagtttgagaagtcattgctgggcttttggtagttaataggttttgaatgagcttgtcttaagttgaaagagaggagaaattgagatttttggactaaattgcaaagttgcttcatctaccatggattattgggccaaactagtgagatattaagggttctattcccgatacatggagatacttctttcttttatttggattaataagggctaaattacaaatttctccaagaataggatctttcaataaacaatcaatacaagaagggattgagccactttatttattttgggaaagcgatgtgtactccag

SEQ ID NO: 10090 - DNA, 628 bp, Gossypium hirsutum
gtgttcgcatgagaaaggtaaaattaactttaaaaccttggtgaaatttatatttacaacattcaaggattcaacaatgcaattttctctctgttattgttttgtttttaggaccaaattcttacaaatcaaatcgaagagctaagtcttaaggttagaaaaatttttgctgcattttcatgttttttcgctgattttcatctatagagattttctctggtttgattttggtttcagtccatttactgaaatcactctaatttggggtaatttgatcaatgatgttattaatagattcaaattgaaaacaccattaattgttgttattaaagtgatgacgggggtttatgtttgatccaaattgaaaacgaaataataccgagttattttattgactgaacattctagttctattccttttactatactaaattttagggtttactctttttactttaaattaacatatcgtggtcttgtttttatattactattaaactttcggtaatgcaaagtagataattccatattggttgaagaaaatcttccaagcgagtttaaatatagctttgcctcttatctttattgagtaattaggagttaagacctaacacacatgcgttgctac

SEQ ID NO: 10091 - DNA, 656 bp, Gossypium hirsutum
gcagtatagtggggatgtatattatgctgactctacttttgtagtcactatatatatgtataattatgggtggcattttaattatttggttcatcaggttcttgatatgcaagcttatgaggctcggcaaaaggagtatgcttctaggggtcagaggcatttctatttcatgacattgaatggcagtgaggtttggatgatatccttttccattcatattttacaaacataatatgaccatcaactagcatacaactctgatagtaagaaggcagtagcaagtgaagaaagtttaaccatctcctgtctgtatttggtattgttaatttaattattaaacgcttagtacatgtatgcgtacatagctggaaacatagttttgtgcacttatttaaaaagtagcttttatttattcttcatgataaacccttttatcactgaaagtgctctcgagaaacaaaggatgcttccttgcagctttagctttgcctttaaaattcatgctttatatgccattgcagcaccatgtttgctcataattgtaattatccatttgtcctgaatgatattttccttagttttctcagtttattttgtttatcaataaaatccagtatgttgtatatttttttggtcaatttattacttcgatggtg

SEQ ID NO: 10092 - DNA, 642 bp, Gossypium hirsutum
gatagatgttaacctcttgcctcaaagcctcttgaaagagagctaaaatatttctaatagcgatacaacttccttcactagcttctacagagaagagacagtcgtctgaaaataggaggcggaatagggtggtagaatatctattatacgggtgaatccaatgggggaaggaaggcctcttggacaaaatggatatattgcaattttagaacctttattgtttagttatacaatttaatccttttaacagataatttttaaatttggcccctccaacaatttatattcttatacaatcccacaaccaaaattttctagattcactcgatttattagttttatagtcattaagaaagccttcatgacttactttatcaaggagaaataagagaacgttaccactgatggtgaatagataaggggaaagtaggtcttcttggtaggggtgagtattcgatcgagtcgggtcgaatcaagtaaaaacattcaagttaattgagttgaggagtcctattttagcaaccaaatttaatttgaaaatttttcaaatcgaatcgaatcaagtcaaaaaatttcgagtcaagtcgagtcaagttaacgaatcttattatttatactaaatgttgtgtttacatggaccaa

SEQ ID NO: 10093 - DNA, 568 bp, Gossypium hirsutum
attatttacctgactcaggttgaaccaaaattggtgcttagttaatgaggctttcaattgatcaaaactctgatgacactactcggaccactcaaactggtcatcggtgtagcaatcatcgagaatccttttacaaaatgttgataataaataggtaaccccagaaagcttctgacttcgaatacattcattggtggtttccagtcaacaactgttgaaatcttgctagaatcaactctaataccttccgctgaaacaatgtgccctaaaaatccagcttatttgatcgaaaactcacatttactgaatttagcatacattttctattctctcaaggtttgtaacacaatcctcaaatgctcagcatgctcagactcgtctcttatatagatcagaatatcatcaatgaacacaactacgaatctgtctaaatatggtctaaatatccggttcatcaaatccagaaagtctgcagaagcattagtcaatccaaatggcataataagaaattcataatgtccgtacctcattctaaatgcagttttcggcacatctgaatctttaactc

SEQ ID NO: 10094 - DNA, 500 bp, Gossypium hirsutum
tgatattaggctcccgtcatttgtgtaaggcgatttatcatcatgggaacacacattgcaggtttccccaaggacacgtaccaaaaagttcggaattgggaatcgtcatttgtcacgttccaaaatcggattcacgtggggtttgtgaaaggtggcgacttatatgatatctttaactctttgggcttctaaaacgtcaaattctgttattgctccttgtattatgtatgattgtagatttagtctctctctctatacttttaagttggtccattctaatctctacatacacatatcaattaagcgctaagtatggattcaaattattataaaactaacgaactaagaattagaataactacgaattgaaacaattcaaaatacgaaactaactaagcgaactaaaactcattcatgacaacaactcatggtggatttaattatgcacggttggtctcgaacctgagtacttaagacctctcctttaccaactctcaata

SEQ ID NO: 10095 - DNA, 459 bp, Gossypium hirsutum
cgaaataagctaaagccaaaccgttcgttcaagctgtgagcatagaaatcccaagtcagcaaatgaacttctccatgttttttagtgtaaaaaatggcgtcaatctagtgctcttccctctaggtgaagcatcactattctgaccttggcattgttagcaacaccctctgcctcaaaatgttgttctaacttggagcacaatcctcgaaagtcagtcccattaaacttggggcattgaagtctatgagagtgaggattcccatccaaactactcgaatgggaaggaggacacatgtgtcccaagtctagtactgtaggagaaataaggggttctctggaaggaaaaccaggtggatcaccacccaaaattcccttccctttgtcatgtgtagccatgcagttgaatgcaaaagttggattgcctaaatactactcgcctggaactcagacttcaactca

SEQ ID NO: 10096 - DNA, 693 bp, Gossypium hirsutum
tccatttcagaatcaaagatgagtagtatgattttaggttctccaaaactagagtcctccttatatttcttagtgtttgtcgtttaagaggtctgcatattatggcatgaatttcattttacattatttaagactttgaatttattttggttgttgaagtatagctgctttcttattttagtacactttttttttatcttaagataaaagaattattcggcaataattttggatccaaaagttaacgatttaaaaaaaatgataaattcaactaactagaatatgtcacgtgtgccaataatttaaccttgacgatgtgattgttggttgaccaacgttgaaaacacttctctcatgaaaaaaaaaaattaaatgtgcttttcaagccaaaatccatgctcaacatataattttttaagaccaattaacttatcaaaccaactttcaaatcaaactgaaagattgaaaaaattttaacatttcatttattaaaaaccagtttgagtgtcaaattatcatattcaaattaaattatataaacaatttacattaattttttaaaaatattaaaatttatatattatatatcataatattaacaatgaattatcatatattttttataaatttttttattataagtagacctgctcatgggtcaggccacccgtccaaagcctaaagacctgtttg

SEQ ID NO: 10097 - DNA, 1160 bp, Gossypium hirsutum
  misc_feature (301)..(301): n is a, c, g, or t
  misc_feature (413)..(417): n is a, c, g, or t
  misc_feature (520)..(520): n is a, c, g, or t
  misc_feature (597)..(597): n is a, c, g, or t
  misc_feature (606)..(606): n is a, c, g, or t
  misc_feature (644)..(645): n is a, c, g, or t
  misc_feature (676)..(676): n is a, c, g, or t
gccaacagtttgatacaagtgcttgcatgattaaaatctctgggctagctccatttcagaatcaaagatgagtagtatgattttaggttctccaaaactagagtcctccttatatttcttagtgtttgtcgtttaagaggtctgcatattatggcatgaatttcattttacattatttaagactttgaatttattttggttgttgaagtatagctgctttcttattttagtacactttttttttatcttaagataaaagaattattcggcaataattttggatccaaaagttaacgatttnaaaaaaatgataaattcaactaactagaatatgtcacgtgtgccaataatttaaccttgacgatgtgattgttggttgaccaacgttgaaaacacttctctcatgaaaaaannnnnttaaatgtgcttttcaagccaaaatccatgctcaacatataattttttaagaccaattaacttatcaaaccaactttcaaatcaaactgaaagattgaaaaanttttaacatttcatttattaaaaaccagtttgagtgtcaaattatcatattcaaattaaattatataaacaatttanattaatttnttaaaaatattaaaatttatatattatatatcataatnntaacaatgaattatcatatattttttataantttttttattataagtagacctgctcatgggtcaggccacccgtccaaagcctaaagacctgtttgaaaaatgagaggatttgagtaaaaaatgcaagacacagaaaatgagctttggtaaaatttaaggtccgttttctctatgggtcgggccttggggcagattttttgacctaaccccaaccccaccccgaatatattatatttaaaaaaaaaaattatattaaatatatatggtaaataaaaaagtatatatataaattaatttatttttaatcactaaccccattaaacattaaaccctttaccccaaacccaaaaaaaaaaatttaacaaaaacccaacccaaattaaaaattttataattttttttaaaccataaaaatttttttattttttttgtttttattaaaaaaaaatttttttttttatggtaagatttttattaaaaactttttttggggtaaaaaaatttttttttttg

SEQ ID NO: 10098 - DNA, 664 bp, Gossypium hirsutum
tgtgtaaagcttcatctttttcgatatataggttttgttccattcttattagtcttttctcttcatccaatatcactttcgagtttatcaagtgataaattcttctacgtttatccaaaagaaaaatatttgtatcaaataaaaaggggcatttgctgataatccaatgcactaaattttgaggggaaaaaccctagtatcaatcaacaaatataggaaaaataaagcaaaggaaacttcaaagaagcaaggctcaacttacaagttgggtctacgtaattgactcttcgcaaatatagctagatataacgatttctatttaaattaaatcgatgctcaaatcagtcaaatcatcaaaaattgatttatcaaattttgtcatcaatatatttgtgtaattatatcactttaagagtaaatcattatgaattcgataagttttttttaatatataattgtaatttgaattcagattatttttgggaagataaacccctgatcaatagatcacaacttgataaatatatttgatagtaaataaattttgacaaaaaaaatttaccaatgtcgataattatactaaaatttttaaattgaagaaataatttttagtagaagactatcttcaatgctagaaaatgaagccgattagtaagacttggga

SEQ ID NO: 10099 - DNA, 645 bp, Gossypium hirsutum
agtatatgtagcagtaggagagcagacgcctgtgagtgtataaaagggttcatatcaaaatcacaagagtctaagaactgtctaagagaatcaccactagactgtcaaaagggagaaggctttacaaggcttgatggggttaaagtgccggatttgttgaaaattgagttgaatgagagcttgaaccctaccggatgtgaggctgaatgcttgaagaactgctcgtgtacagcttatgctaatgtgaatgtaagtgaaggccgcacgggctgtttgatgtggtttggtgatctctttgatattacagaagtttcagacatgtaccgaggagaaaatgtctttataagactgtcagcctcaggtctaggtatgaatactagctacgcatgttctcgtctattttatgacatatatttggaatagagtaattcagtgtcatgtctatattcatcatatgtgtttctccatttttcaaaacaaatgcctgatttataacttgtttcttaacactgtgtttttcaggattaacccatgattcaaagaaaaagaacagaatggctatcatactggtgtcgatcatttcaagtgcaattattttgggtctaatatcattcataatttggaaacgctttgaagtcaagcatc

SEQ ID NO: 10100 - DNA, 663 bp, Gossypium hirsutum
cccatgcaaatcgtatcattttcaacaaagaggataaaagtactatggaggctattgtaataggagttggattgcactttgccccttctactcaaaaaatgagtaaattagttcttgtatgttagatgaaagaacaaactaatcattttgtcaaaaattctatccatttctaatgttaaaaactggttcatgtatgttagaatgaggtacatgtggtgtgccacaagtaattgtctagttattctgttagccatgccagtttttaacaatagaaatagatgaattttttaacagaaataaccaattggctctttcatctaatgtacaaggactaatttatctattttttaagtaaaagggccaaaatgcaatctgactcttagtaaaaggatattcacggtacttttactcaacaaagagtatacgcacgcccgcataaactaaatggtaatgtatacataaataaatatattaagaaccgtgaaatagaattttaggtacctgaacctgaggggcctggctcggaggtcctgcatatcacaaagagaaatttattaaatctctgaacaaaatatacaataccggagatcaaatcctgacaactttgatgattgtatgcatattgttttacatttacgaggccgcattgagattggatgttaa

SEQ ID NO: 10101 - DNA, 636 bp, Gossypium hirsutum
gttcttaaggctggaggaagcatcctagaatttcctaaatttttctggaaatttcagctcatttaaaggtttaattaagtgaccattcaactactttttgaggccattcggttgaccatgttttaggctataaataattgttaaatttcatttgtaaaaggttagacatttttttagacttttcacttaatgaaactttgttaaactttcatggaatttgtgagatttctttctctcatatttcgttgaggacttcgttggcttatctaggaagcctagtggcgtcaaccctgttcttcactatcccaaacttatcactatcaaatagtgtggcgttcacccatataccgaggttcctactttgctaagtagcgggtcgaggtttatcactttcatcctccaccttgaaagcctataagcatttgggtcgatattttctaatattggttcgtgcttgttttcaagaacccttttcttccatatccatcatcgatttacttctttcactttcccttccaatttagccgaacctatgcatattattcttatccataaaccatcatagaaccattatacatagcttccgtcctattttttcatcaacttcatttcaaaagtgaattgaacgaaactttc

SEQ ID NO: 10102 - DNA, 550 bp, Gossypium hirsutum
tctttgatttttgcagtttcaagttcaaagctttctcacaagtaataatctttaaaacccatttttttttaaattattttttagctaatatatttgtattatttgtagcaggaaattgctgaatctgtcttgtgtgctgtttagtactgtttttgattattaagatgcagaagccaccacagtctatagatttcgctttgaaggagacttcaccgaagatcggtgccggagctgtgacgggcgataagctatcgagcacgtatgatctggtggagcaaatgcaatacctttacgttcgtgtggtaaaggcgaaagatttaccggggaaagatgtaactggtggctgtgatccttatgttgaagttaagctagggaactataaaggagttactaagcatttcgagaagaagaacaatcccgaatggaatcaagtgtttgcgttctcgaaagaacggattcaagcttcggttttagaagtatatgtgaaagataaagatgtggtggccgatgatttaatcgggagggcattgttcgaatctaatgagatgag

SEQ ID NO: 10103 - DNA, 667 bp, Gossypium hirsutum
gccaagttccaacttggaaaatgttgccattcccttttaaccaagcggtgattcagaagagattactcaccttcaattcaagtttatattctcttatggacactttataattacatttttgggccaaatttatttggattttttaaaattcgaaattacttttcgggtgggatacttaacatgttagttacatcatttataattaaattagaattattagggtatttaatctcattcgctcctttaacttctcttccggtgctagtctggtacagtgttttctgatccttatgctaacctaatttggcagtttttaccgcttatccacaaaaactcatctataaacaatttaacacaatcattccggataatacttgcattctctattttacctcacgaaaacggatttggatttgagcaagattcaaacccaatctcattttcaaaatccgagatttcaagaaaaacacagaaaatttttgttttttttatataaaaaaattagaaagtcaaaaattacatttatgtttgatttgtttctttagttgctttgtcttctttgattgatttgttgttaaaatctaaattgtttattattcttcatcatgtaacacgggagattatttctgctaaacaatttggtaagctctttacccctagatgttga

SEQ ID NO: 10104 - DNA, 604 bp, Gossypium hirsutum
tggtagctaaaccttgtactattccaatggttaccaatgtgtatcttacaaagatgatggtgatttctttgatgaccctaagaggtatagaaggatatttgggaaatcatattatctcactagtaactccttcggatgttgcatttgttgagactattgttagccagtttatgtccgcatccattgtcaaacattgggcagccctagagcagatcttatgttacttgaaaagagctcttggacggaacatattatacaacaatcatgggcatactcgtatcgagtgttttgcaaatgttgattgggccaaatctaagatagacaggaggtctactactggatattgtatttttgttggtggaaacttagtatcatgaaggagcaagaagtaaaatgttgaatcttagtctagtgcagaattgaaatataaggctatggcacagtctacttgtgaaattatgtggatatgacatctgttaactaaaattgggttggagtattcctcaccagtaaagctcttatgcaataatcaagtaactcttcatatcacctcaaatccattttatcatgaaagagccaaacacatcgagattgattgtcactt

SEQ ID NO: 10105 - DNA, 562 bp, Gossypium hirsutum
  misc_feature (40)..(40): n is a, c, g, or t
  misc_feature (536)..(538): n is a, c, g, or t
  misc_feature (541)..(542): n is a, c, g, or t
  misc_feature (544)..(544): n is a, c, g, or t
  misc_feature (551)..(555): n is a, c, g, or t
  misc_feature (557)..(559): n is a, c, g, or t
tacatagttgtctaggacccaagacgtatgaagagtgaancccatattcagatgttacaaatcctagatatagtagatgagtcttgagttcaaggtaccaagcacaaggagcttgcttgagtccatagattgcttttttaaaatggaaaatgtgggaggggtatgccttgttttcaaaccccggaggttggaccatatagacctgttcatcgaaatggcctgggagaaaggcattgttaacatctagttgtcacaaagaccaattgaactatatgacaattgagagcacccaacgaacagtagtgagtttgactaccagattgaatgtaatttggaaatcaacactaggttgtcgagtaaaccccttagccactagtctagctttgtaacagtctataaaaccatcagctttcctcatgatcctgtcaaccactttcaagaaacaatatttttagtaggatcgtgtggtaccaattcccacatttggttttccatcaatgcatcaaattcatctttctctacttttttgccattcnnnggnngnttattannnnngnnnaaa

SEQ ID NO: 10106 - DNA, 626 bp, Gossypium hirsutum
tgcttattagatttaattaatcgtttgaattgacatagggatatgcaagagattagttcaatttaatgagtatgtatgtgcaataacatgtttggttattagaatctgtttagtcgtttgaattgatatagggatatgtcaggagatgaatggatttttgtatgtgagtatgttcagcagttagccaattactgagttgccgtgaatttattcgtaacaatgtaaacatgagtttaattattctaagttaaaggaatataattaatccaacacaagtatgttaccttgattaaatcttatttgaaatcgtgcattagaactcctttgttttattttaattatttacttagtttttaaatagtttttgaccatcctttaaaaccaaattatttttacctcaccaaagtgttttacaattaatttcataaataattctttttacagtccttgtggggacgataactcaacattacttgtcactttattagttgttgtgattgtgtacacttgcacattttttccgttgttccactaaactggcattccttattatgaaatttgttacaatgtttacatttaggtttgggattaccaacactacccacaatggtcccagatggatatga

SEQ ID NO: 10107 - DNA, 622 bp, Gossypium hirsutum
  misc_feature (389)..(389): n is a, c, g, or t
  misc_feature (566)..(567): n is a, c, g, or t
ataaggatacttcaaaaaaaaggagtggagcgacattgctttttcgtaatatgacaaattttattttccttttgtttactcaaatttattacgtttattgcaatgttgatactgcttttacgtgaaggaaaatccctattctctaaaatgttcatgctttgttcccgtaaaaatccactaaaacgtattagcgaaacataattcttagtctttttgctggttaaatggcttttaaacgtgcattactgagacattcaaatctgtatggctgcatccatggtccttttgcttgactggaattagggtgaagtggtgttataaatggcacaaagcgcattctaggcaccattaattaataaactcaaaagagttgtctagattattcatcnatacctgcgatattttcttttctttttgtttggccaagatgcatgattttatggtttcatgtcttaaagaaatcaaagagaacacaatcatgttgccttttttccacgtttaaaccctaaagtgcttttgttgtctggtgtagctgtgctcaccttaaaaacactggaacggactannatttctacagttatatatacggatgtgcacatatgcatacctgcgtccttgacta

SEQ ID NO: 10108 - DNA, 557 bp, Gossypium hirsutum
  misc_feature (518)..(521): n is a, c, g, or t
taaagcacacaaatcacacttttatatattattccttacttgctttcaaaatatttctcttttaaaatccaagttaaaactctattattgtatatggtttaaatggtggctgtgtggaggttggctaaccctaaccacatctttcctccatttttcttcttcttgagttcatgtctgacatcaggcatcttgtcaggttttgaattttgcatttcaatgaaaagtgggggtcattttatatagcttttttttttctttaaaaaatttctcattttcttttatttgatttcttcccacttttaattaataatttcttttttttagaaaaagggggttatcagcaatcaactcgaagtgattgatgttaatctaatcactaattaatagctagaaattaaacttatcgaaaatgaccaaaaccaagtaaacttactttattctcatgtggacaccgcttttattcaccttatattaatccatttatgaatgatgattaaatttgtatttgatgataatannnnttaaaagtggaaaggagttagaaatatgtatttgaa

SEQ ID NO: 10109 - DNA, 466 bp, Gossypium hirsutum
gctgcgactcaggcattactcaatagaggtgcaaggcttacagaagtaccgaaacaaccacaatattcaccactgccaattgaaaaacaaattctagtcatttatgctgcaattaaaaaaaagtttccctcgttctggtttttaggagtacttaatttttttaaagtttttctatttattataagaataatcatttttcttttttggctatgttccatcggcggggacttagtagttttttgcgatggagtgggcggtgtggatgggccgccttcaccacccgttgtgcggattccgacagaaccgatgggggctccggaatttcaccccgccccaccggatattccggtattggaccagcctctcctcccgacgagccaaagggaacacgaactctatcggagatttcttgttaattccctgggtcaagatccgagtctggaaagaatctcggagactgtcgaag

SEQ ID NO: 10110 - DNA, 611 bp, Gossypium hirsutum
ggaggcattatttgtatggcgagacttgccgtatattcacggaccacaagagtttgaaatacttgatgactcagaaagaattaaatttgagacagcggagatggttagaattaattaaagattatgatttgattatcgactatcacccgggaaaggcgaatgtggtcgccgatgcattgagtagaaaatccctgtatgccctgagagccatggatactcgtttgacattgcttgatgatggttcagttttggccgagctggaggctaggccaacatttctgcaggaaattcatgatactcagcttaatgatgatgacttgcaagcaaaaagggctcaatgtgagtctggtgttgagtcagatttccgaattagtcctaatggatgtttaatgtttagagatagggtttgtgtacccaaagacaatgaacttattcggaagattttgcaagaagcacataacagtcgtttgtcagttcacccgggaagtaccaagatgtacaacgatttaaagaagatgtactggtggaacggcatgaaaagagatgtttctgaatttgtatcgaaatgcctagtatgtcagcaagttaaagctgaacatcaagtgccttct

SEQ ID NO: 10111 - DNA, 619 bp, Gossypium hirsutum
ccacagatcctctccgagcaagaattccgccgtaagtaacattgcgtgttctattatctaattcatcttctttttgtatgttcctctcttcgtttcccttcatatcttttgctcgtaatagaccccctggattttcatttcccacaccacgtccaagaccgctaaggcagccaagtccagctttagcagcacgacctttcttaacatgtacatcacaatctcaagggatggctggatcatcagtggcactggaactaaaccattctggttctgcgacgccttcacatgcaaaacctggtttgaccctttttctccagtaatttgcacactacactattaattttccctctttctcaagtctcctttaggaatttctaaattactactaataatatggacagcattaatcgtagaataatgtagttaaattttactatcactgtgtctttcatcaaaagttataataaagttgccatttcatcacagatccagggcgtagaaatcggctgaagattatcacaaagagaaagagatcagaggaaagcaaggatggaaacaatgaggaaagaagcggtatcgtcatcagggataaacagccgccaagtaaagacagatgcaa

SEQ ID NO: 10112 - DNA, 518 bp, Gossypium hirsutum
gctagtctccctgcccaatcggctctcgcatggcggttttcttaaaataaaaaaccaataatattaatttttaattatttaaattatttaattggaataacattattttttattatttaattattttaaaaaaatctaaaattatcacttaaaaatcttccaattataaattccgactgattaaatgataaaacaattattataaataatattgttgacaacattctcatgttcaagctatagttaatgtggtttataaaattttaaaaatattaaagtttttaatatatttaagaaaaattagtaatttattatattttatattgtttttataatttataagtttataaatttcttatttttaataatttttagagatttaaatatttttttggaatttcttttttatgtattttttttttttaatttttaaatttttaaaaatttttcaaatgactataatgataatttcattataacattgccccacaatgcggggcaacgaatgatgaacaaaa

SEQ ID NO: 10113 - DNA, 665 bp, Gossypium hirsutum
gctggttagcactcctattctccatgacttctacaactacggccccgacgagcccagatacaatattctgctcggtgatttcttgcaggtattttacatatgcatatttaaagtgttcttctgcattactacaatgtgtggacttcattgattcttccgttaatggcagtgtgttgcacaatgcggtgcgttaattttcttctggggaatgaagaactcgataacaaagaggcggaagaagaaaggcccgaagtcgaaaactgcttagtttatatccaagaggtagctggtgaagatagttgcagtgccggataatattttgcaggtctatccgttactaaaagaattttatttttagttgattcactaaacgtttcttttgcccccttgttcatttacgatggcaattcgatttcagttcaaaagtagggtttaatgaatactcctattggattcaaaagtagggaaattttcgggcttcggatttccttattgttttccatttcatctttagattatttaagcacacacctcttccaggctacattcattgttcttgttccgattgttttcaattcatcaaacattgatctcttcgttcatctaaatgatttcttgtttcgattgttttcagttcatcgaacatcgatctcatccttcatctt

SEQ ID NO: 10114 - DNA, 633 bp, Gossypium hirsutum
  misc_feature (61)..(66): n is a, c, g, or t
  misc_feature (147)..(147): n is a, c, g, or t
tgggctagcatattttccctttctccatagtccaacatccttcaaaatccaacaaatacannnnnnttatatgtttagaatttaccaattttggttgaatgggcaattgtatatataaagtttgattttgtgtaattttatattagnaatttttattttttttaatttttacaaattattaacacaattattaatataacatcattttatgtttatttattgcatatacatataattgtatttctcccatataaaaataaactgatgcatttatttctttaaatgaggatggttgaatcaaaattaagatttcatatatacatttaaaccacaaccaaaagtttcatgtatataattacatcaaattaaagttaatgtatcaaaaaatgagacaaaaaattaagtattaaaatgagaaatttcgatataatttaggagccaaattataaataaaatcttaaatttaaaatataagaattataaattaatttaggtataaaaatcaataaaatcagatgaattgaactaaatcaatgggtggacttaactttgcttactcaaaaacatgaataaaaaatgagaaatactctaatgatgaatttggttatgagactgaaagagctactggctttg

SEQ ID NO: 10115 - DNA, 603 bp, Gossypium hirsutum
  misc_feature (64)..(67): n is a, c, g, or t
ttcaaaaattatgtatttttcggcttatataattttggaaaattattagtaacttaacaataannnntaaaagtgtcatgatttgaataaatttttaatatataaagactaaccagaaacaactttaagccgagggattaaaatgaactttatacggtattacaagtactctcaatagacttttaccaaaattaaaacgcaaacccttagttttaggaaacataatttagtaggggtaacgttgcattaatttaagaggaatgaattattggaatataaatttttaaggtaacttatatataattttatggaccctccccaccaaataattcatggtctctttctaattatttaatgatatttcaacaatttttttcatgtcattgacacataattttggtatttttttatattttgaacacagaatctcgaacttaaaactccgaacccaaaacccaaatcttaaaccctaaaccttgactctcaaacttaggactccaagttcgagtttggggtttaggaaattcaaggtccaaggttcaagtttggattcaagtttagatttgggttttagagtttgaattcgaggtttggagtttgagt

SEQ ID NO: 10116 - DNA, 343 bp, Gossypium hirsutum
  misc_feature (281)..(282): n is a, c, g, or t
  misc_feature (318)..(320): n is a, c, g, or t
  misc_feature (335)..(335): n is a, c, g, or t
caaattaccagaaaagataaaatcacatgtattcggctatatagccataagaatttcgatgtaaccttttttacgcaaaaaaaaaatatagcaaacgaatacaaagaaatcaaaaatacttgaaggtgattcatttgttcattctttgttattttttattttattttgaatttattgcacaaatacgagaaaagggggaaggtttttatttacctgttgtttggtgtcgactgagtcggcgtttgcttctggcccaaaagcagacagatccttggggatcnnggttaaagccacggcggaggaggctgaaactcgaannngttttctgactttgnagactttt

SEQ ID NO: 10117 - DNA, 438 bp, Gossypium hirsutum
gcgattaatcgacattgaagcctatgagactgtgcacaacataggtattgtatatgtcatatcaggccaaattacatgagttgattttacaaggataatgatcgatgatatgttattaaaatgggcaagtagtaaatattagtttatatataatacgtataattttaaaaaataaatatatttttaaatttttttaacaaaaattatatatatatgatatttttacatttttaatcaatataatatataaaatattaaaaataaaaaggacacatagtttgttctaatagtaccacattactagtcaacggtcgagcgatgcctatcagctatcagtcaaaatcaaaaatattttttaatatttaaatatttaatattatattttttattttttaaaattcaaatttattgtttttgttttaactaaacctaattgcc

SEQ ID NO: 10118 - DNA, 657 bp, Gossypium hirsutum
tgttagtgactattcggctagcttaggtgctgcttataaatagctgaaattctcattttgtaaagaacttttaacattttgttaatgaattgctaccgaatttgtgaggcatttttctctcaaatttcgttcgagacccgtaagacttacctagcttctagtggcgtctttctaagtctttctgaacttatcactccctaaacccgagtgtggcgttcacccttaatacctttggttcatactttcataagtatcgggtcaaggttcccaaatagccaattctgacttttagggtcttataagtttcgggtcaacactcttctttagagttggttcatccttgaccttttgagccaaatttggtttatttcgtaccaaaaattccataccatttcgtaccaaaaccccataccatttcgtaccaaaaccaactccattttttaattagacataaaccgaacttgaccaacctattcacatccttctaatccaaaccaattccatatccatctttgatcgaacctatttgacttctttgaattcaattatatttttcctttttacttgaatcgatatttccaaatatacttcttcgtttacgatcgggaactaaacgactcgggttcaactactaaattgagatcgtatcatttggta

SEQ ID NO: 10119 - DNA, 656 bp, Gossypium hirsutum
accatggatacttttgcataccatgtgttccaactatgtgtccttccgttcctcctattctgttctaattaagtgcgatttggattatcatgaatgttcaagttgttggcaacttagactgcaagtacaggacaatcatttttgtctttttttcttgtcaaatgcagagagaacttcagcgagaattggagcaggcagaatctggactacggtcttcaaggcgtgacttcccttcatctcatagtaggtatggctatgttcatctttttcaaactgaccactaattctgggttttctccccagtgcttaagtcttcattcatagagcattacctactttgtgactaaaagtaacattattcatctatagcaataagttgcaaggtaacctgttgtccattttttactttcgagaatacttgcattattttctttttttaagctactgttgtttggttcgatgaatttggctgaatttgtctctgtgaacatcataattgattgctttgcttattaaagtatgcaacctgctcatttttgtttcctttaaaatatatgagattgcagatgagatatactttactctgattcttcatttttcttgaagtatccatacctaatgcatatttggatgtggcacttcaaagatcctctgta

SEQ ID NO: 10120 - DNA, 451 bp, Gossypium hirsutum
attgtcggctcaagtctgtttaattcgtgtttaaacataatattaatatattttatatctatttaaatttagataaattcaaattataaattaaaaatattttttaaatttatttattttgtaaataattaatttaaaatcattttcaacccttccatattatttttttaaaaatatttatattacttttaatttaatgtttattaaatttatatgtattttcatttactaaaatttcatataaatataatttaacattttttaatataaatatatacaaaatacaaacttagaaagtgggttaggttgggctaagcctaaacccaacccatattttaaacaaacttatttttttagcttaaactcattttttaagtttaatatttttgttcaaaccattccaaattttaagccgacctttaggcttggacaggtagctcaacccataaat

SEQ ID NO: 10121 - DNA, 417 bp, Gossypium hirsutum
taagttttgaccatgaaggaggtcgttgcacgtgagaccgccttgttactggagcagcagaaacgcctctctgttcgtgaccttgctagtaaattcgagaaggggttagctgctgctgctaagttgtctgaagaggtcaacttcattttaagttcgtttacttatgcattgtggaattattttagatagactgatatagatatttgattaaattgcctaatattagattgacttattttatcattatgaagagttctaggaattgtagataggttggtgggaacttcgtataagttatctcagttttgtaaatgaatggcactaagatcagtacaatagtaaattttgttttatgggttgtttatcgttttttatgcatcttggaatgtcactggattgaggaaatgagtcttctca

SEQ ID NO: 10122 - DNA, 677 bp, Gossypium hirsutum
ttgcaaattgaggcttatatccaggggcgaatttagaaagcttttttagggggaccggaattgaattataaatttctgaaggtcaaaatataattttatcatttttaaaggggctaaaaagatattatattttttcatttttgtgactgccaaagtgcaaatttaccatatattaatttataattccaatatttatgaggggactgaattgccaaattttcatctcctttaaatttgcccctgcttatatagcttactcgtgttcatatattccactgtattgttacttaaacagttctaatagacttgccactatgctgttctgactctatatttttctttaagtacctgtatttgacacccatgtctaacacatttgaacacgggtacgtagatatacaaggacgaaggggaatcaaaattaaattttaaaggggttaaaagtacaattttgtctttgtatagcttgatattttagaattttaaagggattaaactgaaatttttttcatcttgttgggggggggggacaaagtgtagttttaccattaaactaacttataattttaaaaaactccaagggactaacctccaaatatatgggagaacttaggaaaaaattaaaattatctgaatctcaccccaaaatttgagtggcccaaactttcaagaaaaaa

SEQ ID NO: 10123 - DNA, 600 bp, Gossypium hirsutum
tttttgactgcacgacctcatgcaaattaccaaagctcatgcaaaaccaaaatgaaaagaaaataaatcagcaacccttgtagaaattgcattgttactgaaatttgactccaggatattcagtcaatcattgactggcagcgagtgtcagcgcgaagcaaccggcttccatcccaatacaacatccggtccctacacccaccgccatttgcattttagaaaaaagaacaaccagttttctaattccgtaatatgattcagtactataactatttgaaacttacgaacgaaataaaaaccttccttccgacatgaaaaggtgaggcagaccatgaccaagcacagtctaaacaacagcaagtgctaggcgctcatataaacaaaagaagaaaaaaaatgtaaagagcttacgaatttctcgccaaggtgtctgttgcagacgctcaccactgccaggcgaaagagaaacctacgagaccttatattatcggtttccacattaacactaccaacaatatcaatcaagcaaaacgattaattataattggaatacttacacaaagaaatttagttcgggggattgtgtttttgaacgagaga

SEQ ID NO: 10124 - DNA, 459 bp, Gossypium hirsutum
ttttctggtcgcgcatagatggctagcagtacttgacccatttctcgtgttgttttaagtggaaaatatcgacctaaataaaagtccaaccttaaacccactaatcaatcggcccaaacttaactcaaatccaaaaaatatatatatattatttatattattattaaactcttgattaagtcaacagggcaccaatttaattagaaaagttattaaaatatcttttcaaatttaaaatgaggtatatgtttgatggtactttagtcttttaaatttaaatttaaaataaaaataaaaaacatatatatggtaggatttgaatcatggaagtcggtatcgtaccagccggtatataccattttggtcttaaattggtgccaactagtctattgttccattatgatcaaaattttgatgtgtttcggcctatttcaatcaatatcgacttgtaccagttcg

SEQ ID NO: 10125 - DNA, 618 bp, Gossypium hirsutum
  misc_feature (26)..(29): n is a, c, g, or t
gagtggttttgtgacagaattgaaannnngaaattaagaaaatatgaataagccagtcctataaacctctaaaatgagatagacttcactcatacaccactaatcttggaaccaaagccacaatctaaacccacattcaaagcctttaattcctcaacaaaatcccatcgagtcagtcactggttagagacctgattggtttaggaaatattaagggtaaattatcaaaataaacacttttgtttgcctcaagttatattttaattatttatgtttgaaatgttatgttttaatcatttagattatggttttattatgaaatgatcactctaccgctattaaatctcaaatgacagtctgatgtgatagttaaaatgagtaatgagttttaaatggcaacttgaatgtccagttgagataataaaagttaaatttttttatgaaaatagaatacaaaattttaccttaaaacacaaatttctcccatttaaaaacaagcaataattggtttttttttttttttttggtttccaaaaaaagaaaaacctaaccaccttaaaaaaaaaaaaaaaaaaatggaatatccaccccctatcctggttggttttgggtttgcca

SEQ ID NO: 10126 - DNA, 593 bp, Gossypium hirsutum
  misc_feature (588)..(588): n is a, c, g, or t
tatatttattttatttaatgattataatataattttatatataatttttttaaggttttacattatattagtattgtatatcgctatagatttaaattttatatgttataaattatataatataaaacattatcaactttaaaaatgggacgagtgtaagcctgaactcgacccatattttaaatagatctttttttgtctaaatctatttttcgggtctaatatttttactcaaatcttgtcaaatttcgagagggccttcaagtatggacggatagcttgaccagtgaacagatctagacatgatgaattagagaaaaaattataggaaaatattaactagatttaatgtaagaccacacgaatctaagattactatgtttgattcatttgagtataatgtaatattgaaatgtttggttattttattgattttatcataaaaatttaatcaaacaaccagtaaatattaaaattataacgagtgataggaagaaccaaaactgttaagccggaaagctttgctgcggatattccgtcttccggctttgccatacaatctgccatggcatcatataattaggtggnagaaa

SEQ ID NO: 10127 - DNA, 634 bp, Gossypium hirsutum
ctctctgtcacagattttgtacccaattttaagatgatccctttttttgagtacccaaatattagttggttaccctttgtcttgtacttaacataaaacagtgccttttagctttaaaaattattcctttctttttatatctttaccatttattttctagaatcttgtgattggtttatttatagtgagacagtcgatgattttcagtaatttcttggttgtttttcagtggttacaaagacaatgagaggttttgatagagcagtggaatggcttagaccatttgttgatagtaaaggttgggatttttgtgttgtttggaaattgggtgatgatccatcgaggtacttctcaagctacttgtttcatcaccattgatcaccataaccagtattatcttcattctttgttctttttgagggagtcatttgactcaaatgaagcttttttcccccttttttcttgaaggtttattgaatggaaagattgttgttgtagtgcttgttttaatgtcaaagtggaaaaagatgagtcgcagaagccattttgcagggatggtcatttccaacattccataagatcaaaggcttgtgaagctctttcacattttcctttcgccatttctctcctatgc

SEQ ID NO: 10128 - DNA, 962 bp, Gossypium hirsutum
caaagactgatgattttttaaaaagtaaaaaactgcctctgccactgttactgccggcatcagatgcctctctgtcacagattttgtacccaattttaagatgatcccattttttgagtacccaaatattagttggttaccctttgtcttgtacttaacataaaacagtgccttttagctttaaaaattattcctttctttttatatctttaccatttattttctagaatcttgtgattggtttatttatagtgagacagtcgatgattttcagtaatttcttggttgtttttcagtggttacaaagacaatgagaggttttgatagagcagtggaatggcttagaccatttgttgatagtaaaggttgggatttttgtgttgtttggaaattgggtgatgatccatcgaggtacttctcaagctacttgtttcatcaccattgatcaccataaccagtattatcttcattctttgttctttttgagggagtcatttgactcaaatgaagcttttttcccccttttttcttgaaggtttattgaatggaaagattgttgttgtagtgcttgttttaatgtcaaagtggaaaaagatgagtcgcagaagccattttgcagggatggtcatttccaacattccataagatcaaaggcttgtgaagctctttcacattttcctttcgccatttctctctatgctggggtacaggtattctcaacttacaaaattgtttgggtcagtttgggaaattcaagatataaagaacaatattcttgattttgtgacactgaaaaaaacccccggaatcttggaaaggtaactatgtcaaatcagccaagtggggtaaacctgggaatccctccggttccccagcctcaaatgggggagttgggcccccttttcccccttttttttgccactttcccaagggaaaacaaataaaaaagaaaaaaaaaggga

SEQ ID NO: 10129 - DNA, 637 bp, Gossypium hirsutum
  misc_feature (610)..(611): n is a, c, g, or t
aacagccaatagtgccctttttctcctttccaccaatgataaaaccatcaagttttggaaggtaggaaggaaatctgtgctttaactactgtcttaactcttgtcttgtttcagattgattgttgattgtgcatattatcactttgtttgcaataagtagtgattggtacttgagaatgctcattcatttataatggaatatattctgcaaagccactgcaaagtttctggtgcatagatagattgacttataaaatacttcctaacaaatgcttcaaaaagagtaaaacacacttggtaatatatctgattttatcctatctgttcttctgagcattggtgttgagcatgattggtattttgatctgtgggtacctctgcccttgccttctaacacacttatttatctgctgtttgtatggggttcaacaggtacaagaaaagaaagtcaagaaaatttctgacatgaatttggatccatcaaaagctgtaggaaatggcagcattgctagttcaagtaattcaagtagccctaaaccatgtcttgcaaatggaagctcccttgacggatcctacaactatttgagccatgatttctctttcccaccannaggccttccatcgttgcatttacctg

SEQ ID NO: 10130 - DNA, 573 bp, Gossypium hirsutum
tgagtaagcctatagggggacatgtaaaacagtccaatggtacccactgtggttcattacatagttaagtaactaaataatacttggatttggttacgattttcttattaggatttattttttttaagttaaaccctaaataaggtaggctttgattttgactactatccatatattagagtttgagtttagtaatgattcttatattaaaatttaaattttagggttttaaaaattaatttggacaaaaaaaatttaatataaaaatagttaataagtttaaacttcaaatagtgatcttatcactaccaccaccaccgtcttcgtaataataatatgatggatatttgcaattttgtaatggcttgatataatatttagtactgaaacttgatatttttttttaatttagtacctaaatttttttagacttaatctaatacttgaatttgatatttttcttacgagactaaaatttcaaattaaagtataaaaacatctaaagactcagaatttaagcaaatatttttcttacaagacctagggcagaaaaagccatcattgaagaacttc

SEQ ID NO: 10131 - DNA, 614 bp, Gossypium hirsutum
  misc_feature (561)..(565): n is a, c, g, or t
  misc_feature (567)..(567): n is a, c, g, or t
  misc_feature (582)..(584): n is a, c, g, or t
tgaaatctacagatttttaatactataaaatttcaacctactaaactcgtcagtaaatcggtcaccatatgaatcaaggatttattagaaatttcctaggattaaccttctttttttgaattcttgttctaagttctaaatcttgttatttttatgatacttccgatatttattcaagttttacttaaatttatgtaagaatttttacgttattaaaattcaattattattaattattaatataactcaaactccataaaaatggagacattaagacttgaaccactgacttctacataacttacttcctaatttacattaaaacatcgagtatccatcgccatgctagcatatcaaataccaacccttttcacaaaaaataacgttatgaacaaataagatttacataataaaattcaatacttcaattcacaaaaaattatagacattgaagcaaagatcacaattttgattatatatatttaaatcaactcaaaattcaaaagtatatgtattttgaatattcaggctccatttaccatatgctttttccttgagaannnnntngaaaataacaaaatnnnctcaataccatatatatatgaatctagcaa

SEQ ID NO: 10132 - DNA, 894 bp, Gossypium hirsutum
  misc_feature (250)..(264): n is a, c, g, or t
  misc_feature (271)..(272): n is a, c, g, or t
  misc_feature (277)..(288): n is a, c, g, or t
  misc_feature (293)..(293): n is a, c, g, or t
  misc_feature (300)..(300): n is a, c, g, or t
  misc_feature (305)..(305): n is a, c, g, or t
  misc_feature (310)..(319): n is a, c, g, or t
  misc_feature (327)..(327): n is a, c, g, or t
  misc_feature (335)..(335): n is a, c, g, or t
  misc_feature (443)..(443): n is a, c, g, or t
  misc_feature (496)..(496): n is a, c, g, or t
  misc_feature (516)..(516): n is a, c, g, or t
  misc_feature (552)..(552): n is a, c, g, or t
  misc_feature (624)..(628): n is a, c, g, or t
  misc_feature (630)..(630): n is a, c, g, or t
  misc_feature (645)..(647): n is a, c, g, or t
tcgacatggggcaagctcgaacacacattacccatctatcataaatttttacagaatacgacgtgaaatctacagatttttaatactataaaatttcaacctactaaactcgtcagtaaatcggtcaccatatgaatcaaggatttattagaaatttcctaggattaaccttctttttttgaattcttgttctaagttctaaatcttgttatttttatgatacttccgatatttattcaagttttacttnnnnnnnnnnnnnnntttttannttatnnnnnnnnnnnnattantaattantaatntaacnnnnnnnnnntaaaaatngagacatnaagacttgaaccactgacttctacataacttacttcctaatttacattaaaacatcgagtatccatcgccatgctagcatatcaaataccaacccttttcacaaaaantaacgttatgaacaaataagatttacataataaaattcaatacttcaattcanaaaaaattatagacattgangcaaagatcacaattttgattatatatatttaaatnaactcaaaattcaaaagtatatgtattttgaatattcaggctccatttaccatatgctttttccttgagaannnnntngaaaataacaaaatnnnctcaataccatatatatatgaatctagcaacgtctgtaaagcattttgtgatgtttcctgaagtattcagcaatcaaagagacacttacactgcacagagacacccggtgcatagttttcacccatttcgcagtagaaccaccacccaccccatatgccatatcatttattccacgtcgtcatcatcatcccgacaagaagcttcgtagttatgaaattttggtctacagcagtagggcggggcaca

SEQ ID NO: 10133 - DNA, 590 bp, Gossypium hirsutum
atctttgttccaattactccgaatcaacctccaatctataggccgtcgtcgtacgagacgtcgtcggggagttcttctttttaccaatccccatcgccttatgggattcaaacacctccgccatgggtaatgcaaacacctccgcagtcattattctatcaaggtggctcatcctcccaacacccacaattagatctccagtcggatgaaccacaatccccaccagagcaaccagaaccctctccggaacctgaaccaagaggaatccagtgtgtaactgtcgatgacccctatgtggcactgattccgaccgacaccaacattgatttttttaatatacttgtataaacttttttatattctttcatttaataaaataaaagttttttttaatattttaattataatttaatcttttatatttgtaataaaataaaagttgtttttagtattttaattataatttactcttttatatttgtaatagaataaaagttgttttgaataaggaaatatttttaatgttttccatcattttaataaaatgtaaataatgcaacataattttattacaacaactatcagctatt

SEQ ID NO: 10134 - DNA, 791 bp, Gossypium hirsutum
  misc_feature (630)..(630): n is a, c, g, or t
  misc_feature (675)..(676): n is a, c, g, or t
  misc_feature (691)..(693): n is a, c, g, or t
  misc_feature (699)..(705): n is a, c, g, or t
  misc_feature (708)..(708): n is a, c, g, or t
  misc_feature (744)..(753): n is a, c, g, or t
  misc_feature (755)..(757): n is a, c, g, or t
  misc_feature (780)..(782): n is a, c, g, or t
aatgccaccaccatagaacatataatttcatttcttttatcaaaactaaactttccttttaccaagtatgaaaacccaagttcacaaacagatgaaacacagattacctcaaaaagattcttaaaatgtaaactattatcaatgtaaataccagcaagtaaaaatatgagaaagtaaacatctcattttaagaacccacaagcaatcattagacaaccattttagtctccaacacagcatggtaatgtaaactagagaattatacaaacaatcgttcatacaaatctttttacaacacatgaaatgtacacatgaaatgtattatgattccacattaatactcaaaatttagaaagcccgagaatctgcaaagctaaaacctcaaaacctcgaccatcaacaccttaaaatgaatgaagaaaatcaatggctgtttctttctttcataaccataaagcttaagctttaacttccaacacatccattaaagccaataaaaatcataacaccccaagaatgatccctaaaaaaggttaataatccatcaaaagatcataaaactgaattctttttgacaaccaagttccttgaaacaatgttgcactgttgcacttaaatgaaccgattatntaacctagtaaacgaagtataaaaatattttaacaacataaatannataatggttttgccnnntaactnnnnnnnaanctttatcaaaacaattaagtaaacttttatcaaaannnnnnnnnntnnnctttttaacttaatagtttttgnnntttaacttt

SEQ ID NO: 10135 - DNA, 924 bp, Gossypium hirsutum
  misc_feature (47)..(47): n is a, c, g, or t
  misc_feature (174)..(176): n is a, c, g, or t
  misc_feature (180)..(180): n is a, c, g, or t
  misc_feature (685)..(686): n is a, c, g, or t
  misc_feature (734)..(735): n is a, c, g, or t
ctgcagagcttattcgaacaggaataatatcaaatatccaggtaagnagcagaacaatgcttaagaccaccatggtttcatctctttacttgatgcccaagtcaactatgatttctttaggttcaagccaatacatcctttcagactatgttactttgaaagagaaattgaatnnncatncttgagcttcctgaatctcatgcgtattcaatttctctttcaaagtaacatagtctgaaaggatgtattggcttgaaccctaaagaaatccatagttgacttgggcatcaagtaaagagatgaaaccatggtggtcttaagcattgttctgcatccttacctggatatttgatattattcctgttcgaataagctcctgcaagcaggatcttaaaatttcataacgagcttgaagagttggagggcccacatatgctttgatatcagctcggtcaacaaaagcgatatctgcaatactatcagtaaatttacatattccaattcccaacaatgaggatttttcacagaaaagtgacatttataactacaaaaatagtaacaagatgcagaaatgtaaaatatccctcaatacattatataagaggactatctgaggctcaatcagcatcattactattgcaacaattaggaggacgtgggtttgagagcgcttaagcacaaaaannccatttcctcctaattgttgcaatagtaatgatgctgattgagcctcnnatagtcctcttatataatgtattgagggatattttacatttctgcatcttgttactatttttgtagttataaatgtcacttttctgtgaaaaatcctcattgttgggaattggaatatgtaaatttactgatagtattgcagatatcgcttttgttgaccgagctgatatcaaagcatatgtgggccct

SEQ ID NO: 10136 - DNA, 519 bp, Gossypium hirsutum
  misc_feature (10)..(10): n is a, c, g, or t
gcttttgcanctaatatctcattgtcaaactatcaactccactttctatgtaattataaaatttcaattgaattgatcaaatccttcaccttctctccactttgacagcaaatttaatgtcatgagttggcctgtcaggtccaacagtaacatctatccctgttttccaataggacaaacatttaattgatttaaaacccttgcaaaagttttttttatatagaaaatgataaatttagttatcaatatttatattttttattaatttaatttttattttttaaaaattaaatttaactttcatttttttaaagggagtcaaatcatatttttctaatagaaatgtttattaaaatattaattttttaataatattgatgtggtaacctatgtggcagtttatgtatacttcatgaaataattataaaatttcaaaagattcaaaaataaaaattatatataaatagttcataaaaaatataaaaaattagcatttagtacacgtgaattgctatgcag

SEQ ID NO: 10137 - DNA, 673 bp, Gossypium hirsutum
atttacggcttcatttttaaaatattgagttttttttcaagctccgcactgaaatctgcaagatctgtagttaatgggccttaattgcgggcaatctaaaaccagtagactttgatgaggaagactagttgatcaaatgggaggagttattggttaattcatagatgaaaatggaaataatttccaaaatttccttcttcttttttcctgaactttttacatggacaatttagattctgcttcttctttttttgtggtcttgttgacgaggtgatgatttgcagggaatgtgagaatgagaagcttgctggagaattcatgggtgcttaactcttcattaacaaagtgactcttataaagtatcctagttccttgatttcgaagccaagattgaaaggtcggttattgatgtcttttgatagtatcatttcgttttagttcttcctctacttgtctgatgcggaatttaagggttgtcaaaattaggttttaagtttactgttaccatggaatttaggcatgccatgaatgtgggcagtacaaaactgaggcaaatagatttgttaattttacttgcctcatatcaaaattaagaactcgagtgtgcctcgtgccctgagctcactagtcaccaggtcaatcaccattcacaagtatgactttcacaattaat

SEQ ID NO: 10138 - DNA, 607 bp, Gossypium hirsutum
gaaagagtgaggcgtttttgtttttaaatagaatgaattgttggatttcgaagcttaaggacagaaaaagaaagagagagtagggattagggttttctggtgcgccgaaagtttccaatcgacggaggtgttagggttttgtaggtgaagatggcagaggtgatattacatatatacgatgtgaccaacagcggatcggataaaacgaacaacaccattgttcatatcaacaagatcttcaaggataggataggcctcggcggtatcttccacagcgccattcaggtctcttctttcttactctctttgtgaattttgcatttttattacattctttgctattgtgctaaacgagacctaggttttacggtttggaaaattctcttggaatttctaggggttaacttgttcaattacgtaatgcaaatattttgatgttgattttggataacatgtgttctgcttgttgcatttaaactattgcaaatatttattaaagaaaagggcgctttaaatatttattttgcttaaaaggaatagtttcaactttcaaggtagatcggaaaggaaaggagaatgccacaaagaaacaatttatgggttaccg

SEQ ID NO: 10139 - DNA, 665 bp, Gossypium hirsutum
agttcagttcaataaggaattagataaaagtttcgattagagtgcaatatggatctagaccttgaggtgcgaacaaagatctcttctacttgtcgtatcttaagtttaaatcccatcatgtgtgatcttttattgattttatatcaaaatatattttttaaaacaaaaaaaaaattctcataacaatataatttattttgtaaaaataatagcttttctaatagtttactaaccgattgatgtatgattgactcgtgacactaaagttttaagtaaggctaaaatatgtcataagttaatgtattctttgaaaatttagaatttagtcctactactttccatatttcaaaattcaggtccaactgttaacatttttaattttttttgttaaattcaggttaattacagcactatttttttaattgcattcaaaaaatcatacaaaaaatttaataatattaccagttggacttaaatttagaaatctgaaaaatagagttaaatttctgaaaataaagatattagaaggttccaacataagatacccttcttcataaatatccaaattgaattgataaaagcaaaaacaagcaagtgggattaagccttagaattgtcttaaaacattgggctcctccaccattttctttttatatgtttccctc

SEQ ID NO: 10140 - DNA, 460 bp, Gossypium hirsutum
gaaagaaatcaatacaaaattgtgtgtgtttaaaagtattgttttacatttttaacttagatccgtaagttttttttcacacacaaaaaaaaaatttgtattgttatacattttttattaaaaactagcattagatccccgcatgcgcttgggtttctaattttttaattaaaatttaaatatttttaaaattactttttattaaataatagcatttatttaatcaaaagttttatttttagatgtagtcatattaatatattttagttgtaaaattaaatttatataattattaagatattaaggacaaattaatttaagttaatctaattctttatatcaccatttaaaaataaatgaactttgtagtagaaaatgacaaatgattttacacaaagtaacaagagaagttaatgctacatctcatatatttggttggggtaatgtaaaaaaatccgta

SEQ ID NO: 10141 - DNA, 625 bp, Gossypium hirsutum
  misc_feature (42)..(44): n is a, c, g, or t
  misc_feature (590)..(591): n is a, c, g, or t
tcattcaacttgacatcctttcgtagcaatcttgtcaacggnnnatttatcatggaaaatccctctacaaatcgtctataatatccggcaagaccaagaaaacttctaacttctgatacatttctaggaggcttccaatcaacaatggctgaaatcttgctcggatcaaccttgataccttcacctgagacaatatgtccaagaaaaccaacttctcgtaaccagaactcacttttgctgaacttggcatacaactgattatctctcaaaatctgtaaaactgttctcaaatgctctgcatgctcagtctcatcatgagaataaatcaaaatatcatcaatgaacacaactacaaacttatccaagtacggtctaaaaattcggttcattaagtccatgaaaatggcaggagcattagtcaagccaaatggcatcacaaggaactcataatgaccatacctagtccgaaaagcagtcttcgggacatctgactctttaactcgcaactgataatatccggatctcaaatctatcttggaaaacacagtggctcccttcaattgatcaaacaaatcatcaattctaggcannggatacttgttctttactgttaccttgttaagcc

SEQ ID NO: 10142 - DNA, 425 bp, Gossypium hirsutum
caatcccttgaagcttcatacataagtagcctccccaactcagccatggcattttctgataaaaagaaagaacaaaaattgatattgagatcttatcctatccaagacaagcttattataatctaaattccaagagaactcactgaaaatggggcaaggagtttgctcatttctcaaaaccgaaatccagtgcttaattaacggatgtggaggcacaaacaccttaaaagaaacattattaaaaaaaatccaaactcaaaaacaagaaactacgtcgtatttaggaaaacagaaaccaaaggtaaagaagaaaaccgaccagcattctatcatcggaaataggcttttcctcggtggccatatgagaattgactgtcacaaagcccatccgtcgcctccgcagccaccgagaagtggatataaaa

SEQ ID NO: 10143 - DNA, 606 bp, Gossypium hirsutum
cagggatgtggatagtgcgaaggaggggaaagctttttggctttctttcatttttttaaattattaaatactttatcttttatatttttatataaaaatctaccagtaatacaataattaaaaaaacgaaaattattaaaatagttatttttgtttatcttaagttacattttaattatttatgttttaaaatgttacattttaaccacttatgttattacattgtaacattttagtcactaagttgttagctatagttaacggtataatggtaagctgacatgacacactaaattatcatttcaaacaaaaaatttaagttaatttatacaatcagtcctcataattttttattttgagcaatttgatttttttcttttatgcttttttagctttcctttttttttcctttattttccattctacatgtccctctatttttctacgttttccatttattaaaactagtccctatattttaatttttttaaacaatttaattttttttcgagtgatgcgagcttgtggattagttttaataaataaaaaacatagaaaaactatattaaaagaaatgaagaagggaggaaaacaaagggagaagca

SEQ ID NO: 10144 - DNA, 608 bp, Gossypium hirsutum
tcttgtcgatttgatggagcttcctttcatgaatttgatttgattttggggatgcactagttggttgagcatcaagttcgattagattgtgcattgaaaagggtgactttggtgactgagtctgggaaggaagttattatggtatgggaacatcgaaattatatgtccaatgtaatctttattttagcagcaaaaaagatggtgcaaaaagggtgcgaagcatttttggcttatgtctgagatgtaagcgtcattgatcctttagttgaaagtattcgtacagtgagggaatttcctgatgaatttcttgaggaactggtaggttacctccggagggggaagaggaattcaaaattaagtttttgctaggaatggcaccagtgtccatcactccctactgcaaggcattgaaagagcttaaagagttgaaggtgcagttgcaagaacagttggatagcggttttattagacctagtgtttctccacagggctcaccgattttatttatgaaaaagaaagatggaaacttactgttgtgcattgattactgttaaccgactaaattaactataaaaaataagttccttttaccaaggattgacgaccta

SEQ ID NO: 10145 - DNA, 505 bp, Gossypium hirsutum
gtcctactgtaaattacatgcgtatttctcagatagagaataagtccgccagcggtaacctacggaaagaggggaaggtttcaaccatctcatgaaaatctgcaaacgaccaagatgattagggagtttaaatctctctttaagacttcgttctaaaatatctgtatttttttacaacaaatctcttttgcaaggatcaaagacctttgtgcaccaagttaacttcaaaaaaaaaatgttcacaaggataaatgagcataaaattcaaaaataattttgtctttgtttatttataaaattttgaacttggttgtaaagatttgaatttgtgtcattcgaatagatgcatttcctcatgttgattttagagaattatctaggcatctttaatagattcacctatgaggattaatttaaattgctctatatctacatcattaaaaaatgcactcaaagcttttaaggtgtagtttactacttttttttttctttagtagtgtgcatg

SEQ ID NO: 10146 - DNA, 630 bp, Gossypium hirsutum
  misc_feature (168)..(168): n is a, c, g, or t
atctgtctgaggatgaaacgcattactaaaatctagtcgtgtacccaacgcctcttgtaatttcttccagaaccgagatgtgaacctaggatctctgtcagatatgatagaagtcgatacaccatgcaatcttacaatttcagccacatacaacttgaccaatttctncaatgaataatcagtgtggaccggtataaaatgggcagacttagtcagtcaatctacaatcacccaaaccgaatccttcttagaaggcgtcaagggtaacccactcacaaaatccatggttaccttttcccacttccagagtggaatcttaacttgctgcagtaatccaaagggtaattgatgctcagccttaacttgctggcacgtcaagcacttactcacataatcggtaactttgcgtttcaacctaggccactaatacatctcgcaaagatctcggtatagcttattccccctaggatgcatggcataagggctcccatccgcctctcgcagaatagactgcctcagacaagaatcattcggtatacaaactcttccacggaaacataacaccccttcctcattcagtataaaatcttaagtttcaccattttccacttgccgaaaacgagaaactac

SEQ ID NO: 10147 - DNA, 632 bp, Gossypium hirsutum
tttttttttattattcttaataatcaattttaacatttatactattatttatttaattttcaaccccttttttctttattttcacatttgaattattattatctcattttacttttaaaaaatgagaaaaaaataaatttaaataccaaaatatataaatttgaagcttgaaagaagcaaagcattaataacatggtgtgtttaaaaaaataataaagacaaaacaaattgtggagactttattattcatacagctatctatgtttgttttttaaatggaaaataaaaaataaaaaaaatggagatgaagcaacaattattttggggacaaatagtaaagcttgaagatccattttcttttatttatttattttccaagaagaaaattattgaaaatggaaaaagggaagaagaaaagaaaatgatgattgagaaaggagaaaagatgaagacatgaaatgttggaaacctaataatttgaattgaagtttcctctttattttcctacaaaatttcaagataaaggacccacaaatgttcccttcaaaatcaacactccatcaatttcatgtcttccttaccattcttaattactgtataaaaaaaatggtatgaatttgatttcagtttca

SEQ ID NO: 10148 - DNA, 679 bp, Gossypium hirsutum
  misc_feature (14)..(14): n is a, c, g, or t
tgatcaatggtagnaaggttcgatgaaagcatgtgttatgaaccttaaacctactctaattttctttgattaatactagcaaccagcccctatatttccttttatggttgcataaataagtatatacagctcaaatggctttcgatacgagaaatttcgtacaataaattaaagaataataattttttctcaattttattaaaaaagatattttagctattcatttcattttttatatctattagttcttaaatttataatcttttgtcaaatcatttcgaaatagatgaaaaaaataaagtttgttaattttgatgatgtgacatatatgtgatttgttacgtagatggcatgttatcatttaattaatttttttataatttttaaaaattatatatttttaaaattttaaaatttaattaaatactgacgtatcatccttattgcaatctttgtgtatgtcacatcaataaagtttaaaaattttccattccctttgagataatttgacaaaaaattataagttagatttaaaaaagaagaaaaattaaatgagaatttttttttgtaaatttggaggctgaaataagtaaatatgcgaaatgaaaacaaaggaaaggggatgtcactattgccccgtaaacttgtaaaatgtcaaaagcaatgtgcctgacgtcac

SEQ ID NO: 10149 - DNA, 603 bp, Gossypium hirsutum
  misc_feature (569)..(573): n is a, c, g, or t
  misc_feature (576)..(581): n is a, c, g, or t
  misc_feature (585)..(586): n is a, c, g, or t
agtttttggtggtggtggtggtggtggttgaacctggatggaaggggtccgcactggggtgatccctgcaggccgaaagggtggtcgttggattgggatggaaacggtgggctgggaaggagcttgtgattgaggctgcggttcagcagcgggacgaggagtagcaacaggacggggagcagcagctgccgagagccaaggcaatcgaaaacgaaaaaattgcctctgttcgcccatatttgataccaaaaggatgaaaataacaatgaaaaaatgatagataatgaaagatgttgagggttgttgctgatgattagatgtgaggactacatatataggttggagttgatgccttgaaaagtatacgagacattaggacaaatcactttcttctaatttacattctcaacaatcttgtttcttttgtgaaggggagaaattattttatgaaatattcagcaatctttacaaagatttgtcttgtctactagggatggcatctagtttatgtgccttgatacgttgcatttctctattatgaacaccgggaattatgttattcttttctnnnnngcnnnnnnagtnnatacttgcctcccatgc

SEQ ID NO: 10150 - DNA, 483 bp, Gossypium hirsutum
tgaggactcgcccattggaacgagttaactgtgtacgaatgttaacctgtgaaagacacactatgatcctttttttcccctttttggatgtaagttcaattttagacagaatatggaaaccttatatggaaagtagtccactgtatttttttttcttcaataagggctcgtttttgcaagatttaatatgtatgagcatttatgttatgtgactctaatttctttgatttctttaagcggttttttcattttatacttattactgtctactatcatgctgcgatactatcatgctgcgaagtaaatctgtattgtttcttgtatagaagagaaaaaatgcattgtagttgatctatttttcacgtagtgagtttttacttgacactgaagtcgtgccataatctctccgctgtccattatcatcaaagagtttgaaaatatcttttgttcaatgttgtatttgataaaaatcataattttggt

SEQ ID NO: 10151 - DNA, 610 bp, Gossypium hirsutum
atcgttgagtgtgttatattgaaaaattgatgtattgtggctgcgtgtggtaagatagataaatactcatttggtagtaagttatccaggatgaatgaatgaaatgttggcataatgcatgctgtgaaaggatatggggtagtctggctgagagtaattatgactatgttgcttgaatggtatgatttagcgcattatatgtcacatgatagacaatatttgtaggctgagtgtttgagtatgttatgcattatatttatgtggctttgagggaggtttagttggattgagccaaaaatagagattcaaaattgtacaaagaacggtgcacaccattatatgagagccccttgtgtgggacgtataagagtacttagtgggacgaatggatatccatggacatggcaataccgtatatgtggaagtccgtgaggactatctaaaatgtgggaagctcatcaagactatcttttgtggaagtccgtcaagactatctaatatgtgaaaagttcgccttgtgaggaaagttcaccagaaaaacataatttcaccttatgttcttttgtatgagtccgcaaaaaggtgatttattattttgggtaggccattg

SEQ ID NO: 10152 - DNA, 603 bp, Gossypium hirsutum
caaattccttccatgtcctaatttttgtccatgaacttaaaattggtcaaatttttatttaaacccttctaattaatattccaaagtaatttcatactaaaaacttctagaatgcaagttttgcaaattattcgatttagtccctaacctcaacttaagcactttatggatagaatttcatcacgaaattttcacacaatcatgcaatcataccatgaacctcaaaataataataaaataattttttttacctcggatttgtggtttcgcaaccactattccatttaggccctatttcgggatattacatgaattatatttaaatttttatattttataaccaaaatttcatagttccactctcaattatcggattgatttgcattccaagtaaataattatatttgttcttttgagacaatgcctagaattactcaaagccccttctcaacccataaataggaggtgcacctgaacccacatcctttttcattgacaataatgctcataccaatcaaattaaaacataatcggcatggtaaacttgagttggcatatagcaatgctcaccccataccattatactccatggctggtggtatt

SEQ ID NO: 10153 - DNA, 594 bp, Gossypium hirsutum
ggggcaaagattacctctaaacaattcgactcaatgatgatactagtgaagccacaatgcttgatccaggacaaggcctctcgaacagacatagcctcaccgacttgcgggtccaatcacgtggcaaacgacctcgagaagccacgcaaaaaggagctagttgcatgtcatagaaccatcgacatttcgtccaaacaaagattgttcctcctcccaatcatacaagtacgcttcagaaaaatggacaatggccgccgctgatatgtcattactgtttcaggctggctaattgcgaaagtgcaaacaggaacatatcataacaggttgaaaaattaaaggcgtaccccgctacagtccatacctcagccgccttcggacaaagtagaacatgatccattgtctcagtcgacccacaccgattgcactgaggatcaaggtcacaccctttcgccaccaaagctgccttacatggaacgataccgcgcccacacctccaagcaaagtcctttactttgggcagaagaggcaagttccaaagcctctgccaaggtccctgtactatgtaagactcctgattcacacaagccatttcag

SEQ ID NO: 10154 - DNA, 503 bp, Gossypium hirsutum
gcaatgggaggcacaaataattatcacataaggttcaacacttccgatagcagttcacctcaaggcctatcaaatttatttcttgtctaccaaatgttgttcaaccaacaaactattatcgatatcaatttttcttcaagcaactagtcaatgacagaagtcttcaacaagaaccaaaagcacaagattccccagtcactgtgacaagttagcaaagtgatttgagtgatcaccaaaagtaaacgtgaggaacatttttccaccctaacttgtcactgttttaactagagaacaatttagcttgaagtatagcggaatctaggagtgcaagcatttcaatgctctttgaatgtctaatactagtggttggcagttactgtaaataccaatgacaattgtaagataaacatgagattcagtagagaaaccttcctacccttccaatagggtgcgaagcactaaatcagcaaaacaatgttcaacaaactgctacggatcacata

SEQ ID NO: 10155 - DNA, 580 bp, Gossypium hirsutum
  misc_feature (416)..(416): n is a, c, g, or t
  misc_feature (496)..(498): n is a, c, g, or t
  misc_feature (508)..(512): n is a, c, g, or t
  misc_feature (521)..(523): n is a, c, g, or t
  misc_feature (525)..(525): n is a, c, g, or t
  misc_feature (532)..(534): n is a, c, g, or t
  misc_feature (542)..(542): n is a, c, g, or t
  misc_feature (570)..(572): n is a, c, g, or t
tggaattggtaaacttgatttttgtcctttttttaaggtagaagtagcagagggttgaaatgacaaaatatgattgatgtaagaaaagtatggaaaagttgcaggtagacacaagttgtcagtggttaggtgaaatgaggaataagtctgtgatctttcttttttttttttaaatcagcataaaagcttgcaggaaatactattttttggcataaataacaaagtaaaaccagaaacaaaaacagttactgtaatcaaattgcactagctttgataccatctatgaaaattggtaacatagtttttcttaaaaatgagctcactgttatgctatattcatcaactatatacaagtaaaaagtgatattcatatacagatttataataactaaggttcataataaataaaaaataantattttagtcagactaacactatgaaacagatacatgatgagtgcccaaaaaaaaaaaaaaaaaaattaaaaaagccccnnnccaaatggannnnntttaaaaannntncaaaaannncgggcganaaattttaaaaaaaaaaaaaaagggggnnngggggggg

SEQ ID NO: 10156 - DNA, 672 bp, Gossypium hirsutum
agtccagggagcacactcatctaatatccttattatatacaagtggtcacttgcttgaattcaaagtaggatccgggtcgcttatccgtagttcgaataagtcccactaaacgattgagtttgacgtaaactgtaagaagatagtgaggggagctcgtggacccagctcacaaggaaagctcgcatgaactaagagaaggctaagggcgaagctagaataaatttttagggggagtcgaataaaattttagttttttatagtctatatctttataatttttaaaggattaaaccgaatttttataattttaaggggaccaaaatacaattttacctttagtaatttaaaattttaaaaaaaattcaaaggccaaaattaaaattttccattttaggggggctagggcccctgccaacccctgcatccgccaatggaaaaggtcacggtcttagttcgcatatatcaagaagctcgtagaagggagactgcatggtctgacaagcaacccagactgaagcacgtgtccagcatgcctgaaatccactcaaaatatcaatactaagaagagtaaggtcaagtcatgaacagtgcagcctttcttctgtgagctcattgagtatatgcgaattgagaccgcggtcttccctttgttcgtgtaagctctccttgag

SEQ ID NO: 10157 - DNA, 550 bp, Gossypium hirsutum
ccctttctttcatttccctccctttctctatctttacaattcactagagaaagaaagcaggatgatgctcggaaaacgctcacgtcagccgatcaagaggacgacaagcatgacgggtatcaccgtcgatgtctccgacgcggaggatgtcgtcgaccagcaccaccaagactcaatcatatctcatcttcctccccctcaaatccaccctatgcatgaatcccccgacggtacctccctctacgatcaccgtttcttggccatggtgtcgcccagaaacccaacttctttcactaaccgtatcgtcgacagtagcaccacagacactgcttcttttttgcgagcttgttggctttgtaatcgccgcttagctcctggtcgtgacatatatatgtataggtattttttcccttccttttcaatttatctttttcatattaagattgaaactaaagctctaagaacaagaaaagaaaggggaaaaaaatatatatttctctttctttccatccaaacaacagtttaacctctcttagaactcagtctttgc

SEQ ID NO: 10158 - DNA, 641 bp, Gossypium hirsutum
  misc_feature (586)..(586): n is a, c, g, or t
  misc_feature (588)..(592): n is a, c, g, or t
  misc_feature (625)..(625): n is a, c, g, or t
caggacacccgtttgcccccttatttgctttgttggtgttgatgtcatttgttttggctattcgttgcctagccttctcgtgtaaggatttcaccaactcagctttctgttcgccatctaaattaacaatatgttctagtggtaatggcgcaagatcaagtactgttagtgggttaaaaccataaacaagttcaaatggtgaatagccagttgtagaatgaatagatctattatatgcaaattcaacaaatggcaaacattcttcccaatttttaatgttctttcccacaacagatcgtaataaggctcctaaaattcgattgactacctcagtttggccatcggtttgggggtgacatgtagttgaatacaataatttcgtaccaagcttaccccacaataccttccaaaagtggctaaggaatttgacatctctgtcggaaacaattgttttagggatgccatgaagtcttaccacatctttaaaaaataagtctgccacatgtgtagcatcatctgttttgtgacaaggaataaaatgtgccatcttggaaaacctgtcaacaacaacaaatatactatctcntnnnnncttagttcgtggcaaacctagaataaaatccanggataagtctacccat

SEQ ID NO: 10159 - DNA, 565 bp, Gossypium hirsutum
gtgaagaattagaagcagataaaactattgtgagaaacacatgatcaagagttcagaagattgttctcttctttatataaacaagacacaaaatgggcgtgtgtgcttgccaacagtcatcaatgtcgcatgtcataagctatgactgctttgagaagcttaaagaatccaccgtgaagcttctaaatagccacagtgaggatttaaagtctcttcaatagtgcataaacttgacctatgttactccgactcatcagcttttccttggcatccatgtctgacaccagtttattacgcatgctcagatatgtattagagtatgatccttttcggaccctacaaatacatgaaaatctcagaaaaaatttaataaaccatgtcggcacatactcatgtctaatccttacgaaaaccaaacccaaaaaccatagtttgcgacaatctttctatgaagtagtaatgattccgtaacatatgtgactgttttatcttattctgtcagcataataaaacatgatggcacagccttgctctcagtttggattttcactagcttctggatacc

SEQ ID NO: 10160 - DNA, 645 bp, Gossypium hirsutum
aaatgtgtggtctctctaattgcctcttcttagaaattgacttgtcatgatgggtcaatctaaaaatatgggcaagtgttgaaaaaaatccaatatttgtccttcacttgtcggatattgcatactttgcaaatatgctctcttagtttatgcactcttttatagaagctcattgtaaacaatcaaaggaatcctcttatacttgaaaaacactacacattctgggcaaattaactgcttatctaaaaacatttttaacatatatgtggatgcaaattaagctaaagatccaacagatcgtgcttccaccactagctacattcttttattcaaacataatccatcaacttgtaaccaagtcctccattgaagctgaatataagcttgtcactattgttactattgaaacactttggttggttgcatctcctgcgtgaactccaagccccttattctgtatagtaagattaatcacctcaaagtttatcttctatttctccaagataaagttgaatgtaaaactttcgagatcaaccacattcatctagtcaaccaactagttggtacactcatgaaggccttacccaaatctacttttgttcatcaacttcccaatttagatgttgttccacgacccaaacttga

SEQ ID NO: 10161 - DNA, 685 bp, Gossypium hirsutum
agaagcaagtgaaggagaaaggtgtaaaaaatcagaatccaagatctgcaattgtggtggaaaaaacacagaactgtctgtaggcgcaaaatgaaaagggaaaacagattcatgaaacttcacatccctattaacaaaaaaagattttgtttcaagattgaacagaatgtatcccttttgactgggtgaataccccataaagattaaaggtatagctttgggagagaatttgtctttgtaaggagtttgtgcggcataacagagacagccaaaaactttgagatgagagagatttggttgtttattgtaaagaatctcaaaaggacatttattatgaagaacagaagaaggtaatcaatttatcaaataacatgcagttttgacacactcaccccagaatttaagtggtactttagactgaaatttgagtgctctagcaacctcaaggagatgccgatgtttcctctcggcaatcctattttgctaaggggtgtgaacacaggagctttgatgtataatcccctaatcagtaaacaaggaagaacactctgaattaaagaattcagaaccattatcaattctgaagtattttatagaagtagaaaattgatttttaactaggtgaataaattgttttaggtaaagaagggcttcacttttatgcttcaacaaatatacccaggtc

SEQ ID NO: 10162 - DNA, 440 bp, Gossypium hirsutum
ctacttgtaagacagtcttgacggactctcacttataagacagtcctgatggactctcacttgaaagattgtccttttgtaagatattcctgacgagctgtcatatatttcatatacggactcataaaatgagaattcatagaagaaaatcctcatataggaacagattcacatatgtctatctctcaaacctccactggattatgacatgtaagcgaatctggtggacctctccagattataccttatatgcgattctggcgtacctccctaaatcatgccatggccatggacttgtatttcacatatatagcttaaagccttagactcctcagactctcatactacctttaaagggctttcatactacctataaaaagactttcatatctatgtgcacatattctctgtacaaaccagcctaacctctacaaagttga

SEQ ID NO: 10163 - DNA, 638 bp, Gossypium hirsutum
ataatgagcactcaatgcccgtaatgcaaataatgatgatttccgactaagtgcatctgctacgacatttgctttccctgggtgatagtcaatgacaagatcataatctttcagcaactctaaccatcgtctctgtctcaaatttaactctttctgagtcattaaatacttcaagcttttatgatcagtatacacataacatttctcaccatataagtagtgtctccatatcttcaaagcaaacacgatcgctgccaattccaaatcatgtgtaggataattcttctcgtgcggtttcagttgtcgggaagcatatgccaccacttttcctgactgcataagtacacaacccaaaccactcagagacgcatcactatatactacaaacggtacgcccgattctggttgagtcaacactggagcctctgtcaacatctttttcaactgatcgaaactctgctgacattcgtctgaccatataaattcaacattcttttgtagtaatcgagtcaacggtaaggtaatcattgagaaatctttgacaaatcggcgataataacctgccaatcctagaaagctccgtacttcagtaacattctttggaactttccaatttaccactgccgctatcttacttg

SEQ ID NO: 10164 - DNA, 680 bp, Gossypium hirsutum
gggtcccagcccactaaaatgattttttatttatttaggttgtttaaattttttaaattttaaattaataaagataaaattacactttcatcgtctctaaaaataataaaaaaataatttaatcatttaaaaatgataaagatatagactattaaaatgataaaattatatttttactattataaaaattacaattttaatttcgacttcctctaaaaaaatttctattttcactattcaacataactcttctgtacatatttgtttttggttactaattgtctaatcaataatagtttcgcgaaatattgttctttgcatgagcatcttttgagaacaatttcttttgaaaacaactttgttgggaacgactttttgggaataacctcagaaggctggtaggattcttgagtcattccatttttgagatgtcttgaaaagcatggcttggaagctcaaatacggaaattgttaagcatttgttcttaacctttctttgggaatgcaagtgcttcctccttatttctttaatgaaaaattgttgcattgatacttaaaagccttttttgctaaaatacttcaaatgggtgcaacttatattaattgtcattatacctataatctatgtaagttaccttccatttttccacgttcaagtaatcactttcaatcccaaagaa

SEQ ID NO: 10165 - DNA, 515 bp, Gossypium hirsutum
  misc_feature (168)..(168): n is a, c, g, or t
  misc_feature (405)..(406): n is a, c, g, or t
  misc_feature (420)..(420): n is a, c, g, or t
  misc_feature (422)..(422): n is a, c, g, or t
  misc_feature (426)..(428): n is a, c, g, or t
  misc_feature (434)..(438): n is a, c, g, or t
ttttggactcatcttctgcctgcctgtagcaagaacttggggcttattgaagtcttggatatgagcggattaaggtttaggattagcgatgcgatgatgtttgatccttgcgagagaatcaaacaaagtttcttttatgctacgattggttgtttttgtttcgttttngagttttgttcaatataccctctcttcacaaccctaaaaggcgattcttattacatttaatatatttttgagttttatctggatttaatgaatcccagaaccctaaatatcattgttgaattaattcctaatctcactcctagagaatgacttgaacattctaactgtgaacttcataagttatgggtagcttggcaatgaactttttgtaaggaagaaaaaaggggcacaaatgannattttatgcatccnanctgnnncctacnnnnnttatgggtagcttggcaatgaactttttgtacggaagaaaaaaggggacaaatgcacattttatgcatccaagtgca

SEQ ID NO: 10166 - DNA, 628 bp, Gossypium hirsutum
aggtcccagttcctctgcttgtccataaccaattgatgaacacccaggacctgcaattttaattaattttaaactttggtaaaagatgaactgattgtggaaagataaaaggagatatttacacctacaatacatagtttccgattattatatggattttctttaccagtatagtattttctcaaaattaccatattaaataaattattcattgtaatgtattttaaattatttagttaattattgactataatatttaatataaatgtattactataaattcaaagtatttatgtgtatttgatagaaatggtgatagtgatgattattgtaaactgacatatttatattagtaaggttatactttgcgggtaataatgtaccaaaatttatatgtatataattttgtgaacatgtttataataaaaataatataaaatattagatgaacatgcatgaattattagatttttttagaaaaatgccaaaagatgacaattttgaccaatgtgaagatggccaataagaagaaggtagttcatatatcatgtagtaatggtccaagcgaaagttgagacttgaaagggagatgtgataaaatcaatcataaatgtaaaagccaatctct

SEQ ID NO: 10167 - DNA, 664 bp, Gossypium hirsutum
atcatgcgtaaacaaaaacgatcatcacgaacttgacaaaacgggtcaccactgacttgagaaaaaatttattattcccaaagtgaggacctcctcattccaaaaagatacggtggaaggccaacaaaagagggagcagaccccaagaaaaggagatggggtggttggaggggtaagtaagaagaagagacggtgagtgaaagaggaatgaggggggctagcaatcaactctaaatctgatattggctgactgaaagaaacatatgtttcattgttgacttgaaggttgtcgacagagcaagcttttctcacaatatgacggtgaaaactaaccaacagtaaaatatagaatatccggtaagcatcagccatcaaaagaggggaaaggtccgatggtggcacattaccaatgcacaaaagatcatgttcggagtttacatccaacaaacaacataaggaaattaaaactacttcctaggtggaaaagagcatttgcacatctattcttctctcgaaaatatacttaaaacgttttctcttccaatctcgatggtagcgtcctgcaatagaagataacaacatattatgaattgatacataatggactgataacaatagtagcatcaatctcatcttcaaaatttcgcaagttcattctctaaat

SEQ ID NO: 10168 - DNA, 549 bp, Gossypium hirsutum
  misc_feature (524)..(528): n is a, c, g, or t
  misc_feature (530)..(531): n is a, c, g, or t
  misc_feature (533)..(535): n is a, c, g, or t
cgaaagatcatatgggcagtatattaagagataatcagattttagtgggacagggccagaacggtttctggattccctgctccgactttggaaattcattataaattaaccagagataattaggggtcgtaccatatatgtgcagattcctctctgagtctagtttctatataaacaaacggcatcagtattgaagccccgtgcagggagatatcccagtcgtaatgggcaaaggtcagtgtagtcgacccctgcaacttgggagactttgactaataaactgtactaattggcccgaccaaaaattctagaaaaaaatacatagatgggcacatgagtctagtttctgggaaaaattacgaaactgattttcgagttacgaaactcaagatatgatttttaaaacgactagtacacagattgggcagtgtctggaaaataaattttgtaagagggtaaagccagttaacacctcgtgttcgactccgatgacggtttcgggttcggggtgttacatgatgcannnnntnngnnntgatatgatgaatt

SEQ ID NO: 10169 - DNA, 625 bp, Gossypium hirsutum
ttgcaaattgtttgttattttctccctgtttgtttattgtttttgttctccctttcctatataaatttcaaatttcaaagtttagcaagttatacaataagctaagtagaatacaaattgttgagagttttctccttattgaatcatgtacaatgtttgcttgtatcatagtatcatggtagaggtggcttagcggcatttgaattatactccgttgaaattggtggaaaatatcaatttataccctcttttacttgctcatgtttataccaactaaccatagcttaactacattcactgtgtttttggtctcacggtataatatttgcttcagttttattactttaaccttttcgcctattagttcaaatcaggggccttatgagtcttctgttcctaaaagtttaaaatataaaaatggtgcattgctttgaaaattttatatttagcaagttattcaaacatcctatcaaacatcctatgacccttgtgcacctttgtgaagcttgcatcttgacaagaaatttagtataaatttagctaccctttctattgttccttcttggagacacctctctcctggctgtctaagggggcacccctctctcctagttgtccaagccct

SEQ ID NO: 10170 - DNA, 485 bp, Gossypium hirsutum
caaacctatttattaatagtaaatggtaggttaaaaattcttaaagaaatatacctcatgaaattacataaatttcttaacatatttcatcaaataattctttattatcatataaatggttaatataaagaggagatagaaaaaaaaagtggcgaagaaaagtgccatttgagagtcaaagccaaaagaagcttaagagagtagagaaggagagagacaaaggcttaggttttttcttgggttcaaggaagtgatttttggtgatttgtatctttggactatataaaaggtcatttgtgtcctgtagtgccatgcagacgacagtatggaggggaaaatcatggttgtatggttggctaggtggcaaaactgttatagatctattgtcaccatgtgacgtactatgtgattctgctcttaagttctttgctcttggggttgtacctaatattacgaggttgttacactcaagtgatccaagaggg

SEQ ID NO: 10171 - DNA, 656 bp, Gossypium hirsutum
ctgccataatctatcaatgggaaaatattattgcaggatctgcaagttattcgatgacgaaaggtgatatcttgtttaattgttctcatataagatatttactgtgttgaagattgattttggacatttctagacacctaacatgatgcaactaaattctgattctcttcaaacttcattgctaccattgaactcattatttttacctttgttaagccaacaaacttaataggaaaggatcagatttaagagtttgtccatgatcaaagtggcattggaaacattcaacttatctttcactatttctactctagaatatgcaatactagaaattagtatgcaaagctacttccactgcacgattagaatttgatattgatatttttatatgtttcttctctagtttactatttaaatgcctgtgcttgatatgtggtcattggtgggtggttgataagttttgcagttataacttataagcattctttcttcgcataaatgaaaggccaaaagtaaactgatttcaaatgtttggaatgttatactttatgatctcatatactatgcatagtcacgttgaagtcattgcattttatcagggacctcatgaaattttaagggaatgaaaattttcgttgagcagatataaagggaaa

SEQ ID NO: 10172 - DNA, 641 bp, Gossypium hirsutum
  misc_feature (61)..(65): n is a, c, g, or t
gcggaacacccttatgttaaaagggattttgagaggtgggatcgttcaaattgcatgaatnnnnngatcacgaatcaaatcatttcagaagcctttaggggcacaaaatctgaaaagattactcaggtcaaagtttccttaatgaaattgagaaatgttttgctaaaaacggtgaggttgaaatgacatcatttctggcttctttgatgtctataaagtataagggtcgagaaaattctgagcgatctaagggttatgagttttatgatcccacaattagaaatagttttttagacgagaattgcaacattcttttaagatgttgcgtttggagggagaaataaggttagagacattgcttttaaggaagaattgaattctaactcaattcctactatcacttttgatgatgtttagattatcatacctatcattgattaagaagtgaacctagaacctcaataagacaatgttgaatgactccttattcaagatgaggtaattgttccaaaagaacaaactcaacaacctcaagaatgaatgtcattaaaaagttcactagagaaaatgttaatagctttagtggaatattttgaccataagttgcatcagattaatattaagttaatggtttgtcaatg

SEQ ID NO: 10173 - DNA, 665 bp, Gossypium hirsutum
  misc_feature (656)..(661): n is a, c, g, or t
tatttgtcactcatttttactaaattatctgtcgagagtagttttaaacaaaaacattatgcaaaaaatataatgcttcaaataaatattaacacggaaaatcaatacttatgcttaatttttatacaaatagtatcgttgctccaacttatgcctttcctgcgaacttctattcttctgaacttcttcaaattttatttccttgacttatgccaccggaggctaaaatatgttacatttatagcccaagggatagcctcctatttgattctgaaaatatgtcctggatactgggtggacgcgctttcgatacttctgttgacaatatgtcctgcttggagcatttttttctctacaaatttcaacccccactatcttgggcatttttttggaaacatttcagatatcccgagatatattttcagaacccatctcgtcaaaaataatacactggataagtatttaaaactagttctgcatccgaatcgagtactccaagttttgatttttactcgatttgcaaaatgaaatttgaacatacaattggtgtaaatacgtatattttaaatatcgaatcattggtaattagaattattgtgttaaaaaaattataaaacccaaaaccctagccctaaaccctaaaaccctaaacactnnnnnnaact

SEQ ID NO: 10174 - DNA, 585 bp, Gossypium hirsutum
gacgttcggcggtggaaccctacttggaacgacaggttccttttcaagtctcttctgattttctttctaaagaaacttccggtgtttccgttgagatctattccgttggcgtccttcgtgattccctactaggaaccgttcgtttactcgtcggtaactcgatccggactggttttacgatccaccctccttctttcaccgcggttcaagttcgtcgaccttccggtaggtttcacggcgttattaacattggggttacggttcttgacatggccgatgtaccctccatgtctggtttatccgccgtcggtttccgtgacctgattggagaaagcattaattcgaagaaaaacaggggattgaagaaatcgaaatctactacactacctttacccggtgagaatttgtccgatgatcaatcagacgattgtcattcctcgacgacatcgtcatcttcgccggcgtctacggctctaagggaatggaatgggataattagggaaatagagaaaagaaagaatcatataaggtcttcatcatcggaagatggaagcttgctttgtggattggggttatcgtctatga

SEQ ID NO: 10175 - DNA, 625 bp, Gossypium hirsutum
ttagttgcttattataaaatttaaaccatggttagttgatttgttcaattgttcaacccttttttaaacatcataaatgaaaaaaatcagaagaaaatttgtaaaatgaatttaaggttgggcataacctttgactatctatgtacacagtcacatagacttgaatttttgaccaatatggtagaattataccatccttggttaaaaaattcaacaatgtaagccacatcatgggacccaagtcttagaaaaagtcgttgcatctctgacataccatccatggatgtaaaactgtaaatagaagaaacacatggtgttactgttatggcaaccaaaatctgatatcatttgataatatatatatattttttacaacacccttaaaccctaagatcgatcataaaattccaactcattaaatctttgattcctagataattaatgaagaagtagtccaaaaatggaatgataggcggcattttgatattcgttaaaatctaagaggacctgatttgttaacatttaacacactgttatcgtcaccgttagccacgtggagaagaatgaaagctatgcctttatttcttcccatgacgtgcccggccgtgagtacacatctctatga

SEQ ID NO: 10176 - DNA, 557 bp, Gossypium hirsutum
tatcatttggtgagctgtcaaggtccattagtgttgatttgtccttatcccaggttggtgtgtctttccatgcattgctacaaaaccataggtaatattgtaaccacttttttagatctggaatatttttttaatattctttgagtgccttttttaactctatttgatagggtgtcggtagctctgtattaaagtcccaatgtgctagtacatctcctggtggtcatatctctgtgggaatggttctgttaagttggcagagatatttttgcagtgctttgtagttataagtaggggtgttcattcggttaaccgacttgaaattgttataatcgaattaatcgaccttctaaaatttttaaccgttgatcgaaccgaattttttttaaaaaaaattaaccgaaccgaatttttttcggttaataaggtcgattaaccgaattaaccgaaaattatgtgttttttatttttggttaaaaattacccgaattacccgattaaccgaattacccgaaaattacccgaaaattacccaaaaagttcggtgttgagcttga

SEQ ID NO: 10177 - DNA, 535 bp, Gossypium hirsutum
  misc_feature (475)..(475): n is a, c, g, or t
  misc_feature (477)..(480): n is a, c, g, or t
  misc_feature (482)..(483): n is a, c, g, or t
ttcgaataaagtttaataatattaggagaaatggttaagaaatgtcccaaattagcttttgaaaagttaatagcttggcttgaaagtttatttgaaaactttgtttggcttaaaaagcacttttaaaacacaatgataaacacaccttaagtaaataaatgaatgagaaattgtgcgatgatgttaatataaaggaagtcaaagaggtcgttttttaagctaggtgcttacaagacaataatacatgatggttttaatagatttttctacaaaaaaaatatatattggaatattgtcaagaagatgtgtttaaagatgttaagagttcttttcatggtggaagaatgttgaaggggttgaacaacattaatataatatttactccaaaatttggtgttaaaaatggttactcgatatagaccagttagcttttacaatttcaactgtaaggtggaatctaaagttttcatgaatngnnnnanntcgatattgagatctaacatacaatcaaattgcttaggaaaagaaaataaat

SEQ ID NO: 10178 - DNA, 667 bp, Gossypium hirsutum
gcagtttattgacttagatctgacccttgatcttctctgacccggatcattagattgttgtcttcctctagcaatcaaaccaaggtttgctcatctaacttgttcttcgtgcctaacttgttgtcgagtttatcctacttaaaatatttcccttcacgtcttcaaacgagaatctctctctaccataaattagggtttccctgaaagttttgtatgaaaggggaaaagaacaaagcaataacatagtctgatcttcatcatctatgttggccttgacattttttaggtcattaatgagagtgacaaatttactgatgtgagccctaataaactcaccttctaccatacaaaacgtatataatcgttgtttcaataccaaacaatttctgagggactttttcatataaatggcttcaaatttcctccataaggccgctattatctttctccataagtacctcttgcaatacattgttagtgaggcacaactgaattgttgacagtgtcttctcatcaagttcctcccactctgtttgattcgcatatgtgggcttttgctttataacgacctttttcagaccattctaaaccagaattgttgtcattcgaacttgttacaagctaaaatttgtaatcccatcaaacttcttgatatcgtacctcattg

SEQ ID NO: 10179 - DNA, 588 bp, Gossypium hirsutum
ctcttggcagttaagaatatgttccaatccaatctaacattcatgatttaagggattaaataagagtgatatggttcgatcaaatcttccaaatatgtttccgtaaatggcatgatcttcctaaacaagctagatataatccacataatcaacgtagctcataatgtaagttgaataaattgtcaactacacaaatacgaaaacaatctcaattattgcagttagccgcacctattcctcctttccatatttttaaacagtagtgtttcttcattattcatgctatgtgctatgtcaaaccgtttggttgatgatagaatatgagatgattcatatgaggaaatgtgtaaaaagtatatatatatatataattaaaataagtttaagaattgagaccaaattaagaaaatctgtaaattttaaaagttaaaattattattatgccaataaaaaaaatcatgttaacatttcattaacgatttaacaaaagtgtgataaaagaaaaacgcagccaatataatctacataaagaaattggaccaaattaaaaatgaaattcaaggaaaaaaaactggccatattggatcc

SEQ ID NO: 10180 - DNA, 606 bp, Gossypium hirsutum
tgccatttctgttattctgtttttttttattttatataattctagtgatgctccaacgggctaaattcctgatcttccaagttccaagagctgccatattttcttgggtaaattacactcatagtcacccaactattggtgagtttcctttttagtcaccaaattatgaatagtcacaaaccatttgattgtcctttttggtcatcaaagttaaatgtctgtcaaaagtatgatgtggtagcttttaaatttggcataattaactttaacccttaatatttatacattgtgttaatttagtcttgatattaaaaaattaactctcaacatttacacattgtataagttgatcatttttgtagttttacttttctttgcaactgtttcacttaaaaagttaaaaaaaaaaaggattataagctaaatttgattgcgaatataccaaaaatggaaatataaaaaatccaagataatactatttttttttatcttttctcattcttttaaaattaatatttaatgatacaaagaaaattaaaactgaaaagaaaacaccaaattatgtgatgtgtaaatgatgagggttatattttttagtataagact

SEQ ID NO: 10181 - DNA, 678 bp, Gossypium hirsutum
ctttcaatgggaactgaaagcaccacaaaccaacctgtttttgatgtggtcagatgccctgtctgatctgattttatcaatctttttaatggccttcagagtattctctgcaaggtttctatcatatctctccggcctattacgttttctctcaaactcaaatgttgaatcctggtgcaaaaagaaaagaaatagaaatcatgcagtgttttggtataagcattgtaataatgcaataaaaagtccaaaatcaatgccttaggtctatcacctgtgtcatgtcctttccatgcaaacgcctataggccttggtccattttactttacggggattcctcttcatcttgaagttcttgtggcatttcgatctacagaaatggaaaatctgcaaatgtttggaccatcagaaattaaaatcaatgcaaacagcacgaatgacatgtagggaacatagtactataaattattttaattgatgccctcaatctggcataaatgttgctgaaaactgcatgtatctgaacactgccaagcataaacacataccaagtatcaaattttaggccactacatagagaaatgcaacaaaaaagaaaaatactgcaacgagagtaactaaaaaatggatgagaaagacagaaaggcgacttctggacaaaccaaaggccaactccatag

SEQ ID NO: 10182 - DNA, 468 bp, Gossypium hirsutum
  misc_feature (132)..(132): n is a, c, g, or t
  misc_feature (193)..(193): n is a, c, g, or t
  misc_feature (197)..(200): n is a, c, g, or t
  misc_feature (234)..(237): n is a, c, g, or t
  misc_feature (239)..(240): n is a, c, g, or t
  misc_feature (290)..(292): n is a, c, g, or t
  misc_feature (306)..(309): n is a, c, g, or t
  misc_feature (320)..(323): n is a, c, g, or t
  misc_feature (330)..(332): n is a, c, g, or t
  misc_feature (339)..(343): n is a, c, g, or t
  misc_feature (354)..(355): n is a, c, g, or t
  misc_feature (412)..(413): n is a, c, g, or t
  misc_feature (456)..(456): n is a, c, g, or t
tattgtcatgtgtaagcgtaatctccacctttaaagcttcttcattcctagtcctctaaaattaaatgaccaattaaatgtaacttgaacaaaggaaataggtgatcaggatcaaatattttacatactacngatgatggaccaattcctacaaggatgaaggatgaccccactcctccttcaaccctttgtnctannnncttctcgaccacctctactaaaaaatggtgaagnnnnannaggaagcacatgctccacgctccttcctccttcctgctggcgtcccttgnnncttgtcttttgacnnnntcctgctttcnnnnatcaacnnnctaaatnnnnnataaacatcanntctcaaataatatgcctaatctttaaactactaatcacttgtttcttcttttcattnncattttaaatatcattattattaaatctctgttccatgcgccncccaatagctta

SEQ ID NO: 10183 - DNA, 511 bp, Gossypium hirsutum
gattttagtcccttcactaccttaaaatttaagatttaacatctctctctatatattgatcatgtataagatgtacaagttgtctaaggattgaatttgggatttgtgtcaactaaagacttgaatataacttatttgtcactctacccgtggttaaattaacttaagttggtcctctacttttgtaatgttaatttctatctttgaagtgataatatgattaaaataatatgagtcctaagcatttggttggcatatgaatttattattgttaaacctggttcatagaatttctacgtgaccctgattgtgtgatagaatataagtaaaacaatcatcactttaactgtagaaatgaacatgattattaatttgatttactaataccattataaaaataaagggactaaattatcttaaactaaagtatagagattaaaacctacatttaaatataatagaaaaggactaaactcataattggacttatttgacactttcttcccagaat

SEQ ID NO: 10184 - DNA, 887 bp, Gossypium hirsutum
  misc_feature (467)..(470): n is a, c, g, or t
  misc_feature (478)..(481): n is a, c, g, or t
  misc_feature (483)..(486): n is a, c, g, or t
  misc_feature (488)..(488): n is a, c, g, or t
  misc_feature (497)..(497): n is a, c, g, or t
aggtaagattccaattgccgaatcatagggaatgatgcatcccagttccttcccactatatcatgcaaccatgaataaaggaaggaacgtataattaatgtatttgtgataaagaaaaagcaggacacaatttgagtaactcaccagctttgattaattgcgtatgaccaaatccgctgttccagagataagtctacattgattgctgctttttgaaaacgttgtagaaaatatagcttcagccaaaagaatattttgaaatataaaagaatgggaaaagaagagactggttgctattcaaaaagttttaggaattttataccaccatacatttttctattgaagaggcaataccgttactctaaactttatttagtgtcacaaattaagctcttttacttacttcgcgtggctttaagtaattttaggttttttatgtttatttctatattgttttatgatctggnnnntcgaccannnngnnnnanaaacattcnagaaataaacataagaaacctaaaattacttaaagccacgcgaagtaagtaaaagagcttaatttgtcacactaaatcaagtttagagtaacggtattgcctcttcaatagcaaaatgtatggtggtataaaatccagtctcctcttttcccattcttttatatttcaaaatattcttttggctgaagctatattttctacaacgttttcaaaaagcagcaatcaatgtagacttatctctggaacagcggatttggtcatacgcaattaatcaaagctggtgagttactcaaattgtgtcctgctttttctttatcacaaatacattaattatacgttccttcctttattcattgttgcatgatatagtgggaaggaactgagatgcat

SEQ ID NO: 10185 - DNA, 612 bp, Gossypium hirsutum
ttttcatgcactctcaacaaggaaataagctgttcttcttcaaacagttctcggtataagcagctatgttgaaaacacaattacttcatgcttcttaatcttcatctagaaatctttcaataatggcatacatagtcgattgctatgttactcaaactcaaatgtgacgttcaaatatgggtgtcttcaaatgtgaccttcaaaggatcatatgcgtcaaacacatgtacttaaagaaaaatgaaaatcattgcattcataaagtagatcaaacaatacgtgtctcattttgacacaacatgaataaccaatcctgtctgatgttaaacatgagcacaacatgggttttatacatattacacatggctagacacgattagcatgttcaaaactaattagtgtaaatttggcatgacattacactattaaataattgcaataggaataacataaatgaaacaaatgacacgaattctaattttaagttttcaaatctatagaaccaaaaatcaaagaaatttcttgacaaataattaaaatctatcgagacatatactcaagcaaaaactgatgtgattcatttgggttagctaatcacgtctaaccgtgtct

SEQ ID NO: 10186 - DNA, 498 bp, Gossypium hirsutum
cacgaaaccactattccgactaggcccaaaatcaggatattacaagtaacctccccagttttcctatggccattgcacacaggcgtgtctctggccgtatggtgcaagtcagaatgtatggtctattttcacacagcctgtgacacggacgtgtttggtgaccgtgtgagtcacacagcctgttcaacgagtgtgtgacccttaaatgttgaaaaattttataagtttctcaaagtttgcatatgttatcagtttagtctcaaaccttttccaagcgtgttttaaagtctcatggagccttataagggacaatgtgattatgttagattgatatttatttgaaattgaatcatgtatgaaaaatgtatattttatgttgtgctttgttcggtaatgcctcgtaaccctattccagcaacggatacgggttaggggtgttacagaattcataacatacttcccttttcaatacttgtatgaatctcgtatgtacctaag

SEQ ID NO: 10187 - DNA, 609 bp, Gossypium hirsutum
ttttctatttgatgtcggtatttattgaatgatgtaaacaggctaacctattaatttagtagatatttaactcatttataaaaattatattgcttgagaaacttatattgaagattggatcgaaaccaaatcaccacgagcaaagttagaaaaaaattttagaggaggcaaaattaaattgtaatttttacgatagtaaaaattacaattttatcattttaatagtctatatctttataatttttaaaagattaaatcaagttcttattatttttaggggagtcaaagtgcaattttacttttactaatttaaacttttaaaaattttaaatggccttgttagaattaagtgacccaaattcttatttaaataaaatatgatggaaaataaaataaaagtaaaatctatatagaactagacttcttttattttattttagaataaggtttttaaaccttattaaactttatctattttatattgattaggataaggtgtttcaatcctactagaatatgactttacaagcctataaatagacatagtctattcctcttgtattgaattcaaaattttcgacataaagaattttcttctcctctgccagt

SEQ ID NO: 10188 - DNA, 495 bp, Gossypium hirsutum
acaagaaaacagcaaacaggagtgcgtcttctccccaagctgcttctcttctccctttttctccatagctcttcattggagagctcactttctacattatttactatcaaaataatcggctcttcgtcttgtcttaaatggggtgaactgacccaacaccaccacaatttctgttttatctaatctttccatcaataattgatgcagtgaatgtggattgactctcaatctcccaaaccaatcgaaatggttggtttgtataacctcccaaaaagctgaaatcacccgtgtcaatctacggtgaattaaaatctatactaggcatgagctacggggagttaaaggtctgaagcaggtcagttcttcccccccccccccccccttttatctattattggcatcaaatgtatgaaggccaaatatcatatatcaacatttttggggaaaaccatttttaattgcctcaaaaggtcacctattaagctccattaagtg

SEQ ID NO: 10189 - DNA, 574 bp, Gossypium hirsutum
aaccctttctccaaagtcgaaacccttttcttttcaagatccaaaaagccgaaaacccttttgtttttctttcttttcttcctgccgatttctattcttctctacacaattttctttgtttcacttagccgatttcttcttctactcctcttctttaatctggaccaaataaaccttattcaccatactaagtttgaaaagccgaaaagctgaatctcccaagggctgaatactctttgaccgaatctagtggaattagtatcggatctcggatcttaggtctctgccaaattgctctttaggtgtttgcggttttgatctaggagttgatcggggttagggatttaagaaagggctgatcgcgtaaagtaaggttaaaaggggtttgcagttttgataagtattccactcccattggctaagatggccgaatgttcatagttaaggtaaggggacttgtgttggatacgagtctcctattattctggttttaatagttaagatttgtgcagatataggagttgactgtggttagtgatttaagaaagggctgatcgcgtaaagtaaggttaat

SEQ ID NO: 10190 - DNA, 611 bp, Gossypium hirsutum
  misc_feature (48)..(48): n is a, c, g, or t
  misc_feature (50)..(50): n is a, c, g, or t
  misc_feature (52)..(52): n is a, c, g, or t
  misc_feature (496)..(500): n is a, c, g, or t
  misc_feature (503)..(503): n is a, c, g, or t
  misc_feature (505)..(506): n is a, c, g, or t
  misc_feature (517)..(517): n is a, c, g, or t
  misc_feature (521)..(522): n is a, c, g, or t
  misc_feature (524)..(526): n is a, c, g, or t
  misc_feature (530)..(535): n is a, c, g, or t
  misc_feature (544)..(544): n is a, c, g, or t
  misc_feature (546)..(546): n is a, c, g, or t
  misc_feature (554)..(570): n is a, c, g, or t
  misc_feature (577)..(591): n is a, c, g, or t
caatagatgttcaatttcgcgtgtaaaggcttgaaatgtaaattttgncncncttcctccagcaattcttacaggacggaatccaactccttcgtttggatttcttttcgtactttgcgactttttagacactcacaaaaaactcaccaattctttcacaaagaaaatcactcactcttggctttttctacactcgaatgagctcacaaccctcgtgactttttccactcacttcgcctctctaagttcttcaaaggactagttagacttagaagcagtcgttgtgggtcggttggcaaaattgatgaatggttttggtaggaatgttgtaggacaaagaaggtaggcttgaaacaaagaaatggaaagggttgggtgtggccgaatagtacgatatcgaatggatgtttcgggcaacaagtaaaatttctactcgacaacaagaactataacactttttttttaatttccaattttttctcttttttttttcaannnnnaantnntaattttcaanaaanncnnnaatnnnnnnatttttttncnaatttttnnnnnnnnnnnnnnnnntcgtttnnnnnnnnnnnnnnnttcttactccaattccccta

SEQ ID NO: 10191 - DNA, 651 bp, Gossypium hirsutum
agataatacgctactcgaacccacgtttttttgtattgacaacaatatctgtaccaatcgaacaaaaactcaatcgactaaatcaaataattttaaaaaaataataagatattaagtcattttacattgatatttatacatttttatagttagattaaaattcatttcaaggaagaataaattttttttaataaattagccaatcaggggtgaaactgaggaatcggcccggctctccttaaaatggaataatttttatttaagccctttgaactttttaaaaaattaaattagaaaagataaaattatactttaacccctaaaaataataaaaaattaatttaatccctaaaaaattataaaaatagagactattaaaatgataaaattatacttttactaccttaaatattacaatttaatttcggccctttaaacaaattttctggcttcgctcttatagcaaatccgaatctatataattctcagcaccacctatctagtaacaaagagttatatataaagtggccgtattgaatttgaaggctacgggtaaaattccgacccggcccattaaacgaaggccttttaaacaaactgtcgcatttacccaacaaccgccaaattaccatccttaccttctcccaaaaa

SEQ ID NO: 10192 - DNA, 675 bp, Gossypium hirsutum
ttggtgcatgtgatactccactactaacctgagcttttaaatcacatgtgatactccactactaacctgagcttttaaatcatgctttgaccaccatttcttcggcatggttatgtccttccatcctcattgtctctcatctttataaaatatcggctactgatggctcaatttaaattttatattcacgtacttgaattcgtttttaaattgatcttattccatttttttattaatatgttttacaatcaaattttaaaataaaaatattatttatgtaaaataatttcggatggatgagaatcgaaataataatttacgaggaaattagaaaatggacgttatggttcgctttcacaaggcaaacattaacaaaccaatttcagtacttattatgtgcccaaaggagcaaattgaaaaagaaaaagaaaaggcaaaataattgatttattcacaattggcttattcaacaaatagcaaagatatggttgatttttactttcttttaatgattaggcatgaatttttcaacaaatagcagtcccactatatatacttttaaccaagtaatcataatagagtgataagaaaatgacaagtttcttcattgttcattgtaaaaaatattcatattagctttttattcccttttgaaatccttgatttgatttcacc

SEQ ID NO: 10193 - DNA, 627 bp, Gossypium hirsutum
  misc_feature (56)..(58): n is a, c, g, or t
ctcgggtcggggtgttacatactttcacgtatacactttgtcttggatgaatctannnctatcattttccaatgaataattcaatttcatgccatactattatttcatattcgaatacttataaacttacaatttcacaaattttaatatcaaagatccatctaacactcatatatcattttacaatatcacaatttagaattcacgtatgggtttaatcaatagcttataagcaactaaaacaagttttatccatgtttacaacataaccacaaattctctacaagctgttttttctgagcaacagtcgttaaattatttgtaactggggctacgaaattccaaattatgtgccgttaattttccatgaaaatagactcgtatatcctctatccaaaaaattttcagaatttttggtttggccaatcaacaccagaattttcttaaagttcccctattttactgcttgactactccgactactcttcactaagaatttaatttctcattgtaccgaattcaaaatatgttttcgtttattttgtttgaaactagactcattaaggagtctaagcgtataattttatcttataatcatttttgtacgatttatgatgatttccaaat

SEQ ID NO: 10194 - DNA, 372 bp, Gossypium hirsutum
tccccaaaagggccacaacaaagcataatatacctattttgtccatctctgattattttctctcctacactttagtggggaaagaaactgacaattttctgtttggttgatgagaaaatggaaattgtttgtttgtgtatgaattctgaaactataaagcttttgctgattttgagtattgttttgtggtgcctgcctttgagatgacgactttatacaatatttataggattttaggctaacatttttatattttaaaaggtaaaatagatttaaggtcactaaattattagtaaatttgtgttttggtcacttagctttaaaaagttataaaatagtggttgaattattcgaaaatttttatttaagtca

SEQ ID NO: 10195 - DNA, 650 bp, Gossypium hirsutum
atagatccgaagagctggttttatcattgcacaatttgcgacacatctgcccatgtgaaatgtgttctcggtgaatctgtaaagaaagggatcatccgcaccctctcccatttgtgaagaagataaattactaccctggatgcactaaatgtagagaaccctgtgaagagctcgctcttgaatatgcagaaccagagtgcaactatctcgttcactggaaatgtatgaaaccatatggctttgaatatggatgcttgataggtagaggcttttaattggcatttcaattgtaagttgaaataatgtaatttagccaattgattgggttgaaacttgtgtggtttgggttaaaactgtaattgaatcaaattgacttcaatctgtaatatttttttgctgaaacaaaaaacaaaacaactttagcaacagttacaatatcaaaaaaaatcattagctttgtcattatcaattgtcttctaataatttcatagaaattaatgttgtcaacacattaactctcgtcatatcaacagagaccattttgaaaatcctgttagcaacacaattagcttccattaagatgtttttaaccgcccaaaactctctatgtcgtagtagcttttggatttgcctaactagtgtggagattg

SEQ ID NO: 10196 - DNA, 616 bp, Gossypium hirsutum
  misc_feature (609)..(613): n is a, c, g, or t
gtttgatttatggttttatgcaataaaatcctagtttctttgttttcgattatgaattctaaattgttcttgggttaattaatatttctagagctttaatccatgtttgatgtgtatgagtttgtggttgaatagacccttcttgtgattagctcttgcatagttgaatagagttgcattcaattctaaacataggaggatataaatctattggattagaatccaatctaataggggaatccatagagcgaattaatgcgataatagggattttaattagaaagaaaattcaatacatcaacttagagttacttgcttatatgctcgaaagagatattagtataagttagagatttctacggatcaaggaaactaaggaaataaattgcataaattagattgagaattttagatgaattctaagttgattcttacctacgtatcgtttagtcaatcggttgatatttaattattttcatgttttattctttggtgcaattgttagttaatttagatagtttattttagttttaatcaatgttttgaattattaggttaaatgataaaaaaggtgataaatactagtaattgtagtcctcaagggaacgnnnnntat

SEQ ID NO: 10197 - DNA, 695 bp, Gossypium hirsutum
cctttaaggctggtggtacaaatttagcacaaaggccgaaaaggtaaaataggaatccagaatatcttttatccctcgaaaccaaataatgaaattacatgacaaatgccgtactggtattttaactataattagtaaagtttttatagtaatggattaaaagtttaaagttgtgattaaatagattgccaggtttaatatgttcattttctctacagtaaaagtttcaaattagtaattataattttgagtaaacaaacttgcagtgcattcaaaagtgtgtttgataaatgaaattctagagatgagcaccccacatatcatacagcactcttatcaaatagaaatgagtttctattaataaacaactattttgatgatgcattttagttaacattgcattactaaacaactttgcagtgcattaacaagtgtatttgacacatgaaattctagaggcaaacatctcacatcactctcatcaaatggaaatgaatttccctgaataaatgcattattaacaagcttaaaaaaatttaaaaaatgttttccattagcaaatggtatctgagtatcacacacaaaagttaaacatatcacagaatatcatgttcagcgtttcaataaggattgttacttgcgccaaattcaagggcactttcaattcaaatcatgtaaggtggtctaacctcacc

SEQ ID NO: 10198 - DNA, 578 bp, Gossypium hirsutum
  misc_feature (124)..(124): n is a, c, g, or t
  misc_feature (478)..(478): n is a, c, g, or t
  misc_feature (481)..(481): n is a, c, g, or t
ccctggtttcccacacacttttgtatgatctccctgctttcccacacacttttgtatgatccaaatgcagccccgggttcagaatggcgaacttctgaaataaagccttctggtctgtgcctcnacagtgtgtctattaaagcttgaaagaagcatgccctgataatttaaggatcttcagtgaccaatgacctatgtattctcatttaagttaaatttgattgtgttaagctgatttggactgggaacatgtcagaacccaaaacctatgttgttgaggttgaacttgttaattggatttctgttttatcatttcttttttcaaaatatcctgggtgataatgctttatatctttcgtcttgttcttttggtggttgggaagtggcgcaaaactaaagctggctggctggcttgtttacttagattatatatacaagattgattaagtatacatatatcacacagaaaggaaggganatnaatgaaatatctagcatgtgtggaggagataagaatggctcaagaaacagatgtatagtgcctgatgcacgcaattgaaggcagcatcaatcaacag

SEQ ID NO: 10199 - DNA, 610 bp, Gossypium hirsutum
ttgtagaatcctttccaatgcaatggtatatttagttctaaatattgggtagttggaaagcacaaggcaaatatggccttaagattacttcatttgaaatcaagatgttaaaatagatgcttggtcatatagaggggaaaatggattaagaagcatatgttgagatagatgggcagccaaataagaaatggacgatctttagaaagtaaaactgtaacagttaaggatgaaccgataaaatgaccactgggtggattggtcatgtacaatctaaaccatgaagagagctaaacatagaccaagaacatatttcttgaagcagcaaggctagatttggcagcttgagatctcttgatgtagcctttgattggatggaattgaatccttcttagttattatttattttacatactaattgcatttctttaattttagattttttgatcaacattttaaactggtcctacagataacttgattgtttggtatatgtaacactaatgccttactctgtggcacgcattgtgccaatgtgtgggatccattttctttactagaacaattttgtattgcaatggctggaggaggatgcatggtaaagctctgatta

SEQ ID NO: 10200 - DNA, 345 bp, Gossypium hirsutum
tagtcagaatagtaatcagtccggcatgcacgctctcttcagtgagaagatgatttatttcagtagtcttacactcttgcataaatctgttgatttgtccttgtttttttcttttttctgccttcattatttgaggtaaccttattatgggcatggattatatatatatatatatatatatgaataggttgcagttcctagcttggaagacttgagtaatgtgaagatgatattttacaatgatctagcaccaagttcctataaaaatctacgaaaaataagtgttgggggatgtgggagtttgaaaaatctatttccagtatcaatagccaaaggtcttccaca

SEQ ID NO: 10201 - DNA, 648 bp, Gossypium hirsutum
tgcatgaagcttcccaaaaatgtcttaagaaggttgctggaaatttctagtctcttttgttttaattttggttgaccattcagcatcttattagtccattcggctaccttagaaatttagctataaatagcttgttttgtattcgttttaaggttagacaatatatttttagaacttatatgaaatttgtttactttgtgagtttgtttccaactctcattgttctccaaggactggttagacttatcaagtaacccttgtggcgtcaacccgtttttgtatttcgaacttatcactttgcacccaaagtgtggcgttcaagttataccgaggttcctatcatctgtgatagtgggtcaaggttccattttattcgttttccatccatacaacatttaacctttcctaagtattcgtataagtcccgggttaacacacttatattgtgttggttcaacttgaatacttggttttcattcacctatcatcctcaatacatttcataaccccttttgaactaaatttgagcctttatctcttctttcttaacctatttcgtccaccctcgagtattactccaattcacgatcgggcacatctacgactcgactctccttcccgagccggggcgcatcaagtaattcatat

SEQ ID NO: 10202 - DNA, 584 bp, Gossypium hirsutum
gctaaacatgccgatatttatttagttgactaccaaccataattaaaaccaattaaaataaaatcaaagtccgaaaatttttgaaattagaaagtaatagttctgaatcaaatttaggttgataataacaatacaaaaattactaattaaataattaaacatcaacatattattttacacccaaattacaaaaattactaattataagaggatagcaaagccccaatagcaacccaactaatacgattcgaactcaaattacacctgaaacaataaaaatactgaccatcaacctaacacgagttcaattaaatggtaaaatattaaaaacacaaagcaaagaaattgatgatggcttaatatcactgtactttttcttctcaaattaagacaaaattttataaaatttatgtataatttcagtattatacttttcaaaataagacaagaatgatataaaactgttttttatctttcgcgagaaaaaaaaaacactttctaactctcactgtgttgatgttttaatttatataattaactcatgtatccaacgggtaaaaaaaattagtttataatagttaagc

SEQ ID NO: 10203 - DNA, 307 bp, Gossypium hirsutum
aatgacaaatatgtaaatattgaatgctaaatttgttattatactaatcaaaattatgcacagttgatagaagatactaactttgcgattaattatccttagttgctcattttcgaaattgatagaaattaaattgcttcgaatttttttgaaggagactaattttcttaatttcaaaattgagagggattagagaggtctttttatctttttcctgattgatgagatatttgaaaaaaaaattaacaaaaaaatttaaggtctatttgtttaatataaaatattttataaaaaataattctgaaaa

SEQ ID NO: 10204 - DNA, 668 bp, Gossypium hirsutum
ggtgcggtatttcgttagtgattctttcaggaccttggcttgtcacatgagtctgaatttcatattttcgtatgtgaaaagaagtataaatatcttcatatactagacgctcgctaatgagtaccgcatcctcaaaattgtaaccttcccatggcatataagctactagtacgtttttgcccaaagcgagttcgccaccaaccgtagcggcaccgtccgctaaaatttgaccctttttaatgcatttaccccgccgaacccgggcagtttgatgcatacaagtatttttgttggaacgttgatacataactaatggaatgcctagagcatctccattgcccgataaaataatcttgtcagtatcggtggaaatgatctttccctcgtgatcggctatagcgggaactcctgaatctagagccacttggcgttccaacccagttccaacaatgcacttctcggaacgagaaagcggaactgcttggcgttgcatattagaactcattaaagcccgattcgcgtcattatgctcgataaaaggaatgagggaagctccaatagaaaaatattgaaaaggaaaaatacttcgaagatgaacttgttcccatgcaatagtcaggaattcttggcggtatcgagccggaacaacctgttcttcctgaataacc

SEQ ID NO: 10205 - DNA, 701 bp, Gossypium hirsutum
  misc_feature (630)..(631): n is a, c, g, or t
  misc_feature (633)..(637): n is a, c, g, or t
  misc_feature (640)..(641): n is a, c, g, or t
  misc_feature (648)..(648): n is a, c, g, or t
  misc_feature (658)..(658): n is a, c, g, or t
  misc_feature (667)..(667): n is a, c, g, or t
  misc_feature (672)..(672): n is a, c, g, or t
  misc_feature (674)..(676): n is a, c, g, or t
  misc_feature (681)..(681): n is a, c, g, or t
  misc_feature (685)..(687): n is a, c, g, or t
  misc_feature (690)..(691): n is a, c, g, or t
  misc_feature (697)..(698): n is a, c, g, or t
ctttattcagtgagacgtaccatatctttactaaccacaagaatttgaagtatctgatgtctcaaaaagatttgaatttgtgacaacaaagatggctctagttattgaaaaactatgagttagtgattgattatcatcttgggaaagcgaatttagtctcagatgctttgagtataaaatctttgtttactttgcaggagatgaacacatagttaactttgtttgatgatggttcgattttagctgagttaaaagctaaaccgttattttttcagtaaatttgtgaagcttagaaatgtaataatgaattgcaagctaaaagagtacaatgtgagtcggctattgattcagatcattagatcggatccgatgattgtttaatgttctgaggtagaatttgtgtaccaaagaatttcgagcttattcagaaaactttacacgaagaacacaatggttgtttatctgttcatccggggagtaccaaaatgtacaataatttgaaacagttgtactggtggtcaggcatgaaacaagacatttcagagtttatgttaagatggttggtttgtcaacaagttaaagctgaacatcaagtgccttcgggaaatactacagctggtgatgaaccanngnnnnnccnnccttccnctttttttcnccccccctnccccncnnnccccncccnnntcnncccccnnctt

SEQ ID NO: 10206 - DNA, 626 bp, Gossypium hirsutum
ctagtattcgattttctcgagaaatgatccggatttcctcgaggataaaattactttgtttatttgaattttttttcccttcaggattgaattaaaggttgataaacacgaggagctttgaagaagaagaagaagaagaagattcttcgttttattcaatttgcgatgtcgtttttgaccatagactttttttttatcgttttagttgccaactctttttgaattttacaaaaaagataatggaggaatattcaacctaaagaaaaaattaattacttttattttgttcgaaatttaatttaatttcctctatttcttaatttaattacttctgtaattttctaattattaaaatttttgaaattaatatacaatagagttatataaaaaaaatttattttaaggttatggaaaaaagaaaattaattaaattgtcactaaaaaatattcttagcatgggttatctataaatatatgataattttcttttaaagtattaaattattataatcagactatcaagtaattattaaataaaatcaaatcattataatacaaataactgattactaatataattcagattaaacccaataaattaaactaaaatttgtaaacataatgag

SEQ ID NO: 10207 - DNA, 677 bp, Gossypium hirsutum
  misc_feature (666)..(666): n is a, c, g, or t
gagtagtaaacccaggtttgtttgtcaaaatactggcagttatctctattcttttgtatcttttgctccaaatattcctttgtcttgttgaaattctataagatgctttagttgtttcgatatctgatgtttcaaaactactatttatacatatcgatatatggtgaattacatttcatccaccgctaaattttggttttgaacattattgaaagagtcgattaaatacattgtcaagataacaattaagttgtaagatgttaatcatgtttgttatgtagcataccttgggaacaaatgttagttgttctcgaatcagaggatctggcctctgcaaccttgagagagtcttgggcccttcagacctcatctaatcccatgttgggttcataggaccatttgttaatggaagtagtggatcaggtcttgtctctatgctaagtggcgattcttcacataatattctctcaagtgcttccatgtcttcccggaaaatcttgtgagagaacaatggtaccttaagcagaatagaaactttttgaaagctaaagtatggcattgctcaaaagtaaagcaaaccttatacacaaactaaaagcatcacttactcgaggaagtagtgaagatggggtaaaatgggataggacaaaacctaagtctatgagncaaatgacctg

SEQ ID NO: 10208 - DNA, 533 bp, Gossypium hirsutum
aaattacttacaaattcccaatgtagaaatatccaacaaaggtataaaatatcaaatatgttttttaatggtaaaagatattacccaagatgtcatattaggaacctcattcatatccttactcaaaccttataaagtaacaaataattttatctccaccaaagttttaaacactaaggtggaatttccttttgtagaaaaaccgaaaataagaaatctcaacctgttaacactacaccaaaacaagtttttagcggcacttttttatgcatttagtgtcgccttttagcgccgctaaaagtatttgcaacgtttttgaaagcgccgcaaaaaatgtcgctgttgttaacgccgctatagatcatgacctttagcggcgcttttcccacaaacgccgctatagatcaagacctttagcggcgatttttccacaaacgccactatagatcaaaacctttagcgatgcttttccacaaacgccgctatagctcaggacctttagcggcgcttttcacacaaacaccgctatagct

SEQ ID NO: 10209 - DNA, 646 bp, Gossypium hirsutum
  misc_feature (629)..(630): n is a, c, g, or t
atgctcatatattgaaagacatatatatatgtctataccttatagacagaaccgaagccgccttcaccaatcttattgacagggctgaaatcttcagtagctgttcttaattctttgtatgaataaaattttacgttttgaacatcaaactctgttcggaagaaggaaaaaagaaagcagattaggagttttccttcattaaattgcacacgacaaaatgaaaagatgtcctaattatcacaaggcttctgacttaccttcatcaacctcgaaagtctggttgttcactgaatcgttgcgtctacgaaataagaaagaaaaacaagtcataactttatgatgcgccagtgccaagttttcctatatatttgatcaatgctttgaatcagagcagttatgaacctgccgaaaggaaaccaatgaggaaaaaaaaaaaatttattttcttacaaaaatttcagggaatttgaaaaaaaaattcttcggggcgggctggtacccctcttggaaaaaccccaatttcctgggggcttcacccaaaatcaagcacttaaaattttcgggaatatctcccgggattggttgaggtctcttttagggaatccttaaaaaaaataataaccccaaannggcggcccccaaaaaa

SEQ ID NO: 10210 - DNA, 540 bp, Gossypium hirsutum
  misc_feature (11)..(12): n is a, c, g, or t
  misc_feature (61)..(63): n is a, c, g, or t
  misc_feature (480)..(482): n is a, c, g, or t
  misc_feature (488)..(492): n is a, c, g, or t
  misc_feature (498)..(501): n is a, c, g, or t
  misc_feature (504)..(507): n is a, c, g, or t
  misc_feature (509)..(513): n is a, c, g, or t
  misc_feature (517)..(521): n is a, c, g, or t
  misc_feature (525)..(525): n is a, c, g, or t
tcgagcttgannatattttaacgggctaatattttttctaagttcattttttgagcctaannnttttgtctaaagtctcccaaattttaagcgagtctttgaatttaggcagataacttgactcatgaacatgtctatagatcaatcaattaaaaaaggtaatataaagcttgttgctatatctacgggcaactcttggagtttttattggttcaaacaaacatactctatttactagtttttctcttgtaaaagcattataaatgtttctatactagaagttggattgcattttacttcttgtattaataaatgggcaaattaataaattggtcattcttattaaaaaatttcatccggttgtattattaaaaattgggatagttgatggaataaccagatagtgacacatggtgtgccacgtatacatcatgttgacgtaccgacttttaatagtgaaaatggatagaatttttaatnnnaatacnnnnntgctcnnnnatnnnntnnnnngacnnnnntacnttttttttttaaaaa

SEQ ID NO: 10211 - DNA, 686 bp, Gossypium hirsutum
ttgagctgggttaattctcaaaattatacattaactttaatttagtacaattatacgtgtgaaattttaattgtggtctaaatatatacttgaaaatttaattttgatttaatcatacacattttaaaaaataaatttatttatttatttttatattgaataaatataattatttatgcatgcaatatataaacataaaatgatgttatattaataatagtgttaatagtttacaaaaattggatgaaatcaaaattttatatataaatttgcataaaattaaagttcatatatataattgcacattaaactacagttcacgtataattttaacacatatctcttttgagtttaggtcaaaagtaagcatttgattattttgatcggtttaattgattttttctaatttaactgacttaattggtctgaatataaaataaccgaaccgatcgactaagatatcattaaccgatttaatgaaattgactcagatgtcattaattgggttaattaaattaagtcagttgtcaggttggaataggttagataattggattttgagtttgggtaatataaattatatcatatattacaaatatatttaaaataataaataaataaatataagtcagttgagttgatcgattcgattataaattttagtaatcagtactccactggccaaa

SEQ ID NO: 10212 - DNA, 868 bp, Gossypium hirsutum
  misc_feature (433)..(433): n is a, c, g, or t
tccaaattaaattataaaattttgaagagtcattgtattattttataatttttcattttctaaaggactaaacttctaaatttattatttttgggctaaagactttaaatctaatcattttgagctgggttaattctcaaaattatacattaactttaatttagtacaattatacgtgtgaaattttaattgtggtctaaatatatacttgaaaatttaattttgatttaatcatacacattttaaaaaataaatttatttatttatttttatattgaataaatataattatttatgcatgcaatatataaacataaaatgatgttatattaataatagtgttaatagtttacaaaaattggatgaaatcaaaattttatatataaatttgcataaaattaaagttcatatatataattgcacattaaactanagttcacgtataattttaacacatatctcttttgagtttaggtcaaaagtaagcatttgattattttgatcggtttaattgattttttctaatttaactgacttaattggtctgaatataaaataaccgaaccgatcgactaagatatcattaaccgatttaatgaaattgactcagatgtcattaattgggttaattaaattaagtcagttgtcaggttggaataggttagataattggattttgagtttgggtaatataaattatatcatatattacaaatatatttaaaataataaataaataaatataagtcagttgagttgatcgattcgattataaattttagtaatcagtactccactggccaaattgacataactaaataaattaaaattaattaaaattatcaaataaatctcattaaattaattc

SEQ ID NO: 10213 - DNA, 635 bp, Gossypium hirsutum
gcgaccaattattaggcaaggtgccagataagtttagtggtaactaaataaatatgaaataactagaagataattttcatatctcaacaacttttctaatatggtagaaagacaacaattcgctcgaacagtcataatgaggttgatcaaaggtcttctaatgtgagataaatctcaaaatctagtacatttaaggtgactcctacaactaatcaacttaaaaaaggtcatgcaactcagttaggaatgaattgtcctaactacattgtatcgagagatgtgtcggggaactggagcacaaaaaattaaaatcgatggttgtatactctttcttcagtcatggacatggtatcttttacttttatgtatcttagtaaacttcccttatcaattttcacttgtaataaggtaaaattcatttaataatataattatcatattatcttttctattattatatttttagaataacatattatttaaacaagtggaacaataacgcaagtcatataggtatactgaacgagcttgaagaagttgagattagtttttgaatttttcaattacataataattacgtaaagatttgaaatttaatattaggcacataatgaaatttataatttcgtactgca

SEQ ID NO: 10214 - DNA, 684 bp, Gossypium hirsutum
agtctgtctgatgtcatgatggcagcaattacagccgatttgtttcggccggtcagtgcaacatacacccacatgctgctcaaaaacttctcggtattcaaacggaaactagcaatgatttttgaacttcttttactagaatttgcaagatcgagagacgacacaacttgaacctccgaaacaaatcaagataatgccgtaggcatatatggctttgacctgacctttctctgccgcatgcttcaaacaaagaccagactcctatttccttcgactaaaacaatcgaccattcctttcctatataatgcttcgtcattcttggcagcttttcatcttttctgaaagactcccacttttacgccatggaacgacactatgtccatggaaacgttctccaaaatttgatggtagtttgatgctccatgaaaagctttacaagttaacttggcgttgacgaaatcagtgatggaatttgaggcggcatgcttgagaatttccgccaacatatcttttggaaaagaccttatgatgttattgttagcatctttcttcgtcaatatgattttatttgagattgataagaggcttgtttctcaaaacaaatcctacaatgcaatctaataatacaacgaagctatattatgtgtatatatacacacatataggaaaggaattagaggcgg

SEQ ID NO: 10215 - DNA, 672 bp, Gossypium hirsutum
ctcgtgaaagcccacgataactctttagggtttgggttgctttgaaagtggaatacgagagatcaaagggcgaaaggccgaatctttctctcttttttttcttttctaggcttttgcatgtgattttaaaacttttttttttaaaaaaatggtagaaattggatttttgggttcctcggccaccgtgtacggcggcgctgttgccggtgatcagcggccaccacggtgacgatcggtcggaccttgaccagatactggagagtgggagagaagttgagagaaaacttttttgttttttggtttttttgaaatgaaagaataaaaatgaaatttttgtcaaaaaaataacttttatagttataaaaaacggcgccgttttgggccactgcgcagatgccaaaacggctcgttttggccagcccgtttttgacccgacccgcaggctgaggatcctcgcgttttcgttaagtgagttatttacagccctgatccccacacttttatggcgcttttcaattaggtcatttttgttattttttgtttttataaattttaccttttaattttatttagtttttaatcgggcccttacccactgatgctttgaaaagggcctaaaaaagggatttaattgcttatttagtccccatatgtgtttgcgcacttgattta

SEQ ID NO: 10216 - DNA, 609 bp, Gossypium hirsutum
  misc_feature (547)..(550): n is a, c, g, or t
  misc_feature (552)..(552): n is a, c, g, or t
  misc_feature (589)..(604): n is a, c, g, or t
gaatactgattttgattttttcttaaaacttttcaaatttgtcacagtaaaatgttttttggaatagagtttttaaaaaatgatatgaacattttttgattgaaatagttaacaatactaatgaaattttaaagtagagagaacagattatgtcaaaattaaagtagactaaatatcaagtctcagcatagtatagagactaaaactaaaattagaccattctcttataatattaaaaaaaacaaacaaaagaaataggaagccatataaattatatataatcaggtaaaatttaataatattgattatttgaactaattaataataatatgaaaatataaaaactaaattatgttagaaattaaatatcaaatttaaacataggattaccaatactgaaatttattttttttataatgcaaagaaaactaataaaaaacaaatttccaaatcatacacacaaaaaaaaacaaataaattaaaacccttgggacattacttgtatatatagaaagcatagataataggccaaatatcaaacaatgcnnnnanccataaatttactacatccgaatggatttctcttgtnnnnnnnnnnnnnnnnaaaaa

SEQ ID NO: 10217 - DNA, 519 bp, Gossypium hirsutum
tacccttggtcgatattcatggtgtcttaccaaaggagccggtcagaatcattgagcgacgaatggtgaaaagagggaatcaagctatcactgaagttcttgttgaatggattgattctttccctgaagatgcgacatgggagtctttgtctgagttacaagctaagtttcctcattttcatccttgaggacaaggatctggtcctgagagggtggtattgatgtgtactggaaaagttagtgaaacgttgagttttgggttgaatgaataattggttaaaacggggcgttgcatgttaagtgaaacgatgtgttttgttaaccgtttttgccacgtcaattcttgttattttttcttccttttatgttaaaagtgtggggagtcagttatgaatttttatgaatagagaaaacagattttctccctatcttctttttctctccctttctctgctcttttctctcttaaaaattctactcgatttttgagtgttcaacagaaattgacgagaacgaact

SEQ ID NO: 10218 - DNA, 611 bp, Gossypium hirsutum
  misc_feature (571)..(571): n is a, c, g, or t
  misc_feature (573)..(577): n is a, c, g, or t
  misc_feature (593)..(594): n is a, c, g, or t
  misc_feature (596)..(597): n is a, c, g, or t
tcacatactattggcactgcctgtatctttgactcagataccttggtgtcgagtacataagccaagtaagcatcatacccttttttgacatacctctatgctgccattactgaaatcacatcagataacccctctgtctgatcagatttaacccggagcaactcaccattctgacattttagcacaatatatttctgtctacaatttactactgcatcatgctgggttaaccaatccatgcccaatatcacgtcaaattcatcaaatggcagtaacatcaaatcagccaggaaacaataacctcttaccatcagtggacaatttttacaaattttatccaccaaaacagattggcccagggggttcgagactttaaccacaaattcagtaggttcaacagataaatttttaacaattgcaagtttaacacatatatatgaatgcgtagaaccaggatcaatcaatgcagtaatatcagtatcaagtaaagaaaatgtaccagtaataacatcgggtgctgaggcatcttctctggcacgaatgacatatgtcctagcaggtgctcgtgctncnnnnntgcctgcaatatcttnngnnactcctccgctaca

SEQ ID NO: 10219 - DNA, 429 bp, Gossypium hirsutum
ggtgcatgtacttccagctgcatatgaatgaaatccattcgcatgttcaattacctgccaagacaaatgaaacacctagttaaggcattaacaagaccatttaagcacacaaataagtatgtattaaactaagacatatttaagaatttaacttaatagcatacattaagtctgttcgaaaactaaacacacttaatagacaaacaaagaagatgaattaaatatgtaacatggtaagacacaataaaggtcgaataataatgacacaattaatagaacaaatcaatcaaacatgtaaataaagctgtagaaactaaacataattaaataaactaatgtaattaaaatgtccaagtcttagcagctgagttagctagctaagctaaattcagcctcaaataaattgaagatatcctttgttgaaatcgt

SEQ ID NO: 10220 - DNA, 660 bp, Gossypium hirsutum
ttaacctcggcttccgagtgttgatctaaaagcagcctaatatcttccagtcccttgggtagtcccacgtaacttggctcatagtttcacctgtaaaaataatattttagtttaaacatataataaataaaaacatttactgtacaaactatgcatttattaataagtgatttttcccttttcatcaatggaaacatgtgtgggtcgttcactcggggacgtaaaaatgataaccgccaccaggcccacgactgtagtaggagcaagcaaccattgatttacatcttatctggttttatggcccgacacaactctcggtataatgtgcccaacacgactaatccccaactcaattgtccgcattctttgaagtttactaggtgtagtagccaccttatgtgtaccaaatttcaagatttttcgggcattaaaatgcccttgattaattaaaggatgaatgcttgggcgtattgttctttgacgacctcagtcgcgtgcagagaaaacttatcaaaatttttcgccaactaattcatcgatatccggccaccatcaaacttgttcaggaccttccccaataatgcagtccagagatcctctttaccgggaactatcgttgctccagtgacgaccgacccatccatcaatagaccgaagttg

SEQ ID NO: 10221 - DNA, 400 bp, Gossypium hirsutum
aaaaggataaggaacataaaatattctactaagtggatccatccgatttaagaaaacagaagggaaaagttgaagaagcctttgcaaaacatgaagagagatataaggacgatagagaaaagatccaaaggtggccaaacgctttgagggaagtggctaacatcaagggatggcatttaaataacaggtcattctttcttctctattttctagttttagtgtctaacaatattgttattttttgaattgatatatatatatgtttatttccaatattcctatttgttttgtcggaacagtatttaggtagctagactcttttttgaattgaaattaacaatattgttaatttctttgttttatttctgtctttctattggctcaccctgtcgctgggtgt

SEQ ID NO: 10222 - DNA, 384 bp, Gossypium hirsutum
ttcacactttatacttgcccaagcctggcctgatccgaaatatgggcctaaaattttacccaagtccgcgtatatttgtaaatgacaaacccaagcctattttaagcccgcccatattttttttaatttttttgaaaaaaaaattatattgcttttaatttaatatgtaataatttaatatacttttttatttattagaattttatgtatagacaacttaacatttttctaatttacattatagtattatatattaccataaatctaatttttataacccgagccatattttaacaagactaatttttttgcccaagctcatttttcaggcctaatatttttgcccaaatcctcccaaattttgggtgagtaagccggtccttg

SEQ ID NO: 10223 - DNA, 603 bp, Gossypium hirsutum
tttaagtagtatggcactagagtctattgaaccgaattgaattttaatattggcaagcctgaactcaattagatatctctttttaagtttgagctcaattcaagatataattagtggcgtatctaggaagctaataggggggcccagaccccttaaaatgaaaaaatattcatttaaattctaaaaattttaattttaaattaataaaagcaaaattgtactttgacccccctaaacatgatttaaaaattataaagatataggctattaaaaattaaaatttaatttccgaccctaaactctataagtatatcaattttcatactcaatttcggctcgataattaaacttaggattaaaaatatatattaaagataataatataatttaataatataagagtatttaataatatttattaaaaatgaaaagcttgataaaactccgatttattcaattttttaaatattttttttacccttaatccttatttattataattataaagtacaaatattgaatttccacaaaattaattatcatcataaatattgaatttccacaaaattaattatcatcacaattggcacattccattcatgt

SEQ ID NO: 10224 - DNA, 631 bp, Gossypium hirsutum
atatcttcgtattagttcattgggctgaatcatgattgttaaacaatgtaataacttatattgactgtttgtaataatatcttagtaaatgacttgaaaatatgtgcaacttatgtatttaagtggaggttacaaaaaaataacgtagaaatgggatgatgtaaaaaatggaaagttatggaaaattttggtgatgattttttgttttgacaaaatataattttttgaatatttattttgatgaccacataacttatgtatttaattttgcgtttttatttttaaatttgtttgtattaatattttaaaaatttgtctttgtaagattttaaagcagtgcatccagtataacaactttttaaatctcttattgctatacatttataatttataatgactatgaagggtgaatgatgtattgaaagatgaagattgaagacaatgttatgtaggaatctataggatgagcaatgctagataatagataaattgttatattaaaatcaataccttatttataatcctgagctatagtaataataataataataataataataacatcaccaaattacagcaataattatagataatatttaatttttttacgaatcaattattaacgataaat

SEQ ID NO: 10225 - DNA, 641 bp, Gossypium hirsutum
gcgagaaagataaaaagacaaaaacaacatcaatccacgatatatatcatctttctttttcctccccaaaaacgccactaccaatcaaatctaataccatctcgaaacataaaacaaagtattctcatctccatctatcctcaaggatcaaacttgaatttatattatgatgaaatggcagaagatcaaatacccaaaactaatcaaaaaggaagatcaaacatacttaccagtgataaaatgaattgaggaaggaggtgtgggccggcagcgataacttgtcttcaatctttttccacagaacggagttgaaagtgcggggatttgaacatgtaggggcagcgggcaaggcaactacatgctcctctggggcccggctgttactgtcagatagtaggcagcaacgtggccacgagtcagccccctttttgtccctgagttaatgctatcctcacggactttcgtctagtgtttctttactgcccagtcgtgtattattttatttttatatatggacgtcgctcaaaaagttgcatgtaataaattgtcagggagtgtttggttggtaagtggaaaccttatttttcaggttccaatgtacaaaatcatcttcgatattattatatttggggtttcggaat

SEQ ID NO: 10226 - DNA, 461 bp, Gossypium hirsutum
  misc_feature (60)..(66): n is a, c, g, or t
tcgcttcatttttatccgttaacatgttaattttaatcgttaattttaatcgttaatatnnnnnnntaatatcagattaggcccctgttcgttagtacttcttctaatatagtacctctactttcaaactgtccaatttggtatataaatttcaatcccgtttattagaccataatgtggtaaatttttttatacatgacacgtgaccaattgagcgaagaaagtgacattctttttatgaccttttactaaagtttaaagacttctctacaattaatttaaatattaaaaatataaaattattttttaaggattattatcttatactgaagtaaaaaaaaaaatccacaagtgagtcttagttgatactatttatttttaaaatataataaaataataataaataattaaaaaagacacttcgtatcattctaagtatccttgagttattttactccgct

SEQ ID NO: 10227 - DNA, 689 bp, Gossypium hirsutum
atcgtggtttatgggttgttgggtagatgttaaaattatgaattaacactgccaaagtagtgtttgacaaaagagaaagccttaaaaaaattcaagaatttaaaatatgtaaattaagtattcttctcaacaatttaactttaattatgcagaaaggcttcttccaataatactttaactcggtggtcaaagtttattaccttactctacgccatggtgtcatctcagttagttcatcctttgtaacatctcatttttttgaggtataaaaaatagtggtttcaaaaatttattcttcgatgatcaagtccataaatattattgattaatatttatgggttaattttagtattatattgaatttttatctaacgattttgttaattcgatagttagttaaggtacaaatgttttgacgcgaaagttagaggtataggaaatagtggcttcagaaccccattttcgatgagtgagtccattcatatttacaaggttagtataaaatttaattgaattttggtccattaaattttctatttagatagctaattagattgcaaatactaaattataaaagtggtaaaagtttaatcgctatggatttttaattgttttaaggaccaattaagcatttgggccattttgtggtgtacaaactgtggataatacctaaagctcaccaaaattgg

SEQ ID NO: 10228 - DNA, 550 bp, Gossypium hirsutum
gactttgctcaaaactccaccgtcgttggtggctgaaactccgacctcgtccgcctatgcgacgacccctcgacggattccgccggtgactgttccatcaacaaatggtaaccacggctagacccaacggacatggaccggtaacggttgctgggtttttgcttcttcatggcatggatcaaataagggattaaaccttccatggatactactttatcaactcttttaatttccttctaaatgtgtgtgaaatgcaataaaatggaagaagatatatttatagcaaaaggttgtcgttgttgagaaagttgacattaatggaggaaatggtaaggatattgaatacgtgtgttaaggacattgtcaaaattttatggaccgatgctttcattttcattttgttttggtagttaggttatacttatctacataaaaaatattaaataaaaacacaaacacactcacacatacactagctattaatcaatggattatgttcttatcaatatgggatttctttttccctagatggtgatctcgtggtaaagta

SEQ ID NO: 10229 - DNA, 641 bp, Gossypium hirsutum
acaatcacaagaaaaaggtaagtaaattgaacaactcaaattatcaacttttttcttaaaaaaagggttttatttgattcaaaatttggagaaattttataccttttcttgttacaggtaaggaatttggaggaaagacatgcaaatcttgtcatggagttggtaagaatctttgggaattgaatttcatagtaatttgtaattttcttaatgttatgatcatccaatagttgaatgaaatgtagggtaaagcaggtttcgcacttttttaatatagaaatttgtttttttttcaatttggtacacttatttagtaaagttatatattttggttctaaaaagtagcaatgtaaattttttagtgtttaattctggttttaaggttaattcaataaaagttaattattagtattagtagtgttgaattttcatgattttgttaataaaatatatttaattttacttgtgaatttgtttgattttgtgtttaatttgttaaatataagtatgatgcttgtgttattttgggttatagagttgaattgatgaaagctaattattgatattattagttaagggtaaatataatttttggtagttgaatttggattcaatgttctaattgatacttatgtttattt

SEQ ID NO: 10230 - DNA, 487 bp, Gossypium hirsutum
ttttttctgttttaatttttagtttataaattgtaatctatttatatatttatctttagctcgatttttaatatatgtatcctgtttatttgtatagttctgatattttttagcttattttgtttttaaattatgtctttaaaattattcatactcatccatctatgctggaagaaaattttaaacataaattttatactattaattattttgttttatttttaaactaatatattcgaaggggctggtgctcattttaagtagtaagtcaattcaaaataaaaatatttcaatttattatttttaacatcttataagtaaaaatatatcttaaataataatatttaaatatattcctaaagattcacataaataatatagatttttaatacgaattaatttttattttcaagtaaaacttaatttaaatgctatttaccattaattaaaatttataaaaataaaacccttaatgaagtgggaggta

SEQ ID NO: 10231 - DNA, 415 bp, Gossypium hirsutum
tctggcttcattctcaataagtttgctttgctccttgtagtgttcagtcaaaagctcatcgagtcccataaggtttttcctaaaaaccatttttacagtacacattactacaaagaatcaaatagaactgcatgattaatataaaaaaagaacatagtaagcagctcaaattcattggaaatgctcaaagcaattctcctacaaaataaaacaaatttgacaaaaatgggaaagcaaaagcataataaagtaaataggtcctaaaatcttattaaattcataaaaaaaattaacaaagcgactatctttaaggaagcgaaccatgttcaaaatgatgggttctcaatcaacctcattaacttaaaatccaaaccgaaaaaggaaaaaaaaaaccctaccaacgcaaaccggtaat

SEQ ID NO: 10232 - DNA, 651 bp, Gossypium hirsutum
aaattaggtttttgttgttatgttgaaagaaagaaaaaagagaaataaatttgttatgttgaaggaaggtagaatatttattgctatggtgatgttttacgaagaaattgtctagcttttaaagtatgtatgcgttcaggtcaatacagtgacgtttgaagtgacacacattttatttaccgtgtgaagagtgtattatcactcttatagataaacgactcctaaaacataatatcgtttttcactctaaccccaaatgaaatacctcggttaacaataagggagatgaggcttctaattggtagtggttaagtggttaagagttcctattgatgatggttatgcaatcacaagtaaaattagttatgccgtcaagagaactctgtttttttccttgcactagaagaagatgctttataaacctttcttaaaagtgtttggagcaagaggactctcaaggagaagccctgcaccaatggtcacatgccacatttggaattggcacaaggagaaaaagaaaaagaaaaaaaaaattacctagtgccatcacatttggagttaggaaaaaagtaaaaaaaaattattggtattactacatttggagctgtgatcaaagatattttttttcaaatttgatgcctccacataaaa

SEQ ID NO: 10233 - DNA, 636 bp, Gossypium hirsutum
  misc_feature (68)..(74): n is a, c, g, or t
  misc_feature (112)..(112): n is a, c, g, or t
ttctctataatcacatggtagtattcattattttgttttgaccgaaataatcaatcgaaatttaatannnnnnnaatataggggggtaggcaaaaaattacttttaggaaangaaaatttagataattttattaattttaagggacttagaaaataattataccattctaaggaccaaggccaataccttccttttgggttcaccagttattaaatatgaaaattcggtttgttcaataactaggcataaatcaattatacacttgaaacataaatgttagggtagaactatgatttaaacttaaattattttaaaaaaataaactcttgattaataaattacaatttgaaatttaaacgtatgaatttcaaaattattaaatacaatctctaaacataattacaagttaaaaggaaattcaaagcacagtagaggagaatgtgctcactttgtggaacaccaaaaacaatgtatgactgtaattcctctctccaaagagggtctaaaattctaaattcaatattataaagcaaaccccatttgccaatttgctctcttgtttgctttctcgtcttattgagagagagtcattgaagaaacaagacgaagtgggtcaaacattgtgggtgattgga

SEQ ID NO: 10234 - DNA, 575 bp, Gossypium hirsutum
  misc_feature (571)..(572): n is a, c, g, or t
gattgtttatatcattgtccgaaatcaattgttaaacatggacaatctttatttatttgaggcaagaccagaacataatgaaagcattttcttcgagtatcatctgcaattttacagattttacagcaagtatattgcttaaaacatttgaaaaggaagttcttggaattattcagcaacaactaaaattaataccgaccgcggattatggatctagtgggaaaatcaccaagacttatttacagatggaattgttcatactgctacatgtttccttctaaaacaaggaaactaattcaaccatgaatgttcctcttgatactccatctgccttgatataagttgtccctgataatgcctttcgtaattgaagattgggttctcgtaaatacctccattgccccatctttcaccataaggatacgaattaccaaaaagatagtctgcagtctcctcccatgggcagtttactccttgaggaccatagcaatttcgatactcgttctctctctttgcacgatccaggcagggcccagtaaccaaacaaactttcacaaaggtccattgcttnnaaa

SEQ ID NO: 10235 - DNA, 572 bp, Gossypium hirsutum
ggttatttctttctgcatgcactctctctctctctctctctctctctctctctttactggcaaataatttgggaattttctatttatttaaataaattttgtagtatatgttcttccaatggtttcttggaaaattaaaacctttgggaatgaagatataaaaagtctaaccacattttaactcgatcggtttatgaagtcattcttaagaggtaatattttataggtttaagattcaaatcctctcattccccaactatgactgaccagctttgtaaaaagaaaaagaaaaccattaggtcaagcatataaagtagagagaattttgttcttgagggcgtgttttagggtttttgcagaagattgcaagcatgcataagcatcatagtagggggggaaaaagggtttatctttttccttatttgccaggcaaagggcaaagggcaaagggcttctctgttgttattagtaggccaaaaagattgtgaaaaagaacgggaaagcaaagaagaaagcaaaagcatcttcatcatctttccaaaaagaaattaattaagcattatttatgtggc

SEQ ID NO: 10236 - DNA, 610 bp, Gossypium hirsutum
ctttgcatttcgatatttgtggatatttgatttattttattcggattaagataattattaaattaaatattctaaatattttaatactcgtatatttattattcgaaattattttacatttaaaggtaacgggtttgaaattggataatagatatttaaatttattttatttatttaaataatgggtttaaaattttttattttttttgtatttttaaattttttatacgatatctatatttatctataaccacttgaaggaaaaacgtaactacacacttaattccaaatcatttttattgttataataggaacgatatcgattaagttaagactcaattgattttttttttaaattgcacttactaaataaggatatttagtggagtcaaaataatcgatgattaatttaattataataatatttgaatttaatgtggataataagtatattcgaattttaaaacatatttaccgaatataaaaattaaaaacatacccaacccgtgccccttctcaatccataaatagaaggataatgcgcttaagcgcattcgtacccacatccttttgtattaacaacaattcccatattaatcgaactaatact

SEQ ID NO: 10237 - DNA, 370 bp, Gossypium hirsutum
aatagatcatgaacatagttcagattcaaagagcctcaaaacccctgtgctttccctttaggactacaaatcaaatgctcaaagaatgactctgaatgcctttgccattatggcaagaagaagcttacagaagattccatttcaagtccagattctcttatagactcgacaatttccagaaaaaggcattttaggcaaaacaatgaatatttcaatatggcagatagaccctaaaccctaaacagaataaaattttgcaaactgatcaagtacgaaatataagtcgatctgtgaatggatgtgcaactctaatcctttagatatgttgtgaattgaagttgttggcaataacaactacgaaaactgtaag

SEQ ID NO: 10238 - DNA, 450 bp, Gossypium hirsutum
gaacagctttgtcccatttgtcttgataactcgaaagacatggcatttggttgcggccatcagacatgtgaagaatgttcgaaagatcttgagacatgtccgatatgccggagtccgatcggaacgaaattgaagctatacttgtgatcatattcttttagtaatttgttgttgataagatgcaaatagtaaataggtttgatgatgttagattttctgatattttgattgaaaattcatttgtttctcattgtttcccttgtaaaattacaatcaattgtattttcaagctccatagcataatattaaacactttttgtaggttgggtcttaactcgattggcattgacattgttgccaatacaggaggacataggctaaagtatactgaagcgcattatccacctatttaagagttgagaatagattatgggtagttctaggcataat

SEQ ID NO: 10239 - DNA, 650 bp, Gossypium hirsutum
  misc_feature (563)..(563): n is a, c, g, or t
  misc_feature (631)..(631): n is a, c, g, or t
ttgcagttcggtattttgatttgtaaacgcgggttagatgttgtataacgtcacaataacatatcattcatattggagatttacaagttgcttatatttcatatcatgttttaaatttttagggtctcaggttttttggaatttgattcaatttattgtttcgtgttgaatcactttaggataattaaactgagtcaaacttgaataatgacaagctcgagctcaatttaaaattcggtttgaactcgatcgaatattaacttataagctcgggtttagcttaagctcgttcatactcaatatgttcgagcaagttcatttgtattcaagcttggactcgttcatacttaagctctttttacataatagagataaaaaaaaaacaacctaatttcataacataaaaataggtaaaagtattatgtcattgtactagtagttggattacattttgttccctctactaaaaaaagagtaaaatagtccatgtaagttagatcaaatagcaaactaactaattatttcctcaattatgtcagtttttaaccatagaaatggaaaanaaaataccaatttactctttattataacatataatgactaatttacttattttttgaaaaaaaaaaanaaaaatgcaatttgactcc

SEQ ID NO: 10240 - DNA, 601 bp, Gossypium hirsutum
  misc_feature (506)..(507): n is a, c, g, or t
  misc_feature (514)..(516): n is a, c, g, or t
gctttttttatgatacatgataaattatgaccattttctatctaattgcgctagagtggttatgcatgcatctaaatttgggtttccttttctcaatctatgtgcttcttctctaccttttatgaggctattcatatcatatattatatagaatctgaaattatgtatcaggttatgggagaatatggatatagcattgagcatattctgatggttgacatcattcctgattcttctgtacgcaaagcaatgaatgagataaatgcaggtaatgacatgtaccaattaaagatgttcccacttttattgagctatctgttttagttctctctctttctgatacaagcatataaaattttgttaaagttgtgaaattactacctaaactccagcttctgtaagaatcatgtctgtcttcttggcactaattaagctattaaacgacgcaaagaaattcagtgaccatgcaatcttgagtctaatactcttggactcttgagatccanntgtctgnnntttgaagaaacgcataacttggctatgattttgttttacagctcaaagaccatgccaactcgagtctaatactcttggactcttg

SEQ ID NO: 10241 - DNA, 473 bp, Gossypium hirsutum
  misc_feature (464)..(464): n is a, c, g, or t
gttgaactatataccagcttagcatcacaaaaacaagattaaaaagttaatctataattaatttaatatataacaattaccaagcttgtggctgtagtttagtggtaagaatttcacgttgtggccgtggagacctgggctcgaatcccagcagccacatctttatatttttttaaaaatacatgtttcacgtgcttgaattgaatggcttatactttgagaataagactttaagaccacctttaatttaaaaatttacgattacatccttcctaccatagttgttaatttggttttagtttatttaaattttttttttatattttatatatgattcatgatgaatatgtaactgtttattttatttaaatataaacttatttcaaaacatacaacatcctttaatagtttatattatttttaaaaataatataaaacttatgtacagtctttattaaacaaantctcaccat

SEQ ID NO: 10242 - DNA, 631 bp, Gossypium hirsutum
attacatcctgatggttcaccaaaagccaagatcgggtcattgcagatgtttgtggagaaccgtggaagttgtgaggatatgggtcctgggtctttcccggtcgagcaagtacataaaatctcggtgttggatataagattggctaatgcagatagacatgccggaaacattttattgagcaaagataaagatgggcaaacattgctgattccaattgatcatggctattgcttgcctgaaagtgtaagttaccgtatactaatatgtcttaactcaacttcattcgtttaaacttgagccgcataatagatttacagttagatgattattgaacttgtattagttaaagttgtcttgattcactaattatgctaattttatattttgttggctaacaagctgagtggtgctgctgcctgtctaattcgttcttggtttttggagtccctatgagtgtcattacaagttatttttctttcacaacattgcaaagttcaagttctatatattttgtggtcttttgctatgtactaataactatttgtttattctgtttctatagtttgaagattgcacttttgactggctgtattggcctcaagctcgtcaaatcgtactcgtctgacaaca

SEQ ID NO: 10243 - DNA, 605 bp, Gossypium hirsutum
gttgtaaaaactcctagattcaaacagaaaagcatcccactaaaccattaaaagattctattccaacgtcaaacagatttcgacttacttgaccgcaataacaagtagcaattagtcaagccgtggtttcttggccagcttcagtctgccttctctttttcttagagaagcacaagcaattactgagatttataaatatagacacgaaccataaatgaaaatttggggttggagtattaacagttcatccactatttgcacaaggtccttgaaaaggatttgccaagttcaaaatgtcgtagatcttaacataagtcgttgcttgtttcttcttgccttcttgtggtcacaaaagacattttcctggatatgcaaagtagacaatcaataatgatttatccgaagaaaagaaatgagagaaaggagacccaaagacgagatgattggtacctgtctgcataaattacggctaatacactgatgtaaatcataaatgaagcactttaccgtccatcagtctggcttctaagttaataattttgatctaaatccaacatctactattgccatagatatcgcacttaatactatcggtatagtcttca

SEQ ID NO: 10244 - DNA, 511 bp, Gossypium hirsutum
ttcgatgaatatgaggggattgaagttgcttgcaattaagtaaaactccatgatattttacaaacccctgaagatttcgaaagattttaccgtgaaagtcatcttcttaagacattgaaacacaacattttgaggcttcatacttccttggtagaaaatcgaatgctttctataaggttaaagatccagaagtctgacaatttggggaggaatgtttggcaactatgtctttgaggttgtttgcaagagagttgttgaatgattcttttctccagattgatgatttaagatcactggagtataggagagaacttgatgaattggggcctctcattcgacaaccatatccggaacttcatttcagtagtacttcttatcataacagttatgagaccctgaatgaatgggggtatcatcttgctgaaaccgagcttttcaagcatcaggaggatgaacatgctgtggatcttgacataagcattaaggggaagacgagatatgatggtggatc

SEQ ID NO: 10245 - DNA, 664 bp, Gossypium hirsutum
ggagttgaacgacataaattatagcggttagtagctagtttagcatcgttggaggctaaatttgtaaagaaagggatggttaaggacagagcttcacaaaccatgttcttcttcaaagatggggcgacaaatgataatggtttctatgattgtttgatatacattagaccatatgaacaattgctggtgggttttcaggaattttctattatcgaatctttgattattgggagcttggggcactgtatatagctttgaatggtgggggtttgttttcatgtgatacggtgaggtattgggtaagcgattcttatccttgtgtttttttatttctttggttaattacattttacatccctaaagtatgctcatattttaaactgatcccttaattttaaaatattcttattgaattttgaaagtattaatcaattcatccgttagattgtgacaagaaacattcaaaatatataaattaaattataaatacatataggtcgatctcataaattatttctaatctatgttttcaaaatacaccacgatttttttatacaattttagggtaagagagaagtaaatacaatttgaaccgtgccaaacaagtaactaaaaaaaactttaaccactctatataagtcaagatacaccatgttggatgttg

SEQ ID NO: 10246 - DNA, 626 bp, Gossypium hirsutum
gctttgaagaaaggagcaaaagcacttttgtggttgcaatttccatcaaaagtaaccatatgacaacggtaacgataatcaagacaacggttacaagtttgttcaattgctttacggctgttttggtgtcgctcaaagcatgtgctagcgttttccgatcctggtaaacttttatctgtatgaaataacaaaagcaagcatgttgaccaagaatcctacaacaggatattatgtttgcatcaaattcacatatgtgtgcgtgtgtgtatgtatatatgtgtttatatagtttcatataagtgctcttaccacccagttagtgaaactttttctgtcaatttttccagtgcttgatccttcaaacaatggaaacacgagttccacctcctccttgatcatgaaccttaagagatcgtcttcgtcgatgtaactgaccataaagagcatatcgtaagggaaaaggaaaaaacaaaaattactagaagcctaaagaaaaagctgatattctcactggcgattttgattactctcatgacagaccacgttcgagaaaatttgatgagcaacatactgtgcctcctcctcattagtgatctctttatctgcttgttcaccactttctatgt

SEQ ID NO: 10247 - DNA, 597 bp, Gossypium hirsutum
tgaaataatcaccagtgcaatgtaattatcttgaagtggctatctggcaccagagtatgcaatgcgcggtcatcttacagagaaagtagatgtttttagctttggtgttgttgctttggagattataactggtagaccaaactctgacaatagattagaagatggtagagtttatcttcttaattgggtaatccaaaaggataactttcccttttgcaatactatttattcaagcacctattaaaattttaaggacttaatcattattaatttgttcctacaaatgtctctaggcatggaccctgcacgaaaataaccaactcttgagcctccttgatcctacgttagcggagttcgacgaaaacgaagctcttcgagtgataggggtagcatttttatgcactcaggcatcaccgtcattgcgaccgtccatgtctcgtgttattgctatgcttgtaggagatactgaagtgggcaacgttacaacaaaaccaagttatttaactgactgcgattttaaggatgtaacaggggattatgaggataaaacagacaccttcatggatgaagaatctcaaaagtccaatgcatccgatc

SEQ ID NO: 10248 - DNA, 623 bp, Gossypium hirsutum
ccattttatttttttatgcaaaatatggttaagtttttagaatcacaaaatactcaaaagtttactttacatgtcaaagttctaaggaagcatctgcaccttagtaatataatctctcaaaacataaaaagcataaattattatttattgaacatatgtacctatttaattgataaaaccaaaatgttaatctttatattaccagtattcttgacatgcaaccaaagacaaggtgaaacttcatataataacaaagaaggttagtaattaaattataaattaataagtagttatcttccaacgtttaatccctgctagaatatggtcccccaacccttaaacaataagtcacaataacaagccaaatattatgctctacctaacatatagttattaaagttcagtggttctttctttgaaactcccctgttccaaactgcacaccccaaaatgaaatgtggctgaaaaattgatgccaaaagatttttatatcattaaatgttaaactttcaacacatcaaacttacttctgctccttgcatgacgatagcagttttctataaatgcacaatacggctttcacacatccaaagttctcattccttaaatccttgaaacatctt

SEQ ID NO: 10249 - DNA, 676 bp, Gossypium hirsutum
tggttgattgtctaatgttggtaagctcataagaaatggtagggtgatggtcatagtttatcatctccgttattcaattctctcctcttaaagaggattcaaacgttgataatgtcaccattgaaatattcatgttccaagaaaagaaaaaaagtaatttgaactaattatagagatgtctctaggtttagtcaaaagtcaaaaaaaaaatcacgtgtcacccaatgaattaatgtaccacagcaaaatccattactggattaacggaatttttaacaacaaggatgctattttggatgaactgttatgtgtagttatattatcaaataaaagccaaagaaaaaaaattcaataaagactattttgatctaaattttgagtattgataaacacatcatttatgtatttacttttgtgatagttctcttcttgaattatgctatttatgttcttaattatattatttatacttatattttattcattattgatttaggggacaactagagaaaaagtttatttttaaaaagttttacgatttggtcacagtgcaacatcagtgagctacaaaacctccattttgggcccataatataccgattcaaagataattgaaaattttaattgaagtttttcacagatgaagcccaaaaacatcaagaaggcatcataaaac

SEQ ID NO: 10250 - DNA, 670 bp, Gossypium hirsutum
atgtggatgagattgatggtcatgaaaatgatcaaacccaacatcaatatcatcatactcaacttcttgtatagaagaaacaacagtcatacttccgtatgaagccatttttttctcttcttcatgtgattttgcaactaaaaaaatttaaaaaaaatgaagaagatagagtgttcttacgtttaccaaagtgatttattttatcagagagagagagagagagcccggctgcatttatttataacatacggcatttgactttgttaaggttttttcccttttcaataaacaacacattttgggcatgagctgaataaactatttatttaatttctccagtcgtataccatattacatattcataagttgttaaattaattaagtgttcttgttgtgtcttattagtggggaagattggttatttatatgatatatttactgtttatggaattaacgttttaggtaggctccatgcatgtcgacatgtatgctaccctaaacttaacacgtgttcgccggtccaggtattcaccggttcattcattttgcttcgttccatgtgctcacgaacacttagggaagtgcgagctaaactcgcgagctccttaacaacttcttctgttgggatctaaactcgggtcacaagtcggtagtctagattgtgatcgga

SEQ ID NO: 10251 - DNA, 685 bp, Gossypium hirsutum
ttttccagcttgaacaagagtttgtccatctgtaaggcagctttttattgtaatattatctctagctaagcaaccttgaagagcagaaaacaaaatcaaaattgtattgcaacataagatggcagaaagggttttaagtactcctttgtctatcatgcaccttggtcattcctcattcctcatttcctacaatctgagtctggtagtatgtaatctcaaagcacgaaatagaatgcaagttgcatctggtatttggtgttcttaagcgcaggaaaactaatatgtttgaatgttcgatatatacttgaaatttgttccgcccactttacttaatttgttggttgcaaatgatgcatcctcaaaaattagagaattagaggcaataaaatattaagaatcgacaactgaaatttttgtttaaaaaccggtaaaatcgatttttattaagaattgacggtgatgagccctcctctggatattggaccgtccgaccaatgactactaattgaatttatatttgttagggagtcttgggcttcaccagggaattcatttcgaattttgatttattcaaggctcattttaatgttttaaattagtatttttgggttttttagattgatcttttaaaattggatgacatgtacaaattgagtttagccacatagcacaacatgccatataa

SEQ ID NO: 10252 - DNA, 554 bp, Gossypium hirsutum
gacatttgaatgacccgttatttcatcatatcaaactaaaattttaggtcaaattacacaactagtccttgtactttttttatttttttctttattttcattctcttatttttctcctttatttttctctcttctcatattcttcagtacaaatgtataatctttacccaccaaataaaccaaatcattgtttctttcacatgattcctaaattgaatttcactcaaaactgaatatcaatcattctcaaatcaaatctcgatttaaatataacctaattttgcaactaaaactagatataactaatcaatataaaaaaaaccatatcattaatcaactctaaacataaattgatttttttatattcaaaaaaaattgttttccttttccaaattttgacagaattgtgtaaattattcatttccttctcttttatttattgacaaataaaattaaacaagcgataaaattgatctaaaccttttaaaatattttcaagcaagcttgattggaagccaagcatggatgaaccaaagagagaaagagagcatgga

SEQ ID NO: 10253 - DNA, 625 bp, Gossypium hirsutum
  misc_feature (16)..(16): n is a, c, g, or t
aatttcctatgtttcnccagtcattcgcaattatgacccatcttcctcagatgaccactaagaagaccaagacagagcgatggcatccccacccattgtacaagtctctgatactaagaaagaaaaggaatctagggacattgaagaatgtctgcgaaatatagaaaacttgtttgaggatggtattttttgttgattaagaggacattgttgttgaaaaggaagtaaccagtatagttcgaaataaagaactatcgagggttcgaatccctctctctcctttttctcaatagatagatttctttctttattgatttttctttgctacagaagaggaaattgttgcagaagaggcagtggttactgaaaaataagaagtccctaaaaatgagaaagaaaaagaagaagattttgttgagaagattatcacaatacccgagtctgtgggtgcaaatattgataatttggagcaaactggagcaagatcagcaaaagttgctgaggtaaccaatgaggagcaatgtaattcactggcaatagtgtcctacactgggccactccaagtggcctctcctacccaaacagcagctgataatgccaaggtagagccgggaaatgaagagca

SEQ ID NO: 10254 - DNA, 651 bp, Gossypium hirsutum
ggatttcattcttattgccctgtttactttgatgcatttcatgctgttcttgtggatgtaagtgttcacacgactctgctaaaaactgtttctcgcaaggtccacacgaaggtacccaggtttgtctcagatctagaaacaatgatgactaaccttctcaccaaccatattcctctcatctcctcttccgaaccctttttcagggtggtggcgggggtggttgtttggggggaatgagataaacggagagggatggtttcatttattaaagtaaaattgtgctttgatgatatgttgaagtaacttgacctgttgaatcatttcagcattgcttattctacaactaatgatgtttctggtgaaagcattgatggatctactcaggtttgttctaaacttttaaaattgaaatgcaataactacccttaaccatagctttcccatttgtgcttctgcttgattgtggcattacattcaatagatttttggtgtcactactggaatgtggcatggataaatgttctatggctgtaatataatctcagaatctagtgtgcaaggtgtgtgcatgagaacaaagtttattaccttattgtggatctagtctattcattggactggtggaaattgtgggttatggttagtggaaag

SEQ ID NO: 10255 - DNA, 542 bp, Gossypium hirsutum
catggagatgggcgacaagggataatttttcatcgacagatacttatagaggtattcaccaacttggctcggttgataattctagtgtttggaatttgatttgaaaaatcaaggcgcctcaaaagggttagggtgttcatttggattatgtggaagaatagattattgactaatggaaagagagtaaggagacatacggcgaatgaaagccattgtccgagatgtagcaatgtatatgaatcgaggatccatgttgttcgggattgcaccttttctaggactatttggtggtcaattgtgccaactcattctcaagtaagatttttttttctctgccattagatgaatggattttatggaacatgcaaaacattggagatattgatagttaagagatagaatggtgaatttttttttcctataatgtgctggctgctatggaaaaaattagaatatacatgtgttttctagtagtcacagttgtgcccaggaaatcatggatatgggtgttagttggacaaggagtaacgtaaggatgcttg

SEQ ID NO: 10256 - DNA, 639 bp, Gossypium hirsutum
  misc_feature (634)..(634): n is a, c, g, or t
tcgaatgtcttgttagtttcataatttgcttagaatctatgatacctcagggaaatatccatttcaatttgtagatattttctttcaaaattattttagtataaacaaaatctcgaaaacaaataataaagtcgtaagtattaaaatgcatttcttaaattcgtcaccacttcataaaattatttgtataaattaattaagctaaactttgagttttgaaacacaatatttttcagaaattacaaaatttacttggggaacataatataggttaaaatgattagaagtcaaattatattttgtttttctactaaaaaaatggacattttagtttctgtgcataaaatcaaagaataaatgggtcattctgttaaaaatttaatcaatttctattgttaaaaattaatctctgtacatcagtacgaggtatatatatgtagtaggccacatgtaattatccgattattccatcagttacgactgtttttaaccgtagaaatagataaaatttttaccagaagggatagatttactctttgacctaaaatacagaaattaatttacccactttttaagtaaaaaaaaaacaaaatataattaagtatccccataataattttaccgtatataaaangaaaa

SEQ ID NO: 10257 - DNA, 438 bp, Gossypium hirsutum
  misc_feature (375)..(375): n is a, c, g, or t
  misc_feature (408)..(409): n is a, c, g, or t
  misc_feature (427)..(427): n is a, c, g, or t
  misc_feature (430)..(430): n is a, c, g, or t
catattatttcgttactattggtccgtgatcaacgttcaaaataagtaaaaagaaaaacttttattattaatctcccgcgcttgtcgttcaccgcgtggggccaagacgccaccgccctcggcaaaagagtggaggagcaccactaattatggccgaaatatatatatttgtggacaaatttgccctttgggataaacaagtacgaaaaaaaatgtggggtcatttcttgaagactgtgaaagttttttttttgggagtgttagtgaaaattagtggataagattcttattcataaacatattggtcaaaaatattgaccaatgttgtagtaaatttagtacttgtcacctccttcttctataagtatttatttntagtacggtgtgtttagttttttttatacatcnntagtattattataatatnaanctcatcgt

SEQ ID NO: 10258 - DNA, 624 bp, Gossypium hirsutum
caagcatagaaagcgcaaccaccaaagaaccgcttgtttctatgctttcattgctttccaaatattataattttaaattggatgggctatattggaaatttgatatgcattcaagggtcatttatgatataacatcatttttcaacatttatgattttattaaatggcccgtgaatgtatataaaattttcaatatagtccatccaatttaaaattatgtttttttgtaattttttattattagtaaaaaaataccaatatgaaaaccattttgtaagtttaaaagtaacatataatttccaatataaaagtgtaaatacaatttctttaattagtaaattttaaattcccatattttagaagtaattgaatttcaatttttttaattttttaaattcttataataatttttaatttaattttttagtgttttttagtttagaaaataacatactattttaaaataaaatttataaaatgagggaccatatcaaaattttgataaattttaaagtggatagactatattgaaattttgataaacttttagagactattttgatattactccatttatatttgagcatttaatcgaagacggtttccataggtataggtaattct

SEQ ID NO: 10259 - DNA, 651 bp, Gossypium hirsutum
ggggaagcgccgccgccgtccagctccccgcgccggccaccgcacacggtggccggaaatcgccttaggtaaaaaaatcctctctttttttgtattttattatatgcatatacaaatgagtgtaaatctgaagataaaaagaaacgggaaaatatcagagaccttgacttgtcttgccgttgttctcttcctctttctcttgtttgctagtagcgtttccgattttagggcgtttaaatttcccctttttgatgtttgatctatgctacttatgaggttttaactttggtatattggttgttgaaatctttttgagatttttcgaattttttacactgctcagtccagagaaaagaaaaaaaagagcccccctcctctacattcggatctggcctttatagccatttctatacaacacattttttttaaaattctggccattgctccttgtcgcctgctctgtcttggtgcctgtttcatttgcagggtatggagggccagacgcgtgcgtggagagcatgggctagtgcgccgctatagtggagcagggtatgggcaacggcgtggcagaggaaaaggcatgcggcggctgaggctgaaggaggctagggttgctgaaaaatcttaagcaaatgggcttattatttgggc

SEQ ID NO: 10260 - DNA, 613 bp, Gossypium hirsutum
tggggcagagcaagaagcatgtatgatgaggcacatgctcaacctgcaaacatttgcagtcggccattgctgtccgagtaattttttttctttgcttacttaggaaaaccaaaacaaattgtcgctataaagctgacatctatatatatatatatatatataatagtagaatacatcaatgatgaaataggcttttggaagtattgatgaggtacgttgggatttctgtatatttgaggttgcagaaaggacatcaggtttgcaatttgagaccatgactttgacaggtaacttgaacataaccaagaacctacgagtctcatatttttaaccaatggcagtcaacttatacatgcaagttgttggagggtagtcaccaagcaagttatccaaggatctgacagggatgattaattgtgggtcaaattacagttttggtccttttattatgctcaagtttgagatttggttactgtactttttctttttgactgttcatgagactaaatactaatcctttcaaagattcatcgctgccctccaacaatgttgtgtttaggattcaaacctgaactttttgttcggaagtgcaatgtgcctcatcaccatactc

SEQ ID NO: 10261 - DNA, 749 bp, Gossypium hirsutum
  misc_feature (35)..(38): n is a, c, g, or t
  misc_feature (591)..(592): n is a, c, g, or t
  misc_feature (594)..(599): n is a, c, g, or t
  misc_feature (602)..(606): n is a, c, g, or t
  misc_feature (608)..(617): n is a, c, g, or t
  misc_feature (620)..(623): n is a, c, g, or t
  misc_feature (625)..(637): n is a, c, g, or t
  misc_feature (639)..(655): n is a, c, g, or t
  misc_feature (658)..(662): n is a, c, g, or t
  misc_feature (664)..(666): n is a, c, g, or t
  misc_feature (668)..(668): n is a, c, g, or t
  misc_feature (670)..(673): n is a, c, g, or t
  misc_feature (675)..(685): n is a, c, g, or t
  misc_feature (687)..(689): n is a, c, g, or t
  misc_feature (691)..(693): n is a, c, g, or t
  misc_feature (697)..(697): n is a, c, g, or t
  misc_feature (699)..(712): n is a, c, g, or t
  misc_feature (714)..(724): n is a, c, g, or t
  misc_feature (726)..(737): n is a, c, g, or t
  misc_feature (739)..(742): n is a, c, g, or t
tctggatgttttaatctagcgctactctctaaacnnnnctagagaataattcaagagcctgaagctctatggatgataattctaaaaggactttattttcctcacaaaacttttatggaaacagggaagggcactcgagcctcttggacatggagtagtttggtggaagcaaaggattttctaaaggaactattattgtgtcaagtcaataatggtgagaagatcaatatttgggaagagaaatgggtttatgggcttgatggatataggctgaactttcctgagacggttgaacccttaatgccaaagctggttgtagatattatgaataagaaagagggtaggtggaacatttctttaattgaacaatggatttcagagcaagagaaggaggctattatgagactacctatatgcaagacagaggaggaagataaacttgtattggagggaactatgaagttaaatcagactataatatgctgaggactgaaaaagtaatgaaagcgaaacttagcttgaattccttttcgcatagggtggataagaagatttgaaagatcatttgggatctgaatgcacctagtaagnncnnnnnnttnnnnngnnnnnnnnnnccnnnntnnnnnnnnnnnnngnnnnnnnnnnnnnnnnngtnnnnntnnncncnnnntnnnnnnnnnnncnnntnnnttcntnnnnnnnnnnnnnntnnnnnnnnnnncnnnnnnnnnnnncnnnntccttcc

SEQ ID NO: 10262 - DNA, 596 bp, Gossypium hirsutum
  misc_feature (530)..(530): n is a, c, g, or t
  misc_feature (542)..(542): n is a, c, g, or t
  misc_feature (548)..(548): n is a, c, g, or t
  misc_feature (559)..(559): n is a, c, g, or t
  misc_feature (561)..(561): n is a, c, g, or t
  misc_feature (563)..(564): n is a, c, g, or t
  misc_feature (576)..(576): n is a, c, g, or t
  misc_feature (583)..(585): n is a, c, g, or t
tgtttcgttgatgcatttatgtagttattctttaaaattaaacttaatcggtgggtctttcatctaaacaagtgcttagatataatgcatttaatattttaggttgtctgggttttaactggtgccaatgcgtacggggaagattttttcttggagttcctttctttcggatttttatcttgtagctactataagggtcatattgtctggtaaccgtattagggtgcagtctctttctgcatgaaggtaaaacctttttgtttgtctcctatcttgaggataggataagctaaggcccctaatggcactagcaaatagtgtaagtgaagcacttgataaaatttatttgtggtttatcatttgttgagaccattgtggaatttgttcctttgtttatcacttgatttaggatgttggtgggaaaacaagtatataattgaaaactggaataaggatagaacaaaaataaactatagattccactgatttaggtgatttaagaagtattgattttttttttttttcctttncaaaaaagggtngttggnttttgttctancnanntgggaagcaaantttcccnnngttggcccccc

SEQ ID NO: 10263 - DNA, 508 bp, Gossypium hirsutum
ctcctttcttaaatagcaaaataccctaaaataaagtctttaattacttctacgacggatactttacaccaaactctaatctgccagaagactgtttattggcggattatactatgtcaaagaaataatttccactctacatgtcttcttctcggagccatcagatttagggtgtgacaaatccgatttttgtgactgtaatgaagatgtggtttcactcacatgtttcaaacaccagaccatatattttaatttgtataagttagaaagtgagatagtcttggataagaaagttccagattataagattctcttattcttaataccaatccactaaaagcgtaggttctgtagaaatctcccttgtacccacctccatgttggttccttaaggattccaaagggcaagcgacaacttgtttttgggtgcaatctttaatggactctttgtttagttatgagtccaaaagaaaataataataataataataataataataataataat

SEQ ID NO: 10264 - DNA, 385 bp, Gossypium hirsutum
tccgtagcagtagaaagcgagcaaacgaaggaacggcgacggcggattgaacgagaagaaaagaagtgaaatggcgaggaaaggagtgtgaaagagcgagagaaagaaaggagagccatggagtaacggagtccatcaaagttagaagagaaaatctattattaggaagtaaaaaggggagagaaagtgagagggggccgtaaagccattggtagggttttggcattgaatttggcttttcaaagaaacaaacaaaaacaaaaacaaatctgcaaggaattgttgtggaggaggaaaactttggaagaatttcatttatttttattcttattttttgtgtggaggagggcagaagaaaggaatctcgaagaaaaaaaaaaaaaaa

SEQ ID NO: 10265 - DNA, 197 bp, Gossypium hirsutum
  misc_feature (50)..(50): n is a, c, g, or t
  misc_feature (53)..(53): n is a, c, g, or t
aagctattgaagcttacctcttagctaaccccgatgcttgcaactaaganatnggttgctttgaattttcatgcttcctttaaagacggatcagattttaatgttgtgcttctgatattttctttttcatcttaaagcctaaactgtcatatgattgtttcaataagagtggtggtgctggttgagctttgatcttc

SEQ ID NO: 10266 - DNA, 416 bp, Gossypium hirsutum
ataattaaagatcatccaagtgatcaggaaattaaaatggtctgaacaatgtgaaactaaattgttaaatgttaactaatgatgtccaaatggatatggatttatgatgttagtaagctaaaaatttagttgttaaatgttgcaatttatggtgtctgaaagttgtgatttatgatattcgaatgatgtattttaagttgtttggatgtgttaaagagttggtttaatataatgcctaatggttgtttattgttgttcaaagcatgatgaaataaacatgttaggcgtagtttaatatatgccttgctaacccgtaaggttgtccaaaacaagataaaatttagttgtctttaagatgttcgaatgtggttgttcaaatggttcttcaaattttccaaatgtgcccttaaaagagc

SEQ ID NO: 10267 - DNA, 413 bp, Gossypium hirsutum
ccatgctcatggtttgatactttcttttcccacttcaagcaccggattctcttcaagatttgcattttcaaaaatgtaataatccaatgtatcactcaaagcaggagagcttacaagattaaagcaaggagggcaatggatacatgtatatacggtttcaaataaagcatgaaagtgtgagcttttctttcatgcattgcatctaattcctacatgacacgaagagactaagatattaggtggcagttagtcatttgtctgaaatcagaatccgaatcataatcaccaaatgttgtcgtttccactttgcttttttccaatgtcatacggatagtgattgggatgcatgttaccagcactttttggataggttagcctcccaaaaaaaagtagatagtgtttgtcacatccga

SEQ ID NO: 10268 - DNA, 608 bp, Gossypium hirsutum
gaacgtatcttgcttctccattccttgttgatagctttatcatactatttcttaaattttttttggttccaactttttatttctatttgtctttttcatctaatactatagatatattgtttctcctacattttttatctaattttatatatcacatttgaacaaatcataaaaacggggttaggttctcctaattttctcaatattatcactaaaaggtaacattgtacaataattcttaacatgtagtcatattcttacgagtgtatagaatgtgtcaatagtaaatacataaattgcatgaatccatccctacaatcaatttgaaagaattaattttttgaaatgtattttaaaaaaatatgcatttgagagtgacataaattatttttatatttaattactattattttatggaattaatattattaacttaaaataattgtaggtctcaaaataaagatggtcaaggaagaggaaatatattgaacttttattcaaattcgtgaattccttttcatgatattttaccccaaatgttgaaattgttacttgaattgtctatattgttacattgttcatgatattttcctcagctacaagcttca

SEQ ID NO: 10269 - DNA, 763 bp, Gossypium hirsutum
tgattttctccttgatctaactaataattcatcatacatatcacaaattatgatcatgactagccatgccaaaggctaatcattgtcaaacatctccctactacactattgccatatcatgaattttaacaccaaaaataatcaaccatgacatatggcataaaaatcgaataggcctcaactattattcaaccaaaaccgaattggcccaatatcagtcatgaccacattataaaacccatttactaagatttataactaaatatcataggacccaaagtccaaattaacatttatgccattttcgcatggctgaaagtttacataccaaagttcaaacacaacataatagcctatacatgccgaaatgttctcctagaccgactaagaagaaagtaccaaaacttgctagctggtgtgatgacttcgatgacggtcccaagcacgcaaaaagacgagtccaagaaacctaaagtaggtgacaagcaaacaccgagtgagtatataactcagtaagtcataagcattacataatcatccattaataaattatcacatgagaaaacaagtgaaaaggggttaattctctccacccataccaactatgccatggttccttagacctttcggctcaatatcatacaaagtactacatcaatttttcatatgctactcaacatggtatttgaggcattttccatggatgctttcattctcgttacattcatgcaactaaataacattccctctaattcccatgatg

SEQ ID NO: 10270 - DNA, 665 bp, Gossypium hirsutum
atggcagaaagagtgtattttttaggaactccaaggagtgctttaatatgttcttgagaactatagtctcagatcgaaaatcaaatataaagtataaaaacgattttttagcgatgttaagtaagagggaagttttcatgtttattatttagtttctaggtaaccagtcctttacttaactcggcccaagcaatgcccaaagactcccatgcctttcttggttggaccaacccaaccggggatttccgacaagtctttcttcatttttagagcaagaagcggaactacaagaaagctttctttatctttatggataaccaattcattttcaaatatagttgggagactttccccaagaaatgggtaaaaaaaatggaaagatcggaacatgggaatagatctgataccaatacagactacctatttcaattgttgtgctttctaaaattgcatacctatacaagggttcaagtttcgatcgatatttgcggagttgatcatccctctcgaaaacgaagatttgaagtggtctataatttactgagtactcggtataactcacgcattcgtgtacaaaccagtgcagacgaagtaacacgaatatccccggtagtaagtatatttccatcagccggccggtgggagcgagaagtttgggatatatt

SEQ ID NO: 10271 - DNA, 610 bp, Gossypium hirsutum
taaagctcctcttttttctttttctttttttaaatgaagtccaaatttgaatataatgtttttacattgattaactaattgttactaattaagaaaattcactcatttacatcatgtaagactcgaacctaaaactttaaaatttttatggcctcaactttgctattaagctaatgtttcattggcaaaatttgatatctattaaagctattacttaaagatcattgtatgaactaaattataagtgaagaaaattgtaacaccttaaaaatctcgatgtcattaataataaaatttatgagaaagtaagagttattaataaattaaaaatttgagtaaggattaaactgagcctgtgtgaaaatttgaggactaaaagtgtaaatttatcatatgaagaaaaggtgtgattgaataaatgttttttatggatgtgacaaggaaatatattgagatgtggaattggaaaatcgaggcatggactaaattaaataaaatgaaaagtttaaggattaaagtgtaattttataaatttatagagaagagacctaacttgcaattttaccatggttagatattatcaaaggacataatgttaagtaggagtatg

SEQ ID NO: 10272 - DNA, 564 bp, Gossypium hirsutum
ttctctatagcaacttgcctctgtctaagcagaaatgacaaaaaaaaatgtaagaaaccataaaatatatgtgtgtgcgtgtatatatgtatatactcaattttcactgaagtatgaaaaacgtttacaatgtacaacttttgttgtgcaagtgcttaatggtctctaggagggtagggttacactttttggggggcaaatataaggctatattgggagcagcattgagcaggcagcaccatgagaggggtatgggaccggagctttcatcgttggtcgattgcaatcacatgttaggtagatttaaaaaaaagaaagaaagaaagataatggcttaaataaaaaataaaaaataaagagataagacttgtaggtagagttggctaacaaatttaaaggttagctagagggttcattaattgtgtttgtgctaattttcaacatttccactaattaattgtaattattaatcttctaccttgttgttagtggtgtgtttatttgaaatagaaattaatttaaattggtttaaggaaaaattactccatttcatcgtgtccaagt

SEQ ID NO: 10273 - DNA, 681 bp, Gossypium hirsutum
gtagcttctcgaacgactctattgagctcatactttctgaccgtacgaccttcctctttccatttctgtattgtagctacagcgctgtgtttcggatacacaaggcctataagcctccgtcccaacgtgtttcgtcgacctccaccgccacttttcggagcgacttcattatttggtactgctttctctaccaacgctgccgtcgagaaaaaacgcgacgcgatgaggggcgaacgaacgtagcgcatcaacattgtgtttttgttgaatccgtaaggcatttgatcagggttttagcattaggggagaagaaatagggaaggcagaacaaacggcaccgtttatttcgcgctatcctgcttggatttaaaatccagcaatatcaagggattaatttcatatttttgggctccaaaaggcccaatggactgaaacatacccggggaccgttaatgaagggtagtacaattcattttttggttaaaatctgctattcatcctcgtatttgtatataatttgagctttagtccttatactttaaaagttaaatttttaatcctactttttctatttaaaaatcctagtccataattatcgtcattggtagtttctaccaaaatttgtcaacttattgtttttatctcttgttaatcatatgccacattatacgaggtcaacct

SEQ ID NO: 10274 - DNA, 684 bp, Gossypium hirsutum
caatccctctccgttctatacaaaagtacttaaaatgagtttaaaatatctagaaattattttaatttagctcaaaaacattaaaaataaatcaaatcgtttttgaggactaaaaaatattttataatattttctcaaaaatgatttgagaatatattgattcgttctaatataataaaaatgtaagacaatcgaaatttgcaatttgaaaaactcaaatctataccttttcaaagtacggctcctctaatctctttaataaaagcattccttgaaatttaaaattctaaaatgttataacaccaaagattttttaaaaaaaacattttaaatttcaatagatatggataaattttaataaatacataacttaaaaactacattcatttaaacaatacaacaatatatatggttatcatttaatcgctttcattctttcttgctttttttctttttgcttatattaatattagtatttaatttttaaataagagaataatacacttcaacatacttaaatttatatctttttgtgtagacaacaatatccataccattcaaactaaaattcaaacagtttaaccatcttaaacttaaaaatgtgtgttattatgtcataggccttgaccttcgttttgttcaaaaggtccaattcgatatctctaagtaagcccgcattctgaa

SEQ ID NO: 10275 - DNA, 638 bp, Gossypium hirsutum
tatttactgctcacatgccaaaagcccaagccagccagactagaagctacagagaaatgaaagggcctaacctcgagcctaacccaaaactaaaggctatttcttagcaaattaacatgagaaaatatcgatccatatttggagatcaaccaaatccaatcgaaccaaattgactagaaaaaattaaaaaccctaactcaaaattgacacaaaagtctatcaaagattattcaaactcaaggaaactttccaattgctacataattgtaagcaacagactaaaatgaaaaagaaagttacaaaaatatgataaaatgaaagaagataagattcacttgatagttccaaattaagtagttcctgaagagtccaagacttagtacgataacaaactgttgatgaccttctcatccaggtccatatggaattaatcacaattctataaaaatatttgtaaaatataccaaagaccttaagttatgttctagcatctccaaatttaggtctgaagcagggcagtgataaatataaatttgtgtatattagtaaaaagaagtacatataagaaactaaaaacagagatgaaataaaaagacaaattttaagtacatattcatacctgaaatgaatctcccatg

SEQ ID NO: 10276 - DNA, 460 bp, Gossypium hirsutum
ttgatatgcataagattgtggggtttgttcaaagttatgcctaggatttcagtaccagtagagttcaaaggttttttcctgataaaccaaggaatgttttgtggcagccacctacatctaggtttatgaagctgaatgttgacgcatcgtttatggacaacactaagatttctattgcagtagtgttagctagagacgaggaaggacagatattgggtgcttgtacttacccgatagcggatgtggcagatgcttttgtagctaaggcgagagcgtgtgaaagggctctttactttgcgttgcatatgggtttcagaaatatcatcctggaaggtgattctcttactgttattaagaagctaaacttgaacatagtggatagatctattttaagcccaatttcacaggatattcggcttttagagaggttttttgaggcggtggcataccagtttgttcc

SEQ ID NO: 10277 - DNA, 666 bp, Gossypium hirsutum
tcccgattctagtgcaactaatcatgtcaccccaacaatggccactcttaccgatgtctctccatatacaggtacaagccaagtatctatgggtaatggtgagtctatttccactgataatataggctcttctaatattttggctggttctcggttgttacgtccaagggacgtgttgcatgtgcctacagtttgtaaaaatttgatctctgtagggcaatttgtaaaggataataatgtttatttcgagtttcatcttgttttgtgttttgtgaaggacattcagacagggaagactcttctggtgggccacatgcatgatggcttgtatcagtttgatttttcttgagctggttcgtgtaagcttggttctggtcacagtttaggttctccactactatataatgttcaagctcgttcctcccttgatctttggcataatagacttgggcacccctgcaccaacattcttactcatgtcttacgttcttgtaatattttcttcaagaatagtggtttgcctattaagtgtacaccttgtgaactaggcaaatctcataagttactttttactgcttcaaaaacagtgtactcgactcattttcaattagtaacatcggatttttggggtccagctcatgtgttgtccagtgggtactcataaaa

SEQ ID NO: 10278 - DNA, 521 bp, Gossypium hirsutum
tgagttttagattattcttagtgttttgaagttatttttagtacttttatatgttttttaatttatttaataagccttttcaaggtgttttatacgctattggacccagtttgaggggagaaaagcaaagccgaaagatgtggagcggagaaaagagtagaaaaatggagagaagcaaactgcttgtaaaggtcgcggcttggccaatctgtgctgtggccttggcctgagatttgcacttcaaattttgacttatatgtcaacttatgataagtttcataacactaatacattatttatgaaaaaaaaaagacatttacatgataaaattactagtaataaatttcgaaagtaattagaatggttcaaggtttgtagatgtttgagagaattttgaaaaattttaatttttaattttgtaaaatatatatataatgaagaggaaggggatcgtgtatcttaaaatagcatgacctcaataatgtataataataaaaaagtccaatcatgatatctatggg

SEQ ID NO: 10279 - DNA, 499 bp, Gossypium hirsutum
gacccatcatgttgttgttaaagaaaattatgagctacttgaaagagttaatcttttacttattatgatcttaatatctaacattttttttgttaatgttatgtttgctatatgattgattttatcttccaagggtttgatatgaatgagttttctgacatcttttccagtgaatggttatatgatattttaagtttttatatcttctcatttcttttactgtttatttgcaactttttgggtaaaaaaatggaaatcaacaaaactaacgatatttgatatttgaaattttgaataggatttgactatgttctctgttcaatcataaagaaaacttaaatatataatttagaaaaatcttaattttgttgttaaaaaattggtttattttaatttttgatttttttattgatttttgttggttctctactaaatggttggcggttattgagtattaactggtattgtttttaatggtagaggagctttgagtgttgaa

SEQ ID NO: 10280 - DNA, 420 bp, Gossypium hirsutum
gtttctagagattccattccaattttggttggaagactcctaagacttttgcaccctcttaaattcaaaagtttaagcctcctaagaactcccaaggatggatgacttttacaattcttgtacaaccttctaaaaccagaatttcaagatttggggccattgtgaagtctggtgtcttgattaggtttagggacacttcaaggttgatcactttcaacttatacataggctgtgaaaaacaataataaattagagagaaaagagaaaaaataagaaaacttatttttgttgtttattttttatcttaagctaaaaaataaggattgggtgaattaattttactctgtttcccttccataattgttcaatgctactgaatggtaagagaagtacaacaaggtggtccggttggaagcttaa

SEQ ID NO: 10281 - DNA, 613 bp, Gossypium hirsutum
atcctgtaattacaattctttacccgattcaggttgtactaataccggagcttcagtcaataagactttcaactgatcaaaactgttctgacattttttagaccactcaaacttcacatctttctggggaagttttgtcaacggagtcataatcatcgaaaaaccttttacgaatcttctatagtaaccaaaaagtcccagaaaactacagacttcagatacattcctcagaggtttccaatccaaaatagctaaaattttgctcggatcaactcgaataccagaggctgatacaatatgacacagaaaaccaacttctcgcaaccagaattcacatttactgaactttgcatacaactatttatgtcgcaaagtctgtagcactattctcagatgttaggcatgctcggattcatcactgaataaatcaatatgtcatcaatgaataccacaacaaattggtctagatacagtcagaaaattctattcattaaatccataaagatagtaagtgcgttagtcaatccaaaaggcataactaagaattcatagtgactgtaccttattttgaaagaagtcttcggaatatctgagtctttcactcacagctgag

SEQ ID NO: 10282 - DNA, 769 bp, Gossypium hirsutum
ttcttgcataagaacacatcctagaccaatcaatgaagcatcactataaattacaaattccttacccgattcaggttgtactaataccagagcttcagtcaataagactttcaactgatcaaaactgttctgacattttttagaccactcaaacttcacatctttctggggaagttttgtcaacggagtcataatcatcgaaaaaccttttacgaatcttctatagtaaccaaaaagtcccagaaaactacagacttcagatacattcctcagaggtttccaatccaaaatagctaaaattttgctcggatcaactcgaataccagaggctgatacaatatgacacagaaaaccaacttctcgcaaccagaattcacatttactgaactttgcatacaactatttatgtcgcaaagtctgtagcactattctcagatgttaggcatgctcggattcatcactgaataaatcaatatgtcatcaatgaataccacaacaaattggtctagatacagtcagaaaattctattcattaaatccataaagatagtaagtgcgttagtcaatccaaaaggcataactaagaattcatagtgactgtaccttattttgaaagaagtcttcggaatatctgagtctttcactcacagctgataatagcctgatatcaaatctattttcgaaaacacaatagctccttttaattgaacaaacaaatcatcaattcggggcaggggatacttattcttgatggtcaccttgttcaacc

SEQ ID NO: 10283 - DNA, 634 bp, Gossypium hirsutum
catgctctcagatttcgacctttcactttgctcagacgcgatcccagccgttgaatctccatcatcttcaccggacccaatgccgccacaaaaccagtcctgcaaccgtccgcaaccaacccgactcggccgcctcttccgaaggttactccggtcgaagaagatcgaaacactcacacaaagtaagccattcttcgtggcggagcctgtggctgcccgatcgcgttcctttgtcgggacccacgagtatgtctcaccagaggttgcctccggtgggtcccacggtaatgccgttgactggtggtctttcgggatcttcatctacgagatgatctacggccgtacaccttttgctgctccatccaacgagcttacgctgcgcaacatcgtaaaaaaacctctagctttcccaacccactcgtcttcctcccttcttgagcaccacgcgcgtgacctcatttccggcttgttgaacaaggaccccaacgctcgcttgggatccaaacgaggtgctgccgacgtcaaaacgcatcctttttttaaagcactgaatttcgcgctcataaggtcggttacgccgccggaggttcctgggttaaggcggcaatcaacggcgtcttattaccaaccaaag

SEQ ID NO: 10284 - DNA, 630 bp, Gossypium hirsutum
tactgaaagctcggggatagtcgaggattgttaccacactatgaaactcattttggtacttttgaagtgtacatatttataagtatggcatgtataggctagaatgtttatgtatttaagctttaatttgtatatatagatatgttatgccataagtgttggctagcaaatggtgtgttcgtgttaagttttggtatggttttgaatgggctgttgaatgatgatgatatagttgtaatgaagcatgttttgagcgtgaaattggctgaaaattgttgtatgaatgtttccaaaattttgcataggttgtaaaataggtgataaatgtgtgaactaatgagaattgtgggttacttctagtataaaaagtaatcatctaggcttggttagtgagaaaatgtgacaaaaattgattttcggacctaggggtaaaatggtcattttgtgaaattttaggggcaaaacgatcatttttctgaattatgaattctctagtgtctagagtaattttctgatgagatgaatgaatgtctatcattttagatcaagaattacaaaattcgggcctagaccggggaaaagcgaagcaagtggactaagtcgagctagtcgtctatagtttgtaatcca

SEQ ID NO: 10285 - DNA, 629 bp, Gossypium hirsutum
cctttcttcttttgattttcagtgagaatgatgagaaaataagcttaaaaattgtttttcttttatttattatacattaatacatagtttaccattttacccttggttattaaaccatttaatcatcaagtataaggccattaatgtccattaatattatcagtggcacaatcacatcataaggacctttggtttaataaaccataacaaatagacactcttaacttatagcatgctacttttgcattttaagtgatttagtccttttctaaaatgaagcatccaaacaataaaattatttcacgaaactttcacacatatataatcacatgctgtaaacaccaaaaataatattaaaataattttacggctttggatttattgttccaaaaccactattctgatttagctaaaatcgagttgttacaactctcccccttaaggattttcgtccccgaaaatcttaccagtgaataggttcgggtattcctctctcatagcatcctcagtttcccaagtagcttcttcagccccgtgtcgataccataagacttttactaaagaaattttcttatttctcaattctttgacctcacgagctaatattctgatcggttcttcattgtacg

SEQ ID NO: 10286 - DNA, 690 bp, Gossypium hirsutum
ttcgatacttggaaaccattcatgtttttcttttacatcttgcaatgtgcctttactatcatcttgtttaggagaccgacatcgattgctagaacaacttggaagaaatcatagtgtatatcccagaagaattccatcacaaattaaatgttcttgaacaacatcgccttggtgtcaattcatatcgacacatttcacacaaagacataagatcttgttgtcttggcatcttttactaaaagcaaaattcaaaaaaacttcatacaccatcgtagccttcacttttgcatccgacttttatcaatttcaaacctagaaagctttaatcataaaataatataatgcagatatattattaaaatttaacataatgtaaaactaaacattattcaaattaactaagtatctctcttataatattattttttttaattcgggacttgattgtaagttaccactatgttggccactagttgatatcatattaatgataagttagatttttctcaatataataaattttaaaaactattgttaaaccaaaaatccatgggataattacggatttgcattttacttaaaaactttgcaaatggctcgttaaaatttcaatgggcggccgcaatcccttttcactgcagtcattccccttaaatttttatgttcctaacaagctattgcaagcttcca

SEQ ID NO: 10287 - DNA, 632 bp, Gossypium hirsutum
  misc_feature (625)..(627): n is a, c, g, or t
gtgcttttaccttaccgcatttacttctatttgactttaattagaatatagtttacaaacctataactagactagacgtagccgtctcttctcttgtatcatttaaatttgacatagtaaattttcttcttctctgcctgtggtaagatcaaattatatagaattcaaaaggatatgtgttgttctaaaaaataaataactaaaagtgaagttaattttgttacacatataataagttctaatatgaacaacctcattgtatgttctgattatattagctctttctgagacaatgcttagaattacccatagtctctcttcaatccataaataggaggataatgtgttttagcgcattcgaacccacgtcctcctaattggcaacaatgtttatgccaatcgagctaatactcaatcagtaatgattggtataagtttgggttccaatggaattaacgaaagagatttaatttaagactaaaaatacacattaatttctaaaaagtaaaggaccaataaaattatagtaaatgactaaaatgcaaaaatacatagtataaagaccttgtatagaatttgatctaaatcgaaacaaatgaaaaattttgggtgaatatacctaaannntccct

SEQ ID NO: 10288 - DNA, 646 bp, Gossypium hirsutum
gcccacagcctgaaaatgcaacaaatagccaaaagatcaagttaatacccattgctattgaaactggtttttcatgggggaaaataaagtacctggcagatcaacatttggactccaccctctaggaaaaggaatcgccgaccccatttatcaacaccatagattgagaccaatgttgcagcaacattaacgacaccagtaattacagcagacatgagggaagcatcgtctccgaaaccgatggtgttgaacaatacgggggcataaaacataatcacattaatgccggttagttgttgaaagaaaggaattaagatggccatagttaaatgaggcctgtatttcctctgcaacaagtttctccaagggtgctcaactagctttgatgcatcactggccgaaacaaggtctctaaattcctcatcaacatcatccaccccacggatcttcttgagcttcgctcgggcttcctcggtccggccacgttctatcatcgagttcggcgtatctggtaggactagggatccgactgtgatgataagggcagggaccattgcaccacccaaactcagtcgccaaccccacccacctttgatcttagcaaagaagtaattcagcacgttggcaataaggatgcgactgtgat

SEQ ID NO: 10289 - DNA, 409 bp, Gossypium hirsutum
agcctgagttcgagttgcgctaatcactgttaacaatttacccttctcttgtaattcactaaaaaataaagaaaagttttgtattcatagacacatccaaatccaacttttgaatatgcccaacctataaaacaaattgggataaagaacattaatgtctcccaatattctttgaaagctcaatgaaaatgaaccttttgtcctttgacttttgacaagctttccaatccaatgcaaatataaatttaaaataaaaccttgtaacaaaagcaaagcatttttgtgaacttccatcaatcaatgcataaggtatctaataatttacaaattccaataaaaacatttgcaatcctactcatttggtgggaatactttgatttaagatggtattgcaccaaaaaaaaaaaaa

SEQ ID NO: 10290 - DNA, 791 bp, Gossypium hirsutum
  misc_feature (660)..(676): n is a, c, g, or t
  misc_feature (679)..(692): n is a, c, g, or t
  misc_feature (694)..(697): n is a, c, g, or t
  misc_feature (699)..(700): n is a, c, g, or t
  misc_feature (705)..(705): n is a, c, g, or t
  misc_feature (707)..(708): n is a, c, g, or t
  misc_feature (711)..(716): n is a, c, g, or t
  misc_feature (719)..(720): n is a, c, g, or t
  misc_feature (736)..(738): n is a, c, g, or t
  misc_feature (743)..(749): n is a, c, g, or t
  misc_feature (755)..(755): n is a, c, g, or t
  misc_feature (757)..(757): n is a, c, g, or t
  misc_feature (759)..(770): n is a, c, g, or t
  misc_feature (774)..(778): n is a, c, g, or t
  misc_feature (780)..(787): n is a, c, g, or t
agataattgatctccgatggagtgatcactgttaattaagtgaggtcaagtgagaatttagtagatcctttgagaaaaagttttgctagagatgtagtcaataaggtctcaaaagggttgagactcaagcccattaattagagtcacccatgatggaaacctgactcgacgcttgatataacgtcaagtattgagtttaatgagacaaagtacatcattagtatatgactggtagcactataaaaaaattcatcctaagattaaagtgattggtatccataacataaatatgttagagtgttataatcatgggaaaactcttaatgagatctacctatgtgagtgtgaaatgtgatcacttctaggagctcaaaagcttggctttaacaacactcgtggaaagaggatacaaacacatgaccataatagtatccgtgaatactatgcattgactgatgttgaaaacattgtgtgatatgagtttggttaatcaaatgaaataattggtttaaagtttagtttaccattcaatttcaattaactataacacgttttcactaagtgaaggtttaatcataaaacacattaatttatgcaaatttactttcaagattatcaaaatctaaaatattttggaaattgagggagattgttaaaacnnnnnnnnnnnnnnnnnttnnnnnnnnnnnnnntnnnntnntttcntnnatnnnnnnctnncttcctcccccccctnnntctcnnnnnnntttttncntnnnnnnnnnnnntttnnnnntnnnnnnnntttc

SEQ ID NO: 10291 - DNA, 618 bp, Gossypium hirsutum
ttacactctaaaaacaaaatcaaacacataaaaagagagaggggaaaaaaaaggactgacaaacaaaaaaacagagtagaaatagaaaacctgaaaatttcttgaacaagagaacctctgatgggttggtgtctgtcactgtgccaagattttttctcaaagacataaggccttggacctggtctgggcatcttcaatgattctttggtttcttcaaagggaaacaaaggcaaggctgtgtagaaacttaagggtaagcttaagcttttggggttttcctttctgtcgcccaaagacaacaaaatgcattactgtacgaagcaaaatgtaagaagtgaaataataataaaaaaaattaaaaagaaaaagagtgaggaaaaaagacggggggagtaactggttcttccctttttattttgctttacaaataatttcaaagagggttaattgatgactttggcgtctcccccactcatccacatgcctgcttcccctacccccatcagtctccctcaaaatagctcactacctctaaatcccatccttttgctttatttgacaaagattattaataataaaagttagatatgtactcgggcatggataaatgtaagcaag

SEQ ID NO: 10292 - DNA, 652 bp, Gossypium hirsutum
gactcagcatcagtccttgggatgtcctctgaacatcaatgcccagaaaaaaactaagtgctcccatatccttaagggcaaacttgctgtgaagacgatgcacaacatcttctatatcttgttcatgactaccagtgatcacaatatcatcgacatataccataagaagaagatacttcccttcagaaactcgtatgaatagagaggagtcagctttggacataagaaaaccaagtcgtgttactaggtattccttaagagtctggaaccaggcgcgaggtgcttgtctcagaccatacaatgctttattaagcttgcacaccaatttttgaccagcaactcctgaaacttcaaagccaggcggttgttccatgtatatttcttcagtgagctcgccattaaggaaggcattgttgatgttgacttgacatagaggccacccctgcataagtgcaagtgaaagaacagtgcgaatggtagaagcacgaactaccggactatatgtattacgaaaatcaaccccggcatgttgagaaaacccttttgcgactaaccgagccttatatcagtcaacagatccgtcagactttcttttaactttaaacaaccacttgcaccctactgctattcgattctctggaagagacacaga

SEQ ID NO: 10293 - DNA, 648 bp, Gossypium hirsutum
  misc_feature (29)..(30): n is a, c, g, or t
actattcaaatttcacaaataacaccaanntcttaatatcatgataatttttataaatatatctctactcttttaaaaacctccattcctctaaaatactacccacttacaaatctatacactattatttaaaatcttactaaaatcttaaaattatggatatggtagaattcgaaccatacatcaattacattaataaaatcttaaatttacaacccaaccaaaactttatttcaaaatttttttatacattttaattttatttattatgcacactttattattattgcatgttattattattaacttcaagtattacatttcattgtttaatatatcttatttttaaaagtatatgtattctaaatacgttattttcacatgcatacacgtgtgataaaagttctagttttaatccaattaacttaacatttaaaaaatactatccattctattatttatttttaaatttttattttatttttcacaataaatttcaatttatatataattgctttcataaaagaaagttatatacagacaaatacacattttataatatatatatatatactgttagcatttttattgctgcgagaaaccttttacaatttgaactgatgaaaattttggcctatgtgatttgca

SEQ ID NO: 10294 - DNA, 465 bp, Gossypium hirsutum
tttatcttagtccctaaaattttttcttattaattctaaaatgtagtaatttttctcaatttaatcgttcaacttgaattccattaagtgtgatgatacgagactttgaaattaagtcatactaatctaaagattttataaagtttttatattttttagattttatataaaaaaaattttagaaaaaggcgatgatgtgacatagtcttaaaatgcacttcatcacacttaatgaaattcaagttcatggatcaaattggaaaaaacttccatgtttcgagactaatgtgcaccaaaaaatggttttagggatcaagttgagaaaaaaatcccaaattcaaggactaaatattgctttattcctttttctctcaattatatttcttttatgtatagtgtactaaagagttaaaaatcagaatgtcaaattttgctatacaacttgtgctatacgtaagttgtgga

SEQ ID NO: 10295 - DNA, 653 bp, Gossypium hirsutum
aggagctaccaccaaaacttggatattttggtacttaaatgtaacgatattaactttttagtgtttaattcagattttaatgttaactagtgtaagttaattgttaatacggttatggtttgaattttcattattttttaacagaataaaattagttttaagtatgaattggtttaatttactacatacaatataataattgtggttttttttttcgggttttagtattgatttcatgaaacttgattatcaatattattagttaattatgatttttcatcaaatcaatcccaaaactcgaaataaacatttaaaacttaacactattatcttagagtactaaaatgtataacttttatcaaatataggtaccaaattgaacaaaataacataaattttgcattagagaaaatgttaagccaaaatttaaacaaaattcagaagaaaattttcatctatatatattaagttcatttctgttacgcatgtactttaataaaaaacataggtacttaatatagacaaaaaaaagttttaagtgccaaattgaatatagaagccagaggtacttaattaggattaaaaaaaaacctcaagtatcaaattgaaaaaacacaagtaccaaaatgagcattgaagccaaactcaaatac

SEQ ID NO: 10296 - DNA, 397 bp, Gossypium hirsutum
tgcttgctaaattgcactcatcttaatgttatttaaatatatatttaaattttttccaattgttgagatacatttattttaatatttttagtgtattttatatattatatttttaaaatttatttttatataaaaatttaatacagacaagctaaaacaagtttagattttaatatttttattcagatcatatcagacttaaacttaaaaaacaaacctaaattttttatttaacctgacccggcttgacttgactcattcacaactctagagcccatgatccgaacaaaataaaggcaaattatgagctgcttaagcattcatgattttggaagcatttatcaattagaaaaaagctctatccaacctttcccaaacaagttccttcttctacatt

SEQ ID NO: 10297 - DNA, 595 bp, Gossypium hirsutum
  misc_feature (46)..(46): n is a, c, g, or t
agcaccgctatcttcattcatatccttatttccatcattgtcttgncctttatgcaattttaagagattgatctgactgcaataccacaggtactcttgggaccattctgaaggatttaggatactctcataatattcctgtatggcatttaagattcctttgtgataaggcttatatctaataggccatgtgtcccaaggagcatcaatttctggaggtggccatacttcaaatgggataaccttgttgagttggcagaagaatttctgtatgatcctctattgcacatcatgttttctgatatcttcatcaagaactttgtgaatccaggcggtagggaaagaacctaaatggattgctcttcctcgtgtaacaaaatactgaggcttgtagaaaatgatgaccatataatttcatttattttcttagtaatactaatcaatcatatttaaccattgagttagaggatagaaccaacataaaaaagtgaagaaattttgatggtgcggttcaacatttcctctaatggcttttaccagaaaataacggagatcaggaatgaaaaactgaatggctatgtggtggagatgagta

SEQ ID NO: 10298 - DNA, 611 bp, Gossypium hirsutum
taacccatattgaaaaatgctaaacctaagctcaacccatttcgaccttaataatttttttagattattttttatatagaaacaaattttaaaaaatataatacactaaaaatattaaaataaatattttcagcaaattgaaaatacaaaaaaaaagtataggcgtgtgatttgggccaagtctaggccaaaaaatctacatgaggctcggcctatttagaaaatagaccctattttttgcccaaatctattttttggacttatatttttttcaaaccctcttattttttaggtggagtctaggcggctagcctcacccatgatcaagtctaatccttgtttaagttccaaggaaataataccttttaaagcctgagaaagaaaaactaataaaactcaggttctaagataaaaaattaattttaagataaaataaatttaaggcctaataatttatttagccctccaattttataaaagaaaatggtagcttagccctttatttaatctctttcggccattaaatttgtattgtttgtcaaatacttccagaatgaatgaaaaaaattaacatctataaactttactaatgtagtatccacgtgggcaat

SEQ ID NO: 10299 - DNA, 698 bp, Gossypium hirsutum
gtgcttgggaactgaagttcaacattcaagattttgggggtgtaatctttttaggcatgatttcatgattgaaatagtaattagtaagtatatttagcgaataacatatatatctccacttcattctttgtgtttgcttgtggcaaaaatgcctcatgtttcgcattttacatcttttctttgccatgctagatgtatacataagaaatctcttcaaatcttagaagagtgaataaaaatatttgctagagtttatttttccactcactgttcatttatatgtttgatccctgctactgaaacttggcaatggactttatcaaagtgactgaatcatgaaaatgaaaatttacccggttaacaaacaagttaggaccacttaccgcactttgactcaactttgcaactttatcgagaaggataaaaaattgtgcataatgattcattttgcccttaaacttgtgtttttttaaaatcaccccaaaataaatgcaaaagttaacgtttttaattttgttgatatagattgccaagtggatgacacgtcaatattattttttaaaatttttaaaaattcaaaaaaatatatttaaaatttaaaaatcattaaaattattaaaaatataaaaaatattttaaaatattaaaatttaattaaacgctaatatgtcatttatgtgacaatccacgtatatgcc

SEQ ID NO: 10300 - DNA, 626 bp, Gossypium hirsutum
ccatgcgagttgacatgctaatatcattgaaaacaatattttagttaccatttttattaaaaaaataatttgactctttttaaaagactaataactagtcaagagtgctctctctttattttcttagagaaacagttttctactatggatagattggaggtgagtgatgacttttgagaatgggagaggctgagatctcccatcttaaagaagaactagtttaacttttggtgaaaagttcgttggttgttccaagtaaaaattcttagctgatttgttccgtttggactaggaaatcctataatctggatagtttttgggcacaacttaagagtatatgaaaaactaaaaaaaagtttgagatctaagtggtaggtcaaattttatttttgatctcttttgaagatgaagaggatttagagttaatcttggaaggatgcccatggttatttcgaagataattgattgttttttataggcttacccagcctattgaaaaaaataagattttgtttgtttgctcgcctttttgtcttaagattggcctgtgcttgtcgaagtgtgataagaaagatttgatgcatgcagtgggatctatatttggaaggtttgtccgatcgaaaaaa

SEQ ID NO: 10301 - DNA, 634 bp, Gossypium hirsutum
cactctcgtgcccatcgtaccgagagagaagatcacttgggattcttccaggaggaattccagaaaaagtatattagccaaagattcatagataaaaagaggagagaattcctagagctaaagcaaggttgaatgttaatgacggaatatgaacgtgagcttgtgaggcttagcaagcacacgcgggagtgcgtgtctacataagccaccatgtgtaagaggtttgaggatgtccttaatgaagatatctgagtgtttgttggcgtcttaaagtagtgggaatttgtagcacttgttgaaagagcctgtaaggccgaagagttgattaaagaaaggaggaaagtagcttttgagtcgcgggatgcaaagaagagacagatggggaaatgacatcagtcctcatctagaagatcgagagagttcactacccgattaggtgcttcggtggggtatttgaataggaacaagaacgggcagaacacaacttctagaacccagaccacttcggtcgcaagtgttggtagcacttggccaaataggccaaaatgttcacaatgttgtaggcatcattttggtgagtgtcgagggaataaaaggggttgtttcaagtgcagaacattgaaacacttcatcc

SEQ ID NO: 10302 - DNA, 393 bp, Gossypium hirsutum
gggttgtttttgagctctattagctggatttgacctcctttgactttgtttctaagatttagtttggtgttttagattgttgattaccattttacttttgggtgggagaaacaacaagtgtttggatgaaaaagcaaacatatgtctgaggatttagaaataaatgtttagggtgtgtttagatagaaattataagaaagggtaattattagggtaataattacaatgtcttgtaattacaacgtattctaatttcatagatgtgtttactttacataatataattacatcttaaaaaaaaaagatagtcatcatggttaattatcaaagtaattttgtcaattcttgactctttataaaaattgaaaagtgtaattgaagttctccaatccg

SEQ ID NO: 10303 - DNA, 572 bp, Gossypium hirsutum
agattatttgtagcaaattcatggcaacaacaacagtccaagctcgttgcatcctcgtcagattgtccctccgcggacttaaagaacttcaaatttcccggtgcctcaactacaatagggaatgaaaaaaacataaattatatcatgacagaactacgctgcattagaaacttcaatcactcatccttgatattagccaacttctccaacaagtggaagtccaattcaaggcacaaaacaacgtgtcaaatattgaagcccgaaaacttgccatacaagctctatcccgtttgatttcttaattgtcattgaataaaaaaaaatgattcttttacatgttttgaattgttcaatctagatgcaattaaacctacgggctgaaattaattggagttcgcattggaacaactctcaagctaattaaagtaatcaatatgattcacatcatattgtatgtccaaaaaggattctatcaacctttatataactacttttaagttaaaaatatacatgtcaagtcttaacttgattaatattgatattgtcatctttatagaaggacatgagtttga

SEQ ID NO: 10304 - DNA, 651 bp, Gossypium hirsutum
ctcaatttcttggtgtggtgtactttcccgtcgtgaaccttgttatcttcaatataactagggggaatttagggggttggcagggccggccttcttaaaatataaaattactatttaagctcttgaaattttttaaaaattttatagtaaagataaaattgtattttactccctaaaattataaaaatttaatttaattatttaaaacttataaagatatagattatccaaaattaaaattttatccggccttcttaccaaattgatctgacttcgctcttgaatataacatattggttgcaaggcaaatttgattcaaaactttaattaacttagaagttataaattagttattaattattcaaaaatttttatttaagttatcaaatttttatttaaattactatattgttaaaaaaaaatttaaaaattcgatcaacgagtttcaatagttgctaaaagacaagaaaagaccattgaaagaattggctgcatagaaaaggacagattagactcgatcaaggtctaatatctctggcttttatatatatatatatataaatttcattggtattttgtttggtcactaagagctaacaagtacttttccagcaatagacttgtcggatatgatgctttcctttaagtgag

SEQ ID NO: 10305 - DNA, 374 bp, Gossypium hirsutum
  misc_feature (16)..(16): n is a, c, g, or t
gggattgagagtggcnacaggttcctataggtttgtctttgagcaaaaatctgtaccctaaccttttttttttatcttcttccatgcattgtgatttatttcccttgtgatctcagcaatctattccgtgtattcggttgtgcccctggaagcactgaggcaacaactctggaagccagcaaaaatccaatgaggtaaaaaatttcaaaagtggagtaacaaatagagtgctttgaattatgatttatgtaaagatgttggtagttagaaacatctaaattttctttcagaagacaagttcagactccctcaaggccttccagatccttaagtagcataacacgtgttgtcagacgaggtagtgaattggtttt

SEQ ID NO: 10306 - DNA, 539 bp, Gossypium hirsutum
  misc_feature (516)..(521): n is a, c, g, or t
gaagtttttattaacaagaagttttattaaaagacttagatcaatatcatatctatgctatagcttcagggggaatgttaacagtatgtagttttatttagctataggatatagtttttattaacaagtatgttaacagtaggtgattaacgtaattacccattattaatgtaacaaacttgtaggatcaattagaattctatttctttctttgtacatggatcttacgtcaatataaataccatgataatctgaagtaatagacacaactttgcttaaatcttctctatttttaacaatctagaaaggtcataaagagagaccattgaacaaatgatccattattttggcattagagaactaccactaaataatcaaatatatagatgaaaaaagaaggaaaaagaagccatataccacaagaaatttagtcattaaatcagagatgattccaaggataaatgaaaaaaattaccatatttactagatcttatatatctttgaaagtccgtttcnnnnnncttttcatatgtcatttc

SEQ ID NO: 10307 - DNA, 690 bp, Gossypium hirsutum
  misc_feature (434)..(436): n is a, c, g, or t
  misc_feature (439)..(442): n is a, c, g, or t
  misc_feature (447)..(448): n is a, c, g, or t
  misc_feature (451)..(453): n is a, c, g, or t
  misc_feature (455)..(464): n is a, c, g, or t
  misc_feature (466)..(470): n is a, c, g, or t
  misc_feature (473)..(496): n is a, c, g, or t
  misc_feature (498)..(500): n is a, c, g, or t
  misc_feature (502)..(507): n is a, c, g, or t
  misc_feature (509)..(511): n is a, c, g, or t
  misc_feature (519)..(536): n is a, c, g, or t
  misc_feature (538)..(540): n is a, c, g, or t
  misc_feature (543)..(559): n is a, c, g, or t
  misc_feature (566)..(575): n is a, c, g, or t
  misc_feature (580)..(582): n is a, c, g, or t
  misc_feature (584)..(593): n is a, c, g, or t
  misc_feature (597)..(611): n is a, c, g, or t
  misc_feature (618)..(618): n is a, c, g, or t
  misc_feature (620)..(625): n is a, c, g, or t
  misc_feature (627)..(636): n is a, c, g, or t
  misc_feature (638)..(641): n is a, c, g, or t
  misc_feature (643)..(646): n is a, c, g, or t
  misc_feature (649)..(652): n is a, c, g, or t
  misc_feature (655)..(655): n is a, c, g, or t
  misc_feature (661)..(662): n is a, c, g, or t
  misc_feature (664)..(677): n is a, c, g, or t
  misc_feature (680)..(683): n is a, c, g, or t
atcattggcttagagcctcaattatctaagatgagctaagtttgtagagactttctttacattatcttgaactcaataattattcaagctgatataaaattagctaacccaagtgtggataaagagaaattcttgcatgatttctccagagtaacttctttttttgtctatggtctttaatgtcattttagttgtgtagctagttgaataaactttagactagagcaattggtgctttatttacctctttcatcttttcaaaatcccttgtgaaaggtaatcaacaagttggatcacccaaaattggcttgtgtttttgttcaattaggtccaaacagattatgtttcacttaaaaacgaatggaaagtgaactggaaatttgtttgaataattttcaatctttttatcgaccttgtattccatttccagactnnnttnnnntagannttnnnannnnnnnnnnannnnnggnnnnnnnnnnnnnnnnnnnnnnnncnnnannnnnngnnnctacttcnnnnnnnnnnnnnnnnnnannnttnnnnnnnnnnnnnnnnnggattannnnnnnnnnttttnnntnnnnnnnnnntgannnnnnnnnnnnnnnatttaanannnnnnannnnnnnnnnannnntnnnnaannnnatnactcanntnnnnnnnnnnnnnnttnnnnatccctt

SEQ ID NO: 10308 - DNA, 672 bp, Gossypium hirsutum
cgagcctctttacctcttgcttgaaaggctccctcagtacgttcatcttgtcttgatgctctcttatgttcttgagcatacaacatattgatcaactctagtagtgagattgttgataggtcttttgaatcttcaaaagaggaaatctttgactcatacctctttggaagtgtggttattaccttctcaaccaccctactatcactgaactagtttccaagcaatctaatgcttgtacatttcttgtacacaagtaaattgaccaaacatttcaatcattacccaaacacataaaaaaaaatctactaactaagattggttttatcaaacacacataaaaaaaatctactaactatgattggttttatcaaacacacgtaacataacttgtgcaacatacaccagaatatgttcatgaatccgtgaatacatttcgtatgcatattgcgttgatatactttgcatgtgttcaatccaccaggctctttgcaacttatgtgcccgcaaggttatcacttagacagtccaccaagctcgtcgagtatgaagagtctgtcaacattcttacacttgagttgtccaccagacaattcatatattgatagttcacgagactgttccccaaataattgtcttccaagtgattcatattaggattgctcgctatttgtg

SEQ ID NO: 10309 - DNA, 749 bp, Gossypium hirsutum
  misc_feature (592)..(620): n is a, c, g, or t
  misc_feature (622)..(622): n is a, c, g, or t
  misc_feature (625)..(627): n is a, c, g, or t
  misc_feature (629)..(682): n is a, c, g, or t
  misc_feature (688)..(699): n is a, c, g, or t
  misc_feature (703)..(708): n is a, c, g, or t
  misc_feature (710)..(712): n is a, c, g, or t
  misc_feature (714)..(714): n is a, c, g, or t
  misc_feature (717)..(724): n is a, c, g, or t
  misc_feature (726)..(728): n is a, c, g, or t
  misc_feature (731)..(731): n is a, c, g, or t
  misc_feature (734)..(738): n is a, c, g, or t
  misc_feature (741)..(742): n is a, c, g, or t
agtgagggagaatggacacttggcgactgaccaatacttttgctttgatatttttgtgacgatgttagcattgactttttccttgcttattttaataagtaacacacgagtctatggattgggagtccacataagtaaattgattggagcaggatgggttagtgcgacacccccggaaccatagtataatttatcattgtacgcgtctagataaggtttccggcacttatgaccctcagttccaaaagttaatggacccaattgtctgaatcatttctagccctttaccccatcttctatggatggattaaaggtatttatagatgaagtaggagtgagtttggattggactgatatatatactataacatcaatttaatctaattgaattatagatttaaaataggagtttcacttgaagtcagaattaaacaagtcagatggggaaaagactcagacgaattgagcaagttgagtgggcaaggagatggaatgaatcaaggaagttgaggaaaggtttgggtgttgtgtgacagtgaagctgggcgagaggaaaggaaataacaagtcattttggaagggtgaaagtagnnnnnnnnnnnnnnnnnnnnnnnnnnnnntnttnnntnnnnnnnnnnnnnnnnnnnnnnnnnnnnnnnnnnnnnnnnnnnnnnnnnnnnnntccttnnnnnnnnnnnnctcnnnnnntnnncnttnnnnnnnntnnnttnttnnnnnctnntctttct

SEQ ID NO: 10310 - DNA, 413 bp, Gossypium hirsutum
tgagagtgcgtctctacagaagtcattatgtgcaagaggtttgaagatggtttgaacgaagacattcatttattagttggcgtgttggagataagggaatttgtggtgctcgtggagagggcatgtagggccgaggaattgcccaaagagaagagaaaagctgacattgagtccctagactcaaggaaaagacagatggggaaatcaaagtagaccttatctaagaaatcgagagagttttctacctgatccaatgcatcagtggggttctcgaacaagagcaagaactggcagcacacaacgtctaaagctcaaaccacttctatcgctagtgttggtagtgctcggccaaataggctagagtgttcacaacgtggtatgcgtcatttgggaaagtactgaaggaatgagag

SEQ ID NO: 10311 - DNA, 584 bp, Gossypium hirsutum
  misc_feature (559)..(564): n is a, c, g, or t
  misc_feature (566)..(566): n is a, c, g, or t
  misc_feature (568)..(569): n is a, c, g, or t
  misc_feature (572)..(572): n is a, c, g, or t
  misc_feature (574)..(579): n is a, c, g, or t
ccattacgtggaatgtgccttgcattttggatgaaaacaaaattgatgccgccacaaggaagggccgacatcccgacgataagacacacgatgtcttaacgagaagaaattgacgtcccaacaacgtgacatgtgacattctgatgaggcgattcacgacgtcacgacatggcgatgtgctccgcacttaacctgattttttctcctagttaaactctgttatatttttccagttgaattctaataactctagagatattttaatcatattagcccatgaattttaacatataaataaggttttagaaaccatagagagtttagatgaaacaaacacaacaaaagagagtttaatggaattttgtgttttatctagagagttttatatttttgcgggatttaacggcttgttttgattattctccatcttttactcttcttcgattatttgccgtttagtgaagttttctttgcccgtggtttttatcctctttaaaggagttttttcaaataaatatttgtttccaattttctctatccgttctttattcgatgcaannnnnntnanngangnnnnnnttttg

SEQ ID NO: 10312 - DNA, 631 bp, Gossypium hirsutum
aggagaggaacgatggaattaattcaaaataaattaagttaaccaccaaccagacaaaatacagatgcttaaccattgaactagcaggctcattattgacataggtctacattgaattaacttaatgatgcaattctaagattggggttgcttagaataaaatagcaaaattctaaagattcgactcaaactcctgacctcgtgcacataagcaaaacacataaccacaaatacaaagacttaactataacaagatctaacatttaaacaatcaaaattttggggtattacactttcctattgacagtgaatccagacacctcaccaaatcggcgattcctatcctttcaccttgtcttccttccctactctttcccctcgctcgaggtgtttgttgacctttaattgtctttgaggtatgtcagtttaccaacagacacctataatcctcgtctttctgcccaagggttcttagagcataccttccttagtggacttccatggtcaaactagtcctttggcggactctctctttccattcaataacacctaagaactcattgacatttttgtgttgtgttgatctccaacagtcctcgccattctaacgaacccattctcattcctcatt

SEQ ID NO: 10313 - DNA, 669 bp, Gossypium hirsutum
ctctgcccatactcgaagaagattttttcagcaagggtaaaacagagaaagtgaatattaaagaacaaagggtctgttataaaaatagtaaccaattttcttcaatataaaatatactacttttttctggtcacacttcatcagtcaagccacttgttcatttttagtccaaaactatcaatccatggttattatttctctaaaagtgatcaatttaatgatatgacattttggaatttttccttgaaaaatgtttaccataatgtagcacactaattcattggaagcttaaaatgcttaaaatgttattgaatttagttgaagtataaaggttatatatatatatatacaaggttcgaattcacacatgtatatacatgtataaattattggtttaatcaaaggtatgtatatatatgtgtacataaggttcgaataaatgcataggtatatacatgtataaacctttggattggatttataatatgtatattatacttgtttaagtaatttcgaataagcatgcaaatatacttgtttacatgtataatttcttgtattaagatatgtcattatataagtatatgaggttagcatgtttctctgttttggttgatcaataacaggaagaaagcagtgtgtttttttatgtgccatgcttaatcaagt

SEQ ID NO: 10314 - DNA, 646 bp, Gossypium hirsutum
accaacaacccttttataaatacttcccatttccccattctcttccatcaatctctcaatctcttcctttttctcttccaaaccgaaccctgatttccacttcttgtaatcctccaaatcctctggctcctcgatgtaagtattaatatccccttgaattgccctcacttgagcatcgaatcgactgtaccgtttcgagttcaagctccgttgggtgatcttactctcggaggaagaggaatcggattcgttatcggcagctagtattgcatccttgccctgattgatgatctgagtcgttccctttataaccgtgttcccgaactcatcaatgacttgtcctacgttccctaatgaaccctgagctacctcgatttcttttttcagacccaacccgaattcttcgagatcgcgacggtaagtctcgatgacggattcggatctggttgctatcgtttggaacaggccgccgaagctccatccgctagggttagggttgggatcgggcactctgggagaagaatcgggagtggagtaatcagctttgggggaatcggattcgagttggggtttaggaggatccggatcatccgcgaaaactgatttgaagaaattcatgaagaaatattagggtttcctgggttga

SEQ ID NO: 10315 - DNA, 637 bp, Gossypium hirsutum
agcgttatatagggagaaggaaaccctaattttaaatcagagaaccctaattctttatcttttgattgggcttcttgtttgggcttggatgacggcgcatagttttatcttgatttttaaaatatgtatttatattctttcgagaaactataatattcctttatttaattcaaaatagcttaaagataaattatttttaaaagtttttcttttttcatagtttatataatttaggttaaaatttattattaattcctatactttataaaaattgtgaatttaataattatattttcatttgattaattttagtttttatatttttttaattttaaatttttaatcctgactcaagcaatagttgttatatttgttcagttaaatctaattgatggttttgtactatgtgtacaattgtaactttagtttatattctctaattgaatcattctaagtctgtatactctttaaaatttaaatttttagtcgacacaaatgatagtagttagtccattaactgaattttccatattaaaatttgaaaataatagatcttaactgaatgaatttaataattattatttgatgaaactaaaaatatcaaataaaagcaatttctaaaattacaaggacactg

SEQ ID NO: 10316 - DNA, 312 bp, Gossypium hirsutum
  misc_feature (295)..(296): n is a, c, g, or t
catggcgagacacaaacacacgaccagtgtcatcgaggcacttatagcctttgtgattacgtccaaaaccaagaaacgtacaacacttggacctaaactgaagtttgtgttgattatatggccgcaagtaaggaaaacaggcacaaccaaaaactcgcaaacgagagtagtcaggcagctctttatacagtttttcatagggactaatgccttggagaacaagtgtaggtagcctgttgattacatggactgcatgagaaaatgaagaagaccagaattctagaggcattgatgnngagccagaagagtaac

SEQ ID NO: 10317 - DNA, 661 bp, Gossypium hirsutum
ctacttctgatgtccttcgagcttttgcaaacactggaatttcggtttctgtcacgattggcaatggggatattcctggtcttaccaacactgttacggcgcgaagatgggttgctgatcatattagcccgtttcatcctcaaacgaagatcaaatacatatgcgttggtaccgaagtcttgttctcgaaaaacgatgtttggattaataaccttgtgccggctatgcggagtcttcattatgccttgaataaagctggatttcaagacattaaggttagatgaatgcatcatttatattttgaaatagttggtatcttgtatatatatatatgctgtttttcgttgttaattcgatgaccgattatggttgcacccttttcttctacgcataggttcttgtgctagcccgttaaaagattgtccggcttgtatgtccagggcatgttggtcattacctattagcttaatttgataaaccttgttgggtttcttgtaagtttttaacattgcaagaccaatattccatgtttcatgcttcacgttaagaccattggttttcgaaaaatagtttggaaaggattagattaagatgaaaacaacaaatattctttacttatattctttacttatatgatagagtgatgaaaagtccttgcttg

SEQ ID NO: 10318 - DNA, 665 bp, Gossypium hirsutum
ctttcaatgaatggtggcttatccatttggctccccaaggcacctatttggccaaaaggtgtccagcaatttaaagcacaagcttggccgatcgtattcccaaggcagcatctaagccattcacacctcaatttgaccaatcagctcctatacatgtatgggtggattcatgaacgtccaaagggaggaaatattaccttaattcatcacattgaatgtataatgtgcatgtacaaaggggagaacgaatttacaaggtacatgcttccattcatgaaccagcccatcattaaagctttaattaagagagatacatgacccatgcacctagcatttgtccaagaggggttggatatgaattgaagatgcacattcatggaacaaggaagctttcttattggttaagcatgcatgaacgggttttgggaagaaacatgattattcaaccatgcatgaacttacactatccatgaacagagatttaatgcttgaagtgtgaacatttttaattgttgtgtgaacacattagtagctgaattttaataggcattagagagcctataaatagtttattttgtttattgtaaaaggttacagaatttgatcaattaaacttaatagaacttttgttcttgtgaggttactcctctcttctttcgttcaaa

SEQ ID NO: 10319 - DNA, 766 bp, Gossypium hirsutum
  misc_feature (519)..(525): n is a, c, g, or t
  misc_feature (529)..(556): n is a, c, g, or t
  misc_feature (558)..(558): n is a, c, g, or t
  misc_feature (563)..(578): n is a, c, g, or t
  misc_feature (581)..(581): n is a, c, g, or t
  misc_feature (586)..(589): n is a, c, g, or t
  misc_feature (591)..(595): n is a, c, g, or t
  misc_feature (602)..(606): n is a, c, g, or t
  misc_feature (611)..(612): n is a, c, g, or t
  misc_feature (621)..(622): n is a, c, g, or t
  misc_feature (626)..(626): n is a, c, g, or t
  misc_feature (628)..(635): n is a, c, g, or t
  misc_feature (637)..(639): n is a, c, g, or t
  misc_feature (646)..(646): n is a, c, g, or t
  misc_feature (658)..(658): n is a, c, g, or t
  misc_feature (662)..(664): n is a, c, g, or t
  misc_feature (667)..(674): n is a, c, g, or t
  misc_feature (680)..(684): n is a, c, g, or t
  misc_feature (705)..(707): n is a, c, g, or t
  misc_feature (726)..(730): n is a, c, g, or t
  misc_feature (732)..(737): n is a, c, g, or t
  misc_feature (739)..(743): n is a, c, g, or t
  misc_feature (748)..(752): n is a, c, g, or t
  misc_feature (757)..(757): n is a, c, g, or t
gactaattaaagaaaagtaaaagctatataaaaaggaacctatcatctattttaactgatgtatttattaacatggatgatcggttttatttccttcctaaacgaagccaatatcattggatccgacattggactgccactctagttccatgattttgctttaatttataagtttatacaatcttatattatattttatagttttgaattaatggaaaatattcttggattgatatcttatctgaaaataactaaagctttactcttttaccaaaagaatctttaatgctaatatttcatttgacattaatttatagaaactttaagaaagagacagatatattatgaactcaatcctcattttggttttctttaatcataaaaaatggctgcatgtatatacattaaaaggttacattctttcttcttctcttatcaaaatagttgaatttaccctaaaaaataaaaatagttgaatgttacttttgaattgtaaaccagccacaataatcttggacnnnnnnnctcnnnnnnnnnnnnnnnnnnnnnnnnnnnncnccctnnnnnnnnnnnnnnnnttnctttnnnncnnnnntcccccnnnnnttttnnccttccctnntccncnnnnnnnntnnnttccctnctctttctttcncccnnnttnnnnnnnnttttcnnnnntttccctttttcccccctttnnntttcccctttttttccccnnnnncnnnnnncnnnnnttctnnnnnccccntccttttct

SEQ ID NO: 10320 - DNA, 561 bp, Gossypium hirsutum
tatatatattctgagttggatacacatagctaaactccggtgccttattaagtagttgttagtatgaaaataacattgggttgaggggcagggataggatggttggttaatgggattatataggagggaagaagaggaactgggatggagcctttttttgatccattcctcttttaatgaccaaccccacggacaaaaagcctaatatctctactcagttttgcaaatgacaacattgttcctgtcattcttttaactctgctgttaaagcactttacattttacaaatttctgacataaaaatatatcataacattgaattatttcacagggtatattaaggatttgaagagaagtgaaatcccctttggttataatagtgcatgtataaccacttcttataatagtgttgaatcatgcagtaaaagagcaaaatccacttatttcttatttgtatacgcatattataatgtcatcaatattatgaatccaattaattccaaaaaaaaaattcttgtaaaaatctgcaatgaatccaacctgcgcatgatgggggtggcc

SEQ ID NO: 10321 - DNA, 665 bp, Gossypium hirsutum
ttgttgctaccgctttatatagcccaagtctctctcatgccgatgtgggattccctagggtgttacattatcttttctttgctttatgtccaactccatcagagtacaggttaggttgcaatcatgcattttaaatctgctcaaaacctcaagaatgtatttcttttgtgaaatgaatataccggtatctgattgcacaacttctatgccaaggaagtaatacatcaatcccaaatcagtcatgtcaaacttagtcatcatatttttcttaaaagacttgatcattagttcatcattgccagtataaatcaaatcatcaatgtagagacacactacaagtaattttccattaccatctaattttgtgaataatgtcttcatgtggacacttacaaaaattttctttcgtaaaataagcatctatacgactataccaagctcttgggagcttgttttagtctgtataatgcttttttcagcttgtatactttactttcatcgccttgcttcatgaaagcaagacattgatcaacgtatacctcttctagcaattctccgtgtagaaaggctaactttacatctaattgataaaccttccacaaattctgaagaactattatagcatcccaatcgctcggctgaccaaatcagaatggctacaatca

SEQ ID NO: 10322 - DNA, 595 bp, Gossypium hirsutum
ctagtgatttttctacatgtatatatatattttagattttcaaagagttttttatgggactttatgtggatattttattgaacattaatattattataggttattatatttattctttttgatacaaagtggaggactacttataatctctcctcaacctttaaataggagaataatgcatttcaacgcacttgaacccacgttctcttacactagtaacaatatcaatgccaatcgagctaagactcaatcaatttttataaaataaaattaatttaattagaacacaatatacatgattattctatgatttagtagaataaatagatagaatttgagcctaaatgtaatttcttttaggtaacgtttatgaattcattattccttaggaattaaaatattaaaatttaatattttgaattaattcaaatttattattttaataatttaaatttaggtttggatttcaactaattctaagtcttaaaaatattttttaatttaattatttaggaggatttttaatattgttgtttgaaccgaactggaccaactggctgaattgagaatcaactagggtattggtctcgagaaa

SEQ ID NO: 10323 - DNA, 579 bp, Gossypium hirsutum
  misc_feature (20)..(22): n is a, c, g, or t
  misc_feature (59)..(59): n is a, c, g, or t
  misc_feature (61)..(61): n is a, c, g, or t
  misc_feature (484)..(484): n is a, c, g, or t
  misc_feature (490)..(492): n is a, c, g, or t
  misc_feature (495)..(495): n is a, c, g, or t
  misc_feature (499)..(499): n is a, c, g, or t
  misc_feature (510)..(513): n is a, c, g, or t
  misc_feature (516)..(516): n is a, c, g, or t
  misc_feature (523)..(524): n is a, c, g, or t
  misc_feature (529)..(530): n is a, c, g, or t
  misc_feature (534)..(535): n is a, c, g, or t
  misc_feature (547)..(547): n is a, c, g, or t
  misc_feature (552)..(557): n is a, c, g, or t
  misc_feature (560)..(561): n is a, c, g, or t
  misc_feature (563)..(563): n is a, c, g, or t
  misc_feature (566)..(566): n is a, c, g, or t
tgcaaacgcaaatagtcatnnngcttcattggatcctcgaggttaatttgcttagaacncntttgcacaccaaagataggtgagggcaaatataaccttaaagatagtgacttgatacacgccttgcagcattgtcctattttttcttctgtttgagttccgttcgtgtgttcgagatttttcttaccgaagatttgtactaacaaatataacccttatacttttagatttgattatagcaatagtttaatttaatttttgacactcgatgagtttatctttccacttttctttatgggaaaacaaatgcattaccataaatactccattcttagtagtttctttctcccacaccaacgtatacagtacaagttaataaatgtgaaaaatcgtacactgctcaatctttgcaacttgatcctcaaataacctttttttttttttttttttttttttccaaaaattccccaaaattttgttttcnggaacnnncancttngaaacaacccnnnnttnaaaaaannaaaannaagnnattttttttttnttttnnnnnnaanntnggntttgggccccttt

SEQ ID NO: 10324 - DNA, 500 bp, Gossypium hirsutum
gcactgaagaatggtagatttattatttatgcccttaaaattttataaaattacattttagtataatgataaaattacactttaatcttaaaaaattatgatttatccctaattccttaaaagtaaatttctaactttacctttattactcagacatgaaatattgttctaaatgtgtagttgttagttcaagcctataccagatatgataaaccttggaattgcatactagaaaaaatagttgcatattggcactcctcaacaaagtcgagaatagaaaatctaccttcacgcataatatcttattgatagttgaaaaatgatgaatacaatggacatctaacttgtcaaaactatgtatactaatttattttcaaaacttttctctctaaatcatttaaatttattatatttagataactaaacaagaaaaataattcgttgaatatagtgcgttacttacgtacaattattaaaaagcactcaccaaatctaccact

SEQ ID NO: 10325 - DNA, 609 bp, Gossypium hirsutum
gtccagaaaagctacaaggaagcttccagcccctttctagcttaatttagtcgtccattcagcatcccatatagcaattcggctacccattgtttaagctataaatatgagatgtttttctcttgtaaaaggttaatgaacattttattaactttaagatatattgtgagcatgttcaactctcatctttctccaaagattgatccgacttatcaagaaacccttgtggcgtcaatccgtctttatttccgaacttatcactttgtcccaaagtatgacgttcactataccgaaggttcctatctcgcatagatagagggtctcggtcattatcctattcacctatcattccattttcattcttttctttcctaagttttcttataagttttgggttaacacacggttattgtgttagctcactcttgaaccttagccgaaccatattcttgttatcctagccaacttcagcccttccattgaactttcttctttaatttcaagcctaattgcaaaccattttaagtttaccctaatttaacgatcgggaaaactttacgactcaattcttaatcgaggcaagtgcgtatcatttggtatcagagctgg

SEQ ID NO: 10326 - DNA, 613 bp, Gossypium hirsutum
tttgattttgatattgaatacatcaaaggagaaactaattctttgcctgattttctcaccagagagtttcttcaaaaatgccccccaaactccgagacaaaggaaaagggaaaatagaagaatcatccaaaacccaaatcacatcaaaaccaattaaaacatggtatgaaatttgccaagaagaagatgagaaatcatcatcatcgtcaaaatcctccaaaaatacaataattcaagatgcacaagatccaaatgagattggttctcaaatcaaaaaatggattgagtccctatctcaatctccagaagtagcattggcctttttgcaaatgaaagaggaaactcctctcaaacaaattgctgctgaagcagcaaatgtttcaaaaaataaagagattgttttacacaaaccaaaatctcttaaaaatgttttaaaagagacttctctccaagaggtttttccaaaagagatagcggtatcttcacaaactgctacacaaaaatcttcacaatattttctaaacaaatattttgaaaaaattcaagcttatgaagatattgaacctccattaaagggggatgtcgagattcaacttctcctttattagtttgc

SEQ ID NO: 10327 - DNA, 593 bp, Gossypium hirsutum
  misc_feature (551)..(551): n is a, c, g, or t
cccccaaagagattaacacaaaggaatgtcggtaataataatgttgctagaaacccggaattgcccatgcttttgttcagatttttaatgaaaaaatttcaaagaaataaaaagaagatgaagcttgaggtaaggctaaaggggtttgcaaaacaaagaaaagcaaggcttcgttctgaggtttttttttatttatttataaaactgatggttatttattgattaatgaatctctgttaaaaaagagaacgaaatgcggttatttgcaggatcaaccgaaaatcaagccattcttgtgatcatgggagagaaacaacacaaaaacaatccttgaaactgtttttttttaaagaaaaaacttcaaaaaagagagaatatttgtgtatgtttcactaaattatttttgaaaaaaaaacaggaagaaaaacagagaattggctacgttttggggggtatcaaagagaaaaagattgaagcttgattgaatatgaaagatgggttttgtaggaaatattgaaaaaccaaatggaggagttgaagaaccagtgaanaaaaacagaggaaacaatggcaaaaattaaattacgcgtgtt

SEQ ID NO: 10328 - DNA, 622 bp, Gossypium hirsutum
  misc_feature (60)..(61): n is a, c, g, or t
tttgaaagaagatgaatgcaagttagaaagggcaatccatggatgcatgtgactctgtannggcggctttcaagtttcaagtcccgatggtggagtctaggcggctatttttattccacattttcttcctttcgctttaatagtatttgtaacgaatgagtttcccaagaagatgcctaccgctcttagcttagcttaggcactgaaactttgtttatggaccattcaagagcattcaagagagaggtcgatgacaaaagttgtattcaacatcttcattattttatttggcaatcgaaaatgtaatgaatttaatcataaaattttatttttaaaatgatacgttcattatgcaaaaaaaaagagtagtcctatttatttaatttaatttaaatataactattttgagcatgtaattacatattgtggaaataattaaaaataataggtaaaagaattcgtataatgcgtaccaaagcatttttacagtttttatttatgtttttaaccaaaaatacgtctgcccctgcgtatattacaatcgaagaagccaaagacgacgacaatgctgttagtaagatgttggagatgagaacaaacagcgaaacatacagaccgtcca

SEQ ID NO: 10329 - DNA, 487 bp, Gossypium hirsutum
  misc_feature (423)..(423): n is a, c, g, or t
  misc_feature (429)..(429): n is a, c, g, or t
aatggatgataattaaaacaggagaatggcgggagaccataagcgtttatggagaatgcaaaatgaaggagaaaatctggaatcaattttaaaacaattaaaaaaaaactataaatcttttgagcgaaagaagaattgacttttttttgttaattattttatgaaattggaggtttatgttcacaatgtgacttaatataattggtggtaaggattaggatcggaatttgatatctaattcattaacaactgcacattataaaacaaatctaaataatttagagttaatattatgggtatttaaacggttaaccaaactaatcgaactttttaatccttcaaccgttaattgaatcgaatttaaaaaaaaaattaaacgaaccgaaatttatatgtttttttttgttaaaacaagtttaaaanatatanaaaaaaattaataatattcatttgaccaaattaaccgatttaactgtaaggccccaaa

SEQ ID NO: 10330 - DNA, 651 bp, Gossypium hirsutum
gcagtattgagagcaatcgtttcacctctacattttcaccaaccaagtagtgttatagatgcttttattatgtaaccatttacgtatacaaggaagtcaattaaagatcaataacatagttaaaatggtatggacctgcttaaactccaccaccagtaataaataaaggacaataataacccataattagttcaatgctcccttctactgttccttcagagggggtactccaggccagaattcaagaaaacctactatatatgacctctaatatactcgggcagcatttagagacactcaaaacggtgggttggaaggttattaaatgctatctctctctatctctctctctctatatatgtatatataggcaatgtttgcaatcatagtatcaagaaatcaatcccatgcacagcctatctctcaagagtctcaagacataggtaacagataggtaaaagtaccgtgaaagtccttttactaagagtcagatttcattatgttccctttacttaaaaaatggacaagttaatccctgtacgtttgatcaaagagcaaatctgtcctttctgttaaaattttcatccatttttactattaaaaactagcatggctaacgaaataaccaccttgccactattaactcatgca

SEQ ID NO: 10331 - DNA, 661 bp, Gossypium hirsutum
gtgagtttccaaccacaggtaataatgaaagtatatttgcactagagtccaacaaaaaataaactctaaaaagctccatcttccataaccaagatattgaatctatattctgtgtgttcttattacacacacatatatatatatacatttcacaacttaaattttttttaagtgtatgaatgtttaaatttgaacttcaagctataagctgaaagtcgctgattgaaccaaacacacgtctttttattacgttggtcaggagaggtgtcattctactaacttgacggcagagctacggtagagctactgacataactcaatattaccttttttatcactttattttcttattttgctatatcaaggatattatcttatttttttactgtagtacttttcgaggtattacagttagatcctcatctacttcatcaactataacagcctcattggcatttgagccatgagcttgcgcagttccacagacaccctcaatagtaggagcatgaccagcacgtcctgatggctcattgctatccttcacgagttgtagaattggaagcaccatcgaagaaaattctaaggaagttcagatcaagcaatgagaatgggttcattctagatgctggaagaagtggagggactggcctgtttaatacat

SEQ ID NO: 10332 - DNA, 608 bp, Gossypium hirsutum
gatggctagttagtaggatagattgactgattcattttgatgtaatagctgttatatcagctttcttttgtaagcaagttgcatttttttagtatgtattaagtaagggcagttaaattagtagctaactgtcaaattatttgtaactcccatatattcaaaatttgaatgaaaattacatgactttcagttacaaattttttgctgagttatcattctttgttcttctctttttgcttcattcgtttttgctatttttcttgctgaaaaatccaacatgttgttgtgtatttatggctcaccttgaaaggggaaataataagttaaaacaaatggtagaatatagctatcagttagctactaacatattttttatttgaaataatatttaatttattttaaataatattatagtagatttttattatgaagatgatattggaccggttgaatcagaaattttaaactagaaatttgtagtctgatcgggtcaatcatctgtccgattctaagaatattgctgacatttgacgcactaaatggtgatccttttgttgagtattgctcaagattaaaggttttcttttttttggtaacaagacaccttg

SEQ ID NO: 10333 - DNA, 528 bp, Gossypium hirsutum
cttttcttaagcttatgacagatcttttataaataaggaattatggtttgaaattatatcatttacttaatcatttaacttataacttcttttttgaattatatacttattcaatcactttagctaaatcttacaccatttcacaatttcttcttatcaatttactttcctcattaaacggttgttaagtatcaaactaagttattctatctaggcataataaaaaatatagcccataatgattactcactttgtcattatggcatttattctttttttagatcatttttacccacaaactttaaattttagtcaatttgtttacttttagatggaaaatttaactaaactattaaaattttaatggtattgatgtgaccactagcgtgacagtccacatataattcataaaaatttaaaaaattaataaaaagtaattagcaaatttaaaaaacttcataaaaacttttaacaaatttatccatattagcagtgatatatacgtaaaatgccacgtgagttgccatg

SEQ ID NO: 10334 - DNA, 600 bp, Gossypium hirsutum
  misc_feature (54)..(58): n is a, c, g, or t
  misc_feature (595)..(597): n is a, c, g, or t
ggaggcattcagcaattgcatttcgtgtgctcttactgtcagtgacagtgaaannnnnttttattaagaaaacagggaagtgggcattgggaaggatatcaatgataccaacctttcagtggaaagaaaagcaagtagtagggctgcgtaagcttctaaaatcatcttctctgcttctttctcttcctgtagcatagcagcctcatcgttctgtatgatcaaatacaacaaagatttaagccatgtcaacgatgacaaattcttcaagcacactagcataaaaagataatgctccaaatcatgaaaaatgagaagaaagaggggtcctcacccaagaaagaactccagtaccatcgtcttctccttggttcgcaaggaagatggcacatagcagaggaattacagccacgtgacttccctcatttaacccttctgaattcggcaaagaaacagaagctgctgcaagccgtgatctacattgaagcatgacacgtaaatgttatgtgcctgtgactaagagtataaaaatggcagaaaaatgacctctattctgctttctaagccactgcactgaatgcaaagaaggtaaatcaannntgt

SEQ ID NO: 10335 - DNA, 370 bp, Gossypium hirsutum
cacttggtgttaaaaataaatgagtatcattgaatgataaggaatcgtggtttgattattataaacccatatataacaataggcactacataagaattacttgtatacgttacaaaagatgcatcatctttttattacaatgaaaatataaatggacatataaatttttaagattgaggtgattgaaacaagtctcgttacctaaatattcttttaatatttaaatttaatttaaacattaaagtattatttcgattagaatagaattagtttcccaaccataacacctttggggtttaccgacagaacttactccacaccgaaaggaattcatttgtttttttacaccacagtttgaggctagttaaaa

SEQ ID NO: 10336 - DNA, 589 bp, Gossypium hirsutum
ctgcaactacttttccttttgaagatgttgctgtcaagttagagctttaacagccccaaagtcgttctcttatagccggttgatgttttggttttgagtttggctccacctaatgagagttttaataggttttaacatccgtaagttagtactagagactaagattggagcttaatatgtagaatgcggataactcctctagaacgatctcaattaagtgtatgaaatttatttttgcatatgtatttgcagggcaacaatattcatgcatttggtaattggtgaagttgataagaaggcaagagtaaattgcaaatgtttagtcattctcaggtatttatttacacatcttcattgtgaaaacgataattattatcattctaaaatagtcgagcttcatgttaaacttgtaacttggacttttaggtggctggtgctctcaagtggagcttcctggtgatctgtatgttctctatatccttgcttgcctttcttttgcctatactttcaaagacgagtatacacacacacacgcatgcgcatatatatggcttgattttctttagtgcatgaatgtgctgaaattgta

SEQ ID NO: 10337 - DNA, 662 bp, Gossypium hirsutum
gctttctttgactaagttgctgctgccttttttttctatatatattaaaaagaagtcaacattccctttttggtttaattcttctattagtccgtatactatgtgaaagttctgaatttagttctatactttaatttagtcattttcagtctctgtacttttataattttaaatttttagtcctaatcaaatggtagctattaaattcattaagtaaagttctactatttctaaaattgatgcaacaaacatattatcaattgtgtaatacaataccatgttaccttgctatttctatatattactaaaaaaatgagttattagatttaatgattgtcgcttgtattaaaattgaaaatatgaaatttagaaaaatataatgactaagaatgattcagttagagaatacatactaaatctacaacaacacgtgtaatataatattgataaaagtatttaactaaataaatttaactgttatcgtttggtcaagtctaacattttaaaatttaaaaactataaaacataaattgacaaattttaaaaatacaaaactaaaattaattaaattaaactttagaaactgaatatacccaaacaatccaaaatctagaatttagcccagttaaactagggagttttaggcctctttcaacttaccc

SEQ ID NO: 10338 - DNA, 675 bp, Gossypium hirsutum
gagaaactcgtacgaatagaatatggttaggcgttggtagttgtcccaattcaatgccaaggtttctttttttctttttcatgtttcagcttatggttgagtgtgtttaatgctttgaaaaaggtttgtgtctaccactttcatcttcatcactaatgctgaattactccgttgattaatgcatcatattagccttgtcctagtgttaccggttttctgatattagtagctttaccaataaaagatgctatcaaatatagttttcaggatgatattaaaaattaaggttttttagttacaaataaaattgtcacattatcaaattttaaagatatgaaattattattataaactcatctatagagaaattattttatgagccctttccaccacattattcacagtccatttttaattatttaataatatttcaacaatatttttcatgtcattgacacataattttaataaattttttaccctgaaccttgagtctagaatcccaaaccctaaataaaaaacttaaaaccccaaactataaccccaaacacttgcatcataaactcgaaccgcgaacctcaaactcataatctgtaaccttgaacccaaacttgtaatctcgaacccttgaacccttgaaccctgaacctaaaccttgaaccctgaactcaaaga

SEQ ID NO: 10339 - DNA, 673 bp, Gossypium hirsutum
  misc_feature (7)..(8): n is a, c, g, or t
taattannatgacggatgatcgtgtcgtgagtgcatttttatattatgtagtcttactttatacggtttaagttataactttcattaggtaggtgggataattcttatattagtcacttacaatccattacatagtttatagcatattcaacgacttttattttacatctagttacaaaataaatttgactgtgttaaaatatattatgagaactatgatacccttaagtctaaagatcatatttatcattatcattatgataagtgatgtgacattcacatgattcaagagtgttctcatgactgttcgacatagtacattgttctctaatatgtactcatgcattggacttgtcatctcatactgatggcaacgccttatcattaatcaactatacattagtctcaatatataattgttgtcccggcccacaataatatttgactgaggacaatttaataataattatattattccaaaaacattattattcagttatttaatacacaaaaacatgtaccggatataataatggtaatgcatttattaattaaataaggtaaaagtatgtattacaattatctcgtaattggactttccgcatattgtaacacttttttattgtggaatcgccttgagccgattttcgtgatttcctgacttgagaattca

SEQ ID NO: 10340 - DNA, 598 bp, Gossypium hirsutum
cattgaattccttataagacgacggaatgagacttcgctagctgtcagtaaaggaggaagacggggcttgatatttgataaagaccaataaatgggagtagttcaaatgaatcttataatcattcatctcctacattttacctatatattattaaccaattttatttccatcatacaactcaaaatttcgtttattcttcaataactttttgataaattttaaatccattcaatttgtatgtaaaaaaatattaaagaaaaagtgaaagccactcaatgcggtaaatgggactaaacttgatcttgagtcaacttgattcaggtttgagttagatcggtgtaaaattttagattattttttaggtttaagttcgactcgatttaaaaaatagatctacaattttattcaagtccaactcgatcgtaataattcttttagatgattcatttatataaaagagaatctttaaaatataatacatcaaatacactaaaaatattaaaataaatatttcctaacaaaatttaaaaaaatagacatgtgatttgggtcaagttgagctcaggctgaaagaattttgcttaagactcggctagt

SEQ ID NO: 10341 - DNA, 560 bp, Gossypium hirsutum
cgcgctgaagggagatgttgaaatgtgggagggaatttcattttggctatttctgttaatataactgcttagacagttgtcaagctatttccttatttttctatttcttttatattttggccattttatcttttaaatccaatgtaatggtctttgcatcattcttatgaaatatactggaattaaagttctctccttttcctctaattattctccatcaaactgcttttttttctctctttcgatcatgttcttaacaatatttcatttgaatactggtagatattgcatgccaatttagtgatcagatttgagattctaaatagctaataaatataaataggagaagtttgacagatatcggtccacaaataaggacgaagttgagagaagaagaaacttttagaaaggaaagataaaagacattgacccagttctaattaaattagtaataaatatttagtcttaaaaaggttgaaatgttggggaaaaataccattaaaagccttttttttaaatataccgaaatgggcctggtattttattatttatcggaatgg

SEQ ID NO: 10342 - DNA, 604 bp, Gossypium hirsutum
tagatcataagaagaaatagtatcatggctaaatacttccctgtatcagtgtttgacattgtaggatataatgctattttagtagattcaagtaagaaacacaaaagcttgccgttcatcatttctctcttccaaggtttcctctcaaatttcttctctcccatccaacagatttactaggacaacttgtaatgaagttttgccatataatggatagaaacaaacacggttgtcatatcatgttcagttcaatgagggtaatctatatagctccaagaagatacaataagcagtgcctcaaaattgaaactactacagtgataatatataaccaaagaagcaacaccaaactcaggtcaagataaaaccccgactctatccttctattaccttcggttgtctctccttaagattgcctaatgggggggattcaagcttcgtgtagcagagagtggaccaaaaggcttcaagttggtgaaaactttatgaaaacacatggtattcattcatggcggcataaaaaggagacaggcgagtaataggtccctggagcatgtaatgcagattctggtggcctgatagcagacatgtaagtcttcccacc

SEQ ID NO: 10343 - DNA, 457 bp, Gossypium hirsutum
ggagctaaacttccttctcttatgagcaattaaagaactaaattaatccaactattgaattctattcctatgccaataatgtagaccaaattggttaagaattaactcaattatggctacccaaggtaatcaaatatactcctatcctaattaaaaatcatgattgacccattctatacctaaaacgaaaaatattcttccaatttctttaagtttgtcaaattaataattgaccaaactattatcaaagaagagcaaaaatgaataaataatctaaattttattaacaataaaaagaaatgaaatagataacagtcagatactaagcatgaaatctattgcaaccctagaaaagaaattaattcatggagaatttgagaacatcttaaaattaaaatgaaaaaatgatagagaaactttgtgttcttgttagaatacgtccattgttaatgtgtga

SEQ ID NO: 10344 - DNA, 610 bp, Gossypium hirsutum
  misc_feature (602)..(604): n is a, c, g, or t
ccttgacaattgtttgtgtacgcaaaatctaataatccgacacattttctttttcacgatctaactccgtatttggtttatcctgatcaatatgagtaaatttaactcaatttaatacaattcacaatcaattcaattcacatcctatggaaaattatcattttacccctatacttttgattagttacaatttcatccatgggctcggaaaatgaaatttagaccatttaatccttattccaagcctaactaatttttacatgtaacattaacaacccatgtatttcataaaattcaaaatttttccatgaattttacatctttacaatttactccctaaatcataatttcatcaaaattccctttacaaaagttgtttatcaatcaacaacctttcattttctaccataaaacttcataattcaactatattcatccatggaaaaaccctagtactttgataactttgccaattaatctccgagataactaaattaagctattacgatctcgaaaacataaaaattactaaaaacgagacttgaatacttacctaattgggtcaaagtaagcttgtctatcttcaagcttcaaactagggnnnccatgt

SEQ ID NO: 10345 - DNA, 611 bp, Gossypium hirsutum
ataataccatgccatttgaactaaaattcaatcattatttattattataaacaatttcatttatagatgaaaataacatgatttattgtatttaagattttatttattttcctctaataaacattttatttattatacttttttttccaaattttattatatttttattaaaaaataattattttcctatttgttatataaatttaaatttatttggacaatattaatgaccgatttttacatttttatactaaataatttcaaatcactatatattttatttttaatttcaaatatcaaataataacctataattttttttaaaaaaatcacttacaaaaaaaagggttattaaatctatttgttaagtattgaacaataaacatatgattagattgtagagatatttacacaagaaattaaaaaggacattttagtcttttggagaaaattggaatcacggtatttcgagtctcaaagagtcaaccttacaatgtgtaatcacaggctgtctttgcttcttcaacgtttaaaaaatcgtgatatttgtaaacgataaatatattagcaatatttcgtgaaaatgataattaaaaagtaaggttgcgctg

SEQ ID NO: 10346 - DNA, 465 bp, Gossypium hirsutum
gatttaactatcgatatggttgtgaaaacattggagagattttcagatacccttggtccattggaagggaataggattgtaatggaaaagtcattatgtgtgaatggaatatggttgtaatggaattgaataggcataagaatggtttggttggatgaaatgaatattgtaatagtattcatacatttggttgaaaggaattaatattcgaattatataataataataataataataataataatatttttaatattctaaaaaataaataaataaataaataatgaaaacctataaatataatattaatatataaattgcataaaattaaaataaaataaagtactaaattactaaaaaaaattaataaataaaataaatacaatagtagataaaacaagatacgacttcaccctagatattttacactttttcccacaaaaaaacttgtaatgcctactctgt

SEQ ID NO: 10347 - DNA, 478 bp, Gossypium hirsutum
ttttgttttggtaggaactctcggatattccagtttgctgtttttctttttctaaaaaagaatttttcatttacttttacaactttgtttcttcactaacttcaattttttttgtttttgggtataaatgttgactttttcaagtgtccatcaggcgtatatgtgtctgcgcttaggtagttttggttttgaaaaagaaaattttattatattttacaataatcgagtttttaaacttcattgaaattgattcttcaaaataaaaaatatatattccgacttgtatggagaaatgaacgtagtgcaaaatccctttggagaggactgcatttcatcccttgtccttaaagacaattttgttatttatatacactgcatccactctttcaatgatggaaaaaaaattcgggttaatcaagttgataagtcttattttattctcgatttaaaatttttccgaatcgagtcgagtgagggg

SEQ ID NO: 10348 - DNA, 577 bp, Gossypium hirsutum
  misc_feature (320)..(324): n is a, c, g, or t
  misc_feature (559)..(561): n is a, c, g, or t
  misc_feature (563)..(565): n is a, c, g, or t
tactcagagaactcaggtgcaagcaccacatcagggtctatgctcaacatgagggcctcagggtcattttgtataacaatgtcatgactcgagtttccgaccgaaatgggtgtacatcttcaccctctttcgcgcctttattgtcgatatcgtctggcacctcatctagatcgaggtcactaaaatcttcaccgtcgtggtaaggatgattatcattatcgaacccttcttcaccatctgcattggtgcccatcacctctggatgtatctctagacggaaacctgggatagggttgttatacgaactccaccatagttgnnnnntcgagccattgagatgtccttccacagcctaactaatctgcccatctgacattgatatcaaagtcaaacccgtgatgtcgacttattggagtgacattttgaacaggctcgaaatcggctaactgagtgaacaactcaactggttgggggttgacattcccaggtgaccaataaattctgagcatagtggccgggtcataatcatctacaagttccatctctataaatttcaacnnnannngaggaaactgaa

SEQ ID NO: 10349 - DNA, 622 bp, Gossypium hirsutum
ctcataattcaaaaattatttcaaaattaattttttttaccttcatcaaatttcaaaatatgatattatttagctttaaaaaaaacatgtattgttcatttgaatgataataattctttataatcatttcattaaaatacttgaaaccacgagagcctaccattgcgaagttttgaaggctgaaaaatccatttgcaaaagtagagaattctttgcctgtaaatgcttctacaaacaatatgatgaaaataaatatgggagagaatgaacaaattatgcaaacaaaatcacaaaaactatcgatctcccccatcaaaatcaataaaatactgcatcttcctacagttctcaatcttctctctgcatacttgtcggctttgacactgaaatgagctagtacacaataacagatgaagatcatacaccaactatatgatataagggctatttttatcagcttttaagatccaaaactggcattgacgaacagcttgtacctttactagtttacacgtttcattcaatggcgcttcttgccaccacaaccaccacctttcttcttccctccgttctttttaccacttccctttttctttttccctttattaacagggtgaccatc

SEQ ID NO: 10350 - DNA, 682 bp, Gossypium hirsutum
tcgattacttcggctgctggcggcaagttatttcccatcattccataacaaactccaacttgggcatctgcatgacattagttccacaatgccttaattttaaaatcaaacattttacactttgaatagcttttcggattggactctaaaaactcaaaactgagttcaatagaatattttaacgtaaatcttttatcactttgctcgtggttcactccatactcacaaagtcacaataccgattacagaaagtatctgttaggagtttagaaagtatctgctagtagtttaggggacaacgatttactcctaccaatggtgcgtgagatataaaaaaaatacagattttcaatttttaaaattcataaaaatatttgtcttgttgtcttgtgattagtgatttttaaaagtttcgccaaattaatctaatttcataaattttaaaattatatataaactttaatttgatacaattatatataaatgaaaatttgattatgattaaaatatactcatggatccatgcatgccctacaatgaaacctttcgaaattataaaattttaattttatttttaaaaaattataaaaatatgagctataaaaatgatgaaattatatttttatttttataaactaaaagtcagatatagaaggaaaactccaacaattacaaatacccg

SEQ ID NO: 10351 - DNA, 472 bp, Gossypium hirsutum
caattcgatagggcagtcttctttgtttccttagtaggaacgaaatatgatttattgaatgtaaaacttttcttttgggaatttttatatagttttgtgttatcataagtaaaatttgaagcttgtgatttgtttcttttattcgatgatttttataatagattatatgttaatgggatcacgaatgtgtgtaccaatttgaaagttgctatggagatggtgatttttggtgatagagatcagaaatatctgtcgtgacaatgtaatgctaccaaagggcggtattaaaagacccatatttttttcattgcatataattagctaaatttgactctttcttgtttgcttgttgtatttgaagtcaagattccattgaaactgctttgaaggcaaccagttctggtattcttatgatccttttgtctgtggaacaggattagagggaaagttgtctagatttcatgatcgtgca

SEQ ID NO: 10352 - DNA, 653 bp, Gossypium hirsutum
gcactcttttgtaataaaagagagtggatgtttttctaccataactcatcaattctcaaaaacaaatgaagtaaccatatgccaaacactccaaacattattgcttcaagtcaatgtttttgtagtggtgaggcctaaactttctggataagtgaaatatatttggataaaacatcaggggccaagtatactagttcctaccattccaataccaaataggttaaatttttaatatttagggttgtagggtttatgagtttagggtttaggatgtaggattttggattttaaggttttagggtttagtgtttgtatatatattttaaaagctttggtatttggggagccaccattcaaatttactactttgttcaatcacatacaaaattaaaagaatgatttcaaaataaagttctaaataccttaagttaatctctacaaattttcaaatgtattgctttaatactgtcaaagagtaatttatttgttagaaacatattttaaataattaaaaaatataaaaattaagaagcaaataaacccaatttaaaaaaaaaacccaataacaaaatggtgtggtgtcaatagtggattagtaattgattcaaaatttgttgaaaaggaagttgaagcaaatttttgaagcaagtgga

SEQ ID NO: 10353 - DNA, 634 bp, Gossypium hirsutum
  misc_feature (611)..(613): n is a, c, g, or t
  misc_feature (624)..(625): n is a, c, g, or t
ttctttcttttattcagtaggtgccatccgatacagagctattgaaatcggagttgtccccgatactaaatcaataccaaactctacctctcggacaggtggcaaacctggcaattcttcaggaaacacgtccagatactcgcatacaactgttatagattcaatcttattgtcagtcactttactatcaaacacataagcaaagtaagcttcacaaccttttctcacatatttctgagctaacatcgaagatattactattggtaaaccactcagatcattagattcaatctgaataatctcattgttctgacatctcaaatcaatggtctttcttttgcaattcataacggcattgtgcaaagtcagtcaatccatacacgaatatattgaactcatcgaaaggtaacaacaccaaatcggccagaaagcatgaatcttgaatcatcaacgggtaatttttacatactttatcaaccacctacattacccgaatgcttgggtggtctgcctcgcagtaacatattactatatcttacgttctgaacagtgtcttgctcgactaacatcgagcaatctcagataaaatgatccatcgtccacatttaaannnatcccggtcanncaatctgca

SEQ ID NO: 10354 - DNA, 666 bp, Gossypium hirsutum
agatgcgtggaggtgatttccatactttttcaccgttactttcttggtgttttagcaaacaacagcagctttgctaactgtttctaaatctttatttagtcactggagaatcaccttccctagcggaccaacgcaaatcattccactctagggattctcacggtatgagagcctttgatggagtgattcatatgtactgttttcacttattgacgttcaaagaggttcttatatcaaaatatctttccttttactcagtgaagtttaggatcaaatctttcagggtgccagaattgtttattgaaattccagaatctgcaactattggttcattgaaggtaatgactaacgatctatgattctgatcattttggtaaaagtgtttggttgctgttcatcgtattcaaaggttggtatttgactaccaattacacttgctacattttgctacatttggaccttgaagatttttgtctggtctatttgtttcaccgtgtgaatgtttatttatgtcttttccaggcataacatcttgcttcagacaatgatgaatactttgatagtatctcatgtaaaatgtaatctagtgattggtctcatatagatgcatgtttattagagttccttctaatgatgttaaattgttttttcttttctagaggactg

SEQ ID NO: 10355 - DNA, 563 bp, Gossypium hirsutum
tattttttttctctcgggtctccaattaattttgagaagtctgagtttttcctcagcccctccccccttgttcaagcaagaagatggtatggtagtattcttaatgcaaaaaaagttgatatccttggaaagtatcttagccttgaactaggtaaaattcggaaaaagagaaatctttcacaatttgctagacaagataagagcgaaattgacttcttgaaaatctaaatgccttttaatgggaggaagacttgttcctcaattcctctttaccacctttctgtctctaaagcccttttaatatttgtgaggaaattggtaagagaattagatccttttggtagggccatgacccaagcactagaaaattgcacacttgtaactgggacactctttgtgctcccactcatagggcggccttggcattagtaaaatgagtatctttaacgatgccttgctttcgaaaactgctcggcgttttcttactgataaacattgctagctcatcagtgttcttaatggaaagtattgcaataactgccctttgaattggaaaccctaaa

SEQ ID NO: 10356 - DNA, 213 bp, Gossypium hirsutum
ctgctatttaattgtaattcgtcttagtattctaattacatcactaaactataaatattatattaataaggtcttgccattattaagatcgttcatttaacctgtaaatgatacattaaaccttatgtgagagtttaaagaaaaatataaacggtaaaaatattagtttagaggattttaaggtataaaagtgataacgctcacttttttttt

SEQ ID NO: 10357 - DNA, 498 bp, Gossypium hirsutum
aaaggaacaatgactcttcctttctttctttcgttgcacctttataaggtttttcagaccatgacaaccctgatgttgcaaacctaaacataacataaatctggtgtaaccaagagatgcccttttgctttctacatagcaatgggtcgcgcgacgctctttagtggcatccgtctaaaaagaacaatacctgatttatgtgatattttacatcgataaatataaatataaaatataaatataaatattctttttttgaaaactttgcatcctattccttagtagtgctcagaaactcaaagctatatacttcctggaccacaattccaggaataagctcatggatgaagacaaactttctttttacctttttttgacctgatctggataccatttttctcaattcttcaaattgggtttaccactcttaatagattaggactgggagaaagggggtggaggtggggttgtaaaagcaaatatcatccctccaacaac

SEQ ID NO: 10358 - DNA, 690 bp, Gossypium hirsutum
  misc_feature (5)..(5): n is a, c, g, or t
acctncattcagtgaggctgtcttatggtaaatatacacgtgattataatttgatttatatgtattaaaaatttttaatgttagattaaaactagcatttagttaaattgatagctaggctaacataaaaacctgattggtacaatattgatattttgaagatttaattagaacgttttgaagtttaagaaccaatttaaaatttaagcgataattcaaggatattttatagaattaactcttttatctaaacacatgaattacattaaagccaatcatcttgaggattcaatttggtttaaatatgctcgaagtccttatactctttgtacatttggaatttagtccctctatttatatttccaagaatttaggtcatttatttttcaaacttaaaaacctaagtccaattgttaataccattcaaattattttcttaaattcaatggcgcgatgttttgaaataagaaaaatacccacttgggtagcaaaagaaaaataacgttgtaatgaacttgaatttaacaagaattttaacgatattaacaatgagacttgaaattttaattctaaaaaatataactaaattccaaatatataaagattatcgggattcggagcatattttaaccattcaattttatccatatgtcatttatttgacggtagcatcaaccctctatgcattta

SEQ ID NO: 10359 - DNA, 405 bp, Gossypium hirsutum
atcaatgttcactaaagctagatgggactttgcaaatttgaaatttggaattacgatttgtggcggccttcagatttgagcacagagaggaatatgtgaagacatgcattaaatgaaagtgtgtctcttgggtaattaagataactaatggttaatgataatgatgctgacttgccacgtgtgtgctcaagagcaagtttcgctatgttttttgagaaatgtgcttgagtgtcatcatgttgcttggttgttacacatttataaaatgtcaagggttgacttcaagttataaataaagagactcaaggtttatttaaattttcctaactcttttaaatttttgcaccgcaccttctatggtgatgagagttaaaattccttcacatgaacttggtaggtttactt

SEQ ID NO: 10360 - DNA, 531 bp, Gossypium hirsutum
ttaatattaaatttataaaaacaaatttggtatttgaaattataaattatattatacactatttaagagcatcatccatatattacactcattcttttttaaaataaaatcatatttaaatatatttaaatatatttatatatattacttactttctgttatgtgagtatagcatcatgattcttaatatttgtttttttgatgtcatgcctaatccttaaataaaatgatagtacgcctcaacgcacttgaacctacgtatttttacactaataacaataatgatgccaactgaggtaagacttaacctcctaatatctacacatttaaatatatctcattcaatataatatttttcaaatggagaagtattttcactaaaacgagaaccaacttgatagtaatattttcagaaggtaaaaatgattagagtgtgttcggatttcttaaaaataaaacaaaaagttaagtaaatgaagggaaatgataaaacaaatgtgattaagcaaaaagggaattgggaatctcttg

SEQ ID NO: 10361 - DNA, 610 bp, Gossypium hirsutum
tttaatgtttcttaatcattaaatcatcccaaacttgattttataagaaaaatgttttaaggttgaaattttaaagttccatacgtactccaataacatcttacattcatatcatatgtcggaatggatgagaagtattatacacatttgctagaattcgttagatctcttatgttctctataaatcttttgaaaccatacttgggggatgcaattcttgtagctgcttacctcattaatagaatgccaagacccttaatttcaagagttccttgaaaactttaaaaggtaaaaatgttaatactgttctaccaagcagatttgggtgtgtttgttttgtcaaaaatcgtaatgttggtgtactcattagagaatttttgttagtatggatggatgttactttccaagaaaccgagtcctattatggaactttttgaaataaaattttgtatggacatttactttgtatcttaggtgcgggcattcgtttattagatatacgacttgttggcatgcaaagctccaaaaataggattgtagcaaagcttgatgtatgagagttctagcggcttcaatgacatgtcggtgtcattattcaactaaggctatc

SEQ ID NO: 10362 - DNA, 507 bp, Gossypium hirsutum
  misc_feature (461)..(462): n is a, c, g, or t
  misc_feature (476)..(477): n is a, c, g, or t
  misc_feature (479)..(480): n is a, c, g, or t
  misc_feature (482)..(485): n is a, c, g, or t
  misc_feature (488)..(491): n is a, c, g, or t
  misc_feature (494)..(500): n is a, c, g, or t
  misc_feature (502)..(502): n is a, c, g, or t
acggttcatgttcagggttcgtggttgcccgtcctaacaatgtcgtctccaaggttcaaacctgggtcttctctttgagaatgtaatgtgccttaccattatacttaaccacttgttagtaagggtgaatatttgatgtactgccaatatatgagtttcgtgtacgataaataaataatcacatgacacctcgtcattaataaaataatagatgatttatatacaaatattaataactttatttgaatatacactcaaaacttgatataaactctaaaccctaaatcttaagcaataaattctaaattcaaaactccaaactatgtatatttaattatgtttaaattaagttgttaatatttatttataagtcctctgttattttttgttttactcaataatgatgtgtcgtgttgttatttatcgatggtgcatgaaactcatcaactaacgatgcaccnncgataaatagcganncnngnnnncgnnnntgnnnnnnnanaaaaa

SEQ ID NO: 10363 - DNA, 670 bp, Gossypium hirsutum
gatttcggtcttgttctaataacactagtcatatcatcaaatcttgacaaaatccaagtttagaggccagaatgaatctagttgccaagttcaaaaaatcgaagtggacaaaagtacaaacaccaaaatggactaattgccaaatttaagggtaaaaaattatattatcccaaaaataaaatataattgcaagctttacacaaaaccgtgagcagcaggatttgaacctgcgcgggcaaagcccacatgatttctagtcatgcccgataaccactccgacacacccactccaatttgttgatagaatttcgttaactttaaattttactataatttattttgactaaacttggatgaaatgaggtaaaagtaccatggagactcataaactaagagtcaaattgtattttaaaccccctatatagaaaagtgggcaaaccgatccttctattaaaaatttcatctatttctactgttaaaaactagtctttatatatctacattagatacacatggcacgccacatgtcatagtttggttatttcgttagccacgctagtttttaacagtacagatagatgaattttaaaatttgctcattaatttaatgtacaatgactcatttgcccgtttttgtgtagaatgaaaaaatgcaatctgactcatttac

SEQ ID NO: 10364 - DNA, 589 bp, Gossypium hirsutum
cgagagaaatgaggttcggacctagatcgggggaaaacaaagtatttgacaattaggtctatttcttactatttttgtaccgaggtaagttcttatgtaaataatgcattgttttaattatgttttaaatgctttattattgtatgaattgtgattgacttatggacgtattcgaaaaagttacgacaagcgtgaaatcccggttgaaccttaggaatagataggaaacaaatgtcatgacattagggttactaagtttatgtgtaagaccatatctgggatatggcatcagtgtgagacttcgtgtaaaatcatatctaggatatggcatcgatatgagatttcatgtaaaaccatagctgggctattggcatcgatatgagattacatgtaagaccatatctgggaaatggcattggtattgtaccaagtgtacgagacttctgagtatcctttagtattctaagtggttcaacgggtaatttaacaattatgccaaagatgaattgtgtgtaaatccaattcgaaatgatttaggtatttacgtaaaactcatacgaaataagctctttatgtgatgaaccttcaa

SEQ ID NO: 10365 - DNA, 609 bp, Gossypium hirsutum
aaaactcaaaggcttccaggacccttcatgttctgttttgccacctctaattcatgcctcgatggtatctgcaaattgccagaaaactaaattagattaacgttaaatcaaatcaacattttgtagtggtattgcattgcagagtaattaaaacagaccaaggatttaaaatcataccttgctttgtagtgaagttattgttgacctcagcaaattatctccaactatcaatctcaactttttgacaaaatcatcacgagttatcttctttgccttacggagcaaaaaagatataacacagaagaattagaagctttatttaaaaccatagagaaaccaataggggtgtaatcaagccaagccaagcccaatactgccacgctcaagctcgatactcagcttgagcttgatccaacatctatttttaagctcaagcttagcttgagatataatcgagctacttaagcttgagctcaatcaagctcatttaccaatttttgtacttgacctcgagctcaactcaataattaagcttagggttaataatatatattaagggtaataacataatttaatagtataaaaatatgaaaagttcgataaggctcg

SEQ ID NO: 10366 - DNA, 649 bp, Gossypium hirsutum
atggactaaatgtagcgcacacaggaaaagagaaagaagaataaacaactaatcaaagatatctttgaagtcaacttgatcgagaatcataaccgtccaattataagacctaaaaacattataataaaaatgagtagctaagctactgttattttaattctatatatcttatggaattttcaaaatacacccaagaagaagatcctctttatttctttatttattaaatttatttgtgtaaaaccctaatttgcatgcaggtttctaccaagaagattttgtatcactttgaataatctcattataagttttaataatacggtttaatatattcgaatctatattttcctgcattaataacaataaccatatcaattaaactaatactcaattagcggatggagtacaaattctaaatcattggctaattaatatatgggacaattcttttaaatatatcattaaaaaaattacatttttaagagaatattagataaggatcctatatggaccttaagatcaacatgaggactaattcctttaaatattttttaaaacaaaaactaaaattaataattattttttgaacactctcggttctgattatttttgttctttttgataaattacttagaactatccaccagtc

SEQ ID NO: 10367 - DNA, 131 bp, Gossypium hirsutum
  misc_feature (51)..(54): n is a, c, g, or t
attttgatctattacttgatcatgcttagcaacttcgctagctatgaactnnnntattacatttaaattacaacaaaaggaagaaagagaatctaacaatgtggtctattgtcctctccatattaaacaaa

SEQ ID NO: 10368 - DNA, 656 bp, Gossypium hirsutum
ctcattttttctccttttacttcttttacgacagttttaattaattgattaaaacatttaattaaatctcataaaattataattaataattaggaactgttatatgtctagaatattttgtctcaactttatctacaacttataaaattatatagatatcttaattggtacaactcttccattttttctctcttaatttccacaatataattaatataaatgcacttccccatattttttttataatataatttatatataaacatcttctcaataaaaattataatttattaaatttatttttattgactttagtggtaaatattgaaccttaatcactataattaacagtttagtttataatcacatcatatatttagtctgtatatataatcactatttcatatgtagatatgtatctgatcataagataattatttatattttttgaggcatttttcgtgtctgttttattatttatgttcagattttatagccactcctcccaacaattttgtttttagaatttaaatcctgttctccaactcaattggtaaaaaaaggaaaaagttaaaattattgttttgttaaatataaagataattatattatttaaacattttataaaataaatatttttttttctgtactcttaa

SEQ ID NO: 10369 - DNA, 613 bp, Gossypium hirsutum
tgttcataaatatccttccctgactacaaatcagtgaaactacagaattttacagtcagcgtgaatggtatcactatttccttcagacttgatcttgttttttgtccaaagataaaaagggctgattttgttttggtcataatattttagggaggaaacctttgagtttagaagagagtaggaagctgggaggaggctataattcctttatgcaaaccaccttaccagagaacctgaggggctataatccagcacaagaaactgaacactcctctcatcttgccttcacaacagctttcccaagaggattcgctttggaagttagccaagtctactctggcccgccaacgattgtgtataagttcaggcactgggggtatatggaaggtcctttcaaaggccatgcccctactggggaacttgttcaactatatggaatatcaatttttgaggtataatttaggcccctggttttctttatttttgaatttgtgtggaattatataaacatattctatgtttttatccattgaaataggttgacgatgagatgaaaatcttgaaggtggagttcttttttgatcgtggggagctgctttgagggctcatgaaa

SEQ ID NO: 10370 - DNA, 672 bp, Gossypium hirsutum
ttgctgttactgcaatttgacggtaaccaattataacataaatgcaaagaacttgtttcatgcacaaaggcaaaaatgaccataaatccgacatattttgataccagaaagccaacatggcaatcgatacgttctaattttcaaataccattatgtttgagttatattcaaatgcattgtcgtgttatgctctgcttcgaatcatttacaggcgaactctgtatgcatagggactttattgaaatgttgaatagtatacaagccaaatggtattatttgtttgccaacaaaaatgtcttcatgcatccatgttatcttgtaaagagcatcctggtctgttttgtaatggatgtggatcaaaattgtaaaattcaaacttgatttgatggaatcaatgctttacatacatggaaaaataagggatttgctacttttattacagattcctacactttatttgctgttgtctgcaattcccatctttggttagtatgttaattaagacgagaaaatcattgaattggcttgatgggttttgtttttttttatccattctagtcactatccgaaaataaaaggggtaagctatgaaaatcctaccgacataaataagatccattaccagaatcctaatctttttgtatgtaaagcttggaccaaaaagttaggctg

SEQ ID NO: 10371 - DNA, 690 bp, Gossypium hirsutum
attgatctcctgcccactcacattctctttctttatcgaatccttataggcagataggactactcctgcttgctcttggccttggctgcttagagacattcctttagttcgtcttagagaatggaattaggaattccattttcgtcttattgtattgtaggtcggtcatctcttcctttttgaattccatctcttgtttggtttctggtaccggtttcagttcctttgttcaaatcaatatctactatgtcaggcttcccttcccggttgtcctgtcctgttcaatccgttgttcttctgtctgaggcaaaggcgaatctcttatactgtatacggtcgagctggcttcttggctggtacatcaagcatatcggcatattgcttgttcggtgtggtacacatatctttcaatgtcaatcaagtaatagaaaaaattcccccgaaaacgtgaagaataaaaattttatgagcttgtaaggcccgtagaagtccccgaagaaaggggaaaaaggctataagtaggccgtttgctattgctataagggctgctcgcctttatacggcttggctttgctatcgctcctatgtagtggtcggccagtagtcttcctaccatacaagaatgcctattatatagtgctagaagcttcgccagcagcaagaaagacgaaggttcgtagacaaggacag

SEQ ID NO: 10372 - DNA, 651 bp, Gossypium hirsutum
gctatagactttaactcaacttaaacattatggttgttaatgttgaaaaaaaaattgaagttactcaagtcttcttcatggttaaatttttatttataaatttattattttaataaataaatgtcatgttagaaaatgtaaaaaaataactattcatttatttataaatatttttataattttgtatgtattttaataaaaatctttatgtattttatcataaaataacttttaaataaatttcatttcatttttttattttttaaaattaagaataaattgatagaatgtgtaaagtttagaataatatttggtgaatttgaaactaagaccaaattgacagaatttgtaaatatcaagactaaatttattattatgacaataaaataggtcatgccaacattccattagtaatttgacggggaagtaatcaaaatattaaaatttgataatattaataattaaaataaaaaaatttaatcttaaatgagcaagacaagaaatcattaataattagttagccatttatatatagtttagcctaactcttttggaaagcaagaagaatattaacataattgtcatcattaataaatatatttttattcgggatgtctagaaatccgcgttggccaatttctcccaaagagt

SEQ ID NO: 10373 - DNA, 701 bp, Gossypium hirsutum
  misc_feature (676)..(678): n is a, c, g, or t
  misc_feature (687)..(691): n is a, c, g, or t
ttctcaaattcaattactagtgcttttataaaacataaacaaaaatacattaaacattatctccccaagaatcaatagcataacggaatacatatatttttctttctctctaaactagattcggcaaccccataagccatattaaccttaactttcaagctaaaacaattaacaatttaacacatccaacctaactatccatctaatgtcatcaaaacttctactaaaaattttaagctcctaggccgaaattcaaccctcataataacctaacttcaatccaagattcaagtagcttttaaaccaaacctccaaattatgcatacattttcaagagtggcataaaacatacctttttgtatcaaaacaccttagccgaaattcaacaagagtttttcttctttctttcttctagtttcggcaatggaggagtaaggatgagtcactttggtttctcctcccacttctcattatattatttccttccatactataattcctttaatatcaattattaaatcctttgttaatacaaaattattttaatttttgaattagtggagcatattccttccttggccggccaccatgtttatcatgggtaaattgacatgcaaaacccctcctttcaatgcatgtactattagaccattgtaaaattaacctcctcctttcnnncaaagtaannnnncctttttttg

SEQ ID NO: 10374 - DNA, 664 bp, Gossypium hirsutum
tttttttttttttttcccagatccctgaatgcagaaaaaagaaaacacaacgttaaaaataaaatcagtaatgaaaacgaggattattaattaaaattacctgatttaatgaatgataaaccagagaaggagagaggtgggcgatacggacaggattgattgattgatttcgaggtttttattgagtttattatatttaagaatttaagacccaaagatctattttctaaacgaaaggcaaaataggattttatttgggatgtattttactcttctatcatatatcatatattccctctttctaatttaggaatttttattttttactatattattttttcaaatgaaaaatctacacgagaatcttgttttttttttacattactaatagatgaaaattaattacgaaaatacgatgaaaataatattaattacaagaatggattattttaaatactaacatctggatgttgtcaatttatcatcgttattataactaaatagttacaatgaaattaaaaatactttttttaactcatgtcgaattttataggtatttattatttttttactttttattttgtatgcatatttacaaatataaaatactcgtgtcgccaaccctgctcagtttgtttgattgggaaacgagacaacatcaaac

SEQ ID NO: 10375 - DNA, 476 bp, Gossypium hirsutum
  misc_feature (465)..(465): n is a, c, g, or t
tttttgacctttttctgacgtttgtgtttttcattagttcagccattacccattctagcgttgttgaagttgtatcagttccagcaagaaacatatcctgaaaaaaagaaacatgtatctgagtcggacacaaatatcagccatgacaaatataaacataagattaaaaaagtaagaaaaaaataacaaggaccagtatgattgctttgatgttgtctggagtgaggtccacctcaagcaagccattttcttggagtttgagcagaatagaaaaaaagtccctttctcccttgttttgagaagatctatcttcttcacggatctcatcaaaaaatgtatcaaattcgtttttaacttgtttcaagcttgatgttaatcctcgaagaacatcaacccacttcaagtaaggaaacatgtcgccaacacaaaaagtcatcataaggatcaaaagccttctacccaacnacccaaacttg

SEQ ID NO: 10376 - DNA, 651 bp, Gossypium hirsutum
cgggattaaatatatgacgagattgcctgatattgtaatcatcgttgatcagcaagaagaatatacggctctgcgagaatgtatcactttgggaattccaacaatttgtttaatcgatacaaatagcgatcccgatctcgcagatatttcgattccagcaaatgatgacgctatagcttcaattcgattaattcttaacaaattagtagtcgcaatttgtgagggtcgttctagctatatacgaaatccttgattaataataagataaataaattcttttttggaactacatagatctatggaacttttttggaactacatagatctatggaatcggttaatatatcctgaatcgcacaaaagagataaaaaaactgtgaatattgtgtgattagtttcgtcggtgtcaaaaatatagaatttgagtaggcaagagaagattgaatcaaaataattccttttttttaagtaaagttctatttctgtcagagggcaatatgaatggtatatcaaacgcactaaacgggttatacgatatctctggtgtggaagtaggccaacatttctattggcaaatagcaggtttccaagtccatgcccaagtacttattacctcttgggttgtaattgctatcttattaggttccgcag

SEQ ID NO: 10377 - DNA, 420 bp, Gossypium hirsutum
catgcataatgtcaatatataagcagatgatgagttagagtttgcagaactaccacacatgaggtcgggccacacaagctcttcgttggatttgggtgatttggaagtgggtaaagagttttccactaaagatggttttctcgctgtagtgaagcaatacaacatcaagaacggggttaactttcacgtggttaaatctcgacctgaaaagtttgaggccaagtgtgcaatgtgagacaatagatgtgcatggaaatcatgacttctattaagaaaaaaatagggttgtagacaataaagaagtttaccactccgcatacgtgtgttgtaggtatttcacgggatcatccaaagttggatttagagatgatcgcaggcataatactactgatggtgaaagcgagtttgaggactgatata

SEQ ID NO: 10378 - DNA, 637 bp, Gossypium hirsutum
  misc_feature (553)..(590): n is a, c, g, or t
  misc_feature (597)..(602): n is a, c, g, or t
  misc_feature (604)..(604): n is a, c, g, or t
  misc_feature (608)..(610): n is a, c, g, or t
  misc_feature (612)..(626): n is a, c, g, or t
  misc_feature (628)..(634): n is a, c, g, or t
ttatttgacgttttcgaaaaaaacaaataaaataaaaaaatatatttaataagggaaaaactatcgttcgttatccatttatttgttttggtgatgttttatttatttgattaattatataacaagtaatagagttcgattgaaatgcaaatattttaagtaacgggatgacgtaattttattttgtactttgagccttaatctattttttccttgggataagtagcgttaacggtatgctttattactttgaaagaaaagctgagggagaagattagaatagaattctctaccaatacatcttaataaaattttttaggaaaatgaattaaaatagacacttttgtttacctatttatatttgaaatgttaagttttaattacttatattatcttgttataacattttagttactaagttgttattggtgttacatgttaagtttactaagccattatcggttttcatattttttcgttttaagcaatttaattttttcttttatttttttaactttcctttattttctttttatttttcattctcttctannnnnnnnnnnnnnnnnnnnnnnnnnnnnnnnnnnnnnaaagcannnnnntnaacnnnannnnnnnnnnnnnnnannnnnnnaaa

SEQ ID NO: 10379 - DNA, 548 bp, Gossypium hirsutum
ccatggccaatttgttttaaccatggccaattaaattaattattgaatattatatatgattttggagaaaatacatcaaactttatttttagtcccttccttgttgcaagagagattgtcttttgatagtacattcctaactcataaataagaggataatacgcttcagtgcactcgaactcatgtcctcttaaccaagttaagactcaatcgacctacaatattaatttataatgtgaatccaacactttatgattggattgaagtgaaagtcgctagttggatgctaatggacaatgaaaaccataggcaaaattaaaccttacaaatgtaatttattttacatcaaaatagttttggataaaacttgtatataacaagatttaaattaaatataaatttgaatagaatccacacatgatttatgtgatgagaatcgaatttagatattcaaaattcatgaacctttgttaactgtgtcaaaacttaattcacaagtggttgaaagtttaagtacaaaaaaggacctgacaaacttaattcttcca

SEQ ID NO: 10380 - DNA, 658 bp, Gossypium hirsutum
tgattgcatgtactttgtctggtctagtgtgtaagagataaatcagtcttccaaccaatctttgatatatcttcttctccattgactctccaatccttgtttgcaacttatgattactctccataggtcattctgcaggcttgcaacccatcataccagtttttttccagaaatctaggatatgttttctctgtgagatgaagattcattttttctttatttggcaacttcagtccctaggaaatattgtagcctccctccctcttttatttctaattcctgagccaaccacccttttagctgagtcatctcttctttttcatttactgtcattacaatgttgtcaatatatactataagaagagtgatcttacccttgtaatgtcttatggagagggtatgattatcattgctttgttgctaaccaaacgagatcatgattttgttgaatctgttaaaccatgcttttggagatgttaagtcagtttggttaaatcggttaagactgtgaaggttggtcagtttgattatagtaggagggtctttggttaattcggttatgtttaacaaaacatgatcaaatcaattgatttaatcgcttgcttgcccttattgatgcctaaactttgccacttggtctaggttggtgcataaaagt

SEQ ID NO: 10381 - DNA, 598 bp, Gossypium hirsutum
attgcatgttttcaagcaaccaaaatgggtttggatctgaacctttcaatggtaaaaattgagggagactcgttgtcggtgatcaaaaaaatcaaaaattgattggcagataagtcataaattggagcctacatgaaagacatacgaaaattcagtgaggattaccagaactgtgtcttcaagcatgtttcaagaatagcaaataaaggagcccatttgctagcaattgtaggaatcaaagaggaacaataaacttacttggttttgaagtgcctgacagtgtgagggtgataattgaagaagatcagaagtggatacctaagaccacatgaaatgatgaaaaggaaatgacgactgagaaggggaagtatagggaaagtcttaatagtgtctgtttgccaaatagcaattaactttttttagatatcttttgttatttttacgatgcttctagggaaagcttggtttgctaggttttaacttttgtaaccgatacaatacccaatcgtacttattaggcttaggtttattcttaataaaatccaactaatatttttcaaaaaaaaattgtaattatacaactgataaggtgaaggta

SEQ ID NO: 10382 - DNA, 598 bp, Gossypium hirsutum
atgataaagtaatcaccttgctgcttgtttttgtaagttttaaccatggtataatcgtatatatttaatattaataataaatgttttgtatcatttaatattaatattattaataatatgtacgtgtcctactataacttgcatgcatgttatgtttttgaaaatgcgaaatagaaagaaacaagacaaaaaattaaggcacgtcaacaaaagtactctgttaatggcaatttatatctcttaatgatcttatgataataagttaagccaatcaagtgaaacatatactacttttatcctataaacgatagaagttttcttacacgttttttgtaagaagaaaacgactcgtaaacataaagcaaacgggtatcttttagtcaaggaaaaagagttctttcaagtttggtcatttcttctgctctatatataaaattaaggccataaaattataacacaagaaagttttccttgtgctttcttctctctgtctctcttagcacattccaatctcacaagggttactttgcttgaatatttcaatcggctaagcaagctaaagttcgagacttgagatcatcagagaaataaagatcaa

SEQ ID NO: 10383 - DNA, 600 bp, Gossypium hirsutum
  misc_feature (544)..(544): n is a, c, g, or t
  misc_feature (547)..(548): n is a, c, g, or t
aagaagaagcattaatgaggacagaagactttgactagttttcagctttatttgggatgaatattttattttcaataaattgtttacaccttttattcttttatcttttttctgggaagagccatggttatcacaagcaaaagaaaaaggaattttaatattattcaaaaaaaaaaatttttgaaccatatgcttgtagtcgtagatcaacgtttatgaccttaataaattccaattacaatgaggaggaccaagacaatgcaagtctttagtcttctttgaaacacaaaaacatttgttgcatcttttgtaactatttgttgcatcattctaaaaagtaagttaatagttagaagtgtcaagcaaggcgactcaatgcccaattgtatagattctttttattttattccacgaatacttcactacttttcaaataattacatgaatttaaaataaaacaaattaaatataagatataatttctatttatttaagtttaaattcaaaactaaattctatttctaaattttaattatccaaaatnaanntaaaaacttaaatttaaaaatacattaagagacttcaaattccgttttattt

SEQ ID NO: 10384 - DNA, 561 bp, Gossypium hirsutum
ccgcacttttcggccatgagcaataatttgagaaaaacgactttaaaaaagtaagttttgtggaaacagcacagaaatgacaaaccaacagtattttttaagttatattcatttgttacaagtattatattattataatataaattatacaatgaattataaaatagaatcaaattattacaacataatcaggggtagaatcacaaaaatttattaggaatgccgaaattaaattataatttttacgataataaaaatataatttcactattttaataatttatatctttataatttttaaagaattaaataaaatttttatatttttagggggtaaagtataattttacctttattaatgataacttgtttattttgcataatttacgtgttcaactcaacttattcttgaattaatctctactaattagtgcattttgtatttaaatattgtcaagaacaaaattcgggcactttaaatcaaagacaagtaaaggagttaaattgaagcataggaaagagaagagggaccaaattgtaaattcggaacatttgagggac

SEQ ID NO: 10385 - DNA, 393 bp, Gossypium hirsutum
aactagactaaaccctcaattttcacttcctaacatcatatctaatgtttaattataaatttagatcattaattttatacaatttcactaattaacatttttcggaaaaatcacgttcgttttcaatctcaagaagaaaaatcatttgattcatgcaaattctttaaggatttattaaatcaagtttataacctcttaattattgtaaattgagttaaaaatcattttaaaatcatcacttagcactctattataaggttcaccatttttgtgcaaaaccaagctttaaaaccatagatcttagaatttcttaattagatctataaaaacacaaattaatccctattatgagattcatcattttcttaaaatggtaatttgaactcttggatc

SEQ ID NO: 10386 - DNA, 650 bp, Gossypium hirsutum
agtgagaaaaaagaaaatgctataaatatttataatgtataaaatttcatttttatccttttataatatataatgtacggtttcaagattcatttatgttagaaaataatatggattggtaacatgttacgtttgctatatcatctttggaagttaatttttatatgttgaaataaaatattttggttaataaattgataaattaaacttattttaaacaagaatatattaatatattattgattattactttaattgattctatgaaaaatatattatataaaattaaatttttgtttgaaataaatcatttccttttcttatccaaataagaaacattaaaattcatttcgtttcctttcgtttattctaaataaaaattaagtatatttttctttctttaatcttttcaataatatttatctgaacatgagttaatgctaatgttgtttgaatgaactacattaattggtcgaattaattagattagatatggttggtttggagaataaatttaaatctgtaaataaaaaattgatatagataactagaactgattctataaccaatccaatctagaaaaacattggttaatgcgcgaccccaaataggcaatcacccctaaccttgtaagattactatcatgctcg

SEQ ID NO: 10387 - DNA, 411 bp, Gossypium hirsutum
tttgccaaggcacatcaccattattaatgcttaatgaaaagactgataaagtctaggtaattaatgatcataattaaattatataaatgtcttgcaaggttacaactagagttgtctataggtcggccaagtaaaaattttaagcctgtttttaggtttggacttagtccgaccctaaaaataaatctaaaatattgtttaaatttaacccaaataaaattgttaaaattcaaattcgatttgtctgtattgaattttttatattattattttaaatagaaataaatttaaaaaatataatatatcaaatatactaaaaatattaaaataaatattttttaacaaatcgaaaaaaataaaaaaaatgtatacttaaatgatactaaaataagtgcagcttagcaaacaaat

SEQ ID NO: 10388 - DNA, 670 bp, Gossypium hirsutum
accgcacagaaagatacaaatcctttaaattattgcattacataaaaaaattataagaacttttataaataaaaaataagaatatacattaaaagttaaaaaaatacatttggtctcgtatgaatttggttaaattctgatattagtccctgtactttataaaagctattgatttattccttataatttaatttggtcatctttggtccttgtactttttaaatttgaaaatttcaatcctcaccaaatgatgattgttaaattcattaagttaagtttttattatttccaaaagctgatgtgccaaataaattatcatgtatgtaatgtcatgtcagcttgttatttcaatatattacttacaaaaatcacagttaatggattaatgactatcatttacgtcaagattgaaatttcaagattaacgattatcagttaatgggcttctatttcattcgttggtttttgcgaacatctctgtcttcaagatagtatttggcagacattccacataagatagtaattggttgactttttgcgtaagacgtctctggtggacttcctttttgctggcgaccttgttgtcaagacatatttaggaataagttctgtagaaccgtctcacttccttatgacccctgttgacttgtctatcacctctgggtggact

SEQ ID NO: 10389 - DNA, 526 bp, Gossypium hirsutum
gcctttatgacatcatcatccttgttataaggtttttcctggatcataaagacaactaggtgaactgatacatcaataaactattgattgcattctaggaaccatcaactctatgtttcaaacttgagcatagaactgtggaaatgataacatatagaaaatgtaccttgagatgatcaactttgactgtaaggggatcttcactgacctgttcagaaatcatattgttaagttcagaatgttttgcatttaacaaagattccacttatgtaggaaatagataattttaaacaaacatcaaattttggaatgtgaaaagatgaatccaggattgttcccacacaccatttctgtaattcgaagccgcctgtgaccaataaggataacctggtctccttggatgcttgagatctgaaaagatcacattatagatatatgtatcaagggacatgttttgtggttgtatacatctctaactgccattaaatttattgcacttaacaccaaacaagatatagaacgacca

SEQ ID NO: 10390 - DNA, 655 bp, Gossypium hirsutum
atcgatgttaggatgaaggtattggaaacccaagtgggtcaaatagcttatgccattcataataggccacaaagagcattatcgtcaaacaattagccttcttaatgttattaatcctagagagcattgtaaatttttagaaatgatagggagctatcgagtgcctctccatcaattgaggtaaatgcaaaaaatcatttgcctatcccaccaatcgacaagagttctaatgagctttaagaaagctctaaaaaacatgttcatcatgagacagccatcaaaggagatggttaagccaaaatattctccaccacaattcccgcgaaggttgcaccagaatacgttagacaagcagtttcagaaatttcttgatgtgtttaagtagctttccattaacattcatttttctgaaactctttaacaaatgcttaactatataaattttttttgaaactctttaacaaatgcttaactatataaaatttatgaaagatattctgtcgaagaaaagatgactaagtgattatgaaaatataacacttagtgaagagtgcaatgtcattggttctcacactttccataaggcactctacaaattgatgccgctctctatagctcggaagctaagtttggggatattatgctaacctcggtc

SEQ ID NO: 10391 - DNA, 582 bp, Gossypium hirsutum
  misc_feature (405)..(406): n is a, c, g, or t
  misc_feature (414)..(414): n is a, c, g, or t
  misc_feature (492)..(492): n is a, c, g, or t
  misc_feature (527)..(528): n is a, c, g, or t
  misc_feature (534)..(535): n is a, c, g, or t
  misc_feature (539)..(541): n is a, c, g, or t
  misc_feature (555)..(557): n is a, c, g, or t
  misc_feature (576)..(577): n is a, c, g, or t
ataccattgcagtgcacccaagtggagattgttttgtttgctctaccactaatggaggctgcaagtaagttctttcttttccttttattacactggtttttttacttgtttattgccatagctcaaaaacttgctagtagtcaatttttgtaagtattaattaatatcactacaaaatgcttcttgatgaatattaggatgctgttttattgaagttataagaaattttgtttaatctgtttatgagattgaaatcatgtctgaggttgggcaagttgtgtatgagaatttgctgattaagtctgtgactagtggttttgttgtatgttttggccttttggggaacttctgctttgcatctctctctgtttttattagtttaagtaaggtcatggagagattggnnttattccntcatgattccatccatcatatagcttgcacaaagtttcccttttttggctttgtatctgttggatggaaaaaaatganatacatacatacatatatatatatatatgtatttnnctggannctgnnnagtgttggggagannnggatataaaaaaatgcttnnatgcg

SEQ ID NO: 10392 - DNA, 643 bp, Gossypium hirsutum
ccctccttcgcccccatttccttcactttttattcaccaaaaagcaaaagaaaaacactcaacgtctctctgttaatactcgaaaaaagctctgttttttcattgtttattttgcacaatcacttcaaacccagatctatagtcccactgtttcaccaaaaaaaatatggccgaaaattgcactagaaagttgatagtcgaaatctgcaatgccaagaacttgatgccaaaagatggtcaaggaacagccagtgcttatgccatagttgattttgatggtcaaagaaggaggacaaagaccaagttcagagatttaaatcctgtttgggatgaaaagctggagtttttagttcatgatattgaatccatggctgccgagatgttggagattaatttgtacaatgataaaaaaatggggaaacgaagcacgtttttgggtaaagtgaagttggctggcagtgtttttgttaaagcaggggaagagactctggtttattatccgttggaaaaaaggagtgttttttctcagattaaaggtgagattggagttaaagttttttatgttgatgaagaagcgccgccggcaccggcggaacctgcggctgagcagaaagcagagacggctgaggagaagccaaaggag

SEQ ID NO: 10393 - DNA, 310 bp, Gossypium hirsutum
ggccctttttcctcaaggccatgtatatgtttaggcaattaagtgtcaagaatacttgattcttcttggccaaaagcacttcatcctctactttttccttttccactgcatcaacaagtattgtttgtataccactctttctcaacttcttatttctttggatggaaaactttgttatcataggtttcttagacatggctttattgatatgctttcttttagaggaacattttccttagaaatgttgtatgactcattaaaagagttagaatcctcctcactcaaactctcctattcattcttttttttt

SEQ ID NO: 10394 - DNA, 509 bp, Gossypium hirsutum
tagtcacagatttcccaagtcgggtgtttgttgagttttattcatatgtttcatgtatttataaatgtaattgctgaaagggagagaatatagaacagtattttgaagatttctgattctcactgaatattttctctgaaaagtttgatgttttcagtgtatgttgctagttaaaatatcttctttaacccacatatctttgaagtgtattgcctccccccccctctgatcatatattattctgcagagatcctggggcagagacgaagttcaaggaaattagcaatgcatatgaggtaagagttctacgttgtgcttaccatggttttcatttatatttctgaaatgcataagtccctagttcccatggtcatatctgatctttgaggtgctttatattgcttaggtcttgtcggatgatgagaagcgatctctatacgacaaatatggggaggctggacttaaaggtgctggtatgggaatgggggtaagttaattctactgatgct

SEQ ID NO: 10395 - DNA, 570 bp, Gossypium hirsutum
tcacggctagtgtttgctctccatttccatttgcaactttagcctcaaaagatgatatttgattcatgcccacatcacgtccctttccaacttggatgtaatcatgatgtgttatatatccccctcggagagttgaattgaaccctgaaacctcttgtggaattagccaaaatattaaacttacggaattagttggattagttgctgatgtgtacctgcaaatatatcttcacttaaattaatagtttttgaagctttgctaatgccaccccttgttatgtggaagattctgtcaaatatgtcagggtgaccataatggaatcttaccctgcgaagatgagataatcatggaaactatactggtgttaatttttagatgggcccccaacctaaaaccaattggtaataggtggagaggcccctgttatcacattttaactagcacaccatgtgaatattagcaacaatcaatatacaaaatttcccaagtaaaaatttagtcaagatgaaaatttcagggtacctcagaggacttgctaaaaagcgttggctgatagtcacaaagctagt

SEQ ID NO: 10396 - DNA, 659 bp, Gossypium hirsutum
gctagattttgatcagcaattaataggaagagagatgagagtatggaaagattggattgcggaagaattaagattgatagtgatttatatagagtggaggtggtgataaataaataaataatagaagtgtgtttcaaaggggaagttgatggggaaattgcttgctcaacctttttccctttttttttcctataaagaaattgttgagttaatgcaacccaatacaatattattagttaatttgggtttggaatttgtaaaaaggattgtggtttgatccacccgaactaccctttgcacgttcacacattaccctgcaccagcactagcactcttccatggatcctttctagtttgttgttttccatgtgggggctgcttgacttcatcaccaatgcaataccttttctttgttttgttttttattccctcaatcaagcaatacaataccggtaaattaaaacaaaacaaaatttcgtacaaaaaaactttcttcttaactacgcattaccaataaaataaaataaaaatatgatctatcagcccccattttatcttggagaatgaacaaagaaatttgcatcttcggatacagaacaaaatcaactcttttgatggccttaaaatactataatcgatatcattaaacacgtgacctt

SEQ ID NO: 10397 - DNA, 603 bp, Gossypium hirsutum
caagatgatgaatttcaaccaaagctttgatgatcagagaaagaaacaaatatgaataccattatcattcattgcattataaaataattttatattattttaatgtcgaatcttgcatgtttccaggttataataaccattttttttttcaaggaatggcattgttggtgggcaacaactatatccatggcggcacaaacaccagaaagtttcactgttctactgtcaaccttttaagtctttaaaacagacacttaactttcctttgactactattggtttcgaatctttcaatcgtttctgagacaagcaaagccaccaagacacctttcctctctgtttcttcctaataatgtcaatggcaagttaagcaaacaaacccttgcctgttgatcacccaccatactcaaatcctgtttaagcttcatcttcaaggacagaaataagggaaaaagagagccatgttagatatcttcatatggcttatttctttcttcatcatcattgccattattgttctcctcatttatcaggtcaatttcctttataaaccctacaatctttgtcctttttttctttctttctttcctgggtttgcttcat

SEQ ID NO: 10398 - DNA, 410 bp, Gossypium hirsutum
aatagaataaacatagcatcacaaaccatttcaacatcatcacgttcatcctttaagacacccatgtgtacgggaaaccctgcaaaaaatgcaattgctaaccttattgaacaaatagacacataccgttaaaaaactggagatgatccaagtatagtgtaaaaaaagaatgaaatcggatctgcgtttcatgtggaccttgatcgtcgttttgtcaagtgaagttccgattatcaaaaaggaaaggctttgagcgaaaaagaaaaatgcacgtaaatatagtagaataagacgatgccatattactggtcttttgggcccaacaaagtcttgtcataaaaattgaaatggagtaatattcttaaactttatagttttatataattaatgcttaatataacatttggtat

SEQ ID NO: 10399 - DNA, 595 bp, Gossypium hirsutum
  misc_feature (317)..(317): n is a, c, g, or t
tcgagcactacgcgagaaacagtatacaagaaacaaccccctggaacaaatagaataaacatagcatcacaaaccatttcaacatcatcacgttcatcctttaagacacccatgtgtacgggaaaccctgcaaaaaatgcaattgctaaccttattgaacaaatagacacataccgttaaaaaactggagatgatccaagtatagtgtaaaaaaagaatgaaatcggatctgcgtttcatgtggaccttgatcgtcgttttgtcaagtgaagttccgattatcaaaaaggaaaggctttgagcgaaaaagaaaaatncacgtaaatatagtagaataagacgatgccatattactggtcttttgggcccaacaaagtcttgtcataaaaattgaaatggagtaatatacttaaactttatagttttatataattaatgcttaatataacatttggtattctaacttcgcacttcaacttttttagtttaatctgacattttaacttacacttttttcaattttgtatctaagtatttttaggctcaattcgatatacaaatttggcattatttttactaaggaacctaatttatt

SEQ ID NO: 10400 - DNA, 654 bp, Gossypium hirsutum
atccctaaagttgctcctttgttaagaaatggaagcaaattattagtatttacttgtaagaattccaagtatataattgctatgtatggtattcgaatatgtcacacaacgaaactgtgggtttgttttgtattccattagagattattattaaacacaaaattttctataaaaattgatgttgtttccataaaattgtttcatcgtttattatacttttagaaatggaagtaaattgttaccgttacttaaagcagttctgattgtttcatggttagatatggcattccaacatgccacacaacaaaattgctgataggaaaggtcaccaaggatggatgaaagaggaaggtccttactttattttccctggtggtggaacaatgttccctgatggagctgcatcgtatatagagaaacttggacagtacattcccataaccggtggaactcttaggacggcccttgatatgggctgtggggtatgttgacactatgttgtatagtagtatcttgtaatgctcatacttaagtttgtactgtttgagtattgtactcattatggccctctgcaggttgctagttttgggggttcaatgctaaaagaaggcattttgacactctcatttgctccaagggattcacacaaagcac

SEQ ID NO: 10401 - DNA, 654 bp, Gossypium hirsutum
ctgaaacgattgaatcggaatttagtacaaactaattaaaccagttaaaaaattaattaaacttacggttaattgtttctttaatatatttttatttgtttaattttttaatttaattattcaaattgactaaccaatggcctaaccagttcaattatagatctgatcctgcaaacatatgattaccccaacagcaaaacaaccaatcaacgacgtaaattatgcatgcatgcatgttctcatttttatctatgtggttagggatgtaacaagttacatgttgaattacataattacctcaaaatcttagcattttgatcaatatgagatttgaatggaaacatcaagtgaacgaaagggctggcaaggattatattgcgaattagccagccttggtgctgaccattttggtgtttattttatgcacacccatatcttgggtgacaactaaacacgtgggggctttcgtcttcatattccccgtttggcgtcttcatgttttccccaccttaccaaacttcttaatgttataaatctaaagatcaattctgaatattgtggtatgatgtattagagactgctatgatattcttacttgattctatcaaatcagtgagacttatatatagcaaaccagtgttattaaatgaccta

SEQ ID NO: 10402 - DNA, 459 bp, Gossypium hirsutum
tagtttgtgaacccctcgtgtccgactccggcaacggtctcgggtacggggtgttacataatcaatattttggtacatttaaagttgtaaatattagtgtatagcatgtataggctaggaatgttataatatgttttagatgtgaaaaccttgctatgtgatatagcttgattgtggtttagactatggattgtttttggcataaattgtgtgatgaattatggtgtttataataggttcatatatggcttaatgaaaatggtcattttggtaagtttgatatgagattaagttagggatttgttatgcttttggtaaaagaattgatgtgaaattagcaatgttaatcatagatgaatgaatggatataatatgtgaatttgatatgttttggtatgaaaaatgagtatatcattgattggtcaaattatggcatgaaatgtgcttgtgttggagttc

SEQ ID NO: 10403 - DNA, 616 bp, Gossypium hirsutum
tttcatttcttgctatgaccttctccatgcgtattcgttgcttgaaaaatggagtttcagaccctgtgcctctaatttgctttgcttctctgaggcttcgaaaggtttaagaattttgagctcattcctagaagcgttgaaatcgacaagcaaaaaagatgaaaagaattcaatgagtatggaaggggagatatatgatgaataagttctatagagcattgtaatatgtgagaatgggtagtgtttggtcaatgattttgggtaaactttctctggaatgttccaaatttgtaaattatgttttcatttaaccaatacaaatctctcatggtctctagttttttgagactttctgatttataagcctttatttttgacattttggccattaataatatttacttaaaagtatattaaatgccaataatagttttgttccacaattttggtacaaattaggattgaatcaagtttcactctagtttattgaatgctaatattggtttcatatcttggatgtgttttatattaattaaatttatttttaatttttttaattaattctatctctacactacagtgctctcaattaaacttgtttatgggtataggcctg

SEQ ID NO: 10404 - DNA, 355 bp, Gossypium hirsutum
gtcaaggtgtaattttctttctcctttaataccattttttttctttattttaataaattaataattttcaattacaatcccataaattaaatatgcttcttgtagtaaaaagctcaaacaatatatactaaaagtaatttttgtataacaaattaatatatctaaatatattaatcaagtaataaacatgtaatttatattaaataaagatatatagtgtaaatttgtcataagtgaatatagtttaattttacaattatattttattttaattgatgttagtcattatattttaagaatatgaataaatttatcactcaatttttatgtgattaaactgagccactaaacttgg

SEQ ID NO: 10405 - DNA, 614 bp, Gossypium hirsutum
gattttgatgtttttgtctgtaaaatggacagctctttgtacactattttttgtgcataacaaattctcttattaaagaactgtctacaaactgaaatgtcactgcacataaatctgcaaaagtacaagctttttagggcaagtgctagatcatttgttcaaggctgcatctcaaagtgtatttttgcattacccatcttctcaactttgttttcagaggcctctagctaggcctcttaaaaatcatccccgcggattgtggatgacatcatagcgatttgactgattgatgatggagaatattctaataaaacttggagccatgcatagtttccttgggtgccatgctcatgtgtttcttcctataaggagatacagaatatcttggagccgtgtatgttggaactccatatattataggatactttctacagttaggaaagaatgcatttggaacttcagaatttctggatttgtctcatttattttcagttctttaaacctttacactatcttattttttccaatttatggtgtgaatccaaaacaatcacatttctttattctggacttgcatggaaatactttttgggtcttataaccaagtggaactt

SEQ ID NO: 10406 - DNA, 698 bp, Gossypium hirsutum
  misc_feature (616)..(625): n is a, c, g, or t
  misc_feature (681)..(681): n is a, c, g, or t
atcaagtatggaatatctgtatcttaaaagctccatcaaagatgtgactgttttctcaaatggaataaactaatactgcttcaataaattaactaagtttcatatttttgctttactacaaagtacaaaccttccatgcactattttcttttcatctccttattttttcccaattaattcaaacaattatgttaaatttattgttatgcgattactttgtaatttttcataattgaatgataaaataatcgatcacaacattaatatttttcatcaactttacatcatttttattgacgtaataataaatctagcctttaaagtgtaattttttgtcttgatttaacaaatttaacatgtaacattttcactgaatatataaaacatctagagctacatttgttactatacgaatcaaaattatgtataattgacataaaaacattaatgctattatcaattgtctttagttgctcactttataaatttaaaaagattaaattgctttaatttttttgagagagaccaatttgatcaataataaaatttcaagggataattcgaaacttgggttacccaattatgaaaagttataaaacgatcatccaactttccnnnnnnnnnntggggtaaccccaagtttcgaattatcccttgaaattttattattgatcaaattgntctctcaaaaaaattaa

SEQ ID NO: 10407 - DNA, 624 bp, Gossypium hirsutum
ggcttgtaacttatacaagttgtgtttacagctcatacataagctaattacatcagtcaacaacctaacttagttagaaatgaactaagattacatttcattgactaggaattacaaaataaacaaaataagcttgcatcagcagctcctgcatgacttggtcttcttggcctgcatgctgtcgagtttgctgcatgctgaaccaacttcatcaatttggcagtgtttaccagcagctgggcttggttaaagtgtgaaagagattgccattgtgggttgagggagattaactattgaaacctttgacatgatctttttccctcattatcatctccttttgcaattagtgatctcaattttattttattttttaaaaaaattagaggaactttttttccaggccggcttattaaccagcttcaacatctattaattaattcaaataaaattgcttgattaagtaagaagtatttgcaagaaaagcgcctcggagtgattcaatacttgtggttttatatctctctgaaaatacacgtgcatggacatcttcatgaaagcccggttgcattaaatgtaatctgcatatagttttcaccgttctatggatatataggagcactgcat

SEQ ID NO: 10408 - DNA, 627 bp, Gossypium hirsutum
ttcttcctttctttccacgaaaagtctattgttctgattcttttgtattttctccattttgtaataaagttgagagaagaaaaagagtgacgagagaaaaagaaaccgaaaaagaaacaaaaattgaaaaagagaaaaagattggagaaagaaaagaaagagtgcgagaaacaagtgttgttgaaaatgaaagagaattgatgagtgaaagtgagttttcaacaaacaaagagattgtggaaaaagaaagagaagttgaaaaagaaacgagtggaaaagatgaaagtcaacaagaaaaagcgaggaatgtttttactaaccaatctgcaagttgtcctcatattgtttcttctttccaggtttctagagattcaaatgacaagtttcaacttcattaccttcctgatgagagacgattccatttgatcgaaaaaggtaaggttcaagcgcttaaaggtaagcaaggtaaggagtttttagtcaatgaatcatggcaatcaggtttgaaagttgttgataaaatttccgataacttagttttaaaaagatctccttattttgatttggttaattgttactcgctatttgtggttgataaattcgttttaagtggaggcatgaagagtt

SEQ ID NO: 10409 - DNA, 560 bp, Gossypium hirsutum
atgattcaaccctgtccggctataaataccatcgaagaaacctgagcttttgagtgctcttacttgttttcaatatggaagccataatttctccagagatcagattaccaggatttcgattccaccctactgaagaagagcttgtcaattattacctcaaggaaacagctctgggtaaaaacctgtattgcgacatcatcggttttcttaatatttataatcattacccttgggatttgccaggtaactaaacacgctacattttctgtcttaaatttgttctgtcatgtcttttttataagtatatttttttcaaacaataactaaaattatttataatctcaccttaacctataaaaaggagaacagtacagttcaacacactcaaatgtattaataacaatacctataaaaaggagaacagtacagttcaacacactcaaatctattaataacaatactaagactgaatcaaaatattctttaaagctgatacaaagaacacaaataagctatgttaaaaccaagggctcccttggaactgtccttaccatgattca

SEQ ID NO: 10410 - DNA, 506 bp, Gossypium hirsutum
tcttgatttggagttctgtagctctagatataaataatttagtgactatgacttgagataacagcatgaccagaatataagtaaaagtataattatggttatattaccatggaatcatgttgataatttgcttattattttcatatggacttactaagctttaagcttactccctcctctccatttctttagtgttgtcaagtcggctcggggttggagatcgcttgaggcagcatcacactatcagggtaccacctttggagtattgttgaatcttaatgtcttcatgtgagtggcatgtatagggacttattcattatgatgtgtattcttttgatttggccaagatgttggcttaaattgattcattgtgtatagccatgagatgtggcttgtatgggttatggcttgtaagcctatttatccaagctatttatttataccctgtgatgtggtcatgtgattataattgtttgacatgaatggttaggatcatggaatgtatg

SEQ ID NO: 10411 - DNA, 656 bp, Gossypium hirsutum
ccactttatcgttccaggtatttctctggcaagttgcaacaacatagtctttgcactcatgaaacagctttgacaagttttcgttagcagagagtttgtcctctgctaatacaaatcccaaactgagctgaacattacgcaaatgagaaattagcattataaagaatgagtggtaaaagtaataatatgcaacctaaaaataagaaaataacagccaattattgatattcacattctatgttactcagactcaagcatggatgtcaaatgtggatatgcatctgaacaagtacatttagttttttttctaagtttttccatgcatttatagaatacttggagggtcatattcctaaaaacaagtttatgtatgcattggacacaggtatttttcaaagcaacatagtttgtatcaaactatgttgtttcgtatcttcattcttaaaatgcatgtgttcaacactcatgttcgatgcgtatccggacatgggtataaagatatgatcctcctagaacccaccaaatacatatgaggactttagaaaaattaaatatacctgtgttggacatagttgtcaaatcatgttctagaaacaaagtagaaaaacagaaaactcccttttcccccagtttggataacataaaccgaacggcag

SEQ ID NO: 10412 - DNA, 653 bp, Gossypium hirsutum
  misc_feature (42)..(43): n is a, c, g, or t
  misc_feature (45)..(46): n is a, c, g, or t
aatttacattaatatgactagccactcctatatttaatattnntnntataataacaataaatttaagacaaattattaataacaacctaccttcaaaataaaaaaaataaagattgattcattttcactctaattatccttgaaggtattcaaatttctttattcaagaaaacaaatcatatctatactcttattaaaaaaattatatatattcgagggaaaaagattgtatgaaacagtgacaccacgtcatttgtatcccttttctaatagatttcaaatgaaaatcttaaattttaatataaaattattaacataatattaaattattagacttgtttcatacaatcatttctctctactcgaataacttttttttaccatgtataatccatagacaatcaacaatttagtaaagttaaaatatgcttttagtaaatatattttgataaattttgaaatatacttaaaaagttaactatttttctattatatataatatcattatacatataaaacattatcaagtctggtcaagctcataagtcacattcccataacgacaatctaaatgtatatgataataaaggagacaagaaaacagcaaacaggagtgcgtcttctccccaagctgcttctcttctccatctatc

SEQ ID NO: 10413 - DNA, 429 bp, Gossypium hirsutum
  misc_feature (409)..(409): n is a, c, g, or t
ctccaccagaggtaatggaagatattgaagccattttcaaaagatacaaagatcctgccaatctctgagatcgaagatattcattttcttcagattttttcatttttcttgaagtatccatgctcgtatctttgctcaatatcaacattaagcttgaccaaaaaagtcagagaaaaccgaaataggttcaaaccgattattcagttcagtttgatattcggtttcattattattattatttttagtggtaaacaagaaaacaaaattacgtcaatgtaaattggacaaaaacatcattagctttatcttgttgaataagctctaaaatttcatttggggcgccattaaagacttgtcttgctcacgaagctcattttggcgaaacaatcagtagcacggtgttatgagnaggttaattcataaatgaaa

SEQ ID NO: 10414 - DNA, 628 bp, Gossypium hirsutum
  misc_feature (614)..(615): n is a, c, g, or t
ttttcccatgatctttttttgtgtgtgtgtttttatatattttttatttttcccttttttggctgtctctgctgcaccattcattttggggtgatatggcgtctgatcttaaacagactgtaaaattttgatatcatgctattatgcactatcagatatgatcctttctggcattccttgtcggcacatgatctcctttccttttttttcttgaatttgatgactatcagctttgtaacattggcatatgaaatgactttcacccatttagtgaagtaattgacgaccacaatgatgacggtgtctgaagagatcggcccaataacatccatgccccacatcgagaaagtctgtgaataaataaaggaggcacatgaatcttatctccataaatttggcatttacggcataacttgtaacaccccgaacccgagaccgacaccggagtcggacacgagatgttaacaaactttgaaaaatttccttccagacactgcccagtctgagtactagtcgcttcaaaaatcatatcttgagtttcacaactcgaaaatcagtttggtgatttttccctgaaactagactcatgtccccacctatgtatttttttctannatttttgggcggg

SEQ ID NO: 10415 - DNA, 602 bp, Gossypium hirsutum
attgtgctttcattgtcacatatatatatatgttttaaattattgtaccatcgtctctgtatcttataccatgttcgtgtttcataacaacttaactatctagagagttgtttaaaacaacatacattgattttgataacattgcttcatcgagacgaggcaactaattattcgactgattcctgcattttttgcaggctaactagagcagcattgaatggctccatcaaacatttcctccaccccattcttgaattcgaaacctgtttccaacagtttctttgatgacaaaccaggacatttcatacctttgatttctcccaaggatctgcaacacacataacaattgttggacctgttttataatgcaagtttgagaaagatgcagaggcactcactctggtgatggaattgggaactctgggtatttgccaccaagaaattcagacaacttctcaaggcttatggtgtcggaagaacaattgtaccttccttttgcatctggatattcaagcaggaatatatgtgcccttgccacgtcatcaacatgcaccattgaaaaattcagaaggaaactatattcagattggttccctgtacta

SEQ ID NO: 10416 - DNA, 607 bp, Gossypium hirsutum
gaacattatataagagttattgattattttttatttacttagaaaaatcatttttgaaaatatttatgaaaaaagcttcaaaactttatcaaataatatccaaaagccataaaacaaaactcattttgttaaaaaaagtctaaagttccaaaaccaagaacccaaccaaattcaccactatgttcttttaatttgattaatgatccatgacaatccgaaactgccattaaacacctaaattgacagcaatgctaacagaaattacatggttgatgtaatatttgatactttgaggatctaatgaaaacatgttgaattttgaggaccttttatgaaattaacccttttcaaaataaatcattcaattgagaataagcagataaagtgggggatttacctcaataggagtcaaataagccctaaagaaatccatagccattgtataagtttggttcaaatcaggacaaatctgtgttgaactcaaacatgtttcaatcctttcccacttgtaagaacctcgtactctcctttgaagccatattgaaaaatcttccaaatgatattccaaatatgccctattaggaacaatgtgacctgaccctctaaa

SEQ ID NO: 10417 - DNA, 417 bp, Gossypium hirsutum
cctttgaataacacataaatttggtatatatatatatatatatacatggccaaagtaggtatcacgagaagcaagagggaaggattttattccacaaattagttgcctaaattatacccctctttttaatataataatttattatatttgataaagacattggaggattcatgtttaattgccggtgcctatgttgtcccatatatttgatgttttttaatttggtaattaaaactatcatgtaaatgtgatggtgtactgatgttttttttattattataaaagaagtaagagttaaaaggtttgaattcgtgtaaaatggatgtttgataaaaaaatttaattatcgttttaaacacattaaagaaaatgatattcattgtttgttgttgaatcatagttgtttagagtaagccc

SEQ ID NO: 10418 - DNA, 649 bp, Gossypium hirsutum
tgttcttgtagataagggattgtttttcatgttccatggtgttagaatcattacccatgtgtcgtatgaagaagctcaaagcatcaaaagtggggcaattaccactttttcatatcactcccacactcaagacttgatgtttgatcccccaataacttctattacagaaatatatgattgagattttaaaataatgtttatagaaatatatgattgagattctaatatttataatcaattatagagattgagtttaaccgtaacttgatttttttttatagataaaagagggttacacactacctacaatcaaattatttgtacatgtgaatcgtctaatctgtcttctataagtaatttccgaacatgaggtgtaggaacattaacatctactacgttaacatgaaagagataattgaaagtatattcataattaattttatcattttatgtatcaattttatatgattaatagcaccataataaatgaatacttcctaaccaaaatgaaaatgatatttttcacatgtatataaatgtaaattatttggtgcttatttctattttaaaaaaaaattctaaattttaatcatcaagtgtagcatggtaatttttcacatcgttttttaattatgtggttagatctttg

SEQ ID NO: 10419 - DNA, 695 bp, Gossypium hirsutum
gcataagtgcatagagagttaacagaaatcattagaagggcaaaatctagattttgatttcattattataccaatgttttatataagtatattatacctcaactacaattatagtatgagaagttatattaataagatcaggatatacaaaattttctaaatttattttttatacaatattaagggtaagaaattggagtaacacagtttaaatttataccaaataagtatctaataagagttttaaccatcttcattcaagtcaagagttttaaccatcttcattcaagtcaagataaatttatttttaatttagtatattagttatggtaatattgtattaaattagagaaatggaaaaaaaattcatcgtttctagtgcaatatatgaaaatattattacataacaattttaaagatgccctttgagatagatggcaaagaacttattataattttatagtatataatctcaaattgtttgaaaatatccgttgcccaaatctcatttggactaaataaaaaagtttatttattatttcaataatagattgaatgtaaaactggctatcaaattataagtaattttttttcccaaaagtgatattaaaatattaatttcctttcattctacgcaaaacacaatgtcaaccaataaagatgtgacacatggcacattattacgggacatcata

SEQ ID NO: 10420 - DNA, 618 bp, Gossypium hirsutum
cagctcgttattttattattattttaaagtttccattaaagttttccttaatcgcttttagggttttaattattaattatttcttgcttttatatcttaggtttgggattgtttagcttagcatgatatttagttaatactctgacaattgcatgctatttggtttagaaaactattattcttaataatgttttctcttgctttacaaatactttaagttttgacaagtctttttaactttaactgtttttcaaaacttcatattaataatattttgattgaattgctaagtaaagtcagtttagttaatggatattttcctttaaaacaaaagagcgattttcatacaatccaactaaaagtaaaagaatgactttacaggatcactttggtaatcaatgtaatgccttcaacttagccgaaactcctaggtcgagtcgagggggttacactcaaccaagggtatcataacgaaacgccaaaaaatatatcacacaactttgaaccccgtatatcaccagtataaaacttcgataaaaaccatatgcatatgaccctaattggcatgtcaatcttataataacatttctaccaagcttacataggcttagaaataat

SEQ ID NO: 10421 - DNA, 520 bp, Gossypium hirsutum
tactttagaaagtgtaaatattttaaagtatggcatgtacaggctagaaggtctatgtattaagttttgatttgtatatatatgttatgccatgagagttggctagcgaatggtatggttttgaataggttattgactgaagattatttagttttaatgaagcatgttttgagcatggaattggctgaaaatttgttgcttgaatgttgtttaactttgttagtaggaaagacctatataggggtggcttgtggctgtgtaagaaaagcaataacctcttaaaaatcacacggtttggacacatgggcgtgtcatatgactgtgggcttaagtcaatagctagctttgtatcacacggccatagcacacgggcgtgcctattggccgtgggtgaaagtcagtatgggtgccttgttttgccatggctagttcacatgggtgcgcctgatgcccgtgtgaagcacatggcctggtcgcacgggcgtatgacctcaaaagaagtgtttctctgaggtttgaa

SEQ ID NO: 10422 - DNA, 611 bp, Gossypium hirsutum
ccccgatcatcgatgttgaaatctttaattgattcatcttgaaccatttttcttttctctgacaatttacgatccaacaactatgcttctctaatctaatcgaataatacaagcttggtttttaattcggccaaaagactgtcatcaccgttaatactggttagagtgaacattgcttgtaagtcagttactacttttttgcttagttcatctgctaccacattggctttaactggatggtaatttataacacagtcataatcgtgcatcggataattacgttcataagttttcaactgctgagacacgtacgcaattacttttccttcttgcattagaacacaacccaaaccacttagtgaagcatcactaaacatcacgaattcctttctcgactcagttagagttaaaatcggtgcttctgtcaacaactgctttaacttatcaaaactctcttgacacttcttactccaaacaaactgcacatttttctggaggatttttgtcattagtattgctatctttgagaagccattcacaaatcttcgataatactcgggctaaacccataaaactacgaacttttgacacattcttggtgctttccactg

SEQ ID NO: 10423 - DNA, 413 bp, Gossypium hirsutum
ttcatcagctccagagctgggagttctccttctagatttctctttgccaacaagaggagtcgatttagtagttcacgatgaaaggcatagtatagaaaggcgagaaagaccaggcaagatccgagttgaaatcgatcccagacccggtaaataggggttttcctagctccagggaaatggatttttgaacgatcccaagtgctagccgaaaggctaattcggatgatgctttcactaccatagttgaaggaaggagagcagaaaatccttctcactttctcgatatgaaagaaaaatagccgcttagtttcggtttcctagtcaagtctcatcccttgatccgagatctcttttcgcttgaaagaagcgaaacttttaggattgactattctgatttataaaggtgaagggag

SEQ ID NO: 10424 - DNA, 540 bp, Gossypium hirsutum
  misc_feature (516)..(517): n is a, c, g, or t
  misc_feature (524)..(528): n is a, c, g, or t
  misc_feature (530)..(531): n is a, c, g, or t
atgattattaggttggacttaaagaaagtttaagataaatttgaattgacattcattggtaaactctttcaatatttctattttctatagaaatgaatttagtttttttatgaattgtgtttcatacagtcccttttcttgttcatgtcagtaattgtggatgaagataaactccaaagttttaccccttcacacatgacccttgtccccttatactttcattctatgcattgagttcctacatctccaaatcatataggaatatcaggcaaaaaagtggaaacctattagaacttataacagaggaccaactatatcgcatcttttttttttttttttttttttaagggggggttttttttcccaaaaaaaaaaaaaaacccatttggggaatttaaaaaaggttttaaaaaattttttcgggaaaatgggggaaaggggaaccccccgggggccccaaaattttttttccttttaaccaaaaaaaaaaaaaaaaatttttgggaaaaaaaaaannaaacccnnnnncnngggaaaaat

SEQ ID NO: 10425 - DNA, 518 bp, Gossypium hirsutum
gcgtgacgcatataactccggtaagcccctcgttctctcttatatctcatatttgtgtcaaatgaaaaaagaaaaacagaataaaattgcaacaaataatcacctttgaagtattcttggttgctttatactgatcttggtatatattttgtattataattcgtattctgtttcccttgaaatgaagggaaaaaaaagccccatttacaaataaaattcgaaggctttatagccaaaatacaaacggtttcctgctgtttctttactcacgtcgcaggtcacaaagacttggaggaagaacgggcgtcgggcatgcgaggcggacgtgcgagtggagtgcgtgaactactggtgtgctattgtggaaacccaatgatgcgatcgttgagagcaccaaaaatatcctatccctataaaataataaaaataaaaaaataaaaaataatagtataagggaagtagggtcaaatcctcaggaacttgatttgtagaattgcttgttccttgaaatcttgaac

SEQ ID NO: 10426 - DNA, 648 bp, Gossypium hirsutum
ctctcctctacttgttactggagaaaagagtctccatctattcgatagacgtcccaatctgtgattgtgccctagctaaaaggggaaataagttgggccaaaacgtctagcggcacaattttgcatttctcttagaatgatttttcccacattaatggtctttacagttaaaatcgagtataataataccattctctctaatgaaattgtagtcccgtgtgaaataagcataaagctaaatcgaatgaaatagaaccataccttcgctagtggtgtcaaatattctctgcgacaagtgtgaattccttgctttgacacagttcacttagaacctggaactgtaagttcctcaagaatttcttgcaaattttcaacctcaatatttctcatcaaagaagcatatttgtcatcttcaaaattaggtaatttaaataattcattaatagcggttgtgtaatggcctaaattttcagtggtgtcgaaacggtgatttgagatcactaaatccgacaaatgagtagaaaaatattattaatttagtgagtataagttaaatgtgaagttaggaaaatttttgaaatagtgaatagagtactagaaataaatattaaaataattagaatcaaaaacgaattatcgagacctcaa

SEQ ID NO: 10427 - DNA, 633 bp, Gossypium hirsutum
  misc_feature (629)..(629): n is a, c, g, or t
gttgttgtgcttggagaagaaagggagctttggtttcttccccatgtgaaaaggtttatggtatattctggtttagttttcacttacatttatatgataaatacaaaacttttggtccggttttgcttgtttcaaacggttttttttataattattattaatctcttacccataaatataaaaataatgcgttaacatactcaaaccaacatattcctatattaataataatgtccatattaatcaagctaaaacttaatccatttttcaaaaagctaaaggttggaaatttgaaagtgatttttttttgtgattattaatgaatgagtattagtatcaatgttccactaagtcgagccgagtgataagaagctaaatgttaaaaaaaaagaatttaattgattgagctttaaattttattttagaatagttggattcaataaggttactcgaaatcaggcaagattgaattcgaaatttcttttaagggacaaaaattgttgggtagagtggtaagaaagtttttgattttgtaaatgaaaaaataaacattgggagagcttttcattgtttgagcttcaacttatgtcgactctatagaatagttcgggttcaataaggctattcgntact

SEQ ID NO: 10428 - DNA, 769 bp, Gossypium hirsutum
  misc_feature (676)..(676): n is a, c, g, or t
  misc_feature (678)..(678): n is a, c, g, or t
ttgccaatgagtatcgggtataagcatcatttgaattgtagaatggacaataacagtgccacggttgccggcattgttaccgacccaaacggcggcagcggcggaaatggtagaaccaacggccctaacgtcggaagcggtagtaacttttttaacttgcggaatcttttcagtaagaaagtttattaagtgtgttaaccttttttaagttggattttaatttttttatagtaaatttcttgtttatccttttgttattattctcccttgaatccatatgtaaacataaaatgagttgtcttgagtcttaattttacatttcatttgctacatagtagtgatgtcgaaagttttctacttaaaaaagattattttgtagacatcacatatatcttggaaattgtgggctctgacttcctacttatttcctataccaaattaactattaaatactagctttgtcacatcagctacgaaagaggaaaatcttaaaaagaaaatttattttttaaattataattaaaatattaaaatataaaatttggcaggcatcaatatctactattatttgtggctatttattatgtgagccgtagaaagtagacgaattttgtttctccgttagttcttagggaaaactccgcaggcccagcgttgtcgtttcacattatcacanantaaaattagcagtgtggagcagtgaaaatttcagctttagcttcttctttttttataatattaaaatataaaatttggcagtattactggc

SEQ ID NO: 10429 - DNA, 637 bp, Gossypium hirsutum
ctaaaccctgtcaacaattaattattttttaatttaaaaaatatcttaaaaaatttaacatttttaaaaatgtataaaaattatagaaaatattttttaaaaatttaaaattaattaactgttgatgtgacattatccacgtgtatactacatcaacaaaattaacaaaggttaatttttcatccattttggggtaatttgacaaacaacgtaagttcaaggctaaaagaggtaaaaaattaaatggatagctaaaatgacattttcttttgtaaagttggagggccaaaaaatcattatgcccaattcttattttgggcaaactacattaatagtcagcaactatgggtttcttttttcatttttgccacccaactattagtaaatctctttttttgtcaattaattataaaaaattacaaaatggtcactaaactttttaattttatctttaatggtcacataactatctttaattttgggttaagtattaatgattgacaatatatttttctatcgctagtcgttttaccgacatataaatcaagcctgcatgtttgaatttccatgcttttctgaaataaatataaaataatgttttgtaaaagtaatttaatcacgcgtggaagacaataaa

SEQ ID NO: 10430 - DNA, 575 bp, Gossypium hirsutum
ggaataaaatgctaaaatccggacttaactcggtccattcatattaatttttatattatttttatataattttgaaaaatatataatatattaaaaacactaaaaacatcaaaataaatatttcttaacaaattgaaaataaattttaaaaattatgtatacttaaataacaataaaatagatgcaacttaataagcaaatatctctaaaatcataacaaaattaacaattgcctttaaaataataacaaaattaataataaaataagttttatacaatatccaaacaataacaaaaaaatattaacaacataatagtaaaatggtagcaaaatagagagaaaataataagaaaataatattaaaaaagtatatttttttgtcctttagtgaattcgggtcgggctagggccaaaatgccttaccagaggccaacccattttttaaacgggccttttttttgtgcaagcccattttttgggtctatatttttgtccaaaccctcccacatttcgggagggtctttaggctgggccaggtggcccgttccatgctcacctctatccagctcctcta

SEQ ID NO: 10431 - DNA, 453 bp, Gossypium hirsutum
cttctttaccgtccacaacttgaattcttacggaaagatgccatgatttttcacttgtacgtctcatcttgtattacgtagtttcctttaaatttttcagaatgagacttcgtgaaatagtagttcgctttattcttgaagctgtaccgctttaatacaacaatgaaaacatctttgtttaggtattccgttccaatttccaatacttgtacgtcatgagatgtgctcacatgaccaggtattatgtgcggtagcttcaaaaactctaaaccacccttgatcgataagtcaattttcgtcgtttgaggtagaggttcatatgccctgaatcgcggatctacatgtgaagcattgtttaagctgccgtcttcgaacctgtaaggttttggattcattggaatcgactccaatttagaaaatagtgccacttctgaaccattcaataccacactg

SEQ ID NO: 10432 - DNA, 612 bp, Gossypium hirsutum
ttctcaccaccacagtaaatccttttacggaaccaatctcctttaccaacctcaataccacttacacgtaaaatcaataaacgcaatcaaattttttttaaaggatattccccgttgttcaaacaatgacatgcaaatcaacgaaaggattagaaaaaaaaaaggaagaaaaataaagtaaaaagaaaaaaaagagaggagacttatcttgaatctaccatgcatggcacttggagcatttatcttccaatccgaatcgtgaaaaggacatgcccgacaaaatgagcaacatactatgaaaacaagataatctaacgaccagcaacgacatgatgacaggaggctatgcaactacgtttattttaattctaggaaaatccatgatgattttgatgaaatggaagacatactcaaaaagagcatgtgaaaactagtttagaaggtgaagtttgagctccactgatcactggtgatgacaaccggcacaatgaccccacaccaaagttaatggattttgggtttggcccatatgcataaaaaagaaacctattacattaatatatataatttttgtgttaaaaaaaaatgatgtgaaagccccgttagctttac

SEQ ID NO: 10433 - DNA, 542 bp, Gossypium hirsutum
ttcacttgtcttcttctccttgtgggaatattctctctagttctcacaaagtgacccgacccatttgcccataagggaccctattgctcttgtcgtgttttatgacttcctcttaccagttaaccatattcaaaacgtaccgattgagttgttgcagcgtatttgccattataattattagttgacttaatatatatacacagaaaattatatgtaatcttggatgataatagttcataaatggtcgacttatttcccttttaagaccattaattatatttacaaattgaattagtttaataataagaaaaactcaataacgttgagattataaattcaagtttcgtaatgaagagatttgatatacctattttgatttgttagtttgatagtttaattagtaattcgatagtatcaatataaaaataaattatgttgataacttttaattaaaaataggttaaaatatctcatcaaactctttactttttttcaactttagaattcagtctatatatattttcaagaaattggtctctcaa

SEQ ID NO: 10434 - DNA, 424 bp, Gossypium hirsutum
gatctgcttgtataatagagggttttgaaaatcttgtttagtaagaacaataatgtagaagctaataggtatttatataataaaacaaagacaagggccaatggaggtactgcaaagaaaagtctagtaatcatccttatacttgttatataaaaaaaaataataataataataaacaaattaaaacattaagaatcaaagcttccttggatcgaagagagatggaaacagagaaaggagaataaaggaaacttatgaaaggaggcatcgagttgttggaactagcaagcaagggaaggtgcaaaaaagagggggaaataatgtatgaatgaggaaaaggcaaaaggctggtctgttgggaatttaaatctggtgtttctgaaatcatattaatatatagagagacactgatgttgtctgggag

SEQ ID NO: 10435 - DNA, 424 bp, Gossypium hirsutum
  misc_feature (58)..(60): n is a, c, g, or t
aaagttttgtttagtcctccaagttattgaataatataggaatgttttcaacacttgnnnaaaaaaaaggacctgcgattgaggggggttgtttgtaagaagtaaaagcttgtatggggacatcatttgagtaaagctaaaaatatgccgtttatgatttcacgtccctatatctagtatagcgtggcaaacatgcaattctataattaaatttggtcctgggttcaattcgatacaccatgatatttggattcggattcgggtgtgagtgttggtttttatgatttttaacctacccataaaggtgttgaggaaaataaatattaagtggtggagtcccttaataatttggtcccttcatttatttatttctcttcccccgtccttctgttcagttttgttgaaaacaggctctctttttttt

SEQ ID NO: 10436 - DNA, 622 bp, Gossypium hirsutum
tttggagtggttggcagtggttttgaaggggatgtagatgggattgttgtgaaatagaagggcaggagaggggcatggagttgaaggaaaggttagaggtttaagcaaagaaaaagaagatgatgaacaagaagacatgtttcaaagtttttgagttgttcaaagccagaagctgttgggatttttcgatcgttttggaagttagcttcttccacttaatttttatacctttcttttaaaaataaattagttttcttatggatatgggttggggttttattatgattgcagtcccacatttgattttttttcatcttttggataatcttttaactcatttgtatatgaaataaatcttttttatacttaagatctatttttatctcctttactactatttcatttccgttttacgatccattctcgaatacaggtgagcatttgattgaatcgaataaaaatattttgagttaatcgagttgacgaatcatattttatcatcctaactcaatttgaaatttttttaaatcgagtcgagtgaaataaaattcgaattgaaataaatagaatatatttgttcgagttaaattaaaaaaaataatttgagtgcttgtaatactgt

SEQ ID NO: 10437 - DNA, 649 bp, Gossypium hirsutum
ccttattttttttactcaaaccaggtttttgggtaaacttaatcatagcaagtaagatgcataggtttcaaaatcgtcctttacatggtgggtattcaaaaataaaatataaatgcaataaaataaaaatattatgaaggtatttatactaagagttgaattatattttgtcccatttattaaaaaaatagatgaattaattcttgtacattagatcaaagaacaaactactcattctattaaacatttcatctatttttattgttaaatagtttttgtacattagaataaggtacacatataactttctggttattttatcagtcaccaacttttaacagtaaaaatgaatgaaatttttaacaaaaaaaaatcaatttaccttttgatctatcgtgcaaagattaattgtatgatttatatttttcaccagattcgcagatgattacgtgagtttacatcttgatttcggtttcctttgctatggtgtggtgatttgatattgtgagaaaagatgtaagaagagtgatgtttttgctccaagtcttggataatgaatataacaactcaccacaattagcccaaatcaactattcttccaaaaccaagatttgctttagacggagcccaaagcagttcttctctattt

SEQ ID NO: 10438 - DNA, 504 bp, Gossypium hirsutum
aaatgttggacccacgttgttttatattatatagtatatagtaaagttagtaacctacaccggcctgccagtgccacccacataataataaaatgcacatttttttaaaacaattaataaactaattattaaattaggggtaaattttcgttttggttacttaatttaaaaaagttataattaaaatatttaaaagtttttatttaagtcactgaaccatttaaaagtttctatttaagtcattggttgttatgttttttttaaagttttgccatcgagctctaaacaacgatttaacaattaatatgataggtcaatacccatcaacgagtagaagaacatactttaaatccaaatcgacttgacggtcagtgtcagacattaggaaaaagatgtttgaattttggtccacagaattatgatgtccaaagctgtttcataaaaaaaactgaattataaaagagagcttttgattattgatgtaagtagtgtggatagagaaag

SEQ ID NO: 10439 - DNA, 601 bp, Gossypium hirsutum
acttacagtcagactgagagagttattcaaattctcgaagatatgttgagatgttgtattctagagtttgaaggtagctgggagaaatatttgcctttgattgaatttgtgaataacaacaattttcaaacgagtataaagatggcaccgtatgaagctttatatggtcgcaagtgtcgaatgccattatactgaactgaattgagtgagaaaaagattcacggagttgagttaatcaaagaaacagaagaaaaagtgaaagtcattcacaatagtttaaaagcagcttcagatcgatagaaatcatacgtggatttgaaacataaataaatagaatttcaggttggagatcgagtattcttgaaagtgtcatcgtggaagaaaattatttgattcggtcgtaaaggaaagttgagtccgcatttcatcgggccatatgagattgttgaaagaatagggcccgtagcatatcgactatcgttgtaacaccccaaacccgagaccgtcaccggagtcgaacacgaggtgttaacagactttaaaaaaaatttcccagacactgccaatctgtgtactagtcgctttaaaaatcatatcctga

SEQ ID NO: 10440 - DNA, 635 bp, Gossypium hirsutum
ataattgtccactactaatgtatatggtataataacccactaagtcctttaattaatatttcatagtcatttgacccctttaagatatataattcaacttttgtatcttttacgatttagtctttttcaattaattaactatctaaacattaaaatttcttaaccaaattttaatatgaccctaatagaactccgtaaatattttgttaaaatatttaataaaatatttacgggctctgtttatagaaacgaggtctcgatacctcattttctaaatccaattgactttagggacacacgacttaaacttacttattcattcaaataacataatttaccatatcgaaatcaaatataatacaatatttgacttgtaaagattaaataataatctttacggactcacttgtcggatttgtggttccaaaattactgttttcgacaccactgagaaacggattgttacaagcatgcattcaataggtcactttataacttgtcttagacctaagaggaaacaagtggtacaccagaatactaattatatatgctagctgtcaagcaataacgacgttagctaaacttggtacaaaagcaagccacaatttatctttcctcgtgtgctccaagaatac

SEQ ID NO: 10441 - DNA, 664 bp, Gossypium hirsutum
gctggagaagcttgatatcaaatgttgggataataacattagttaatgtctcattcaaccttctcccttctagtttttttttaataatgtaatgtaagaacttgccgtcatatcttggtcctgatagagctttgagaacttttgttgtttgagaaaacaatggacatctagtagtaaaaataaaaatgttacttaatattatgtgataaaatactgttagaatcattatttgggtggtaattaaaagcacattttactaggagctggattacattttgctctttttactcgaaaaaataggtaagttagtcttatatattagatcaaagagcaacccggtttttctgttaaaaaattcatctattcttactgttaaaaaattcatctattcttactgttaaaaacaaatcttgtacattagcataagatatacgtggcgtgccacgttttactacctagctattctgtctgtcgtaccaatttttaacaatacaaatagataaaatttttaacagaaaaaattaattttctctttaatttaacatacaaagactaatttactcgttttttgaatagagtgaacaaaatacagtttaatttttagtaaaataatctctatgatacttttactgctaaaaaagtgtactgtaccctggttgaggga

SEQ ID NO: 10442 - DNA, 609 bp, Gossypium hirsutum
ttttatcttgtcttttccaactaaataataatgttattttctcccaggattggagggcaggagaacttcttccattgccacaagtgtggtaagctaatctgaatccatctttatgtaagcttttattagtcttattggggtatttgaacatcactaatacttttatccgtttgtttttatgttttttgttgcacaaaggttgctgctattcaattcttctgaaaaaaagccatccctgtgttgaaggagcgatgcaccatgactgtcccatatgctttgaggtaatttcaagttctcttatttaccatcaaatatgataatgaattactttgatattttacctaactgaaagacctcaatctgtatacgcagttcttgttcgaatcgagacagaatgtaactgttctgccatgcggacatacaattcacacaaattgtttcaaggaaatgagggaccatttccagttagtgcttcagctcaatctcaggattttactattacctactattttgtaactactctattattgactgatattccaatcacttgaacagatatgcctgccctctgtgctccaaatcggtttgtgacatgtctaaggtctggga

SEQ ID NO: 10443 - DNA, 584 bp, Gossypium hirsutum
tgagtagagccgaagagtgtgaactgtacaagttaccaattaaatgaaggaatgagctccggtgtatagagaggacctcaccgtttaagaagtaaccatagaaacgatggaacccactatttatttatccatttctatttactcctttattttagttaatatgctttttttgatacctagtatcaatacaatttcttatttcaaggcgaaatgaaatgcctagaaaaaaggaaaaatcgtggtcgggacggttagagtagcaaaagccattggaatttttattttatacattggaagaatccgttttgttattaatagactagaaaagaataactgaaagaaagaattagttattcatcaaaatttcttttattcaatgaccagaattaaacggggatatatagctcgtagacgtcgaaaaaaaattagtttatttgcatcaagctttcggggggctcattcaagacttactcgaactattactcaacaaagaataagagctttggtttcggctcatcgggatagagataggaaaaaaagggattttcgtcgtttgtggatcactcgaataaatgcagtaattc

SEQ ID NO: 10444 - DNA, 387 bp, Gossypium hirsutum
aaagaattactgattcggtcattagtctagttccaaaaatattgtcaaaatttcaaaaaacaatattatttacttcttgaatggtaacaagaaacgtttatggactatatgatccaaccaacttaactcattttagaacaaatttgggtttatatttttcaacttatgctgcctatctcaatgttaaaatattaaattttataattaaatttaatataatttttttttatttttttaaacaaataaatgattcatttggattaaacgaactcgaagctatttctttttaaatccaacctcaacttaaccttatccataaacacttctaaaggtaataaagtctctacaaagttcaaattctattcaatccgtgcatcatatttgaac

SEQ ID NO: 10445 - DNA, 655 bp, Gossypium hirsutum
tgccaacttcctaaagctttaaatatgtaataattagcaaactgaggatcagctaagaatttttttcattggtaaataacaaactcgtctaacttaaggatattacaaaaagtaactgaaagctgtctaagtatctctaaatgggtttcttttatacacttcggtgcaaaatgaagccatcaataatcagctttcaagtaaatctccaatgtgagtttcagaattaacactttagcaataggatcatgctcgacttgcctctgatggggagtcctcccaaccatatcccgattccctagcagtttctatccctttaccccctatgcttttttttttaattaaaattctaagtttcccaagtcgaataagggttcatctagttaacataacaatttatgggaacatgatacctatgaagagtatgacaacttgaagaactgataatttagtaaaaaattatgctccacaagtacatctagttggaaacaaaaattcgaaaggaataaatggcaagatataaacaaaaattcctcttcaacatagcaaactacaagcaaaataacattgtaatgacaaaaaccaagtagtattatgaagaacctgagacggaatcgaccaagtaacacgccaaacaaaaataaataaagaatgcaag

SEQ ID NO: 10446 - DNA, 576 bp, Gossypium hirsutum
ttggataaaaatataggttcaaaaaatgggcttaagcaaaaataaggcccttttagaaaatggattgagcctcggataatgttttttttgccccggcccgcctgaatttgcaataaaaaaactctgttgttttgctgttgttttcccactttttgtcattgttttgctaccatttaactattgtgttgctactattttgttgttaatgtttggatattgtataacacttattttattgttaattttattactattttagagatatttgcttgtaaagttgcatttatcttagtgttatttaagtataaaaacttttttaaatttattttcaatttgttgagaaacatttattttaatatttttagtgtatttggtgtattatattattttaaatttttttatataaaaataaaaattaaaaaattaatacaggcggaccgaactgaacttaggttttagcattttatctggaccaagtttggacaaaaattcaagtctattttttaggtcgatccggactcgaacctatcaattgggcctaaaattttgttcagcctatgaacaactctaatcggg

SEQ ID NO: 10447 - DNA, 560 bp, Gossypium hirsutum
  misc_feature (53)..(54): n is a, c, g, or t
acctcgaaagccccattttatctgtaactctatctttcactcatttcctgcannttaatatcattacattaataactctatttcgtaatttaaacatacaaaccgacaccgtactgttgagaaggaagaagaaaacaatgagtaatgagttggatgtgagatgcaaatgccgtgcagctcagtgttactaagaggtagtgaagggaataggaaagagtttcctctattgagagaacaattgaaattttcattgatttcaatcaaataaatattttaaatattaataaaatttagaagtgggacttaggaagctttttactaatagaccaaacaaaggtaagaataaaaagaaataggaatattaagatgattggatgataatagtagccgactatggtgaccaaagggcaaatacaaatatacaacatccgagtgattcccaagcactctccttcacattttccttttgtaaatccaatgccttctttttagcctttcattgtcacttcctccatcaatacccttcttggttttggagaagatcacccattccagagtaa

SEQ ID NO: 10448 - DNA, 669 bp, Gossypium hirsutum
ggagttgttagaaaggttgaagctttagtggggagtgttgggttaatccatttagaggcagctaaaggagagtaagagttacaagagataatagcaaccatgttagcacttataccataaatcaaagatttcacggggaaaagaaaaggggattttagttgagatggagaaagagataagattgttgggaaatacaacttcttaccagaaacagttatatcttctgcaattaataatatggttaaaaatatgcgtatagtccctatacttttcaaaaactaggaatttagctcctatatttgtatttctaggaatttagtcactttacttttcagatttcaaaattcaagtccaactattaatacgattattttctttcttttttaaaaattcaggttaattataatatcttttttagttatatgactactaagtgaatagtcttttaatttcaaaatgtcacagaaacaaattaaaaaaaaatttgttagcgattagacttgaattttgaaatttgaaatttgaaaattagagagactaaattctaatttggttgctcatcttatcccttaaccataagatatggggttcaatccccacccattggaatgaaacacatttcatggttagtcgtttatctctttggagagcacctaaaatccccttttc

SEQ ID NO: 10449 - DNA, 622 bp, Gossypium hirsutum
tttattgagtttcatctacattttgattagtttgggtgtatctcaacgtttggattagttggtaatgctaaattaaatattaaatatattaatgagttaataaaaaaaaacatatgttttaagaattgaagtttaatgatatgcattggcaaaagtaataatacaggagtattagaagtattcatgaatcgaatgagattcgaattataacatttagcataagcagtattaattcaacttttcatatcaataaatgttgaatacaataacgagataaattgtatttccagaaaaagaaaatatattcaaatcttggcgttgatattaatggaaagaacaatcattaactaactctatacataagtcgtaaaataaattgattcaaatttaatccaacccgataaatttattggattaatatattgattaaaatgtgaggcgaggcatcagagaggggggtacatgatgatcacatggtttatatgaaatcatatgagatgatagtcagcaaataccaactctcactcgtgcgcggtgactgtaccaatagtatcatattattatatgatctgagattcccgcatgagttttctgtccccccactcgtgcacttcattatcta

SEQ ID NO: 10450 - DNA, 510 bp, Gossypium hirsutum
tgtgagggcctaataagaacaacactttgtaaaattatgggagatgtactcacattaatacttgaaaattaacagaacaacaaaaaatatatttaaagggttagatattgaccataaccagctcgtcactcagctagttccctactttgttagttcaccactctacctgttcatttctcgctaactcgcgggatctcagtaaagataactctaaggatatatgtcaaacctagaaaggtaatgtgttattgtgcatgacacttaattatctcctaacatgttccatcatgaaatcgtgccttataaatataaagatgactaccatgggagattagaggaaaaaactccccgacacttattaatctaaaataataaatgtaatttaaaatgatataaattctaattcaatattattggtgtaattttatcttaaatttatttttaaattcgattcaatgatatattatcaatattacttttaatgatactgggccaatatgacttcaaata

SEQ ID NO: 10451 - DNA, 629 bp, Gossypium hirsutum
ttgctcccaaggactttcaagattcatttgcttaattgaggagctgacgcttattctccattcaaccgaacctatgttgcatcaatttaatgaaattcagctcaaagtttacttggacattaagccatgaatctgcctattcggctaaccagccattaggttataaataattgctaattttcttgtaaaaggactttttgccaatttttgaatgaaattatatttttgtgagtttaaattcactctcctaattcttcaaagctcaagttgacttatctatcactagtggcgtcaatctgactttgtttgaacttatcaccataaggtgtggcgtttatcacaatatcgaaggttcctattttgctaaatagagggtctcggttttaagcaagttacctttcttttccttgaaaaattttaagcccgggtcgttaatttctattaagggttggttcttatttcattgaatattcatcctttcttttccatcattcaatttggtttgaaacttcataaacctaccaaacacctagacatagcaaaatttaattcttgaaacctttgacttgaaaattctaaactgatacttcctaattttgatcgagcatcaatacgactcatcatcatct

SEQ ID NO: 10452 - DNA, 549 bp, Gossypium hirsutum
  misc_feature (56)..(56): n is a, c, g, or t
  misc_feature (59)..(59): n is a, c, g, or t
  misc_feature (61)..(62): n is a, c, g, or t
gattttaacaagcaatctaataaattctaataccagaaaaagatgagaccttaagncantnnatcaaataccttaccgcatgaaccttccaagcaatccataccaccattaaaaaaacccccttatcccggggggtgacccaaccataaaacatggccaccccctcctcctcctaaaccttcctaccacaaccaaaaaaaaagggggggaagccggtacaaaatatataaaaataaagcaaagggaaaaaggcccttacgggaggcttaaatgatttatcaaaaagggggtaaaaaagcccgggggaaaaatcatttacaaagggcacagttttgctcttcaaaaaccttttctttcccatttttccccccttttcttctacccaatattgcccaaaaataaaatttttacccaagttcccacctttttttttttttgtttttaaaaggggaggggagaaccaatcttttttcccaactttaaaaaaaaaagaaaaaaaaaaaaccttttttgggtttggcccaatcccccttcccccaaaatccaaat

SEQ ID NO: 10453 - DNA, 650 bp, Gossypium hirsutum
tattatccattcggtcctgaagcaaccttttaaattcctcacacgactgaatgtcatgttctacaattccatagaaattgcaaaaactttgaccttcttccccgagaattctatcggggtgacaaagcaatcctttcttaactagtacctctcagattttttgcagaggtgtctttatctctgaaacacatcttctgactttccattcgtcctctttccccactgtgctcacatttccttcggtatggttagggaatgggttcccagttgcgttactggcactatcgaatcgtagaatacctgcgtcaatgagtccttgaactctcctcttaaaggctaggcaattctccgtggaatgcccctggttccccgcgtggtatgcacaactagcgtttggatcgtaccactttgggtatggaggtttaaggagtgccatgtaatggggagaaattagctgtttctccaaaatatttgggtataattccccatacgacacagggatgggagtaaattgcggtctcttgagattaggccttactggtcttggttcgtttctgggctggctttgagcgggtagagtgttttgtgggaatgtagtgacgggcctttggttattcatggcttatatagggtaggaaggaggtgaagct

SEQ ID NO: 10454 - DNA, 545 bp, Gossypium hirsutum
gatctctgatgttggggtgtgacaagacctgtataccaccagtccacattactttggtcgttaatgttttattgtatttagctattttagttgttgtttagaaaggaatgggattgatcttttggtatgttagtaagtctcgaaaatcttgatatattcgagagacttgtatagatttatggagtgaacattgggagcacttatcaggtcatcaaggaacattatttgcgaaaataaaaccttttgtgaatggttttacaagttaagttcaccgtgggagaatttagtggtgagaggtctagttttgagtacaagaatgaagtgtgttacaacttagttcactggttgtatctgttttaaagatattggattgatctcattgaactagattccacagacataacgaaactaaattgtgtaaacaattttgttgttttatgattttattatagttgtcttaatttaataaaaaaatcaacttccactgtcacttcttccccttctctatacttatagtttagcaactagttctactcaacaaatac

SEQ ID NO: 10455 - DNA, 599 bp, Gossypium hirsutum
gagatgtatgcccgagcatatcgaattctttctatttcggttgaatcttcatccggatccgggaatgtgtctcgtaaccagcccatctcgatcttacctccgtccattttctccggaatagcgcccaaaagctcgtagcacaccgctccccaatcgctagattgggcagacccggtgactgggtacccgtccaccggcaatcccaattgcagactgacatcttccaaagtgatagtgcactctccacatggaagatggaatgtgtgcgtctcgggtctccacctctcgatcaacgcactgattagtttcgggtccaccttgcatccccggcctaccgtcgccacgtgccaaaaacccgcttcccgcaggtagttctctaccaacggtgatggaggagcatgcatattccggatattgcattccaatatccgatctacagacttttataacaaataataaattaataattatctaaaaatgcataaataaaaaattcttaaataatatttaaaaattaaatttaacgcttaccattttcatttgttccaccgatatgtgctgcttatcaagacgagtcaattctccggccattggttgaa

SEQ ID NO: 10456 - DNA, 600 bp, Gossypium hirsutum
  misc_feature (7)..(7): n is a, c, g, or t
atgagcntatggagaacttgggtgaacttttcgttgctcatagtttggatatttacgatcgaaactatttttcttttgagttcgacgttttattttaaaaaatgaaaatgaagtcatcatcaatcactttcgggaggtgtgatcgagttatttcaaaatttgatcgttttaataagagatgtaatttgctaaaataatatttttttgtctacaaaatccagaaaataagttcaggagtcggttacgcacgagaaaatattagcaccattgttatgcccaaaattggtacctaataattacttcatgtatttagtgttgaaaaattgaaattttgaaaagagtttaaaacacaatcccacttagcataatattatttttaatcaaaatgtacaaggggccttttatctcaaggtaacaaaaggtcacatcccataagttaggacacgatagctcgaactctcgaaaataagcttgcttttttttattttactatttaattaaatctcatgtattttaattttaaaaggatattcggtcatttaggttcaacgaggaagtcgaaccccataagttagggcatgacttctcgaatatctaaaa

SEQ ID NO: 10457 - DNA, 404 bp, Gossypium hirsutum
taggagaaggaattattggctgcgagaggatctgctaatcaaactataaatggtgttaaccggaagtatagtgacagcacaagacctgggaggaaagggcggcactctggccactctcatgacttttctggagcggctggtgatgactttgaattgtggaatcttgatctagatgatctaaagatggaattgcaggctaggaaacaacgggaggcagctcttgaagctacactagccgagaaggaattcatagaagttgaatacaggaaaaaagttgaagaagcaaagaagagagaagaagctctagagaatgatttggctaacatgtgggtgcttgttgctaagttgaaaaaagagggagttgctacccccgagagtaatacggatgagcagcatggtaatag

SEQ ID NO: 10458 - DNA, 385 bp, Gossypium hirsutum
ggaaggcaaatatgtatgcacgcatgcagttaagtcagtgaatagttacctcagacatgaatttctttaggatttcttgtttctgaagttcatcactggttggaaggcccatggccttctgtctttggtcaaactgcatgggagaacaagtaccccaattatgataaatgcataaacctagtagtgccaatagagataaatatcaaaatgatgcaattctacacatgaaaattcaagggtaaactacacccatggtcacttttgtttatcttaggttacgttttgatcacttatatttgaaatgttacgttttagtcatttacattatcatgttgtaacattttagtcattgagccattaatcgtcgttaatggtgaaacggtaa

SEQ ID NO: 10459 - DNA, 697 bp, Gossypium hirsutum
  misc_feature (163)..(164): n is a, c, g, or t
  misc_feature (179)..(187): n is a, c, g, or t
  misc_feature (198)..(203): n is a, c, g, or t
  misc_feature (209)..(210): n is a, c, g, or t
  misc_feature (215)..(216): n is a, c, g, or t
  misc_feature (639)..(640): n is a, c, g, or t
  misc_feature (648)..(648): n is a, c, g, or t
  misc_feature (677)..(678): n is a, c, g, or t
  misc_feature (691)..(694): n is a, c, g, or t
cgatagaaactttaatgattcagtcctaacatgtcaagtgaatagcgtgaggtatgcaagatatgatggtctaggaagcttgaggcatggtcttgacagacaattggtagaggtgccgagacccttgaatggtaacttgccttacatgcatgagcacaagcannagcaataatgagggnnnnnnnnnctcgacaggcnnnnnntagggnngtgtnntccctaaccagaatcaatactctggggtcttcgatagaaactttaatggtttggtcctaacatgtcaagcgaattgcctgaggtctgattttgatgcaagatatgatgatctaggaagcttgaggcatggtcttgacagacaattggtagaggtgccaagaaccttgaatggtaactcgtattacatgcatgagcacaagccagcgaggcatagtgttgacagacaaatggtagagatgccaggagccttgaatggtaacttgtactacatgcatgatcatgagcatgaacttgcccatattagcaacagacttgagagacaggtggcagaaacgtcacaagccttctatgattacttgtattacatgcataataatgttgatagacttgtgatacaaatgacaaaaatgtcaaaagccttcnntgattacncgcattacatgcatgagcacaggcctacnngggatagagttgnnnnaca

SEQ ID NO: 10460 - DNA, 613 bp, Gossypium hirsutum
taaaataatcccagaaaaataattaaaatggccttattacagcccaaaaccaaataataatattaataagataaaacttataaagaaataaatcggctacttattgctattaaaagaaacagaaatagtagtgtggccatctccgagtccctcgcagctccaaaccatctaagcttagggattccctgcacagttagaaatggggtgagtttacgaaaactcagtgtgtaatcccaataacaaaaaaatagtgaaaacacagtatcagtacaatctgggccaaagccctatttagtcttgacatatactgggccgaagcctttcgtttaacggttactaggccgaagccttttcataaatcatatcactgggccgaagccttttcataaatcatatcattgggccaaagcctttactgtaaacggtattgtaacaccccgaacccgagaccgacaccggagtcggacacgagatgttaacagactttaaaccccttataaaaaaatttcccagacactgcccagtctgagtactagtcgcttcaaaaatcatatcttgagtttcacaactcaaaaatcagttttgtgatttttccctgaaactagactcatgt

SEQ ID NO: 10461 - DNA, 768 bp, Gossypium hirsutum
  misc_feature (531)..(531): n is a, c, g, or t
  misc_feature (540)..(546): n is a, c, g, or t
  misc_feature (550)..(553): n is a, c, g, or t
  misc_feature (555)..(555): n is a, c, g, or t
  misc_feature (557)..(563): n is a, c, g, or t
  misc_feature (601)..(601): n is a, c, g, or t
  misc_feature (642)..(642): n is a, c, g, or t
tgaaaacacgtcctaagtctagcccatttattaacaaacagattaaagttattaaaaataaaataatcccagaaaaataattaaaatggccttattacagcccaaaaccaaataataatattaataagataaaacttataaagaaataaatcggctacttattgctattaaaagaaacagaaatagtagtgtggccatctccgagtccctcgcagctccaaaccatctaagcttagggattccctgcacagttagaaatggggtgagtttacgaaaactcagtgtgtaatcccaataacaaaaaaatagtgaaaacacagtatcagtacaatctgggccaaagccctatttagtcttgacatatactgggccgaagcctttcgtttaacggttactaggccgaagccttttcataaatcatatcactgggccgaagccttttcataaatcatatcattgggccaaagcctttactgtaaacggtattgtaacaccccgaacccgagaccgacaccggagtcgaacacgagntgttaacannnnnnnaacnnnntntnnnnnnnttttccagacactgcccagtctgagtactagtcgcttnaaaaatcatatcttgagtttcacaactcaaaaatcagtttngtgatttttccctgaaactagactcatgtccccacctatggatttttttctagaatttttggtcggggcaattagtaaagtttattagtcaaagtctcccatgttacaagggtcgactacactgac

SEQ ID NO: 10462 - DNA, 649 bp, Gossypium hirsutum
ggaaggctataatggagggcaactttttagagacgagatggcattgccgcattggagctttctgtaaagtgcgtctcagtctgtatattgaacagggagatattaattgacaaataaccacatagctcgatgcttttttctaggtaacttgcctttttcagtccaattatatttccattatttggtcaaagacagaactgtaggtaatgagttggtcatgaaattgcagggaaggaaagatgctctaattggtacttaaaatggaagtggctctttttcaaaattaactaaaaaaatatttaattacgaaaatgacccaagaccaaaatcttacaagaaagaaccgttttttctgctgttcatcggtgccatcatttccagtgggggcactctaaatcttcttttttttggtggtcgacaccaatatctatatttttctttcgccagactgtctggcgacataatattaaactcaaatcgatatcgatacgaaacagaaagtgtggatacttaggtttacttttgataattttttagctttagtaatggtgaaaaaacccttaaaattcaaaaacaaaattctggaaaaacaaagtgttttcttctctcaaattttcatttaaaaaatcctattcccagatttccatcg

SEQ ID NO: 10463 - DNA, 699 bp, Gossypium hirsutum
gatgtatgtaaagctcgttgccttaataaatacaagtagactgagatggggaaaatatataaaacgtgaagaaaataaaagaaaatgggaaatgagggacaagggcgaaatagattgaaatgctttgtctgaatttggcctgcgaaacaaccaacaggcaaggggtcagacggcatcccatcaacactgactttcggaggactgatatcaacggtaaagaacatgacacgtggtggccatgcaaatcgtgtaatggcaatgatggtctaagggacatcggtctaaatgagatgggagaatatacctacatagtggggggtaccatgatgactaatgtacacaccatctttttgcttaattagccccttctttaattttaattcttcaacccattacccgtccctttgctttggcctttttttctttttgggtaaatttcattgatagtcatccaaatttcttttttggtcactcgtctatgaaaaataataaaatagtcacccaactatttaaatgtcttttctggtcaccagtggactaacgatggcaacttttaaaattaacataataacaatttaaacctcaatatttatatattatatcaatttagtcctgattttaaaaaatgtaaccctcaatatttacacattgtgtattttggtcttttttatagttatgcttttctttgtgatcctttca

SEQ ID NO: 10464 - DNA, 378 bp, Gossypium hirsutum
actttggtagagttctttttacccatagatttttacagtttagaataaaaggttggaatgcagttaaaaattaacccagatttgcaaagaaagtggaggactatattatagagaaggcaagataatgaactgtgtaatagtgccttgtattatattgtaaacgcaagtgttggagagaaaatcaaagattaaattgtaaaacatctttatgagagaaaatcaaagacgaaactgtaaaacatctttttgatgttgatgagccaaataaaaaggtctctcttacatcttaggactcattattagcaaaataatggactgtaaaatgaaaaaaaaagaaaaaaccaaaacatcattgtttttccagttttgctaaaaaaa

SEQ ID NO: 10465 - DNA, 317 bp, Gossypium hirsutum
  misc_feature (218)..(218): n is a, c, g, or t
  misc_feature (249)..(249): n is a, c, g, or t
  misc_feature (255)..(255): n is a, c, g, or t
  misc_feature (261)..(261): n is a, c, g, or t
  misc_feature (263)..(263): n is a, c, g, or t
tttaaaatttagtccatttacttttaatttcataagtctaatttaaaataagagggactaaattccaaaggtttaaaaatacagggactaagattcaaatttagacatttatttttcttgaacaaggtccatggacttatctcttaattgacaatgactttttcttcctttctttttagggacttcttttttattttatttttggttggtcaaaattnaaccatttatttatgattttttttaattccntaaatntaaaantnattgacagctattattattgtccctacacaagaactgctttaagcatatctagt

SEQ ID NO: 10466 - DNA, 763 bp, Gossypium hirsutum
  misc_feature (590)..(676): n is a, c, g, or t
  misc_feature (679)..(711): n is a, c, g, or t
  misc_feature (717)..(720): n is a, c, g, or t
  misc_feature (722)..(736): n is a, c, g, or t
  misc_feature (738)..(742): n is a, c, g, or t
  misc_feature (744)..(756): n is a, c, g, or t
  misc_feature (758)..(760): n is a, c, g, or t
gcatgttgaaagaaaatctaggaggagcatttggtgccttcaatccagtagtatcttgccttttcccaatctaaacaagtatataaaacatgaagtagcataaatatacatacatacatacatacatacatacatattttcgaactaatgttttttattctctaatttatcatattttattattaccatacatgaaaaagaataagagagggaaagcaaagttgtgttgcagaagcatttagcttcacaccttttcatgatactagatgattaagatcccatcctcggtagaacttccaaagaccgatgacttgtagaaataatacaaaataccaagttaaataccaaaaaagttttatcatgaccaaattttttaattgataattttaggttaatctataaaaatagtcacttttgttcacatcggattacattttaattatttatgtttgaaatattatgttttagtcacttacgttatctttttgttatgaagtggtcattctgccgttaagctttgttatctccctaaccgcaatcttacatttcaaatgggtttttaaatgccaacttgaatgtccaaactgggnnnnnnnnnnnnnnnnnnnnnnnnnnnnnnnnnnnnnnnnnnnnnnnnnnnnnnnnnnnnnnnnnnnnnnnnnnnnnnnnnnnnnnntcnnnnnnnnnnnnnnnnnnnnnnnnnnnnnnnnntttttnnnntnnnnnnnnnnnnnnntnnnnntnnnnnnnnnnnnncnnnttt

SEQ ID NO: 10467 - DNA, 636 bp, Gossypium hirsutum
gtgtgaccccctaatttgaccctagtcggaaagcggtttcgggaccgctaaaccgagtcacctttttatttgaatatgatatttattgtctaaaataaatgtgtgaaaattttaagcttcgatttagtaaatttcatgtgaatttagtcaataggacttatgtgtgacatttttgaaatgtgatagatcaaaacataaggacctattagtgcatgttgaaaaaggggggacttgcatgtcaattttccccccatctagtagtggccggccatgacattaggatggacaaagggtgatgggcaaaacatgtcatagacatgttgtgttggtgcatcatgggaggaaacaataaaataaaataaggagtatgggtaataaaataataatggaaaggtaaatgatgatgaaaaaaattgtctcatccatgttccccccccctttgccgtgaattgaagaaagaaaacaaaaaaaaagtgttcattcttgaacatctttggccgaatagaggaaagaaaggaaggggaagagcttgagaaaatcggctatggtggtttgctagactaaggtatgtttgatgttgtccttgagattcatgcatgtttttagttgttagtttgagttctacctagcccatgg

SEQ ID NO: 10468 - DNA, 648 bp, Gossypium hirsutum
tgagttctggttggaaaacacgattagagtttttgataaattatcttgtacatcgaccgaatgtttaaagtatcttgtttatatattaaaagactctgcatattagtagaggaatactttggtcatggtagtgtcgaaggatcagttggattgggaattcttgcagtctaagttcagaaaaaaatatgtaagccagcgatttctctacaataaatgcaaggaattttttgaactgaaacaaggctatatgactgtagcaaagtatgagagagaatttttacaacttagcaagtatgttcgtgaatgtgtaccaacagaagttgctatgtgcactcgatttgaagacggattaaacaaagatatcaagttgctagttgtaattcttgaactgaaagaatttgtggttttagtcgatagagcacacaaggttgaagaactcagtaaagcaaaaagaaaagctaattttgaagcatgtgatttgggaaaataacctatggaaaaataattcttatctccattgaagaaatcaagagaatttcatagtcgttcgttagtttcggtaggttattctgggaaagatatggaaagaaaaattcaaactcaaaacctcaaactacgtttgtagcaagtgtgggtagtgttaggaaa

SEQ ID NO: 10469 - DNA, 691 bp, Gossypium hirsutum
gaggcaattctcaacagctaatcatttgagattcgcattagggataaataatattgtattaatctctaatgtgaagactctaataaattcttattgagtacccaataatttatactaatattatacatacatatatatatctatacaactatatataaaaggtgttcctttcaagacaaatgtcttttccttttttattttaacatgaaaatattattgtaagtttcatctttaatcttttcacttttttttaaaaattatataaggatagttaaatttcaattttgatttttatatttttcttaaacttgaaattgaatctctatattttaattcgacataatttggcacctcgattcttataaggtcattggttagtttaaatactctattttgattaaaatgctgatgtgaatttttaaggattgttaacatcattaaaattatctattaaattcaggtccattacgatgtcactttttttgttacatgaatactaagtgagtatctttttaatttcaaaatgccacgctagccaatttaataatagaattataacagtgttaacaaatagacttaaaattttaaattcgaaaagtagagaggctaaattcctgaaaataaaagtagggagattatttctaaatatacgaagagtacaagaactttatggtttaagacaggctcctcg

SEQ ID NO: 10470 - DNA, 533 bp, Gossypium hirsutum
  misc_feature (475)..(485): n is a, c, g, or t
atttttttttgtttgttgtcctactactatcagctttagagcactcaaaatttcatcaaatcaatttctctaattggcccaaaataaatatatattatttatttagataatgcatcggtttaatttttttaaggacaaaaaaagtcctttattggctacggttgctgccgggtaaactggatagaagccgaatttaataatacctgttgaccatccgaaagtttattaattatatttttattgtcgagatttattggttaaaattattatctagcactcatcatttgataaaaaaaatgttattattattattatcctattttatttatataatataaggatatgcatcaaatttttaactttattttcaagttaaaaaactccatttatttcactgttataatttaaaatttaatagactaaatggaaaatagaagagtttcgggcatcataaacttcaaagaattagtacgtnnnnnnnnnnnacaatttcattttcctattttttatttcatcttcgcacctacactatt

SEQ ID NO: 10471 - DNA, 595 bp, Gossypium hirsutum
tttccatgctggaatcttcatgctgcgttcggcaggaggagttccttagcaaaagtgaatatcctggcatcaataccatacacgagtatagtgtgttatcaacactaaaaccaaaatggagcaaataaaatttgttgctttatagtcagttaattcaactcataaacatagtgcattcataatggcataggccacgagtacttcaaagaaaaatgaagggtctgaatcacataggccacaactattcagtaaaaacactttatcactatttttcttttattagagtcatcactaaactttgatgaccgagatatgaacacaaaccaagctataagttaaatgcatcaaatgttacacaaccaaatctacaaacatatataaaagtgaaatagataaaaacaccctatatgcaagtgatagttgtccataaaatttcaccatatcaaatgctacacaaccaaatctgtaaacatatataagtggaatacataaaaacaccctggatgcaagctcaaataacaaatcaactagtgcgactcaaatccaaaccacacttgaaacaataaacaatcttaaccatcatgccatcacatgg

SEQ ID NO: 10472 - DNA, 684 bp, Gossypium hirsutum
  misc_feature (679)..(680): n is a, c, g, or t
cagtggttcaatcagttagggggctatgacgtttggttttttgcatgcaacaatgtgcccaacccaaagtgccctcctggtcccaacctcgatgctgattttgtagcagccccaatgatgttaacaacatatgtcaatggagttaagagagatcttgtagctgctgttcagaaaagtggaattgcttgggctttggaccgtgacaatggcaaccttatatggtccactgtaagatatcttcaattttcatattatgaaaacaattaattgattatctttacattgtaaaaaccgaatttcgagacgtctctctcaagataccaagatcggaagtattgttcctcgaagtatcaatcggtttagttagatgaaaaagccttgaaggggtatagtataggtagggggagacgtcttgaaacttttttcttacataacatcatgcttaactggtaatttggaatgtaggaagctggacctggtggcctcgcaggaggaggaacatggggagctgccactgatgaaaagagggtctacaccaacattgcaaactctgatcgcaagaatttcaccttgcagccatcctcaaaggtcaccactgctggcggatgggtggctatggattctaaaaatggccgcatcctttggtcaacagccgaccctaataatggtacagccagtnnacct

SEQ ID NO: 10473 - DNA, 655 bp, Gossypium hirsutum
caacttgatttctttgttcccttcctatctagaatccataggtcaaattcttgaaggagtaacacccacctcattactctgccttttgtttccttcttcatgacatctttcaaggctgaatggtccgtatagacatatactcagtttgccattaaatatggtctgaattattgacttgccaatactacaactaacatttctttttcgatggtattataattgcattgagttgggtttaatgccttacttgcatagtggattgcacggaagattttgtctttatcttgtcttagcactgctccaacagcgtagtcactagcatcacacataatcacaaaaggtttcgtctagtctgggctaactataataggggctgagattaatttatgtttaagtaccacaaagtccttgacacatttgttgttgaatatgaatggggtttccttttgcaatagttggctcaaaggttttgaaacctaagcaaaatcctttatgaatctcctatagaaattaatgtgtcttaagaaatttaaaactcctcgaatgtttgttggatgtggaaatttctctatcacttcgatcttagccttgtctacctttaacctcttctttgaaatttgatgactaagaacaattcctttaaccccttctttgc

SEQ ID NO: 10474 - DNA, 569 bp, Gossypium hirsutum
attaaaactaaattcaaaatataaaaagttaatttaaaataaaaatatgttacatgttaactgttggtaaaagtactatagaagtctcgcctctaatgaaaaaaaaggagcaaactaatagtcgccttgttaaatgtttattttattgttttatatataaaggacataataacattttagtctttgacctctacacttttattcaatttgacttttacctttttatttagaataaattgatctacaaccattcattgctgacatgacattattttgtcattatgtcatatcaacaaaagttatgaaaactattcaaaataaaaaaaaattgaaaataatatagcatttccttattcctgcacttaattctagggaaaactcctcaaactaaaggtgtgcatacttcgggtaaaatcaaaaaaattcgtttaactttcggtcggggtcggttaatttttttatgatttttcagttaacggtaaattggtttcaaaatttcggttaaccgaaaaaattaataaataatattatccaacccaacccaattaccccacccaattatcaaccta

SEQ ID NO: 10475 - DNA, 527 bp, Gossypium hirsutum
ttttttgagtcatcagattcatctcagattttttcatgtcttaatccaacggcctaaatttaaaatctcttaaaagatgcaatttaaaaaatggcaatcctacgaggtaaaaagcgtcctacaggacgtacgtcaatggaaagcgcttcctacggaagagggtacttggcctgtaaagaaatccgataaaataaattgaaccattttgatgaaagaaatcagaaacctaaatccaaataactcaaacccgaaacacatgtgaatggattatattttttgcacaaaatctaaaagaaagctcggtccaaaccctaaaagatctaactcaaagtgatctcccattcaaaaggcccaaatatgaaacaacttgaatatgaacatgatttgaactcaaatccaaaataaaagcatttacgcatatcatctcaataagtaattcatagaagcttgacatcctccattgaaaaatctctcttcagttacacttttgcagttacagcagatgggcactttcctaatgtattcca

SEQ ID NO: 10476 - DNA, 697 bp, Gossypium hirsutum
atctgaaatagatcagaatgtcgtcaataaacacaataaaaaatctatctaaataaggcctaaatatctgattcatcaaatccataaaaatagcaagaggattagttaatccaaatgatataaaaaggaattcatagtgtctgtacctcgttcagaatgctgtcttctgcacatcagcatttttaactcgcatctgataatagccagatctcaaagcaatcttagaaaacactatagccccttttaactgatcaaacaaatcatcaattctcggtagaggatatttattcttgattgtcactttgttgagctgtcgataatctatattcattctcatagaaccatatctttacaaacaacactagtgcaccctagggcgagaaactcgattgtacgaaacctctattagttaattcttgcaactgagcttttaactcttttaactctgttggagccattctatatggagctatcgatataggtgaagttctccgtactaaatcaatagcaaaatcaacctctttaatcggtggaaaacccgataactcttctggaaacacatctggatacttgcaaacaactggtactaattcaatcttcgattctaacacttttgtatcaagtacatatgcaagatttgcattgcatcccttttcacatattttgagctaagatcactgaactacagctggaaaac

SEQ ID NO: 10477 - DNA, 580 bp, Gossypium hirsutum
cactctctcccacttccggccgctaacatgcgctgccgccgtctccgcctcaaacccagcgcggctggtccctcacccaccggacctcctcaagtggatcaagagggaaggtggcttcgtgcacgaggctgtaacaattacccaggataccacctacgggctaggtcttgtcgcctctggaggaatccccaagggttctgatcttatcgtcctccctgaacacgttcccttgaagtttcaatcagacaaagacgatgaggctgactctgtctcgctccctttgtctaaccgcgttccaggtatgtgttttttagcatttccacttcaatcttctttggtatctttattgtgttttaagtgtttgatactagtccacaatgaagaattttggtgatttttttgcgcacttcccagcattggaactgcccattgattcctttatgctccatgaagatttgaatttaattgattttggtgtgggttttcttaattgaatgactccgtagaaaagaggccagctattaagattaagttagttacaggttgaataacttcatttagcttaaatgtggaagttcat

SEQ ID NO: 10478 - DNA, 645 bp, Gossypium hirsutum
gcaacgcaactttcacgtaattccatattggaaaagggttaaattggtaattggaatataattttgttagaaggatatatgtaaagggatatttggaagaccaaagctcatacaaactcttcttcactgatgtgattcttttcttgcaaaaatctttgtgtttctataaactaatataaaatatttcattccgattttgcattttggagcgaaaattgttgcgagtaatgcaagacatccactcgatcgaaggtggctgcatattcggcggcggtggcggtggaggtggaggtggaggtggaggaggaggagacaaaaggttacgatcgcaccaccattacaaccatcaagctctcaagtgtcctcgttgcgattctctcaacacgaaattctgttactacaacaactacaacctctctcagccacgtcatttctgcaagagctgccgtcattactggacaaaaggcggcatcctccgtaacgttcccgtcggcggtggctgccgcaaagccaagcgcaccaaaaccaaagcttcgtcccaaaccaccgcagtcgccgcctccgcactgccgcctccggagcaacaacacggtgatcaacgtaaagcgaattctcattctagtagcgagagttcgagtcttactg

SEQ ID NO: 10479 - DNA, 770 bp, Gossypium hirsutum
  misc_feature (58)..(59): n is a, c, g, or t
  misc_feature (379)..(381): n is a, c, g, or t
  misc_feature (497)..(500): n is a, c, g, or t
  misc_feature (511)..(515): n is a, c, g, or t
  misc_feature (518)..(524): n is a, c, g, or t
  misc_feature (528)..(529): n is a, c, g, or t
  misc_feature (544)..(546): n is a, c, g, or t
  misc_feature (558)..(558): n is a, c, g, or t
  misc_feature (560)..(564): n is a, c, g, or t
  misc_feature (570)..(579): n is a, c, g, or t
  misc_feature (588)..(590): n is a, c, g, or t
  misc_feature (592)..(596): n is a, c, g, or t
  misc_feature (599)..(602): n is a, c, g, or t
  misc_feature (607)..(611): n is a, c, g, or t
  misc_feature (613)..(613): n is a, c, g, or t
  misc_feature (615)..(619): n is a, c, g, or t
  misc_feature (622)..(627): n is a, c, g, or t
  misc_feature (636)..(637): n is a, c, g, or t
  misc_feature (639)..(646): n is a, c, g, or t
  misc_feature (648)..(652): n is a, c, g, or t
  misc_feature (658)..(661): n is a, c, g, or t
  misc_feature (664)..(664): n is a, c, g, or t
  misc_feature (674)..(683): n is a, c, g, or t
  misc_feature (688)..(694): n is a, c, g, or t
  misc_feature (696)..(696): n is a, c, g, or t
  misc_feature (698)..(698): n is a, c, g, or t
  misc_feature (701)..(704): n is a, c, g, or t
  misc_feature (707)..(708): n is a, c, g, or t
  misc_feature (710)..(719): n is a, c, g, or t
  misc_feature (728)..(732): n is a, c, g, or t
  misc_feature (736)..(741): n is a, c, g, or t
  misc_feature (744)..(764): n is a, c, g, or t
  misc_feature (766)..(767): n is a, c, g, or t
cttactggaatatgcaaaaattagagatgattcaattcgaaatacttttaagaatatnnctaacacttttgttcctgagttcccagatgctatctttgagacatggacggaagatactgattatgcaagcggagaaggagctaaagaagacaaggggaatgagtcaaaaaaataaaaggggggattcttgtctttttatttatttattttaggtctttaggaatttgtttctttactaactaggatttaatttctgcaaaataaaacatagcaagcatgaataaatgcttcctttaaaaaaaaaaaaaataaatgatgtgggaatgggaatgaaaatggcttggtttggattaggaagaaagaattggtttttaaacannnctaaagacttccccccctttcttttttaccccacctgggggttggttttctttcctttatttgcttttggcagagaggacattgtttttttttagaggggggaaggggaaaaaatnnnntcaacttttannnnnttnnnnnnngttnntcccttcctttcctnnntgtggttaaatnannnnnaagaannnnnnnnnnttttttttnnnannnnnacnnnnaagcnnnnnangnnnnnaannnnnngttcaggtnnannnnnnnntnnnnntttccnnnntcntctccccctnnnnnnnnnnctttnnnnnnntntnacnnnnttnnannnnnnnnnncacatctcnnnnntccnnnnnnccnnnnnnnnnnnnnnnnnnnnncnncta

SEQ ID NO: 10480 - DNA, 636 bp, Gossypium hirsutum
gggaatagattgtagctgggtacaaataggccggttaaagacgagtaggcagggtacgacgaagccctaggccgacggggtgacacatggttgtactggtcagctttgggctggagattgacgattgactgagcgtgctttggcagctcgtggtggagtactctctgacggattcgctctattattgcctcctattcttgagggagtgatcgggattaagccgcgtggcgataaggactattcgctctttggggtgggcctttcgtactcaaatccgtacggggaaaggacaattattcagcgcactaaagtggatggggttccatattcatgaaaagccaggtttgaaatgatccatgttactccaccaagacaacctatcttactaataagaatagggttacaaataaaataatataatataatataataagaaagagaaaagggcttccaacgtctataaatagaagctgctttctctattttgcaaagcaaagggagatatggatccagctaccgctgaaagactttctcaaattaatcaagcaattgaaaatgtggaaaatgctaagcgcgaagagcagcaaactctggctctcttctgggaacacatgccggcgatcgatcccagtctca

SEQ ID NO: 10481 - DNA, 524 bp, Gossypium hirsutum
ttatgttttcacaacttagtcatgtgatcctctgcatctatattgtgtaagttgggttttttagtagcaaatggtcgaatgaaaaatggagtttattaccgcatacaggtaaacaaatgtgttgcatcgtaatgttctcaagcagagcattttttctttcggtatccactgtcggttatagtgactaattcctctcactacgagtgcttttcgaagtggtaaacggttggtcataaaatgtgctccaccgaactcccccgatctcatgattaaaggaacatctcatgtaagaatcactttaatacctcacatacattgatatttcggttctatattatatatctgccttactgaactttgcatttgtcctgtttttgtctttttggcttctgaagttatttttgttctttttcttaatattttcttaatccagtttttgtgcattattgatgttacagtaatggtgtttcaagagcaagtaaaaagaagaggttttttcttttgctcctctcataagcttgttg

SEQ ID NO: 10482 - DNA, 547 bp, Gossypium hirsutum
agacttggaggcaaaagtgcaaaaaagatattttataaacacaagactctatttaaattttaattacattaggataattgttaatgattattatttagatttaattttagcttttatctttatttaactttatttatccttatttatctttatttgtcttttagaatttaattaggaatagactaggttttctaagtactataaataagggatggagtgacacaaatttcactcatctcttttgtaaacactccctctcccaaaaatctctagcctttgctccttccattttttcaataaaattcctataacacactaaacctggcctaaaagtttagaccgaatctcggatgctactttgatcgctgaagtgatcataggtaaatttttacaaaaaaaaaattcatgtcgaatcgtaatgcttagttgtttaaaaccagtaagtaaaatatcagttaagatagtatatgtatatgtaagcggaacaaaaatgattaaaacttaactcataatttgtaccacagctttgtaagactttacatttcca

SEQ ID NO: 10483 - DNA, 694 bp, Gossypium hirsutum
ctagctagattaagctgcaacgagttcaaaaacatagaaatcattaaaaactgagtcaaaaccgtaccttaattgctccctcaagcttggccgaatgtaaaacctagaatttcctcttttcttcttgctagagtcgaccaaggaaggtgatgataatttaaaatgaattttagttttgtttattaaaccatttattatccaattaccgaattaaccttaataaactttaataatttcaaaaataataagctaacaacttccactaaactttatattggccaaattgacaagcaaggactcccatattttaagctatagtcatataatacttttagacaatagaactttacttttacgcgttacatgatttagtcttttttaccgaattaagcatttaaacggtaaaatttctttacgaaacttccacataattaatctatcatgttttagaggttattaaaataataaaataaatattttaacttcagatttgtggtcctgaaactactattccaatttgacctaaaaacgggctgttacagtgtatttatgaatagttgagtttatttcatatgagtttactaagctataaatcttactttgtttatttttctcatgttttatagtgatttcaaatctagctcagattcggggatagtcggagactacatcacacaaccatctatcactttgg

SEQ ID NO: 10484 - DNA, 501 bp, Gossypium hirsutum
tcctttcttaaatgcagcctaaaccgctaaagaatttgaatggacagacatgtcaaatctgtggtgataatgttggagttggtgctgccggtgatgtgttcgttgcttgcaatgagtgtgcctttccagtttgccggccttgctatgagtatgaacggaaagatgggactcagtgttgtccccagtgcaagactagatacaagaggcagaaaggtttgtctgtttctttttatgtttctgtatcatttccattttatgatttggcttctaagattttatatcatgtgcaaagtaaataatttctgaatatttcagggagccctcgagtggagggagacgacgatgaggaagatgttgatgacttggagaatgagtttgattatgctcaaggactcagtaaggctaggcggcagtggcagggtgaagatgtggatctttcttcatcctcgagacatgaatctcaacaaccaatccctcttctaaaccaatggccataaagta

SEQ ID NO: 10485 - DNA, 507 bp, Gossypium hirsutum
gagggatcaaattgggcgagtaagtcggaaatcaaatggaatttggtgatatagcaaacgaagaaattgcctcaaaacaaattcgtcttaacgacggttttgggacagagtgcgtttgcattgatttttttctccatttttgaaaaaaaatataaaggtgaatataccagtagtaaaagggcctgaataatcagggaaattttatcaaattcaggcgagtgatgctggctgagaatttagatatcgcaagaaatttcaattatttgattgagtgggtcgcttccatctacacccaatcaagaagctgacttgctttatccttccttcaatatgaaaacacacacacacacaacaaaaaggcagagagagggaggctaccgagaacaggatgagagataaggaggtaggatgctatatataaggaattgaaaattagggttagggttcaaattttagttcgtggtcggagtttttttgaaataaccagaggcccaaatttcctaaaaa

SEQ ID NO: 10486 - DNA, 670 bp, Gossypium hirsutum
aattcacctcacagtcagtctcaatgatacttattgcattggaaggcttcgtctctatgatatctatgtagtactttttattgttatatgccaccataatactgtccccagtagttaaacaggaataattcctcagtgtcgtctctaagctgcatgatgaaacaaaagtgagattagagttgaggtgtctaaatctacttggaaagcaacaggtagattacatccataacagcatgaaaaaaaaacagattcagggagttacattcctcacaaatccataccaaataaagaaactcattttgcttacacgaatctaaattacacaaacttctcaaggtatatgagtatgaattgataacttactacaaaaatttcaaaattcctttctaagctaaccatcaaacatcaaaggcgcaagcatacatatattcacaaacctatccactcacatagcttttgggtttgaaatatccaaaaagtccttcgtgtggggctgcaatttcacataggtaccctttggaagagttacatttttcaccctcacaatatctccctcctgtaggagcaaattctccatcatctacatcataaccattgaaaacaacgggtcaagaatcatataagtagaagatttcctccattttagtggacctaaagcaatgccataatt

SEQ ID NO: 10487 - DNA, 615 bp, Gossypium hirsutum
gctaaatcacttaataaaatcataatataatgaaattaaaacttcaaatatatattaattcatcataaaattccagagcctattcatggtaacttacaaaatcacccatggaatcaaaaactaatgaattcaataattggacctagttgtaaaagtcacaaaacataaaaatttcaaagaaaaagcaagaattgaactcacatggtacaaaaatatgagaaaccagcttacttcagacctcctatgacgtttttgctgataaattataaagaaatctctagatttttcacttttatctttgtattatatatttaatttataaaatttccaattttgcccttgtttctccttactttcttgctgatttttcttgtctagccgtccaacccatataatttgggtctaattgccttttaaatccctccttattagtcacttaagctatttaatcacaatttaacaaattttgtactattttcaatttagttctttttaattaattgactatccaaacgttaaaattttctaacgaaacttttatactaaatcaatgacactccataaatatttataaaaatatttatggcttggtttataaactcgaggtctcgatac

SEQ ID NO: 10488 - DNA, 650 bp, Gossypium hirsutum
cttaacagaagattgaacagaggagattttgagatgtgggttattaactaacatggattgaaaacaattattcttatgtgggtggccgaacgatccattacaaggacaaggcaaggactttccaaataaacccagaaatttcgaagctaaataagcaagagttgatccacaaagcaataaataagctatggatagatccagaaaagcaccaactagagcagtgaatgtccatgaattgatagcattgcatgccattggaggaaaaaaagaagagagtttcaatctggctaactcaccccgagttggttttagttgactcagtgattgggggactgataaagcttaccaacgaggtttggttgactcaagtcgtcgatgaaggcttgaggaagaatcgggtagggtccttttttctttttcttttttgatttgatttgatatgattgatattttagaccgttcaaggttttcaaagcttcggttacatttccgagatggataccggacgacgccgtttgaagaccttagtagatgacaacgacaattaaaaggggccaaaatacatttgaattttaatgtaattggattgaaaatgatttgaggccgaacatttgaattttgaaggctaaatgcttaacttcgggttgcta

SEQ ID NO: 10489 - DNA, 659 bp, Gossypium hirsutum
ttgtttcatccgcaactaatctagctcctcaaatatatgacattctccatccttacctttactacacatctaggacggaataataaatgggccgtctccgtttgatcagtgggataaaatatagggatattaataattatatttattacctcaattagcaaccgtcttagcttagccggtagagcgcgtggcttttaaccacgtggtcgtgggttcgattcccatagacggcgtctaatttatttgaatttgtaagtttttttagcgaaagggagcacgcacgttaccacttttagtttaaaagcccagatcaatctctcccactatttatttcctctataaggtaagttgaaatcatcgaagcaatttaaaattaaattaaataagcttattataaaattgctattatcttatgaaacgggcttctgcaatttggttgctgtggagtggcaggattgaactctgattaacatggcctactcctccggcctatttttttttacctaaaaagacaaacgatacaacatcgtatttcttttccaaaaaacaaaaataaaataaaattagataagtttgattcttaatccgtaaattaagaaaaaagaaaaaccatttgtctgcaaaaataaatgtatgaaagagcatattcagtcaacgga

SEQ ID NO: 10490 - DNA, 599 bp, Gossypium hirsutum
  misc_feature (546)..(562): n is a, c, g, or t
  misc_feature (564)..(565): n is a, c, g, or t
  misc_feature (580)..(581): n is a, c, g, or t
  misc_feature (583)..(585): n is a, c, g, or t
gagcacatgagcttatcgaggagatagacaaattgaagtctaatctagtcatcgaaaatctgagcacaacagaggtatcattcccaacaagattagaggacaaaaaaaagggggacaaggtaggttttataaattttctcaatttatttatattactaaatgttaatttttcactcttggaacttattgataaaatctcgagatatgtcaaatactttaaggaaatgatggcacaacaaaagaaaatgaaaaagggcgagcacattgatgttgatgtctcatgtagcattttaattgataaaaggatgcatttgaaattgaaagatctaggtagttttacgattataatagagatagggaattggtattttatcaagatcctttgtgatttaaaggccaacataaatttgatgcccctatcgagctaaaataaactcagactccgggaattagaaaaaacctcgatacccaaaaggtgtactcgaggatgtattggtcaaggtacgagcattcataatccatgtcgactttgtagtctttgacttnnnnnnnnnnnnnnnnntnntcatttctgttggtnngnnnatgccatttctgac

SEQ ID NO: 10491 - DNA, 574 bp, Gossypium hirsutum
tcttctcctgcagcacatattatccccgaaatcagggagaggcaaaagcaagatgatatgataataagattgactaatgattagaatgtctaatgtaaaacctcaatcacttcatattgtaaatacgaaccttcaggacaaaatgtatagcagcaatttcactgctgggattaaaatcaatctttacttcatgaaaaatatctccttcagacagtttcttcaacggagtttcaatagcatagtcctgaaaagattccactttccacttcatatatatatgttcataatgaaaagacagccttctatacaaaattagaagccaatacatactttaatgggaattgaaccaggaggtctcatgcctttaggaggttgatcccattcactgcaaaatccgaaagacaatttttttagcacacagaaaaagttctaaatagaaacggcaaagtaacatctttccatgcaaaaataaatatccaaaggggcaagatcaaggcttacctgccactatctccaaggtaagaaactccccaatgaagaatccactttcctggaagactacatcctacccgaa

SEQ ID NO: 10492 - DNA, 570 bp, Gossypium hirsutum
aatcgtctattcaaggtaataagtgaagtctaggtggattctttcttgggtattgtcttctcaatcggtttttcaaaagtattttccaaccttaatctctgtcataatcttagctaattagataattagtcttagtttaaaaacattctttaagtcttaggctagataataaaaagatagtaattactagtacttttagtcctcgtggatacgatatttctggtctcaccataactatactactgttcgattggtcgcttgccttagtcgaatttttttagttagtttcacgaccatcaagtttttggcatcgttgtcggggactaagatattaggaatacttaatttttattactttagccatttttattttttattgcaatttaattctatttttattcactaaatttttttttctttacttctagtaggtttttatagtttatgactagaagaaacccctcaggacctctactttttgatagtgagatcgagagcgcagctcgcagaaaccaaaaagaaaaaaggcgcagcttacaatacatagaggaagagcgagaggacaatata

SEQ ID NO: 10493 - DNA, 512 bp, Gossypium hirsutum
cgtctctctaccttgatgaggatggcgaagaatgaaaaacaataagaggtgtaaaggcaagtaggagtgggctagtgataactcatttattatttgttgataactgcatactttttggagaagcaacagaaagggaagcaaacgagctaataaatattctaattaagtacgaaaagaaatctagacagagcatcaacttggataaatcgacagtgttctttagctcaaactgtttgacacaagcaaaggatttggtgacctaagttttacgtgtaagaagggtaacgaatgtcgaaagatatttgggatgccaagtattgtggggaggcagaaacgaaagacgtttcaaaaatttaaaagacagaatcgttgaacgagtgaacaattggtgcattaaaacattatcccaaggcggtgaggaagtctttattagaagtattctccaatctataccaacttacgcgatgtcatttttttattgccgaattcattaatgtcaaagaaaaaaaaaa

SEQ ID NO: 10494 - DNA, 578 bp, Gossypium hirsutum
cattcatcaaacgaactcaaaaaaagaattaaatatgcttttagaccaccgaacaaaaattcagaattattcacataggtattgatattaaatcaaaggtatcgatatttctttcaaatggtatcaatactgcttggaaaatcgataccaaaacaacattttgtttctcgcttaaaatcaaaatttcaaaatttatcggtacctttcataaagtattgattattctacctcgagtatcgatactcgtgatatggtatcaataccaatttatgttactaacttcctgcactttcaaaaatcatggaggtaccagttttaaaacacgaatatcaatatctctgctccaaaccacaaaaattcagcagtttaaggcatataatccattcaaaataataactactcaacatgcaacttttaccttatcaaataatcaccaaaacgaccacaataatggtttaatcatcgaaagcatgtccaaataagcaaacgatataacaagaacaatatccataaatcttaagaacaaataagctatgacagtaatcaaaacattaggcaaagtcatcaacaattaccac

SEQ ID NO: 10495 - DNA, 601 bp, Gossypium hirsutum
cttttctaccaacggatggtcaatctgaacggattattcagatacttaaggatatgttgagatgttgcattctcgagcttgaaggtacgtggcaacagtatctacccctaattgaatttgcttataataacagttttcagtcgagcatcaaaatggcaccggacgaagctttatacggtagaaagtgtagaactccgttatactggtctgagctctgtgagaataagatttacgttattgatttgataaaagaaacagaacagaaagtgaaagtgatccgagatagtttgaaaactttatacggtagaaagtgtagaactctgttatactggccggttgcttatagattgaggctaccatctaagttagaaaagatatataatgtatttcacatatcaatgcttcgatggtatagatctgatccttcgcatgtaatttctccgtctgatattgaaatgcattctgatatgacttatgaagaaaagccgattcgtattctgtctcgtgaaatcaaagaattacgtaataagagaatttcgttagtcaaagtgctgtggcatagacacggagtagaagaggctgcatgggagcctgaagattc

SEQ ID NO: 10496 - DNA, 791 bp, Gossypium hirsutum
  misc_feature (199)..(199): n is a, c, g, or t
  misc_feature (205)..(205): n is a, c, g, or t
  misc_feature (209)..(209): n is a, c, g, or t
  misc_feature (248)..(248): n is a, c, g, or t
  misc_feature (286)..(286): n is a, c, g, or t
  misc_feature (404)..(404): n is a, c, g, or t
  misc_feature (502)..(503): n is a, c, g, or t
  misc_feature (649)..(649): n is a, c, g, or t
  misc_feature (692)..(692): n is a, c, g, or t
gcatggtgtgccattgtcaatagaatttgatagagacccgagatttacatcacgattctggaagaaattgcaagatgctctgggatctaaattgcattttagcattgcttttcatacacaaacggatggtcaatctgaacggattattcagatacttaaggatatgttgagatgttgcattctcgagcttgaaggtacntggcancagnatctacccctaattgaatttgcttataataacagttttnagtcgagcatcaaaatggcaccggacgaagctttatanggtagaaagtgtagaactccgttatactggtctgagctctgtgagaataagatttacgttattgatttgataaaagaaacagaacagaaagtgaaagtgatccgagatagtttgaaanctttatacggtagaaagtgtagaactctgttatactggccggttgcttatagattgaggctaccatctaagttagaaaagatatataatgtatttcanntatcaatgcttcgatggtatagatctgatccttcgcatgtaatttctccgtctgatattgaaatgcattctgatatgacttatgaagaaaagccgattcgtattctgtctcgtgaaatcaaagaattacgtaataagagaatttcnttagtcaaagtgctgtggcatagacacggagtagaagaggctncatgggagcctgaagattcaatgagacaacaatatccgattctgtttaaccgtagattttaggggacgaaaatccctaagggggaagattgtaacagtc

SEQ ID NO: 10497 - DNA, 484 bp, Gossypium hirsutum
  misc_feature (348)..(348): n is a, c, g, or t
  misc_feature (380)..(380): n is a, c, g, or t
tatccatcaagagataaagataacaaggagactatggggagctaaaatatcaagttagattcaagaaatagaagctggaggagagagaaaatcaagttaaagtttgaaactaataggacaaggtaagaacatcaagatttcaatatatttttaagtttgatattattgaaaaagcatggaaatgatgttatagtagagttttcttatataaggtcttatgtttttgatatattagtgaagggaaataagtgaaagtgatgggaaatattatagagaaagggaataagggagttataaacttagtaatcaacatcttgcattaaaacagttttggacagcagcagtagnctaaatttaaaaaaataccaaaaattgtgganatcaaattagaatatgaataaaagataaaattaaatcataatgagcctagtttctcgtagaagaaacggtgtaaacaatgaagttgtaaatcatgagatataat

SEQ ID NO: 10498 - DNA, 474 bp, Gossypium hirsutum
gtttgggaatgatcatctaaaagccgatgcttgaacccaaggcggaacgagacaactggaggctgaaacctcccataagaatttcctttctcttaactctatttttaatttctcaaattttcgattcaatattcttaattcttttttattttatttttcgtttccagatccaaacctttaattctgttattttcttattttttttccaggaacgcaggttttcttgggcaagattctgcctgggatttcatggaacaagacattgtgcaaatccagtccctgaggatttgaccctacttcccttttattattattttcattatttattagggataggatatttttggtgctttcaacgaccgcatcagtatggtgttaatttttcagaaacctttgcaccagtttcaaagttggacaactataaagcttttattttccttggatgctcaaaaacaatggaaagtgcaccaatta

SEQ ID NO: 10499 - DNA, 544 bp, Gossypium hirsutum
  misc_feature (42)..(42): n is a, c, g, or t
  misc_feature (55)..(55): n is a, c, g, or t
  misc_feature (139)..(139): n is a, c, g, or t
  misc_feature (217)..(217): n is a, c, g, or t
  misc_feature (296)..(296): n is a, c, g, or t
  misc_feature (358)..(358): n is a, c, g, or t
ctggcttatttggtttgggaatgatcatctaaaagccgatgnttgaacccaaggnggaacgagacaactggaggctgaaacctcccataagaatttcctttctcttaactctatttttaatttctcaaattttcgattnaatattcttaattcttttttattttatttttcgtttccagatccaaacctttaattctgttattttcttatttttttnccaggaacgcaggttttcttgggcaagattctgcctgggatttcatggaacaagacattgtgcaaatccagtccctgangatttgaccctacttcccttttattattattttcattatttattagggataggatatttttngtgctttcaacgaccgcatcagtatggtgttaatttttcagaaacctttgcaccagtttcaaagttggacaactataaagcttttattttccttggatgctcaaaaacaatggaaagtgcaccaattagatgttaaaatctactttttctgaatgattttctctagaaagaattttcattgaacaa

SEQ ID NO: 10500 - DNA, 470 bp, Gossypium hirsutum
ggtgtgtatcagtaagggatgttaataacaccccaaagaaaacagtggtggtttgtttttcatgtatggctagcaggctaggaattatgaatcgtgccctataacaattaaagttgaatatgaagcgtggattattttggcatcatcagagttagggacgaatcaggattttaattcgggggtaaaatttctaacttcgaacaatcttttttaacgtaaaaaagtgtcaattcttctcgaatgcttctttttttcttatcaaataaattaatttaatgttttttttaaaagtatgaattatttaactataaaaaatttttaaaaaaaccacactatgtaaaattaaatatttcttttcaatatgtaaaaaaataactagtactgtattaaaaatttaatatttgatttttctccactaataacaaaatattgaggaactgattgataattattgctttcctgactcactt

SEQ ID NO: 10501 - DNA, 363 bp, Gossypium hirsutum
aactctgcacttgctttcttcctctccttcacctcacccatcctttcctcctcacaaacagcataatcgtcgtcatcgtcatcgtcatcgtcatcatcgtcgtcatcattatcatcatcatcctcactgtcaacttcttccttatgggacccgttattgtctttcaagcatctctcagaaggtatacatccctgcagatcaagatcctgacaattgggtatactctgtccattatggtaagcacacatttcctggtaaaataaatgtttagagttcaatattttctttacatcatccttcgccttttgggagaggtgaggcatagagtccattagagaagggttctccaccactctacaacaa

SEQ ID NO: 10502 - DNA, 600 bp, Gossypium hirsutum
  misc_feature (26)..(28): n is a, c, g, or t
  misc_feature (245)..(245): n is a, c, g, or t
  misc_feature (384)..(384): n is a, c, g, or t
  misc_feature (390)..(390): n is a, c, g, or t
  misc_feature (550)..(551): n is a, c, g, or t
  misc_feature (577)..(578): n is a, c, g, or t
gtccctgataaaattaaatcctcctnnntggatttaaaaaattctagtctaattattaatattgttcatatttcctgtcaaaatttatcaacttagcttgtgtattttccatcattcgtatggaaagttgtacagggattgcccaaaccacctggctaagttggcaaatatttacgaaatataccaaccaaaataatgaatgaactaaaatttaaaaataaaaaaaaaaaagaaagaggacttantttttaacttttcaagtataagaactaaaactcaaattttatcaaagtacaaggattgatggcatattttaaccttttgaaagcttgtagcctttcctaacatataagcccattccaaaattgaacatcttatagtttncggtcntatatttaaaaaaaccaaaaaaattcggtaaggaatcatgaaagctttattctcaaatgtcatacttaacatttccatctaattgataaaaaagatatttcccccccccccaaagattgttgcaaatgaaacataactacaatcattgatgtccatttgnntgggtatggatcgaaccgaccaatcnntctccactgaccaaacctgcct

SEQ ID NO: 10503 - DNA, 608 bp, Gossypium hirsutum
  misc_feature (54)..(56): n is a, c, g, or t
  misc_feature (58)..(59): n is a, c, g, or t
  misc_feature (253)..(253): n is a, c, g, or t
  misc_feature (308)..(308): n is a, c, g, or t
  misc_feature (548)..(548): n is a, c, g, or t
  misc_feature (551)..(552): n is a, c, g, or t
  misc_feature (595)..(597): n is a, c, g, or t
ctttgacattttttagtaagtttatggacaacttaatgtgaagttgggatacannntnntgaatcatcttgaacttcaaactttgttagcgcaatagagttttataggcatgaatatagatttcttcaatttttcaataccttttttagccacattatttcacaaatcccatgagccatagatccgttctttgctttagcactattatgagctatggcatttttttcctccccaaggccccaaaatttccccnaacaaatggataagaacaaggaaaggaacttccatttgaaaaccaagttgcttgnatggctttatgtaaactttaatgccttattggtcattttttaccaaaaaaaaagggaacccttttttcgagagaacttcttagatatctcaatatactataaatggcctcaaggtgctcttcacatggtgtgtgcatgatttgactcactaaaatttagcgaatgtaatgtttggctaagtatgagataagtagataagtttttatactactttttgatattgtgcaacactaacaagtntcnntcttttttttctaaactttagattaacatattgaacgagctannntattctgaaaa

SEQ ID NO: 10504 - DNA, 544 bp, Gossypium hirsutum
tttcgcttcttcgatgttcttgtgcattttttataagtggtgaaagaatgtttttgctcaggttagagagaattttctttaaattcgtttagaacaatgttgatttttccgttggttttgaactggtgtattgggagcaggaaatcgttaagaacgacactcatctttcgcggaatcgtagttgaagttgttcaggaaatcaagtaagtgttgaactcttaaattttgcctttttcaatttcattaatctggtttaatggtgagtttagattgattttaagagttttggtgtaacaattttaagtgtgggttggctcgaaagtgttttcgcatcaaaatcgtaacaggtgtgttcccaaaacacaaaaaaaatcgagcttcggtgaaagctaaaaaaccattctgtcgatgtcacacggacgtgtgcttggccgtgtagttgcccgtatgcgaggcacagtcgtgtgtttgatgagggcataactatgcgcaagatatgaccgtgtggtagttggggtgtggccgtgtagatcacacaagaatg

SEQ ID NO: 10505 - DNA, 517 bp, Gossypium hirsutum
ttataatggaaaattctagaaacgacactaaatgcgttgatccgttgcccaatcagaatttactgatatctgtcttctcctctttctgtcatttcattttccttttgacgatttcattttcaaaactttccttgtagatcgttctattttctttttgttttgaaactttctctcttccattcttcatctcctgaggctttcctagtctggctcgctcaccccatcataccgtgtttgatcctcagcatactcgggaactcccatttccaggtatatttcctctcttcttcttagcgtttctgttgcaagaatatgtgcaagattgtttgcagatcttggtgtatgttgaaatctgatattatttagtccatgtattttctgttggatatcataaatgtatgcccctaccattgatcgatcttgaccctttgtgctacatttcttgattattgcgagggaatctccttcaaagatgagtgactgccatcccttttcaactcctacttggactgctttc

SEQ ID NO: 10506 - DNA, 687 bp, Gossypium hirsutum
ctcatccagtcttctctctccaaaatcgacttaatccaataaatttcgaaaaaatctaaacccagactaaaattttagtcatatataggcaacccacccaccaatatttaatactttatcattcaacttcgaccccgaccctagaacgattcttgaatccttccccaacctgttccaaaattttacaaaactaaactgaatatatatatatatcttataaacataagaaattacaaataaaatatatgaatatatattatagagaataggaaaatattttataaaattttcacacacattctaccataatctaattatagataataggaaaatataaatatattattgagtaaaaatatttatgtaacaatatataaaaaaaatctatataaaaaagcaaacatgactttaattgaaatggtaaattaaattagtgaagagtataatgtattgggtcaaatccctttattgtcatattatatatatatagatttattaaaatataaaaataatttttggtttaaaagagctaatatatattgaggtatctatataaaattttcttttatacctaaatagtacctaaacttaaaaattggaagtcaacttgatactttctttaggtaactaactaaaactagtaacacatgcttatatggcactggcaatcaataacatgacggcata

SEQ ID NO: 10507 - DNA, 412 bp, Gossypium hirsutum
tttcagttacccttataattttgttctttactcgattaaatattggctttgctgttatatcattttacattttccctcagtcacaacttctttaaaaaattttaccatgttgacatgttctaaaatcaattttctttgagcagttcaaattgtgtttgaatttccagttatttgtaaaagtgttttattttcattctgcagtatttggaatgtgaagcagataagaaagcatcacagcttgttgatctccttgtaaagaccaaatctaaaaaagttatagtgtaagttatgcatgaagattccctctatggtttttattttacagaaaatgacaattagtttttgctggttaccatacgatttaattatttatgcagatatttcatgacttgggccttgtgttgataactaa

SEQ ID NO: 10508 - DNA, 620 bp, Gossypium hirsutum
  misc_feature (456)..(456): n is a, c, g, or t
  misc_feature (536)..(536): n is a, c, g, or t
  misc_feature (547)..(549): n is a, c, g, or t
  misc_feature (551)..(551): n is a, c, g, or t
  misc_feature (553)..(553): n is a, c, g, or t
  misc_feature (572)..(581): n is a, c, g, or t
  misc_feature (610)..(615): n is a, c, g, or t
tatgatgctggtgctggcgacgttgttgcattgtttcgaatgggaattgccgaatgggcgaaaacctgatgtgaaagagcaactgcgattggtgttgtcgaaggtggagccgcttattgttgtgcccattgcgcgttcatctaattcaatgcaatatcaataaatctgtggttaaaatatgctttaagtcattatacttttcataaattttaaatttaatccttgtacttttatttataaaaatttaatctatctacttatttttattagtattcacgctcatatttaggttaattcgaatattttttttggattcaatttaactcaaatttcgagttttatttaaaatttggaacttaatcaaaatttaaactttgccatgaatctcaaaatttgatttttttttttttaaaatgaaccccaaatggggaattaaaaaaaacttgaaattaaaantccaaaataaggaatcaatgtttatttaagggaaaaaaaaaaaattttggggttaaattaaaatttccttaaaaaaaagnaaaagggggannnantnaattttaaaaggaaaaaannnnnnnnnngggggggggggaaattttcccctacctgnnnnnnaaaaa

SEQ ID NO: 10509 - DNA, 368 bp, Gossypium hirsutum
  misc_feature (358)..(363): n is a, c, g, or t
tgaccaaaaaaaagtaggtctagagaaagaatctaatgtctgaatgtgacattaccaattagcctttagacaaatgacatctcaatgaagaagaaacagagagagagaagagagataatataaaagcaaagttaaaagagagtaatgaggttaggaagttgcaggcggcattggttaattgaagggaggggggcaaactttattggtgagaagagagacctctctctgtgtctccatatctctcttaaatcacagtacttacactcccctctaaaaggaaaatgagccaatcaccttttagccccatcagcaatacaatattccacaaaaatattagcgtgggatcgaatttgaatannnnnnaaaaa

SEQ ID NO: 10510 - DNA, 637 bp, Gossypium hirsutum
aattctgatattggtcctttaactatattcaaatatgagatttagtccttatataattttttagcattatgataaacttagctcctaatatttactttttttcattttggttctaatcttttttccttttatcattttggcccccgccatcaacttttactcaaattgcttttttagatgaaaaagttgaacggaccattaatatattaacaacactaacatggctacgtgtatggcagtcatgtgtacttcataaatttaaaaatataataataatttgaaaaaaaaccaacaattgtctataaattttaaaatttttatgaacttcttttaattttgttgatttttttttattttttaacaatttatgaagtaggtatagcttgccacacatggtaccacattagtgttgttaaaattttaacaatttagagcactttttcatctaaaaataataatttaactaaattttaaatgttgaggactaaagtgatctcacaaaaaaatttaagggccaaaataataaaataagtaaacactaatgctagtataaacacatgttttaaatagttagatatagagtaaagaataattaatacaaatttaaacttaaaattgaaaggactacacccttttg

SEQ ID NO: 10511 - DNA, 639 bp, Gossypium hirsutum
gacaaacctatgaaataaaaatagttaaaagattttggaatttattatgttaaaagttgtgttatattttattttatttattaacaaatagtcattattttttatatattagattaaagagtaaattaatatttttgttaaaaatttcataattttttattattaaaaattgatctatgtgtattaacacaaggtcttacatgtaatacatcatatataatatggttattctattaattatgttaatttttaataataaaaatagataaatttttaaaaaaatttacatttacatttacattttatgtataatacaaaatctaatttataataaaagaaatctgacttttaatataataaattccacaataaatcacaacaagcagcaattaaaaccggcaaagcattgaaaactagcatattctagttgttttggtgggaccttgaaggactggaatgaatttattatgatggcaacttttttcatttttatttcttatatgacaaaaaacttaagtgtcaaagatgcatattttggaaaattttcttaccaatttacattatttctattttgttttggtacaaccaattgacattatttcatatgtatatgaaattggctgttccacgtctagtact

SEQ ID NO: 10512 - DNA, 671 bp, Gossypium hirsutum
ggattacgggattctgtggtgtattatttgtggactgttttcttggtcaaattttatagaggtccctgaactatgtttttttatttgattatttatagtccttttacttttaaaaatgtatattttcagtagttcaacatttttccgtgaaatagtttagggtaaactatatttgtagtcacccaattatagtttttttttctttttggacacccaattatgaaaagttacaaaatggtcacccaactatcaataaatttctttttttgtggcccaactatgaaaagttgtaaaatggtcactcaactattaaattttgtcttttttggtcaccaactatcttgaatttttttatgtttccgtttttatgttagtcagctggtgaccaaaaaaagacaattaaataattagatgatcgttttataatttttcataattaggtgatcaaaaaataaaaaatccatagttgagtaacctctattgtaatttaccctaaaaaatgctaacgtgaatatgccgcatcatcacatgtaaagctaataaatcatatcaaattatttgatggtatttgtgaaaaaaagtttactttagtgtaaaacatacaagtttctaaaaagcaaaacattataaatgatcaaattagaatagaggcctgacggcctgcccgaaat

SEQ ID NO: 10513 - DNA, 623 bp, Gossypium hirsutum
gagaaagggacaaagcggattttaggtggagaacacaaaatacacaatggcagcactgcaggatggaaccctacctaaagctagagggtaagatgtgtggtatagttgtagttatagatcagggaaacaaatgtaggctggccgtgtcaagaaatcacgtggaagcttcatttaataatcatgcaatgcaaacacactttgtacttctactttctctctttaaaggaagaaagagaaaagcatcacccagtagatgctttttttcctgccattggatctgtgaatatctctgttttttttcctttttagatagcaaaggaccaaacacattcacctcctttttaactccctgtcatgttttaaatggtaataataaaaagaaaatgacgttaaaaaaagagaggaaatacatatgtaaaaaagcaaggctccatatcaatattcattgggttagtgatagacaaatcagcttttcttcttgtgggcttagaaaacaaatactaagagttttttttttttttttaaatttaaggatttcgccaaattttaactcttaaatttaattaaagggttatctgtacttcatcccccccctttaaaactgcgaaaaagggggaaaaaaa

SEQ ID NO: 10514 - DNA, 572 bp, Gossypium hirsutum
tttgtgaaacatggttttaggcaattttgtatcacaaagcccttccctcccttatatgtacctatatttttaggttttaactttcttgttccgttttgttgaactatatattgctggagaatttgaaacatgttttctttgtgtttgacttattgaatgatattccttttatttttcagaaaggaaaattcctttggtttttacttgtaatatggtatggctacataaatttcatgttgaaccaaaaagaaaattttcatggtgtgcataatgttagtatccgaaaataggagtgagtaaaactcgattcaactaaaaaaaatagaaaaaaaattaaatttctagttaaacgaatcgagttattcgagtcaattcgaattctttttcaaattttgagatcgaattgagtttagttttcaaattcgaataactcgaataaactaaatatcaaactataataatttatattattaccccaaactcttaaagctcttcactttcctctaaaaatttgtacttcttcacacttttgctctcctcccatcctatccccttctaccctaaacccatcc

SEQ ID NO: 10515 - DNA, 603 bp, Gossypium hirsutum
gatgcctcgagttggtcattcgttatcccctttttccatatagcatcacagtagaggatgtcattggcacttccgatgtcaaagagtatcctttttatctcatggttatagacagcagcgaaaatgatgatggcgtcgtcgtagggcttttgcaatcattccagatcttccgatccagaagagatgggttcatctttccatgacctaggtttttttaagagatcatgctaaagtgaaccttggcatgtctttttcttctcgcagcgttggtaattcgaaggaactccctcctgttatcatatgggttaccatgtttaggagtctttcgcctgttagggagtcctcacggtttggttctttcgattggcgttcttctcgtggccctttttcaacttgctcttccctttggctttttctttgtcctatttctttagggtgccgggctaaaaactttttgttgtactcatttttgacgagtttctcaattttatttttgaggtggtcacacacttcagcatcgtggtcgtggtccttgtagaaaaggcaatactgagaggtatcctttcatctttggacttgtcggtggtgaggaggagatctgca

SEQ ID NO: 10516 - DNA, 661 bp, Gossypium hirsutum
  misc_feature (651)..(654): n is a, c, g, or t
agtcggaacagtggtttcggaccacaaatctgagtcaaaaaatattttaaaattatttttggtgtttatagtatgtgtattgatatgtgtgaaaatttggtgtaataatttttttttcgtttaaatggttaatttgataaaaggaccaaatcgcgtaagttttaaaagttgccttctataagttaaagtgcctatttgttttgattaattaaaggtgaagtacttatgtgaatattaacccatttttatgttagtgggagttagtgacatggcatttggagtagtttttaatgaatttaaaggttagataaataatttggcattttaagcttaaaataataaagcaaagtggaattgatggccatttatcatcttttatggccaaatgtactaaggaagaaatccaaaaatggggttttcatattcggcaacttggtagcttgattaggtaagtgttttgactcagtttttgatgatttttatatttttgatatcgttgcttcgtgttttacaaaacccatgcttgaattttagaatttaatgatgatttcatgagatgccattgttgatttagtgagatttgtgatgttaattgttgataaatgaaagatatgtgattgataaatataatttgtctttgaattttcgacnnnnttgagta

SEQ ID NO: 10517 - DNA, 594 bp, Gossypium hirsutum
tatcatgtgtaaggtggaatttattaataaaatcaactttttctatatattaaaaagcattcaaaagctctttagtttacttgtatttatggttgtcctagtatcttggagagacaagaagtttgggacctactaatgtcatttgcaaaagtagtgtcgagagaatggattgaaattagagattttaatagagttctagcaaaaagataaactctctttttgtacaacaaaaaaattagtggaaaaggatggggacatcataccaagtggagttaaggcaactaatggggaagaagtggattggagtctatgcccccttaaaagaaatgttgggaacatgtttggaggtgtagctttggtctaaaattgtgaagagagttgtttcattatttgcaaaagcttaaaggtttactcaaaattacatgtaaaaattcttattcttcaacacattttgcttattctcaaggaacaacaaattaagacttgcaacctcatcaacaaggagaaagaatgtataaatataattttaaggatgtcgagggtcaaatggaaactttttccaaccttcaaagacatccaatctatgcttgtcca

SEQ ID NO: 10518 - DNA, 571 bp, Gossypium hirsutum
gcctcaatagtaagtcttatgccttccatctgtttgctttttttgctcaaagagaccataattttgaaacaggtaatactgatacatcatggatgttatatggcaatgccgtatttaacttttcttttgagctttgggtttggagcttgggaacggttcaccccggtctagtgtaaggatgagcaaagagccgtaagaccggggtttgaagtatgatagagaatgggggagaagaggatgagtgaaatctcaaaagaatagggttctactatagggaaggaggtttgaagtatgatagagaatgggggagaagaggatgagtgaaatctcaaaagatggggttatgccgtggagaatgagatggaaaaaggtgggagaggagaccccttttcctcggcctttttaggcatgtatagggatctgattcgctattaagtgcagggtggttgtaaggtatagaacatatttatgtataacaaagtgttacatttgatatgaaatgcatgagtgttacatttgatatgaaatgcatgagtctttaaacatgatttgagtgcgactgtcggatata

SEQ ID NO: 10519 - DNA, 635 bp, Gossypium hirsutum
caagaaatagacgtgtccagtttcagataaatatgagtgcactatgtttcaattaaagcgcattaaatctaataaaggctttcgtgaatatagaagaaaatgttagaaaaatgagaaaaataggtttctttcaaataaaaagtagaatagaacttttttataaaaaaaaatacaatgatacatatttagagttttttcttacttcaaaaccaaacaagtgaaaggcaaacgatcctgtacaagttcagttaaaatttagtttattaatcattaaattcactccaagtttcactttataattttatgtacatccctcgtatctttcttatttagctcagttttccctctattttatttattttattgtttatattttaattttatgcacatcaaacattcttactttgtactactaagaaagttccaataaataatatgttcaccttttcatcctactaagaagttattagatatactaaaaggattttcaataaattaaaaaaaggtaataaaaatgttacaagaaaactgaaaggaatactgtaaattgaaatgttttaggataattattttgtccactcccagtggaataagaaaagactcacaagcggagttaggttcctaacctgtgtcct

SEQ ID NO: 10520 - DNA, 639 bp, Gossypium hirsutum
ttattcccaatgagcatcaaagtgccttctactcactccttggcattcacggattggttatgtagcaatgctttttgtaaggatcttaagtttggttttgattgccagtggcgtacgaccttctatgcgatagcatggaagattttggtttggagtggaggtgtcgagctgtttttgatggatactttattctccctcctgatcctaatcggaggattgctaacgatgttgaaattgctgtctctgctttctattcgagcctacaagcttagctttggttaagcttccaactaaggctaagggagttgtttccccgggattgagtgaacgagctcatagccctccacccgccttagctcagtgattctttccctcagagatagtcaaatcccttttttttcaaaaagagtaatctattccattctacctaagttgtctcttcctagctcttgcctttatccgcaaggagcttttaagccacccccccggattgatagagcgtttaaggggaaagagctcaccgaaaggcagtcccaagagtgaaagggagtttgagctttgaacatacatatagggcaaatacaggattgtacgaaattcgttcaaacaaagaaatcggtcagtcaatcactcaatcca

SEQ ID NO: 10521 - DNA, 546 bp, Gossypium hirsutum
atgtgcagcatggagaagagtatatacttatatatatatagacaatatttaacgaaactcatgtatggactataacccttgtttcaccaatcctaaaagtaatttctttttatctcaaactcacgtgagaaattgaaaattgcaaatttcagacaaattttacagagtacacaaaaaataaaaattcataataaaatgcataaatttaaaaattaaaattaaatcaaataagttactaactttcgtatcttgctatgtcttctttttaagaaaattttaatatccaatatcaaatttctcaatttgcaatccattcattttactaacgatttttttatttttaaatcttaattaaaaaggtgagtacctggtacgcggataatatattatttttattccataagtaactttaaaaaattgacatatatcttttttttaaaaatatttattttttaatattttattatatatttgtaagacacatgctaacccattgattttgttggtggactttaaaaattccgctaacaggataccaaataactt

SEQ ID NO: 10522 - DNA, 673 bp, Gossypium hirsutum
atcaatctcgcctcgaaaaatattatcaaaacaattcggctttagtttcatataagattttacgagagtttaaatgtttttcgtatttttataagaatgaattttgtaaaattaatataatataaaaatattttaaattttttttatttttttatttagagtcaaatttaagtatcgtaaattttacataaaatcaattcaaatgatattaaaaagagattggaataagaaaaaaaccagcacgtctcacccaatggggtgtgtagaactcatcaaacggtgcataagcgactctacagtctcaccattgttcactttacttcataagttcatataaatgagaaaggcagaggagatcttggacaaaatcttaagttgtaccaatatatatatatatatatatatctaaaagctacttccaaatatttacatattttagttacaaaattgtacacaaataatgatatttctagtcaataaacaacacttactaaatatcaatatttttctaactgcatgcatgaatgcaacatttatatatataatattataaggttttggattgcttgtttgtgttcagaactttgtggccttccatgtctgctaatgcttgagaaactttagtaaaatttgatgataaatgttatggtatttgttattattgatcgctatc

SEQ ID NO: 10523 - DNA, 657 bp, Gossypium hirsutum
gtcagtgatattgtcggtcaaatattattaattataataataattcagaaattcggatttaatcaatttcaaacttaaatttctctcaaattaatttattcaattcaaattgacctgaagttgagcggtttaaaataatccgaactcataatgttttacattggaaaagttaaaatgagttagactcgaatgtaaaatttgactcaacccaaaacgataaaaaaaaattaaaattcatgttgagggattttttactcattcgagataagtattataaatgtgggttagcattgttcttggcgagaatattgtctcccaatacccaaggttttcaaaaacgggttagtagtcgaatcggttaggtcatcagttcgtcgattcgaatagtttgtctggctcgattaaataaattattaaaatttcataaaaaaatttaaaatttcggttcaattgattcaaccgcccagtttaaccaattttttgccggttcaaccagactatcctagttctaggacaactagttcaatgcccttctctagataagtacctcgattggttcttaattggactagccagtctcatctggttcggttcaaacaatcttgccactatcatgagatcttgagtgcttgaaaaggtagtagggtcaacaaagcg

SEQ ID NO: 10524 - DNA, 340 bp, Gossypium hirsutum
ttgtggacaaatcgagtgaatccaaggattttaattggctaatctccctaattatgcttcccctcaacatgtttcttgatagattcagattaatcaacccttgcaaacttgctagttctcgagggattttcccacttaatttgttgcatgacaagtcaatactctttaacaatccaagggtgttgccatattctcgttcaaaacctttccatacaactaacaaatgctcatggaagttgatccctatagcaccaataaaatcgacggtatacgttatccccgctaaagggataagtgccatagaacttcccaagtgagccatggctgtcaaattattgag

SEQ ID NO: 10525 - DNA, 579 bp, Gossypium hirsutum
ttttggcaatctgtccacctttagtgatgacaaaacttcactcattcattttttttcctcattctacacctaccattcaaacacaaacaaatcctttccacccacaagtaaaagtaacataataacatttaagcacaatccaagcttcatgatgcaatgttctaaaaatactaatataatatcctaaaatgcaaatacatctacttaagtacaaataattaaccaagtttagaggcctaaaatataactcttttcaagagttattaataatatgatcattgtataaaatgtcaaatggaatatgctataaagctatgtacatgagacattaaatgcaaatttgatttagttgatagttggatcatatgttggttgtatttgataatcttgttttaatatgattattgattttaaatcatgttagcaccactaagtcttattgctcagtctacagtttgtttatttatgtgcccaaataatgtagatctcgaagtttcaaagtgaatggcagcatctggttttaactctcgacttagaaagtttgtatatatatttttaagtttataacaaacggcatga

SEQ ID NO: 10526 - DNA, 417 bp, Gossypium hirsutum
tcttccttcagctccgccgtttgcatcaggttccgatcccaatcttatattttcctgaattccttggtttctacttgtgatcagaataggaggtttatcaattgattttttttatgcacctataagctaaagatgtgattgtttacgagcaattattatttgatttgatttttttgaacaaatttgaaattcctccctagatgacgttgacgttggagacgtaaaggctttctgaattaattgcattatttgatttttttttaacatgttaaaacattgtagcgaatgttgataaacttacactataatttcaatctaaagatctgtctttcaaataaagaaatatatatacagatgggtgttatttactagtaaaagttccaaaaaaaaaaaagggaagcccgggggtttttcaaa

SEQ ID NO: 10527 - DNA, 689 bp, Gossypium hirsutum
gttcagatgtatggaatgtgctgatagtaaaacttcaatgcgtcgataatggtacctaattattttgcaaaaaggaaggaaaaaaaactttaacaaaacttaaataaaataaaataaaataaaatcacggagtactaattaaaaattaaaactattcgaccaatttaatagtctctacctgctttggtcattgttgccaaaatagtgtttcaacctctatctatttactttaaactggtgttcatcacataaatctcgaattgtgactgcaccatgaggaaatacggtgacaacttcaaaaggtccagactaacgtgaacgcgattttagttgagaattgaataataaaacctgttgacccgcgataaattgtcgctgtaaaatattcttgtcattctatcatttggtcttttccttgtaaattacaacattttcataagcatttctcctaatcccctctagttaagtgatatcctacaatcttttctttccagccgcttcatagtccatgttcacttgcttaatttcccacattgctttctgttctagtttgactgacatgtgacatgctttcctaaaatccaactgatacaatgacatccctaaaagaattttgtatgctttctataatgcccataaggcgtcatcaaatcggaaagaccaatctttcctccaaagtgtcttcagac

SEQ ID NO: 10528 - DNA, 679 bp, Gossypium hirsutum
gttccgagagagcgagtcacctgggatttcttccaagctgaatttcgtaagaaatatatcagtcagagattcatcgattagaaacgcaaagagtttcttaagcttaaacaatgtcgtatgtctgttacaaaataagatcgagtatttgtgagattaagctagtatgcatggggatgtgtttcactgaagcaattatgtgtaagatatttgaggatggcttgaatgaagacatcaaattattagtcgggattttaaaaataaaagagtttgttgtgcttgttaagcgagcatgtaaagccgaagaactcaaaaaagagaaaagaaaagctgattcagcagctagagatgtgagaaggagatctgcaagcgaatcattttagtccatgtcaaagaaattttgagatgattatagccgttcaaagactaatgtggggcattcgagtaaagatcgtgctagaactcattcgagtttcaaagatccaattacttcaattgcaagtgttggaaatgttagatctgatcgccctgagtgcaaacgctatggtaaaagacattctgacaattgtagattgtatgattgggcttgtttcaaatgtggatctttggatcattttatttgagattgtcctaaacctgttgagtaagagattgtacaaaacccgagactgagtaacacttc

SEQ ID NO: 10529 - DNA, 515 bp, Gossypium hirsutum
tcatttgcttacctgcattgcatgccatgcattcaaattaattacatttatcttgtctacaccaacatatattagaaacttatataccaatcaggtctgggatgttaaggccattagagaaacggccggtgggtcttcctgtcggataatcgatgccgtaaggtggggaatcagcacgagccgtggtttcgaggtagttattgttgccactgtcaacaagtgaatcaccaaaaatgaagaaagctcgagcctcagcaatggcggcaatgctcgccattaacaaagccaggaccatcaatgaagctgaagatgccattggtattggttatgataagaaaagaagccaaaggaagagttgaattgtatgggaataagaaagtaataaggggttgcttatatagagatggattgaattaaagagaaggttaaaaagcaaaaaagggaagctgttttgttagttgaatataattttgtaccaacttttgccacctttgtcaggatatttattgcctagt

SEQ ID NO: 10530 - DNA, 648 bp, Gossypium hirsutum
  misc_feature (60)..(62): n is a, c, g, or t
  misc_feature (628)..(629): n is a, c, g, or t
atcttcgattctttttagcacttatgttggttttgattggcttcacctctctctcttacnnncagaaacaccataaaggagttttagcgatgttggctcagatggctccgcctgccatttatcctccaccgccaccgctatctttggccaataatccacctaggaaatcatcactagaaatcgcaagtgtttcgccaaagcatagaagagactggagggtaggttcaaggtaaaagtttgattgatatcaactacccttctttctttcctcaacattcagaaaccttcatcgccaacggattgggaaatcatgcaagaaagttgcaagttgtgttccataaaagattacagtttttccaatattattaaacctgcccattttcattcattttttgttgtatataaaaatatagtcccaaatgatcattaaggtaactcttttgttgtttcattaaaagtcgataaaattacttttgtattcagttttcaatgtgcttttcttttcttatccaacaaaacaggtttgagaatggacaaagaaggtgacagctaaaaaatcataataatgtttgaccaagtcaaaatcgcttcgtttatgttcaaatataactgacaacaatgaaccacnnaccactatgatttggacag

SEQ ID NO: 10531 - DNA, 560 bp, Gossypium hirsutum
cattaaagaagaatatctttaatggggaaaaaaatacatgctactcacccatcaattttattccaatttttttctttttcactcttaacatgtcatacaattacgaatgaatttaataaattcaaatgcgggtctacgaaatcatgaaaaagttaactgattcatgaataagatgtttcaatcaaaccaattatcttttttttccccgaaaaaagcttaatagccactatttcgcagtagcggcggcgtgcgccaccgcgaaagaccccaatagcagcgtaacggaaaacagcagcgataagggtccaacatttccgctaaatcgatagctttaaaagaataacaagcggaaaaatcgaaaacagaagatcaagtatagcagagtgatgcagataaatcaaacatctcccttatatctcaaatagaaatcaatctgcaagaaaagtttagggtttcaaaaattaccttatgtaatttcctagtacgtcggaaacggcagaagaaaaggtgagactgggacggagtgggcggcggggaagtgtgaagagaaacgagcgtct

SEQ ID NO: 10532 - DNA, 781 bp, Gossypium hirsutum
  misc_feature (141)..(141): n is a, c, g, or t
  misc_feature (193)..(193): n is a, c, g, or t
  misc_feature (310)..(310): n is a, c, g, or t
  misc_feature (349)..(349): n is a, c, g, or t
  misc_feature (614)..(614): n is a, c, g, or t
aacacatgaatattgatcaatttttcgtttagcctaaagctttaaaaaatattaagaagtgagggattcggatcctaacatctacaactattttgtatcaaaaagaacattaaagaagaatatctttaatggggaaaaaantacatgctactcacccatcaattttattccaatttttttctttttcactctnaacatgtcatacaattacgaatgaatttaataaattcaaatgcgggtctacgaaatcatgaaaaagttaactgattcatgaataagatgtttcaatcaaaccaattatctttttttnccccgaaaaaagcttaatagccactatttcgcagtagcngcggcgtgcgccaccgcgaaagaccccaatagcagcgtaacggaaaacagcagcgataagggtccaacatttccgctaaatcgatagctttaaaagaataacaagcggaaaaatcgaaaacagaagatcaagtatagcagagtgatgcagataaatcaaacatctcccttatatctcaaatagaaatcaatctgcaagaaaagtttagggtttcaaaaattaccttatgtaatttcctagtacgtcggaaacggcagaagaaaangtgagactgggacggagtgggcggcggggaagtgtgaagagaaacgagcgtctaggtacgtgaattttaagatgaaattttagaaaaacttctttattttttctcaatggaattagaagtaacactttttggggtaatacttagatagtcacccaaagtttcatgct

SEQ ID NO: 10533 - DNA, 617 bp, Gossypium hirsutum
tgtatgtgaaagagatgactattttcgttttcccgtacctttatataaaatttaaggttaatatcaaaaatggtcccttaacttttatccaatgtgcaatataatacatatacaaagtaaatgtcatatttaatacctgtactattctttcatgtcttttcttgattgatcaagtatgaagtatgtaagccccatcatctccagaagaaatgaacaagacatgatatgtgtgcctaatctaaatatacttatcagcgatccattgattggcttagtgtcagttatattcacaattaggataaacttaaaaagaaatggaaacctgttcgagatcacctaaatccatgttacaaaccagataacatttttcttcttttttctcatgagcttgggctgttgggaaaactatattgaagggtttaccaagagaagtttcttcttgtttatcatttcaattcaaggagatgcacatatgtttgatattatatacattacacaagaagctgtaagagaaaaggaacatcaagctatggagatttgtacattcttataagcagcaaagaaggcttccattgttcctgttaagggctactactaactttgttaaggcaggcgat

SEQ ID NO: 10534 - DNA, 579 bp, Gossypium hirsutum
tgggtaacataggctccaatatgtgatatgattgaagctttgtttcaaaattttcaccccttccaattatggattgtaattctctatgtagttatatagtggttttgatgacttctgttttttacattttaggatcctcccacatgacatggaaggagaggaaagagatggagaataggaaggtggtttctttgggtggaaaggtaaggactttcgtcttcagaaataaaaaactgtgaaaactgcagagtgattgctattttaaattatttttaacattagcttttgctttcctgaaagcagccccctaagaggcagagattacctctgagtgttgctaaggcggtcatgaagaatcaaaagaaaagagaagagaaaatgcttcaagaggtggtttactttcattgccttttggccataatctatgtaatccgggctcggaatgtaatcaattttttaaaatttttctcttatatttggaaggtcattctcatacctatgtatgcatgtttagtatacaggtctgagcatgattacctaagaaaacataagagtcctggtagtatagatcatgatgca

SEQ ID NO: 10535 - DNA, 552 bp, Gossypium hirsutum
ctcctctccagtttcccacaccttagcctcttctcaatcagattttttgtttattgcatagttatgggtaggatctattgattttattttattttccccttccatggaaactgttgtgagatactgttatcaatatatgaaatgaagcacggcattattcagtcttacggtgaccgccaaaccagtcattttttttaagatggtatttgttcacttataattacgtattttattattaatataatttaaaaaattaatgtaattccttttgtaaaaaaatagttattaataagaacataatacaaatactcactcatgaaaaatcatggcgtgagcgaaaagtacgtaaaaaatatatatttattaaaagtttatgtgaaagtgaaactttggtctacgctcaaatctcatggcgtaaattattattgatttaataaataatattttttagaaaaaaacattctcacgataataaaatttccttagatggtaaataaataaataaataaaaccatgtttttaactaaggaatgtgttcaactcaataaagag

SEQ ID NO: 10536 - DNA, 649 bp, Gossypium hirsutum
tctattgttctacattatgtacatatcgccagtttattttcatttttagagttatatttatttgcttatttctaaagctatatgtcaggcaaagctggcatcagaacaatattctcgcagccaaacgacggaacgagcaccattaagcattaattacattttttattacggttttatttaatgaataccttctctgacttggtaatgaagcaatacaataaacttcattattttagacgcgactgagatgatgatatatatttagttcaaatttattcttgttagtgcctttttagccttttgggggagaagtgaggagccagttcaagggactctgaaatcatccttgtgttttatctgtataacatgaaaatttgttagtttagagttaagacttttgaaagttaaaacgatggcgttagtaagattgttaacaaccagaggtttgcttagacgtgtaaggttttgtttgtatggtgaactgccttgttaccaccaaaagaatgtgaaatgagaatattagtaatagattattcatttgtttcttgttcttaattaaattttataatagatagggtgaataatgtctttaggcgaatgtaaaacagaaggtgtacgtgcaaggagggaaggaaggaggaagaactat

SEQ ID NO: 10537 - DNA, 607 bp, Gossypium hirsutum
aacttatgcttgtttgggtgtttttgtaatgtattcagatcggaaatgctgcgatcaacgaaccgacagacacgttggggctgttcgattatgcatggagccacgccatcatttcggaccaactctacgacaaaataaacaaggaatgtgactttaaacaaactaataatctaacggttcaatgcgccgatcatatgaaaggtttcatggatgcttatgctaacatcgatatgtacagcatctacactcctgtttgcattaaagctcttggaacaagacgaacctttcccaaactccctgtagctcctcgtctcctctcccaacatgtaattccccaaataaaccctatatgtatgtatgtgtatgcactggtttgctaaaatgcttgatttggaatagggtatttggcatatgctaccaaggggctatgatccatgcacagaagagtatgttgagaagtacttcaacagagaagatgttcaaagtgcattgcatgctaatctcacaaagctttcatatccctacactacatgcaggtataaaaaagctttctaattaatctatgctatgattatggtacgtaggcagagggcatcctggagctttc

SEQ ID NO: 10538 - DNA, 585 bp, Gossypium hirsutum
ttttccataggctaaatcattatagaccctgaatttgactacactaaatagagttaaaagcatttgataatataaactaatcctctacccttggacttggaaattgctttgactgttattttattgaaagatatttttaagttctgttttttttttctattcaggaaaatatatttgcctttccttttcattgcctttttttaaaggttttttccttcttaattactttgtttcctttcctgtctcattcattagattgtatttcatattctttattaaaaaatagtaaattagtttatgtacattagattaaaaaataaattgatatttttgttaaaaatttcaattatttttattattaaaaattagagtaattaacggaataatcaaatagttatatgtgacatggcatatgtacctcatattgacatataaggactattttttaacgatgaaaatgaatgatatttttaacaaaaataatcagtttactttttgatctagcggtttttaataaaaagagacaaaaaaatctaactcataatacaaggaccttcaaagaacttttaggctcaaatcttcttt

SEQ ID NO: 10539 - DNA, 606 bp, Gossypium hirsutum
tggagttggtggaaaaatgttaaaacattccctttgtttaactttaaataattgtcttctctgctatttttggaattagaaattacggctgaaagtgaagcagcttgtataaaccatttgagggacccaatttgtgattttgatatttattgaaaaaagatgattttttttatgtcataattgtacatagttgcatatgtatataagtatgtttgactagaattatcttcttatttaattaattactaaaaaatgtatttctttcttaaattttgttaggtatatatatacatatgaatctggttgagaagaatgctaaatgggttgtaaaaataggtgcttccaaacatttttttgtcaacaaaaaaatgtttaccgagtttgaaagtgtagctgaaggtaaataagtctatatgggtaattctaacaattcagaagtacttgataaaaaaaatcttacttaaatttacttctggcaaaatattagcatttattaatgttctttatgcacttctcctgcgtaaaaatttgatcagtggtggattactgattaggcagacattaaattagtctttgaatccgataaactggtattttcccgtaatg

SEQ ID NO: 10540 - DNA, 601 bp, Gossypium hirsutum
cggtaacggtctcgggtatggggtgttacattattaatagccgagatattatctattgttacgggtaagatatcggtcttattatgacaatatgattctatctgataaaggtgacttcagtataattcagaactttgatgattaatataagagacagctttattataaactcttttctagttttcatgaaagaattgacatcgataaaggtgaaagtgatagaagatcaagattgaattctaatgatgatatgtctggggttatccttttaacgaaaagaaaagatctcttcgaaaagaccgatttagtgatttagtctgactcgaactatttgattgaaaatattatttgattatatatgtttgaatctatccactagactggaaataagctttgaatgtatatatgtaatttgagggataatcttgaaaacttgatatagaattatatctatcaaaacaactctaattgagagatgttttgataaattaaagttagtttgattgttgaaatttcttttgcatgaagatattatcaatcgaaacatcagctctggttcagcctaagttgaagaaaaagtttatgattttcagttatgcgt

SEQ ID NO: 10541 - DNA, 625 bp, Gossypium hirsutum
  misc_feature (591)..(591): n is a, c, g, or t
  misc_feature (595)..(595): n is a, c, g, or t
  misc_feature (599)..(599): n is a, c, g, or t
  misc_feature (601)..(605): n is a, c, g, or t
  misc_feature (607)..(610): n is a, c, g, or t
ttaaatccaactcaaccctgtcctcattaaacccaaattggtgggcgtcacatggcggctatctgttcaattctagccacctttgaacgtacattggattttagtctaagacaaataaataattacgttggcatgcaatagtataaatttagtacttaaaattaaaaaaaattaattacatctaaattcattaaactattagtaagctttcgttatggtcatttaattttaaaaaattataaattaattttgaattatttaaaagttttcacttaagttattgaactattcaaatttttattcaagttactgggttattaagtgtttttcttttaaaaaaaagttcggctagtgaattctagccgacgattcgatgattgatatgatagatcaatattcatcaatgagtaaaaaaaaataccttagctctaagttaatttgatgatcagagtcaaatattagagaagaaaattatttggattttggtttacaggtttttgactttcaatgttgtttaatgaaaaaaattgaattgtaaaagagaagggaaaagagagttttcgattggtgcaagtggtgtaagtaaacaanattnacantnnnnntnnnntaaacaaaaatccaa

SEQ ID NO: 10542 - DNA, 683 bp, Gossypium hirsutum
attttgggcttgagtccactttattactatatagggctaaggcccaaattgctctattactgaataaggctacggcccagactgttttgcatattctattttctattgtttgttaggggagtaaacactgagttttcgtaaactcacccttccctttttaactgttcaggtaatcctcagccttagacgatttggtgctgcgaaggacttggaattggccacacgactgctgtgtcttgcattcgactttatttaattttaaatttcacttttgggtttttaattctgtaataaggccattttttgtttcaatttttaattgggctttggattatatgttttatttaaaactgctagtctaagtaaatgcgagtttttaaaatagtaactgttttccaaaacccgcgtttttaaacttctaagtttttaaaatgctttcgcggtttaagatgagttgatataccaaaggaaaataatttggaaaatgtttgtggtgatataatttgataatagtaatggaagggtctttaatttaaaagtggatatttaacgataagtcctgtttttcgaaaagcacttcaatgtgacacactagattcgaccataatatttaggctgggtttggggtgttacatttagtggtattaggtccaaattgaaaaactcggctatggaatggattt

SEQ ID NO: 10543 - DNA, 604 bp, Gossypium hirsutum
cctcactgattcaagcatttcttctaatcgtcaaatgagtgcagagattatgaaaaagttgtatcagaaacttgaagaagatgatacaaatgttagccaaacaaggagtatgttagctgatgggccatggaccaattcttctacatctgctgctgatctttatccagttagtttgacttctggatattggcagaatagagaatccacaaattagaaaaaaatttgtataattctcttgtttggtttttccccagaaaatttgtattcctttgaaaccgaggcttaattagcacatttgattcagtcaaaaaccaaaagtcacattcaataattttgacattcgaaatactaaaattataagtcaactatattaaatgtgtattttgattttatacaattttatacataaaattttgatttgatatagttctggtaaattatttacacaattattgattaaaatcattttatgtttatatattgcattcatgaataattatatttatccaatataaaaataaattgatgtatttatttttttaaaatgtgcctatgattaaatcaaaatttaaaatttaaatatacatttgaaccacaattaggg

SEQ ID NO: 10544 - DNA, 581 bp, Gossypium hirsutum
tcaacgagaggtgttttaggttgttcgaaaaaggtaagttcacgaatgacagccacccccttgcaattgaaggtaagaaaggtaaggattccttatttattgattcgaggccgtttgaatacaaagttgctcatatagatttttatggccttatttttgaaaatcttccatcttttgatttggttaattactgttcacatactaatgttaacgatgttgtttcaaaagatgtcatgaagattccgtcttatgacatgttttataacgacaattctgttgattctgttggattggttcatcctgtgcaaattgtgaatgtgtgtgatagcagtttttcacgttttgatttgtttgattataaaaattctttgaattcatctttctgtttaaacgtgcctattcaaatgatttgtgatggatttgaatttctgaaaggttgcatgaacacaacttctttgctcgatatatgcgttaaaagatttttgcatgaagtaattgatctgtttgactttgttcttcaagataaatctctgaaattttgtgcaagatttccatgctttgatctatctgttcgagtaaaa

SEQ ID NO: 10545 - DNA, 588 bp, Gossypium hirsutum
accgcacacaaaaccaatataagtgccttcagaccacttgcttgtgtgctatggacgtgtggaattgcctaggccatgtgggaggtcaaaagcccgtgaaaaggggcacacaaccatgtgactaaggcacacgcctatgtgaaaggaggcacatagcagtgtgactaaggcacacgcccgtgtggaccaaggacatggccgtgagagcaggccgtgtaactctctgtctatttgcactaaatttgagtatagggctgacacagccgtgtgtccaaaacacatgtccgtgtggaatccctaaatccccgaattagccacacggtcgtgtggccagactgtgtggcaccgaatcactcaaaccctaatccctaaacacaaacgcccatgtacccaaggaacacagccgtgtggcaccaaaattggcccaaaaccctaattcccaaaggcacagggccgtgtgaattggcacaagcccgtgtggaaaccccagtggccacgaaaccaccctaagacagcttgaaaaatgagtttttgggtcaccacatcttctcaactgatggaactcagaaccgcataaccaaagtgaat

SEQ ID NO: 10546 - DNA, 384 bp, Gossypium hirsutum
tagtaaatactagattttgtcacacccataataaaatattatcttttaaaattattcaataatgaagataggtggaactgtaatgaacttgcattttaatattattaaacatatgttcaatctttgaatttgtaatttttaattctcttatttaaaaatgatataaaatatgaaaagataaaaatatcatcataaaaatattaattataatttaaaaaaagagtacttttgtaattttataattgaattaatcataactcaatacattaactcaataaaacgattaaataaataatcctatctaaaataaattgacttataaatatagacaaacttaaactccatcacatattaaaatatatacatagtttggagtgacaggca

SEQ ID NO: 10547 - DNA, 625 bp, Gossypium hirsutum
acatccccaactagaataaaaggacttaatgtaagtaattaggtgccctaggcctgacactacacggtcagtgcttgtaaagtaccgaattatcaccaagtgaatcactttttctataacgatttctaatacacatttctaaaagccattgaactccaaacaagatagcataagtttccaacataaatatattggcagtgctaatttgcaaccggcaccttgcattgacaatgtctccatttgcatcttgaatcactggcccgagccccaacttattattactatacctctgctagcatcaacattaagctttaaaagtccatgccatggtttttcttatttctttgagtttcaataagtttaacgggttatcgaagattgatgttgctctttcttcctcggatgttggtggtctagtaaaaccttccatgatatggcataatgttattgaaaaagtgtttactctgcttacagagcttattgagatgcttacatgtaattcttgctttctctttacttcgtcatttgaactgcatggtgaagataaactattggagataaagttagaagttgggttcatttaatattatattgacttgagaatttaggccgaagccttgtgttg

SEQ ID NO: 10548 - DNA, 689 bp, Gossypium hirsutum
aggtaaacatagggaccactactccatcaaaaccattccaatcaatccatatagatattatatatattaaaatagaatttatatattactataaggatatttatatcttttctcattctaaaattaaaatttattttttatataaaaataatgatatttgacacattattagtagagtttttaaattctatatataaggtaaagaggttgataagtgtcttatatgtaggggtgttcaaatttcggttaaaaccgaattaactgacagaagtgatttaactcggttaatcggtcggttaacggatttaattcgatcgaaggttggttaatgattttctgaaagtttggttatcggttaattcggttcgaaattgggtaattaaccgaacttaataattcataataaaatttttatgtagttttaatttagataattcggtcaaatgaacattatcaatttatattttttttatatgttttatacttgttttgacaaaaaaatgtaaattttggttaactaaccgaattaatcaaaatatttcggttcgattaacgattaaaagattaaaaagtttggttaattcggttaatattaattcggttcaattaactatttgaacacccctacttatatgcgtatagtaaaatattaaaaaaatatagcttatatacacttgtcatcatcccaa

SEQ ID NO: 10549 - DNA, 592 bp, Gossypium hirsutum
  misc_feature (534)..(534): n is a, c, g, or t
  misc_feature (536)..(537): n is a, c, g, or t
  misc_feature (581)..(581): n is a, c, g, or t
  misc_feature (589)..(589): n is a, c, g, or t
gattataaatcaagaaaaaccggaagttcagattttccatactcaaatcaacaaactataatgcttacctaatccaagtggatcgaaaccaaaatctccaggaaggctacaacaatgaaaaaaaaattagaattgaaattactatatgaacaatgagatgaaacaatatataactatgacctgccatcaagccattcaggaggtgtgctaccagggaaccacaaaggtctatcaggaggcagtggttcacaaacactcgatactccacctttcgttgcttttgtacgagtttcccctcgtaacaatgtcgtaacttttctcgaaaataatttttcgggttgaatcctatttaaaaacccagttaattattagaaaaataagtcggtatccattaacaccttgaaaaggattaagattcgagtttacctgattattgagaagcttgacaatgaagtggaagccatggataaagccatattcaatggaggtttttttttttggcaaaagcgtttcttacagagatgagtagtgaantnntttatctggttaggaaaatatgggggaaaaaacactgatgatanattgtcanagg

SEQ ID NO: 10550 - DNA, 670 bp, Gossypium hirsutum
accatctcaacaaggagactctggatttggggacaaaatcaggtagtgaaatttatagttaatgaatcattgttgctttttagatttttaattgatattgatctcactttccacttacttttccatatatgattacagggatcaaatttacctcgtttattttggggcgcatttactcctaacatggtattgtcttgaattcctgatgtcttcaccccaagagatgttgctgttattattttgttgctctttgtttttgaacctttctttaattcttcaaggtcctgtttatgaagtttgaggcttttatttatttaaaatttacgtttcctgtcaaggactaggaaaaggaaacttcatgctaatcacttttagacattttggttctctgggaccagtgtttattcagaaccaaatgcgaggttcctgctatctccttcataaatgagtgaactgaagatagctttgcttcaataagtcgtgacctaacttttaggatacttttgcagtatcatttgcttctaatattatctgtgttcttttatctatattgacatgttatctagctcatgacctggcagagaaataagcggacttttccagtcgattttcaggctggcaggttgttccttgaatctgtctattacctaaccaacactataaacactca

SEQ ID NO: 10551 - DNA, 566 bp, Gossypium hirsutum
tcacttacattatcattggacactttattattaatattcgactcatctaacgaagttaatgtttaaaatgaaaatatgaataattttaaacattatattaaaaatagttccgaacttatattttccttgaatttttctattctttttgcttaatttttttaatataataaattggtttaactaattatcaaatcggttgaactgaaaaagtggtgtctggatagaccaaaaacagctatattatgttggcagaaaacaagtaacccatatcctaacacttgcctcaaaaccagccagacatggcagtttgctatattagtggtattggctttggcccttccgctacctttcaggattcaccaaatcgtacaatacccttctcatccaatcaaataacaacagcagcactacccagaaccaaagccttatcttgtttccaccatgccacaacttctgtccaaccaactttctcttttcactgcaaaactagaacccacttcccatttcgccctccattgcctgcttcaaacaaacctaccaccatttcttcagcaatgtcatctgga

SEQ ID NO: 10552 - DNA, 732 bp, Gossypium hirsutum
  misc_feature (594)..(594): n is a, c, g, or t
  misc_feature (637)..(637): n is a, c, g, or t
  misc_feature (651)..(658): n is a, c, g, or t
  misc_feature (660)..(669): n is a, c, g, or t
  misc_feature (678)..(680): n is a, c, g, or t
  misc_feature (683)..(686): n is a, c, g, or t
  misc_feature (689)..(693): n is a, c, g, or t
  misc_feature (695)..(699): n is a, c, g, or t
  misc_feature (701)..(710): n is a, c, g, or t
  misc_feature (717)..(719): n is a, c, g, or t
  misc_feature (724)..(724): n is a, c, g, or t
  misc_feature (726)..(729): n is a, c, g, or t
cttcttacagtaagtggttgattttgttgtttgctctcggctgttgggttaactttggatccagtcctttttactcacagtaatgttacttttgattaggtctccaccacgcatccctgaagttcaaattcctaaggacccagttatggagtttgctcaggcacttcggtttgagatcaaccgggcttttgctgtcctacgggatattgcatcaggaagagaactcaagaagttcctatctgtatgtggtttacttgtaccgagtagttatcttttctgtttgatcacttgcagattattcatctgatttgcaattaagatagtgatacaatagttacttagtttgctttgttctgatcattttattcatatgaagactttttttgagctatgctatcatgcatttgacaatcatattggaaccggactctgattgtttaggtgatcgccggcttatgggtcttgtctattgtcggaagttggtgcaacttcttaacactgttttacataggtattgaagtttccttcatttgctttgtcttttttccccctatatacatgttggtttcctgattttgttttaatggttttgcnatagtcttcgtacttcttcacacggtacccgtgctatacgagnaatacaagggacannnnnnnncnnnnnnnnnnttcaggtannnacnnnnttnnnnntnnnnncnnnnnnnnnnttccccnnntgaanannnntaa

SEQ ID NO: 10553 - DNA, 558 bp, Gossypium hirsutum
  misc_feature (539)..(541): n is a, c, g, or t
gcacttaattattaataaatagtcataattattgaataattattacaaaagttctttacagaaattaatattcttgttatgctccactcaatgctcagtagattatttttatcagtgcaaaacgtcgatagccattgggtttcactgtatcctcgaggcttatttatcaataactctttttcacatcaaaatataggtgaggtaaataaaaccttaaagaaaatgacattgatatacatcttgaagccttcattaatttctcctaaaaaatattttgtttataaaatcgataataaaaattacgcagtataaattgatagaaaaaaaaaaccaactaaaatgttaaaaggaaaaaaagggaatattcgattttagatcgttcaacttaacatcaaattttatgtgagctatattttaacatcttaaattagtttaaaatagaagtgcttatgggtcaagttggtttcgaccaaaacttaggcttgttttgtaggcccaagcccaacccaaaagatgaccttaaacttttgttcaagccnnnctcgttttatatatgct

SEQ ID NO: 10554 - DNA, 658 bp, Gossypium hirsutum
cttggtttgcacaaattagaagctccccattttcctcaagaaggctaaaacgttgcttattatcttttctgacagcctacaatcaataaacataaaaaccatgaaatttcttttgactgcaaaatgaacattttccttctcatgattgtttatacaccaacattttggagaccaagaatctaaattactactggtaacagctcaaagatcgcttataagtaaacaacaaatagtttttaaagaagccattttcaattttaactacaaaagttacatgctgcaatgatagaaaatttcaatcaaaataggaaaggattctcaagattcaacagtgaacaaagacaagaaatgatgttacaaattctatctctttgacatcatcaacagtttgtgaccctaaagggatattagcaaatgttctcatattcagcttcagcaaatcttcaactttgacataaccatcacttcgcatattcaaattcagttcacagaattcgtgtggtagtcaggaaaaccatcaatggggttggaggtttccatgtggtagtcaggaaaaccatctaccatgatctcacagatattatcaatctccgtgctccgacatgcacttgcatgccattccaaaggctgttggaacaacaagctatactgaatgccg

SEQ ID NO: 10555 - DNA, 577 bp, Gossypium hirsutum
  misc_feature (141)..(142): n is a, c, g, or t
  misc_feature (147)..(147): n is a, c, g, or t
  misc_feature (508)..(508): n is a, c, g, or t
  misc_feature (569)..(569): n is a, c, g, or t
gggcaaggaaaggaaataattaattccctgaaaaaagttaaggaatttttggatcaatctgagattttctatttctttttctttgcagaaataaactttcccggctgattctcacgctaattttttttttcaaatttcatnnctctntattttattttatttcatattttgggaaatttagaacgataagcgaaaatgaatatatttagattagcaggggacatgacccatttgtttagggttcttgttttgcttcttaaaatccacacaatcaagtcttgtgctggtacgttcattttccaaatatttactttactttttgtttctgggcttagttcattttatgttgtacttttttcccagtaatttactgcttaatataaaaaaatcgaatatttaggttaaattgtgggtgggtttttgctagtttattgaatactcaaattggagccatgtaaaatgtggaaactttatcttgatagaaaatgtgaccccccttttttttttnaattttaggaaaaaaaatttttggattttgggaatttttttttaaaaatttaaatttgaangaaggtcc

SEQ ID NO: 10556 - DNA, 627 bp, Gossypium hirsutum
caggatgtcattttgcctcgaccacgccctgcaaatcaggtcaacaatgatatctgaattcaggggctacatatcatgtcactaatgatttgtctaatatacctactgttgttgattatacaagtactggtaagcttgttgtgggcattggtgccaatgtacctgttgcttatataagttcttcttttattcattttggttctagggtgttgcaactcaagaatgttctatatgttgctaaagtgtgcaagaatctgttgtctgttgctcagtttgccaaggataatcatgtttatcttgagttttaccctttttgatgttttgtgaaagatttacatacatggaatgttttgctagtggagagtgtgcatgaaggcttgtattggtttgatgtatcaccaattcaggatgaaactatttgccagttacctgttcaccagtcacgtgtccgccacatagtctaccagtcacatgttagcagttcttgtttagtctctgagttttttgaatcttcattcgatgtgtggtacaaaagacttggccacccatgtaataaagtagttcaaacagtgttgaatagttgtaatttgaagtcttttaagtctgaagttcacaaggtgtgttcat

SEQ ID NO: 10557 - DNA, 645 bp, Gossypium hirsutum
atggacgtcatctcccaaaattaaaacagttatttaatattcatacactcgaatatagaaagatggaattcgattggtattattcttctcgggaaattacaatatgaataattcctagaaaagtttgaaagaatcacagttgatcccacttaaaacttaaactatcagacataaatttctctaaagtgattaaggaataaaaaacaactaagtttataaagaaatcgtgtacaaaaagtagaggagaagaatgcttttctcaaaatattgtgtttctattcaatgtgaaaggtaaagaaatcaatcatctatttatactagtaacagctcccactacatattcaacagcccccactaaatcctcaacaattaaatatacattattttctttacattaccgacatcaatatcaaaacgagaaaaaatacgtaataatttaatcatttcaacgcgaagaaagaaaaaaaacccattttagtctaatactatcaaaagctcaatgaagaacgaagggatatcaaggtcaaaaattgtgttggtgagaaagaaaaacctgttcaattcataactcattttaatctaactatctattgcttattctatttgtatttgtgacacaaatgcaatttcttatgggtgatggtg

SEQ ID NO: 10558 - DNA, 609 bp, Gossypium hirsutum
gtatcatacgactagaactttagtttgacaaatcgcgcagtcttaggtaatttctttgcttcaaatcctcctaagtgtttgagtaaatgcattattaaatagaatacaagggatgattacaaatgaaagagaatgcctctatttatagttgaggtctcctagatccaatagtacagattgaattatattaacgactaaaattagtgcctagctacaagatgagagtattaagggatttaaactctatacatctttgtcccttaggatttacaataattatcctgataactctagtttactgaagtgtttcattgggccaccaaggtctcaagttaatggactttttcataggtttcacgaatcgagctagttcaaataggacaaattagtcttatttaatcaattgacctccatgagactttttgtgcgcattcattatgggctttgattcgaggctcatgactttcttccccattcattctcgtgatgcccttatcacgtcctttgaatgacactggtttgacttgtctatgcattgtctcaatgcctcggttaattccctactattctctttgtcgagtagttccgcccctcgaaacatttgcctca

SEQ ID NO: 10559 - DNA, 650 bp, Gossypium hirsutum
ctagctcgctcctaactcattgagcttgattctatctcattttaatttatgcattttagttgctggaataaaacattaattatgatgcagttatttttacttaattattgttgattcttaaatatgtcttaagtctattaatgcatgttaattagtaaagcattttaatgtgtcttaagtttaattaatatgttataataggtacaactttttaatgtgtcttagattaagatattttaattgtgtctaaagtttagacaaattaaatggtgtctaaattgtgtcttattgttgcatttaaccgagtattaatttgccttgtaggttgttcaccttggaggctgaatatccatgtaaattgaagatacaatggatcgaatttaaggagatacatgcacatacgaatttcaaagaagtttccattcatgttcacatgtgtgaccgattggtgtcccaagagtgatccttcaattaaccgaatgcatgaacacaaaaactactagaacccttcaagaatcagcttcaatgaaagtgcattgtgactgatcacatggatgcgcaaattcatgtatgtgtgtttcctaaagatgaagaatgtggttgttcattctattcatgcatgaaattaatcaagagggacgaaatctgtc

SEQ ID NO: 10560 - DNA, 606 bp, Gossypium hirsutum
tcaatctttgtgtgaggaatggagaatatagtagcacaattttggtgggaaaaaggtcatggaaaatgaggaatgcattggtgtgaatggggtaaacagtgcaagttgaaggaggatgaaggtttgggttttagaagctttgctaaatttaatgtggcgctcctcgccaaacaagggtggagacttatttctaatcctaattcattattgggtaaggtgttgaaagcaaaatattacccaaattcagattttctaaactcaagttttatggcaggagtgtcctatacgtggagaagtatctgggcagcgaagaagacattacaagatggtctgtactgaaggataggtacaggcaacaatatctatatctttaatcatgcatggatcccaagttccgttaattataaaatttctaatccagttcgaaattgttatatggaattagttgatgagctcaatagtgttaatagagaatggagcagtgtgattattaccgatgtttttgattttgttgacgccaccaggattcttcgaattccgctcacaaaaatcccgcataatgacgggctgatgtggagaggtgagccctctggtgagttcactgtt

SEQ ID NO: 10561 - DNA, 631 bp, Gossypium hirsutum
tccgcaagttcgtcagctgtattcgaaacattcgaagatctaataccagtttgttgttcactatttgtttcttccaaatttggaggattttgaacaatacttagatttcgcaatcttcttctggccattttatctgcaatacacataaaatagttgaaattttagtaactaattacaacaataatagtaaatataaaatagttgaaatatttaacaagatcaagatttaaattataatattacatataattaaaaaatcgtaaaatcttactatatcataatttgtaaatatcttcatccacatcctggcaaatccattgaaattgtgtactagtactagggatattttcatttaagttttcttctgatctttcgttgatgtcatctctacctccattgcccatgtaaaacaagtctctaggggtgttatggagtacaacgtactaaccctcatcagttggatcttacgagtaaaaaacttgtttcacttgagaagaaaatacatacggctcatctatcaattgttgtccagtgtgaattaatcgagataaattcaccattgtaaaactaaattgatcttttttaatttcgcgagcagtattaacatcagccaaaattaacatcagccaaa

SEQ ID NO: 10562 - DNA, 651 bp, Gossypium hirsutum
ccaaatttcctaaaaaatattttaaacactttagaacactttggtattaatccaaaaacatttaaataaattaaaacaaatttaaaacatatcttttagtattttgcaagtctttgaaaatgtttgaaaatatttgacaaaatttttaatcatatttttgccaaatgatttaggacatataatacctataaaatttaacttaaatgttgttatattaaaagtttgggatatcaaaactaacaattacttagtaaaataaaatcaaattagtttgcattactccgacaacgtaatgtgacatcacacattcaaatctattgataggattgggtgtagactgtcacagaattaatgccacctccccatatttgaatttcttttctcatgagacacacatctcttccttttagaatgccttttcatatccaagaatctgctagtcttatttcaacccttaggaaatacttgttactatagtactttgcttgaaatgacctagttaggatgaagtcttgttttgtcatgtgtcatgcttgcttagctagcaaaggtccattcataaaactcaccatttaattcccagccccttcatttttctgtgtgcaaaggagtctctaattgcagagacgtgaattcctttctcttgtctta

SEQ ID NO: 10563 - DNA, 679 bp, Gossypium hirsutum
tcataattagcatttgggacagccaataattatctgtattaaagaagatttggagagtgaagacttggatgactgctcaccttattaaagaagtagatgttcaacactaacattaagttaatagttatcatgtcggtccttgttaacgtgagatgtattattcgtttcataattttattgataaaaaacagtcttattttattttattttaaaaattttaaatgttaattaaaaacacatgatatttttttaaaaaattaaaaaatatatataacataccatataattattctaaaattaataatgtaaacatttatttaatatatagttacattattgataccattattattttatggactaacataaataaagataaatgaggccttaacttgttggttaaagcaaaggtcttgagtctctaataaattcagattcgtgttttattatacacatttatgatatttgagtctttatctcattttgtgggtgtgtagacctgatcacgaatagggtcacttatccaggcttgaaggcctacttgaaaagtgaaaggatttggacaaaattatatcctgaaaaatggacttggactaaaaaataagattcatttttaaatgggccgggcctcgagtagaatttttttggctcggattcagctcgaatcaacataaacttc

SEQ ID NO: 10564 - DNA, 520 bp, Gossypium hirsutum
tatacggatgtttaaattttataaaaaattaaattattttgatcaaattattataatttctaaggtaaaagaaattatttaatttttttaattctgatattaagtaaattgatttctctcaataaatattaaagaatgtgaatatgatttgcaagtggaaaaagagtgtacatttataaaatagttgaaataattcaattgtgtatatatttatttatgattcgttttcaataagcaaattggattaatttataaaagtgtggaggtcaacccagtataaaagttaggtttatttcaaaaaagttttgtgagtgatgaagtttggaattaggattttgagttttgacgaaagaaagaaaagggaaaatcgtggattttaataattaatattgttacgagtccacataatgtggctttgaagtggtttattggcattattattgaacttgaacaacactcattcaattttatttctacctatttttgttgctttaactaacaacaagtgcacctcatttca

SEQ ID NO: 10565 - DNA, 593 bp, Gossypium hirsutum
atgtagaagcgaggggtacttgttttgcaaaacaaaaatcgtgtgttaaatagaacttgaaattttggctactttttcaattacaaaaaattacaagtgcaaaaatataaagatgaatatcgagattatttacgtaattcgaccttagcctatgtctgcgaggtttttcccaaaataataatttactatcattctcgtagtacaaccaacgatttaagtcctaatactaatctaactctcatcaatttaacaatctcatcattgtacaaaaactagatcactctcccattaacctcccccttcgaaagcttagttttataactcttgagactcttttgattacttacaaaaacaatgcacacatacatgttattgacttgaacgaatttgtgctttatcaagctcttaatatctcatttattctcaatcatcacattaacttagacaaaacttaagttttgcttacgtaagagttataatctaatcaattttctataaaataaagctaaaaatcaacataatatgatacttccataagagtcttgatatgatccaatgccttcaattatagaaagcggttttacttgttccgc

SEQ ID NO: 10566 - DNA, 568 bp, Gossypium hirsutum
tcgtctgataattaagttgagatataaattaatggtgtgatgatggaaatttaattgtctttgcattgagagaatcaaaccattttttaatgtatatttggtcttaaataataatagaaaaaagggtctcctgaagtttcgaaagcatcatttagagattaaattatgttaataaggacagttattttattgttaaataagtgggtaaattggaaggcattctcttcttgttttgaagtctgatttattcataataaaaatcaaatttgagattttatcaaaattttactactaaatctactaaacgtcttagtttaaccaagtttattacatcaacacctctttatgatttgaggtttaggattataaatatatttttaattaagtttattatgattcgaggtttagggttataaatatatatttattattaacccagttttaatttatgtttaaattaatcctacttatgaatttgtctttttaattagaaagaatcattgatggaaatacccatagacgagcggttcaaacttaacgttgatgcagcatgagaagcggacgaaag

SEQ ID NO: 10567 - DNA, 664 bp, Gossypium hirsutum
tccatgacctaaatagtgggtttccatgttacttggacttgggtgtgagtattgaatatgagcatgcatcaaacacagttgtgttcattttttaatttgtttttacatgtatttggagagttattggagaattgtattccccatggccatgattggatatgtgtctgatgtcagtgtcggacaagggtacttaaagaaaaaaaaagaaacagttggaggagcaagggagtataaagtaaatgccaatgtttccaaattagtccaaccttgatagtagtagtaaaaaaagagtattatcattctgacatgctctgggtatggtataataccacaggcttggtttagggttgtgatctcacctcacctgttcctttagctagtctagattaacccgaaaatggaaagctagtctgagttagttgaactttgttgaagtttttgtcaaaaccgctgcctatggaaactgaatgggtatattatttgtaaaaagtaagaaactagttaacgctatgtttctttgattcttcatttttgttgaagtacttgtgtccaacgcatatttggacattgatgtgtgtggatatgattctccaaggaccattcaaatacatgtaaaaagtcaggaataaatctcaacatacccgtgtcaatcccaaacctgtat

SEQ ID NO: 10568 - DNA, 671 bp, Gossypium hirsutum
tttatagcacgtttcaagcaacttcatccttaaatatatttgaatatacaaacatgaattgttttaccccgccattaatcctacgaacttagaatattttttcaatttttcaaacatgaaactccaaatctcaaacatcctagtatacaaattaaaaatcctccgacaatacataaaacatcaacatacacatcaaattaactatccaaacttatactgtgaacttctctaacaagctcacgaaggttataaaattattaagtgccctaacatgtcttattctaagacctcacatcaccatcaatgtcaaatgtatcaagttagactttcatgttaacaatcttaggacacgtagctaagtttgttctccattataaaagggttgtgcaaacagctcacgtaggacattccttctcccttttcctaaaaactctttctaagaaataataatctcttctaaaacttcatgctcctctctttgattcttccttcatcttcttcccttgttcgccttactagttaacaagttcaaattattttttgattatttttttttcctcagacccaaattcaacccataagttttagcatattcaatttagttcattctccatttaaagagccagtcaactcacactatatgtaagtgcctagaatatgcaaccttgtca

SEQ ID NO: 10569 - DNA, 470 bp, Gossypium hirsutum
  misc_feature (19)..(19): n is a, c, g, or t
tgttaagaccaccgcatcngtttagaccaccgcatcatcattggagaataagaaagaggaatccgaaagacgagcatccatgaaaaagattttaaggataaggattaaacatggatttagtttgaaggttttaactctcctgtagataatacagttttctatgggagatccgatcaacgggggataagcaatacaaggtttgccttgagcagaaaggaaccaacacggtttcaagggtgtcgtagaaattttaaggctaagtactattatcaaacgggcaactaattgttagtaaccatcagctctgattcaattaggagtaaacaaggctagaaatgctatagtaaatcaccaatcgtggtatactccgataaggcctctgtcgtaaataatatcgagagttaatggcttccgagcaggaacaacattcatcacccatactggatcagtctcgagtgctgctgcaaaca

SEQ ID NO: 10570 - DNA, 664 bp, Gossypium hirsutum
aactagattggtgatattagttaataaaagtaagtaaaatgcagagtacgatttcatggtcattatcttataagaagagggtttcttattttagaaccgtaacagaagttggcagggagtaggaagtatgtgtaagagaatggttcaagattgaaactggcagtgtattgatgacctacagtcgaaatgatgatgactggtaaatgaacagggtttaactaaaataaaagcaacttggctctaatgatggggaaatgttgaggtaagatgtggttggaggctaaagtgacggttcacacaccggaggaataaagttagagatgaatatttatagatgatggcagttatttatcaactttgaatcttgatacttgtataacgcaagttccatcatgaccaatcacttgataaatacaataaaattttaagcaaattatgattgaacagaaatagattgaacaaagtaccatgtgtatgccatataagggagagctcagggctctacatattatgcgtttgcatattcatgaagccaagttttggtgaagtgttactcttgtcgaggtcatggtaggcatagttgtggcatgatgaagtaaggatggccaagcatggacaaataaaatatttataacataactagtatgggttctcacaccctatt

SEQ ID NO: 10571 - DNA, 410 bp, Gossypium hirsutum
gaaagtcgaactattagttattaggttggtggataataaatataatatttaaatacatactactcttccacacttggctttctttgtcatgaggtaaactgatttccacccaaatcgctgcttattcaaaactcttaccctttacgataatttgttgtccttttcggggtattaattaggcctatcaaaatcgttttacttcattttcctgaaagggcctgcctggcctttaaaagcaaaataatcttcatgtgattccgcgtgataagttggtttttttttttacgaatctgacctataaatttaaaaaatcataaaaatgactcaactttaagattaattatgagaatgatcatcactttttgaggcacccccgcttgggttaccttgcaaattggggacaccaaaaa

SEQ ID NO: 10572 - DNA, 666 bp, Gossypium hirsutum
gctatcattcgccacgaagctgaaccaagatgggagcccccttcacgctttattgaatgtgaataaggagaccgcactgtcactgtttgcggtcaacaatcattgccctgaatgtatccatgatgtgacaaatcggaatgacactgccctccatctcgcagcgcgacctggcaagttgaaagcttttcgagttttactaccatgcctatggagcagcgagtatgattagcagattaaaaattttctcaatttcaagaacagggatggcgacaccgtgttacacattgcggcatctaacaagcaactaaaagtgtaaaaatctctcttagctcagccacttattcttccatttgccaagtgtaatgtattttgcttgactttccaatgcagattctcgggctattaacaagattcaggatcaacttatgagctaccaattcggagaatttaaccgcgacagatatcttattacgagccaagagtaaacaagagaacaaagaatgcctgaccattccacgatgtgctcagaatcggaatattcatttttcaattatatggagtattttgacattgtgagtcatttgggtttaccaagctaggaacatgtcaagcaacaaaagcagcgctttgctagtagtaaccacgttgattctcacaaccacttac

SEQ ID NO: 10573 - DNA, 625 bp, Gossypium hirsutum
tgctcttcttgtgaattggactttcatattaaatgtgctttgtttacatttaatattgctgagaataatttgaaacagcttgagcatgttggccttcaacatccattgattcccactgaaaatggtgatgaaaaacttaaagatgtttttaactgctttgggtgccgggaaccattagcaaattatacacgcttttctccttgccgtggatttaacttacatgagaaatgcactgagattcctttcaaattgaatcatgtgtggcatcgcaagcatcctcttgtcctacaatttaatagcgaacggctctcttgcaagatatgctgccaggtaacaatgcgaagaggatttgtttatggttgttctccttgtaagtttgttgttcacattgaatgcgcatcacaatcaccattaaaagttattaagagtacaaatcatgaacatccattcaccttgttgttgagacaagttccattcacatgtgacgggtgtggcactgaaggaaatcatgttgcctattcatgtggtgcatgcaacattataatccataaaaattgcatttcattgcctcgcattatcaaaagtaagtggcatgaccatcgccttcctcacacatatttccatc

SEQ ID NO: 10574 - DNA, 523 bp, Gossypium hirsutum
ttttgaccatagagctcggtatgatacctttagtaaaccccaaatctaaaaacagaaaactgacaagaaaatagaaaagaaaataagagaaagagagagacaattttcataatactcaattcatgccttctctttgttacaaccattgattaaaaagaaaaggaaaaaagagaaaacaataacgactccaaagttggctactgccaaagctgacttggatcaaaatgccccgtttcactaaagcttttatacgcctactaaagcttctatacgcaccgtttttactttagtttttaactcataacaggaacaatggtgtatggtggtgttgggctggtcaagcgatttgaggcttggtgatgagcggaggtggtgaaggggaaataatggtttttttagaattccaaaatatgttttttatttaaaatatctttaagaaaattattttatgtgaaatgttaaagatatgtggcatgacttaaggtcccttttttctgggggtttacctttaagcatttacctc

SEQ ID NO: 10575 - DNA, 550 bp, Gossypium hirsutum
  misc_feature (544)..(544): n is a, c, g, or t
gattagtgttagtgaggtgacttggattttgtcatttctacttataactagcccccaaaatcatgtatctagatcaaaacgttgctaatatatagatttacatattaataaaagtatgaaatataaattaattttttttataaattgtaacaacttaataatctaggttatatgaactttgatacatatacatacatatataattttttatattatattttaagtataatgataaatttaattcttaatatttatatttttttattgatgtagctcttatatttgattaagctaaatttgaccatcaacttttcataaatattaaaatttaagcataaatattaactaaaacatcaaatttttaaacatgacaactcgtataataatccacgtgtttttattttttatttttttataattttgaattttttattctttaaatattttataatttttaaattatttgttgatgtgacatataagacaaatagtgttatgtagcatgaaagtatacgtagattgtcacgaaggttgtcacaattanaaaaaa

SEQ ID NO: 10576 - DNA, 667 bp, Gossypium hirsutum
ttctacatggtttaaccatcaacaataaccccatttgattaacccattatcaattactaaaatccaacttaagtcataaattatgaaaaaaggaaaagaaaattgattttgttgatcatcatatcggattgaaaagaaagtgaatttttttagaaataattgagccaaaaaaaacttgaagcatatggcatcgtaaataaaaaaattatgtttaatgggtgactcgccaaaactgagagttaaaaagcgatctatggagcagaaagatgaagaaggaagacgaagctgagagacaaagatgacaaggcagagatgaggcagaggctgatggacagagaggaatggagaaccactgcttagaagagaaaggaaaatgtcttacggcttagaaatcggtaagacattttctaaaaattggttctgattttacccgtgtttggtcaatccacacacactttcatgatttttgttctgtctactttgttttatctaaaagcaacggtggttttagtttttagtcatgttttggtgtatatgagatttatcatgataagagtgccaccaaatttattggaaactattctcaaagggttttatcatgataaagcacaatgatgatgttcgtaaatttggaattcgagatggtgacgaggaggaggataagccc

SEQ ID NO: 10577 - DNA, 601 bp, Gossypium hirsutum
gtttcacaagcctcggtattgccttgcaaccaacagcttcttcattttcatgaagagtttcaaatgttcagtcatgtccagcacttctccatccttacaaggaacccatttgaatcctttaagcaattgagccaaccatagatgaaccgttgccagacccatagctttccccaagcacaccttcctttttgacccaaaggggacaacctcaaatcaaatcctaaacactcacgtcttcttccatgaaccactccagtctgaacttttcagcatctgccctgttaaggatcatgtgtattaattcaataggttgaagtagttagtttattagtaacagaagcagtttataatagctatataggtctatatatacattgctactaatgtacaaagatggttaagcattcaagatacaaatcatttaattcagtttacatattttctagtttttatctttgttacctgattcctttcatggtatcagtcgctttgtgatcctcggagctatggctaccgcgcattctgctgattctaccttcgttgaaagtggttgtgttgttttcattagtgatagagttgtaaactcgtttcctcggtataa

SEQ ID NO: 10578 - DNA, 598 bp, Gossypium hirsutum
  misc_feature (575)..(579): n is a, c, g, or t
aatctttaatcgacctatgctactattttgtcaatatgtcatacttaaataggccaaatttgttataaaggtacatggaatgagtagcaacaacttccctaaaaatctccccattggcactttgacaaaacaaaatgactaaagctccccctgcacatatggcgaaaaacaaaaatgaacacaaagatatatttacacagttcagtttctctacatttgcagggctttgttcatagtgataattcattatctttacaccttgtacaataggtgattacaagaactaacacttaccagattagcaatctcaattttgcacctaagatttagattattctcctcgaagttttcccctaaaactaagtgactcacttgattacttacaaaatctactaaataataggataagtgctaaaattctcctcacccttttacttacacaaacttttgaatatataagagcttaagacttgttaagataaagatcaattgcaatcaatttttccatcaacatagcaagataattagcatggataatatcttcaatatgaccagcataagccttcaaatatttnnnnnatgttaacaagttacctga

SEQ ID NO: 10579 - DNA, 648 bp, Gossypium hirsutum
attatgggtgaaagtttgaaaacaattacgcatatcggaaagtggtggttcatgtcaatagcgccaaagatgatgggatttttgagagaagaagaagaatgaacaaatgaaataaaagagataagaaaaagagagagaaataaatggggaaaaaggaacgtgaaaaaaatgaaaggataaataaatgaaaaataaaaaaaagctacaagtaacgatgttaggctcgggtttcaatatagtggacactaaactaggaccaaaaagaaaatcataaatatcaattttagaaaaataaataaattaaagtaccaattttatatttaacccttttaataatatccaatcgttttcattttgagtcatcatcgagcaacaccagcaacattgataaaaatcttttaagtctttccctaataatttccactttgctttttactaaaaatctatttttccaatttttcttttcaggattgaaaataccgattttctcgcatgacaaataaaataaatgcaaaatgcacacttcaatatttgaagtatacccctttttacattttaatctttgaagtattttttagctcatttcagttttaatattattaagcatttccagtttaatcataacgttatcgtatgttcatgttcagt

SEQ ID NO: 10580 - DNA, 616 bp, Gossypium hirsutum
  misc_feature (61)..(63): n is a, c, g, or t
  misc_feature (576)..(576): n is a, c, g, or t
  misc_feature (581)..(582): n is a, c, g, or t
tctacgtcttctgactactgtaagctgaatttctttcagcaaaggaatatcacacaaatannnccatcagcacatatgtgttatatcaacttgatatatcttcatggattaaacatgccattaccagatcagtaaggaaacatgctctaaaaagataagaataaagatggagcacaaggtaccccgtgtgttggtctgatggccagggtgttcaccgccccaggtgtggcctgggtttgagtcacgctagtcgcgttgttgttagggctttaccttcttcttgtaattcacccaaaaaaaaaaaaatggaacaaaaaaaattcaaagtaagggcaacaaaaaaaaaaaaaatcaatttttgactgttaaaatttttttaacccccaaaaaccattttttttgctttcccaaatttttttttttaaaaaaatcccaacctaaaaaattggaaaactccaaaaaaaaaaggccaacccccgttcaaaaccaatcctttttaaaaaaaaaaaagggcaaaagggttgaaattttgataaaataaaaattaattgaacttttgaaaaattcccttaattncttanngttaaacaatttcaagtaaaaaattttaggccct

SEQ ID NO: 10581 - DNA, 711 bp, Gossypium hirsutum
  misc_feature (596)..(597): n is a, c, g, or t
  misc_feature (622)..(622): n is a, c, g, or t
  misc_feature (625)..(625): n is a, c, g, or t
  misc_feature (627)..(684): n is a, c, g, or t
  misc_feature (688)..(696): n is a, c, g, or t
  misc_feature (699)..(699): n is a, c, g, or t
  misc_feature (707)..(708): n is a, c, g, or t
atttgcatttaaatattaggtaaattcaacatgattgtttctgtagttgattaaatctataccgttttccaagtaaaagaaaaaaaaaagtgattagaacagagcttaatatgttaacaaattttaggaaaaaaatatataccgttggaggccttgatgataggaaggcatccaagtcttcctcaaggaccgtcttcgaccgactgaacggaacccggtttggatcccaacgaagcccataactttatgcctcttggtcccattaacatcaacatctccatcggaagtagcagttatattgacattcccgggtttgtccaaaagaacccgaacggatctcaggtcggagagacattggtgaccgcagtcagtggaggaaaggaaaacgtagagggagaagaggaaagagagggtggagaagacgatgagggctgttgatctggtgaggcgcgtggccggcggtggatggcgggagtggaagaatttgggagatgatggcataactgtaaattagatttgatctgccgttattggtcgttatattggatctctttgtttatgggcttttcgggtttcaagacaaaaacctcttttanntgcaagggaattatgccaaattccnaangnnnnnnnnnnnnnnnnnnnnnnnnnnnnnnnnnnnnnnnnnnnnnnnnnnnnnnnnnncccnnnnnnnnnccnttttttcnnccc

SEQ ID NO: 10582 - DNA, 466 bp, Gossypium hirsutum
gaactcttcgtcctgacgatgtggccatacttcgtcacgacgaggagaaagccacgttgcaacatggcaatgtgttcctcaattttctcgtctttacttctttcagttaaacattattttcgtttcccacttaaacattgattactgtaaattattttaatatattttacctgtaaatttaaactataaataggccttctacaactctagaaataataacccataacacgtttaaatattagcttttataagctttcaggaaattttgtgtttacattttgagtattcttatttatggattcagaggtttagttttttttatctccatctttgtattcttcgtttttgctgatttagtgaagttatctttacccgtatttttatcctcttcagaggagtttttccacgtaaaaatttgtgtattcaatttttttaattttccgttatttttcttgtccgttgcaag

SEQ ID NO: 10583 - DNA, 606 bp, Gossypium hirsutum
  misc_feature (342)..(342): n is a, c, g, or t
gttgacatactgatctttggcacaagaggtttggccatgttagcctcaaatcacttgatttgctgcacaaaatgaacatgacagaagacatggtgaaggttagtgcaagtgaaggcgtttgtgaagtgtgtcagcttggcaaacaagccaggttgcccttttcagctaaccaagcatggagggctcgagaaagacttgagttggtgcactcagatgtctgtggaccaatgaagaccccttcactgaatggcagtaagtattttatactgtttattgatgatctgaccagattttgctgggtttatttcatgaaacagaagtcagaagtgtttgaagtttttngaaagttcaaggcattggcagaaaatcaaacaggctgcaggattaaggccttgaggacagacaatggttctgaatacttgtctgaaagatttcagaagctatgtgagcaggctgggattcatcatcagctaaccacagtgtacactcctcagcaaaatggagtgtgtgagaggaagaacagaacagtgatgaacatgaccaggtgcatgttgtttcaaagcaagcttccaagcattttttgggctgaaggtgtcaacacctcag

SEQ ID NO: 10584 - DNA, 623 bp, Gossypium hirsutum
tgcacatggattaaaaaatcttataagaattggaaaaggtgagttggtagtgttcatcattatggttttgggccattgcatcttttgcattaaaaaaggattctgctatgtccactttgttgtataaaatgacctcttagtgtatcatagtcagtatgcttcctcatgtaaattattatggaaaactatttcaagtgcagttttatgtgcagcttttagatattaccaataaaattacagtcagatcatggtaaactaatgctttatgcttcaaacttcagttaaagaaaatgctgcatctcatattctccattctacaaagcattatttggttactttcttgctggatttttccaatcttaaattaaggtgataaaagttaagtatgcatgttagttcagtcagacagttccaaaatagttgactttgggatattgacaatcaagataatggattcttaaaattgaaaacatgttggtgttagaaatttcagccttttaggtgtgcatttttgtcatgtgaagcacagaaatccttgaataaatgttctgtagaatatttgtgatttggagagattgaaaaagaattactgcgtcatatccatgcaaaaacctgtgtgagga

SEQ ID NO: 10585 - DNA, 642 bp, Gossypium hirsutum
tgctgtatgttccccgttgcatataacctgtttcatgcagtaaatatcagtatatcttgctggtctgccagtagatcatagtggttttatctcaccggcttggaccaaacaagaagtatggtttctcgcttctgactatagagtaattgtttatatgtctaaacctatgagtgatagatggaacatctgggagtgccatgagttatcatgcagcacattattaggttccataggttattcgaataatgaattgtttgttaaatcccaacagattttttctctgacctagcagtttattgcctcccattaccaacctatgcaacattaacttggctagtgatatcttattcttgaattgagaagaaagggtgcaggggggatcatgcatttccttgagctatatcaatatacctctatggggaaacataatttctggacttgctaaattctttcaaccagtgtaagatgattatcttgctagggattagttgcagtctgaaaatcatttcaattctatgttcacctaagatgatgttacttgacaatgcttgtgaagcactaaacccctagtatcattttcttttttctagttaggactagaaacttgaaaatctgcattttgtctgatttcttcatgccgag

SEQ ID NO: 10586 - DNA, 468 bp, Gossypium hirsutum
aaacccttcaagaccataaccctcaagaatcaacaaaagttgatgcttccataaaagatagttgtgctcagcaagtttgatagtgtcgtgtttggagaagtaatgaactgtaggtgcgcagggactgccaggtccttgcgaatgaacagcctccccagtgttaaaggagtgacgaggcgtgtcaaccattggtacagcgtttggaacggtttcagaggccatggaaagaaaatagaaagaaaaaaaaatctacaccaagaagaccttggctcttgataccatgttaacaacagcaaaaataagaaaagaagaattctatcatatcattaactgagtttaggtgggtgtatttaatacaaacgctgctattaactaactaacagtattaaccgtttaactaatcttgtttgacaacataactactgtctactagtacaaaagctattcataacacttccattcactcca

SEQ ID NO: 10587 - DNA, 449 bp, Gossypium hirsutum
ccatacctcttcaggcagcttttcataaaactggggctctcaacaaatggaaagacaaaatcctaactccatctagaaacaatactatctattgaagtatctatcaactttatataaacgacaattggaaaacttttttgaaaccctactctcaatcaaaaccctcaccaccataattgagtaaaccattcttcacaaaaagaaactcaagcaaatatatatatatacatatatatataaaatgaagaagaagctatattaccttgcaactcccaaggttccatcttgttcaagtccacttctctaatgacctccatatcaaacttttgaaacgacacctttttggtcaagtagtaatggagtagctcctcgtccgtcggatggaacctaaaccccggtgggactccgccgttcgttgaacccattcacctcccaatatctcaatgata

SEQ ID NO: 10588 - DNA, 660 bp, Gossypium hirsutum
acattgattggtgtccgttctaaaccatggactgaaccacgacaaagagggcaatgcctgtccttaaccagccattcatctatgcaatgttgatggtattgatgtttgcagttaggaagaaccctacaacaatctccgcctttaaactcttccaagcatataacacactcgctgtactgcaattcaattttttcctcctcgtaccgaacaatggtcccgaccgtgattggcctcaaagttttatcaagctccgtctgtgatggctgtctttgcatggcaggatgaactactggagagctaggtagcccgttttcgatatcttggtggatatcccggcgggaacgaccaagcactaaatctatgcaaaaacatgtaggcacttccacatcaaacgtcaagaaatcaaacgccatcttgattaagttgccaaaaagcacagcagcaatccatagaagtatgagctttgcgaataacgtgatcaattcttcgaacaccatgttgaaaggagagaaagatattcagagagatactcgtaatattaatcagcaacttcgattaactacgacttttataagcatccttgttacttgctagaaaagtaacgtatagtttgaaccctataaatctagtaatattaatagcaaacaaaatacctaaact

SEQ ID NO: 10589 - DNA, 582 bp, Gossypium hirsutum
  misc_feature (257)..(257): n is a, c, g, or t
cggtcttgttcttctttttgtttgtttatcgtatactatatgttgttctttatttttggattgtttgttcccctctgtttaatattatagcttttgtgttattttctatttcttttaaatcgttgcttagcagaatactaattgcctaaacaaaaagcatccgtatgtaaattgtttactgcatctgtgttggcttgattttggttctaggaacccggtgggagttgtgttggcttgattttggttctaggaacccngtgggagttgtgacgcacgtagagtttatttggtagtttttctatatggtaataaaatgtctttttaattcgttgtgagttgtgacattctgtttcttagttttctcaaaaagtctgtactttagttttaaaaaaataataataatctaattgggatgcttgttgatattgataggaattggagaatttcaaccgatttgctaattgcaaaggtttttgtcgatttgggtttcatgattatatacggtggagattgtcatgattcgtgtatgcatatatgttttcttttccatactgctgggtgtttgcattaatcagaaaatgt

SEQ ID NO: 10590 - DNA, 586 bp, Gossypium hirsutum
  misc_feature (527)..(527): n is a, c, g, or t
  misc_feature (529)..(530): n is a, c, g, or t
  misc_feature (571)..(572): n is a, c, g, or t
catgaagattccatttttatccaaaccggcttccttaatccggtaagttctctatacattgcattcccaagcttcaaccttctatcttcaatggcagaaacgaggtcctaatcaagcaaacagcaattagatacagagcttttcttcttcttcttcttttttttataattcaagaaaaagtattttgaaaagtccaaaagtagaaaccttagcctctacaagagccttagaaacttgggcttcacgtggttcctgttccaacttctttaaatcaatttgctttgccagtttctttaactcctcattagttgggtcttttccaactccactttcacaataagatttcgcctccgctagcagattcaatgatagacacgctttggcagctcgataatacgcctaaataaagacattccacggtgacccaactctcaaaaaagggttctttttttgaaacactaacctaaaaaaaaaggacaataactgaaaccagtaccttaacgttagcagggaagagcttaatggcntnntgagaatccgagagcgcacgtcgataattcccaaggagtanntcacatgagctctg

SEQ ID NO: 10591 - DNA, 786 bp, Gossypium hirsutum
  misc_feature (408)..(408): n is a, c, g, or t
  misc_feature (458)..(458): n is a, c, g, or t
  misc_feature (461)..(473): n is a, c, g, or t
  misc_feature (475)..(489): n is a, c, g, or t
  misc_feature (502)..(502): n is a, c, g, or t
  misc_feature (506)..(510): n is a, c, g, or t
  misc_feature (512)..(516): n is a, c, g, or t
  misc_feature (518)..(519): n is a, c, g, or t
  misc_feature (521)..(523): n is a, c, g, or t
  misc_feature (526)..(532): n is a, c, g, or t
  misc_feature (540)..(542): n is a, c, g, or t
  misc_feature (545)..(545): n is a, c, g, or t
  misc_feature (548)..(550): n is a, c, g, or t
  misc_feature (568)..(569): n is a, c, g, or t
  misc_feature (571)..(580): n is a, c, g, or t
  misc_feature (586)..(592): n is a, c, g, or t
  misc_feature (595)..(604): n is a, c, g, or t
  misc_feature (607)..(608): n is a, c, g, or t
  misc_feature (617)..(617): n is a, c, g, or t
  misc_feature (619)..(627): n is a, c, g, or t
  misc_feature (629)..(629): n is a, c, g, or t
  misc_feature (634)..(664): n is a, c, g, or t
  misc_feature (670)..(680): n is a, c, g, or t
  misc_feature (682)..(696): n is a, c, g, or t
  misc_feature (700)..(700): n is a, c, g, or t
  misc_feature (703)..(703): n is a, c, g, or t
  misc_feature (707)..(713): n is a, c, g, or t
  misc_feature (715)..(719): n is a, c, g, or t
  misc_feature (722)..(756): n is a, c, g, or t
  misc_feature (762)..(764): n is a, c, g, or t
  misc_feature (772)..(772): n is a, c, g, or t
  misc_feature (774)..(774): n is a, c, g, or t
  misc_feature (777)..(779): n is a, c, g, or t
cagcaccttaaatgtttgcttgggtaaacaattttccggtggggacttgttcttccgaggtgttcggtgtgataaacatgtcaatacagaaaccgagtcagatgtatgctaatccttctgattaatttttcctttttactgttcattttaagacacaagaattttaacttttctttggcttaattattcagctataatagctgcatgttttacaaagcattaggatcaagtttattttcagtttgataaaaaattatctgtagtagcaagtcaacaagaaccacaccatctcagacacgctgctaccactcccctccctttatttagttatttgtacaagtttctagcgagaaatcatgggaatatcaagatagcctattatgcttctttggaccttcctcgtataanaaaatcaccagtcttgaggttgccattataatctatcaagagatttgcgnacnnnnnnnnnnnnngnnnnnnnnnnnnnnntcttaaagcaaangaannnnnannnnnanntnnngannnnnnntaggttcnnnggnaannnttctgctgctgaatgganngnnnnnnnnnntattgnnnnnnncannnnnnnnnngcnnaagaaaaanannnnnnnnnanagccnnnnnnnnnnnnnnnnnnnnnnnnnnnnnnnttttcnnnnnnnnnnncnnnnnnnnnnnnnnntctnatncctnnnnnnncnnnnntannnnnnnnnnnnnnnnnnnnnnnnnnnnnnnnnnntaaaannnaattaatncnttnnnatataat

SEQ ID NO: 10592 - DNA, 573 bp, Gossypium hirsutum
tttatttgataattaagctgttaatttatcttgcttataaggctttattttggataattattgaagatattttgatagataaattcattttttattaagagttttatctcaatcaaaattttgctaaaggatgcttgtttgactataaatagactgctagtctacttcttcgttgagccatttgggggtgtgttagatgttttttgtttagagatttttatgagaagatattgtatgtaatgtaaggcatttgggaagagtgatgtgtaacaatttggactagctatcgggactataattatttctttgtgtaatgatagattaagctttagctaatagatagttggattaattgtggaatgaaattattctctcaatgaggctctagagaataggatcgtggaatctgaactacattaacaaatatcctgtgatgattctctctttacttatctctttgactcatgttttagatttttagttattcccctccatcttttatttgtttattggttgctttttgttaaaacacctgtttgaagagagagcaaacctagattcctacatgatgga

SEQ ID NO: 10593 - DNA, 1071 bp, Gossypium hirsutum
  misc_feature (436)..(436): n is a, c, g, or t
  misc_feature (772)..(772): n is a, c, g, or t
ttaaacaattgttaaacacccgttcagatagattttcaagacagctaagtctagtaacaagttgggattttttacatttatcttcatggagtattacactatcaacaaatgcattttaagccatgttttattatgtcttaaatggtgctaatcaatatttggaagagtagaaagaggagagatcgacagcctcatctcaagggttgtccttatgtttatccattaagatatttatttgataattaagctgttaatttatcttgcttataaggctttattttggataattattgaagatattttgatagataaattcattttttattaagagttttatctcaatcaaaattttgctaaaggatgcttgtttgactataaatagactgctagtctacttcttcgttgagccatttgggggtgtgttagatgttttttntttagagatttttatgagaagatattgtatgtaatgtaaggcatttgggaagagtgatgtgtaacaatttggactagctatcgggactataattatttctttgtgtaatgatagattaagctttagctaatagatagttggattaattgtggaatgaaattattctctcaatgaggctctagagaataggatcgtggaatctgaactacattaacaaatatcctgtgatgattctctctttacttatctctttgactcatgttttagatttttagttattcccctccatcttttatttgtttattggttgctttttgttaaaacacctgtttgaanagagagcaaacctagattcctacatgatggttaggaaatctgtaatcaaaaaagaaagaagaaaacaaaggcgaatttaggaaaactaacagggggctccatccccttaaaaaaaaaaattactagttaaaacctttaatttttttttaatttttaaaatttgaaagaaaaaataacatttttacttctccaaattataaaatttaattttattttttaaaaatttaaaaaataaaaaaaggaaaaaaattaaaattttctttccattttaaaaaaattttttgaatccccggggaaaa

SEQ ID NO: 10594 - DNA, 684 bp, Gossypium hirsutum
ttcgcattctgaagcagagtatgttatgagaaatatccacaaaggaatttttggtgatcacttaggtggtagattgctcgcacaaaaaatctttaggcaagggtactactggcctatagtcttggagggcaacaataagttagttcacatatgcgattattgccagagaaatgccaaattccaatgaaaaccagtagagcccctttaagtcatgtcaggtccatggtcattttgaaacttgaggggttggtatccttggtccattccttataaccatgaaacaaaagaaatttataataatggttgtaggctacttcaccaaatggattgaagcaaaagctttggcaaccatcatagaaaaacagatggagtctttcatttagatatagattgtctgcaggttcgagataccttacatgattatcacatacgacgtacaattttagggaaaattcaaaaacttttgtactgacctccaaataattctagctaaaagcttagtaaaaatgacacaaataaatgggcaagtaaaagcgatgaacaagaaaattctaacggctctcaagaagaaagttggcaaagctaagggtgcttggttagaagaactgcctgaaattttgtgagccctacgaactacacctgacactatgataggagaaacaactttctctcttgtcctacggg

SEQ ID NO: 10595 - DNA, 808 bp, Gossypium hirsutum
  misc_feature (801)..(801): n is a, c, g, or t
caaagagggatcattagaaagccaaaaagaaaaattttaaggactgtaatggtgatttattggctgtaaaaacatcacccaaaaattggcacacaaagcacaacaacaaagaaagaaaaatatgacttactgacattgatacaaataatggagagaggcagcaatggacagtaaagaaggctgttaggagtggaaaaaaagggaattttagggtaaaaaatagggctggttaaggaggtcaatagggtggctaggaaaacaaaaacaaaaactctaacaatggtggtagcacaattgtgatgaaatcccatagaaaggaagaaacttggagagaaaaaataagagaggagaggagaacagctagggtaggagaaaatttgacttaagtctgaaaaataagttaaaaaatgatatttatacctaggttaaaaggcatgggtgacacaaaaatagggggaaggagaaaaattagcaaaattaagctacttgcaagggaaaggaatcaaactcgtgtttctaagaaaattgcactatctccttgttttctcttagccactaggttaattactcattattgaaataaatttataaactttaaaccaaaaaattaagaatttacaggtttgaagcaaaatttccaaaataacaaaaatggtgcgagggaaggaaatttatttcaataatgagtaattaacctagtggctaagagaaaacaaggagatagtgcaattttcttagaaacacgagtttgattcctttcccttgcaagtagcttaattttgctaatttttctccttcccnctatttt

SEQ ID NO: 10596 - DNA, 405 bp, Gossypium hirsutum
  misc_feature (378)..(378): n is a, c, g, or t
  misc_feature (389)..(392): n is a, c, g, or t
  misc_feature (394)..(396): n is a, c, g, or t
ccctttgaaaattccttcagaacaacatttttcccaaaattatgaacttaaaatacttatgctcaaagacaagaaatctgatagttatgctacttaagtatgcatattgttcaaattaaattcaaccacttattattatagaaaaatttaaactaaatgcttttgtaaaaaagacatgttaacccttaccaatttgatttttattcctttattaaaaactaagctgcaatcattaagcttaacttatgtcttcatatgttgatcgaagcaatttctctccactaatgtaggtagcatgaggactttgaatcaataggtctttatcaaggttgtaacgtggctaggctaggggtaagtgaaagatggataaattttgtntaaaaaaaaannnncnnnctccatcca

SEQ ID NO: 10597 - DNA, 616 bp, Gossypium hirsutum
  misc_feature (539)..(541): n is a, c, g, or t
  misc_feature (543)..(543): n is a, c, g, or t
  misc_feature (563)..(566): n is a, c, g, or t
  misc_feature (575)..(576): n is a, c, g, or t
  misc_feature (579)..(579): n is a, c, g, or t
  misc_feature (581)..(589): n is a, c, g, or t
  misc_feature (591)..(591): n is a, c, g, or t
  misc_feature (594)..(594): n is a, c, g, or t
  misc_feature (603)..(609): n is a, c, g, or t
tgaaacaaataaaaataatgaacctagaagattaaaaacaggatgttcatcatcttcatcatcatgagtctctaaaatccccatccatattcaagggaacaacatccctttgcttatgaactgcagaaagtaaattaaataaataataaaaaaataagtataaatataaataatttatgaaaaaacacagtgaatgtgaacttacaaacatcaatttcatcgtccacgttctcaggattgaaggcgtcgttggaactatgtcttctcttagaatttctcttatctttcttcgagatgtttcctctctttcccattgctagaaaaagaaaagtggccaattttcggtaaccgagtttgatttgcttcagtatttttttttttcaaactgcaacatttctacaaatacaaaattccttctatctatctttctctctcacacaaataaaaaaaaaaaaaaaaaacccccccgggttttgggggggggccccaaaaaaatttaaatggaaaaaaagggggtttggaaagccttttcaaaagcnnntnttgggttttttttccaaatnnnnaaaaaaacnngcnannnnnnnnnangtncccaaaaannnnnnnaaggaaa

SEQ ID NO: 10598 - DNA, 541 bp, Gossypium hirsutum
gtctttccaaatttgagtattgtatttaataatagaattttcattgactcaatcaccaatatctgtggaggtcaactttcttcggcaagttacacacttctactatctcttcatctcttcatcatcctacttttgccatatactattatttatccttctcataaaattctttatacacctccaaagtctttcatatcttatctggctaaaattatatactttaaaacccaataatccaaacctaaaaaaagaaaaagaaaattatgtttaaatcattcaaatgcattcggcgtcaaataaaaacattagctattattccaaaaccgattttattaatatctccatatttaatttgagttagcaatatacctaggagttggtgtgtggttaccctatttttaatctccacataaaccctgcttcagatacggaaacagaaaagcaatgccaaaagttttgaatgctagggatcaaaattcaactcattttgaaggtagaattactccatttagggtagacttaaattgctatcgcaaatgac

SEQ ID NO: 10599 - DNA, 525 bp, Gossypium hirsutum
taagaacttccaactctttcaagagttttttgaagtgtcatatgtcatgtaatcaattaaatcttcaataatgattaatattatctttaggtcatattggaattttgtctttaggctttaatgaaaacccaagcctagtttttagagcggaaaaccttgttagatcaagttatgtgtgatgtacgtactacttatcgaaataacgtgtgcgtcttgcacttcataagattcaaacccccagcttaaggaatataggtcattatgggccaagtggcatcatacctcccccataatgatctatatgctctcagtcgggagtttgaactctatcgaatgcgagatgtgcacgtcccctcaataggtgttccatatatcacgtatgattcgatttaacgaggtggttccactttgtaaaccctgtctcaggcttaagctttcattagtgtctggcgaaaaaatcctagcataactcaaagacaatatcaatcattatcaaggattcaatcaattactcagtaaaacaca

SEQ ID NO: 10600 - DNA, 651 bp, Gossypium hirsutum
aagtaggtggcacaagaaagaaacttgtgatgcaagaaagaaaatttagagaagaaagaaatagacttgaagcattatatataggcacattgtgttttttttatcaaagaatatgtcacttggtacgtaacttgtgtcacaagttacatttttccacaacattataactttccaaaaaaaactgtgtttattcattacgagtcttttctgaaagttatatttattcaaataagtctatttagattcaaataaaaaattattagtatttttgaaaataaaaataaaaattattatatataaaattatttacaccagcaaatttaagcccaagtgtctcatacccattttttgacgttacacgcgtaggtatagccaatggctaaacccacttatccaatcgactaggcacccaactcaattacccaagttataaagaattctctatttatattatttaaattttatatatgttagcagtgtaaaattactaatattgcaaactactaacattccagagttccttccaaaagaccctatgaggacttatacccaaagcctaaagaagtaactaattataccccgatatctcgtggtatatatagatattgttgtgtgcatgtccccacaccaacttatcatcttcatgtacct

SEQ ID NO: 10601 - DNA, 675 bp, Gossypium hirsutum
actggtataggataggactgaattttatttttaatctagttaaatttgaatgagatgggctagtttgacttaggcccgattagtttctgttttctagtctttctctttgtggctctaagcccaaatttcttatgtatttcctttatttatttatatgaataaatccagtcaaattattcaaaaatcatattatagatatatatagatatagattattaaaaagaaaaaataattaattagaaaaatgaattttttgaacattaaatattaattaaaccataaataattaaaatgaaataataaaatttaaaatcataaatagttatacatgtttagaaaatgtattaaattagtaataatcttttgtcaacaaatatttcttttgttttcccggtaaggatcaaatatctcatatcaatctataagaaaatccatcatgaggttaaatgaacaatatttaataatttttttctctgtaaacacttaacaacttgttgggcaaatactaattatcagcacatgttaaccaattataaaattgcacctaaaattgcatatatagttggaaactagaactcaggtttaaaggtcgaaatttgtaaaaatttgagtaaaaatattagggttgaaaaatgaatttgaacaaaaaaattagacccgtttaaaacaactcga

SEQ ID NO: 10602 - DNA, 521 bp, Gossypium hirsutum
taagaagtgccttttataaccaatgtaactatatgtttaagaaaaactcttgtataatagtatataattcataaaaatgatttatagataatttcatattactagtttttaaaattataattaaatattttatttatttagataaataaataaaaatagccaaataaataaataaaaacatatggtaaatagtaattattttttaaaaaaaattaagagtgaataatataaagttttattcccattaaaaattgactatctatttaatagtgaagtttggacctaaaagggcggtaactcaaaataaaacaaaagttgacataatttaaaacattacaatgacttaaaagaacctcttacatgtggcacacaaaacacttcctataacaaaaacagattctacacaattcaacaaactcaccaaacaaagagatactaatagctcttaacaaccaaaatccctcaatgtattaaaaaaaaaatccttcaaatgatactattacgccacataaattggcttc

SEQ ID NO: 10603 - DNA, 549 bp, Gossypium hirsutum
cctgaacacttcatggtttagggttcgaggttcaatgtttagaaaaaaataacaaccaaaattatgtatcaatgacatggaaaaaatttctaaattatcattaaataattggaaagggaccatgaatgatgcggtgagaatggtccataaaatgatttctcgttgtaatgtgatattttgagattgtgtcattatctaaaaatttaaaaatatatattttaaatttcacgtaatgatatagcgaaatttcaaagtgatacattatcacacttatatagaatttaaattcaaagactaaaatgagaaagcgaatgaaaaatatatatagatacttaaagtagacacaattgacaagctttgaagctaagatttatattaatttgttttaaaagacattaatagaacaaaatattttgcaaaaacttcttcatatcacttcgattgcttttttttatatacgaatctctctttttagagtagattgaaggtcttgccatattcagtgtgaagtcaaatcaaatttcataacgagagatctaatggaatggg

SEQ ID NO: 10604 - DNA, 639 bp, Gossypium hirsutum
  misc_feature (630)..(632): n is a, c, g, or t
atggttcagtggcaaatggagatgtgcattcacaggctcatggggacttgggcaatgaaggtaatttcaagaaagagaatctgatcaatgtaggatcacaatctctgatttctcatattagttaaagatggaatgcttctttttatgctaaaagaccgcaaggtatcagtttttggatcaaacaaactctgtaatttggtattggacttatgtttttttttatattattactttataggatcggtgaagctgttttagttcctcatgcgctgataatatattatgattctaaaaatggaagaaaatatattgttttcttttagctaatgtctcctttccttttggttctgtcattcatttacctactatttagtgcaagagctgggaatttgttttagaaatcaattaagaggatgtgatcatgtctcacaaaatgaaaaagggagaaaaagaagaaacatgtcatatgacagaaaactaaggggcagaatgtaacttttctaaatgggttcttgatataactaggagtaaaaataggattgtgtcatcgggtgattgaaggggaagttgaaacgaattgtcttccctttattttggttcatggaacaacttattgtgattgatagctcnnnctcgtca

SEQ ID NO: 10605 - DNA, 573 bp, Gossypium hirsutum
cttaatcgactctccaagagaataaaaatagaacaatgacaaaccaaacacccataaggaaaaaagaaaaaaaagacagacagagagaagcgtgtcagagagacaaacagagagaaacgtgtcacagagacaaacaaaatcaattcaatatctattattttaaatccattttatttttaccaataataaatttaaagttgtatatctattaggagaatttgatttatttttagaaatagatttaaaaatctaaatttatcatctgctatttagaatgggtttagatgggcaatgtgtctacttgcgattagtataaaaataacaatgacgatgagattaaatacagtaacgatactacaatgtgagaaaaaatataaattaaatgcaccacacctaaatcactcatccaaacccacccttaaacttgtatgcctaattgaaaacaatagttgccccaagaagcatggatatctaatagagatcttcaaagataaaaggcctatggagagagatgctcaccaaaagcccattgagcaaatcacgcccaagcccacaacaccaatatccctaatg

SEQ ID NO: 10606 - DNA, 562 bp, Gossypium hirsutum
cattttacgttctttgcttcaacatctttttcataccttatttggatttctacctgcggataacaaaatctattatctatatcttttttttccttttctctttcctaacctaaataataacatttcaatcttttgctattagtcctatgttcatcatttttagtttctacactttttctaaccgataaatttcaaaattttacatcaactttgatttaatctgcaattatacacgtgaaactctaattgtggttcaaatgtatatttaaaactttaattttaatttaatcatacacaattaaatagataaatacattattttatttttatattggataaatataattatttatgtatgcattatataaacataaaatgatattatattaataattgtgttaacaatatataagaattagatcaaatcataatttatgtataaaatcgcacaaaattaaaattcatatatataattacatattaaatcatagtttatgaataattttaagattttttttaattttaaacttttagtcttaaaatccttaaaatctaaaaaaaa

SEQ ID NO: 10607 - DNA, 445 bp, Gossypium hirsutum
atttttccttgatcacagtgccatttgatgtgattttgcttgctgctacttcaatttcttccttgataaatttgccttggcatgatttcctgataagcttgtttaggtttaatttatattaatttgaaaaatttctccctaagatatgatggttttacatcaacaaataatgaagttttcattaaaactgagtctcatgtgaataactgaattcggtgtatcaattactttccattatataagtagtatcactaaattcttgtaaatcaattacaatcgcaggaaatttttaggaatatttcgttttccttttttttatcacaatatcagtatcacttgctatttttgttttgattttttttcctctgtaaattttaacttagttactaaattaaaagtgtaagtatgtttttaatattcatgaaagttgtttgaattggattta

SEQ ID NO: 10608 - DNA, 455 bp, Gossypium hirsutum
ccatgcccgagtcactacccttgtagacaagctaggcaatttagttgacacacacactcgcgtctctgcccgtgtacacaaactaggcaatttaccgtgtaactcactgactttggtcacatggccaagcctcatgcccatgtgccaggccgtgtaccctgtgaaaaaaacctcacacgcccgtgtgcctggccgtgtcctaggccatgtagcaacctaacctgcaaccatttgaatgctacacgagacacacggctgtgtcacctgacacacgactgagacacacgcccgtttctatacccgtgtagacaaactaggctatttacaccaggggacacacggccatgcaacaaaaccgtatgtcacacatggatgagacacatgcccgtgtctctacccgtgtagacaaactaggctatttaagtgtctacccgcgaagacaaactaggctattt

SEQ ID NO: 10609 - DNA, 619 bp, Gossypium hirsutum
  misc_feature (591)..(592): n is a, c, g, or t
cgaattgtttcgtcttcatttttcttcagctcatgtggaaacgtttcgtccactccattgtgttcctaactgcaatggtccctttggttgatagttagaacttggaacaactttggggacaaattgccattttgaaccaaagctagacgcctgctccattactggcagaaatctagcaacatttgtgaaaatttccctatctgtttaaaattcaacaattattcgtataaaataagtattcttgttactaaattaatgaaagaaatataaaaaaaaaattcctcacttgaaaaagggttttgatcctattggcacttgtaaggttaaaatatacaaatacttgtttttgcattaaaaacgtgctcttgtcttaggtccaatctaaaatgaatggcacatcgtaacaatattgttctgttttggaatagaatacaagaagaagaaaccaatcaacttttttaaagccaaaacgatagccccaacacacacatatgggcaatggcggaggaaaccttagcttagcttttactttacttactgtccctttctatacaaaaaaaaaaaaaaaaagggggtttttttttttttttnnttttttgggaaaaccccggtttccccc

SEQ ID NO: 10610 - DNA, 629 bp, Gossypium hirsutum
ttaaaaactcattttacgcatcagtttctccaaaaaacaccactcgaccttgctgcacgccttgctcatatcgagttttaaggcaaaacctctatttgaattccctcttcttctcttgaacgagtgcaagatttcatatgccataaaaatgttatttgtgatttgccttcctggtacgaatgccccttgggtatcatctatacaatagtgaagcacttgacgaaatctgttgactaacactttcaatataattttataaatcacattgcaaaggctaatgggtcgaaattgactcatagacttcggtgaattcaccttagggataagaataatacttgtatgattcacctcctctatgctccttcgaccatttagcacgtccaaacagtacctagtgacttcatcccctgttacataccaatacttttgaaaaaatattgcaggaaagtcatcttttccagtagctttaagaggggctatggtttttattgcttcaacaacctcttttgctttaaattccaccattaatctttcattaagctcttccataatacatggtgatattgccgagagtaatctatcataattgccaaccttttttgacgaaaacaattctttgaataccctgt

SEQ ID NO: 10611 - DNA, 460 bp, Gossypium hirsutum
  misc_feature (44)..(46): n is a, c, g, or t
  misc_feature (423)..(424): n is a, c, g, or t
  misc_feature (444)..(449): n is a, c, g, or t
  misc_feature (451)..(453): n is a, c, g, or t
tctttttataattcaaactttattataacaaaaaggaactctannncgtcaccattattaatttgaaataacaagtagaattataaaatatatgattcaaatgataatcaaaattaaaatttggaaaacttgagaggtaaataccatgtttgacagcccttgatgagattgtaaggaccacatgctacttcaactccaacaaatgaataaagaaaaagaagcaacccttcaaagcctcaaggttaaagcacctaactccatttttcaattctccaacccccatcttttggtgggtttttatcttacacgtgcttaatgtatcattcaagggcttttttttttggttttttgggccccccctcccaaaccctccctcaaaatctaaggtttttaaccattttaatttttgttttttttttttcnnagggaaaaaaggggaacctnnnnnntnnngggggcc

SEQ ID NO: 10612 - DNA, 578 bp, Gossypium hirsutum
  misc_feature (402)..(402): n is a, c, g, or t
  misc_feature (493)..(499): n is a, c, g, or t
  misc_feature (527)..(531): n is a, c, g, or t
  misc_feature (535)..(536): n is a, c, g, or t
  misc_feature (539)..(543): n is a, c, g, or t
  misc_feature (552)..(571): n is a, c, g, or t
  misc_feature (573)..(573): n is a, c, g, or t
tgtattttttaaaatttagatgatttaatttctatattttacaatttaaaaatttaatctttttatattttcaatttaaaaattttaatctaacaatttacatcaaaatatttattttctataaattatatacaatgtcatataaggacggtttaatcaacttgttaaattgataaaatttgtcgataacactaacgatgttgatgataggattgatatttttaaattaaaaaaataaaactttttttaagtatatagactaaagtatagagaaatttttatatttttatatttatttcaattttaaactagatgaaatgagcctgtaaacaattatggtgaagtttgaagaactgaatttattgagttaaatgcgaattgctatgcgcacctaaaatggangaaaaggaaatggggggtttaatttaaaataatggatgtttagtcagccatggtgattgcgacgagacaagcaccacgccccattttgacnnnnnnnattcatgtatattatataccccactttnnnnnccannccnnnnntttctctcnnnnnnnnnnnnnnnnnnnntnaattc

SEQ ID NO: 10613 - DNA, 651 bp, Gossypium hirsutum
atatcttaatgccagcttgggagtcttcaatcaatgacctgcaataaggcataaataacaatcaggacttcccttatctgttttaaggcagccaatacttggataaagggcccaaaatacttgaatagtaacttatcacaagccacacacatgtaaaatgagacagttttaaagaatcatttagtatatatattgtgtcttcttacaaggcaggaaagatgttaaggatatgcttgttttaaataacaaattatatattcttgcagagctcaagccacaagtagagctataagtctataacccactaaggaaagcaatcatatattcttcctgaataagcatgtgttcacagtcaaatcgtgctactctagaaatgaacaagctagttaacactagtgttttcttgcatggaagttattctcagggaacatgtcttcaatcattcaacaccagtgcagcaaataaatttttaagggacaataacaattctatgttgatatccaagtttctctaaagcctaaggtacttcaatgacaaggaagccaaatatagcattattctcaaaacccatatgcccaatctttagatgttgtaattaattatgaaacaaaaggcaatgataaaagaagcttctcccaacaaatttctgtt

SEQ ID NO: 10614 - DNA, 649 bp, Gossypium hirsutum
  misc_feature (14)..(14): n is a, c, g, or t
catggtggaaaccnttgttgcatccgtatattatgttcgtctaacaccaacatgttgtcaaagtaatcgagaagctttttgtattttttatattccacatatattttagagcattcttctttaaagaatttacttaagtgaggtgaatgcaccaatgtttccatcttttctttatatgcttatcatccggttcatgaatccttttggtggaccgacactttcatggtgtactagcgcataattcctctatcagtagcagtcaaaatattgatcaatcgatctataatccacaatgcacacaaatgtatttcctaagccatccatgagagcactcaactcacaatgatatcatttcaataattcttatgtaccctacataaatatatttttatgtcagggaacttttcagcagcacttcccgtgagaattcatagtcacaattggattcattctactttgacttcaactcaactttcagcttagactcatgctcttctcttagatccaattcgtattggtgcacaaagttcttgagtgtgcttccattgttcacaaacccatcaaaataagcatgcatactctcgtctgtttgagttgatttcatttcagcttagaaaagatttctaagataaagaggaacccgaatttc

SEQ ID NO: 10615 - DNA, 559 bp, Gossypium hirsutum
aggaaagtgagacccttttccgtgtttagataagtattttatttaagcaagagaaagcaaaggtgctttcccttgaaacactttacctcaattttggaaaataaaaatttgaaataccatttttatcttgtctattttttacataattagaaaataaaaaatatgaaatcccatttttatcttgtctattttttacataattagaaaatatcattgtaatcaatcatttccttttctttcccctttttaaccaaagtttgtgagagttcatttactttcctttcccttactcagtttatccatcctaacaaaataaatatatatatcattttttttcctttataatcgatcaaacttcattcaagcacagattgatgacatattttgacctttcttatatacatttttgtagtttaaagtgtcatgaacttatgatgatgaacattgtgttgtgcttactttgtgttacatgttactagaaaatggtgtcaaggcccctaatttgattgaaagagctaaggaagagataggggccatcttgcaccatgacatatcatca

SEQ ID NO: 10616 - DNA, 635 bp, Gossypium hirsutum
ctgggttggagaatttgatggaggaggagtcacaatctactgcttccgccgccgctgccgccgctgctgccgctgctgccgctgattcttgtttacctccggattcggaatagagggtgagaatgatttttgaagtaaaaagggtaagctttttctctattttttgtatcataaaaaacaaaacaagctaatattcttttttctcccctttagatgacttaatgttatgtgtatagattatgcgtatgatctattcttgcatccaagaaggatagatttgatttggttgcacagaattgaatacaaatttctactaatgttggcaatttgatttgtgaggtgccttgtatattcccatcaattccatccagaaatgaattaatttatatataaataatttgattgtttagtgttacattagttcaatactttgcattagcatctatattaatttctttcactttttttccttcatctttactgattttgcaactttggcatattggcttttaaggttaaaagtctatcttttatttaaaaataagtaaatcaattcttgtacattagataaaaaaataaattaatttttttgttaaaaatttcatccatcctatagataaggtcaccgtacataa

SEQ ID NO: 10617 - DNA, 672 bp, Gossypium hirsutum
gaccagatagtttcttcccattgtaggttgtgcaaaagttgacatctttggtttatcttggtttgaatgggaacaaactatctggtaatgtacccttggaactaggacttatgtccaagctttcgtatctagacttgtatgcaaaccaattgagcaagtccatccctaaaactttcaggttaaaataatcagcaaaatatctctactagtacttgtattttatgaaagctgcggattcaggcccaatactgtaaattgggttgggtttataaattatactaaattaggtttattttgggtaggacttaggagtgttggggtgagccgttggttagggattaggtgggcagtacgctaagcctaatacatgtaatatatgatattagttattaagttcgattaatctgtttaattacttgctttcgagctaaattaaccaataattaaactttttaaaaattattaactaacttctaatcgaattaaattagtaaactgaccgattaattttaaccgaaatttaaacacccttaaatctgttactctaatatgatgatctttaaattattttttttataaatgtatttgttttaatagaatatatatttaaaatggtataaaaaagtatgaatttgtcaaattcatatatacctgatgaacccaaatcaactg

SEQ ID NO: 10618 - DNA, 531 bp, Gossypium hirsutum
tacatacatacatatattatgctacatcactacctaaaagcttcactaataacccttcatggcggattttcctaatatgtacatacatatataatgctacatcactacctaaaagcttctcttgataactcttcatggaggattttcctaaaatatacatatctatttggtcaatctaagagctacgctgccttcgtaacagtccaagacataatcaacaagctcgtcgagctctgcctcgctgatgaacccatcgccgtttttgtcagccaccttaaacgcacgttgagctctaaaacgaggaaaacgagactgaagccttcgaaaaccttctttcacttcgtctttgctaagctttccatctttgttgacgtcacaacccttgaataaactcaggatctgctcatgttcggctagcaaagatggtgatacacttttcttaaaaaaaaccattttctctttacccaaccaaatggaagaagaaaatgtatatgtaaagctgctattttagcttcggttgtatacgtctta

SEQ ID NO: 10619 - DNA, 686 bp, Gossypium hirsutum
tggattgcatgttcttgatttgttcacactttgcttgtccaccaaatgtgcgagctgttgcatgaatgggcatctcagaacacttccattttcactttctaattgtataaaaaagaaaagatagagaaaccagtctattttggtttgatgcagatgttgcagtccactaggttggagatgtatgcacggtagcatagtgttattatcaaacaaattaatgaactactaatcctctatcattgattgcacacaaattttatcataatgagctgtttggatgcaatgaaaatttaagtctctaatctctatacatcgcccttcactgcagcaagggaaaaaaatcaaccatatacttctatcgttggaaagatccaatggcctctcaaaagttctaaaaagatacgaaatatacgaaataggtatgtcggcagatattattactatgaggagcagcaagtgaactagagagcaaaagggtagtaaacagtcgatttataatctctattaagatatgttcttgaaattgttcaagaaaattttgtgtgctttctcgagaggcaatggctttatttgatgaaagatgcacggtcggaaatgattgagcaatatcttgctggaaagccacctcatcttccaacttcttttgtttctcttcatctaattaagcaatcttaggctattcggag

SEQ ID NO: 10620 - DNA, 660 bp, Gossypium hirsutum
tacgagtctgctattgcttagaaggtttttcatatatttgaaggattatactctcgtgttcaatacgtattcaatacatatgttgaacaaagtccataatctatttgtattgttaaaaactaacatggttgacaaaataaccgacagtgacatgtggcatgccatgtgtaactcatactgatgtataaggactagattatatcagtaaaaataaatggaatttttaataaaagcaccagtttactctttgatttaagatacaacgactaatttgtccatttttttagtaaaggggggtaaaatacaatccgactcctagttcgggccctccatgatacttttaccatcagagctgattataattgcattcaatacaagactataacataacatttgtaagtgaaaaaagaaaatacaaaccttttgattcccagtttgtgatggtattacgattggttgaggaaggacgccattatcgatgttctgaatgtacggtcgcaccttctcctccaacatctcatttaactaaacatcaaatattggttatgatagaaatacacacaaaaataagacatactgaatccattatagaaataaaggaagcagtccctaagagaaaataagtttaaacgtatgtgtgttatgatacttggacttggg

SEQ ID NO: 10621 - DNA, 582 bp, Gossypium hirsutum
aaattttaattatccttagttgtttacttttgaaattcacaatgattaaattgcttcaattttttttagagagaccaatttactcaatattgaaattgatgactggagcggtctttttaccttctttttttttcttaaaatttacttatgctaatacataaaggttcataaattcataaacgagcaaataagaaactcattaaaaagttataacctcgatggaaatatatgtatgtgtgtaatacttgttacaacaatcttattattttaaaattaaaccttaatgtcacaaaattacaaaaaattaataaaaaagagatcaaattacacaatgtgttgtttagggttaaatttttttaaaataaagactaaacggacataatttataaatgttgaggattaaagttgttatcatgtcaattttgtaacttttataattgaatgacaaaaaatttactattacttaagtgattactagtataatttagccttattactattaaaagaaataaattcattaatattggtaaaacgttacatcaaacaatgtgttgctattaccaaaagcaaaatggagctcac

SEQ ID NO: 10622 - DNA, 405 bp, Gossypium hirsutum
gtgattggtggtaaagtcttgtgatagttttccttaatctgtaacataccggtatgctacacattcaactacaaaaataaaaatggtaaattacataattagtcattaaattatagataagtttttttattttgattgtttaactaaaaaagttacaatttggtcattaaattattcattgggatgttaaaatctatgctatatggctctctctatttgcattacatataccaatcaaaagttctctttccacttctcttttacaataggctttttttttcataaaacaattttggatgtcatgaatttgtgaactaaaattgaaacaatttttctctgatcttcaatactgaccatcaaattgacttgaatctaagatatattttgctacttggcgatgggtgc

SEQ ID NO: 10623 - DNA, 754 bp, Gossypium hirsutum
tctcatgctgatgtttccatatggaccaaaattacacccaaattttatcacgaatgattcatttcttttcttttttctttatttgctttctgtttgatttgccctaaagcatcatatctatcatttgtggttaaaaaccgacattactgttttattttaagttgacaattatgcatgaaatgcaaatggtggagacgaaagtgagtactatttgatattttaccaatttcatctccatctccgaccaatttccaatgactttcatttgatgtgccatttttatctcttttactgctttcacccttttcacttcatttcaggtataaatagcttttgactaaattaaaaaatcatggtatatatgtatctaactatactatatattgactaagttagtgtcactctcaaccaaattccaactcagttatgaaatcatcacaagtctatttattttacaaaaaaataaatattattttaagggtatttatgtatttttaaatctatacttaccatatgtaaaacatttgattgagtttatgtcgcctttaaccgaatcccaacttagttatgaaattattaaaaactcgttcattttaatactcgaaaaagatttgaacccaaatcaatataatttttatcaatacaactttatcatttcaactaagataatatttaagttatatatattatatcatttttcatattattaaatatattataatccatgtactcaatggctttacctaatccaatg

SEQ ID NO: 10624 - DNA, 547 bp, Gossypium hirsutum
aaaacaacccggatagaaactattgaaacagacttcacttttatggatggaaggggcatagtgatgaatatgattgatatagctgaccctacatagtgggaaagtacttggttcttattgtaatcttctttagcatgctaagacttcagagccaatctcaattacagggacatgttgtcgtaaagaatgacagtatttgcttaaatatcctcaagtagcccttggtcttgattgatagagtccccgtttttgtagattgcttacaaaagtcaggtcaaaaacatgtcactggcaacttcctgttcatctttccctccatttgggaaaataaaaagaattgttatcaattccaccaactcttaggaagaaaatataaagcgactgatattgtgatttaaacatactgtgtatagcttttgcttgcatatgtaagcacctcccgttacgaaggtcttgaagttgatagagagatggctatgaaggatgcaaaggccctctataaagcaggggagaagagattggaactgatgagaaaaccttatccgca

SEQ ID NO: 10625 - DNA, 621 bp, Gossypium hirsutum
ggggcaattacttaatcacttaatcatgacatctaatgaaacccatccctccctgcttattcttgtgtctgcctgaacttaacatgcacccccaccttttatataatttaccttctccttttgaaaatttagaattatcaatacaaatattttttttttctgaaaattttaagcaattatttcaaatattttaattaattaaattttataaaatatatacttttaaaatttacatcattgaaatcttttataattcatattttaaattttttatttatacaaaatttaaaaaataagagattaaaactaataaaaaattggttactaaaaatcaggatacaaaaaattaatgagacgatgatagagtataacatagatgttactgccatccctgctctaatattccatgtatcccctcaccttcctcaccataaatttacgctattatacttgctttttttattgttaaataaatgttagggtcccctgctccatcatatatttatttatatgagtaaaaatggatttttctctatacacagtcaactatatttaaagggagataaaaaaaaagggttgcatataaagataaatgacaaacataatttaatccacgcacac

SEQ ID NO: 10626 - DNA, 612 bp, Gossypium hirsutum
  misc_feature (46)..(48): n is a, c, g, or t
  misc_feature (50)..(51): n is a, c, g, or t
  misc_feature (90)..(92): n is a, c, g, or t
  misc_feature (575)..(577): n is a, c, g, or t
  misc_feature (580)..(580): n is a, c, g, or t
  misc_feature (597)..(599): n is a, c, g, or t
  misc_feature (606)..(606): n is a, c, g, or t
  misc_feature (608)..(609): n is a, c, g, or t
gagggctcgtgcgaatggctgcaagagtgataggcagtattctagnnntnntcaatattatccccgggatagggagagatgttctgctannnaaaagggttcgagattgggatgaaattgatcggagagatagagagcatgttaggagaagagaacattattatggtggcaataggagggatgggagagagagagaaccaaggggttattgggagagggatcggtcagggtccaatgagatggtttttaggttgggtacttgggaagcagatcggcaaagagaagggaaggtggcttatgacaaaactcccgagtgcaatggaaagatggagaagaaagttgagcagccgaaggaaaaactcttggaggagcaagctcgtcaatatcaattggatgttcttgagcaggcaaaaaggaaaaacacaattgcatttcttgaaaccggggcagggaagaccctcattgctgttctcctcatgaaaagtatttctgatgatttacaaaagcacaccagaaaaatgctctctgtctttttggttcctaaagttccactagtttatcaggtagtcaatttnnnganttgccgtggtcctttannnattgaangnntct

SEQ ID NO: 10627 - DNA, 637 bp, Gossypium hirsutum
tctgaagcataaaatatccattgatgaagtctgaggtgatagggcaagactttcctttaagaaaagcatgccgggtaactaagtgagatagattttgagcaaaaagaactaagtgagatacggtgccagttcaaggttttcgcatgctgccattcaaggttgtttcaaccagactggactggctgaggtacctgtctggagaagggcattggactggttgactcaggaaccggttggactgggcaaaaaccggttaaaccggatttttaatatatttttagtttaatgacttttttaatggtttatttaattgaattagatggaccagtcagaccatctaaccggtggcttgattgattcgaccaccgatctagttctgataaccttctgccattccaactaagaaaatgggttatgtctagaaaatgaaagagagcagtaactgttctaatctatgccaataagaggacggtagctgttctgatctatgccaatttcctccacacgctgatattcctttaacttagttcttgttgttggatggattgctttttatctggacattcttctagtaatcccacagtaatttattttggggtctggtttagtttgttgagcagatcattggtaatctatg

SEQ ID NO: 10628 - DNA, 650 bp, Gossypium hirsutum
tgcttggacttggtgctcttcttcttcagtagccctattccctcctactgcatcttcagaagcataggaattggtgcctcgatccactccaccgcaccgtcggagaaataggatttgtagctcgtaactttaatctgcttaactgtgatgttggggaagcaagattcactattgtagcttcaatctgtttgactgcaacgttgaggaagtaagatttgccgtcttcgatctgctccactactgcttagggagaaaggatctacaatcttcaacctattccactgttgttcagggagataggacttacaatcctccacctattccactgctggtcagggagataggacttacaatcttcaacctattccattgctggtcaaggagataggacttacaatcttcaacctattccactgctggtcagggagataggacttacaatcttcaacctattccactgctggtcagggagataggacttgcaatcttcaacctattccactgctggtcagggagataggacttacaatcttcaacctattccactgctggtcagggagataggacttacaatcttcaacctatttcactgctggtcagggagataggacttacaatcttcaacctattccactgctggtcagggagat

SEQ ID NO: 10629 - DNA, 463 bp, Gossypium hirsutum
atttgtcacaaccttagcagtgacaagtttggatttatggaagaatttgaagaaagaaggttgaagaagagaattctgaaattttcgttcacaaggaagaaaagacattacaatgaccaaatcatgcctatgaccattagcataaaactaagcccattaatcaactagcccatctttctcggtccctaacgtctgtgatcctcgtagcctattatctatcagcttacatatagatattagcccatatgtgagtttaactaaccatcggatacattatccataactaccctatttagggatttcattcccaatttccccctttgtagttgagatcatgacaatgagtttcctaatgtacccatcaccttagaatggatgggatactgaaggtacggtaaattctacctaagcaaaaaggcataaccatcatgcggcatgtatgaatgtgataatgcatgggtga

SEQ ID NO: 10630 - DNA, 571 bp, Gossypium hirsutum
ggcttggcatgaaatcaaatctccaccacttgtaaatgatatgatacactaatcaaaaggtctttgcatggttgtaacggggtttaggttacaggtatggatacaagctgaagagacaaaggttagaatcgagataatttcaatatattaccccactatcaaaaacttaattactgaaccacaaacaaatatctagaactattttacatgagctcttgacaactttagcttgctgagaattacaataataatactgagttttttttaaaaaaaaatcaaaaaaaaacaataaaaaaaacaaacttcaaaattcataaacaaaaaagggggaaaaaagggggggaaaaatattaaaaaaaatctcgataaaaaagggaaaattaaaaaaaaggatttcaaaaataaggggtaaaggggtaatggatgagggttaataaaaaaaaaggggggggggggcccaggggggttctcaaggggattaattttgggggagggttttttttgaaaaaaaggggaaaaaaccaacgggctttttaaaccccaaaaaaaaaaaaaaaagggggggacccca

SEQ ID NO: 10631 - DNA, 743 bp, Gossypium hirsutum
tacacctatttgttgtggacatggatttatttagttatattgttttctgaatgtggaagtaaatctagcttcctattatgagattacccatatttctattcaatcgatggggaaaattacacctatttgttgtagacatgcatttatttagttatattgttttctgaatgtggaagtaaatctagcttcccattatgagattacccatatttctatttgtcttctcttcaaacaacttcttgtaacatgaaatgagacaaggtagtctaaatttccaatcggtattgtagttggcactcattggcatatattaacttttagattattttaagattgcttttaactttgatttcaaaatgttttgcacatgattcattgatttttatttcttcatttcaagctcaacatgccattggggcaacaaaatttagctatcactttcaagccagaatgcagaaaatcgatcaaatcacaatggactaaaatcaatgtgggcaaaccgcatgacctacaattcctactagtatcttacaaacaaataacccttcaatcacacctactttaagcagtaacttgaacaaaaaaatatttaggtcttgatagtaattgatctattcaaaagtttttctttacgtcattggattgttagtgagttccaaacaacaattcaatgatcgatgtagtggattaatactcattgacgagtagaatatactttagatttaaatcgatcggatggctag

SEQ ID NO: 10632 - DNA, 622 bp, Gossypium hirsutum
ttttaacttctaggattcttcagattgtatatgtattcgtgtctgttagctatgtagttctctttttgattaatgtattcatgacattcattacaattaattatttgttcttaaaccttgataattccgactgaaaagaaaaaatcttgaaatgaaacttaacatccttatttgtttttaaaagtatgacatacgctgattacaaaaaatagggctgccatatggtgctaggcctatgaataaaaacatcagtgtaccatagcttgatatcatgcaagactgtttttctgcctttttttttcttttagtttttactaccgttattttgcataatatcttaaggttagcaagtacctctactattgaggaaaaaaattatcccctcttgttgtcactaataaagcttttacagagatcaattatagaaatggaagaactttcagctaattctaagcttcttggcttccatttccatttctctttatcttcctgttttcttcactctcatccttttccatttgtgtctagttgtttcttttctctttaactaaataacaacagaaaactcttgctcttggtggtcttacctaatctaagttgtacgtcaccatcatgttaggga

SEQ ID NO: 10633 - DNA, 658 bp, Gossypium hirsutum
  misc_feature (6)..(6): n is a, c, g, or t
acccanccagtaaatctctaacgtcagttaacttgtacatggcacatcatgttcacattttcattttggttacctaaaaaaaatcattttttaaatattgatcggggtaaaaaaaataaagattaaagtgaaaaaacgatagaaactaaaataatgctttaaaatttatcaaattgtacttgtttacctccttttaaatataaaaattttattttatgtttccaaattaaaatcaacttaaataaatcatctttaataattgtacataaaacctaaatttctttttattttatgatcttgaatctttcatactaagctaaaagcaaagaaaaattcttataattaattttatcttccatgtcaaacaaaatccaaaattttttcatcatttctttacccaatcgaagaataagcaattaatttaattaatcaaaagaaatttaagttttacagacaattattaaaaataatagggaaacataaaatagaattttaaaatttaggagattaatttaattaatttcaatattacagtaacaaatcggttaacattatcaagggataaaaaattttcaacaatttatttaattgatttttatgttttaaaatttaaaattttaatattgaaaaaagttagaattttcagcaatgtgataaa

SEQ ID NO: 10634 - DNA, 870 bp, Gossypium hirsutum
  misc_feature (288)..(288): n is a, c, g, or t
  misc_feature (535)..(535): n is a, c, g, or t
agtgctatactgaggaatcattttttgatttaaatttgagagttttacttgttaaaataaataaggcaaattatctagttggtccaatttttggggcatttttactttggttattcaaaatgaaatttttgcaatttcgtcattcaatttttagggtgctttcattttagccacccaaccagtaaatctctaacgtcagttaacttgtacatggcacatcatgttcacattttcattttggttacctaaaaaaaatcattttttaaatattgatcggggtaaaaaaantaaagattaaagtgaaaaaacgatagaaactaaaataatgctttaaaatttatcaaattgtacttgtttacctccttttaaatataaaaattttattttatgtttccaaattaaaatcaacttaaataaatcatctttaataattgtacataaaacctaaatttctttttattttatgatcttgaatctttcatactaagctaaaagcaaagaaaaattcttataattaattttatcttccatgtcnaacaaaatccaaaattttttcatcatttctttacccaatcgaagaataagcaattaatttaattaatcaaaagaaatttaagttttacagacaattattaaaaataatagggaaacataaaatagaattttaaaatttaggagattaatttaattaatttcaatattacagtaacaaatcggttaacattatcaagggataaaaaattttcaacaatttatttaattgatttttatgttttaaaatttaaaattttaatattgaaaaaagttagaattttcagcaatgtgataaacaagtgcaatttgacaatttttgatgcattattttaattt

SEQ ID NO: 10635 - DNA, 493 bp, Gossypium hirsutum
  misc_feature (454)..(454): n is a, c, g, or t
  misc_feature (456)..(457): n is a, c, g, or t
tttatgatacccgaattttttatcgaaaaatttcatccttcatgactcattatcaactttttttttctttttctttttagattcctctataaacaagtgttaagatctttaagtttcaattaccggtatatattttataatccacaattgatttagttgaaaactaaattaagtatttttcacatcaatgctatgtttttttttttaaatttccacgtataaaagtttcatagatgatggatctaactagacatgctcatgggccaggtcaccggtccgacccgaagacctgttcaaaaaatgggtttgagcagaaaaataagacttgtttaaaaaaggatcgagcctcaagtaaggtattttttgctcgggcccggcttggcccaaattcacaaaagggaaaaaaaactgctatatttagttgttttaatgttattttcttgttgtttttccncnnattttgctaccatttcactattatgttactattatt

SEQ ID NO: 10636 - DNA, 590 bp, Gossypium hirsutum
  misc_feature (564)..(565): n is a, c, g, or t
attttgatatccactatccatccttatttcaattttatttataatacatgtaagatagttaaattcatcacaaaaaatgattcaatttcacattctcaaccctatataatatttcttaatctattcaattttgtccttatcaccaacaacccattcaattacactcaattgcaaatttaagaaacttttataatttattcaatttagttcctaaaatcgggactaacctaactttcaatttaaaactcaaatattcaacccaatttcatcatagtccaatttggacctccttttttttcacttctaacataaattttgaaacttgtgcacattagtccctattgtacaaaactattagttaacttcacaatttaatcttcttttccctagcaaaacccaaaacttcaagactccatcaatgtcatcttttcagaactttaacaatttggaaataacacacgaataagctaaattaagctctcgaaattctaaaaacataaaaaattcaaaaaaaaaaaaaaaaattggcctttttcattttttttttaaaactttaaaaccctnnaagggattaaccccatttttccttt

SEQ ID NO: 10637 - DNA, 658 bp, Gossypium hirsutum
gagaagtggagtgggggtatatatgggggttcaaatgaatgagtgagtgtcaatacatagccttgccgccccatatgacaaaagtagggtttgtttcattgtctgagaccccaccattgatgcctgtttggactttgattccttgcctctcccttagatttggaaggataataataatggcagtttgaatcatgatcaacttttttatgatgtaattgttcaagcataagttagattaaaactccatatgtatttgcatgtgtatatacatacgtagtggaagctatttcatgttcttaaaaaaaataaaaataaaagttggtaataaaagtggggaaattgttattttttattaaacatttcaacaattttattataaattctcattatatctatttttcttataatatacttaaaatttctctagtctctcttcaactattaatttataggataatgtacttcaatatacacagacccatgatctcctatactaataataacacccatgctaattaaattaaaattcaattgactatttaataataattgaatcaggataatatatttaatttctcaattaaatgcaattttaattagatgggtggttccaaaagacataatcattattattgtccttctttgcaatgatatggag

SEQ ID NO: 10638 - DNA, 621 bp, Gossypium hirsutum
  misc_feature (615)..(616): n is a, c, g, or t
tttttggttcaataatcattaaccgattggattttttggtttaatcttatttttttatattaaattttaaaaaaaggaaaaaagattatttttacaaaattaatgggaagtataggtttgaatcttgttgttcattttaatttagagatgctaaaaccttgaatattggaatgggctatggattgctagtggcttttggaagctaagacagtattaatggggaattcagtggcttttggaattgtaaattcttattgccattattgagagcgattctcttgtggtaattaggtttcttaatggttggtttatctaattagtgagataaaataattttttaaaaatgcaaattaactcatctatccacagtttcaattagttcaattagttttaagtacgatatatctagggtaataagcaagactaaatcgacaaaaaatttacacaatttaaataagaaaagggagatctatcaaataatggtaaacaataacaataaaaaagaacacacacaaaatttaaaataataagtctaaatctactcatcaaactatttattattattcctaaataatctaaatgcagaaatatatcaagtagttgaccattcgagcnncataa

SEQ ID NO: 10639 - DNA, 310 bp, Gossypium hirsutum
tagctttattttggatggttctgctatattctatgaagttgttaattgtaaattacagatcacatgtatcccattattttttggtaattgattttctctttgttaaggcaattgtatcatgatcaccactggtcttcgcaaaatccacatgcatacatgatatatacatgttctctttagtgtgatgtgctttgccaacttcttagagatattttattctttgcactgttttgcctatgtggttaagaggatgatttggacatatgtgttgctatcattgtagaatatagatttatgtaaaagctatttt

SEQ ID NO: 10640 - DNA, 364 bp, Gossypium hirsutum
caatttaaaattcttggaaacaaaatcttaaaataccgcaaagtaaaatagcattcaagaacagaagaaaaattttagagaaatgaaccaaccattccctctctttagcaaaatttgagctgaatcggcaacaatctccatgaccagcatcataaaacatttcgaaaaatcagaaaagaaaaggaaaaaatagattaaagatgattccccaaaaacttggcatgcactactaatcatcaaggtggaaagaggcgagtaacttgaataagctgaagtgatacatatatgttttattttatttggttaaagtattagataagtgaacctcaagttgtagcttattggtcgagcgtttatttatcaa

SEQ ID NO: 10641 - DNA, 600 bp, Gossypium hirsutum
atatgttcttgaaatttcatttacctataatagtctaatactttaaattaatgctggaggtttgcctgactgatgagataggataggggtggctgttcggtggaagatttctgcaatcacattcataggagtttgataaaggatgtgaaatatgttctggtctggggctcaagtgcaaggcattatcctcaacactgtggccttggccattccttgcaggatgaagatgttgttcagattgtcaagaaaaaggtattagaaactgtaaactcgtgttcatactaatataatgctgtctgaacggcttcataataattccaacaatttaagaacttgcttggctgtgggcatgcaccagtgtatttttaatgtaaaacaaaattgaacgatatgaatacggatttttccaggaaaaggaggaaggaggaagaggccgcttcaaatcacatacgacaggtcctgcacgaatatctgatagagagaaaaaggctccattgaagacctaaccatgacaaaagatgtcggcaggaagtaagagttgcccttttttgttgtataagtaatattatcaactagtattgtctggctgatttattctgt

SEQ ID NO: 10642 - DNA, 692 bp, Gossypium hirsutum
  misc_feature (675)..(676): n is a, c, g, or t
agaatctacggtctgaatggtgtctgtgatgccgactcctcgattaatgccgtaagaataacttcctttcatcgttttctccgttctaaccgtcaaagtaaagggcaggcactcacatgcccacccatctccaaccccaacgtcaccaaaagctgattctgcatgttagtacaaagcagccgcttccgcttccttttccctcccattcaaaaacgtattccctcaagcctttctttctccgtcgcctcctcagccatggatagtgcctcgccttctatgctgtttttatgtggaaaatcatcaacggaatcggaaattgccaaatccttgaaaatcaacgacactcttaatctcccgaacggcggcaaagtttctgctcttttacaatcggagattaatactttccgatttggtgaagatgcttttaatgtcgatttgttttggaactcactctcaactaaacgattcggtcggttccttatttggtccccgctgttgccttctacgcatgacatcgtttctcagtaagcaaaagatgaactggcaaaaaaataaacgaatttagttgaactattttattcattgaatgttaatgtttgatttttagcttttgaacagtaatttttgtgagcttccagtgggtacagtttgtgtagctgacaaaaaaaaaagacnnggttcaaaagctaaaa

SEQ ID NO: 10643 - DNA, 271 bp, Gossypium hirsutum
cttgttgtttcaccccaccatttgttcctcctcctcctgggcttgaatttaccacaccaactcttgcttccgtctgcatatctaaatgtaacccaaaaatagttgcaaaatttaccaaagattgcaaatttattaggtaaaaagaaacagagctttggttttataggaacaaaaatcaaagcttgaatttaaagatttttgctttatttgttgttctttttctttatgcttcttacaaaagtttcagtcttcgcatattcttttttttttt

SEQ ID NO: 10644 - DNA, 485 bp, Gossypium hirsutum
aaaattttagcttcagatcacccaattaactacaactattatatcaccgagagaacaactccattgcatacacatgtttttataaagaagcacagtgaaatttagagcaatggatagctcaaaagatgaaaatacttcacattgagaaataaaaatataaataaaagggaaggtatctctcctttactataagggggtgtttggttaggagaatgtttaattaactctggtaataggattatctcatatctagattatttagcacattaccagtaatgtttaattttcttgtttgattgagttgtttggaatgtaagatttttttgttgagagaatacaagataacctaatagtattaaattgtcattgatcacaaataaggacgaaaaaagctattaaattatgcaaacagtaaaaggtgacaacgaaaatagataaaaataattaaggtaaaatgacgaccacgatgatgatgaagacagaca

SEQ ID NO: 10645 - DNA, 676 bp, Gossypium hirsutum
  misc_feature (642)..(651): n is a, c, g, or t
  misc_feature (654)..(660): n is a, c, g, or t
  misc_feature (666)..(669): n is a, c, g, or t
  misc_feature (672)..(673): n is a, c, g, or t
gtatcatggaggaggttgtagaagaaattgataaattaggttttggataaggaagatatgaatagggaggtaatgctatactactagtacgtgagggggtaatgccttgtaatttgaggatgattgattgattttgggtaaactaactcgtggatcacccaattttttggcgtttcattttggtccctcaaataaaaatatttataatttaatcactattgttacaataattaaacattttaatcctctagccgaatgatgaaatctaacctagtgctccacatcatttttactattttttaacctaccatcgttcatcttctcctccacatcacccctgcttccaccattctttcttattcttcttttgctcattgcttcgagccattgtaccatctcttcctttacccactatttccatcatcatcgcaccatcaagggcttccaataaaccatgcccccatctaattatagcttcctcaagttacctagcacctaacttttgggtgctttcagtacttgcaacactgtggttacaataattaaagattttagttatcacatcgtttctgatgtaacattttatatcatcattttttattttctttatgggttattatttatctagggttggtaataatnnnnnnnnnnggnnnnnnnaggatnnnnatnnggg

SEQ ID NO: 10646 - DNA, 671 bp, Gossypium hirsutum
  misc_feature (568)..(594): n is a, c, g, or t
  misc_feature (596)..(615): n is a, c, g, or t
  misc_feature (624)..(627): n is a, c, g, or t
  misc_feature (632)..(632): n is a, c, g, or t
  misc_feature (634)..(644): n is a, c, g, or t
  misc_feature (646)..(648): n is a, c, g, or t
  misc_feature (650)..(658): n is a, c, g, or t
  misc_feature (660)..(667): n is a, c, g, or t
atctccatcgaaagattctcgtttattcgacgtgaatggattgaatctggttaacaacggtccaaccccggttttgaaaccaaccctatccataggtcaaatacttagccgaaagttgcttcttcctgaagactttgaaactgagatgctagcagagaaaggcactgtgaaaagaaaagtgtcattgggtcaaatgctcggcaaacaaaacggtgattacataatcaactctcagaaaaccgagagagaaaccggtcacaaacagttctcaggaaaaaggaagaagttcgggttcgctcggttttccctccttttagctaaacaaaataagaaaaagaagaagccaactctcaacttgaggtagatgctgtgagatatatatatatattatataagtgaagcactaactctattaattacttgtattgtttgacctcatttctcttcaaagcttcatgctttttatgttatgtttgtttaggttcttctctaggccatgtctgccatgtttgaatatcatgtttgctcaacttaaatgaaatatgacttgaatgttgtgacatataannnnnnnnnnnnnnnnnnnnnnnnnnncnnnnnnnnnnnnnnnnnnnntctcttttnnnnttccntnnnnnnnnnnntnnncnnnnnnnnncnnnnnnnntttt

SEQ ID NO: 10647 - DNA, 769 bp, Gossypium hirsutum
  misc_feature (742)..(742): n is a, c, g, or t
  misc_feature (758)..(763): n is a, c, g, or t
gtcaaagtcaggtttctttatggacttatattatggaatcaaagattgggttgctagattttgatccgaattcgatatagctttggaaagattcagcgatttgaagtgttttaactcgaaattagagttagatagaaaacctcaaaagctgggaaaagtaaagcaacattcttaggataagctgtaaccaaatactaaattaaagtttggattttggaatccaatctttgtttgattgtgaaatgaatccttcttattgggttatgacatcttaaatcattgttatgtgtcaaagtcaggtttctttatggacgcacctgttacttatattatggaatcaaagattgggttgctagattttgatccgaattcgatataggtttagaaagattaaacaatttgctagatttttctttcttttttgtctctgggatttgagagttgtgaaggtaacattcttaggataagctgtaaccaaatactaaattaaagtttggattttggaatccaatctttgtttgattgtgaaatgaatccttcttattgggttatgacatcttaaatcattgttaactctggaacacacaagattggaattttgttgaatttctgattatgtagcagttaggtttcttaatttaagagtaggcattttgggtagttatattgacaagcttttctggttttcagctttgatttttctttctttttgtctctgggatttgagagttgtgaaggtatngtgaaggtaggtaccnnnnnnatctga

SEQ ID NO: 10648 - DNA, 658 bp, Gossypium hirsutum
gatatcgttcattggaagaaaatgtcagatttttcatctaaaacaagttaatacgccaaaactcacaagctggttttcccagatctgcatggttttcattgtttcagtgaaaagataatttatgatgctaatgaaatcctaggcaaaaacagacaaataaaccttaaagaatggaacatccttaatttctacaacataaataattctttttatatatatggacatgcatttggccttaatgcttaagctatacaaatggagctagccctctcccatcccataaacccacatcctcaaggtgcaaaaataagaccaccaaatcgaggctcatcttctaaccaataccaatgtcccctaggagacgttttgaacagcatataatgacatctaataacagaattatcactgctatgcagtaccatgatgcatgaaatcatgaaaatatggaaataatcctttgaatgccaattttagatgatatcatccagtaaataatttgacatgttccatattaaacctcccatgtcatcagcctttgattaggaagtgtacaaaatcctccgcagcagatctacctaaactagatcatgatttttgacatcacatttgattatagacaataagaaaacaactagctatcaagttccagacaacttcc

SEQ ID NO: 10649 - DNA, 598 bp, Gossypium hirsutum
tggggcttttgttgtgatgataggacaaaaaaagggcagcctatagttctgtaagggtcaatggttattggtacggttgcaattaccaaagaaaaatcgaaatcgccaccacgtcaagacacgacatgactttttctccaccgattccaactcaaccaaactttggcacatgtgattgggtcatatgagtgagaaatgtatgacattcttgtgcaatagaggttttcttaaagacactagagttggtaagttagatttctgcgagcactgcgtttttgggaaacaaatctaagtcaattttgattcagcagtacacaaaagaaaatggactctagattacattcactctgatttatagggtccatattctgacatttcaaaaggaggtaataaatatttcctaatttttattgataatcactctaggaaagtttgggtttattttttgaaacaaaaaagcaaagtcttcgaaatcttcaaatattggaagacactgttagaaaaacaaaccagaaaacttgtgaagcagttgagaatggataatggtcttgagtcctatttttaagattttaataatttatgcaaatgggaaggaatg

SEQ ID NO: 10650 - DNA, 430 bp, Gossypium hirsutum
ttacaacacattgaaattacttttataggaaaattttccaggtattttcaaatttactccgatggttaattttattaattaagttaatcattatctttattaatcattttatttttatttcaatatcatcactcattgttattttgctatatactatatatttttgtaacttaataaattttcatgtgtttcagtgttattatatatttattattataccctataattacatgtcatctttttaatcttgttcataaaattttaaacttcactgatgatgtatcatattattttattgatataatacttaatctcacatgcaaccgttattttattttattttttggaaaaaatctgattttcaatctaaatggctgtggcttgaggattggactatgagattgtttcctaaggtagagattgcaattcc

SEQ ID NO: 10651 - DNA, 415 bp, Gossypium hirsutum
gggtcctttctccttatatatagggtcaaatttatttcggatctatctttttaataattttatatattttatagaccaatattttaccaaaaataatgtataaataaactttgttgagtttttccatggttcacttaaaaaaaacttatatagtagataaaagtgagggataaaaaatagatatttgaacaaaagtaaagcaaagttgatgaccgttgaagatgaaaatttatccagaacggtgcaaaaaaaaaatatcgtataaatacaaaaaacgaaaaagttaaaaataaattatgtttaaaatcatctaaacaaattaatttctaaattcatctaaatctagaaactattcattcaagtctattcttgtgaaatatttttttattaatatttgtcacatctcatgctacta

SEQ ID NO: 10652 - DNA, 690 bp, Gossypium hirsutum
  misc_feature (559)..(563): n is a, c, g, or t
  misc_feature (566)..(566): n is a, c, g, or t
  misc_feature (568)..(568): n is a, c, g, or t
  misc_feature (570)..(572): n is a, c, g, or t
  misc_feature (576)..(576): n is a, c, g, or t
  misc_feature (578)..(581): n is a, c, g, or t
  misc_feature (588)..(590): n is a, c, g, or t
  misc_feature (612)..(613): n is a, c, g, or t
  misc_feature (655)..(656): n is a, c, g, or t
  misc_feature (659)..(663): n is a, c, g, or t
  misc_feature (675)..(680): n is a, c, g, or t
  misc_feature (682)..(682): n is a, c, g, or t
  misc_feature (684)..(685): n is a, c, g, or t
cgtcggcctcaatgacaatagtcaatgtaagaacatgtctcggacatggcatcggcttgagacatgagccagagtaagaccatgtctaggacatgtcatcggcaacataccttatgtttgaggtttagtgaatatttgataagaccatgtctaggacatggcatcgacatcataccctatgtttgaggtttaatgaatatttgatagtattccaaatagttcaacagtgagagttatagtttaagttaaacgagaatggtataaccatgttgtgagtggtacaagtacctatttggaatgtttgagatataagcttaatgaatactatgtaaattgtattggttagtgatgagtaagttgaatttatactttctttgtattatgagcatgtcgatgaagggtagatttattgttatatttaatttcatacaacttactaagcttaatgcttactccctcacctttccattttcttatagttccgcctaaatagcttgaggatcatcagacgtcgaagaagtcaaccacattgtcaaccgaagcacttggtatagaaagnnnnntangngnnnactnannnnatatacnnntacttatatttctcatcctcgnngggcatcaatgagactttcttttttctcactgccagggaagnncgnnnnngtgattagcaannnnnngngnngaaaa

SEQ ID NO: 10653 - DNA, 674 bp, Gossypium hirsutum
  misc_feature (26)..(27): n is a, c, g, or t
  misc_feature (636)..(639): n is a, c, g, or t
  misc_feature (641)..(641): n is a, c, g, or t
  misc_feature (643)..(650): n is a, c, g, or t
  misc_feature (653)..(657): n is a, c, g, or t
  misc_feature (659)..(664): n is a, c, g, or t
  misc_feature (668)..(670): n is a, c, g, or t
gtaaaaaaacaaataaatacttgaanntttttttacctttacataggattcccaaactgcatcttcagcaacaacgagctgcctatgctcgtcccaaccaaaaccgctattgttttggccattaagcatgtcataaacaactgaccattccctttttaggcacctaatccaaaattcaatatttggtttccccttcaacattgctcttggtaaagccttttctagcattttttctacctcgttcaaataaccggctttgaacccggtatcagcattaaatgttcctacattgggcaaatccaccatgcaaaaaaccaaggctgcatcttcttctggaacccattttcttttgcttcctcaaaaagcttgaaaaaaagcatgggattggggaacacctgacatatttatcttaaaaaaaaaaaaaaaataacatttttttccttttttaaaaaccagaaacaaaaggggaaaaggttaaaaaaataaatccgtagatcaaaaaccaaaatcaaaatctcaaccccaagtttaaaaaaaaaaacccctggtgaaagaaaaaaaaatttaattaaaattccaaatttttttaaacccccccccatttttttcaaaaaaaccccccagtttcaaaaaaannnngngnnnnnnnnggnnnnntnnnnnntctnnntctc

SEQ ID NO: 10654 - DNA, 622 bp, Gossypium hirsutum
atatggtctagaactctattactcttaagaattcagaatacaatggaatgagtacaaatgagggggaggctctctatttatagttgagctcccccaaaaccgacggtcaagattcatttacatcgacggacgagattaaccatatcccttaattttagggattttacaagatatgctatatcaaatctaatctaatctttacaagatatgattctctctatcttctaagattagttaccatattagcctaagttgccatgttttcatcattgggccaaccaggcttcaatctgataggcttctccaatagttctctgaatcgggccagctctcgtgggccaaatgttccccatcttatcgatagacctccatggggtgcatcttgtgcgatggtcacgggctttgcactgcggcccgtgacattctcccccacccattctcgcaacgtcctcgttgcgacttccgaatggcactgacttgattcgcctcgatctcgtctcaacgccttagccttttccttctttcgggacttttgcttcggcttacgtcacttcttcactcggaccgtcctactcgtttgtgcatctcgatgacaagaagttatgtcactctctgtccacat

SEQ ID NO: 10655 - DNA, 726 bp, Gossypium hirsutum
  misc_feature (634)..(634): n is a, c, g, or t
  misc_feature (636)..(636): n is a, c, g, or t
  misc_feature (638)..(640): n is a, c, g, or t
  misc_feature (654)..(666): n is a, c, g, or t
  misc_feature (676)..(676): n is a, c, g, or t
  misc_feature (678)..(684): n is a, c, g, or t
  misc_feature (693)..(696): n is a, c, g, or t
  misc_feature (700)..(701): n is a, c, g, or t
  misc_feature (703)..(705): n is a, c, g, or t
  misc_feature (710)..(711): n is a, c, g, or t
  misc_feature (713)..(723): n is a, c, g, or t
tttgatctgacataattttttcccagatgcacataggttagaaattaagtaaactaagcgtcattaagagccatcaataccttatacaatctatgatactgttctgcctgctttctacttttccgaaccaaaactcgaaaatcagggcccataccactgcagaacaatatgaagatttatgtgaatctatatatcaagaaatatagaagttgtactagcagcaaagaactgtattaaaacatagaaatggtgatgagctatttactaagtagcctagtaatcaaacctacttattttgaaagaaacgcatttcacctttctacatgcctaactgtctttcaaaatcaaaagcacagtttcctttcttttgttggatatagcaatatgtggcacaaaataataaaccataaaaaaaaactatattacatggttaacaacttacagagcttccttacaaaaaaaacataacatgacagcaagatcataaataaaaaattctctgacaaataggatatgagtaaatgaattcttcatatatcaatcaaggcatagaacaaaaagaaaaggaagggaagctttttaaaaaaggaataaattccatgaaacaaaaaatgggcatgtactggaaagtcantntnnnccttcctccgcccnnnnnnnnnnnnnggcccccccntnnnnnnntttctcttnnnncccnncnnnccctnntnnnnnnnnnnntct

SEQ ID NO: 10656 - DNA, 518 bp, Gossypium hirsutum
  misc_feature (513)..(513): n is a, c, g, or t
gtcacactcgtttgacaatttgttttcttaacttcatatatcttatgaagtatctcattaattaccttcagcagtccatagaatggcaattcaataaaatcaaaatttaagtaattataactattcaatattttaaaagattaatgttaatgttgcttgttttttatttatttttgctcaatcatgtgttgtttgtaaggaattttaagttgaaactaaaatttacttagacgtttctatgctgaactttgttatcattaataatttgattaatgaatatttaaaattttctgtaaactcttgatgcatttgtcaaattcataatatcttaaattattcataacaattttcaaagcaccaaaaagaggagaaaattttaagtagaaacgagtttttttttttttttttcaaagggaaacttaaaaaataattttttttaaatttttttttaaaaaaaaaaccccccccccaaaaaaaaaaaaaccccccaaaggggattttttttttttaaanaaaaa

SEQ ID NO: 10657 - DNA, 550 bp, Gossypium hirsutum
atccccgacatagaatgaagtcagcataaactgcagtcccccgggtttgggagcagcgtcgtttggcccgaaaactggcgcctgatactgaacatgaatttgtgccattaaaagaactctaatccaactcttttagatccttgttttttattttttagtttttacaaaagttcaaaaaaaaaggtaaaataaaaccagtaataaaaacatgttgaaattataaaagaagaagaggaagaaaaaatgggaacttacaaaggttctcacaagggaaagaaggcagctttgtggaggcgaggaatgagttggatatgaatcgacagttcccaatgacagaatcgacagaggtactacttttacaacaacgacgaattgatgaacaatgggtgaacaaatacagggtaaaattgtctgggggagaaatttttctattacgttcgttgttgaataggttattcttagcccccttcaccgaatgatgatttggtaaatcagatgaatagaagaggaatagccattcgccgaatgaagaaaacagtgaagcaaacta

SEQ ID NO: 10658 - DNA, 610 bp, Gossypium hirsutum
gacaggctcgctacacatggaaccatgcctagttctggttggtaaagctctacatcaaaactagtttttggtatgaaagcatcacatttgttgaactcattgctccaggagccttcgtattgcatctatcctctactgatctaagaatagatatttctttttgagttctttgtttgagatcttgcagaatgccaagcaatgcccctaagtctgaatgaaggaacctatggtctctttgatggtaattcaaacatgtctcattttgaagttcccttatcttagcctccatagctaaaagcccctttgaccaagtgacctctaagtcttgaaataagagattctggtctttcttaataggttctttgctattcaatggagggtatggcttagaacttgtcatctgcacaaggtcacctttccacttcgaacattcagatcgtaaagcagaaacctcttttgccaacctttctccagaagaaatctcagcaacaagttgctcagcaaacttctctgtttcatcacctatttgattagcatgattctgtaataaacttagttccatctttagttcctgaatggatgactctgccacttccaagaatcctctaac

SEQ ID NO: 10659 - DNA, 432 bp, Gossypium hirsutum
  misc_feature (427)..(427): n is a, c, g, or t
catttactagaaagcaagaaccgtgttgagtatttttacatcgcaactttcctctcgtaaatctcttcctaacagaaagaaccaaacatactgaagcatttccccatctatcaagtgtgaacgtggaaagtgcataaccatagtagtgaaaataaaaggcaagtagattacagaggatcagcttctactcctaagagaatagctatccacataaaagttacccagtcttttggtcctaaaataaattatatataatcaactttagaagcatccatgttctttaatatagaactaacctcattcaaagtcaatgttccagtcttatcactgcaaattgttgttgcggagcccatggtttcacatgctgaaagccgacgcacctgtaaatcacgtctgttaaggggagagatttgcgagaggagatgtntgatg

SEQ ID NO: 10660 - DNA, 621 bp, Gossypium hirsutum
gttgacgataaatgcttgcttcgattggcgccattttttgaaactattattttattttttacatatatttaaagggttataataaattaatacctaaaatatgttttttataaaaaatatacttaaacttaaaaaaattctaaccaatcaaaaactttcgcatggcacaaaaatcacacaaatcttgttacgtaaaacaattccaaatatatacaagtaattttttataaaatttaaataaaaatatatacaaatccaaaaagaatattgatgaatcttttttgggtacaatatgaaaatttattttattataatatattgattatataaaattgaattatacataaattaaaaaaataaattataaaattatatacaattccgttctaaaaattctatttttttaattgattaattatataaaataaaaagcatataaaatataaataattcgaatatatatttcaaaaatttcaaaaaaaaattaaaaattggtggaggttgattggtcaatgctcgatcaacgagcaaagtgttatcattgactatagttaattagatgaaggtgggggaaaaggtttgaataccaggaaaaagaaaagtgctaaactgagggctaaa

SEQ ID NO: 10661 - DNA, 461 bp, Gossypium hirsutum
agaatatgagtaagaagctcaccttttccgttaataaatttcattaattatctaatgtaaaagaaaccaatttataaaattatatattaatgaaaggagagaaaaaaaacaaacgtaaactccaggtatgtagagtgcacttcatcttcaatccaggcactagttcttttcaagaaactatacccagggcatagagaacaagagattgaaaattgcatcagaaaagctgcaaagtacattgaagatatacgatatcccgatggttcttggtaaggacttaataaggccttttcatttcttcaaaacatgaaatttgatgggatggatatataattcctatatatatgtgtgtgtgtaggtatggaaattggggaatttgcttcttttatgggacatggtttgcactcttaggtcttaaagctgctgggaagaacttcgaaaattgcttggccattcggatt

SEQ ID NO: 10662 - DNA, 706 bp, Gossypium hirsutum
  misc_feature (649)..(652): n is a, c, g, or t
  misc_feature (654)..(660): n is a, c, g, or t
cactcgctaatcccccatagaaggattagttcctcatgacattcataaacaatatataatcaatgtaaagagaaaggatgctaattaaatcaacaagatagagtaaatgaaagagcttgattatattgatattaagcacaaatccatagagttgaatgattccccaatacaaatctcttgaaagaaaataatgaaaaaataaactaaaactctagaaccctaaaaaattgaaactaaatataaaagaaagaaactatgttaattcaaatgtgccaaaggagcttatttatagccttcaggtggccattgtccttaaccttaggttagttgatattcccgagctttaagttcaattctacggaccaaaatacctctacttcatgcctaatttctgtcctagagtcgaagttgcaacaccccaggatcattgtcacgacataacaaccagtatgctcatctgtatccatctttaggggtatgtcacgacatcgaaggcagacttgagttttctttattttgttccttatgttgcaatgtcagccctcctgtgttacgacatagcatccagtatcatcctacaatgccttctgacggtctcctacacacccaagaagtacgttagctctcccataggtatcatttggccctnnnngnnnnnnntgcacactcacaaagtgcgttagctcacccttaggtatcatttggc

SEQ ID NO: 10663 - DNA, 675 bp, Gossypium hirsutum
tggtaatatttagctactcctatgccctatttttagaaaagagaaaggaaaaattttcgcttatttctcattttttacaagagtttttactatctttccaatataagtttaaatttgtgcactattctttattttatgtctaattattgtaatacatatataataaataagttttttcctcatgttattacactagtgaccaaacaaggcattaggatttagttgtttaacataaaatgcttcagttttaagaagattttggatactgaatatttgagactaaatattgatgttttatctctatctgttctttctagttttctcccctaaatcttccatttctctccctatttcctatgtttctccctaatcaattctggttacctctggtttcccctctaatttgtactcactctatttcaaagtgaatgtccacttttcagattccgttgcttacattaaaaattttaacttacctaaagttagtacttcaaggaagagaatttcattgtggtagtggacattgtttggaaacatactagtaaaacattaaggtgtacaactttgaagtgagggagccacatatttgttctacttctacattcattctcgagaattataattaattctgaagaagcaaaaaaaaccaaagcgatataagattctttcagtacc

SEQ ID NO: 10664 - DNA, 568 bp, Gossypium hirsutum
tacatttatttttatttctattttttgaattttctacctgttggtgactcttaatttagaaaattctaaaaatagaaataaaaataaaagtaaataattgttttaaaaatagataaagtgtgagaaaataagggaaaattatttttaaacccttcaaattttctccctacattatctatatagaaaatccaataccaattctttaaaaaaatagaaaaataaaacattaagcaaaagtattagttctctgttttttatcttttctgtttcttgacattgtatttttttctgtaataaggaaagaaaatttcaaaagaaaatttcaaaacataatttattcttacaatttggatttttttaaaaataatttaaatgaattgaaaatttgaatcgagtccgaaaaataaaattttgtggtatattttaaatatttttttaaagaaatgacatcaatgtcaatttcacaagcctccataatatcaaatctggatgttcttcaagggcatgaaacttgatttgaatatattactaatttgagtttggggaaacattgaggaagcatgaaaca

SEQ ID NO: 10665 - DNA, 649 bp, Gossypium hirsutum
  misc_feature (636)..(637): n is a, c, g, or t
caatggagctcgattctagctcattgagctcattttatcctttttaatttcgttttagttcattttagctttcgtctatcttattttttttgctggaacaatttcatgcaggaaaattttcatgtgtctagttaattcgttaatttatttcagctcataaataaattataatttgaatctaataattgtagtgtttaatgtgtcttagtttaatgcatgttgttaatatgtcctagcttaatatcgatttttaatgtgccttggctgctgctgaaaataagtgtcttagtcattatttgattttaatgtgtcttagtttagacaaattaattacatgttccaaattaattagtttagctgctgctgaatttaattgtgtctgaaacttaattaatttgctaaattaatttgtgcagccatatataatggacagcttgaatatcagagagctgctgatttcgttctcccaagcatcccttcatggagaccaatggccaagagagttttcacattgctagaaatgtttttcacactagggaccattcggtttggggctttcacattgatgcgagcttggccaaggagctagttgctaaacccttggagctgccgttgggaccaatcatccgagtccanncaaagaggttcc

SEQ ID NO: 10666 - DNA, 392 bp, Gossypium hirsutum
ggtgttgcaggttccttcttcccttgcacttggcttttggcggcaacatttgctacctccgtccccgccttttgctttgcctctgcctttggctctgtctttttctctgcctctgtctctgtcttttgctctgcctctgtatctgtcttttgttctacctctgtctctgtcttttgctgtgcctccgtctctgccttttggtctgcctctggctctgcctctatctctgccttttgctctttctctggctctgcgtctaattctttaaccattttttctttaatggattcaaggccttgcggctggttaccttcatcagcatcctcctgcctgctttctggttgcttttcttcttgttcttcttcagtttctttagtagcagcaacaacctc

SEQ ID NO: 10667 - DNA, 590 bp, Gossypium hirsutum
ccttccatggatttaatgtgattctcgttataggttggcggaccgagcattaggcaaaggtggattccaagttgaaacagattactttgcgtgatagtgatagagtggaggtcgttgtcattggggcgagatcataacttctttctaatgtgatttcggtgattaaggctgagaaagtgttaagtaaaagctgtgaggcatatctggcctatatagacattatgagttcttggtcatgtcttttggttcgaaaaatgctcctaccacattcatggacttgatgaattgaattttcattcgtattcgaatcaattcatagttatctttatagatgatatccttgtgtactcacgcaccaaggatgatcgtgaagcacatttgtggattattttgtagatattatgggtgatgtaattgtatgcgaagctgagtaagtgtaaattatggttgaaagaactgatttttctaggccatgttgttctggcagatgggattcatgtggattcgaaaaaaggttgaggcaatagtggagtggaagttgccaaaattctattaccgaggtcagagcttctttggactggctggctata

SEQ ID NO: 10668 - DNA, 542 bp, Gossypium hirsutum
ttttaaaagtggaatggaacgggacttattcgagtattcagagatttttttttatttttacaaaaatttcgacagcatttcttcttaatttttacataaaaccccctgcaaattcaaaccaaaaaccaactaatccaaaaccaatggcacaatcaaaaaaaatttaaacctaaatatatctaaatcataaccaatccattgacatagtcatttaataactaaacattcataatattaatccaaattaactaataacttcattcatttttcattccaacttataccaaattatataatataatatttaccattttatcaaactaataacaaaatatggtatacctttcttacaactaacattacaagcatatctatataacttatacaacacctagtacatgccactttcaattaagaaagaaaacatcacccaaaatttgctggagtcgggatcgttcagatgctgaccgggatactagactcctattaacctgcacacggaaacaaccgcacgctgagtattccatactcagtggtgttac

SEQ ID NO: 10669 - DNA, 606 bp, Gossypium hirsutum
tttttcaatgtcaaggaccaacttcgagaactatttttatgtaccttgaagaaaatatctattaacaacaagagtaaatctaaagtgttttttgttcgttttctttagccaaaattttatcaaccaaagggttataaaatattatatttagaggaaaactaatgaaacaaaaaaaaggagaagaagaagaagaaaaaggaataaaaaaaaggagaagaagaagaagaaaaaggaaataaagtttcaagataaactcattggcatccaggaattggctcgaaaaacggctcattagttgagaaaagtttttttttctttcttttgtgggttttacaaattttgtagatgtggaacgtctctgttttaaaagctaaaagctttgcttaggaagtttgaagatcaatttgatataatttgtaaatgtgaagggttaaatttattgaattatttagatttagtatcaaattgatagaatatgtaagtattgaggactaaatgtgttattatactaattagaaaaaggtttttcattatcaatttaactacaggtaactaaaacaggaaagaattcaaatattaatgtctaaattaaaaaaatttaaagta

SEQ ID NO: 10670 - DNA, 656 bp, Gossypium hirsutum
  misc_feature (651)..(652): n is a, c, g, or t
agcatcaatgcttcttcgtatatttggaatgacagcatctcccgttgttggtaaaggtaattaaaaattgcatttcttttgaaacaaaagtctgaattattacatggatcagccatctccttttcaattcctctcggtacaaaaacttttcccattggaagtacgagaaattaaaggtgttttgaaatgtgttgtgtgtaaaggcggaatcaatcaagaaaataaattcgaatgcctactttttttttatggaaaatgtgtttggtaaatgaaaacaaatgttcttttctaaaaatgtccgtgaaatatgtttgatatcactaaacatttaaaaatgagaggaaaggttaaagaaataaataaaacatccaatgatattattcttgatttcaaatttctcaactttttcttttgtaatttcataagcttttgataaagagatttgagtagacaggaacaaatgagattgtaaatagttcaagatgcctctagagacaaaaaaggaaaaagaaagcagttaagggaataattactgctaatggcttctagttataagtattaacatatattattaattaatggcttcaaatagtgtttaattatgagtcaacttaacttgcaaagtgccaagcaaagaagtaatggacattnncatg

SEQ ID NO: 10671 - DNA, 648 bp, Gossypium hirsutum
  misc_feature (557)..(557): n is a, c, g, or t
ccctatacttacatcaacggtgtatgtttcaaaccaggcattattttatttttctaatccttattttagcatagttttcttaacatggaagaataagctatgatttcaaccttgatgttgacggtagtcgcattatttaacaccaaaacccatatttaatcaagaccacatatattattccattcaattcattacataatcttcaaatttcaactttgttttcatggaaaaattactctttcacattaaccaaattaaattttacaatcacacttatatttttataactactgcatgtagcaattaattactctttttatgaattttaatgcgttaaaggcaatcatttatcaaaaagataaaaacctataaatttattgtgcccaaaattccccatatagtttgctttatgacccctcagtttttaaagtttcacaatttacccatatttgtttatttaaccctatttataaaatctaaaaattttaccatataaaatagaaaaggcccctccacaataccaaaataattagaatcatgttaatgagttgatatgnatcaattttcatgtaaacttcatctcataaattattattatctcagaggatatatgaaatcagtttcgactttgcttcctttatcttatac

SEQ ID NO: 10672 - DNA, 544 bp, Gossypium hirsutum
tatagatgaaggataacacaacttaaaactcccttaatatgtggctcaacaagggcctatgtgaacaacctcgcatggggtaatagacaagaacaaacgtatcttggatcagataacatattgaaaatcaaacctaaaacctattaacaacaagcagagaatcccgatgtaaatataatgtcacaaaaaacccaaaacttaatgtgagatgaaccgcttaaaaggtaaaaccattagccctcttcaaggtaaaaaaagtagtccacatatttgtagtggcatgttaagaatcttattgtcatcttcaagttgacagaattgatgagatgataggttacaaggctagttgaacttccaaaaaataaaaataaaaaactgaccaaaaaaacgaggtataagagggaagcactttggtctcagaagataaagagagaggatcaatgacaagaaaaaaagggaaaaaaaaacaatgaagactaaaccaatttgaaaccatcttcattgtaaccctagtttattttttattttttattttttggcacct

SEQ ID NO: 10673 - DNA, 667 bp, Gossypium hirsutum
atcaaatgcacttggagaaatggcagcagctaggttcagccaattgagcttaaatgagctcattaaaatgtaatttttggctgaaaagagaccagcattaaaggtgatacgaactcattttgtgattgattcgagtcgttagtgtttgctcgatcgtgaatttgagtaaggctaagtttgtttcaaaatagaagaaaggctacaaacaaacgtttaaaagggaaatgggtttatcaacgaatggaaaattttggctaagggcagagaatgaaccaacaatagaggttgttgacccgagactcaaagtagctcttaggtgaatgacagtataggaaaacaacaaagaaaagacctcgacccactatcaagaatgataggaaccttggtatatgatgaacgccacactatgaaagtgataagttcgaaaacaagaaatggatagacgccacaagctaagcttgataagtcaaatcaattccgtaagaacaaagtgatacgacccgcccccgggaacggctattgtttcagcctacaagcgaggctcgtcgttttgcaagctggacgtagctcaatcttattttgtggagcttcatttagctcgtttccagctcctttcaagctcaatgagctcgaatcagctcaatttcagctcacatacttacgattc

SEQ ID NO: 10674 - DNA, 677 bp, Gossypium hirsutum
ggtgcacttatgagtacgaagatagatagtcggaatgaaaaaaaattctatatttcagaaagtatgaaacgagatgataataagtttaaaaaaaaacttatattgtgataagctcatccaagtatgttggtgattatatgaagctatgtgctcaacatatttgattaagtgaatgtgataacccaatcttgatctaaattaatatttcattcaatttactaatttaaataataaaacaattcatttcatgcaatttgatcactttttgacatttttacaaatttacccttaaagtttcacatttgttcaatttagtccctgaacttaaaacatgtaaattggtcatttttaatgaaaaatcatgcaagttgaataatcatatactttttctcctcctcctctccattcaacatccttaatgtatataacttgcttatatgtaacattatctataatttcatcatttatttatatattcattcaaagctgtccacttgagtcatagtcactaaattatttatatcttgaactacagaactcaaaattgagattttttaattttctataaaactagactcacatatcttcttaccataaaaatttaagaattttttgtttagccaataagtacagtttattctttaaagtcacctttgttctgctatctgatagttcca

SEQ ID NO: 10675 - DNA, 600 bp, Gossypium hirsutum
caccatttctagccttgcaatcccacaagtaaaattcatcatcattaaaccacaaatagtgccccctcactcactcactcatagttgttcctgggttgttgtccattaccattaatgaatattatattagtggacaagtttctgaatatattctaatttcttcaagatcattagacttttaagagaaaaaattgtaaaagaaaaaaatagaaaaatgtataccactaaatgtatggtttatgtgaacttgatatttttctaaaatatgatttttttttctttttactttttaataatatataatttgcttttattgttgtcatattttaaacaaataaattatgcttagaacttatctaaaaatggttttagtatcagcacaacaaatacttgttatatcacccctactaaatggaacaagtggcagaacaaaaggatgcctaaaggatacgccctacccattatagattaagaggtctccaagagcttaacctctagtctcaaccattcgatcaggcgaaaggtagctaccatccactcttctaggccccgaccttctgttaagagtgtgatcattttggtcaccaaatctcatatggg

SEQ ID NO: 10676 - DNA, 641 bp, Gossypium hirsutum
  misc_feature (59)..(61): n is a, c, g, or t
  misc_feature (63)..(64): n is a, c, g, or t
ctttcatttctgtgttaggaaggggttatgagtaattttaagcattatgtcacaaaaannntnnaatcagaatctataatgagattgttcaaaaaaattaaagaaattttacatattttcatatatttttgtactattaatattttaatgatttaacatacatattttatactctattcgtatagataatgtatgtcaaatttgacataaattaaaattctaacgatttattttatgtataaaactttcaattattcaataaatagtaacatgtacaatatttagatcgatataatagagatatcaaatcaattcaaaaatttacatgcataatgtgtataattatattgataaactcaactacaaaaacatacaaaaaaaaaaaaaaagaaaattaccttaatttcaaattaaaaaaaaggattccccccctaaatttaatttaaaaaatggcttaataaaaattttttaatgaaaaaagaaaagattggaaagaaattaacatttaatcaaggggacccactcccttttaataattttttaacttcaaaaaaaaattttcctggaaaaagttttaaaaaaaaaataacaataaatgtttttcaaaattcaaattggtttaaaaatttaagtcccaaatc

SEQ ID NO: 10677 - DNA, 408 bp, Gossypium hirsutum
atctaatgttgtctgtaggctgcgggaattcctgtgagcccatatagtgtaaggatagctcttgagaatacatccattcctgtaggtggtttgcccgaagataagctaaccgctggacaagggcttatgcaagttgacaagtaggaaatttggccatagcctttgcttctttatatattatttcttagttctgaacttctttgattcttatgtctggcagagcatatgaatatatacagaagtctcaagatctttcatgtgtttgttatcaaataaaggtcaatcaatctggaaaatcaagtaagtttaggttgatgtgctgaaaaatgctatccagtgttcaatgtgttcagtactattatatttacgatccaaaaatttgtggatgttcaacaaatatcagaggat

SEQ ID NO: 10678 - DNA, 649 bp, Gossypium hirsutum
ttgtgtatgagttaagccatgtgatttggcttattttgatatcatctttgattgtgtataagtgttcaattatggtatgttttgacaaagaatagatggaatgaaaatgtgcaaatgatgtcttgatatgtatttggtatatgaatggattatgcatgatgttgattaggtaattgggtatgtaaatgttatgtttgatatgcaaataatgtgcattgaaatggttattatgattgccaattgagttatgaaatgtggtcatttatgcttgtgaatacttgtgtttatagggtggcaaatttggctttgcaaatagcctatttttgtccatacgggcagggacataggcatgtgtctcagtcgtgtgtgacacatggtcatgttgcacagccgtatgtcccctggtgttgaaatgattggaatggcggaaatgtgcaagtgtacacaatcgtaacaagtaataaagtgacaagtaaatgtcgagttatcgtacccacagggactgtaaaaagcaatatttatgaaattaattaaaacactttggtgaggtaaaaataattttggtttgaaaagagtgatttataaactaagattttaaaactaagcaaacaatttagataaaataaaagagttctagtgcacgatttca

SEQ ID NO: 10679 - DNA, 567 bp, Gossypium hirsutum
  misc_feature (545)..(549): n is a, c, g, or t
tttgaaattaatttcactatttacagcaaatatgtccaatcgcgcagcagttactaaattgattctagctacaaaactcagaatttaatttcgtaaattttccctaaaactagactcatatatctttcaaccgtcaaatttttagagtttttggcttagccaattagtacagtttattagttaaagtctcccctgtttcaccattcgactgttctgacctcttgttactaaaaataaattttatcattataggattttcatatggtgttcccaattgttcctacagaaaatagactcattaaggaatctaggaatataaactataactcataaccattttttttagaatttttaatgattttctaaactcagaataggggaatccaaaaatagatctgaccctgtctcactaaaattcacatatctcaaaatataaaattccttttgctaaaccgttatttttccatgaaaataaactcaacaagctttaattccatatatcattcaccctctaattcatttttataccatcctaggttatattnnnnngtcacgtcactgtgctgc

SEQ ID NO: 10680 - DNA, 581 bp, Gossypium hirsutum
gactaaattgtgaataatgtgaaagtataaggttaattgtgttatttgttaaaaatatgaattattgactaatttgaatagattgaatactgagtatgttgaatttgataatatatagaccataacccaagttcgggtttagatccgggaaaggaaaagattaacgagtagccgttagttgatatctgagcaactcgaggtaagttcgtataattagaatcgaacttatatttataattgaaatttctatcttgaatattgtatgaatgtatatatatgaattatagaattgaaatgcctattcgttttatgctcaaatttactttcgagtctcgtttgaaccgtagaaagtcgtaggatacaagtgacatgtcactagggttactgtttggtcgagctctgggatttgttgtagactcaccacagctcgtatgagcttaccattttagctcttatgagcttatcatttagctcttcagagcttaccgtttcagtccttagaggcttactgtttcagctctacggagcctaccattcagctcaattgagcttactgtttatcgggtcaggaggagcataac

SEQ ID NO: 10681 - DNA, 608 bp, Gossypium hirsutum
atgttttccttttttttaaaaaattattatatgatttttgttacgacacaaaatacaagggcgacttgtgatggggatttctacatcacatttctcaccatacaagtgcagagaatcgttatattttaaggtgaaagtaagagatcgcaactattttgtttggttggttaaatcggtttttatcataatttacaaaaaagttatttaagaaatgtataattgaagcaactttaggttgatgaatttggttggttaaactttaggtattagtcttgaataatatatatttttaaataattaaaaatattaaattaaattatttttctgatcagatcggaataattaactgaaaataatcaataaaattgaaaaccatttaactcacccaaaacgaaattgattaaatcgattgagtcagtcttttcgatttaaaatgaagtgagtctttacttcatcacggttttgatctcaggcttggtttaagttatataggacttcagaagttgagataattaaatgagattatatttgatgtgatagttatttttaatgggattgcaacgctacttgtcaaatcatgtattatctctacagtctttgtaatggca

SEQ ID NO: 10682 - DNA, 250 bp, Gossypium hirsutum
tatttaacgggtttatctttttgttaaagcctatttttcggatctattatttttttcaaaccctttcaaaatttggataggctttcgaatttatacgagtaactcaaactatgaacaagtttattttaacatgtgatgtatgtgttcaaaggcaaattttgttagtttgaacatgcaaattcaattcatgattatgatattataactcagctaggcttaatgtaagaggattagttagactttttttttt

SEQ ID NO: 10683 - DNA, 516 bp, Gossypium hirsutum
ctctatgttgccatgtcatatccagatatgtcgaagatgcagtaattgacacaacatacttcactaagttacaggataatccaagtcttcgttaatcgggatataatttgcaatctgagtaagaaagaatatgttcagtgttgagatgtgtgacattaacaacagagaaaaaggaaaaaaataaaggagcggatgatgtcttgacaaagagcagagaagaagaagaagattaatggaaaatggagtaccgtcgcttcaaaaagtgtctttaaaaatatatatcgaggttaattcgaattccggccttagttgggttgagttattatatattttattataaattgtataacaatttctctcaaaacttattgaagacgatttataaagtgagtcttataagataaacttagacgcgtgaaacgtgtacttgagggcttcctacataagttttaacccgaaactttacttagtagagtagttttcgttgtttgacggtgtgttacagaagttaaatgg

SEQ ID NO: 10684 - DNA, 675 bp, Gossypium hirsutum
tctttccggattgtgatatttgagactagttctcatttgtttccctttttcatcctctctcattaatggttttctttgacacggaaatgacccaattcagaaacagatgaaaaaaagcatgctgtctttcatctatatttcatacatacgtttgtattttacctgcgaacacattcccagtaacacaaactgcaactatattagaccaaaagaaaaggcaacacccaaattttgttacaaattcataactacaattcaactctttttactgacattggtaaataaaattaaaaaaatcactatttccaggccacccccaccacttttgtacatgtttctgaccttactgcatcaccctttctccaatcactactgtttttgacagattttgctatatattgccatgttgtcctagtttctcacttcatacttcacatatatgtatgtggcctaatagtggtgctacatttgaatgcagaaggtacacacactacaaaaacttctgggaccaaagaaactgtcaatatcaaactaatcatgaatcaaaatccagccgtaaggttggacttttcaagattcaaagcatttagcagataaatcataggacaactttttcacaaatgctacttgtttatcatagtttttctaattaatgcagccttaaacttggtttct

SEQ ID NO: 10685 - DNA, 691 bp, Gossypium hirsutum
ctggatacaatcacagagatgcgaatatgataagttcgtatccttgttactaggtccaacttcatttgctccaattattaatgcttctattgacatcgtggaaggcagtaatggacagtaccatgttcttgtcatcattgcagatggacaggtctaaaaaacatgctttatgtacttagttttaaatctttcattttcttctattcatcagtcttgccaaatgtttatttgattgcttaggttacaaggaaccctgatgtaccgcgtggaaggcttagtccacaagaacaagaaactgtagattctattgttgctgctaggtaaagaattgttatcacttctttgtagtgattaagattttattgtgttcttgtcatattgatcatggtattcaataaacagtcattatcctctctcaattattttgattggagtgggggatggaccatgggattcaatgcaacaatttgatgataatattccacatcgcgcctttgacaacttccaggtatgtcagcaatttctctaaatcaatatgcaaagagcaacctttctcctattaagtttaatttgtctttagttttctaatatatatctaaacagtattgtttgatttatgggaatacttggtcattatcataggattgacactacattgcaatgtagttttcacgaatggtgatctctttac

SEQ ID NO: 10686 - DNA, 674 bp, Gossypium hirsutum
gcttcctatgaaaattaggacatattctctaaagcttttattataatcggaataaagtacattactataatgtgctagattacaaaactcattgtaaagcataaaaatctatgtgtgtgacacaatacattgtttccccaaagaagccttaattcaatatattggctctagaacataaattgtttaacactaaatgtaagtttatgccattgacatatgtataatgcataactttctatcttcacttgaaaagagagatttactttcttcaaaatatttgtgtattaatttagaagatctaaaccacgagacttgaagattttaagatatcgatagattcaagtatactttcgcatataatttatgtccttaatgatctgacatgataaaattcggtttatttagttttatatcaaagttttatgattgtaacacttaattgataatgatatgatcaactattaatctgacaaaatataaagaaatagaaaacgacttttcattttatgtttagaacgaaaaattctgtgtctaatttagatgagtcaaatctttattcataattaggccaggaatatacttaattacttgggtaaccaaaattggagtttgattttaattaatttagtctaatttattagcataagaatatagcacaataattggagttatgt

SEQ ID NO: 10687 - DNA, 466 bp, Gossypium hirsutum
cagctacactaaacatgcatgcatctcatggaacatcatcaaacataccttagcctatctacatgcatggccgaatctcttcacctttcttcttctttcctccttaaaatttttggccaaggatgaaccaaaggatgagaaaatttttccttggttttctttccaaattttggctaaatggaagagaaaaaaggaagaacaaaaattcccccctttcctttctttatcccccgggaaggggggggaaaaaaaccacacacacattttttttttttgttttccccttccccctttccccaaccccctttttttttcccccccaaaaaaaaaaagtttcttgggagggtttgcccccccccccctgggggggggggcccccccccctttggggggggaaaaaaaaaaggaggcccccccccctttccccagcaaaaaaaaagcccccccccccccccccccaaaaaaa

SEQ ID NO: 10688 - DNA, 548 bp, Gossypium hirsutum
catgctctacttagtaccaaatgcagataggaagtcacatcaacatcaaaagtgaaaaaagtcccaaactattgtaaacatcagttattgtaaacatcagataggttacaagcgtattttcctaataggatatttgtaccaaaatctctctttaaaccttttaaatggtgacaaaatactaccaaaaggcccaaaaataagatgcctactcaagttttaaaaagaatccaaaagtgctataattgtaatacagaccaccattccaacttaaagaaaggatgtgacacttctgtaagatgcatgtctaacaagctgaaaaggacaagtatgatagtgatataggcaaatgcagggaaatgtcaaagaaaacataccaacattggttggaacagtccacggagttgtagtccatattgctatgcatatatctggaaagaattcttccaataagctatctttacttgaaggtgtactgaccattctgaaaagagcatatatgcttcttaaaacatgaccctctggatattgcattaggacataaagagaaa

SEQ ID NO: 10689 - DNA, 767 bp, Gossypium hirsutum
  misc_feature (565)..(569): n is a, c, g, or t
  misc_feature (640)..(640): n is a, c, g, or t
  misc_feature (645)..(646): n is a, c, g, or t
  misc_feature (653)..(657): n is a, c, g, or t
  misc_feature (659)..(659): n is a, c, g, or t
  misc_feature (661)..(674): n is a, c, g, or t
  misc_feature (677)..(678): n is a, c, g, or t
  misc_feature (680)..(683): n is a, c, g, or t
  misc_feature (685)..(685): n is a, c, g, or t
  misc_feature (687)..(688): n is a, c, g, or t
  misc_feature (691)..(692): n is a, c, g, or t
  misc_feature (698)..(699): n is a, c, g, or t
  misc_feature (701)..(726): n is a, c, g, or t
  misc_feature (728)..(730): n is a, c, g, or t
  misc_feature (733)..(741): n is a, c, g, or t
  misc_feature (762)..(764): n is a, c, g, or t
ccaaccgttaacacttctaatcccttaattccgaatcaaatcgttatcacttccaatcaaagtttcagaactagatagtggtcgaactagtcagaacaccggtttgccattcctaccgatccgatgggtttgcctcgtttgaggaaataaatcattaaaaaaatcataaaaataaatatattaaaaatccggttcaaccattttctgccaagttcaaccggttcataccgattcctaaattaaccggttcaatgcccttcttcaaacagatacaacaaccgattcctgatctaagagtcagattcaaacaagcttgcttctaattccctaactacagaaaagctctataaatgtaagaaacaaatcgcttgctcttggatatgttgtataaaaagggggaatttattctcttctttttccaaaaaatgctcactcttaaactctttgtttacaccctagtaatattatttgtttctctcttcatcttcagattcctatctagtgctccaggacataatcctggacgcaaagaataagaaagggaagagttccttgcttcatttannnnncttttctgtagttagggaattagaagcaagcttgtttgaatctgactcttagataaggaatcggttgatgnaaacnnttaaaannnnntnannnnnnnnnnnnnnatnntnnnntntnnttnntcttgnnannnnnnnnnnnnnnnnnnnnnnnnnncnnnctnnnnnnnnnccttctttctttttcctttcnnnttc

SEQ ID NO: 10690 - DNA, 542 bp, Gossypium hirsutum
aaatccacaaatggtgcctcgagaccaaaggggttttgaattgaaaactcggaaagggcaattcaaatttcaacacgtgatagtctgctatgcttgaattaacaaagaggaaatatgttatgtcttggggtatcaagatctcttaggaacgtgttaagctcaaagtggtccttgtagagttcgtacggagaagctcagactgcgatatttggggcttatttgttttcccccttacttatttttgtatcttgacaatttttgctttcttgggttaattcgttcttttcagattttgttcctcataaattgcaattttatccatttttataatctttttccaagaattccgtattgaaataatgattaatggactaataacacttatgcatattactttgaaaagtttctaaataatacaagaacttgaaacaggactattgtttagaactcatcaagcctaagggctagaaatattggagaaagatgattatctctttggactttttatcagttgaacgaaaagacaagatattgcgtctgtg

SEQ ID NO: 10691 - DNA, 583 bp, Gossypium hirsutum
gtcaacaagttgcctcaatttataagctttccaaaaaaatctcattaggccatggaaagttgttttttatgttatctaattaagatgtgcgattggagttcgttacttttaaagaattctcctctaatgcttcatgtttttttgctttgattaggttggtggtcatgatgaccgcttgtccactatagtttacattgcatttcttgtctataatatgatttcgtagagtttaaagaaacaaaatattgtggcttgttcttctaccgaggctgaatacagggtcattgtgatataggaagtggtgtaggattgagatctttcaagttgtgtaaagaaaaaggtccaaagattgaaggaaaacccttttcttatcagcaaagcaatatggagatgaaagaagaaaccaagaaagtattagctaaatcaacaacaaattaaacaaccaatgaagcttggaaatcgagcagagaagattggaatggacatgaaatctttagatttgatcaattaaagtcttcatgaatccaaaagaacacttcttaaaggatttttaagtgttcgaatagatctggaataagcaagc

SEQ ID NO: 10692 - DNA, 1206 bp, Gossypium hirsutum
  misc_feature (612)..(613): n is a, c, g, or t
ttttcaacttccaatgcaaactagccacgtgtttttttttacttttttcaatttcataaaactatttttaaaacaaaaatttagtatttgatataccgatcatgagctattttgaaaggtgacgagctattgtcatatttccttatctaagtcaagctccgaatgggaacaggtcagatcgaatcgatccgggtcgtgttatattttataacaggttattatcatgcttttgggttaaaaaaaaaacatctttagaaaaactaattttacatgaacgggtaccatttgtacggacgtcagcctcacttactgcaaatcgtctaattctagtatttaattttatgtattagacatgaagatttatcttttctttacaattcctttcataaggtctttaattaatatttaaaaattaaataaataaaatacatgatattcttttttaatccatacgtgatcatttttaatttcaattttttaaataattttttttagggtaaactattaaaatagtcacttttatttgcctcaggttacattttagtcacttatgttatcgtgttgtaatattttagttactgagccgttaattgttgttaacgatgtctccgnnacatcgttaacaacaattaacggctcagtgactaaaatattacaacacgataacataagtgactaaaatgtaacctgagacaaataaaaatgactattttaatagtttaccctaaaaaattttatttaaaaatttgaaattaaaaatgatcacgtatggattaaaaaagaatatcatgtattttatttatttaatttttaaatattaattaaagaccttatgaaaggaattgtaaagaaaagataaatcttcatgtctaatacataaaattaaatactagaattagacgatttgcagtaagtgaggttgacgtccgtacaaatggtacccgttcatgtaaaattagtttttctaaagatgttttttttataacccaaaagcatgataataacctgttataaaatataacacgacccggatcgattcgatctgacctgttcccataggagcttgacttagataaggaaatatgacaatagctcgtcacctttcaaaatagctcatgattggtatatcaaatactaaaaatagttttgtgaaattgagaaaagtaaaaaaagacacgtggctagtttgcattggaagttgtaaaa

SEQ ID NO: 10693 - DNA, 594 bp, Gossypium hirsutum
gttcaagagtttatttcagcttagaaaagcaaggtttcgaggggccaaaaaaattgcattatccatacaagattaataaaataaacataaataaggatgaggtaattaaatgaataaagttgtaaagggggttgttaagcttgcaagtcatgatcatcaccaaccaccacttcttttctcctctaaaaggggtaggtgaacccaatgggattgtgctttagatatatacatatgtatagagcattcggtacaagtcaattcgttatgccttgactacatctaagtacatgtgtatacatatgaattgattgaatattgcttttagaaaaaaccccacattaatattgaaaaatattttgagaataaaataatttttaaattgatgatacttacttataatatatatatttggaaattaatcaaattgaaaacaaaaggtttgacttatgttgtaattagaatattagtaaaggtttgggttttaatttcaataatcaaggtttaatcaggttgtattggctcaatattttaatttagcaattttttatgtgcttacataaaaataacaaatttagtcatcgatgtttatatatt

SEQ ID NO: 10694 - DNA, 618 bp, Gossypium hirsutum
gataagtattttccctagttttaaattagttgtggggaatctgccctttttcacatttttatcattttctcatcttatttgtgatcaaagatgaaaattggaagaagcctatgttattcttatccataaatattcaatattctactatacgcatttgataagaaagggcagaagttaattactttttttaagtgttcaaaattataaaaaacttttggaattaaacctaaatttttttgtgtttaaaaactaatatgagtttggatcatgtaattatttttatcgggacaattttatctgaatatcatattttctgttcaaataaaattacttgaggactataaaatagatgacgatagatatgattaaagaaaagattttcggttaaaggcataatttaatttattaattttttagaagagtcaaaagtgtagttttttttttaaaccaaaaaccccacccttgaaaattgggttaaattagtaaaaaatatgaatttaaaaaaaaattaagagaataggctgatttctgtgatatttattggaataggttgattttggagatagaaaataaaaatgtgtccagcaaggtatcgatgcttatgactaaatagcgaaa

SEQ ID NO: 10695 - DNA, 696 bp, Gossypium hirsutum
cagcaaatactttgtctccaactttgaattggtttttcctctttacatgcatgtcatgacattgttttgttacttctttaaacgttctcaagttctcatcaacccttgttcgtcactcatctaattcatcgaactgcaccattctctcttcacttgtcccttaatttctatcaccttgaaaaggatacgattttaacacgtattcgtgagtgatttcctgtaaataatgttgagttgcatgattactaacatcaacaaaatgacaagtatcatctcgctcactagaaactctcacaacatcacgtgcttgaaaagtaacctcttcatcacctaccttaagcacaagttcaccattacccacatcaataatacttctagcagtgactaaaaagggtcaacctaaaatcataggtatctcaacatcctcattcatgcccaatataacgaaatcaacgaggaatatgaatttatctactttaacaagtacatcctcaatactacccctaagatacttaattgacctaccagccaatttaatactcatactagtgggttttggttccccgagatcaagttgtttgaacattttataagaaattagatttatacaagcacacaaattagctaaagatttttcaacatttaagctaccaataaaacaatggatagtaaaagtccttggatctttaagcttgg

SEQ ID NO: 10696 - DNA, 646 bp, Gossypium hirsutum
aagttccgtgacaagtccggcatcaaataaccttcaattatctgaagaatgtatgcccaagcatatcgaattctttctacttcggttgaatcattatccggatccgggaatgtatctcataaccagcccatctcgatccgaccttcgttaattttctccggaatagcgcccaaaagcttgtagcacaccgctccccaatcgccatattgaacagacccggtgactgggtacccgtccaccggcaatcccaattgcagattgacatcttccaaagtgatagtgcactctctacatggaagatggaatgtgtgcgtctcgggtctctacatcttgatcaacgcactgataagttttgggtctaacttgcatccccggcctaccaccgccacgtgccaaaaacccgcttcccgcaagtaattctctaccaacgatgatggaggaccatgcatattccggatatagcattccaatatccgatctacagacttttataacaaataataaattaataattatctaaaaatgcataaataaaaaatcttaaataatatttaaaaaataaatttaacacttaccattttcatttgttcgacggatatgtgctggttatcaagacaaatcaattctcctgctattgctaaattcg

SEQ ID NO: 10697 - DNA, 642 bp, Gossypium hirsutum
gaccaagttacgacgtctgaaagccccatatgaacctttggaatagttaggatacatatgtcatgatagaggatttcaatatatgtgtgcaagtaagaccatggcatcgatatgtggctccgatatatgtgtgcgagtaagaccctatctgggacaatggcatcaatatgtgattacatgtaagaccacgtctaggacgttggcattgtacgatttatgtgtgattatctgagtgtcctagccaattctgaatggttaatcgagcaaaggtaaatcgtgattggatgtgtagaacgagttaaaaggccaggtatgagttagcttgtcagctaccagtaataaggtaagtatgtgacttgaaagttgttacaagttatatgtgatgcaaaggataaatacacatgaatttaataagtgtattcagttttgaacaaatggtatgaatattatgggattgattcttggatatgcatatatatgtgaccatgtatattcggccatattagtagtatatatacatgataccataatcagattcttgagcttatgtaaatatgtatatgtgtgtttgattatataatgacattttagcttagaaagttgactgacatttggttaatatgattttgtgagcattcagcc

SEQ ID NO: 10698 - DNA, 685 bp, Gossypium hirsutum
taagatgattccgcacatagtccacccttatcgataatttacgatggttttgcccttactcacatatatgacataggcattttcacctatgcttctcatttcacattcatgattcaattccaatcgatctaacatgcataagaatatatcacatacctggccaacttaatgcattgaacaaattcaattgccgatttaacacaaggtctcatagtcttagacttttatcaaatcaccggcatttagcctgctaggttttaaacccgataatattattcaccagcttaaagcttgctaggctcaaagcccaaatatcaccattataaagtcgtctcataaacaattcatataatatagcatgtatacctgttcactttgctctatttaatcattcaatcacaatttataatttccctttgaatcattcgatattttgcacactaagtgtcattctcaatatctcgcacactaagtgccattctcaatatttcgtacactgagtaccatatttgattgccccgcacactaagtgccacattttgtcgatatgtcgtcagacattaaaatattcacgtatatacaatttatacaatattaaagcattagaaacatcaatttaacaatgcttattgcatacgaacttacctggctaaattgtaaagataccaaagttcagtggcattta

SEQ ID NO: 10699 - DNA, 588 bp, Gossypium hirsutum
tagaatgtattttctgtataattctttagattgcttatataatagtaaagaattgcactaatctgccttctcttttatacccccttatttactcactctttcatttggattcttttgaatcaaatggaaaactttaacaagctcaaatctttgctttatccaaatgagaatggatgttacaaacttgcaaattggaaagccaagaaatctaattttattagttcatgaaatcactccttacatttgatacacttagttgaaaaggctaaagattgagcaatactatatttactcttgaaactatcattttgttgaattttacatctgtacaaagatgaaggtgattcaaatataaacaagctcttcattttgagcaaagaatgaaatacgtaattaaacctacctttgcattttcaaaaactactaccccttccctagacctctcttacccttcgttttacttgaaggataaacatcactgtggcacttttacctgtgcaaagccctgaaaatggcaggtagcaggtttgccctaaaacaaacaactgatagcagattagtcttgcgaggtagcagaatactcgaaaa

SEQ ID NO: 10700 - DNA, 670 bp, Gossypium hirsutum
tgacgattgtgtattcttgcacatcatcgattaatttctcaacaactatgtatgcgggaatagtataattgatgtatcaaaagcctaagttcaattggtaatagagtcgaaagctagtatattgactaaataatattgtaattattatgcgaagaaccgaaacttaattacaaattatatgaaccctaattatatatgttcaatctgtctcttagttatcctgacacattcctttacggattgcattagaactgatacattgaataaatgaaaacgatgagttaaagaaatagatcacatatataactatttgctatgaatgcatttttttgctatcagcaagagatgacttagagattaaattaatttcttcaaattattatttaattgattgtaattaaataattgaagttcaaagtttatattaaattaattagtcattatagttttattgattgagacaattaaatttatttactcatagattctagtatggtaaaattaccattaattaattaaaataaataatatcatgagaatagaaaattgggttagataaattatttgagtgggttaaaaatttagataatatatataattgtacataattcattaggcagacccaatagcacatctagggggtgataggcaacaaagtctagtccctggg

SEQ ID NO: 10701 - DNA, 556 bp, Gossypium hirsutum
tgtcgttttctagatttaaacatgtgtctcccattgggaatgcaatatgactcataattgcacccaaatcttgttgattatttgtaaatactttaccactttgtttatgattgaattattgaataaggtttttttttataaatataattttaatattaaaatttttttcacccaagtcgcgtgtgacaaaatctaatatagataaaaggtttttgtaaagtttgattttatcttaacttagttggcgccattgttgcaacaacttggtaggtatgggttctagtgcatagtatttttcaatttaagaatttgacgaaatttatgaataatttaaaaattatataaaaaaatttgtaaagatgagattgaagattgattaggtagaatcaagacagtgcttccaaagtcattaatagtttaaagagcaataatattggtatcatgttgctcgattttggataacatatatttcttatcctaagatccatatgaatatacagtcttcaaatattaaaaagaattaagtatactcatattcaactcttgccttcaaatc

SEQ ID NO: 10702 - DNA, 672 bp, Gossypium hirsutum
catgctccaacttgattcatttctattttcatcttcatcacctacaaaagttctaagcaaggtaaaagaaatgtactataccagtttgcgacaaaccagacccaagtaatatacagtcatggcgcgcaagaagcaagaatttaaactgaacaaataaaaatcatctactaagtttctatcccaaaatagagatacttcctttccctttagcagaataaattcaatatataacaataagcttatggtaaaagtatgatggaagcccttgtaataggagtcagattggattttgcctcctttactaaaaaaataaacaaattactccctgtacattaaatcaaagggcaaactagtcctttcagttaaaattttcatccatttctactgctaaaaactggtgtggttgatggaataaccatacagttccacattgcgtgcatgatgacatacagggagcagttttaacagtagaaatgaataaattttttgacagaagggccaatttgctctttgatctaatgtagagggactaatttgctcatttttttagtagagggagggaaaaatgcaatcctactcctagtacaagagcctccatggtacttttacctaagcttcttgtatttttctcttttgctcgattgttatttgctaaaaaacccaactacctgg

SEQ ID NO: 10703 - DNA, 634 bp, Gossypium hirsutum
ttttctttccttttctttgaaacctttaagcccgggtccttatttgttaataagggttcgttcttgtttcattggaaaccatttatccccattttgcttcctaattcatttaaaaccaatataactcatcttattgaattttgaactaaatcgacactacctaaattcgatcgggaacataatacgactcatcacatcatccgaatcgagctcgtatcaattcttttgctaaccccctttcgaaattaccttgtgatttttctttgtttcaggtttgcaagattccatccacggattggttccaacttcattacctttctaccgagagacgttttcaattgattgaaagaggtaagttggaagataaaaatgattgtcacatttccaatggtaagcaaggtaagggttccttgttgagcgagtttcaactcatttactcacatgtttatgacaagattgctgaaaattgtttttgcgaaattgttttccccattgaattggttaattttcgttcatctattatttatgattttgtttcaactagtgctttgaaaagttttttctatgataagtttgttgctggcaattttattgaaggcgttcgattagatcagcatgagcaaagtgtgatagt

SEQ ID NO: 10704 - DNA, 612 bp, Gossypium hirsutum
  misc_feature (17)..(17): n is a, c, g, or t
  misc_feature (602)..(608): n is a, c, g, or t
ttttcaaatgttttaangtgattaatagaagattggtaatgaaagattaattaacaccttcttcttgaaaccatttcttcacttctcttctggatatgaactcctctattgctacacaaaatcttgctgattgatcgctgctaagcttcgaagagtgatcatatcttaaggaattgttcttgacgccatttgacttcctgtaggatcaaatttttagatgtaaggaactaaaatgatgggtaaaattaaggcaaaaatggaaactataattgaagatttaggaagtagaaactttggtttgggttagatgatgatgacaatcgcgataatggaatttttttttttttaaattttcttctttacaattttaaatatcttttaaattttaataactttttaaaattattttaatgtttgtttttaattacaataggtataataaaccccatatattattcaaattgaattagtaatttaacctttttcacttatataaaattattttcattgttttatccgctttctattttacaaaattattttccccccattttatttcttttatttaactttttttaaatatatatataaatccaaaatcnnnnnnnaccc

SEQ ID NO: 10705 - DNA, 565 bp, Gossypium hirsutum
cggtacccggcacatgaggtgtaagtataacattcttaaatttcaaaactgggtcattagggtcaaatggttctttccatgcaacatcaattcctaagcctcccaagtgtccagactcaagatgttgcacaacagcctcatagtcaagaagaccccctcgagcaatattcaccaaaagggctccctgaaatcacactattgttaacataaacatccaacaacttaaatcaaccatgagtgcagctctttcaatacaaaattaaaagttgaaaatttatagaagatagctaacataaatataaaacaaatgctatgaaaacatgctttctgaaaattttgattcctgttttcatatctatggttgcaactaaaaaaagaagaaagagttctctcctcaattttggagtgcatttgaaacaaacctttttcattgaagataagaagggcttgttcacaatgccaacctgaaaatttgaaatatccttattgtattaactacggttggagaataagtattttagcatatgtatgtacataaaacctaagaagacaataccattccctc

SEQ ID NO: 10706 - DNA, 486 bp, Gossypium hirsutum
tcttgcttggagctcgctacccgggctttttttaaaaaagaaacttaacatcccaatgagataaataaagacttttgaataatctagcaacttaaaatgaaaaaatttcaaatagttcagtgacaattttgtaatcttttgaagttgagtgaccaaaatgtaaacttactaatagtttagtgactgtgggtgtagtttaccctttcacctttttaattcattttattgtttaaaaatgatcaaatgtgggattaaaatgtaaattttccactatactttattttgattaatatttgccattatattttgagagtatagttaaatttgccacacaacttttatgttattgaattttactatcgaaatttgagttttactaaattttgccactaattgtcaattgagttttagcatcaactggaatgggttcgagtgcgctaaatcgtattatcctcctatttataggttgaagagggactatgggta

SEQ ID NO: 10707 - DNA, 649 bp, Gossypium hirsutum
cagcatgtttcttcaacttaggcgcacaccaaataaaaatgctttaataaaagaaagattgttactggtgatggttgcactctactgtactggtcgttggagtggacaaaattataaatattaaaaatattaaaatatattaaaatttattggttaatcaatttattttaacgattaaaattatcaataatgaaaaatcgttaatagagggattttattgatttttttattaatgataaaggcttaattgaatataaatttaatacaggggcataattttttttccttttttaagagtttcttttaacatgtaatcctatatagaaaatcatcaaactagatatgatattgctagtgtcacggacctggatcaaagcccgcgacaattgcgtaaagagtatcccatagaggtcaattgatgaaatgagactcatttaattcaattgaattgacttgactcatggaactcatggagaagtctatctaattgaagtgttggttacctaattaaacattccagtaaaattagagttatcaaggtaaatagtgtaaatcctaaagaaataagattatatagagtttaaatcgcttagtaatcaattgtagatagactccaaccttgaccgtccatgtaacccaaccagtactg

SEQ ID NO: 10708 - DNA, 892 bp, Gossypium hirsutum
  misc_feature (601)..(601): n is a, c, g, or t
  misc_feature (754)..(758): n is a, c, g, or t
  misc_feature (785)..(787): n is a, c, g, or t
  misc_feature (789)..(792): n is a, c, g, or t
  misc_feature (806)..(809): n is a, c, g, or t
  misc_feature (835)..(839): n is a, c, g, or t
  misc_feature (851)..(851): n is a, c, g, or t
  misc_feature (854)..(854): n is a, c, g, or t
  misc_feature (862)..(866): n is a, c, g, or t
  misc_feature (868)..(869): n is a, c, g, or t
  misc_feature (872)..(873): n is a, c, g, or t
  misc_feature (878)..(878): n is a, c, g, or t
  misc_feature (880)..(882): n is a, c, g, or t
tggggaatctagagaaccttgtgactttaaacttaagtcaatgtggaattgttggtccaatcccttctgctttgggtcaattaaccagtctccaatctctgatcctttgggggaaccaaatcaatggatctatcccattagaaattggatatttgagaaatttgacttatttgagtctctccaacaatagaattgttggtccaatcccttctgctttgggtcaattaaccagtctccaatctctgatcctttgggggaaccaaatcaatggatctatcccattagaaattggatatttgagaaatttgacttatttgagtctctccaagaatagaattgttggtccaatcccttctgctttgggtcaattaaccagtctccaatctctgatcctttcggggaaccaaatcaatggatctatcccattagaaattggatatttgagaaatttgactgatttgagtctctccagcaatggaattgttggtccaatcccttctgctttgggtcaattaaccagtctccaatctctgagcctttcggggaaccaaatcaatggatctatcccattagaaattggatatttaagaaatttgacttntttgggtctctacaacaatagacttgtcgattcaatacccattactctgtaccaattaaccaatttggaaattttgtaccttgataataaccaacttcaaggttcaatcccttcttgtgttggtagtttatcaaagatgcaggacttaagccnnnnntctaatctattaaaaggtcctattccnnnannnntttgtaatctagcnnnnttgacttcattgtacctctcccaaannnnnttgactggttcnatnccttcttnnnnngnnagnntatcnannntgctggactt

SEQ ID NO: 10709 - DNA, 622 bp, Gossypium hirsutum
ttcttctgtgagataaatgatggcaggggcagatacagaagagttgggctgggatttatctttgcgagcgcaatctcgaagagctctctctatgaatagtatatggctgcgagaagatgaagaagggaaagggattggaagataggggagaatcgatctgattaatcaggacatagggaaggaagttcaaaaacaagagggggaaagattattgacccaattttggggttcagtattgaggaaggggtacagtctgcacaatggcgaaagagcaaatatggctcgagtttgataaatatggtaatggagcatgatttagacgatgagaccttagtgggtgaggaggggaaaaaacgaaatagggggagatggaagatctttctagtaatgtagagagagacaatactagtacaagaaataggagattaatggatctcaaccttttatcatcgacggctgccaagaggcaagccgaccggtcacaatgaaaatcttaagctggagcgtctgtggcttggggagactacggacggtcagaaggcttcggcaaatgctgaggttacataatccccaaatggtcttctttatggagacaaagttaggcagaacagcaaacagaacg

SEQ ID NO: 10710 - DNA, 612 bp, Gossypium hirsutum
  misc_feature (589)..(591): n is a, c, g, or t
  misc_feature (596)..(598): n is a, c, g, or t
ttaatgatatatatattatcctcaagagagagatacaatgaaagggaaaacaacgaaagtgaacagcttacatttcaatatatccaagcttgggtgaactttcgagcacattgagacatcgatggtggtggtgtcagagtgtagtacgttaacatttttttttcaatgttattgaattttataggtttaattctgaattttgtattcttattttacgaaattttaaaaattggtcttttattttaactttccagaattttatttttatttttgagaagttagtttaatttaatattcttatttattattcacttcaaaatcaagagtttatcaatttgtatatattaaatttgtaaaagtaactacttccataatttatatgcaataaagaaaaaaaaaaggtaaaccacaacattagtcactaaattatgaataactttttgttttggtaacttaataaaagaaagctacaatttggtcattaaattacttaaaagttttcatttaagttactgagttgttaatatttttttttaaagttccgccagagagtttcaagctgcagtttaatgattggtataatggatcnnntattnnnctaagaatcgaaga

SEQ ID NO: 10711 - DNA, 925 bp, Gossypium hirsutum
  misc_feature (321)..(321): n is a, c, g, or t
  misc_feature (558)..(558): n is a, c, g, or t
  misc_feature (585)..(585): n is a, c, g, or t
  misc_feature (675)..(675): n is a, c, g, or t
  misc_feature (693)..(693): n is a, c, g, or t
  misc_feature (704)..(704): n is a, c, g, or t
  misc_feature (726)..(726): n is a, c, g, or t
  misc_feature (747)..(749): n is a, c, g, or t
  misc_feature (754)..(756): n is a, c, g, or t
  misc_feature (860)..(860): n is a, c, g, or t
cccattcaaaaggatagggttaaaccaagctgcatttacagctaaaagaagctttgaagaaggagccaagacaccaacactgtgaagataaaaaagattctgattgtaatatggattcttgttaaattgccagagaaagacatacaggacaagataatttaatgatatatatattatcctcaagagagagatacaatgaaagggaaaacaacgaaagtgaacagcttacatttcaatatatccaagcttgggtgaactttcgagcacattgagacatcgatggtggtggtgtcagagtgtagtacgttaacattttttttncaatgttattgaattttataggtttaattctgaattttgtattcttattttacgaaattttaaaaattggtcttttattttaactttccagaattttatttttatttttgagaagttagtttaatttaatattcttatttattattcacttcaaaatcaagagtttatcaatttgtatatattaaatttgtaaaagtaactacttccataatttatatgcaataaagaaaaaaaaanggtaaaccacaacattagtcactaaantatgaataactttttgttttggtaacttaataaaagaaagctacaatttggtcattaaattacttaaaagttttcatttaagttactganttgttaatattttttttnaaagttccgcnagagagtttcaagctgcagttnaatgattggtataatggatcnnntattnnnctaagaatcgaagaaaatacctttagatccgtcaatctaacggtcagtgtcgaagattggagaaaaaagctgtttgaattttggttcgcaaatcttaacgtccnaaattgtttcataaaaaaaagaatatagaagagaaggaaagagagtttcgtttatgcagtagtgt

SEQ ID NO: 10712 - DNA, 472 bp, Gossypium hirsutum
aattgactttagtccttgaatttgtcaattaaatctaattttatctataaatttaaattctgtcaaaatttaataatgtgatcaatattattaaaaattaaatatattcaatttgattcgattttaaaaattaactaattaaattcaaattaatcctagagacaactttaaataatctcaaactcacaatccaaactcaaattaatcttatatctaaattaacagaccaaaaactaaaattaagtggcacattccaacataatatctaattaaaacataattataataagcataatattaaattttgccctcaacgtttacatcttttatcaatttggttcttttttagttaatttagccaataatcttttaaaaaagaattagacatttttttaatgaaaatattgactaaaacattaatttctagcaacattaacgtagcaatccgcatgacaatccatgcggctttatg

SEQ ID NO: 10713 - DNA, 513 bp, Gossypium hirsutum
ctagctcaaaatgacggtagaaatagctaaatcatgctttaaggacctcaaaaacataaagaacattaaaaacggggctaggacatacttacaatcaagcttgaaagttgaagaaaaaccctagctatggcctctcaaattttcggcacttgatggagaagatgaacaagatttttacttcattttccctttttattcgttaattaacaaaatgaccaaaatgccctttttactaaactttgaatttttatccatgcatgctcatttttgtccaaaattttagaacttggtcaaattactatttaaggtcctcaaactaataattcaactcaatctatgttaaaagcttctagaactcaagttttgtaacttattcaatttagtccctaaaaataaattgggcatcttaggcatagaatttcttcatgaaattttcacacaagcatgcattcacatcctagacctcacaataatcataaaataattatttctactttagatttgtggtcttga

SEQ ID NO: 10714 - DNA, 671 bp, Gossypium hirsutum
  misc_feature (569)..(582): n is a, c, g, or t
  misc_feature (584)..(603): n is a, c, g, or t
  misc_feature (606)..(608): n is a, c, g, or t
  misc_feature (610)..(610): n is a, c, g, or t
  misc_feature (614)..(626): n is a, c, g, or t
  misc_feature (630)..(636): n is a, c, g, or t
  misc_feature (642)..(667): n is a, c, g, or t
gttaagggcgttcaatgcctatccaaccctacacaccacaaagtgtctatctgacatgtatacagagacgtagcttaagtgctagatcaaaatgcgacaaagcgccagatttagatatttaagtttataagtattgtggctcagccaccaattcagaatagatcacttccttcttcataatatcctaacccatgcaaatacagattacagatattcataatatgtattaaattattctacattatttcgcaggtagataacacagttcaaaatcagattaagtatcacagtactcgtacgtctttaacagagtattaaagagttttcgttcagtcaaattcatatcattcatacaatggggaagtcaatatcagttttaaacaacatttacagcattaaaaacgggttttaggccctttttatatgctacatggactagacatacatccacgtccttacccatatggctcacacagcttgggcactcgcccatgtcctctgcatgtatggttctaaagcataaacaaagagttacactgcctggacacacagttgtgtccttgaaccgnnnnnnnnnnnnnngnnnnnnnnnnnnnnnnnnnnttnnncngtgnnnnnnnnnnnnnaaannnnnnncacctnnnnnnnnnnnnnnnnnnnnnnnnnntttt

SEQ ID NO: 10715 - DNA, 588 bp, Gossypium hirsutum
cggaagttatcctttgtctattcttagaccggcgacttcaaggtctctcagttcttatgaggaactgtatgcaatcaattatcagttcattcacagaagaagaatggattaacagctactctagaatagcgaaatctattgcctcaaggttattattctttagtgatggtttcttagcccaaccctacccacccctacattgctcactcaatgcttgagtgcttattgtcgattgcattaactttcattttgctgtttcctttttctactttcttgcttatgcttgcctcacatgaatgcagagttcctacagacttgaactgcttgcgagcagtgcaatgcatttcaggagttgatcctcgtaccaaacatctcaaaagcgttgttgccttcgaaattcttgttaattgtttcgagaacaaggtagccctctgttcttgctttttcgttagttctctgtttgaaagttcttattttcttgctaattgcttccaacttgagattaccgccatgagaaagtgttgtttttgaggaactaatgccatgtgatgatactaattttcttctgatgtcataccagcattatcc

SEQ ID NO: 10716 - DNA, 684 bp, Gossypium hirsutum
aagtacactgcgacactagcgactatcatcaatgacccttcccaccgcattttacactcctgtccgttctttgtcatttcgccatttctgatgtctctcttttacctcatttgtcaaacctcttatctttaattaattctgattccgccattttccatcttctcattttaaacctttaattatacacctatatatatatatacacacacacacacacacactcatttcttccttatacgacgtgtcgtttcttgtttttttcttttttattttaatctgttcatttctttctattggtgaacccgaaaatggagagttatttaaagttttgatcttccgtgcgaacgctgccgtttctctgtttctcaaataatttactatctttttgatctgttaagttgtttctctatttcttgatcccacagaaacgactacgtattatagctttgtttctgttgtttaacgactcctatttctcatctccgtaattagctattcttttctttttttattgttctctctgaatgcagtcgtttctggcttacataattacatgatggaataaaaaaattggagtgatctatttgattagttgatttgtgattgatctttgaatttatttcgcagttgatttccgaaagttctgtattcagtccccgggaggagggtgtttatagaaacgag

SEQ ID NO: 10717 - DNA, 609 bp, Gossypium hirsutum
  misc_feature (576)..(576): n is a, c, g, or t
  misc_feature (578)..(578): n is a, c, g, or t
cattaagctgcaaaacagtccggatttgtgtcaagggtgacggatgtggcctctttgtccaaaggaaagtaagttgaactgcgtactgtatggtatagttgatgaaaaaacagcacacattggactataaagttttcaccactaaatgaaacacccaggagctggcaatccaggatcataattaagagctgctttgattggaaagaaaaagaatgaaagaatccagaaatgagtttacatcagcaacattaattttaacaaatgtgtcttcaaaaataaaaagaactttaaaaaatgaatatgggtaatatccaacgtatacaagtatagcccaaatataagataaacattaggctaatgggtcaaggaataattgaaactgtgccacgtgttgaagtggtccacaataagaccaagtcgtagtatagcaatttacaatacaggacaaaggacttggataagatccatgttaaatgggcccactttacgcaccagggctaaaacagacatttacatttaaatgggctgaaaaggtttacattttacaatgcacccccccgccaaaaaaaaaaaacngnaaatttggggtttgaaaaaaaaaaaaaaaaa

SEQ ID NO: 10718 - DNA, 391 bp, Gossypium hirsutum
  misc_feature (387)..(387): n is a, c, g, or t
taccaaacaccacaagatcaaaatccacctaaaatgaattcaaacacagcatttaaaacccattaataattaacaacagaacagatttaagttgtcctctttagagaagaaaactaaaaccacaaagagtgaaagataaatgatcaagccatattaaaacaccaaaattaaagacctttattggtataataccatattaaaacaacataacctacaaaaacaaatataataaattacttatttagcattgcatattggcaaaaactgaaattgtacaatttcttcacaacattttagattctacaagacagcaacaccacaatccaaattcagcaaaataacttaaaagccaggaaaaaaaaaaaaccccaaaaccaacctaaaaanaccc

SEQ ID NO: 10719 - DNA, 635 bp, Gossypium hirsutum
tttctttagtttttatgaaatggatttggggaaaactaatgatggacttcttatgttcttgattctgagatattgactggttctgtagggtagggcagccgattgtaatggaaatcttatgctgaaatgtttggggactagggaatccccgaacaaggcatcgcctttggcatatgctgagggtgactaatctcgatatggtttttttatggaaactaagctacatagtttgaaaatggaggaagtttggaggacatgggggatgtggagggaatagatgttagtagcaaagaaacaaatgagggttatctttaggatggaagtaaggagttaaagtagtgttaagaagattttcgatgaatcatattgatgtgacaatggagggggagttagaagacattaggtggcaatttgttgggttttctggacatctaatggaaaatttaaggcatcattcatgggatttgttaagaaatcttgtatctgataatggggacccattgttagttatggaagatttcaacgaaattatgtattccacaagaaacaaggggaaaggttgactgatgaatggtctatagaagcttttcacttgatccttgatgattgtgatttgcaggatgtgggttatgaga

SEQ ID NO: 10720 - DNA, 587 bp, Gossypium hirsutum
cagtcctatgtcttttatgcacctaattgaaccctatcgtagatactcctaggcatgacatttatagaagctcccaaatcaagcatagctctatcaagtttaaggtctcctatcttacaaggtatcgaaaacattcccggatcattgcatttagttgggagtttcttttgaaataccgtagagacattttcgcctaagctaattttttcattccaattaatttccttttagatgtgcataattctttcaaaaacttagcatatctaggcacttgttttattgcatcaatcaatggaatattaacttgtaccttgcggaaagtctctagaatttcggcattgacgtcgtctgacttttccttccttaaacgctgtggaaatggcgccctcggcacataagaccaaggttgattattagcgttctgacttgcttgtgctcgaagctcgggaaccctcacttcctgttcaaattttgctgcatcgtgcgaagcagtgagctgttgtaaacgtgatttccctgcttcctttggtgctgcttgcgacggttgtaaatcagccttggcaaggctaaattccctctcaatatca

SEQ ID NO: 10721 - DNA, 645 bp, Gossypium hirsutum
gccaagagaggaagcaaatgaggctatatcagatttcagtagctctacgtcctgtgcggttttcgagttcgacatctttgctttacggcttctaacagtgaaaagagaatctaggatatacaggggtttagggtttaaaacaatggagaagatggaaaatcaattaaagacttgttctcgggcgggtcgggttgcgggttgaaatattgcaattgtattattagtaatatgcagccactaacaatgtatttatcgagtttgtcacgaatttttatagaggtgttggattcagccctaaaaatggtgcaacttaatataggtacaatttaataaataaatatctgtaaattaataataaatatataatatttaaataataacaataaaatagtagtaatataatagtgaattagtagtaaaatattgaaaaaaacaacaagaaaaaataaaagaaaaaaatagtaatttttttgcataatagggttggacctggctaggaccgaaaaagacttactcaagtgttagcctattttttaaacgagccttattttttttatctaaatttatttttaaaacttatatttttactcaaatactctcacttttcaagtaggccttcatgacgaaatgggtaactttattccc

SEQ ID NO: 10722 - DNA, 600 bp, Gossypium hirsutum
agttcggttatacaaatcaagtattgcctttatattgaggaattggttagtatttcatgtacaagtaaagtgagcactggctcgttaattttaaagcaacttgctttaggcttcttaataacttgtttttatctatttgtggctaaaggtgaaagatttagtgagagagcgaatgtagataaataaataaataagtgtgagttttattattttgtaagtaaaatatcatatcttgtaatatatattcatagtagttttttttttctggataagaagaaaaggtttcgaacataatttggtatttaaaaagaagaaatactttgttgatggaaatttatgggtttggggaatttgattttgtgattttcgtgtgaaagagttatttgatttaatgagataacaattcaatgggatttttggaaactcctctggtttctaaatgaaggaaagatgaagtatcttttaaaaaataagttatttttttattttttattagaattaagattaaattaagataatatgtaaatgttgagagttatatttttcaaaattatgattaaactgatacaatatataaacatcgaggattgaatttgttat

SEQ ID NO: 10723 - DNA, 562 bp, Gossypium hirsutum
gtataagcaatgtcttgcttagatagaggtactctctaaccgagctgctctgaccatgctcaatgtgatgcgatggtgtttgaataaaattacgattatgatgagtctcaatttagaaaggtatgaataaaagtttatgatatatatatataagtgataacacgtgagatgaaaggtcatgttgtgataaatatccatacttgcttgatgctcatatgatgtagtgcacttagcttacttgataagatgaacgggataaatagaaattcgtagaagtatgagtaaaagttcctaatatcatgatatgaatgaaaatgtcattgccttgattgaacgttgaatgttgatgaatgtcaatgatattttttatgagataaatgattataatgatatgaatttatctatgttaaattgtttggactgaattatgtgattgtaattatatgtatatgatgatgcacgaaacgaaagttgtgattgtgatataaatatctatgtttgtttaacccttatatgatgtcatgagtatgatttgttcgagtatctgaatggataagtcagc

SEQ ID NO: 10724 - DNA, 669 bp, Gossypium hirsutum
agaccaaatgcccaactctcattggtcttgaggattaatattttgttaaatgtagaacaaatttattttaaaactcgtattttcattaaatttaattgttgtttgaatctcaattaaatacactacttaatttaaataatgaataattaagcattaatgcggataataattaaaatatcaaaattttaatataattcgaatttataatattcaaatccacactacaaatatttaaattcgtactatccaatagtattttaaatcttattaatatagtacacagtggtaattattcaaaattttataccacaaaatatgatttggtgttgaaaaatatgagaacaaaaaaagtgaactcaatgatatataaagtattttagacccttttattcttttattaacaatggtgttttccaagattgatgatgtatctcaccaccttctacgtctccttccataccagtatgcaaatgcagctactgatgctgccacaacaacacccgcggttgcgtgccaagggtagatcagcgtttcgacaacaaggctagaagttccggcttcgattaacggtgtctggggttttattttcttattccctgtcatagcgaaattcaagccctgtcgtcccacctcggccagatcatcgactgctggtttaagctgagcgga

SEQ ID NO: 10725 - DNA, 651 bp, Gossypium hirsutum
  misc_feature (646)..(648): n is a, c, g, or t
cttttatcattataataaactaagtactagtcttattttatttaatttgatacacagctcatgccgaatatcctagctcaatttagctcatcatgttttctagttcattatgtgatttaaataatttttttttctaaccaaatttaatgtgtttttatttcatacaagtgttaaatgtgtcttaatctattacaaggtttaaatatgtctggccgaattaatgtgtccaaaggacaattaatttgttgatttgtttggtacaggtgcacaccccttggacggcatagatgtatggatgatgagttaatgcaaggtgcatgcatatttgaggttcaatggatgacattcaaagggatacatgcatttgggatgtacatgcaagaggaagctactgattgttcatgtatttgaatattcatggaccatatttatcgacaattggaagataaatgcttgggaaatttgtgcaagtaccaaccagcatctagaacaaaccatttcttctcacatgcatgattattctaccatttattaaagtgcatggacgttggccacaagggagatgaatttctatacattcaattcaagtattcaaggcacattaaagcctcattcggccaagggagatgtaggagtattaaaggcnnnatt

SEQ ID NO: 10726 - DNA, 649 bp, Gossypium hirsutum
aattcgagcaagctttgaaatcactataaaacacggaaaagtaaacagagtaatttataaagcttagtaagctcgtatagttaataagtaaaatttaccattcattctcaaattaagttatctatcataaaacaatacaatttaacttaatcataaggctaatatatgttccacatagtagatcatgtaacttacaaactttatagattcaatgcttatacgatttacgtacatacttgcactaacacgtatcaatctcttaccctttcatattttcaatatacccgttgaaccatttggaataatatcagatactcgggaatctcacaccctaagtgccaatacaaggctgaagccatctcaatctcatatcgcatataatgctcactctcgagctatctacgggtctactcacacaagctgacagtcaagacgtaactacacgttgttgctcgcacaagataacaagaatccgcaacacatgttgaaaaactcagccaccagtggaactacgcgccagcacccaaacacaataacccctaatgacttgtcatttgtatcctatctattcctaaggtacaactgggatttcatattgccgaatctttgtcgaactttttcgtaaggtcgtattcatcaacaatgcaat

SEQ ID NO: 10727 - DNA, 632 bp, Gossypium hirsutum
tcaaacacatatataagcatctaattaaagctcggaaacacccggttcgcaagtcatgaggaagaactgcactatggaattcaatggagctaaggagatgaaattataagtccaaagcttcatcccattccatagaaagctattggcagagacatttaactgtgagttgtgattgacaatgtttgcagtattgtctgtaggcatactaccaagaatgtcaagatagattttcaaaagcaaatagaagcagaatcataaagtagtaaaactatagcattgaccgaattcgggtttcttctgaattagaactaaggtcgaacatgaattgttaccagaaactacaagggactgctccgaatgaaacaataaggttggaaggaagaatggtgccataatggcagcaataatagtcatttggacagtttgcattaacgattgctgatccattttctcagaatcatagatacctacctcataatatcctaacacttccctctagccgttaatgaacaagtatgcatcaatggttaactaccaagtacctcaaaatggtagataacctcatagtatcctaatacattaatattgttcattaaaatgcatgttccatacaggctttctattccagtgat

SEQ ID NO: 10728 - DNA, 535 bp, Gossypium hirsutum
aaattcggaatgatgcagggaaatttcaatctaagcacaacaaagaaaaaaacaaacttttatcattataattatcagaaaggctcctccagtttcctcaactacacagcttgatagcaaaatccccaattttttaaaactgaaaccctaattcagaaaaggaaaaaaaaacccagctacattgactagagaagaagagtaatcaacaggcaaaatcaaacatctatatgcaatcaaataaaagataacggctgggaaaaaattggccgaaaacaatgaatcaaattaaataagaaaaattgttctgttttttctctggaataaaaacaaaatcaaaatagtaaagaaatagttttcagcagcagtttgttaacaaaggtaagatgattgaaagaaagtgaaggtgagagaatttaggagaaaaagataggaaaagggaaaaagaaagaaaacaatagatttatatatatatactttttttttactttaaaataaaattgaaaaggaaaaactaaaaaagacttgagaacacgat

SEQ ID NO: 10729 - DNA, 484 bp, Gossypium hirsutum
agcaagaagaggataacttaagcgaagcaagcaaaactaaacggaaaaaggaaaacagaagcgtttcaatttttggtttttgattaattttaaagaaaacccaaacgtttatttatgctccttttccttcatcagattgggagttttatgctttcgtaaggtattataattaatttacgatctgccattagagcgacaacgtcgtctcataaaggttctaaaggtgacacgttgcgaaacaagtgatgacttgtgtaactgagttttcaaccgagttgagacttgggattgtaaagtgtcaacactcaacacggaattgactcgctcttggttcagttcggtaaattacataaatagttatctaattattaatttttttattttagacacttaaaataaaatatttacaatttaaacactcacattatatagtttgatcattttgatcattttcgttaaagtcacgtacagcaagtttgacatg

SEQ ID NO: 10730 - DNA, 615 bp, Gossypium hirsutum
gtgttttgcgaatttatcaaaaatttcccaaattgttgtctcattttgagattacagcttctgatctttgagcatggaaggtgtttgatataatttctacatgaagaaaaacccgaaccagttattgatcatgagaaacgctcttctttcgagtttgccactgccctcacagttctacaacattggtatatatgtgtgtgtatatatatatatatttctaaatccacgagattaatctaaaaaatagagaaagaagctctggattcgaatcgtggatatcattccgtaactattcagttttaggatgtttctctcgcgtttagagttggaggtattgtctcttagatcagtggcgactccgggttttgatttaatcttttaaaaattataaaaatatagattattaaaatagtaaatttacatttttactattataaaaaaatatacaatttaatttcggtcttccaaaaagaatcttcggactttgcctgagttcactaaattattagtatatttatgttttggtcacttaattttaaaaagttataaaatggtcattgaactaaccatgggagttaagtgagatgacaagggtctctcctcaccttaaacaat

SEQ ID NO: 10731 - DNA, 626 bp, Gossypium hirsutum
tactttgagcataatctccaatgctttattaagatcctccatagacaatcgggctatggctgtcccaagatttctcttctcttcggttgacattttcctaaaacatcatttacaaaacttgatatattgttcccaaatccggtttttatatctacataaacatctataacggtatatatacaaggcaactcacaaaagaacactcatcaaccttaacctggttccttcttttatttcagaagcccaacttataatggcaatcctaaccgcaagtatttgtggacaatgctagtcaatcgtacataacaataaacaacaaatcttaccattcaaaaggctacgataaaaaacctacagatcatttgactcatctgaattattgtcattctcacttgtttacacaaaaataaccaacatatgcactccggatagtcgaacatgtaccgaaaaagacagggaagtataaacaaagataaatactatcatatcatataaatttttgctagactgaaaaacagatgaatacacatcacactagatagcaaaattttttgaggtctaaaaccaacctgcacttttggacgactgtttctctgagatgttccaaatgtgtatcgacctcgaaa

SEQ ID NO: 10732 - DNA, 590 bp, Gossypium hirsutum
  misc_feature (304)..(304): n is a, c, g, or t
atttcagcatgtacctataagccatttgcacccttgttcaaggcatcaaaacataacaaaacatgcacaaaatgaccaaattccattcaaccattatgccatataggcacctcaatcacaatcaaactaacatacctaaacttatgtatatatgaacacattgctaccattttaaaacataccataattgacttataccatgttaatataattttaccatttggaccattactcacatgcatcaaaatcacccaagtgaatcaacatatatatacataccaaaatcaaaattttgctttcaacncaaactttaaacaaaagtccacctatccatgccattataatctaggccaaaacatcaaaatctaccgatatgattgctggatagtgtgataggtctccgacgagcttccaaaccgatcaagctttcgataatctataaaacataggaaagaaaactacgtaagcatataatgcttagtaaattcataaattatgaacataacttaccatttcaatgtatgaccttataatttaaacatgattcaatccaacataagcttggcacaagcctaagcatcatcaacaac

SEQ ID NO: 10733 - DNA, 462 bp, Gossypium hirsutum
agagtggacggagagaacttcatggcttttctggctaaggacagggaagaaagtgccatggtggccatggttgttgttgttattgttatatatatttatataaaattgaatgttcgattgtggtgtttatatagatttttgtgaaaatggtactttttatcttacaaatatcgataggtgaaatcttattggttggttatcattttagaaattctattttcaatgcccacgtggcatccttagagaccatttatgcattatacttttggtatttttctgggggaaatttcttgataattaaaaaatgaaaaatctcaagcttattttaaatgttgtttattataccaatgaaattatgccacgtgtgagtatttggtagcccaatcaatatccacttataacagataaccttttctttctctttggcataatgccaaatttagccattcatgcttacatttg

SEQ ID NO: 10734 - DNA, 331 bp, Gossypium hirsutum
ttatttagggtatgctaattcagatagtattggctaaccctaggatattgcgacttctatgctcatatgcgaaatgctaccaattgcatgaatatacttaatatgcctaaactggatgaattgaaatcttcgttatctttccccccaaattgtacgacttgttgtctgttgtgcaattgatgtgctgcaatgatgcaactttttgtttgattagtaaaatttctagatcatcctttcctgttggtgaagagcttgagagggcattattagtttgtctattggatggttcatctactctatgacaataatctatgttcttaatttctagatc

SEQ ID NO: 10735 - DNA, 643 bp, Gossypium hirsutum
tgtgcataagcaagaaacaatgagccaatttaccatctaaaattacacataaaaacatagattaaaacagacttgtaatgaaacgttatagttggcagtacatctacaaacatgtttagcacaggcatttaatcttgataccaaagacagtttcatacatgtaatctcatggagttcaaaaagcagcattcgtactttctttagttttctggattgactatgtcgtcttgaatgaagtcagtggaaaaggtggaaaacatctccataaataaggggattacctaactgtctcagtagttcttctactcatggggtcgaagggaaaggtacataccatctcgacatataatggaaaggggaacaatctcaataattcatgtattgtccaatttctaaagtttgttgcttctatcataggattgccaaaagaaaattgacctggaaaacaacgtggaacttgattcccaaggtatatgcataaaatagttaaaactacttccaattaggaaatacagattaactttgaacgaatccgtgaactaattttgttactaactaaaaaaagcatcatataataggacaattatttggtacattgccattggagtctttaaaaatataaggttctaagggcgatacatgt

SEQ ID NO: 10736 - DNA, 605 bp, Gossypium hirsutum
atctcctattaaaatcaactattctaagaaaaacattccatcaaatcaagtaaaaaaaattaattaaatgagttaataagtcttattttaccattttaatttgatttgatttttttaaatcaagttgaatgttgaaattcgagtcgaattgaattgagtgaaattattcaaattaaattaaaaatgtcaaattaaagtcttgttatagtataactaatttcatattagagcacataaatttgaaatcatatgtatttgaaaaaaaaatttaaataaaaataataataaaaataagatactttagtataacaaatatgaatcgttaattagcttatttggtaccaaaattattattttagaaaacttttaactttctttatatattctttagaattttttttaaaattattataatttttaaaaaatatataaattttgaaagttttataaatattttgaatttttaaaaattgttttgaacatttttataatttgttgagagagatcaatttgctcatttttaaaattgacagtgaccaaaggggtatttacaccaatctattatttgagttattcaaattgtagaattcaactcgattcaaact

SEQ ID NO: 10737 - DNA, 678 bp, Gossypium hirsutum
atttcatttcacttcccgactcaacccggaagggtaatagcatcggggaggagagaatgagacaagattcaacccccttatctatctatctatggcgagcacgggacgagcgagcagaaaaagtgtaacgaatccatcccaccagaccttttggatgggacccgtgttgctggcacgagagggatcaagggaccgatcgccctgaattagatgttcctctatccaatcccacggagagaggtattggccccagcctccgcatatggaacaccaatgaatcctaaatttgttaggtatctaacggataggcgcccgacggtgataagatcgccacgggaagcgcttatgaccgctcgcataaacacccccggttcccccaagtcgattgggttactaggagcattgcccacaagtaggcacttgaggcctatcaagaaattctcgatcgaagaggcaatgactttctccatctcagaaaaccctcgccatgctttttttatcttatactcatttaccttcctcatagtatgcttttggcttcacccacatataaattattgtatacagagttccttgacgtatacggaaaatttggattggctgcttagaccaagggaatacaaacccttaattacaacatcgaatattgagatgattcgttcttgtaaatacgctacg

SEQ ID NO: 10738 - DNA, 641 bp, Gossypium hirsutum
  misc_feature (582)..(584): n is a, c, g, or t
tataaaccgaagtccaagggttcattgtttcaagtttcaatacaaattgaaaacaattcaaaagaaagactcaatgttgaaagactgtactgactgtgataacatccataatcgcgataaatgcataaaagggtatgcagtgaaatcgatttaattttccgcaaaactagaaatgaaaggaaaaaaaaaaaggggatttgattgtttgaatggatttaccagttctttgcccaactccacagcagcttcttggtaactagctttcttcccagaactgctcccgcaaaacacacaaatccttttaaacctagactttgtctcttccatttcccttgctctttgtgttttttctctctctctcacttttgtggccaacaataatgatgttgaagaaagttgagaaatgagaacaaggtgagtagtttttctagccctttcaagttgtttatatacacagcgcaaaggccaaaaaacattcaagcttcatctatttcttattaatattgggaagtggaaaaatattgtttttatttatttatctatatggcgacatcgactattattatttgattaatttaaggnnnccaaaacaaaaacagaaggtgggaactttaataggaaaaattaataataatgaatca

SEQ ID NO: 10739 - DNA, 649 bp, Gossypium hirsutum
cattgggtcctcctaaaaagatctactaaattcatcgagttgttccaaagaatcaaaacggccagttattaatggaattccttgtcggctctctgtaaaatactcgtttggacgagggcttccaaacacatcataagctaaacctgtgctgacgaataaccaacccgcgatgaatagggaaggtatagtaatactatgaatgacccagtatcgaatactggtaataatatcagcaaaagaacgttctcctgtgcttccagacatgccgagctccacatattcttgtaggggatcgattccgtaaaagatgggatcagtaaatgggaattcaccgaaactcaatctttgtgagatcgtcaatattgtaccaaaggtatttttagagtataccgaatcagtatagctatccttcttctgacacagcaacgcaatttcaaacagtatatcgacgtgaagtgctagataatttctttcttcttcttgcttgtcgatgtataaccaggtatcatgcaatagaaaattcctcaaattcctggaggtattggcttgggcctagaaacggaagatcaggtaacccgtgaatccaacgagttggtttataataattcatgaaggaaattatcatatttctgcaagtcaattagatgcg

SEQ ID NO: 10740 - DNA, 608 bp, Gossypium hirsutum
ctcaatcaaaccatatccatcctccaataaaaacctaatgacctagatctaatcctatcctttgcaccaaactagacctaaatgaattacctagaattgagactgttttaagagagcaggaatttcatgaagcagcaataacgatgacatttttgggggacaaatatgaaatgatgatgacatatagcatgatttattcatgacgaacagagtaatttctaattggtggtgaatttcaatgaaaacgtatgacattctcaaaatgaagaattttaatagagttcttattttagttgaaagctgtgacatcgttaaataggatcagtatataatttttcagaagctgaagtttatgttaaatgttcaaagctgcagctagagtgagttgcaggaaggattacgatcataaagcttgtatgttaaacttctaggtgaaacagttataaggaagctaaatgcatttgcaggtaattggttaaattttcagacacagattggaataaagcaggtaaattttgtgataaaatagggattaataaccctcaagtttggacagtagaaagtagaaactcattaatcaactttcactggaaagtaccttcttcgtg

SEQ ID NO: 10741 - DNA, 574 bp, Gossypium hirsutum
ttcctttggtgacgaagagattttgttttttggaaggttaaattaattattctaatgaaaattaaattatgtatctagatttaaatacaattgaaacgataaggtaaaaataaaaatttatcattaaaaatattatatttttaataaaattattaaaaatatgtaaaattataaattaatttaatgaaatatgtggttgtgagtacgagagtttgagctcgatttcaaataatttcattctctccccttaactatagaaaaaattatatatatgaatcatcctatttttataaatattttaatcaattaatttatattcaatttaaaacaaataagttaggtaagaaattattttagcttttaaggatacaaaagaaaaatcgcaaaaaagtatggttataaatttgtagtatcctactttcatataatttacagggttcaacaagtaatcaatatttcacgattaaggacatagtactatttatagtagcggtccttatatatcgtattaataattgaaatatgatcaaagaaacattctctattgacaaggcttcttcctataccaaaggaa

SEQ ID NO: 10742 - DNA, 670 bp, Gossypium hirsutum
  misc_feature (610)..(610): n is a, c, g, or t
ataaagtgctgttgggaggcaacccagtcttttcctttatgcaaataaaacttttgggaaggtaaaacgaaaagtgaaaatgcatgtcgaggatcggttctgtttaaggaaagacttggtacttaagaatgtccattgtgactcacctctctttcttgagaacttacctggtgcatttatcacaactattttactaaatcccataatcttggtttttaataatttatttcttaaatatttaagcatagcattatctaagctataaattcgagaaataaaaattgcacattttattttatttttcttcttcattctgttttattttattttgcaggtagaccttccaagacaaaatttaagcttccatttcagcctacaaaattcctttaatttcagccaaggcctaatccaccttccatgacattgaaatatatagggagtttccttttctctatttttcctacttatctttacttttattctttaaattacattgggacaatgtaaactaaatagggggaggggaacataaattggttctaatttgcttatccgttgacgctttttgcatatttctcgtggaaggtaaataattcccttgataaattgngatgatacagtatgtttcttgtgaaaggtaaataattcccttgataaattgggatgatac

SEQ ID NO: 10743 - DNA, 637 bp, Gossypium hirsutum
atagctattaggcacctttagataatagaacatcacttttgcactttacgcaatttagtcctttttctcaaattgaccatctagacgataaaatttcttaacaaaattttcacacataaatgctatcatgctgtaaacattaaaataataataaaataaatatttcaacttcatatttatggttccaaaaccaccgttctaatttgactaaaaacgggttgttacaactctccccccttagggattttcgtccccgaaaatcttaccagtgaataggttagggtactgttttctcatagcttcctcgggctcctacattgcctcttcaatactgtgacgatggcacaagacttttactaaagctatgtatttatttcttaattctttgatctctcgagctaaaattctgatcggttcttcgttgtatgtcatatcgggttgaatttcaattttagatggagaaatcacatgtgatggatctgatctatatcaacgcaacatcgacacatgaaatactttatgaatcttctctagctcaactggtaatgttagttgatatgctactggccctattcgttcaataatctcataaggcccaatgaaacgcggaatcaaatttacctttacgaccaaatcg

SEQ ID NO: 10744 - DNA, 585 bp, Gossypium hirsutum
agcttcattggatacgaagtcggacaagtgtattaataataaataaataaatacaatcttatccatttctgcaactaataaggctgtgggggtgggaaattagaccaaacaccccttataaacaaatgtagtaccttgaaatcggaatgatagaactgcatcatcttttgtgtattattcaaattcgagaataattgtcagatatgatatatgtttcacataagtatacttattattttcaaaaaactttttcatacaatttgaacatcatatctaatatttaaattcgaattaaattaaatacgaatattaaaaaatctgactaacataataattatcaaatataagccttggacttggtgattggaaagtggatgtaaagcattttagtggcaaatgagtggcttagaactgaatacaaattgcagaatatcaacatcatcatcttgtatccagaaactagtttctaatttgatgccctgagacagaagatgataattaaaagtagtttggttttagtgtaaaattatagttgatttcattcaatcttgtatacctaccttctcaagggatgagagcactctt

SEQ ID NO: 10745 - DNA, 431 bp, Gossypium hirsutum
ttttttattaaccacatttagtgccaatgcctcaataaaaataagcaagaaatgtgataattaatgcaaactaaaataatataaatggcttcatttgtcatacactttttattcacataaatatcatatctataacttataatatttatcatttctcaataatcatataaaacatttaatattataataatacttaatgaatattgcaaaagttttaaatataaaccccttaaaatagaatttttttcatttaagtattttataatttataaaaattttaaattagtaatgataaaattacattttggcccttctaaaaatgaaaaaaaaaattgatttaatcttttaaaaattataaagatataaactattaaaaccgtgaaattatatttttattatcgtaaaactgaacaatttaatttcgacctccc

SEQ ID NO: 10746 - DNA, 636 bp, Gossypium hirsutum
  misc_feature (552)..(553): n is a, c, g, or t
  misc_feature (589)..(589): n is a, c, g, or t
  misc_feature (592)..(592): n is a, c, g, or t
  misc_feature (598)..(606): n is a, c, g, or t
  misc_feature (609)..(613): n is a, c, g, or t
  misc_feature (615)..(620): n is a, c, g, or t
ctgtgtctctttatacaaaaggtaaagtgacgaattgtagtttaaaagcactattgaaatccacttaaaatgaattggacgaaatatctatcaaatgaaggaagtgattgattaatagctattatcacgaactcttcttcatatatctcatagagatcgtgtaagttcgatatagtaaaaaaaaataaactctttttttatctattatagttccaaaaattatagtatccaaccattctactaatttcaagaagtttaaaactttttttattgaaaatatttcatttataaataaataaattaaaaaaatataagtgtcgcatcatgttacaatcataattttcattaaatcttggtcacgatggtacaacaaagttagcttttctgcaggggcagccaccaaccgaagcccccaccaccacactcaacttctacatgattttacgttcattatgtgatatgttgaaagcaaaatatgaaatcatataaaaacattatatttcaaaaaataaataaataagattttagggtttttaaatgtggtccgttgtnngtcgacatatatatgatataagcttaaggaaaaccnacntatatnnnnnnnnnaannnnngnnnnnntttaaaaacccttaaa

SEQ ID NO: 10747 - DNA, 675 bp, Gossypium hirsutum
taatgaacacttctccggggacaactatcaggatagtgaagaacttaagaatatgtggagattgccattctttgatgaaatgtgctagtaagatgagccaaagagaaatcatattgagagatataaagagattccaccatttcaagtatggggtctgctcatgtggagattattggtaaaatggtaagtaacagcaacattaatttgctttgctgttaataacacttgattagtgcttctacttggtttatttagaataatgcttttagttaaaacatggatgtagctacagcaacacaagtttttttgtttgataattggtagcaagtacattaaatttctccaatggacctttctgcacatatatattaaacttgaaactcattagttaagtttgtactttatttaggtatctaattaacgttgttagattttttcaatttcaacttatcatcttgtgccacttcttcctcttcccttcagtgaaatttagcactttaaaagatgggttgcattttgctccctctgtcaaaaaaaatggacagattaagctatacaagttagatcaaagagcaaataggtctttttgtttaaaaatccatcaatttttgttgttaaaaatcaatccatttacatcaacataaaatatataactgttcgggatctcatcttcaa

SEQ ID NO: 10748 - DNA, 640 bp, Gossypium hirsutum
gatcatcaacacccagtggttgatcaaataattttgaattgaataaaaaaaaactggaagtcaaatgagaacgaataaacatggcattagtacataaattacggaggaaatcagcacgaataacaacgtaagtcaactatgtaatgatactcaattttcatccacttgcttaaaaaaagttcattgaaagttgaaagaccaacaaggaacagagcattattaaatttccacataaagctccaaactccattgaatcaaactgtttataaggaatataaaaaggggattcctcataatcatccatagacaattaatcaaaaacataacaaaagatgaaaccattttaaaataaccaaaatgagcaaagagcaggtatgattgaggcagaggtaccgttccaacgagatttaggagtggcctcaagcacagcctcaagatcatcattcctagtacaaaccaatataggaccttcaaaatcaagcggtactgcttcacctctcttcaccagcaaatcatctcccttgcccatatcttgcaatgcttttcccactcttccaccaccaacaataattgctggcaccacctcggtagcagtagtcgtagggggagcagccataacaatggaaggtggacttctttg

SEQ ID NO: 10749 - DNA, 640 bp, Gossypium hirsutum
ctggaagtgttctgaacaactggactgcggaggaaattcctatagtttttagtgctaatacagagtaatgttcaaaacacacttgttgttttaaaagcctaaaagcaataagaatcttttgcgaaataggttcatgttcaaaacgtttatttcaatataaatgcactttcatttcttattctgagcaaatattcttttatcttgagcaaattttctttttttgcgtttcgtttataatcataccatacaaataaagctatacttaggttcatttgtttgttggacattctttcatgcctacaataggtctctagatatcaatggcatgagtgacgctgttacaaacccgaaattattgataatgttacttgtagcatgttatataaattaaagatgtggaatggagaggagaatgagggaaataaatatatgaattttcagctaggaagggttttgttgggtttttcacataggaagaaaaacagaaccaagttatccatatgaaatatgaagctcttgttgaagctagagcaacaaagtaataattccggatgaagtatgaagtaggtttgagattcaaggacttgagagttgcaactaaacgaacaaaagcaaaagggataaaaattgagagaagtat

SEQ ID NO: 10750 - DNA, 647 bp, Gossypium hirsutum
gagggttaaagacactgacgtatacaagacaacgtttaggactcattatggtcattacaagtttctaatgatgccatttggactaacgaatgcaccagcggcttttatgactgatgaatcgagtattccagccctacctagatcggttcgtagtggtttttattgttggcattctggtgtactcgaggactgaggatgaacatctccaagtggttttgtagattctgagggagaaacaactgtacaccaagttcagtaagtatgagttctagttacgagaggtaacatttttgggccatgtggtatctgctgaggggattagggttgatactcgaaaggtcgaggccattttggattggaagccacctaagactatatctgagatacgtaattttctgggagttgcgagatattatcggcaatttgttgattggttttcattggttgtagcacatttgactaagttgttgtgcaagggggtgtcatttaactggactgatatgcagcaagagaacttcgagaagcttaagaaagtactaactgaggccccattcttgatacaaccagagtctgggaaagagttcactgtctacagtgatgcatcacatgctagtttgggatgtgtgttgatgcaaaagggtaaagtg

SEQ ID NO: 10751 - DNA, 519 bp, Gossypium hirsutum
tggcttgaaccgagcaagagcaagatactcggcttataggtcagtaagacgtaccaacttgcctactcactgtaccatgggctctcatgctaccatcgacatgcacccgaaactgtgctgccttggccaatagtaagcttctaccctatagcgagggacacatatatatataggagagcgacgtgcaagcgattgatattaggcccttttgccggtctaactaaaatgagtgggaattacgactaggacctatggctttcaaagaaagggcactaaagcgacgaatggggaaacgaagatgaaaagtatgttttttattttatattcattgatcctggacggagtcaaatcttcgaactacggatgacttgatcccgtaaagtacgtaagcaggctcgaaatgagctccagtcagccgctacgcacctttacgcttcctcctcttctccatgtggattcttaaactgaaaccttcaaacccgcctttccctcttaaatgggcgaatcaggttcagtgct

SEQ ID NO: 10752 - DNA, 511 bp, Gossypium hirsutum
gcctttaatgggattggaaaatagggaagagaaattctaatttttaagggtaagttgcaagtttgaaagagatgcggcatattagcatgggcaagacgtaagccacttatcaaccatgacttcagttttacttgtaaaactacatatattaatctaaattaatttcaataattgaaattccagcgtagaaacaattttcttttatgggtttttattaatgtttggatttatttttttatgattttatgtattattagtgaattagatgattatgaatataaagtgtagtgagatgatagtttattttgtcctttaatcatgtggttgaggattcgatcccaactcacaatagtaaaaaattctttaaatgataggtaattatctaattcttggaagtagcacaaaattataaaagttgtgtagagagatttttgaagtttgggagaagaatagatagcattgcaaagtttcaaatagaaaagtggagtcttggaggaatttagtctgactt

SEQ ID NO: 10753 - DNA, 557 bp, Gossypium hirsutum
tttattatttccacatattactcattaaaaattcaggattaacaattgtcatttgtatcaagactgaaattttaaaattcaagagagttagaaggatccaattagagaacatgggctaaatctacacataatatatgactaataattgaatttaactaaattgatttaactactattgtttggatcaagattaaaattttcaaattctaaaagtgtgaggaccaaaaattaatcaaattaaagtataaggactaaatccataacttttgaaaagtacaaagactgatagcagaatttaacctattaaaaagattcaattacaaaaaaaaacaaaaaacaaaaaaaaaatagggttggaaaggaaaaggtttacctcaaaatctggatttcgaaaccagccccaagttaaaaacactttaacttggattgggtgggtttttaaacctacggttgggaatttaaacaagttatcggggcaaaacaaaaagggtttctttacggcaaaggcaatggcggcggctcctcctccctttccaatttggatcccccttttcccc

SEQ ID NO: 10754 - DNA, 608 bp, Gossypium hirsutum
atcacacataaacataccaatttaatcaacctaacaattctaaccaatatgtgtaacaccccttacccatatccgatgccgggataaggttcgaggcattactagacttaaacataaacaaacatacaaaactgagccataaaatttcatccaaatttaaaacttttcaagcacatgcaaattgtcccttataagggcccacgaggcataaaacatacatcgaaagcggtttgggactaaaccgagaactttcagaacctttttgacacttaaaaaattttcttgttttggagagtcacacgcccgtgtgggtaggccgtgtggtcacacacgctgtgacagccctaaaatgaccctagtcggaaagcggtttcgggaccgctaaaccgagtcaccaaattatttgaatatgatatttattgtctaaaatatgtgaatatgaatgtgtgaaagttttgagcttcgatttagtcgattgcatgtgaatttagtaataggacttatgtgtgacacttttgatatgtgataggttaatccataaggatctattagtgcatgtaatcaaaagggtggacttgcatgtcaatttcccccatttaattctatgg

SEQ ID NO: 10755 - DNA, 644 bp, Gossypium hirsutum
tccaattatgtctgataagcacacaataccttgtagtaaaacgtttattagaaggagagcttgcccagtcaacctttgtataacaaattactgaagagtgctcgtgatcttgacacaacaaacctttacctatagctccataacggatcggagaatacatactataattgaattccaatgactttgatatggtgaatgaatcaagaaactgacttgctagcaaatgaatggtggagttcaagataataacaacaatatccttttgaagatgagagtaatagtaaaaaaagcgcatttaagagaataagtagagaagttgagactagggggtaggttaaggacaaaacagctacaaccaaaacccttcaaaggtgatgaataaatagggtctttaggaaacaaaaagggaaaaaaaaggatttgatgattgagaaccgaagatggcatacgattgattagataacatgaaggactaaaccatcccaataaagaataggaacttgcatgtgtaggaataatgccagaccaaactcaattaaatgcctttttttaccaattatcccatatgtgagaacaagaaattagtctagcatactttgttgaaacatataatattgaaaatgatgttatattcaagagcattg

SEQ ID NO: 10756 - DNA, 550 bp, Gossypium hirsutum
cctcgaatttcttcttatgacttcatttttaagctatatttactattttcttaactttctctctctctctcttattttttatttttgaaaaatagatggtggcaacactggattgattatgtgaaccaggaccagcagcctaacaacagcaacaacaatgaaggaagctcttctttgtcagggaactcagattcaaatggcgtgggtatttcaaaaaggccttctggaattgataattctgatttaatatctgatgggccggcggaggacgcgaactctgatgatggtgtggagattcatgatactttattagaaggccgtgactatgttttgctccctcaacaagtttggaacctacttttttcatggttagttggataatttggactattttgggttctgttaagaattatttgcatgtagaaaacttattggtaagtttctgttggcaagttgtatcaagttaagaatggaatgataccatattgaaatccttgttaactattaaatttcatgttccaagtatttagacaggcccgtggagaggggg

SEQ ID NO: 10757 - DNA, 651 bp, Gossypium hirsutum
  misc_feature (29)..(31): n is a, c, g, or t
tgaatacgatttatctaatttatatactnnntttttataactatatctatataataacaaccttcaaaaagttgtttaataattagttagaaaacaattttaaatagattattgttgataaacaccttaattagttagcaatcaattacataataataaaattaataattaactaaaaatttctacaaagttgataattgctaatttaatcgatcgagggaataattagatattttatatggcatttaattaatgtataaacttatcaacttctcaaccttaaacattaaagttaacatttaattaagtaacattttttacctttttatgaaaaaaattacttatcttttcataatagtattcattatataatttatatttaatgtttttagttttaaaaggatgtatttcaaaattttcaagtaatttgatttttacaattaatatttttttattgttaaattttaaattttttattttcattttaataaattttataattgaatttctttactatttggaatacatattgtcacaatattaagagtattattgaatatttcataaatattaattaagttataacaaattattatattaatttaatgattctgtttcgattagaaggttctttccggaccactatgctaa

SEQ ID NO: 10758 - DNA, 390 bp, Gossypium hirsutum
tttagaatataaatatttgtttaaaattagcatataataaataatgaaatgcataatttgagatggattaataataatgtataaaaaaattagactaaattattaatcatggtgttgtcattaatcttgagttgatagtgaattaacttgtgataccaactcaatcaaatacattattaatatatataactgatgaagataataaagtgtatataatatatcaaaatatcaaaataaagctttactaatgcaattattatgggttcaaatcccaccatacacatatttttggggtttttaaagtgaaaagactaaaatacgctcgaataacttatttaaactatgatagggcattctcataaatttctaatcgagttggtgacttggttg

SEQ ID NO: 10759 - DNA, 846 bp, Gossypium hirsutum
  misc_feature (159)..(159): n is a, c, g, or t
  misc_feature (277)..(277): n is a, c, g, or t
ctcaaaattatttaatacttattagcctgtcactttaagttgttaatggtaactagaaataaattacaaatttagaatataaatatttgtttaaaattagcatataataaataatgaaatgcataatttgagatggattaataataatgtataaaaaanttagactaaattattaatcatggtgttgtcattaatcttgagttgatagtgaattaacttgtgataccaactcaatcaaatacattattaatatatataactgatgaagataataaantgtatataatatatcaaaatatcaaaataaagctttactaatgcaattattatgggttcaaatcccaccatacacatatttttggggtttttaaagtgaaaagactaaaatacgctcgaataacttatttaaactatgatagggcattctcataaatttctaatcgagttggtgacttggttgaactcataaagtgtgcataataaacttaaaatgtataaaaatattaaaataaagttttaattcaatagtaaattaaaatgttttattaatataattggcgtatgtgagtttaaattctatcatatgtatatatattttttcgttttttaaaatgaaaaaattaaaacaccatggaataatattacttgtctcaataataaaaaaaacactcttgtaattttttaactgaattgaaaacctagttaaaattgtcaaaatttttgttaatagatactaataacccaatttgaataaaattcctccatttttaaacgttaaaaaaattcaagggatccttttattccaaacagaccaaaaaaaaaaatcataaatttaaataggagaat

SEQ ID NO: 10760 - DNA, 361 bp, Gossypium hirsutum
aagggaataaacaaaagtgaaaaaaagcagcctattctccgacaatactatctgcaaattgcaaagtcaataattacgacaatagtggggtggggtctccatgcttactccttcactcctcactctattctcatcttaattaatttgattagtataaatagtattatcaatacacgatacgtaaatttgagtgtactaaaatgtattatctttttatttatgagttagtaaaaaactacgaataattctaagtattatgttaaaacgaacaaatatgatctttaacttataatgatattgttaaaaaaaaagtcaataatcacgacaatagtagggggggggctctatgcttactccttaa

SEQ ID NO: 10761 - DNA, 592 bp, Gossypium hirsutum
gataaatataatatattataaagccgattttgttttgcctttctacatttattttcagtgagtttttgtcagatttttctttttatttcttgctcggcataatattgttgggtgaggatatcccattctagtggtatcccggctttggcatatcccaagtagggatattccggcccgagtatatcccattccggggatatcctggcattggtttagggttttttttgtgaaataaagtactgtactgggctattattagaatgcaaaaacacataaaacaggcccaaagaaaagcgaaagcctggaaaaataggcccaattttttttgggtctgagcacatcatgatagtaatatttgagaaatgattgtaccctaaaaatatttttgaacatatccattaccaaaaaataataataataatagtgtgcccactctactttgaattctcattttattgtttttatttatgcaagaacaattaatctgtaaactattttcattttgatggttaagagtcgtagctttttgcaagaaaaagttattgaattagctccaattttatttaattaattaatatatttaaaaaagctc

SEQ ID NO: 10762 - DNA, 615 bp, Gossypium hirsutum
cttgaagtgtaaacctgtgggaatatatatgagtttttgtaagaaaaagaaatgcgcgtttggttgcacaaggattttcacaaagacctggtattgattatgaaaagacatactctcttatggtagatgcaactatttttaagttcttgattaatctggcaataagacaagtgtttgatttatgtctattggatgtaattatagcctatttatatggcccacttgataataacatttacatgaaactcccggaaggttttaaatggctagaagcagctaattcatgttctcgagaacattactcaatcaaattaaatagatccctcaatagattgaaacaatttgggtgcatgtggtataatcgccttagtgaatacttattgagggaaggctataagaatgatcccatttctccatgcattttaataaaaaattttggatcaagatttgttgtaattgatgtgtatgttgatgatttaaatatcattgggactcctgaagagattttagtgacaatagagtgcttaaagaaagaatttgaaatgaaagaccttggaaagacaagattttgtctagggctacaaattaagcacctaaataatagaatccttgtgc

SEQ ID NO: 10763 - DNA, 473 bp, Gossypium hirsutum
ttttaacgttaggactcaggtaattcatccaccttagccgacaacttttcccacttctcttcaaacctgtacaaggaacaaaaaacataacatcttaaagaagaaaagacagaaaaaatgaagtgtgactgtgttgttaagaacctgttctgttggctattttgttccattgtccttttccatggacattgacataatcaatgagtaacttgtcttcctccattgcccataatccctttttgtatagaatttcaccttcttttttcatggacatttgttggagttgttgctgtttgctttgaagaagatgcacaaggattttgcagtatatggattagttttttttgaaacacaaatgttgttttaaatatatatatattttcctttttcttagctgtaagtttagaattctggttgtatatatggaggtaatgatgagatgatgatggatggcagatttggataaattacca

SEQ ID NO: 10764 - DNA, 674 bp, Gossypium hirsutum
cgacctagattaatccatccatttgtttattttacatgcaaataatacagtgccatgaaataaaataagattagtgcgaaaaatataattaaattttttttatgaaagaaaaaataactaaatgatatattaataaataaacattatgtgcaaatatttcaattatagtccttaaactcttacatttgaatttaattttgttacttctaagaatttaattttttttatattttgaatttaaaattctaaattaaactaataacaccattaaattcatgtgctagtatgatatttttaatataattaaaaaataaagtaataaatatgaatttgaccgcattaacaattagacttgtatttttaaaattgaaaaataaaatttaaattcctaaaaattaaaaaaatgaattttaaatgtataaaaattgaaatacattttaaccatttatataatattgttgtaaaccattttttttaaaagcaagatgaaaattttactagaactgttaattagtgaaatttttaaaaagaaaattattaaccaactccttcaattaattagtttatacgaaaatatttctttctcttgaacatttgaattttgaagaaaattcatttacattgaaaattaatgaacaataaataatacaaatctagtacattgcatgctcgaa

SEQ ID NO: 10765 - DNA, 749 bp, Gossypium hirsutum
  misc_feature (446)..(448): n is a, c, g, or t
  misc_feature (542)..(544): n is a, c, g, or t
  misc_feature (560)..(562): n is a, c, g, or t
  misc_feature (583)..(589): n is a, c, g, or t
  misc_feature (626)..(628): n is a, c, g, or t
  misc_feature (630)..(630): n is a, c, g, or t
  misc_feature (633)..(633): n is a, c, g, or t
  misc_feature (635)..(638): n is a, c, g, or t
  misc_feature (640)..(641): n is a, c, g, or t
  misc_feature (645)..(646): n is a, c, g, or t
  misc_feature (651)..(652): n is a, c, g, or t
  misc_feature (654)..(668): n is a, c, g, or t
  misc_feature (672)..(672): n is a, c, g, or t
  misc_feature (677)..(678): n is a, c, g, or t
  misc_feature (688)..(692): n is a, c, g, or t
  misc_feature (696)..(704): n is a, c, g, or t
  misc_feature (709)..(713): n is a, c, g, or t
  misc_feature (721)..(723): n is a, c, g, or t
  misc_feature (725)..(725): n is a, c, g, or t
  misc_feature (734)..(742): n is a, c, g, or t
ccaagccccgtatacaaagaagataacatagataatggtttagaagctctaattattaagaccaaatcaggcaaaaaagaaagcattgatatgactcaagtgcagacgaccctgaagaatttgaaggcctttgaatcagcaattcaagaacttgaagagggattagagtgtggctttaggtgtttgattaaaactagaatgtcccttctcaacctactcaaccattaatgaaactagtgatatccaacgacatcccggatttttttacaagggggcttgtctgcaaatagccgtatatttctacagattgaaaatgtaaattatgaagccaaagaaggaatcttttccccaaaatctcatcatcattactattattacttttcaaaattcttttatcctgaaaactactgatcaaaagacatgaagagtaggaagtgagaatgaannngatgagatgttggggaaaagattccttctttggcttcataatttacattttcaatctgtagaaatatacggctatatgcagacaagcccccttnnnaaaaaatccgggatgnnnttggatatcatagtttcattnnnnnnngagtaggttgagaaaggacattctagttttaatcaannntnagncnnnnannctcnncaatnntnnnnnnnnnnnnnnnaagnggggnntttttttttnnnnnaaannnnnnnnnaaagnnnnntttttttnnntntttttcccnnnnnnnnnaaaaaaa

SEQ ID NO: 10766 - DNA, 412 bp, Gossypium hirsutum
tggatttgatggtgctgagccttcgcaagggaacaagtaggtgacatgcaatctttgatttgctaatgctctttaacatccatgtcactgaaaggtctctcgggtctgttcttaaattttgtaaaaatatgaaccttttatgctttagctccttgttgcttgcctttagtattatttgttctactttattcctaagtaaacattcaaggtttttaaaatattttaagttattgctctaatttgtcaaatgttaggcgacatactcttcttttaggtaagtttcattttcttcaatttttattttgcaaaactcaattcaattagaaaaaatctaaaaaaaataaattttgagttaattgaatcaagttatttgagtaaactaaaataattaattcgaatttcttgttcgaat

SEQ ID NO: 10767 - DNA, 468 bp, Gossypium hirsutum
tatttccccagtcaattaagagaccttagcttcctttacggccacaaccattcacaagagtttttttaaagtcctaaattttctccaccatgagaaaccccctcccttggatcctcatcaattcgagtagtttaagaggaatcatctccttgatcatatctcatctccagtctcaaactagttcgctgaacttggacctccccattcatgtcatcgaagcttgctctatatgcataataatctgatacgccgctctttaggcgtagtcttagcatcgtttcccctaggcacagcctcacattcaacctaaaatagaaaacacaatcaatgtaagttcatgagaacttagtgagataaatgtaacaccccgaacccgagaccgtcgccggaatcgaacacgaggtgttaacagacttcaaaccacttattaaaatttttccagacaagctgtcaatctgcgtacaagca

SEQ ID NO: 10768 - DNA, 601 bp, Gossypium hirsutum
aaaagttcaattgaattttaaaagtattaacaaataaacctatatttttaaactcgaaaaaaagattaaattattgaaaataaaaatataaaagatgaatttcaaatatataaatagtacaacaacttagagcatattgcaacctttaattttctactctataattagcaaataaaataaatatttaacccgacgtgaagcttgggagagaatcatactagtttataattaaattttatataatataaaatgacaagaaaagcttttctcacttcaaaaagaaaaatgttaaattttgttatgactatatgcatagtgtgaaagttgcgaatttaattgttatactttgatttggtcatttttagtttttgaatttttaaaatttaaatcttagtcatcaccaaatgataattattaaattcattaaattttactattttcgaaatttgatatgtaatgtcatgttagcttattatttctacatattactaaaaatctagttaatgaattaactatggtcatttgcgtagatagaagtttcaaggtttaaaaagtatagggacataaaatgattgaattggagaatatgaaccaaatctcc

SEQ ID NO: 10769 - DNA, 659 bp, Gossypium hirsutum
taaccatgactttgggataaagaaaaagaaactaatttaggaagatggcgtttatttcatattataaacattattacttttattttaataataaaaaatgacatataaacttaaaagaaattaaggctcaaactgtcccaccatcctaagaatggttaatttaccatattattcattaagccatttaatcattcaaatctaatagtgatcaaattttacatcttttacaaattaatcctttttaattaattaactatctaaacattaaaatttattaacgaaactttaataaacctcaataatactctgtaaatatttattaaaatatttatggcttggcttatagaaatgaggccccgatacctcattttctaaaaccacttgactttagggtcttaccacttgaacttaattaatctttcaaaacgtataaattataaattcaaaatttattttaacaccataagtgactggtaaatattaaataataatatttacgaacttactcgtcagatctgtggtcctgtaaccactatttttgacaccacgtaaaaacgggttgttacaacccaagcacattaccccagttactcaaaatggcaagtatccaaacggactatttttccctactcatggtagctcggttagtggagggtaac

SEQ ID NO: 10770 - DNA, 468 bp, Gossypium hirsutum
attccttgattttataatatattaattttagtaatttgtgttaataataataatttaatggttgctgctgctgctgctgctgctgataatgatactgatgaagtttaaaaaaacaaagccattcaggtcggtgttatatgtgggtttaatttttctctattccctatatttttaaaatttttaaaatttaatctcttttatttttaattttgatttaaaaaaattaaaatttggatttttattttcaaagcaaacttttttgttttctttttggagatattatgagtaaaattacaaatacaatggcaaattgtaagttctaatcaatataatcaaagctatcattacaaatcataattagattgaaatcgaaatatgtctagaccaaaaaaaacacctataaagaactcacacatgatttatacaaaaaaaaacttaaaccaaaatatttcaaagcctcaaccacgc

SEQ ID NO: 10771 - DNA, 472 bp, Gossypium hirsutum
gcctgagaggggatgagtgaatacctggaagataaagttctcttattcccgggatcagggcatcgactgcttaatttataagttcatacccgatagcagtagccaatgtcggagtcggaagaggagccgttggtgctttagttccgtagctcttgcctgagacggaaagttggcaaaggcttcagacgcggtctccggtctccctttttgggcacgtgccaatcggtcttaaagcctcgatgtccgctaaagaagatagagatcgagagatgtggcactcttcataatgatttagaaagacaagcaatagctgttttaaaaggcaaaggttgactttaattagcaggctcaaggtcaatttctttttgagttcccggcccaagtcaaggcgatgcaatagtcgggcgataaggaagaagcagtcccaggccttaggtccagatctgagaactttcgagaggtgaatcatagc

SEQ ID NO: 10772 - DNA, 615 bp, Gossypium hirsutum
tgaatcttttgagcatcttatacctgtcgacctttttcttcttttaatatcagtatgaaatgtcttgataaaataatgttgatgtgttcatagttgacgtttcttagtcgattgattttggcattttcattaatggtttcattggttaccaattgatttaccacattcccttaatttgcattctaaacaaacatgaacatattactgaacatttgcccttgcattattcgttattatcatatcctccctatgatttgctacaaagcaatttacttcgagcctaatgaactgaattatgttgttttctgatatgttttcctgtcggagaattagtatgccatgtctctctcttaggcttatcaattccaagtttaatatagaatcattagtctcttttcattcgagtgacatgccattgaaactcatttaagtgaaactgataaaggccttacggagagctttctcactttgccttttctttgtgtacttttcacatactttagaaccctctaaactggcacttaaaaaccttagcagcctgccctcggcgtttcacatggtattaggcaactaaatataccctgcatttatgaggaaaccttaatgcagctccca

SEQ ID NO: 10773 - DNA, 640 bp, Gossypium hirsutum
gtgaataagacctttttcatggttaatgaatgttcctggggaagggtgtattctttaaaagcaataaaggcccttattcttgctcaaaaatcaaaatatgttagaaaattaataaatttttgtatgaaattttgtggcatttggaatttttctaaatcccaaacccttattaaatcaagcctcataatttaggaagaccattttcattcctgaatcacttgataagataaaatgaggttgtaaatccttagtccgggagcctgattgaattagctcaatcatcatactcaaacgttgagcttaacactgaacttagcgtgagttcgatttccaaacttaaaacttgagaaaatgctaattactagaatatttaatttatgcatgtatttaatatctgaagtaattaaaaattccagaggttctaggcttgcaagcctcttgagtgagtatactggagcttgaggctaacagtgaacaagtggtacttgaagaattcatagagcttagctcaagtagctcatgagtaattggtttcgttataccttaatagaggcaatgagaaatttctttatgataagtagattaaagttgcagtttaagttttggtcccaaactcaaaagtctggtcctcttctacata

SEQ ID NO: 10774 - DNA, 642 bp, Gossypium hirsutum
gaaaaaaaggagcttgtgaaaggtaaaggaggagttctaaggaaagtgacaatgaccaaacaggtacaagtcgtcaaccttggaacagattttgcggttttgaagatggaatatgatgaaacagttatacagcatgttatattgacagtcaggcacacggtgaaccagatcaggttgctcaacaaggagtttcactgataaaaggatcgttgagaagcttttggcctgcttgcctgaaaattctgtcaaaaatctcatgacacgaggactcaagggataactcacttatgtctttgacaaagcttgtcaattcattacaagctctcgagcaagaaagatccatcagggaaaaaacaaactaaaaaggtggtggtaggaaaggcaaataaatacatcctccatgtttgcattgcaataagagggatcacattgaaaatatataccggttttcaacctaaagttcaatgtacatcatgaaagaagtttaggcgtgtcgagaatttattcaagaacaaaagaagatcaacaaggccagcaagcataagttgtcaaaaatcaacagcaacaagaagggaaattgtttgttgcttaatgctatgctataatcatctataaaatctacaaacatagccaagtttagaa

SEQ ID NO: 10775 - DNA, 445 bp, Gossypium hirsutum
ttagctactgaaggctcggggatagtcgaggatcgtcaccacactattgatctcattttggtacttttgaaaatgtaaatatttgaagtatgccatgtctaggctagtagttgtgaagtatgttttgtgatgtatatatttagccatatgatttggctaatttgtgtttgaacttatggttgagaaaggtttatgatatgtgatgttaatttgcaactatggcatgaatgatgtatgttttagcataaagaatggttgattgggttgtacatgtatgattgtttccttgttgtaagttgacccataataggtggcaagttggcttaaaccaagcctgcattgtgccacacggtcaggggacacgagcgtgccttgtgaccatgtaagaaaagtagtattctcttaaaaagtacacggccttgacactgaggcatggcatatggat

SEQ ID NO: 10776 - DNA, 694 bp, Gossypium hirsutum
taggcaatgatgcaaagagaagttgaagaaaaagggttgagaaaataaatgaactgccattttaactttgatggggtattgttttactttggctgatgatcaaatatgtttaaattcggtgttatttataagtggtttgggaaggagggaatgccatttttctaaattttaattgaagtttttatgtttgacattcttttcatataaaaaaaatttaaacagtcattgttttaaattttaaattatcataatcttttattctcattgtttattatataaataattcttggatgtattattagtggataaataaaaattgttgagatgtatgcataattcatacttgtaatgtacatttatgaaataaaatcacgacatgctatttaattttaggaatttcttaagaaattggttcaaaattttcttttatccaacttcaatgttggttgatagtttgtcataaataattgccatcgacacactgttgacaaaattttataatttaaaaaataaacgacgtctgcataaataattaaaatgtttgggaatattggtcaatcaatattcttttgtattttcttgttctaaaaaattcggacagcaaattatcgttagtttctgacaggaaaggcaaattgatcttattagcgacaatgtttttagggatgaactcatagttaaactgtcctcgacc

SEQ ID NO: 10777 - DNA, 496 bp, Gossypium hirsutum
  misc_feature (436)..(436): n is a, c, g, or t
ctgcctggtggagtgatgacactactactgttatcgattccggtgccggaaaacctcctcccgccaagtgagtacagcgagaccttttttttttcttgaactgttttttaaaaaggttgcaatttcaaaataataaaattaaattaaataaatttcgaaagttttttttccaccttgaaaattatatgtatttttgctataataaatggtattaatttttcacctcttgactttgctagtattatataaaattaggttcagaaaaaaaaacctaaaaaaaattatagttaattatttgttttattaaacatataattgaaaaaatcacaaaactttcaattattttattttatttttgaaaaatatgtaaatatttttatttaaatttcttctattttcagttaaattagattgaattatgagcattaatcatgcnaatataaaattacttggtatatttcataagaaggatcgaaagagtactacatccaacccc

SEQ ID NO: 10778 - DNA, 552 bp, Gossypium hirsutum
tccctgtacattaggtcaaagaataaattggtcatttctgttaaaaattttatctctttatgtactgtcaaaaactagcgtggctgacagaataactagatagtggcatatggcatgccacatgtatctcatgatgacatacatggaataatttttaacggtagaaatggaataaccagttcgctctttgatctaatgtataaggatcaatttatctattttttgagtagagagattaaaatgtaattcgactcctaatactttcaagtataaggcttcacgaagcattaaataataataataaaaataaaaggaatagtacaagattttctattgtttgaaattgagaatcggtaatttgttcatctgattttatttaacactattatacaatttctttttttccctgtttaattattcccattttcttttctttctctctcttttccactcctttttaaaaaggaaaacaaattaaagtcttagtttcccccacaattctccttttatgacacctcattttagtttaaactatgctggtagtccctttgc

SEQ ID NO: 10779 - DNA, 668 bp, Gossypium hirsutum
cctgtgaaatccttaacagtctgaaacatattgcattgatggaggccaagatgaaaaaactctctgatgtactgagtaaggttagttggttgcttatattgtgatggtatgattatagttcactaaccttggccctaagcaccttgtatggatggctgtaggtatcattagcttctctattgacgggtccttctcatttctctcttctttcaattgtttctttaaaaacaatatttctaaactatttttgtctgcaattcatttattgtttagaacttagaagggattgaggaagcagcaagcaatggccccaaaaggtatttggatttggattttagcttttactgattttgaatcactttcgctctcactaaatatgggttaagttaactttattttcattggacgtaattatgaactcgatgatgtctctcatttccaattcttaatttataattaatcatttccgaagatttcatttgacatactttctatatataattaattgcagtgacataagaaactttgaatagcatatttgatgtctgggggtaggattaggtggtgataatattttgctctcttttaaatatggacaatatatgaaggatgagaagaaaagaaacgtaacccagattgtgtttttatcctcctcctttatttgaatg

SEQ ID NO: 10780 - DNA, 640 bp, Gossypium hirsutum
atatgtcacaacctgtccatgtcttttggatttttaatattatttttaaggttaaaatatgacaggagtgtttataaacttaaaattaatttaatctttatatttttatttttaagaatttagttcttttattttttaaattttaaaatttaggtataattgttaacattgttaaaattttattttttattaaattttttgacgtgccattttaagttaaaaattattcacttggtaattatgtaactaaaaactaacattataataaacttaaatttaacaaatagttttaacagtgctaatgattgaacctgaatttttaaatttaaaaagtaaaaagattaaattcctaaaaataaaagtacaaaaattaaaactcaaatttacaaaaggtgtaaggacttatgatatattttaacctatttttagattcatttaaatttgcaagttaatggggtgagctgtccttgtctaccatgtcttacaaaataattagccctgattgtagctttaattaagattgaagcatgaaccaacttccccatctactactataattatcaagaatttcaatttcacatatttccctaattttataaaaaattcatattttttaagtaaaggcaagggaagttaaaac

SEQ ID NO: 10781 - DNA, 577 bp, Gossypium hirsutum
  misc_feature (510)..(514): n is a, c, g, or t
  misc_feature (516)..(516): n is a, c, g, or t
tatttgattctttttattagtacaatgactaaattaatccatttaatagaagtgactaatttgatccaatccctataaaagagggacttagcaagtactttcaccatcttttttttttcctttagagaaagaagtcttctcaatataaacaaaccaaatacatatggtagcccaaaacctatcttatgcaacaaacaagaaaaaccaatataagctattgataatctaaagtatacctacataaaaataaacgaagtactggtataatactctgtatcattaccggctcaagcatgaacggatgaatgtatgcaaacttggatcagcatcatgtagaaccacctctccaaaatcaaggaaaaattgaagaattccctgatcaataaatccgaaagaataaacaagataaaatagtactactgaactacaaagctaccaaatataaacacttcaactctcaagccaaaattttccaaaattcaaataaaaaactgaagaagaagaaaagtnnnnnanggtaagaggagtcccttggaagagttagatgagagagggaagcaacggatcgtgaaaagct

SEQ ID NO: 10782 - DNA, 613 bp, Gossypium hirsutum
aaagagctcattcgcatgccctccctctttaggagggtaccacttcacattgtcacctttaaaagaataaaacgaattagtgacacgatgaagattaaacacaaaggaactttttgagatttgattcacagtttgaacaaataatccaataccggggtcgaaaatagaaatcgttcttacctttttcttcgatggaaacaaacataaatcacaaggcatttgatagctatggttttggaagtcaactttccatggttcgattaccttaggcaatgatatagaatggtgttcaccggggtcaaagacaaaattttctcttgccatttcaatttgatttggcaatttcatgaccgacttcatagaaagagcactaagcaactcaaaatcattatcattcaaaacatgttcggatcttttagtccacagttgagaacatcctccgaaaacaaaattttgattttgacttaacaaaccaacaagattcacatggctcattttcaaacttaaagacaaagtatcatacaaacaaagattgtttacacattcattcaaacaaattttacgatgcttgctttctttcatggatgattcataatagccaactccaggatta

SEQ ID NO: 10783 - DNA, 604 bp, Gossypium hirsutum
ttcgatggtcaactagggaagcatcgaaagagttaactcatgttttattttgctttctgtataaacaaaggcgagccttacttacaaagcatgacaatatcgaacagaaccatatatcagaatccaaaccctgcctaggccttatgcttacacacctcaggttctaaatatttaaattcaaagaagataaaagataggcatatatactttctcaatcatttttacaatgtcagaattaataataaaaaatgcctgtccttcttaatcataatcagaaattttaaaaattgtataataaatctatgaaataatatattattactgtgtgaagggaaataaaagaaatggaaaaatggagggaaattgactcacaagtgatcatatatccatgcaaatatccgaataagcatcagaacgtaaatacttcagaaataataaaaagttaaagcgtaagatagaagaactgtactgcactgaggcactagaaatttattgataaaagaggtaaaaaaacgttctaaaaactgagattcattatgcttgaatcaataaagaataagcacgaataacagatatattactcctgcttcttgatttatttcct

SEQ ID NO: 10784 - DNA, 634 bp, Gossypium hirsutum
cttaaatgtataccagagtttgagaaataaatttatttatatttactttattttaaataattttcattttaatatattataaaaggtatcaatagaattaaaattttgatacatataccatatttttaaaaaataaataattattaaaattgtatataatttagaaaaaaatatctttaatgaatttggacatcttgttatctagattcattctagacttcactttgaaatgtttcttattaattttaaattttttgaaaattttaattttaatttaatatttttataaattttaataatgtttttacaaatttataatgttttaatttttttagaaatatttttttttaattttaagaaaaagtttggaaaggaataaacataaacacatccagtaaaaaataaattttattgttgacgtggtagttgaaacatcaacaactatcgctgacatggagacccacgtagcgctgttaacagccacatcaatgttgtaacagtcaaagatgaaaaacattggtcaaagggcttaattgatacaatttgagagtttgaggacttaattgagtgtgttttacgcacaagggattaattaatgttttcaccaaagtttaggggctaatatacccattca

SEQ ID NO: 10785 - DNA, 688 bp, Gossypium hirsutum
taggttatggtcgcagtagagcattggggcgaggcgagtgaaaaaccgccccgcctagccttgttgtcatcactagttaaccaatgggttataaaaggctaaaaataaatttattttaatttattttaatttttagagttaggaccaaattgatagattttgtaaatattgagggtcaaaatttttcaactctttagaattaaaagtaatatgaaaaattttgtaaatatcgagagctaaatttgttgaattttttatatttaagatcaaattgataaaatgtgtaaatactagagagctaattttactactagaccaataaaaaaagtccacattagcttagagtgattaagatatttaattttgaaaaatttaatgactaaatcgtataagtttaataattaggtgactaaaataaaataaaagatataattgggtgatatttttatagtttacccataaaaatttttttcatcatgttctaggttatttatttaattgaaaattttaacatatggactgatttgcatgttttaaaatatataaggattaatttgctattttttcagtaaagtggccgaaatacaatccgcctaagttgaggggcttcctgctatttttagccaaaaaacagacaatactataaatgcagaggccaacaccccactcatgtcatgtcctaacacaa

SEQ ID NO: 10786 - DNA, 584 bp, Gossypium hirsutum
taaaccaataataaaaatattgtacctctcaataatttttttactacagtaaccaacatgtgacaagctgatcagatcacatgccacgtttaaagaatatataagtaaatcacacatccaatgcatgccccccaacctctttataggccaaaagctgtcctcgccgatttgtcgtacatatcgccggaacctaaaatattcttttcccattttaaccttgtctctctctaaaaatttccctccatcatccttgctcattctctctctttcttttttttttcatttcgctaaataattaaaaaaaaagcaataaaatccaaaaaaaaaaaaaggaaaatttataaaaataaaaaataaaaaagggttagctagttatagcgcttacctccttttctaaaataaaaaaattaaaatttataaccaaaaaaaaaaaaaaccaaaaaaaaacccctaatttttgggggaaaaagggggccttttcccttttttcccctttaaaaccggaaaaaagggggggattttattccccccccctttttaaaaaaaaaaaaaaaaaaaaaaaaagggaaaaaatttttttttaa

SEQ ID NO: 10787 - DNA, 495 bp, Gossypium hirsutum
tttttttgtttgatttctgaaatttgaatgctctctaatatatataattatattgaatttaattgggtaactataaattttggtactggaacttggcctcaaagtacaaattggtacctaaggttttctttaatccaaagtatttgaacttagctttttggttcaaattagtacctaaacttggcttcataactcaaattggttcaaataagtcattaacgtaagtactaatttggacaaaaaaaacctagttcaagtatcaattttactcaagaagtgaagttcaggtacctaattggatcaaaataaactttaggtatcaattgaaaccttgaaaacaaattcaagtaccaaaatgtatattcatccaatttaatttataaattttatgagctactttttattcatttattataaaagtttttattgctaagtgatgttttgaataaatatatacaatcaactttccccataacagtctcatttgtcttctcg

SEQ ID NO: 10788 - DNA, 440 bp, Gossypium hirsutum
aagggttgtaagatgaaagagtaaacttattctttttattaaaaaatttatctaattgtaccgttaaaaattgacgtgattgacaaaataattagatattaagacgtgacgtgtcgcatgtacctcacactaacatacataaacttgtttttaatattaacatgtcatatgttattgtgtggttattctgtcagttacacctgtttttaatcgtataaagggatggaatttttaaaagaaattacctatttgctcttcaatctaatgtaaagagattattttgctcattttttgagtaaagaggacaaaatacaatctggctcttagaaaagggttttcatggtacttttccctgttgcagtgtatttgaagaacatttgaataactgtgctgtttttgtatggataataaaagtataaactgcattagtagtcacccaa

SEQ ID NO: 10789 - DNA, 620 bp, Gossypium hirsutum
agcaccgatgactttcacatgggaagctaaaaaagatgtgggactcagacatcaatttctataactattatcgtaaatagtattgaaaatgtagaactattgtttttcgatatagataaattcaagttcggaaataatggtatgaaatactgacatcatattaatatactttttaataatttaatgttaattcattctaaattttaatattttaattaaaaatttgaaattaggttattttactggtgaactgaaaaaacgacttatccttttattttcccaagtcattttacactcgcttctcttagttctttacttatgttcttttaacaaaatcacctttgcttttctccctttctttcaccagcatcgtcccttctctcattggcgacattaaacaaatcaaaacgcgttgagacatctcgattttggtacagtctctattttcgctatttcagaaattaaacatgtgaccttatttattcttgctcttctaatctaaatacccatatcaatgtggattattttatttgttcctttttcagataactaataaatattaagttttggatttggtttatttcaagggtaaattacatcaatagtcactcaacttttgg

SEQ ID NO: 10790 - DNA, 659 bp, Gossypium hirsutum
  misc_feature (7)..(8): n is a, c, g, or t
tctatcnnatttggtggagcaggaaccgacggcccaaaagaagaaagagctcctcccttaaactgttggcttgggctagaatatccattaaaaaattaagaccatttggcctaggcttaaaaggcccatcaaagtgtccaatcggcctaaacatcccatcgttagtgcgcctatatgcatggtacggcgcctgcccaagaccgaattgacccttataaggcccacagctaaatcgaccatcatttccctgtaaggatggattagaagccctatcattttaaaactagcgagactcagcacacggcccaacctgttctcccaacaaaggaccctgcgattccactaagacagatccaagaagaggtgacggacccaacgcaccacgaacatgatggtccgccaggttcgacactcgtacacttgatgaggagtcaacatactcatgattaaagcagaagaagcttctctgggctgaatgtctgaatcttccgcagatctaacattgaagacgggttcaaaaccctcgactgcggcctccagacgagaactgatcaccatgaacagagccctcctacgacgaagtagcttcaaaatatttgcacaaaaaggtacatcctataccacacgcaccggccgactctcatattcaagcagcacat

SEQ ID NO: 10791 - DNA, 567 bp, Gossypium hirsutum
  misc_feature (554)..(554): n is a, c, g, or t
  misc_feature (559)..(563): n is a, c, g, or t
ttttagaggttcccttcatcatcattagactaatacctcgtattcttcccactttccttcttcctccatctaaagaaaccctataaaataataggcacttcacaccataaactagacttgtttatggatgactttggaacaataataaaattatttgctcaattttttattttattatttaaaataaaacatttttatctcacaaatccaacaaataaaaccacttaaatataaaatatcatagtcttgagccaatttaatttaaaattgatttggtatagacttaaagtcaaccataaaagtttttcactaatttatttcataaatggtaataaaagataagtttcatcgacataataaaaatgtcaacctcaatgtcaatagatgacacattgacaattgattttatcataattcaaacgcaacatatttggagtgattgcaagtactgatatattaaaaattttgaagcttataaatatagctgcttgtgatctcatatttagaaatccattaaaagagaaatatataagcattgccaaattatagccacnccttnnnnncccc

SEQ ID NO: 10792 - DNA, 373 bp, Gossypium hirsutum
aaattggtcggacaatttattcttaatttaattgtcggtccatagttaaaattttataaaactaatttaatcgtggacttttttgtctcaatttttaattttttatcgattttgaattatttacttgaaaatcaattcaatccctatattcaaaccgacatatcaacccgcttttataccacaaataattctatttaagataggattattagttttaaacaagttatagaatcaattttttattctttaaaattcgggttaggttcaaattttgttaactactatgtattaattaaaaaagaaaaaaataagtatagtgaatgataatttgacagaaaaataaatttattattggaggtcgtaatcgacatgt

SEQ ID NO: 10793 - DNA, 352 bp, Gossypium hirsutum
tcgatctatgatttatcattcatggacgttgataagatccttccatttcatttagcagcaccttaggatggcatagccttaaattttaaattttttaaattaaagtaaagttaagggcgaggttcaaacgaggaaaggcttacggtggatacctaggcacccagagacgaggaagggcgtagtaagcgacgaaatgcttcggggagttgaaaataagcgtagatccggagattcccgaataggtcaacctttcgaactgctgctgaatccatgggcagacaagagacaacctggcgaactgaaacatcttagtagccggaggaaaagaaagcaaaagcgattcccgtagaag

SEQ ID NO: 10794 - DNA, 644 bp, Gossypium hirsutum
  misc_feature (13)..(13): n is a, c, g, or t
  misc_feature (576)..(580): n is a, c, g, or t
  misc_feature (591)..(592): n is a, c, g, or t
  misc_feature (596)..(596): n is a, c, g, or t
  misc_feature (622)..(626): n is a, c, g, or t
ggtccgttttccntgaatttggatccaaaaccagaaacccagggatgaatgattaagctttaatcgcttcgaacatccaaaaccatggctcagccgaatcgaaacgcgcggcaatggaagtttttggatatctttaccgccatgtttttcagcctcgtattgttattcttcttgttggtattcacccctttcggtgatcccttggcttactccggcaggcaagccttgttgctttccacgtcggatccgaagcaacggcatcggtttgtgtcactggtggaactgggggaacaccgtcaacccattgacccctgccctccagattccgttgatcacatgccatgcgaggacccaaagcgaaacagtcagctaagtaggtacatgaatttttatagagaaaggcattgccctttgcctgatgaaatgcctctttgtttgatcccacctccacttgactataagattcccattcagtggcctgaaagcttgcacaaggtaaacaaatttgtgttctgtcttggttttattattatagaaattattaaactgttccattaagttgtgtaatggttaggnnnnncattccaaaanncaanttaatggaacagtttaataattttcnnnnntaataaaaccaagacaga

SEQ ID NO: 10795 - DNA, 650 bp, Gossypium hirsutum
caatgaccttaagctttgcattcctaaccactgtcccacatgaacctgactttgtaggaaagggctgcttcgcaaatcccaggcacattgatagaactggtcctgcctctgtcattccatatccctatatttttccaaaaaaaaagtacttaatccattggccatttgaacttttgggtcaagatccaatgaagcctaccattacaagtgggcagcattggtggaatgatgtacagatctgactaccctctgaaaaacctcctccacaatggcaaaatgggacttatatttcaaaataattaaaattttcagattttaatattttgataaaattcttaaacttgaattttcattattttattgataaaaatttaaaatttaaaatttaaaattcctgaacaagaaactttgaaaaatatttttagaattttaattaatcaactatttgatattaaatattcatgctattttatatgatataaaataaagattttaattattttataatattatctaacgaaagatgggtggctcgaaattgaatatagtgagactaactgcgtgccagaattcagaaggaggtccagtgacgactcaatggccattaatacccttagattttggtgcacccgcatattcgtaagggttac

SEQ ID NO: 10796 - DNA, 615 bp, Gossypium hirsutum
tttggtgatgataccgacatggatttggtgatagtttttagctgatttgaacaaacttgcaatatagcggggtatattggaatttcaaatgaggcaattaaattacttttgattcctttttcacttggaggctagatcagagaatggttagaggtattacctccaaatactattacatcgtgggaggaatttgtccaattatttttacataggctcatacaaagaccttctgcactaaaaactgaagccaaattactcaagttcaatcaataaccaactgaaatgttgggacaagtttggaataagttcaatctaattattcagaaaatacttggaggtgacattgatttggccattcaattacaacatttttacggaggcttggatcatgatagaaaaggacaatttgatgttatggctagagcgagtatttggacaaagatgactcatgggatagttcttcttttagaaaaaacaagtagcaatgatcacacttgggggctgactagataaccaaaaggtagtaaggaattgatgagtgttgtcgagaaagaggcagtattggaagaagacggtttggaacaaagcaaggagcaatggagtgatggtgactct

SEQ ID NO: 10797 - DNA, 482 bp, Gossypium hirsutum
cttttttattttgtttctttcttacaacctttacctactcccaccgtcactgctctttaaccacagtttcgtcatcagcatcaccattgcctgcttcactcaggcggccgtcatttcaatctccaaccttttcctgcctcgtcatgtcgtggtccccctaagctaatgttgggcgggcaccgtgttaaaacgggcgcgtggcgattcccgacgtggcccccatttactcgttaaagaatctgtcggcagccacgtcgtcacggcaatctttaacgtcagggaaataatatattaactatgagtgaatggtattgcttactttgtgggttttttctgtttttgtgttgtttttttgtcgtactgagagaacaccgtgatattgtcgttgacggcggcgacggttcaacgctgtctctgttcttttatatttttttttcatggttttacgccaacggttccctattgtcgtgtttcgtgtgata

SEQ ID NO: 10798 - DNA, 549 bp, Gossypium hirsutum
gaacttgagaagcttgttgagaggaagcaagcatattgccaaatccatctatgtcaaaaataattgagtagttgaggcagactcatggacgacccgtgaggcattaagtgctgcttcaaagccctcaaactttggcaatccacttttagcgttgctactcacaaattacttttaaaaattgctctaattaatgtcatttaagatttgagtatttaatttttttaaaataaaaaaattgtgaaatgttaaaatatttaatttaatttgaatattattaatatataaaaagttaattaatatataaaaatatcaatcttttaagtgttttgtaagcacttaacatatattatcaataaaatttaatttgaatatacaagttataagctagatattaaatgcatgtaaacataactcttataaattataaaataagttataattgttgattgagtcttagtttggttgttattagtattgttgttggtgtaaggaggatacgagttcgaatatactgaagcacatttatcctccaatttaagggttgaggag

SEQ ID NO: 10799 - DNA, 606 bp, Gossypium hirsutum
ttaggttgcaagaccgatttggttaaacagaagatacaaacagagtttgccttagatcgcaagaccagttcagtcaaaaagaagactcgttgggtataatacatccaacctagcttgaagaggagcacgtaggatgtgatatagagaaaactcataaatctaagctcgctaaggagcaaaacagggagctcacacaaagttgagcttaacagagagctcgcacataggcaaagtttaatcatttgcttgtaaaccttgcacgttaagttccactaaaacatagtttaaaatccattcttttgaaacgttattaaaaccataggctcgcttcagagctcgtacaaaactttgatttaaaaccatctttacaaaattatatattgaaaataatacttttcaaaaaacttgtatttttgaaacgtgggtttccaaaatagatttctttttagtaaaacataagaattaacataattttgataataaccgaaattcttagaccactcacacttttgtaatcttaaaaagaacatactcacgtcgaatcctcaatcacttactaaaaatagatgaacttttagcttttccattgtccttattggtagatgg

SEQ ID NO: 10800 - DNA, 620 bp, Gossypium hirsutum
cctctgctttctgaactaccaaacagagtattattgatgaaaataattgattttgaatccatagttcaacatcatacaacactaaaattttcaacgtaaaaccaaaactaaacttagaaacaagaaaaacaactccctgcccactcaaggaactacaaattttcccaatttctcactcaaagaaaaacaggaactcattgagaaacccaagaacccaatgtttaaaaaatctcctaaaatttcaagcttttaacattcgagcaaaccaatcaaccaagtccgaaaaacccaaattattattgctcttaaaatagtgataaccagcatgtagatgagatgcatcagccatcgctgtagagaaatttattaagagattttattgaaatttagatgccaaattacttacttctgttaacgttgaaggaccaattcagaatagaaggggagcaaccaccaaaagagatgactgattcaaaaggcaagatttatacttgcggagagaaacggtagacagagagaggagaaagaattagggtttattaatttgggattttggggacaggggagagagagactgtaagaaaactgcttaattcataaatcaccgctaaattattccc

SEQ ID NO: 10801 - DNA, 620 bp, Gossypium hirsutum
aaaaaataagtaatggatgaaattagtataaatctcaaaattatatatcaactattgtttaatatataattatatgtataagttttaattttgtgtaattttatacataaaatttggatttgatccgattcttataaattattaacacaattattaatataacattattttatgtttatatattgcatacataaataattatattatccaatataaaaataaatcgatgtatttatttctttgaatgtgcattgattaaatcgaaattaaagtttcaagtacacatttgaaccacaattagagtttcacgtgtataattgtactaaattaaaattcatgcatataattttgagatttatcccatcaaaatttgaagccaatttaacaacatataaaaactttcacccaaaagaaaagctaaaatgccgaataaatcttttgaaaataattaaaaaataaattaagtccctcaacgaaaactgcattcaatagagccatttgaattataattgctacctaattaagctcttttagttgaagccattaatggtttgttaattgttgatgtggcaaaaataatggcataacaactaacgtggtaaaatgatggcatagaaagc

SEQ ID NO: 10802 - DNA, 485 bp, Gossypium hirsutum
ctgagaccatgcgagggggcttagctacacagtgatgaattcaaataaaaacacacaacttgtaaaagaaatttaaagaaaaaaacaatatatacaaagaaattaaggatttaaggaaggcatccatccattccctaataaccaaaaatggaaagacagacatcaagagtcagcgtcaacccactccgtcgggaggaccaaaggctcttctcttaaaattttatttaaatttatgtttctataacctttttatatatttatgtcacagtctctgcgccgcacagtagagagacaacgaccaaggcataccgacacttaaggttaggaacccccggtctcgccttcccagactcatccaccccttaaatcgatcgacaacgatcatggcaaagaggaagatggcaagaatgttgttagtaacccacaaaaactaagcaaagactgtgtaacagtggaaaggaaaaaatgggacggatgggataaag

SEQ ID NO: 10803 - DNA, 669 bp, Gossypium hirsutum
gacttacatttcttggctcattgcttgcatttcattcatttgaacaatgacttggggaagcaatttgagatatttgaatgctttaaaatagatccgtctttgtttcgatcatttgatgagttattgacatgtaaaatgttttgttcatttgattgtacgaatgatgttttaaatctgcccttttacatgactcatacttgtcttgatacgactatgcatgatctgtatatttgttttgatcatttcatgatgattaatggttgtccatttccattgattcatttgccatctttactgctgaatattgtgagttcttttgcaaaggcctatgaaagactaatcgccccattcgcccaatgagagttgcataagaaggaatattttctagtgaacaaacagctcgacttgaggacaagttgttttgaagaagaggggaatgatgtgaccatgccccatggctctctaagtcctagtttcgatcccaataagctcccaaaaggacccatgattcaagcgcggtccaagcgattctaagaagctatttcagcattattttttagaattttgaaggaggatcagtttgttaacgaagggaaagcttgggctaatccattggggaatccacgtgtcttagtgcaagctgattttagctcaattccagctccaatc

SEQ ID NO: 10804 - DNA, 655 bp, Gossypium hirsutum
  misc_feature (20)..(21): n is a, c, g, or t
  misc_feature (630)..(630): n is a, c, g, or t
acacatttactaattaaatnncggtagtttaatcactttgctaactacttatacatataattcaattcaacattataaaccattatcactcatttagccgattatagagaattaaacataatatctctaggatatactctacatggccgaatatactacattaattttcaacattacctatgtaattacctataggttcttataccttaaattcacacatttagccttttaatgcctattgatcattcctttggtcttatcaagaaccatttaacatgcaaggaaaataatcatagaggaagaaatttacattctaaatagactcaatctttgaccgaatgtacaaggctcctctaagccactcatccaaaaatctttaccccattctagtcattcccccattgttccatacaacatgaaataacccctaattccaacacttaatcattcggcatattgctcaaatcaccataagaaatctcaactttcttgacattaccaagagtgcatccacaatttaacttagcatattataaagccaaatcaacaaattcaaagcttacctcctaatagctaaagatgaatgccgaattgctctaggtaagttttccccttcctttttttctcctngcttctggttggaggagaaaaaaaa

SEQ ID NO: 10805 - DNA, 615 bp, Gossypium hirsutum
gcttgctcggtctcaggtttgcagtaaaatttaaggaatttgctaaagaaccttgcccacaaactcttcggacctatgatagagcaaaggcgatgctgaattcttggttttgtagtacatctttaaaaacctctgctccataacaaacctgtaaggtcctgcggagccatcggcaatagacatgcggctaacaagcttgtttggaccattggatctcagggtttggcccaccaaaagcgtgtctgtcgggtggtcaaaactctgccaaataaatttgcctttcttatcatacaaaaccaagttaccatttgggagtatcttcaatcccacaacacccttgttggcagtggccgtttgccatgctacagtgccatcagcatcggctagcactaggtttccgtcagacccgaaagttagtgtggcgttttcacgaacaagccttcctcggttggcttcccaaacccacctcactattgactcggatcggggactgcccattcttagtgctaaggtgaaagcattaggagtggtgttatagaagcataattggaatgggaataagtaagtgagtagaggacgatagtctgccaatactcacactggattctccaactc

SEQ ID NO: 10806 - DNA, 600 bp, Gossypium hirsutum
tgagaaagacttagccaaatccattttagttcctcaatcaaaaagcattggggttttgagtttagggatgatctcctaatgggaacacctcaaatggagaccaaagcaaaaaaggatactagagtttgtgatttgagatgcttaaattaatttttaaaaaaattcatggaatggaatggcaaaagatgaatttaagaggattttagtttaccctatcttaggccgattgagtcttagctcgattagcatggatattgttgccaatacaggaggatgtgagtttgagtgtgttgaaacgtattatcatcctatttatgagttggagaagagctatcaatcggtttaggtattgtctcaaagagaatagatattatagaacttatgagtttgttcttagattagtggtgaagataataagggataattctagattcaatccctcacattttgttgtttatatgattaagtcttatgtgaagaatttaaaatgtccagttaggtccatgcttctaatttatttatttatactaaatttagactaaaataagttacatttgctcggtataataaaatgttacggccttccttcatgatggtgct

SEQ ID NO: 10807 - DNA, 400 bp, Gossypium hirsutum
ttttgttatggatcacattgagatgaaataagcttgggatctcatattttgggttcaccaaccttatccaatgtttaaatcaataaataatgtatatattttttaagaaaagcttcaactagtcaataagatgatgacgaaaaagagactccatttcttggagaaattaaccttaaatccgcctttaattttttctacagtattagaataggggtgatatcacattatttgaacttgtatcaaacaggtgtttgttaaaagctttcaatataaagtgagaaaggattgtataaaacagggatgtcaagttattttgtatcccttttcaattatttaaggacatttcaacaattttttccatatcattgatatataattttgttaattttttttaacctta

SEQ ID NO: 10808 - DNA, 609 bp, Gossypium hirsutum
  misc_feature (43)..(43): n is a, c, g, or t
tgctcttgctctgtactgcatttgttcttacatatccctttgnatttgctctaatttttcaagtcttttgtccattgacttggtctttttccttgtaccgtagggatgtgtatttggtgtgtttttgttggtttccagattactgaaataatttttaattaattaggatcttttaatggtctttaatgcatatgatgtaatgtaatgcaaatgcatgaaatgaatgcaaaggaggcatcaattctgatttaattccatttagaaaactttactagaaaacaaaattctttacataaaaccgagttacaaataagactttgccctaatgctcagagctttaattttcctgagcaacaaagctaactcctgtcccggatctgactccagctcatacttcacacttaatatttctgcctgtaccaccaaagtctgcaagtaatcagctacctcccgaatttgtgttacgatttctctcataatgtaatccctacttctaacttgattctgagaatgataaagctgtcccctccattgttcttcacttgcctctaagaacacgatcctcatttcacaattctgcaatgccgcctctaatcttctatttccctt

SEQ ID NO: 10809 - DNA, 605 bp, Gossypium hirsutum
  misc_feature (545)..(545): n is a, c, g, or t
  misc_feature (596)..(599): n is a, c, g, or t
cgtggcgtcgactgccagttgtgttgatgacatggataggaagcagcaaatgtgcatgccattttggaaagtgaacctctagtagatgaggtatttccttctatttttgctttttgattgtgtttttcttctccttaattttattctcaaatctcactttcagcatgctgggatttttaggaatcaatagcctgcattgttccctttctttagggctcatctggtccaggcccacccccttatgcattaggcatcaaacaggcttatcagatattctatgcagtcttgtttactcccatttctgatacactcaagtaaaccaattctactttgatttctaatcattcttctccgagagctcctcattatgtttgcctactcctgagtcctgagtagttcctatgaatatgttgctgtgcttgaagaacttttgttatctttcatcttttcttttgacatttttaattgctttaggtgtttaggatatcctttgaacttttcgtgtgaaaaatcttgattaaacttagtggtgctgatattcaccnacattaactatatgcttcttactaagctatctaattattatgtaacttcannnnctgcaa

SEQ ID NO: 10810 - DNA, 640 bp, Gossypium hirsutum
aggaagaattgcttgttcttttagggtatagtgtattccatcttcaataaaactacatataagttggtttacatggttggtctctctcattatatcagtttatattcttatgtagaaggaattattatgctgtgcatttttcattttccttcaaatattctacctttcttgctttaggtaaaccatgcagaattttgtcttagtcatggtgaaaatcacatagtcattggttttagcagaaatttgtcaaaaaatttagtgggtggtaatattttgttaatagcctgatttgttgagcaataaatggtggaccaggtatttataccgagacccttgctttttgaatgtgcactaacatttctcgaatttttgtaacaaatgaatattaagtgtcatagatggatgttgatccaaacctaaaccttttctccaattttctactgtagcctagctttctgattttaccatttgtataattattgttattgtctgattttttctattcttgagcaagcttgtttctttagtaaaatactaattcttgtttggaggaaagcatttacttcctgactttttttgtgacgattctttttcctcattaataatggttattgacttgaaaaatatttgagccatctgg

SEQ ID NO: 10811 - DNA, 457 bp, Gossypium hirsutum
aaagtgcggagggaagagataggggcttacatttcttggaattaaaatttatgtatgttctgtcctgaaagattgctctctttggtccaaaaaatcaagaacgaatcattgtatacacacactagaatgtcatgtcttatatccaacatcatttttttggcatcacatattccatgtcttgaatccaaaatcatatcttcaaactcaagtaaactaggcttattgggatccatctagagtttacaatttcccttattacttttataagtaatatattttaaaaaataatatttaacttttggaaaataaaagttataaaatcaaaaactcgtaaatgataaagaggcattaagatataagcctaaaatcaatctaaatctgaaaattaattatttttctatcccccacaagtgacatcaagtgctagaaatcgggactcacaaatatacagggcaaa

SEQ ID NO: 10812 - DNA, 586 bp, Gossypium hirsutum
  misc_feature (570)..(570): n is a, c, g, or t
cttgaatatccatcaaagcctgattttgattcgcaggagttctaaaaggttgatataataggaacaataaaaacctcctccgtgccaaacaatttggagaattttcttaccaattatcaatacggaaggcttgtgcagcatagttccacttgccttgtagtctaacaggtacattactgtgaggccggtttcgccttctaactgtttatcaggcatctccatgtagaaatagcaatagagagagagagagagagagagagagagagagagaatgtcggggaaagcagccattgttgtgaaaatggtgatgggggactgacaagtttaattttgatttttatataattacattatgttttatattttcggaaatccaatgtaacatttcactttgcaatattaatttacttcttgtagatttctggtatcgatgattggaaaactagatttttcttcctggttacgctttctagcaaaagtaaaaacccaaggtgctgcaagttgaaaaccggaagagaaatagtacagaaaacaaaaaaggagaagagaatcgagagagagagagaaaangaaaactgaataccca

SEQ ID NO: 10813 - DNA, 653 bp, Gossypium hirsutum
catttgacaaagaaaaaactcacatgacttggattaaaacaacggaataccaagaaaataccacatcagaatctttttttaatcaaaattttatacatttattgtataattgttttcacctatattatgagcgtgtcaaaatctaatatacaatatatatattttttgtgtgaactttaaagctataaaataaataattatatatataaataatttaggtaaattataccaacagtctctaagttttatataaaattatattttaatcattccactttaaaaatttacacattttaattactcaataattatttatccgaaaaatacctttccaagaataaaatggatggccatgcgaccaaagagatgactctaatcataatctttaatatggtgaatgaatggtcagaattgaaaacgtgattggactttaaacattaaactttatttaattataaaataaaaaaagtaataatgtcacatcaaaatgtaataacttttgaataaaaagataattaagcacgtttaaattggagcaaaaataaataaataaatacatgccttgaataagacgcaatgaaatgatatattttaggtttatgtcaatctgtgactatgacctttttatcaatccaaccacatatggctacaaa

SEQ ID NO: 10814 - DNA, 572 bp, Gossypium hirsutum
ataaagatttattcatgatgaatgctgcaaggttctcgagatatatttaattcttctcattttattaggattgcgttacatttgtactgaaacttatatttccatttaggtgctgaaacatcaacgaatcatcgaggagcttatggaggagaatctgaagcttcgtcagattctcatggaagacctgaaaatatccccaagcaagctccaagctagttattctagtaaaattaaatctccatgttcggaatgcttctattgccgaaggaaacaaaggagaaatagatgatgacaaagtatgataagtaaaccaaaaaccattcaagtgttataccaaagttcttattcgataacatttccgactggaacaggattttaagttctggcaaggtgctccaacctgataatgcagaagtggtgttaaccatcatgacatgtgagccaaaggagaaggataccaaagtaaatcaaatccgtcgatgaccaacttaatgagctgattaaacaatagacatgattacaccaaacagatgatagagctacttaaactaatattccggaggaattcactc

SEQ ID NO: 10815 - DNA, 643 bp, Gossypium hirsutum
ttgcatacccttgggttgagaaagtcatcgtgggacaggtctgacatgagagtttaagttgtgttattctatttatttaactattatccattcttattgtcatattaattatttaactatctttctttttcttgatttgttatgccggtatcattatattttgatgatgtagttttccctacacataactaacttcttggaataacttattttctgggatgtgactcccaataaggagaattactagcaagctgatagtgtttagcatacctcgaatgaattcaagttattgaatatctagtatagttacttttgtcttactgagatagcatttactcaaacatatttgattcacaagaggccttaaagccaatgttaaagcataatgctatcttttgcaaaccctgcttaccaccctctaaaaatgacaaataattaataaattgataaaaacaaaaataaaaatagtcttacatcatcaatccgttgtagtctagttggttaggatactcggctctcacccgagagacccgggttcaagttccggcaatgttttgcttattttgttctttttccccattttgcttgcttttatttttgtttgtttgtttttttttctcattttgcttgcttactctgttac

SEQ ID NO: 10816 - DNA, 667 bp, Gossypium hirsutum
  misc_feature (181)..(181): n is a, c, g, or t
  misc_feature (183)..(183): n is a, c, g, or t
ctgaaggagaaggagattcaggctgcgaacaagtatcggagatgcaagataaggtgtctctcctctttcttcatgttatattcaaatgtttctgaaataagaacataattgcgtaggtatttaagtgtaataacttatctatgtttttacttttcggaaacccaaaaagaatatccttctncngtcgtttgttcttctctgtatcccttgttccttggtattttgttaccagtttgcctgtatgttgtttctcaattcctacttcattgctttctgtaggatgcccaaggttccgtgacacgagaaattgtgatggatgaagattgtaatgatcaacaatgggaattaagcatccatggcaacaagtcacagaacaatgtttgtgatcctgaaagcagaagcccttctttcttgaagacgggttccacatgtccaaagaaggataaaagcagttcctggttgagcttagatgcatctgcatcaggacgtacttcacgtgcaaaacctaagaatgaagcgagtacaatcagcaaatgcactcctactaaaacttcggcttcacatcgtaccaccagaccttcaaagcaggcaacaccaagcacaagaaaagttacactacaggagcatgctgtagatatggcagaacaactcagcttgggtcctctat

SEQ ID NO: 10817 - DNA, 553 bp, Gossypium hirsutum
ggtgaggtattttaagaagttcttaaaggcaatttcttgtacaagtactgaatcttgacttttaagatttgatggttttataatcttgggattgtatttcaagcattctttgtgttttcagacaatttgatctctgttaacatgtaacatatattagcctgctttattatccataatggtgattcatgcaccatttgctttacaaagctgaatattaggcattaattttggattattgatcttttaggcagtcaatattatttggaacccaaaatatttcgatgcctataatataacaccattttagggagaaaatttaccttggagacgagattattaaattcatatccgttaggtagatatcagagaaagttgtgattttttgtttcattataacactttttgctatctttcccgtttctctttttctacccatcttttatcatacaaaattttggccaatgctcccaatcataccatgatggtttatggaataaaaataattagacccagcaagaaacataaaaaaaaatggtaattatacccgtggaca

SEQ ID NO: 10818 - DNA, 527 bp, Gossypium hirsutum
attgttggaggagaagaagcgtgtcaggaaccctcttgtccctgtcggtaattttccatttcccctcttcaaattctccgattttatgcttgctttttatctattttttgtatgaaagatttgtggttcgaattttatagaaattaaacttttgtttgcttcagtttgtcttgcagatccatagttggaaggatgtttctgataaagtttttctaattttaagctttaattaataaattgatgtttctgatagccagtttaagctacctaattaacaaccccattgctaatgctttattcctttaaatggaatctcaagtgtgaaaattgtgtagctaagtgctttgatttgttatgtgtatgtagcatattcttggagttgcccttttatttggctgcaaaaacacttcacgtcctcgattatgttgagtttttgcttaactaaggattgcttcatgtggttactatccaaatgggagctgtaaattaacgtaaacttcttagagttacacctcaaaggacgtcat

SEQ ID NO: 10819 - DNA, 632 bp, Gossypium hirsutum
tcgagggtgtttgggtggttatggactaagggggagtcgcatatggccgagttgctggctgtgcgtgaggccctttcttggttgcgtgaagaaggctacgataatgttgaacctgaagccgattgtaaggaggtgtttgtggcactttgttcttcattatcatcacatctttcggaatttggtgttataattcaagattgtcaatatttttgcgagtttttcatcgcttgttcttcaaatgggcatatcctaataattattacaatagtaaggatatcaactaaacttaattgatgaaatttaaaaaacagaaaggtcaaattcttataaataaaaataaaaatataattgtaacggtaccaactaaacttaattgatgaaatttaaaaaataaagagatcaaattcttataaataaaaataaaaagaaaaatatagaggctaaacttcaaatttgtgaagctacagggtcttatgacataataaacccaaaaattattccgttgccgggacttgaacccgggtctctcgggtgagagccgagtatcctaaccacctagactacaacggatttatgacaaatcctacttttaattttatatatttatttttgaacgaaaatgaacctccgct

SEQ ID NO: 10820 - DNA, 361 bp, Gossypium hirsutum
gtaatatatgaaattctaatttttcacataaaaaaatgcatgtcttgtagattatttactttgataatagatttctccatgaattcgggttagactttattaattaaatacttcttgtaagtccaacatgtggtctaataaaacaattattccaaatataatttttaattaaatttaataaaaaaacaatttctaaaataataatccaattcaagtgaaagaaaattttcaaaggaacaagtattccacgttttgggaaatatacattttagataattatatttttttaaaactcaaacttatgtcttcctacattagtaaaaatatcaatgtcaatcaagttacgactcaatcgacaatt

SEQ ID NO: 10821 - DNA, 598 bp, Gossypium hirsutum
  misc_feature (577)..(578): n is a, c, g, or t
tggtgacgcccgtttaagtcgactgaacccactaattatgataggtttaagaaagggttccaagaagaagataaagcgtccaaggacacatcaacagagagcaagaccgtggatgataatggttcaacacccttggaacctgaggtagtaccagcatagttcttgaacatatattactcgttctctaaaatacaagggtttttttttttcacattaatttgctcattttaccgcccacacttgtccaaactgaactcttaagctgtaaaaagaactaataacagaatgtcggaagatttttaccattactgagatgttttcatttttagaattaacttattgattcttgatattgaaaagtatgtatgttaatatgtatttgaagttgctatgcggccaaatttgttttgagaatttgtagttattatattaacatttgtacatgattaatgcacactgattggaaaactccaaataagataagcaataagaagctaaaagtattatcgaagtttttgtactaaagttagattgtattatgcattttttatttataaaattagtttttttttgttannagttgttatctatttttacc

SEQ ID NO: 10822 - DNA, 540 bp, Gossypium hirsutum
gctgtctcagtttcggtacagattatggccaatgaaatatatatatattgtatgccatattcatatatttttatgtatcaaacgcttttgtttcaatttaaggtaacttataataataataattataaatatgataataattaatattatataaaattttaaatctatactatattgaattgatgtctgaaatattttacaaaataataaatatattatgactttcttttatatataatatatatgtgaatggtttttacttttctgttttggtagaaaagaaataagttcaaggaactagctacaataacgctgatgggagcctatattaaccattgctcgatgagcatcttcttcaaacaatgatcgagcatgatcaagtgggtcttcaaaagttaataacctgttaagatcactaggaataactttggcaatgcaatttgccagtctattatgctctcgcacgacatgtcgaaacttaagttgccagacttgcttgcataaattatgtattaaacgaagtttagaaaagttattatc

SEQ ID NO: 10823 - DNA, 625 bp, Gossypium hirsutum
tgtaattgcagaaattgcagaaacagtatatgacatcgcgacaagaaaagacctgcaatgtcacggtgagacgaggaatcctgccgtctcgatgaggccaatatagtaagtggcgttgcaatgtcgagtggtctgacgtcgtgacgtgacaagctatatggcaacgtcatgatgtcaaccttgcattttgaaaacatttacaatttggcccttctttgacttcatattactatttgagctttcataagttcgtgtaagactcgataatgattctatattgtattaaatgtatagtttggttcaatttaagtattaatagtataatttgactgagattgattgtagttgttccggcaataaatgtgacatatcataactcgaacccaacaatcgagttgggtatcaaggtgttacattttttgccataacttttttttataaataagtacattataatattttttataacatgtaaattatttttataatatactttttaatcataattttagaattttgtgaggatttaaataatataatttttttttataattttataaaatataaatagataattttttaatgtttataatataactttaaatctttttgcgataacccttct

SEQ ID NO: 10824 - DNA, 652 bp, Gossypium hirsutum
tgaaatgaccatccaagttgtgagattttgcaagatgaggaggagactgtaatatttatcaaatcatcacatccccaaacttcgagtttttggagattagaaagaatatggtcaaactccgaatctttcctccatatatgattaagattcatggcacgatccagcatcagatttctaattggtgtgagagtcccaacgtctcttttacaagagactacgtatttgaaatcaaaatcacaaagcttaaaactatccaaattgtaaaatcttcgaacaaaaggaaatatagaagatcgagagccaccacgcactacaaaactttaatatcttgaaacaaggctggtggaaactgttccatatcaccaaaatttaataactcaagttcctctaaattgggaatgaccttgaaaccaattaaacatacacaagttaggcacaatgttgatctatatgcttaaaaataacataagatctacaattttggcatttgatatcgatgattaaatctcaacaaaatcaatattaaatcaaaccaatccaaaatagatgaatattttgttttaagaaagcacaataccttggaaataaaaaatgataaaaaaataagctgaaagaagtgcataaaaaatctgaattaaaatggataagcacc

SEQ ID NO: 10825 - DNA, 616 bp, Gossypium hirsutum
  misc_feature (575)..(575): n is a, c, g, or t
ttcttttattcatcaaaccaatataaatggttttctatcaccttactcaactttgagatgaatttcatcatatctaactacatccttagtcttacatctatcttaacatttgtgtcacggctagactagtgttttgtatatattgcttcttgttaccccaacattccctaccgtatagcaaagcaggtctcttaaaactgtcctatagcaaagcagggctctttttgtcacaagtctccacctttaatcctatagttaacatctccattaatctctcctatctttcttatttatactgcccctaggtacttaaaacaactgttgacaatcaaattgcttcttcaaataaatgtacacagctataaactcgattttcaatctatactcaattgcagttatatattgcaaaaaagaaagacactaaaagatgcaactaatattgtacaacaatatttgttcacaaaaatttaaatttgaatcaatcaaagtgtgatgaagctatagtatacaaacaaatgaatatttggtttccaaacatgtaaaaaaaaattgtcatacaaaaaaaacatacttgngggttaatccaaattaagggaaaaaactggaaaaaatcaac

SEQ ID NO: 10826 - DNA, 631 bp, Gossypium hirsutum
atgcaataaaacaattttaccaaatttaataggttaatagctagacttaaagaaagccatcatttcccactatgttatgaatcatactgatagccatttattattatacttaattataaattaagtatataaatatgtatatgctagtgggaaagtagataatatttttatcatcttcctcccataatcgattataaaaaataaggttaagttcatcttcatttgccgataaaaattcaagggtaagtaagttaaattttcaacaattttctttagatttatgaagtagaaaacttaatgtaaccaacccagttgataatttagtaatcttgagagttagtgtgagttctcattgttggatacattgtaattgaaagctagaaacaacagattgagtatcaagcttagtttatgtgagatcgtgttgatagtgaagtgggttaacttggtgtgtattgaattgagttagaactttatagtcattattgatttcttaaagacctaattgtaaggaaaaaaaactttaggattttttggtataaaatgatagtttgaggttcctagataataattatgaaatcatattttgattcgatcaggataattaaaagatacgaggatttcagacata

SEQ ID NO: 10827 - DNA, 395 bp, Gossypium hirsutum
ctctctatgcatatttgggccctgcttctgctcatcgccatgacaagaaaataaagtcatcattgtaactcttttctttgtttgtagaccctaaacctattctctaataaacgataataagaaaagagatactttaaaggttatcgaattgaagaagacattcgcaattgagataaaaaaaaatattacaaacgaaattaataacttcgcatgtgtttttatgttattaaaataatttattacctttacctttgctattaataataattgtcattaagttttaattcgattgacatgacgttgttatcaatataggagaacgtgagtttgagtgcgctgaaacttattatcctcttatttataaattgaggaaggattaaattcgagtgcactga

SEQ ID NO: 10828 - DNA, 575 bp, Gossypium hirsutum
tgaggttattgctacatgcacagctttcaaactgtatgtcgagacgtcgcaatggtttggtgattgaatcagattccatggtcactcttgcttggattcgtatgaaagtgattcaattctctcttgtttgtagagaagccaactcaatggctgacttcttcgccaaaaagggtgtcatgaggagttgtttgttgcgtgggtgtaatttggtttcccattttggtccttttcttgttcttatggtgtttttcagtttccttaagactcttttatcctttcaatatagctttttttatttaatttatatcatataaaatttaaatctataacaatataaaattattagatattgaattaaaaataacataaatttatttatttaaatatgagtggtcttaaaatgagttcagattaaccattcacaaatataagtaaatttgaataaaattcaatgttcatattttaagttgaggccaaacttaaacaagcatagattattttaataccatgaatgcctctacgcacaataaagtaagccttctttgtggtatgattaacattaatgattaatggta

SEQ ID NO: 10829 - DNA, 630 bp, Gossypium hirsutum
tgacgtataggaaaaggagagtagcgatgaattcggcgatgagagctctgtaaaaagaccaaagcttgatctcagccacgtcgatgagcggtgccggtggaggatccacatagtcctttcggctcatcccttcttcactcacttccttcgacatgtttgattctttgtttcttcaaaatgttggaagcttttttgagctgttctgagttgatggtactgccgtctatttgggatatgctcacttcccttttataaactggtttcaatgccaccatagttgtgcattttcggataagataaagggtacttttggaacaaatatgatcattttttttagtattataaaccattttcaattttatagataaaaataataataactttatattttggacaaataaatcaataaatattaggtgtaatgatatttttataaaaggaatttaagttcttaactttaaaaaaataatttttatgatataaaaattgaattgaagactacatttttagtgttttttttaatggtattttatttgttgaagggaaaagaaaaaagagaaaggggggacagtgggtaataatgaaggacagagtgggacaaaggggtgtacagcgagaccatgtgagtgt

SEQ ID NO: 10830 - DNA, 642 bp, Gossypium hirsutum
ttcactttttcttcgttgattcattctttatttagtggtggagctagaaaatttttttgaggaggccggaattaaattgtgtatttttacaatagtaaaaatataatttcaccattttaatagtttatatatttatagttttttaaagagttaagtcaaatttttattatttttgagggaccaaaatataattttattattactaatttaaaattttataaattatgaagagttaaaacgaaatattttccattttaggaaaacgaaatattttccattttaggagacaaagccttgccaactccttaactttactaatctatcatcttttaacaatcttaaaaacatttaattttatgtttgctcccaaaacaaaatttatgacttctcctattgtgtttttttaatatgcttgtttaagccacaagattaattaaattaaattgatgtaaattaagataagataaaagagggaatattagtttaagtatagccttataaaacaaatccttagggtaaaaagaagagggtccattccgtgccataatattctttaatggactattgactttattccgaacttatccaaaaggttgttggttatattaacttttatataatacgtctagggccaatgtatgg

SEQ ID NO: 10831 - DNA, 683 bp, Gossypium hirsutum
tgaatttaacgcgtgttgtcaaaatttttgaaattccttgttcactttttatgcaaggggatcgggtctatttaataaattgaatcgggtagcttaatttgttagattttctatgacttttccctgcttatatttgatgtgattactaatcaaggttgtttgtctttattttattttttctttttcgtcatgcatcatatgcatcatattagaaaggtgttgattagagaccggttgccaaaaatgggtttctgatggaggagttaattacacaagtaactgagaaaaatgccgtggttcaggactagtatttgaaaacccagaaggaaaaaggggacagcttaacagaaggatgtatctcctatcttcccgagcacgtaactgtaaatgttcgtcaaaataaccttgaagacttgactcgaatttggaaacagtgggactcagacactaagggtatcttcattgaaaagtacggggatatagctcatttgatagccatcaacgtagatgaacaattgattcaagccttggttcgattctgggacccagcttaccagtgctttacttttaatcaagaagatacgaccccgaccattgaagaatacactgctttactccgtgttgacaatgtacagttttataagatatatgtgaaggagcccaaaccaatgaccctcaagaaa

SEQ ID NO: 10832 - DNA, 579 bp, Gossypium hirsutum
  misc_feature (57)..(57): n is a, c, g, or t
  misc_feature (549)..(549): n is a, c, g, or t
  misc_feature (559)..(559): n is a, c, g, or t
  misc_feature (563)..(563): n is a, c, g, or t
agtccattgatgagaaggggctaggggaaagcttgaacccaattcctacggtgatgnatataagcgcaattgaaattcctggggagttatacatttgtgtattgataagaccattcactatttcttgaagctcgatctctcccccggatgaaccatatagccaagagaaaccatgaaccagaatagaagagcttgccccacccatgagtaaatatttcgtagtagcctcattagaccgtacatctttcttggtatatccagataataggtaggagcataaactgaaacattctggagctacaaagatagttattaaatcgttagcaccgcataaaaacattcctcctagagtagctgttaatacgaataacaaaaactctgctatagccatttctgtacattcaatgtactctacggatagaggaatacatagagttgaacatagtaaaataagaaattgaaagatttcattgaaattgttcgtttggaaatttcctgaaaagctaatcataggttcttctctccatcggaacaataggggcggaatgntcattactanactngtgaatagatgaaata

SEQ ID NO: 10833 - DNA, 633 bp, Gossypium hirsutum
gcagagagtccagggcaattcaaaattaagatggtaaagtatagtgttagaattaagtgacccgaatctttatttaaataaaatatagtggtaaaataaaataaaagtaaaatccctatagaactatacttcttttattttattttagaataaggttttttaaaccttattaaactccatctatttgatattgattagaataaggtgtttcaatcttactatactcctattagaatatggttttataagcctataaatagacatagtctactcctcttgtaattattcgaattcgacatagtgaattttcttcttctctgcccgtgattttttcctaaaagggtttctatgtaaaaatttgtgtgttctttatttttatttctcttctctttgtgatatattgtcattatcgatattttttttacaaattggtatcagagcttccgggttgttcatctcaatcacgataatgacatctttgaagtatgaattttcgctgttagatcgtaacaccagattcgcgttgtggcagataaagatgcagacagttcttgcacagatggacttaaaggaagccctactagtggtagataagatgctttcaacattgacgaaggaagagaagaagcgcaa

SEQ ID NO: 10834 - DNA, 630 bp, Gossypium hirsutum
gagtttggtgttgcttatataggattttactaaggctatggtctcggtaatgatgttatgcttattttacaatttgtgcttaagaatggtaagttatgtttgagtttatacgagtttactaagcagtagttgcttacgtagttattttcctttatttcatagattatcgaaagctcgatttgttggaagcttatcagagatctatcacactatccagcaaccatttcggtagtttttgaattattttggccaatattataaatggcatgtataggacctctttataatggtagttcttgaatgtgttaatggtcaatttggtatggatatgcttttgaagtttatgttttgtttgatgggcttttaatgccttgacaagtttaagtattttggtcacttttaaagtacttgtaatatatggtcatttgggtatttttatgatgatatgtaaatggttataattgatgtcatttgatagttaaaggaactaggtattacgcttgaaatgtggctatattgctttgttatggttaatgatgttttggtataaatgtaatgcctttgaatgacatattggttagatgaaataggttgattgaattggtatgttttaatgtgattgaaaggtgt

SEQ ID NO: 10835 - DNA, 589 bp, Gossypium hirsutum
  misc_feature (562)..(562): n is a, c, g, or t
  misc_feature (566)..(567): n is a, c, g, or t
tacgtatttttttatttgacttttcttttaagtgatttacctgattgataggaaaagtgaaagagatagaatcagttggattcttgctatttcaagaatagagttggttaaacattgtacaataaatgatgtatgcatctatttatgtgctatttaattttgggaagttatggtttaatttaacttgtaaatcaaactttccgaaactgagtaggagttaaaactaaatgattgaatgttcgttcgattcaaatgaattaaatctgcgtagtaatcttgtgacaaaggctttcttagccatatgtcgaagcaaaaacaaacgttaatcgcattttcatacaagagtaaattcattatattttgaataactaaaaaaagaacttaaaacttttccaacaacggaaacgcagattttacttttatataaacatttatgcatgaacatgttttataacttaatcagtggctcattctgatatatgtatttttcttcctttgtaagttatcattttatagcgtttgttgtcttttgtatgcctatgcaccactacggtacataagncctnnagaatcaacatgagctggagct

SEQ ID NO: 10836 - DNA, 642 bp, Gossypium hirsutum
aacaggtttgtacattacactcgttcttaagtcttttcacatcatcagtattacttgaatcaacatcgaaaactaaaatgacaggaataaaggaaagacaaaactcttaactgaaacggtttgcataagaaaatggttttcaaaattaaataatgaattgccttattaacatctcatcgtattcaaatatccttgaatatgtttatggagatcccaattaaatagaccttttgtttaattacacaaacaggggcatagccaaggagggctggtaaggctcggcccccctaaaatggtaaatttttcatttacgccttttaaattttttaaaattttaaattagtaacagtaaagttacacttttattcctaaaaatgaaaaaaaaatgatttaatcctttaaaatttataaagatataaaccattcaaatgataaaattacatttttactatcataaaaattaaaatttaatttcggtcccttctaaaagaatttctatattcacctcagtacacaatcggttgacattaccaaatgaaattaaacttatcatgtgagaatgagaattattgttttgcttgaatacagaattatggtttgaatttagctttttagatatttttctttacatagctgcttaat

SEQ ID NO: 10837 - DNA, 403 bp, Gossypium hirsutum
aggagcacatcaatcttcctagccagctaaaaagcctccatcaaagtagagggtttgaattgatcaagataatgactgattttggtattcaaattactgagacaaatgctaagggtatatggttcaggaaggtgaattgatttaataaaccaagaaacatatcttgatattgttccactatacgttgttgttttagattaaccagctctttcataggattcccaaactatccaaatccaaaacgatcttgcaaactcttcatgtaagttggctaagataacattttgagaccataatttcgttagaagtaaaaatggtgccattctaaaactcgaccctctagattcaacatcactatgtgaaccttgctagattttggagcctcaaaatattgttcaagctt

SEQ ID NO: 10838 - DNA, 610 bp, Gossypium hirsutum
aaaagattaaaactttaacaacttacagaatatgacttggagaaagatacaaacttgaccgttgttctcttatttgttctgattttataaaactggtgagagagagtaagcaaatgcccaaagccagaaacggaaatgtcaatgagagattaaattagagatgatatcaatgtaattagctagggatcatacgacgacgctttggacgaggattaaatcatgctttttctgtactcgtgggaaatgtaaaatggctaaagcctaaagaccaactcctatccatagtccatcccaaataggaggggcggaaacaaactaaaaacacaaaggcagaaacccagaatcgttagaacaaaaagaaaaaaaaaatgaaactctccaaatatgcgcataaaatgtcgcatccatctcctgctgtagtcttcttctgcaggaaaatttctatccttttacttattttctactactatttgattctggggggtgttttccctttctccacagaaattccttttttctttttttggatatttaggggaaatgggataaaaaaagaagaaaacaaagtccatatccccaaggggcagcatctaactcctgaattccaagg

SEQ ID NO: 10839 - DNA, 651 bp, Gossypium hirsutum
gttcctctaactggttcatcatcaatgtccatttctggaacattttggtctggctcagcttggtctgttgctagttcttcagaaacttcttcaggttcatgtctttcccagttccaacatgacctttcatcaaataccacatccctgctaattgacaccttgtttgttgaaggatccaagatcctatagcccttcttaacagtgctgtagcccaccagtacaccaggttgagccctttcagacaatttgtcccttttaacagcaggtacatgtgcataacagatgcatccaaagaccttcagatgagccagtgatggcttgaagctaaaccaggcctcgaatggagtcttctgatccaaagccttggttggaagtctattttgaatgtatgttgcagtgttaactgcttctgcccatagtgctttaggcagattcttctgaatcatcaagcacctggccatatccatcaaactcctattcttcctttcacttacaccattctgctgaggtgtatatgtgttggtaagttgatgtttgatgcctgccttatcacagaaggcttggaactgagctgaggtgtactcagtcccattatcagaccttatggacttcagcttgcagcctgtttcagtctcagaagcagtcttgaac

SEQ ID NO: 10840 - DNA, 506 bp, Gossypium hirsutum
aataaatttgtgtttaataacaaagatttttcatcactttatttggtatataaatctaggagtaattactttgccaagtcactattttgtttccgtatgtaggtcaccattttgctagttcatagaaaaattgattgattgaatatagggttagggtcccttaaattactttttttttatagtgaaagtataggaatatgtaaatttgaattttagtatttttatttaaaattaatttaaattaatttttgtatattaaaaatttatcgttaaatcataaataattatgataaaatatatcatatccaactgatttacctatgatcttactcataaaaaactcaaccatcccaaaaagttcatgtatttttaaactattgtgtgtggctggaaaaaaaatacaaacttaccggatctgtttcatcacacgatagttcaaaataaatagaatttttagacgatagttgcgtttttttatgggttgggtcgagtcattggtaaataaa

SEQ ID NO: 10841 - DNA, 355 bp, Gossypium hirsutum
tttgtcattatcaatctaaattatgaaatttctttatttagtaactttatctataggaatccctaaattatgcaaatatctcttttgagtataagagcaattgaatctaagttgattaattgtaatttttttctaattaaaacccctattatcgcattaacccgtgctatggattcccctattagatttgactctaatccgatagattatgttgtcctatttttagaactatatgcaactccacccaactatgtaagatctaatcttaaacaaagtctattcaaccaccgatttaagtacatcgaataaggatcaataatatataaatatcaaaccaagaattaagcccacataa

SEQ ID NO: 10842 - DNA, 587 bp, Gossypium hirsutum
tcttgtctttcgtcgttgctcattcccgttaggccgaagtgtttggcgtttccttctccgcgcccgttcatgcttcgctgacctatcgcgtggtaaaaagaagaaagtacgaaagaatagtaaacggagcacaccgcagaaagattctaaatatgagaagtcccccttggattcgagaagaagaaaatgaagaacaggaacgaaacgaaataaggcgtttctagctctagtatcggatgagcttctcccaattatgtctggtaatagaatagggcggcttgctctgaccaagactccactttttgctctgtccatggagcgtatgaatttcctggaatgtagatagaccaaaagagggaatgaagagataggaataggaattatagtaccattggaaaaaggggcacccgtggaaacatctctactgacgaaccatttcaatagtacgggtgctgccgtgccacgaggcacgaccataaaaataataaaaaagaaaaagttatgtagttggaccatcagctctatccgttcgagtttcacttctctaaagaagataagacgctaaaactgaaagtgttcgcaatgca

SEQ ID NO: 10843 - DNA, 375 bp, Gossypium hirsutum
aatttcagtattaacaaacatgattacctatgcagagtaaattttaaaaatatttaaaaataagtctgattgttcgatagtcgtagttacaagaaataaccatacacgactgcttcattttaatacattttaaccattcattctgacttattactaaaaactacaaaatgctactttgttcacaatagtataaacatttagaactagtgtctaatcatctaaagaatttgcagtgtgtttggattggaaatttgtaaattcaaagatcttttaaatgagggcggccatatgaaacgaaagtgagaacgtatttaaaagaattttgaaaacccacatctttatatgggggttccagagagggatttcaggtactca

SEQ ID NO: 10844 - DNA, 608 bp, Gossypium hirsutum
  misc_feature (551)..(553): n is a, c, g, or t
  misc_feature (557)..(563): n is a, c, g, or t
  misc_feature (583)..(604): n is a, c, g, or t
attttttaaatttgttgaattctttaataatttttattttttttttaattttttaaagtatacttgcacaattagtaggtataagaagattaatgttagatccccaaagacaaatgatttatttacccattcaaaatagtttacgcgactaattgtttttaacaatatatatcatttcttccaatgaagctcgaaaatgaattgtggatacttctgtacgaatatcaaatgttgaatatcttacgtgtaaccttattgaaatagttcaacacattgtcaattgaattatcatgtaagtggtattaaaatttttaccgatcaataaaaagcaattagactaaattaaaataaaaaataaaaaaaaaattcaatccaatatggcaatatgagatgttttgtactttttgctgagttggagagtggcacttttttttcactctttccttctcctaacacacaacagtatgtaaagggaaaacatagcattcaattctcaggtcactcactctgcgaaactctctttgttctcttaattttccaaaaatgatttnnnaaannnnnnngaaaaaaaaaaaaccccccnnnnnnnnnnnnnnnnnnnnnncccc

SEQ ID NO: 10845 - DNA, 612 bp, Gossypium hirsutum
tacctaatatcacgaggacggtgctgctagaacaaatgttagaaatgtttagagtaagtgtaatacgtatatagggcatgaaaatattgtggttgagtgtaacaaaatcaaacaaaaaacattatggatacccaaatgctttcacctaccctatcgccaaaccaaaattagttttatggttgaggtattcgtaacagaaatcccctgcccccagcgaatgcctctctatgccccacgtttttttagagcatttttcttttataaaaaaatgtttttttcctacctcatttttcagattatacattaattctaaaggaatttaaattaaaaaaaaaacataaaaattgtaataacaaattaggaaaatttaaattaatacatcataatatttttaatttataaaaaataaaaaagagatgaagatggcctcatatcacattagtatgtcgagttttgacaaattaattttttaatcaaatctaaaatattaaatcaaataattattttttatcaattaaattttttatttatttttatgtataaattacatagtaaatataataagtattatataactaaaaaaattagatttaaatagacttgttcaaggat

SEQ ID NO: 10846 - DNA, 455 bp, Gossypium hirsutum
  misc_feature (303)..(304): n is a, c, g, or t
  misc_feature (313)..(314): n is a, c, g, or t
  misc_feature (329)..(330): n is a, c, g, or t
  misc_feature (335)..(337): n is a, c, g, or t
  misc_feature (369)..(384): n is a, c, g, or t
  misc_feature (386)..(388): n is a, c, g, or t
  misc_feature (392)..(392): n is a, c, g, or t
  misc_feature (396)..(397): n is a, c, g, or t
  misc_feature (401)..(405): n is a, c, g, or t
  misc_feature (425)..(426): n is a, c, g, or t
  misc_feature (428)..(437): n is a, c, g, or t
  misc_feature (439)..(450): n is a, c, g, or t
ttaggagttagattgcattttgccatttttatttaaaaaatgagcaaattcatccctgtatgtaagatgaaagagcaaattgaccattttgttaaaaattccatccatttttactattaagtactaatttggctgatggaacaaccagataatgacacttgacatgtcacatgtacctcatgctgacataaaagaattgattcaagcaaaatggatggaacttttactagaagaaatggatgaaatttttgacatggagggactaatttaagcaaccggatagtaatacatcatcactcaacnntagaagtgnnatgtattttttaacnngaccnnnttacttatttatctaacgtagatcgatcagtnnnnnnnnnnnnnnnntnnngaangagnnagtnnnnngacccctacgtctctttatnntnnnnnnnnnngnnnnnnnnnnnnaaaaa

SEQ ID NO: 10847 - DNA, 568 bp, Gossypium hirsutum
  misc_feature (565)..(565): n is a, c, g, or t
acaaggtagtccgtatgattcaaagagatagggggagggtagccatgatgcggcttgtacaaggagtcagataaggagttctaagtcaagcttggtcagatcttatcctcgatggatgggactctctctcctacttatttagcgagccctataggtgttaccggcacctcttactctgatttgatctttaacccttgggcaggcaataagcattatctaagtccctagtctgagtttgatctatgggtcagtcttgcaaagacggattcctggaagaagagcaggattcggggtcagctctctcatcataaataaagaagtgaaaatgaagactcggactcggctaccggctgccaatgggatagcaccggagctactgccatcctctttccttctctattctttcgcgcatttcatctttttcctttaaagaaagaaaaaggcggtggttagaaaaggaaagctggctcgaccgaaagaccctattttgggcagcctattcgtagacaaagaaagccgattcgccaattattattcctttacttttaatcaaaggtctttccgnaaa

SEQ ID NO: 10848 - DNA, 531 bp, Gossypium hirsutum
caaactgcattagcttattcctaacaactaaaactaataacggtaaagttcaacaaatatttgttaggataattttaaaatgtaagagtaaataaatttaattaacttattaattagaatgattaattaattcaatttttattgcgaactttaattattcagttaaaattaaataaataattatttgaaaaaattaatttaatttttaagacatatattattcataacaagaaatcatatttattgcggataatgatacacccgacatatttcccttaattcatcattttcatgttttaatctcattaattcaaaatgcaaaccattaaggatgtattgagtagacttgtccatgggttggactgcctatccatgggccacactactcgcctaaacccaaaggccctcttgaattttggaagggtttaagcaaaaaatttaggcttgaaaaaggggcttgagcaaaaataaaaaagacccgtttacaatatgagtcgggctcaggtttgaatatttaagacccgacctgac

SEQ ID NO: 10849 - DNA, 700 bp, Gossypium hirsutum
aggtgtgttcttgacaggaagcttgaacagtcggtgcgggcagagccaaatgggatagatctggagaatccacattttatacaagcatcattaagatcttaagttacaaatttaaatgagttcaatcaggaaattatccatgatgacattccaatctttcttgtgttttcacaatcaaggtaacccacaaaacagtcatttcatcataagaaaaacattaagagtgagagatggattaattgcaacataaaataataatgaggtaatgaaaggaaaaacaaggcaataacataaaatttacctccatctcatggtggacccactcaagggcatccccaaccttgtaaagaggaacaagcatgtcttgaatgacatgcatctcatggtaatagtttcttatagattcaccttgagtagccttgagcaaggaaaccttgggtggcatcaaccagcccaaaagaaacctaaaccaccattgatctccgaatggaaggatgagcttcccctcccaatacaaacatcttgtgtgcctgtggtaatattctcttgtaggaatgtactctacaaactctcccttctttaaggccgtttgcgcatgttggtagaaccagggtttaaaccaccaacctacattgttaattttattccccttcttcttggcctcttctttagaggcatatctcccagtcatgaacacacc

SEQ ID NO: 10850 - DNA, 617 bp, Gossypium hirsutum
  misc_feature (37)..(37): n is a, c, g, or t
  misc_feature (563)..(563): n is a, c, g, or t
  misc_feature (566)..(567): n is a, c, g, or t
gctctatcctttaattcatgtttgatgcttaatagangcacttggaagcaaaaggaacaagaaatgagcgaaaaccggagtgtcagggcaagctacaatagccacatgggctaaaccattccacatggccagaccacacagccatgtgacccacacgggcgtgtggtaggctgtgtcgatttcatggaattgcacactaaattgcgaaaaattgtgatttttaggtttttcggacattcttagatgtatacatgacaaaaataagaagatataggagagagtcgttaaagaatattcaataaaacagctcaaaaaacaccattgaagccgattcaaaagtagatttccgttaaaattgaagattcctagttgatttcttagaaagttatcatgagtttctttatttcttttggttatattgtatcttggatgtttttattttcaagcatgaactaattttctaaatacttagggagatgaaccatatgacgaattctgttatttgatctatattttacgcaataaattcttagtttcttgttctcaattatgtgtgcttaatnctnngtttgatatttctagattattgatctcatgtttgatgtgcttaaatcggt

SEQ ID NO: 10851 - DNA, 634 bp, Gossypium hirsutum
tacaccaaggactacacttagatttattggatttgttgctaaaatatcggtattaaccccgaaactcccggcggatggccagagacccaaggaaacgaaagaatcggttacatttttcatatgatctcctattttattttagatagactaaaaaaaaagaactcggttcttttttttgtattatatcgctttgactccttttccatttattctattctatcatatttatattattctaattattctaattctatgtatttctttttttgttttaataaattattaaattttttataaaattattcataaataatgaattttcatttacctatgtctaaacggagtcaaaaatatattctatttatctagttagctagaaatgtatttttttttcaattgaaaattcccaataataataattcttattaaaattagggggcaggtttcatgtcaatggcaaaatacctcattcgttgcaatactcctttaaacaataaatgaaaaataaggggttctcttgaactaagaaggggaaggaagaaagcgagtcggtgtgataattcctcatcctcaaattaatccttcccatggattattgtcccaacgaataattaattgtaggggtgaaaccttg

SEQ ID NO: 10852 - DNA, 639 bp, Gossypium hirsutum
tttggtgttgcgagttatctagagttgatcaaaattctttcagaagttgcgtaatttgtaaggttaacttagggttttgttcatgttgttgctccaattattctcatattattctcttttgttcttagagctcagatatttgttgaaaattagagtttggattaggtgtgatctaatcatttagcatttggtatggccatagtctttgtgttgaaggaaaaattctttgggaagttgtccaaacattttcgttgcaaacattacttcttagatcataaaggtttaatggatattaaggtaaattggaggtcaaagggtaattggtggtagtcggaagattctttgattcaaaggttggtagttggggaaagtttcactaagattttctataagaaactagaaggtatctaatctcatatttgattcgcactaaccacaccaactatcgatgtggtttgaaaaaatgagaagatagatagagaaaaacgatggaacctaatttttaataggtggttcacacatgccaaaagtttgatagatttcttagagttctacctttctcctagtaagtagaagcctatatataaatactcctagctaggtctctccctttcggcatcccatagctgagtcatgtag

SEQ ID NO: 10853 - DNA, 659 bp, Gossypium hirsutum
ggacttggtcttctataattttattggtttagttgttttgatttttgagtcataattatttagtattgttaaaattgtgtgatccgaatttagtttgtttgatacagtttaaaaagtttgaggtataactcggttgttaattaaaaaaataaaataaagagataaaataggggatctatggggatgaaggtttgagggtcgaataagtataggactatacttcttttattagacatttggtcccgttcgattttacgttttagtacggaccttgccacacaagttgaattcgtatggtactatacttcttttattagattgattataaaagggttgtttaaccctcaaaatgtgtatagtaaaaaacctcttgtattgttgtttttcaatattagtgaatttatcctcctttacttgtggtttttttctcgataagggtttttcatttaaaatctgcatattcttatttttctttcttattgttttgcgatcaatcctactactattatcgatgtatagcataacaagtataggttttttttattccttcgttttgctattcatatgtttacggttcatgactatccttttcaacaatgtcatcttcaaagatcaaacttacgtctccccttaggaatgcattgtgtcttaaaaaaaaa

SEQ ID NO: 10854 - DNA, 327 bp, Gossypium hirsutum
gttaaccagtcaccaatttagttggaaaagattaatatatcatttctattaaataattgctactattatcttgatagcgtttttgtcttttcatacttttatgtaatctttaaataaataaaaaataaaattaacatatttaaggattgaacacatatttaatgtatttataaacaagttatttatcactacttcgataatcattattaaataaattattaaaaaacaaaattttgacaaaatattttctcttacattgtgtatataaataatatcattaattgagttggtgatataaattagctccatatttaccttttttttttt

SEQ ID NO: 10855 - DNA, 614 bp, Gossypium hirsutum
  misc_feature (17)..(17): n is a, c, g, or t
  misc_feature (63)..(64): n is a, c, g, or t
  misc_feature (66)..(68): n is a, c, g, or t
tcgttcttttgagaacnaatatgcgggtgtcacctcatgtgtgttcctttgattatagctgannannnacaaagctcttttgtttgagtatattttcttttaattactcaaccttgggattttcaagcctttaatcatggaatctgaaaatgtccatcatcaacatcagcttcaccattataatcagcttctcgttgggtcttcttcatcttctttaccttgctatggagtttcaagcagtccccattcttggacccctactaatactttgtaagtcccctcccctccatttatttatttttaattaagcttcttaattaacctttttttttttggaaaaaaaccagggatttaaaaaaaaagggaacttttttgcacccagggaaaaaccaaaaaaaaaccttcaaaaaccccccccaacaaaaaaaaagggtcaaaaaaaaattttttattttcccaaggttttccaaaacccttaaattttaccccaaaacccaaaatttcccccctttccccaaaaaagggaatttcccccaaaataccccaaaaaaaaaattttaaaatttgaaccaagcaatttccagggaaccctttaatcccttaacccctaaaaa

SEQ ID NO: 10856 - DNA, 645 bp, Gossypium hirsutum
  misc_feature (641)..(641): n is a, c, g, or t
cagagtaagatgatctttctgatctaggcaattttactaaagcaagaccagctatatggactgatgcaattattctacatgaagtggtccattttttcgaagggaaaaatagacggagcgggacctatgattattagattggacttaaagaaagtttaagataaatttgaattgacattcattggtaaagtctttcgatatttctagtttctatagaaatgaatttatttttttatgaattgtgtttcatacaatcccttttcttgttcatgtcagtaatcgtggatgaagataaactccaaagttttaccccttcacatggaataagacatgacccttgtccccgtatactttcatcctatgcattgagttctccaaatcatacaggaatatcaggcaaaaaagtggaaacgtattagaacttataacagaggaccaactatatcgcacctcttttttttgtagatggcgtgtttttattctccaggactaatagaaactcaattgctgcaattgaaaggtcttagagaagttcatcgaggaattagggcagagtgtaagcctcagtaagtctcgaatattgttttcacttgctaatgaagaataaagaattttggcgattaataaactgaacatcgggnccca

SEQ ID NO: 10857 - DNA, 660 bp, Gossypium hirsutum
gctatccttaagctcacgtcttccgagtgtaagctcgcttcacaaaaattaccaatagggtaattttataatttttctaaacttttaggtcaagttgtaaataagaaaaatatctctaaatttttttaaaataatttcttcagagatttttctctctacaactttctcttgaattcaagtgtgtcaaaaataatgacccaagacactttttatatagggagggtttagagagttcaactgtgattaaacttaatcattttaatattaaattaatataatatttatcaagataaatattagattaaatttaatattaaatcttattaaattaatataatatttatcaagataaatattaaattaaattaaatattaagataatcactttaatattaaagtaataaaataattttaagataagtattaaatatattaaaataatattatttttggaatagttaatctgaaatcaaattctctagtagagtcccaataggagtgcaatactttcactgctcaaccaccgaagacccaccgctactgaccattttctagctatcgaaatgtcactgtcccagtggccgacacctcgagttggttctgtaacaccccgaccccatatccatcaccagaattgggttacgggcatttccagagatt

SEQ ID NO: 10858 - DNA, 469 bp, Gossypium hirsutum
gataaggtcagaatgaattcgggttcccctgttctgactttggaaaatcattaaaaattgtacaaaaatgattatgagttatagtttatatggttagaatccttaatgagtctatttttagaagaaacaagctaaaacatcatccgaattctgtacaatgagataattaatttttagtgaagagtggtcggaactgtcagacagcgaaacaggggaaactttaaagaataaactgtactatttggctgaaccaaaaattatgaaaattttatggtatgaagatatgtgagtctagtttcagggaaaattaacggatcttaatttggagctctgtagctccggataaaaataatttagtgactctgactcggataaacagctttgaatatacatgttagtgaatattgaaattatggttaatgttgtttaagtgtgttatacacattaaggatatggaatggaaaggagg

SEQ ID NO: 10859 - DNA, 697 bp, Gossypium hirsutum
gatattggacatcatggtcgtgcttgtttcggtggaaatattaaataaaaaaataaaaaatcttgtcaaactttttactgtttgtttgtgtaaaataaatttcatcaaactataatgtttttcaagtcaaagaaaaatacttgtcgtgttcagacagtgtcttacatttaacaaactcctaaccttaaaccatttcaccatttctttccagctcgtatgaaaatgtcatcactgatgtctctctgtgttcaacggcggtatcctcaggctctggtcattgtatgtgttttttattttcctttcaaatataagagtttccttggtacaaaattgaaaagaaaaaagaaagtaaaaggagcaaaactagaatatatatatatatatatttcattaatgtgcttagtacgaaatatgtaaaagttaaatttattatttcgtaaagttgagcaatgtgagaacaaaaaaattgtaaatttcaaattaaaatacaactctctcattttatttttgtttttatgcattatcattaaatatctcatttttttttctttgctcttgcttttggtttttgccaattataatcctattttttcactcccttattcatcatctttcttattttcttttctctatcaagcaagatcttttattttgcatcctattattcaactttttttacgcaatccaacacatctaa

SEQ ID NO: 10860 - DNA, 365 bp, Gossypium hirsutum
ctgagcgagttctaggtctgctagacacgtgtctcactccaattgcttgcagtgcacgtagtcctctttgtacctaggactgacattctaagagagctttaggtccgttggacacgtgtttcactctgggttgcctgcagagcatgtgatcccccttttgcgagcaccttgggtatatgcggactgagactgtgaccctcacatggttcgtgcgagttggatccacagactcaccttacgaatctgcgaactcctctcgctgtcgtcttgtagttcgcgtcgcactcaattgtctggtgggacctatctgagtcacaggtaggtgacccaggtcctatttaggatttgggttggtgatcacagat

SEQ ID NO: 10861 - DNA, 508 bp, Gossypium hirsutum
  misc_feature (12)..(12): n is a, c, g, or t
aagagaggaaanctcattccctcaattataagtagagtgagctagtctttatttttatttttttacagtcaaaatagttgactttaacttgagtgagttgatcatatataacaatttcaagaatttatttatatttttttgttcctcttattttcttactaacttagatttattttacaacgaagttaaaatattattatctatgttttttttattcttcacattcatttattatatttcaaatatattttaatggttttttaatgaaatataatactttttaatttttaaattaaaataatgttaaatttgatcctcaacatttataatttttatcaatttgaaccttattcttttttgagctaaatttgacacttaattttttaaaaaaattaaatttggccatcaacgtatcgaaagagttgaattgtttctttttgaacaaaaatactaactaaaatgttaaatttttaaacaggtagcttgaatgacaattcacatgagggag

SEQ ID NO: 10862 - DNA, 675 bp, Gossypium hirsutum
cacacaaggtggcattagactagtacaaggtcttgtctctaaaaagaaggttaaattttttaggaatttagtttttgtatttttttaaattttaaaagttaagtctaattgttaatttttttgttaaattcaagttaattacaacatttttttaattacgtgattaccaaatgagtaattttttattgtttcaaaatgtcacaacaactaattaaacctaaaagaaaattaacactattaatattgaacttgaattttagaatgtgaaaagtaaagaagataaatttctagaaatacaaatatagggactaaattcttaattttcaaaaagcaaaacactaaaattacaacaaagtaacaatagttgccaaaaatacaagcaatagaaaaagattttgtaattaaaagtaaagttctgaaacctgctcatctactcctctgctgcatcttttctttttcttttcttcttttcggtttcatcctcagcccctgcatcgattgcaccgtcaacaacagcaatagccccaatagcctcctcattctctttgttgttgttgctcttcttctttttcttcttttcaatttcatcactccctacatcaatagcctcaatagcatctacattctcaatacgcatattttaaccctaaaagaaatatggaaaagaaaagaatg

SEQ ID NO: 10863 - DNA, 619 bp, Gossypium hirsutum
taattcgcaaagtaattacaacaaattcatcgataaaacttcatgatccattgaaatataaaaccgatgcagatattagaaccagcagcattggctcagataaagtcaacagaattttaagattaattttcatctaaatacagaaaaaaatgaaaaaaatcaagaaaaaaaaatcaccgcgaacattcttgaatcgcaaggaaaagaaacagagatattgttttgaacgaaattaaacgtaaaatatgaatcaaagagtgagaagaagaagaagaagacttagacttacctgattgaaatatggtggattcaaagagtcgaatcaattaaatgtattatataattagcccaaaaatctctttcaaagatcgttgatccaaattttctttaaatttttatatataaggagaacagagaatgagaaaatcagcgtattccaaaactgcgttttgtttatatatacacgaaaagcgtggggccagatagatatttttttttatagtttatatttatacaatgactattactcttatctcctccgagcgctttaggaaaataatgtattttaatgtgcttgaaatcacattttctttaacccacctcctttagaaccaaataa

SEQ ID NO: 10864 - DNA, 673 bp, Gossypium hirsutum
attcgagcaagaagaagaaagaaaagctaagaaaaatagagagtatttgatgaaaaaaatcagtttcattcattgaacaaaacaatggcataatgccaatacatataataagcattaagattgtctaaaacagcaagtaatcacctaaacattacctacctccactaattacatggaaacttgaaattttagcttgtaagcctatacaatgctatgtttacagctcatacataagctaattacatcagacaacaacctaacttagttagaaatgaactaagactcatttcataagctaaagattacaaaatgaacaaaaaatagcttgcatcagcagctcctgcatagcttggtcttcatgacctgcttgctgtcgagtgtttgctgcatggtgaaccaacttcatcagttttattttatgaaaattaccttaagtctgagttcattctgttcaatttacagatgctctcttgaaagtaaaggttagcccaaaagaggcagcagaggaacatcccttacaggttgctttggaggctagcaaaaacacagtactccaaggcagcatggatgtcttactggtaaccatgagatgctaaactgactcttattttatgcatgtagaaacgactcaaacttttcattctttgtgtactacttcctgtaaacaatgcat

SEQ ID NO: 10865 - DNA, 443 bp, Gossypium hirsutum
  misc_feature (12)..(12): n is a, c, g, or t
gttttcttttcntttttctttaaaatttttaagttgttttgtttttgtttactgttttagcaaagctgtttaaaagaaattacaatgcagtttttttttctttaaatgaaaagttatgttcttggcaatttttggtgtttcttttttgagttaatttttttggcgctgtaaattgggggaaaaagaagttcttatcttttccctagttaaaagattattcaaatcccgattttccctcaaaatatctcagcttttgtttttttttccttatcccaaaagcatcgtgaattgacttgtttttttgttctaaaatttagatattatttattgtttttagaatttataataaaaaaagatatcttttactttagaaaagaatcttttgctttttattcatgaaaaaaaaaattgaatctcttcctttcacacctatttgatgtgaa

SEQ ID NO: 10866 - DNA, 647 bp, Gossypium hirsutum
caaacccacatctgcatagcttctattgcaagaatgctacagcatcgagcattaaataggtgagcttcaaggctaacttttcttcttttgcaccaaactgcatcaaaatgacaaaaaaatatgtaaaattagcatgtaaataagtaagattacaaatttaactttaattttgccctactttaaaattttgtaataaagctacacaattttctatcaaaatacttagaatttgctttaattactagtcagaaagtgttgtaaaagtctttatatttcagagtaattagtcttgccaaaaacaataaggctgagatgatatcatttctgacttctttgatgtttatgaagtacaagggtcaaggaaacgtgagggagtacattatagagatgttacatattgcttcaagacttaagacacttaaaatcgagctttctgaccaatttaaaattaattgcaactttcaaaagcataaatggattctaaataaacttatttctcattgtgtgcaagaggaactaagtttgaaacatgagaagtttgaatgtactcatttggccaatgcttctaaatacaacaacttacattttgaataaagtaccccactaaagcagctgcaagaacaccttatgagctttgaacaggttga

SEQ ID NO: 10867 - DNA, 355 bp, Gossypium hirsutum
cctctttttctaattttttgtagttgtgtatgcacttgttatgttgatggttaaaaattcacgtgcatctcaaaattcaatgagctatacaagattcctcttccgttggtatggatgtggcacactatagaaataattacgcaaaccgtaaaatcttataactttgttcctgttaaaaaggttttataacagttatcatatttgtaaaatggaagatggctactgaatgattgaaattcaaaattaatacatcaaaaatatttctcgttctgaaattaagacaatgtttgtctttatcttaggactccaattcagtttttgtattcttcgttctacgttaaatttttaggtatga

SEQ ID NO: 10868 - DNA, 669 bp, Gossypium hirsutum
acatgtaatgtcacaacccaacgccgtcgagattggcctaaacacgagggccccaagtgcaagatgaagctaatttttagctcatttgaatttcttttcgtgtggttcaactcattcgagctcaagttagctcattcgtgctcaagtcagctcattcaagctcaatttaactcgttgagctcgttattagctctttagctcttttaatttaatttgccggaataaattaattagttgagttagttattttagctcaaataattactaagtgtttaattaagaaatctggacattttaattatgtttgtttattgcatgtttaatttgttttaattattacctagcataaatgtgtttgccttattacaattatttaatgtgtcttattgctgatttattatgcctaagctgttatttaatgttcagccaaatttaattaacttgtctaggatgctgaattaaatgtgtcttagttgccgaatttattgatgtttttcattagtttcagccgaatttatgagcatatttattgatcaaattgctgccaatttaatttgtcttaaaatgctgatttttaatgagcaaatattaatgaccgaatttaattatttggctgcaggtttaatggcttggacggcaatttaaggaagtggatgttggccgaattta

SEQ ID NO: 10869 - DNA, 663 bp, Gossypium hirsutum
tgtttgcctcctttcatttacatcgaaacaagctaaactgcaaagtttcaacccattactgtttgagtactaaaagttttcttcttaaacataaaatgtcactgcatttacatctgaagttacattctagaagtgacaactagctttactgggtttgcagataacataaatttgatatggggaaactttgttccagtgcttttcttcattttaggctgcaaacagatgtaagccttctttcattcacatttgttcaatattttttaatttctgtattccatttataaggtgctccattgtttaatctatatctcatatattctaattttgtagcatcaaagacttgacttacaaaaaccaacacaagggttaaaggcatcaagaacagactctacacagccttcaacaagtatgtaaacctcagagctctttagcttaattctcattagctatggtagataaagattagtaggcctgttgacatatatcctcctaaattgtcttctatttgctccttttaggcgttaggaagagtctaagctccacttcaatcagcccttttcctagaagatgatgataatgatgattttatgtatgttgaagtctcattttcagtatagataatgatgttgatgatgcatgccctgcctaagaaatgaaaat

SEQ ID NO: 10870 - DNA, 663 bp, Gossypium hirsutum
gcatagtggttcagactacaaattcgagtcaaaaaaatattttaatattattttgtgtgtttattatgtgtgaatttgattgtgtgaaattttcgtgtttaaattttatcgtttgaatgactgattaaaggaaataacttaatcgcgtaaaatgaaaatttaggggtcaaatttaaaagcacctaattattgttgtcttttaaaaatgggggttttaaattgcaattaggccatttaaatgatagtgggtggcaatggtcaacattgcccttatattatatattttctaatttattcaaataaggttaaaatagtaaactaaaaatacatgttaatgtatgttaaataaaacaaaaagaaaataaattcatcatcatcttcctattgccgaatttgaaacaaaagaaaaaggataaaacctagctaggtttggccattgatgagctcaatttaagatcaagaattgaagaaaacggaactagatcggagaaagtcgaaagaagtcgagtagttgactatgtccgtcgaaatctgaggtaagtcgataagcatttgaattttgtttaagtcatgaatatataatagatagatgataaattgtgttattgaaattattaatgtccttagccgaatttgaatattgaaatagggaggtatttgagt

SEQ ID NO: 10871 - DNA, 674 bp, Gossypium hirsutum
tccatttgagtttgaagggttgtatttagttaagaggttaaactatatgtacatgaacatgaatcaagatggtggaaattgtgactatattggctgccattctgtagccaacaccattgaatccattttaaccaagatgggaaataaggtggtcatatcttaggctaaaaagaatagaattacttgcagactgctaatctttcatactttcaggagtaaatgagtgcaaatgtttgggttgataacaattcagcaaaaaatatgtacattggaaaaaagatcttttgtccggggagttgtatagaaactttgagcttaaagtgcacatgaatttagacaaaagaaaagaagataaaaaagtgaaaagtttaacaacacaagctatgctactattataattccctaaggaattgtaaacctattgttgttgctagtgaaaacaatggctgttttacttgaatcaactataatgttgcattaagatgcaatattatgggctgccatgaaaaaaaccgaagttatagcagtaaaaaagggaactctgagtgttcataaagtgaaaacctaaatgatgtgaagtatgtacagaagattaaacgtgcttcgtaagtttaggcttttgaccatatgaacttctgattactcagcactggaacacaatttaaggcgatacg

SEQ ID NO: 10872 - DNA, 663 bp, Gossypium hirsutum
cactcattacatagggcaagaaacatgaaagtcgagcgaaaatagcagtgtcgggattcacatgaatcacactagcatattacagatccgaacacgacaacaatccataagattataattgcaaacaacataaagactaacactacagtccctaggagttactgaatccctcttcattttttgaattaattctccgatgttactcaaattcttcattttcactaaagtatcgggcactttacgacactccaaatatatgaaaaaaccttaataaaattgcgagtaagacgaatcaaacacatatccataccaagcattcacctcaaatccatgtaacataacttccccctacaaggctaaagaagagcacctaagcacttgttgcctataggaaacgatggcaaaaaaaagttaaattttcagggtaatgcaatgagctaacatacaaataggtaccttaatgtgatcccagaatcaccaatcaatataattataatttcaacaattatatatttgatttgatttgattgaagattcaagattacaaaaaatattacatgcatgcatgcatgataaaagaaatacacccacaataatggctttttaaagttccattctaaatcacattatttttccttccaattccagttctctatctgcaaa

SEQ ID NO: 10873 - DNA, 647 bp, Gossypium hirsutum
aaggttctctacttccccttcaccatggccaagcgtgtaacacccctaacccatacccgtcgccagaatagggttacgaggcattactgatcaaatcacaacatacaacatacgtttttcatccaagaatccattaatacataaacatcaatctaacatattcacattgtcccttataaggctctacgagaccttaaaacatgcttggagaggttcgggactaaaccgataacatttgaaaactttgggaaaacttataaaattctcatgcatataggtatcacatgcctgtgtgaataggccgtgtacctcacacagccaccagacacgcttgtgtcacaagccttgtggaaacagggaatacatactgacttgcatcacacgaacggagacacgcccgtgtgccatgaccgtgtaaaatatggagggtatattaacttgggtcacacggccggccacgcgcccatgtgccagcccatgtcacacatggccaataaacacgcctgtgtgtctaagccgtgtaactcactgacttgtttaactaagttacagcaggcacacggtcgagccatacgcccgtgtgctcaaccgtgtagggcgaaattaggcttgatttaagccatgtttctcacctacttcaagcatac

SEQ ID NO: 10874 - DNA, 445 bp, Gossypium hirsutum
tatagggttatcaaatgattgaactattattttataaagggtttgctagggctatggtgcataggcaggcagtagggtggctaggaaatctgcaagtgaacatgaaacaatatctcaaaatttggaacatgtggcttagaagtaacatttggacatcttgttgtagatttatgtcatgtgcctaccctggtgtcaactactaataattgtttagctccattttgtactactaatcataaaatatttcagcagctattaatgacaaattaaacaaaacatatgattatttgaagatcatgattaaagaacatggattttttttttacagttatagcaagggaaaatcacatgtataaaagaataggatgttaattacgtattagtattgtaattagtttgtagaggtattaattggtaaaactgtacatttatggttaaatatgaa

SEQ ID NO: 10875 - DNA, 541 bp, Gossypium hirsutum
gcacgatgcccaaatggttcatttcagaataaaattcgtagcattaccttgaatttatctctgtcattcccagagtgcaaaaactccctgcttttgtcttgactcataataacacacggattctcgacgtcaatctacaggagtagaatgcaaattttcaaatatctgtgtaattaggctcacaagagagtatagttttcaaactaagtgtgaaatcaaagtaaaatggttgtcagtaattgatagacatggagaatactgttaggaggaaaaacacgatcttggtccggtgttctgcaccatcaaaaattgtcataaatgcaaccccatttgacaattaagatttcatcatgtcgcatcttagatcaaacaaattaatgacagaccatgtactatcaagaaaacaacaaaatgatgcagataaagaatttaaagcatacttcttagataaacactcacattgaaatgttcaaccagctcacgaaggtcctctttgcggctagcaacttttctacctgtccaatgcctcaggagtaagaga

SEQ ID NO: 10876 - DNA, 465 bp, Gossypium hirsutum
ttttttttggaattaaagttcttcagacaagtaatagtttgttcttaacccaacccaagtatatacttaagttgttaactgaaacaaatatgcaagatggtaaatgtgtgctctctccaattgcctcatcgcagcaattaaagttttctcaatttatgcaccctcttatagaaactcactggaaagcaatcaaacgaatcctttgatacttgaaaaacactgtaaattatggcctatgaattaattgtcaatattaaaacattcttagcatatatgcaaatgcggatttggatagggacccaacagatcgtgtttccaccattggatatattctcttctttgggcacactttaggtgttttatcttttgcaagaacttcatgtccctctttctcatacttcgcatattaacttggtaggttatctgtaaggatgaaaattaaacggagagcgacctaataacact

SEQ ID NO: 10877 - DNA, 544 bp, Gossypium hirsutum
catgtacgacaaattaagagtatttttaatgaaaaaatcacaagaacgttttaacccgaattaactatttggactacttaatgatgttataaaaataaaaatcaagttgcactaaattaaaatataaaaaattaaatctaaaatttaaacaataatagatagatcaaaactaaaattttaccccagatagatgggcacttaaattaaaaggccctagtttttctttgtgctgaaaaaggccctagtctgtgggtcaaattataaatttatttgtcaaaatttagtccttgtaatttatgtaaattaagaagttagtctaactattgaatacaataaaaaaaaactgacactaaatcattaacttgaaaatcaataaatcaataatttatgttaatttatatacatgaaatttttatttaaaaactaacaaattattgttgactaagtcttagttcgattcatattgatatttttgcctattttagaggacgtaggtttgagtgtgttaaagtacatttatttttctattttaagggttgggaag

SEQ ID NO: 10878 - DNA, 625 bp, Gossypium hirsutum
atagcactcgattctatgattaattggttatattgaaagacggaaatggtttacgaagttggcgtttgaattgaatggaattggagaaatagcacagcacttcaatggaaagttctcatttgattttcttcttaggaacagaatataactgtaagatatgcaatgttttatttatttgtttgattgatagagacatgcaatgtttccagcaacacatcgtttcaattcggctgacttaattgtgtggagaatcaaaaaattgggtttgttttgtttttttgttgtattttggttttttgtttatattttgttattataatcatattgtgttgttgttcacttggacttatgttttgctgcttttatttgttcactaacatttttttttcattgtaagatcatatttaaaaatttttaaaaaaaatattttttaaaaaatacattgaaaaacacaaatttttttaatttaactagaacaaatatattcaattcaatttaatttaaatttcatctcactcgactcgattcgagaaaatttcaaatcgagttaagatgataaaataaaattcgaaaaatttaaaattttttcattcgattcgattcaaccgattgctcactcttattc

SEQ ID NO: 10879 - DNA, 618 bp, Gossypium hirsutum
  misc_feature (65)..(67): n is a, c, g, or t
taatataagtccttcacttctcaaaatttaaaatttagtccatatatttttatttcaagaaattnnngtttagtttagcattgttgttctattgaaaagtgcttttaaaaaactcgatcggaagaaatgtttttgaaaattaaaatgttcattttatacatgatattaaaaattaaaatgttctaatgaaaattaaatatttgtcgtgagaaattaaaatgtttattttatacatgatattgaaaattaaaaaataaattaaattaggtaatatttaatttaatataactatatataaaatattttttaaaccttttaataattaataaattatttataaatttaattataaattaaatatttaaaaatttaaatataatagcaaatgatttttaaataatttaatataatacatatgtaaataatttaatataatgatacctaaaatataaattaatgtaaatttttaaatatcttttaaatagctaatagatataagggtattttataatttatactttaaaacgcaaagtataaggtatctaaactcctggtggaataatatttttttaccacactttcaactttaaaagtaagtgtttggcattactttcgagg

SEQ ID NO: 10880 - DNA, 608 bp, Gossypium hirsutum
tgatgctctttgtgtagatctaaaactagtgctaaaggtatccactttatttagtactatcgtttttgtttatcttattcattggctgctttactaaagttgttatccttatctattaggtattgtgggacgagaaatcggctacacactcactgttgaggttcgccttgacctttgttaccttctatttgtgcaagctactagttatatgatgattgcatatgttggttatgttggttttgatatcatagagagtgagagattacaaatgaactgagatattgttttctttgtttatatgagcgggcaccctgttctaagtaaagagcgattctgctgctaatccttcatatattgagatgtcccaattggctatagactgtagtatacaagaaagcacgtaataagttggtcatgttggttggtttttcctattgttctttcgtataattcttagtagaagtcacaacacccatacatatatgtaaagaatgttgaacttgcatgctgatggctgtattcttgctctgccctctcacctcttttcgtgttcttgatgctgcattattttactccatttgctttacattttgcaggatattcggaga

SEQ ID NO: 10881 - DNA, 402 bp, Gossypium hirsutum
cgcaagacattttgatgagtcacttgggataatataatttttacatttgaatttggtaattaagtttattttaagatttataatttttttggttcatgttggttcttgatcttggcaattaaatttattttggtctctaaatttagattctatcgagatttgattacgtgatccatgttacttaagcaggatcgaacggactaagaattgatcaatataatagttcaaacaaatggattgaaccaactgcttgaaattgataaaaattgaaagtcaagacaaaaatcgaaaattgaataggttaactagattaataaatttttttttagattttcatgaatttttaattaatatttttttattggtccgacggtcgaaccagtcaaactaattgaatcgcaa

SEQ ID NO: 10882 - DNA, 662 bp, Gossypium hirsutum
atatacgcaaagagcaggctacccaatgcacctagctgttatctaatactatatatatatatatatactttataatattatttttttaaatcattaataaattataattataattttttttaatgtaattgtcttccacaccaaagagtcattacgataaacaagtaaataaagtaaacaatgacataatttggttttttttcttttaaatatgtgaagtctgtttagcgagcaatttcactatctttaattcacaatataataagtgatcaaatctcatggctttccaagtgcatagacctcacatctaagttacccttttaagaatttaagctataagcataagtaatttattcttcaaaggcactcacaaataagttcttcaatagacaataaattgttttttatgctctcgtacaaaacctatacaagtctcacaatatattggagtttttcaagatttgctaacatactagtgatcaattacaatctaacccttaataatagtagctacaaaacaacaaaagcaatatactaataaatactaaagtaaagtgaactattagagattcatttttcaaagaaatcttcaatggaaccccaattggttttccacaatccaagagatttaattgtttgatttgagcctatccaatacccac

SEQ ID NO: 10883 - DNA, 662 bp, Gossypium hirsutum
ttcctttcactttttgtattaattttcagtaaagtattttggaggtgttgtattagaattatattttattatccttactcaaaaaatagataaattatttcctgtacattagtttaaaaaatatattaatcttttgttaaaaattttatctatttgtattgttaaaaacaggttcttatatgttaattatgatgtgcatgtgacattgtaacatgtttttaaacataaaaataaatgaatttttaataaaaatattaatttattttttgttttaacgtataataactatttatctatctttttaataggaaaaagaaaacgcaatttaaagtggaaattatcttagtgaaaattcatgaaattagtagaaactgagacatatttggctgtgttttagaaaaagacaatggaaacacaaagacaagtcactgttttgtcttgaaacggagagggttttaatcagagaatgagggccacttgtcaatggtgtgtgcaggtaagatatgatgaagggccaaaattggagctccattaaattaaaagctttcaaatgtccatgggttaaaattggtctcattaatggtgtttttctcaaaacaagacaattttggacattgattgctgtctaaataaatgggctaaccatggaagaaagaccgata

SEQ ID NO: 10884 - DNA, 646 bp, Gossypium hirsutum
aaagaaaagcaaagtaagctataaagcttagtaagctcgtatggctaataaactcataatatcaattaaccataatttaaacagttactcaaagtacaatttagctcatataatttcatcattctatcacatactcatttgcatcatcaaccatgaatttcactaatctattaaattccatgctcatatgatttgtgtacatgttctcatttcatttaccatttcatatgtataagcaactagatataaattacattgaattcaatagctatcacctttatatagccaaataaaccataggaaatctcataaatttccagctactcatcatatgaatttcacacatgtcatttacttgtcgatttctgtatgagtaccagaactgatgtaatattatgattttgggcttagttggaacagtggttccgggaccacaaatttgatgaggaaaatttcatttttattatatttttatggtctacaatttcacgaaatgatttcgtgaaaattttgttcgaaaatttcgacgtttgggcactcaatttagtaaaaagaactaaattgtaaaaagtgcaaaagttgagttctacatgttagaggtatcacattgttatgaaattttaaatgggaggtccttaaatgaaaa

SEQ ID NO: 10885 - DNA, 576 bp, Gossypium hirsutum
  misc_feature (30)..(31): n is a, c, g, or t
  misc_feature (545)..(546): n is a, c, g, or t
  misc_feature (569)..(570): n is a, c, g, or t
caattactaatgctcagatatagcataaannttaaaattgaaattcaattaaaacctaaatcaagcttcttatttgaagcattttgatgtgtattgcatttggaacacataacttggaagcaatggcaaaaagaaaaaatgggtaaaattcaaagttgtcatacacatatatatatatattccaaaattgcaaacaaaaaaatattatgattagctagcattttaaagcatgcacatgccccatctaaatcaaaagattcctaaattagggatttaatttgtttgtcttgacataattaattctgatttccaggaaaaaatattatactctctctacccaactttaaatcacccattttcagtactcaaaataagccatatcatgttaacttagctgtcaaagaaattcaaaatcttctttttttttgttgttgttatcgccgttgttatatgaacaaaggttccaaaataaaagttggggtttttgttgaacattctttaaaattttaaggaaaaataaacaaaagggaataaaaaaaaaacanncgggttgatttgtaatgacaagnnaaggct

SEQ ID NO: 10886 - DNA, 691 bp, Gossypium hirsutum
  misc_feature (524)..(524): n is a, c, g, or t
  misc_feature (527)..(527): n is a, c, g, or t
ggttcatataagccttccaaatatatatattttttcctttgaaatttgactttccacagagccaaaacaagaaaaagggtgagctacgtgtaggacgtttgttgtaaaaatgaagatgaggaagtaagagaactttgtgacgtagagaacaaacaatctttgtttgtctctaatacaaagcaaattagatacaatttgcattgggttgcatgtttatgtaccaaataataacacttctaaaaaaagtgtgaattaactataaatatgtgttctttcttcttctttttttaataatttgtttatttatatcttttaaaagtattttcatttcggtcaattatgaaaaatattattataatttcgtcgctacttttagaaaattttatcattttagtcacctttgatgatgaagatgagcacatgatggtgatgatgttggctaaaatgataaacttctttaatagtaatgatgaaattataaggatttttttatgtaattaaaataaaagtatcttaaaaattanacnattaactagatagtttatccaaatcgaaaagaatgcaaattaatttgccaaataaactttacgtgaaaccaataagtaattcaagattttcgtctgtgacttttgatcaagaatcattaaattgggttgaaacaatgggattggacgaccaattctttggaaat

SEQ ID NO: 10887 - DNA, 490 bp, Gossypium hirsutum
gcttgtaatcggaagtgatcgtaggtaatttcgtagtagtttgttatgataatgtaagttacttgtggttatattaatgttttctagttattttttgtatgtatgggaaattacattagttgattatatatattaaggagaattaaaaataagtatatacatgaaattgaaaaattaatgatagcatttcttggagttgcatgttatagatatgaatttattgagtttataacatgtgtacagaaatgacgaagtctctctgaatgatgataatgtttaaaggtaatgaatttacgtataatgcccggttgaacatagtaatcgctaggatacgttagtatgcgcacttgtacgagatttcactttagtgcctctgttacacttcggtgtctctatttgcactttggtgcctctgttacgcatctatgatgcttctggtgtggtgtagttttctaagtatctgagtctagtacttagttcattgagctaa

SEQ ID NO: 10888 - DNA, 604 bp, Gossypium hirsutum
ttaatttaaccagagggtcatcaaggttcatttgcacacaaaccttagcaaaacgacttcttttctccaagctagcggcattatcaatcttgagaagtctaccaatcttctagtgaggattgttgggtcgtaatattcaatggtaagttctggaagtctttcccagggaagtttgattgtcaaaaactttctgtttatgaaccaaggccattttttttattacattatcataatcttggccgcacataaacttgacgaagtagaaaccataccccaagtctatgagttccatcatacccaagggtttccatagttgatttatcttgaggctcaaatcctcaaaacctatgctttttccaaaaactaataatgagagttttggaccatttcttcctaatgtttgctatcttttcctttgttagactaacggctattgtcgagctgtattcatggtggtgttcatggttttcattttcatactctgaagccatatttgtgtccccttcttccgagtcttcaaagacttatccgtaaaagctattattctccctcgtgagagtgtccatgtaggagataacttgcctagtagtgggtcatgagaaaa

SEQ ID NO: 10889 - DNA, 505 bp, Gossypium hirsutum
ttggacgagcatatgatattatttcatcttacaatgtttcatcgggtaaaattataagataagaaaaatttgatggtacaaagtggatgttggtaaaagatacttatgaaatggggaaaatgtatgatgtggatataagcaaagtgatgattagaaattgattcatgaagcattttgaattgaattttgcattttaccatttgaaattatatatgtggtaataatccaaatttcatttggttgatgttgttgtgaatgccatgataggtgaaatttggtgaatattgaattttaattgctaaataaatagggtaagctatttgtttatattgtatgagcttactaagtatttataatacttactcattgttactactttctttgtagattttggacatctagaacgtgtcgaccaaatcagcgagaagcacacacttatcgtctctcgatttgatagtcttttgaatatttcaatttggttatttgtggcatgtacataagatgg

SEQ ID NO: 10890 - DNA, 646 bp, Gossypium hirsutum
  misc_feature (613)..(619): n is a, c, g, or t
taggttatttatttttatgtgcaggaagggtaggcgttggaacccaagtggattctgtcggtggagtttgaattaatcaagtgcatggattaaggagtgataaggggagagattttagggatgatggagagataagggggagcgtatctaggagagattttaggagatttgaaatgggagaagtggtggccggtcaaggggaaggtttagagcaaattcggctattggggttttagggtggcatttttctctttttttttttttttttcttgtggcggttggtttttaaaaaaaccccctcctttttcttcccttttttttttccccaactctttttctctccctcttcctctccttctttcttaaaaaaaaacgaaactatttttttttttttttttttcccaaaagaaacaagcccaatccccaaagaggggaggggaggcgattttttttttaaggggcacccctgttctttttttttttttcccactcccgttattttaaaaaccctttccctcttttttttacaccccttttttgggccaaaccccttttttttttcggccccccaaaaaaaaaaaaaaacccccctggggggggggggggggggaannnnnnnacccgggggggggggttttaaaaaaaa

SEQ ID NO: 10891 - DNA, 475 bp, Gossypium hirsutum
  misc_feature (67)..(67): n is a, c, g, or t
tgagtgacattatgcgtttgtaatttataaatattctttgtacccccatagttacagttttctttgnggaaatcccacctaagcatggctcggaagtataaaatatgtggcacaagcaattgatttgataagagagaaaatgagttgagttctttgtaacctagtggtggagatccttgttagttaggtttgtaaacgatttccccccaaaaaaaaaatgtttgggaaattaatagtttgaatgcacgtgggggatagtttctgtttgaaacaaaaattctattgaattcttaatgtttatgaactgagcctgagttccaaggcttatgatctctgtaggagatggttggttagcttagcttcagttctcaacttcgattgtgatggataggggttcttgattgtactgaagataggatgtttggggtcagacccttaacacgtctgggattgtgttcttgcggagtctatgaaa

SEQ ID NO: 10892 - DNA, 620 bp, Gossypium hirsutum
ttagcaagcattcaccaaattatttgtacaatgaaaactcctttaagccctcaattttttttggcatatgaattgtaacactctacatccggcctagacgtccagaccaagttggagagttacatcatccattctaaaagtcatactaccataacacaatcaaattaaaccaatagtcacataatattcatcacaacagtaatttcaagacatagtcttcataaatccataacatcataaaacaaatatccctaataataatgttagaaaaacaacattaagtatttgaccgagcttctgcgacaccaacctgatcaagactgattaccacttgatatccaaacaataacagggtgagttattaactcagtgcgtaaaaaaggaatgtaattcaacaacggtgacttatagagaatttccagtttagagattcagtttatcctaaaagcatgttcgatctaggttcagagtagaagtgttacatatgtatacatgtattattccagttcagatacagttcggatcatattcggatgcaatgttcctatttccatctgctacacaccaactttggccatcctaacacaccactatggacatttaatgcccatccatccctg

SEQ ID NO: 10893 - DNA, 652 bp, Gossypium hirsutum
cgacatgatgggtttgagatgtgcacatcagttgctgtctccttcgctcgacgcatgaaactagaggatgacaacacctctatccaacaaactcattgaagttcataagacctccactattcacattgctttactcaagtatttcttcattgtgccaataaaattatttctatgttacttttataagaatgtaagacaacttatatgaattagagaaaatattaatacgacctttgctcaaaattcttaaaaaattattgaagtatatatttccagaattcatgtgttacaataataaggaatgagtaaacatatgaaatgattaattgttttttttatataattttataaaaagaaaaataggaagaagttaatgatgtgagttttctagttgtggtcaatgaaggatgggcattgtatgatgagcgatcaaatgacgacttcgacatctttttaggggcgaacatcttctgtcataatcattagatggtggtgggaggaaattacccctcctattttgcatggaatttgatggttctttcccagtattggttagccaattggtgtcgcatttgcagcctcttccatcactattcagcttatcaccattgcacaagtccacaacaccatgatcttcttctccactcccatt

SEQ ID NO: 10894 - DNA, 657 bp, Gossypium hirsutum
  misc_feature (533)..(535): n is a, c, g, or t
  misc_feature (540)..(543): n is a, c, g, or t
  misc_feature (547)..(549): n is a, c, g, or t
  misc_feature (551)..(568): n is a, c, g, or t
  misc_feature (570)..(574): n is a, c, g, or t
  misc_feature (576)..(578): n is a, c, g, or t
  misc_feature (580)..(591): n is a, c, g, or t
  misc_feature (594)..(610): n is a, c, g, or t
  misc_feature (612)..(614): n is a, c, g, or t
  misc_feature (616)..(654): n is a, c, g, or t
tcaagagataaaactaaataaaaaactaccagacagaacatatcatgatagaaatttcaatggccatatatgtacttattaccacacaataaatgaaattgaatgcaaggaatgttaactccttaaaataaaggagtcacagatttaacgtaacaagcaacaaaaactaaaaaaacttcaatatctagtttttatgtgaatttctaatttaactcaagttgatgcaccaaaaagaacgtacctttaccagcttttgcagaaaggtttgttacctccacctccaatttagcaaccccctgtgactgaaaatgcagaaattccttaacacttttggaaacaaaaactattgctttccatatcaacatcatagctttcacttcattgtgcttgtcagaaagtggcattttactatgatagaattttttactactcttgattagcttacttaccttactttcagagcaatatgaatatgtcagctatttgtactgaagatccacaaactaagtcgtgcctacctttaaacagcaaannnaaccnnnnaaannncnnnnnnnnnnnnnnnnnntnnnnntnnntnnnnnnnnnnnnttnnnnnnnnnnnnnnnnntnnntnnnnnnnnnnnnnnnnnnnnnnnnnnnnnnnnnnnnnnnttt

SEQ ID NO: 10895 - DNA, 560 bp, Gossypium hirsutum
  misc_feature (52)..(56): n is a, c, g, or t
  misc_feature (527)..(527): n is a, c, g, or t
  misc_feature (529)..(529): n is a, c, g, or t
  misc_feature (543)..(543): n is a, c, g, or t
ggtgctaactccgcctcagtggctatagtttctttcgaatgaaaattacggnnnnngctttgagtggggctaacgtctcttcacctccatatatttcaccggacgccacgtaaatgtgaacgtcacttccgaaccccaatgctctcaacatcaaaccaatttcctctggagttagcggacatctgccttgccttctcatcttttccgggttgctcgcctacggttcatgtcaacataaacatgttaaaatgctttagaatcatcttatttagatttgaatatgtgtgtttaacagtttatacggccttacatgtaaagctttccacctcctccggattttcccaagttccctcctttctttatctcctccaccataataacatccggtgaatgcaagcatatcaggttcgaacctatggaaaaacaacatataaacctgcattaatgaagtccttgcgttttttacggtaacgacaaaactgaatacagccatggacaatatgaataaaaaaaaaatggcctttttncnccaggggcaaggtnataaaaggttaactttc

SEQ ID NO: 10896 - DNA, 601 bp, Gossypium hirsutum
gaaattcataggagaggtccctttgtccattagtgtaatgtggtagattgttacgaagaaagttatcctcatccaatacataaaatatgtgcactgaggggtcacattctattattcattccattagtatgagattgttatgctcaaatgagtccctcatgatcttaagggtgtgttcacacttaaataatgtttacacctaaaaagtgggtgtttggccttttcttagaggagtagatggtcttgccaaaaggtgctgtgagcgggtggtcaagagcatagaatgttggtgctcccttaatcaaagcaaatggttgagcaaggcacaatttcaaatggagtcaacagggaggtcaacactacctctgatgctaatacgcttgatgaaggcacaatttatttattttcaatcaattgaataatttaattgtagaacaatttttttaataatttagtttagtttcttatacattacctaatctttttcacatcttaatttttatatttatggaatgtgaaaatgtaattaaaataattcaattcattcgtgttatagataagtagataatgatgtaggcaagtagatcaagtctggtagaaa

SEQ ID NO: 10897 - DNA, 644 bp, Gossypium hirsutum
tttgttatcggtgcaagaagatatgggttaaagcatattaagttgcatttgggatggtttatgggtggttttaagtattttatcgacttaaaaacttcttaaacaattttctaagtcatttatttcttattttttattttatctaattgccttgagttttatattttttttgtttgtttttcattggttaataataaaaagatataaaataaaaatatttaaataaaaatttaaaaatattaaagtagatataaacttattaaaattataaaaaacctataaaaaattaattttaatagaattttaatgagaactaaaggaagccttaattgttttaattttttttttatattttcttaagggtttttttttacctaagtctaaaaagattatcactaaaaagaatttatatgaaaagacgaaaatacaattatagtaatatttattattttaaatattttcctaactaagttgctaggttattggaggaggtgtttcctgttttattgctacccatggaggtggcgtgtaccgtaccatgtactagtatttgtcgtcgtcttatcctagtggtgcaattaaggggtcttcgtcaaggtatcttctgtaaaaatgacttttcaaaaaaacacttgcctttactt

SEQ ID NO: 10898 - DNA, 322 bp, Gossypium hirsutum
  misc_feature (180)..(180): n is a, c, g, or t
  misc_feature (302)..(302): n is a, c, g, or t
taaaagtacaggtaccaaaagtgaaattatcccctttaaaaatgtttagttacctaaatgaaaaagttaccatggtttaagggcttcttttctatttaggccttcaaactatcccgcaaactgtggatttgaaggaaacgcaaaaaaaaaaaaaaaaaaaaaaaaacttttttttttttnaaaaacccttttttttttttttttttttttttttttcccccaaaaaaaaaaaaatttttttttaaaggaaaaaattttccaatttccccaaaaaaaatcttttttttaatccaaaatttttngcccccgggattaaaaaaaa

SEQ ID NO: 10899 - DNA, 630 bp, Gossypium hirsutum
  misc_feature (561)..(561): n is a, c, g, or t
  misc_feature (588)..(590): n is a, c, g, or t
  misc_feature (605)..(607): n is a, c, g, or t
  misc_feature (612)..(613): n is a, c, g, or t
  misc_feature (616)..(625): n is a, c, g, or t
tataggttaggttcctttggtgtttgacatgtaaaccattaagaatgaatgagttgatataatcccaaaagcataactcaagtgctgaagttttactggaaatagttaaggctctcatatggaactcgcatgaaattgttattaacatacataagatgcaaatgcaacctttattgtgtccagaacaaaaagatatataagcagtgtagattatatagcctttttgagtgaaaggaggcaatatttgaaaacaattattgatttgcagtacatctttcctgaaatggggtaaattgctagttatagtacataattttcatgaattgctttatattgttactattaggtttatgaacgtttgttgcctctgctgcttgcatatctggtttgtaaaatgatctgctttttaaatttatatataatcatggttttccaatattcctccataagtagagttggaaaatgaaatttttagttcttgcttttgggttttactaaatgcaactgaaaaagcaaaatgctggttctagggttgctcatgctacctttaaaggaccaatntttgtaattttgtttctcaacaaactnnnaaactgaaaatttgnnntttannatnnnnnnnnnnaaaaa

SEQ ID NO: 10900 - DNA, 623 bp, Gossypium hirsutum
  misc_feature (176)..(176): n is a, c, g, or t
  misc_feature (178)..(179): n is a, c, g, or t
  misc_feature (291)..(291): n is a, c, g, or t
  misc_feature (293)..(293): n is a, c, g, or t
  misc_feature (408)..(410): n is a, c, g, or t
  misc_feature (524)..(525): n is a, c, g, or t
  misc_feature (532)..(532): n is a, c, g, or t
  misc_feature (568)..(569): n is a, c, g, or t
  misc_feature (599)..(601): n is a, c, g, or t
atggcatgagttaaaaacgagccaagttttgaatagtactacaataacataagaacccatgaatactaaatgggaaataaccgttttttatgaaaccaatgatatgaggtttccatacaactaacttcatcaagatcatttataagtgtataatcatgttttctctcgaatttggnannttttaagaaaaagaagtggaaaagagtgaccttaggcttggaaaatagcctattaaagtccacatggttagacacacgggcgtgtgtctaggccgtgtgtgacacacggctnanccccatgggcgtgtggtatgaccgtttgtcccctgcacctaaaactttaagtcaaattagtacatgggtagcacacatgggcgtgtgcccaggctttgttaatttaacaaaatgnnncaagttttggacacggggtgagaccacaggcgtgtgccttggccgtgtctaaaagtcagtgttgcccacgggttaaaggcatggacgtgccctagaccaaacgggcgtgggtgnncacacgncccctcacaaatgggtgtgtgatactcctaaataannaatttttttctaaagttataggatgttccnnntcctatcccgaatcatccccta

SEQ ID NO: 10901 - DNA, 672 bp, Gossypium hirsutum
ttaaaggactggtcgaagaaactcagatgggtgttgttttaattgattttgtatttataaggctaatgcattattataaatgtactttgaaacaaaaataaaaataatcaccaacaatataacattattatttaatatttttagtgaatcaatattgtctttttttttatatatatagtgttcgtagttatttttctttataatgttgttttcaatattcaagtttacgttttctccttgagaatgcaatgtgttttaacattgcacccaatgatttattggtaatattatcttaatttatgatattaataacctcacaatacaaaaagataaataatataaaaaaataaggtgaaaatttctttataactcttgtaataagttagcaaactagtacattaagtagttgggtttatttattgagttatatatatggttaaaagatatacagttaagctaaaatttgatggtgtaataatattttataattattttttatttttcagtaattatttttatctgaagttccatgtcaatattggacgtgaaagaaacataattttctatggaataacacttactttgatgtaaaatcatttattgcccaaacaaaacaaaatatgtcattttataattttcttaatttctttttttaatcacaagtttcgtgtc

SEQ ID NO: 10902 - DNA, 615 bp, Gossypium hirsutum
  misc_feature (50)..(51): n is a, c, g, or t
atattatcccatataccgtctgtggagtttttatattttaaatcggtggnngtgtttttggatttggatttcaatttagtatcttttttcaaactagaaatggtatccttgaatttcacaatattgctatggttacatttattaagatgttgttgttatagttttaaggtaaattattagaaggttattatatttattgaattattcaaaacttttcattttaagttatttgattgataaaatcatggttgtatagccttttttttggtttgcacctcctatactagtcaagagctctttttcttttttacaatttaatttttttcatcaattaattttcaacatatcaaattttcgaatcaaaatctaaacaattttcttttccatcaaattgtcttggatctaaggcatgttttatttgtcaatagatattggtccatatatgaattatcaaattgtcatttggaggtcactaattggatttaaaaaaaaaaagccaagaacctaaaaaaaattttttttaaaaatttaaaaaggttttttgaacctttttaaaataaagggaccaataggaaaatttttaaaggttttggggtcctggggggaaattaacca

SEQ ID NO: 10903 - DNA, 410 bp, Gossypium hirsutum
ataaacatggaagtcccattgacaaggttgtcgagaaggaaaataaatcaagtatatccatctataaagatgatatgaatgttgttttacgtgaggatttgaaggatgtgtttaagaaattcggcaccgtgaaggtattgttgaaattggtgtctcttaccatataattacaatatagttgtataaaagtgaacaaatttgatctgtgatcctttatgaagtactctgtatgcatgatgcatattctttttcgtgtgaagtatgttgacttcagaatcagagaggataagggttacattcggttcgaacaacctgaagcggcccagaaagcccatgctgcttcagtctcggctaaaggtggtctggttgtcaaaaatttcattgctaatgtagaaccggtaacgggtaag

SEQ ID NO: 10904 - DNA, 655 bp, Gossypium hirsutum
tatttgcctgcttaatgaatattgatacgagattacataaaattttttattttgaaagagaaaatatgagataagaaattaagaaagtagtgtaggaatgacgaggcggtattgtcttatttacttatgtggtatatttgtatggatgttaaaatattcttttatggatgtcggctatatttataatcattttcatatttctctatcttatcattttatcactgaaatttaaaattaatattataaaatatatttgtaatttatttatggatgtaaatttagcatatatatttttagaacatgtatatgtaaatttagcatatatttttttaggatattgaacaataaatattggtgagtggcgataaatttgtatttttaatattattaaactcatgttaggcttttgattttataatttgtaattgttttatttaaatatataaaagtatgaaaagataaaagtgtcatcataataatattaattataatttaaaaaggagatatttctataattttataattaaattggtggcccaattaagggtgacagtaactcaataaaatacttaaatataagtattagataaatcattttcacatatttatgattttaatttgtatttagtatatactagtcctatgtagaggtgtt

SEQ ID NO: 10905 - DNA, 656 bp, Gossypium hirsutum
tatgtagaaagttggcattacgggcaagaacttatatgattcttatatgaaaaaacatttcatggttccatttaaacctgagaaagcttatctcccttaacagaatactaacaaccaaagattttccgatgtcactaacacactacatggtgggaaattacaatcaatatataacaccgttttgaaagaatcaaagcaaaacacaagcttgaaaatagccaagggactcgggagtcgtaaagccataatgattttcgtccttgctttcctccgactcatcatcttcatctccatatggattatttgaaacattaatcaaattggggaaaaaattattcataatggcagtgtattagaaagaacaaaagaaaaagaaaaatttccagcttttattgaggaaacctactcattgcatggcatagcttggagtgtagctctaaactccattgtcggctgcttttcctacgattagttctactcaaaccctgacacttgaatgtactcacatgtgtttgaagggataacaccgtatcttctgcagaaagacactgatttcttggcaattccaaccagtcatgttggttatctctaagttgatacaaggcattgttatacaattttagaagttgctccatccactgatagggcaagtaaac

SEQ ID NO: 10906 - DNA, 637 bp, Gossypium hirsutum
  misc_feature (42)..(42): n is a, c, g, or t
cacttggtcttataaaccctctatccaacagttcttgaatcngagctttcagttccaccaattcctttggtgccatccgaaaaggtgcaatggatactagagctgttccaggtaataagtcgattccgaactcgacttttctgttcggaggtagtctaggaagttcctccagaaatacatcttgaaattgtttgatggtcctaaccgactccacagtcatcccctcaagtttagcttgactcacaaatgctaaaaacgcctctcaacctttccgaatcaacctctcagcccttaaaggtgagacaacattgaacaaatagttccttcgctcccctatgactattatctcctcatcctcgatagttcttaacatcatcctcttaacagcacaatccaacgttgccctatgcttagttagccagtccattcccaaaataagatcaaattccccaaatggcaactccatcaaatctcctacaaatatcttattttgtgtctctaaaggcacctccctaaagagtttatctgctttaaccgaatgtcctaaaggacttatcactgataccccactcacagtctcctcaggaagcttacccaacgccccagatacattataggcaacatacgaatgagtgga

SEQ ID NO: 10907 - DNA, 577 bp, Gossypium hirsutum
ccctttttaattcggtgaccgactatcggtttatgagccataaatgttctcttcaatcctattatgcacatcaacaattaagctagattagtttaattttcatttgttagcatttagggtgctatatggcaagtgatctacaacaaataaatatccattttgtcttgatcttaatgtttagcagttttctcaactaaaacttagaaaagtcaaaagggaagttcatatggctcttcaatcccggattttaaaccttagaaagctacatgtgttgcatgtgggcatacaatcttcatttaaataccatctcacttccattagaaatacgaagaaaagagagacgaacaattaattaaaacaaaacaaaaactaatattttacagtaataagcaggtttcattcaagatatatatatatttatgaacttctacagaactgaatcaaaaccatcatattggaacaataatggcatattaaaccttaccaacgtctgcacaagtaaaggatgggatttcaatcttttgctcttgcagtctccaaattactgttgcttgataagctggaattgtggagatct

SEQ ID NO: 10908 - DNA, 504 bp, Gossypium hirsutum
caggttaattttttgggttgagcctcaagtaagattttttggctcaagctcggctcgacccaaatttggctaaatttttttcctgttgttgttttgctattatatcgctactattttgttgttattgtttagatattgtataactgttatttgttgttaatttttgttactattttggagacatttgtttactaagttgcaactatcttagtgttatttaagtataaatttttttaatgtattttcagtttgttgataaacatttattttaatttttttagtgtatttgatgtattatatattttttaatttgttttatataaaaaataatataaaaaatgttaatacaagtgggctagactcgagtttagcatttttatttgacccaagtttggacacaattttaaacccatttttcgagtcggattgggcctaaaaagtaggcctaaaattttgcatcatcccgaactctatctgacccatgatcaatccaattcccacatg

SEQ ID NO: 10909 - DNA, 467 bp, Gossypium hirsutum
  misc_feature (7)..(7): n is a, c, g, or t
ttgagcntctgttcagctctttcgagcttttgttcacctcttatgagcttctgttgttgtgttcaggtggaccagttttatgaacttctgttgacgatgtactctaatgcataagtcagtattcgcatggaaaatcttggtaaggtaagctgtttaatgaatttgaaagatctgttatttattgaatattgatctgaacataaataaattcaacagttgagattgtggatgatacttgggtttatgttaagcttatagttacattatatcaagtttaatattaatgatatacaatgaaatggtaaatgacaaaaatgagaatatgcttatgttcatgaaaagctagtatgattcaaaaggtgtattttctgataaaatggtttatcatgtgattgactccgaatgagttgtatacataaatgcactaacttctgtattgatgatggagattaggcttatgtcaagct

SEQ ID NO: 10910 - DNA, 682 bp, Gossypium hirsutum
tcaagaacgagactgttgatctggtaactatatatatccatttccttttcattggtgttcttttattacaaaaaaagttctgggttttgtcttctgtgtttagccaagctgtttacttcattatccttaaatgagatccacaaggaactctgttattagctttattccatgtttaatgtcaatgtttttccctctttcgggtctttgtatttcctccccacctatccttttactatatatagcttagctgagttacatgttggaatgttaattcacttctcacgtcattttaccaataaaagttgttgatccttgattctcataataaaagcaggattttcacaaagggaaattatttttatttttatttatggtataatattgtattacatacagtcaattgataattttattttcatttccaaattaaatcaaaaataattttatatcaaattattaccaattttcaggtaactttcaccctttgatttaggtatgctaattaagcagttcatgcttagggatactagttaaataatctggttaaaaaaaagtcaaatatagcaagtagcatgcaccactacaatggagagaaatcccggtttagtcatgtgataaactatttatttttaattaattattgaacgaaatgtacggggtatgagatttgggcatttgggta

SEQ ID NO: 10911 - DNA, 449 bp, Gossypium hirsutum
tctcaactttgaaatagctgcccaatgttggaatatttaaaatagtattacaagattaaataaatatgaaaactataattcaaaaatataaaaatagctttttaatcaataacaaaaatttaaaatgaagaagaagaagaattccataaaccttccaaaatctgacccactttaaaacaaatgcccttaaaagaattttagcatctttacctgcgactccaaccacaaagtattcattgctgaaattaggggtgagcattcgatcgaatcgaatcgaaaattttcgagttaatcaagttttcgaatctcattttatcatcctaactttatttgaagttttctcgaattgagtcgagtgagatggaattcgaatcgaatcgaatcgaatatatttgttcgagttaaattttaaaaaataattttggatccttgtaaccattgtcacacat

SEQ ID NO: 10912 - DNA, 406 bp, Gossypium hirsutum
gtctttttccatggatgccgagttgaaagaaatttccaagaaactgtctttgactgaggaggaaaatgctgagggaaaatgactggtttgcgggttttactcatcaagaagtcactgttaccagcacagggtatgacggattatcagttttattttatccaaatcttttagacttaatttcttgcactgattgaatggtaaatatcaatatgcatcagaggttaatcaaagttgatgtctcagtctcgcagttcaagcctttattctcgaattaatctttccattcgatttcattcaaaaaaataaaaaaaaattaatttttttattaattgaattgagttatttgaattattaagctcaaataattcgattcaagtttcgagtacgagtcaagttagaatttcaa

SEQ ID NO: 10913 - DNA, 601 bp, Gossypium hirsutum
  misc_feature (542)..(543): n is a, c, g, or t
  misc_feature (545)..(546): n is a, c, g, or t
aagtaatcagatggttttttttttgttttgctataaacagaaaaaaaaaaatgagaaccatgattttcaattcggctaaaatgtgtaaaatttaacatcgtggggcaaaatgagaattaattattagttcaattctgacttggatatatgatattggtacttctaattgagtctttaactcgattgatatggatattgttgtcaatgtaaaaaaacgtaaattcaagtaggctgaagtgcattatccttctatttatgaattgagaacgaattatgggtcgttttaaaacttatgtcaaaaagaactcaaaacttataataaaattgttaaaaaaaaaattattttcagatcaaaatgcagagatgtttagtacaatcaacttaaggtaaacaaatatttttaaaataatattgaactctgattaaattaaaatcgaatcccagaactatcaagggttcctaaataagcaggttttcaaaaaatttaattatgaatttcatcccaattaaactaacttttcaatatttgtaatttgtaaatnntnnaaaaatttaaacaaaaaaactaatttctcaattcttataaagtaaagagataaat

SEQ ID NO: 10914 - DNA, 776 bp, Gossypium hirsutum
  misc_feature (527)..(528): n is a, c, g, or t
  misc_feature (550)..(550): n is a, c, g, or t
  misc_feature (552)..(552): n is a, c, g, or t
  misc_feature (589)..(589): n is a, c, g, or t
  misc_feature (592)..(594): n is a, c, g, or t
  misc_feature (604)..(605): n is a, c, g, or t
  misc_feature (668)..(670): n is a, c, g, or t
  misc_feature (673)..(683): n is a, c, g, or t
  misc_feature (688)..(704): n is a, c, g, or t
  misc_feature (706)..(710): n is a, c, g, or t
  misc_feature (714)..(716): n is a, c, g, or t
  misc_feature (723)..(725): n is a, c, g, or t
  misc_feature (728)..(731): n is a, c, g, or t
gagcaactcacgtcttcaggtgtcgtgcttgtcatcagttctctccaccctctagatgtcgagaagtcgatacgctgatgtacgctgcgtaagttctcgcggtgtttcatcccatttcataagtttcgaatctaattctttttaccgacaatatatcaaataattttatttaatatgtgacagaatcaggtatttacggagcaaatagagaagctaaaagaagaggtgaatcattttgattatatatatattttaatataacaacatggatgttattttggatgaaaaactgattaccttaaataatcaggagagacgccttggagaagaaaatgcaaatctgcgtgaagaggtatttatttggtctctacttttcctatatatagtcaaacattttgtaacatttgattacattaaaaattattagtgtgggatgcgaccacgagaatcgacgtcaacaaggcaatcggatgatgagcggaacatggaggtggagacggaattgtgtataatgccctaaattaaannctatagtccctctcacggacancngtcaatagatggccaaaaatcatcaaaaaacaacacnaannntttgtatcgnncgaagcttatcgaacggcctaaacaaatgatcaaaaattgacagcgcagtaacttaaattaannnacnnnnnnnnnnnctgannnnnnnnnnnnnnnnnannnnnctcnnntctctgnnncgnnnnaaaaagataaggatctgcgctgtggctgctgccgttgccgagact

SEQ ID NO: 10915 - DNA, 405 bp, Gossypium hirsutum
ccccgaatgtggtgtgcaagatgcatgcatgttggattcaatgcacctaatgatacatgcatgaactacattaaaaatggtgtgctgattattgaagttctctaagtgaccattcggctaaagagatagtttttcaagctgccattatttccttcacattgctggatacattttggccattcggttcttggtgttcacattttaaggctcttcaaaaccgtccattcacacctaatgtggctgttcaagtgccctctttattattgataatttttcagcaagagttgcctattgaatgatcatttaagctcatcagctgaatgtagctgctacatgcattcccaagattcatttgcttaatatggaagcttcatgtatggtcactattcaacccaacctacattg

SEQ ID NO: 10916 - DNA, 656 bp, Gossypium hirsutum
gttatatgcaaatcctctcaacgcaaaggtgcatctacgagcaaggacacggacaagcagaaagtggtgtagcttcggcagtcagtaatgaatagtaagtcagtaatgaatagtaatgaatagtaaggcatgcgaatcctatgtaatgcgaaccctatgtgttatgcgaacccatttgttattgcgatcctatgtgtattgtgagccctattgtaatgtgagtggtgaatgtgttaaaaatgatatgttggcattatgaacacttgaaaccgttggatatcattggcatgtcatagggtttgtgagtactcatcccttttactatgtattagggcattaaggcggagataacgttggagagataagagaataccaagcataactccatttatcgtagatagcatagtgtgtttggaaagtgtgagcactcgtgctacacttgcatagagatagcatacgactctttgagtcatttggagtattttggagatccgtttatccaaggcatacaaataaaaattatatttcatattcacaaattaccaatatatatattaatgatatgtatgaatattgtattttatgtgaactgtgatagcatgtctaaactctagcatggttgatgtgtttatatgtgttgtatgcttgagcactca

SEQ ID NO: 10917 - DNA, 703 bp, Gossypium hirsutum
  misc_feature (50)..(52): n is a, c, g, or t
  misc_feature (612)..(613): n is a, c, g, or t
  misc_feature (616)..(616): n is a, c, g, or t
  misc_feature (618)..(623): n is a, c, g, or t
ttagagagaaactatcaacaaaatgcaacctcatatataagccaatgggnnnctttgaataaaattaatccagcataatggaaagcagaagaaacataatgagaaaaaagtacagctaaggaacagaatgatagtctttagaagtgaatggatgcctacaagaatatcccattcacacaataaggtgccaatgaaaaaaggaaaactataatgaatacaaccataaaggtttaagcaacagaccttcaaggttctcatataatgtccaagatcacgcaaaagaccatccttctgatctctcttaaaacttggttcagaatggatagcacgatcataacttaagaggcgctcctttgttattccattctcatttagggtcttccagtagacactgatgtcaaagtcacttttaatataatcaatcaatgcctgcaagcatatgttctgttagctgatggaaactaaaaaagaattttcactgaattcacgtatctgatacctgacagattataacatcatcgggactggtattattatgtaacttctggtgccattcctccatcattcctcccttgcaatcgttgtttctctgggatagaatgaaggatggannaangnnnnnngaagttacataataataccagtccccaatgatgttataatctgtcaggaaacatatacgtgaattcagtgaaaatccttt

SEQ ID NO: 10918 - DNA, 687 bp, Gossypium hirsutum
cgtttgacacattgacgacatcaaaaaatatatttttttaatttattgatcgatgtcacttgacacactagtgacaccaatttttttttaaaattttcaacaaactggaagcatccactaaaaaatatatatttttccctccctgaatactcgtttttttaatgggtattttgaaaaatacatattgatgttgcttgacacaatgacaacacctaaaaacgttatttttttaaaaaagcctatgattgtctaatgatgagggtacgttgtttaggcgatatcaacgatcacggggaaaaacatgttatttacatacataaattttgacttaggctatttttgtaaataattaattattttggatcaattgcataaaaaaaacccaatataatgaattaaacaaaactctcttttactacaaatcccattgctatcttgatgtaataacaaatatggttggagagttatggcctgaaatttttatttatttttactgtaaaattttaatccttatacattaatatgagatatacgtacattatgtataattgtttaattatttcactaaccatacaaacttttaatattaaaaactgatgaaatatttattaaaaaaattgttgtttgactattaaaagtagaagaattaaattttaaatatgccaaacatacagggaaccgataaca

SEQ ID NO: 10919 - DNA, 623 bp, Gossypium hirsutum
  misc_feature (378)..(378): n is a, c, g, or t
  misc_feature (384)..(384): n is a, c, g, or t
  misc_feature (470)..(470): n is a, c, g, or t
  misc_feature (488)..(493): n is a, c, g, or t
  misc_feature (496)..(507): n is a, c, g, or t
  misc_feature (510)..(521): n is a, c, g, or t
  misc_feature (530)..(531): n is a, c, g, or t
  misc_feature (537)..(539): n is a, c, g, or t
  misc_feature (543)..(547): n is a, c, g, or t
  misc_feature (553)..(569): n is a, c, g, or t
  misc_feature (596)..(601): n is a, c, g, or t
  misc_feature (611)..(612): n is a, c, g, or t
tgagtgaatacgatacgagaggatcgagaccaacgtacgagggggggagagctttccacaccaaatatggcttttttaacaaagataaggtcactttcattgttgaagacgccttttgaatgcctccaacagcccaaggaacgaaagaagaagactttcgatgccactggattgagcaatagggattgattggataagaacacgcttgcattacttccaggatcacagggactaagttgctcgcatgaatatgaatatagagtcataaagcccggataggggggctactataatagcttttcctgatctctcctaaggcttacgggactgcctttctctagaaacgggaagaggcttgagaaaggtaggccaaagctnaattanagttgcccccctatccgggctttatgactctatattcatattcatgcaagcaacttaatccctgtgatcctggaattaatgcaagngtgttcttatccaatcgnnnnnnttnnnnnnnnnnnnttnnnnnnnnnnnncttctttcnntcgagnnntggnnnnnaccatnnnnnnnnnnnnnnnnnctgaaagttgacttatctttgtttaannnnnnctatttttgnnaggaaaagccc

SEQ ID NO: 10920 - DNA, 673 bp, Gossypium hirsutum
  misc_feature (663)..(663): n is a, c, g, or t
ctcattgactttatttctagaatgcttgcatttcacagggcaaaaccaccgtgagcccttcagaaattgaatgccatcatacaccgtacttgctcacataagtgatctcagtttggaatgaaagaatgtcatcaatgcaagacattgctaatttacctaattgaaacagtcccggaagtaaattcattagggtaagggataaacaaccaggctgactacgagaaattaaattttaaaaagagaaaatgggtgttagggtttaatataaatgagtcagggcttttacaagtgttaaaatttaaaacctcaatagtgatgggttaaataaaaaaaaagtccggtattttattaaaaataatttcaatttaaaatgatcaaccattaaaacaaatattttttttaatttatcttataccaatggtagaaacgaaactgtcactatatataggtagatctatagtgacagtacaaaatgtgttgatataaactcaccatatattgatggataagtaaccgtcgatatcaacatatttatactaacgaaatttgactgtcgacaaaaataaaccatcgctatatggcaaattatttgcattgacaccttgatgatatgatttattgaattgagtagaataatttttcttttttttcaagagtgattgntgggattgca

SEQ ID NO: 10921 - DNA, 579 bp, Gossypium hirsutum
ataatggagatatttatgcaaagtggaagaagatgcggttccaatcaggggcggagctagaataactttttaggggaggctgaatgaaattttaattttttatagtctatatctttataatttttaaaagattaaatctaatttttataatcttagtggggtcaaagtgttattttacttttactaatttaaaattttaaaaaaatttaaagggcttaaattgaaattttctattttagaggggccgaggcccataccagccccctagattcgcctctaattctaatctcatgaatctagatatacatggttgagaggcaattagtgagtcttcattgaaagagagaaggatagattggacaaaatcattaatcttgataattcctccaaggatcaacattattgaaaatgagctcattcctaaatttctagacaatccagagggtactagcaacaagagtgtaaaatcttttggattcctaagtaataatatccttatgtttgagtaagcggaggatctaaaaagagatagtagggatatggttagaattaaagcgaaaagacacgacgaaccaacca

SEQ ID NO: 10922 - DNA, 580 bp, Gossypium hirsutum
  misc_feature (329)..(329): n is a, c, g, or t
  misc_feature (338)..(338): n is a, c, g, or t
  misc_feature (410)..(410): n is a, c, g, or t
tgattatattctcacctaccaggacaaagaaggagattggctgattgcaggcgatattccatggcagtaagaatatttttccttccttttcttggtcccttactttagttttcttattacaagcaacctttgcgaataatagaaatcatggaaggagtacaagagaaaaaaacataaatttatccggcatttataaacatttgcaatccttttacattatcttctcataaaaaagaactttaatcaacttaacatattggaccgaattttaaatacatacgcaagttaaggagagactaaatttggatgaattaatgttggttttgcanaaattttgntaggagtgtgcaacgaatggagatagtgaggaactggggttgaacattggagtttgatgggatttgcatgtntacttttataagcaaaatttactagtttataccaactttagtactttgaatatcaattgttccttccaataagtacgtagtttgtaaaaaaaaagaaaaaaacatgtaaaatgagtgaagtgcgaaagcatatatatatatcactataatagtctaagctagccaaggca

SEQ ID NO: 10923 - DNA, 557 bp, Gossypium hirsutum
  misc_feature (464)..(464): n is a, c, g, or t
  misc_feature (469)..(470): n is a, c, g, or t
  misc_feature (476)..(476): n is a, c, g, or t
  misc_feature (480)..(480): n is a, c, g, or t
  misc_feature (493)..(502): n is a, c, g, or t
  misc_feature (504)..(505): n is a, c, g, or t
  misc_feature (539)..(547): n is a, c, g, or t
cagagaaagcatagacacagacaaactcatatttgaagttatcttttatctaaggttcagtttagcattatttttcaatagtgtttctaagttaaaaaatgcttttgagcaaaaattaacattttttatttttactttttgttaaaaaatatatttctacaaaacatatttttttgtctcaaaaacatactatttaataatatttttatcttaaaaagatttttttattccagaaatactttttaaaagtaatattaaaatgaccctaaacatttgtacgtgactttcgactcattaaatgaatgattttcgattttcaatcaatttatttatataaagagtaaccttgagatttacaggtatatgatttttaaattcacaaagtaataaattacattctttcccttataaaaattgtacaatatattaacaaagatccattaacttggcaactactcaatcanagatnngggtgngtgnccctctcgcttgnnnnnnnnnntnngagcactgtatgtcatataaaaagaacgacattnnnnnnnnngagctgggaa

SEQ ID NO: 10924 - DNA, 516 bp, Gossypium hirsutum
acatgtacaacgtctggaaacacgttttcccaccggtcccagatgaacgtaagtggccacccgtatctcttgctccttttaagctgttaccgaatagagaattgcgtcgcaaaccaaagagtcgaccttgctcgactagaatacataacaatatagatatccgagaaacagctagtcaatagaagttgtgcggatggtgtaggaatccaggccatacaagtcgatcatgcccaaatcacaatagttgaatgtcattgtaaacaaattatattttttttgtaccagtcaaaatattttgtaaaatctggttgaatgttagtaaaattattaattactaattgtattaattgttagtaaaattatcaaattatatcaaattattaattctaggtaccagtcaaaacattttgtgaaatctaacattttgttagtcaaattattaattgttaattgtattaattgttagtaaatttatcaaattatatcatattagggttagatttagggttaggattt

SEQ ID NO: 10925 - DNA, 656 bp, Gossypium hirsutum
caacagcgaggacaatgtcaataccatgttgtttaataaattggaccaacatatccagttcatttgaaacagtaagacctaaatttgataacacatcctccgagtgcaagcaacaatggtcaagtttgaggtgcggtttcataaatttgacaacatgcttcttttgttttaactattttaaaagtgaatcaagagttttacacatctaattacatgcttgaataagacagaaagacagaacaaaaacaaataaaaaagatctagtaaatggatcaaaagtgcgaaatattcagggagagacaggaagttgtgggttctctttttgtggtggagcagagctaccactaacttcactataataattacagagaccttctcaaaaagaaagaataattacagagtttctcaaaaagaagagaccaattgtatgacacaacatatttatctcccttaaagcattcagaacatgacagttacatacaatataaaagaataaaagtaagaaacgggtgatgcaaaattgagatatttctttaatgatttctcttacgtcagttcatttgcaacattctatttcacttcctagtaactaattactgattgctcacaaaattagaccacatcatttcaatttgaccatgcaaccaacgagtgca

SEQ ID NO: 10926 - DNA, 641 bp, Gossypium hirsutum
ctctacatacatatttatatacaaattattagataccttaaagaattcatcccaaaccgcttacttatctatcatcattttccttatgctatctcatccaaagccgttggtgtgtttgacatagatcatgtcttgtacaattcaccactcctaactaaatgcctttgactattgtcaatgtgaggcttagccttgaaactttgattgtcgaaaccattttttttgaaaaacaaaaaaagtttgttgtcgactaaaaatgaaaataaaatggggagtcgccaccgatcttttattgtagtgtgatcggatcaccctgaaaataatttttggtctgcgaattttgagaaaaaataggttcgggagtcggttacgcacgaggatgggttagcaccctcgtaatgcccaaaattggtaccgaattgattgtttaatgtcttaatgtcaaaattttgaaaagattttgaaatacgatccttttattttgaataaaatgaattagacgatgagattcacttatttcaaagaaataaatcatctcactcagtaagttagagtgcaacattttaaatcctcaaaattaaatttatctcttgacttttaaaacatatgcattttgagaaggatttccgattatttgggtc

SEQ ID NO: 10927 - DNA, 500 bp, Gossypium hirsutum
ctttaaaggtataatcaagcccagcagagcccgaataatgacaagcttgaacttgactcaaacatcactttttaagctcaatcttgattcaaaacataattgagctgattaagctcgtttatcaatttttataatcaaactcatttataattaagctctttttatatatcaaggataaaaatgtaattttataaataaaaaatatttaaatggaatgcttaattaggtttgtgggctacttgaatcaagtattacaatatttaaattcagcttaatcaatagctctagctctactcaataatttttgataaaattttaagattttttgaatccaattagaatagcttgcaaatataatgtatcattgtactcttaattttaagtttacatttttaattcttaaaataatattaaaaagttctttctttctaaaaagaaacacccaatcaattgaaggctttttagaaagtggtggcaaagtgcatcctttactttaagtc

SEQ ID NO: 10928 - DNA, 688 bp, Gossypium hirsutum
ctccaatactaaaaatgaagaatataaaaaaatgtattttaatatttacatagaataatttctcgatttataatttgaatcctcaatatggagaatataaaaaatatattttaatatttacataggataatttatcaatttataatttaaattttgtaacgggttcctttttgtttctccttgaaaatgattaaaaataattggaaatattcaagctttataaaaactgattataaagagacaacgtctaatgtgcattaaagctaaaatttatattttagtccaattgttgagtaattggttgttgagcatattgacaggttgatgattaaggatgagtaaaatttgattcgattcgaaaattttgataaaattttaaattttgaattaaatagttcgagttttttgagttaatcaagttattcggattaacttgaataaaaaattaagttttttggttactcgaatatgaattacacaattcgagttagccgaaaatcagaataagaaaaggaaacactacgccgttttgataaatatttacattttctaaaattaaaagttaaaattacattattttgataaatatttactcattaatttaaaaggtaaaacaattatattgtttatgtagttaaataatcttgtactttgtctactaattaaataatcggtccatgtaaacaca

SEQ ID NO: 10929 - DNA, 635 bp, Gossypium hirsutum
  misc_feature (555)..(557): n is a, c, g, or t
tctccatgtttgcaggtttacatatttgtccattttatagtgataaaaatagaatatatttttttctttcatgttgtttacgtcattccccttgtactcgtgcattctattgcagcactggctgttctgttggatttccttctgcaggtcactgcttttgtttctctgatagttttcgactttttgcgagccgagggtagaagggttgattgttttccatgtataaaagcatcatcaacatatgctgaatctgagaaaggtatagtttgtggatactggagttgtatgattgatgaatcatgtagtgtaattgttacgatgatcttgattctttgaactgattttatattagatctagttttcatagttatttaatacttcaaaccctctcacattcattgtaaaactgtcatgaagtctaactacagaattgcttatgaaaaactttaggcattggtgggagaaaacccgggctactggctcaatatatgaaggtaattgtttctacttcagaatttttgtaattttttggtgtcaacagataaacaaggagannngaaaatatacatttggttctaaatttttttttgttaattatacaatatgtagtaggtagctcattacggggacaaacc

SEQ ID NO: 10930 - DNA, 454 bp, Gossypium hirsutum
  misc_feature (52)..(54): n is a, c, g, or t
  misc_feature (58)..(59): n is a, c, g, or t
  misc_feature (406)..(412): n is a, c, g, or t
  misc_feature (430)..(433): n is a, c, g, or t
  misc_feature (448)..(451): n is a, c, g, or t
tggcaccttacgaggcactttatggtcataagtgtcgcactcctttatgctnnncttnntgggcgagcgacgtgttctgggtcttgagttggtctctgagacagaggataaggttaggttgattcgagatcgactgaaagcggcttcggacaggcagaaatcttatgtagatctaaagaggcgtgaaatcaagtattttgtgggggacttcgtgtttgtaaaggtctcgccatgaaaaaaaattctgaggttcggtcgtaagggcaagctgagccctagatttattgggttgaaccgaattcgaacgagagtgggaccggtcgcttatcatttggagctacctccagagttagatcgtatccatgatgtgttccatgtctcgatgttgagacgttccccctctaannnnnnncatattgtgcttgaggannnnattgaggtcaaaccnnnncaa

SEQ ID NO: 10931 - DNA, 671 bp, Gossypium hirsutum
accaatcgggttcaattaaataaactattgaaaattcataaaaatgaaaaattataaaataggttcaactaatttcttttgtctcgattcaaatggttccgagcgattcattcaaaaattagttaaatcataatggtatattgatcggtttttgatctaactaatttgactgatcaatccgatctaatttcaataataatgctttttttgtctcattaagtatgtatatacctttttactagagcacacatgtcaaatattcattgggtcacaaaaagccatttagtataggcaccaaattaaacatgaaggaccagaaaaaaatttaagtattaaattgaacactaaaggtaaactcaagtaccaaataacacattaacccaaataagaaaaagtctcaaaatacaagctggatatttttaaaccgtgaaagagtgaagaccgttcaatcgataatacacgtaaaaaactccttaaaaaaaaacttcttttatggcggttttttttatatattatcatacacagaaaacggaaggcacaaacttcacattggaaaaaacaaatacaaggagaaggaaaagagggaaaaaaaaaagaaacaaaacataaagggatttggactttgaagggaaaaaaataaaaaaaaaaaatgggaaaaggagggaacaaaa

SEQ ID NO: 10932 - DNA, 663 bp, Gossypium hirsutum
tgctgaaacaagttcgaatttcaagggtggaagtgatagctattctgtcttgggagttgataagtatattgaagttgttgagttgtatgctgtcatgcttctgggaacagtttccagtgatgtcgatcttgcaatctcttgggttgagcaagctgctttgccagagaaaaaccgacaggtaatatatgcttaagtagaaatgtcttaggacactgttagattgagtctgtgccttttgtgtacataaatatacttcatctagctgtttacgaatttttggtagttgaaattcagcatgatttgtgttgatggtggagcactgttagaagagctttacacagtgttaagtatgacggcgtcactctgcatcagttaatttagaattagccagtggccttttgcgcttaacatggtattagagccctagttctttgttaccttatttattgatgctaagtcttatgcttacttgttaacaatgggcctacgagaaagagggaatttttaaattatgttatctcacattggctaagttttggatttgctatggcattatctttaggttctgcctttcaatatattgttgattggttttaggttcatgcttaacattaaatggtgggctaaggctggtcctcatgcccagactgtaacttgacactt

SEQ ID NO: 10933 - DNA, 656 bp, Gossypium hirsutum
ggtctatttgccttttaaaccctctttcttttatcatttaagctatttaatcatttcccaataattttatatttgttacaatttaatcctttttattcaattaactatcgaaactttaaaatttcttaacgaaaatttaatactaacttattaacactccataaatatttataaaaatatttatggctcgtttttaaattttcaaactctcgatatctcatttccgattctaatttttaaaatttttatttctagtacactattcgctatttcaaaaattttcctaacttcacacttaacttatattcactaaattattaatattttctactcatttttcggatttagtgatatcgaatcattgttccgacaccactgaaaatttaggctattacagaatatatatatacttagtatataattcgggccgggcctaggccaaaaaagttttacttgaggctcggcccgttttctaaacgtgactcatttttttacccaaactcatatttcgagcccatatttttacccgaaccctcccattttttgggtgggcctttgggccggactgggtggcgcagcccatgcacacctctaggtaaatacgtggattctcaacattcgctcctttattaatacattcttaatttcgttggatg

SEQ ID NO: 10934 - DNA, 620 bp, Gossypium hirsutum
  misc_feature (60)..(60): n is a, c, g, or t
  misc_feature (63)..(63): n is a, c, g, or t
  misc_feature (69)..(69): n is a, c, g, or t
gactcgagatcggataatgaatacagcaaggagagagggttccctagagtatcggagganttnaaggangcattatcaacgtttcaacaaacgtttgttgtttctgatgctaccaaacccgattacccgattctttatgcaagtgccgggtttttcaggatgactggatacacttctaaggaggtcataggcaggaattggtaaattaccctttttatgtgtatttactttttaattataattttagtccctctattgcataccaactcaaaatttaatcctttcattttaattcgatatattttgattctcttactcttattaatgtgcatcgtaacgcaattaacagaagttaacaatttggatttattgttcacgtttatgagataagaggacctaaatatgtaaaattaaaataaataaaaaaaactaaatcctaaattttgatgtagtaactttttgcttttactttatttcttttaactgtaataacagccgggagaagataaaattgacattttgatgttgttgttgggtggggagaggatccagtctttttttacagggagcgggtaccgacccggaagatgaggataagataagggaagcattgcgggcaa

SEQ ID NO: 10935 - DNA, 632 bp, Gossypium hirsutum
cagtctattcagttacatctatgtctttatcttttgggagtcatccgccccgatgcccaaaacaaagcatctccccaattgacttgatagatgacatattagtcttttaataggtttgctcgttttcgattagactaggtttgtctactaattcaagttgtctttccgtattacgatccgaccatgtaataccacttagaattagttaaacatttagacaaccaatgagcaacatttgcttcaattaaatttatgtaatcaattaatttgttttattaactaatctgttcaaaaaattacaagtttacttagacgaaaatactacacttagggcatcagatccaacagaattccaacccataaagcttgcttacttgtatggagattaaaacccaacttgagcatgaaaaagtcatttttgttctttaacgcattgtaacctaatacctccattagacaaaggttagaaacaatcctccctcaattcaccaaagacatcttcttattggaatctaaacttccccaaacaaaacgccttgcaattttcttaatttttgtgcaaataccatataagaccttcatagtttgcataaagtaattaggtatcgataacaacacagaccgaaactcga

SEQ ID NO: 10936 - DNA, 424 bp, Gossypium hirsutum
ttttttcttctttcagcttatcccaagcctcctttggtgtttcacaggccatgatcctcataaagatcacatctgtcacacaattctgtatgcatgacatggccttgtgcctttttgttctttcatcagcgtgttgcctcatttgagcaactattggattagctcgaagaggtgctggctcagcatctgagttaacaacttcccataggtaaaatgcctgcaggtaagtcctcatcttaactgcccaaatgttgaagccctctccattgaagacaggtggtgaagctggtgaaaaacctaatgatgccatggttttgatactgaactacaacaggccctctaagaatatggctctagataccaattgttggatctaagtgcaacagcaacaagcttcaacaatatgcttgtcgagcaagactca

SEQ ID NO: 10937 - DNA, 722 bp, Gossypium hirsutum
  misc_feature (699)..(705): n is a, c, g, or t
  misc_feature (709)..(710): n is a, c, g, or t
aaattcgcacaaacgaatcccaccataaatattgcaatttcaagcctagtacaaatatttgaagccatcaccacaactccaaatccagaggctcaactcaaagcagtgagacacaggcatgcatgcattatatagcccatagtttgtaattggagccatgtgagtctgagcaaatggaaaggatggttacatcagaaaagtgaatcaaagtggtggggggaggttaatggccactaacaggaatgggaaaatccattaccttagctaaattagagaataatatgagttgtcatcaactttcttactgctaactacacttttaatggtgtatatttaccactgcaaaaatggcccaatgtttatatttatggtggtttgtaaaggtagctaacccagcaaaaataaatttattatagcctgaaacgagatcaattttggtttataatatactcttaaacatagtctacctttgtttattatctaatatctgcaaacctctctaatctatacccgtaatcaaatgctgtcccctaatgcatttataattgcaaaatgttgaactgagaggatttgcttttattgcagctaagcaaaaggaaaaagaaatatgatataaagggtaattagggtattgaatgtttagttttttaatttaagctaatctttgaggtttatgcccttgtttcaccccaaggctannnnnnntttnnttttgctgggtt

SEQ ID NO: 10938 - DNA, 629 bp, Gossypium hirsutum
cagtgtcaaaatgactttgaaatcccctgttctgtctttagaaaatcattataatttgtacaaaaatggttataagataagatttatatgcttagactccttaatgagtctagcttcaaatgaaatcaaatagaacacattatgaattctgtacaatgaaaaatttgactcgtagtgaagcgtggtcagattagtcaaacagtgaaacaggggaaactttaagaaaaatctggtattgaatggccaaaccaaaaattctgaaaattttatggatggaatatatatgagtatatattcagagaaaattaacggcaattgatttggagttttgtagctccagttataaataatttagtgactattgctcaggaaaaacagcttgtgctgaatttgagattatgttgtaaaccttgacaaaacttgttttagttgctcataagctattgattaaacccatacgtgaattctaaattgtgatattgtaaaatgatatatgagtgatagatggatctttgatattaaaatttgtgaaattgtaagttcataagtatttgaatatgaaatgatagtatggcatgaaattgaattattcattggaaaatgatagatgtagattcagccaagacaaa

SEQ ID NO: 10939 - DNA, 603 bp, Gossypium hirsutum
ttattttcagctacggattcctgttcaacgtctggtttaattctgaatgatagtgtaactttgacattagatgcatagtcatgcttgtcggaaccagagtgggtcaatcgaggaaaaaataatgtgttgatagattggaggtacacttaccgtgatccgttttcatttggaggttgggtatcctgatggggattgcaggactggtatgccattttggattatactacttttcttggtttcagatgtgtaagctgcttcattttacttgtatgctttcgtttgcaccctttgttgcaagagttcgatatatataagttgaacaaatttaatttgcactttgaatggattaaacttgtcgatggtgaaaagtgtgaaacatttggtagaatagcttcccaactcgaatgtaggatagcaaaagctatggagttctatgttttcaaaagaaatctccattaacatgaaagatgtatttgatgcatgtatctaacacacacaaacatatatatatatatatttatatggatttgtggtataatcttccaaatatatgcaaatgcttagaaatattgagtatattaatgtaaggcactctcttaccca

SEQ ID NO: 10940 - DNA, 609 bp, Gossypium hirsutum
gtttgggtgactctgttcaccagtgataagccaagggttcggggcaaccattcgtgccattaatggagctctggagtgcgatggtggaaacccagccaccgttgagcgacgggtcgagtactatatcgattattgtaaccagcttggtgtggatccagggcctaatctaagatgctagatttcactttgaatctgtgttgagtacttaaaaactagttttaactttggttactgttggatgacaaaaaatgtaatcttattaaacagaataatttggtttatcatacatggtctaggttttatacaaggtcaagatgtggatgttacttatcgtggagtgaatttttagttttgggccggccgctcccccattttgtaattcataaaactttaaattaataatggtacaattaataccttaaaaatgataaaaatttaatttaataccttaaaaattataaactatttaatttaatctttttttggtcaccgcattgaaggtgacagcttttaaaattgacataatagtaattttaaccctcaacatttatgaattatgtcaatttagtcttattctaaaaaaataaccctcaacgtttacacattgtg

SEQ ID NO: 10941 - DNA, 610 bp, Gossypium hirsutum
ccgagggatcacagtcctaagaactgagttgaaacacgttttatcaaacacttggatagctcagggctttccatgtatattaatttcagtaatcggaactgacaaaagaaaaaggaaactggtttgtttttatttttttacccctaatattaatgaggatttgagttcattttccggctaagatattctcataaaaatcccaaaagcgaaggttccagtttgaaatgttcaacagaaaattttaagaaacaatcgaatgctgtaaaagaaaattcacgaattcaaaggaaatgaaaaaaaaatacctgatgaccgaagcaaatcccgagaacttttttgttcagtgaatccaattttttcaaaagagcaatcaatttgcagatccaaacatcgttcccatgcgcatcattgcaactcccggttataacgaaaccgtcaaagttcgcgatctcatcatcgtcagggaactcgccattggccaccttgaaaacttcccacgcctcgccttcctctgccagcatttcgacgaacaccccgtaatatcctccgtacctcttcttaacataatcggaatcctccgcacacagaaatacagcaaatctcttcccat

SEQ ID NO: 10942 - DNA, 432 bp, Gossypium hirsutum
  misc_feature (376)..(376): n is a, c, g, or t
  misc_feature (394)..(394): n is a, c, g, or t
aaaagctcgaaagctaaatagaaactcgtaagagctgaacaggaagtaaaacagaatagttcgcaacaaatgctgaacctcgacttacttgtgaaaaatgtcgttgtctccttccaataccatcatacaccaaaatacgaatgtactaaaatctcacgtttcattcaaaccgaatatccaatttaatattataatttcaacaataattcatttttttaacaatagaataaatgcataacaccattcattaaatttatagaaatattaaattttaaccatacgaacttacctagattgaattgtagtaattgtagaagttcagtgactattccactattttttctttttcacaagtatctacgggatcttaattaanaaaaaaggactatactancattttttctttttcacaagtatctacgggatcttaat

SEQ ID NO: 10943 - DNA, 789 bp, Gossypium hirsutum
  misc_feature (675)..(677): n is a, c, g, or t
ttgtaccactactaaaatcgaacacatcttgcctacaaattacaaacaagccttgaaacaaccccattggcacaacgtttttcaatcaaggatcttggtacattacattacttttttagctagctgctgtgcaagtgaggagcggcgcacaagtttgttaggttttttgtttctgcacattagttgggttaggttaattgggtttagcatttagtatttgggcttggggttaggttaaatttaggtagtttaggttaaaacgatttgggccacgttgggcccaagtatttggacaatggacatttaattattaatttttttattttttattttttcttattctgaatgggccccaggcaaattgggctattacacctttttctatttatgaataacttaacgttggtttttttatgaaaataggagttatcatataattagcagacaggtctattgtgtatcccgaaggagtccttgaagacgtattagtgaaagttaacaggcttatctttcctgcggacttttatgtgataaaaatggaagaggataatgctcatagatttttagacatcttgttggggtgacctttccttagtactgcatatactaagattgacgtgcatagcagaaccctcacgatggaatttgacggaaagatcgtgaaatctaatgcannnttacttgggcattacacctatctcctggtcgtccaataaacaacgagctgtatctcgttcctccacagaggctgaatactgcgctgtggctgctgccgttgccgagactatt

SEQ ID NO: 10944 - DNA, 385 bp, Gossypium hirsutum
aatggtcggttaatttggttaatggtagttcgggtcggttaacctattgaacacccctatttgtttttgacaaaagtcatacattttggtacctaaagataacaatgttgacttttttaatatttaattcaagttttagacctcagttgatgaaaattcataattagctaataatattagcacataattgtcatcaaatcaatcctaaaattcgaattaaatcacatcattgtattttataaattaaatacaaattaaataaattcacaattcaccaaatttattctgttaacaaaattatgaaaaatttaaacataataatattagcaattaaccttcatcaaattaattctaaaacacgaattaaacactaaaaaattaacac

SEQ ID NO: 10945 - DNA, 507 bp, Gossypium hirsutum
tttccttctaaaaaattggcagtaattctaaataaattaaaaaatctttaaaaacaaacaaattttaaattttataaaaaaatatataattaattaaaatttataaatgaaaggctttcatgattttgttccctccttttatcttgtacaccaccataacccctcttaggaaactttttttcttctaaacacaccataccatatcttaccgtcaatccaaattcaccatatatcattttatcccgaaaatctccgaagcttcaactcatgaactccatttaaatatctttcaaaataaataaataaaattcacctatatacttaagtctttttaattcgttctgaatccaataaaaattcagataaaaaataaaaaaatatatacataaaaatactcaattttgtcgaactcatgaaaaacccagattcaaaatctcacatgattataaaaaaaatcataaaattcaaacaaaaaaaaatcctaggctttctgattggttgatgaaa

SEQ ID NO: 10946 - DNA, 662 bp, Gossypium hirsutum
gtcccatctacaagtttgactcatatggaaatataatcttcaatgatatgcaatcttagatgtgatatgcaatcttagatatgatacaatcttagatatgattgtaatcttagatataatacaatcttagatatgattgcaatcttagatatgatatacaatcttaaaatatatgattttgtaatcttggagatttaatttgtagatatcctttaatcttaaccgttgatgtaattgatctgtaccgttagatttggggagactcaactataaatagaggcctctcccctcattgtaaaacaacttgaaaacacttgagttttgggaagcaataagaattcttgagagcattcactcaaatttctctccctcttgcgttcttattttctactgtttgttcttatttattttttgttcatcttcgttttcaacctttttttatttaatccctatctacgtgattttttaattctcttttatatttatttttttaataattttagtattatatcaaattatttttttattaaattatatattattcattgttttaaaaaatatatttcatttgattgaaaaagttttttcttaaattaggcaatgtttggtgtttagaaattcggaaaatagtgccctaaaatgctgggttgcgatttaaaaaa

SEQ ID NO: 10947 - DNA, 665 bp, Gossypium hirsutum
ctcgctaactacagtcaagaaaatacgccataacgagccaccaggaaaagctcgaaagttggtcgggagtaatattgtaattatttagaaggctgtagaagaaaatgtgcagcgacaaatgaaacccaacctccagcgtgtgcaacggaagcagaaaactatcattagtggtcttacacagtcgatgtgacccttctagaatggaaaactcatacgcgaaattgggaagttttattccctacaccgataagaccgttctagctcctcccatttagtggtgcttgcgtaagatttctccgttactaaaatcagagtcaaccaacagattgggatgatacggttaccaactcttctcatttttaccatactatcgatcaaagaaggaaacataaatgttaaaagaaaaatcgaagtttctaaaaattacctttgttttgatggaagaaaacattaagaatagaggatttagggttctgaaagatattttttcaaagaagaagttcccttctcgcttgtttgacgatttgcatgactcaggaaaatcaacggcttagatgcgaacaaacgaaaatagttcaattttcaacaatcagatacacacacgcgagaatcgctcatgcacgtggcagagcaacaatcatgcatcacaatccgcagtgtaccca

SEQ ID NO: 10948 - DNA, 608 bp, Gossypium hirsutum
tgtcttacacatgtaacaactcgatttgtacgcgatgtcagaaaatataatttcgaaacttcatttttgtaaatcaagtctgtaaaggtaaaatagaaatatttacggagttattatgaaaatttattgaagatcagttaagtactttaatcgagaaaattattaattaaagctcaatgactaaattataaaagtccaatcgttattaaattttaagttaaaaaatacttagggacactaataataattatccaaaagactaaaatgattaattaaccaattttatgcatgaaatagtggatggtgatgatgattccatttagtttaaaattatattaagtataattaattagttaaaatttagtttaattaaaacattaattaaagtatatatatataatggtgagtggatggaaagatgaactgattcatccttcttcttccattgtccaccattaaagaaagaaagaaagaaagaaagaaagaaaagggaaaaactcaaagtttcaagcatcattcgaccattaagattcgtaagttaaccaagtttttatctttttttaatttttatagattcataattacgagagcttgatttagttagccga

SEQ ID NO: 10949 - DNA, 635 bp, Gossypium hirsutum
tttgatgatgcgaggcaaccttttaatataacatgagaaaaatatataattaaaaattaaaaaaaacacttctaaaaatatatataaattaataagagaaagcataatttttttcgcataaaaaatctagactaaaatttataattttattaatttatttattttaaatattttttatttattttaaattaatgttcgtcacatactatattgtaaagttactatatgtcaccattagattacggcgaagaaatcaacctgaataacagaatataaatttaaatactaactagatctaaaaaatttaaataccaactaaatatttttaaacaattttagaagataaactacgtattaaagcaaatattaatttaaaccagcctaaattcataaactaaagtgcaaaatctgacccttggtgtaatgaaaggacaagggactctaaagatatgtagcagtagaatagctttgggtttcctttacttatttaggcttctccctcaattctactcttttttctttttcctttcctatgtaaaacattgcccactcggtgtgtgggtgtgtggtgctatgggagtgccagtgaaacctctccccaaaataatgcctaaagtgtttatgggtaggttgaa

SEQ ID NO: 10950 - DNA, 663 bp, Gossypium hirsutum
ttgcggagaagtggcattcggcgctcgagggaggtgtgagcagccgacctaggtgcggcgcacctaaggttttctgcttttttgatggttgtgggttagtgctaagtgggctggggttttgggcctaggttttttagtttttgtgttgggtgttttgggctgtaatttagactttgtttttatttgtttttttggtttatgggccccgagctaaattgggctctacacttgaaatttgtggtcgaaccaattgattctattttcaaaaacataaaaaattccatggaagagcaatacaatttgatttgttttttattttttcttctatctattacattaacatttcatatttctataatataaattattaatatgtttcaattatataaaaattgtaataattttaaacatattttaataaaaaaaagataggatacttgacttcaaaaccttaacaaaagattgataagtctaaatttaaaaaaatgtaaatttaaaggtatttaaaggtgtaatatctccgtaacattgtacaaaggaaaaaaaatacaaatactaagtgggaaaatttagtttggacttaaaccgaaaactttgtcccctaaggacaagaaaatatatttgatgtagtaaacatgtaataatgatgtggtgctccatgca

SEQ ID NO: 10951 - DNA, 664 bp, Gossypium hirsutum
cccttaacctttctagtttctataaccatgatagttgttcgcttgataaagcaccaatgtgatatggacgctttaattgcaataggagtttttagttttatttatttattatatcaggttttactaatagttttagttttacttattttatctattatattaggtttttatttccttcataaactctaagttagtgattctattttatgtcaattagtactctttcctttgtcattaacagtctataaaaggctgccaatatgaaataaagaggtaagcaattattttatcagaagaaacgttattttgagagggggttcagtcaaggacgaatttaccttttgagtaaccataggtcaaagcaagaattctttctcgtctagacctgtgactagatcctacgccaaggcgcataacaacttggtatcagagctagctatcgtgggtgacgaaaagactttgacagccaagctggaggttttcatggaacaaatggctacaaggcaacaagtattagaggagcagagggcgatattatctctttcggtccaaaagataatgaaaggagattcagagaagaataatgaagaatagggcagtagcggaggcaggaaaaggaatttagacttgcaacacggtgggtgcatggtgccacgatactcta

SEQ ID NO: 10952 - DNA, 525 bp, Gossypium hirsutum
  misc_feature (501)..(503): n is a, c, g, or t
  misc_feature (509)..(513): n is a, c, g, or t
  misc_feature (520)..(522): n is a, c, g, or t
ttacttcttaagggccatggacggaagcgtcagcccgtagtgcggagaaacgatgaatacttggcgagaaggctaagtacggattctaggcctcaagaaccctttttggggaaatattgacaacttttggctagaagggttttttagtggctcatgatattggggggaaagcaaataaataaaaatatggaaaaagaaatttttttgaaaagaaatatgaaagaacaaaaggcttttgggggagagtgtttacagaaaaagatgcccccaaatagagtcacttcaccccctatttatagtgctagggagatagtctaattgaacttaaattctaaaaagataaatacatttaattaaagataaacaaagataattaaaataaaatcctaaatttgaataacccaaataattatcttaatattaattatcctaaaaaaaaaaaaaaaaaaagagtcttccaaaaaaaaacctctcctatttgtttttaactccttgggcctnnnatgtcnnnnnttttggnnncat

SEQ ID NO: 10953 - DNA, 604 bp, Gossypium hirsutum
tccccttcttgtaatgttcactatacaactattcggaacacacatcgtaggcaaaatatgccatctgaccatccttttgatcatttgcttaaacaatgggggtaaaggatcaacttcttcttctctaaggatccctggcgggttccccattttatcctgtcatatgaaattcaggaccaaaacgcgcaaaaccgaggaaaataaagaactaaagagtcgaaagctagtaaattaccactgcatagttataacaacaaccaaattgtatcgtaacacgacctttaccacgcatccatttcctcggttctgaatatgtacgatctacaaacattcaaaatgaattaatacgaaaagcaatactaccattcatgctaatactcgagataatcggttaattcatagcaagctatttcgacctaaagttcaacgaatcattcgagttctaaagcttatttatacctctaagttgccctttttggcccatacgttgaagattatatacgcattctatgatctttttctgttcttcggcattgaagaccttcgtatgaagctcgagtcctttaagaacattcatcgatttaccgttgatcttctccatgtg

SEQ ID NO: 10954 - DNA, 679 bp, Gossypium hirsutum
ccacttctaacaggttcagcaccttgtggcatctcaggaacccgttgaggaataaaagggggaggttattgtacaacaggatttgtttttatgaattttgtaaaccactcattcatcatttagaagaagacttcatttgtctcatcaccttggccctcagattcgggccttcactactagatgcagctctttgaactgaagctggagaattgctctcagcttccttggattcagctctagcttggttggatgacattactatatgaaaaacacatttaaaatggtcagaagatatcaaactatcacaaattatataattgcatgtacaagtaaagtcatacttgctacgttagttcgagaaacggctaaaccatagctctgatactaataaatgtaacacccctaacccgtatctgtcatcagaacagggttatagagcactaccagagtttacagagtaatttcatataattcatgtcatttactttttatatccggaattaatcatattgtcccttgaatggaccctcaatggcccaatttaaatattagaatcaagtcggaactaaatcgagaactcaaaaaaatttcacaaaattccaaaatttttcttatatacaagagtcacacgcccgtgtgggtaggccatgtggctcacacaaccatgtgacatgcctat

SEQ ID NO: 10955 - DNA, 517 bp, Gossypium hirsutum
tttattcagcccctttttattcagtcccttctgtgagtattaaactaaatttgtgtctgatatggatatgttcaattctttttctcaaaaatttccatgtatttgaagagtccttaaaagatcatatttccaggctcaagtctagttatatacacacacgcatatataagaaatgcgtagagtcggagcaacattagtaaactattgtcaaaatgataagcagcaaattgcctggcaatgccattatggagaatgctgggaacacatctaggcttgttgtctttgcagcatagttgatttgcttactaaatttaaggtaaactatacaatgtcactaaactattaataaatttacattttagttaatcaacttcaaaaagttataaaaaggtcactgaaactatttgaaagttttcatttaaggcactaagctattaaaactactgctatattgccttctctgttcacatcacctgcaccaatcgaaacagaaagcccttcttcaaaaagcccttct

SEQ ID NO: 10956 - DNA, 634 bp, Gossypium hirsutum
tttttctccatgttttcactaatggaaagaaagagttttggaaattgctttatattttattactcctttaattttcaatggtacacttggttttttttttctttttttatggtcaatgttttaaagtctggtttgaactataaaagatgcataaaaagtaaaggttttaagaagctgtaaagttaacttcttcttttttggtacattacaatagggagggaggatctgattgtcaagaaaccttaaatctcaaatgccaatacaaaattcttaatcactccctcctttattgtgccaaagctactcttttttttaaccaatgaaatttggaagaaaaaaatcgtaaaaaaatctaaataatttaatatctgcaattaagaacaattaatcacaatattaatattttgtcaatcataataataataataataataaatttagccattaaaattcatactagtaaaatgatatcatctaattcgtttatatttatacaatattatttattatatgtattagtaagcacaaaattgatattctcataaatgtataagttaatgggccttgttatattaattaatgtgataataaatgcgttggtgaaagttagttaacccttcaaaacttggaaaaa

SEQ ID NO: 10957 - DNA, 662 bp, Gossypium hirsutum
tctttaacccgttgactgaatcgaaatattttagttaatccgatcggttaaccgaattaaccaaaatttatatgtttttgtcttttgattaaaataagtataaaacatataaatatatattactaatattctttttttaatagctcaaaaaatatcttatatataatatatattatttatttcgattaatataaaaataatagttcaaaatataccttgcttatttggaaaaaaaatacattgctaatataaaaaaatattatatataatatttattatttatttaagttaattcggttaaccacttaatttcgaatcgaattaatcgataactgaaattttaaaaaatcattaacagacctccaactaaactatgaacactcctaacttgcaagatgtgcgagacactacatctaagtgttcattgttataaactctgactcaaacagagttaatagtgatgttgaaaattgtgttgaagataagttatttgctttatagggttttttacttaaataatatttaaaaaaaacttaaatggcatgttgcaagaattatgtatccaaatagtatattcaaatgggtggaaggtggtgcataggcaacaccaccctgattctgacacaatttcgttaaaaaaagaagggtataggcgtgtgaag

SEQ ID NO: 10958 - DNA, 634 bp, Gossypium hirsutum
ccaccagcttagatattagatatgaaaggggtaggtttggtaaagcaggtagtccaatgatttacaactaattacttgtgattgttattagaaactttcctataggaattttgagtatggaccctgttgatttcgttgttctaggaattgagtgcatttaactaatacaataaataatttagtatgttgttttataatgctttttttaaggatataattgtcaggaggaatcttaaaagttctcaaagcaatactattttagagtagaaaatgttgaaaaaaaacagttttatttatttatttatttatttaataaccagttcattattcattgcattagcaattacctacactatgaaaagtaaattactatcaaaatctcagtggtaggaaattcaatacttcttaagtcagattttatgttaaaatcttatgtaaaaagaaaaagctttatcccattaaaatattcaaaattttcaatttcaaacttaatcgagatctaatgttattttcgaaaaattaacaaaataaaaattgaaagatgcatagagggtaatgatacttgaactttattggaagaaaataatcttaaagtaaaaaatttattacctattcgtgtatggcttataatgtg

SEQ ID NO: 10959 - DNA, 617 bp, Gossypium hirsutum
tttttttagttgacgagttgtgatcccattttggaatcatggattcatgatcaacattaatatattttttaaaaatttaattattattttttaagatttaaagttgtatttatattttgacatttaaggttgaattttcgatttgttgaatttgggtttcgaaaactatgaaattgtgggttcaaaccctactatgtgtactatatttctatttttttattcataaaaagaataaaaatgacaaaaaaaatttctttaaattaatataatttactttataaaataaaattattgtgcaaattccactataagacagcactaattaggaagaataaaaaacctaccataaatgagattgagatcacaaggcacgattgcatcatccttctggcctggtttcatgtctgcctcaactctatgtccactcaagaggaataataggacatctccttctttagcctctttcaccattttttcaagtccagccataattttaggcacatttgataagttcggtcttgacccggccccaaaaattggtctaaaattttacctaagctcgacctgaataaaaatgctaacacctgaacctagcccgacctgcccgtattacaaat

SEQ ID NO: 10960 - DNA, 632 bp, Gossypium hirsutum
atgagagattaataaattatagaatttcagagatgaaaatagaattgagatgaatattttcagagaggaaaattttatcatttatccttatttcataaatatgaagctggtggaatttatagcagaaaaataacatgtttgtcactacttactcctcaattctagtagtaatcaaatccctaaaggagatgcaatcaaattaaatccagaaacaaaaaataaataataaaacaagagagattctgggaaaaaccttcttaatctctttattcaagcaaggaaactagagaaactaatccttgaagtgttgggattaactttggaattttacatttacaaataatttttatgatttgctactcaacatattttacttattcttatggaaaccaaaatataattattagtttatataaacttttactgagcttggagaattttcatctatggtgctttattcaatgtgttggaaataggactctgattagagttgacgttattgtgtttcttatctttatttccgcattggttttatatttgttgaaatgaatgttcttttgtttgtaaaaaaggactttttccccttatatttccctttttctcttctatgcaaatcaggatgttgctcttga

SEQ ID NO: 10961 - DNA, 636 bp, Gossypium hirsutum
  misc_feature (627)..(632): n is a, c, g, or t
caataaacccgatttccctcagcttagctacatccacgatgttccggccatcgaagacgaatgcaggcttctgcatgttatcataaatcttctggtaatccagggttttaaactcatcccactctgtcagaatgcaaattccatgagcatcctttgttgccgcataggcatcccaaacaacgctaacttgcttcatggaactcgggctcgtcggttgaagatgaactggatggtcccaatcgaacttgttcatcgaaagatccctctgaatctgctcttcgctgacttgagggtcgtatatgctcagcatagccttgtcacccaacagtcctttgcacacatctatcgccggggtctccctagtgtcaccagtgtccttcttgaaagcaaagccaagaatggcaatcttcttccctgaaactgtgttgaacattgaggacacaatccggttcacaaagcgagttttctggtaatcgttcacctttatcacttgtttccagtaatttgctacctctgggagcccattgcactcacagatataaaccaagttgagaatatccttttggaaacatgatccaccaaaaccaacactagcattcaagaacttgggtcctattctcgtatccnnnnnncatc

SEQ ID NO: 10962 - DNA, 678 bp, Gossypium hirsutum
acttctcttccaccattttatcccaacggctcctcgccctttaagattgaactgccacctttctctgcctatcttcttccatattgattcttaccattaaaaagaaaaaagaaaaagacattccgtgttttagggaaaaaacacacaatatattgatttttaaagtattgaagacccataagggagacaaactacatagtatatatacatacacacatacacaattaaatttcaaattaagctcataattgcaaaacacttaaagctattattattacatacaacattattagttcacgagaaaagttctttcaacactgatggagcacatgagagtgtcttttcacccagccccaagacatgcagattcaaaagggctgagccagcaactttccaagcgaacccacatttgccaacatcgtccttttttatggcatattcatagcaaatgttgtaaatggcaagagcttcctcactgatttggttcattggtctttgtctctctaccaactctgcacctccatacaatacctaatcccgcaacaatatatgtattcaattagatttgtgaagctaagaatcgactagagctacctaatcccgcaacaatatatgtattcaattagatttgtgaagctaagaatcgactaaagctactaatcatgacctgaacttgga

SEQ ID NO: 10963 - DNA, 664 bp, Gossypium hirsutum
caccatcaaaggccacatcaattattcagaaaaagaaattaattcaaattcagtatatatataatactatatattatatatttttatttaacaacataatctttgatcattaagtaaaattatcacgaaaaaaatgttaattatgaaattaagatatgaataaatgtcgttttagcataaattattaatattttgaaattaattatatgtatgtgaaaaaaggatagttggttaaaattttatatctcccgcaaagttggcgagaactagaattagatatattgatataccaatacgaaatcaataatcttacagcatatatgtgaccattattgattgattttgattgtagttatatgaatatattacttttaatatatcttttaaaaataatacatataaaaggttggtctaaattttaaaaaggttagtataaaaatattagatttaaaaaattgatttgagtaaaaaattttgacccatttaaaatataggtcgagttctgatttaaatatttaaagctcgagcctcacctgatttgtttttaaaaacttctaatatatttccttcatatattatgtaatttataaaaaaaattaattccatagtaattgtaacgccccttacccgagaccgttgccggagtcgagcacaatgcactact

SEQ ID NO: 10964 - DNA, 670 bp, Gossypium hirsutum
ttcattatgtggcgaactaaacgtctccgaaaagttattttttacatatatgaagaagaagaaaaaagatagaagttacttaataattgaatttagagattgtgttaattgaagatttaatataaattttttatgccaacaattttttagttgagtgacaaaaaaattatattgtagatataagagtttcggtttaatctcaagcaacctcaatccttttcaccaattataaaaaaataatattttaatttaataattttaaggagtttgtgatttttttttcgtaaaatgtttttaattatttattttttaaattttaaaaatatagatatgcgttgaagccaatagccaagctctcgggttcgggcacatataaatgtagaaatagtattttaaatttaaaaaggagaaattagaagataatattggatctaagtaaaagatacgggtaaaagtgaaaatattgaaagataaggtaccgagacaaagagtaaaggacacatctcgattttttcatattaaattttattttatgatttttgaatattatttgacaatttattttttataaatatctctaaaatatttatttttatatcgcaaaataaataataaataaaaatcgaatgaaggatataactccaaaaagaagaggtaggtttgagtcaga

SEQ ID NO: 10965 - DNA, 601 bp, Gossypium hirsutum
caacaacaaaaaatatttataatccatgtagtatttgaaggttgctctcaacaagttatttaaactaaaattgtgatttcatcatattgtttatgatgaattgcatagcttactcttattgaataagccatcaaagagatacgattttggttaagacgtgctttgaattcttaaaaaaaatagttcaagctccatttcatgtgaaatagttagattcccatgctttgcatcaggcagtccaaccatttttttatttgcttaagggtgggtttggatgggcgatgggggatgcagtacggtgcgtttagcttactttttgtctcacgctacaatatcgctacaatatctaatttcactgctgccgctgtttttacactaaccgcatataaacgtaccatccatccacacccaccctaaatctttttatcggggcatgatttcccatctttactacagtatctctatcaacacaaatttgaaaattgaataggtattcaatcctcacatttttcctattgagacggtgataacaaaagaatataaacaagcaattaaaaatgttacctttaatggttaatagcaaacaaactatcacaatgaa

SEQ ID NO: 10966 - DNA, 405 bp, Gossypium hirsutum
ttggaattgtcttctcaaatcagggtctagtcttttaccttaaaaacaaattcagagtttgagtcatacatccatgttgatcggatgtccacagttccatttccattaaagaccacatgtgagtgaaagggacattcccctggctgggtggatggttgaaattattggagaagatgtgttgcaagagtggtgccactctcataccagaaaataacaaatcacattttaactgtttctttttcttcccaaactcatcaatagcataaccaaatttgaacacattctttacctcaaaaattcatccacccctctgcctaattttcatctcactctattatcccctaatttagtggaagtgaggcaagtggggacaataccaggataagatccagcaataccaaacac

SEQ ID NO: 10967 - DNA, 543 bp, Gossypium hirsutum
ttttttatttgagtccggtctgatctgacctaaatattatgttataaaataatattatattaattatatatgttaaataattattatatatatttatatttatattaaatcactaatctaataataattaaacacattacctaatgcctaaaaaaaatttacccaactaaataatccatctcaaaatataaaattttaaaatttatatttaatacaataaaatatttattatatttattttttaatataataaaacatttattatatttatggtagtatttttttaatataaatactttttaatgaatttttaatgtgttagaaaaaattttattttaaccttttttagtgcattatacttttttaaaaattaattttaaataaaaattaatataaaaaatttaaatatgggcgagcccggatttatttttcttaaatcgggacacgcttggacaaaaaagtaagcccattttttaggccaggctcggacttaaaaaagtcatgcataggcctagcctaacccgatctatgtgcacctctaaa

SEQ ID NO: 10968 - DNA, 455 bp, Gossypium hirsutum
atctgttggaacgtatgcaggctgctctgatgcaacaaaaatgactgactgaaggatggttatgagaattattacgagtacttctccatgaaaacaattgaaaactgactatgagtatatttgtctatgtaaatatatgttgattgaatgggaacatgttttatcggtatatttgcaaattcatacagctttttgtttataggttacgagtctttcttttcttttttcttttttatatattgcttcaaattaaagctagatgattggaaagttaaatagaaaaggtaatcgcgaaactcgtttgaattaaatatattttcacaaataagattgaccgaaggtcaactacttaactaattgatttaaaatgggataatatcacgtttggtatctatacttttataaaatatttaatatgatacataaattatcaatatgtgttattatgttaccta

SEQ ID NO: 10969 - DNA, 378 bp, Gossypium hirsutum
  misc_feature (28)..(29): n is a, c, g, or t
  misc_feature (326)..(326): n is a, c, g, or t
gtttgatggcaaaatagtttcaactttnngtagaaatctaatttgggcttcggttttatttattaagcattaggtttggattttcgattttataatacttggattaggcttctatatatttaaattttgtaaatataaatattgtatttaagtcgaaatatttcttttctaaagtccagcccgaataaaaacaggtctaatcttttgtcaaaattcaattttcaagctttgcattcttcttcaagttctcttatattttaagtaaatttggatagcctaacccttagacaattcaaaaaaaaaaatttattgtaaaactcatagtngataaaattggattggttgaattgataatcaatccacataccgaccaaaaaa

SEQ ID NO: 10970 - DNA, 577 bp, Gossypium hirsutum
agtcaatactgttttggttgatcatagaaaaaagatggcatccttgtaacttgttgtccactttggtccttcctatactttataggaaagatactattttcttctaatggattcgaaaatttttgccatatttaagttttttttttaatttttaaatgaaaaatggtcaacaaatagagcggataaagcccaaagggctacaaaaactcaaaaacggtccaaagttaaaaaataaagatttccgttgccgggacttgaacccgggtctctcgggtgagagccgagtatcctaaccacctagactacaacggatcttgacatcatttttaaacaagatttaataattacattacaccccaaaatgctatgaaaaactattgaagtctatgatgttagatacccccaaagtggcggagtgtaggtagaatgttgaagatttgatcccttctccatcgttttagaattattgtggaatgtgtgggattgatgtctataatgggataaggatattcgtgacaagacgtattttttcatttcttttgattcgtggtatggagtgattggatctacatggaaa

SEQ ID NO: 10971 - DNA, 595 bp, Gossypium hirsutum
ctctctcaaagctattaattggtatcttacttttatgctatgatcgaaaaaaaaaggataatgctgcgaggacccctttttaactaattaaagcaatatataaacactgctctaatcaccttttcttaaccttaatcaatgctagctagctagctcctctaaaccacgattgatatgaaatttttattctgttttatgtatgttatgtatgaattttactcggtttggttagttatattcagtttttcatctattgtgttttgtattaatttacttttatattataatttattggatatatatttgtacatatattatatttgtgattgtactgtatttgtaatggaaatacttaaaaaatgaatttttatatcatttgatttctcaaatctttttaatgttgaaaaagtgatataagttcaaaatttgtaaaagctttttttttatggttaaaccaaagactacataattttataatttttgtcttttcataagagaataattcacttgcatcggtgtaaaattaaagtggttttactctcttcaataactttttatacggctaatattttaacaatccgaccattgaaatcaa

SEQ ID NO: 10972 - DNA, 441 bp, Gossypium hirsutum
agatgttacagggtaagaagattgggatcgaatttttgagatggtatttgttgtgatgaaagttatagatggacaatggtgattactttaaatgtatatttaaagtttttgagatggtatttgtgttttagtaatgtatatttgatagatttaatggtattataagcactcgaattttttcaaaaatatcccttctcaattttttgcacttaattgaactcttaaactaacaaaattaactaaataggccctttgactgatgttgattgttagtgtttaatgacaatgctaacgtggttgttaatatacgtcatgttagcaccatttgctgatcatcgtcaattcaaaaataaaaataaaaatagttttaaaacaagtacatagtgaatctggattcatttgaatctcgatacccgcttgtctagatacattctggaaaaa

SEQ ID NO: 10973 - DNA, 206 bp, Gossypium hirsutum
ttttcaaacatggatacctaataattgtatccaatgaatattttaattagtttaaaaaatagaaatgtacgttcatcttatacgataagaatgtaattcaattgtttaattcatcacttcactccacaaaaccgccattaacagattatgaaaactataattaaccacgtcattactgggcctaaactaaactgcagagccactgg

SEQ ID NO: 10974 - DNA, 683 bp, Gossypium hirsutum
ctcgataaagtcggttgattaggataaaattgtatcccttagtagccgtacaggcaccttttgatgcatacggttcaacaaaaattgcgaaaaaaaaatcaatgtgtagattccagccatccttcgttttttctagtgtgccttttctaacttctaatttctaacgaaggggctttttcttacattttttaaataaaatgaaattaaagaaagataagttttggcccgttttcctataatctataatatagaaaaattcgctaaacttatcgcacaaacttttcattgatctatttttttttcattgggattcaatccaaatcacgatgtcattttcttgttcctgaatgggtttcatcaattttttattcaatttttttaggtttatgctctactccgagtaaagatccgcccgattttgatttgcgcatataggacaaatgacccaataccacatctttttgctatgatttcatttccttttttattttaattcctttttctttcatgttttccgccaaatattcaacgtatttctcatattattcgattgattaatagtttgaaatcgttcttatttctatttcgaatttgtaaataaaaaagatttatgattatgatataggtggtaatcataaatgtattaccaattgggttttttctaaacggagcctgggatactt

SEQ ID NO: 10975 - DNA, 537 bp, Gossypium hirsutum
tgtgagatttaaaacactctcagtgatcagtaattttttttttaaagatgaaattatgtcaaattaaaataaataattaaatctcgaattttaacataatagacgagaaatcataattattaccaattattcaacgtattcgactagataatttcatttaattaaaaataattgtactcatatttatcattaaaatatattttttattgttttcaataattgtattgtaaaaatcaaattgaaggtcgaatcatttaaatcacatgttctcgatttaaataatttaattgtcataacaaattaaatgaaaaattcaaattaaaaaaatttattagaaatccgaaacctaatttaatcaattaaaccattggtttattgtatttgttttcttaatgatttaccggttcacatagatttactctatatcaaattttatcccactaatcaattaaccatcaattttgttgccgttggtatttcctcccttaattcaactatgtttgcgaattggtgtgtttggatacggtcctttacttg

SEQ ID NO: 10976 - DNA, 701 bp, Gossypium hirsutum
  misc_feature (449)..(449): n is a, c, g, or t
  misc_feature (557)..(573): n is a, c, g, or t
  misc_feature (577)..(578): n is a, c, g, or t
  misc_feature (580)..(581): n is a, c, g, or t
  misc_feature (583)..(598): n is a, c, g, or t
  misc_feature (602)..(605): n is a, c, g, or t
  misc_feature (607)..(609): n is a, c, g, or t
  misc_feature (611)..(621): n is a, c, g, or t
  misc_feature (624)..(624): n is a, c, g, or t
  misc_feature (626)..(634): n is a, c, g, or t
  misc_feature (640)..(642): n is a, c, g, or t
  misc_feature (644)..(647): n is a, c, g, or t
  misc_feature (654)..(662): n is a, c, g, or t
  misc_feature (664)..(666): n is a, c, g, or t
  misc_feature (668)..(668): n is a, c, g, or t
  misc_feature (688)..(697): n is a, c, g, or t
cttatttccggactttgataaggcaaaaacacggtagaagcccctgcaaaaaaaatccccacattttccctctccccctcgcgcacgccgctcattgtgcgaaagagatgggaaatatccttccccccggggggccgccccagatttctcacgccgcacatctctcaacatataaacacataatgtgttttctccccccagggggaaataaccccctaaagatggggtgtgtgactcctcttaaaaaaacacactcataaaaaaaaacatgccgggtttgagcaaggacccctctctttgtttttaattcaaagtgtaaaaaaaaatgggggttctttttttggaacaaaagttattatgtcatgttgtgaactgtaaaaactattgttttataatatactcagggaatgataaataaataaaaaaacaacataaattttcaacgacgnttttacatatgatttttttgttggatggtgcaaaagaatttttttgatgcaaaaaaaaaaaaaattttttttgggaaaacaaaccgggttttttttttttaaataaannnnnnnnnnnnnnnnnttcnntnntnnnnnnnnnnnnnnnngggnnnngnnncnnnnnnnnnnntgngnnnnnnnnnctttcnnncnnnnccctccnnnnnnnnntnnncnttctttcttttttttttgtnnnnnnnnnnttct

SEQ ID NO: 10977 - DNA, 677 bp, Gossypium hirsutum
ggtcaaaccttttttttatgatttttttgctatggattcataatttaaaaaaaaaaacccaaaatttagaaggaaaaagaacccaaaataaagggaagggttttttatggtgaaggtgatgattgatggttttgtaatattctgaaagagataaaataaaaaggggggtttatggctgatcggtaaaggttttgattgtgttttgactgtcgccgccggccccacttacccttccacgtggatctctactgcggcatttgtttggattactttcattatcagtcctcaaactatgactcaaattctaaatcggtctcaagctagatgcttttggaggttaaatgcaactcaaatatgatgtaaaatggtaagagtaccatggaggcctatatactagaagttggattacattttgtttattctacttaaaatttacatcaaagagcaaattgatctttctgttaaaaatttcatcaatttttattgtttaaaattggtccttgtacaccattatgaggtacacgtggcatatcatatgttattgtcgagttatttcatcaaccatgtcaatttttaacaaaaatgactaatttgatctttgatttaatatactaggactaatttgtccatttttttactaaaatggataaaatgcaatctgactctattacaaaatc

SEQ ID NO: 10978 - DNA, 520 bp, Gossypium hirsutum
tcgtgcatggcatttttgcataaataggaactgtgacacaagacaatcgatttgcgacggagacataagtcatcaagtaaagaatgaacttacaccttcccagaaaatgctataaactaggaagcatagaaacagacaaatatgaatacgacataatacgggcatgatgacaaaaaacctttttaagaaaatcatgatagtaatacagcaagatacacaacaaaatatatatttttataacaatatataaattgaagtcacacacgccccgtgttcctaacccgtgtaactctctgtttgtcacctaagaacaaattgaagtcacatggtcaagtcacacgcccgtgtgctaggctgtgtggtcgatttaaaatttatgacttttcataaaataggtgcagacttcacacgctcagggcacacgcttgtgcctgaagccgtgtcatccacacggctgagacacacactcatgtctctgcccgtgtgctcaattctgagcattctattttacaacaattag

SEQ ID NO: 10979 - DNA, 432 bp, Gossypium hirsutum
  misc_feature (39)..(41): n is a, c, g, or t
  misc_feature (65)..(65): n is a, c, g, or t
ttggggtatttgcatttatgtccctcctcatttcacaannngagctatttaatccctctagtaanctttacacctttttcaatttagtccttttcacttaattgactacccaaacattaaaattttcaaacgaaattttaataccatattactaaaacttcataaatatttataaaaatatttttgactcggttttacgagatcgaggtctcgataccttatttttacccaattccttcaataatttctttttctaactaaccactaaatcggaaaaatttttctatcgatattttcatacaattttcctttccaaccaaatttccgggaaaaaatttaaaaaaaattttcctttaaatcggatttgggggtacaaaaccccttttccaaaaactttgaatttgggcccttaaaaaacccaaacaataccca

SEQ ID NO: 10980 - DNA, 483 bp, Gossypium hirsutum
  misc_feature (469)..(474): n is a, c, g, or t
tcatgacatgctctcggatttagcagtcacgttttagacttcaagcaggagtatttctcctagttatcttttgtcaattaaactctaattattctagggatattcattaacaagagtttttctttgaagacgataagatatagtcgcatatgaattttaatgagagtttcatggtaattatggagagtattttgtaccccttttgtgagtgcccaataagatttagagttttatttatcgatttgctctttgagattttgagctttgtattcgaggttttgggcaatgtacaagttgtacatttaaattattttctttatattgtacttttatttgtttacttatttagtgaaaaacctatacctcctttagttgtggtttttatcctctttgaagattttccatgtaaaacatttgtgtttgttctttttcatttttattatttcgttgcttatacgagtcgatacannnnnntttactcga

SEQ ID NO: 10981 - DNA, 440 bp, Gossypium hirsutum
  misc_feature (427)..(429): n is a, c, g, or t
ttgtcattaatttgctagcccgaataattttactctttataaggtaatggtcgactttcagttttgtgcctctatcatgtttaaatttgagatttagtccttatattttaatctgacataatttaattatcttacttttataatatcatttgtcagttcaaatagttaatatcagtaactacttcagttagaatgctaaagtgaatttcacttaaaataccattccaacacaaaaattatatatttcaacatgatgagttagaatttgtgattttaaggaaaaaaaaatctatgaagcattttaatcgcaatagttaattatttgtactaactaatgatattataaaaatagagcgataaagttttgtcaacttaaaatatagtgactgaatcccaaatttagcaagagcaaagagaccgtaaagannntcgaatattac

SEQ ID NO: 10982 - DNA, 698 bp, Gossypium hirsutum
  misc_feature (680)..(682): n is a, c, g, or t
  misc_feature (686)..(688): n is a, c, g, or t
tattaatctatatgaaactcgtatattttacatattaatacccaataaaaacaagcattcggttataagaaaactcatttcatatcctggtctattcagctaatataaatatgcacatctttatacacatgtaaggcatataaaaattcaactaatatgataaggccaaatgtcatgtacgcatgccttaacttaatccataagtgaacactaaaatttgtatcttgcatatgtcttaatctttacctaacaatttcacaatttaccttcactcaataacatccattatgaaccatacggtcgaatacataacatcatcacaaatatcatgtattttggttacactctcgatatagactcaatacaagaccaaacatatatataacctatcaatatattcatgccaccacagaatgcaatcacattgcataagttataatcaaccatgacacattacataataaccaaaaagagcttgaatcataatccaacaaaactgaaactaaacatataaattaagcgatttttgcatggccttatatatgaccaaatttcattatttcaaaataaaatctagcctatacatgccatagttccaaaatgcaacttataaaatatcgaaagcgatcgatagtgtgatagcctttgctgacgatccttgagcttgtaacttgaaaacnnnaccnnncatagatcca

SEQ ID NO: 10983 - DNA, 580 bp, Gossypium hirsutum
tctccaccagcacatatacggcatagtttattcattgtaacactcatttagtgcatcaaatttccaaatccaattcaacttaggcataatagccataatcggcttatagccttaaatcattacatattcggcacattaactaaataaaatttacattccctttacatattaatttaactcttaggcatataaaaaggaatcaagcttaaacacttaagaacttaccttgaatgttgccgaacgattacaacggctattcgattactttctcttttcccttatccgaattttgcccctctatgctcttgagcttggatttttcttccccaagtgaccgaacattcaagagctcttttcctctcttttctcttctatttttagctttcatgaacaagaatgaacaaaaaccttccttttcttcctttttgttattctattactaaacattttgtgacacaaaataacatatattatttgtgccatacttatgccataacttcaataaaaaaatttacacatgttgtctacaattaacaccatggctggccactacacataaaatggggagtttgacatgcga

SEQ ID NO: 10984 - DNA, 475 bp, Gossypium hirsutum
cctaactggcacctgcttttcctactcaacttctgacaacagtttttattattcaggttgcgataatttggttactatttttggcaatgaaacagataaacttttgggcggatgtttgcaaccaagttgtaggattaataacaagacttcttatgttgctagttgtcttgcttttttccctcaggatctcagttcattctacataaacatgactaatagggttgattctagtgattataggaagaaaaaatcatgcggatttgcttccttgatttctgatgactatgatttagaagattctgatataagtagtaggacgcatgtcccaacacaattgcattggggcacaccaatatatggagaatgctatttgaatgatagttcggatacttcttgtacatccgatggtgaatattgctggtcgaggttgagctctaatcatctatgtgtgtgtgatagggatactcgcatttac

SEQ ID NO: 10985 - DNA, 686 bp, Gossypium hirsutum
ttgttgacagaagaacctatctccttctaatcatgcatatcttttagatttcttttctttgtttgtcttcaatattatagattttctctttctttgcataaacatatatgtaatcaatgaaagcatgagtttttccatgttaaaagtatcatttatgttgcttttataagatataaattttattcttttttcgggtttatagttattttatttaattttaattttttaagtataatatattttaccaatgcactcaatagttgttgatatcagcattaatttctcattctatgcatgtaggttaaaaaatttaaaaaagaaagtcaattatagatgtgtgtaactccaaagaaatacccttaatgaagtaaccccaagggtttttagttcttttatgtaaagagatggatttagtttatatattttaatttggtcaaatttagtgaatgtaatttttttcaatgatcaattttggtcttaatatttttcaagatttgaaattcaaatatgatctaaatagtaacaactaattttatttgattaattgttgctattatactttgattttttttagcttatgtatttttcaaattttgaaatttcaatactgacaccaatgaaaatagttaaatccgttaattgttttgagtaatttgtgaatatagaaagctgacgtgatattacgc

SEQ ID NO: 10986 - DNA, 627 bp, Gossypium hirsutum
cgattgagttttaacttgtttgtcaatataggaggatgtgaactcgagtgtgttgaagcgtattatcctcctatatatgggttggggagagattatgggtagttctaggcatattacataaaaaagaacagatatgatcagaatgtataatgagattgttcaaaaataaaaaaaaaacactaaatttataataattaagtataaatgttatgcgtaggtaaattttaaattatttaaaaattaagtttgagtttgtgtaaatattctacaattttttttctaatttagtttcggataaattttgattataagttagttgtatttatattaagtttatttttattttaatggatggaatgtatattatttgtgattgtattcctagatttcttcaataataatagttaaaaaaacaataatacatattggcatcatgataaatttagccttaatgtttacattatttgtcaatttagttcttcttattattctagttaaatttgtcgttaacaatgttaaaatagtcaaattatatttttaacaaaaatactaattaaaacattagccttttaacgatgttagcgtgatagctcacatgatagtttacgtgtacttggacactcccaa

SEQ ID NO: 10987 - DNA, 428 bp, Gossypium hirsutum
acaaatagagttgcccatggttggtcgagtttgagtatgatattaatatattttatatttatttaaatctagcccaacttgaaataaagatttaaaagtttgccatatgcccatttttataaaagtttaatccaagcctattttagatccatacatattatattttaaatattttttaaaatatttagattatattattataatattaataattttattttttatttattgaaaattttacatagtcatcttaatattattttaatgtttacattagagtaatattatatatttagtataggtttattttttttaatgtattataaattacataatatataaaaataacataatataaagtattataaatttaaaaacgggtcgggtcgggtcgaacttgggccttcaatgttcaagcctgagtccaa

SEQ ID NO: 10988 - DNA, 540 bp, Gossypium hirsutum
taaactttttttgctataagcatggtaaaccagtcaatttcataaaatgaaaatttcttgaaagaaaggaaaaagaaataaagatggttacatactaaaggaggcgggtactcatgaagagatccaggatataatttttgataaaatcccagaaaaggttcaggtacctgaaattatgaatataatgggatatcccaatcagttatgtcataactaaatggagttgacaaaaggaaattgttgtcgacaacgataatacatagaacacttaaatattatggaaaagtgaggatcttgaatgaaaatatatttgaaagcatggatatgggaacaactcataaaaaaaaagacacttctattataacttatgaaatgtatctcgtacttgaagtccaaacacctggaaggtataaagccaaggggagtacatgttagcataataacaagtagcataatagcaagtcataatatataaaattgacttgtaacaagaatgtttgcaagacacttatttttggttgtgaaaaattattaattagt

SEQ ID NO: 10989 - DNA, 641 bp, Gossypium hirsutum
  misc_feature (58)..(62): n is a, c, g, or t
tatagattgatttgttccaagatgaaattttttctagatggtcatatagtggaggcannnnntttagaagagacccaagacataactaataaggaaaactctagaagagattcagatacctaaaactgaagattaaaaaaatgaaaataagatatctcgataagttaggtcaattcgagaaaatgtggaatcaaataatgaaagtggtcgacaatgattttgcatgcaatattattattgaaataatgaaataaaaggaggatcttgaataaatctattgagaaatatagatatgggataaattgatcaaaatagaaagatgtaactcacgtacaattaaattcgtggagtttttggactagtagtccaaatatttaaaggtataaagctagtgagggtgaaaatgaaatagttttgcaaaagcgaaataaaaatatgaattttttcactaagacctggcattgattatgaaaagatataatagtttttttgtggtggatgcaataacctttagatatattattttgacaattcataaaagatttaacttgcgtctaatggttgttgttacaactttttatgaatcactatatagtaaagtttatattaaaatccttaaaggatttaggatgctagaagca

SEQ ID NO: 10990 - DNA, 644 bp, Gossypium hirsutum
acttgttgttacctttttttctaagattgctctcgtactcaagtcgagttatgcataaatctaattcaaattgcaaaatattaaactaacctcaattaatcctcggcgaagtttgtttagtaagagtgcaagtgaatcaacttcaagacaacgtctcaaacagagtgagcacttcatatgttctgataactgacaaggttcccggtcaatatctctcaaccaatgttcctttaacaaaaatgcagaactcaacctcaaaaagagaacaaaaatattaataaaatctaaatattctgctatcttctgattggaaaagaaaatcgaaatcaacaaaacaaggcttctattaaatatctaattagctaacaagaaaagagtaattaaaacctaaaagaaattaattcgggtaagatttccttttctttttcgttttatcaatacacaaaactgaaactacgaccaacatcacttttccttttttttctttttcctttctaatctttccgctttatttttattttttcaaattttctcacttaccaaaaaaaatgatagaatcaaggaaattaatcggaaatagtacataaaaatagaaaaaaaaagtaatcaagagaggaaataggaaaaaaaaatacctgaacaaa

SEQ ID NO: 10991 - DNA, 378 bp, Gossypium hirsutum
taattatgaccactatatgagcgatgttatggcgatcagaaagggacaatgaatgacctggctgttgatgtagtaataataggacagcttcattcatgcatcaaaacagcgcagttctgaatctgagttgaagtccgtcaccattttcttaccaaaaaaaatatcctaaaaaatcagacagaatcaagagatgcttattgccatctgataggtttgggggtattggtgggggaggggaacctattccattcgggtttcatctcatggttccaactccaggcacacgtgacagtgcagacatacacaaagacagttagctcagcctcacttactagactgcaccagtggcctacggcctacggcctacaccctctttat

SEQ ID NO: 10992 - DNA, 617 bp, Gossypium hirsutum
ttctttttgggtctttacttacatcaaacgagaattactaatttaccatcatctccctactcacaaaaaaattaggatttcatcaatagtctttggctgccaagttgggcattcgagatcatttgaaaatttatacatgtatttttttaaaatgaaagttatatttttcaagtttaaaaattaaaatggatttaattgtcaaaatcaagtattaaagtaaagtaaaaaaaaaatacaggtaccaaagcaaatctagctatcaagtcaagtttagggtccaaaattatattatccctataatttattataaacataaaaaattggttgagttgagttggcctcgggtctttaaagtttgagccccactcacattttaaatggatctaatttttttacctaaacccattttcaagcataaaatttttgtccaaaaaccatgattaaaattacatcttccaaaatgattgtcattgttacatgaaaaatggaatgtaaaaaatatctagtctccatctttccaccaaagttatgagcgtcttaacaaaataggatgtattttagcctttttaaaaaaacttactacatctaaatggttttgtaagtcgatcgtgacatac

SEQ ID NO: 10993 - DNA, 377 bp, Gossypium hirsutum
atcatgctcaacttgcttacaagaaaattaaagcttgtcttagagagccctttggtgagtatgtcagcaatttgttgttttgaaagaacaaacggcatgcatacttggccttcttcaatcttctcttagataaagtgtttatcaatctcaacatgtttagttctgtcatgttggattgggttgtgagcaatactaatggcagctttgctatcacagtacaacttcagtggtgaagttattggtttcctcagctcttccataattttttttaaccacatcatttcacaaattccttgggccattgatctaaactcagcctctgcactacttcttgccacaacactttgttttttgcttcgtcaagttacaaggtttca

SEQ ID NO: 10994 - DNA, 632 bp, Gossypium hirsutum
agacagtgctaaaatttttttacatgcatatactcgctcactttggcacaccaaaggcatagacagagggtgaaaccctattttggcaacaataatcaaaagtaggcagagaccattaaattggtcaaaaagttttaatttttaattagtactccttgatttaagattattttatttatgttttgttaaagtttattttccttccttgtagaataattatataccattgtcgacgcattgaaatcttactttaaacgcattccataagtttgtactaccatttataactcattataatacagggaaatttagattccatcattggatcaaaaatcactcagccatttgatccttttaagcggacacaatttatattggacacaacttttccgcccagccttatatctctccacaaaacaacacgcctgtctatcttcctgtttcacccactataaatcctctcccactatattgactgtaacgcattcaagcaaccattttaatttcttttctcttttcaatatcatatattttgaactttaaactgttctacccaaaaaaaaagatggccaaaataagaggctcaatcaggaaagccaccaaatctgttggagaatatgcgtcctctgcta

SEQ ID NO: 10995 - DNA, 660 bp, Gossypium hirsutum
acctctaaaagtggttgtttttaataaaccatttgattttattaaaacaacaattttagtccacgaaattcagaaaaacgggttcgagagtcggttacatacgaggaaagattagcaccctcgtaacgcccaaaattggtacaatgttgattaattagtgtcttagtgtcgaagattgaaaactttaaagagatttaaaattcgatcctttattgaaatgctagaaaaaaaattttgtagaaaagggcatactctacgttaatcgagaaaagagaattatggcccgtaagttaggacacaatacctcgtattcttgagaataagctcccttttgttttttctcaaaacatgtttattttagtttttttttaaaaggatattcggttatttgggttcaacgcgagaaaaattgagattcagtaagttagggtacgacttctcgaatttccaattacgaaatattgcctttattattttttagaaaagaacctcatcttgagaaaacaacatgtcatatccaatgcgttaggacacaacatatcggagtctcgagataagctttaaatttggaatttctatgtttaaattgaaaaggggatattcagttacttaaattcaacaaggagaattgaagcccagtaagttagggcacaatcttct

SEQ ID NO: 10996 - DNA, 397 bp, Gossypium hirsutum
tagatctctttaaactcccacgaggttgttcgaacatatgcaaagcttcattacttgatagagcctttttttctaaagcgtctactatccgtttagtctctttatggatatatctcaaagaacattttttttcaaatgttagaatttgttgaatactccttattagagtgatttttggtcaatggtaacttttccccacggttttttttccaatggctaaagacaactagtttatttgctatataaacctaagtcattttcatccttttgcattcaaatcccatcctcctaattctctcaattctcaagcatggaggaatgagaagaatatgaagatgaggagccaaaaccccaactacaaagaaatcctcctcgcaactgacacctactgcaaatt

SEQ ID NO: 10997 - DNA, 595 bp, Gossypium hirsutum
  misc_feature (584)..(584): n is a, c, g, or t
  misc_feature (587)..(587): n is a, c, g, or t
ctttttgggtagttgtggatctgaacccaaaaagctgcattccatagggggatcaaattaggatcttcgtctcttgctaacctatgaaaaataatgagatgtctattaaaaaaccatggcatcccatccatgacacgctttaaatcaatctcactgtagaatctaaataaaatccttttattctctaattctatgattgatactcctcttaatggatgccataaatcagccaacgtgtttcttaaagatgtgaaatttacaatgctatccgtaataactctccccaccagacatagatcatataactcttcatcagccttattttcctccaataccaccatgggatcttcctcttcatcgttgatattgaggttggctaactcagtatccacgtgattaacattggccatgacccttctttgtcttctagtaattaacttccctttaaccggcagaaccaccgtattagatttaagattcgtgacaaggtaaacaaaaaaaccctaaactttaagtcaaaaattccttccaatcgggagtatttcaatcaccctaaaatttgaatttcgtgcgacaaggcaaanaanaaaaccct

SEQ ID NO: 10998 - DNA, 555 bp, Gossypium hirsutum
cttttcaagagcattgctagaagaggtggaaatcaccgtataagtagtgctcgttctaatacgttcacaagcatgggaagaaacagtgaggtccgtacttctagtaggtctgtacggaaagtatcatacgttgagagtgaaggaagtgaagaaattgaggaagtcaagaagaagaagactctaaaggtaaattcttctcatgttgttatggttattattacatactttactattttagcaggtatgtaacgtctttcatatttgatgtaattgattgcttataaattggaacttctgatgtaggttatccaagttggtatttatggactttgcagataaaatgtaataatgactctgtaatcagcattctgttgcatatatattctgcatccatgttgtatgaacatcgcaatttttccttgattaaaagttgcttgataaggatcatggcaactatttttagtagttccaatttataagcaattatttttagtagattagttgaatatatattctactttatttttttagtagattagttggatcttctgttgc

SEQ ID NO: 10999 - DNA, 643 bp, Gossypium hirsutum
gtaacaaagccattttcaacggctcgaagacctaaacggcggcgtttcctgattttcctttgccccttaaaccctaacaacaagcgtctaaggaattgcaaagtttagaaacttggaaggtcataggatacgatttaaaatgcgaccgttagagacactgccgccaacggaaaccctagaaatcgagaacggtttgtctctcgttccgcgcgtgaaactcaatctcacaatccacccttctctcccctcggtttcgaaaccgatcgacgaatggcagctcaagcgagccctgatagatttcctcaagacctcgctctccgtctccgttaccgttcccgaagaagacctccagatcaaacgactcaaagacctcaagaaacggaagcgagacgagccggtcgcccacggtgctctcttcattcgtgacattaggtttttgagcagtaagaagaaaattgaagaggttgataacgaagaagaggatgtgaaggaattggaaaagaaatttttggaatggagaagctatgtagcggagaaaatggatgggattgagctcaatcttgaaggagttaagtataatcttagtgttgagattccagcttcggatgattttggaagaatgaggaaagattgggaggagtcg

SEQ ID NO: 11000 - DNA, 640 bp, Gossypium hirsutum
ctagtgtgggttaaagtgtgaaaaaacaaagtcgtgccaaatctttaggaccgttgctgtctgaatagattgatccagtgtattgtcagctagataatcctaataatgtttcgagataatccatggttgtcgtgatgtgttgttagaaatagattgtttggaagcactgcatcactgatgatacaacaatcggattcgtatgtaattcatgccatctgagacctattgcgttaagattgagatattggtattaggcatgtgcatcaataatgcgataggatggtcgattacttagcaaatgttgtagaaagaatggttattaacttttacgcttggtcctcatatcctgattttgctttgaatgtgctgtatgaggatgttactagtttatcttttcttaaattaattgctatgtaatagcaaaagaaaattactttgcaacaataaattggagctgtaaaggcttgagaacgagagaataagtaacatttatgtatttttttttaggacgtataagttaatacccaaacataaacaaaagaaagttgatttgtcttaacatttttttttatttactttccatcacatgggaaattaactctctcaccaattatcaagggagtaactttccattaaactt

SEQ ID NO: 11001 - DNA, 584 bp, Gossypium hirsutum
  misc_feature (555)..(558): n is a, c, g, or t
  misc_feature (569)..(572): n is a, c, g, or t
  misc_feature (577)..(580): n is a, c, g, or t
tcatcataaatattaaatcataaagcaaataatccaaaaatccaaatgacacaattgccagtgatttagtttaacatgacgtggaaagacctagcacatgcagaaccaataaaagaaagcactttgctccagtagttaaaggtcttagagggtctacatattgcaaacccttttgctcctccatacatgtaaaagttctagtaaagcttgttcactatttccgaaacaactaggcctatatgtgacaaaattaaagccttattaaagaacattgaattgattttaacttttggctgactagagaatcctacaaaagtgtaccagattgatttaagctttcatcgaacagacccatcttgcagcattagcaaagaagtagctactgggtttctctccctaatcagagaagtttacaacaattcttaaactgcataactatataaaaaattcttgccatgttttttccatgagatctggaccaaagtatctagttcaagacgtcaaattcgattacacaaggagggaatattatattaaatatttttttacaagcannnngaattaatacnnnngtaannnnggac

SEQ ID NO: 11002 - DNA, 375 bp, Gossypium hirsutum
ttattatgtagggtaaagtcggtggatagcatcctcccatggcttcttttgccttcaacctacacactttcaaacaaacaacacttggaaaatataaatgttccttttggtgtcaaacaggaataactacttcaatctttatttgattatatttaaaaggaaatttataatccaacctctctttctcttttagagagagcagcaatcggaaaaattcaccatttcttggtgaaaattagaggatctttcatgttaatcataaatctatttactcatttaaacgatactcacttttcatgttttagtttagaatttttaatggtgttaaaaaataggggacacatttagtccataaaaatatgttatctgatattc

SEQ ID NO: 11003 - DNA, 466 bp, Gossypium hirsutum
  misc_feature (300)..(300): n is a, c, g, or t
  misc_feature (303)..(303): n is a, c, g, or t
  misc_feature (348)..(348): n is a, c, g, or t
  misc_feature (364)..(364): n is a, c, g, or t
  misc_feature (371)..(371): n is a, c, g, or t
tttttcttcttcttttttttctaaaccatttttttaatttaaattgtgtagagattgaatcttaatgattagaattaaaaggttgtgttgtgaagcaaacaaggaatgccagccttaaagcatatatcatctatctgtgattgggtagtggttcatccgacaagaaggaatggatgagggcaagagcctcactgggtttgtttagaggcaccaagtgacctgcccctctcaccgtcactaatgtcagcccttcgtattccactatcctccctccaacctgaaatttttcaatttcccaanttnatatataaatatatatacacaaatattcatattacatgcaggttnattttacagaaaaatnaaaaagnaacctgcttgttgggaaaccaaaaaccccaggtgaatttaactggaaccccaattgcttcaacacagaatctgaaactaataaaaggaacccttc

SEQ ID NO: 11004 - DNA, 580 bp, Gossypium hirsutum
aaattttgagaattagagtaattaaggatttacccttcaaatgcaaaataacccactgtagctcttagtcccaagaccttacacttttgttggctgctagtcattatgatcatgaacaacaccaaatttctgccagggtttatcaacaaccgttcagcatggatcagatggtttgcaaattagaaatgaaccaaaattttgaatacccatttggtcgaatgatgtcctcaacgtttctgcgaaggaagcttttgtgtttagcgcttctgaatcaattgatctgagtactgtaaaaaaggctagtgcttccattgatgacatgttaggttggatttgatttttttttccttttagcgtagacagttaaatggaagcctgaaaattgtaaattagaaagtttagaagaaatttcatcgagttcaagttggaatttttggaggtctgttttgtcaactttagctaaaactcattttcttgtaacgtaggcacgcaggcactacgtcttaattctagaaatagcaatttcggaggattttcctgtaaaaccagaacataaattccaagacaaaagcagacacgg

SEQ ID NO: 11005 - DNA, 640 bp, Gossypium hirsutum
acaggatcagcaaatattccattataaattgatccttcaaatgtacgaaaattcgaaacgagacctgcatttctctcttccagtttctgatcaaacctccaactttaaggaaataatcttattttagtctttaatccactaatgtcattgcatatgtgtggaggtagtaaaatcgattagttcactattcaatcagttttatgagtcagtttttattttaattaaataaattattaaaatatttacaaaattaaaaatggttaaagaaataaaaatctatttactcaaattcaatttaaaattggttgaatcaattcacgatctaattaattagtccaatctaatctaattctaaaaatcctgacttcatatcatcaaatcatcacatttggagataactatgatttgtgagataactatgatttgaacctaagcaattcaagagtacgatcacaaatattcggtcatagagtcgtgccttccgattcaaaaatcttatgatgagtaccggtttctaatatcggtgtcttattttaatccgaaactcgagtaacaaaccacaacatattggtaattgatgagttaaattaatttaaattaatgacataagacataggacgtacctcaacaagctctggat

SEQ ID NO: 11006 - DNA, 676 bp, Gossypium hirsutum
ttgagttgtctcgagcttaaatcgtttcaaatccaagttaatataaattaaatgaatttagattgctaacttattatgataacataagtaggatcaaatttgagttcagatttatctatgggtgaaaatcaaaactcgctgcaagttgagcttagattaccagaaaagaagggaaaaacatcagcaaaagacgcgagaatagccattcctcgtaccaactaacaagtattttgcacataacaaccttattatatatttccctgtttatcccaaacaatccaaaagctaaaccacgatgcttcaatctctgactctcattcccaaattggcgaagaacccacctctcaaagctctctccctcttcaactcttcaatcctccaaggtcttcaacacacccctgaatccatatccttcactctatacattcttctttcttccaacttgcgctttcattctcagtcccttctcctccaaatcatctctggtagaatctcctcccctttcttcactccttcgtctctattccactatttaactcaacactgttttagtcccaactcgatgaatcaaatccgtctgtatgaatccattatcaacgcccatgttcaatcccagttacctgatcaagccatttattatttcaatcaaatggtagacaaaaactttgtggttgga

SEQ ID NO: 11007 - DNA, 415 bp, Gossypium hirsutum
ctcctccagttttcagatacataaggcttagagactcgagtttgggaaaaccgtgtgcagagcaaaacatttcttttcctttgaaagctttgtcatagaattcaagaacccttaagtcaggcagcttctctagtgttggcattggatcttcctcaagcttgcaccttaccaactttatgtaaacgagatttgaagacaagtagtggtactctggtaacttactgatctccacagctaatctcaatttatgtaggttaccacagcacgaaaggaggtgggtcaaatgccttgtatctatttcattgctgataatagacaaggaatgaagatatttagcttggatgatgggtggattcttgtccaactcattaaaattttcaatcttgaagggcccattaatctccaactctctaaa

SEQ ID NO: 11008 - DNA, 639 bp, Gossypium hirsutum
gacccttatcccaattttgcttttaatatggcctactcaattatcacctattattaaatcccattacaatattcttcttcaatgtgcaaactctttatatttttaatgttttccgtattccaaaatttactcaaaacttcttttaattaaatatcactcgactcagcatttttataaatttaatttctctttatatttttcgaatttaattttccaaatcccgtttatatataaaagatttgcccaatcatccaatcttttagagttttttacaggtacctttaaacccccaaaaaagggactgtttatacatttattcttattggcattttttgaaacaaaagtaacttttacaaaaatagaattacaaaaatggggaaaatatagttgatttaataaagacaaagaagggcggatccaagtataacataatgggccacaacaagtcgtccgattaaactataagccttccgggaagtgaggttttatttgtaaggcttcattgcgcgcgtgtttttcctttaaaagcgtgccgcgttctggcgggtccttctttgctcctctttttacccttcttttccttttatatcaacttccaattatcccgctgtgcccatgttgactttcctttactgcttg

SEQ ID NO: 11009 - DNA, 560 bp, Gossypium hirsutum
  misc_feature (58)..(61): n is a, c, g, or t
ttaacaccaattcagtacttgtattttctagcattacttgtgccattttccttatatnnnntaaggagatgaaagccaattagatatagcaagactaagagtacaaattttgggaaaataaatattggcagtaagaaatcttgaagcagagaaataaagggtaatagtactaaacacttccaaattttcacatattttctctactttttcccaatcttcactgtttggtggattcttataaagattatctcggctattcaaaataacaaacatttccttatacttcatagcaactgtaagcagttcaaaagtacaattccaccgagtcttgcaatcaagtaccaattttttttttggtatttaggaactaattacctagctacttgttcaaacttttgaatccttttatcaaaagcaacttaaaacacaacactatccctaattatttcgacaccatcagctacaacaacatttaacccattttaaataattagatttaatatatgagcacaacaacacatacgaaaaactgatcgtgcaaaaaaagggaaccataaagg

SEQ ID NO: 11010 - DNA, 657 bp, Gossypium hirsutum
gtgaccctctgatgaaatagggggcacttccagacatacaccaagattagagactcgtagatatcccaatctagcacaaacagaccttgccattctctcatctatgtttttaaagaagtagaccatagtcttttgagcattgactccatgttaaaaaaaaggccaaatctatctagcaaacttctaaccctattagcttggtccatgtcagccctaccgaataagaccaaattgtctgaaaaacagaagaagagatgagactattgaggcacattccttgctaacaaaatcgattttcatttatttgctgctacaatatcatgaatactctgttctagtttttataaaacaaacagatatagaaaaagcaagcaaccatgacaagtgcctctccaagggtctaaattctgcagtcatgcattacaacataaaacatttttaaaggcacttaaatttggacactttagaaggtattaatttctaatgtgtgattttaagtctttcaacttttttaattgattttttaaatattgtaattagtgtaaaataattaaaatatattaatttttaaaaaattcaaatattataataaaaattttcaaataataattaaaatatttttaacttacttgtaaagctaacgtcgataaaggcaaa

SEQ ID NO: 11011 - DNA, 575 bp, Gossypium hirsutum
cgtcaaagacgaagcatttgagattctctatattgaccattttgtataataaatcaaagttttgcatgattccacccaaaacaatttaaaattaaataaataaatactcatctattttctttttaattatcatctttgtttaatggaatcatctattttcaataaggctgtccgtttcattgacttgaatttggctcggaattggactaatttatcataataactttatcacatcaaaactatgggaatcaataatattcaaaccttagaagccatatattcataatcaaatgttttgttttcttttgttttatggtaggtgatctttcgaacaaatagttttttcgggtttatttatgaatttcatctttatacttcgtgaagtttggaaagttggcttttctactttaatttataataaattcatatttgtactttacgaaaattgagaagttagtccaattaggtaacatttttaatcgttgtcgacctaaaagtctatagttttactagtttatgtgacacttcatactcgaccaaattatcgatccaaatataggatatcacatttgttg

SEQ ID NO: 11012 - DNA, 612 bp, Gossypium hirsutum
acaattgatgggataatttgtttaaattaaaatggaaaaattaagataaatatattgagaattctgaaggatgtttagaattttgttttttttttaaaaaaaaaagtcaaaacccaaatttgtccttttaacttcaatcttcggtaggaaaaaagacaagaaacataaatgagtggccaaaagaaacagtaaattaaagtcttcactgttctgttttggctagcttaaaggcttaaaagtaagagatttttttattaacaaaattatatgcccgaaaataatttcttattaaatccaaataaaagtgtaacttaatatatttaattcggttttttatatgtaattttgtttttattatttaaatatattaaaatccgtaataacatgaaaaacataggatgaagaaaataattataaaagaagtacgtttcattaataaaacagtaagtacagaatgctaattacagattacatatgattattatagatttgaaaagaaatgaaagagagacaaagattcacgatgttgactgaaaagacaaagaaattaaacccacattattagacattaatttttttttaaagttattgttttgcatgggttaacctcca

SEQ ID NO: 11013 - DNA, 656 bp, Gossypium hirsutum
taaccatcctcaacaacctgcttatgttattgtagaccctccttttgccaataagaatgaagcttggaatgtaagtaacccttttccaactttttccttttttggcttctctttatttaggtaaaagtatagtagaaatcattgtactaagagtcaaattacattttacctcctttatttaaaaaatgtacaaactagcctatgtacatttgattaaagagcaaattagttcttttagttaaaaatttcatctatacgtactattaaaaacaagtgtgactaatgaaataattagacaatgacacatagtgtgtcacgtgtacatcatactgacagacagaggccagcttttaaccataaaaatagatgaaaactttcatagaaagactaatttactctttgatctaacctacaagaactaatttacccatttttttagtaaagggagcaaaattcaatctaactcctactataggatactctcacctttatttacctttttgttttgttatttttatttaatgttattgatttatcattaagcagatgaacaagtaaagaaaagggtgttgccaaattttcatcattcacaaatgaaagcagagagctcaccatgacaaaacacaaccaagctatgtatcctttgatgctcatgc

SEQ ID NO: 11014 - DNA, 692 bp, Gossypium hirsutum
catcaccgccagaacattcttagatatttcgaggacactgctccccttataagcagtcagaagattagttcctgcaataaaacaacgaaagatgtgatcagcgattcatgtttacgacagaacatttgaagaacttttagtcttttcaacaacaacctgaaaaataagttaatatcgtttcaggtcattcctcgtttgcctttggtggcgttccacaggttcagtaaaaattcaacaccctcttgcaggcttgcccttcttccttctccatagttccacaattcagaagttgcgtaccgtccacttggattgtattcgtttatttcatttataacggaagtgaccgacttatacacttcattgcccatctcatccttcaaatctttcagcttttcatcttcattatcaatcacttcctgaaccagcattatcaaactttgagcacaccatttcgtacagacagaaaataaactgaacaaggaacaagcaagatgagtttcacaagaaaacacctaacaatacggtccggaaaggttttatgattatgaaagtttttatgttaggcaggcttctgccgcaatctaattcatttttctacaacagaggaagagttatatttgctccgactcttagtatttcttaaagcaccctatctaacacctatgtctgaagcatattgagacacggggtac

SEQ ID NO: 11015 - DNA, 680 bp, Gossypium hirsutum
tttctttaagctttgtgttaaaacacgggggcgcctggcaataaccgaggtggattcccattcccttcacaagaaaatccattatcctcactgttttctcctcagacactatcataaacgaaggattctttcgaaaaacttctattacctcttttttcagaccaacccactttttatacacatctagttttccatcccactaagatttaggcatgaaattcaagacagtgacggctaatacgaatgacatgctcggaggattaaagcccatttccttcactttctccactgtcttctcgaaatcggtcggtcttttcaagaatgttttagatgttgaatacagtactttgacgatattgggttcaggcactccataattgttaagacggaatttagtctgctttgatagcacgaaatcatctgctaatttagcaagaaaatttctagggttccttcttttgccgacaacaatcttgttcacttttaaaacaaattgattgattacaaatcaagaataagaagaagcatggtcttatttgtttttaagacgaagtaggtgttaagaaagcaatagtcacgctaagagcaattcataaatggagaaagaccaaccctcaaaattcatataaatatataaataaatgaaatgtataaaacattactaaagacgccaaggaaga

SEQ ID NO: 11016 - DNA, 753 bp, Gossypium hirsutum
  misc_feature (638)..(638): n is a, c, g, or t
  misc_feature (643)..(681): n is a, c, g, or t
  misc_feature (683)..(695): n is a, c, g, or t
  misc_feature (697)..(713): n is a, c, g, or t
  misc_feature (715)..(717): n is a, c, g, or t
  misc_feature (719)..(721): n is a, c, g, or t
  misc_feature (723)..(725): n is a, c, g, or t
  misc_feature (728)..(729): n is a, c, g, or t
  misc_feature (731)..(732): n is a, c, g, or t
  misc_feature (734)..(739): n is a, c, g, or t
  misc_feature (743)..(743): n is a, c, g, or t
  misc_feature (745)..(745): n is a, c, g, or t
ttgttgttaccatgtgcaggaatttgggctgattgacaagaaagagttggctccactccaagagctcatagattccatcatagtcccctactaaatatatatatacacggggggttggagaatggagatcctgataaagagttttattttaggggttgttccaaaagtagtaaagtttgttttattagtatgtgacctgaaaaatttaagtgtctatattctctatgttataaatgcaaatccatatgccatattccttggatttaaaatattgcaagagtatgcctgttggtttttcttttcctcttcattttggaagcctagccctaaatcaagcattttttaaaagctaacagcttttgggtaattgaccctaaaatattatttttatgattaaagtgttttttatttaattatgattttaaatattataaaattttaattatatattgaaaataaaaattaagttcataactcgtcgaactacgaagtaatcacagccctagtttccataaatgattgcgatttgttatttggtggaaataatttcaatggaaagatacaagattatgctgttaaattgcttttgcttgatcatagctacaaagtactacttgtttgccataaaggatcacttncttcnnnnnnnnnnnnnnnnnnnnnnnnnnnnnnnnnnnnnnntnnnnnnnnnnnnncnnnnnnnnnnnnnnnnntnnngnnntnnnttnntnncnnnnnnttgngnttttcttt

SEQ ID NO: 11017 - DNA, 668 bp, Gossypium hirsutum
ggccgtagctaattaagacaacttcagatttaatcttagaagtcgctggtggattttctttggttaaggccaggcgaagtctctaaatctctaaaaacctttaacaagtcaacataaagataattaaaggtaaatttcaatcatggacattttctaattgaataatttactagggataggaagtcacttcgtaagtgatttttcagccttgctgctaatttgatttcttagcttaatttcaggttacaaaggacttgtgcttggtggattaaggcgtcaataaataagcattattattctcttgatattttctcctcagcagttttaattagagccaaagtttatttattacttgagactatttttagcaatcgtaaaacataatctccccccatttttttcctttcttttgtttcgcattttttttacattactttaattttaaatcgcttcgaatagatttgttgcaagcttcctcgtgggacgattccctatttaccctatattacaagttaatgtaggttaagtatatgggtttaatttggcagacgtaaacgacagctaccaaattttggcgctgttaccggagaagcgacgtagtcaaatctatttgattttcagaacttattttgttttattgtttttttctttgcaggtagattagaccc

SEQ ID NO: 11018 - DNA, 411 bp, Gossypium hirsutum
ttgctttttgtcatcataaaatatgatctcaatatgaagaacctagatcaggttgtattttcctaggatctttccaagttctttgccttaggaagtaagttgattcttggatataaatgagctccacttgaagcatggatcttgttgatcaaaaccacaaaaagaccttacaattttggatgagataggaaatatgatcggaaaactatgtattgtatgaaatacaataatactttgatagatacgatgtcatggtatggaaaataaatatcgggtttttattcttaggaccattacaagttcttcaccttaggaaggaagttcattgaatctccaagcattgatcttgttggtagaaattgagcctgtatacaaatagacttgataacttcggacactattgtaaacgca

SEQ ID NO: 11019 - DNA, 568 bp, Gossypium hirsutum
acgctacgctcatactctgtagcgacaatcccagaagcataccggctcagtctcagaaactcagactcatactcagccactgacttactcccttggaccaggttcagaaattctttccggcgagcgtccacgtaactagccccaacatactttcctttgaaggctgtcttaaacagctcccaagtcacactgtcagcaggagttccatctctcaccgtgagccaccactgataagcctcatccctgagtaacgatatggctcccttcagcttctgctccacagagcagtccagatcatccataatccgctctgtggcttctaaccaatactcagccacattcggagctacaccagatacgcccctaaatatctctgctccattggcccggagccgctcaaaaatagacccccgaattttgtttcccgtacttgccccagcaaccctttccaaaactcggagcattgcctgggacagagcatcgtccccggcacctcgatcatgagactctacctccgttgccgggggtaccggggcatctgctgccggcacatgtcctgaaaaaaaaa

SEQ ID NO: 11020 - DNA, 623 bp, Gossypium hirsutum
ttttgccccctctgctaaaaatgaacaaattagtccctgtatattagatcaaagagcaaattgatcttttttgttaaaaattttatccatttacattgttaaaaattgacgcggctgacaaaataagcaaaaattgatacatgccgtgtcatgtgcatcttatgttgatatagaaggactaatttttaacagtggaaataaatgaaaatttttaaacttatagaaactaatttaccatcttctgagtaaatatggaacaaaatgcaattagacttttagtacatagccaccagtactcttaccaataataaataagaacctaaaagcttgcaaatcacatccacatggaagtcaaggttttaaaggaagggacttgaaactttgttcacggttaaaggttttcacttccagcaaaaaaaataaaggcaagctagtatgtatgtatatatatatatagttctaaaagcaaatcaagtttggaacttggaattaaatcaattatattcatatgctaaattaagcacgcaattgaaaaacaatgaaatttcagaggacgggatagagatataatgaaacgttaccagcactgcaagaagtgggtggatctttctgcacatcctttg

SEQ ID NO: 11021 - DNA, 634 bp, Gossypium hirsutum
aaaggttgggcctccaactttcacctcaacagaaacaaatttatctgggagatgcgtaatctaaagggtggatttgggtttccgacccaatggtctattcttctctatttggtttgtgcccatagacaatagctaggcaatgagattgttgaggatcaactcaatcgcttaaagttgtaccgctctattatgttggaaagccttattactgttagaaacatcttttatttctgtctagagaaccataacccaaatagttcatgcccttaaattttggtgttgagactatctctcgggtcacacaccctttagataagctgttgccataaaatgctattgatgacttagttgctattttggttgggaggaaagaagaacctccaaatttattttatttttattgttggcaacgtgtacgcttttggttcactccaccaacagtggttgttggggagtcctttaaacattgattttcttcttcgtatgtctgatatctaacttttcctttgcaggttctgcccaattatccactccgtctcagacctcgagtagtatggtcgtggatgccattattgagagaacataaaagtttatcgctaatgctgatgtaagggtgcatgtgagtggtagtagt

SEQ ID NO: 11022 - DNA, 666 bp, Gossypium hirsutum
atgttgatcagcactaggtttagttccggactgactcaaccggagaaaccaaccaaagtggatttaaattcggctgttttccctggaggtccacctttacctccaaaagaaccgaaattgatcagcttcgttgacacgaacgagacggtaaggggtccagaggacttaccaggatattgggtggttaccggagctaaactttgtgtagaaggtggcaaaatctcaatcaaagccaagtattcattgttaacaatattgtctgaagatagtatgatgttaatgtgagagaaaccataaaagtactacggaaacacttagactaaaagtcagattgtattttgctccctttacttaaaaaatgggcaattagtccttgtacaatgatcagtttgctctttaatttaacgtgtagagattaatttacctattttttaagtagagggggcaaaatgcaatccgactcttattacaagggcctccatgatacttttaccaagagaaaccatataattcatatgcattatttgtgccattgtaaaaatattaccatttgcttcatttattccaaattataaggtcattcttgtcaattgtgttttatacagagttagtgaatcgaaaaggttgggccgggttcgagttcaagtcaagtctgggatattcgag

SEQ ID NO: 11023 - DNA, 653 bp, Gossypium hirsutum
tacagagccaaagcctcagcaaaaatgaggataagaatcattccaacaaaaagctttggctgttgggcattggctctgcaaataaatgagtagagaaactaaatcaagcaaggcatgttctcacaatcgcaatgaatctcgaaaccgaagacaaagcaaaaacctattgctataaagataacgcacataaatatacaaggaaacaaccaagaggaaagatcaatgattatcagtagtaaatggatgaaacccacaaatctttataacttctaaataccttagttgaatcgaattaaactacattttgtgaaacaagtcaatttccagctaaactaggtcaatgagcatatgatcacacttattatacaaatgtacttccatcaattgtagcaaaaccctaaaactaaatccctttaaaaaatttgtcccaacatacaacactaattttctcaaagagttaatatactatttggcactagagtttggttcaatgttcaatttggtacctgaatttagctttaatgttcaatttggtacctaagttttttcaaactgatacttaagttttcttttgtcctagttaagtacctaagtttggcttcaatgttaaatttggtacctgaactttttctcccaagtaagtacctatgtgg

SEQ ID NO: 11024 - DNA, 647 bp, Gossypium hirsutum
gttatatgtgttggcatgtaattaatcggtgaaatttgatttttttattttttattttttgcttcgaaagtgtcaagataaattgcagccattagaccctatcgtaacaaatattattaaattaattaaggattaggatattaaacaatgaaaaagattacgtgtccaacatacatatatttaagacgaatatcaaacttgaatatgtgtccaacatacatatatttatttatttttaaaatatttatatactaagatatatagtatacatcatggtcatttaattaagggaaaagaaagattatcagaaaaattaaggttagtcagtttacttttaatttgatcaattttaatatgtatatttttttgaatttgtcaacttcaatttctgtatttttttttaattttgaaattttagttttaatccaaactgtagcaattaaatttatttggataaattcaattactagtcttatactatgagtatagttatagatttagtctattttctccaattagatcattttaagtccctctacttttgaattttgaaattttagtctccacatgaatgaaagtcgttaatccattaagtggaattttggtgagtaatatgtcaaaataacaagttgacatggcattacaca

SEQ ID NO: 11025 - DNA, 673 bp, Gossypium hirsutum
  misc_feature (667)..(668): n is a, c, g, or t
  misc_feature (670)..(670): n is a, c, g, or t
cgtaggttcactgaatgttgcatatatcttatactatcctcacctttcatttggaactcattttttttatctgctatcttctagttaattcatcgcaacaatatcaaaatttgcaataattctttttcatcttcaggtcgatagaaccggaaagatacctatgttgaggttccgagatcgtgattcatatgcaagcaataaaactaaggaatatgatgatatagcaatgaagtatttgtcctacgtgctcttcctccttgttgcaggcttttctatttactcccttatgtatgagcgccataagagctggtattcttgggttctctcttcactcacaagctgtgtctacatgttcggtaagccatttgtcctctcctgttcctttatttgataactttgttggtgacctactgacaactacaacttattgacattgtgaaagtttgatttcattaacatcggagaagaaaataacagttacttctaaaacgtttctttccttggggtcttttattgttgtcatctgctctctttttttaacctttatgcattggtaaagcttttcagccttggtccttatttcattttcccataagtttttccaactagtataagaactctggactatttatacaaacaacattgatattctttcctattgtgacanngnatg

SEQ ID NO: 11026 - DNA, 690 bp, Gossypium hirsutum
tattatgatgtcagcgagttgtgtcaaaacatgatgcgaccaggttcgcatcataccttccctcttgaaaatgatttgtcctcaaatcgggccatttgctcaagaaaaatctttcctcgtcacaaacccctttgttcaagttccgaacaaaatcatttctaaaacactgagaaccacaaatggtttgagaagaaaacgggttatttccacgccctctctctttaggagggaaccagtccaaagcgtcacctacataagaatgaaatagattagtgacactttgaattaaaaactctaaagaaccctttgaaatcttattcaagaattgagcatataaaccaatgacagaatcaaaaatggaaaatcagccttactttttcattataaatcaaaaattacaatgtcgtcaccaaaccggaatcacaaagcattcaaaacttaaccatattctgattctcaaatccctccaaataaagataaagaacaatggtctccgaggtaaaaaaaggtgttctcttaccgcttcaatttgactcaaaaatcctttaaccagtatcgtaggaaaaacatgaagcaatttgaaattattaccaaacaaatcatgctcgaatcttaatccacaattcaaaataatttccaaaatcaaaaacttgatcttaactttgcaagccaaacaacattcacagactc

SEQ ID NO: 11027 - DNA, 529 bp, Gossypium hirsutum
  misc_feature (518)..(519): n is a, c, g, or t
  misc_feature (522)..(525): n is a, c, g, or t
cagagcaatagacaccctcagttcatctctcagaccatcctcgaagcgtacgctacactcatactctgtagcgacaatcccagaagcataccggctcagtctcaggaactcagactcaaactcagccactgacttactcccttggaccaggttcagaaattctttccggcaagcgtccacataactagccccaacatactttcttttgaaggctatcttaaacagatccaagtcacactgttagcaggagttccatctctcaccgtgagccaccactgataatcctcatccctgagtaacgatatggctcccttcagcttctgctccacatagcagtccaaattatccataatccgctctatggcttctaaccaatactcagccacattcgaagctacactagatatgcccctaaatatatcttctccattggcctagagccgctcagaaatagacccccaaaattcatttcccgtacttgccccagcaaccctttccaaaaaaggagatcgtataannaannnncagt

SEQ ID NO: 11028 - DNA, 666 bp, Gossypium hirsutum
aaatacactgccctgctacactaatacatgaatggggtgacatgctggatcagaacaggtttcaacatcttgtccataagaactaagcagcaaacaactctcccactgtgaacattgaacaatccttcaaaattaaatgaataaaatgaaacattacaagctgacagagaagtgagtattctaacaacacttcataaactcatccagcacttcatgaaatgacagtttccagttcaccaaattcagggtactgaatattttataatgccaatgattcgagatatgaaaccataaatttacaaagacatcatactatataaatcagcaagaatcagcagataatgttaccaatagcaattattcttactatatagacatgaacattatcgagttgagggagtaattgagagcggaaatgcaacaaaagagaagtaaactagagatggaaggtaaaagaaaagccaatgtttacacctttcaatgagaatgcagtgtcttcatactaggcaagaaaccttagatacagactctaggaataccagtaaaataattacatcagtaatacaagctagtttaataaaatagacaaaggcaaagtatagttgcctgaattacgtataaatgtgcgacttaaaaatgccagccattaaacgcccatatctctga

SEQ ID NO: 11029 - DNA, 692 bp, Gossypium hirsutum
ttcagttggtaaagacgaaggctttaagttcgtgacccatcatgtacaattatatgtacaagttttagtttcatcatgtgtagacttgattatgggctagggcggataaatgctaaaatttaggcccattttttagattcaactcgaaaaatgtgtttaaaattttgttcaagcctgacctagataaaatatgctaaactcaagcccaactcagcccgcccatattaaattttttatataaaaacaaatttaaaaaatattatacatcaaatacactcaaaacattaaaataaatgtttcccaacaaattgaaaatgcattaaaaaagtatttatacttaaataacatataattgcaagtttgcaagcaaatgcctctaaaatagtaacaaaattaacaattaaataagagttatataatattcaaacaataacaacaaaatagtaacaatataataacaaaatggcagcgaaacaacagcaaggaaaaaattaagcaaatttaggtttggcccattccaaaaaaaatcttatccgatgcatgacccgtttagaaaaaagactttattttttgtccaagcccattattaggcctatatttttattcaaatcctgtcacttttcgagcgaaccttcgagattgagcaggtggcccgacccatgatcaggtctaatcataagtggttgcaatgg

SEQ ID NO: 11030 - DNA, 601 bp, Gossypium hirsutum
ccacaaagggcgctttgagttgaaaacccagaaaagggaaactcaaattgtgatcaaggatggggcatgttgcggccttgtttttaccggaattaacaagaagggggaacattacatcttggggtatcgacgaaatacttcagacctcctaaacgcacatctggctcccaatggttttcgagccgtccgaatagtgaagctcacactgcgatatctggggcacctattttccatcttatacatttttttgtaccttaacaaaatttattatcatgataaactttttacctcgagcttcgctctcaataaagtttcaccttgtccatcttggcaatatttttcaagcatttcctattattaatagactaataacacattcataaaaggtgtcctgtatattactctagaagtttctaagtagtgcaagaacccgaaacaggtcaattattcagaacttaccaaccttaagggttagagttacttgagaagtaaaaagttttggttaagactattgttttagatagttgttaaagaaatcagttgaacaagaagaaatacgtcaatgacaagcggggagcaataatagcctaaacataaaaat

SEQ ID NO: 11031 - DNA, 410 bp, Gossypium hirsutum
acagaatttgtgtaatggccagatcctcaccttttgacaaacttctgatggtacaatgtctaaagcagaatggtcatgttgtagcagtcaccggggacggcaccaatgatgcaccagctttaaaggaagcagatattggactttcgatgggaatccaaggaacagaagttgccaaggaaagctcagacattatcattttggatgataactttacttctgtggtgactgttttaaggtggggtaggtgtgtcttcaacaacattcagaaattcattcagtttcagcttacagtgaatatagcagcactagtcatcaacttcattgctgcaatatcttctggtgaagtcccattgacagcagtccaactattgtgggtgaacttaataatggatacctttgggtctttaact

SEQ ID NO: 11032 - DNA, 520 bp, Gossypium hirsutum
  misc_feature (64)..(66): n is a, c, g, or t
tccaccattcatactcatagaatttttcatttacaattgctcatgtcgtttctctaaataattnnncacatggaataatacaaaacgtatgaactactacctttaacaattatttgaactagattatattcaaataaccataaaattcattggtttattaacgcaaatttgcatattagatatgttttaatcaaatatattatttaattataaaacctactatagcaacataaataaatcagttaatattcattttcaagaacaaatgagatgcttaaaacaatatgtaacccatgtaatcaaaacttaaaaagaagaccatctcaaatatttaaaccatatatcaagttgatttaatatttaaagatctaccttttttttttctgcgttgagtcttgacaattttatcaaaaagaaatcaaattaaactctagaagaaaactttgaatccaatcaaaatctattaatagcaaactttgaaagggaatcttattttccgggggtacaaaaggaacaaaac

SEQ ID NO: 11033 - DNA, 691 bp, Gossypium hirsutum
ctaaacctaagtcgggggaaaaccaagcaaatcgattaaatcaactagtcgcaaattttgtaatctgaggtaagttgtatgtaaataatacaactaaaatgttaatgtatgtgttaatttgtacttgaatttaatatagcatgaattgcctgattttggaattaggaaagcatgatggtaatagagatagtagagttcacgtttgaaactaggaaataaattagatattcatgccatgacctttgggtcactcgtgtgagctagtgtaagacatgtctgggacatggcatccatattgagacgagtgctagtgtaagacatgtttgggacatgcatcagcttcgagacgtaagctagtgtaagacatgtctggaacatgcatcggctacgagatgtgtcagtgtaagaccatgtctgggacatggcatcggcacagatatactagacttgtgtaagaccatgtatgaacatggcgtatgtctaaccccatatttgaggctaaatgagtatccgataatgtttcatatggttcaacagtgaaaatatgatttaaagttaactaaaacagtaaccgtgatctgagtggtacaggtacctatatggtatgtatgaaatgtgagctcaatacatgttatatgaggtgaaatgaatattgatgagtaagttttgcttatgccacttgtgtattgtg

SEQ ID NO: 11034 - DNA, 499 bp, Gossypium hirsutum
gggtttaaacatttaaggcctgagcccgactcgactcgacctattttaagtttacaatactttatattatttttttatatatgatgtaatttagaacacattaaaaaataattttatattaaatatataatactactctaatgtaaacattaaaataatgttaaatggctatataaaaatttcaataaataaaaaatataaaaaatttattaaatattaaaatgaaataaatattttttaaaaaatatattaaaaataatatttgtgggcttaaaatggacttggattaatcttttgcaaatatgggtgagttttaataaaattttatgcccaggtttcgtgtctagctaaactttgataagcataaagtatattaatatcatgtttagatcaggcccgacctgacctctgaacacctctactaagaggtattaaaggaaataatctagtctatatactattaaaaaaatggctaaatgctcaaattaggacgtataaa

SEQ ID NO: 11035 - DNA, 655 bp, Gossypium hirsutum
aataaccaactaggtgggaaaatgccacccagtttgggatatctggtctccctccaaagggtttcacttgaaaacaagcttgaaggggtaattccttctagtttagataatctagaagctttgatagagtcgtatcttagcggcaacaagctatcttgagaacaagtcacttgaaaatacaggaactggatggctgagcagagctgggaggcaacggctaagtcgaacaacttaggactgtgctggcccagcgatggcggagtgagccggaacccaaaccaagaaaataataaaatgttttattttgattaataataataattattaaacaaattatattttaatcctttaaattttaaaagaaagtagtatgtaatggtaaattatgtcaatccacacataaaaaaagaaaatatcatgtcaaatttctgttaaattttttaacagaagtagtcaaaatgaacagattatgtaacatacatgtctaaattgcaaactttttattttagatacctaaaatgaaaatttttgataatacccaaaaatatatacatgtatatgataaataattaaaaataaaaagaattgttttaccatatgaaatatttaaaaatttaaattaatttagaccgtccaccttgcccaaatttgaaag

SEQ ID NO: 11036 - DNA, 638 bp, Gossypium hirsutum
ctggttcctgtactaagtctttatttgaatccgattctattaaagtaaactttaatctcaactctaaaaagaaaaaaataagagtaaattgtggctttattacaacactctactttgaagaatttgtaagtcatcttttacaattatttatttttaaaaataaaattataaagagaaaacaaaaaaatgactggctttattagaataccaatttattagtagtatggttttctattcatgttttacattggattgattagtttttaggtcaaattataacgttaaaatttgtaggttaaaatattctaaatttgtatatctaggaaataagtacttatactttttaaatttaaaaaatcatattaaaatttttctattaaatctttttccttcccaaattggctgtcaactttattcctcttcttaaaatataaaatttctatttaggtccttaaattttttaaaaaattttaacttagtaaagataaaattatactttggccccctaaaattttaaaattttaatttaatcatttaaaaattataaagatatagactataaaaattttaaattttattcagctcctaaaaaattgttctgccttcgcccctgttcgaaagctcaatttaaaaaaacc

SEQ ID NO: 11037 - DNA, 605 bp, Gossypium hirsutum
  misc_feature (61)..(62): n is a, c, g, or t
  misc_feature (64)..(64): n is a, c, g, or t
  misc_feature (66)..(67): n is a, c, g, or t
attaaattttcttttagtgtgatccaaccctatatctaaatacttctatagatcacatacnntntnnactttaaccatattcatcaattaaggaaaggaaatacaattataacaatttaggaaaggaaatacaattacagcgattttgattatccttttgttttttctgccgaaggatgacaagcatgatatctttcaaaacgtgtggtgcatatgcccgtatggcatgctcaatgagaaaatgattaaagaagaaactaaaagatttaagcaattctatagttttaatatgtaaacccttcaattcaatttaggtgcatatccctcttggccattatgactgcgatttggtgaggttgacatggatgattgacagatttattttaggacattgattgaaataacgatcattccttgtcagcttaagctcaaacatgttctccatcaatgttttcactttgtttgttctacaattaggagaagtactttaatattttatttttatggtctttaatttatcacttcaccttaaagtactttctcttctttctttcttttttttttccccatttttcccatttttaggtccataaaatttggggggg

SEQ ID NO: 11038 - DNA, 640 bp, Gossypium hirsutum
  misc_feature (585)..(586): n is a, c, g, or t
  misc_feature (588)..(589): n is a, c, g, or t
  misc_feature (629)..(631): n is a, c, g, or t
  misc_feature (633)..(633): n is a, c, g, or t
ccaagatagatttgagatccggatactatcagttgcgagttaaagagtcagatgtcctgaagactgctttccggactaggtatggtcattatgagttccttgtgatgccatttggcttaactaatgctcctgccattttcatggacttaatgaaccgaattttcagaccgtacttggataagtttgtagttgtgttcattgatgatatcttgatttattctcatgatgagactgagcatgcagagcatttgagaacagttttacagattttgagagataatcagttgtatgccaagttcagcaaaagtgagttctggttacgagaagttggttttcttggacatattgtctcaggtgaaggtatcaaggttgatccgagcaagatttcagccattgttgattggaagcctcctagaaatgtatcagaagttagaagttttcttggtcttgccggatattatagacgatttgtagagggattttccatgatagctaccccgctgacaagattgctgcgaaaggatgtcaagtttgaatggactgagaagtgtcaacagagttttgacaagttaaaagcattgttgnntnnagctcctgttttagtacaaccagaaccaggtaaggagttnnnantacagga

SEQ ID NO: 11039 - DNA, 503 bp, Gossypium hirsutum
ttggacaggacaggcttatgatcacatactaggtttatggcattatcatgagaaagaaggggatgttggtcatatttatagacatgatacaagttagctactgattgaaaacctgactttgttgaccatgagttggctttatcatagaaaaatgaattctctgtttcaaaaaaccaagagcttggcgataacctggaattggctgtggtagacaaccaggagaagggaactgattttgtccgagatttgcagcaccaaattgtatttagtttccctcttgtccttcgtactcaaaattcaatgataagttgcactacttctaacagggtggtagagtttgcaatagtccttagttcacatgggaaagaggcttaacgatggcaaccaacgtttgtgggagactagaccaacgtgtggtgaacttgaactggtggtctctttttgcacgcttctcaatccagcaccaggaatacccccgtttggatcactacacattaaaaaaa

SEQ ID NO: 11040 - DNA, 556 bp, Gossypium hirsutum
ttgtttggatgacgtccatatcacaatttgtggtcctttttctttcattacaatttggaataaacaaagtacaaattatattttatataatgagtggctagtttttttttaaagaaatgtcatacataaaataaaaagttagttttataaaaaaaaatagcatacatatagatacttttattctagttatttttattattattataacttcatttaatcaaatgttaaaaagaattaaattgaatttttaattttagagaggggttataaagtaaattttctctttaattaagggagaccaaggttcttacttgccccttttgacttgattacacacacatatctagcttgattacataagagaagtgttaggatttttgtgttcttagtgtagtaatttcatcatattcaataaattactgaaaacatgtcctctcatggtaatgtgtcgaaagttggtatgttgggtacatgagttatgcatgatatgctttcactcacaataatagaatcatatgtaacaccccatgcccgaccctattgtcgagttcgagct

SEQ ID NO: 11041 - DNA, 635 bp, Gossypium hirsutum
aatgatgtggcaacgctagtcaattgcacggcaccacatgaattgcttttacattttctaaaaaatacaaaagttaaattaaagttgattttctttgtttcacttattttacattttctcctaaatttctttcaacacatcgtttgattttgattcatttgggtatgccttgttttcttctttcttctctacttcaccaggctttcattcttgcaaataaattgaaccaacctataagcacaagggaaaaaaaaatacatatttgattgtgattgtccataaattttgaagttgggttgtttgtatgggttgatttcgtttcgtcacattttttcaacttttcaccaataagtatataatatgggatatccaagatggatcgagaaatgcatgatctgcctactttggataccaagatgaattctattttttaatttaactttataaattatgtgatattcaagatgatttcggaaatattgctcaacaaatgaagctcttattactttatatcaaatttacataaaccgaattattttatatctattactgatcctctgatagaagaatgtttatgccttagaattcagacaaaaaattctgaaattaatgatttaacagaagatctagcaata

SEQ ID NO: 11042 - DNA, 419 bp, Gossypium hirsutum
  misc_feature (61)..(62): n is a, c, g, or t
ttttactagttattttaaggttttattcaattatatcccttctttttatatgtcgaatccnnttacaccatatgccctcattgaccgttgacttggtcgatgatgtggattgggtaatgactgtattggttaataggatcaatttaaaaaaaaattggtaaaaaagtattaaaaatcgtaaaaatatttaacaatatataaattgtacaaaatatataacttgaaattgattaataataataacacatgaaatatatatgatatagatatatagttgatggaagtaataaactgtgcataataaaattaaaatgtgtaaaagtattaaaataaaagttttgctaagtgataaattaaagattttattaatgtaattggttcgggttcaatgtgctcaaatccacatcctcctacacaaa

SEQ ID NO: 11043 - DNA, 224 bp, Gossypium hirsutum
atattttattttattattagttcctatattttataaatgttgtgaatttagtttctatatcttaatttgatcatttttagtctctatatttttaaattttaaaatttcagtcctcaccaaacaataacggttaaatttattaagttaaattctattatcaaatgtctaatgtcgtgttagctcgttattcctgccaatcttaaaaattcaaaattcaaaaaaaa

SEQ ID NO: 11044 - DNA, 642 bp, Gossypium hirsutum
caggatgggcagttcttttttgatgggtatgaaatagttttagtattttcttgttccaatcttttaaaattgctatttagcttttgaaaggatagaaatataataacacatactaaaaattctattatatatctatgcgtgcgaaagtcacaaatatagagtataagtgtatgtctaaaaataacatataataaataataaaatatatgacttgaaattaattaataataaattaaaaattttaaaataaaatattaaactacttttaaataaattttttattaaattagtgacaaacttaaataatagtatagatttgatgaaccaaaactaacattaaaattattgaaaatatttaataaaaatcagatgagatgggcactcaaaatttaacaatccattagaaacctgcttggagagggttctacaaaccaaaaataaaataaaatagaaaacaagaaaatgcaaaggaaaagaatacgaataagtctttcctccattacaatatttaaacgaaattatacttgtttgagcactgcacttccttttttagcttatataaagtcatatcctaccacaaatacatccatagtaaaatgtatttcaacatcttttctttatcctccaagtctccatccactt

SEQ ID NO: 11045 - DNA, 585 bp, Gossypium hirsutum
  misc_feature (505)..(508): n is a, c, g, or t
tccatgtttagagtgaggattaactgaaagaaattagtaaggctacaacatgagcaaactatatgcatctagtctgttactcatgcgatgacttattgtttcgaattacgaagttcgacaaactagaccaaggtatcgccgagggagcgtaccatgtacacttgagagaacgaacctacaactgtaggagatttgacatactttgttttccatgtgtttatgcaatttcaacatgtagcaatcaacgtttagatcacatgagtattgtggatgaaatgtacaaactagaacacatgtataacgtgtgaagaaacatatttccactgattccaaatgaaggtatgtggtcgctgatatcgaccgctccattcaacttgttattcaacaaatcattgcatcacaaactaaaaggtcgatcaacatcgacacggatacgcgacaacatggatattcaggagaagacaaaccaacagagactatgcgggtggtgtaggaacataaagtnnnngaactcatggtctcatgtaaaaaaagaagactaagggaaatcacccgagggtaggaccaatacggtagttgttagga

SEQ ID NO: 11046 - DNA, 620 bp, Gossypium hirsutum
aattatcaaaaatccatttcttttatttttataaatgaataaaaaattatacgtgattggatttgaatttcaaacttttaacctaagcatcatttgggttcaatggcaaatcgaggggcagtaccaacccctcctaaaatgaaaattctttatttaaatccgttaaaattttaaatttgtaatgataaaattacactttaacctcccaaaaataataaaaatttaatttaatcatttaagaattataaagatataggctattaaaataataaaattacattttttactatagtaaatatatataatttaatttcggcccctaaaatattttctggcttcacacttgtttatttattttatgatttttttacacaaattgtggcataatttaattacaacttattaatttttaacaaaaaatagaatctaaattaattttcgattatttaatccctcaaggttaaaggagattcatccttccaaggaattgtggaaaaccaagtaagatacaacatgaaacttttaggtatggattagtaggaatattggcattcattttggatgggttggccctacggtttacatgtattaatttatagttatggtagatcttagcccac

SEQ ID NO: 11047 - DNA, 675 bp, Gossypium hirsutum
  misc_feature (21)..(21): n is a, c, g, or t
  misc_feature (647)..(648): n is a, c, g, or t
aaagttcttgggtcattgacncaagagctacaaaccacatgacccattcctcacaaaaatttgtttcatatacaccttgcctagtaatagaaagataacagtaaccgatggttctgtgatcacaatggctggtcagggtgatattgttataaacagaactcttacttttagaaatgtccttcatgttccaaaactgtttaacaatcttctatccatccaaaaaattaccaaagactctaattgtagtgtggttttctatcccaatcgatgtgtttttcaagaacagaatacgaggaggatgattggacatgctaaggaagtaaatggcctataccatcttgaagaatccagtggacaaattagtgatctgaattcctcacctttatcattcatctcagaatctgttaaaaccaataaagaccaaatttggctccatatcctccgccttggtcatccattatttagagtccttaaagttatgtttccttttcaaagggtcaattgttgaaaaatttcattctcagtcctctgcccagccaaacactcagtccttgcctgccaaccaacctgcccaactcgaaactatgcaacccgaaacagagcctaatacacccaaatcacaagaagggattcacgacactaatttnntttgtgcgctggattcttcaagatggt

SEQ ID NO: 11048 - DNA, 658 bp, Gossypium hirsutum
aacttatgtgatcgataatggaaggtaatacgatagatataaatttttaaaaattgacacatgaattatatgtattaatgcagacatggaaaaataattaaaatatttaaattaaaaaaaatcttacgtgcaaactctcttcaattaaacgtttttttttatctttacattaaatgcttaaaagaaacaaagtagaaacaatgaattaaaaaaaaaattaaatcctaattggataaaatggttttgaaaccgaaaaagcaaaaactaagttaaaactcaaatcatgatttagttatagaatgtttgttgtatcgtaaaagccttaattcatgatttagtttttgaaatatttttatttttattttgataattaaattattttatttaaattttgatacctaaaatattcattctttataatttttagtccggaatttttcaaacgttaaaaaaatctccacccaataaaatcatggcacatgtctcataagataattttattaaaaatcttttttgttaaaataatatattattaaaatggtttttaattaattagttattggttaattttttctattatttttcacaactattctctctcgtatctgaaattttttcactttatattactttttttcacattcttggtttgggattc

SEQ ID NO: 11049 - DNA, 659 bp, Gossypium hirsutum
atgtcttgcatattcatctcctgcagaggaaactagatgggtcagtatgtttataagctggaatggtttgagttcctttgcgtgtcattaggtgtgagtgttgaggtttgttcaaacaccgagtcatgtttacatacattgcatgttgttgagagtttttttcgcggttttgagtattgtgagggagagttgcattcaaccgggtttttcccagtattattattatctccaaattgtctaaattgcttattattgatagacaagtttttctttattttttaaatttagatttctttatatgaaattcgtaaccttgtttgtgcgcaagaaatttggattgcctgacccagaaagaattggctaaaaggcggatgctagtttaggtgacccgtatacgatgggatcttttaagctgagtgtgatccttctggctctatatcatgtctactgggtggtagtaagtagtaaggcataaatattttacttattgacggggtggcaatagattattcactagtttctcgagtagaggtgttcatgggctgggttgagtttgagttgggttaaattaaaaatttagggtttggcttggcttgaaaaatgggcttaaaattttgtctaagcttgacccaagtaaaaatgataaactagggcattac

SEQ ID NO: 11050 - DNA, 650 bp, Gossypium hirsutum
aatagacatcaccccctattgcctctgctctgcctcccgcctttgttttctcttcttatttttctcctcttctcgcaattcttctcatttcctcaacgcaaaaagaataagccaacactatacaagtctttaagtagagatgagatggtacatttgtctggatacaacaaagaaaagctctagaccgttctcgtcaccggaactgttctttgtgaagcttgccccaccaccatcgccacgattcataacctcatgttgctgttgaacccctctagaatgtttctctttttcttcttcttctttgcttcttctttttctttttccgttacgtctgtaacaaaaaatagctagaagaattgatttgttatttttcaaaagttaagttactgaattgaaactaaagtaactgttttgtcaacggcatcaaagttgagtgatgtttactcaaaaaaactactgttgaaatgaaaacaaattcacaagattctaacttcttttgccacatggcacttcatttcggcggcttcatatcgctaagattagtaccaaatagccagacaggcggcaatgacatgatgctcaaccaaactttcatttgcacttgcacccatggcaagctccatgttgctggttgctgttggtttctccac

SEQ ID NO: 11051 - DNA, 660 bp, Gossypium hirsutum
tcaacagatcaaataggaatttttttctcccgattacatctatagaacaggcttgaggtggggttcacagagcgagagggtctcatcaaatcaagtcatgtcaagtggtaggtgacctgtcacgcaaggccgataccacgaggtgctccggttctcaatgaagatgatagataaaacctcaactcaactcgaagataatactaacatgttaaggaattttaaatcaacaacactttgaaaacttcttcgaaaaaatttcggactcttcgcaacagaatcaatataaaagtttaagtacatggagagtgaaattatatggctaaagctaaaagctgttttgttaatcctatacaaacttatatatatatatatataaagagcagataagttaaaagaaagtaccttgaaaatcagacttcttgtaagaagagatgaacccaaagcgaaaacgagcagcagcttgcaagtgaaacaatcttcttgaatgaattattggtgtaattctaaagggattcttttgattcgttgcagagattgtgtgagttacggaaaccgactccatggccattaccagcgtgtctccccctctccccaactttcttcccaaaccagaaaattttatcagcacatcgtatcgaccgtgggcctccttgcggttag

SEQ ID NO: 11052 - DNA, 665 bp, Gossypium hirsutum
ctgaaataacaaacacgggatcaaaatgtcaagcctcaagagtataacattcatcaaaaacagagtcccaaaatggaactcttaggagcatacattggagtacaaaagaacatgtattgatggacttatcagcatcaaactaagtagtttacaaatgatattttcacttaaaagaccccacaatcatggcctgtgctgccctaagccaacaagaggcatgattatgatgaaatgtgaacaagtgaatggaattcaagcagtaaagagcaagtaaaaattgttcgataagcattggtttcactctagatcaaactacaaaatagagaagcaattgaatctagatcaaggcatgcagatatagacacaggatagcaacacagcatgaaattattggtgggataccgagcatcaagtatacgtagataaatatttgtaccctacttagatagtgtattaagttcatatgaagaaattaactgtcatttttgcacttttttcatgtccattctgagctttttcctgtactactattaccatattaagaaaacaacaaatacatgccatgtcaaacattttacatatatgctaaaaatatctttaaccatgattcaaggggcataattatctcatatatctatttatgacagataagcattgaggagcaa

SEQ ID NO: 11053 - DNA, 608 bp, Gossypium hirsutum
attcccaatacaggggcccaaaaattaattaattacaggcccaaaataaagtcagcccaaccagcccaaaccttaaccaatttccagtcaaatcagaaaccctagggcaacttagcgccgcagcaagctggcgccgcaggcgcctctaccgcagcagcccgagtctttctccgcgtaaatcgcacctctacaactgccatacctgcaaggaaaacggattcaacgcaacaatagcacagaatagggatgttttttgtattttgcaggattttttgtttatttttctttgttttcggttataaaaaccgaggagaattcagtgtaaagggggatttttgagaggatcaataaaaaaggattcaatatcaacaaacaaattttcttttccgaatacaaaaggtgttttttcattttttcagtattttgagtttcgttttatttttttcttttttttttattttagccttttttattattttatttttcattgaaaataaaaagaaaggaggaagaaacttacctggtcgtcggagtcgacgagctggcgtcttctccatcgacggaggccgaaggcttaggttgaacggcggcaacaacaaaatgaaaaa

SEQ ID NO: 11054 - DNA, 220 bp, Gossypium hirsutum
acttcttcaaaatttcaacttatcattctattttttttccattcttgtttctttcaaattttcattgcaatgcataagtagagcaagctgttaactaacaatgtgcatcgtgatcgatcattcttgatcaatttgcgtgctgttttttgaatctgatttaagtattttttcaattttttaagagaaaagggagaaaaaagaggaatagtgtttttttttt

SEQ ID NO: 11055 - DNA, 661 bp, Gossypium hirsutum
caagtaacccactgaaaaatgaagatgttatgatcttccaaagacgctacgcaataatcccgaagaggcatttctaatctacatctcttacgtaccaatcctgatgacctgcaaattaagaagaagataatcttgcaaactactcgaataaaaattggttagccaatcatatggtactaagagattccaaatattccttacagtagaacaatcccaagaacatggagaacatctttggaaacatttccatagactccataattcaagtcatgtctaaagcctttacgaaccacttcttccttggtcaataatcagtgtttaagaagaagccatatgaagaaccagacccattggggaccctgaaatttcctgggaatgtgcgatcttgagtctttcttattccatgttccttcctgtaacttcccataagtgctcttgattaagaagcaacttgtcgagttaccccaatataatcctatcaactcttgcactcgagtgggaaggcagaatccctgcaattcttatgattatgtcttctggtaactaaagacaaaagaggtcaatattatactcaccattccctgagaccatatcactcagcacacaatccatatccaaattagaatgaccaggaataaagttacctaacggtcccacattt

SEQ ID NO: 11056 - DNA, 635 bp, Gossypium hirsutum
ctttggttcctttccgttcaacatctttccaatttgacgagccatgagagttttgccagtaccaggaggtccataaagcagcatgccttttacatgtttaatccccaacctggaaactcaaaagctctcccatcaaaataaataaataggtatatgaaacataaataatatgctttcaaaaataagttatattacttgttagtcacatgaggaggaaaaacacgggatgcaaaagctctccgaaatatatcagcaaactctgcacttaagccaccaatacccaatgattgtagattaaactctttctgcctaaagatgctactactggcagcttcacgttgattgacgatctgcattgcaaaacacgtcaatgagccatcaaagcaaattgaatcaagttgattaaattataatcttgatatgtaaatatcgcacaaatctgatatctctgaagatcaatgatgtccaacgatcagaactatattagaaatatatatatctacatatatatacacacacattaagcaaagcaactaataacatattagtaaataacctttattccacttgaattttgtgcttcgaagataaagtaggtatcattggaaatcatccccctttcaggaacaatagaa

SEQ ID NO: 11057 - DNA, 489 bp, Gossypium hirsutum
agactaaaaacatcaatacacataaaaaccatctcaaaatattcaaggcatcgaattatcaagattaagttacatgtgcgataataattattatacctttaatatttggcaatcatgcttttagtagaaataaaattcaagggatgccttcttatttcatgttgtgtgtctagatttggtttatttgaggaccagcaaaaggttaagtgtagggaagtttaggtgtgaggttcatttttacatccatcttcactaactcttatcttgtttaaagaaagaatccaagtcaattttttttatgattttgcctttttacatatttatttattttatgttttgtcatttggtttacttttctttacaactaaatcttttccttttgtttttatatcttcttcttcatttattttaattatatgtttacattgcttgaggtcaagcaatgattaaagtgtgtgagagtttgatctgtcgtaattcgaaaaaatg

SEQ ID NO: 11058 - DNA, 674 bp, Gossypium hirsutum
ttgtaccactactaaaatcgaacacatcttgcctacaaattacaaacaagccttgaaacaaccccattggcacaacgtttttcaatcaaggatcttggtacattacattacttttttgggattgaggtagccccatctcagggaggtttgtatttatctcagcaaaaatatgttacagatttattgcatgaggccaatatgcaggactctaagggcgtcttgactccaatgagctctgacacaatgcttgttgcattctcttctgattcgatagttgatggcacgggatatcgcaagcttgtgggtaaacttcaatatcttaccttcacacgaccagatatagccttttctgtaaacaaagtggctcagtttatgcactgtcctggagcatcacattggagggcccttaaacgattgctttggtacctcaatcggacatcaaactatggattgcgaatagtcaaagagaacaatccacgtctttttgtctactccgatgcagattgggctggtgatccagttgatcgtacatccacaacggggtacattacttacttgggcagtacacctatctcctggtcgtccaagaaacaacgagctgtatctcgttcctccacagaggctgaatactgcgctgtggctgctgccgttgccgagactaattggctcacaaa

SEQ ID NO: 11059 - DNA, 491 bp, Gossypium hirsutum
acacctcatgttcgactccggcaacggtctcgggtacggggcgttacaccttttttacaaatgtcaaacctacattagagaattcaaacagtttctcacaaagtgacttcttgagcagatttatatttataaaacaaagactccaactcctctttaaacacttttgctaaactcttcaattttcttaacagcttttctaattcctcaatttgccttcatcttcttcaattccatattttcttaaaggtaatcttatctcctcttcttttccatactttttttcttatttacatacaagaatgtcaaggatggatgttcatggtaaaggtcctacccagagtagagttcaacccccaaaaatcatgccattttcaaactccctaaatttgaaaatattcttccacgattctcagtagcctgaggttttcattgcttatgacattaaaatacctcaaaggtgttgtctaagtgacaacacccaaggctttaat

SEQ ID NO: 11060 - DNA, 546 bp, Gossypium hirsutum
  misc_feature (539)..(539): n is a, c, g, or t
atcatctcaaggatgtatgcccgagcatatcgtattctttctacttcagtcgaatcattccccggctccgggaatgtgtctcgtaaccagcccatctcgatccgacctccgtaaatattatccggaatcgcacccaaaagatcgtagcatatggctccccaatcagcaaattgaacggacccggtgagtgcggacccatccaccggcaatcccaattgtaactgcacgtcctccaaagtgatggtacactctccgcatgaaagatggaatgtgtgcgtctcgggtctccacctctctatgaacgcgctgatgagtttcgggtccaacttgcacccccggcctatatgggccacgtgccaaaaacccgcttccctcaagtaattttctatcaggggggatggaggaccagacatattacaaatataactttgaaacccccgatctacagactgttataaaaaattttaaattacaatttatttaaaattacataaatgaaaaaaaattaaaaatattccaaaattttatttttcccttcnccttttt

SEQ ID NO: 11061 - DNA, 610 bp, Gossypium hirsutum
gtgttgtttgtgttgtacccagtattattagggtaataattataatctctttcatcacaaataattgtaatttcttacacatatttgtttattagagtaattatattataattctctatgtcatgtttagtaatataaattgtgattaaacaattatataattattataaaacttattagtatgataaaaatgtttttttctttaaataacaaaaattaaaatcaaatcatcatatgtattatgttagtctaaaaaagtagatgataatataattactaataaaaataacaaaataaaaatcatatgtattataaattttatatacttttcaaagtatggataatctcaattctacctataattgaagttataaaatatgcaacatactaatgtcacggggttagaactttaggcaggcaaaccatgtagtcttaagtgattcctttacttcaaatctgcccaagtcagcctatctctcgaaaaggcgagaattttcaaagaaattctcaaagccattgaaacaaaacggaagcaaactatcaagcaaagaagcaaaaagcggacataaaagccacaagaaaattaagctcaccaaatgtttgagtatgc

SEQ ID NO: 11062 - DNA, 545 bp, Gossypium hirsutum
ttacagaatgacaaggacgaattttttttccttttatttattttctttttcctctgtaaaaatgaggctataagaaagccaagattagactgtaaacgggggaaccctcacacatactgtatgagagacacacaatattaatacaaaaaaatattgaaaaaaggtgatttggttcttcttctcttttttgctcttcaatctactattttttttaatctacgacttgaaagaaactaagaggcaagggtttacctttatgccggcgtcagactcctgttctctccgttgcaatcagagtttgaatgggaggatcgagaatggcgaagtgactgaacggctcgaaggcttggtcaattcgtcggaaacggcgttgtgaatcgagagcacctagggttttttttcttttagatttgttttggaaattaaatggtggctgatttagggatttcaaaataggctatatggggcaaaggaaacggcgccgtttaacagcctttgacccgcgcggtgacccgactcgagggccgaatccgcgcactttctta

SEQ ID NO: 11063 - DNA, 345 bp, Gossypium hirsutum
acttactacatgtttttagagaaggcaacaaggtaacggatggtttggcaaaatttgcattttcaagacctttgagcaaggttacattcatgcaacccccggatgaaatccttcaatctctacacgataatcttcctgatgtagtgtgatcttgctttatattgattagaattaatctctcttttgtataaaagaaattgagtaatatatattacttttttttgttatatttataaactttaacaaaaattttaaaatataaaataatatttctaaattttgttttaaaaatattttaattaaataaatcaaattcatccatgcaacgcatggtagtaatcaggt

SEQ ID NO: 11064 - DNA, 599 bp, Gossypium hirsutum
tcacatgatgaggtagaggtcgagccaacccagggtgaacacgtggagggccccaaagcacacgtatttttttatagaaattccaagcaaagagcgaatgacaggtaggtatacactgtacctttttccccttaatccctgctataagaaaaaagatttccattttaagttgagaaaaattgacaattatttaatttggaaaattataataattaaaagattatgattctattcaatatcgatttggattattatttgatttttaagagcatataacttactccaagctgagttgggttttaaaaaaccaaaatattttttatatatttttttcaaaatatcgttatcatccttaaccccagctctaagttttccttttttctatttttgaaaatcagtaattgtgtaatttgcaaaaaaatataataataaaaactaggttgggtatatataaacattctttttgccgtgtattttcaatgtgaaaatcgaaatgctatgattgtatatatatagataaaatactgaaaagaaatgaaaataaataacaaaaaaatacatagtttaagagtgagtttggatggactattggaatgtga

SEQ ID NO: 11065 - DNA, 365 bp, Gossypium hirsutum
catttgtttcattttaatttggcaaaattgtaaattttgccattaattggtttttattttattaatttctcaggttatgccgcctcatccacttactttaggcataattatgccttaagtcctcccctatttattagttaagctatttaatcacttaattatcacaattagcaagttttgcacctttttcaatttagtcttttttaacaaattagacatgtaatcggcaaaatttcttaacgagattttcatacgacattcctatcataccatagaccataaaataatattaaaataaattttcttccgacctcaaatttgtggtctcgaaaccactgttccaatttcactgaaaacaggttgtt

SEQ ID NO: 11066 - DNA, 650 bp, Gossypium hirsutum
tagtccgagttgctactcatcagcttcatcttcctccgagatcgagaccttaacgaccccaaacattaacgaagaagaagagtattttcttacaaaactgaaaagtcatcaagttttcgacattgaagaggcattgattacgttaaggaagaaaacaagaacacaagagagttccagggttgttctttgcacgccacgtgtactttctgctttcaggtctttgatcgtttctcggtacgtaaatattcaagtgaactcggtcgcagttttggtcaacttgtcattggaaaaaaccaacaaggttaagatcgtacggtcaggattggttcctgatttgatcgatgtgttgaaatcgggatcccctgaagcgcaggaacatgcttgtggtgcactctttagcttagcacttgatgatcataacaagaccgccattggagttttgggagctttgcaacctctcatgcgcatgttaagatcagggagtgagcggactcggcatgactcggctttggcgctttaccacctctcactcgttcagagcaataagactaaattggttaaaatcgggtcggttccggttttattaagtatggttaaatccggtcatatgacgggtcgggtattccttatcctgtgtaacttggcttcgg

SEQ ID NO: 11067 - DNA, 670 bp, Gossypium hirsutum
cttgttataggcttgatattgtgatcttgtagttgaacatttgatgatagtggagctcttgatcggactctaaagtcccgtggtttttacccttgatttagaggggttttccacgtaaaaataccagtgtccctatttatttttgttgtggttgcattagttgatttgtggttgattaaggttcctagagaacctattttgtgctattgtgcttgccataattttttagttatagggtgagaaagaacaccggttgtgctttcgctttgtttcggctgttcggtttcttcctaacacacatagcactattaaaggatacgaaaataaagaagaggttgaggtgaatttttcgcctatctattgtgacattacatctccaagacataaccttttaaatttaaattctaaattgacttttcttttatacaattcatacactcttgataaaaagcaaattactattatatacacattacaatcacataatatgtaggacttatcataactaatagatcaaacattgagattcaacctcaaatttaattgtgaataatattttaattatgttttgataatttctagatctaaatacaaccctaataatgatacaataataaaaaaaacaccaatgattatggtacctaaataaaagataaaaggacaccaatga

SEQ ID NO: 11068 - DNA, 472 bp, Gossypium hirsutum
ggttattgtcttcatcttttataataataaaaaaaaagttcagtttaaatgttaacttatctaattttttttcaatttagtttgattgtgtaatttagtatctgaatattttttttaattcaattatatatatatttaacaagatcaatcgtgtccaacattctttcagccatgtttggtttgaatgtcaaattaaacattaaaatcaaaactgaaaaaaatcttaagtgccaaattaaacattataattaaacttaaatatcaaatcatatattaaaaaaagtaaaaacttcgcataaaatatatatctattaaatcttatataatatgctatcatttaaaataagggttagtatttgacacattgagagtattttttttattccataagcattttttaaaaaattactgtgttttttaaaaatattttattatatttttacatgacattaatcaaaccctcctaccatag

SEQ ID NO: 11069 - DNA, 617 bp, Gossypium hirsutum
  misc_feature (458)..(458): n is a, c, g, or t
  misc_feature (465)..(466): n is a, c, g, or t
ttggataaaaataattaggggcttaaatttatatgtttccattcctgaatgagtctattttcaagagaaacaaacgaggacatcattcgaatcctgtacgagaagataattaatttttagtgaagaagggtcggaactgtcagacagcagaacaggggagacttcaatgaataaactgtattaattggcccaaccaaaaattatgaaatttttatggtaagaagatatatgagtctagtttctgggaaaatttatggatcttaatttggagttctgtagctcaagataaaaataatttagtgactatgacacagatggacagcttgaatattcacataagtaaatagtgaaaattatggataatgttacctacaagtgtgttgtttatactaaggatgtggatggagaggaggaggaggaaaaaatacaaaaatatttgaaggacccgggaataaatngaccacnngcccaaaaaaatttgtaaggcttcattgcgcgcgtgtttttcctttaaaagcgtgccgcgttctggcgggtccttctttgctcctctttttacccttcttttccttttatatcaacttccaattatcccgctgtgcccatgttgactttcc

SEQ ID NO: 11070 - DNA, 602 bp, Gossypium hirsutum
gattcaagaagcagtgtttgccatgggacccacaaaggcatcaggagaagatggattcccaagtcttttttatcagaaatgctggcatattgttggagaggatgtcacctccttttgcttacaactccttaatggggacatggacgtgaactcttttaattttactaatataatgcttattccaaaagtttctaacccttcaaatatgacgcagtttaggccgattagtttatgtaatgaactttacaaaattctggcaaaggtaattgcaaatcagcttagaggggttattgaaaaatgtattgatggtgcgcagagtgcatttatgccaggacgcttaatttcaaataatttcttattggcctacgaaatattgcatatgctaaaacataaaagattggggaagaagggctttatggcaattaaactcgacatgagtaaagcatatgatagggttgaatggaatttcataaaagagataatgctacgaatgggatttgaccaaaaatgggtggatgatcttatgaaatgtgtaactacgatttcttattcagtggtcattaatgaggatattgaagaaatatttctgccaaccagaaacc

SEQ ID NO: 11071 - DNA, 561 bp, Gossypium hirsutum
  misc_feature (59)..(61): n is a, c, g, or t
  misc_feature (479)..(479): n is a, c, g, or t
  misc_feature (492)..(492): n is a, c, g, or t
  misc_feature (557)..(557): n is a, c, g, or t
atgctattctgaaatgaaattgaccttcacaatgcagaatatggtgtccttatcttctnnnaataagaagaaaagaatcactttaacttgataaatctcttaccaaacaaaaattaaatagttttagtttaatcaaaatttaattatctcataggtgcaatggtaaggtacattaaatttttaaggagagaatgttggtttgaaccttggagacaatattcttaaaagaagacaactataaacctcgaacataaatcataaaacggatattaataatataaaaaacaatctaattttattatctaaatttactatgagtaaatcttaaaaaatgaattttttttttaaatcatatcctaaacacatattttaaaggtatcatagatggtttggtgagtacaggtattgaaaagaaaatcattcaagatcaacttagtgatgattgtttattagattatagttgtaaccttttttttttncaaaaaaaaaaanacaaaatatttgactcaaaaaaaatttgaaggctattgacccaaattgattggggcccttccccnatta

SEQ ID NO: 11072 - DNA, 590 bp, Gossypium hirsutum
ccatcagtctgttaaacaaaacataaaaataaaaatccaacatgtcaaagaaatttaaattaataaatactatatagtcttaattaattaattaggagcattttatgtagccctagatgatctattactgttgcaccttcctcggaccgcggtttgaatcaacacttgcccaacaccttcgccgagcccttcaatcagccctccgataaactcgatcaccacttgagatgcgaccctcaccgcggtcccaaacttgctcgacttggccatgcccttgataccattggcttcaagcccattcaccatgttcttggcacaaactgcatggagatggtaatcgcacgtggtgcaatggtaaaccctccccgacctcttgcggttacactcaccgcacgagaaactaaaagggtcagcggttgatggtgaggggaggagccgtaacatgtgtggatgaaccgagatgttaatttcagttgataacatggcacaacatgggtgcatttggaaactacaagcattgcatttgaaaacgcatcctttagtggtcttggcacaaatatcgcacctcgatttcaatagtccacttctaa

SEQ ID NO: 11073 - DNA, 620 bp, Gossypium hirsutum
aggttcaagtcttgaagatgatattgttgggaatgacacctacgagccctcaacatagaccacaaattggacacaaataataccaaaaaaaatctaaatttaatttataataaaatccaaaattgaagaaatgtatccaaaatttaacacaagggttaatgcactatttgacacttgaattttgacatttgttcttacatttggggtctaaaatttttttagttcaaagttagtacttgaattgataatttttttcacacttcaaatttttttatttaaattacttcttgaatttaacaattattctcataatgagcttaaattgtatttgagcctaaattaatcttttatattttcttgaaacaaaattagaataaaaaatttaaattctaatataaaaacaattttcaaatttaaaaactaatttggaaagtaaaaatttaaactaagtttgtagacgtctatttttcaaatgaataaaagaaataaaagacccaataaagaaatgagattaagtggaagatatttaaataattacaattaacaagtagttttgagaaccactgaatctctaatgaaagataagagaaaaatttggggtgtggagccttaaatagaga

SEQ ID NO: 11074 - DNA, 659 bp, Gossypium hirsutum
tgtggaccaatcagagcttgccatgtcatccctgggaagacaagttagtaaacattgggggtaggtaagtatcaaattaatggtgctttgttatctttaattaagttgttgttcataaattcttgccacaaaacttgccaaataggatctcattggattttttttttaatttcttacttatttgtgtattgagtatgtttttcaccataaccgatataatttaactatcaatgagattttgatacagttgaaaagataaatgtattgggttttgagtattgaggttcgaaatctattatatgtgcaattaaatatatgggtgtccaagtcaaactataagttattgtcatatgtgagttttactccaattaattagtttataatcgtaaaattctaacaacaacgctactagtaaaacttgtatccaagtcgcacttggagcaatgaacaccctaactattatgccaacacatgagattcataaatacatatatttaattatatataatgtgatatgagtattataaaaataagaaatcaatcatatcaccatcaaacaatgaatattaagtttgtttgataagaaaatgattggatttatcatcatttatatacacataatctatgattgaaatcaaaatctttggaacacattagca

SEQ ID NO: 11075 - DNA, 572 bp, Gossypium hirsutum
  misc_feature (57)..(58): n is a, c, g, or t
  misc_feature (539)..(543): n is a, c, g, or t
  misc_feature (545)..(546): n is a, c, g, or t
ttaagttacttgtttactgtcgataatcgatgcacattcgcaaggttccatccttcnnctttacgaataacaccggtgctccccatggagacacacttggtcggatgaatcctcgatccaacaattcctgaatctgtgccttaagttccaccaactcttttggtgccatccgataaggagcgatggacaccggagccgtaccaggtaacaactcgattccaaattctacttctctgctgggtggcaacccaggcagctcctcgggaaagacatccggaaattccctaactgttctcaactccttaacagtagggctcttagcctccgtatcactaatataagccaaaaaggcttcgcatccctttcgtactaacttttcagcccttaatgccaaaatcacgttcgacaggtaattctggcgttcaccaatcaccaccacctccttatcctccgccgttcttaacaccattcgctttgcagcgcaatccaaggtggctcgatgcttcaccagccaatccatacctaagattaagtcgaannnnngnnacggcagctccatcaaatccgctaaa

SEQ ID NO: 11076 - DNA, 424 bp, Gossypium hirsutum
ccctctctcttttttggttgtgggagacaaagagagaaagaaaatagaggttaatgtggagtttaaaggaatcaaagattagggttggatgaggttttttttttcttcttttgactataaataagagaatgcttatgagggaattgagattgttaggaaaattttggacctcaaaatggggtattttcatgcactttccaaccaattgtaagcttaatttaagggtttttctacatggaaaatttaccaatttgttaaaaggggaggtgggaatcatcctaaaatgggaaagaatgttgggtttgtatgtatgtatgtatgtatgtatgtaggtgtttatgggatataataaatttgtattatgtattagttacttacctattttcatgcatgagttgcataaatctctacacagaaattggct

SEQ ID NO: 11077 - DNA, 462 bp, Gossypium hirsutum
tgaggtcaaggaccctttcgagcaaggggtatttgtcacaagctaaaatatcactgcggcaaaatgatgcgttttgggaggaattgtttaatgaaacgatgcgcagaatgaactatttaaacgaggcattttggtttaattaatgttgtttaatttaccatttattttaaccaacttttaaagctttatttcctttcaattttctttcctataaatatggtgtaaagggccataggcaattatgaaaaatcaaatacaaacaattcagaattctctctccttttatacaaattctgtctttttactagtcctttttctttattaatgagagacgttattattattttcatgaaaaacgtttccaatataataagaataatattatattttagagttttatgggtggtttacgatggaacacgtcaaaaaggtacatagggactttgatcctactcaaatgga

SEQ ID NO: 11078 - DNA, 645 bp, Gossypium hirsutum
gattgaggtttggtaattgggtaaaagaataaggaaaaaaaaaactaagacatgagatctagagactccgaaaacaagatctacctacttggagagaaatacaaaataaataagaaaaaaagaacgaatttcatttttaagatgatagtctataattaatagccaatgaagggagaagatagatagataccttttaagatgaaagtggcggtaagaatgagcagaaagaacgggagagggcctctgctgatctcaatatctaatacagcaacaggaatatggcatgtaaggtaaacccatctgcaataaatttcttttcgttttcatttttatctttttccccttttaaagaagaatgggataggaagcgaggaatttagggggtagcggaaaaggaaggatgcgtgaatctatagatattaatttggaataaatgggattttgggtttgggttgaattagtgatcttttctcttttccctcacttttttttctgtttctttctcctttgtcctgtttaagttaatagtctttctttgttcatgtgtaatgtgttgttggttgatcggtaagaacaaaattcaattcaatagcaatagtaccaaggaattatatacttaataaagagagaaagaaagagcgagag

SEQ ID NO: 11079 - DNA, 628 bp, Gossypium hirsutum
  misc_feature (23)..(24): n is a, c, g, or t
gcgccgatggagccgtggaaagnnaagaaaaaggccttgaagttgccatttgatttcaaatttcaaaaacaattgattttttgctttatggataatttgaaaaaaaaaattcaatttcaaagatctttgtgcagaaagtagatttccaagttggcggtggcttgtatttatactaagggctaattgcacaagcttcctaaactatgatttaaattttaaattgatttttaaatttttaaatatttttaattaagtccttaaagtatcaagaggtcatatcaaattggatttatctatgggtatctgataaattgaaaaaaaaaatccaatttcaggatctttgtgcaattttaagttggcgttggcttgtatttatactaaggtttaattgcacaaacctccctaatttaaattttaaaatatttttaattaagtccttaaagtatcaaataaggccattctactagttcaattaaatatcaatttggatatatctatttttgaaacatgctcattaaattgtaaaaatatgtatattatttgaatgattaatttttatctaaattttaaatattttaattcccttcttaaaaatatcaatattgtatgaaaaatatttttctattca

SEQ ID NO: 11080 - DNA, 632 bp, Gossypium hirsutum
cttcataaagctttcaactgatcaaagctgttctgacactttttagaccactcaaacttcacatctttctagagcaattttgtcaaaggagtcgcaatcatcgagaaatcttttacaaatcttctatagtaaccaaaaagtcccataaaactacgaaatttagaaacatttttccagaggtttccaatctaaaatagttgaaattttacttggatcaatgcagatgccagaggctgatactatatgacccagaaaaccaacttctcgcaatgaaaactcatatttactgaactttgcatacaattgtttatctcgcaaagtctgtagcactattctcagatgctcagcatgttcagattcatcacgtgaataaatcaatatgtcatcaacgaagactacaacaaattgatctaaatatggtctgaaaattctattcatcaaatccataaaaatagtaggtgcattagttaatctgaaaggcataactaaaaattcaatgtggccatacctcgttctgaaagcagtcttcggaatatttgaatctttcattcgtagctgatagtagtttgatctcaaatctattttcgaaaacatagtagctccttttagctgatcaaacaaatcatctattc

SEQ ID NO: 11081 - DNA, 678 bp, Gossypium hirsutum
  misc_feature (57)..(62): n is a, c, g, or t
aaattatggataatgttacctacaagtgtgttgtttatactaaggatgtggatggannnnnngaggaggaaaatatacaaaaatatatgaatgactcgtgtataaattgatcacatgcccgattataatcgataagtgttggattagaaatgatataatgttttatttggtatatttattatgaaattatgattatcgttataatacaaaaattgaacttgtgagtttatatggctaaattttagtgattatttgttaattttatgaatttcatgatgtgttatttcatatgtattgatgataaaatcgtgaataatgtaaaagcatgaaaattgaataaatgatcaaattgagcatttcagttcagtgacaagatgaattgaaggaaaagaccatggttggaccatggcaacaagtgataagtgatagcttcggctacacttatctgatcaaggaaaaatgaaagtgataagtgatagcttcggctacccttatctgatcaatgacaaatgacaagtgaaaagtggtagcttcagctacctgatcagtgaaaagtggaagcttctgctacctgatcagtgaaaagtggtaggtccggctacctgatcagtgaaaagtggtagctccggctacctgatcagtgaaaaatggtagctccggctaccagagaaaagaaaa

SEQ ID NO: 11082 - DNA, 587 bp, Gossypium hirsutum
aaaacagataaacatgacatccaagcttataatcaaagaaaactttaggagagttttatgaaaatcaaaatagtatgaataaaattatttagaagttgaatttgaacatccagactacagagacttcatctgcttcacaaatcaatacatataatgcgcattctaaagtcttttctacagctaataaaacaaagcataacagaagtattttaactttgatcatacaattagagtagtgctattgaagtgatagaaatttccaaatgtttccagaacctggactcgtactcaattcttttttatcaaaggccaagattactatcttattgattccactgtgttctactctagagcagacctttagtgatataagctaaagaactctgttcataatttgatataaaacattcatttcaaaactcaaaagtttattgtgaactgtaatcaatcgtctaaaaacatagtaagtccttttgattaggcacacgaggcttgtacctaggagcgcctggcaatagcataaaaaaatccacttgattgaatctcctttaatttcttttatttttcacgatctcatttgggtatct

SEQ ID NO: 11083 - DNA, 816 bp, Gossypium hirsutum
  misc_feature (467)..(468): n is a, c, g, or t
  misc_feature (562)..(563): n is a, c, g, or t
  misc_feature (566)..(570): n is a, c, g, or t
  misc_feature (572)..(572): n is a, c, g, or t
  misc_feature (574)..(574): n is a, c, g, or t
  misc_feature (582)..(582): n is a, c, g, or t
  misc_feature (586)..(589): n is a, c, g, or t
  misc_feature (591)..(592): n is a, c, g, or t
  misc_feature (598)..(599): n is a, c, g, or t
  misc_feature (610)..(614): n is a, c, g, or t
  misc_feature (619)..(622): n is a, c, g, or t
  misc_feature (657)..(661): n is a, c, g, or t
  misc_feature (663)..(665): n is a, c, g, or t
  misc_feature (667)..(673): n is a, c, g, or t
  misc_feature (678)..(678): n is a, c, g, or t
  misc_feature (680)..(699): n is a, c, g, or t
  misc_feature (701)..(701): n is a, c, g, or t
  misc_feature (703)..(705): n is a, c, g, or t
  misc_feature (708)..(714): n is a, c, g, or t
  misc_feature (728)..(730): n is a, c, g, or t
  misc_feature (733)..(736): n is a, c, g, or t
  misc_feature (738)..(738): n is a, c, g, or t
  misc_feature (741)..(746): n is a, c, g, or t
  misc_feature (748)..(752): n is a, c, g, or t
  misc_feature (754)..(763): n is a, c, g, or t
  misc_feature (765)..(767): n is a, c, g, or t
  misc_feature (769)..(774): n is a, c, g, or t
  misc_feature (776)..(777): n is a, c, g, or t
  misc_feature (779)..(797): n is a, c, g, or t
  misc_feature (799)..(800): n is a, c, g, or t
  misc_feature (804)..(812): n is a, c, g, or t
tcatttttgccttcattcttacaagacagcttcctgtaacgacataatttaaactaaatcgtgtcaaatgcaacaaattaacatcataaatcatggtttaattaatttattacagtcaacatactgaagttccagaaagcatgttcttttcaacaaagactgcttatttttaacaacaaaaggaaaaccaagcttttatcatggaacatgaaagtgaaacaacccatagtttctttttatcaagaaaaaccagaaaaacaaaaactagatcattcgggatcataacaagacagatctgttgcaataaaacatcaataaagaaaaaagtaattattagatcagatgatatgcataaatttgtaataacgaacctcttcaatggaaaagaaatgtagaaaaaacagagaattgcagaaaagagaacactaactaaagcaaagcaaagaagatatttgtgagggagctanntattttgaatgttgatgttttaatagcccttacactcaaaacaggaggcatatatatttgaatatttatttatcatggacttacactcaataannaannnnnanantaataaanaaannnncnncaatanntcaatggtttnnnnngctannnntgtatcttaaaaaaagtgggcttattcaacaaagnnnnnannnannnnnnntattntnnnnnnnnnnnnnnnnnnnncncnnntannnnnnnaaaaatataaaaannntcnnnncnccnnnnnntnnnnntnnnnnnnnnncnnntnnnnnntnntnnnnnnnnnnnnnnnnnnncnnatannnnnnnnntttt

SEQ ID NO: 11084 - DNA, 408 bp, Gossypium hirsutum
atgtatctccctctaccttcagggttaatatatatataattactcaaaaaatgaaaagttcacttatataaattaaaaggttaaaatatgatttaaataattgtattagtatattttaaatttaacttttctattttttaaaatttaaaattcaagtttaatagttaattatgataaaattttctattaaatttactaatgcatcattaaaaaaaacccttaattggtagtcatataacaaaaagacagtaaataaaccttaatttaacagaataattttaacatgttaataattgaatttgcatttttaaactcgaaaagtagaggctaaatttcttaaaataaaaataggagactaaatttgataaaagtatcatagaggccatgtagttggagttaggttgaatt

SEQ ID NO: 11085 - DNA, 601 bp, Gossypium hirsutum
tttgggcttatttacactttaggtccttcctcatttgacaattgagttatttaatccttctagcaacttttacacctttttcaatttagtctttttatttaattaatcacccaaatgtcaaaattttctaacgaaattttaatactaccttatcaacacttcgtaaatatgtataaaaaatatttatggctcagtttataatactgagatctcgatacttttttttctcaatttcttgagcaaataaatctttataaaacacaatttattatttcaaaaatcttttaaaagatacatttggctcataaatattaaataatataatctacgagttcatttgtcggatttggtggtctcgaaccactattttcgacatcgctgaaatttgggctattacaaatttgcttcataaaactctcagttttgactcttttataaattagtcctactttcaaaattaaaggtatttaaaactcaatttcagaaattgacttaatttcctaatagccattgtcaaaagcattattgattaccaaccttacgaaatttcaaacacatatacgctaaaattcctaagatactctcgaaacttctaggccca

SEQ ID NO: 11086 - DNA, 453 bp, Gossypium hirsutum
ggttcctgaatttggaatttgtcacacacattgcccccaatttgttaacaacattaatcttttaagggttaatatgtagtttgccccctgaacttgtccaaaagtaactagttggtacatgaacttgtctaaaaaattatattttttaaaagatttttactttttaaatttatgtctaccacgtgtcattatgatgggctgccatgtaccactatcggattggtcatcaacgccacattagcacaaactaacggtgttagcgtgaaggtatcaacttcagtgacggaatacaagtttaaatattaacaaagtaaaaaaatattcaaatactaattagaacttttaaacaaggtaaaagggcaaaatattaatcctaaataataatatagatatgggtaaattgcacgaaaaaggtgggttttactgccaaatattgacaagtcgtccgtaaaa

SEQ ID NO: 11087 - DNA, 651 bp, Gossypium hirsutum
gatggtgtttgagttgttaaaaattgcttttaaatctgatgataaacgatcaaaaaatcgtaaattacacatttaattactcgagttcatttatgtttctattttgttcattatttaaaaaatttgttattttagttactcttactaggtaagttatcaatgtcagtcactctcatcaattaagttgttagttttagtcactctactattaaaacgggtttgatcaccaaacaaaatactgacatagtctggtataacaacaaaattaacttttaatgtttacccattttattaatttaattttgattttgaaaaatatgacaaatttaacctttaatatttgcacattataccaatttagttatggttctaaaaattaagaaaatctaaattaaaattcaaaaatacatatacattaaaaaattattaaaatttataaaactatataaaatactcaaaaatttatataaaaaaaaataggcattaaccccctaagagcaccaggaaaggttccctctttcttttaattgtatggattcttcgtctttatttttaacttgtggttttgcaaattatgtctgatgatgagcagagatgcaaaggtattgtaagagaagaaaatggcacaagcgatggctagagggaagcatc

SEQ ID NO: 11088 - DNA, 661 bp, Gossypium hirsutum
tttatgactggttttgttggttctttatgactgttttttgtttactttgtgcttgaaaattatgtaattgtttggtattgatttgtgaatttagtgcttagtaaatgtttgatgattcggctcaagtgaaattgctggtaaaattatcatggagttctccaggggtgaaatcagaaattctttttaggggatcgaaattaaattgtaatttttacaatagtaaaaatacaatttcatcattttaataccctatatctttataatttttaaagaattaaattaaatttttatatttttagaggggctaaaatgtaattttatatttactaatttaaaaatttaaagagcctaaataaaaaattttctattttaggtggctgaggccttcgccaccccttagtttctcccctggagtcctctatactaggagtcatattatatcttgtccttttgcaatttagcccttgtatgttagaccaaagggcgacctgatttttctattaaaaatttgtgtatgtatgtcagcatgagacacatggcatgacatatatcattgcttgattatttcgttaaccatgttagtttttaacaatataaattgatgtttgatctaatgtataaggataaatttgtttatttttttagtagagtgataaacgca

SEQ ID NO: 11089 - DNA, 640 bp, Gossypium hirsutum
cgttgaatttctctctaatgtccattttgttatagattatggatgattttggatgacctttcgggttccgacgcaaccctttgtctaggacaagctcgaaagtcatcagaggaacctctcatgtagataggtcaagaagcacggggaactcgttctcccatacacgcaatgtgtgctagagggtgtacattttattgataaattattttacattgattgagatattagtacaagctaccacgacatgtgcacagggatactgaagtgtttggaacctcctacaatcgcaccgcttgtttcaaaaatcaactccataggacctaggaggtataccggatcaacgaccgatggtctctgtaactcgaaacgtttcattacatcttgaatatacttctacatttatcgacctcgccatccgttggtttgtaactattgcattcctgacatattcgacaaacacgtgtcccgcctctatctggttaacttggtgctgccccattcttgatatcaaaatagccaacctgtagaatgcagtcgagaagacagatgaaatcacaagatgtcgtgttttcaaaaacacaaagttaaccccctccgccaaattagtggttatatgaccataattaagaccctcgtcgaa

SEQ ID NO: 11090 - DNA, 635 bp, Gossypium hirsutum
catctgtctttcaaactcttcttaaaatatgtataatataaaatgtctattttattgtctgtatttttttaaaagtataaatatgtttatccataaaaaaataaatttttatagcgtgcttaaaaagtccataatctttaaacttgtactctaataagaatttaccctttaatttctatccaaatgatcttttaatatttaattcatatctaaataagtgcttaacacatgaaataaagacttactcaagtacaaattagaagataataatagcttattttgagtctaaaagttttgatgttttaacttttcacatgaaaaatattctaaattatttttctagaacaatatctaacctgatcatatatatatattttaatataatatctagaattaccatataaatggaaggatgtcgcgtttcagcgtactggaacttacattctcttgtataaacaataatactcatatcaatagaactaagatttaataagtttattttctgaaagaaatactgaattagataaataacaataggcataggtaaacaacataattcaagccatgaataaaaaaccgaccaaaagaacagtgttgagggggcataggctataaagtagaagagggggtccata

SEQ ID NO: 11091 - DNA, 562 bp, Gossypium hirsutum
tatgggtgggatcgagttgatttaagattgggtgggtgaaaagagagtgagctaaaatggcaaaagatagaggaaaaatgagacctacggttatgagattgaaggccttgggggatctttgagggatagaaattaattcactgaggatgtagggtatggacaagaattgaagctcttctggggccagatccatgatgtcttcttaggaaattccacagaattgtaatatggggttggagattggggaagatgaaagcttggaaacaaaagctagtaaccatttccgtcaattggctatttgagagtactttgttgatttccaacgattttttgtttcatttctgtgttattcattgcatgagccatgagtctgatagaatacaatataatcgccgctgtcctgtagtactctttttttgtttgtttctttttaccattataaatattttttacgaaaaaaattacatttgttttttacgagatttttattggaattttgctattttttcccatttgttgtaggattttttttaaaatgttaaaagatctcgacatccatgga

SEQ ID NO: 11092 - DNA, 687 bp, Gossypium hirsutum
  misc_feature (654)..(656): n is a, c, g, or t
  misc_feature (658)..(659): n is a, c, g, or t
  misc_feature (666)..(682): n is a, c, g, or t
gagagatggatattccgggaaattatttttatcgcaacaaaggtacatcaaaaagacccttgaactatttgagatgtaagatgcaaaaccggtaagtactcctttagtttcccactttaaactctcaattttagattcctcacagaatgaagaagatgaaaggcacatgtcaaatgtaccttattcaagtatagttggaagcttgatgtattcaatggtatgcactcaccctaatatttcacatgttgttagtgttgttagccgatacatgacaaatcctggcaagttacattggcatgtaattaagtggatttttagatatttatgagatacttctaacatgtgcttagagtttgaaaaaactcaaaagggtctagtcggatatgttgattctgattatataagagacttagatcgaaaaaggtctctcataggttacctatttgcttttgggaattttgtcattagttggaaagtaacacttcaagctacagtggctttgtcgactactgaatcaaaatacatgacaattatagaggcaataaaagaagcaattttattaaagggcctgttcagtgaactggtaagtgaaaaaggggcaactgtcgtatattgtgatagtcaaagtgccatacatctcaccaaatatcaaannnanngaaagtnnnnnnnnnnnnnnnnnccagt

SEQ ID NO: 11093 - DNA, 409 bp, Gossypium hirsutum
ttttggtattctcctttgctacaagtaggtttgtttaaggtcaatttatctgtttaaacttgagttcttttcttttctctctttaaaatgttcatattctttatatctaaaccaaacaaatcccattaacatattattttctaaattctcttaattttgtcactactagcctccgtggtcgcttccattaactatcatatccttatccaaaataaaaaatcaaaattacgtctcatacttcatcatgatctcttctttctattttttcaaatcgctttctgcaaaaatcattacaaaacgtaaatccacaaagaaaatcccttttattttttcatcattggttgtcaccatgaatgctcaatcattttggtagtggtgagaaggaatggtttgataatggtgaaggaga

SEQ ID NO: 11094 - DNA, 659 bp, Gossypium hirsutum
tgggtaaattaacccaatcctcaataaaaaaagaaaaaaaaagaaaaagaaaaaggaaatccaacatcaacacatgaacatgtgagattagaatacataggttgtaaacacccttaataatattgatgtatgttgacacttgagagagaccaacattagtgacaatatatgataagatattgacaacctaactacttacattatcagtcaactcaagctataaattagataaataagcaatctgaaatttaggtttttaaaactagatcgatggtcaaagttattggatcgtcgatttaatcaatttgttcggacagcttgtttcgaggattccaactctgttctctagagaattaattgaaaggttattgatgaataacaatatgcaaagctaatttaattaaatttgtttaatgatttacccgttttactctctaaaaataattaaaaatataataatattaataactataatatgcgtaaattgtgtatttaatccttgtattttaagttggtcatttttaaatcttatactttttaaaatttaaaatttttattttggacaaattgtagctattaaattcattaaattaagttctactgctttcaaaatctaatgcaacaaacatattattaaatgtataatatcatgtcggctt

SEQ ID NO: 11095 - DNA, 528 bp, Gossypium hirsutum
  misc_feature (483)..(484): n is a, c, g, or t
  misc_feature (486)..(487): n is a, c, g, or t
  misc_feature (499)..(503): n is a, c, g, or t
ggagattaatgatttctaccggttgtgaatatttaatttcaaaaacaaaaattattattatacacattttcgtaaatcaccatcgagccaccctaacacattttattgtctagtgcctctacaaccacatcgctcaaatggaacccatgccaaaagctcttatttcattataaaagctttccattagaaaaaaaaatttgtacgtcaaatctttctaaaaagaactctttaatctcacgagacctttgaaatatcaagtctagcgattttccacacccttcatgatgtaaatcatcttgtactagcagctctctgcatcctttatagtgtgaattgccataataaactattgatgtgtagggataaaataaacttagttactagtaaataagtttcaaagatacaatgaagtctaatgactgtttacattttgcattgacaaaaatgactcactaagcatcaagtggagtatagcaacaaaanncnngcattttcctannnnngcttttcttcgacttgcatcgctag

SEQ ID NO: 11096 - DNA, 355 bp, Gossypium hirsutum
tattataaaataagaataaaatttaaaaaatcttaaaagagattaatttcttcttgcattcttttagaataaaatatgagtatttcactattcaaatctaatgtgatatatatggtcacgtttagaagtatttgtgagatggattatattttaaaaaatattttaaaatttttatttaaatcgttcggatagagtttagattaacacatattattaattttataatttaaaattaacaaaaattttaaaaatatagggcttatatgttaatttgttttgaagttaaattttaataaaattattttattattaaaatttaaaaacatggtggtttcagcaaatattattgcgaaga

SEQ ID NO: 11097 - DNA, 655 bp, Gossypium hirsutum
attagttcatttatgttgcaacttttggctgaaaagtgaccagcaattaagagggtaacgagcagccaattcaagtgtgaaagctcaacattgaagagtcatggagtgtgaacacatggaaccgaaaagccaagatgcatccagcaaatgtgaaaggattaattgacagctttggagttggaaacattagctctcttgaccgaatagtcacctaggaatgccaaattcagctcaccaatttgatgcatgtatctccaggttcattgaatctattgtgcatgcaccaagctaaatgaatctccacattcggctcaccttgctaaatgaacccccacattcggccaacctacataaataggaaaaactaaaattaatgtggtatttagctgaactaaattaagaataaaaacaagacacattaattcggtcaacaatgacactaaaatcagctcattaaattcggcagctttaaagcaattttaaatcatgtaataaaacttgacatattaaaaacatgcaacaaacatattaataagctgtaataaactaattaaatcgacttaaataaatattcagctattaaattaatgtctagttgatattgagctgaattgaaaatgtttgagctgaagttgagctaattcgagctcattga

SEQ ID NO: 11098 - DNA, 692 bp, Gossypium hirsutum
gctctttgaactccagctgaaaacactcgagcctaaggtgaaaaaataacctgaagtgctcctcatgtcatcaactgaccctgcccaatcgctatcagaatagcctacgagtttcagctcctttgccctccaaaacttcacaccagtatcgatggttcctttgacataccttaacactctttttgctgccttcagatgtgccacattactgcagtgcataaaccttgaaagtagactaacagcatagacaatgtctggtctagttgctgttaaataaagcaaacaaccaattaagcttctatatgccttctcatctactcgatcatgttcactggcacttgacaatttttctcccaatgcaactggtgtagtgactgatttgcatttcaacatgcaaaatttttcaagcaccttggaagcaaatgtttgctgacttatgaaaatgccatcacttccttgttttatctccatgccaagaaagtaggtcatcagaccaaggtcagtcatctcaaagacatgttgcatctgtttcttgaagtcttcaataagttcatctttgcagccaataaccaacagatcatcaacatacaaggaaacaattaacaaggtttccttctgatccttcttaacatagagtgtaggctcactgatactctttgtgaacccgagccttgctaagtagccatcaaacc

SEQ ID NO: 11099 - DNA, 621 bp, Gossypium hirsutum
tgatagggtttgctttcattctctaatataaataaaagccctaatatcatttaattattggaaaaaaatattacaaactttaaactaaactttatgagttagggttctgttcatatgtggcctgcatcataaaagttaagcttgtaataaaaaagttggctttatggaaggcatgacatatttgctttggtgttcaaactttaaattggtttttcaattttaaaatattcgtcattaaaatgtaagtatcatatcaatcgcgtccttttatcgatctaacaattaatttaattaggttttaaaatgctaactcaaatctcacggtgaacatgtttaaaatatatgaattaaattgtaaatacacgtgtacttactacatgaacaacatgtgtgaggtcagaaatttttttttggaaggcaaaattaaattatatatttttacgatagtaaaaatgtaatttcaccattttaatattatatatctttataagttttaaaagattaaattaaatatttattattttgggagcaaagtgtatttttaccgtacctaatttaaatttttataaattataaaagtgttaaaaaaaacttcagtatagagggtcgaaacccaacccc

SEQ ID NO: 11100 - DNA, 477 bp, Gossypium hirsutum
ttatgaattgggctgaatcaactctggtaaattccccttcttcttttttccttacttatttagaaaatatttttatattagaatttatatatattctttcttaattaaatttaaattttttttatttatcaataataattctaagttagacttatgaaattcaacaattagcttggctctaccatggaggcattggctcagttgggaaaagtgaaagtcctagatcttaagtacacaagttccaaactcaccattcgtaattttatgcgcgggtctcaaagtatcactatgtgcagttgtcatgtgagtttagttcaatttattggctttaatctagaccgtagaggttcttagtctgattttgttgtaatgatttgattctactttgtgattcctcatataatctgtattgtaatagttagtttgatacttgcaattattcaaacatatatttgtatttgtactttgattgggctt

SEQ ID NO: 11101 - DNA, 642 bp, Gossypium hirsutum
agtttggttccatatagaaatcctccatgtaaccatcgtctactgccttacagcacacattctccccgacgacacgattgggtgtattttttgttataaatattgtcatgtaaatataaatatgtcataaacaaaaaattgaggttattcattcaaataatacctttgtctttattattatctatcatgagttatgcgtaagttaataataaataacaaactgagctaaagggaatacacgaagcacactagtgaatatgaaacttggtaaaaagtaatgttatcgacattgaggcctcatcatatcctcgtacagagaatatgttgtcttcgtatgctacaatacccgcataatttctattgactgtctttctcccaaatattcatattgttccttatccaggtggaattcgggtgacttttcgagatacgacgcaggtcctttgcttggcatcaactcaaatggcggctggacaccgacaaccatatactctcatttgggatagatgggaattcaagactcaacacactatgaatgcattctagtcagtagacgtcattgatgcaaggcgcgtactcaatccatacgttcccacatgcagcaattgcatgtgcgcatgagaactgaaatgcttggaatct

SEQ ID NO: 11102 - DNA, 612 bp, Gossypium hirsutum
aagtaaatctgcccttacccaaatggttgttattccatttactaagggattcatggcctcaaagtaacaaatgataccaattttgtcaaagcctcatctctctcccctcctcttctttttgtatttaccattattaaagaaaatataatagtcatgtatttaaagtttttagtaaattttatttttaacaaatattaggattatatatttaataataatttgtaattgatatttttaaatattttaaatttataatgttagttgaaagcaaaattgtttcaaatttctccttcatatatttttttaaaatataataatgtgcatataaaatcatgtctatataaaacttgttttggaataaaaaaaatgtatatataacatttgcaaaaactccattgaagtaagagaaaatcaagtagtaactttcccatattttatcatgggaatcacatttccatatttataagaaaataactcacaagggaaaataaaatttcaagaaaagtaaataaaattggacatattaaatgttggaatcacttttcacctgattaaattctcaagaaagtgaccattttcaatcgcaccgaaagctaccttaaataaaaaaaa

SEQ ID NO: 11103 - DNA, 402 bp, Gossypium hirsutum
agctgatcgttcttatacacatccagaatgtaaaattgaagatgtgttggtaatagttgataaatttatttttccagtaggttttattattttggaatgtgaagctgataaaaaggtaccaataattcttggaagaccttttctagccactggtaaaacattatttgatgtgtagaaaggtgaattaataatgagagttaatgaccaaaaaataacctttaatgtctttgatgtcatgaagtgtgtagatacaaatgaagattatcacatcatttggattattgacatagtagtgaaggaaaaattggcagaattttgttacaacaaatttgataaggaagcagattcagttaagtcgaatgatgaggaactgattgaagaacttagtgaattgatagaggc

SEQ ID NO: 11104 - DNA, 497 bp, Gossypium hirsutum
tgcgggctgagtatacagaaaacgaggatagtcttgctttatctaacattgctggttctggtattgaattgatggtcttcattattttatcaggttgggctgaaacttgaatcaaatttgtgttttccaagattatcagaatttggatttttgtaatcaaaattccagagttttactctgtttttggattaaaaggatgcaatattggaattagtaatcagtgacatattcactaagaaataactactctatcaccttataattttgtatttaatccatttagttcatacattcgtttttatgagatgatatccaacaagtttgagattcgaaccttagtatacaatcactttctctaatcctaaactatgatctactattaagaaaaaacacaaagcatcctactgtgattattttatattgcagtatttacacaattttgaaggtgtttattttagctgaacatgttatgcggttgcagtgtggtgtttgtattt

SEQ ID NO: 11105 - DNA, 595 bp, Gossypium hirsutum
aagacctttactcacttctatggcgattactatacgccatattccaattctccaaaagaccgtaacgtggcggattacactacgacaaatagataactttaaaactctacgccttaaacttggatttgtcagactcggggtgtgatactctcttttcatcatggacgactctttggcttataagggtgaacagttccaaattgactcttactattttatctgtaacaactaccacccgtgaagacaatttgcagatggcctcaaagcaaggtcactttatcgacctctcaactgggaaggctattattatatccctacctcaaattggactcaattggacctttcgttgggccacctaaggtccaatgagtagtataattagataggaaccctcacttacctataaatacttcgaagtgtaacatattaaggagattattctcctctgccaaaactctaatacgccaaactttcacccttctctacctaactccctgtactttttcaactcccgacaccaaaataagtgaaccgacctttttggtactgccccatcttcctcatctccgcctttgttgatacagggaatcaaaaa

SEQ ID NO: 11106 - DNA, 649 bp, Gossypium hirsutum
atttacacattgttctcaaccttcaaactacacaaacttacacagattcatggttccaaaattttgacataaaataaccattttccatgaaaactcattaaaaccttataatctcttgacgaaactttaggggaagtttagaaaccttctaatttcattaaaacaagttgaaaatcactttgaaacattgattttatacaaaatcctaaatttcaccattaacgacccaattattgacatttattcaaaacccttaatttactagataaaatttcaattttaaaggctagataacattaaaaactaataagaaatcgaaaaattaccttggctaaaggaggaacaatcgtttaatttaaaatataaaaatcccaaaacttgagcaataacaaaatcagtggtgttttttatggtttttttttggaatttttggaggtttaatgctaagatgatggtagaaataataggattgaattttgccaatcaaaattaaatgaatggagcttcaaaaataaaattccaaaaccatagtaaaaaacaattttgggttaccacaattcaaaatttctgaacctattctgagccaaaattctcattttaccctcaaaacttctagacccaattttgggatgtgacatattctctttca

SEQ ID NO: 11107 - DNA, 417 bp, Gossypium hirsutum
gaaccagtaaaacattactattatcaaggaaattcaagccaagaacaaagtcgaaatcatccaagtgaatggcctcaaaacatttattatcttttcattaaccaacttgtacctcaactccttgtgctactcccacaattgagaccaacttgatcctcttagtcagtttactaattgagagaccaagcttactcacaactttctctgatatgaacaagtctaattcctccgtatcaacaagagactctttctttgacctgtgatgttgatgtccatatacatcaatcctttctgcttgcgatcgctcttcactttcacataatcaagtatcattaatccaagctctaaagcctctctttagctccattctatcttctttagtgactgctgataacttagatcactctaaacagtctc

SEQ ID NO: 11108 - DNA, 395 bp, Gossypium hirsutum
taccaaatgattataacattatgctcaaacatatgtaagccattttcgcatggctatatacattaaccaaaatattcttccgccactagtctattttatacatgccataagacaatccaaaacatagcagtaccaaaccgtggatagtgatagtgtgactagttgctgacgatccccgagcctgtagcttcgcaatgagatctataaaacagaggaaacagagtaaacggagtaagcattacaatgcttagtaagttttaagcagtggcaatagataacaatcaaattataacatagttgttcgtatttttatttcactcttccttcgggcataccatcccttttccaaatacgcacgtctcatcatatacaataggcaaataaactttcacgca

SEQ ID NO: 11109 - DNA, 595 bp, Gossypium hirsutum
  misc_feature (585)..(587): n is a, c, g, or t
cttctttctactattaaatttttgcgtatgcatctgctttattgatatatattttttatgctaggtgttgttggtttagagaacattaatataaatttcactttggatttaattgatactttttatgcaggcttctgatagtatgaacggatagatcacttggaatttctgcttgttcgtgttgtcataacgaagtgaaggaggaaactagctaatcttgtccagaatttgcaaggtcgaatctattatctatttttaatttcatagttgcactattttgctacttaaaaattaacttgatttcaaaatattttagtactgctaatattcctatgaattaaaaatatattttcttataattattttaatgttttcatcttctttgatatatgaaacatcggaaattcttgagctttaactaacggggttttttgacatatgcacttgacgcactgttagaagtttcccatttaatcagttattgcttcctgctcctcctgcaagtattggtgcaactaaagcttagcttcaatccacattgtttgaggtaagaaaggtctacttcctttctttatttgaaaggtnnnctcctcca

SEQ ID NO: 11110 - DNA, 615 bp, Gossypium hirsutum
  misc_feature (50)..(56): n is a, c, g, or t
  misc_feature (585)..(585): n is a, c, g, or t
tcttgtcaccggaggcttgttcttcttaccaaatctatgccttgagcagnnnnnnnaatcgcctgaggtataggagggggtggaggaggttgagcatttggatttgctcgaataaattcagtataccaattgttcatcatttggagaaaggcatcccgagcctcatctccctgtctcaatgtctcaggtctactttccacaggcgcggtcccttgtgcgggagccggcgcattactagcagcatcatcagccgcagttccttcaggatccattactatattaaaacaaaacacagtttaaaataatcaggagtcaccacactatcacaatatttttatggcatgtataactagacttttacacacactttattagtccgagaaccgactaaaccatagctctgataccactaaatgtaacaccccttacccgtatccgtcgccgaaacagggaacaaggtattaacaaattatagtatatactattaaacaaaacccaacaaaaatatggcgggcattttgatcattataacatatgccattaacaatacaaaccaacttcaaaggcttcgaacaaaatgattantttgatactataagtagaaatttgaaccta

SEQ ID NO: 11111 - DNA, 829 bp, Gossypium hirsutum
  misc_feature (638)..(643): n is a, c, g, or t
  misc_feature (645)..(649): n is a, c, g, or t
  misc_feature (651)..(657): n is a, c, g, or t
  misc_feature (662)..(673): n is a, c, g, or t
  misc_feature (678)..(679): n is a, c, g, or t
  misc_feature (681)..(681): n is a, c, g, or t
  misc_feature (684)..(697): n is a, c, g, or t
  misc_feature (699)..(701): n is a, c, g, or t
  misc_feature (703)..(706): n is a, c, g, or t
  misc_feature (708)..(713): n is a, c, g, or t
  misc_feature (717)..(719): n is a, c, g, or t
  misc_feature (721)..(726): n is a, c, g, or t
  misc_feature (729)..(733): n is a, c, g, or t
  misc_feature (736)..(749): n is a, c, g, or t
  misc_feature (751)..(763): n is a, c, g, or t
  misc_feature (767)..(772): n is a, c, g, or t
  misc_feature (774)..(776): n is a, c, g, or t
  misc_feature (781)..(788): n is a, c, g, or t
  misc_feature (790)..(801): n is a, c, g, or t
  misc_feature (803)..(819): n is a, c, g, or t
  misc_feature (821)..(826): n is a, c, g, or t
tttactccaatgacgaggttgctatagaaagatatcaagtttgaatagaccaaaaaatgccaacagagtttcgagaaactaaaggcgttgttgactgaagctctaattttagtgtaaccaaaactgggaaaagaatttgtagtgtatagtgacgtatccttgaatggattgggatgcttgctcatgcaagaaggcaagctaatagcatatgcctcgagacaactgaagccgcatgagaaaaactatcagactcagagttagccgccatagtattcgcactgatgatttggagacaccatttgtatggcgagagatgctgagtattaaccaaccataaaagtctaaagtatttgatgactcaaaaggaactgaaccttcgccaacagagatggctagagctcataaaagactatgaaatggtgatcgactatcacccagggaaggcgttgccttgagggctatgaacacttagttgtagttaactgacgatggttctattttagctgagttgagactgaagccaatgtttttgcaagagatttgcgaagctcaaaaaggtgataaagaattgcaagctaagataactcagtgcaagacaggtatagaatcaaactttcggattggttcagatgagggannnnnntnnnnntnnnnnnnaaatnnnnnnnnnnnntttanntnttnnnnnnnnnnnnnnannnannnntnnnnnnatannncnnnnnnaannnnnctnnnnnnnnnnnnnnannnnnnnnnnnnnatannnnnntnnnttcannnnnnnntnnnnnnnnnnnntnnnnnnnnnnnnnnnnntnnnnnntta

SEQ ID NO: 11112 - DNA, 387 bp, Gossypium hirsutum
tttttttttcaatatatggttcgaattattttgattaaactacgcattattacttttatttgtatcagattacattttaattatttaggtttgaaatgttatgttttaatcacttacgtttttgttttgttacaaagtggtcactctaccgttaagcttcattttctctctaatagctgttgtcgaaaccatttttttgaaaagggcgtcgactttggttttgaaagcaaaaacgaaaacgggaatcgccaccaattttttttgtttaggtgtgatcggatcaccaaaaagtttggtcattttaataaaatattttggtttactaaaacaacgattttggtctatgaatatttgaaaaaaagggttcgggagccggttacgtaaaag

SEQ ID NO: 11113 - DNA, 663 bp, Gossypium hirsutum
  misc_feature (21)..(22): n is a, c, g, or t
atgagagaagggtcggtgtcnngcaggcggacactggtgatcttgagggcggagatgagggatgaaaccttggccggaaaaggcggcggtggaggagagacggtggaggaataggtgattccgatagaagggatggaagaggtgaagtggaggaaggaaaagaggagagaaaggaagagaaaggaagccatttttcactgttcgtgaaaaaatgatgaagagcgtgagttcagttagttaagtaacggcggttagaggctgttattttaggcgggaaagttcagttatggttgtgtgtgattctctgcggaatggtgcacatttaacattcatctgaaccgttcattggacaacgttctgtgatgtaagggaatgattgattgatgtattttgattttggatgaggcccattgggttgaatctaatatgaatcggattttgggcctagttcctaattaatttcattaacaacgatgtttggatgggcggtgggctgcggcacagtacgtttagcttactttttgtctcatgttacaatatctaatctcactgttatcaagtgattaataaagcaaattaattgattacattaatatactttgtataattgtcctcatgtgatttttgcatgcaaagcaaaatagaagcaaatgttgttcactg

SEQ ID NO: 11114 - DNA, 613 bp, Gossypium hirsutum
ctttaatcattttagcaacttttacatctttttcaatttagtcctttttatttaattaaccacccaaacgtcaaaattttctgacgaaattttaataataccttactaatactccataaatatttctaaaaatatttatggctcggtttatgaagctgaggtctcgatacctcattctcgacccaatttatctaattaattcttttaaatcaccaaattcgctaattcaaaaatacttttatattcacatttgactcataggtattaatttattaaatttttaactcactcgtcagatttaataatctcaaacctctaattcagacaccactgaaaattaggctgttacatatagaataaagtattaattgagaaaaatcagctcaattgagaggctaattgagtagggacgaaattattatttattaaaagctaaggggggaatggtaataaacagcttgcactaaaacagttttgaacagcaacagtagactaactttgaaaaatcaccataaattttagaaatcgaattagaagcttaaaaaatatgaaattaaatcttattgagtctagtttctcataaaagaaacggtgtagcaatggatttgtaaat

SEQ ID NO: 11115 - DNA, 637 bp, Gossypium hirsutum
tctttcctgatgaaaacaggtcaatcttcttaatcccttttcaaataacaaagttgatccattgatcaagatgttcaccatgccaatggcatagtttgaagcaccctttgagctttctttatctgttggtcaaagctgagacagagaaaaaattggttgacacagttcaaggcggattggcttcttttgttttaagcaccaatagtttgtattcatgacccagaaagcaggtttcacccgacatgtttacatcaaagttgaggtctgagtgattaattagcccatgaatactgatgtatgttcacgtgactaactaaaaataccacaaagacaagtgcacttattgataaatagtatagctacggtgagtaaagatatcgtatccacgaggactaaaagtattaataattaccgttttcctattatttagtcgacaaattggagtgattgttttaaactaagatttgttaaattaatctaactaaagaactcaatagagaatgaatcaggaaaataatcaagtaataactaatgagagaaacaatacctaagaaagaatccacttagagttaagctattattatgaattagaattaaacaatttattcacttggtatcttgatccctagaaatccct

SEQ ID NO: 11116 - DNA, 655 bp, Gossypium hirsutum
ttgttgaactctgaaatggaagcttttattgctgactttgggactgcaagacttcttaatcctgatacatctaatcgaactgtaattgttgggacgtatggatacattgccccaggttctgcagcttcactcccttcttttcctttttatttagtttctgctgcttattgtttcgaattacatattagaataacgagggaaacaagtaggaaaaaccaaatgaagaaatatcaaatataaataaaaaaaaattaattctagattagaggattcaaatgcaaacatacatgctgattacaaaatataaattaacatgtatttaattatttttgttgttgtaattacagaacttgcttattcattgatcgtgaccgaaaaatgtgatgtttatagttttggagtgctagcgttggaagtattgatgggaaagcatcctggtgaattattgtcaacattatcatcatcatcgtctcgtgtccaaaatttcatgctaaatgaaattttggaccctcgattatgaaccccgagaagtcgaaaaatggcaggagacatcgcttttattgctgtcattgcttttgcatgcttacgagctagacccaaagctcgaccaacaatgaaattagtgtctcaagaattcctacacatcaattcccca

SEQ ID NO: 11117 - DNA, 607 bp, Gossypium hirsutum
  misc_feature (53)..(54): n is a, c, g, or t
  misc_feature (59)..(59): n is a, c, g, or t
  misc_feature (61)..(63): n is a, c, g, or t
  misc_feature (389)..(389): n is a, c, g, or t
  misc_feature (535)..(537): n is a, c, g, or t
  misc_feature (544)..(550): n is a, c, g, or t
  misc_feature (554)..(554): n is a, c, g, or t
  misc_feature (564)..(566): n is a, c, g, or t
  misc_feature (589)..(594): n is a, c, g, or t
tctatcatattttaatacgttacttatttatattatatattatataaatttgnnctttntnnntttttttagcattccatttattacataataattattctagaaacagataaaacaataaagttttcatgcagcacatttagagtaaaatcaagggttgatactagaggtaaaagtcaatatacattccttctgcagcctttgttaaacaatcagttaacctattgcattcatgatacacatgagttaaattggtattccaatcgcgtctcaacaaatctcgaatcacatttatgttttatattgtagttagtgttaagattcttgtgataagttaagttgcaaaaaaaaaaagaattattgaaaaaaaaaaaatttaatggatgtanttggaaaaaaaaaaaggtggaaaaaaaaaattttttggaattttttttttaaaaaaatttttaaagtttttttttttaaattggccccaaaatttaaaaaaaataccggggaatttttgggaaattttttttttttgaaggggggnnnttttttnnnnnnngggntttaaaaatnnnaaaaaaatttaattggaaaaagnnnnnnttttaaaaaaaaa

SEQ ID NO: 11118 - DNA, 686 bp, Gossypium hirsutum
tctcaacagataatttaggtttcatcggtttgtaatttttgggtttttgaaattttagtcttttacgtttttgaaattacattgttaataaattttcattaagatataatttgataagacaacaatatgttattaattacattttgatttttaaattaatggaataaatttcaaaaattcataagagtataagaaatgagatgagagataattagatcatgtatgttcggtttgttcgacggatagaaaaatgacttttgttttcctgacaaatttccaatgggtcaagtcctttgtatataaaaccatatacaagaactaatatatatatatatatatatatgaagtcaaatctgaaatgattcaaattccaaaaatttaaattttaaattgatttgattcatattgacttaacttgaaacttattcaacacaatagattgtaaatctaatattatctcattgaattttcaatttggttcctcgacattctttaataaatatgtcatttattgttcttaaaattcaagtcaagtctatagatgataaacctaaactagtatttaattataaaatatattacttgattggtataagcattgttgttaatacagtaagatgtggattcgaacgcactgaagtctattatcctcctatatttatgggttagtgagggaatatggatga

SEQ ID NO: 11119 - DNA, 561 bp, Gossypium hirsutum
ttgtaacatggaggtccttggtatcggtcaaattgttttttgccccttctactaaaaaaaagaacaaattaattcttgtacgttagattaaaaagtaaatttatctttttttgtcaaaaatttcattcactatcattaaaaactgatgtggttaaagggataattaaacaatgatacgtgatgtgctacgtgtatttcacgctaacatataaagactagtttttcatagtaaaaattgatgaaatttttaacaaaaggattaatttgccttttgatttaagtagagggagcaaaaacaatttaacttgagtataaggatcttgttttacaacaaaataaataaacacaaaatcactataataatagcttgttgcggtggttacaagtgaaaacatatacataaataaaggttggttgtggtcatgttggtagtttgcttttctagcgtgtttggttttagtttagttatctgatatgttcggttttagtttccgagataataggaagagatggtgggactacaatgcagttattagcattttgcttgaggtgatgcaatct

SEQ ID NO: 11120 - DNA, 489 bp, Gossypium hirsutum
  misc_feature (483)..(484): n is a, c, g, or t
gaccattgaatgattttaattgcttaatttttaagaatgtatttggctattcggctagctcaaattttccctataaatattttttacttcattttgtaaaagaacttttggcatattgttaatgaattgctgccgaatttgtgagtcactttctctcaaatttcattagagacccgtaagacttatctagcttctagtggtgtctacccgagtctcccttttcaaacttatcactcactaaaccgagtgtggcgttcaacctatacctaagtatcgggtcaaggttcctaatttaccaaattcaacttcttaaggtcctataagtgtccggtcaatacacaactttcgtcttggctcattcttgaccttttgatccatttacgtaccaaaacctataccattttgtacctacaccaaaaacccatttcgtaacaaaacctataccatttcataactaaacctaaaccataatcaaaccaaacnntaaac

SEQ ID NO: 11121 - DNA, 449 bp, Gossypium hirsutum
tgttgccacatatgccttcattttccacactaaattattaggttaagacctagcttaagaagtataactggctttaaataattagctatttcaagctaaaatagaaaaaattcgcccgtaggtcttagcaattatgtcaacggatttccaagattcagtccgcacattaattgattttttaaaatgaattttaaattaaatcttacattaatttaaaaaagttaatacattgttgtagctttaatttttcttttgtgttaagttagcctttaaatttaataattgttctcgtattgaagcttaaattaatttttgtccaaatgagtacttgaatttggtaactattttcgtattgacacttgaactttttttgtccaagttaattcttatatttcattgaaaactttaaagtttaagcccttatgtggaacaagtgtctaattcatgcc

SEQ ID NO: 11122 - DNA, 607 bp, Gossypium hirsutum
  misc_feature (53)..(55): n is a, c, g, or t
atctcgatagttagtacatttgattcatgtaatcattttcgtggagcgggtannnattttttgcagcatttataatttcttcggatacctaccaaccaaagttgtcaaagcctttttcactgtaacaaaattctaacgagatttctggcactgcgacgaacaaatgctctctctctctctctgtgccttatccttgtttttagcgtggtcggaacctttttcatcatttcccaagtagctttgcctcgtaccactgtgtcctgcatctttcctttacttctttgggcaaaatgtcgtgcatgttaagtttaaaaattaaaatataacaaccatccccttttatttttatttgggtgggggcacaaataaaaaaaaaaaaaaaaaaaaatttttggttttttaaaggaaaaaaaaagggaaagggttggaaaaaaaaaaaataaaaccaaaaaattaacctttttccccctttttaaatttcccttaaaaaagaagggtaaaaaaccaatcaattggcaaaaaaaacccccaaaagggggattaataaaaacccccaaaatttttttttttttttttttttgaaaggggggggaaaaattaaaaaaaa

SEQ ID NO: 11123 - DNA, 587 bp, Gossypium hirsutum
agtggatgtcctttagaggtctctctatgataagaatctaatcaaattagtctatctattaataaaatggattgaattaatccttttactattaaaaaaaattcaaataaagttaaattagaatagagttaacaattattattttaaaaaataatttattatttaataaatttataattttaaggttttacctattcaaaaaattttaactatttttttattatcagttagaccttcagcctatttctaacaacattaattaaaaattattacaaaaatctttctacatatcaatattaggagaaatgctagatttgattattttaagacatgtttaaattaaaaaaaaagtagagattaaaggatggataattaaaattctatgcaataaattggaaaataattgttttgatgatgattaaataatgattagaagtgataatgggtttgaatggttatgtaaggtatctagactaattttttaagctcgggtttggtttgatctaacttgaaaaatgaatttactttttttgtctaaatccgaccaaatttaagaaaagtaaatccaaggttgacctaacctaccc

SEQ ID NO: 11124 - DNA, 666 bp, Gossypium hirsutum
cctgagttcccagatgctatctttgagacatggactgaagagactgacgatgcaagcgaagatggagctaaagaggacaaagggaataagtcagaaaaatagaagggtggattcttgtcttgttatatatttaattatttttaggtatttaggaatttatttctttagtaattaggattcaatttttgaaaaataatacatagcaagcataaataaatacttctttagaaagaaaaagactaagtgatgtggcaatgggaatgaacatgtctaggattgggttattaggaagacttggtatttaagcagtcttaatggctcacctctctttctttacaaccctacctggtgttcagttttcattcattactttgttcttgcaatgagggcattgcttctttttaaatggggtaaggcaaataattgctcgaaatttttaaaattttcaagtatgtttcaaataatttctttcataagtatgttttaataaatgaatgtttagagaaattctttttaataagatagcttgtatgcaagcacgaatgatgattttatcttagtgattgtatgttatcatgaagaatgaaatgtttttatgatattagtcttaggtaatgtttgccatgaaaatttagtttctcttgaaatcagacctgcatggaatgt

SEQ ID NO: 11125 - DNA, 497 bp, Gossypium hirsutum
cattccttaaattggagaattaaaaaccgtataaatagatggaggtaaaatattctttctttgaggacaaaactacaagattatgttggaaaaaataattctaaaacaatgaattagtctattgttttctttcaaaactaaccagtggtgatgtttatagccataaatctatttacataagtcatacttatgctttgtacgaagggaactaaagtgttcttggcttttaaccacttgttcttctctgctatcattaacctcaaaaggtgctagtaatcgaaagacaaattattgtcaaaagatagaatttatttgggaaaataatccttttatattttgagagaatattaacgtatttaaaatgtatttttaacttagtccttagtctctatttataaagagaataacaagtgtctcaatcgaacaactattaactgaataataatatttaaatacgaaaaatacaactctgctgggattaagtgcccttagggtaa

SEQ ID NO: 11126 - DNA, 468 bp, Gossypium hirsutum
  misc_feature (63)..(63): n is a, c, g, or t
tgtatttccatgatcctttccctgccattcatgttgaaggtacaaatctatccctggaagacntgagaaacaaagataacagttaatactggtagcaaagggttgctattttttgggagcaaaagagaaaatttctatttatttgtaaagtacaaatcaataaaccaaagaaatgaccaacgaagtgttggggataacgtaaggcacattcaggggcgaagccgggggtggcatgggccctggtccccttaaaatgtaaaattgttatttaggcctttaaaatttttaaaaaattttaaattagtaaaggtaaaattgcactttagctcctctaaaattataaaaatttaatttaatcctttataaattataaagatataaactataaaaaattaaaatttcattcgccccctaaaaaattgttctggcttcgcccctgggcacattgcactttcttaagagaaaaaa

SEQ ID NO: 11127 - DNA, 675 bp, Gossypium hirsutum
  misc_feature (669)..(669): n is a, c, g, or t
gttgcctatcattactacagtcatgggcaccgtttcgctttctatttctacgtcctcgagtggaccacccatatacattcccactaatgacgacgtaaattttatattagattttttacaattattatgtagatttttaaaaataatagtatgataaaaatttatttaattaggtggaaccatctggcaagttatgctcgattacctacctctcttgaagatatacagcttctattagaccaacagtcggaagcacatgtaagtattaaataaaatttatatttccatcataagctagtcgattggtatttagtatttagtatttagtattatgtatataactaatatttctatcatgttcatatagtttcaatggacaccatacgaggatccggcaattcgggcagtaattccggatgatttcttccaaaatccaaacacttggcacacgaaagtcgcgttgatcagctatgcgaccgtagagatgcaccagtcagacagagtgttacgacaatttggatgtagacaaccaattcccgtggcacctaaggtgtttgatgatcaccacaaaatcgacctacggtaattgcatacggattggccgagattctggtcccactatatctaaatgtaggaagatcggtatgattatatacctactttagaacngggcat

SEQ ID NO: 11128 - DNA, 493 bp, Gossypium hirsutum
tatagcagtgcaagagcttgtcgtaacatggttcgaacctgatttgccttcgaatttaatggagcccttatgtcgtaattttaccctttgtataattagaagttaatatacatgtatgaaataaaaaaatggtgagaaaccaaaatcttttgtagtgaggaggttgcctccgagcggttcaccgatgtcgagcttacggaagctgaaagagaaacataagagctttaatcaaatctcttgttttggtaccgcccgacacttcaaatccaagtggaagaggcgaatttaatcgaaatatgacgaaacatttaatacctggcaaaatttacaacaaaaagcaatttaagatcaagggtttcgttcttctactgggacagaatgttccgtccgatacaagtggtaccagtacagaactgacgtccatgatttgtactttttgacgttgtccctatagtcactagagttattcacgtgttagaccatggttggattt

SEQ ID NO: 11129 - DNA, 549 bp, Gossypium hirsutum
  misc_feature (56)..(60): n is a, c, g, or t
ctcctactatccgcctggctgagagtcatacataattctaatggtgaacttgaaannnnntttgttcatggtatcatcttcgtcagtccaagactaattattttatattcatagataaccaggtttttgtattataccccccctctatctactaccaatgagtaagcaagattacatgtttttagttgttcccgtaatgatgagacctatgatcataggggagaaaagatgatcaaatattgtaaagatgctttgatattggctaataaattcttcattggaacatcattaaatcttgggtgcaataagcactaaaataaaaaggctgcttgaaaaaacataaaaatttgggaacttgtaaagatctacaacataaaaaagaagtggaatcagtgggttacttttgccaaatacattcttaaagataacattaatatatagcaataattatgttttgagagtagtcccattcaaccaagcacattaatcttgatttcttttattttataaattatggaaaagtgatctaccaccctcataaaaaaagaa

SEQ ID NO: 11130 - DNA, 409 bp, Gossypium hirsutum
cagacaatcaaagctcacatcttacattttttgtcacatctgtttaggattacatgtagcttcagaatatatgtaatgcaattttctttttctccctttattacttatttgacgataaaagttggagagaactacaaaatcgaaaagttgagagaagatttgccaattgaataactctttctgaaatatcttttaatttttaatatgcatttaagcagtccttagtgtaaatacttttcaaataataattgaacagtcgaatcgtggctaatagcatcgttttatttgtaatttattttattatatctaatttattttttgttaatctacgagaatacatgcatagtattgtagacatagatgtaggaaattgcatgcatgtatcacaattcttggatgataggatgta

SEQ ID NO: 11131 - DNA, 565 bp, Gossypium hirsutum
cttgtgagaatgcagggtttccaggcataggaggaggcaccatccccgcattaccaaagggtgacgaagataggttttttgggggattattgccattcatagacatcaccgaaaaatatcaaatatccaccaaaatctaaaacattcacaacaaagcaaattccaagctatctcagcaaatacccactaaccaaaaacacccaaagaagcaatgattcccttcaaaatcaagcctttagaaattgaaccgtaaaaggttaccaaaaccccggaagaaaaagccctaattttgaataaataaaaaacccaaagccgctgaatttgaactaaatcttatccaaaaaaagcttctaaatatgcaaaatgggggaaattaagggaaaataaagatggaaagtgcacgaaatgaagaaattgaattacattataagatcaaggagagttctctggaactaaaatagagagaattaagagaggggcaaaaagggggtaaaattaaaaaaaaaatgaaataatcttacggaagtgtgaagagatattaggccttcccttacagcaaaaaaag

SEQ ID NO: 11132 - DNA, 491 bp, Gossypium hirsutum
tgtaagaattcagtccaagaggcccatttaaaggccttggacgaaattcccttgaaaggcaacaattagggctttttttaaaattttcctagtagggctaggaaagtagttaggaggtctatatatatggcttggtcagccacccttatagaggaggcattgaattgagattttttgtggagtgaaaactccctttgagtttctccaagaattctctcttgagttttctttagaagtagttttaacaatctttttgattgtgggagccatcttcaaccttcttcttgtcatgtttttacattggagggaagattagagccgtttgaagggagttgtgaaatctttcttgatttcaaggcttcttaggactttctttatcgtttttgctatttgttcttcttttattattcttgttggtgccgaattattgattaattggggttaattgttcttgttgcattttcagcccttccaagcctcaagaatcaaaa

SEQ ID NO: 11133 - DNA, 680 bp, Gossypium hirsutum
  misc_feature (7)..(8): n is a, c, g, or t
  misc_feature (674)..(674): n is a, c, g, or t
atatcanncatcaacaatatgcttttcttgtaattcaacttgtaggaacccataagatatccacgccatggtatctttaggggccttcaagaaggattcttgaattccatctttacgttcccttcttgagttgctactgcatttattttgttgcaaattgataaacaatgtttcttggactcatatgttagtgtcagatataggtgtatgtgttaaatacgggcatgcttaattttttctaagttcttccttgtattgatgtttgatatcttggtcctgatgtctggatacttcaaggaaaaaagaagaattggaacaatacatgcttttccgcccatgttgctattagtatcctgctaacttagtatgtggttcaaaagccattagagctacaaacctgatatctcaatcaatatggctgactttgaggcagcattctggaatttgtaaagccttgtgttcatacagttttttgtgtagtttatgagtatatcagaatcattgcattttcatttgtggtttagcttaaaagtcagttttctataacttgtatgacgagtgaaaaatgatgtctagttataataggtgtgatgtatcataaaaaaaaggttcaatacattctcaaagaagtgttgttttagtagttttgtagtggcagccagtttgcatagacnatcatg

SEQ ID NO: 11134 - DNA, 619 bp, Gossypium hirsutum
tggtttgagaagtaatatattagcaaaattgagagcctactcttttgtagtagagggagccttcgtcctttgttttcattgcaggttctggtacaacttaaattggaaaaattcccataattttggaccctatggtctttaatattatttagatttgtaagtataaaatttgtttcattaggttgtccattaatagtttagaaagtgttaaatacgtagaatactatttttctaaaatccgagtcttcaaattaagtttgatgaatttagttggcttaaaattataaataagtaacttataaatatacaacttttttttttgggttttttaggggaagaaaaaaggttaaatggcacttttgttttcttggcacaattggccaattaaatttaacccttgaaattccaattttccccttaatttttccaatttaaaataacaaaacttttttaatcatttggtttttaatggaacaaaatggtttataacccccccccaaaaggaaattcatttatttttctgggaaacaaaccaaaaccccaaacttttctaaaagatggttaatctttaattaactttttccaaccgtttggccgggaatggggccaaaggttaaaa

SEQ ID NO: 11135 - DNA, 633 bp, Gossypium hirsutum
ttgtgttggtctctaatgcagaggtactcaatattttgggtttattaatgtaccaaccggaaatttgaagtaaaaggttttgatttctgatctgattttcaatttgttaatgaccatagtgtactttcttgcatcattccattctactcggtttctttacggtgcgaacggctgagcagagcagggaagcaacgatgagtcgacccgggaggagacagcttgagacggccatcaaagccataaaataataaaatgttttattttggttaataattagtattggaattaaaattaatttaaagtggtacgcaatggcaaattgtatacatgtgtcaaaaaaaaatgtcatgttcaattttgttaaaatttttaataagagtgatcaaaagtaataaactatgtaacgtgagtgtttaaatggtaaacattattattttgagtgagacttttttataattgagtaactatttaaatggtttatgttgaatataaattttcatttttgaaaaataataaattttatgaaagtatcaaacaaaatacgaatatctatctgggaaaataaaagcatagaataaaactaaatttatatgaagagggaaaatataatgggctagaaagggaaatttcatg

SEQ ID NO: 11136 - DNA, 637 bp, Gossypium hirsutum
  misc_feature (65)..(65): n is a, c, g, or t
tgaaattcccataacacgtgtacatctagatatacagacagacataaaatattagcaaaatctangtttagatgcatacatagtgaattgattagttagtatgtgaattgaatggtaaatgacaagttggtaagcatacatagtgaattagttttttaaaatgattatgtgcatgtttatattgtattgaaagttgttgggcacgaaattgtataaagatgggctatgaattcaatttgaattgaatgaatgcaattggtttaaatttgtattataatgatttgaatcatgaaaatatcatttaccgttatcgttaagtgtacggtttgttttatctgtgtgcaagtacaagtggactttaagattatgaaaagtaactttaatgtataggaagcaatcttcaattcaacaaaatttgtatagttttttttgttaaatgtatttatataatatgtacttaagttgagtcgatttgtaacacaataaataattatgtttagggtaaagttaaaattgatttttttttaaattagtcacctagttgaattatgaaattgagtatgctaaaattcaaaatccataacgtgaaaattgtcatggtcaaatttaagatgtatattcataccaaatacttgaa

SEQ ID NO: 11137 - DNA, 360 bp, Gossypium hirsutum
ttttaatgaaaaatatcaatatggtaaataattgactaaaattaatctttagctctatgaggataaaaaaattaatttaatcctttaaaaatttataatttagataaactttggcttcgtcctagcaacaacaacaatttaattgcttcaaatataacttcccatattcatatttccatgaaaccatagtccaaagaaaaagaacccctcgaaatggtatgttactcaaaaagggctagctaggtttataaaattcacatattaatcactatataggttactaggtagctagagaagaagacataaaacaaacccttgttgaacttgaacccttctttgatatggtagccttaaggcaaa

SEQ ID NO: 11138 - DNA, 551 bp, Gossypium hirsutum
gttgagcgtttgaagaataaaaaagccattaaagcttgcttggtggaaccatcaatggaggaaactgaaatcaactttaaaatgtgggatatgcgcaaaaagtcaatgtatgtcgttacgatatcttgaaattctattgtaaagaacaaccaattcaaagctgaagatgttgttcaactctggtcgttccgagtcaactcaactttatgctttgcacttcaaaaattttgacttgatttaactccagaaaaatgtatagttgaaattatgaagtaatttataattgtactcaattatgtttaaggttaaatattaatattacttgaatcaaaactattagtttattttattacgtacataacccccaaaaaaacaatgtaaaaatcttatgttgtcttcgtgcctttgcctgacttgtacgaatattagcaacagtaactgaatttctctttcaaaggcatcatgtatatttgcttatcatatagaagcataaaatgtagacccaaaggccctttttactttattactctctttaactaaaattaaatcaa

SEQ ID NO: 11139 - DNA, 616 bp, Gossypium hirsutum
  misc_feature (508)..(509): n is a, c, g, or t
  misc_feature (557)..(561): n is a, c, g, or t
  misc_feature (565)..(565): n is a, c, g, or t
  misc_feature (567)..(569): n is a, c, g, or t
  misc_feature (574)..(578): n is a, c, g, or t
  misc_feature (580)..(582): n is a, c, g, or t
  misc_feature (607)..(613): n is a, c, g, or t
gggtgatgtacagctcaactcctagctaaatctcatccgcatttgctattccattcaaagaaaagagagaactaaaatagtttttttgcgtgtagcgaatcatgaaatttaaaaagtcgtgtaacaaatattttccccaaataaaataaataaattctatttttatattcaaactctttttattaattttaaattataaatgaatttattcgatgaaaaaaaaatggaatatagattgacttttatttccataagttttataaaatattaaatatattgatttaatttaattacaaaatatatgattatatacaatgttgcttgaataggattggaccggctagaagatcagtctagagagtgactttaaactggttagatcgtaaatcggtacgaaataattgaatcaattaaaaaatcaatcgaatttacgattgaatcaattgaacatatattttttatttttaataatttttaatcaaatcgatcaaaccagatgaatcaaacnntctcagacatattgaatttaggtgatgttggtcatgtctttatactgnnnnntttngnnngagannnnntnnncattatcatcgggattgtatgtatnnnnnnnatg

SEQ ID NO: 11140 - DNA, 672 bp, Gossypium hirsutum
gttcgattcttggactgtaagaaatttggggaaaaaaaatctggaaatcgaaatttcaagtttttttcttttggttgtttaattcagtttttgcagtctgttttaatttgaatactttgaattaaccatattgaggatttaaatttcgatttcattttctttttgtgcatataatttcaatttataaacgtttctagtttctttatatttcttttacttcgttaaacattacgaaaaaacgattattttatgagaagtgcattctattgctacattattattattattatttgaatttttatgttgctttttttttatatatatttgcagaagaacaaaaaaactgaagtttcttgaatcacaagctgaatgtaagtatttgatatttcaattttcttgacatttctacctaattgtctgaaactgaaaaatatgaatttgtatgccgtggaaatggagcagtacaacctaacttaaaggattctttcctatgatactccgactctttatttttcttgagtacttgtctttgttgtgatacatatttggacataggtgtcacctttcaaagatcatccaaaccttaaacccatgctttattgttgagttgaatggatttgaatttattgggtttatatggatttgaatttattgggtttagtagtaagatga

SEQ ID NO: 11141 - DNA, 644 bp, Gossypium hirsutum
attcaccttatcataaatgtatataataaagcttgaattttgttttaaaaaataaaagttttaaagagtgtaaatttatttttcatagaatgacgttaccttgggaccactcaacatccttgaagaaaaataagggtaaattatatttcattatctaactatgaaaaattataaaataatcatctaactaatcggctttatttttttggtcatcacccattaaattactaatggaaaaataactcgacaacttttaaaattggtataataataactttaactctcaacatttttaatcatgtcaaattaatattgatcccaaacaaattaatcaccaacatttgcacattgtgtaatttgatttttttttacagttcactttttatttgtaacattgacggttaattttaaaataaaaaaatatgaaaattatcatcttgaatttttttttgtgtttctatttttagtatattctctatcaaacttagtcaataaattaatcatagaattgcgttacaccgggggcaagatcacaccacatcaactcaactgcttgtaccatcattctcaaacaacattaccaactcagtaggtgggtctacatatatcattaataatcaccaagttcaaggaaacaccatatg

SEQ ID NO: 11142 - DNA, 691 bp, Gossypium hirsutum
agttgcaatcagtgacacatcatgtatcttcagattaggctaattgggaattctttataaaggaatttcaaaagaaatatattggtgaactatatattgatgatagaagacaagagtttttatgctgacacaaggtggaatggctgtggttgattatgagcgagaatttacacgacttagtaggtataccgttaaatttgtgtcgactgaaattgaaagttgcaagtaatttttgtgtggtttacatgatgagcttcgggtacaattcgtatcgcatagaattactgagattgctaatttagttgatcgggcaagaatagtataacaagctttgagttttgataaaaagactgaggctactcgtactgttggaaaacatcctagagctgctagttcaaatccacaaccaaagtaatcaaaaaaatttcgtggtaattgaaagttgacttttaagctagatagagctgatagaaatcatgatcgacaactgactgtatccactggtagtgtacgaggtccatctaggtatattgatattctgaattgtgagcactacgggaaaaagcatcgtggtgaatgctagaagttaattcgaggttgttttcactatggatccacggagcattttgctagagagtgtctgaagaataagaatgctatccttgttacttcttagaggcctgtacctaaa

SEQ ID NO: 11143 - DNA, 618 bp, Gossypium hirsutum
  misc_feature (21)..(21): n is a, c, g, or t
  misc_feature (523)..(524): n is a, c, g, or t
  misc_feature (552)..(552): n is a, c, g, or t
gttttaaattcacgttgatancaaatttatctaaagcatttaaaagtaaatctaaccacttcttctaaaacgtaataaaattgtatgtatagattttaaattttaaacccctcaaaaaaaatcaaaattaaaacttactttctcctttaaaaaatgaaacatctctaatttgataaaattacatttaggatagagattaaaagttttttttttctttttaaacttcatctgataaactaaatcaaattatattaaaacaattaatcgatacagttgccgggggagttgtatgggatgaaaatgaaaattaaatatttggatataaccaatatctaaaaaaaggtttgatttttaaggggttcaaacttatccaatataaaggtcatgataaagtaatcattcaattaaacagtttggagaaagctattttaggaagtattctcaccacatcgaactctaattaaaggaatccaaagtattttggcacaagaaaatacgtaatttttgcgttacatcctgaaannacaaaatcaagttggggaaggcttaccntaacaaacattgatcgaaaaaaaatttgtaggtttttgatttcccgcaaggattcaaaggggaaaa

SEQ ID NO: 11144 - DNA, 715 bp, Gossypium hirsutum
  misc_feature (675)..(677): n is a, c, g, or t
  misc_feature (682)..(682): n is a, c, g, or t
attcctcaagatcgatccattatcaccttcaatactaaatctcaataagctattcataagacaattataaaccacacatcaaaggccatttgcacatatatatacatcatcaaaatcatccatataaaccaacttacatggctatatatacaaaccaaaacatagacatttacaagccatttcaaatggcacaacatattaccaaatataccaaaatccctatacatgccatatactcaaaacataagtacaaaaagtaccaaagtggtagtagaatagtgtgacgaagtctctaacgatccccaaatctgagctagctttgaagtcactaagaaaaacatggaaaaataaacaaagtaagttttatagcttagtaagctcatatgaaataaactcaatcttaacatgaatatacaattcatcaatttgaacatatcaacatataattcatttaactaacaaacctttcacattttcaatcataatcttatatataaacttcacaacttcttcgatttaagcttatacagttcatgtacatacctgtaccatcgcgatcaatctcatacacaatcccatctttcatttacccgttgaaccattcagaatactatcagatactcgagaatctcgcacccgaagtgacaatatcatggacctatcctggcccaaagnnnactcnatgcatctcgcacccataatggcaatatcatgg

SEQ ID NO: 11145 - DNA, 586 bp, Gossypium hirsutum
  misc_feature (553)..(553): n is a, c, g, or t
  misc_feature (555)..(557): n is a, c, g, or t
  misc_feature (561)..(563): n is a, c, g, or t
  misc_feature (579)..(581): n is a, c, g, or t
tctgcagttattttctccctgtcaggcaacggtgccacaacaccctaaatagtagtgaactcgtggttgtggagggtctcggtgtcacgacatcctacccctagtgtcacgacatcattggtgttggctctaatttctacccctctaaggataccatgacttcaaaggcttggtatcgcaatgttgactcgttgtcttgacatcctaccctcattgtcgcaactctctcgacagtaggctccatgttgatttcgcgttgaagttttgtatccttaaggtgaaaggattcggtgtcacgacatcactgttatcagtgtcgagacacccactctaaatgatgtcttccttgaggttgggcaattgtcgtcttcctacatcaactcaaacacctcattaggtctcccgtggaaccatgttgccaattctggtctttaaaaggggcaaaaatcgaccaaaaatatttattaatgatgaatgccaaaattcaagaaaagatagttaatttgcctaagaataaactgctcaagtgtattggaaactccaaactgtcttngnnncttnnnctttatcacaaagaannnaccaa

SEQ ID NO: 11146 - DNA, 638 bp, Gossypium hirsutum
tgttacgatccatattcaaacacgtacaatacagggtaaaggaattacccaaaccttatctgtggattgaatcttcaaaataatcaaccatatcaaccaagaccacatccgcctcaacaatattaacatccaaagtcatctcttgaaaccacagtagagaggttggccattagcaccgaaaagttccaacaaaagtctgaggctcacttccaagaaattgatcagcaaataagtaagttagcacttacagttattcgtttggagaactaaggaaaattagcatatcaaaccgagccgaacccacgtcaaaatgcaagtactatgactataaaagatggaatagagtcaaaactggtgcttggcacaagtcgtgaccacaacattgaacaggaagccaaactagtagctccccctgagccgacacttcataaatcatttgttgtacctttctcataccctagaagactcgcccaagttaaaaaggaacaaaaggaaaaagaaatccttgagacattctggaaggtagaaattaatattcctttacttgatacaattaaataggttccatgctatgcaaaatttttgaaagaattgtgcatcggtaaaaagagactctaaggaaacgaatggggtgaatg

SEQ ID NO: 11147 - DNA, 369 bp, Gossypium hirsutum
ggagagtgagtgagactattcgagtgagtaaaaggcaagtgagtgtgatttctttgtgagagaatttgtgaggttttgttatgtgatgtgatccgactcggttgattgagtcgattcacttgattgcccgatcgtcgacgaggaatagttgagttatcggaaataggatgaaataaggctagagatgcggaagctttcaaatggttttaaaggttggctaaggtgatggtaaatttataagggtagtaggctcgatttaagtataaaaataagaaaaatggaagttgataaatgaaggctcggttttgtaaaaagatattaaagttgggtaaaatctaggatagtcggtggaatggataaatgagctta

SEQ ID NO: 11148 - DNA, 497 bp, Gossypium hirsutum
agttcttgctctcttcagtcttcacaccgtaagtctaaatcccccaaaaaaatcgtcctccttttgtttttgctgcaaatgtgttttttttagaggagggataagggaacaagaaatgagaggtgggaaattgagattttctggtgccacgtggcattcacaaatctatctgtcttacgtggcagcttctcaagttagaattggtggataaggctatcttccattgaggttgaaatttgggtgggataacttttattgattggctaatggccattgagtggcaccctaaatggccgaaacactgatttcttctggacttgtgtggttcttaagctatttgggttcattttggacccaatagcaactttatcaaatactatttttattaggctaatgttaggcttaaaacattaatatgagaaaactgacatgttaggctaatatctacatgttgatctttttcggaaataatctgggttcgaatcatcgttgaacta

SEQ ID NO: 11149 - DNA, 650 bp, Gossypium hirsutum
  misc_feature (27)..(27): n is a, c, g, or t
  misc_feature (232)..(232): n is a, c, g, or t
  misc_feature (610)..(610): n is a, c, g, or t
ttggaaatgatcatggcttgcaaatgnctcttataatcatgcaaattcttcaaagtaataaaattaatagcaaaacatttctcactaggacaataatcaacccaaaatccatttgtgattatacacaaaaactgtaatagaagaagcatgctaaactaaactcttaacatgagatattttaccaacatccttcaaaattaaattgatagaaagtgctgcacatggtgaccanaagatgttaggatacttctcattaaaaattttcctaatagctttgtaatttgcaatattatatgcaattagctagaccacattgcttaatccaacaatttttacaatctttgcaaacaaattgtaaagagtatcaacatctaaaatcatgtctgatgcattatcggatttgacaaagcataatcttttaggaaaatacactagaaaattgtttgatgacttttgtctctatctttctaccctctcccattatagtgcatccacattccaccaaaatgctgtaaatccctttttgagtattctagtagattggttcacaatgtatgatatgatggagctttgtatcccaatcccatagatgttatggcatcaaggcacnatagaaacttgtcaatcccttgacgctatttgtggagtct

SEQ ID NO: 11150 - DNA, 732 bp, Gossypium hirsutum
  misc_feature (693)..(697): n is a, c, g, or t
  misc_feature (702)..(706): n is a, c, g, or t
  misc_feature (708)..(724): n is a, c, g, or t
  misc_feature (727)..(727): n is a, c, g, or t
tcatggaaccatagatagataccgttgaatttaaaggagttcaattataaatagaaccctccccttaatttcttgtatgttattttcttgtggcttttctatttaattcaaatcactgtctttacgagaggcagatttgaagcaaaagaaccgtttaatgtccgcgatttgctagactaaaattatagtcccgtaacacttgcatgcgcagccacccatgacatgaccagctcatcgcaatagcacccaattccgcaccttgttccttttcaatgaaagcagtattaacattgatcttcactctcaatctaatagatgcctacaaattaacaactgttgcctggtgcggaagcatcactcttctactcaaattacgtaccgtgaagtcccttccgcgagcctttatgtgggagtgtaaacttcccatgtattagcttattgcttctaagctctaacattccatatacgtcgtaataagactaccaaaactcgtaaaagcctcactgtctaacaatctcaaagaattctctaaccagtaaatacacttaccattagaaacctttcagtctctcaacgcttgtatggcattctatcggtatgctcaatacctcagattataggacgaccacgtcggtaaaaaataatcacgccccagcctccacgcgagagctaaataaaactactattggtgtnnnnnctagnnnnntnnnnnnnnnnnnnnnnnctnaaaaa

SEQ ID NO: 11151 - DNA, 459 bp, Gossypium hirsutum
aaatgctgacatggcaagctcagcaagcaagcaattaacgagataacggttgagtgatcatcttgaataattttttaacgagataatttactcaatttttaaataagaatatgtcaaaacaagcaaaaccctagaaagaaaattcctaaaaaactagagaggggaaataaatatcttaaaaaaaaagtttgaaaaaaaatccaaaagtataataatttaacctcgaaagtaccatccttaaacttaaataatttgaatccgaaataacccaaacctaaaacaacctaaattcaaaaaggtaaactatatttaaggtcactaaacttttaataagtttatgttttaatcattcaacttcagaaagtcacaaaatggtcattctatttgaaaattttattttgagtcactaagctattaaaatccttattgtatgactttctttaatcgcatttcctgcaa

SEQ ID NO: 11152 - DNA, 558 bp, Gossypium hirsutum
gtctgcgtggttgtcacccttatcccctagaaaatttttagcacctcgtttgtgaatccccccatgggatcttctttaaattggcttgtagtcggtgtcagaggtgcagggggtactagttgtaccactttaagctgaggttgctgtgatggttgaggtacttgggttgttcccatgaactggtcaaaccattgacccattattgtgacgatagcattgcaaaaatcatttttaaccgcatctaaattcactgcaggactctgtccttacactggaggtaaatggcttttaatttcctcatccatcgcttctcttgaggttttagacattatttttagctacaacataacttaagttaatcaaaattatagggaataaactagagatgtaccatgaattgcaaaacgcgacttagccttcgattttgccgggttggctaaacatagcttatgataccaaaacttgtaacactcgttagtctgtcaggaacacatgtcgtataatgcctaaccagacagatcgcccagcggactagggaattacttgcagattcaaacc

SEQ ID NO: 11153 - DNA, 671 bp, Gossypium hirsutum
ctgtatgacattcaagacgagcacccgaacattaaattcctaatgacatgtcatttgtatcctacgaattcctaaggttcaaccggtactcgatacccatcatagctttgctttggatatatattattcaatagcattacaaatacataaatacatacaattgaattacataaatatagtaatccttacatatgaacttacctcaacaaatagggcgtagaaacaaaatccaactaatccgaggccttagcttttcctcgatctaaattcatacatggtctatcttgatcaaaatagaaaatttcagtccatttattacttctattattcaattcagtccaaaattcatatttatgtgaaattaccattttacccctaacatttttccttttcacaatttagtccttaagctcataaattgaaatctaaacattttaatcctcttctcaagctaaataatttctctagagacttaaatcaacccatacttatcattatttcataaatttaacatgaacttttacatttttacatataagtccctaaatgtcatttttatcaaaaatcactttacaaaacttgtttatttattaacaaggattcataatctatcattaaacatcaagaatcatacaaaatcattcttggcataacccgcaatctttgaaagt

SEQ ID NO: 11154 - DNA, 569 bp, Gossypium hirsutum
  misc_feature (231)..(232): n is a, c, g, or t
catacaacacaatgggccaaagcaaagttagataaaagctgccacatatttttccagaagaatccatcttttcctctgacaatgaatttggcttccaccttaacttttcctttcgtttgctataacaatacaatgatccaaagctggtaattcggatttgaatatttgtttatatttgatttttcacagatttgggatactacatatatgacactacttaaacaactatcnnctcttatataccttttatctaatttgaatattgtgaagattgtatatattctccccccaccatatatgagagaggagcgatcaataaattaacattagtggaaagaaatctggcgcttgacaaatgacatgcatgcatgcatgcatgggtagctttttcttttgttgatccattattaatactaactaaagcacattgaaaaaaaaaatgcagagagataagccgttaccttcctagtcttgcgagacgaatatactgcctttaaagattaagccttttcttggtattctaccaactctttaatttatttatttcccccaaaaatatccttcttctc

SEQ ID NO: 11155 - DNA, 409 bp, Gossypium hirsutum
attcccgtgttgtgtatgcttagttttaaccttaggttttagcggaaaagagcactaccccttgaaaacccaaagttaaaatcaagtatagacacattaagaataatagctctattattcatgttccaaatcagcatcccaaaagacgatattacaaagatttctcccaataaaggggcaattttatttattatatgttttgtatttggcagtaaaactctggcgtctttcactcaactagcatccgagttacagaagaaaattttgaagatgattttggagagttttggacttgagaaatacatggatgagctcattgacgccgtaagctatgaactgaggatcatgaaatatgaaaagccaaaaaccaatgattcaacccatgtgttagctgctcattgtgactctg

SEQ ID NO: 11156 - DNA, 659 bp, Gossypium hirsutum
tccaaagctttacctttatggtgcaatataatcttgattttaatgtagtgattgctaattatgatcaatttcttcttccaatgcggtttgtattttgtttgttgatagatatatagcggcaccattcatctctcgttaatttcctgcgaatataatccctgaaccctaaagccattgcattaaaataaatataggaattgattgtttcctataagctcaatcattgaattcaagtggctcatccaatcaccaatcaatgatggcctcatgcatgaaactagtgaaggtaaaccagttcaacggccagttagtttcattaaatatggtgttggataagaagacagtggaggaggggagagaggtgacgtgagaattaaaataattcttcttctttttgtttattttattttattttaatgagtaaaattattttatcttctttaattggttgaagattttcttttaaattcttattaaactccgtaatactttagatatcaaattgggataaaaaaatttagatgctaaaatgaaaaatgaatatatttagagttcaaatcgtaaattaaactttttttttattttttaattttctatatattacaagaaaatatgttgatgttcttacttgtggataaatttttttattctggtcgcag

SEQ ID NO: 11157 - DNA, 522 bp, Gossypium hirsutum
gaaggaggacaagttatggaagaagagacagagagcgaaactcaaaaagtcgagaaaggtgaaaggtggtggagagggagacaatttgcatgggagaaaggagattgcgacagccttgttttaaatagggttttgtagagagaaaacccaaagaaaggaaaaaagaatctaaatctctttggattcgccttactgtctttctttgggtctatttcccaatttgcttcaactcttcaacttataatcagtgttctgtcagtgactctgactccacacgcaatttcatgtcttctttttactacaactaaatttacctcacaacactaattaattggaatttaacacttcaattcataattacctttataaaattttgataaataaatcaaatgcatcgtttgcaaattttagtatttttaagaatatatatatatatatatataagttttttatatgcatggttatattcagaaaacatatatatatatatacaatcaaccctagataacaactaccactacc

SEQ ID NO: 11158 - DNA, 547 bp, Gossypium hirsutum
acaatacaaccaacaagtggagaaatgttaattgattagggtgaattaggggttcataggttttctcaaaatggtgtatttatttcatatgtcaaaactatatgttatttcgacctttttttcttcttttaatttctcttgtccgacgtgcatttgaaacatactaggacatggtatagggacattatcttcttaaggattctttgaatacatgaaaatcttgagaaaaaattgaatgtattcatgttccaaactcatataggcaataacggatcagaatcaaatttatcaaaaaaaatttatgtacttgattatacatgaaaatctttgaatacataaaaatcttgagaaaaatttttatttttaagaacatttgataaattgattttgttttcttaatcttttcctttaattatacaaactctaattaatgaagactataatctttaacgtgtttttgtgtgtgtcaccttaataggtagagggaggattgatttataatgatcaacaatctgtacatccatcaagtaatccatccatcaagaaa

SEQ ID NO: 11159 - DNA, 575 bp, Gossypium hirsutum
ggtgtagcaatcaatgagaaccctttgacaaaatgtcaatagtaaccaaccaatcccagaaaacttctgacctcggatacatttctaggtggttttcagtcaataactgcagaaatcttactcagatcaactcgaatgccattcaccgagacaatatgtccaaaaaatctgacttcccagagccaaaactcacacttactaaatttagcatacagttgcttatctctcaatgttttcaacacaatcctcaagtgctcagcatgctcagacttatctcatgaataaatcagaatgtcatcaatgaacacaacaacaaatctatctaaatacagtctaaatattcgaacatcaaatccataaaaatggcatgagcattagtcaatccaaaaggcataacacggaattcataatgtccataccttattctaaatgtagttttcagcatatctgtgcctttaactcgtaaccgataatagccagatctcaaattaatatttgaaaatattgttgcacctttcaactattcaaacaaatcttctattctcaacaatggatatttattctttatcgaaacc

SEQ ID NO: 11160 - DNA, 600 bp, Gossypium hirsutum
tatttactgctgcttcatcggttttacttttacttttacttttatggagttgttggatttagaggagaagggccaacataagagtgggacatggtgggataacttgaggaccacctagaaaagaagaagggggaaacgtggaggatggtgaggaatcgaagggccaaaatcaaacttgtgaataggagtttcttggggttagtggttaaaaaggattgaaggtgtttcctttgggatgaagttgacatcatcttaataatttcttagcaaaaaagagaaaagtggagatgaatcttaaggagaccaaaatgaactaaaagttgtacagaggagatcaaattgaatagaaaatggggaacatgaaaagattatgatggagatgttggtaaaagtaacatagagatctctgtatcaggagtcgaattgcattttgtcctctctacttaaaaaaaatgagtaaattaattattatacattaattcaaatattaaactgctcttattaaaaattgcatctatttctactattaaaaattggtccttatacatcagcatgaggtaaaagtggcatgccacgtgttgctgtcaattattccatcaa

SEQ ID NO: 11161 - DNA, 609 bp, Gossypium hirsutum
ttaaaagtgagagagtttaagtaagaatataagtctaaaaaatgaacttggacaaaaaaaaactcgttaaaagaatgagtcaagccttgggtaagtctttttggcccgattttagctctaataagcaaaaagacaaaaacaaattctgctattttcttactgttttgctactattttcttattattttcttaccgttttactaacatttcactattatattactactattttattgttattgtttagatattatataactattattttattattaattttgttactattttagaggcatttgcttgttaagtataactcttagtattatttaagtataaatatatattttaaatatatttttaatttgttgagaataatttattttaatgcttttagtatttttgatgtattgtatttttaattttttatatataaaaaaataatataaaaaaattaatttgggcagatcaaaccagagtcgagttttagtatttttattcaagtcgtgcttgaaataattttaggcccattttttgggccaaatcaagcccaagcatagcaaacgggcctaaaataataattcattattggattgaagaaaaacatga

SEQ ID NO: 11162 - DNA, 571 bp, Gossypium hirsutum
ggatgggatttcgtgacataacttcttaactaaaaaggggatgaatcttctctaccaaagtagaaaatattaaagtgaaaaacaaatgtggaaacaatgcgagaaagaaaagggtgttaatgtcgtggaatgaaagttagaggagaaatggacaacaaataagggcaatggaaaagccttttgccgaattcaattaagtccttttcgagaagttttgcgcatttggccatttcctttggttaaaacgtggggaaccaaaacaattatgagtttacatcagcaatgattttagatcaaaccccaccacttgcttttccattagcttttttattttgttttttctccccattttagtgtttcatttatttgcaaagcaacaaaatttagtaacatctatataaaattaatacatgcaacaacaaacatctatagaaaacacaaatgacctaacaaagataaaaccatttctttttgtttatttattagtatatattttcttttacatcagaaaatggcagcatatgtttctcttagtatatattttttattttgaccaattcttgagtcaacc

SEQ ID NO: 11163 - DNA, 607 bp, Gossypium hirsutum
  misc_feature (33)..(37): n is a, c, g, or t
  misc_feature (571)..(575): n is a, c, g, or t
  misc_feature (578)..(579): n is a, c, g, or t
  misc_feature (582)..(585): n is a, c, g, or t
ggcctaaaattttgccctagcctgactcggatnnnnngctaaaacttaggcccaacctggcccgcccgtgttaatttttatattatttttatataatttttaaatatatataatacatcaaaataaatatttcccaataaattaaaaataaattttataaaatatgtatacttaactaacactaagataaatgaaacttaacaagcaaatgcctctaaaataataacaaaattaacaaatgtctttaaaataataacaaaattaacaacaaaataagttttattcaatatccaaacaataacaacaaaatagtataaacataatagtagaatggtagcaaaatagggagaaaacaacaagaaaataacattaaaaaaaaaagcaaatttttttgtcctttagttaattcaggccgggctcaggcctaaaatgccttacccgaggccggaccatttttttaaacagaccttatttttttgtccaacccctttttttaggcctatttttttgcccaaacccccctatttttcgggtgagccttcgggctgaccccaatgacccgacccaggannnnngcnnatnnnnggatgtcccgacccatgatcaa

SEQ ID NO: 11164 - DNA, 680 bp, Gossypium hirsutum
ggtatgatttgattgtaaaagctttgttgcatttgtcagtgttgcctgactatgtgcttatgtactcttttactgagcgaaaaaaaaataatagcaataatatattaaattagttaatttgataataaaatagcgaaaataaaaaaaaagattaaatcgaaccttaaagcaaaattctggggcaaatcagaaataaataaaagaaatggaccaatttgaacgtgcgaataacaaggaggaaccaaaagggaaataatccccaccctccaaaacacacagcttcaaggaagaccaaaacgtagtcaaaacaaattttagggccaaagttaagaataatgaaaacttaattgcaaaacaaataaaaaaacagaagagctaaaagcaatcggacgaatttagaaaaaaaacaaagaaattgaaatgaaatggaaaagaaaataattcaattccaatagaaataggaaaagagaataatttaattccaaattggagtaagaataccaaaagtcctataaaaaataattggttccctttcaaagaacaaaatacccctatttatatacacggggtttactaaaaatagcttaaataatttaataataaaataaaataaaattcatatcttcctatttttagccatttaccaagtcaacgaattttgataactccttggctttctc

SEQ ID NO: 11165 - DNA, 684 bp, Gossypium hirsutum
ttagtaaaccacttgcatggacgcgttggctccgccatatctatgaaaatgatatatcgccctcgaggttgattctagaaatttgctaaattagatgaatatgatttgaattatattttgttttttatttaaaaatgaataaattaatttttatacgagaaaattagtcattttaaatttttttatctattcttattattaaaaattggtcattttatgttagtatgagatacaagtgacacatcacggtgaaactatttaattatttcgtcatccatgtcaattgttaacaattgaaaggaataaaatttttaacaaaacttgtcaatttcttttttaatctaatataaatagattaatttacttatttttttaagtaaaataaataaaatataatctatctcttatataatggtttcatgatatttttatggctaaaatggtaaaattattgctatcaaagattcaagagtagcccatgccatgataaaattgaaattatgaaaatttgagagttaaaagtaagaatcatcttgtcttgtatagtttataatcaatatggctataatgataccccttctaataaaaagagtagccaataccatccatgcatagaagtttgaagctattgctatatttatagtataaataaatatatatggcttgtagctagttaattagggc

SEQ ID NO: 11166 - DNA, 555 bp, Gossypium hirsutum
caaccttctggatatgttaggcttgtattgtaatctttgcatgttttctatgcttcattatgttcacgtacttttcattctaaaaatatttatgtgagttgtttgtttaagatattttagggctaagattcatattttctgtcagttcttcctgctccaggtttgtttcaaagtaagggaggaaaaggaaaaagaaccttccgcgctaagcttcatttagtttctcataaatcatttgattgctgtaatagatttcttaggtcacaaacgagttaagtcgtttgagtaaagtagtcctcactccatagtggtgtggtaaacctcatttctgcatttctcttctgctcttcctgcattttgatgtatgttaggataatccgtatgacttgcttaacattaatccaattaaatgcttttgtttcatccattaggtttcagaagccggaaaagtttcttgctttctagttagaatcaaaagaaaaatggcaataagatattccccagaaggtatatgcatttgtttctagggtatgtgtccctttgagacagtttcaa

SEQ ID NO: 11167 - DNA, 633 bp, Gossypium hirsutum
  misc_feature (497)..(498): n is a, c, g, or t
  misc_feature (573)..(574): n is a, c, g, or t
aaattgttggagagaaccgaagtcgttatcaccaccgcttgaagattgcatactagttgcttttttaccagaatcaatagaaagaaggaagggtttttgttttctccttgtggttggtatttacaatatgaagttgaattgagggaagcaaaagagagaaacgaaaggagagggaaggctttaagaagctggtatatgaatatgatcgagaatgttgggaaggggtggggcagccattgatggagagaaagaggtggcggtggctggcgacgggtcaaaatcaaacttccatattatagagagagaggggttgcagcttccgaatatgttgcgtatgtgaaagctagaaaaggatgtgaggaattaatttaaactttatatttcataggattataatgcataatcgtctgtgtagagctgttgatggcccgctaggtccttcggctcggtctactttgattaaaatttaagcttaaatttcatttttgggctcgttnnggcttgatttaatatttaaatataaatatacataatatttatgcatttttataattaaatataagtagaaatatnnttattattatttagattaattaagctcagacttagaaaatatttaagatcaaattcgaa

SEQ ID NO: 11168 - DNA, 772 bp, Gossypium hirsutum
  misc_feature (691)..(711): n is a, c, g, or t
  misc_feature (713)..(723): n is a, c, g, or t
  misc_feature (730)..(743): n is a, c, g, or t
  misc_feature (746)..(750): n is a, c, g, or t
  misc_feature (752)..(752): n is a, c, g, or t
  misc_feature (754)..(760): n is a, c, g, or t
cctttaaacatcctgaaaacaaaaatcttagtagaaacatagggatattgaaagctccaccgcccttggtattcgacccttggaggagggagtccatagtagaacggctatatcaaatgatataggccatcccattccttagtctaagagacactatcgaagaagacatacggagagggtaattggaaaattttgttcaaataacaatgcactacccgtaaaagaggcaagaaggggaatttttcttctcgcctaaagaaccggaggtttggggattagaaagtgttaaagattttaatcgagttttgcttgcttattaagcttggtgagttttacacatcaataattccttgcttgacacaaccattgttcctaaatattgcaagaatgagaatttcatgccagtgaaaaagaaaccttttgacttttggggttgaaaaagcattttgcatggaagtgacttgttagttagggggctggattggcaattgggggaaatctttttttagtaaatggttgaataaaacataagttttaattaagtagatcaaaagatggaacaattgattttttaaaatatgtaatgctttcttatagattccaatggaacatatattcctttaaaatatacttgctgatgatgttttagaggaaaaggccgcccctaagatctgtgagctcaaacagttannnnnnnnnnnnnnnnnnnnntnnnnnnnnnnnttttttnnnnnnnnnnnnnntcnnnnncntnnnnnnncccctttcccct

SEQ ID NO: 11169 - DNA, 662 bp, Gossypium hirsutum
ccatggtgggagtgaatatggtttaaaatataagaatacgataggaatccttttaattagatgattatgcatattacttgagttaaatcattcaacttaagttgtactaaaacttagatcaaaagtaaatgacacaaatttatacactgcacgatgtgatttaatcttgtcaagtattatgaagtcgagagacttaacatgaactaatttaagaagtgagagttgcaatttaatggtaaattctaagtataatgtgagttgagaaatcgattaagttttgaattagtaatggtatgaccgatttaattagaagtcgattcatttaatattagagtgatcaattagtttaatggggggttttaatttctttttagtcaactaaactaattcaatcttcttttttttgtttttgagaagaggttaattctatcttttaattcaattagattatagtttaaaataactatttgtatattagattgtagcatatgatataatattgcatgatataatgatatataataatatataaatattaatatatcatctaagtatcacccatatttttgaagtaagttattttattacgattatatttttacctttttacaattttatataaaattaataaaaattcatatgtgaaatttggaactttgccc

SEQ ID NO: 11170 - DNA, 675 bp, Gossypium hirsutum
tttaagctgttagctaaaaagctgaaactgattgaaaatggaagagacaaagaagtctaattcttacactaaattaaaagacatttaattaattttgggtaattaattaacaacttaatgcaaaagttaaacattgacaactaattacaacaagccctctcatgatttcattggttttgaatcaatggattaaattgaagaaccaaccttttcattcagggttaatttcaccaaaagtttttaagctatggtttaaaatttaaattaattcataaatttcaatatatttttataggtattggtattgtatcgattatattttttttatcggttcaattatccgtttaggtattaaatgtcggttcgaacaggtggattcaattgtaaaaacgtgtatacctatattgcatggacaattttggtctaatgtactaaaacatatagtgttgttaaaaatcaagaaggttattttttagcatgtcaaattccagtttttcatgtagtcactaatgtttaaaatgtgatcatcatgtcccatttcaaatttcatttggcatttaacattgaatctgatagttgtcgattgagttttagctcagttagtattgatgttaaactcattttcgtttcgatttaagggtttcgaaggttttatgggacaatgagcatctttga

SEQ ID NO: 11171 - DNA, 664 bp, Gossypium hirsutum
ccagtctatttattgtgcgagtccatgaactgaacatatttaaaattataatttataaacttatgtcaatgaactgaacaggtaatgaagtgcgtgcatgattatggactaattacgtaaacaatgacttgggggagagtgttgaaaattggccaacaatgctgctctgatatttttggttgaagtgcaggcagcttgtaaatatgctgcagcacgtatgcttgctgtaacagcaaggttgttgtttagttactttgttaagttagttgaaaatgaactaagttggtaatgttttaatatttttaggtgctgattgacataattagcttgtgtaagggttaagttttacttgtttcaaagtatgattaatgggagtaatcgaatatttggtgacgtatttcgttataaaaatattgtttttcttattgaaaagttgagtaaaatgagctattagccataagttcccttactgcacatttatgagcaaataaaaatactttgctttattgttctatgtcctccgtttttcatcctttgctcctccaaaatcaccaacagagagcaactagagttgtgaaaatgtagataacccagatcatggctagcggaatattattgactagttcagagctttctactgtatcaattaagggcctaagacgag

SEQ ID NO: 11172 - DNA, 607 bp, Gossypium hirsutum
ccctgcagccctgccacagtaaacactccttgtaaatgccctcaatatcaatgtacgactattgcccgagctttgttttagagggaaggggggattgcataatgaatcagaattatctaaaaatgcaacctcaactatcaaaaagtaaaattacctgtacaagctcatccgtgggcaaggcacaagaaggtaaatcatccttaagaatgcggatctgagcaccagtttcactgcgtatgttctgaacaatctgcccaccctttcctatgatacatccaatctgatcagaagatacaagaagccgagcagtgattgggtggccttctgattcttcatcaccatgcaaatcttctgcaacaactttgtcatgcacccggaataaagcatcttgagcaggagaaacaaaactgtcaccatcttcaacagcatttgtctcatcccgtgagctgtagatagtaaccactcgctcctcagaaccaggaactgtctcaccaattctaatctttgatttagtggctactcttaattgcttcacaatctcccctccccttccaataatgcttcctatctttcttgcagggcataaataccgataaacagtatcttc

SEQ ID NO: 11173 - DNA, 612 bp, Gossypium hirsutum
tgttggagagtgtcatgctggagttctttattgtattgtagatgtatttggctattgcctgttatatatgcaaaatattattgattttgctctttcttctaatttgcctttcactactattcataccttaaattagatgtatttggttcagggtttaagattgtttttattatggttggaaaagtagatgtataaaagttggtttaattgtatgggtgtattaatgagaaattttgaaatatttattaatagtattaattattggattggtatttttaaataaaaaataaagaaattttatttttcaatataaaaattaaatttcaaaaagatagggacttacaacctactttaaccttttatatatacaaaaaatcatatatattaaatttatagcacaattagatccatcggatttttaacacccttaacctgtatccgacgccggaacaaggttacagagctttaccggacttacaatcaaataaacagacatttcatttttttatatcacattcattttagaaatcaatcaaattcaatcatgcagtccctaatataagccctcgaggcccaaaataaacattaaaaacagtcgggactaaaccaagt

SEQ ID NO: 11174 - DNA, 614 bp, Gossypium hirsutum
gtttggcatcggtgatctatgatacctaaggatcgatccaccagttccattccaatacggtaaagctaaggttgatttggtagttgaaagccacgatgtagcctttgagataaaaaaaggcgagatgatatttgggtatcagccatttgcaactaaagatcctaagatttttgtgaaccctgaggagtttgtggctgatagatttgtgggggaagaaggagagaaacttttgaagtatgtatattggtcgaatgagcgtgagacggaggattccacggcggagaacaaggcttgtgccgggaaaaatctggtggtgctgctgtgtagagtgttgttggtggagtttttccttcgttatgacacgttccaagttgaggctagtacgtttatgttcgctccatccgtgacgttcaagtctttgactaaagcctcatcaagtacttgactgcccatgactgaaatttagttgtttgtgaagggtgtttaatttgatttaccatcttgttctctaaatttcatttgaagtcctttggtttgtggtgctagcaatggagaaattattgagccaagaaatcatatgctggaaaaaaaaaaaacttttgcaacaaacaaat

SEQ ID NO: 11175 - DNA, 521 bp, Gossypium hirsutum
  misc_feature (514)..(514): n is a, c, g, or t
ttgaaataaataaataaatttcagcataaacacatgcaaaaaaaaatgttaagtctcgatagaaaaacctgaaaaagaaaatataaatagaagtaaaaaaaatatatagaatgggataaattttagttcttaccagttaatattgcttgaaagctattgaacaagactgagaagacaagaagatctgagagagatgatataacttgtgcaactagttcatcacttgtaaacaagtaggaaatttgatgccaacaccctaaacacaatataaagaataccattccaatgcatattgattcactcattattgtttttattgcaaatttcaatggttttgcatttcctcttcctaattcgttggcaacccgaactctgcaaaaacacaccatttatatgataaatgaggttaaagggaaaaaatatttgaattaacagtatatagagaaagaaagaaattacattgctgcaccaaataagcctacgcagatcataaattcccatgtattgaaattgnaagctgc

SEQ ID NO: 11176 - DNA, 615 bp, Gossypium hirsutum
tgggatgcatatatccaatacgagcaagctattttactaacgattgaccaatctgacatccaggtctcagcatgatacctttttctttacactcagatacatttaatcataaagaatttgtttttgagttggactgctaatcatccgttccttgttcaggctaaagagaaacaggtccagcgcatacggagtatattccatcgatacttgtctattccccttgctagcttgaagtctactcttctagcctacaaggcatgggaggtggagcaaggaaattctcttgatgctgaacctggcgatgttttagggatttcttcccatgttgcttcggcttaccagaaggcagaggagatgtacaatgcccatgtacatcatgaagaacagattactagacaggatatatctgagtctgaaaggtttcaacattacatggtatacatatcatactctaaaatctctatcgtgtggaaattcttttatttaatactgactttgaagtcaaatttggtttcttcatgtattctttaaggcactgtttcttgtttcttatgagactgaaatattgttcttgcctctttaccctattgaagtcttggctttaagcatcattcc

SEQ ID NO: 11177 - DNA, 409 bp, Gossypium hirsutum
ttttgtcattgaatagagaaggcctcataatggaatgaccttctcccaacatagttgaatttttctccaagaccatgagacaaacttcttatttttttgcttctatcttaagcttcttatggatcttttttcttggtagtaatatcgtctctaaatatctagatcagatacaaattgttaacctcaataatcaccaaaagagggttcggtgttttaaaaatttaaagcaaagatggcaatcaatagaaacttaataatttatcatgatttggtcccaattgcctacttccactaccttaacttgccatgactaaggactttctaaattcactaatttgaaccttttgaggacaatgtttaacctttacaatctctatcttttcaaaatgcaagatatggtcactttacc

SEQ ID NO: 11178 - DNA, 650 bp, Gossypium hirsutum
ggagaatcaagactttcctatagtcagaaatttttatttaatagctaatcacatagagtgatttaagggattggaataaaacaaatcttctttccaaaacaatattagtttatttcaaactttgaatatacattttgattaaaattattaaaaaaccctttttaataattacgataaagatatactcaattaaaatcatatgaaactcatttttatatttaatttaattggatcctcaatgtatgcgcatcaagcatacacatatatcgtgtctaatatttaacttaatcgaattaaattaattacgagaacatttctataattaatataattcaagttaacttcatccttttataattcaaggatcccacatcgatggtagtaatattagatcatttctaacgttacaaataattattggcatctagaaaaacatcacatttactcaagttacaaaaagttatggtttgacataacctttccatgataatgtcatcttataatatatccctttgttcttgatatctaaattgaacacaagtcatggaacaatcaccctcatatagcccaatctattgtttattgatttctcaagtagactaagataaataaatgagtgtggtatctcatatcaacattcatgggtcatg

SEQ ID NO: 11179 - DNA, 571 bp, Gossypium hirsutum
  misc_feature (58)..(58): n is a, c, g, or t
  misc_feature (273)..(274): n is a, c, g, or t
  misc_feature (516)..(516): n is a, c, g, or t
  misc_feature (520)..(520): n is a, c, g, or t
tgtctgagtaggagaaagtcttattgttgtctcagagtaggggctatcaagctcagtnattatagtaccgcagaaatgtatccagaattagcgttttattaaatcacagctataagcactacaccatttttcagcacttacataagaaggctcttgaatcaaaccaagttggtggtaattcatatagtcaattccacttaaccgtagacaacataatatctgttctggcaactcttcaggtctattcccctgcttttgaagacaaacatcatnngtgagtaaatttcattgataaaactgaaaatcaaacaatcttgttcagagaaagggggagggggaagttgaagttttgaatgagatataggaactttcctgtatcgttaggcctacgtctaagatgcaaagctttaacctatctaggaatgcatcaaaacctttcctagagatgtaactgaatctatgcatatctatatctatctccaaataattttctccctgcaaaaattcagagtaatngggnagcctaagaaagaaccatagtgacacaatgtatctacacaattctatgcta

SEQ ID NO: 11180 - DNA, 527 bp, Gossypium hirsutum
  misc_feature (466)..(471): n is a, c, g, or t
aaaagaggaaataaggttaaaaagtcaaaaaagtaatttcatcaactttgtgggtaaagaagttagtaaaggacttaaggcaaaaaccaacaaattcaataagaagaacactatggtggataattgtctctatggtggactcacctctcaatttctctattggcaagaaaaaaggaacaaatggtggataattgtcacttttggaagcaagtagaacactatgaaaaattgtcaaaaacgcaaagcttggtttgaaaagaaaggtaaatttatgtttttatatgttttaaattaaattcaattgaaatttctaataatattagtggtttaattctagtgctactacttatgtatctaacatgatgcagagattcttttttattcaaatcataaactcaactaaagatttgatatatatatatatatatacacacaacttcttgtcctgtcataaaaaaaagtttgnnnnnnaatactcgagtaactacaccacaccaaaggcgtcagagatgcataacaaacgcccc

SEQ ID NO: 11181 - DNA, 691 bp, Gossypium hirsutum
  misc_feature (553)..(553): n is a, c, g, or t
  misc_feature (589)..(591): n is a, c, g, or t
  misc_feature (622)..(625): n is a, c, g, or t
  misc_feature (642)..(642): n is a, c, g, or t
  misc_feature (653)..(654): n is a, c, g, or t
  misc_feature (666)..(667): n is a, c, g, or t
  misc_feature (677)..(685): n is a, c, g, or t
ggtcctaccagcatttcacataattgcattgacagaaatggatttcatgataaaaaattgagcctactttggtaatggaatcaatggtttaattgattttatcaattacctgttgtgacacgcttcttttgtccaccagatataccccttaacatttcatctcctaccatagtgtctgcacatacttccagtcctaaaacctaaaaatttcatgccaaaggagttcaataagtatatatatttatcttagttcttggatatcttttagattcctctaacattacctttagaatgtaatctgtgataacatttacttcctgaccttcagttgctgctgcctaatatttttaaggtgaaatgaatcaacaacacaagtttaattctttctacaattgaaacataaaaataatattcattacttcttaccttcatgaagacatcaatatcgggatcaggtttaatatttgcttgtttctctcttcttgaaaacaaaaaataaaaaataaagcaattattattttggcagaacccctttcaaaaggaaacaaaatantcctgttgggaaaaaaggaaaataaaaggttctggnnnacattaccatgggctcctgggttcttacttnnnnaaaaaattaatattaangacaaggttannggttggctggtnncctccttctnnnnnnnnnaaaaaa

SEQ ID NO: 11182 - DNA, 390 bp, Gossypium hirsutum
ttggagtatgaaaaaagaggaagggatgtgacggggattggatttggatggggatggggatggggatgggaatggcgcccaaaagaagaagagttaagcagtggaccagtggtagcgtcttgctggatcaagcaggttttgccaggaaatgggttttaacgaaagggcctaatgactatgaaatatactccattggactagttaacgaaacacacacacgccctatgtgaatttgactgggcctattaactcttaagtactgcaaatctatataaattattttaaaatataaaaagcctaaagaaaatgcacgtccatccctgctcctctaaaacttggattttattttaaatttattgaaaacacatattcgcttaacaattgaatgtc

SEQ ID NO: 11183 - DNA, 663 bp, Gossypium hirsutum
gaggatcgaaactttggtatattttattagattatataaagatattttgagttgtcattatgttactattccgccatatatatgcattcacgttcaggttgaaatagattgcaaaacaatcaaaagatttgcacatattgattcataattttattgtattggaaatttgtaaaaatgcagatgataaagtaaaaatggttagtctttgtatacactatcatgcattaatttgtacaaaataaatataaataattaaatttattagcaggacatattaaatataactaaaaatttatgtaagttttgaacataaaacattttacatgtgcttttctaaaatcttattcatttttttaatttataaaatgagttacttatgaatttaattaaatttgaagtctttataaaattaaagtccatgaaaattaattttttgggtttactttcgacaatgttatcttttaagtttgaactcgatatacaacgtgattgttcattatacctaacatttattaaataaattatcatattcttgacagatttggttattgattaaataacatttgctaaactaaagcattagttccttatagtttattataaaataataaacaggattaagagcagttctagtaaatttaatggtaaacaaagttactgaac

SEQ ID NO: 11184 - DNA, 552 bp, Gossypium hirsutum
tcaatggacaagttatcgcaacccatcgtttcatcactgaaagttgagaaaaactgtttgaataatagagttataaagtcaaagctttagaaattatgcggtcttaagttgaaatcttattattggtgtatgtttagattttatataaaattataagaaaagtaaaataaaatacactcgtaacaatattcgatattttgtaaaaaaatacgtttttgatcatttttcaattgagtggatgtctaattaactcgttacacctgctcatagaatggatttaatttcattgcacaatacataaataagtgcactttgcaagacaaatatcatgccatgaccaaaccagcatgttgtgaaagcataattcggaattgtactctttgtatactcacatatcctttaaagttctgtcatctgtttgattgccagtaaaatattttccgtaaaataatttcaggaaaatgttttacttttctgtaaaatgatttactggaaaatattttctggtgtttgattgaatctgtgtaaaatattttcggctgtttggcaaaa

SEQ ID NO: 11185 - DNA, 673 bp, Gossypium hirsutum
catctttggagtaaatcaagatgtcgtcaatgaacacaatgatatatttatccaaacatggctgaaagtgatacgatctgcctcggggtgagtcgagtcgtatgctagtttgcccgatcgtctacaaggaagtatcgttcggctcttttaactaagatgtttttacgttaaataatacggaagctttttaaaaagggtttgaagatgggtttgaaatatgaatattaaaggttcggttttaaaagaaacaaaagaatgaaaatagtttgaaggcagtttaataaatgatggttatggaagatggtgaacttaaaagcaagtaagaaccaatattaggaaatattgaccaagtacttaaacgctttcaaggtgaaaatgaaaatgatagaacctcaacccactacttaacaaagtaggaacctcagtatatgggtgaatgccacactatttgatagtgataagttcgggatagtgaagaacagggttgacgccactaggcttcctagataagccaacaaagtcctctacaaaatatgagagaaagaaatctcacaaattcgatgaaagtttaacaaagtttcattaagtgaaaagtctaacctcttacaaatgaaataacatatatttatagcctaaataaaagtagccgaatggacaaacttagaagctaaaa

SEQ ID NO: 11186 - DNA, 503 bp, Gossypium hirsutum
ttcgttgattattgagtcttagctcgattggtatgagtattgttatcaatgtaggaggacgtgggttcgagtgtgctgaagatgattatcctcctatttatgggttgagaggaattatgggtagttctaggtattgtgctaaaaaaaacaaatatgatcaaaatctataatgagattgttaaaaaaacattttagcaattgacctcgcaagttgtcctgcaagaataagacacatcacatttatctgacatttcaactcatatatagaaagaagaaacattaataaatcaactaagttataagaaatttggatctaatgagaaagcgatatgtgatgcctcacgaatgactgatggtgcattttataatattctttttgttaatgaaattgagatgctttctctggtactctctcaaccatctttccttctcttcctacactttaactacatcctacagctctttgtctcttaggcgaatcgtcgtcaatcatcatgaatccc

SEQ ID NO: 11187 - DNA, 643 bp, Gossypium hirsutum
  misc_feature (5)..(6): n is a, c, g, or t
  misc_feature (8)..(9): n is a, c, g, or t
tgatnnanntgtttgaagcatctggaacatgactggattcagctcgaatttttgtgcctcgattttgggtctcctaatacccaaattaagatcatgaaacattggcacaacatactgtctgtaacagtctgattttagctaaatcgaaacagtagttttgggaccacaaatctggggtcaaaaaattattttaatattatttttggtgtttacaatatgtgaatatgtatgtgtgaaaatttcgtgaactaattttattgtttaataactcaatttgagaaaaaggactaaatcgcgtaaaatgcaaaagttgcattccacttgttaaaagtgcttaattgtcatggcttattaaatgaaaggtccttatgtttcaattagaccaataaatagcttgagtggaccataatggacatgtattaattaattttcatgttttataactaaggttaaaatagtaaaaatggttattaaggttaattaaataatataaacaaaatttcattaatcatttttgttcttccaccatcgaatactaaagaaaagaataaggtttgaagcattaaatattttagcattcatttagcttaattgaggtatgtatttcgttcagttttttgatgatttttctgtctatgtgatc

SEQ ID NO: 11188 - DNA, 666 bp, Gossypium hirsutum
cttaccaatgaggccctatcaattagtattacacagaagaaatcaattatagacaccaatacaattagatctgctcttcatagacaaacttgggatttgcgatcccaagtaagatcagttcaggatcatgggatccttttctatcagataggaaggggatatcagaagcaagcaacagacaaatatgttaagaattgtcaagattacatgctgagaaaaattggagatatggacttgtcagatttcagtttcctaattaaggaatatttgagtgtatcaaataggattctgtaaatattttatccctaactttaaggctgtttttaggtacagcatccctagaattagtatgtttcctagtgtaaagtttcctaaggtaggctcactatgtctataaatatttatgtaatttcttgtgaaaaatataattgaaatagcctatttttaacatggtatcagagcttttttagcccgatttctgggatttttttctttgtctggcgatttttttcctaattccaaccagccctcaagcctgtaaaatttgttcaaacgaaatatgactaaaactgtcaagatcagtaacactggggatgtctcagaagtttttgtgaacaactcaaacccaacaagtgagtttcagaacatccaagtagcctacaggca

SEQ ID NO: 11189 - DNA, 587 bp, Gossypium hirsutum
attagacattaaaccagataatcataaattttttattcgttggttacagactaacttaataaatgaagtatataaaaaacattaatggattgtcattctatgaaaaaagattattttcttaaattaacttaacgtacccttttccatataaaagcttaaatcttgaattcaaccctcttaaagatgatggtatataaagttctattttttgatgattaatatatagcttaagaaaccataataactatgcatcatatatactgttttagcttaaatattttttttattctttgtcataacatagcgtaataaaattcactcttattggtccatttaaattaacaataatgcttaatatttaaaattttatttatttattatcatataggtatatatactttgcaatctcttgttaaataatttgaaaaaaaaaatggatgatagggaaataacattgaaataaatgggtgttggattcttgcccctccaataaatgattgaagacgttattgcaactttttagaggtgtcagagatttaagtcgtactatgtctttctttaatttaattagttcgagtttcagacga

SEQ ID NO: 11190 - DNA, 480 bp, Gossypium hirsutum
aagcttcccttggtacttatacgatacggagtgatcataataaagaaccgttatcccatccgaagcaccaatggaatcggccaacgttttctccatgttcctatgaattaacataaatttcaaagagtcaaactccgttgacttatctgcaaccaatcgggacacttccctcataagggaccgggactcgccgcaccctgaaaaaagagaagaaatgaggaaaaacgcgatcgctgattgcaatttgaatcatattcatattcgtagccttaaattgaactgtaaaaggcaaatgattttgattgaattgaaatgaaatgaatgtctaggttacatgggacggtgacgaggaggagggtgtgagggtggcgacggatctgagaagagtagttcagtttggtgaggatctgccattcccctacgccgtttgaagcgcaatcaacggctgataacagcgcaagtgaaattatcggaatccag

SEQ ID NO: 11191 - DNA, 650 bp, Gossypium hirsutum
cacccattccaagactttctcaatacatcacattctaaattgactcttctagataagtttaaattatgtactatgttgtactgttttgttcaacttactgaaatcttaatagtgtctataaaattttaagatatattttaaataaagcgcataatacttaaattaagaataattatttgatatattatctgtagagttttttagactctacaaatggattgagaacacgataaatattacattgatttatatttatgtttttttatactctataatacacttgtcatatcattaacccatttgtgaagtttaaaaaatttcctcaaacggtatatgagataattttcctagaaatattaaacatatagaaagtttacattttcgctcaagcaaattatgtagttatttaaataaagaaaaaaaatttgagcaaaaattttattaatttaaccataaaatatgaaagataggattaattactttcatatattttagggtttttttataaaataatattaaaaaattaattaattataaaaatagggtggacaacaaattaattataaaaattggaagaaaaaagagaaaaagaaaaccgtaaatacaaaataaaagtaagggtaataatgtcataagaaagtcggttccag

SEQ ID NO: 11192 - DNA, 406 bp, Gossypium hirsutum
tttgaataagagggtaatcgacgacaaaagcttctttggactgatcaagaaacagtggtgttaaggtagacaaataaagtggtgcaatcgataagatctccattcacagcggacaatttaagggaggcaggaaaggctttacattaatcttccttcaaaaaatatgataattgtaaaaactcccttaggttccccgacaaatattgatggtcctttttgtacattgcaaaaagcgtcatctttgaaactccaatctcctattttgtccttgttctcaccttgtaattatgtgcactccttagtttatgcaaaacccctaattatattgaaatattctgttgatcattaatctcttagggaagtaaaattttattctttgggggccggtccaatattaggagcatat

SEQ ID NO: 11193 - DNA, 628 bp, Gossypium hirsutum
ccatactttatttaataattaaagtccaataaaccttaaccaaattaactcatttttaatttggactaacctattatgatactaaataataataacatgtaatgtcaatatttttcaacatgagatttatcaatataaatgtatcaccagatctaatatgaatcattcttgaaaagctttatcatgataaattatagttatggtgatagattcaaggtgatgaggagaaggatacgctacttgagacttagccttttgtacactattgatgtgatgggttttttggaggcttttggcaatctgtttttgactaatcaatactcatcgtcaagttgatttgatgatttcgaggttaggatacaaatttcaacaatttgttttagattacttcataggtatgacatttgtgcattaatttataataaattatttattatttatactatatgtcatgtttttatattactgttgttcattattcctattaataataacgttttactgaatttattaattaaaatattttatcaataaaactgtcggtggcttattaaacgttaggatcgagtattttgactatctatacctaatgttgtataaaagggtggctacatgacacatgtcactg

SEQ ID NO: 11194 - DNA, 487 bp, Gossypium hirsutum
  misc_feature (62)..(63): n is a, c, g, or t
  misc_feature (399)..(399): n is a, c, g, or t
cacatgacaatgaatttagttgatcattattcagctgaatcatattaaaaacaaaatttctnnctcattaatctccataattaaaacaaaactcaattaattattctaagtctaattaattctgtttggacaagacacattataacatgtattaagacttatttataagctgtaggaatttaatttttcttattaacatgtaagaaaaacacaattaatcatgcataattaaatcctaccagatttgagacaaattaaataacaaaaaatatttgagctgaatttgcaagttttgagctaaattgagctgatttgagctccttgagcgaaaaaggaagataattcatctcgtagtaaaaagcgtggagggttcttctagctggtccccgcttcttccantgaccaacaaaaagaatttaattcagctcgtagtaaagtgcacggaaagctcatcggattagtccaggcttcttcgatatgaccaaca

SEQ ID NO: 11195 - DNA, 620 bp, Gossypium hirsutum
tggcttaattgattcacccgaatctaatcaaatcttcaaatatcaaagaagggatagatggactagagtatcttcaatataacaatatataactagatccaaaaatgttcttaattaaattgtcaaatcaaatgaaacaagtttttaatcacatctgcaattgacactactgaatatcattcaacaactcttaactcattttgcaattaaatttatatatttatttttatgttatacaatcaaatgtaccatggataggcatcaatttcgacaaaatcagaacaagaagtaatgaagctttgctactctttacaatttgtgacaggttttttatgcatatatatatttgtcaacctttgagagccaatgaagacagtaagaagaatgcacgaagtgaatgctgttgctcggaaaaagcctctgatagaaagagcttgctactccggctatgaaacaaggcctcccattgaatgaaggaacagatttgaacacagtgttgaaatcgttttggggaagatcattaaggaacgcttgaagctcaggcgattcacagtgtgcttatcggcaaatcctagtgacgatatccacaatttcacatgcaagggaagaacgtggtagta

SEQ ID NO: 11196 - DNA, 534 bp, Gossypium hirsutum
aaaataagttatgttgggagatattaatatggggtgtggcctaaattgtaaagaagtggaaactaaaggggtaaaattataaatatttaaaagttgaggggttaaatgaaaaatatgaaatcgttggatgaccaaagtcgcattttttcaaaagtgtgaatggtgaaattgtaaatgttaaaaattataaaggcaaaatagtcatttgacaagagatatttttagtaaaattatcaaaatgcccttagatgtgtatttaattgcagcccttggatttacttgatgaaaatggaattaatatgagtctttacatgaacaaatgccttcatatagaaagaaattttatcttttattcactttagtcttttgtcattaaattccactagttcacactaaactttgggaattttcatagctacctagagaaacagtgaaataaagatcttagagagtttgttgatcatcttgaaactaagacattagaagttagagttgaagaaaattgaaaggaagttaaaggtgtgacagacaggg

SEQ ID NO: 11197 - DNA, 637 bp, Gossypium hirsutum
acccctttactttttgaatacataactttaaccccccatttccccataattcatgtttgatcatacatacatataataggtgccttcctttatatatacaattagaaaaatccttattctaaatacacttcttttatgtgtacccatcacctcttctacatataatcacttcattattcacagttgaatcatggtattgcataacactttaccgtagcccataaagacattgtgcctttctaatctttctaatcagttacaagccatactgaatgcgccaaaatggtttcaatacagaatctgccataagattcatctttttagggtatgatacgtctaaaatatataggtttttcaagcctatttttaattgtaatctatgcaaatttcaagtatatggacaactaattcagtcattttagttcatatttaaacattgagtataattttagtaaagtaagtaattttatgaaaattagtattaattttacataattttactattttatgctacatgttaaatttcactcaatttgctatagttggaccaccaaattagtttatgtggaagtcaataagaacacaaatgcatgtgaaaaaaaaaaactttatgtggacagctaaagaatgaattggg

SEQ ID NO: 11198 - DNA, 649 bp, Gossypium hirsutum
gacaagagtggtttgcagattcatttgagggagaagaaccatttcttgaatgagttagaggtgaaaaagagacgatggcaagacttgatccgagacattgaagcaaacagtttaaactcacactagtgtgtatatatattgagttctattttgtttagaccttaaataaaggtggagggattaacttttaaatttatgaaaaatataaggacttagagtatattttaaccaaaatttcttaatttattatttttaaactaatttttaatttctaaaattaactatcatcagagactttatattggagatatataattaactttgaataaatgcaaataataatttaaaattatattcagattataaataattatctctaaattaaatcgggctgaacgagaatccgacctgttgacaaatctactattaaaccttagcgccaaaaattttaaccctagccgctctcgttttctcctgtgattagtgatctctcccactctttttagcttcaaagcctaacaaaaaacatatggcgaaaagaggcggagaacgtggcgcttttaggtaggggtgtgcaaaattcgggtaaaactaaaaaaaattcggttaactgaccgaattcggttaaatcggtcagaggtaaaaaaaa

SEQ ID NO: 11199 - DNA, 647 bp, Gossypium hirsutum
tagtttcgttcccattgttgcttccataaatatgaattttattaaatgagtgcactctaaatatttttaagcttttgattcagtttagtatcaacgaattaaccgacacaaattcagagctcaaaactattttttctataaattattaattatagagtatttgtgttatttaatgtatcccatttttcttatagaagattaaatagtttcaaacacaacttttaaaactagtattcatttaaatttaaaattatatatttttacaaactttttcgacaacatagtttaattataaataaactatataaataatcactcaactattaaaaacttttattttagacacttaaaataaaattttataatttaaacacacacattacataatttaattattttgatcacttttattaaaatcacaaatggtaagttgacgtgactattaaagaaaatcgatgtagtaataaatttagttttaaatttttacatattatattaatttagtcgtaattttaaagaattaatttttaaaatttataaatattctcaatttaatcctaattctaaaagcttcaaatatatatataaaatgaataaatattaatattaaataaaaaaaagttgccatgcgttgctaaatatatacc

SEQ ID NO: 11200 - DNA, 595 bp, Gossypium hirsutum
ctaacaatttctattatcgatttaattaattattttttatcattaaaaattcaattcgacatgacatgataaaagattcccatgaaaattaagtttaaaagcttaattaatttttcattttttgttaaagactatgttcaccttaaactttaattttataaacaatggtaaacaagtagtaagcgaaggggaaaaaactatttgggggaaaattatgacattaattattaagatgttaatttttatttttatttcatttataatagtaaataaaaaaaatctaaattgcatgggatggctcattttaatttttaacttctttagtgattaattgtgaggcatctttgacatgtcattaaatttatttttaggataagaatgttattaggtcatgttaaatattttgtatcattttatttgatagtagaaaaaaaaaaaaggaaggttatgttaattttataaaaaatttgagttacttctgtgtatttaaagaattttgattttatattttaattttttaacataattataactataaatttatatatgcaattatactttgatatgttcttacgaaagtcgggggctaataaaa

SEQ ID NO: 11201 - DNA, 551 bp, Gossypium hirsutum
tatctcatcccatggtgttggtaatttgtgaaaatattgaatttttcaaaattctacattttcattttttagtttctgatattcatgaagaatttttttagagaattcttctaaatatttaatatcacataattttattttagataaaatataattagatatattatcttgatttttttatcagtataaccacaaaattctgtttttagaataaatgttaattattttaaaatatctttgagagttcctatctggttgattaactgccctttttgttctttacctttttcagattcttcccatcttctgagaaattgtagaacattttcttgaaatgtttcaacaaaataatttaagaaattttcttttgaccaagtattgctgttgcttacaataatagtcatagactgtgcccaatcatctatggttttttcgtagtctgctataagaatattagttaagtctaaatatattcctccttgagccacatttcttttatttaaatcatctattctttgttgaataggttgacttgatgtttctcctgggta

SEQ ID NO: 11202 - DNA, 562 bp, Gossypium hirsutum
agcaacaagactatcaagcacaatataaagcagaaatccagacgacaacaggattaagtacacactagtacctgaaaaactgttttcagaagtggtttgttggcagcctgctcccgaccaatatcatgacaccacctatatcaatatccaatatctgcttaatatctagctttatttcttggatcctctcccaaaaaagaaaaggtgtcatcagatcctcataaaagccaaacgccctaacccacaccttaccattgaaatgcaccaaaaggatattaaagaatggatgaaaactatgattaattttagaaattgtactatattcctaatgtttctaaagattacatattataacattatttatttttagttctagtttatttgagatcaaaactagaaaaggaaaaattacacccccgccagagccattagagaggaatggaggcaacagttattcatctctactgctagaatttgggcaactcactctggccaatcaatttatgtttgggtacgcatgatgctgaaaattttacgcttctcacatccttggagaaagaaa

SEQ ID NO: 11203 - DNA, 652 bp, Gossypium hirsutum
gtacaaattcccctgcaagattcactataatttgcgaaatacattgtaaattaaagaatatgtgtaagactaagattttgtcttactaccattaattattgtgcaacataggaactggttggaagattgtgcaagctcgtgacctgagtcagattcaatttcttgattgaattggaaacacctttcgagtttcaacaaattagataatatagtagaaaatgtttttaaaaaattctatgttttagattaagattattgctttaaaaaataggagtttgtccttaagtccagtagatttgatgtaatacaaaagttaccaatttattggatttagatgtatttattttttgttatatatttgaataatcgagtataattaatttacctcggttttttgctctacttttatatgagggtaaagaatttggagaattaagtgcatctaaaaattgtttattctttttttttaattacttaaccaattgcgtcgaaagaattagaattttttgaatgtaattatttatagttatacgtatgtgacatatttgagtaaccatcataaatggtgagtccaattaaattgagtgtaattgaactccaattatactctccaattctttaaggggaggctaagaattatggtaattacgcg

SEQ ID NO: 11204 - DNA, 645 bp, Gossypium hirsutum
attcctcaagctgttcccatagctcctcaacaaactgaagtgttaaaattgtcaaagcctccagtggacaaaattcgaaagtatggagccgaagagttccgagctaatgtaaatgatgatcctgaaagagcagagttctggcttgataatactatcagagtgttggatgaattatcttgtactccagaagaaagtctcaaatgtgctatctcattgctgagggattcggcttataattggtggaaaactttagtgtcagtggtgcctaaagagaaagttacatgggacttctttcaagaagaattccggaagaagtatgtgagtcagcgtttcattgatcaaaagagaaaagagtttcttgaattgaaacaagggcgcatgacggtagccgaatatgagcgagaatttgtcaaattaagcaagtatgcccaagagtgtgtatctaatgaagctacattgtgtaaaaggtttgaagatggattaaacgaggatatccgattgctagtgggaattcttgaaattaaagagttagtggtactagttgaaagagctatcaaggctgaagaattgagcaaagagaaaagaaaggtggaaagtgaagcaagagatgaaagaaaaagatcaatgggcaagccatttcaatct

SEQ ID NO: 11205 - DNA, 420 bp, Gossypium hirsutum
ctcagcatttagacctgcatgacatgcatatactaactctactagtttgactatttatccgtctatttagtttcgaattttcggtaagtcgattcttgctttttctgtaaaaattaaatctttgttcgttttcctaaaccctttgtggaagctaagggtagaattttttttaggggagcggtctaaaatcagttctcattgctattattttcgaataaattatttttttctgaacatttttatatatttcccgttctgtgtattctgtattttgcctattttagttgtttcatttattccgattggtctttcagagttctaacttagacagttctgtttcttgctttgtttgtttcaacttttatttattttctatgcctttatgttgttatttttgtctttagtaacatatttgttcct

SEQ ID NO: 11206 - DNA, 615 bp, Gossypium hirsutum
tgtacgtgtggaaaagaatgtaagtaatgttatcattattattattgagctcaattaagtaaattttttttaaatgagattatgacttataggatgaaattaacttacttgaaatgtccatatgatttgaattttggaaaactaatatttggtaagatttatagttaaagtcgacgaacttactaagctatagtcaggttacttgtaatgtttattgctctttgtagattaacgagagggtcaaaggatcggatcatcacgctcaagtcacactatctcaatttttcggtaaattttgttataaatactttaaatggtttatatggcatgtattggagcttatatgactatgttttgtattaactcatgaatatattagttaagttaatataagttgatatatgatatgaatataaattaactaagatgtttaaatactacttgaaagtatgaatgggtataatgttagataaaagaaggactagtgatattgttatgaaatgaatgtgatttggatgaagattgtatttattgagttgttgtttgtattgaattggtagtaaatttgaaattgcaggccaattttgcctagacttgctgagtttcggagctaaa

SEQ ID NO: 11207 - DNA, 648 bp, Gossypium hirsutum
aaattgtcgaccttgttgcccttaaaaccaggtctttaaatatttactgtttctttcatttttgcagtggcccaatcttccccaataattttaaaagacgatagaggtatgcatgagttttgtttcctttgttaaccatatagagtaggcagaaaaggaatgcaacggcagcatttagtaaattagatgttcttttggtcaatctttcttcactttgtccgtttcatcacccaaatgaagggttacaaaaatattctatatgattcaacactgcccatatgctagttcttataatccatctcaatttgtcaactaatagacgtatcagtctgtgtatgtgtatacatatctactggtctcttacattgggtggtcgattttctgttctggcaaatctacaaagatttgtatggagctaagatggcaaaagtgtcccgagtgcgtcttttttcttctgggcttgtatgcactttaaaacaagagacaaagctccatcatagtagaagtgttcaatgttttgcatgtttttctctatcatcctttgaagttactcattccttttgttgcagttcattgccatgatgttcaggagcagctaatccgcccaagagacaacaatgtcgagaggacacaggttgtcaatgaacc

SEQ ID NO: 11208 - DNA, 650 bp, Gossypium hirsutum
cgggttaatatttatacatgcatcatggagaagattagcattatgtaaaaaatattataagaaaacctttcacttatccaacttgaaggacatgaatagtgtagacaagcaatcatatcaatccattttaaagttctgaaagtcaaggcgttggtgtcttgcctgagaggctccctttccgcctcctgtgtagtcagaaccttttgtctcatttccagcaagagtttgcaccttctcattaacaaaatcaatttccctacaataacattcataaaacggaaataatggattagtgtacaaataggaatcttggaggaaagagaaagcctgaaacagtaaagtagtaattcttttaaatattttgtacacaagaagtaccctggatttgtcttgatgaaataatgcacattgttcacatacaattagaaaaagatagtcaccattctttcaccatctcaataacagaaaatagaaacttgtcgggctttcaaacagtcaaatgttagcgttcaaaatacgaaagagaaaactatcaagagagaagcagatgagagaaaacatagagagaaaagagagaaatttgaggaagaaaaacttgtactatattcatttcttgccttgttggttacaacagaaatgaatatagtaca

SEQ ID NO: 11209 - DNA, 376 bp, Gossypium hirsutum
  misc_feature (61)..(63): n is a, c, g, or t
atcgatgattacagaggagtaaactatgtctatttataggcttgtaaaactatattctacnnngagtgtaataagattgaaacaccttattgtaatcaatatcaaatagatggagtttaataaggtttaaaaaaccttattctaaaataaaataaaagaagtgtagttttatatagattttactttatttttattttatttaaataaggattcaggtcacttaattctaacaacataatagagatttagtaaaacattatggagtttaatcaatttattgtctaactctcctgaaattaatcagttttagtaaccaaacatacggttaatagtgatacagccaaaaaatctgcttggtttatatgaatgagagagg

SEQ ID NO: 11210 - DNA, 630 bp, Gossypium hirsutum
  misc_feature (531)..(532): n is a, c, g, or t
ttattcaagagacttcactacgttagtgatggatgaaaagtagagtcccaaacatcaaattggagtctagtcttatgtcatgatgaggtcttttaataacgatagtggtcggcttgcattgataaatttcacagttagaaaaaactaaaattaaactaaacaaaaatccattaccactatagcttttaaacaaaggagaatggatttcgaaaaacaaaacgaagtgaattgaaactagatctaaaaagtacagaaaaatcaaagaaaaccatattgaagagaccacggccgacaatccacaataccaagttttagtttgtaaaaagtttattaggattttagaaagaaaaaaaaagcttgtttttctttgtttttgctaatgtataaaaaaattgctaacatttatttttggatttaaatttgagtttctttttttccaaaataatatgaaaaaaatattattttgtggaataatataaaaaattaattatcagaataatatggattatgcattgaaatctcaaatggagnngactatgagacaatgattgtgtatgaaagcctcgttatcccaaatttacatgctgaaattccaaatttttttgggtttccaattgcttgccatgatag

SEQ ID NO: 11211 - DNA, 612 bp, Gossypium hirsutum
  misc_feature (9)..(9): n is a, c, g, or t
  misc_feature (434)..(435): n is a, c, g, or t
  misc_feature (464)..(464): n is a, c, g, or t
  misc_feature (466)..(468): n is a, c, g, or t
  misc_feature (577)..(578): n is a, c, g, or t
ggtatcagnatggttgaaactccatttgtgcatattctaaaacatatcttccttgctgtctctctattgtctttcaacccaagcccttttccaactttatcatcttattgatctgtctacaacatggaatgaattacttaatcctatatatactcgaacatgcagaagcatgaatagtttatcattcaagaatttttaactgacaatcccatgttttaattctcttgttcaattgagtatagttttaacccatggttgtctgccataacctgaaattgagcttctagcttgctacttccaccatgtggtgcttcccctaacttctctatttcataaaagagcttatgactgacttatctaaatgcttcctagaaatcatttttattattgaaagtgactaaatcaaatctgaatatatgttattatcacgattnngacaagcaaaaccctacccatattataantnnnatgtggggatttgcgactatcctttcacgaacttttcttctacgcaaaacccacgagatggttgatggtatggtctcgtgaaccttctccatcatgcatgatggagcannttctttcaaattgttgtttggcattttaaacatt

SEQ ID NO: 11212 - DNA, 358 bp, Gossypium hirsutum
tgagctgagtgagcttgaagaagattgcatggagtgcttagcttgttggtccatgaactttcaagaagaccaactacggtttcaccccaaattctatcaactagagctgaggttgcgtccttgaatctcgtagcccgagctcggataattggtcctataggtagctcgaggggatccatgttagctcttggtaaaccttgggactcggtcggatcattccctccctcttcgaagtgatttgcccccaagtcgccacctgtatcatttggagataagtcagccacgttaaaacttgcgctaatgttgtactcacctgggaggtcaagcttgtaagaattttcattaattcgctccaaca

SEQ ID NO: 11213 - DNA, 344 bp, Gossypium hirsutum
aaagaaaaagaacctcagctacaataatgatagtttgccgtctatatatggatttaccagttaccaactacaaaagcctaaaaagagaaatgtttcgatgtttcaacagagtaaagtcaccttgccaagtgagcggagaaagcacgagcaaaagcatcacctcttcttttagcatcatcagttccaccttcacttgccacagcctaaaacatttgacaagcttacacattataaaacagttataggaaaatttcaacttcaaattatttacactaatcactaagaaatacttttcttgttggattttatgctattttaatatggataatttaaaaaaaaaaaaa

SEQ ID NO: 11214 - DNA, 642 bp, Gossypium hirsutum
gcaatggaattgtaaatcatgagatataatagattttgtgagacaaggtcagaatgaattcgggttcccctgttctgactttggaaaatcattaaaaattgtacaaaaatgattatgagttatagtttatatggttagaatccttaatgagtctatttttagaagaaacaagctaaaacatcatccgaattctgtacaatgagataattaatttttagtgaagagtggtcggaactgtcagacagcgaaacaggggaaactttaaagaataaactgtactatttggctgaaccaaaaattatgaaaattttatggtatgaagatatgtgagtctagtttcagggaaaattaacggatcttaatttggagctctgtagctccggataaaaataatttagtgactctgactcggataaacagctttgaatatacatgttagtgaatattgaaattatggttaatgttgtttaagtgtgttatacacattaaggatgtggaatggagaggaggaggaggaaaattgggaaatatatgaatgattcgtgtataaatggtcatatgtttgattataactcataaacgatgaaatatgaatgatgcttatttttgtgcattattggtcatggtttaagctcatgtgtg

SEQ ID NO: 11215 - DNA, 646 bp, Gossypium hirsutum
tcggttatggcccatttcgaccttggatgtccatagctcactggtatggatgcaaaatagttggttctttttattctggactgcagtgcccacgcttatcttaaatgagttaaacacacttcacttccatcctcttctcctacaatttgacttgtacattttaaatgcataggttgatatggcactttgatttgaacaagttcagaccgaatgaagtcaaaagagtgaagatcagtttggcttgtgtttttgcatttatggcaattggatggccattgatcatctataagacgggaataatgggatggatcaagttttggctaatgccatggttaggctatcacttttgggtaatgctacttccaagtttcatgtggttatattttatgagttcaaacatctttaacaggaaatcatcacttgataagatttgatacctgtgaaactctataccagtttggtggtcaataatttatcttctaatgccatttaatcatgtggaaaaccggccttatttcttttagtctaatattgaccaaagtgatacttgaaacaagagctatttgaagcgaataacttcatatatttgcatgttttgttatgagttgattaatcatagattgtcaacccgtggctttgatgtgat

SEQ ID NO: 11216 - DNA, 590 bp, Gossypium hirsutum
caaacattccgtgaactttattatattttctaaataaataaataaatcatgtcatattttcaattaccataataaacctctatccaccgaaataacaataataaagttctatatttagaaaaaaatcaactattttatttttaataatgtgcaactttagtggcggaaatattttttttaagggactagaattaaattgtatatttttatgataataaaaatgtaattttaccattttgataatctatatctttataatttttaaaggattaaatcaaatttttatcatttttttgggacaaaagtataattttacaattattaatttaaaattttgtaaatgataaaagagtctaaatggaaaatttttaattttagggggccccaaggcccctgccggtccctttagcttcaccattgtgcatcttgttccatagactatctgataggcatattaatactcaagatcaaatattgacaggtagctttgtttatctacatactaatggggcaatgaatgtgattacgaggttgacctctgctggcggtgtggtacaagacttgtccgaggagtggattgttggatttaa

SEQ ID NO: 11217 - DNA, 626 bp, Gossypium hirsutum
atgttaagtgttcgtaaaaggggtacttacactcccttgtgagatcacacgtagaattgcgcattaactgcataaatacgtgtcaagtctaaaataatgtatatgttaacatatgtaaaacctattctaaaatatcacatcaatgaacagtaatcatatcatataaatatacgaccttaccatttaaagaaaacaaataaaaacactcaacagagatcaccaaacccaccacattgaaacatttttttttagaagagatttaaccttcaatccaaaattttgagattagtggttttctaagctcactacagaccaccattggagcaaatttcccatttttttgttagatgattcttgaacaagcttggagagtccaggtaaacctcagcaatgcaatgtactaaaaatggcgtccaccgtaacagacccatggtcgaactgaaaagaataggtcggtttccacaaagcatatgtcttaataaaaagagcattgaatcctattttcctccatataattgttgttgacatactctccttccccaagttcattacctgcattcatctttgtgcttgcccaacctaacggggttaataatttatccttgaaccgcgacaccctattcacc

SEQ ID NO: 11218 - DNA, 531 bp, Gossypium hirsutum
tattatactagtatggtttttagggtttatcggaggtttgggtttagttaattatttatttttggttaaattatagagtaaaaattaaaaggctacaataagttctttgtgtgtttaatatttaatctctatacttttatgttataatttttccgttaaatttgttagtgtgacatttttaaattaaataaaattacttatttgatatccatgtaagaaaaagatgacactataatggacctaaatttaatagataattttaacggtgtaaaaatttcttaaaaactcatataaacattttactcaaaataaagtatttagactaactaatgacattttaagaattgaggtagaaaattatgtcaaaattaaagcatagagataagattttaaatttgagcgaaatataaagatcaaaattgaaatttaacctttcttatataatctcacaaaagtagatggattaaatctgaaatttaaccatcatcttctcatgtaaaaaaaaaaaaaaaaaaaaaaggacaaatatct

SEQ ID NO: 11219 - DNA, 508 bp, Gossypium hirsutum
gtggcagttagggcctgcgtttgcgctacccatttctaatttgccaaagttttctgtgatggatggtgtagttaaagtagcagaaacagggtttcttaaattctaatggaacagaagaaaaaacctgattgagacctgtttacttgctatagtccaaagccaatgcattggtccattcagtcactaaatgaccttgtagtttcagcaaatgcttgtttatgcagataaacctacttcccgagtttttaaaagaattaccaagaaacaaaccactttttgcaactagttgctttccattgaattccttgtttgctagttcggatttgctctctttatttgtgactttcaagttttgcgttctcaatcatgaagtatatttgttagaatgaagctgcccttgacaattgccgttctattgggaatggcatcctttttaaggcattcataacgggttcatagctctcttcctcaatttcaaaacacatcactgaataatctctagactctc

SEQ ID NO: 11220 - DNA, 605 bp, Gossypium hirsutum
gtaattgtgaggtgtgtgtgtattccaattccaaaatcataccatttattattgtcatctcacctttgcttgccaactctctactggccttcttcttctttctcttcctttgtatgccagtcaagcacgtcttgatagatgataaaatttaaatatagagtgaacatctacttatgttttttttagataagacgcatggtgtttgtatactctccattcttttaaggcaaatttaaataaaatccataaacctcttaaggtttttaaaatatacatctgctcaacaaaaatccatttacttttaaattttgatgcaaaacaattactctttttttttttaaaatttttcccaaattttttaaaaatgaaaattaaaaaaccctgggatttttttaacccaaatttttaattttttttttttaattttaattacaaaaaaattttttgaatttggggtttttaaattccaaacttattaatggccacaaaagggggaaattccaaattttccccagggaaaatttaggggccatttggcccccaaaaaaaaaaattttttaaattttctttcaagggaaaaaaaataatatcctcccccccaaaaa

SEQ ID NO: 11221 - DNA, 606 bp, Gossypium hirsutum
  misc_feature (544)..(544): n is a, c, g, or t
  misc_feature (546)..(547): n is a, c, g, or t
gcaatgcttgtaccaataattcaacatatctatgatgttgctttcatcccatactaccctaaggccaccttccaaactttattcatattatggaattgcacacctttttgtactatattatgtaactcgaagtaagatatggcatcaggatcctcttttatctttaaatttattctcactcacatacttaagatatgagtcatgcacaaatgttcacctccatgcaaatttatgtaatattcatcgtcacatatttgtatttaaatagaaaagataatttaaaaaatttctactatacaaatctgcatgtaaattaaataacataatgatgcaacaaataataattcaaagaaaaaaaaaagcagccaataataattattagttgaagaacaaatacaacaagtaaccaataataattccaaacaatatgttgtcatccacattcaaaataaattaacaacaaataaattcacatgttgtgacactctttaacaataattaaataaatacacaaaacaaatttattataatcaattgttacccncnngttaaacatatacacaacaaaatcacatattgtcgcacatggctaaaaaaaaaaaaaaa

SEQ ID NO: 11222 - DNA, 667 bp, Gossypium hirsutum
tatccaaagctaagagggatcaaaattgagctcttcattttaagagggactaaaaagggaattataccatataatcaaggtggggacaaagctctagccccttccctgtatcaaacttgaaatgatataacctaaaagacccaaccaacaaactctaaccattcaaatctaaaatgatttaaataagtaacttaaaattatctaaactcgaccttcaagctagagtgataaaatctaaaatgagctaagattagtaaacttaaatgatttaaactcaaaaccaaccaaaacccaaaatgatccaaaaattttaagacttgaattggttgacctaaaaacatcttcaacggatgaattgatatatccacccccagcattatttagttaaagtgaggccaaagcccctgttcgcacattaatattatctccataacaaacctaaatgaccaaatttaaaatgattctacttaaaatattcaattgacaaacttaaataatctaaactctaaataatttaaataaaaatctaaaataatttaaactcaactattaaatccagagaagagaacccaaaatgatataacttcaaaactctaactcacaaaccctaaactattacatgctcaattaacatgaagttttagcctttggttagcaaggttaattt

SEQ ID NO: 11223 - DNA, 651 bp, Gossypium hirsutum
ttccaagccaattcactcaaaggccaaactatgtctgaaccaatatagtgaaccattttcggttcaatcggctagtcctgtctggttccaacaatacaagtgtcaatatataagttcaaatctgctgttaagtccctatacttccacaaaatttgatatttagtcatgtaattaaaaaattaaaaattatgtcctcttacttttttttatttaaaaatttcagtccaatcattaaaacactattactatttcctatcaaaatttatcagcttgacatgattaagccatcttcatatgattgacaaaaactttaacatgttaacaaattttgacgaaaactaccaacgacaacgatcggactataatttttaaatagaaaaaagtaaagagtacttaattttcaactttttaagttcagggactaaatcgcagattttattaaaatacaaagactaacagcatttgttaacccaatatataaaagtttataattccacaaacatgattatatcgtgaagcataacacgaacacgatatgaatacatgaattgctatagatctaactgaaatcttaagaaagaaccacctcaaaaccaagcctaatttaatatagccgcatggatctatccattactaccgaaacatacagcc

SEQ ID NO: 11224 - DNA, 690 bp, Gossypium hirsutum
agaatgagtcagattagttaaattgaaaattaattaaagtattgatttaaaaaatagttttgaattagttgatttaagaattaatatgtattaatttaatagagtaaaaaatttgttaaactgaattttaaatatttttaaaaatacttaaatagataaattatctcattagttaatcaaaaaattagactgatcctcttatcttggtcatttcaaatttttttttgttaatttaattatttcggttaaaaaaatttacttagctactctaccattaaattttcattcttttctttctttccttattattattattttttttgttttcttctttttaacccaaaatattgtagccattgcttctgttaaagatgttgtaacttcctccattaggccaccgctagcaaacaagcattgtcttgtcaatgaacaacactagcagatgcttcttctttctcgctatttttcctatgctcctcatttcttctccttacccatagtcatcacttctcaccatcactgctataatcattagacgtcttcttcaacattagattatcgatccaaaaccaccaaagttaattccaaagcctcttcttcatatttataggattagatttctcaaaaaccctaaaaaattgtgaagttactttctaaactttagagtttctatgcttcgatctccctaat

SEQ ID NO: 11225 - DNA, 424 bp, Gossypium hirsutum
tttcccatgattgactctggtgtagcctgggtaaatatttccggtacgctttcttttgtgaatggctggtccggtcaagttgtaacctggcaccttatggtactttatctctacactccctgaacatctgttctgcttggaagaatagcagaggacattggtgtagggaagcgacttcaagtagagctcagttttttcaataaaatttgcccaatacgccacaagtaccttcactttcgcatgcttcgagaatacaacctaccatgtttaagcatcataagaatagggaagacacaagcaaaaatccactaaaacagtacctctgagattgcacttgaaagagataaccaataaactgttttctttgtatgttgggattggccaagccattccatggtactgatccttactgtgcctccatctc

SEQ ID NO: 11226 - DNA, 563 bp, Gossypium hirsutum
atctatgccacttgaaaagttgaaacaatcttcacattgagcccactgaatcttttccctgacacaaagagaaacagactttagttttgcttactacaagacccagaaagtgaataatctttggactttcgttcttcattacgattttcatcattatttcataaaatgcctgaataaaacccacatttgtgccagactatatactgtaagattttttcaatatcatggattactgaagagagataaggcccatcaaaatgtttgggttccaagaaaaaacaccaatggcctattgaataagttacatggcttaaaaccgtcaaagctacctgtttgctggcatagcttataaattctcctattagtttagtttaatttaaccaaattttataggacaaaaatattattcaatttgttatttttacatgttacttattaaaaattcagttaatgaattaacgagtaatattatattttgaaaagtacaatgattaaaaatgatccaactgaataatacagactaaatttataattgttactgtttaggttaggacaaagacttc

SEQ ID NO: 11227 - DNA, 663 bp, Gossypium hirsutum
  misc_feature (20)..(21): n is a, c, g, or t
gtgggaaaccagttgcttcnnctgctcggggtagaccatctagaaatacggggaatgctagtggcggtcagagaggatctagagatgctacaaccagatttgaggctcgtgctcctgctagagcttatgctatacgcgcacgcgaggatgcttcctcgccagatgttattaccggtactttcactctctttgatactaatgtgattgcattgattgaccctggttctactcattcatatgtatgtgagaccttagcatccagtaagactttacctgttgagtctactgagttcgtaattcgagtgtcgaatcccttgggtcgttatgtgcttgtcgacaaggtgtgtaagaaatgccccttaataatccgaggctcctgttttccggctgacttgatgcttttaccgtttgatgaatttgatgttattctcggtttggattggttgaccgtacatgatgcagttgtgaattgcaaaagtaagactattgatttgaggtgtgcaaataatgagataatccgggtcgagtctactgttttgaatggattgccaacaataatatcctcgatgttagctcaaaaatatgtgagaaaggggtgtgaagcgtatcttgcatacgtatttgataataaagaaccaaaaaagaaacttgaatcggtaccag

SEQ ID NO: 11228 - DNA, 682 bp, Gossypium hirsutum
ttcgactttcacttgttaacaaacaaacatctcattacaaactctgaaatatctcgtttcatgcctaaccaccaatacaattccctcaaatcattatacatctttgtacttccgggatgaatagatagacaaccattatgtgcctcataaagaattttctgaatcagttcagtattttttgttatgcaaatcctacctcaaaacctcaaacaatcatccaatccaatctgatattctgaatcactattcgatttgcactgaactcttttagattgcaactcattatcacctttctgagcttcacaaacttgctgaagaaataccagtctagctttcaactaggccaaaattgatcgatcattagataaggttaaccgtatattcatcactctcaaagaaatcaaaggctttctacttaaagcatctgcgactactttcgctttccccgggtgagagtcgatcactaactcataatctttcaacaacttgagccatctttgttgtcgcaaattcaaatctttctgagtcatcaaatactttaaactcttgtgattagtaaagatgtgacacttctcatcgaataaatgatgtctcaaaatttttaaagcaaacacaatagtggctaattccaagtcgtgcgttagataattcttttcgtgtggtttcactatctcgaggcata

SEQ ID NO: 11229 - DNA, 766 bp, Gossypium hirsutum
  misc_feature (458)..(499): n is a, c, g, or t
  misc_feature (502)..(507): n is a, c, g, or t
  misc_feature (509)..(512): n is a, c, g, or t
  misc_feature (514)..(519): n is a, c, g, or t
  misc_feature (521)..(550): n is a, c, g, or t
  misc_feature (555)..(561): n is a, c, g, or t
  misc_feature (563)..(575): n is a, c, g, or t
  misc_feature (579)..(582): n is a, c, g, or t
  misc_feature (584)..(588): n is a, c, g, or t
  misc_feature (591)..(605): n is a, c, g, or t
  misc_feature (615)..(621): n is a, c, g, or t
  misc_feature (625)..(629): n is a, c, g, or t
  misc_feature (633)..(633): n is a, c, g, or t
  misc_feature (635)..(649): n is a, c, g, or t
  misc_feature (651)..(655): n is a, c, g, or t
  misc_feature (657)..(657): n is a, c, g, or t
  misc_feature (661)..(661): n is a, c, g, or t
  misc_feature (666)..(667): n is a, c, g, or t
  misc_feature (669)..(679): n is a, c, g, or t
  misc_feature (685)..(687): n is a, c, g, or t
  misc_feature (691)..(700): n is a, c, g, or t
  misc_feature (702)..(707): n is a, c, g, or t
  misc_feature (713)..(720): n is a, c, g, or t
  misc_feature (735)..(737): n is a, c, g, or t
  misc_feature (741)..(743): n is a, c, g, or t
  misc_feature (745)..(746): n is a, c, g, or t
  misc_feature (755)..(761): n is a, c, g, or t
ccccattcctagggtttggccgattggatttctttcatttgggaatcaattgattgctggaaaatgggcctttttggccgaatcaattccttggcagattcgcatcttttctttcttctcaatttcgtttgattcatcgattctatttcttttcttcttgctgctcttttaattgaatttgggaattttaaattcaaatctgattcggtttaatcttaatctttgtttttgatttcagatctgttcgtctaggatctttcgtaggagtttctcgtgacttggcaactcgatcttggtccgcgcgcaaccctatatcatttggaatcaaattttgggggttttgggggttcttggttgatttcaaaactgatctcaattttttaaagaaaaaaaagcagttttccccaaaaaaatttttcaaaaaaaattcttttaagggggaaaacgttgccaaattnnnnnnnnnnnnnnnnnnnnnnnnnnnnnnnnnnnnnnnnnnccnnnnnncnnnnannnnnnannnnnnnnnnnnnnnnnnnnnnnnnnnnnncactnnnnnnntnnnnnnnnnnnnncccnnnncnnnnnttnnnnnnnnnnnnnnnttacttatannnnnnntaannnnnactncnnnnnnnnnnnnnnntnnnnncntttnccccnncnnnnnnnnnnnttttannncccnnnnnnnnnntnnnnnntttttnnnnnnnntttttcctttttttnnntttnnntnnctttttccnnnnnnnccctt

SEQ ID NO: 11230 - DNA, 530 bp, Gossypium hirsutum
aaaatgtaaagttattaaattattactacatttatgattttatcaattaattttgaaaagttataaaaatatttattgaattatcaaaaatttttattcaagtagttggtttgttaaaatttttttaatcaggttagtgagctctaagtgacaattttataatcagtacggtggattagtacacattgacaagtagaaaggaaatatcttagatccgaatcgatttgatgacaagtagaaagttgtttagattttgattcacagattcctaatgttcaaaactatttcatgaaaaaaaattaattatagaaaaaaagataaaaatgagctttcgattaggattaaccgtgcaaacaaagaagaccatataacggcgattttaacggtccaacaacttaaattgaaactttcaaataactcactgacattggatgggtttaccattttatttaattgggttaatgaaaaaaaatattaaataatattgagagtgactaaattgtaaaatttacctgttctcacctttaacg

SEQ ID NO: 11231 - DNA, 465 bp, Gossypium hirsutum
atatgttctcacaagtctacagtagtacagctcaagtgttttcaactaagaattatttgcccttaccttttacagctttttgttgaaaaacagcttccaaaccagacgatacatctactttgattattgtttccatgcttggttcaattattgttatgaattccaagatagaagctgcttttctttgcaggtttgatggtgatgtcttcagaatctcaataaggcgagtaatgacagtagagtctagcaattctttcctacaatacatttccaaaatatacatcgggttagtgttacagtcaagaacccaaggattcaacatgaatatcccaaaacattaaatcactaggcaaataaaaaaaccttttgtagtacatgctttgacaatggagcctaaagtaactaagggaacatatataaactccaccgtcccccttaaaaactactggcagtttcagtttcaaa

SEQ ID NO: 11232 - DNA, 659 bp, Gossypium hirsutum
  misc_feature (54)..(54): n is a, c, g, or t
agaggtgtacatgggtcgggcttaactaaaattttaagtctgtttgttaggccnagcttggccctacctaaatatgggcctaaaattttatccctttctgaccccaaataaaaatgttaaaactcaagctcgatccggctcgcctatattaatttttatattaattttatataattttaaaatatatataatacgtcaaaaatactaaaaacatcaaaataaatatttcccaacaaattgaaaataaattttaaaaaatatgtatacttaaataacactaggatagatttaacttaacaagcaaatgtcactaaaataataacaaaattaacaaatgtctttaaaataataacaaaattaacaataaaataacttttataggatatctaaacaataacaataaaatagtagcaacataacagtaaaatggtagcaaaataatgagaaaaaaataagaaaataatatttaaaaaagtaattttttttgtcatttagtgaattcgggccaggcaaaaaataccttacctgaggtccggcctgttttttaagcaggccttatttttttgtttaaactcatttttcgagtctatatttttgtccacatctcgaacaagccttcgggctggactgaataacccgacccatgaacaattctataa

SEQ ID NO: 11233 - DNA, 567 bp, Gossypium hirsutum
ataagttctttcgccaatttcagctattgaagattcaataatactatagttgacagcatcttcgttgttttcttagagggaatggtggaaggatttttttggttcttaaaagtttttaattgttttcgcgattgaattgcttctataactacaaatttagactaatggctagtggtttttatgagaacataatgttaataggatgataggcatttttcctaagtaaagatgcaatagatttaaagaggaagattcgttttgaaggatttgtttgatacaaaattattgctttgataccgtgtgtgctgctgcaatgtgctaaaaagtgttatttttgttgtcaagcttaagtacctttgttttcatttgctgatatttttggtagaagtatcatggaggctcctatactaggagtcaattgcagtttgcttttttactcaaaaatgggcaaattagtctttgtccgttagatcaaagagcaaagtggttctttttgtgaaaaaattcgttcgtttttattgttaaaatttagcgtggttgacgaattaaccacacagttgcacttgc

SEQ ID NO: 11234 - DNA, 360 bp, Gossypium hirsutum
atggaagttttcgaacaatggaaaatacttatccaaatattaaaaaatataagatttgttttacatgaaacaatgcaccctacatttagttctaccttacaccattaatagaaatgcatgctctcatatttactataacataattttgttaataattttttttaaatgattaatagtttatacatcaagttttagtattttattaaagggaaaggtttcactttaattatttaaatttgattaattttacaccattttataatcattaaatcaatatgaatatatcaaattaaaatctttaatttacattaaaaccttttattaaacatttaccattattttccccatttcctctccacg

SEQ ID NO: 11235 - DNA, 681 bp, Gossypium hirsutum
  misc_feature (540)..(540): n is a, c, g, or t
  misc_feature (548)..(548): n is a, c, g, or t
  misc_feature (553)..(555): n is a, c, g, or t
  misc_feature (562)..(562): n is a, c, g, or t
  misc_feature (566)..(580): n is a, c, g, or t
  misc_feature (582)..(583): n is a, c, g, or t
  misc_feature (588)..(591): n is a, c, g, or t
  misc_feature (593)..(602): n is a, c, g, or t
  misc_feature (604)..(604): n is a, c, g, or t
  misc_feature (608)..(609): n is a, c, g, or t
  misc_feature (612)..(612): n is a, c, g, or t
  misc_feature (614)..(616): n is a, c, g, or t
  misc_feature (618)..(623): n is a, c, g, or t
  misc_feature (625)..(638): n is a, c, g, or t
  misc_feature (640)..(645): n is a, c, g, or t
  misc_feature (647)..(657): n is a, c, g, or t
  misc_feature (659)..(667): n is a, c, g, or t
  misc_feature (669)..(670): n is a, c, g, or t
caagttatcttgtggcgtcattccttcctttgctaaaccgaacttatcacttttggtgtggcgttcattatacatttggttcctatcacatttgatagcgggtcaaggttctttgttggtttcccaaaccgacatttacctaagagctactttgagattcgggtcaacaatctcaattgttggttcattctctacccttagccgaactttccattcattgttaaaccttcttccttttaaaacctttgtttggagcctttcatctattctgttgaaacgaacttttggacaattttgtgtttacgttttttgggttctttgtttttcgggtttcagggtttagtttttatctccatctttgtactcttcgttatttttccattaaagtaaaattatctttgcctgtggttttttatcctctttggagggtttttccacgttaaatttgtttgttcaatttctcaatttctttcactgtttttcttgttcgttgcttaatcgggtcaatccctaacaaagccataatttgcacttacagtngatgatangatcnnnaatgacnttcnnnnnnnnnnnnnnnannataannnnannnnnnnnnntnttcnnacncnnncnnnnnntnnnnnnnnnnnnnntnnnnnnannnnnnnnnnntnnnnnnnnncnnttaaaaatact

SEQ ID NO: 11236 - DNA, 619 bp, Gossypium hirsutum
gacgtgtctgggaagaaccttttgtttacactttgtttttctcattcctgcaaaaccaaaaaaatctctctatttttcctctttcctttttcttttttaaattaaagaagtttcattctttacatgtagctgacctttaagctcttcgatattggaacaggtaattttatttatttttttgtttttctaaccatttttccttcatttagggtttcgttttctttttgttcgccgctgaaatagaatttccgcagaaaggaacgaacattttctcgagaaacaaacagattttttttgttgaaatccacagtactgtgtcggataagatagtatgggagcttaattttctgattttcagctttggatattcttccatgagaaatatgtgttactgaaccaggacatcttaagtctccgtccctttatcagtgctttggtgttttaatttattgatcttgagcttgtttatgattacatgtgggaccgaaattttgtttttttttctaaggaatcagatgactgttggaaattactattgttatccaagtgcaaaattggtgtgagaaagcagagattgaaatttttgcttgattattggctattgattttgtagctcata

SEQ ID NO: 11237 - DNA, 643 bp, Gossypium hirsutum
agaggccaagttgaaaatccgcaaagagcgccttgagccaaaagaagatttgagttgaaaacctgaaaagggtggctcaaatattgaccagactggggcatgtaatgagcttgatatacccgaatcaacaggaaaaggtaggcgacatcttggggcatcaacgaagtactgtagatctcctaaacacatgttaaattcaaaatgattcttagtttgcacggagaagttcaagctgcgatatccaaggcatctagtcttcatattacttatacagaatgtgtttgttcttgtaatactttattcttcactgttcttgaatatctttttcttttcaagacccttgctctcaataaattatttttctttcataatctcggtgcgagcatgttgcattagaataatgattaatggactaatctactttcacaaaggaagttttgcatattactctgaaagattctaaataatacagcaacctaaagttggactattgtttagaacatgccaagtttgaaagttgaaatgtctaagattttgtcaagatatcttgtgggtggcaaagttttaatcaccaagaagaagttccctttaaaagaaaattcttcgtttgtgcaagagcatttggtatgacaccctgtgaaat

SEQ ID NO: 11238 - DNA, 620 bp, Gossypium hirsutum
gggaaagtaactgtatgctaagtttagtaagagcgagttttggctccaggaagttggatttttgggttatatagtttcgggtgaaggcatcggagttgatccgagtaagatttctgtaattgttgaatggaaatcacctaagaatgtaaccgaggttaaaagctttttaggcttagccggttactatcgaaggtttgtaaaaggattgtctatgatagcaactccgatgactaagttgctacagaaagacgttaagtttgaatggacagagaagtgtcagcaaagttttgagaagttaaagacattgctgaccgaagctcctgttttagtgctacctgaacaaagaaaagaatttgtggtctacagtgatgcatccttaaatggactgggttgtgtgcttatgcaatatggcaaggtaatagcctatgcttcacggcaattgaagcctcacgagaagaattatccaacccacgacctagaactacccgctattgtttttgccttaaaattttagaggcattatttgtatggcgaaacttgccgtattttcacggaccacaagagtttgaaatacttgatgactcagaaagaattaaatttgagacggaggagatggttag

SEQ ID NO: 11239 - DNA, 466 bp, Gossypium hirsutum
ctatgtagctactaagtttgaggtgtcaaaggctgataattctctctttattcatcgtgaggggtctcggctactttatgttatggtgtatgtagatgacatcattgtgactaggaatgactatcatgcgataaatcaatttattaaggaactcgatgatgaattttatttgaaggacttaggacagctaagctattttctgggcattgaagttacttacacttcaaatggtcttttcctcaatcagaaaatatatattcttgatctacttcgcagagcatccatggacaagtctaatggatctcccatgccaatagtgactacatgcagtttgtttgctcaagttagaagtcctattgaagatgaatctctatataggagtatagtaggtgctctaaaatccgttgtgatcacaaggccaaatattgccttcttggtgaataaagtatgtcagttcatgcccaaa

SEQ ID NO: 11240 - DNA, 405 bp, Gossypium hirsutum
ctaccttcgccactctcacaaaaaccctcgcatatttctttgcttctttactaactaaaaaggaaaaacattctttgtttaacgcttaagattcctttaacaacaatggctgcctcaatgtctactctaatggttgttctcgtcgctgtatgcgctctcatgggttccgccattgccgccgacgctccggctccgagccccacctctggtgccggctctatctctccttcatttgtctctgtttccgtcgccgccgccgctgtggctctgcttttcggatctagacttcggatctgaatgatgctatctctggtgttcagatgatgctctgtttttcttttatatatgtatttttttctttttgatttgattttgaatttggtttggaattttagtagctgtggt

SEQ ID NO: 11241 - DNA, 509 bp, Gossypium hirsutum
cctttattgtagtttgcccagaaaataatacgttctaaataggtttaatatgtcaaagtcacaaatttaatcatatattttaattttgatatattaaattcatatattcttttaatttcaaatgtaaatctaaattgtatatatttctaatcccaaacataaatctaaataagtggtttgatatgagattatccttggaaaaatacaaaaaaatcaattattaaattattttcttgtaaatcttaggattttgaatctttttttttatgtattttctaaagagcagggactaaattaataaaaattataaacattaagggttaaaactttattttatctttttataattgccacatcaacaactctaatggcaaaattggatggagggactaagatttttaaataaacaaagtactgcggacatggtagtcggcactgtaccgataccggctggtacataccgtttcggtcaaaatttcgatgcgtttcagcctgtttcagtcaaaacc

SEQ ID NO: 11242 - DNA, 652 bp, Gossypium hirsutum
ttcatcactgacaataataatctcgaatacatttgatattcggctttaccctgtagacaattcaacatcctttggaagaatagacaagatactgctttgagctttatactcaattctctgtataacccagagtttctcagtactcaaatcttactctgaaataatagtaacagaaaccagaaatcaaatcctccctgcaattccaaattaaaattcgaatcatgctgtacttgtttaatttaccacttatagccacatttctatactctagtcatcaactatttagaaactttactaacatgaatcaaatgattccaacttcatagatgtggtctctttattaatcaagacaactatacttataacaacatctctcgaataagagaaatccaactaatatgtttccgtatcatactttcaagaatacaatttcttcattttagactgcatatttacttacccataattgcacaaaattattcccgaaccagagaataaacttaatgcacatggcttaatttacctttgctgataataatcctttacacgaagattagagaaattgaaatacttgaatccccacacttccatagtcgaaccagtagcataatcataatagacattgttattgcaattcaaagaatacctttaa

SEQ ID NO: 11243 - DNA, 562 bp, Gossypium hirsutum
ggtgtgcaattccgagaaaaccgacatgaccttctagacacccgtgtgagtcacatggcagtatggtctggccgtatggaatggttcagctcgtgtggctcctgcagcttgctccgacactccgattttcactcatctttcgttccttttgcttccaagtgctctattaagcattaaaacatgaattcaaaagattgagagcataaaaattacaattagcattgaataatcgcccaaaaatacattaagaactaggttaaaacatattacttttagcacttatcacacttctgtatttactattagcctaagctttcctgtttctttacttcaattttactgttattaacttaagtattgaaaacataaactctaatgcccaaaactcatgtttatcaaggctcaactatcaagttcaacaccgtcctccaaatgttgtcttcagaccgaaatctacgaacttgtaaagattttaaaatatatataatataagtgtataacaactaaattcattattttctttaagttcatgattgagttggtgtctcaagtcaacctgaaa

SEQ ID NO: 11244 - DNA, 662 bp, Gossypium hirsutum
agaagtatgagtatcgactatcatagtagaaggcccagcatgacccgctctccttttacgacgctgctctagcattccactatcctcctctttttcactactgataactatattcacaagcctcacatcagttctgcacttcttacgcatatccctcaaagaagctcgcaagtctatggcttcgtcaattttgcgagatagactagtagtttcctctaagtcatttctgaaaccacgagttgtgcctgcagcaccaataattattgggttagtaggagctattgtaaaattcatattcgcaccacttttttcgtgcgatgagaccactaagatccaaggccgaagttttatcctgcaaaaactatagaagttcctgggttcatatttatatcttgtcaatataagacccaggtcgtctttgtccttatgaggccatgtgtgtctttcaggtcgtgcaccaactgtctaggccacttctctgttatcaccctgcctctatctattggggttaagacccttcaaatgatactgaaacacattccttaagatcctttagaaccaggggatgaccagtgcgaagcttttcgaaattggggtgaactattctctattataatgcttcgcttaaacgagtacatgtccctgtttagtgaggaccattc

SEQ ID NO: 11245 - DNA, 489 bp, Gossypium hirsutum
ctacttggacatccgaatttgttgaactaagtatatagggtttggatgttagatttatcacgtcttgttcgttgtttagatttggcaacatgacaggaaagcaaccccttttcccttttcagatgatttgtttttttaagtattttatcacacatttgaataatcatataatcatcattgtttacagttccggaggtccgcctcctgtattggttttgtcaaatgcgcatggtttaaaataaagaaagaagccaaaggttggaaaaagaaagggtaaagggaaggacttctggaatggtctttccttggcaaattaaagttttttataaaatggaaactccatgaccatgaacaccaaaatcatattatattgggggagcgaagtggagccccgattactctattagtctttgtgctgtttgataataggtcaaagtcatatatctctgtcttctaataatcgataaccaccaaaggactgacttaaaa

SEQ ID NO: 11246 - DNA, 643 bp, Gossypium hirsutum
gagctttccgtttaaacagttcgtaaagtaacggaatgcttcaagtctgccaaactgtttcttatcaaatttcttccaactactgaaaagagcactacaaatttgctcaatgcaaataaaaaggatgatgttttaggcaaaaatgagtagttgaaagttgaaacatgctgattgttggaaaatccagtgtcattagttcattattgagagccaacagaagcagaaacacaaacaatatggacaagttgaaaagattgtgacaaagaaatgaaattatagtagcattagtagcatcacaaagcaataattaaacactattacccagcttctccgaatagcaagggaacattcatacaatatcaatgagctgcagaaatataacttaaaattgcacatcaaacaattcccactagctgaatacggaaccattgctcaaactccaaaggcagatgatttgcatgttatagttgattctggaatcgatgttccgaagaacatatgtccggtcaccatgtaacatttgcgactaatatgaagaatcataataaagggtggagaaaaaggaaaacaactctggtcagacaagcaaccaatcccgaaggtatcgtcagagaatgcacttcaacaaaaggcatcccataca

SEQ ID NO: 11247 - DNA, 464 bp, Gossypium hirsutum
actgcgtaaatactgcacctcattaatgagaaacgtggttttgtacaaggaatcttttctttttcgttatcgaaatttatggaccagaataaaaacagaagtgtttattttaaaaaagaattgatggatgaaattggcggttctttcatttggaggtaaatattaaaggtcttacattcttcattcttgtcaatcctatgttatgaattgtttcaaattgccttctactttatgtgatgaaataacaagcttgattcgtagatattggtggacaaataaaaaaaggcggtaaaggatacattggatgaaatgggacaatctttgtccgccaaagtcacaaggaggccttgaatttcgtgatctttctcttttcatatcagccatgctcaacaaacaaggatggaatatggtgcaagataaccaatcattgtgctttaaggttcttaaagcaaaacactttgcta

SEQ ID NO: 11248 - DNA, 570 bp, Gossypium hirsutum
ttggagaaattgtttacagcgagacttcacaattaatgggttaaaatttatgacattatgaacttatgatttttgtctacaacttgttccaattaattttctagtgttcatagtagcatgccctatggctttaatattgatttaagacacccatctgtttctacaggttaatgtttgacccatttgctaggataatttatgactacatgggaggaattgaagatattaaaaaagctaaagtatgtatcacggtgttatggttggctctgtgttgctcacctcttccttttacttaaatacctgtgttcaatgcatataaggacataggtacggggatatgaccctcataggaccatgcaaatatggaaaaacctagaaagaaatgaatataccggtttggatgtataccaatatcccactcccacccaagttcgagtaaacatagatggttgttccttttgctgctttagaaattagaaatgatgtgcattgtcctttatcttctgattttgtaggtacgaactgtgattcccgcaagtacctcttttcaagaggatggtggtgagttta

SEQ ID NO: 11249 - DNA, 632 bp, Gossypium hirsutum
  misc_feature (62)..(65): n is a, c, g, or t
ggtctatttaaagttcggttcagtcattacttcacttccggcgcaacttgagcctccgcatnnnngttaatattattaggatttatcctcctttcttcttccagttctgagtcatcgtcgtagttctgagcctcgaggtccaactcggtggtggtgttatccaactcggcgggttggctcacagggtcaccgggttgaggagcgagattagctctacaaacggggcaggtagtatgagaagccaaccaagcgtcgatacaatcagggtggaaaacgtggtcgcatttggggattaaacgcagcgtttcctcatcttcgaactcgttcaagcaaactgcgcactccaaagctcctttcccgatcttatgaactttcacttcggagtaaaccatggtggggaaagtctcgatcacagacggctcaagcccacgcatcccacggcgagaacgcccagtttcgccattgaaagggcggacgacgcttccgttggcgttggcttcggagcagttccgaagataaatagagaaaaaacccataaagaacaaagcggaaatcaagacaaccacgatgatagccatggaaggggtgaaacgggcgtaagggtaacggtcgttgtttcgttcggtaggttg

SEQ ID NO: 11250 - DNA, 409 bp, Gossypium hirsutum
actctctttttttttcttcttctcaaatttcccaatttttttaaatttaatcttctaattgcaaatcctattgaataaaatactataatctacagattcgtgagcaatttgcctggatcttccatgcttgaagtctccgctcttttgaataatgtagctgtaagtttatcgacacttcaatttcattttaatttgttttatctctcaaataaatgtgtgttattttttaaaatttcttttcaattttatattcagcttctaatgcttttgcggcacactttctgctctcaaacagtgaatggtaaagttatcgatttctttgtctctaattgaaatgatttattgtagaaactttgttcttaaatgttttaattaaggccaaatatgcagcccgtcccaatattaataa

SEQ ID NO: 11251 - DNA, 651 bp, Gossypium hirsutum
gtgtgatcgggtttgatagtggcaagtacgtaagctttgttcgatttagtattgatggttttacaatttgtttgctaaaaaggtgtttgatattctatttttaggttctagtggtctcagaagtagtttcacatcaaaaccgaactaggtgtgtacccttaaagcgaaaaaataagattcgacgaaagcttaaaatggggcctatcgatgccacacaggcgtgtgcctggtcgtgtggctagccatgtataagacaaggtcgtgtgattgataaatgtgtggcaatacgcttgacacgactgtatgatgtgtgagtgtgaccgtgtgggccacacgggctaggccaggttgggcgtatggccctacacaaacatgccacatgggcgtatgagttttgggccaggccatatggaccacataggtaaggccaatacgagcatgtgggtcaccacgtgcatatggccctacacggtcatgtggacctagaaatctgaaatctttcctagggtcgcacaggtcatcgcgtttgaacaccccaaacataatactaagaaataaaattcttatatatcaactactaatattatttttgttactccaaatatcatatgtaaactaatttctaatacttgatatgacacaatcctgctc

SEQ ID NO: 11252 - DNA, 430 bp, Gossypium hirsutum
gttgttacgttgagaccaaaactctaaaattttcgagaaaatattcaacctccaatatgaaaaaattagaaaaaaaaaaggttcaggtttcaaaaagtgttttaacccttatttttcttgaaagttttattattataaatataaatatatgtaaattcgtacgttttgtacatgttcgagcagctacagtatagaatcaaatcaaaataaatattcacataaaaaccttatacataatatacatacacgatgagattaaagattcacatgctgtaattatgtataatgtgatttgaacttgtattgtttaaggtccgaggcctccacgttaaccaacaacgttaaggtgtcgtaataatttagtgtgatttaattatgttttaataatgatataaaataaaaaaaatataattatgtaatacacgcgagc

SEQ ID NO: 11253 - DNA, 565 bp, Gossypium hirsutum
caattttcagttagccaatggattctgacttctctattttataaaaatagagacttatctcagattttgggatattgaagtcttcatctataaaagaagtacgcctctttttcttttctttagtttcccttctttgttactagtgattctccaatggtaatatttaatatttttaataattttctatagaaattactaaaatattaaaaaattactactcattttatatttttttaataaatttctataactttttttatggtttttaataatttttctgtaatttccatattttataacatttttatattgtcctaatatattaatatattttataatattttatcatgtttataattttaataagttttctatatttttatatcattttaataattttctaatttttttcaatattttagtaattttaggcttaaatgttaaaagaatccttgtaaaataattaaaattttaattaagccaccatgtcatcatcttctcagacaaacatcacatgatcaatttttcatgtgaactgcaacgccacctaccatattatcacttg

SEQ ID NO: 11254 - DNA, 401 bp, Gossypium hirsutum
  misc_feature (366)..(367): n is a, c, g, or t
  misc_feature (398)..(398): n is a, c, g, or t
gatgagtgaatccggaaagaaagttgggaatatatattatttacaagtttatttgtgattacaattttgattcgattgttttccctacattagggggagagaaataataacttgtaatgagttagggggagaataatttgaaccagaagttcaataaggataactcattacaagttaactgttagatgtatttacaaacttaatgagaataaccaagtgttatataccatctaatgttttaatttgattcaaagtcccagtaggacaatcaattggaataaataatagattaatcagttccaaatatgaaaattattctagatggtcatatagtggaggcgggtgctctagaagagacctaagatnnttaaatggatcaaaaaaggaagaggtaggcncaa

SEQ ID NO: 11255 - DNA, 662 bp, Gossypium hirsutum
  misc_feature (507)..(507): n is a, c, g, or t
  misc_feature (515)..(519): n is a, c, g, or t
gatgaatgaaagtgcctgctatttgctcaaaaatggtccaatcattcattttcggagacttgaaatcaaccatccatttaattaaatgttgacttgaattttactctacatctcttactggacataggaaatttccaagaacaagaggttgcagaaaatggctatgaaaagcaatagaagattaggagaggttgagcaaatgacaatataaaatgaagagaaattgaaatagtgaaaaagcaataaaccttaatttcaacacataaattatgagttttcccttctcaaatttggttaagtgaatgtagtgggacgttagatcttagattagtggtctctaataatatggttagtatttttttacctagtggaacagaatgatgacatgtgtcataaaaataattttttcaaaaatttaaataaataaaaattaggatttttattttttattttgcatgcataaatatttggacagccgtttatccagattcactcgagataaaaagntgaatgannnnntatttatgcatgcaaaataaaaaataaaaatcctaatttttatttatttaaatttttgaaaaaattatttttatgacacatgtcatcattctgttccactaggtaaaaaaatactaaccatattattagagaccactaatcta

SEQ ID NO: 11256 - DNA, 671 bp, Gossypium hirsutum
cggattacattagttacaccgacgccccttgaatgttccttaatatcatttccaaccctcgacccttaatatattaaatttttatggtttataaaggaataaaactcaaaactatataagaaatttgattaaatatgtaatgttatgcatgaattatgattttgtctaattttatatatgaaacttgatttgatttgattgattcaattttcacaatttactaaaacaattatatatggcatacacaaataattatatttacctaatataaaaatgttatgtatttatttttttaaatgtgtataattaaatcacaacacaaaatatatgcaccaaatcaaagttcatgtattaaattgcacattgaatcaagtttatatgtaattttgagatttatctcatttataattaatatatttttaaactccacaaatgggttgaaagtttgacaaatgtgtcatagggtatagtaaaaaatgtatataaaaataaataaatgtgaccagggcgaagtcaggaaaaagttttacggggccgaaattatattgtctatatctttgtaatttttaaaatattaaatcaaaattttattacttttaggagaatcgaagtgtaattttccattttaaggaggcggggcccttgccaactcctaaatccgcttctgaatg

SEQ ID NO: 11257 - DNA, 644 bp, Gossypium hirsutum
aaattacacacggccgtgtgggtcaatggccaggccatgttaatcgtaaaagcccttggtcgacaccctcaaaagacacgggcgtatgagcagcccgtgtggaaaggctcaggccgtgtcatcttctctatttggtttgttttgtccctttttggctccttttgactcttggtgctctcttgagtacaaaacatgaaataaccggattaagacaacaaaatccacaaatctagtgataaacattcataaatatgctgagtattaagggtaaaaatatgtataatttggcatttatcagatatgcctcgaccttaacccatttagatacataatctactgctaccaatatgtacttgtgactaaaggcagaggaaaatgatagagaaagtcaataccccaaacataaaacaattccaccttaatgatgtttgttcgaggcatctcgtttctgttggtgacatttcctaccctttgacattgatcacaactctttacgtaagcatatgcatctttaaatagtattggccaaaagaatttggcttgcaatactttggccatagtacgtattccttcgaagtgtcccccacttggagctgagtgatagtggtataaaatcttatgtacttcatcttctgccatgcatc

SEQ ID NO: 11258 - DNA, 474 bp, Gossypium hirsutum
tttaatctcaaagtgccacatccatcgatggtggataggtcaaaccatggattctcaatccaactagtttgattaattcaatcgtcaaactaacaaaaaataaataaataattagaaagtcttaaaaaatttaaaaatataaaaattttattaaatcgattcaacttgtttaactgctagttttgtcctaatttttttttactagtttcaagtagttctcgagtcaatcgattcaacctatttatttggaccattaaatctatcagcttttggtctatccaatctcttgtgacaaaatctaagtttaagaatcaaaataaatctagttgccaagctcaatgattaaagtaaacaaaaaagaaatacaagttttaaagtggacttagttgcgaagaggcaaaaatttatattatccgttgttaataccatagaagctaatatttttattctcgggttaatttctccatacattca

SEQ ID NO: 11259 - DNA, 694 bp, Gossypium hirsutum
ctcggttgggataacgagattcgtcgcttgcaaaaaaaaaagaagaagctaaaatactttgatattataaaagagatcttagatcaaaattgattgcatgaaaaaagaacaaaagagtttaaaaactcaaagaggaaactaaactaaaactaatcctaaattactagggtttttagatgcatctaagatgacctcctttcatcaaacccctaaggtcttatttatagaagtgttagaagccctaattaggtcatcagcacatcctaggtcttcatataagtttgattgtgcagcaaaaatagccttgaagggcttgggcttactcaggtcctatgtcgcaccatatatattgcatggcgcaacacaacatgctttttataggctcttgggtctgtttcatcttttagtggatccggatgcttgtgtaacattcgtcccaagttcttacgtccattgggccctaaattcagcatcctccacactcaaattaatagactagaactacctaagacctgtgtcggcctaataggtcactaacactaaaaaaatgtgttaaaaatacttattttattaacttttactacttaactactaaccattgaaaatacaataattaataataaaagtgatagaaaataagctcattaaatgtgaaaacataacaaaattactactacatttgacgtcaggttag

SEQ ID NO: 11260 - DNA, 662 bp, Gossypium hirsutum
  misc_feature (653)..(653): n is a, c, g, or t
  misc_feature (655)..(655): n is a, c, g, or t
tctgaactagactagtctacattgagcaaagacttcctgactttcagtaatgtactgttgtatgaattgtgatatgtttcaagacagtgaggtaatgtgatagtttagagcattcgatgttacataaaatctgagttattaaagaggttaaagccgagcattgggatctatcaaaattatccttgccagtgttgatattgggatggaaatgaaaaggattattcttgaggccatatcagaattatttctatggcggaaagaggaaaatgtgatgtacctattcttaaatgtttggcgagatctataaatcatatcagtattgaatgaattcctactcatcagattcatggaatttcaggtctctttgattgttggatttcttggaattccggtctccattaaatcaagttgagatacgggttttatgtcatgatatcatgggaaactgagaagggttgaaaatttaagaacaattaagagatgagtccgtaagctttcagaatatatgagaaattaaaaagatatattggaggcaccgcctgagtgaaagttctttagcaccgaatatgaaattgaggaatctaagtgaagaccacttttccagtaagattttcggggacgaaaatccctaaaggggggaagagttggtacancncaaattt

SEQ ID NO: 11261 - DNA, 400 bp, Gossypium hirsutum
aaagatatttatactaatttgttattaaaattattataattgttcatgttataaacttcaacttgactcaaatatgaaaaaccgaaaggcttattcgatttgattagaaaaactgattaagttgagttaatcaatttgattaacttgaaattcgatttatttttttccgttttgaaatgatttttctcgcttgagaccttgttctttttgggttaggccctgataagtttttcttattattagtgagctcgattcagtttagttaattttttaaaatttttcaaaatgttcataataattcggctcaatttggttcttgatttttcatattaattttggattttagatttttagactttatttttataaataatggactttgctttatagcatttgagca

SEQ ID NO: 11262 - DNA, 568 bp, Gossypium hirsutum
  misc_feature (259)..(259): n is a, c, g, or t
aggcacaagggcagacggaggtctgaggttcaagcctcaccttgcgcacggaaggcttgtatttttgctgctcacgtgggggagagtcagagtttgaccgaaactctactagccatggcttgagtcggtcaagcggtggactactgttgatggtgcaaggaagttggataggatttaaattggtggtggctgaaattaaggagaaaaatagggaatttaaacttgggaaggatttgtatgccgaaataggattcatggnggtaccaattcggctataggcaattaaatgccgaaaaagctctcaaattttggctaggatgaattgtttgtttatttttttcagctcaaattctcttatcatattttctttattttattttattttctcaaacttcattccttttgattcatttttcttttcttggctaaagcctaaatcttctattgctattcttaaaattcttttcccttttctttttcttccccccatctctctcaaaccattgctaaccgattacccttcgaaaaactgaaccccactacgtgataacccactttactccctaaa

SEQ ID NO: 11263 - DNA, 351 bp, Gossypium hirsutum
agagaagaagagcccaaagctgaagaaagaggtaaatggaagaagattaagagccaaaatctccatcaccaaccttctttcgtttcacctttcaaaacccttacccttaattatacatttttcttttatgatttttagggttcctttttgcccccataatttcccgctcaaagagaaggagataaatccaacccagatttttgcagaattagtgctttttttttagttttgattctagacccagatatggaaatcgattctggatcaacccaattcacagatttcagaaggtaaaatgctttttcacttttttttggggggggggtgggggggaggaggaacccttaatta

SEQ ID NO: 11264 - DNA, 741 bp, Gossypium hirsutum
  misc_feature (684)..(685): n is a, c, g, or t
  misc_feature (690)..(707): n is a, c, g, or t
  misc_feature (709)..(736): n is a, c, g, or t
ttaaacaattagaaggccacttttacattttacgcgattaggtcattttatcaaattgagcacacaaatgattaaattttcatacgaaactttcacacatgctaattcacatatcataagaacggaaaataatatttaaataaatttcttatgcgaatttgtggtcccaaaatcactagtccaactagagtctaaatcggattgttacattacggcttgagtgatgatagaaataaaaggaatgaagtttgaaaatcaaaattgaatgagaggagaagggacgataaacagaaaggatgaaagaaaactatcgtgattttgcaaatttgaaggggaaaataaggtatttttaaaactttagtataactgctttataaccactcctaaattgaacccttttacaaaaaaagtcattatttcaaaattgaaagtactttcagtattcttatcaaaaattgttttgattttcaaaaagtcatagatgaaaacatttttcgtttaccatgccacgaaattctcgagcacactaaagctaaaattctcattttacccttaaaactcctaggcccaattttgaggtgtgacacagtggtagataaagttcacattattgttgtcaatgcactacaccaagaataccaaggagattggcgattttaccgcattattggtgggttatcaatnnaaaannnnnnnnnnnnnnnnnncnnnnnnnnnnnnnnnnnnnnnnnnnnnngctcc

SEQ ID NO: 11265 - DNA, 552 bp, Gossypium hirsutum
ccctacaaacgagattctttttatagagctataatctacaaaacctttataaattacctcgtggcaaccatgaatttctaattctgaaagcaatggaaagttttgaatagaaattatcaacttcccgcaactacgaattgcaagtttcttcaaagaaggaaggtattccggcatactccctaacaatgagggacaatatttaataaagagttcacgaagtttagggaatttcctagcttcctcatcaacttcacacaagttccacttctcccaattaagcatgtccacaaactctaaaatctccaatgaagaaaatgtgttggtcgtattctctccaaacaactcaactcccacagtccttacactgcgcaatcctttaatacgtacctttttcaacaatggcaatttcccaattgatggcaatgacaataaatttctacaatcatcaaggcataaagattgtaaacaattgaaggatgaatctcccacccaatttgccaacatttctccacaatagaacttaatgctgagctccatgagcttcttagaaaa

SEQ ID NO: 11266 - DNA, 573 bp, Gossypium hirsutum
tggcattgcatgtgaatgtcttctaaaatcctgtaacggcgacaatcattgctttagttggtcttccaacttttcgtttagaaatcgattgtcagatcacgtgttcctagtgtatgatggtttcaaagttagggagattgttaaaagtgaggcatcaaacaaccgtatttacattgaggccgcctttaatttctaccttgaagggctggattcctcacaatgcgaggtaaaacagtgcggagttcatcgattatttgcaaattaaggattccaagtgtgacagctcaatgatgtttcaacctcataattaatactgagttccagaacttaaaaatgtttacaaaatatttaacataattattattggttttatttataattgtaagagatttctattaatcgttatttttggctcaaaattttatatcttggttttcatttctatcattgtttaaacacaaatagaaattgaatgcatgtgtaaataaccttaattattcatttagcctttgaatttgtcacttttcctgtagttggtatttatggttttcttctagtcccaagttagtactg

SEQ ID NO: 11267 - DNA, 519 bp, Gossypium hirsutum
  misc_feature (60)..(62): n is a, c, g, or t
  misc_feature (64)..(64): n is a, c, g, or t
  misc_feature (378)..(378): n is a, c, g, or t
  misc_feature (382)..(382): n is a, c, g, or t
  misc_feature (489)..(497): n is a, c, g, or t
  misc_feature (500)..(504): n is a, c, g, or t
  misc_feature (506)..(508): n is a, c, g, or t
tgtgagtgctcgtttgggttgggcgtcagctaagagtgtttggagcgcggattaactgcnnntncctaacaggtgtgtatttctcattactctagcagtaggacggctatttcgggccacgatgggctgaaatgggccatgtggtcccaatgggtccgtaggcccaagtggataagttgtaaaattactaaaatacccctgtagggtaggactaccgatttacccctggagggtaaaatgactattttgcccctcgtgcgtaaatgactaacttgtgtgatgattgggttaattgacgtggatttatgttagttatcgttaattcataactcgagtgtgtaatagatcgagtgaaatactatcgcgtgggacatatcncttntgtgatgattgtgttagttgacgtggatttatgttagttatcgataattcgtaagtctaatgtgttagcgatcaattggaaaactatcgcgtgggacatatcattannnnnnnnntgnnnnngnnntatttattttt

SEQ ID NO: 11268 - DNA, 400 bp, Gossypium hirsutum
aaattcagggctacgtgaaaagaagcctaatcaaatagccaataccacatgaaagaagcaagaagtctttcctcctatgaaagaaaaaactgaagacaatagttcaaatttggatgatgtgtcaagacccatgctaccacataaagttaaaacttcatgtatcataagataatagggtcatcttccctacatgtgagaggagcattagagtggagataaaagaactcaaatctgttaaattgggggtaaaccacacacaaacataacaagaacctctctgcctttcgcttatcgcttttaagttggaagtcatcttacaatttaacaaatgagggaattcattttatctcaactcttaaacctcctatgttttacctccctcaccacctttctggccaca

SEQ ID NO: 11269 - DNA, 664 bp, Gossypium hirsutum
taagccatttgagtgtattagaatgttcaaacacaaccgttttgataatttcaacttaagcttggctcatatcatgaatccgagtttcatattttttaaaagaatgcatttcatctagttttaatctccatattggaaactgaaaatgatagaattagtaaaataaatgctttgttttcttttcgggcaagtaaaatagatttccttaccacaaatgtgaaacaagtcacttttttggttacatgtaacagacattaaaagcatccatcaacatcatccatccacttgcgaaagcaattgaaacaaggctaagtggttgtgttctaaccgtagattttcttgttatccttttagagcattaaattattgataacgaaattcattgaccctatttcatttcataatatatgaattgagtctgactcaaacttgcctctttttttgagttatatccttgaatcaatttttattctttatttattctgcgatgtaaaaataaatattttatatttaaaataatgaaaatgaaaattatttgtattttagagatatttataaaaataaattgtcaaatattaaaaaatcataaaataaaatttaaaattaaaattaaaatgaaaaaatcgagatctacagacgaggtgtcctttactctttgtctcgg

SEQ ID NO: 11270 - DNA, 639 bp, Gossypium hirsutum
gtgttcattgttgtggaaattaaaccacgtgaaagaattgttagataatatatcttgaatcatttgattcatttcattgtaatcattgaaaaataaaaataaaatatttaaagtttactctctgtcaactaattgtaggattactgttaaaatatgaaaatgagtacaaagtattttctcatttccagcaaagagattgacacaagaattgatttttttgatattgaaataccttggagttctctcaaaccaaccacaatgactactcataattgctgcatctcagctatggcctctcaaagccacatatctctcgattttcacacttgtgccttcaagaaatagaaagtctccctcgctggtcaccacaacatgggttttattttatttcattttttagttgtgatctcatttggagagcttattgatttggtttttttttaagtacattgttagaggaggaagacatttgtttaagttactaaaaaacaattttttcatttgatgggtacaaggcctctcaatttgcctctggtttgatgcttacaatagcatcgtgtgcgttgtgttatatagttttttgtttgtggtatccatgtattatcgtataaaatactttgcatcttcactcaactacgg

SEQ ID NO: 11271 - DNA, 665 bp, Gossypium hirsutum
ttgtcatagcgtaacttattagtccatcttagatcatatatgacgcgaaaattaattgagatttcatacggatattcattaaagaaccagaagattctttaatttaaaaaattctcatttgttgcttgttctcaatgaaaattacttattagaaactcactagctaaaattgagatttaatgtcttgcatttctgaaatgaatatcggtccattcatctaccatgttaatgattttgatattatatgattcttggtagatgcatctacaaaataattacgtatgttttatcaacttgcaaccagtcgtttgcaaaattgcttatttaaataattaatttatgatcattcaattaagacaattcatcttgctagtactgttaagtttatatctcaggattttattgattaagtttgaaaactttttgtaaaagtttgttatttatgcgcataatggtttagagaaattattgaatgaacgtctttaattaatgtctaaaacattacttatgagaactaaatttcctatttcaacattatgttgatttacgtgttgtatgcattaagccaataagttataaatacttcccattacaattgatttttggtcaagagctaaatatttctcatctttgaaattttgtatatgcgtatatgttccaattgc

SEQ ID NO: 11272 - DNA, 750 bp, Gossypium hirsutum
  misc_feature (467)..(467): n is a, c, g, or t
  misc_feature (475)..(476): n is a, c, g, or t
  misc_feature (480)..(482): n is a, c, g, or t
  misc_feature (496)..(497): n is a, c, g, or t
  misc_feature (499)..(499): n is a, c, g, or t
  misc_feature (501)..(501): n is a, c, g, or t
  misc_feature (506)..(507): n is a, c, g, or t
  misc_feature (513)..(514): n is a, c, g, or t
  misc_feature (516)..(520): n is a, c, g, or t
  misc_feature (526)..(532): n is a, c, g, or t
  misc_feature (537)..(538): n is a, c, g, or t
  misc_feature (546)..(548): n is a, c, g, or t
  misc_feature (550)..(557): n is a, c, g, or t
  misc_feature (559)..(561): n is a, c, g, or t
  misc_feature (563)..(563): n is a, c, g, or t
  misc_feature (579)..(580): n is a, c, g, or t
  misc_feature (582)..(599): n is a, c, g, or t
  misc_feature (601)..(610): n is a, c, g, or t
  misc_feature (613)..(627): n is a, c, g, or t
  misc_feature (630)..(632): n is a, c, g, or t
  misc_feature (634)..(647): n is a, c, g, or t
  misc_feature (650)..(658): n is a, c, g, or t
  misc_feature (661)..(663): n is a, c, g, or t
  misc_feature (665)..(668): n is a, c, g, or t
  misc_feature (675)..(678): n is a, c, g, or t
  misc_feature (680)..(681): n is a, c, g, or t
  misc_feature (683)..(697): n is a, c, g, or t
  misc_feature (699)..(716): n is a, c, g, or t
  misc_feature (718)..(729): n is a, c, g, or t
  misc_feature (738)..(741): n is a, c, g, or t
  misc_feature (744)..(744): n is a, c, g, or t
tactataatttactattttgtatctttttactcttctaaatgtgtatttttagtccctttccaactttatttcattaattcaatctagcttattttttaaaatatgttgtaatgtggtaaatatatactatatacacatttcgaaaaataaatacactagaaatgattaaataactctttgatcaaataataatgggtccaaatccaaaaaattgaatagtagagggaccttttataaaatttaatctatatttaccctaaaatgaaaacaaaataaaacagcgttaaatcagcaccgttaaataaaacctacctgcctttctcatcctcgcctgttacatgcttgaagatcaccagcctgtgacattatcactgaccctttacaaagataccaaaaatacgtatactttctatatccattattagcctcgattctttttccttttaatttctctattttcttcccngatcctgnnctannntatagtataaaaanntntnattanncccccnntnnnnntctctnnnnnnnttttnnctcaaaannncnnnnnnnnannntnatccccccatttctgnntnnnnnnnnnnnnnnnnnntnnnnnnnnnnttnnnnnnnnnnnnnnnacnnntnnnnnnnnnnnnnntgnnnnnnnnngtnnngnnnntttttgnnnntnntnnnnnnnnnnnnnnntnnnnnnnnnnnnnnnnnntnnnnnnnnnnnntattatatnnnngtnaatata

SEQ ID NO: 11273 - DNA, 642 bp, Gossypium hirsutum
actgtcgttaactgtgtaacaataagattatgtgacacattaaatcatcatttcaaacaaaattttaagttaaattatataattggtccctatatttttttgttttgagcaattaaacttttttttcttatatgttaaaagcgacggagaatgggggaaaatagagggagaatcagaagagaatgaaaaataaagaaaaaaattaaaagaacataaaaaaaaataaattgctcaaaaaaatatggggaccaattgtatagtttaacataaaatttttgtttgaaatgatgatttaacatgtcacgttagcttaccgttacaccattaacgaaaattaacagctcagtgactaaaatgatacaacacgttaacataagtgattaaaacgtaacatttcaaatgtaaatgattaaaatataacatgagaaaaaacaaaaaaataactattttgataatttacctttttaagaaaaactcgtattattaaaaaactcaaaaaacaacattattaaaaaaaacagtcatgactactaaaagaattaatctctataatcagtaaaaccaacatcaaatataccttaaatagaaaaaaaggggttattatggaaaataaataaaaaagggaaatgtaaaaaaacaggc

SEQ ID NO: 11274 - DNA, 646 bp, Gossypium hirsutum
caattttctttgtcctcggtattgagttaacctatattagcttttaatttaatatttttgttacaagacaaattattgggagaatttaagaatttgagggttttcgatgacttgtgggtgttgagattcattgtatatactatttgaagtatgttaattaggacacctttttctattgaccttgaaaaattatatatgagtttcaaaatttcaaatagaatgattaaggtacctatcctattttgtccaactcgggtttgaagtatgttaacaatgaaaatttatctttttctatctttttcaatttgatttaaaagtgattttcatcacaccaagacatattgtaaacgattctcatgtcaaataattaataatagcttacattaaatctttttgattaaattgtattttaatcctctaatttttcaacacttacgatctaaccattctccacatttttaatttcataatctttcaactaatcaatttatttcctaaatttatcaaaattctattgtatttggtcttggaaccgtgccacttattattccaaaaattcggagcgttacaatgttacttcattacaatatttattatctatatctataatatcaatagtttttattaagtactgtttcactgagtt

SEQ ID NO: 11275 - DNA, 635 bp, Gossypium hirsutum
gccttatctatcagtgacttgaggtcatcaggggttccaaagcggctactaggtgcaaagaagtttgtcacatggtacctacaaaatattaaatgcaacttgttataagtagaaaagtgtgtctacttatatctgccacatagcagttagtacaagtttacaaacttacaaacatacacagcaacaaatagatttgagctaatattacgatggaggtaatacccgaagctagcataatatgagtgttcttgaatagccatgatctgaacagcattgtacccaagtcttttaatacggggaagaacatcatctctaaagttggcgtatgtgttaatcattggctcctacatcagagagttgataatactaagagaattgtaacaaaggaaataaagatcaaaggtgctcgtgggacaatttttctttgaatgacagaatgcatgatcattaagttttaacatgttagtcatattctatacaagcatgttagtcttatattatatgcacatgccattatccatagtgagaccgaacataaggcataatgatttagttaatttcttcttcaacaaatagtaaacaaaaacgattccatttcaatgacaaaacccattccccaaatcacatctaaccct

SEQ ID NO: 11276 - DNA, 688 bp, Gossypium hirsutum
ttacgcctatgttctcaaacactacaaaagatacaattaaaaaattacaaagagagagaggagaaaccacctctatttatagtagtacaagcactccaaagccttgtatcttttagaagtgggattgtgttatttcaacatataacaatgattctaaatctcaaagctataggcaatgatgtctaaatgtaatcccatttccattctccatcaaaagaaatcatataactcacgcgaaaatgctaggtatgtgtaagagttaagctcaaacatgtttgtatcaacaaatcatcttcccctgtccaaaaatcaacaccattctcattacacacatttcagatgattctttttcgtatatcgttccatacaccacttgggcctttccataaatgagagtagttttgtaaaagtttagttttaaacggtgttgtaaaattcagtttctagtatataactaaaatagaataactacgagtcaagtgtggattagaaaaagtcaaattattatgtgatattgaattgaatcaggtaataaaaaaataatacaacgactaaacagaattgtgtttaaaataaaaggaaaatgacttctaattaattggtgtatttaatggcgattaaaccaaaacctataaaataattaaaccaaattagaagtgagttagtggaatgatatggttaattcccg

SEQ ID NO: 11277 - DNA, 640 bp, Gossypium hirsutum
  misc_feature (12)..(12): n is a, c, g, or t
atgtcagtgcantaaatagataggaacaagataaattgtgagtgtagttgttgaagcaatatcttgaaaacaataagataaaatatgatactaataaatggggatcctcaatgtgaatattcaacagaatactaagtgctcacaaggtataaaagtataggtgattgtcgatgcattaaattgcaatgaatatgataccaagcttaactttcatatttaatctaagacttaaacatgcacattagccacaccttccgatgatggcaatggaacactattaagaacaagtagattaaattcctctaatcctcaatcaacttccgttgtcatgcttgttagcttgaactgttgctgcactttccagtgtcaatgaccacagtaacacttccatgctaaaaacattcaaacccaaagattaaacactagaaaccagatagaataaaataacatttaacccaaaaatcatgtgtacttccatacaaacatgaaatacaaagtattcaccattgtctagaagacaaatatgaaagaacaagtggagattactattcttagaaaatcttgacttgatctctcaactcccttttgtgttgaacttaaggctcctcgtcaagagctaagctacatccctttcatatag

SEQ ID NO: 11278 - DNA, 675 bp, Gossypium hirsutum
tcgtaagggatttagattgtactcattccaattaccagactcatagagcccggtattgttatttattgtcactacctccccgtgtcaggattgggtaatttgcgcgcctgctgccttccttggatgtggtagccgtttctcaggctccctctccggaatcgaaccctaattctccgtcacccgtcaccaccatagtaggccactatcctaccatcgaaagttgatagggcagaaatttgaatgatgcgtcgccggcacaaaggccgtgcgatccgtcgagttatcatgaatcatcagagcaacgggcaaagcccgcgtcgaccttttatctaataaatgcatcccttccagaagtcggggtttgttgcacgtattagctctagaattactacggttatccgagtagcaaataccatcaaacaaactataactgatttaatgagccattcgcagtttcacagtctgaatttgttcatacttacacatgcatggcttaatctttgagacaagcatatgactactggcaggatcaaccaggtagcattcctccgcgacgtcggcactgcatggccctcaacatgccccgtgagctacgaagaggtcataacagagcacgagcatcgtccgtgtcaagagacaaaatgcataggcatcgagagatgagggcatgacccc

SEQ ID NO: 11279 - DNA, 432 bp, Gossypium hirsutum
tgggtaagaagttaggtttacatgttatcggtaatgaaaatgaggtgataaaagaattgattcaggattcttctttgataagttcgaactctactcttattagacgtatttaatacttgttggtgaacgtaagattttgggtcattcaacatcttcctagagaatgcaacaaaattgttgactgtttagccaaaatggctttggaaacaaaccaaggattgaagatatttgaggagattccaagggaggtgttagcacttttcctattgcccattcgagtgacagtcttgcacagaggaacattatgtaattagttttatttgtttattttacttactaaaacaaaaaaaattgattcaaattgaagaaaaactgggctcgagcttaaaaaattagtctggataccttacatggatctaacctatcccgatc

SEQ ID NO: 11280 - DNA, 691 bp, Gossypium hirsutum
ctttcaatctccctccaattattagtatagtaaaaaggatataattaaattaaaatgaattacttattaagaaattgaaaagtaaacaacatttttatcaaaattcttataatttataatttataattacatggttcaagactatatccaaggtcatttaaatattcgaaaactttcacttaagtcactggattgttaaaatcgttgttgtagagtcttctctattcacaccatctacaccatcaaaagtccttctttttatatattctcttctacatttcagttttttttagtgaaataactttaaacatcacgaatctgtgaaccaaaattcaaacaattttattcttcgatctttgacatcgacttggatctaagttatgttcttcaactcatcgatgggtattgatctactgtgccgatcatcaaatcatcacttggagctctttagtcaaacttaatagtctagtgacttaaataaaaactttcgactagttcaatgacttaaataaaaaattttgaatagttcaatgattgttttgtaacttataaaaattgagtgaccaaaatgtaaacttattaataatttagtaaccttaagtgttatttaccctaaattaaaatacatttgaacaatttatcaaaaaaaatttaaaactaaacttaaacgtttccaacgccgttctttaat

SEQ ID NO: 11281 - DNA, 606 bp, Gossypium hirsutum
  misc_feature (550)..(550): n is a, c, g, or t
  misc_feature (553)..(553): n is a, c, g, or t
gcttccattcaccaaatctattgagatttaatgggcccaaactatgttggcccacacagaccctttgggattgtattggtaaaacaaatggtaggatcccttgaaacacatgggggctgtatcatataaacacatgaattgtgagaataaattactttagctcaattacaggaaactagactaatattacacaccatttggatctacccttggaaattttcagttttttgaacgccaccaatgagaaagaaccaaagcaaagaaagaaaccagaagtcagtgatgttaactccttaacatatatccaaaaaaaacataacagcatgatagaattgatggtgtctaaattcatttttaatatatatttgatatttacgtctatatatttcaaatattatttgttgaaaatctattacagataaataatattaaaggaaaagaaaagaaaagaaaggagagaaaggattgtatgaaacatgaatattatcccttcccaatagttttatatcatatcgataattttatcctgaattttaatttggatttgatnttntttaagatgaaaatattgaaattcaggatgaaaataatgatgtggtataaaac

SEQ ID NO: 11282 - DNA, 673 bp, Gossypium hirsutum
tgaatcgagagcagattcagaatgagcaggtcactaattttagtgtggattgagataaaagtctatatttcctaaagtgaatatatgtattgaacaattttgaatatgaaggtgagtcatgatgaacatccaatggtgccatttcatatgtctcatattcatttaagtcatttactaaatcatgctactttcaattaagaattaacattgtcaaaattcagcaagcacatgacaaacatatacatttcaatcacacacctatcatgtcaacttaactcatttacaaatcatactaaactacatatatcaacttggatatatacttgattatgttcatttgccgacttccaaattagcattttctaacatagcaaaatactaaattaactctactatgtatgtaacctccctaacccgacccagacgttatgatttaattttgaaagctacattggccactgaaatggcctagtaaaaccatttagtttcattagtattaatttttttttattttaaaaaacttagggtagttgtcaaaaaatgtctaattattaagtcgattaaatttaaagtccagttcattaaaagtcacgtttttttttaaaacaaaaactcatttgattttgtcaatttgcctttttaaaactctcatatcattattatgcagtgtgaa

SEQ ID NO: 11283 - DNA, 657 bp, Gossypium hirsutum
cactataagagacattgataatgtctttcgaattcacagcatttccttgaaaaatggtcaagttttggttcctccagatgcgctagagaatgatcccaaaaacacaagcccaagatgagtcacccaacttgtttgtagaatgaaattgtaaattcgagaaaagccactccgagaaatttccagaaaagaaacttccaagttgattagcagggatgattttatgccaaatctccctcgcaaaagagcaatctttaaggatatgaagaatatcttccttaatatggccacaaagatgacatgatgcatcttgcgcaatctcccttctaacttttttcaaagttatttaaaagtctctgtttgagaattaaccagatgaaatgtttcccatgttggggccctgggattttccaaagtatgctccatttcacctcattcggattccaagtcttctccttcagcataatgtacgcactcttcacagaaaagacccctgttgtcgttctaaaccaagatagaataactggtctagcctagtccaaaggagggggaatgctaatgatacgtttgaccacctcttcaggcagccacattttgaaaagatctagattccaatcactattgaccaaaaccatcttattaattttggtctcaggaaca

SEQ ID NO: 11284 - DNA, 533 bp, Gossypium hirsutum
  misc_feature (37)..(37): n is a, c, g, or t
  misc_feature (397)..(397): n is a, c, g, or t
agcaactcattatttatattatcaacaatataatatnaaaaaaagtaaacaaaatttaaagctaaagtaaagacctaatattatagaaataaataaataaatattgtgtaaaacaatttaataataataataataatgatgatgatgatgatgatgatggtattaataataataataacaataataaaaatctttaaattaaaaattatatgaaaggatatactatatagataaataaaatgatataataaaataaatgtatttaaaatatttaggtaaataaatatgaaaagaaatataattgaaataataatgcaaaactaattaaattttaataatatggtaataataacaagtaaataaataataaaataaaaaaaggaaaaataataatagnaaaagaaaaattaaactaattaatttaataataaaatatcaaaaataacaaaaaagggactaaatcgaacttaaaacataaattagcggcgactcccaaataaataaaacgaaaaaggaccacattgaatacccac

SEQ ID NO: 11285 - DNA, 681 bp, Gossypium hirsutum
tagagcggagcccgtatcacatactattcttatacagttaatatattatagttgaaaactagcttctcactgctattttagaagaatattgtcatgtttcagtaatacccctcaaataacaaatgcttatatgaagaggtctagttaccgaagtctatagggtataagctgcctcatcctatcatataagagaataacatctgatttactatttatctcaactaaaactcttaaatcttttctatcaaaaagaatcttaaatctttaaaagattacattagtttgttttatctaatgacaatacatttcaatattaaatatcaatcggataggcctctaaatggatggtagagtttagctttacgagtccaatactaactcactaaaagtagtttatatgcatgatttaaaagtttgatatcaacaattgttcactactcccagttaccaagagatcatcaacatataaagatactatcaacaaagtttcttcttttgattcttaacctaaaaggtaggctcacttagactcgtttcaaaacccaactttagcaggtgattatctatcctctcataccaggctctgggtgtctacttcaggtcatacaaagttttcttaagctaatagacttttgattcatttccctccacaatgaaccctggtgattgctcgatataaat

SEQ ID NO: 11286 - DNA, 399 bp, Gossypium hirsutum
gtctcgggtacggggtgttacaattttattggtatcagagctacggtttagtcgattttaggactaccgtaatacgtttgggtctagctatacatgccattttatgtgattatttgatagtgtggtgatttctgacaattgaaaatgtgtttatttatagtaatggatcccgatcccgaccgagcggtagctgatgatcttgagagtgtagcgcctgctcccgcacaagggacagctccggcggactctcaacctattgctagtaatccgaatgatgaagctagacaagctttttatagcgtaatgaatgattggttcaaccaatacattcgaactaatacggctgttccacaacctccattcccaactaatgccacccccgcacctaccataccctct

SEQ ID NO: 11287 - DNA, 592 bp, Gossypium hirsutum
agtagctgccagctttgtagagcaacgtttgatttgggataatatctattcaaagtataattagtggagaactttaataattgatattccctaatacatttttcttttaagagaaacgatgagggttggttctttccttataggaaacacaatattcttaaggaacttgaccacacttttaaaagaagaaatttccccttaatcacacccttttaacaaagacttaaagtagtaaccaaccctttttccatttgaatgtatcaactatcaaacaaagataattttaggtatttatgtcatatcattttttttgagtgtctatttaatgttttattattatataaatttatatgttgatgaaaaattattttacgttattgatatataattttggtaattattttatccgaaatcttgtggttcgagatttgagattcgagttcaaggtttggggtttatgattcgggttcaaagttcaggattttaggattaaaaaaaattaccaaaattatatatcaataacatggaaaagaaatggttgaaatgccattaaataattaaaaagagaccataaatgatgtggtgagaagga

SEQ ID NO: 11288 - DNA, 658 bp, Gossypium hirsutum
atgtgtccaatgaaccaagcacaaatgaatcatctttaatttatttatgtttataaacaagatcctttatgtatgtttaaagcttctataataaaccatataaaactcacttattgttggtttattgtatacttaatagtattgttggaactttgaagacaatgttttattaatgacggaattcaagtttaaaccttggagaaaatgttgtttagggacattgctactaatctctaaagaattaatctttatattggttcaaaaaaatagtattgcttgtatctttacctatttataatataatttaatttataatatttattttttattattttgtattcaaaaataataaatgaaattattaaaaattttaattattatttatgattaagttttaaattagtttcaaaaatggtttaagttggaccaagaggtaaaaaaaaatcaatgtcaaattttagtcttttgtgaaaggaaaataatgctaaaaactttttgaccttatttagggtctggattgactttaactctcaaagtcttattataattctaaaaagtttcgggaaaaaaaaagggcgacatgacaatctcccatctatctaaatgtctagtcaaactctacctatgggtttcgtataaaccaaaggaagtttgaaac

SEQ ID NO: 11289 - DNA, 438 bp, Gossypium hirsutum
ccctaacccgagtcaaactgaaaacggattacaacaatttatggttataaaaaaagtgtaaactacattagtagttactcaataatgaaaaattacaaaatatcattcaacggtttaattttaactatcttagatttttcgttgttttcatttttacattagttaattagtgacagaaaacgataaattataatcattttaaaattttttataaataattgactaaaaaatactaataattaagtacttaaaaatgataaaattaaataattgagtgagagaaaaccgtattatattttaccctaaaaagttataaaggatgtaaaagttcatctgaatgattaattagttgggtgagaagccagaaggtagactgagtcctaaaagaaagggcaaaataaaagacctataaaatgagataatgagttagtctagggt

SEQ ID NO: 11290 - DNA, 672 bp, Gossypium hirsutum
ggagagcaaagagagagcgtattttattgatcaatcgagatatttacaaagcttttccaaagtctctatttattgacataagacggataagtgaagtagagatctacttctaatgaatattagaatttaaagtgcatcaaatcttaatattaatagacatccacttaataaaatattcataacaaaaataaatattttaatagttgttagtcgtaattaagattccatttagttcatgtgttggttattttattttctattactttcatatgtattttaatttattaatttatgtatggcaaaatcattctaaaataagctaccaacatttaaaatttaaacttgtaattaattactaatttaaaattaaaagtaagagaattcaaaaattaggttggatgaagcttgattgacaatttgacacgtttaaaagttttgtttaatccaatgcccgaagtatgcatttgggctttgaccctttggaaataaatacatagtcttaattattcaacggtgatgaacacaaatttagaaatttttatttcaacaccttccagttctcttatgaaaatcttagtgtaaaaaatataacttgggttgcaaatttagcttaaagaaaaagacgacttgagctataaatcaattaagcaagtaaacccgaatttctcatag

SEQ ID NO: 11291 - DNA, 432 bp, Gossypium hirsutum
  misc_feature (18)..(19): n is a, c, g, or t
catctagacgaaatcctnngactcaagaaagttggtgattttcttttgttatttaattgacatgtacctagtgaagtctcttatattttgctatgttgtgatgtttaatttagaattggttaatgacatataactatgttttgcaagttggtctgtaaagtggtatgtcttggtttttatgttaaattttgaaggttgataaattaggaacatgcatgattgaaatgggaatatagaatgaatgagttagtatgatcaaatgttaaactgaatggtgggaattaggtgcttatttgaagattgtatattttggttgattgagaaatggttgagtttgaatgtgaggtaccttttgaattggtttgtgcaagttttaagtgttcatatgcgcaccaaattgaataggtttgttttggacatgaaatgggtacc

SEQ ID NO: 11292 - DNA, 644 bp, Gossypium hirsutum
ccaagcaacgattacagaaacgtaaaaattatcaaaaatcgagcaaaaacacatacctaattgatgcttgcaagtgttgaaaccctaaagctctattccttcctattttcttttgattttcggcaagaatgcatgaagaaatggcttatttcatgcatttaatttactttaattcatttaatacaccatttaccatttttccctttattaataaatcattaaaacttacctaacatgtccataattgtccatcactaacataaatggtaaatttgacatgcaaggacccatattttaaaagccaagccaagtaggtgctttaacatttagcactcaacttttgcactttacacgatttaatcctttttcataattaagcacagaaacagacaaattaaatcatagaaatttcacaaatgcaaattctcatatcatagacacagaaaataatattaaaatattttttagacttggatttgtggtcccgaaactgctattccgactagggtcaaaaccgaactattacaatatatgcttgcaatttgatataaaaaacaatgtgaatgaataatttataactatgaggtttatagcaatttatactctttttttgtgtttatattgtaacctagtaaatgattgga

SEQ ID NO: 11293 - DNA, 530 bp, Gossypium hirsutum
atatcctttcagcacttcataatatcatatccatttggcaacatatcatatcaataacttacctatacttcataataaccattaggctatatgcataaagatttacaatagagttatgattcttttaatatgtgcttaacatatcatactcaatcacattataggcattaatacttaaaacttacctcgattgctaatgtacgtcaattccgactattcgaccaatttccttttttccacgatccgacttcgtttccttgagttcttgagctaatgaaccaaatttaaacttatcacatcactattgtgtaaaaccacattcgattatattataattcggtttgcaagaaatacacttattccttataacatttagcttcgagatcaccacctcaatcatctcaagtaccaaacatgcattaatactctctttagtacaatataaaataatcgtacacatctttaatcaccttaaacaaattactaagtattatagaaaatcaaggcatactcatcgttagtcttattcg

SEQ ID NO: 11294 - DNA, 652 bp, Gossypium hirsutum
aggtccttcctcatttgacaattgagctatttaatccttctagcaacttttacacccttttcaatttagtcttttttatttagttaaccacccaaacgtcaaaattttctgactaaattttaatactacctcaccaacactccataaatatttctaaaaatatttatggcttgatttatgaagttgaggtctcgatacctcattctcgacccaatttacctaattaattcttttaaatcaccaaattcactaattcaaaaatgcttttatattcgcatttgactcataggtattaatttattaaatttttaactcacctgtcggatttggtgatctcaaatctctattcccgataccactgaaaattaggctattacaagctggcttgtcaaaactacaaggaatgaaaaggaggaagtaagcataaatgcttagtaagttcacatgcaaatagcaagtaacacaactatataagcaaacataaaacatcatttgcatcatcatcaccgagacattcatatcacattttcatttatcatcttaccatattgttgttatatcgagttttcaacccgagggttaagtacatacctgtttaaagtattcatttcacaacacttaccaatacgtccctttcatctcgagtattcct

SEQ ID NO: 11295 - DNA, 681 bp, Gossypium hirsutum
caacaacagtaagctgtggtcaacaatttcattttcaccagcaaaggaaaagaaaccagggagcaacaaaatcaatggtgtggttcatgaatcaaagaacaaaaggccaagcaagaccaaggctgtgaatgggataggtaaaaagagggttccaccatcaccacatgacttgcactatactgcatataaaacacaagctgaagaaatgaggaagaagacttttttgccttacagacaaggcctacttgggtgcttgggatttagttctaaaggttatagtgccatgaatggcttagctaaagctttgaatcctgtttcctccaggtaaaaactatatcaagttaactagggaccctgggactaggatattaaagaaattgtattgttttttcttttttcttttcaggtttatcagcttaactttggacattcttttatgttgtttattattagaagacatttattaaattgattctaaaaacttattaaaaatattctgacaaatgttgaaaaaccaatcattttggaacactacttcccatcattcatatccttttgtgtaaataattggaagttgggatgataaacctaccacatctcatcactccatttaaataaattattaaaaatttatagaaattataaaattataactaattctcgattcaactacatgtatgg

SEQ ID NO: 11296 - DNA, 390 bp, Gossypium hirsutum
ttttcaagcattaatcgattttacttctaaaggggaagttttttcaaaaaacaaattacattatatgtaggtgataatgattgcataaatgaacataattgacacattatacgaagctaagttcctatagttgcctaaatagcatttgaggcactaaacaaggtatataacgaacatttggtccaagaaagtttcataactgttctatacaacaaacatgtgtaggtcaccaatcccctagatgtatgtacatacatagcagaattttatgttcccatgagtgtagctattctaacacaatctctatcaatcaaccattatcctttcaagcgatctcagagaaagctgtaataaagattagtattgtcctacacagttatgcccttgatt

SEQ ID NO: 11297 - DNA, 629 bp, Gossypium hirsutum
  misc_feature (279)..(279): n is a, c, g, or t
  misc_feature (344)..(345): n is a, c, g, or t
  misc_feature (356)..(357): n is a, c, g, or t
  misc_feature (368)..(370): n is a, c, g, or t
  misc_feature (406)..(406): n is a, c, g, or t
  misc_feature (408)..(434): n is a, c, g, or t
  misc_feature (436)..(436): n is a, c, g, or t
  misc_feature (443)..(443): n is a, c, g, or t
  misc_feature (446)..(446): n is a, c, g, or t
  misc_feature (449)..(453): n is a, c, g, or t
  misc_feature (455)..(465): n is a, c, g, or t
  misc_feature (469)..(489): n is a, c, g, or t
  misc_feature (491)..(499): n is a, c, g, or t
  misc_feature (501)..(510): n is a, c, g, or t
  misc_feature (513)..(523): n is a, c, g, or t
  misc_feature (525)..(525): n is a, c, g, or t
  misc_feature (527)..(541): n is a, c, g, or t
  misc_feature (543)..(544): n is a, c, g, or t
  misc_feature (546)..(551): n is a, c, g, or t
  misc_feature (555)..(557): n is a, c, g, or t
  misc_feature (564)..(571): n is a, c, g, or t
  misc_feature (574)..(578): n is a, c, g, or t
  misc_feature (580)..(580): n is a, c, g, or t
  misc_feature (582)..(585): n is a, c, g, or t
  misc_feature (588)..(588): n is a, c, g, or t
  misc_feature (597)..(601): n is a, c, g, or t
  misc_feature (606)..(606): n is a, c, g, or t
  misc_feature (611)..(626): n is a, c, g, or t
aaacggcatcagtattgaagctctgtacagggagatatccaagtcgtaatgcgcaaaggtcagagtagtcgatccctgtaacatgggagactttgactaataaactgtactaattggcccgaccaaaaattctagaaaaaaatatgtagatggatatatgagtctagtttcagggaaaatttacgaaactgattttcgagttgtgaaactcgagatatgatttttaaagcgacagtgacgcggttagccagtgtctgggaaatttttttaagtgtgttnacacctcgtgttcaactcccgggacggcccccgggtcggggtgtggcaattggttgggatcaganntggggtttaannaattctatgannncctcaatgggttgggtttaggtatacatgcaattanannnnnnnnnnnnnnnnnnnnnnnnnnnancctcctncgnggnnnnnannnnnnnnnnnaacnnnnnnnnnnnnnnnnnnnnncnnnnnnnnnannnnnnnnnntcnnnnnnnnnnncngnnnnnnnnnnnnnnncnncnnnnnnatcnnngtaattnnnnnnnntannnnntntnnnncanttttttttnnnnngacanaattnnnnnnnnnnnnnnnnttg

SEQ ID NO: 11298 - DNA, 637 bp, Gossypium hirsutum
atctcatgtctccaccacttctattgtcacctcgagtaggagagactctttatttttatctaacaacctctaaagaaactataacatcagttttgattagggcagaaggggtttgccaattttcattgtattatattagcaaagtgttacagaatgttgaacaaaggtaattaaaggaaaaaaaagcttatctttactttaatagtggcagctcacaaattgtaaccctactttcaagctcatcctatgactgtcatgacaaatcaacctatcaatgacattttgtctgaagtagttacttcaggcagaatgactaagtggggaattcaattggcagagtttggattagggtacgccttgagaacaacgattaaagttgaaatcttagccgagttcatgttggaatgttcttttgatagataaccaaaccttacaggtaacttttagttttgaacactattactcacaaaaatgatacaatggcatgtcatataaattattggaatttttcttaatagatattcattttgtcttgtgatgctttattgaaaatatacatttggttctaaatttttttttgttgattatacaatatgtagtaggtagctcattacggggacaaacccagctcaaattg

SEQ ID NO: 11299 - DNA, 509 bp, Gossypium hirsutum
  misc_feature (27)..(27): n is a, c, g, or t
attgagcaaaagagtgacttcttgatnggcaaggaatttgcaaactgaagttttatgagcactgcatttttgggaagcaaaagagagtttgattcaccagaggaatccataacacgaaggggatgttggagtatattcattctgatctgtgggggccatccagagtgccttcgagaggtggagctaattatatgctaacctttattgatgatttttccagaaaagtttgggcgttcttcctgaagcaaaaaagtaatgtgtttttcacatttaagtcttggaaaactatgattgaaaaatagacgggaaaacaaataaaatacctccgcacagacaatgacttagagttatattctgatgagtttaataaactatgcaaatcagaagggatcatgagacacttgacagtttatcatactccacagcaaaacaacattgcagaacgaatgaacagaacgatcatagagaatgttcgatgtatgttgtcaaatgccaacttatcaaagacg

SEQ ID NO: 11300 - DNA, 627 bp, Gossypium hirsutum
atagaagttataatttcattcaacatgaaaggaaaaaatgttagaaaatgtaatgaaacaaaagtcggcaaaaccagtagttttgttgatggaaagcaacggaatggcataatgattgggctcacattcaataataacaaaagcgggctgacttcaaagccttcaaaaatggggaaccttttcttgtatttttcatgctacgataggagcaggggcgacatcgagaattgtttgaaaggagccgaattgtattaaaccggttaattgaatttttaacttttgagaggggccaaacatgttacttttttctatttaataaagaggttaaaagtgattaaactaaactattaatatttgagagggactaaagtccaagtgtaccataacgagtaatcatcgactgaattaaggagaaatgaagcaacaacaattgtctctttgcctcgctttgaacaatttcgttcaccatttccgtctgaagaggaaatgactacaaagaaggtaaaagaaacaaagagattatagtggcaaaccttgatactcaacatttgaatggcacaagtcaacaaggagtttctttttgtgacaaactttggagaatgttgatgttgttaatgatgtgatccg

SEQ ID NO: 11301 - DNA, 689 bp, Gossypium hirsutum
tttgggaaatgatagttacggggttacccctggacttcatgcatacttaagaagcgaaaattcgtttctaaaaataattaccaataaatatgtcataaaacagttctggattacaaagatttaggaaaaagaaaaagaaaatccaatgccatgaaatcatcaaatttgtaaaatgtgaagtatattattattattattaacaaaaattaaaaaaattaatttacaaaatttagcatccaattgagtctttaaaagatgaaaaattaatcaataaatctccttccttaatgttgatcatgtttaattgttaagtttcattgatgtgactaatagaccaattaaacaacagcacatgacaaccaattacatcaaaacctttttaaaaaataataaaaatatcctaaaaataaatattttttagaaaataattcttaaagaaatcacaaaataaaaataaaaatatgggaaattattaataattataagaagttataaaaacttatcaaatttactaaaaactaataaaaatcacatttggaatgagcttggataaatggttgttcaaattcttttaaatatatttccattttaaaaataaatttaataatttttaaataattctttcataataatttttttaatttttacaaattatttaaaaatcacaactaagaatgaacttgggacaa

SEQ ID NO: 11302 - DNA, 694 bp, Gossypium hirsutum
caggaacacccctgttgtctaaatgagttacatacctctagaaaaagtattaaatgcagtcttggatcttcaataggtagtccaacaaactatattactatttctaacatctgaaacataattgatttcaactcaaactgctgagcttgtatttgtggtctgactatccctagattcaggtcattcaaaattagcacaacatactgtcgaattggtctatctcgatcatctatcataccacgaacaagaagattggcaccctgaccattcaaattatcatttagaccaggtattactctacaaataagaggattagcatcttgaccgttcggattatcattgaggacaggatcattctcgttcctagccatttttcacaattttttttgctttcttcgtaaagttatttcgatctctgggtcaaaaggatattctttattagcacgaatgcctcttctcatgcattgatgataaacctatagaaattaaattaaacgaagttaaataaactatgaaattaagtaaaataaccaaaccaagttacaccaaattgctggtccctaacaacggtgctaaaaacttgtcgcgtgtgaatatgatatgcgaattgtgcaagtatacacatcgtatgaggtaataaagtgataagtgagatcatttctacagggatcggattagatacaaacatgggtca

SEQ ID NO: 11303 - DNA, 629 bp, Gossypium hirsutum
gggtatttcttgaaataaaatacagacctcatgctcttatggctaccccaggcctaggccaaggcccaagaccaggacatcccacatgtatcctcgattctcaagtgcctacgtgcacggtagcaaatcaaataagatgaatagcggggtcttaagctaatccttgactaaaccttaaaaattttaatgtcataatacctttcaaattctcctaatcattatcttactacaataattcttactaagaaaaatatctatatcgtcataatttcacctaaaaaataatgagttacctctacagcgtgggtggaatcccatgtcagaggactacgtctacatttgaaaggagataataataataataaaaaagcgagcaaaagcatattatacctacatacattacattacatatatagtgatgatgaatgcacctttgcgtttgttagagaaatctacacccaagatatgctgtcggcgaccttaacaacaagtctttcaaagcaggaaaggacccactccactcccacccccattttcatctcatttctacttcctttttctttatttttttcagtctttcttggactttcgctttattgcttgtatttctcctctctctctcgccaatt

SEQ ID NO: 11304 - DNA, 611 bp, Gossypium hirsutum
gaagactcacctccaaatcatacacttaaaaatttagatggtaaacactaaaagtttacacttccgttacactcgcacaattaattccactatgaacaaataaaattctctcaatatgttctcttgcataaactatacaagccttgaaaatatatatcaatatggacttactaatatattagtgattgaatacaattcaatcctttaaaatcaaccattataagatagcaaaaataaaatagtaatagagtccaataaaacctaatctaatggaaattcaatattcaaggtaaacaacaattcgatctcgaatgattctccgtattacaaaggttataaatttttaatccaatccaattttcacatagcaatgatttaattttcacttttatttattcaaaatatcatcaaagttaaatagctcaaagattttgtttcacaatattaccaatacgagaaattttactttattttcgcagtgatgaataataatgggcactaccaagtaccactcacactgtattttcatctaacaataaagaaaagtaatagacttttaggagggatgatttatgtaatgagagcatttacaatgcttcgtaccttctttc

SEQ ID NO: 11305 - DNA, 520 bp, Gossypium hirsutum
ttaaatttgaactcgattcgatccgatcgtattaaaaaaatattatattattttttatataacaacaaattttaaaaatataatacatcaaatatattaaaataaaatttcccttgaaaaaacattaaaaatttatacttaaataatattaagatagttacaacttagcaagtgaatgcataataacaataaaatagcaataatataatagtaaaacggtagcaaaacaacatcaaaatcgcagaagacgagagcaaaatagcagcaaataacaacaaaacaatagtgaaattttttttttaggtaaatttgggtcgggttgaacccaagccaccaaatttacctatgccctgacccatttagaaaatagacattatttttttgtctaaacttatttttcgaacctatatttttatctaaactctcttacattttaggcgagccttcgggattaagcgggtggctttactagtgaataggtttagttgagacatagcaaactcaaccacatgttctctct

SEQ ID NO: 11306 - DNA, 669 bp, Gossypium hirsutum
catggaagatagaaggaaacctatctacttgaagcttggtgacccaatgaaacaatttagtaatttacagttactagggtaaatattataatcctaagaataagattgtatagagtttaaattctttaaggctcccatcttgtagataggtatcaatcttagttgttgatgtagttcaatctgtaccattgcatcttagggagttagaccataaataaaggtcttccctctcatttgtaatcattcaaaaacttagagattgtaagtcattcttatgaatagggagaacatttactcaaacacttgttgtgctttcttttttgtgcctttctcatttatttattttttgtcacttactttgcttacttatttttgtataacatcaataccttagagaattcttatcaagattcttattttttagggtttaggttggcttagacaaatcttcttaaggccaaatggattgctaggctaaagtttagttccaagacacaatgaaaagaatatacgagttagcattttcctgaaaaaaaacccttcatcttcaactctttgctaattcctaaaaaccctttaccacctagacttctttgatctgacttcatctattattataaatctgaattaaacgatttattcacttagtatcttgatccctagaaatcc

SEQ ID NO: 11307 - DNA, 604 bp, Gossypium hirsutum
ctctaccaccttaattgaccggattcaatattaaacagtttattaagaacccatttgcataattttaaactgcagcttggtatccaagtcaactaatgagagttaatagtacaaaaacttgcagttaaacgtcattgcttagccatatgcatgtgcttgggattttagaaagataaataataataataaaccaacaaaacgccatggaatcccaccattgaatcttcgcaacctgcatcatgtagggggaattaatacaatatatgtcttttggatacttactcttttggcaatacattgtcatcataaatagaatatttattaacaattatggtttcatgagtgcttcacgtttgtttatagagtaatttaattgaattttttttatgatttctttaagttaaatcataaatagtgtacttccaaaactatatgctacctttaaaccaagtcctttttgtaccttttgttaaacttttcattttccagctctgtagcccatgaagatgggtggtgatcaaattttgacccccccccaaaactaatactaaatcatagatttattttaattaattaaatcatgccataacccattaatcgattg

SEQ ID NO: 11308 - DNA, 664 bp, Gossypium hirsutum
atgatggatcaccaagtatcgacaaaaacataaaaacaagcataccctttttgtctcaattgcaaaaaaaattattcccgtacatattacatttataaagtttaaatctacattttttgaaaaggtaaattacattttttttagtcactcaagtatgaaaaattataaaataattactcaattaataataaatttctttttttatcacctaattataaaaaaattacataataattatctaactattcaattttatctttttaataactaattgactaacatgaaaacactcaaaaatttttaaaataattaaataactataaaaaagataaaattttataagtcactattttataattttttcacagttaaataataaataaataaaaatcatacatacttttcacgagacataaaacaaattgcatcttggaaatgaaagattaatatccggtaacgctgtctaaaggacttgtattaaaaaaatacacaacaagaaggtgacatgtaaaacatgcagccaaaagtaacattaatatataattcctttattaaaatggggtttagctaataaaaaaacccttttaaaattaacaattgaataaaaaaataccattagtacaaaggaatagaaaaagtataccatgagcaaagttcctggtag

SEQ ID NO: 11309 - DNA, 673 bp, Gossypium hirsutum
ttttggttgcatagtgaaagtggaatcttagggtgagattattttaatatctaaagcttaatcattgataagtaagtgggggcaaaacacaaaaattaatagcataaactgcttgtttatatcatgtctgaacggttagaattaagtgacccaaatccttatttaaataaaatacgatggtaaaataaaataaaaataaaatccttacagaactacacttattttattttattttagaataagatttttaaaccttattaaactccatctatttgatatttattagaataaggtgtttcaatcttactacactcctattagaatatagttttacaagcctataaatagacataatctactcctcttataattattcgaattcgacatagtgaattttcttcttctctgcccgtggtttttttcccaaaagggtttccacataaaaatctatgtgttctttatttttatctcttttctttgcaatatattatcattaccgacattctatttttacaaattggtatccgagcttccaggttatttatcttaatcacggtaatggcatctttgaagtatgaaattccgctgttgaatcgcaacaccagatttgcattgtggtagataaagatatagacaattcttgcatagatggacttagagaaagccctgctaa

SEQ ID NO: 11310 - DNA, 472 bp, Gossypium hirsutum
gctcgttcatccgttgacttaatgaatgtttttatcttagctttccaatactcataatttgttccacgatcatagatcggcatgagactaaagatcctttcattacaagcaagcatatcaaccaagataatcactatttatattgagtaagaggctctgataccaattatagaaaagagtgagtacttgttttacaaacataaactgtggctaaaatagtgcttggaattatggtcacagtttcaaccacaaaattaaaagtgcaaaaatgtaaagatgaacattgagattgtttacatagttcgacttcaatctacatcttcagggccttgcctagagcgatgatacactatctttatcgcaatcaaccaattatttaagtcttaacatcaatataactcttaccaatttaacgacctcaccattgtacaaagactaaatcactctctcattaagcttctgcctcaaaaaa

SEQ ID NO: 11311 - DNA, 641 bp, Gossypium hirsutum
gtttcactaccttacaaccacaaatgagagacgaaaaattactttaaacatagatattacaaagagttaattctacataggcgatccaaaggggaccctagataaaatgggcatattgcaatttgaaccccctcttattatttagaattacaatttaatctttttttcataatttttttaagtttgtcacccaacaatatatattcttatcttgccctctatgttcaggggtatagccaaagggtggcaggcaggcacctttacccctcttggttgaagggtttaaatgcttagcgcgttttaaacataaagagaaaatttgtaatttttgccccctccagataaatttgtcttatctcgattccccgtcatataattcttgactttgcctctctttctatgtttatagatcctattgcttaaaccaacaagaaatcttttcataaatatttaatcaccaaataatcttcaataatacaaatttaacccataataagatatgtgcatagagattttgtaagttaaggtttttgcatatgccctttgttaacatacctacatacatacaaatcatctaaaagatcctacaattgatcactcaatgataagtaaatgtaaaaaatagaaccatggcccactag

SEQ ID NO: 11312 - DNA, 355 bp, Gossypium hirsutum
aatgttattaagcttgtaggttaattaacttaattttgattaattaaaaactaattaagatctaaaaagcaacttaaagttgtcgtcttttaattctttttattttcttccaccttatgagctaaggaaaacctagaaaaccattgttgaagtcttaagctattcgttccttgtatgcaagtgaattaaaagtttgtatttcgtaaattttatgtttttaagataataataaagtttgatttagtttatccgattattattttttaaaattgtttaagttttttaaagttgccattgatgatttcttgaaatttttggtgttttgtggttagattctaagcttacacatgaaaaa

SEQ ID NO: 11313 - DNA, 445 bp, Gossypium hirsutum
atctcgagttgggttagtcttggataagtataaaatatattaatatcatatttaaacctaacccaacccgacttatgaacacctctaaatcaaatatatctcattcacatgttctaaaaattttatatatcatagttgaattgatatttaacatctaaattgaaaactaaattgatggaaatactttattgttatagtattgatattttaagactcaatttaaaaaaaaaaatcaaaatttgttgatagtttgaaataaaaccttgtgctttgttgtgatggacactattgtaaataaaactgttaaaaatattggtattattttgttaaattaaaatgtttaaaaattgaatccatatttaatgaatttattaatataaaatattttctcttcccaaatttatgtatctatattattaataaaattactggttgagttggtgtc

SEQ ID NO: 11314 - DNA, 465 bp, Gossypium hirsutum
gtttaaatgtattgttataaatcaagaaatacgaaaaattgaaattgatcgataaaaagaaaagtgagaaaaagtgaaaaatttccgaataaacctttggaataaaaagggatacgaatgaagtgacagaaatgatcacatgtgtggcacggattgtgtgtaggccactatgtaaaagtgaaattgatggtcacgtgtgtagtactatgtgtaagctactatacgtaccggatagtttcgatcacgtgtatagtactatgtgcaggctactacgtgtatcggatggtaatggtcacatgtgtagtactatgtgcaggctagtatgtaaactgaacatcattgattaataaggtggttgctatgtgttgaatccaccgagtatctgttattattccaaagtgttcatcgggaaattgactaactgtaattgaataatgaatataggtgtgggattgaattggatat

SEQ ID NO: 11315 - DNA, 539 bp, Gossypium hirsutum
cgataggtctagcattgacatcatcccacacatgctgaactaaagctataacagcttctttaaattgttttgcacgagcccttgtgatcagcccttgaggtagcaccatcggatctcggcttggacttggcttatgggaagccgtgatcgtatcatccaagattcacatcgcagttttggaagaaattgcaagaagcattgagtactaagtgtcattttagcaccacttttcatccctaaaccgatggtcaatccgagcgaattattcagatactcgaggatatgttgagatgttgcatccttgagtttagtgcctcgtgggaacgatacttgcctttggttgaattcgcatataataatagttttcaatcaagcatcaagatgtcaccttacgaggctttgtacggtcgtaaatgttgtacacctttgttttggaccgaactcagtaagaataagatttacggagttgatttgattaaaaaggccgaacagaaagtaaaagtgatccgtgaaagtctgaaagcagcatcagatcatta

SEQ ID NO: 11316 - DNA, 620 bp, Gossypium hirsutum
ggtgtgatgtgagaaacattatcgaatataaataccctttcttatgacctaattaacctcaacactaccatttacttttgcaaatgaaaaatgcatggcgtcacttagcttcctttccccattgtggatgaatgaatggtttgtggaatactacttgcccatatgtttataatattcacaaacccttcaactttataaacatcattttaacctttcatttaatttttttaatttttagaattatattatttattaaataattctaaaataaataaaaatattattgactactcactgtgctgatacgataataattaatttttaaaactttttaaattcaaaaaagttataaaaattatttaaaatttaaaatttactaaattatttaacaattataaaaatctttaaaaatatttttaaaatttaaaaaataattaattattaacataatatatatgtggactgttatgtgaatactacataatcaaagtcaatggatgtaaaaaaaatttattgattttaaataatttaacaaataatacaatatattcgtttaatatctgaaaaaaaaaagtattatatattttattatatatttagtatttgaaaacttaccccca

SEQ ID NO: 11317 - DNA, 690 bp, Gossypium hirsutum
tgctttagattcttcacatgactcgtatcattgtctaagttttatttctgaagcacaggattcatataacattactttggtttatatcgatgaggcgtagaacgcaaattatatttcggatgttccgatgaggtatcaggtgttagatatattggtgtctgtgtatccgccttgagtccgtgttcaattaataggaatcataaacatatgtcttgctaaatgacattcgatattaaatgctaatagaaaattgtgtattttgtttataaatgttaaaatgacaaaagataccatgtgaaagatcatgcaaactgattaaaatgagccctgagggtcaatatggatataaaacaaagcaatggattcgagttagagatgagaaaagaaatgtacttgatgatatattatgacacatatgtagtgttttatgatgattaatgtaattatatgttcaaatatgacatgccaaatgaaatgtggtatgagattatgtacatgagaaatgaaatgaaaacttgatactaaatgataattaggtcccatattgattgtgtttgataacttatttctatttgaattattgattcaaatcattttagcatcattgagcactattattcagtgtacggtttgtttattttcgtgtgcaattaccataaattttaaagtcataaagtgatcggcatcatt

SEQ ID NO: 11318 - DNA, 685 bp, Gossypium hirsutum
ctcaaatgtccctagcaatgaatcattaaacattatgtgtttttggtctcttaagataattaaaattgaggtatttttggtagcttcaacactaagtggtttgacaccattttgggttaattcaaaatggttatatttataattttgttctttaagtttatcgataacgactctatctaataattgtataagctcaaatttcttttggataagtaattttcttttcttttgcttttataatataattacaaaaggcatttaaagtttggaatgctatttttttttataaatttagtttgttggaactcttggaaaagtccaattatcacacatttgacaatattttgtaattttctttttattcatcgacagtgttattgaaaatctagtcagacttttaggaataattagaagtaaaacttgtagaaaagttaattcttctaaagaaagaaaacaatttttttttatttttgtatttcctacgaaaggttttattatcaaaatttctaaattattaaaattgcctataaagaatctttaactggcctaactcatgactatctagtttatatatatcaatattaaaaaaaaacataaataaatacagttaaatcaaaattcgaaaatattaaaaagaaatttgaaaattttatccttaattctgataccaaacaagtgcggattt

SEQ ID NO: 11319 - DNA, 560 bp, Gossypium hirsutum
  misc_feature (330)..(330): n is a, c, g, or t
ggtggaatactcttgtgtctgttgtactgcaagagaggattacgtgggaattcttccaggaggaatttcggaaaaagtatattagtaaaagatttatagatcaaaagaggaaggagtttctagagttaaagcaaggccgtatgtcagtgacggaatatgagcgggaacttgtgaggctcagcaagtttgcatgagagtgcatctctacagaagccatcatgtgtaagaggtttgaggatggcatcaatgaagacatccgagtatttgttggcattctagagctacgggaatttgtagcccttgttgatagagcctgtaaggccgaagagntaattaaagaaaggaggaaagtgacttttgagtcgcgggatttgaataagagacagatggggaaatcacaatagtcctcatctaagagattaaaggaattctctactcaaccgaatgcttcgacgagctattcgaatagaaacaagaaccagcagaatacggcatctagagtccagaccacttcggtcactagtgttggtagcgctcgaccaaataggccaaagtgttgg

SEQ ID NO: 11320 - DNA, 600 bp, Gossypium hirsutum
tggataattaccacttaaggactgccattatttaatttcatagccatttaatacctttaacttatagaattcaacttttatgttttacgtagtttagtcctttttattgaattaacgactcaaacaataaaattcctttacgaaattttcacatgaacattctatcatactgtaaaccttaataaaataataaaataaatattttaacttcgaattatggtcccaaaaccactattctgattaaccctaaaaacgggttgttacatgctagggcctatgccatccgtgcccgcaaagaagcgacatctccggatgttatcataggtactgtttctctttatgatactacggttattgctttgattgacccatgatctacccattcatatgtatgcatgaatttggtaattagtaagaatatgcctattgagtctacggaatttatgattaaggtgtcaaaccctttaggcaatcatgtattagttgataaagtatgcaagaaatgtcctttgatgattagaggtcactatttttcggctgacttaatgttgctgacgtttgatgaatttgatgttatattgggtatgggattggttaact

SEQ ID NO: 11321 - DNA, 493 bp, Gossypium hirsutum
  misc_feature (430)..(431): n is a, c, g, or t
tttcaccaatttaccctcaaccaatttcatttaaacaagactgaaaaataaattttgattttataaaatacctcattttatttatttatttatttattagatcttagtatttattaaattatcttaaaatggatgaaaaaaattaacctatgttaattttattgacgtgacatacatgtggattaacacaaggatgtcatgcaagcaattaattttaaaaaattaaaaactataaaagttatttaaaaattataaaaataatttttagtatacaaattataattttttaatatttttatttttaaaaaataattaattgctaaagtgagatatacatgagttgtcaacgtcaacaaagttaacaaacgttatcttttttatccattttctagataatttgacaaataatgcaagcctacgagttaaaatnnggtttactgttgactcagactaacaaagactcaatctgggttattgttgatagattgaccga

SEQ ID NO: 11322 - DNA, 667 bp, Gossypium hirsutum
tatgtcattgaccttcatgtctgatatctggtgtgatcaatatcttattcatgagtctctagtttgatccctaaatgaagtagaaaaaatgggtttttctagatgacagaagattaggttatgttccattgaatctgtccagaaaaataaaagaaaatggagcattgatcacctcaagtaatggaaactgcttcgttcacagttcacctgtgaatgaaccaaactttagacttaaaaataattgtttggatggctgaatatttctacattagacttgaaacatgaagcactaaaatgtttgagaaaatgctaaaatgttaactattagggaatagatattagcgtacgaaaggatctgtttaggattggggatttgaggtgctccgtgtggccattttcctgccggttcaaggctttatcaacataggtagaaattaactattacggggccgaaaataaaaggccaatttttagcaatgcaagattttggtccactcccctcttatcaattatatgtagcaactatagtaatattaaataacaaagtccatgtattgaaataatagagatttttggaccctcttaaaaaaaggaaaaaaattattaatctaaaaacaagagatcatcatgcttcaattattttgttaaatgttcatatgccctcctt

SEQ ID NO: 11323 - DNA, 664 bp, Gossypium hirsutum
tgaaaggatgtgcaagagaaagaacttttaggaaagaaattgattcacttttgtattaaattttgtcttttttcacattttcttgccgtgcttcgttacatacaattatttatatagtagttgtaaatgattaatgtaaatgattaatggtttcaacacattcatgtatcctagttaagtacatgcatgactaatagatatatttactctaagtacattcattaaattagatatatacattcattaaatacaagcacatgtaagtaatgagcaagtatattctagaatgttacaaatataatattcaacacttttctttatttgaacttttcttgattacgtcaatttttccacgcattcttcaaaaaccttcaaccttgagaggttttgtaaaaatatctgccacttaatcttgagtctttacaaacttaagctccacttccttcttggcaatatgctccctgataaaatgatatcttgtgtctatatttttgctttgatcatgcaacacaggattttttgctagtgcttgtttagagttattatcaatgcaaattttggttgctctttcttgtggcaagtgaagttctttcaacaatcctctaagctagatagcatgacaagtacaagaagttgctaccatgtaacacctctaacccgtctc

SEQ ID NO: 11324 - DNA, 499 bp, Gossypium hirsutum
tattcacgaccatgtcataacccatgtgtcacacggtcaagtccacggtctttatctcagcttttgtgcaagtgtcacacggtcgtattgttaaaccccgtaatagattataaccgtgaggactatattgaaatcattttttacaatgcacacagtcatgcctctaaaccgtgtacctcacgggctgtgtggcagaccgtgtggtacaaagttaattagaccatttgacctatttttcaagccaaccattccaacacttcaaaacatacttaattcactttcaatacttgtttaaaacattcaaagtttcataccaaaacagaccaaacctttccaattcaaggtgtgttacatcccaaaaatcatgttagtagatattggggtaagtgaaccaagagtggtcacgccccgatttttaaaagttatctttttctattagataataataagtatttagtctaatagataagttgcggtggagttgcctttgaagatatga

SEQ ID NO: 11325 - DNA, 604 bp, Gossypium hirsutum
gatattaatattctcatatcgtcaattttcctttttaactattgtagtatatcaatagttcactatctggtaagctaattgtcacatacatacattaaccattcatctcccatacagctaacaaaattagccacaaagatagtacaaattttctctattcgatataaaccaaaacctgttatttcttttccaacaaaccttactaaatatacactttatactaacccaagtgtttaaccattcacccatgacataaatgtattttatccattattgccgaatatagatatgcttcacaaatcataattcacctcacatagtaaccgaattaatttttatcatttgtcaaatagattacaaaataagttatataacaaaatatagatacattttaaaccacacaattaaacaaattttcatggggttacatgatcatcacatatcaaagacaaatgttcttgacatttccatcacctaaaccgaattaatcaatgcaactcaataatataatcatccatacatcattattatcacacatatatatatcatgactaaatttcttaaacatttgatcatttgtttttcaaaaccgcaaaagctcctt

SEQ ID NO: 11326 - DNA, 672 bp, Gossypium hirsutum
aaatcaagcgacataagcacaatgatttagtaaaattttgactttaagttagtaattgatagattcacataagcgatttaaaagtggcaagtttttctatcaaagatttgtgacgaattttataaaactttgattttcagttttgtatcaggccacgttttggtaaatcaagacgacataagcacaatgattttgtaaaattttgactttaagttagtaattgatagattcacataagcgatttaaaagtggcaagtttttttatcaaagatttgtgacgaattttataaaactttgattttcagttttgtatcaggccacgttttggaaagtaaagatttctacgtaatactgtaactctccagattcggctataacttctagaccgggtttgaggtgttaaaatgatcgtctcaaactttttattttactttaaaaagtatttttactttaatttatcaattcctatttgggggctgtaataatttatttggattgtggcatggattattttctgttggttttagtttacattacatgcaaaaacgtttgaaattgaacaaatttatggttatgcttaaatatgcatgaaacctggttttaaaaatcaaaaatttaatttaacaatttctatttggggattgtaataatttatttgggttgtggcatgga

SEQ ID NO: 11327 - DNA, 612 bp, Gossypium hirsutum
aattctgattacacaataaattatccattcaattcaaacttgtatttataaattgataaacaaaatagtttactcacataaatatggactaaaaaccaattctttaatgaactagttaagtgcttcctctcccatgaatattaaacttaaacaagttgttctatgtatagtataacgtggcttgacaaaacacaatcaatgatatttaattatataaaaataactttcacatatgtcttcaataaatagcatattaggacggattttcttgatatcaaacttcataaagattaaattttttatttatagaaacttcaatagcattgaaagtcttgatttgatttttgcttaacttaatttttgcacgatatattttcagtaataggttgttaaaaatccttaaagataagtaattaaaagctccaaatacatttattcaaaatatgctaaaaatctgatagatatttcttaaattgcaattgacattgcatctagcttttgtagttcacactagcaatttccaaaagcatatgtaaattaaaaaaaaaaaattatagtaaccaaaaatagcactaattaaaaaactcaaaccagcacgatgaagtcaaaaaa

SEQ ID NO: 11328 - DNA, 640 bp, Gossypium hirsutum
cattagcacatactgatttcccaatagacaccatcatagctaacacatgcatgaaataaaattattggccacaatatttcaatagcaactataaagagctctgtctggcataattcaagatggaagcaataacttgaacacactaaatcttattgattaatgtctaagagggccaggcccagaaattagttcattcacaaaacatatagcaagaataaaccagatttagatatagcatagtaaggagtagcaacgtgtatactcagcatacaaagcccaattctttccttttttgaatagaatagaaccatctttaacaattctcattggtagaaagacatttaatccgttgctaataatagctcatcacccaaccactagtctctctgagctaaccaacaatccttattgaaataagatatttgagcttccttcagcgtgaccattcaaatcgaatcaaatgaaaaatttttgagttgacgaatctttttttatcatcctaactcagtttgaaattttctcgaacagagtcgagtgagatgaaattcgaatcgaatcaaatatatttatttgagttaaattaaaaaaatgactttgggtccttatagccactgtcactcagtgtaatcaaatttgccca

SEQ ID NO: 11329 - DNA, 555 bp, Gossypium hirsutum
  misc_feature (546)..(550): n is a, c, g, or t
gaacacatttgagctgacttgaattaatttaactaaaattgcatgtagatgggctgtcgaaaggtgtttaatggctgaattagaactcccttgaagctaccgaatgcatgaatagtaaataaatggtaatgggattggttcatgaacttgggaaattcatgctcaatcgaatggtcatggatgtgaacattgaacttggaacgatcactagagttgatggctgattagtcaataaaattcgttcatgaatgggcagattcatgctctagtcgaatggaccgtttctttcccccttggtacgtgcatgtatgcttagtcatgaaggttccgtgaatgttcaacctttaattgagtctttaatgtgtcttgaacacctgaatggacaatttgcaactagctgattcatttccgcttcttttgatgcatgaatgtgcatgtaatcatggttgctgttgatgcatgaatgtccaggttctttcccttccttaatgccgtccaatgtacctgttgatgaatagccaaaacattcagcttacaagacaaagnnnnntgcac

SEQ ID NO: 11330 - DNA, 490 bp, Gossypium hirsutum
aaattgctttaatttgagctaggagtgagctcggtttagcttaggcaagttggatctagcttgaataagctggatttgagctagacggagctcgtggagctggaaacgagctgggatcagcttgccaacatgtcaatgttcggcttgacagacttgctcgatgaagttcgcggggcgtgctcgtatcataaatgaactccttgaaaagggctatgtgcgtgaaagccttagtccatgtgccgtgcctgttttactagttccgaagaaggatggaacgtggaggatgtgcgtggactgccgtgctataaacaaaataactatcaagtatcgtcatcctataccacgattggatgatatgcttgacgagctaagtggcgcgagtttattttcaaaaatcgaccttaagagcggttatcaccaaatacggatgcgtgagggagatgagtggaagactgcgttcaaaacgaagcatgggctttacgaatggctc

SEQ ID NO: 11331 - DNA, 659 bp, Gossypium hirsutum
gatatacggagacgcagcaattcatttgttctttctggaaaagctttatgtggagacaccatcatttacttgatagcaggaataaatccctttcgttcagtaatctgtactactactcttgggcaggtaaaactctgttttattactcgggattgtaggtgagtatttttgtcattttcaaaaagttttcctataataattaggaaagaggtggaaattttgtattattttcaagaaagagtagcagacatctacttgcattttgttcataatttgatgtgtattatgtttatacgtttaacaataattgttttggagtctaaaatatgatgtttggagatatatcccctagtttagactttagggaggtaaatttccctttgggttatgtagggagacgaagctgaatgaagcaaattgtttggcattaaaagggtgagccaaagcaaagctcatcaatgaattctccaactccaaggcacgtaggatgcaccgcttgtcttctttcatctcattctcaaaccaaaccatccacctctgttaaaaaatgttaaaaacactccaccaccaaagctatcgaaagagattttttcgacttctttctcagaatgccaatgagattgggtcataatacaactctttcaagttcaacaacgagc

SEQ ID NO: 11332 - DNA, 602 bp, Gossypium hirsutum
  misc_feature (60)..(60): n is a, c, g, or t
  misc_feature (558)..(558): n is a, c, g, or t
attaacctttctaaataatttttttcctttttgtatttgcgagcttgaaatttctcatantttgagaggttttttttttcttcgagtgagttctttttttcttttctctaaaatctttttaatcatggaacccttaaattttgggcttttatctttgtggccgaccggacaataaagtttagtggatcaaattgtttggtgctaaatttcttctttgatgaacatgcttccccacttgtatttgtttggccggttgaaggacttctcttatacttttttttctttatgctccaattttttcatattttattctgagcctacaaaagtaaagaagacagataaattaatccaaattaactccaaaaaattagataaataaacaaaatatgaataaaaaaatctaaaaactataaattctaatagaaattaatctaaaattaataatttattcctaaaatattatgaaaattagaataaaataactctaaatatgacttttatccttatcattttatttttttaataaaattttgaatatattaaagccaatttccctanaaaaaaaaaaaaattatatgaattgttaaatttcccaccagggg

SEQ ID NO: 11333 - DNA, 404 bp, Gossypium hirsutum
tcactccctacaaagttcaatccaacaccacctctgtccaccctttaagcaaaaataaatcccttatttgagaaaagtgggattcgaaccctagacctctgacactagccacacaccacttatcccctgggccagcaggctcctttttgtccaattttcccttcatttattcaaaagcccacctacttgccatcagggttcttttaataattttaataattaaacaataatttctcttacccctaggttcaaactcaaaccttgaccaagacctaccatcacataattagcacttacccgaaaatgctaagcacaaaaaaagaagaaaaattcgagatttagggatttttaggtttcgagatttctgaggcgttacaggtgcaccggtattatttgtgaagaag

SEQ ID NO: 11334 - DNA, 534 bp, Gossypium hirsutum
gtcgttagaggtatgctcacactcaaagaagtgcttgcatctaaaaagtgggtggctgacaaggtggcctgttgagtgggtggtcaaggccaccttcgaggaggaatgggtggtctgacctaagaagatgtcttggtaaagggggctcgatgacgaagagtagagagactaattttggcggctttcttgtgttgacatgtgtctaagctctagaggtataacaaaacttaaaatttcgtcatagtatatgaactaaaaccataaataaacctaaaaaataacaattccttaataaaagaacctgatcttatatttaaggaataaatttcaaaagtatacatgaactttgatacaatttgtaatattatacacaaattttattcaaatttcccataacgttaacaacattatccacgggtcactagtttccttagaaaaatgcgtaaattattgatgtgacattttatcaatcaatgtctttcaattggacaggtggaagctttgataaggcggcttgtgtgttataatgggtag

SEQ ID NO: 11335 - DNA, 507 bp, Gossypium hirsutum
  misc_feature (8)..(10): n is a, c, g, or t
gtctagtnnngtctccacttctcggctctacctcttacttatatttgaaagctttggtccatggtgaccgggattcatccgttaccggtggaataatctggggacgggtgtactatcttggatggagattggtggacaggctgtgatatcattatttatgtaattttgggaaacgggatgaaccggtcatccccgttaagacagcgaagagggagtgatgtgaggtggatgaatgattgccacgtgttcatgtaggataagatccatgaaaatgtgcggcgtttagccgatattttgtttgctttctcggctccctctcgaaagatggaaacatttttaaaaaatagaaggataattcacaaactaatgggatagactgccatgaaacaatatgatttggacacgtagactaagggactactgagtgtgggatccggcggctgagagatattgggtgtggtgaagattaaaaatatgtaggaggaaaagaatgggaagaacgtgaat

SEQ ID NO: 11336 - DNA, 563 bp, Gossypium hirsutum
  misc_feature (51)..(53): n is a, c, g, or t
aaccctttacatatcacgatattcattgcacccatacataaatttaatttnnnctttattttctctgaatgacaattattttcaaaaatatatataaaatatttaacattttaaatatggtaaattaaaatataaagttgtaaagtaaaaataaaattatttaaataatgagagaatatttaatgtcctgtcggtgcataagtctcatgcattatcagtgaataataatatgacacttcatcattaaacaaaataaaaattattggagaacttatcaatacatactaataactttatttaaacataattaaataataattaattatacacaagtgctaaaacccaactctaaactttaaaccctaaacctatgatcctaaaccctcaatccgagaagtattaatatttatttataatagtaatgattgatgtttaattatatttaaataaaattgttagtatttatttacaagtctttcatatttttttgtttaatttaattatgatgtgtcatattattattcattaatgatgcatggaacttatacaccaacggtgcatca

SEQ ID NO: 11337 - DNA, 680 bp, Gossypium hirsutum
ctgtgacctactgatcaaacattcacttactttaagaacaacataaattcgaatcataactgtaaaaaaagagtagattataaaaataatcatcttactattaacgtgatctattttggttatttaagtttaaaattttctatttttgtcctaacattatcgaaatttaatattttcgtcactcctctattaaatcacttatggtggcctttttatgggcataataacaaatttagccgtccaatatttatagattctatcaatttagtcataattctaaaaaaaaatgaacaaatttaaccatcaactttacatattatgtcaattcaattttacttcttaaaaattcaaaattcaaaatatttaaaaaataaaaaatatttaaaattcatttttataaaaatacataagattttataaaaaaaagtacatgaaaattctaaataaatgaatacccaatttttgtttgacatgaaatttatttattaaaatgatacttttataaataaaatatatattttaaaacctataaacaatacttaaactaaattcaaacatttccttttttatatttattttataaatagtaaattttattatattgctacagtctttgtcaaatttgtcgagcgctaggcaccaccgtccccaataacccttactcctactgggccttcaaa

SEQ ID NO: 11338 - DNA, 546 bp, Gossypium hirsutum
tgctcagattcatcttgtgaatagatcaaaatgtcgttaatgaatacaaaaacaaatctatctaaatacggtctgaatatctggttcaccaagtccataaaaatggcaggagcattagttaaaccaaagggaataacaaggatatcataatgtccataccttgttctgaatgcagtttttggaacatcagactctttaacttgcaactgataataacccaatatcaaatcaatctttgaaaatactatagcccctttcaactgatcaaataaatcatcaatccgcggtagagtgtatttgttctttatagtcactttattcaactgtctgtagtcgatacacattctcatcgcgcttctttctttttcacgaacaataccggtgcaccctagggagaataactcagttgtacaaaacctctatctgtcaattcttgcaactaagatttcaactcttttaattcggttggagccattctatatggagctatcgatattggcgttattccggatactaattcaatacgaaattcaacttatctgatca

SEQ ID NO: 11339 - DNA, 355 bp, Gossypium hirsutum
tcctttgaactttttgaacacctcgaacgcctcagatttttctttctgaaaataaacctaagtttttcgtgagaaatcatcgataaaagaaatgaaataccttttaccgctaaaagattcgggggtaattggtccatatatgtaggtatgaatcaattcgagagattgtttagctcgatgttctaccttcttttgaaacgaagttctcgcatgctttcagagcacacactcttcacaaaattttccctcatagtccatgtccggtagcccgtacaccatgttcttcttcgtcaactcgtttagaccatcataatgtaggtgaccaaaatggagatgccacaacgacacagtgtct

SEQ ID NO: 11340 - DNA, 808 bp, Gossypium hirsutum
  misc_feature (670)..(674): n is a, c, g, or t
  misc_feature (676)..(682): n is a, c, g, or t
  misc_feature (686)..(686): n is a, c, g, or t
  misc_feature (688)..(694): n is a, c, g, or t
  misc_feature (702)..(712): n is a, c, g, or t
  misc_feature (714)..(718): n is a, c, g, or t
  misc_feature (722)..(723): n is a, c, g, or t
  misc_feature (729)..(731): n is a, c, g, or t
  misc_feature (736)..(740): n is a, c, g, or t
  misc_feature (744)..(774): n is a, c, g, or t
  misc_feature (780)..(780): n is a, c, g, or t
  misc_feature (786)..(787): n is a, c, g, or t
  misc_feature (791)..(793): n is a, c, g, or t
  misc_feature (795)..(803): n is a, c, g, or t
gacaagcctggaacatctaagtagaaaatgaactccttgggagtgtccaaaatgtcggccggtatgctactgcatcccttgttctcgtgatcgcggctttcgtgagtccgtgaagggaacattaatttctcgatgttttctgggaaattaaaccaatgggtaagtgtgtcggcgacggcgctcatttttcaaatcgatgttggagacaagaagggaagagaaaaatgcagggatcttgggacgtgaaagacgaaacagcttccaaaggatgaattttctgcttgactagtgagaaaaagcggtgagggaaccgagtatatagaagagtagaagaaaaatctggacaaatctcaagtattttggaatcttctcctgcttacacgcgtcctttgttgtgtgatatttgtggaacccccggaccgtgacgtgatgctctgacgctgccacgtaacctgcatatcagtttgcatttgattaatgtattcttttgggtgaatgggttgatccacttccttatttgggcttctcttttatttaatccaagattagggcccaaaataaataagcccaaatccggaaagtaacaaaaaaagtaacaaaagaacctacttgtcaagcaagttgctaattaataagggttttcactagagtttttagtgcgaatcctatnnnnntnnnnnnngaanannnnnnntgtttttnnnnnnnnnnnannnnntctnntccctnnnttttnnnnntttnnnnnnnnnnnnnnnnnnnnnnnnnnnnnnncttttntctaanntatnnncnnnnnnnnnatttc

SEQ ID NO: 11341 - DNA, 620 bp, Gossypium hirsutum
ttgtctatccttgctgtttttgaagattttgggtataattaatggaaaactaaacccagctctcgatgctcacttcttaaaacaaaataaattaaattaaattaaaatttttatcaaaactacatatttaaaatacttatgtgcatttaaaaattatatatgataaataataaaatgtaaagtttgaaactaatattaacacgtatgcaatatgtacaaaattaaaataaaaaaattagtttaaattatgagtaaaatgatatttaaatagataaatacatcatattaacaatattaaatgtactctaattgtttatcgtagtattatcatttttctttagttaatatcgagttgatttgtgacacaaactcaattaaaagcattatcaatatatatatatatatacacaaacattgagggcgaaccaatttatgcaataacattgaaatttataaaaatattaaaatgaaactttagttgaagtggtaaaaaaagattctatagatgtctgtagcatcgatttaaatatcaacatttgtaaatctttcattagttttttaaaaaataagaaaaggtggaaatatcttcataatatatatgacgacacgaattcaaatgt

SEQ ID NO: 11342 - DNA, 413 bp, Gossypium hirsutum
ttcttccaatgcttctaacccttaagtttggtcagttctaaacaatagtcctgtttcaggtcctcgtactatttagaagctttcagagtaatatgtagaactccttctgcttgaatattaccagtccagtaatcattattttaatgaaaaatgcttgaaaaagattatcaagatggacaagataaaattttgctgagagcaaaactcgaaatgaataaatcaatcaagatagcaaattttgctgagatatgatgaaaaagattatcacaatgaataagatggaactttattgagagcagggctctaaatgaacaaatagaaaattttgctaagatgtaaaaatgaataagataaaaacaggtgccccagatatcgcagcatgaacttctctgcacaaacttcttaaggaacct

SEQ ID NO: 11343 - DNA, 655 bp, Gossypium hirsutum
tgagtgggaaagagggggactataatttccatcctcaacaaatcaatctgttgatatatgttggttgcagaacttaaaagtagatgattttttacatagttaacaaacaaatatataaacaacatgctcacaacgtaacataaaggaaaaagcaaaaaaggatgaccgctaaaaccagataggcctaatatggtgtccttaaaattcaactagaacttaatggctgtctaaattttgtaactagcatgataagcatacaaatatcttttctccacatggttacatggagataaaacctgccaaatatagtcagcttccatcaagattgactaatgagggcctcccttcggatgccttagaagaccaagtgtgtcaataggaaactacaaagaagcgagattttgcctcaatagattctccaatgaagtataactgagccttttcattaccctaaccaggtaaacatcctatcaaccaaaggctatttaagtgatatgaaaattgctataaaaaggacaggaagatttacaacctgcgccagatatcgtaatctcctgatgcatgccattgactccccctgaccactttcctatatatagttgagcacattaaaaaaatcgaaaaccaccaaacccatgaccgtataacacccata

SEQ ID NO: 11344 - DNA, 630 bp, Gossypium hirsutum
aagatcggtcacttttaaaaagatcaatccaacggacctctcttataaatggattgattatttttaattatttatatatcttctttttattctttatattatcaatggtaaaagtgttgaaataatcttactaaaaattctaccattaaaatgaagtgattggagatgaaccatatgtaaggaatgttggttgaataagactaaattgactgattgtatcaaaaactgatcatgttgttggtttgattaacagattagaatgattgacatgtgaatcaatacagaccgattgaattaaattaagagtcgattgaactgattgaactaaaatttttttatttttaatttttataaaatttttaataatttatttaataaatcaaatcaatcagttagaacaaaaactgttggttcgacggatttcaccatcatgtgattacgaaaatactgtgctctttctttaaaaaagcatcattatcatacatttcctcgtatcactattgcattggaattaatgttggggcagatgcaattatagagcaacaagagtattgataaaaatgttattttaacaaaatatattgaatagtttaattattttttaaattgggaaagaatgaaatctatgcg

SEQ ID NO: 11345 - DNA, 670 bp, Gossypium hirsutum
acaacgtaatatccgtctggttgaattatttaatttaatttttggttttttagttatagatttttaaatcgataaattaaattttttactacttttaaatattatctgacaatttttggaaactgttttttattattataaatattcctaaaaacaataatttttaagtaaataaaatatattcaataaattttatatgatattttctgaaaaatatttttatatagagattttaagtatttttactattttaactacaaaatctttatttatattataaaaataagattaattataaattaaataaaaaaaattggttgatttttggcaaggttatcaaaatcggatcaagtctccagttcatcaatccaactagtctgactagttcatccggttcgattaaataaatcattaaaaaatttataaaaaaatattaacaatccgactcaaccagttttttacctagttcaaccgctcgattttactgattttttttacctaattcaactggttcataccaattctcagttcaaccaattcaatgtctttctctggaccactatctcggttgattcccagtccaatcgtccattccggttcaaacaatcttgatttcctataactacaatgttttatcttatatttcatgaaccgtccaaacatcttgatt

SEQ ID NO: 11346 - DNA, 670 bp, Gossypium hirsutum
  misc_feature (8)..(8): n is a, c, g, or t
cggtatgnttgagtgctctctttaactatcaaccaccattaacatgcctcgttgtgaagcaaaaagactccaccctttaatttctgcttgggggtgcaatccaaatccgccataatcctctcagtggcctccaactagtactcagccacattaggagtgaccccaatgacaccactaaataactcagctccattaaaccggagtcgcttagttaccaaccctcgacccccagatacagaatttgggtccagcgtccctctccaatatcctcagcatggcttgagacagtgcttcatccccaggcgaacaactctaagacccagtttcagtagcaggtgatacaggtgtctcactagtgtccaggttcggcatgctgcccagagataaggactcagcttgagcccctctacggccttcaccccgaccttgcttaccacgtccttgaatacctcgcacaatcattgtctaattcgggtatatctacattaagagttttatgcatcaattcaatatttattaacatatattttatgcaaaatttgtcaaaagtttcagttttctaactatctcagtatagtctcaataagtactatttacaatgtttcagaatagtttaacgaagtacaaaaatacttacaggatcggtgctgaagactcggtgtagcacatt

SEQ ID NO: 11347 - DNA, 590 bp, Gossypium hirsutum
tcacagaaaaagcggagttcaagaaaaataaaataaaataaagataaagaatctccagtttctgtaaagttcttctaaaagggtatacactaaatatttagtaaattagagcctgctacatttattattaaataataaaatatacgaaacgtgtcaagattgtgggataacaaacagtaagataaattgacataatataacttggtaaaaaataaattagaaagttacattaagttttaaaatattgaagttttcggattttaagcgttcaatttcaacttgtctctcatattatctatgtttaagtctagctataaattttatttaaatttaaatctaaatatattttaatcttgtgtttatctttaaagaaaaaaacaaactaaaatacatgcatccatgatgtgtaacggtgattttcttagttccccatgcattgaactatattaattataataataaatgtaaacaaatctaaaagtttaaaaattcataaatttaaaagcttatttccatttttggaaaaattgtagatattttcttaattaccaaattgttgatattaattacggtaatccatttcggataaa

SEQ ID NO: 11348 - DNA, 641 bp, Gossypium hirsutum
caacctaccaaacacagtgagtcaaaataggctgagttcccaacaaggtgtatgttgaaatttgaagatggtgaagcagacataacaaggaaacaagaagatccatttatcatcatcatcaaaggtataataacatgttgggttgtaaaatttgactatgggggatttgataaataaagggaaacaaagaaaagttggtcatttaacagaaaaaggagtgaaagagagacattgaaagtgacaacaaacattgggttggtttcgacaagtaaggcaagacacgatatagaaaaccttgttcacaatttgctgattaaaaaggggagttggaagttggtgaattttatggtcagtggttttgctttaaaccagtaatgtttagctatatgtttttctttattttgatgggcaaacttcattgactttaaccattcatacacccttttatgtttacatggtgccaacaagaacaaatataaaaaattttacttgcaaagatgaacaaggaaaagaaagggttttttattttattttataaagttccacaatacaaccaagtcaacctaatatatatatatatatatatttggctttgaatgagttttatatttgtctatttgacattgtctttggctgtatgt

SEQ ID NO: 11349 - DNA, 345 bp, Gossypium hirsutum
  misc_feature (59)..(59): n is a, c, g, or t
  misc_feature (61)..(61): n is a, c, g, or t
gaaatgatcttgtcgtagttcaagtctttaccgtgcttcactactgttgcctagaggcngnaacaaccttagcttatactgcattattctattaggttgggattgaatctcaagcttgtttgtttgcttatatatgtattgttatttagcctaatagcccaccactttatatttgtatttatagccgacgctatcagtgttcatgcttcttgtgcatggtaaatgtaactgtaagggccaatttcgtccggctatcagaggcggcggtctctgttgccaatgaccgacggtcaaggtgaagccccaccgcccctatgaccgacctggggataatgagagaaaaga

SEQ ID NO: 11350 - DNA, 564 bp, Gossypium hirsutum
  misc_feature (558)..(558): n is a, c, g, or t
aagaagctttgggtacatggataagttaaaaattttaattttttcttcaaccaaaagtgcttttggcttttatatacatttttaacctttgttttctcccaaaatttttagtatttatatttggtatataaatattatctctttttaaaactttaatctaaatatatgtaatattttaatttgttaggtttatgttttctatgttatgttaatatctaataatacaaatgtgttaaaagcaataattaaaaataaaaaataatttttaaaataatacaattgtgtcaatatcaattataaatatttaattattatatttaaatatttaaatatagtttatatattctaaaatatcataatattaactaatttgaacattatttaaatacatatttgttgctttataatatcatgtctaaaatggacattttatttctcaaaagtacttcttgacagctaccaaacacttaaaattttcaaaaatactttttaaaagcaatgaagaactgaccttaaatgtggctatcgaggctgaaaagtcgtaaatttaactgtccnaaaatt

SEQ ID NO: 11351 - DNA, 593 bp, Gossypium hirsutum
ctaaatgacgatttaatgatcagtaccgattgacaagtagaagaacaaatcttaagcctaatttggtctgacgaccagtatcgaagattggagaagaaaattgtttgaattttagttcgtagattcgtgatgtttaaaactatttaatgaagaaaaaaaactaaacaatagaaaaggaagggaaggagagcttctaattagtgtaagagaagcgaacagtaggttatacaacaatgatttgaatagtttagtggtcattttgtaactttctgaagttaagtgaccaaaacataaacttactaatagtttactgatattagttagtttacccaaaaatatgaaaagttcaaaagaaggacgttccagcaaatatcctaaaaagaaacttagaaataaagattctaccccgccctttttgttacaaaacttcagttattaaccgaacaaagaaacaacagctacgccgcagtaagtttcatagttataatggcaatgatcctcgagttccggtcgagaaagccgtcagcttcttcgtcgcctcctaaaccggtcaactttagcgccaacttggatctgtcgaaccttgtgaattt

SEQ ID NO: 11352 - DNA, 679 bp, Gossypium hirsutum
tcagggacctggacgtaatttaataggggaccgcagcctggcacccattgatccctccagaaatctacttgcatcccgtccccaacattccatatgatattctgccttacctcctcccatacctcacaaacacctctctaaaacctagtagcaaccaaaggaagatttccgacccatttgtattttgtgcgaagtatccgagcatagatgatttttctggaagacgattaaaagcaatcttcatcaaaaacgccttatttgcttatccaaacttttgatgcctagaccatcattagcttgatttcgacagatctcatcccatttgattagacatctattctcattggaagatcccatatgaagttgcctatttttttctacttaaaaacaaaccccttaacgaatatagttcgactgcattgcaagagtgatacgaacagccaacgactatgtcttcgctttccatcctgaaagtttccgcctcatctcatcaactaaataatataacgtattattggtgattcgtttatggatcaaacgaactcccaaataagaagaaaatcattattaaatgcatacgtaaataacaaaatcactcaaaaggtgaattacaaaatgtgctcaacaaagttcttcactttaaacagggtgctcttagtacagtgtttgcatcctgtcg

SEQ ID NO: 11353 - DNA, 559 bp, Gossypium hirsutum
caatttccctccaaattcaagcctgtttggcctgtctatttccatatagtcaaccgtagatcttacgtactcctccgatatactgagcctggcttcacgaaccaaccgtgacgtctccgagagactccctttgataaggttgttgacagggcttgttccacatgccacacaaacaacattgccataaaaaccttgtttcaatggtgggtttttcagtttgggacgagcattgactgagaatgtaagcctaagttcatagtcgactggttttacatccagtgctttcacccatgatctccaaacatgagctgccattgcatcaaaggtggagcaccctagcatgtcattaggttgagctagagattttagttgagcttggaactgttggctaaccttgtaacacttttgaacaggcttggatttccataggctcattgttaagctcgaaccttcttcgattctcatgaattcgggatgtcggtattttatcgtcggtggatttcggggctggaaaaattccctgtcccaacaaggctcagggttgttctccaatagtaaa

SEQ ID NO: 11354 - DNA, 627 bp, Gossypium hirsutum
gggcatgatccagaattgaaaatcaataaagcacatatttgaatcaacatgcagtggcatctatgccaacactacataaccactcaaccatctattgagatatgcatgcattatatcagcataggcactcatattcaacgacctaaacccttctttgaagagttcatgacgcaacagcttttatttttattataatattttattatttcagtttatttcacaatatttattttaagtattagatatattatagatggctagggttattagttatctttagggtttgaagctaaggttaggaataaaactttatttgcaagtaagcttagaaacttgcaagagagaaatcctatataaataagttttagactttacagccataattattattctgattatttcctttgaattaatagaaaagttagaggttttctataacctaagttttctagagttccatctttcctattcgtttgttcagctctaattcttttaattgctattgttttctcccctaaaccacatcagtacagcatagtcagcaccagaaaccctgatggtttggctcttttattcacaattatagtataaggccccagaatagcctaagaactaccattgttgtgc

SEQ ID NO: 11355 - DNA, 612 bp, Gossypium hirsutum
taacggaatcaaagggtaacagaattgaacactcaacaaggtttttatgatttcgacctatcaacctctacctacttagtagaagggtaggtataattctggacatggtccttgtactttatcctattttacaattttaatctatatattttaatttgtaaatattgaatctttatagtgtttcaatttgaaaataactgacatgacaagatgaaatatgaaggaattaatgagtttcatgtggcattaaatgatagatttgtttgtccacatagacttattagcagactgagtaactaatttaattgaattagttgatttctttctatttatgaattctttactttcctgttatggtatcagagctcttgtaactacttttactgttggttattgcttgcgataaagtctgccactgtcaccgttagtaagtctttcaactcccttgtctttgcttctcaaaaggttgttacacttgttgatgatagtaattttcttgcttggaagcaatatgtgttgcttgtcattaaggctcaccgtcttcactactttcttgatggtactgttcttgttccttcatccacggtttctgatcagaatggctctccgaaa

SEQ ID NO: 11356 - DNA, 742 bp, Gossypium hirsutum
  misc_feature (511)..(512): n is a, c, g, or t
  misc_feature (514)..(514): n is a, c, g, or t
  misc_feature (527)..(534): n is a, c, g, or t
  misc_feature (545)..(545): n is a, c, g, or t
  misc_feature (547)..(557): n is a, c, g, or t
  misc_feature (559)..(562): n is a, c, g, or t
  misc_feature (566)..(566): n is a, c, g, or t
  misc_feature (568)..(577): n is a, c, g, or t
  misc_feature (579)..(604): n is a, c, g, or t
  misc_feature (608)..(618): n is a, c, g, or t
  misc_feature (622)..(626): n is a, c, g, or t
  misc_feature (628)..(630): n is a, c, g, or t
  misc_feature (635)..(636): n is a, c, g, or t
  misc_feature (639)..(644): n is a, c, g, or t
  misc_feature (647)..(648): n is a, c, g, or t
  misc_feature (650)..(653): n is a, c, g, or t
  misc_feature (662)..(662): n is a, c, g, or t
  misc_feature (669)..(671): n is a, c, g, or t
  misc_feature (674)..(675): n is a, c, g, or t
  misc_feature (678)..(681): n is a, c, g, or t
  misc_feature (690)..(690): n is a, c, g, or t
  misc_feature (705)..(710): n is a, c, g, or t
  misc_feature (720)..(732): n is a, c, g, or t
tctgtacgtgacatggatttaccaaaattttctatgtttttctctatatttggaggaccattcctccacactagtgtctgaatatgttatgtatacataaagaaactgaaaagtccgaacaatattaaatctagtatttaccttgaacagcgaaggttccaacttccaggttatttatgttttgaaaagtttatttcccttgatgaccatatttactaaatatcttaggactaccattatttatttatttattaatgtttattgctagaaattttaaatggtgtatgaatgtctctgttatgcatgagaatgacgtaaagaattcaggaagccatagaccgaatatggtattataaatggaaaatattatctagagatcattttccaaatcattatcattcaagtctggataactggataggtattcatatctgacatttgtttccaattccggtaatataaaagtttgctttgatttgaactatggatttggtggaatgaatgaaccacnntngcatgttccactnnnnnnnncccacctactntnnnnnnnnnnncnnnnagancnnnnnnnnnnannnnnnnnnnnnnnnnnnnnnnnnnncctnnnnnnnnnnntttnnnnntnnnctatnnttnnnnnnccnncnnnnccccccacnccccccnnnctnnctnnnnccttctacntcccccccccccccnnnnnnctttttcccnnnnnnnnnnnnntttttttttt

SEQ ID NO: 11357 - DNA, 405 bp, Gossypium hirsutum
  misc_feature (13)..(13): n is a, c, g, or t
caccgtgacttanactttggcatttatagtaggtggcaaacgctcataattggctcatattataacaaaatggaagatccgcttaaacctatccaattaaccaatgccaagaacttgacctttcaatcacatagattttggtgcaacgaatatgaacgaatcacaccaagggaaaaggtgaatttactttttgtgtatattttaaacatcctgtctgcaattgtttattcttattgttcctttccaccaaaaagtaaaagaagaaaaactctttatgttcctttatcaattccttattttatttttcagtttgattccaacaggtaagttggtgttgatgtgagacggtaattatttcatttaattaatttgataaataaagaactccaatggctcgatagaact

SEQ ID NO: 11358 - DNA, 422 bp, Gossypium hirsutum
tggagctgattctaaattttgtcagcttgggcaattttcttacggcgaaagaatcagtttgctatggacggattttgtttcaaatcagttcacatttgcactataaattatattagaactagtttaggttcaggaccacattgtactggtcataaggtttcccaaatggtcactatgacatcaaagaggtaaatgaaactaatcttcctagttacccagttcaagatctttaaatgtaagattcaaccagaaataattatgtgccagtttaatttccgaacattcagagcaatttggatactaaaaaaaaacaaaacttatttctgaaaacaatgattaaagagtagaggcttgaagggtcaaaaccatctctgtcaccttttaactagtaaagcatagtgttcatttgcatgatcaaagca

SEQ ID NO: 11359 - DNA, 650 bp, Gossypium hirsutum
ctatttaagatatggttggtcactttttaacctttttaaatcatccttttctactcatattatcttgcttttttgacttttcataacatacagaatcattagtttcataattacttactctatttttttaaaatttatattatttatggaagaaacgtgaatgtttttttaacttttttttagagatatttacgtattttttcataaataatatctttcaactatttaaaagatatttatatatttttccataaataatataaattaaaaaaaaaaggtgaatatctttcaactttttaaattcatattgacttaatcatggaattgaggattaaaggaaaagcaaaggcaaagggtagaaagtgttgaaaagaagaagaatctgttgcagctttctatcaatgaaaagcccaactttagcaattgggatgggaaggtgaaatgctattggctccaaaacaatcaaaattattactgcaaaatattaagtctatcaaatttctttccatgcaattaaaatctcctcaataatttactattttaaatttatatcatatataaaattatcaaaattattattaattaaactagtaccaagtaaaaaaaaaacttgtaaaaaatcaagttggaaaaaaaattaaaatgagtgg

SEQ ID NO: 11360 - DNA, 563 bp, Gossypium hirsutum
attcaattgccagtgctttggaataaggccagagaaaaagttttgtgccaattctaattgtctgagcttagaagcatttgagatagaatccggactacttccgctaagattattgtcccataggtgaagcccctcaagatttgaaagagcactcatgcatggtaatttacctaaaaagaaacaaattataatctttcaatataagaaataaaatagttgagattctttgtggtgctaacatgatgttatgttgcaagttgaagtgaatgtattacttacatataccaatatgggtaaggagaagcataaagcttttctttagccataataaatctaaaacaacttcaaatcttttttttatttgtttcatatttataatgattaaaagacttcatgtttatgtgataaaataaaatataaaaatataaaaatatttttttaaaaggagagaaatatgtcattatttgagaaaaaaatatatgataaatctaggttgacatgtcatttttagaactaaggtgaaaaaaaaaaaaaataaagccggccctttatttgaagaaaaa

SEQ ID NO: 11361 - DNA, 557 bp, Gossypium hirsutum
gtatgatttcttcttggaaattactaagttgttcatatgaatttgcttcgttaccttttcattctttggcttgctgattgaaggaaaactttattagaaggactatgctagagtgttgttgttattgtgagctgattgttttgttttgtatcatgcatgactcttgggggtgacgtatatatgcattttgaaaatgatctgtataaaaaactactattttgataagactatgtttttacaagatttctattaggtttcaacgtctggatttgaattattgcaatatttttaatgaagttattataattgaacttatacaccaaatggcttgagcgttatttcaaattgttaatgatttcattcaaacttcaataaaaccacaactatcatatgtttatatgtataacttttgtagaaattttataaagcttatgccaaattgttttgttataagctagttcaattttgagtaatgacacatcaaactcagatcctatcatagggtcggatttgtttggttacattctcattcccctgcacctgaagttaagacagat

SEQ ID NO: 11362 - DNA, 446 bp, Gossypium hirsutum
  misc_feature (375)..(375): n is a, c, g, or t
  misc_feature (379)..(381): n is a, c, g, or t
  misc_feature (385)..(387): n is a, c, g, or t
  misc_feature (438)..(441): n is a, c, g, or t
acgaggtatgggcattatgagtttctagttatgcctttcagactaacgaatgcacctgctgtttttatggacctaatgaatcagatcttcagaccgtatttggatcgatttgttgttgtgtttatagatgacatcttgatctattcccctgatgaatctgagcatgctgaaaatctaagaatagtgctacagactttgcgagataaacaactatttgcaaagtttagtaaatgtgagttctggttatgagaagttggttttctagggcatattgtgtcagcatcgggtattcgagtcagtccgagtaagattttagcaatattagattggaagcctccgaaaaatgtatctgaagtccaaagctttctggaggancttnnntatnnntttttcggaggcttccaatcaaatattgctaaaatcttactcagactgacnnnnatacc

SEQ ID NO: 11363 - DNA, 643 bp, Gossypium hirsutum
tttacggttcaaacgagactcaaaaataaatttgagcatataaacaataggaatttcaattctataattcatatatatacattcatacaatattcaagatagaaatttcacttataaatataagtttgattctaattatacgaacttacctcgagttgctcggatatcaactatcggctactcgttaatcttttccttccaccgatctaaacccaaactcggcttatcttggtctatatattatcaaattcaacatttttagtaaccatttaattcaattcacacatatttggcaaattacaaatttggccctatacttttgattactttgcaatttagtcacttatacataaaatggaaaatttcacatttttaaccacaatccaccttatcaaaattctatatggtattatactatcccatattttcactttattcacatttccaccacaacatttctatctttcacaatttaatccctaattctcatttttgtcaaaaatcacattataaaacttgtatatctattaacaagcatcaataatataacaagaaacttcaaaatacccaagtattcaacaatgacatatctcaaaatctttaatagttttaaaaacaaaggtacgggtcagctagattaagc

SEQ ID NO: 11364 - DNA, 626 bp, Gossypium hirsutum
tctgggtagcgtcgcccataagtaaattgcaccttctccacccagcacagcaccttcacccaatggtgacagtgcttctataactatttctcgattcttcacgagatctttgacttgttcgcgaacccattcaggtcccaattctaacgagtgaagagctagttgctgagaaattaacgaagcgcagattggtatgttgtcttgaaccttgagaagttgagttgcaaggccctccacttttgtggggtatgcaatctacatgcatattcatacacgcttagatggatggatacaaatatttgatggcaaactatgaagaatgtaacagatacaagataaaacaaatttgacaaaccaaactaagtcacttacatatccaacgcgccatcccatcattccataggctttggagaaagaaaagatgttgactatgtgatctccttccacgcacgagtgtttcagaccatcatacataaaatacctgcgtatgtgttgttacagacaatatatacagaattacaggtttccacactgcggactctgggaaataatctacaagccttgattatcaaaatgcaaacaaaattcattattacataaactgctattgtatcctgtacccatgg

SEQ ID NO: 11365 - DNA, 645 bp, Gossypium hirsutum
ctgcaattattacaattcaatttaggtaagttcatatggttaaagtttaataattatattgaattgacgaatgattgtacgtaattaataaattgttgaaaaatggaatgttgttaaattattatgtatttagcatattgttaataaaatgaaatattgttaaattatgaattgaaaagaatatccaattaaagtggaacgcgggattgagtacaatcgttctgtggcaaaagataaattgacggaaaattacccaagcaaatcgaggttcagtattttttgtgtaacaccccttacctgaaaccgttgctggagttgagcatgaggcgttacttaacttaacttaaaagttcgaggcataaaaatttacttttaaaagttatttcactgttcataataaggttgtccatctgcgcagcagtcactaaattaattataactcaagatacaaaactcaaaatttagatccgtaaattttccctaaaactagactcatatatatttttaccataaatttttaagaattttttggttcataaaattagtacaatttattagttaaattctcccatgtttcactgatcgactatcttgaccactcgtcactaaaattcagttatctcattgtacagacttcatatggtg

SEQ ID NO: 11366 - DNA, 574 bp, Gossypium hirsutum
  misc_feature (563)..(568): n is a, c, g, or t
aacgcataacccttttttaaccaaaaaaacaaaattaaaaaaaaaatccatatttcagctttgagacttaagagacacttcccttccctttctctctttcatttttatttttattattcaaaaaattaaaattaaaatttaattttaatacatcatttttttattgtgccgtcactgttctatgctccaccaccacaccagcatcgtcgtcgtccccgccgccgtcacctagggtttcaaatccttcaactttcccctttctcggtttccttctacaaatttccaagctggattatctctctttcttctggcgaatctcaatgcgccgctggtccagcggcttcgttgatcaaatctctttccttttcccatctcactctatatatgcgtatcagtttctcttgttgatcagtttggagcaaaaaaaaggctaggttttggtgagattagtttctattgataaaaattttaaatccaagggttttttgtgtttgtatttttttttttttcccgggaatttaaagggattgggggaattaaaaaactccccattttcccaattnnnnnntggaaa

SEQ ID NO: 11367 - DNA, 400 bp, Gossypium hirsutum
taatcgaactcaagttctagtagcttgattatatcttgaactactttactttaaaatatatgcttgactttaaaatagatgcttgattaagttcgagttgagtattaagcttcgaatttcgagtcaaattcgagcttgcctcgattacaccaatatctatcactgttcaaatgtagaatttgacagtttgaagataaaagcagcccatagcaatcttgggcctgttgatttaaaaatgacccatgttttacaaattacaaatcttattagtttctttaacaaattgatttgagctaaaaatggaattgcccaagcttgcttgattaagttcatttaattagttcgattatttatatttgaatactaatttaaaacatgggactaagcacaagttaatccc

SEQ ID NO: 11368 - DNA, 651 bp, Gossypium hirsutum
aacaattgtagctttcttccttagaagcatccctatatatataaacgcacaaatgattgaggtacatgcaaattatataatatatattatggtaaactacatccaagatcattaaactattagtaagtttatgttttcggtcattcaattttaaaaggttacaaaataatcattgaattattcaaaaaaaaatatttaagtcaccaggttgttaaaatcgctattgtacaacattctttgtttccactgcatgcattaattgaaagttccatttttctttttcttctacagttcaattttttcatgaaatagttttgaatgtcatgaatttgcgagacaattcatacaactttcttctccaatctccaacacggatctgatcaactaggatttaaagtatgttcttctacccatcaatgggtactcatcattaggcaaatttaaaaaaataacaatctaatgacttaaataaaaaaaaactttcaaataatttagtgactatttttgtaactttttaaaattaaacgatcaaaatgtaaacttattaataatttactaatcttgaatggggtttaactttgtatgaatgataaaaatgattaaatttaacatgtaattcatgaattttttaaagagagatgtttgaagggg

SEQ ID NO: 11369 - DNA, 676 bp, Gossypium hirsutum
ttgttactccttcactcgccatcgtgatcggaaagttctgatacctttgttagcattcaaaatacgaaagagaaaactattgagaaaggggaagatgggagaaaacacaaagagaaaatagagataaattttaggaagaaaacttgtactgtattcatttcatgccttgctggttacaacggaaatgcttaaaaggaaagagaaaagaaaaccatttgaaggttggttactgccagactgttcattattggcttagctcaaaattgccctgtttcaataaaactcttacacacttcgttttcattaaaatgctacgcacggtttttgatttcgtcttttaactcgtaacagatacaaccactgaataaagagtaatcttagattaatatccttattagaatagaaaatgtgagtgggtgacttgaagttgcttttgttgatatttaatgtcttatccaaaatgtcaaatatcatgatggcaagacaaggaactagatgtatacaacagaagcaaatgactgttgacagcttttttgttggccataacttttattacccaaaaaaagaaaaggcaagaagaatttatttttcaaaaatgaggtttaggtttttttagtgtgtggtattcggtttagtgttagagtacttatatgaaattgggttgggtggttagcga

SEQ ID NO: 11370 - DNA, 630 bp, Gossypium hirsutum
atctttcgacaacagaggatcttgtcgggaaaggcagataaaaataaacatggtaaagacaaggccgacttttacttttgcttctcttgtctttttgactactttcattgccaatttgattcaatttaattaatgatttttttacagtgaagagccctctagctagtagtgttagtagtagctataggcaccaacttttggaccaatcgttgaagttcaattttattggataaattataatttataatctcatatgggaccttcaatagtctacttcatccttggctgctctgcctgttcatataaagattaaaaaagaaaaaaagacaaagcaatgaggacaacaataacaagccagggctcatgtcaatgcatgaacaaggtcttttaacaatggttttctagttatttttagtttactatagagacgctttagccaaaatacataatgttaataatatcaatttgatttgtttcacattcattcattgtttatacagacactaaaatgcggtcttttatttttaagagggatcaagatccctacttgccccttgtattcgtctctaacaaagttgatgatgttgtgtttattattaataggagaaaagggagagaggctaacaaagc

SEQ ID NO: 11371 - DNA, 413 bp, Gossypium hirsutum
  misc_feature (398)..(408): n is a, c, g, or t
ctcgagtattatcaagcttttgctgtcgaacttgtaccgaaactcaactaggccaagttaacccatttccaagctgaacacgaactttgtttaagcttcaaacatgagtgttgaaaatggaccaaaaagcaaccttgaaaagccaaaaacctcttacatgccaatggaaaagaggccacaccatagctcaaatcccacataggcataggttctgcaagggtaagccagacaaagctatttatacggaaattttcctcctagcctttagtgtccaaatttctttaacttgtttaccgtcagtttcttcaattcgtttaccatcagtttttaaaccccaaaaaaataccgctaaaacaataatttccaaaaaattaagaaaaaacccccaagtggggccnnnnnnnnnnnaaggt

SEQ ID NO: 11372 - DNA, 485 bp, Gossypium hirsutum
tttttgggtttgaatctattatgggcttggattttctcgagctcaagcctttttcaattcgaatttttgagatttgggtttggatcgagccaagcggactctgacgaattcagataattttgaattttataaattataagtattttaattttgaatttaataattcattttatttttttactagtacaacgaaattaaatttaccttataaaaggcataaataatatacatataataaagttactttatataaaataaataaagtgtttattgtatgtaaaatttattattttatgacattatataaattaatgaaaatatttattattattatattagattaataattgaataattttttatttttcatattaaatttataaacctaatattcatatttcaaaactcaaatatattacactaagcctagacccaaataatatactcattgttacctaaactcaaaataaactaattatagccca

SEQ ID NO: 11373 - DNA, 575 bp, Gossypium hirsutum
ccatagcatctttccttttcagagataggggtaacctcgatacaaaatccatcgtaactctatcccatttccactcaggtatcatcattggctgtagtagtcccaaaggcacttgatgttcgactttgacttattgacaaaccaagcatctcaacacaaattctaaaatgtctcatttcatgcccgaccacaagttcaactatttcaaatcattatatatcttagtactcccaagatgaatagataaacaaccactatgtggtgtagaaattctaccactgagcagtaaacaatcatcgaatccaataagatactctgaatcagtcgtcgactcacactgtactcttttagcttgcaattcattatcacatttctgagcttcgtaaatttgctgaagatatactggtttaaattttaactcaactaaaatcaaaccatcatcagacaatgtgaattgtgtattcatcactttcaaagcgaacaaagattttctactcagagcacctatgactacatttgctttcctcgaatgataatcaatcactgactcatagtctttcaacaactcgagccat

SEQ ID NO: 11374 - DNA, 550 bp, Gossypium hirsutum
ggataatccatgggttgaagttcaaaatcacctattattttattcttttcataattctttatatgtttaatgttttaccaaatttaattattgaatttgttaatatatttatacttataattgcacgttaaattatagttatagttttgaaatttatcccttcgaggaagagtttagtaccaatgatggcacatttctaaaattacttacggaaacggtccttttctaaaaataataacggatatagatcgaaaacttaaaaatgtattgacatggacgtgtttttaagggataacccgaaaaaacgctaccacgtcagtgctttttcctttgtgtcaggcaaaagcatgttgacatggatgcttttggtcatgtaatttccgttaaatttgcttttcttgaacttatcaatgttatttaagaattagattatcccttaaaaacacgtctacatcgatatatttttgagtttttaatttacacctgttattatttttaaaaacagttcatttccataaataatttcttgatactaaacccttcgatgaac

SEQ ID NO: 11375 - DNA, 659 bp, Gossypium hirsutum
cctgttgcggtagtgtttaaggtttttgatgttgtttatggacttgaaaagtccttgctatcagatcccaagaatgatcttcctgggtatttatcagtgttgaaatgcctccaagaggcattaaggtttctgggtgataattgcgggtttgcaattcaatggttggaagatataactgagtgtttggaggataacagagttcttgacgaaatgtacctgttaaatttgaagacgccgctcaagggtctcagggagttgcaaaataatggggaaagagtacatcttgatggaggccttttggatgctacattggataaactgtaaaatgagtttagaagactattgacgaagtatagtgtgccactcccaatgtcatcaccgtcactaggcgaacgggcatacattgcatcatctcccttacttgtgactgatatttagaagctgcaagcgcccatttcttcttcttcttttgtcgttgcgctcttctcttctcttttcaaaaccaactattggttagaaagttgagttctaaggcaaatttttatattctattttcataaaaaaattaaaaatttattttcatctttggatatctaagttgatatttaataacggagtaactaaacgtaacaaatcaacgagcttaatgataaagtggt

SEQ ID NO: 11376 - DNA, 642 bp, Gossypium hirsutum
ctactggattccctgttctgtttttagaaaatcattataaattgtacaaaaatgattataagataaaatttatatgcttagactccttaatgagtctagtttcaaatgagatcaaatacaacacattttgaattctgtaaaatgagaaattggattcgtagtgaagagtggtcagaatagtcaaacagtgaaacaggggaaactttaagaaaaatctggtattgattggccaagcctaaaattctgaaaattttatggatggaagatatacgagtctatattcagggaaaattaacggcaagtgatttggagtttagtagctccagttataaataatttagtaactactgctcaggaaaacagctcgtagtgaatatgtgattttgttgtaaacattaatgaaaatttgccaatgaattatttattgattattataaagcttactataatctatgtgtgtgaaagtcggatcaatatatatattattctgaaagtaatacttgaatagtcgattaatgactattttaaattttgttgaacttaagctcaagagcaaaggggaactagatccgataaagggaaggaaaaagtaattgaatagccattgaagtcgttcgacgacatcctgaagtaagttcttcc

SEQ ID NO: 11377 - DNA, 567 bp, Gossypium hirsutum
  misc_feature (10)..(10): n is a, c, g, or t
tgttaataancgttagcagggttgtttaaatacgtgtgcatggtttcttttattttaatgatgatttagtaaaacttttgttttatttctcttcaaacataaacttactaataatttaatgactttgggtgtagtttacaatattttaaaatgtaaacatacatgtaatgaataacgatgatacggtataattattgagattttcttatgaatactttatatactctttttaagaatttatttctatattgaaaaaacttttaaattactaattatatttaataccgaaatagaaatttatatgtatccataataaaagtacatttaaaacaaaattggaaaaaagccgaagacaagaaaattgaggttagcgttgtttaaagatgtagttgaattcaaatttgaaatattttttaactaaagttgatatactatgccatttcggtggtcgatgtaatctctcgaatttaggtctaacgtctaaattgggttggtgaggttacacaaaaaaataggcccatttaaaatatgaaccgagcttaagtatggatatttaaagcctggcac

SEQ ID NO: 11378 - DNA, 460 bp, Gossypium hirsutum
actaattagatagtggcatgtggtagcttatggtttagcctaatattttttctcataaaaatgattaaaaatattaaaaattataataaattataaaaaataattaaaaaataaatatattaaacattaaaaaattaaaaaatatattagaattaatataaacttattaaaattataaaaaaatataaaaaaacttgtaaatattataaaatataaaaattttaataaattatgaaaatataaaattaataaacttatttaaaattaaaaaaacgtattaaaattcttaaaaataataaaaattggaaaaaatataaaatattaaaattggtataaacttataaatattatataaaacataaaaacttaaattggactagttagccagaaatcgacaagggtaccggtctgagagaagccattagaccggttgacttgggaactgattggttgaatcaat

SEQ ID NO: 11379 - DNA, 647 bp, Gossypium hirsutum
tgacgtatttggtcatttccgagataccatatgttgactatgtattagtttttttactccttgaaactcaattgatctattaatattttgttcttataagtataaactgtcatgttgggatcatgaatacatgtgatatatgagcggtaggtattttttgagaaaaacatacttgattgagtcctcaaacttaaaatttttatcaattaaactcattgaccaatgaaaattatcttcgacttttaccatgctgaagtgaccatgaatagcgatggactcaaccattattatgttgacgtgacattttatgtggaactaattattgatgtgattttaagtaattagatataatcatgtgtatttattcattttatggttgaatcctgtttgggttacgatggtattctagtaaagccctccaataatgatgaatccaagattcaaacttagtccaaaggttaaaagaaagaagtctaccccttctttcaactacgaattatgttaaaaattatgtttaactcattatctgtactacgaatttaataatagaattcttactgaagtaaaatcttacaaatataaattaaacaacttcttgcattttattatttcaatatctctatatgcacacatcaaatttccacacc

SEQ ID NO: 11380 - DNA, 597 bp, Gossypium hirsutum
ttctgttgcattcctttcatgtgtgaatgttactcttttgttctttgttagacagtgttaagttgaaatgtacacaaatactaaggggggacttaattgaaaaccctgaattaaggttcatttgctctcattatgtggaagtagtaattatattgactatgagaattactaaagttacacatgatttcaccgtctgccttacatactttatcttggtaggtactagactttatattttataggcgtgccactcagaaaatggaatcaagtatgcagtgaatggcttttacattttgctattataggactctgttttgtttaaacaagtaatgctgttttacattttgcttggtttttcataaattttttgtttatctaacaaacaaatttctgcacttatgaactgttttcttccatttaaattgcaggatgaaacatctttaatttggatttcaagcagtggtgaaagaagtttgaagttagcctcagtctctaaaattattcctggacaaagaactgtgagatgtttttcgttcttttctacatatgcatttagagtatcatcagaaacatgcatacccactgttaaatgttgag

SEQ ID NO: 11381 - DNA, 649 bp, Gossypium hirsutum
agattgttggtgaaacttaggtatgggtcttgacttacagccttcaggattacattttccactattttaatcagaattaaacttctattcatgacaacctactccataactcataaatataaagtttagtatttcatatacacattatatatgttagggatcgtcccgattaagcaacaagtaataaaaatagcggaataaattgagaaattgaacacacaaatttaacgtggaaaaattcctccaaagaggataaaaaaccacgggtaaagataattttactataatggcaaaagaacgaagagtacaaaagatggagataaaactaaaccccaaaaacccgaaaacaaagaactctcaaaacgtaaacacaaaattctctaaatgtgttatgagttctaatctctaatgggtgtttttactaaggttgtaaaagagcctatttataggctaaattcatatgtcaaataataataaaataatctaaactaatcagtgtttgactgaaacaaataaacagagtttaactaaaagattatttctcaaatttgactgaaaataaaactcatacttaacaatatacaaattaattttgccaataaatttcaacacctaaaactctatacatcaccctttcaactttacctta

SEQ ID NO: 11382 - DNA, 648 bp, Gossypium hirsutum
agttggttgggttggattgttttctaatttctaatgtaaaacatataagatcacatatcaacaagccttctggttgggccaagttaaaagctcctgatggcttcaattaccaactcccacttcctgcagcccttcttatttcgtttgggttcgcccttctgggccaatcttttgaaccaattgatagaatcccaaaaactaagcaccatatctaaggaaaagcaggatcggtggccaatccactattgttccttggctgtacaaagttgctggcatttaggtctgaagtttcaatgccaaacacccaccactaccctttgttttggcttaatttatgatttagtcccttaaatatatccatttgtctaccttgaaatttaaaactttttttatctcaatttagtacctaaaatatcaattttctctatttttaacctatttttgtagcggcagttaaatatatatatgttaagccactttggccatctgaaaagtgcaacgtggcttgttattggccaatcaaaaaataccacatggcaattagatttatttaaaataaaaatattacatttcaataaaaaataaaaaattataatattaaatatttaaaaatataattgagtttgtccagctgttgatcgatattga

SEQ ID NO: 11383 - DNA, 449 bp, Gossypium hirsutum
  misc_feature (56)..(58): n is a, c, g, or t
  misc_feature (63)..(65): n is a, c, g, or t
attactatttcaatgaaaatccttggtccttttttgttggaagtgacccttaagannnctttnnngtttacagctgatgcatgatatagtagattagttgctatatctttggaaagtaaactaataatttagtaatttctcagattgttggtcactgtccaatctaacgagatcgattgatgatgaatttggtctaagaactgaaccattaacaaatccaagtttgtttgttttttctttttgtggacaatgccttgatcataaatcacttctgtgtgttgtagttgtttctagtaaaggcttgggaaaccaaaactaatattgtgtaaatatattgttgcaaatagaacggattatttccataatcaaattgattgttcataaaggccatggtgatttgtataaacaagaaatcaaagtatttgactgacaagcaaatgtgtcagaaa

SEQ ID NO: 11384 - DNA, 679 bp, Gossypium hirsutum
ttctaaggattctggttctggtgcgactcactcttcatcaagttctggggcttctggttcttctacaagttccagttctttatcaggttcaagcaattctaagagttctagcttttctaaaatttctaaatctacgttaaatgtttgtgcttctaactattctagaaactttgattctttatcaggtttcaataaatcgacaaattctaagacttcagactcttctttaagtcatgatgcttcaggtatgtccctacgttcaaatacttaacatggttataaacattctaaggattccaatagtttgaattgtacattgggttttggtgctttaggctcttccacaagtttaggttctaacaattccaaggattcaaaatcttcatcaaattctggtacttctagctcttctgcagactccaattctttatcaggttttaacaattctaaggggtctggatcttttcaaacttcaaactcttcatcaaatcttagtgcatcgggttcctccacagggtcgaattctttatcaaattctaacaattctaaaggttttgattcttctaagaattcaaactctttgtttagttctaatgcttctggttcttacagagggtcggcttctttgacaggttctaacaattctaagagttccaaaacttctagctcttcatccgac

SEQ ID NO: 11385 - DNA, 608 bp, Gossypium hirsutum
cgacttgaaattcgaagcttgatactctgctcgaggtcaattgaacatttgtttttaagctagagcttgagatataattgaactactcgagttggagctcagttaagttcacttatcaatttttgtactcgagcttcgctcgattaataataaatatatattaatggcaataatgtaatttaataatttaaaaatatgaatagctcaataaggctcacaagcagttctgagtcaagtattattaagctcagttttgattcaatcaatagctcgagctcagcttaataattaccgaatcaagttcgaatttttttttgagacaaactcaagtaactggtaagtactatatctccacccctagttgtgcatctccacattgcctagagtacctcacttcactatgaagcaccttgccaaactcttcttagaaggatctggccaaaaagggtcgactcttggtcgtctttctgccatttgtcaaaagaaaaaaggcagaatcatgttaatttaagagtttcttagaaagtgacacttggttacttaattacatccaaacagacgtgcaggagtcacacaatggttcagcttactaggatgaacacctttgg

SEQ ID NO: 11386 - DNA, 639 bp, Gossypium hirsutum
aaatgcaggacgcacactcccgagaaccctttcttgcgagctcaagtgcacctaagcgaatgtgtcccaccccaaaggggtctaaggcatgccgaccaacacccaactataaaaaaggattaatattatactcatcaggttcagaagtttaacctgcattgcccaataatgacatgatccccttccttcacacggaagcatggtgaaatatgtgcggggatgtttgaatggcgcttctcatacctgaaaagaaaaacaaaaaacattcactctcaaaagaccattctcatcacaaagatttgactaaaacgaagctgaatcatgcctttggtatttcttgatataatgaaggtagttccgtcgaacaatgattgtcctgaccatcttggcactgtggcaagtaccggctaagatacgaccccggattgaaacagtgccagtgaaggggcatttcttatcgatgtaggttcctttaggaaacaaataaacaaaacattacaaaaacacattctacgcattccttaccataaaccaacattaatcaatcaattaattcatcttttctttcctataagtataccattatagaaaggacccattttcgaatatttcaaaggcacaacaagaagaaaaaaccct

SEQ ID NO: 11387 - DNA, 732 bp, Gossypium hirsutum
  misc_feature (666)..(672): n is a, c, g, or t
  misc_feature (684)..(686): n is a, c, g, or t
  misc_feature (699)..(711): n is a, c, g, or t
  misc_feature (713)..(724): n is a, c, g, or t
  misc_feature (726)..(728): n is a, c, g, or t
aatcccggtatttctcaaattgaacaatgatcttacaatgaagacctgaaacaatgcctatgtccaattcatactcatccatccccttagcaagatcctcgtcctcggaaacattaagattcctatttagagaagttaaaaggagtaacaacaagaacattatacaatcgtgtaaaattcatatagtagcattaaccataagaaagcaatctaaaatatatgaagtattaggactacagatatatgataccggtccatcacaaattcatatgttttcataaattttgtaggtaagagaaaatctttgagcatctaatgccaattactcttaaatgataaaaaaagaatatgaagataaatgtaagttgaaagagcaaaataaaataagagtacaatcgcataattttcatttcatagcattaaaaataagacacatattattttagacatgtagcaataagtgcaaggaatgatactgcaaccacatgaagagtattagagaagatataagatatcaatcaatcaatcaccaattcatatgtagtaattagtctccatgggtaagataagatctacatatgaattggttggtgattgattgattgatatcttatatcttctctaatactcttcatgtggttgcagtatcattccttgcacttattnnnnnnnttaaaataatgnnncttattttttatnnnnnnnnnnnnnannnnnnnnnnnncnnnattt

SEQ ID NO: 11388 - DNA, 510 bp, Gossypium hirsutum
tttgtagtgaagtcaaccgaaacctttttcatattcgatggtcgtcaccatcccttttcatattcgatggtcaaaaccatcccttttcattaatcgatggttgtcaccatcccttttcatagttgatgttcgtcaccatcccttttcatagtcagtagttgaaactatccctttttcatattcaatagttgtcaccatcccttttcatagtcaatagtcgaaactatcctttttcattaattgatggtcctcgatacgtcattggattttttcttcgaaacataatatgataatataacatgatagcatttaaaacataaattttaaaagctatgtaaacgtacgattttacctggctaaattgcagaaatgacaaagtacaagggcattttggtaattctctattctcctcaattttccacttgatcttgatctagattagtaatgttattcaatctagtaatttagacagtaaaataatatattttatgcaatttagccatttcgaca

SEQ ID NO: 11389 - DNA, 660 bp, Gossypium hirsutum
tgacctattcaagttcacatcacaaataatcatgaatatccattaagatgtgtcacaagatttaacattacataaaatcttgacattgatcgatgaccattcatgaaaatgagctaataccttgaccaaaacacagcccatatgcaaatacaacccatagcccattaggccaaatttcaaatgtacatgtgctcaggcaaacactattcgaaaaagaaattgtccgtgcaacctgacctctcaggtcaagatcaaagaaccacactttttctctgcttttcaaatggcaaacaagatattagcaaccagacaagcaagcaactaagtggaatttgaaaggaaggaactcaatagaaggaaaaaccaggacaactaggcagtaaagtgattattgacatggcaaaaaaattgtatgtaacagccaacaggagatcttttttaacattgttggatagaatgtagttaatattgcttgaatagttcaactccattttttaaaaaataaaacacagagctagaataatcttggaatgcaatgtgccttctttgcgtacaatttaatgcaataaatctaatcaccttgcttttgcattttcagtaaaagcagcaaaattatttgatgcaacatattgatttttggataatctcctcggagttaaa

SEQ ID NO: 11390 - DNA, 510 bp, Gossypium hirsutum
cgaataaagtaaaggaccctacaaggaaaaaaaggaagggtagacaagtctcgaaaaaacaaaaggcatccccaactcaaaaatgcagttactacaaaatgataggacataatacaatgacttgtctaacgttgaagaatggaatctctacctcgacacatgagttcaattcaacaaatttaggcaatgaaatgtcatatttaggaaatgattaatttacttctactagacagtacaatgtaagaatcaattattctttgatgatattaatttcataccatatcgattttcctttagtagcctttcgatgatgatttttacttgctaacaattttgttttcgtttattaagctttcgagtgatgaagcattgcaaacgttgctacagttgcataacatgtggataataggtaaactccatttcatttatctaaacatttcatttatctaactcaatattttacgtttgacaatgagattttggaattagttgtttggtttagtggttagg

SEQ ID NO: 11391 - DNA, 611 bp, Gossypium hirsutum
  misc_feature (59)..(60): n is a, c, g, or t
acagaggcatttcgctagttgcttcttaattggaagaaattatttttaaaaaattcacnncttttttgaactggtgttggctatttgctcgatcaatatgattctgctcttagccttaaagctttctaccacaattataacacacaaatagcatttacaaggcgaaaaatcattcagaactctcctgttagtaacatcttaatatgcgaaacaattgatcaaggaaaacaaacttaatacatttcaacaaaactcaaaaccaaatcattttagagtctgagtcgaggagcacaaaaaaaaaaagggtacccccgggcaaaaccttttttttgaaaaaaaaaaaaaaaccactttttttgaaagggaaaattaaaacgaaaggcccccccaattttttttaggggggaacggaacccctttgttttaaaaaaacgttttaatttaataaaacgggggttttggtccaaaaaaccccaaaaaacgggttcaggaattggttatgggggaggaaggattaaccccccccccccccccaaaattgggaccaaatttttaactaagggcctaagggcaaaaattgaaaatcgggaaaaacattaaaaataaaacca

SEQ ID NO: 11392 - DNA, 676 bp, Gossypium hirsutum
cttgtcttcttctccaccgttccaattcaatcatcctctctttaccatttcccccctcttatttctctataatttatgcaaatgtatctccatcactagtttcgtacgtgccaataatacaactctttcctaataataaattattgttggatagcatactagggtttacctttgatttttgagattgaagataatggttgaatataagtatatccactattcttaatctaatacatgtttgaaataggtaaaagtatcatgatgatttttgtactaaaactcaaattatattttattccttttattaaaaaatataaattagtttctgtacattagatcaatgagtaaattggtcatctctgttaaaattttcatccatttgtactgttaaaaacttgtgtgactaacagaataactaaacaataacatgtgatgtaccatatgtacctcatgttgatgtaaaataattagtttttaacagaaaaataattttagtgtttaatctaacatatacaaactaaattactcaattttttaactactaattgttttaacttgtatgtagacttttggtggttcttgatgggttcaccgtaaacacctaataaatttgttaatgtatgtataaaaaacaaaacttgaggacgacatttaattgaggtcacaagttggaagc

SEQ ID NO: 11393 - DNA, 274 bp, Gossypium hirsutum
catgtttggcatcccccattgagatgaaactcatacaagttgcatatagttacaatattcaacaatagagatattggccagagttaaatgatcctcattctaatggtatcacagatttttctttatagaggcaaagtatgagctattatagttaatgttagctgagaagcaagttgctaacctgcttcctacgtgaatttttcaagattgcttccctcacttcaaatacacttcaatatttatcctattccataccacatgttattatgatatt

SEQ ID NO: 11394 - DNA, 682 bp, Gossypium hirsutum
tcaagtgaaggcaactcaataagtagagtctctatcgcccttgggttaggaagcagagaagggagaagatctaaaaaaattagctcgggttccaaataaaaaagaaaagaagaaattccgttgagaaaagcattcctttgaccttcacttttgatggttgaatgttcacaagacatgtgaccatgacttgttgatgtaaattcttttaattcagcaactgattttttttctagtctggtaacttatcaacttgactctcgattataaccaacttttttgactttttccatatccttaacctaagccccattgtaaccttgtaaagacctcttgattggtgaatcatctcatttatagtgatggatatttgattttcaagcaagtctatggtactaacatttcttgtttgactgttgagtgcacattatttgaaccttaaacactttgagtgctttgagtaaatctttagtgaggatgttaattctttttttgagtttgaatttcaaataattattgagatagggaagatgcctaatgtttttaaagcttaaaattctctacttgggttgcttgtactgtttagtgtcattttagtgtaaatttccaatgtatgattatcttaagacattatcgatggaaataataaattgagagaaggtaacttgaatgtgggttgagaatt

SEQ ID NO: 11395 - DNA, 662 bp, Gossypium hirsutum
gaaatttcatccatgcaagcctatttttgtccaaaaatttaaaaattgggaaaatttctccccaagaccttctattttataatctaaagcaatttcatgcaaattgcttctagaatccaagttttgcaatttattcaatgtagtccctaatttttccaattgggcacttactcaaagaattcattcatgaaactttaacacatgcatattctcatattctaagcctcgtaataatcataaaataaatattttgatgtcgaatttgtggtcctaaaactactattctgactaggccctattttgggatgttacaagttccttaaaaagttcttgaagtggattgaagtttgcttaactactcatcggttctctatctccattaatgaaagccttgtggggttctttcaatggaggaaaggtattaggtagggagatcctatttccttccttacctctttatgcttgttatccaggttatcgaatgttactatcataaatgctctcttcaagtatcatcctaagtgccttcgagtgtggttgactcatctaatgtttgtcaatgatcttcttattttttctaaaggtattgttaatttgatggctgatgtttattgtgttcttcaacatttttactaactttctcgattacaactcaatgactc

SEQ ID NO: 11396 - DNA, 382 bp, Gossypium hirsutum
tttaattttatttcttttttaaattgagcttgaatccagaaatccttcgcaaaaccttaacgtcatccctttaaaattattaataaactctttaccttcaacacataaatattttcttttttttcatcattctttcaagttggcgcttaaaatcttaacattccatattttgtttcagtgatttcaacctttaggtaaaagctttagattgcaaaatatgatatatactgaaacatgattttctttgatgttttcaagagagtggttgggagggagaaaacgctagaatcataagcaagattataatttttttttttgaaaaaaaaaaaaaaaaatcaaggggattcaaaagggatattaccatagcaatttgtaaagattg

SEQ ID NO: 11397 - DNA, 622 bp, Gossypium hirsutum
catcgtatcacttcaactatgatttaaaccataaaattaattattaatgcaaagtaacaaaaacattaacaattaaaatatattgatattgatattacagttcttttttcctttttgaatcaaataaaactagaacttattgtgctatgtcaaaaggtaaaccattaaaacaatcccatttaagaaaaacttgaaaatgcgtacttaaaataaaattaaataggatagtttcttttatatttaacaattacattcttttctaattaaagtataattataaatataaaaatattttcaatattttaatctcttttaatagacataggtagttagagtcatgtatcatacttaagtttgaatttttattgagagaagatcgactttgttggaaaaatttgcaaatgacatatccattgaaagttaataaacccctcaagagtcaatattaattttaatggggggttttgtctcctaactttactaagaacctaagaaagcagtatgttcacaaaatggtagcacctcatcgggtgcctaaaaagacaaacaattcgcattacacatgattagacttgaatccttgccttaaagcttatagggcattataagttgtgttcaatcc

SEQ ID NO: 11398 - DNA, 421 bp, Gossypium hirsutum
aatcttttttatattttattatttttggaataataaaattaattttaaattttgttaaactgtattttggtctcattagaaaatttgtttataaattaaattgaattatgactaaaaaaataaaaaaaaacctttatggaaagccgagtctaagccggctcaataggccatattttatatttattatttactatttaaaaattaataaaattgttctaattggacctacaaatattcaatatgagaaagaaaaatccaactctttttcattcctttattaaagttccaactccgcttggcttacatattattttaaaagttaaagaacattaaaaattattaatttttacctaatttttaattaaatttaaataatattattaaagcatggtataaatttttttccctaccatcattgtgt

SEQ ID NO: 11399 - DNA, 456 bp, Gossypium hirsutum
tgactttgcctcagcaagaaaaaattaatattaaaattatatttaagaacatttatttagcaacttaatcataaactgaatggtaaagtaattgtaaataaattttctttagggttgagtttaatctttaaacatcatttatttttgttttatttaatccttctgtattaaaataataaaacaaacattatcatgttaaaatttattactttattaaaaatatgcacattaaatttacaacaacttattgctgcttttaatcttataaaaaataaacacacggttacattttaaaccccatataaaccccttaggtggggtatttgaatccttacctgccctagtgacctatttaagtcttgcaggtcgtaaagagaactccctttacgtgaaaaatattactttcagatattcaagtccttccacttggatgcttggtctttcgaaatattcaaa

SEQ ID NO: 11400 - DNA, 618 bp, Gossypium hirsutum
gtttttagtgactaagaagttgattttgatgactttaaagttgttcaatcagatcaagatagaaagaaagaaaacaatttagaaaatcaaccaaacacaaagaaaaacaatagaagcaaagttaaaaacaactagaaaggtttagtgcccttatggtttggtgtaataacggtttttggtgagagaaaaaagagatcgtgaagtgtttgggtgcagtcataactgatatagaataaaatcaactaaacaaattagtgaaatactcaaaatgaagagaaaaaaaaagaaaatagatcaagaagaaggaatcaattaaggggttgtagagatctcatccatggacgtcatttggaaccccaaaaggcaagaatcgaatatggattatgagtttctttatctaagaataaaataaaacaacaagttaacaacacaaatagactcaatcaaatagaaaagaaaagaaaataagaactaaatgaaatttggttgaaagaaaatagtttggtttggagtatacttgatatccttgactttcaaacaagtgaaatcctacccccaaataaaagttcttgaacctagaaaaagattgcaaaaataaaaatagtttgtttcaagaac

SEQ ID NO: 11401 - DNA, 596 bp, Gossypium hirsutum
aacagatatggcctgtaaacaaaaatatttgggaaagatttagcagggatgattacaaaaaactaaagacttgaaggggtggggggaaaaaaacacccatacacacgttgtttaactgaaccaaatccaacaaacaattattacaccaggaacctaactctaaaatgaagtgaagtacaagcacattctaacaagtaaacagactaccatcttccaaagctcaaccaacacagattgaactgggcatcatagcaaatagtttctccgccaacttataacctcatcactatcaagaaaaacacaacataacatgcagcaagtgtgttaattaaaaatgagaaagataaaagagtgtttaaattaaaagagagagaaaaaataaagggcaaacaaaaccgtataaagaacacaaatgtagcacatacaaggacaatccagaagccttgatcaatgctgacggtgttacatgtatatatatattttctgctgaaaataactaaaactgtgaagagatccgtagtttaatcaaaaagagagaatccaaggtgacactttgaatatctagtaaaagggcatcgatgcaagagcatgtggca

SEQ ID NO: 11402 - DNA, 664 bp, Gossypium hirsutum
gcacattgggttaagggttaatgttaacggattaataaaaaaatatgttaagagcaatggggtttactagtggttaacacaacaattaaggtggttaaaaattaaatgggttaaatcctaagtgcctctattatcttagtatatcaaatcaataatgtggtctagacatgtataatcgaagtaagttctaaaactccaaatcaagttgacatacttacaacaaaaaataaaatgagcacgaaataaaatatatgctctataggctcaaaagctcacaagaaaatatgatttgatatcaaacttgcaaatttaaaatttcaaaataatttttcaattcagggagacaacttaaaattataatttctaaaaaacaacttatcatacttgaatctctcgtgttttaaattataaaccacacaaagcacaaaaattcacaaattattccaaatccgaataaataaaaacgtcaaatttaaagaaattaattcaatgttaggttcgataaaattacttaaacacaaataataaattcaggggctatatctcacaaacaattgctcacacttaagatgtatatcgccctcaatgtacaaacaattaaaatcatagaataagtacaatatcataaggaggaagagtactgaaactgccttgaatttggatg

SEQ ID NO: 11403 - DNA, 668 bp, Gossypium hirsutum
gagggatgacatatcccttctcataaatttggtttctgtttccttgctgtttaggccttagggtgtagccctctctttttcttataaaaaataatattggtaaaattttttagcttaattaaaggctgttcttttgttacaattatgttaattttctgtccatatatgtaattgacatttaaattttattcgaaacatgtcagaatattagtggtaacactttccaatcatacaacttatcaagaactagtactttccaaaatgactcatgtactttattgtaagaaataaatttttttagatatatctcgtgttatatttttgttttgttttgtttagtccaattttatattgtaaataaatatattcttttatcaaagccaatagagacacttttaaaaagtattttaaaatttgagatagtatttttattttgcttgtgaaattagaaacctctatttttattttataatttttttaaagtaatagaaaatgaaatcttttataacagtcttactaatttgttgatttacttttatagttatgttagataaaactcataaaagttaaaaataagaaggcagattatttaatacatgttttcttgctcatttaatatatttttggtacaaatttgtagcatatggtacctaccagaatgtagagaa

SEQ ID NO: 11404 - DNA, 630 bp, Gossypium hirsutum
cgggttctattatgatggggtatggatcaacaagcatggtttatggttatgtttcggcctttgattttctcagatgcttggggcattccaatgttgaggttgttccccatgaagttttcaacaagctacctttcctcaaatatttcctctatacccccacgtaagcaataccccttctctcatgctcatgcaattaatatgtatcaaaattttctttcccgagatttgaaaataaaaaccggttaataattgtttgtaatttatatacgcgttatccacctatactttatttttaaaatataattatatattattttggttaatgacatgttaataagtatatgataagtttaaagaaaaaataacacaacaaatataaaatgataaaataatcatataaaattgcttaataggttttcttattaacttcattagtactaatattgtggaatactttttttaaattaaaattaggtagttatataatcacaattaatactatcaaccctcaaccaatgaattaatgagtgagcaatgtaattagccaaacacatctacagaataacaccttcaacagtttctttcctttatagcttcttcgcttttagacggtaccgaaatctatttcca

SEQ ID NO: 11405 - DNA, 653 bp, Gossypium hirsutum
tttctttgtgacgttgtactgatgcatgcggggcatttattacttggccgaccgtggcaatttgatagacgagttcaacacgatgggtataccaaccggtatacattcaaattcataggaaagaatgtgacgttggcgccgttgactcccaaacaagtgtatgaagaccaaatcaagctaaaagcttctgttgagcaaatgagagaaaaagaaaaagaaagttgtaaaaaaataaaggaagagaaaaataagaaaaaaaaacaaaagagagtgacaagaaaaatatccaagaaaaagaagaaaaagaaaagaaaatcgagaaaatgagtgtttttgcaagagttagtgatgtgaggaaggctttggtgatgaatcgaactgttcttgtacttttgtacaaggaagcattaatttctactaacgatttacctgataccctgccccctcctattttgtctttgttgcaggatttccaagacatttttctgaaagaaaccccgagtggtcttgatgtgatccagcccagattaattgagtcgtttcacgtaattgcccgatcgtcgacgaggaatagttgagttatcgaaaataggatgaaataaggctaaagatgcggaagctttcaaatggttttaaaggttggctaaggggat

SEQ ID NO: 11406 - DNA, 502 bp, Gossypium hirsutum
cctattggatcgatggatgaagttatcttcacttgattaaataaatgtactcaaggtggatttaattcaatttaaatttgttagactctagttatattatccttcgtcaagccatccaataattatatttaaaaagaaaattatcgtgaaattcaattttaaagtttcagtcaattttacttcacctaaatattatgtcaaatctcatgcaatcatcaaaaaatatagagggaagagtttctgttagtacttgtcaatccctcacctctcggacctaacaacactccgactagtcacctcacattgtgctctaacaatgcttctagttgacaatccactactctaccacccacacttatagagtagagcactaaagaaattaatgacggtaacaaataaacaatgtattttgagaaactcaataagaaattaatgcatgttcatgagcaatcagtgaaaagacacaatgataggggcacatttcaaacattgctccagcacc

SEQ ID NO: 11407 - DNA, 458 bp, Gossypium hirsutum
  misc_feature (53)..(55): n is a, c, g, or t
tgactgacttgtagaaaagttcggcatggatttccaaaatggccactaactgnnncgataggtctagcattgacatcatctcacacatgctaaactaaagctataacagcttctttaaattgttttgcacgagcccttgtgatcggccctcgaggtagcaccatcgaatctcagcttggacttatgatacgagcacgccccatgaacttcatcgaacaagtctgttaagccgagcattgacatgttgggaagctgatcccagctcggttccgagctccacgagctccgtccagctcaaatccaacttattcgagctcaatccaacttgcctgagctaaactgataccagcacgccccgcgaactttatcaagccagtctgttaaacctagcaatgacagggtgatacgagcacgccccgcgaactttatcgagcaagtctgttaagccgagcaatgac

SEQ ID NO: 11408 - DNA, 644 bp, Gossypium hirsutum
ttaatgggaggttgggcagtatgaattagactatattatatggtgtagcccaacttaactggctcatgttatatgcgcaagctatagatttgacgaggttttggagaaatttggcccaatggatttgcatactcgtttataatggatatgtataactttaaaagtataacgatttatttggtttttcttttttaacttcataaaaaagagtaattttgatctatcattttttttctctttaaacttttgattgttttgtttatcaaattactcaaaacgaatagaaaagttaacgtgtgttattttgttgatgtggtgtgttatcttgttgatgtggttgatgtggtatgcacgtggatgacatattaacaattaatttttaaaatctaaaaaatatttttgtaatattttaataatttaacgatttttaactttaaaaataattttttaaatttttaaatttgaaaatattaattaaatgctgacatggcaatccgtgtgtatgctaactctaaatgaaaaaaaaaatttgctcagcaagcttagtgtacctacattaaaaccatgatggcaacaaggaacaaagccactagtgaaacagtcaaaggcttgtttaaagatggcaaaattcgaaccatccaatg

SEQ ID NO: 11409 - DNA, 613 bp, Gossypium hirsutum
gacagggagagaacttgtccaacgaatacaagggtatattgcagaaaatgaaagagtgagagaaactcagaccctttaaacataagtaaaaattacagagttcaagaggatataccgagaataacgatccagtttgatgcggcgttcgacaaccgaaacttaaaatcagcgacaggtttggtggtttggggactgatgggcgaactcctggttttaaaatcgacccttcacaacaacatcccttcccctttcacagcagaagcattcacatgcttgggaggtataaagttagggataacaatgggtatacaatcggttataataatgggggattctagaaccgtaattaaaaaatgccaaatgtcttcaacagataaatcagagattggagcgatcataaaaaacattcagaataagaattcatgctttcaagaaattatctttaagcacatccatagatcagggaactggaaaacacacagattcgcaaatgcacactctacaaagcggagagatctcttacctggtaggagaggaggtgaatcggcaccctttagtctcgaaggaaagatgggcacgaaggccagactgaaggagaggatgaagaatctga

SEQ ID NO: 11410 - DNA, 590 bp, Gossypium hirsutum
gcggtctagacatatttaacacatacattaaaatcgtcagcagccaagacaaactaaattcgactggacaaaacaactaattatgtcctattcttgacacattgaattagcagcagcctaggacacaactaagacaaattaaatggctgtagcaaaacaaacttaaaacatgtcctaatgttgacacaattaaatttggctgactccaagacacatttaaaacatgtctaggctaaaacatgctcactaaaacatatttaagctaattagatgaccagattctaaacacattaaaaagttgtaggaaaaaaaaacatattaaaaacatgtattaaacttaacaaacttaactaaaattattaaaaatcaaatttgaacttatttatgagctgaaaactaattaactaatttaactaaataagtttattccagcaacataaatgcaagaattaaaataaactcaaaacgaacaaacgagcttattgagctataatcgagttgaattgagctcgttgaaattaagatcaagcttcattttaaacttgggcccctcgaatttaggccatgctagatgttgtcgagttgtgtca

SEQ ID NO: 11411 - DNA, 498 bp, Gossypium hirsutum
  misc_feature (47)..(50): n is a, c, g, or t
gagaactcaaataaaaatcttatctgacgtgtaggccttacaatgcnnnncaaagcataactttatctctagttgctttcttcctcccttgatttcagtgttatgcaaacaggtttgcgtgagtttctcaagttcttaagaagaaacctaataaaagttgggtgtatggcatgaacttatacaaaccttgtactccaaagtacccagaaagggtagtaaatgaggcgcagtaagatccaagatataacaaagattacaaatgcgaagctagcaagtgtttcagcaccactatatttgctcatcttccctatctccaaaaatacatcgctagcatcatgaattgccaaaacaacagagccaacacgggcaaatctgcaagaaattgagtgtaaaaaaagaaactgctatcaataaaaaaattaaaaaaaaaaaaaaaaaaaaacccaacacccttaattttctattttccaaaaaaaaccttgcaaaacccaacaaaaa

SEQ ID NO: 11412 - DNA, 580 bp, Gossypium hirsutum
tgatgcattgaccataacactcctcatatcgttgttcccctcttagtcgcttccccaaacagaatgcagtcgtctgcgaataaaagatgagagatctgaggtcttcgtctgcttattttaatcccttttactcttccttactcggttgctaacctaagtgaagtagaaagtccttcactacatatgagaaataataaagggctaagagggtcaccttgacgcaaccctctctctggattaagaccatccctagggctccatttaagaccaccgagtactaaacagtgtcaatacagtgcataatcctcgcaacccattcaacatctaatcccatcttgatcatcatttgtttcaacaacccccattctaccctaacgtatgccttgctcatatcaatcttgagagccattagccttttttccccacccttttgttcctcaaagtatgtagaatttcataggctaggaggacattgttagttattagccttcctaggacaaacgtactttgagctgggtcaatacaagaatcaagtactttttgaagtctgttggcaatggtttttgaaatgattttgtag

SEQ ID NO: 11413 - DNA, 454 bp, Gossypium hirsutum
  misc_feature (420)..(420): n is a, c, g, or t
  misc_feature (435)..(435): n is a, c, g, or t
  misc_feature (447)..(448): n is a, c, g, or t
tcttcaaattaatggcgagaaaaagcttatgattttatgtacttttcagccatgtttatcttccttacagcttttgggacaatattttaaactgggttccttcttgtttcgattttcgttgtgttatatccaatcgatactgtttgtttcttacctaacggaccgtttgtaagcttttttctttccttcaaaatgaaaaagcatggagaggatgaagatgattaagaccatggcgaaactaaaccaaggtcccgaaccctccccctaaaggaaaattttctcatttcccaatggcctaccaacattttactttattttcctggtggcatgaaccttaattaatttaaaaaaaaatttgcatttttattttttccctgcattttccttaaactttaactaaatttcctccatatttgcttnatttcctggttaagnaccatttcctgnntttggg

SEQ ID NO: 11414 - DNA, 279 bp, Gossypium hirsutum
  misc_feature (56)..(56): n is a, c, g, or t
caaatcccttatatttggaattcttgccggccttttccttggcctaaaattcctcnaaacacgtttttttggttatacgtttttctcgtccactttctcaaaggaaatgggcgcttactgtgatgaaaatctctctttctctccggcttgtaatttgtctccatctcacgacctccggctctccaaacacgtccacgacaacgttcacggcaacatttatctcgatcccgtatttcattttctctctcccatttttccttttacttttacttttttttt

SEQ ID NO: 11415 - DNA, 706 bp, Gossypium hirsutum
gtttggtctaggtttgggacttttagggatccaataacaatgatattataaattttgttaactaaatctacactactctaaataaaagaggccttcctacataatacgtgtacattgcctttttccttttcattataaaagataaatggcaaattttcagttttaacccctctccaaattacatttgaaatttaacttttttatattttaattagactttatttgatgttctacttttaaaataacattaatcaatccaaataattattatccttaattatttcaaataaaatattaatatatttttttcctaaaaaaaaaagttctagtaaaaaacgtgataaattagattgagtattttttagaagaaattatgccttaactttttaattaaaatagttaaagatgtcaattatttagactaactaatgataatataaaagaataacaaaattatgtcaaattaaaatataaatcctaaatcctaatctctatgtttggatcgtaatataaagaaaaagaaaagaaatttggttaactttttaatatcccaagtagacgatattagaactactaaaatattagtggtatgccattaaggaatcctagtacgctctccgattattagcacatttatactctctgtatagtactttagtgctctctgtttaatagtgcataataatgcacctctgtattaattccg

SEQ ID NO: 11416 - DNA, 612 bp, Gossypium hirsutum
ggctgtctttgacgacatgaaaagcctttgaagtcttggtattaggggaaaatatcgcaaaaccttgactggcttctttcttaactgtgccccaccttcatccgcattcacatcttctgtattcctattcatccaacgagacttaccgcaaacatgacaagactgttggtttttctgatcaccccagtacaacatgcagtcatttgggcaactatgaattttatcgtacccaaggcccaaatcttttattagtctcttcatatcttgacaagactgggggatttttgcaaacggaaacatctctctcagaaactctagcagcattgtaaaagagtttccggtccaccctcccaaacattttaagtgaaatagacgaatgcagaaggacaattttgaatattttgatccctcgtaaagttcttcgttcatttcattaagtaaattgtagaacttcgccgcttcttcatttggctcctcatcaggtgcacttgttcccgtttcgcaaaaaacatttccaccaatattacaatcatcgaatgcaataaagtcaggtggaaacgattgctcaccatgactgtgcatattaaatgcatcccgcaacataccttccat

SEQ ID NO: 11417 - DNA, 405 bp, Gossypium hirsutum
aagtttggcaagtgtcctataaatatacaaaaaaatattaaaaaatagatatttaaaaaaaatagacacatgttaattttttaaaactgtttgtggaataaaaaagtatacttccagtgtaccaaatgcttacccaaaattaaatatataataatataatattataaaaacattaaaaataaacaagaaaaaatctaaaacatcaaattaaaataagagaggttttttaaaacaaaaataatacaagtggccttaaaacgagtttgggttaatcatttataaatatgagcgaattgaagcaaaattttaatctcatatttcaggttagagactttgacaaacataaaatatacaaatatcatacatatatccgacccaagcttggttcaatctgactcatgaaaa

SEQ ID NO: 11418 - DNA, 551 bp, Gossypium hirsutum
tctcgacatgtcaacccaaatttagaacaatagaggtattattcccgtgttgtgtatgcttagttttaaccttaggttttagcggaaaagagcactaccacttgaaaacccaaagttaaaatcaagtatagacacattaagaataatagctctattattcatgttccaaatcagcatcccaaaagacgatattacaaagatttctcccaataaaggggcaattttatttattatatgttttgtatttggcagtaaaactctggcgtctttcactcaactagcatccgagttacagaagaaaattttgaagatgattttggagagttttggacttgagaaatacatggatgagctcattgacgccgtaagctatgaactgaggatcatgaaatatgaaaagccaaaaaccaatgattcaacccatgtgttagctgcgcactgtgactctaatacgatgacccttttgtatcaaaacgaggttaatggactacagattcaaagcaaagatggtgaatggatcaatatgaagccttcacccaactctttcaaag

SEQ ID NO: 11419 - DNA, 638 bp, Gossypium hirsutum
tcatttagcaagcccttcttacaaagacagtcaatgacggtgctatatgctacaatatcaggtttgaaacctctttcttccatcatcgataaaaacctaacagctcttttggtgttcccagtcttacacaacccgttaagtattgtactgtaagcaattaaattaggttgataccctgttccaatcatttcatgaaacaaacttgcagcctgagaaatcttacgttgcttacaaagtccattaatcaaagtggtaaaggttacaacatcaggctcaacacctaacttgagcattttcccaaaaacagaaaacccgaaatcagtatgacctaattgacaaaaacaattaatcaagatgttgaaagaataaacattatggggaactcctaatacttccatccgcctacacatagaaacaacagtagcacaatgtttcattctaacaatggatgataatattttggtgaattccagaattgaaggcagtgggtacttgtcaatcatctttttaaaggaagccaaagcatcctcaacattacggaagcgatcagaattttttgggtttccccttacagacatggaattctcacttaaagcttgaatgtgggtagcaaaggtgttaaaatatcgaggaagaaa

SEQ ID NO: 11420 - DNA, 579 bp, Gossypium hirsutum
  misc_feature (556)..(557): n is a, c, g, or t
  misc_feature (560)..(560): n is a, c, g, or t
  misc_feature (562)..(564): n is a, c, g, or t
  misc_feature (567)..(570): n is a, c, g, or t
  misc_feature (572)..(573): n is a, c, g, or t
gtgacgtatttactcaccctcatgaaaatatcacatgctttctcatattctatgtattcaatcttgaatactagtttttcaaacgactatttgaatgtatttgctaagcatttatatcaccattcttttgaaagtcatgagtgagggaaattctggagaaacatattttgagtttcaacaataatcatagtaaactttaatcatgattcttttataagaacacaaacaagccttttggttcattttataatcttcattcaactactattttctaagtcaaatttaccacatatgttcaaattatttcaatttatataaatgaacaatttctttagaatttcaatatgcttctagcattctaaatccttaaattctaaatccttcaaggattttaatattaactttactatatagtgatttataaaaggttacaacaacaacaattagaagaaaattaaaatttttatgaaatgtcaatttaataatatatttaaaggttattcatcataaattaatattatatattttcataatcaatgccaaggtttaacaaaannatncnnncannnngnngtatga

SEQ ID NO: 11421 - DNA, 623 bp, Gossypium hirsutum
cacaaagaagctctgaacatgatgttttctcatcagcttgatgttttcaaaaactttgagagattatacctaaaacctttgggattacatccagaatattcatttattcatccgattaaacttcaatttaccgaattccctgatgaattaaaatggatgttatggtatcttacccacttgtatcacattgggatacagtttgatagattcgatctccaatattttctaactgttgtttatcaaagacaagaaaacccagaactccacaacttggctacatttcttaaatggttttatcctttaaatcagtggttggatatgattaccttaacacttgaacaatccaaagaaacacctccttcaagtatagtaattattttctataaaccacaatatttcatgcaaaatgatgcatcaacccaattaggagcatttccaacggcttgaattcacaagacatatagctcagaggttgatacaaatccctatgactacaaagcactgcaaaaatatctctgccaactcaacaaaaccattcccacagagatatggccaccaggagatgtactagcaccttgggactttaatgtaaagccaccgacaccctatcagatggagttaaa

SEQ ID NO: 11422 - DNA, 651 bp, Gossypium hirsutum
  misc_feature (53)..(53): n is a, c, g, or t
  misc_feature (249)..(249): n is a, c, g, or t
aaattcacaaagaagctctgaacatgatgttttctcatcagcttgatgttttnaaaaactttgagagattatacctaaaacctttgggattacatccagaatattcatttattcatccgattaaacttcaatttaccgaattccctgatgaattaaaatggatgttatggtatcttacccacttgtatcacattgggatacagtttgatagattcgatctccaatattttctaactgttgtttatcaangacaagaaaacccagaactccacaacttggctacatttcttaaatggttttatcctttaaatcagtggttggatatgattaccttaacacttgaacaatccaaagaaacacctccttcaagtatagtaattattttctataaaccacaatatttcatgcaaaatgatgcatcaacccaattaggagcatttccaacggcttgaattcacaagacatatagctcagaggttgatacaaatccctatgactacaaagcactgcaaaaatatctctgccaactcaacaaaaccattcccacagagatatggccaccaggagatgtactagcaccttgggactttaatgtaaagccaccgacaccctatcagatggagttaaaaaaagccttaaagaatatcaaaa

SEQ ID NO: 11423 - DNA, 445 bp, Gossypium hirsutum
cctcacgttattacagtaaaaacacattaagaattaaaataaataatcaacctattacggtacaaaagcctctttaaggaaataatatatattaaatggggaaatgattcattttcgtattctttgtacaattattattttaacaattcaaacgtcaaatttattattctatttatatagatcacatatgttaaattcgatgcaaaataaatctttatagatatttgttttagacaaaaaactttcattcatttaataaaatattaatttataaaatattttagattgatataataaagatattggatcggtttaaaattttacgtagataataaatacaattacatcaaaaattttaatgtgtgaattgttaaaatattaatcataaaaaataatacgaaaagatataaaattactttaattttacatcgatataaataaattc

SEQ ID NO: 11424 - DNA, 647 bp, Gossypium hirsutum
  misc_feature (462)..(464): n is a, c, g, or t
  misc_feature (471)..(474): n is a, c, g, or t
  misc_feature (479)..(479): n is a, c, g, or t
gaatataatcctcaagaacgacttcctagcactcataacgtcgtcgttgtcatcctcgtcgtcgccaccactggtggagtcttcactatccaccaaatccctaaagagatccgttacttccttttccggttcagaggcctgcttcggagtagagtctggcggggtctcgtagtcatcatcgcgcttgaagatgtggattgaggtgatctctcggtcggcgaagctaacgcgccgcgaccgcttcttcctgaacgcgatgcttccttcgtccgttccctgcgtatcgcatggtggttcgtcggggaatttggaggccattcttgctaagaagcgagatgggagattgggaattagggttcagaaattgaagtgcattttggttttctggtgtttcagtggctttgtgcgggaaatgtcgcgttggaagtgggacttttgaatttgcattttgcaggcagctcnnntctttannnntctanagtcagattcggtttttgtaacactcttcatgtgaggattcataattttttttgctctaagaccatgtcatagagctctcaacacaccacacgtattgcttgatatatttaattgttacaatgtcaatgtgccttggaatcgtgggttgtcgaccaaccccgcaactc

SEQ ID NO: 11425 - DNA, 547 bp, Gossypium hirsutum
  misc_feature (499)..(500): n is a, c, g, or t
  misc_feature (502)..(503): n is a, c, g, or t
  misc_feature (505)..(505): n is a, c, g, or t
ttaccgaacagttgtcaggacttctactggggtaacacctttttctttggtttatggaatggaggcagttttacccattgaagttgaaattccttctctccgggtattggctgagctaaggttggatgaggcggaatggatccaatctcggtaggatcagttaaatctaatagaagaaaaaagactaaaagctattcgtcacggtcaaatataccaaaaacgaattatgagagcatataacaaaaaggtccgtcctagagaatttcatgaaggggacttggtgttgaagaaaatcctccctttacaaaaggatttcagagggaaatcgatgccaaactgggaatgaccttatgttgtaaaaaaggctttttctggaggtgctttggttttgagtgaaatggatggtaaaaacttaccgaatcccgtaaattctgattcagtcaagaaatatttcacttgaaggcaaaagaggaatcaaagtgaaaacccacaaagggcnntnngnacccttaaaaaatggataggctaaggcaaaaacccgaaaatg

SEQ ID NO: 11426 - DNA, 657 bp, Gossypium hirsutum
cctctttcgttgaaaattaaaaaaaaaagttccgaaagtgttgaaaacttcgatattttcccatttactttcaaccttattgtgagatccaaaacaaagtcatatataaaaaaaattaaccacgtgatgcacatattttcatttttttaagaaaaattcatggtaaaaataattaaaataccataaatatatgatatatataatataaaatacataaatctattagtattttcattgaaaattacaatttttgtatttaaatttaaaaatttatataaaaaagattgattgaatttgatagtttgaattaacccaacgtcaattcaatcaattaattatggaaaaatatttatatttttttatttttctaaataaaattaaaattaactttaaaaataatttttaatcatctatagattctaacatcaataagttttttttaaatatttaatagctttttagttttacccaagacatgtctatattatttgatttactaataaaatataaaatataaattttttaataattttattattggttctgattatatctgttatttttgacataatgtaaactactcatagcctctctccaacctataaataagaggataatgcgtttttgcatactcaaacccacgccctcctgcattac

SEQ ID NO: 11427 - DNA, 548 bp, Gossypium hirsutum
caaacagatatccccaacatcaaatcataacgcatatccaatagcatgagccaatgaatctaaggaagaaataaataaaattaaaaataggttaaaaaggcattagactccttgcttttcttacaaaagaatcaccctttgcagaaacaaattcaccttctaaaaaccattactacaaatccactctttaaaaggtaacaccaaaatttcagaatcttctctttgtgaaaaatatgtgacacgggctaaaaaatgaacttaagggagttagctaacaagtctttatgctatttcctacatagaactgtcacatttaaaccctttttcaatttagtcctcaaacttcaaattcttagttaaacaagttaattattggcccaaataagtactcaataattgttaaaaatccaaaaaataataccgtacgacgttaatgggatatgatttttttttacttaattggatacattctgattactaaatatggattaaaatcaatattaggtgtcacttaccaaaaagaaaaacgaaaaaaaaaaactttaggg

SEQ ID NO: 11428 - DNA, 538 bp, Gossypium hirsutum
cctttatccgtctcattttaaaggcactttggtgacatcaaccaagccggtaaaagaatggagcttatgtttgccagaccagagattgaaactcctagtggcctcaaggcagcatctgtttcaacgagcatatacaacgagagtaattttagaaccattttgcctaagctttacacaagccccattgagaccatcttttgcccagaccccaaccagggcttgtactgtcaattactttttggtttaatccaacgagacgaggttgtcacggttggttcactctttgcatctacggtgctaagaggtgtcaagtttctagaaaatcactggcaagagctatgctatgacataaaaacaggtcgattaagcgattggatcaccgactcaggatgcagaaatgcagcatcattggtcatgaagcctaacccagaacaggctgacttgatagagaacatatgtaattgtaaatcatgggaaggaataattagaaagctatggcccaaagcaaggtatattggttgtgtttgtactggcgata

SEQ ID NO: 11429 - DNA, 500 bp, Gossypium hirsutum
  misc_feature (420)..(420): n is a, c, g, or t
  misc_feature (425)..(425): n is a, c, g, or t
  misc_feature (462)..(462): n is a, c, g, or t
gtgtcgaggttttgtcctcatcctccgagagagttgttgtatacttcaagaaagagggggaagaagcattagttttgtacacaataataatcatggataatgtgcgcctaggattcaaaccaccaatcaataaatatgtaacttttatgtgcacaacactaatgcttcttcgttgaactcttgcaaagttgtatcttcaccaactgaagtatctcttcgtaaattgtataatgccccattcgattcttagcttttaatgttattgagaatacaaaattattattaaaaaagaagaagtgtgaaatttaaatgtcacaatcacattccaaaatcttaagcattagaaatgtaagactatacaaatcaaactcttttattattatcaaaagggagttgacttttttttttcaaaggaacaanatgantctaatcctatccttttcaaacacacaacaaaaaggnaaaaaataaacaaagcctttctttagggctaggcacaa

SEQ ID NO: 11430 - DNA, 665 bp, Gossypium hirsutum
gattgctacaaacatccacaaggttattagaagatttaaatacaaggtcaagactccttattaaaaatataaaaccaagtgcctaaattctaggaactcaattttcaatctttctcaatcttttactaaatatttctggtacccacttttgggttaagttttctatcattctttcaagtgttgtaactttgtatgagactgcttaattgttgattatctaccttttagaggtatcatcttattcatcattattttctctcattagtgaggtgttacttaaggttttgtatagcaaacctttaggagaagtagttctatcttaactttgaaaagataggaatgtaacacccctaacccgtatccgtcgccgaaatgggttacgaggtattaccagacaatacacaaatttcaaacaatcatatgcatacacttgcacaaacttttaaaccaatcaattattaacataaataaccgatttaatcattattaccatatagtcgaatataactttaatgcaacttatagaatgtacaaaacgtacaaactacaatacacttcaatcgcatactaaaaaaatcaaacataaatagaactcacaaaaccaagtacacataatcatatcaatttgaccatatcatattcggccacttggtaccttacttaca

SEQ ID NO: 11431 - DNA, 642 bp, Gossypium hirsutum
ttataccttatttgcatttgtttttcttcaaagagactattgtttagggtacatgatttgataaatttaaaaccattaatagaataatttttttataattagttgaatatttgtactttttttttaatttcaatttgaatatggaaatatattttgtaatccatagttttttttcaacctataaatatgagagtaatgcattttaacgtactacattgacaacaatgtttatgtcgatcaaggtaaaattgtaaaatttatttgcaaaattgaaatgtggatttgagtaataaatatttaaatttgaagtcattcaataacaatttaaaagttttgttggaaatcaactcgattaagcaacgaatgagtaaaaatagcaaaagaaattgagaatttgaacatatgaatttaaatttaactaaaagattattttttaaatttgattgaaatatgagtcttaataattttatctatttttattattaaaaattattcttttgttattgtttagttatttccattgatacctcttttactactgtaatgtaatctttatatttaaaataaatggaattccaacaataaatatttgaatttaaatccattatcacaaatattttatctaaaaaaataaaaatggac

SEQ ID NO: 11432 - DNA, 442 bp, Gossypium hirsutum
  misc_feature (423)..(424): n is a, c, g, or t
  misc_feature (427)..(434): n is a, c, g, or t
gtttattgatgacatcctgatttattccaaggataagactgagcataggaacacctgagaacagttttacagatctcacgggacaaactgttgtatgctaaatttagcaagagtgagttttggctctgagaggttggattccacggtcacattgtgtcgggtgatggcatccgagttgatccaaataagatatctgctattgttgagtggaagctgccgaagaatgtaaccgaggttagaaggtttttgggcttagccggttactatcgacgcttcataaaagggttttcaatgattgcaactcctttgacgaggttgctgcaaaaagatgttaagtttgagtggtcagataagtgttggaaacacaaaagtttatatgctttttcatacccatttttacttaaattcgtgcaaatccggatnnaannnnnnnncggcagct

SEQ ID NO: 11433 - DNA, 581 bp, Gossypium hirsutum
  misc_feature (266)..(267): n is a, c, g, or t
attttttgttgtagcttgaggagttgactctgtattaatctgatgctccacctgcttttgattttctttattggaagagtctttaagagataagttaggtagcatagcagtttcatcaaaaacaacatctctgctaatcacaacttttctattttcaagacaccataacttatacccttttacaccagctttataaccaagaaaaacacatttaatgaatctcggttccaattttccattatcaacatgagcatacacaggacacnnaaaggtctttaaatcaaaataattagcaggattaccagaccatacctcttgtggagtctttttctcaatggcaacggatggagatcggttgatcaaaaaacatgcaatagaggctgcttctgcccaaagcgactttggtaagttggcatttgacaacatacatcaaaccttctccatgatcgttctgttcattcgttctgcaacgccgttttgctggggagtatgacgaactgtcaagtgtctcatgatcccttctgacttgcacaatctattaaactcatcaaaacaaaactctaagccattgtctatgctga

SEQ ID NO: 11434 - DNA, 793 bp, Gossypium hirsutum
  misc_feature (655)..(763): n is a, c, g, or t
  misc_feature (765)..(773): n is a, c, g, or t
  misc_feature (776)..(789): n is a, c, g, or t
tcaagaaagcaataccaacagagtgaaaaaaatttcaccctcggatgatgaaaaaattaacatatctcaggacaactttgaaagaaggcataagctatctccttagaaaatcagatagcaaaacttctaggttacctttcatcaaaaactactaatgatacaatggacaacaatatgctacaacttttaaaaccaagtgagtaaaaattaacataaggggcttgtagctaatggaggcttgctgaaagtaaactcaaagtagcacattgaagtaaggaataccatatatgtgtatagaaagcaaacgaattttagaccatacttatagactaaaagataacaataaaattttcaagaatgaaaatataaacaacacacgaggaatgctaaaaacaatttacaatctagagataaatggtccaatgatgagataccagaagatgccaagaagtaagcaataatgattgccacaagaatatttgcctctttttatacagcaataacagggaatttggtgtccttccacagaaaagggtaagttaccttgtaacatatgagtatccaatcaggatagaagtaattatatgatgagacatcatcacagaaaaatccttccttcgagtctcccaagtaaggagggcgaaatgctatagannnnnnnnnnnnnnnnnnnnnnnnnnnnnnnnnnnnnnnnnnnnnnnnnnnnnnnnnnnnnnnnnnnnnnnnnnnnnnnnnnnnnnnnnnnnnnnnnnnnnnnnnnnnntnnnnnnnnnttnnnnnnnnnnnnnntttt

SEQ ID NO: 11435 - DNA, 657 bp, Gossypium hirsutum
ccttgcaagacttagtgctgtcaacaggagccttaaggtagccaaatctggggtcaagaagaggaacagacaggcagttaggatccgtggcaggaagtgaaacatagatagttggggaaactgtcatgcctgaattggtgatggttttctttggttacaaaagttgcagacagtagattaatttgtcatttcgtgttaatgtattggaaaatttgtcacctctgctagagatggtttagccttggatttgataattgcatttttagttttaagttatgcgctaatgggaatttcaattacatttgtacgagactattgtatgtttattttgttttggattgttggttgaaaaaattatttcagtaactggattagcaacttccttaaagtagcctattttcacgtacaaaagaataaggttgtgattggcatcttgctatctttgctaattgccggattatgggtggatatcttctggctagttaaattaggaaaaaaaatcctgtcatttttattagaggacttggtctaataaaaataattaaatccttctaaaaaaattataaataaaattattaaaaaataacaatagtggcctaataaaagagtaggagtcaaatttttttgaagtcttagattgggacgggattgctatta

SEQ ID NO: 11436 - DNA, 697 bp, Gossypium hirsutum
  misc_feature (651)..(658): n is a, c, g, or t
  misc_feature (688)..(690): n is a, c, g, or t
aggaataagggatgtcaatactgccttccaaaattcaagagataagagcaacatacgaattgcaagagcaaccctaccaaataagggcattcatctcaaccaatcatgctttaggccttaacgtagtctcatgtaacttaccacctttaaaatttttaaaattgtactttaatcccctaaaatttataataatttaatttaatcttttaaaattataaagatgactactcaaatggtaaaaatatatttttactatcgtaaaaattacaatttaattttgaccgctaatttttttttctaacttcattcctgctcacgacacatttaatataaacttcttatgcatattaaatttaagatatgaattcacttgtcatccacatattgataaagtattttcttaaatttaccattgttcaacatctgacttaagtatgaaagagtatccaaagcataatttttgatatcccataattcactctttattttgtaatctttcaatcatcctcaccaaaaaaaatccctttatcccccactacattatcaaattttctacaattctttacttgtaaataaaaatattctttttctattttatataaatattttaaattatattaaatcatctttgaacattcggctgattcaacnnnnnnnnagtaatttgaatattcggctgattcaactnnnaggagta

SEQ ID NO: 11437 - DNA, 634 bp, Gossypium hirsutum
aacaagttgcttaattttgttatcaaaaaagaattttctttttcttgttggatcttgtttggtttaatcatatttgttattgcagggagcttgcaatgctgaacaatttcaagctttaggatccggggatccgggtttggcctaaaatgtgctgttgtaagtttcccgccaaaatataccacactgttagcaagatagttacttttttttttctgtctaatagaaatgaaatttcatgcttgagttgtttttagtttatactttacatgtctaaagtaccgcagagttgtttgctgactttgaaaattttggcttcttaattttttcttatcataaatcaatttatttggattgcttaaattttggttcttaattttgaaagcttgttggaggggtggacctcatgcaacaacaaattgccctcgggaagcagccgcacattattgtaagttcatttgttctccccctgtcatattatctagaacttcaagtaatttgagcttgaagaatctaggttaagttgacctgtggtataagacttggttgctatcataaagatgcggataacagttagatagataaaaattgattgcaatactagtgtgttgagttgtttatgcctccttctctaagt

SEQ ID NO: 11438 - DNA, 636 bp, Gossypium hirsutum
ctcaatttctaattttgttgatgattttgagtcatgccattgttgataatgtgtgctttattaagtttgatgatagtaaattaaagatatgtgttagattactaagttttgtctttgaatttttgatgaatttgagtaatttgggtaatttgggttaaattgtgaaatttgtaaattaagggactaaaatgtgaaataaatgaaacatgtggacttgtatgaatactatgaatattcggccaagtataaggaaatttggtgtattttgtgattttatgaaatagggactaaattgttaaaatgtgaaaatgtgagggctaatttgtaaaataccctaaatatgtgtttatggatagatttaatgatttgttgaataaaaaagttaaatttgaattgatttagatcaagaaccaaagaaaacagaattagatcggggaaagtcaaaagtcatctagtagtcgttttcgttcgattgaatccgtacgagttaagtttatatgcaaataaatgtgtattgaattgaattactatcaattatatgctattgaactatgatgaatgattatatgagttgagaaatatcagacatccgagaaagtatcgacaaagttccaacgttagaaaagccctgtatga

SEQ ID NO: 11439 - DNA, 409 bp, Gossypium hirsutum
cagaaattgagattctgcactgaacaacaaaatacagaaaattatgaagatccaagtagtgaaattacacgagaaaaaaaagtaggatctgcaatgactgcatctacatgctttcccttgattctccacagtacttactaagctggtgaccaacttactagttttgtttctctctaacatcatcgccggtagatgtagggtggcgcttgatctttcgtaatgctctttccgtgttgaagacctcaacctacattgattcataatgaaactcaaggcatgcaataaacaatagaagctttaatggatagtattatttgcctaactagcaacttgacagcatacagaaccctggaaatttacataaaaaatggtaataatatgtgataccccgtttctgaagttgttctaa

SEQ ID NO: 11440 - DNA, 451 bp, Gossypium hirsutum
tttttttttggtatgtcctcttgtttcagtggcactggtgaatgcgtgccatcaaacagaagctattgctatatatttggctgttatagttgtttcactagtttgtattcaactcttcccctatgatactaaaggacgagaacttagtgatactgcgtcctgataataagtaattggtttcttaagacaagttaaattgtgttgtaggtgagtactgcgaagatgctatgattgagctcttcttgccaattatactgtaaaaagtatactggtcattgttatgtacattttcctacgacataaatgttaaaagggaaaagaggaaaaacactaatcaatggtggttgtatttccttttgcaaaaaaaactatactagcttttgcagatgagattagttgcttttctttttcttttgtgatgctccatcaagatattccaaaaaaaacaaaa

SEQ ID NO: 11441 - DNA, 377 bp, Gossypium hirsutum
attaagtttgactcttatttgaggactttcgaaaaaatttaggtttttatttaaccattttgaaaagttgatccttcatttgaggacttttataaatgttgagcccttatgtaataactttgaaaagtttagctcttatgtgagtaacttctaaagagttaaaccctaatttatgcatttagcattggttttactgataatttgatagatataaatgataattaatctcatgatgacaatttgcaactagcggttgctatgtatttgtgtttatatgaatcttagggcctaaaacatacttagttcatggtcttgtccctttggaattaaataaactccgcatcatgaaaagaaactgtgaaggtttcatatgtgca

SEQ ID NO: 11442 - DNA, 373 bp, Gossypium hirsutum
gatgttttcacttctctagcctttatttaaaatacaaacaaaaagtcttatgttcttcttcttagttttattacactgtgaccaaactgtcttttgcatttaaagcataacccctttgaattaatggcaattgcagagagaagaagtaaagaagattttgtgtattaaaaccaccttacccccaccacccctggcccttccaattccagaacccaattttccaaaaaaaaaaaccctttttttttttttttggctttttaaaaaaaaattttccttttctttttgcattttccacctgccttcggcggattcaaagccaaaaaattccggggccggttgtttcccgggccccaaaaaacccccccttaaaaaa

SEQ ID NO: 11443 - DNA, 510 bp, Gossypium hirsutum
agttcagtggagagaaagatgaaaatcacatctttggggggtctaaatgaggggacatattatgggccatctatgaaggtgcttttgttatctttttctttttctgaatcaccctatttgcactaataaatagttttttaatgcaatgcataattacaattattgtatgccaatgccaatgccaatgccaatgccactgccattgccatcatctctacaatcattatcatcatcatcatcatcatcacacgttttcattacggctttttgatgacttgttgcttggttcaaagtaagaaaatcgaaagtaaaactacggttaaccaccgtaactaaacccttttttagtgggttaacattttttttcaaagaaagaaaaagtgggtggcgtttgactcagtaagaaaagaaattggatcaaattggagagtctagaagaaactaaacattgttttccacaagaaaattattacaactatgatatatatacccatctggactataaccaat

SEQ ID NO: 11444 - DNA, 590 bp, Gossypium hirsutum
attctttccagccgctcttgcatcttatcttgcatctctttttagagctgttcaagcttttctaatctttgatccatgttttttaatttcactcgagttccgtaggggtgtcgattttccaagttaactgaaataattttacctaattagggtcactttgtgaaaatctaatgcatatgatgcaatgtaatgcaaatgcatgaatgcaaaaagagacgttgattcttagttcaattctattagaacaactttactagaaaacaaatctctttacataaagcggatatatatacggtcttgcccttatattccaagacaacgatccttttcttcattcgcgcgttaagatgaatctcacgaactcttcaaaagggacatctcttttatctcctttttgcttgatctgagcctcgactcgttgcttgctcatccttgtgatgctcattggcttctctttaagaaagttcagcggctctcaaataatctttgtcaccttgaatccttgagcaacagagtaatagttgtgttgtcctctattaaactattatctttctcttgttgtgttttcttgaaacatattcgggcaaatg

SEQ ID NO: 11445 - DNA, 644 bp, Gossypium hirsutum
atccttgactccctgcacaataactagataataagaccagaaaacaaccccagtagcattataaagaacccaacccaacccagacaaaccccaaaccaaccgccatccacgtaacaaagtaccatacatccaattccaataacaccaatttatacctcaaaagcgaaaccaacacacaaagaacgtaaaaaacagccaagagaattaagcaaaccaaaataataggcagaattcctactccaattcaaacaacaacatccaaaaaaattctaacaaacaaaaacaccaacaactatctaatggattccatagttgaagtgactgacaaaatttgaacaattagatctcaatagaaatgaatatcattacaccatgactgacttgcatcttgtgtatttcagatatcaacaatggcttgcgtatctaattgcaaaataacgaagaaataaagcagtatctgataataaatattcttaagacactttacctgctcgacaccaatgacccagtgatgccaataccctagatggaatgtgcaacactggaatgtagatacaattacaaaaaattaaaaaaaccaaatattagagatgacccaacgagaaaatgcagaaattccgaggaaacaaacaagagataagaaa

SEQ ID NO: 11446 - DNA, 512 bp, Gossypium hirsutum
ccttgtgagcatgtattgttttttatcagttcaagtattttctttgtgttagtgcttaattgacaaacatccttgtaatgaatcaaaagtcaatggtgtcaaaaagtgaggttttgggactccgtttccatgaaccggactcgtaaatatttttattaaatatttatagagttttattagaagcgagttgaattttggttaagaaatttaattgaattaaggcttaattttagtatagagactaaatcgcgtaagtgataaacgtatgaattactaaagaattctaattagaatttatttaaggggacttaaaaggtaattatacttgtggtttataagtggacggcaacatggttttaaatgttaaatatgttgtaaatttttacttcaaataaataaattaataacataaaacataatataataaaataacttaaaacaagttagtggaacataaaataaaaacattttcattctttcttcatgcaagccgaaattaaagggagaagaag

SEQ ID NO: 11447 - DNA, 795 bp, Gossypium hirsutum
  misc_feature (551)..(551): n is a, c, g, or t
  misc_feature (553)..(553): n is a, c, g, or t
  misc_feature (599)..(599): n is a, c, g, or t
  misc_feature (623)..(631): n is a, c, g, or t
  misc_feature (636)..(636): n is a, c, g, or t
  misc_feature (638)..(638): n is a, c, g, or t
  misc_feature (653)..(653): n is a, c, g, or t
  misc_feature (667)..(668): n is a, c, g, or t
  misc_feature (670)..(671): n is a, c, g, or t
  misc_feature (673)..(682): n is a, c, g, or t
  misc_feature (690)..(692): n is a, c, g, or t
  misc_feature (696)..(696): n is a, c, g, or t
  misc_feature (698)..(699): n is a, c, g, or t
  misc_feature (702)..(706): n is a, c, g, or t
  misc_feature (710)..(715): n is a, c, g, or t
  misc_feature (717)..(729): n is a, c, g, or t
  misc_feature (734)..(737): n is a, c, g, or t
  misc_feature (739)..(741): n is a, c, g, or t
  misc_feature (744)..(744): n is a, c, g, or t
  misc_feature (756)..(756): n is a, c, g, or t
  misc_feature (758)..(763): n is a, c, g, or t
  misc_feature (766)..(771): n is a, c, g, or t
  misc_feature (775)..(778): n is a, c, g, or t
  misc_feature (787)..(791): n is a, c, g, or t
ttccaattacatcaccagactatgaactaaattttagttggtcattagaattcaaatattttaattaatttcttaaactacaaataatattttaccgtaccaattttcggtttgacgtaaaacatatttatattacatgaatttgactataaatatatatttattgaataaaaatagcatatcaatatagtttaaaatgattattttttaatacatcacaattacatataaatctttgagcacttgcgagtgcatattagaggtgattatgggtcgggtcgggtttgggttcagacaaaaatttaggcccgttttctaggtccggccctggcccaacctgaaatatgggcataaaaatttatccgagcccggcccatattaaaatttacaacaccaaaaaagtatatatttaatatatatttgattaaaaataaaaaatatatatttaatatataattcgggccgggccgggctcgggcaaaaaagttttaccccaggtccggctagttttttaaacgggcctcatttttttacccaaacacatatttcgngntcctatatttttacccgaaccctctcatttttcgtgagggccgggnagcccaatccatgaacccaatcannnnnnnnngtggnantcttgaattaaaagnaatggtagtattgnnanncnnnnnnnnnnaagaaaannncccntnnctnnnnnactnnnnnncnnnnnnnnnnnnnccccnnnncnnntcncccccaccacanannnnnntcnnnnnnattnnnnttctttacnnnnnatac

SEQ ID NO: 11448 - DNA, 422 bp, Gossypium hirsutum
ttacacacgggcgtgtggtctacccgtgtgtctaacatgggcgtgtggattacccgtgtggaagtatctaagccgtgtgcagccctgaaataaacatattttgtccgcttttggcctttttttctggcacttttcactttcctacgctcatctggatataaaacatgaaattaaaggatgaggagcatcaaattcactaaatctcatgataaatcatccgaaaatatgccaagcatgggattaaaatatgttacttttgaggtttatcaaatatccccacacttaagcattttaatcataaaattattcttctcaacttataattcttatcaaaaatgtgttcgaaataatccacagataattatacactgagaattcaattaagagaacattaaaaatttcaaacaatccaagttgggtca

SEQ ID NO: 11449 - DNA, 681 bp, Gossypium hirsutum
  misc_feature (7)..(8): n is a, c, g, or t
tccttcnnatcacatattatcccacctacagcggaaaaaccagaaatgaaattaacgacactttcagtattaagaagaaaactcatacctaatttcgaacgttcaggagactattgcggatccttcaccaagacttcattattgattaagtaatatttctttgctcaactgtaagaaaccttaataattttctccaaattcattgattttccttggaagttgaacaagttacgatttttccagatgcgccaaagtattatccagaagaagcaagcccagaccgaatctgtcatgtttttatctgattggtcctatagatttgagaacaaccattttaaaatattaccttcaaagatccacttattttgattggaagaaattatttgagtccaaatatccttcgaacatgaacatcccctaaaaattagtaaaacatcctctgtatggtgaccacaaaaatgacatgactcatcatcaccagttcccgttcgaaccctttcagagttggttaaaagtctttgatttaggattttccagataaacatatgacggtgtaccaacggagctcgtggaagggacaaaagaaagagggtacatagtggattgggctccacaggaagatgtcttggccatggggctattggtgggttttgagtcgtaacgaatggaattcgactttgg

SEQ ID NO: 11450 - DNA, 579 bp, Gossypium hirsutum
gattaggttaggccgaatgatattttaatttttaatgggccttttttgaatggttttgataattcattttctaatgggcatgataatgtcttaaaaaatcaatttgcagttaacacttcttctaacgttttatttgagtaggaaatgggaaaggagcattcgggtctttcagagtttaggaagggcaacttggttcttaataatcctacgttcgaaggatctaatgaattggtggtgaatttagatactaattttttagatcctaagcatcattcggcctaaaatgcctaaaagtatcaagaaaaatattttaattggttctaataaatctttttctgtatccagaggacgaggtttagagaataaatggtaacaatcgtgggggagcttcttttaatcgttcttttaaagacaagggtggtagattaaaaaatgctggaatttcccgaatcccattatcagatgctataagttccatggttaatcttgtaaattcgcaaggagcgcctagaccggatggtattggagggagcactacaggacagacaggtggtcctgattccacctctgcataatttg

SEQ ID NO: 11451 - DNA, 687 bp, Gossypium hirsutum
acatccagtccttacgatgaatgaggaattatagtttttatcaaataattctaatacactcaccaaccattgtcatatatatttataagacccaccctcgtacttaggagcgaaggcagtaattctagagacagaattaaaatttaatttttactaacaatttttaaggtgttaaattaaaattttatcatttttaagaggggttaaagtgtaattttacttttattaaattaaaattttaaaaaatttaaagggcgggctactaccaagtgccaacccctctagattcgcctctgcttatacttgtgatccaggccataaaaaaagaagttattaaattattttttatgaaaagtcgattattttattgaaattagaacttgaaagatacaatccacgaaagcaatcaaaaacttaaaaaggaagttaaaaaatagaaagcaaaataaacagaggcctcacacagaaaccctagccaacattaaccatcaagtgaaaatagcaagcacttgaggataaaagctagaggaataatgattaaataaattccccaaatcaaaatatccttaccttctttaaacatattcgaaacaacagtatttattaaattaaaattcaaaacaatttatatatcgatattacattaaataaataaaagctccttatcgagagaatagcaagcaaaac

SEQ ID NO: 11452 - DNA, 642 bp, Gossypium hirsutum
caattgaaatcatctccagagtggtaaatgcgagctttactggcttcaatatacctatgaaaacaacaaaaacataaatcccaagcatgggttgcagatctaaaaactggacatataacacaaaaataactacagctaatcagagtaaaaattataccagtattttttgcaaaaaacatacaaccatgacaggtatttcatgtatgtgtcaacagcacatactgatccaacttacaatagaattctagtaatgataacaataaaataacacacactatccaccaaatgaattttacaactttaaccttagaaaaaaagggcattatgtgctatataacaacagcataaacttcattacttttcagttttcatgatctgtaaatggcataaaatccagacctaatggcataaaacaatagaactacgttctattagcagaaagcagattacaaaagaatattcaacataccagtcggcaaaatcaccccaaaagaaatcatatatttctctcccaacgtccccaaagaaaaatttgttataactctcagtgacagcatcaattagcatatgcaattttgagacctgaaaagtgaacaacagtactcaagtaacttctgtaccattcagaacaagaataaatca

SEQ ID NO: 11453 - DNA, 524 bp, Gossypium hirsutum
ggatacaaaattttagaattaagtaaactatctcacaatttggtacacatcacattattatgtttttatcatctaaaaaatatcttttctaattattgattggggtaagaaaaatcaaggattaaagtgaaaaaacaataagaactaaaataatacacgaaaattgtcaaattttacttatttattttattgcccaaaattctaaatatgagttttgaaatgtaattttttaaatatgaatgttcaaaattattatagcaaattggttgacattatgaatggatcgaaattattttcaaaaattatgaatgaaaataattgtctttaatatttgtctaagaaacccaaatttcaaatcttagaacaatctttacaattaactaattaattaattttatctttcatcccaaaccaaactctttttttttcatcacttctttatcaaaacaaagaacaaataattaatttaattaattccaagtatttttttcctttacttttagcttaacatggaagattcggga

SEQ ID NO: 11454 - DNA, 593 bp, Gossypium hirsutum
aacatggaccctacatctatcacatgtacatatcttgaaatcttttcctgaaacgatgcatcttactatatagtgtgcaagaaattgctgttccaggtacttgtatatgggtaaataaattgctggtaacggcaatattgcactgaactaattggctcaatatcagtgacatttttcctggtacattcattatttttgctggtgaactgtagagcttgaagtgaatgtttcttcctgacaattccagtgttccggctgcataaaataattgggctttttttttaatattccatgcttaattgcataaagttcggagagggtccctgtatttggattgctcttccctggatgtgttgaaattccatacattataggtcaccctttggcagctctaggtggtagcaacatcaagcttcaatagtggaaacacttttaggcaaagtttatgagttattcattttacttctcgtacataggtttgctcatggtaagcttactcgtctaagcctgaagattcactcaaaatttaatttattaggtctatttaaaatatgaattgagctcaaaatttaaggttcaagatggctaacatg

SEQ ID NO: 11455 - DNA, 600 bp, Gossypium hirsutum
ttgatcatgtcacgtaaagtggtaattagtttggaaaacattgagtaattcgaatttttatcatccttaattagtttagtgtgaaaattcataaacatttaagttttgtctatttttatcttggaccattttgatttcaaatcattttaagcttgatttttttttctaatctttttaatcaagtcgggtttaaaataagtttgggtctaggtctttttggtttattctttcgattctagattcatttttcctcatctgaaataaaacgtgactatctaaagatctcattatagtgggattcttttaaatcaatgattgaaataaaaaggatgaaaaagaaacaccaatctaccgttaatcatgtcatgtaggatttgcattgagaaacgatagtttactttttaaccaattcaaccggtttcaacactaaagaaggactgatttccacataaaagcaatgtattcaataactgatttaataggttccaagttgtcagtacaaattcttagttctcatcattctatcttttaactgttagaaattttcatgtacgtatttcaaagaatttcacatatctcacatcctttagatgcacctac

SEQ ID NO: 11456 - DNA, 616 bp, Gossypium hirsutum
aattctcgcatcgaggcaaaagatgtccgtccaatccataggccggcgcttgatcgttctcatcttttgcggcaaacggtgttactgttaaaccccacggaacgccggaagcttcttgggagtcgggatcaatcgggaacctcgacaccgttgcacgaacggccatacttttccttcttcgtgtttctcagaaagtaatgtgattctttttggtggtgtagggctgtaggctaagctagtaagagggtgaagcagtgctgggcgtgcgtctacgttagcagaacttggtactcgtggaaatcgaaacttagaatataccacgttggattttgttaatgacgtggaggattttttcttcttcttttcctgtaaagaatttactcctatttttaatttgtttttgagtttttattggttaatttagttactctgcaatgttttggggtcggtcaggcttaaacaatacaaaaaaaaaatgaattttatctttaacgagtgcttaaatatctgccaaatatataaaacaaaaattcaaagatgttgcgaaaacatgaaaattaaaacataccaattcaaaccgctttaatttaattcaaaattttataaatacaatata

SEQ ID NO: 11457 - DNA, 680 bp, Gossypium hirsutum
aacaactccactgtcagaaaatggtgaagactagaacttgctatgtgatgtgctaaagagacaaatgatgggtgtatatatataagctgggagttgtacagtttcaaattggatgggtgggttcactttcttcagcaattgggcttcttgtcctacttcaaagtgaagcattgtttatcatgattgtactttaaaaaataatattcagataatgggtcaaagaaattactactcccttaaatatatattaatttgcgaaaaggaaattgtgaccaaattcttttccatataaaataggttaaaaaagaatagcaaatgttaaatttttatattgtcaaatttggaacaccattttctttttgtggtttgcgttaatggaacaaacgtggagcactcattattaaagccattagtccaattcaataagtatacgacccaaaacgagagccattttctttttggggctagcctaagtaaatgataaaagtaaaactacttgtattctaaatatgataaaaacttgcctattcatacacattactttggggctactataaaaaacgtgtaggcttgtcagttttttccttgaactgtggacacaaaaaggaccaggttgttttgctgattggccactccctacacaaagtaattcactttcttatgtaagcatcccaagccta

SEQ ID NO: 11458 - DNA, 634 bp, Gossypium hirsutum
aatcaactcggttctaaaaaaatttcaaacttctgctttcaggtcgacttgctaaaaaaactcattttactattcaaagttaatattttaaattttaaaaatacttgacccaagcctatcggattgggcggactactcgactcttggacaggtctaacattcacttaatttttactataaattgagttgaattaggtgaaaaacctttatttgatcacttttgtaaaagttgggttattatatgatgattttgaaagatttagtctttacgtgagaaattcctaaaagtttgggacctaaattgagcatttagcctaatattttaagcatgttgaggtattttaaatttttttaaaagaagtgttgtttgttcgggatcgacggactcttaacacatttagtattattcgagagagtttgtcccccaaactcgagtgcttgaagaaacatcggtggtgggttcacataataagaatgtctcactcaccattggttggatttagacctatactttataatctatggggcattgttgggcaagtatactaccacatgggctaaaagaggtcgattcttcaagcactctagttcttgatcgagtagggagacaaaccctcgaggacaataacacttt

SEQ ID NO: 11459 - DNA, 462 bp, Gossypium hirsutum
tttgatgtgtaaatagctatttgtgcttttcttgtttttggccataaacttcatcatctatattccttaaaacgtgccaccattacgagttgcgtgtaaagacaccaaatatgagctgccagagaggtatctttataattaattcggatctgttggctaaaatctttcgctataagttttatttaaaattgtattttaccttaaaataagggtgaagtcagaacaactttgtaggggtcgaataaaattttattttatttatagtttatctttttataatttttaaaaaattaaatcgaatttttataattttaaggggtcaaaatataattttatatttattaaattaaaattttaaaaaattttgaaaggtctaaataataaattttcattttaggggccaaagcccaggacccctgctagccccttagctttgcctctgcttgaaacataaaaaaaaaa

SEQ ID NO: 11460 - DNA, 790 bp, Gossypium hirsutum
  misc_feature (396)..(396): n is a, c, g, or t
  misc_feature (450)..(450): n is a, c, g, or t
  misc_feature (454)..(454): n is a, c, g, or t
  misc_feature (467)..(467): n is a, c, g, or t
ggtaattcaatctttcaatagttgaatcacactttttttttgggggttttacaggggagagaaaagggttttcaaatcaaaaagttccataatgtaaaatatattggttttgatgaataatccttctctgtttcatcattgatgtatattttattgtacatttttcgttttagctctgatttaagaaatactgcagatcttacacgcagtttcttgtatgcaatttgatgtgtaaatagctatttgtgcttttcttgtttttggccataaacttcatcatctatattccttaaaacgtgccaccattacgagttgcgtgtaaagacaccaaatatgagctgccagagaggtatctttataattaattcggatctgttggctaaaatctttcgctanaagttttatttaaaattgtattttaccttaaaataagggtgaagtcagaacaantttntaggggtcgaatnaaattttattttatttatagtttatctttttataatttttaaaaaattaaatcgaatttttataattttaaggggtcaaaatataattttatatttattaaattaaaattttaaaaaattttgaaaggtctaaataataaattttcattttaggggccaaagcccaggacccctgctagccccctagctttgcctctgcttgaaacatttgttaatgttaattataagaaaaattgacaaaacattataaattgacttatttgtttacattttgatcagcaaatcacaagattatgatcaaagaaaagattagatcaagcaaa

SEQ ID NO: 11461 - DNA, 490 bp, Gossypium hirsutum
ctggatgatgacagtaacattggcagtggagtggtgaattcttcctactttggaactccaacaataatcttcaggttgccatttctctttcatcttccggttgaactttaactttattagtatgctagtaccaacaaaagatttttatttggcactcggtagtgatgtttgatggatattgggtgcaaccagtcctgtagttctagttatacatttttcatgttgagcatagcttgctcttttagttttatcattgaaatgtgaattatgttgttctttaaatggaacttgacatttctccttgttagatttataatatatttgcggattttttagtgctaggttagcactctgaacacaaatttctttctccttgtgatgttaaaaccatattgcatcattcatttgtgacgagtaagaatgttgtctgaatgatatcgcgacatgtaggaatgtggaaatattttctttggggaagtgatcaggttaa

SEQ ID NO: 11462 - DNA, 462 bp, Gossypium hirsutum
  misc_feature (51)..(55): n is a, c, g, or t
aaacctcggatctctatctgaataattgacaaaggcactccataaagtctnnnnnttttagaaacatatagatcggccaatttctcaagggaatagttagtacacactgtgtaacaccccgcgcctgagaccgttgccggagtcgaacacgaggtgttaacaaacttaattcatttatttacacagttcattttaaaatttccagacaagctggctaactgcgtcactatcaccttaaaaatcatatctcgagttaaaaaacttgaaaactgattccgtgaattttccctgaaactagactcaaatattcatctacatatttttttatagaatttttggtcaggccaattagtaaaatttattagttaaagtctcccctgtttcagggttcgactactctgaccttcatgcattacgacttagatatctccctgtacagagcttcaatacttatgccgtttg

SEQ ID NO: 11463 - DNA, 673 bp, Gossypium hirsutum
gacgtttaccctagcaacaatttcatttgctgctttgttgagcctcttttatgtacctctattgtcttcttcaatccgaaatttgacaattaggtctttcattgatattttctttctcatttttggcaataaaatcaaaatgcaataaatccattgaacggcgggaatcaatcccgacacggattctattttactcatttttggaaataaaacaaaattttgaataaaatcattgaatggcaagaatcaatctcgaaacggattttattttactcatttttggaaataaataaaatttggaataaaattgttaaacggcgggaatcaatcccgaaaaagattttatttacctttaatttcccatttggaaataaaatcaaattaatggaataaaatccattgaacgacgggaataaattctgaaacggattttatttacttttaatttggaaacaaaatcgaatagaatttgttaaacggcatgaaaagaatcccgaaatagattttattaattttaatatttatttggaaataaaaaaataatagaggaaaaagaaatctgttgaatgatgggaaaatcccaaaacagatttctttaatttaaaaataaaaaaatttattttcgaaaaatatatattttttatattttccccttagtgtcttgttcgtctcg

SEQ ID NO: 11464 - DNA, 544 bp, Gossypium hirsutum
ggagagtttgcattgattataggaagctaaatgatgccacaagaaaagatcacttcccccttccattcattgaccaaatgttggaaagattgtcaggacacatgtactactgctttttagacggactctctggatatttttaaatcccaatagctcctgaagatcaagaaaagacgacatttacatgtccatatggtacgtttgcttatcgtagaatgccttttggattatgtaatgctcctgctacttttcagcgttgcatgatggccacctttgatgaactcgtagaagacatcatggagttatttatgaatgatttctcagttttgggtaattctttccatctttgccttaaaaattgaaaacaagtcttaataagatgtgaggagacaaatcttgtacttaaatgggaaaaatgtcattttatggctcaagaaggtattgtgttaggatataaaatttctagtaaagggattgaggttgataaatctaaaattgaagtcattgagaaactacctcctcccaattccggttaaagctatgg

SEQ ID NO: 11465 - DNA, 661 bp, Gossypium hirsutum
caattcctttttccaataaaaatgctttccttgtacaatattaacactgcttcaacactaccgaatcttattcatgtttctccctagccgaaggcttaaaactcatttattaccttccaaaattttcagagttgattggaaattagaattaacaaatattttttttgaaaacaaagaaaccaaagagtatcataacttgtaattgcactgatcatatgctgctaaatctattattgttacatggtacatagttgcatattctatttcattatctctttgcatccgtccccatcacacttcattctaccctgctacattttaattattttactatttattattaatatttttagttttttaattcaagtaaatatttaataaaaaatttaaacaagaaatatatgaattttctataacatattattttattttattttttaataattgtatatatatgacataataaaataataattttatatacatacctacattctcaaaaggaaaagaaaaaattcaccaattctgaattgaagcgtactagaattttaccttgtaagcctaagcttgtcggttgtaaagttgggaaaggataaccaagagaatcttatctttgacacgtgtggcaatcatattcgatcatagaacggaactagttgac

SEQ ID NO: 11466 - DNA, 640 bp, Gossypium hirsutum
atttgtgtcgtttctctattacaaggggaagcctatctatggtgggaatcagtggttcgacatttaccgaaagatcaaataatgtgggatctgtttcagaaggaatttcaaaagaaatatgttagagagatgtatattgaagacaagaaacaagagtttttaatgctacaacaaggtgacatgtcagtaatagattatgagaggaattcttgagactcagtagatacgtctaagaatttataccaactgaagaagacaattgtaaaagattcttacggggattgcgtgacgagatcaaggtaaaattggtatctcaccgtattactgagttcgtagatttaattgagtgagctaaaatggtagagcaagtgttgggcctcaacaaaaagactgaaaatgtcagactaaccgggaaacgtgcgggaactatcagcttaaatcttcagtcaaaaagatcaaaggaatctcaaggtagatggagacccaattatagatcggataacggtggtaaaagtagagggaaacatatgacaatatctactagtaacgtacgaggtccatctcgagaaatagaaattccaaattgtcaacactgtgggaagaaacatagaggggaatgttggaaattgactaggggttg

SEQ ID NO: 11467 - DNA, 662 bp, Gossypium hirsutum
aaataccatggaagagttcccttaagctggtttttcatatttttacttcaattaagttcaattcttgattatttcttaaaatttttgtgtttttgtgacttttacaactaggtccacttgttgaattcattagtttttgattatatgaaagaaattgaaagttcatatgaatatgtgttggaattatatgattatttggcatggaattagagctttaaattgtttatatgctgattttattgaaagaattgaatagaaagtgaatgtttgggacctaattgtaaaagagtttgaagttagagttttatatagaaattctgaatttcaatagttatgaaataacttataatgtgtaggaaaagtataaattgagaaaattatcttagttgagggtgttaattgagtaaggactgaattgtatgaattgtgaagtttggggcaaattggaaatcaacattttgcactaaaactgttttggacagcaacagtagtctaactttgaaaaatcactaaaaattgtagaaatggaattagaggatgaataaaatatgaaattaaaacttattgagtctagtttcttatagaagaaatgatgtaagcaatagaattgtaaatcatgagatatggtaaattttgtgagagaagttcagaatgatttcagg

SEQ ID NO: 11468 - DNA, 280 bp, Gossypium hirsutum
ttttctgagtcctccccaaattccgaatttcagactttgatcgcgataataccttgtttctccattaaaggtctctcaatcagctatctcgccttctgccttgttcacttcgcccatttcctctccactcattcgtgtcctcttaatcttatatcacaatcagacccgaggctaccaccactattccaacaccttcctttgcctttaacccacccttactcccactcctctactttgcccgtcttcaatagcccaactttagggtatgttgttttttttt

SEQ ID NO: 11469 - DNA, 650 bp, Gossypium hirsutum
  misc_feature (118)..(119): n is a, c, g, or t
  misc_feature (597)..(598): n is a, c, g, or t
gttagttcctttagtagcctctgtcaaaagtcacaattatatttcaatagttgaaataacaagattctttttaaggcaatttaattttgaaatcttgttaaaatttttaatcagaaannagaattttttttaaacaataacaaaaattctttctgtttgttcaaataacaaaaattttcatagctaaataaaagtgaactctaattaataaaaaattcgagttaaattttaattttaagatttattgtttgatttaataaaagagttaacttttataatgcgaactctatgttggccgtttgataaaaaactaaaaaggcaataaaaggtaacctttgaggatgccttataaaaaaattggaaaatctgtaattaaacttctacaagctcaatcggttaccactttaaagaggacagagaaaactcacccaaactctatgtttaatgcaattttttttatatttgagaaatgtttaaagcatactctgttttgttttctctcaatttatcaactatttgagataaaatcttttattttttttaaaaaaacttctcaagttatccactattttaaaaaaaaacccttttatttctctnntttcattcacttgttaaacacacaagcaccagagaaatcaaaaccaacccta

SEQ ID NO: 11470 - DNA, 454 bp, Gossypium hirsutum
  misc_feature (61)..(61): n is a, c, g, or t
  misc_feature (63)..(63): n is a, c, g, or t
  misc_feature (65)..(65): n is a, c, g, or t
aaagtggatagaagtagctgtcaaacatttatatgaaactcaattaaatgtttatttattncnangaaaggtttcgaatatcaggtaaaatttttaccaaacttatatggaacaaagggcaagatgaataatgatattgaaaagtttaaaaaattgatagacgtcatcataagttacccgtttagatcagataagctagattatgattgtttcaaagttattagttaagtatgccaataatgatgacttattcaggtgtcatcaaatcgtatgtcatgaaaagaaatggctgtttgcgtttgaagactaattaaatgtaatggaattttttgacaaataaaaaaatgattgggaacgtagacattcaaagaggagtatggctagttggtttagttatattaggagggattttgtaaagatattttaaaatgttacccgtatttgggctaaaaaa

SEQ ID NO: 11471 - DNA, 355 bp, Gossypium hirsutum
tttagttgatatgtttttaatttcaagagtcattctatatatccgatttaaaaagcactgttattatttggcctgaatcagaatttgaatatttgttgaatattaaaatgaaataatattgaaatttaacaaaagttcattgctagtgttattaatgtgattttaattttttggcttaaatgcaaaattcaaactattctgtttttcctatttagatacttagaagtttttttcagggttaaaatgatatataaattattaattttttcttatttaccccaaaacacgatactaaccaataagaacatgatacatgacaagttcttaaaggacgttgtatacttttttttttttt

SEQ ID NO: 11472 - DNA, 425 bp, Gossypium hirsutum
cttcagtctgacgctctcataaaattaaatatacttagtaaagaagtgaatcaataggccttgtgactgtccagattcactgcccattcttttcattttgtacgctactcacctctcctaacaagtcatgcttcctttcccatcctcattttcactttaccactaccaatttacgtggttgacattcataaaatgtaattaataaattacaagtggacccgctattctaacaaaatcatacatttctcgagaatcacagtaaaatttaacaaatcggaactagaaacgtctttaccagttttggttatatgcaaaacagtacacaactcttactaagttgacagtaaatttcttgcatcggaaacgcaatgtacaaatcagatcagtacattctcgaccaaggtctgctgctacatggagtagct

SEQ ID NO: 11473 - DNA, 569 bp, Gossypium hirsutum
atttagtttatgtactattattcttaataatttagtctatttatttttcagatttcaaatttcagatccaattgttagtgtgttattttttttaaataacgttgtaatgaacctgaatttaacaaaataattctatccgtgttaataattggacatgaatttggaaatctaaaaagtagaggagttaaattcttaaaaataaaagcataatgactaaattccaaatttgggaagagtagaaagacttatgtcgtattttaaccataaaaaaaatagaaatctaaagcatatgagaatttgggtcatgctattaaatcttcaaatggaaaccacattcggaatgtcaatttgaggggttatgagcagtttaagaattatattaaaaaaaaaattggttaaactttgttgttagtttctgtacaatgcgtaagttgtagatttagtttctcaatagatttaacgattatcatttgtgttaaaatcgaaaatttaaaaaaaaataaagagactaaaaatgattaaattggaaaacacaaactaaatctacaacttgacccatagtacaaaaa

SEQ ID NO: 11474 - DNA, 633 bp, Gossypium hirsutum
gtaacttgggttttttaatttgggctagtattgtaatgtgaactggactattatttgggttttattattattatttgttttgattctttggccccgggcaaaaatgggtctttccaggaaccttttctctttttctcattactacttatggggttaggattttaaaacaaatttaatgggcttcgctactcacacatcccatttagttttatattttaacatttatattcatatttaattctaattattattattgttaaaattcttcaattaaatttattgatgtgaaattttaaaattataaaaattcacttcgcaataaaataataacgtggaacacacttttggagggatgagaaaaaatatgggcaaatgagtatgttttaggatcacgtatatggcttgcctgcatgtaagaaaatgatagctgctaaaaatgcctgcctttttacactttagcctcgcattcctacattttctgctttttgctttcgcacttaacagacaatggtcaaaccatgttattcttttatgtaatcaatacttcatatatttatgtatgccttcgtccctgttcaggcaaattctttggtttccactttccaaccatggcagggcctgggcataaccttt

SEQ ID NO: 11475 - DNA, 595 bp, Gossypium hirsutum
tcatctgtacacacggtatcggccttctctaaattccatgtaatccaatcggcaatgggtaaagagaaaaaaacgagcttgcatcgcctgaggaacaacaacaaacccagatgctcttggcaaagtggcaataacgtaccacatgtatgctactctctggttcaactctacataaggggcaaaggtcgacatgggtcatcaaccgccgaggtcgttccttatttgtcagaattcgattcctataaagcagccacataaattgtttaacccttttacggactcccattcttccctataatagaccaacgcgcatccttccacccaagcacatttttgtgcaaaaattaaactgtaatttttctgaggctaaaaatataattttattattttaatagtttatatttttataaattttaaagtattaaattaaatttttatcatttttagggaagtcaaagtataattgtgtaattttacctttactaaaattttagggaatcaggatctatctacacacaagcacaattggttcttataaggagtagccatcgaatacctacttgtctgggaccatttccaagctaagttatcctca

SEQ ID NO: 11476 - DNA, 469 bp, Gossypium hirsutum
ctgtttcttcgtctgtgtgcatcacccacagcccttgcctcagcctgatacacgtcatagacaacttatttaatggcacatcagaatcaaaatattcagacaacccgacagcacaattatcttaacagtatcagatatcaaagcgaccacaacaaagtaatctgataatgattttcgatgaacctaataaaagcaacacaataaaaaaaaatcaacaagttttccaaacaataaaggattagtttgattggttctattgctacttgcattttactattcgcatttgtaaaaagcttctagaatgaaaaaaagtctaaataaaattcaaaagttggttaaaaatgaaaaatatagtaaaatttagtaccatttctaaaatagttctatacaaaaagtaaaaacattaacttctttattggatttcttaattgtttaagcatattgttggggttcctatccaatgtgtcat

SEQ ID NO: 11477 - DNA, 670 bp, Gossypium hirsutum
tggtttgtgtactaagactaagcgaattagctatgagatatatgtcgtatttaagtattagttgttgtccgtaactaggttgactcttaattctacagaattaagaattagatttagccaatgctttttctgctgctatttttgcaatacgagattgtctttcaacatgttttcattattaattttgtaaatcgatactgaaaatatacaaacaatatcccacattcttttattattataactaattctttttttacatgcattctatgtgaatataaactttattatgatttgattaattactattgtcgaaactatttttaaattaaaaaaaaaactaaaaaaacgatggagaccgactttttgaaaacaaaatatggagtcgccaccaatcctttttgtttaggtgtgattggatcacctaataaagcatttcattccatttaaatcaattttggcctacgtaaatatgaaaaaacgggttcgggagtcggttacgtatgaggaaggattagcaccctcactacgcccaaaattggtaccaaatcgattaaatactgtccttatgtctgagatttaaaaaagtttttgaaatgtggttccttttataaacatttgaatagcccaagttggtcgtcaaaattctcttggttcataggaatacaacatc

SEQ ID NO: 11478 - DNA, 368 bp, Gossypium hirsutum
aggagaatacttagcagaatttttgaactgctttcaaattctctctgtcgaaactgtttttttgaaaacaaaaatttaattgtcgactttaaaaataaaattggggtcgccaccgatcctttattaaggtgtgatcggctcaccttaaaaattatgttggtctacgaattttgagaaaacgagttcggaagtctgttacgcacgaggaagggttagcaccctcgtaacgcccaaaatcggtaccaaattgattatttgatgtctttgtgtcaaaagttaaaaagattttaaaataagcttgaatgatgaaatttgcaaaaggataaccaatcgttcaagtcatgtaaagaaatcaagtcccaatacgt

SEQ ID NO: 11479 - DNA, 356 bp, Gossypium hirsutum
  misc_feature (346)..(346): n is a, c, g, or t
cataaattttaggaatcgaattagaagatgaaaaaaatattaaattaaagcttattgcgtttagtttctcatagaagaaacggcataagcaatagatctgtaaatcatgagatatattgaattttgtgagacaatgttagaatgaattagagttcccctgttctgacttttaaaaatcataaaaaaattaataaaaataattatgggcttaaatttatatgtatagaattatgaattagtctattttcaagataaataaacgagaacatcatctaaattctttatgaagagataattaatttttagtgaagcaatcccaaagtttcttttttttttcaaaaaaaanaaaaaaaaaa

SEQ ID NO: 11480 - DNA, 625 bp, Gossypium hirsutum
  misc_feature (613)..(613): n is a, c, g, or t
ggtggattagtacccctcgataagtagaagaacataccttagatcagagaagaaagttgtttgaattttagttcacaaattaatgacattcaaaattgtttcatgaaaaaaaattgaactacaaaatagaaggggaaggaaagttttcaattggtacagacggtatgaacagagaaagccatacaacaacgattttaacaacccaatgacgtaaataaaactttcaaataattcattgaccagaacataaatttactaataatttaataactttcaacgtgatttaccctaatatttattatcaccaatatgccacgatagcataaacttcaattttggtccttcttaactttgtctcaaaatgaaggttaaagtcacccttagacttggaccaaaacgggaacaagaaggccgggtagccggagcaaatcgaggcctttctcacggctaaggaactaccatttttagggtaataaattgagattgattcaatgtatattatatacatctaagtttgaaccccccaaaaaataatacatataagaatttatgtatgtatttgactttcaaaccttttattctggcatacatgtgaagttgactacaccaaagngatctaaaagat

SEQ ID NO: 11481 - DNA, 658 bp, Gossypium hirsutum
tatccgatcagtaacataatgcaaaaaatataatttttaaacaatctttaaaaacaatgacctttaccttaaactattgttttaaaaatttacacattattcatatgaaattttaaaaatttttataacatacagtattagaatattttttataatgtttttacatgtttatggaacgtaaatatattataacaatatttttgagataatataaattcatttttgacaatattacttaaaaataaaatattaatccatacaactttccttcttctctactgaaattctattactctaaaaggaaaaaagaatgcaataagtaaatctgaatatacggactcctatcaaaacgtttcaatactttattagccacatgaaaagcaaaaattgcaaacaaaggcagaccatattttcatacctcccaatacaccagtagtctcactcatcctcctcctcctcttcttcttcagcctctctcaaccactttaaaaggggaaagatgagcaaatattaacaatctccatttcaccgagtggcaaatagaaaagattaaagttccttttttacctgtataaatttttctgaacgcttcagaaacactttatccgattcatctgctccttccttctcatccgcccaccttagaatagcatcatct

SEQ ID NO: 11482 - DNA, 522 bp, Gossypium hirsutum
ggatactcacgagctcggactcaatatcctagtgacatgtcacttgtattctaatctattcccaaggttcaaacgggctttttcctcgatcacacatctttgccgtcttccacggaatatcgaaaccgatactcggtagcaattcatatttaacaagtagcacacataatttgcatattactcaataataaccacaaagcataatatttcatgatattaatcatcatatcatataaataacattaaattacttaaaatgacaattatgttactacatttacacctgaacttacctcggtacaaaataaaaaaattttgcaatttagtccacaatcttttcctttccccgatcaaggtcgattccacgtctttcttggttatggagcttggaagcttgaaacaaaccctagctatggagaacccttgaaatttcgtcctaatgaagaaaatggacatattttgccatctttttcctttttttaaaccttttaattacaaaatgagaaaaatacccttcattat

SEQ ID NO: 11483 - DNA, 650 bp, Gossypium hirsutum
ccataatgtacaaaggtgctgagggtctccacatgttgtaaattttattctgcaaaatcgaaaatccaatgttgcgacctaggagttttaaaatcacaatattatccataccctaaatgatgatttgatgaatctggtccgagaaggttatagaaggcacgccattcacaaatgtcttctgaatgtcctcttccaaaatatcaatagcttctttttctttcgagcctgtgaagacatcctctgctgaatggccgacgagcttatctctccaagaggtaggttgaacagaggacagatcaatcatcatgctgttactcgtctcctcctctttatctctgaatctaacctttttaggaatcaactcctccacaatggatttcccagagccagaattttcacagagagaatccattccaaataaattaattgttggttttgataatactaagtcatagcgattcatcacgatttagctattgaactatatttgttttcccactttagtacttaaactttttttttctattttggtacttaaactttgcaccattacccattttggtacctaacaaccaaaaacattaaaatagagttggccaatcaaaatgtgtcatgttaccaatgacattgtaggttgatcgttgatgtgg

SEQ ID NO: 11484 - DNA, 576 bp, Gossypium hirsutum
  misc_feature (62)..(62): n is a, c, g, or t
  misc_feature (64)..(65): n is a, c, g, or t
  misc_feature (516)..(523): n is a, c, g, or t
  misc_feature (525)..(536): n is a, c, g, or t
  misc_feature (538)..(538): n is a, c, g, or t
taagtagttcaattaaacgtgataaacttgggagaaatattccttcaattaacaacgatgcntnnaacaatgtcaaagtgagatgttgttgactgggaaacagggatgcctactagattctttctaacctggggccgggggcacaatgagatcaacactgtctgattcacttcacttatggcttcgctggaaaattcattttgcacctatactatttacatacctgtcactgcatttctataattttaatccttaaactgggagaataatcacagtcaagcaccattttgattttgtgagatgcaaccagcaaagatggcctcactcatcttcaccaccttctttggaatatactaggtacatcatcaaggctgacaaacaaaactatggtactaatttccaggtaaaaaaaaaaaaaacccctccccctttagggacaaatttaggggaagtttttgtttgggccattttaaccttaaaatttaaaaaatttttttttatttatcccccaattgnnnnnnnnannnnnnnnnnnnantaaaagaaaaggcaagacgattttcttttactaaaatg

SEQ ID NO: 11485 - DNA, 579 bp, Gossypium hirsutum
  misc_feature (557)..(561): n is a, c, g, or t
agggatgtgaatgatgtgttcattaagtgaccaggatgtggtaaggttataaacaagtaagttatacatgaggatgattttatggtgaccttgtgatcatgggcctatacttgtgatgtatgaaatgtggtgaaaatgatttgtgatatgtatgttaaaatgaggttaatacaaagaaagtgtgaaagagtgaattagcaataaaactgttttggacagtagcagtgacgtgattttgaaaaatcaccaaaaatagtataaattgaatcagagactgaatgagatatcaaattaaatcttaatgagtctattttcatataaaagaaacatagaaagaaaaggagttctatattttgagatatttatgtttttgtgagactgattcagaatgattacgtgatcccctgttctgactttggaaaatcacaaaaatttggaaaaaaataattagaggctcaaaattatatttttaaaatccataatgagtctattttcaagataaatcaacaaaaacattatccgagttctgtactgtgagataattattttttagtgannnnnggtcaaaactgtcaaaaa

SEQ ID NO: 11486 - DNA, 701 bp, Gossypium hirsutum
cttccctagcttcaccgctttattttctcatatttttcatgtctattcttttctctacaataattttcatcacattctcttcactaacatgttaagaatacaaaattttatataagcaaactctagtttagcattattttcttgctttttcaacaatatcaaacttaaaattaaaataaaatatttatattcttaccttatcccattaattataagtccttagcttgattttttttctctcctccaattttaattttcttgaatccaaggtaatagtcatacttacaaaatggtgaattttgatttcgagtaaaaaatggtgaattttgatgaaaataactaaatcaatattttcccatgaatggtgaattgcgggagattgatggtgaatgaaagaaatctatacaacttttctattaaaatatctctattaattaattaaatattctaaaataaaattataataaaacatttcaaccaatcatattttaacaccaaataatccttaattattatcatgataatagatgatggttattctaattgagaaatgattattttgctcctcacgattttctacaatttcaccattgagtcactcttccctttaggaaaaattataatttagttcctcttatttctccacttattcaatttagtctttatacaccaatttatttcacatgttggtccctttcacc

SEQ ID NO: 11487 - DNA, 664 bp, Gossypium hirsutum
aggtagaagaagcagaaatggagacacagtgttgattctttgccaagtcattcacataattcgtagagaatccctcgagcctagagtaacaaacttcaaaatgaagaatttgtaacatacactaccaagcaacaaaatttggggaatgctaacaagaatcttaatattcaaagcagagaatgggataccatcaggggtgaaaacttaataggttggatttgttcagcacaacaaagggaataaatcatatttgtcaaaatatcattaaaacaagaaaacttttcacggacatcccactctgaattcaccatcagacgtttaggctaaggctgtcatgagacaaaattgcatgccaaataagctagctcattctgggtttgggtagttctccacaagtccagaaacaccataaaataaaagttaaaaataaaaataaaaaatcaatgtgtactaatatgtttgtaataactatgaatcttcttcctaaaacatcaagccccagttagaccacacgaacttatccaggaccattcaagcttgagcttcaggttttacaccattaagatctatgtttggtcaaccgagctaagggcttaaaagattacagatacaaaatgatgcaatcatagttttttacgttactaactcttccacaattctcccg

SEQ ID NO: 11488 - DNA, 635 bp, Gossypium hirsutum
cattagccatgaaaatggcctcagccgctaatagaaatagagtttgtgtgacgaaacccaaggactatcaagcttcgaccaacgaggaacttaagcggcggcggccccatctatgcccctcaaaaaaataataatggctaataggagatacaattgagaaagaattatcacttttaaaaggaatatatataatgataaagctctcacaattacagaataacacctaaaagaaaaataagaattgaacctacaagtgtttactagtgaaagagaataacaataagaaataattgaattttgttcttaatcttttgagcttgtttattatattcttgagagtgtccttgaaccatatttgtacctttttattggtttttagatgtttggaactattggaaggagtttttaggtgttggaagcattaattttacacatttaatggagtttgcaagcttatgtctcgagacaaagaaggggtgtctttagacattatgaacaaaatatgaccgttagagcattaagtctcaagtcaaaacatgcatgtctcgggacatcaagggtacttcgatggtttatgtctcaagaaaaacaagcttttacctcgagacatggcttgttgtctcgagacaatgctt

SEQ ID NO: 11489 - DNA, 605 bp, Gossypium hirsutum
  misc_feature (59)..(62): n is a, c, g, or t
  misc_feature (64)..(64): n is a, c, g, or t
  misc_feature (477)..(477): n is a, c, g, or t
  misc_feature (505)..(505): n is a, c, g, or t
tctgattacttggtaacgttagaatgagcatgaaaccttagcaataggtaataattacnnnntnacccttatgcatgcaaaattacgattttacccctagggttatttttttctaaaaagcatgatgttctgtttctgtatacgtatgccatgacatattatttctgttgcatgggacatgggtttatattgatggaggaagcgttctggcaccccccctgcaatctgggggcccccccacatatatctgttctggggacttccccacaaaatctggcaccccccctgcaatctgggggcttccccacatatatatattttttttggtggcctagccacaaaatctgtatctggggactcccccccaaaatctggcagcccccctgcaatttttttggggggtagcggttgggtgggtcgagtagtctccccacatggtgtaaggctggtacgggggggttatggatggctctgggnggggatttccccccccaaaaaaaatttnttctgtacccccgaggggcctatgggtttctttttaatttttgtacggggccaaggcccaaaaaaatctaaccctaaggttttatcttttttgccccagg

SEQ ID NO: 11490 - DNA, 686 bp, Gossypium hirsutum
  misc_feature (444)..(445): n is a, c, g, or t
  misc_feature (448)..(448): n is a, c, g, or t
  misc_feature (451)..(460): n is a, c, g, or t
  misc_feature (469)..(469): n is a, c, g, or t
  misc_feature (472)..(472): n is a, c, g, or t
  misc_feature (499)..(499): n is a, c, g, or t
  misc_feature (524)..(524): n is a, c, g, or t
  misc_feature (526)..(526): n is a, c, g, or t
  misc_feature (533)..(534): n is a, c, g, or t
  misc_feature (562)..(571): n is a, c, g, or t
  misc_feature (577)..(579): n is a, c, g, or t
  misc_feature (586)..(589): n is a, c, g, or t
  misc_feature (592)..(593): n is a, c, g, or t
  misc_feature (602)..(604): n is a, c, g, or t
  misc_feature (617)..(623): n is a, c, g, or t
  misc_feature (631)..(634): n is a, c, g, or t
  misc_feature (636)..(639): n is a, c, g, or t
  misc_feature (649)..(653): n is a, c, g, or t
  misc_feature (660)..(660): n is a, c, g, or t
  misc_feature (672)..(683): n is a, c, g, or t
gaacgctctggcctatttcacaaaactcagatatcttataaaatacaaaacctttacctgtttttcttattccatatgaaaatagacacaatgagctttaatttcatatattattcaccatcaacccatgtctctacaatttcttgtgatttttcaaaatcacattatttctgatacttgaatctgtttttaagttactttcacatttttcttagttttcatgtgatagttactacttaatcatacatactattaaacatgtatatcatccgccattctattagttaatcactagcaagtatttacacatcattcattgatcatatcatatcaaaagaaaccaagttcctatacatgccatacacaaaacgaaacgtctaactataccaatgtgatttcttcgatagtgtgatcagttttccacatttccttccaacccaaaannaantgnnnnnnnnnnttttgtaanagnaaaactttccctttggggaagggcatntatagaaactgggtttcttttaaangnaaagaannaatgaagaagggtgaaaatccttgcaannnnnnnnnnaaaaannnggcgaannnnatnnatgtttaannnaatgaataattannnnnnnattattcnnnntnnnncaaaaaaaannnnnaaagtancttaaaaataannnnnnnnnnnnaaa

SEQ ID NO: 11491 - DNA, 628 bp, Gossypium hirsutum
ttgaatggaagaatggctagatggcaaattctactttctgaatttggcataatctacgtgagtcaaaaagtcgtaaaagggagtgcaataggagattttctagccagtcgagctttagaaaattatgagcccttaaattttgattttcctaatgaggagataatgtatgtggcagctactaaagaggacactacaaaagattactcttggaaattgaatgttgatggagccttgaacactgtgggtaatgggattggagcggtcttggtgtcctcgggtggagatcattatccattcacatgtaaattggattttgattgcacgaataatatggcagagtatgaagcatgtatcacggggctccgggcagctatagagcgcaagatcaagtcactagaagtatatgtagattctgcactggtaatttaccaacttcaaggtgaatgggagacaagagattccaaattaatcaattatagaaggttggtgttggggtcagttgaagaatttgataatattaccttcagttatctcccgcgtgatgaaaactaaatggcagatgctttggctactttggcttccataatcaaagtaaacagacaagaagatgtgaagcccattcagatga

SEQ ID NO: 11492 - DNA, 420 bp, Gossypium hirsutum
atttgaaaggaattggatccttgggtttaatcgtagaatggggaaatatttggtattcgaaactgaattgtagggtattctcgatggtgtggcgttagtacaaagaaggcaacaagacaggatattggtacagacaaataatatgaaagttattagagctatcaaggaagcattgtcgaagtggtcaaattcaacaataatcaggcggacaactcagcttttgcaaagtgtagagaattggtcaattaaacatgtccttaaaagaagaaaatgctgaagttgatcgtattgccaagttggcctttgataaaggggaaagcttacaattatatatagattctccttttgactctttctagctttttataaaatattttaatttattcaacaaatatatatatgccaaataaacgtaaaaga

SEQ ID NO: 11493 - DNA, 495 bp, Gossypium hirsutum
tacacatgccattcaagggttagcatgtacccaatttttaaggagaaaactaaaatattatgaaataataattttaaatttttaagagaatataaaaaaattaatcaactttaaataccgctatcatgcttcatggacattttaatttattttgaattatgtattgatttaaagagaattgtggttaaaatttttgtcacacggatacaaactatgttacacccttctccgtcatattgtataaaaaataaaactcattttaaggtataaacgagaaaaaaatggatttaatattataatatttacattttaaagtatttgtaaataaagtgttgatggtaaaagtaccagaaaaacccttatacttaggagcggattgaatttcaattaccctttatacatttcaaaatatgtaaattagttcatcctaaatgacaacttttatatacaatacgacatatcccttggtctagtacttagagtgattaatagctt

SEQ ID NO: 11494 - DNA, 414 bp, Gossypium hirsutum
ctagggtctaatgaagctagggttttaattacgtaatttttttaattatttgttatatttatcttttttgaattatattgttaattattttgattatacttatattttattttttcaggagaataattgaagaaaaaaagagtttaaagtttatttgtggcaagttttttttggattagactttcaacgcaacactattttagtattttggccataatttgagttatagaactccattttgggcctataatattccaatttgaaggtaattgaaagctttaattcaagttatttcacaaatcaaacccacaaaacatcaataaggtgtccaaaaatggtcaaaagtttgacacgaaaatatgtcaaaaagtcaacatttttcttaagatcgaaagatacctagacatagtcaac

SEQ ID NO: 11495 - DNA, 593 bp, Gossypium hirsutum
caaccaaacccttaatgggtcgatactattttcaaatcgagttgaaattttgtcatccaactttttcaagagctcaaacctaagacaagatgtgcaaagcaataatgcctcgccggattaactcgatagggttgactcaaatatatgaatgtgagatatggataacgtacttttgttgagttgtttttcctccatcaatgggttgacctaatgatgacctgaaacttttgatgatgagatgaacggcacagcttcacttgaggagtgtacgagagaattgtcagaacaaatgacgacgacgacgaacaaaaagagcagccatttaacaactcttctcttcatgttttaaaatataatatctcaagtccttggtggctcttgcaaattttaatttttagccacttgttgcttattttgctttggactgattattataggcattcataaaggaaaaattaaataatttttttttcattaaaagtcaaaagagattattctctttgtttttcattaaatcaaggaataatatatatacctcaagaaacttttaaattcacacacatggagatgggataattctatggttggaaacc

SEQ ID NO: 11496 - DNA, 641 bp, Gossypium hirsutum
gtgcttacctatcccaacacgagttccgacagttaattcggagaaatcaatattcctttcagtgtaaggtaataaagggttattgttgaacattggagattcaagaattttattccatgttgctaccatttcatcatttgctacatagcctgaaactccaattctctctgaagttcgactcctatagccatgtggagatgatggcagtgatatagctctttgagaatctatttcgtccctagaaaggttatacaatgcagagctcccgccagcaattttattgtggccatcaagatggaagtttgatgcctaagagaacaagaagaaaacttcaatgacctattaattgtattcaaccacatcctctcaaaaggaaagcatgttccagttttctgttttaaagccttgccactaaacaaagattttgtggaattaagacaacaaaaagaaaataacaaaagttaatgtacctattttatggcaatttgcatataatctgtgcatagattagttctattgcaatcaattcttttatggaatattcgcactgtgcaaatggtaacaaaacagagtacaactttcttattttaaaaccagtagcacaaatttatgatattagggaaataaacaagtgcaagagg

SEQ ID NO: 11497 - DNA, 660 bp, Gossypium hirsutum
atgttaatgactacgctatttcattatatccaaaacataaagttcgtgtctatattcaactcttactttttttacaagtaaaattacaacattgttaagtgattaaacaatttaattaattgtattaacaattttaattagaattaatcattataaatattgaattgatttttctttttgaagtaatgtttgtttatgtctataatcactcctggcttttaaatcggattcgaactctcttctttttagttgttgcaatagcaatgatatcaattgaacaaaagctcaatcggtctgaattgaataaattaactcaactctaattaaattgtaacaaacgcctccaaactattattttcattctaaattggtccaaaaactttaaaactttctaattacatcctacaaactatcaatattatatcaatcaagtccctccattactaaaaccgttaatttccccattaagtgacacatcatatcttttgtggcataatttaaaatttttttaaaaaaagttatgctacatgggatctaatgttcacctaacaatgaaactaacaatttgaataacgaaaaaagcttgattgatataacctcaataattcaaagagatgtaattaggacattttaaagttcaaagatcaaattaaaatgtaa

SEQ ID NO: 11498 - DNA, 602 bp, Gossypium hirsutum
gtgagggtgttgggactacagatattatcatagtcggtgctggtgttgccggtgctgctcttgattctcttggaaaggtcccaattttttatcacctttattttaattttatagaattaagttccgatcgacttaggataataatagtaatgaactctaaaaagatcatggagccatatgcatgacgctcggaaatagtcttcttcaatatttttatagtactaaaaataatattaaaaaatttattcaactataataacacaaagagtattttctgctataaaaattgttaaaataaggcttcacaataaaatggaggatgagttttttacagataattttattatttatattgagagagattgttaaaattttttatttagactttataatatttaatgattttatttccttgaaagaacattgtgcacaattttaagtaaacatactcatggcccgacctaactcgaaagtctactcgaaaagtgggagggtttgggtaaaaatataaattaagaaaatgagcttgggaaaaaatgcccttttaaaaaacaggttgagtcttcggtaaggttttttcggcccggcccaaatatgtattt

SEQ ID NO: 11499 - DNA, 626 bp, Gossypium hirsutum
atgttccgtattctggaaagggtcacagggaccagtacgggtgctgtggactgtgggtcgatttcagaacgactccggtcgaatggagcgaaaatattcaggggtatttttggggtagcccctaatgtggctaaatactgattgaaagccacagagagaataatggatgacctcgactgtacttctgaacaaaaactaaaaggtacagtgtctttactgcgagataaagcctatcagtggtagtttaccatgagagaaggtactcgggccgaccggttaacgtgggatttatttaaggcgacattccaaggaaagtatgtgggcacaagttatgtggacacctaaagaaatgaatttttgagtttaatccaagggaataaaattatggcagaatatgaggcagagtgatacgagtcataaaggcccaacccaagttcaagaaagtgatgggctcaaattgccacaaggcccaataacgagatcaaaggcccgacaaatgcagtccaaactaaatgggaccattcaagagtttgttagcaaggccttagatgcatacacgagagaacaagaaaatcaagattcactttcttgttttcaagaaaatcaagaaaccgaatcttgactca

SEQ ID NO: 11500 - DNA, 629 bp, Gossypium hirsutum
ctctttttgcttgtaaacaacttttaatacctcttcttaagataacatatccaagcctgtgatgaatatactggcacgagtcattattctcagaatcctcaacttctcttgcctctaaacttttgtttcttggttttattagtaataagacttcgctgctcatatatttgaagctaaaatgtgaaggtcctccaagatatttgaattttagttactagatcattttcaatttcacatgctatgtctatatgagcaacttattttccttttatactttatgatgcataattgatatatattgtatgaatgttgttggaatctcaataattaaggatagaaatcttaacttattactattagttttcttgtaaatagaaactaatctcagttactgattcttaggaaattaagatatcaattactgattcttaggaattaggatttatttcctttaaaatgattatttctctctttataaatctgtaaactaaagcagtagaaatgaactgaattttttcctctgagttttttcatggcatcagggctttaggattcattcgatcctaatttttctctaatttcccttcctaaaaattccttcggtttagtcctccaatgggtgatataaa

SEQ ID NO: 11501 - DNA, 355 bp, Gossypium hirsutum
  misc_feature (55)..(55): n is a, c, g, or t
gtcactgcctccgccatgcgactttcacccgaaaacagcaccaccgacagtgccncacacacaaggcaacaaaggaaaccctcttcatcttttttttcccctacagaagctgcaaatacaaagaaagcaaagaagttaaatggtattgggtgcatttttggggatgatttgaggcacaatttatagaagttgggattggtaactcctcagacgttacagtttgcaccatcatttacggatgttaaaactttgaaaaaatgggactccgtggaattgaaggaggtagatcccaccatctatactctctaagtaagcgggaggaaggccccttgacacacgtccaacttcaaaagtt

SEQ ID NO: 11502 - DNA, 470 bp, Gossypium hirsutum
cctcttgacatgtgtattacaatacttaaatttgaattacttaaaaactttaaggaaaaattccacttaagatcactaaactattagtaaatttatgttttggtcacttaacttcaaaaagttacaaaaatggtcattaaactattcaaaagtttctatttaagtcactggactattaaaataactgttttatggcattttctgtttatactacctacatcaatcgaaagctttcatttcccttcccttttatagttcaattttttttaacttaaagaatctataaatcaatattttaataactttcttctctgacgctgactattagatcaacttggatctaaggtatgttattttactcattgataggtattgatttaccgtaccaattattgaatcgttgcttgaagttcattgcccaaacttttttgaaaaaaaaatttaacatcccagtgacttaaataaaagct

SEQ ID NO: 11503 - DNA, 674 bp, Gossypium hirsutum
tcccttcgttttcatagatttggagttcctaatcttgaaaacctcaatttggagacgaacaagctttttggatcaatacattcttctttatttactcttccatcgttgaagaccttttatcttggagaaaatcaattggttgggaaaattgatgagttccccaatgcatcttcttctttgattgaagtactgtctataggcaataattatttaacaggaccaatcccaaagtcaatccttcaacttccaaggcttgaatggctttatatcgaaagcaatagcttcagttccatgaagcttgacatgtttgtccatctcaagaacttgaggtatctgacgctgctcaacacaagcttgttaattgaaagcgacaacagaagtcttacttttccccagttagagagcctaagcctaaggtcatgcaaccttactgaatttccagaattcattaaaaggcaagacaagttggtttacttagatctttctaacaatcatatccatggtgttgtgcctaattggttgtggaagagcagtctttcatccttacacctttctttcaatgtgattgattttccaaaacagcttcccttaaatgatgcaaacttctctttttcaatgttgagggtattgtatctggaatcttgtaacataagtgcgtttccggagttcttaaa

SEQ ID NO: 11504 - DNA, 662 bp, Gossypium hirsutum
tggaatttgttgcctttgttgacaaaaatgcgacccagaaacatacgaaatgacctcattaaccttatctgccgttagtcgttgtaaaacaacctacctgtacctccatcagcaagtgaccaagtaataatactttctacccttttgtcctaagagtcatatttcactttatttttctatttaaaaattcgtaaattaatatttgtataataaattaaaaataattttttttatttctattattaaaatctgatcattatacatcagaacgaggctcatgtgatacaccatgtgtaattgtcttattattttgtaagctattagtttttaataatagaaattgatagaattttaacaaaacgattagtttgctttttactctaacatataaaaaataatttgtctatttttttaataaaaggggcaaaatataatttgactcctattaaaggggtctccatgatacttttacctcaagaactgataaaagtttaaagggctaattatcaatttcttcattccctttatgaaaagagttagtatttggtacaataactgttgacaccatttttttgataaaacggtgtcgacttggattttgaaaataaaacgaaattgggagtcgccaccaatcttttttgatgagatgtgatcggggtcac

SEQ ID NO: 11505 - DNA, 639 bp, Gossypium hirsutum
catttccctgtgaaagaagaggatactgagcatttttcaagcagagaagtacactggagtattcaaaatgtaaatgctacaaaaaggaaaagggtagaagagtaacaaaggagattctgaatggataaattttataataattacagaacggtatactgttatctgtcttgcattaaaaagcatatgaactacaatcacatatacatacagacctgaactttgcataatcagcctctaaaaaaccaactaaaacagggattccacggcaagctatgaacatctgcaaagtcaaggagctataaagaaggaaccagcatgttcagtacaactcttttccatcaattaaaagcaattgaaataatgggaggtgagtactcaacaccttgacagacaaagctgctgcaagaaccaagctgcttccatccgaacttcccgaggacgatcaggccccgcaaaactcattactaaagggatctataatataacttgaagtgaacaaaactgcataaatactacaataacatcactctctccctcccccttctcattgcagtggaaaacatcaatccaggaagttaaaagcaaacacacaaagacaaacatatatatgactcaaaaccttcattcacaggaacaaca

SEQ ID NO: 11506 - DNA, 642 bp, Gossypium hirsutum
caaagtatcagtgaagtgggttattatgcatatagtgaaaaagtggcgtagttagggttacgccctaacagtgtgtctataataaacttttatattgtatatgttgtaaagagttcgatgtaatgatttattttgtaatactttcccttgttcttagatattaagtatgtggattaaataataagaaaaatgttttcattaataatttaacattaattgtttcaataattctgataagtattgtgtagtaatacccgagatttggacccgtgaattgggtcaggttcaggtgaccgcctccggacatactaacatccaaagtgtgaatattgtggtaaaaagatatatatatatgaggcgatatttgccagtatacaggtcaaatcgtaataaagttacaacatagtaggtgagtactccaaggatcatacccaagggaggctagtgcttgatcaatttgaatctaaactccaaaagatctaatcaatacttgaaataagttatagtatgacaatataaataaaaggattttttaaaatttttataataataaaatataatatagtaaataaatagatatcaagagattgaaaaactaaaattaaccaaatctggctatgggtggttagctcactttggaac

SEQ ID NO: 11507 - DNA, 650 bp, Gossypium hirsutum
ggaaccagcaatcccaaaggaggacctgaattgaccgttcttttcgtatccataatcttaaaccaagcaccccagaagtttattgatccgggaattttccagctattgaaaggagtgggaaaatatatattgacagaacttacgatcatatagtaggttaccgtcagatcgaacagtcggtgtgtataaatctaaagttacagtcgttatggaatgttcgattcttccaaaaaccaaataaaggaattatctacaggctaatgaatggacttaaaagcttgtagagacagaacttcagtggcacaatacaatattttttctcaatttgtctaccaagcgcattacaaatttctcctgaaaagccatacctgattgatgaaaaggatagagacctcacaggaaacaattgtgagaagcaattttcaaaattcttttaaaacaaaaatgttgaatatccagtaaaatagttgtgtgagtatatggtttagccaatgaccaataacaagtagaccataaagcaacaaccactgcagggaaggcagaagttcccacttccactagcccttcaagcaatgatgaagggttcaacattaagatgattgatcatctaacaccctctattgaatcgcataatcgagtgataaccaaga

SEQ ID NO: 11508 - DNA, 665 bp, Gossypium hirsutum
agttgtttactttcaaagccgacgttggctagaaaagaaagagtggtgaaataaggcattgtgcaagtaattataagagggaagggcactcaagtgttttatgtgtacttgtggggggtccataccatatctttgtgcactgagttcaaattgctgagatcaaccacaatcatttaattaataagcaagataatagtgaaagcattagctttgtgggtaaagtgggtggcaatggcatcacaacaatgtcttatgtggcttacctattcatgtctcgcttgggaaaagaaaatcattcttccaaatgtgccttcatctctatctactattttccataaccccatacccatattttatggtgaaaatggtaaagctatataggaagtagcaataagtctctaagatcatactgcagttaggctgctacctctataaaataagataagataagatgcctttttttaatcatcttaagataggcctacagatctataataagtattaattggtgatgattgttactaaaactggggcatatcaatcatgccctaaggatgaaaaaggtgtgggattgtgtatttgtttagtgttaaaaactgcagtggtatattttatggatacgtagaaaactcagatgcaaaattagctgtacgtaccaacgacac

SEQ ID NO: 11509 - DNA, 610 bp, Gossypium hirsutum
tttatggcaaatcaccaagcttgagtgtctcttttaccgactctttgacctccttaatgatttccaaaattttggctttagtcgagcaatcttaggctctatgtggcccctcgcaaaggaagtatgttatcgacccccattctttcttcttgtccttatccttggaggacttccacttttcggatggtggcttctcgtttccttttctgaatggtcggtccttctctcccccaccttttcccttgtttttaggcttggagggctcgactttgtcttgcttcttgaacttaagaaatgactctgcaacgaacatagcttgagtctagtcttggatgccctttcctttgcagctctagctttacctaaggcttgagcctatccataaagctaaacaaggcctcctcgtccccaaggttggatattcgcaaaataagctctaaaaattcccaaacatactcacgaacttcctcacgttaagtaagtccttagatcttgacctcaccccggcattggcatttttggataaaattttttcgaaactccttgtgaaattgctcccacatctcaatatcgactttcttgtttcgctttgaatcctcgctcctacatt

SEQ ID NO: 11510 - DNA, 370 bp, Gossypium hirsutum
ttttatatgccaaatattagcacttggcacaagtcacataatgtgtggtcgcgacaaagtaaggtttttttaatgaagcttatgcttggagagaagaaacatattgatttcgttctttagcatgtgtgtgagcacttgaacactgagctctttggtatgttgcttagagtaagggaggggtatgtcgccaaaagccttgcataaactcaaaagtacatttgagcctaaattttgtttttagattttagttttttttttctttccattgttgcagcatcttctttcttattttgcaaagagcgtggcttttgtcaatacttctcgtgccttagtcctagcgaagccttctcctaaagttactgttgtcatg

SEQ ID NO: 11511 - DNA, 655 bp, Gossypium hirsutum
caagatatttactaaactaaaatgatatattttagattaattaaattaaaaagtccttaaattttatgagtgccaatatcattttaccacatttattcctatttaatagtagtttttttccctctcattttaatttaattttccaagtctccctctcatttttattccttatttttttctataatgaaatatatattttacttaatcatctcggtctttttaaaatatatatatttgaattcaattaactataatttaaaaaaaaattaaactagggtggagtcggatcagagttaaatatataattaatttttgagtttaagttcagtattggttaaattattttaaggttgaattagggtattgtgataaagtattgggttggggccgggccgggctgggagaaaacccgtcctttcctgccctgccccgttgctatcactaatttcaattgctaaatcaaaagagtagaggtggaattaaaagtagatggactaaattttaaatgtactaatagtgcaaggagtacatcataattagtccttttaaacagtagctgctagatttgattgtacgcagtaaagaaggcgtcaaaaatcgccaatgttacgaccttgttttctgctcgaaaatctttgagaggaagacgggaact

SEQ ID NO: 11512 - DNA, 681 bp, Gossypium hirsutum
cttattacttctatcagattcaagtaacattgccagttttgaagttaaaacctctattttcatccttctattctgttggaccaggactccccacttctctaaacctctttttaagttttccagcttgtgcacaaattctcctgtggagttttcccaaatatgtttagtttcatcaaagaatgtctcttccaaaacccaccatgcttcaaacttgaaattcttttctgtcgtccatctaactctgtaatccgtatcaataagaagtggacaatggtcaaaaaatgaatgtgggaggtgctgaattagagaatttaggaataaagcgctccattgtttcgttgccactcttttgtctaatctttcctgaatatttgtttctggcaaattgcccctctcccacgtgaaccacttacctaaataaccccaatccactagactgtaatcttctaaaaccttgcgaaaaacttctatccttctttcctctctaggcaatccatctttcttctcaaagccatataagatttcattaaaatccccacaaaccagccatgggtaatccccctgattttgtaattgtcgcaacaagttccatgattcatccctatcatatgagtaaggagaaccatagaaacttgtaaatctccacttttctccacctcctccttcctcaataatcacatc

SEQ ID NO: 11513 - DNA, 364 bp, Gossypium hirsutum
cgaatgagcaagtgttgaagggtactttggtggaaattgatctgcatacatgcgagccatggcagcttcctggtaccacctctctcctttaattttcctttggaatcttattctttcattcctgttggtggtgtgtctttgaaaatacaaacagagaggaaaattattgaattattgtgatcagtggcacaaagcctcaggccgccagccatgtttgctgttagaaacatcagacacgtaaacatgtttttttttcctctctctctagaatggaatagagagagatgagatggacgggaaaggaagcacgtcaatttcttagattacattacattgcatctctctcacacatgtttagaaaccc

SEQ ID NO: 11514 - DNA, 607 bp, Gossypium hirsutum
  misc_feature (240)..(243): n is a, c, g, or t
tcgatatttgggctcttcgtcttgctgttttctccaacaccactagtatgcttcctctccgaagtttgttctttggttgcttaattctttaccttaattattattttttatattacaatggttctcgatatatgggaaagatcacttactctttaaaaaacaaatctttgatttttaaacagaggaaatgagcttgtatttctgattatagatacaatgtgttgttctcggtgtgagtgnnnngtgtgttgcgttaagtctctttaatgtttgagatcgaagcttcaatacccagattagaaagtagggaaaaaagagtaattttggatccaaagtttagacattttgaagattgtgataggaaacatgttagctttgttgcctttctgggagcaatgcttttggaaaactagtttttacgaagtaataatttctttgtcttctaaaagccagcaagaagcacactgatcttggttaattgaatgatgcattgagtgatggagtattcactccatgttgagagatttatagagattgctttacattataaaaagattactactaattagcatgctatttagcttaaattagtggaatattttccatg

SEQ ID NO: 11515 - DNA, 652 bp, Gossypium hirsutum
ctctcctgtggtctctatataatgttgagaagtaatattagcaaaattgagagcctacttttttgtagtagaggcagccttcgtcctttcttttcattgcaggttctggtacaacttaaactggaaaaattcccataaatttggatcctatggtctttaatattatttagatttgtaagtataaaatttgtttcattaggttgtccattgattgtttagaaagtgttaaatacatataacactatttttctaaaatgtaagtcttcaaattaaatttttaaaaaaattaatagtgttaacaattggacataattttaaaatctagaaaataggactaaattcctgtaaataaaagtacaggaattaaatttcaaatttatgaagtgtataagaacctattacattttactcacataaaacatcttttctttttacaacaaagtaagtttgatcattttaacatgttaaatatatatactcaagttatctagatgtataaatgataagtatagaacttatttaatcattttacccttttatgattggtttgataaaaaactgatacataaaagtattttcgttttgcttatgcaacaaacaccgaatcaagttgcaaataaagcattaacataatggtaaaaaggaggattgg

SEQ ID NO: 11516 - DNA, 453 bp, Gossypium hirsutum
atattgacagtgagtttgtggaagaacaattctggaaagactacctattgctctttgacatcacattttattgatgatggttgggaactaaagaggaagattcttgccttgaaaactttggagcatatcaatgacacaaaggctttaggcgaaattattgggagcttggttttggagtggaatataagcaacaaagtatgctccataaccgtggataactcttttttgaatgacagtatggttgatcagataaaagaaatttgtcttagtgaccagggctctgtttcttcaaatcattggttcatcagtttcacacttctcgaggatgggttccgtgagatggatggcatactttttaagttaaggaagtccattgaatatgtcactgaaacaagacaaggaaaattgaaatgccaagaagctgtagatcaagtgaagctacatggtgggaaa

SEQ ID NO: 11517 - DNA, 603 bp, Gossypium hirsutum
gatccttaccctcactgtagcattgattacaaagactaaaatgaaactttacttctttaaagcgagaaccgataattgggtaacggcaaactgagcagacatggcgttcatgacgattcctatctccagtttctaacttcaggagagtggacaaaataccaaagccccaatcaggatcattgaacatgataaggaactcattgaaagataccattgaggtatctgtttctccatgaacttccagcatttcactagctccatgataagggataaatatagccctcaacaatttgatgtactgaactacatctacctttctaatatgagaaccaccttcatttacagccctcaacaaagtataaatagataaaagagtaccgaaaaagagagaaagaggtgaaagcagccatagatttgagcgaaacaaaacagcagccctgagaagagaagatatgtgacggacaaagctaaggaaaattggaaataaaagatgaagaaaggaagaagtaggaggaaagttacctggatgaagaaggagaagaagatgaagaacggaagaaggagaaggaggaaaaaataaaagaagcccaatcggtagggtaa

SEQ ID NO: 11518 - DNA, 605 bp, Gossypium hirsutum
  misc_feature (52)..(52): n is a, c, g, or t
ccagccttgggtaatatgatcaacacagattcatcaataagtatgttacgtncatagccacgcggctaaatacatttggcacgaagccaaagtctagatggcacagagctatttttaggttggcatggagccataatcagattacgcgactttaagtcgtccgtcggtccgtagtcgtcttatgcgactcgtgcgaccttaacagatcaatactgggtccatagtcgtctcgtgcaacttgtgcgactccatcagaacaaaaacttcctccatatcaatgtcccaacgccatgaaaaatgtcgtgtatgtcatgctcaatcattacatgtgtatgcagaatggccatactcaataacagtcatttaaacatatattaaaagcatattagtcatacaaccacagtcaagtcaattaaaatgcagtcatacattcacggtaatatcactcatagcccaagtcagtcatttacccacaagggcaaaacaatcattttactctttagggcaaaatggttattttaccctacaagggtatttcggtaatcctacactacaagggtatttcgataatcctatcctacaagagtatttcggtaatcctaccc

SEQ ID NO: 11519 - DNA, 610 bp, Gossypium hirsutum
agagaaaaatggtgaccgtatatgtgagggagaaggattaaatcctggtatttttaaaaattgacatgataaatttattatcgtatttgtaatgttatgtcagtttattattatcaaacattatttataaaagaactaattaaaagatttaacggcggttgtttacattaaaattgaaattttgaaattagaaaaatatggcaactaaagaacattgactaaatatatgattttacgcgtagtataggactaataacaaaatttaaccaattagatttaactgctaccatttggttaggactataatttcaaaatttaaaattatacaattcaaaaagtagaggaactaaaattggtcaatttaaactattgagactaaatctacaacttatgcatattataaggactaaaaggtaaatttgacacgtatggaacactgatgacacagtttcaacggcttcttcttcaaactttgtttgactttgactttgagttgtaaattttatttttctttatttttaacaaaaataataattatatttaaaaaattgttggtgaaatgcttcctgttttaacggttttaacggtttcatcccactattttctccct

SEQ ID NO: 11520 - DNA, 614 bp, Gossypium hirsutum
ttgaactataggcaaaggctgatgttgttcatcatcagaactagatgactgagctgatacatttgtaatagagtgacctgaggcaaaaacaggcagagatgtcaaactgttagaatttgttaccagaggattgaatggaactatggttgcaacgagaggaatgtaagactgtcaacgagttttagaagaagaacgttgctaaaacggaaattgagtttcatcgaaaaccacatgtcgagacacaaatacacgaccagtatcatcaatacgtctataccctttatgattagcctcaattccaagaaaaacacagcacttggacctaaactacagcttgtgtttgttgtatggtcgcaagcaagggaagcaggcacaaccaaaaatgcgcagacaagagtaatcaggctattctttatgtagtacttcatatggactgacaccttgaagtgtagttgaaggtatcctattaactatatggactgcatatgaaaaagcagaagaccaaaacttcagaggaagagatacatgtgctaggagtgtcaaccccatgtcaacaacttgtcgatgtctcttctcaaccacaccattttgctccgaggtatgaagacatgtaa

SEQ ID NO: 11521 - DNA, 681 bp, Gossypium hirsutum
taaacccatcgtccaacctctatttcaaaaaaccgaaaacgtatgttatcctaattagtgtaagtcatgattcatgactaaagtacataatataacacattgattgaactttatttgttccatacgccacaaattttattgaagtgaagtctacataataaaaaaaatggtattcataagacatgagttggccaatgcattcgatgcaccattaaagctcatcttccatgatttctcttttgacaactcacccactttttctgaaatgcacatcaagtcttcatccgggaaatcgaatctcaagggctcgtattcctccattgtttgacttgccaagaagtcagctattgcgcttccctttatcgacttttggctcacatatgcgatgtcatactcagtaagtaggatctatcatcgtgccattctccctgagagtgcagatgactccatcatgtactttattaggtctagttttgaaattaaccatgtcgtatgatacaacgtgtattgtttgagccttcaaactgtccaaatcaatgcacaacagaatttttcgattaaagggtactttgtctcatactctgtgaactttttgctgaggtaataaattgccttttctcttcttccacactcatcatgctgccccagtacgcaacccattgaactttcgaacactgtcag

SEQ ID NO: 11522 - DNA, 620 bp, Gossypium hirsutum
tagaagtgcaagcccgtcttccagatcgttttcaagatcagcgacgcccaggtctgattcttcatcgtgaagggtagtgctttagttgatgtatattttggatgaatgatgttgtccttgtagtttcaatagaaccttttaaataattggtttgtgaacttaagaagtggtttaattaaatacgactacaaatttgctcaactttgtttactgtcgtttatttttgagttgcctgtttggactttggatgtgggaatttaacgttccgtattaagatctttttgatttgatgattggaattaagattttgttattttattgatgaaatgtaagattacttaattgaagtaattttgaacattattagcatacaaatttatttttttctatgaatgtttgaagtttacgaataaattagtaaaataatatttcctgcaaaatatatttatttattgaaagaaagaaaggtagctatgatgaagtattgagtagaagtccattatataaaaattattatgtgtataaatttttaaattataagcacatgctaatttgactagaaatcttggttttattcgaatttaggggaaagaagcaaagaaatcaaagttcctttttct

SEQ ID NO: 11523 - DNA, 679 bp, Gossypium hirsutum
taccaccctattgtgaaatttgtttttatgaccgattggagtccaagaggtccggtcaagaagaaatgtgtaaatcaacaaatttgacaaaggggaaagaaagactaaaagaatattttagaatattttggttatacttttttttcaaatttgttaagccaaccccacttaaaggcttcatcaacttagtaaaccatggaatttacgttagtcacctaaagattaatataatataaatcatcacatatggtaaaattttcagactaggcattagaacaaatttagatttaagcaatagaacaaaattagagggagttaataagtagtggaacttgaactagaatgaatttaaaaataattgctcaaccaaaggggactcgcttgcctattgggttgtcacaaggtcatgtcaaggtccactcaggagttactctttagtaagggcttaaacacacaagagcttgttatgctaaacgcaagcacacactcatcacattgaccatcataaaatcatgtcaacgtctacttgggagttactttgaatatgtctgataaagttttccatcaccctactattgactctataagggtagagtcgagccatacccaatcagatccaagtaaaacatttcacagatctactacggtaggatagttgtttgaaagagcctagaatggg

SEQ ID NO: 11524 - DNA, 577 bp, Gossypium hirsutum
aaatagctatagaacttaaaagtgaaagtccttatgtggtaaatagtccatttatgagttagtggatgatagtggagtgggatatggtgtaattactaatatttttaaaggatattttagtaattagttaataaagttaatgtttaataaaaataaattaaaatcatcatcttttcaccatttctccaccaaaaattagaaagaatggtagccatgggagaagctaggttcggccaacattgttttgctcatttaggtatggattttgatccgtttttaataatttctacgtttctgatatccttgtagcttagtctagctagctcgtatctccgttttcgaaactgttatagattttgtaagatgccattgataaatattcatgattttttatgtttaatagtgaaatatgaatattttatgttagattttcatattttataaagtgatttttgataaaaatgtcaattttggactaaattataaaatataataaattgtgtggtaaaatgtgaataaatgaaagatatgagttgttatgaacatgtataaaattcgactagcttgggctatgaaa

SEQ ID NO: 11525 - DNA, 649 bp, Gossypium hirsutum
caatccaactggcctgatttagttccaacaacattgataatcaatttaatcattccaaataaaactttctaaaattttaaaaaaattcacaatagaaaaaatacaaataaatgatatgagtataaatattcattttataaatcatagtagcaaaatttgtcatatcagaagtagggtgagcaaaaaatttgtcatgccctgatgccatcgatagatatgtttcattgtgataaaatttaagattaattttttttattttgacataatttatttttttatagcttattatcatatttgataacaatattaatttctattatgtagatgatgatgtagaattttttttaatttttttaatcatactattaaatctcattaaaattaaattaaccatgttgaatcaaagaataaatttatatgctaataaaatgtttaaaaattgtttttataaaaaaaaatcatgttaataagaacaactaattctttttatcaatttaaacctactccgtacagctaatgctataaaatagagtgattaaattaaagtagaaggatcaaatcttaattttaatatagtaaagagactagaattagaattagaccattcaattgggtgcttagtggtgcttactacctgaattaaaaaaaa

SEQ ID NO: 11526 - DNA, 692 bp, Gossypium hirsutum
  misc_feature (52)..(54): n is a, c, g, or t
  misc_feature (59)..(59): n is a, c, g, or t
  misc_feature (62)..(63): n is a, c, g, or t
  misc_feature (367)..(378): n is a, c, g, or t
  misc_feature (380)..(382): n is a, c, g, or t
  misc_feature (387)..(394): n is a, c, g, or t
  misc_feature (400)..(401): n is a, c, g, or t
  misc_feature (404)..(410): n is a, c, g, or t
  misc_feature (413)..(431): n is a, c, g, or t
  misc_feature (433)..(435): n is a, c, g, or t
  misc_feature (437)..(439): n is a, c, g, or t
  misc_feature (441)..(443): n is a, c, g, or t
  misc_feature (445)..(460): n is a, c, g, or t
  misc_feature (464)..(467): n is a, c, g, or t
  misc_feature (479)..(479): n is a, c, g, or t
  misc_feature (493)..(500): n is a, c, g, or t
  misc_feature (506)..(513): n is a, c, g, or t
  misc_feature (516)..(517): n is a, c, g, or t
  misc_feature (520)..(522): n is a, c, g, or t
  misc_feature (527)..(539): n is a, c, g, or t
  misc_feature (543)..(559): n is a, c, g, or t
  misc_feature (561)..(565): n is a, c, g, or t
  misc_feature (569)..(574): n is a, c, g, or t
  misc_feature (576)..(578): n is a, c, g, or t
  misc_feature (580)..(580): n is a, c, g, or t
  misc_feature (582)..(591): n is a, c, g, or t
  misc_feature (595)..(597): n is a, c, g, or t
  misc_feature (602)..(612): n is a, c, g, or t
  misc_feature (617)..(623): n is a, c, g, or t
  misc_feature (649)..(650): n is a, c, g, or t
  misc_feature (661)..(667): n is a, c, g, or t
  misc_feature (677)..(685): n is a, c, g, or t
tggttcgatcctcttattttgatttctcggaccgagagatccatgaatcggnnnccttntgnntatagatacaaatggtccaatgggagcaagaatttccaggagcatttggaacatttcgtttctgagcagaagagccgttttcaagtagtgttcgatcgattacgtattaatcaatattcgattgattggtctgaggttatcgacaaaaaagatttgtctaagtcacttcgtttctttttgtccaagttacttctctttttgtccaagttgcttctctttttgtctaactcacttccttttttctttgtgagtttcgggaatatccccattcataggtctgagatccacatctaaaaaaaaaagnnnnnnnnnnnngnnncatcnnnnnnnnttgggnnccnnnnnnngannnnnnnnnnnnnnnnnnncnnnannnannnannnnnnnnnnnnnnnngggnnnntcacatttccangttgcactttttannnnnnnntttttnnnnnnnnaannaannnttttnnnnnnnnnnnnntgtnnnnnnnnnnnnnnnnnannnnnttannnnnntnnngntnnnnnnnnnnaaannnaaaannnnnnnnnnnacccnnnnnnntttttttttttccacctcttttttgnntttatgcccgnnnnnnnctttttttannnnnnnnnccctttt

SEQ ID NO: 11527 - DNA, 656 bp, Gossypium hirsutum
aagatggtagcgttaaagagcgtgaaaagaacagagaggagcaatgactggacgagtgaaaaactgaggaaaaaagatttgggagaaattcccgattgtggaaacgacaggagtcaagacgctagcctagattaaggcactggactgccaggctgcccgccccgttacgcgtcatcaattttttttcttcttcttaaactattactatttgttcaattattagaaaattagcagatgctagttttagttatagttatatagggagagattattatttttggatttatgaaatcagaggctacatatgtaatctcccttttcggtttaatcaatttcattggataaattattaaaatttaaaaatttaaaaaaattaaatttagtttaattcttgtttgttgccttttaaaaaaatttattgaatgttttttaaatatttttttaataaataaattttatgttaaaaaaatattccattagtgatttaatagatgagtgatcaaaatattaaatttcaataacgttaataaataaaatagaaaatttaaacttgagtaaccaaaacataatcatattaatagttgggtgactgtttatacaatttacccttgtttttattgtgtttttatggtaaaccaagcacttagttgtccaac

SEQ ID NO: 11528 - DNA, 602 bp, Gossypium hirsutum
ttaattgtcccgtttcggatagtatttagtaacactaagatcgaacagggtaataccatgagtttatacaaataggagttatttctaacaacctacaattgcaacgatcctagacattcaatcagaaattttaattttttttccaattttaagtaacaccaaaacagaaacatttcatgatgtttaacctataataaaatatttaattagcccaaaattggagcaacttaaatacaacagcattttcgagtatttaacctacgataacattgccacacgatcggaaatttatcaaccttcaaacatattcatatggatcatttagataccataaatttcaaccttcaatctcaataattccaacatataaacatgttcatttgtagatagccaatatataagcatggatttacatcgatttagatagagttagtaaacatttaaatgacacttctcaaccatttttttatccaacaatagccaatagaaaaaaaatacacaactaattgaacaccattaattcagcatattaattgaagttcaaatatctacaacatttaaatcagccttcatttacttccacaagcttcataaatggatgc

SEQ ID NO: 11529 - DNA, 570 bp, Gossypium hirsutum
atctcataatagccattggcaccccgatgtgatttgaatacattgtcaaaatagacctgagccacatccttggctatatagggatgtttcaaccttataaagtaggcatactcggttaatctgtcgaccaccaccaatataacatttctgcaaaaagcgatggcccttctatgaaatccatactaaaactagaccaagttgcttcaggaattgatagaggctgaagtaatctttagaggtattgtggtttcacacttatacctttgaaaactatcacactccctaataaattgattcaccttgtaacatccctaaaaccctcttgatcgtaaatattttaattttaagaagaataagtgttagagtcttcatggtaaataaaatatgaattattagtgttagaatagaagatagttggatactagagagaattgaaaacactagtgtgttgagaaaaataaatttggggtattggctaaatcgtaagagtgtaaaaattgtgggggaaaaaattctgaaaattaaaagtataaaaggattaaattgaattatagggaatcatacagggac

SEQ ID NO: 11530 - DNA, 612 bp, Gossypium hirsutum
acatctcgtacaacctcaacaaggaaaatgtcatagtagggccacatagtactatgcttgacgacaactaacacacaatagacctaccacctagccaaccacaagaacatcctaccactcggattgtcgataatgtgatattaccaaacaagggggcctctcctatatataccccaacagacgaagcaccaagggatccttcttctcccaagcatcttttgttataacgtagtattctccaaccttctccccttccttcaactcctttcttccttagtctccaacttcggctcttcacttgtcagaagtgaaccaacctccctatgaccatcactttctccttgttgattcctcgtatcaacagaacaaattttttattttttggtacctctcatgtttgttttgcagtttaagttcggggttcggattgcttctcttaataatgtcttctctgagatttaaatttgtgttatctccttaataatgcaatgtactttaacactacatccaacactcattggtaaatttttatgtaataacaattccctttttttgttgtcatattatttcaacattctatcattaagagtcattattaacgtcttgagttac

SEQ ID NO: 11531 - DNA, 658 bp, Gossypium hirsutum
acattgacggataaagataaggaagatatattgcaatggggggttcctaacaaaatcgatatgattgctctttcatttgttcgaaaaggctcggatttggttgaggttcgtaaggtgctcggagagcattctaagaacattcttctcatgtccaaggtatgcatgtttgaagaatttcatacatacatatatacctatacgtacatgcatgcatgccatgccatgcataaatatatagatgctattttacttgcactcagttaggaaccatgtaacgaatagtctcatttgcttttgcctgagtttttagaaagtattatgaatagtagtgttgatttatattaacatatttttagcttgtggaagtttcgttcggttcgaaatatggtttaaaattttattcaaatttatttatatttataaatagataattaagttcatttaagcttggtaatattattttttttaaaaaaattaaaatttttttaatttaatatttaataatctaatttttttatttataaaaaaattatatatagtgatcttaatattttttaatatttacattgcagtggtattatatactattatagattaaattttttgtgttataaattatataatataaaacattacaacttaactaaagggccgactt

SEQ ID NO: 11532 - DNA, 330 bp, Gossypium hirsutum
  misc_feature (24)..(25): n is a, c, g, or t
gtttatttgtgttatttataatanntcgtgatattattagtattttcgtaatattattattaatgatattctttattttgattttttttttattagaatcgaaaagtttaattagaatagaaaagtataataaaagtttaaaaaaatcaaaaaatattgcattcagacaatcatacaatatggggtagtttgaattcttattgaggctttttcttcctaaattatttatttatttcatatagcatatagaaggaaattgatttcatatagaaagtatagatagattactatgtatcgactgaaccaatgactattcatgattccataatt

SEQ ID NO: 11533 - DNA, 560 bp, Gossypium hirsutum
tattttatcataagctgctaaatgccgaggttacacattataatacgagaatttattatataagctaccatgatgtatatccaacccaacgaaaattatggtttaatgtgatggcagaaaggtgggaaagggtgataagttggcgaggtcgaccttagacctataattctggagggacatacttaactgcttgcagaatagtttcctttattggttcggcatcgtgcctcagtcatgagcataatatagagaaccattgactcgatgaggcttttgtcacccccaagatactattgtttgattttatattttcttcattttatagccttggaaatattgatagatttctagatgttccgattttatatgattaatttgaaaaaataaaattatcatgttgtccttaactttttaatgtagtttatttaagctattttttcatttttaaaaaataataattttattttaaccatatttgcatctaaatatactttcttttcatccatcatatcaggcgcggagtcagaatattttttgagagggttggaataaagacgtaa

SEQ ID NO: 11534 - DNA, 385 bp, Gossypium hirsutum
tgtatataattttgattaagtataataacaaatttagctttcaatgtttacatatgatcattttaactttagttctaaaaaattaacaaattttccctcaacgtttacacaaatgttgtggataaattattaaattacgattaaattgataaaatatataaattttaaaaattaaattattttggtttttttagaaggatgattttatttaattttaaaattgagaaaaactggaaaaaatctttttcccaattattttctagatttcatatatggaaaaacgaaaaccttcattttatgtgcataatttagatctaacgtaccattctgtggagagaaacccaacaaaagcatttgagtgggtcagtctcagctcaggttactg

SEQ ID NO: 11535 - DNA, 679 bp, Gossypium hirsutum
accataagcttatggtattataaaatagttgtctgaaaaagtccgtcaactaaaaaaatttttaatcctaattctgaaattgcaataatgggtttaatcatctacagatgccctttacttttactttttaatttttaatgatattttataaataatggggcttccatttcttacaagtttagacaacaatcaatcgaaacatacaagttaaaataaaattaaatacaagttaggtagcttatctaaatcacgagataagtcgattactgtacttgaaattgatattttatgacaatattcagacaagaaaaacaaagccgtgtttggtgaaacgaaaacctcgttgcgatgttacctgtataacacgacaatattcagacaataatgtttacaaaataaaccaacacaagtatatgtccacacatctaacaaattcattctcaatttaatatgttttatatttatattgataatgaaaatatattgtcttttttttaatatattgttgaaaaatcgatacatatttaagtttttatattcaattttaaaagaaaatttaacgacgcgttttaagttattgttgttgatagtttgcaaaattgaaaaatcccacattgctaaaaaatatgtaaagttaaaggtttatatatatgatgttcttacaatcttgggaagttgg

SEQ ID NO: 11536 - DNA, 650 bp, Gossypium hirsutum
ctcaggaaactcacaaacaactggcacggactggatttccaactctaatgttttggtatccaataaaatagcaacataagcctcatacccctttttaatatatctttgtgctgattttgttgaaattacaataggcaacacatctaatttctcagattcaacccagagtaactcaccattctgacacttcaatacaatgtatttatgcttacaatttaccattgcatcatgttgggttaaccaatttattcctaatattacatcaaattcatcaaagggtaacaactttaaattatctagaaaacaatagccctctatcgtcaatgggcaattttacaaattttatccaccataaaatgctgacccaaggggtttgaaactttaaccacaaattcggtgaattcaacaatcatattttcaacaaaaacaaattttgtgcatatatatgaatacatggaaccaggatcaatcaaagcaataatgtcagtatcaagtagagagaatgtaccagtgataacatataatgtcgaagcatcttcccttgcacgtattgcatatgttcttgccagagcctattgaatcttttgcagaactacgactaccactgatattttcaaaatattgttgtggtctaccccttgagacaggat

SEQ ID NO: 11537 - DNA, 561 bp, Gossypium hirsutum
tctgcccgtgtatacaaaaataggctattttgtaaaactccttacccgtacccgtcgctggaatagggttacgatacattaccagataatacacattattcgcatacaattaagcattcataatcaaaatccaatcaaatcattcacatcgtcccttataaggttctataagaccttaaaacatacttagaaatagttcgggactaaaccaaaaacatatacagactttggaaattcattataaattaaccagagataattaggagtcattccatatatgtatagattcctctttgagtctagtttctatataaagaaacggcatcagtattgaagccctttacagggagatatccaagttgtaatgcgcgaaggtgagtgtagtcgatccctataacatgggagactttaagtaataaactgtactaattggcctgacaaaaaattatagaaaaaaaattgtagatgtatatatgagtctaatttcagggaaaaatcacgaaactgattttcgagttgtggaactcaagatatgatttttaaggtgacagcgacacagtt

SEQ ID NO: 11538 - DNA, 660 bp, Gossypium hirsutum
atcttgctgctgatcttatctgttcttataatattagaagcataaatgtataactttaacgagaaaaacatattatctgatatttaaaatatgaatacttttaggaaaattataaaaatatcattaaactattatcttcattttattttggtcactaaattattagtttttttatttattcactaaattttttgaaattaaatattttagtcactttttgtcattagatgagtgtcgaaaagtttatataggcttttttattggtctaataacaaatttagcctttaaatatttacacattatattaatttgatcctaaatataaaatattcaacaaatttagccatcaatgtttacaaaaattttcattttagattgaattctaaaaaaaaatcaatacatttagccctcaaaatttacaaaatccatcaattttattctatttcaataatttttttaaatgtaatttttttaactactataaatttaattctatttcaatctaaaaaaaattatttcactaaatgatttttttcttttaattaagtatatatatatgagttgttattttataaattgatggtttacatttatatacaaatatagatgttggtgcttgacattgtacttagagacatttccttgatattgcgtacacca

SEQ ID NO: 11539 - DNA, 632 bp, Gossypium hirsutum
gggtccagtttcttttcttatgggttataaactcttacttcagacgagcatcctgatacacgtatatgtcgcaaacttggtttccaacctttgaacaactcaaaaagtgtctttgggacaaccttggttagaacttggtttaatatatacacagtagttttgagagcttcaacctataaggacttaggcagctgagagctactaagcatacttcgcaccatgtttattaaagttcggtttcttctttacacaacaccatttttatcaggtgagcctgacatggtgtattggccaactataccgttatctagaagaaacttcacgaatggatcatatgcttgtccatcctcaatgtatctaccataatactcatcacctctattagttctcacaatcttgatttgattatcgcattgtttctctatttcaaccttgaaaactctaaaggcttctaatgctttgctcttgtgatgaagcatatagcgatacaattattgtgagtaattgtatatgaaagtgatgaagtaattctgaccttgcacatctatatttaggcaacatatatcagaatagacgatttccaatatggtcgaactcctcttggcacttttatttgacttgttagttcgctg

SEQ ID NO: 11540 - DNA, 597 bp, Gossypium hirsutum
  misc_feature (44)..(44): n is a, c, g, or t
tcggaagtgtcaaagtcgaagtcatccacactatctaagccacnttttggtactcttcagttgaacttgataatggcatgtatagggctgacccttgttgttaattaagtatcttttggtaatgtatattcgtatagccatgcgaaaatggcttgtatattttgagtataacattatgatcattttgtatatatggtcttatgatatggttattaagtggtgtggaaatgtttggtaatgattagccattggaatggccaatcatggtcctattggtgctacgtatgtcatggctaatcgtgattatacttggaaataatgtatgtcaaattactagttgattcatggaaaactatgaaataggtaaaatttaccttaaaatagatgctgacagcagcagtgatgtgaatttgaaaaatcactaaaaatagtagaaatggaattaaataatgaataaattatgtaatcgaatcttgatgagtctattttcatatgaaaaaaacgaaacgaccatatgagccgtattttatgagatgtttaagttttcgtgaaacagggccagaacgatttctggatcccctgttctgactttggaaa

SEQ ID NO: 11541 - DNA, 645 bp, Gossypium hirsutum
gatcccccgtgtagctcccccagtcacaggtacaattataagagaaaggccaccagttgataagattagaaaacaaggggctgaagagtttcagactactaaagatgatgatgtagagagagcagaattttggctcgagaatactatcagtggctttgatgagttatcttgtacacttaaggaatgcatgaagtgtgttgtctcattcagagattcagcctatcattggtggaggactcttgtgtcagttgtaccgagcgagagagttacttaggatttctttcaggaggagttctataaaaaagtatatcagttagagatttattgactagaaatgaaaagagttccttgagttaaagcagggaagatgactgtaacctagtacgaacatgaatttgtcagactcagcaagtatgctcgagagtgtgtgtctacaaaggctgacatttttaaaagatttgaggatgggcacaatgatgatatctgattgtcagttggcattctagagataaaagagtttgttgttctagttgaaagatcatgtaaggcagaggagttgttaaaagaaaaagaaaagggaaatgctaaaattgaggttcaagacacgaagaaaaggcagatgagcagatcatttcagtctacaac

SEQ ID NO: 11542 - DNA, 647 bp, Gossypium hirsutum
caatttagtacttggaagttggcgtccatctatttgctcccaaaactagaacgtcagtcaaatgagtggtgttgctcggaatacgagactataagatgcttggaatattgataatccaaacaccataatctcattctgaaatgtaacattatgagtgaaccaaacaccccctaaatatattgcttaaagaaaaaaattgagctaacaatatggcatcgtcaagataataggtggcctataggtgcctaatatgagttggataaataataatcggtgtgtagtaagaagctaatggttttgttcgccaaattcttgaccttcacaaaagaagatttataaataaatgcaacaaagaatctttatctattaggttttgtgtgttcttagtttaataaatccatcatatttgataaattattaaaatggtcaaattaattattcaagaaaatatacaaatgtcatttattatctttatgctaaaatgttcttaatgtttttgtatgtcaagcaaatggttaagcaaatttgacttattgattattttaagtttaactattattaagttgtattatatgaattgattgtaatgcaaaaggtaacttattttagtaggtaatctaaatggtcgatagtccatgggtcaaatt

SEQ ID NO: 11543 - DNA, 543 bp, Gossypium hirsutum
ccgtgttagttgttacattatctagggtttgttttttttctttaacaaatagatgccatttaaacttggagaagaaatcagttagaggtgactattcgatgaagtcgagtcaaattaaatcaaaaaattttgaattagttaagttgatgaatcctattttaacaatcgaattcaatttgaatttttttcgaatcaagtcaaaaattttcaagtcaagtcgagtcgaattaacgaatcttattatttatactcaatgtttcgtttacatggatcgattgttttactagaagatgaagtacaagcttttagattagttttgaataaatgaaaaaaggagagtgaggcaattcgagaaggaaagtaagactaatgggtaaatatttatcaaaacaatctagttttgcgacttgatattttttacttttaactgtagaactggtaaacatttatcaaaacgacgtagttttactttttcttatttagattttcggataactcgaattaggggtgagcattcgatcaaattaagtgaacccgttcaag

SEQ ID NO: 11544 - DNA, 414 bp, Gossypium hirsutum
ggcgacggactcgggtacggggtgttacaggtagaatagtcggaaggaaaccattcaacaatctacttaccaatggataagggcgggaatatgatcaagtccactacagcgatttgagataaacatcccaacgaacatagattagttgtattgttattatttattataagcatttactcatccaaacactagtaagttgtggtatgtatctgaataaagaaaatcgttgagttcatcagaacttacaaacggttgacctatagattcaaggttcgtggtgcaaggaacttaagaaaggacaaagttagatcgagatgagtcatgggacttcaaagaaaagtgtcatgaagataggttaaaggtcgccttaaagaaaactcgccaagagggcgataacattgtatctatctaaaa

SEQ ID NO: 11545 - DNA, 488 bp, Gossypium hirsutum
gctgaaccattactgattcatcaaatatgtgaatcccagaaagtcaacgatgaattgattgctaaacgagctaaatgtgtttcgaatgtggaattagagtttcagattgacgacaacgattgtttgaagtttaaaagtcgattatgcgttccaagaaattcagaacttatttctatgatattgagtgaggctcatagtagtcgaatgtcagtccacccgggtagtacgaaaatgtacaacgatctgaaatgtcagttttggtggcctggtatgaaacgagacatttctgactttgtttcgaagtgtttgatatgtcaacaagtgaaagcggaacatcaagtgccttcgaaactacttcaaccgatcatgatacctgaatggaaataggatcgagtgacgatggacttcgtatctggtttactgttgacgcagactaagaaagactcgatctgggttattgttgatagattgaccgaagtctgctgatt

SEQ ID NO: 11546 - DNA, 532 bp, Gossypium hirsutum
gagaaagccacatcagtatccaaaataaactaatttcatttgataatttttagccacactttagatgtgttctccgcatgtgaagagatttttttatttattttttgaggtcttttttgtactagagttttactcatccttctaattttgagttcgaattagtactaattattttaacacttatgtatggttaagcttgcttttccttgatttaatatactaaataaccaaacgaggcatgaatgtctagtataaagcacatctatatgtaccttaaatacagtcgcagtgagtattcaccctttggaagttgtgaagaggctggataacaatcacccattgcatatacacgctataattgatgagagcaaaaagaatttaacagggcaacaaaattggggcaccagaaggaagtaagaacaaattaaaaacccattatgggaaaacaaaataaaacactggaaaaggaaaatggggattccacctgaattggaataaaacatatttgtccagaattggtgctactgaatca

SEQ ID NO: 11547 - DNA, 682 bp, Gossypium hirsutum
catgagcttgatggaacaggatacaaggtatcgtacatgggatcctaatgaagcacatgtttatttccttccttttagtgtggtgatgatactaaagcatctcttcgatcccatcatccgcgataaagctgtgatggagcggacggtagtcgattatgttggaatcatatccaacaagtatcctttttggaatcgaagcattggggttgatcatttcatgctctcctgccatgactgggtaaataatataattccatactactaatcaaactgaatcccaaatggaagtaaaataatgtttgttgatgatgatggattgacagggcccaagggcaacctggtacgtgaaagaactttactacaattccattcgagttctttgcaatgccaatacttcagagtatttcaatccaaagaaagacgcatcctttcctgaaatcaatcttgtgacgggggaaatcaccaacctaacagcccatttgactccctcaaatcgttccatcttagcattcttcgcaggcaacttatatcacggtaaaattagggcacttgtatttaagcattggaagggaaaagataatgacatacaaatctacgaaaaacttccggtcggggtttcctatagtgaaatgatgaagaagagcaggttttgcttatgtccgagtgggcatgaagttcccag

SEQ ID NO: 11548 - DNA, 604 bp, Gossypium hirsutum
cagcaaacctctctggtttgaaaagattaacatcatctccccataagtcaggatcatggtgaagtgctatgattcgcatgtcgacctctgaatgtgtaggcaggacaagttttcctaattggacttctcttcctacttctcttatcacgccacttataggaggatagagccgtaaagtttcattgataatcatggtaatctgttggagaaaaagaaatccaaaaggcaatataaatggtcactgttagtttcaagcttttgaatttgtatagtttgcttaccgtttttaatttggccatcccttcaaaatttgggttttgattaccaaagacctcaatcacctctgctcttgctctgtcttgccaatcggtgtgtattgctaaaagcagggttgcccatgcaagcaaggaattgactgtttcttgcccagcaaaataaaaagttttacactcatctactaaatcttgtatcgaaagtctgtttttctcgtccgcctcatgataagcattaacaagtaatcccagaaaatcacagccgaaattatcagcttctccggtcactaccctcttttcccttttttcaacaatgctcatcacagaatcat

SEQ ID NO: 11549 - DNA, 520 bp, Gossypium hirsutum
gacgtgacagttaaaaataaatataataacaaatttaaccctcaacttttacatattatatctgtcgaaactatttttttgaaaaaacaaaaattagttgttgattttaaaaaatgaaaaattgcgagtcgccaccaatcttttattgaggtgtgattggatcacctaaaaacgactttaatctacgagttttagaaaaacggatccgggagtcggttacgtacgaggaaggattagcaccctcgtaacgcccaaaaattggtacctagttgattaattagtgtcttaatgttgagagttaaaaaatatgatccttagtaaaaacttaaaaaatgcgttacttattaagactcttctcatttcggagaaagaaaatgtcacacccaatgcgttagggcacgatattctacttcttcaaaaatgagtttgtccaaaatactcgtgtaataaaatttaaaagaatattcatttgtttaagatttataaagaaatcgcggcccaatacctttagggcaccatt

SEQ ID NO: 11550 - DNA, 680 bp, Gossypium hirsutum
tgacatcccaactaatttattttttaagaaatttttttatcttgtcacattagacaactagttcaatgagagatggatatgttgtgtgatggtgcaagatcgaaaaaaaaaattcactacattacatagtggttcgagctttttaaaattataaatttaggtataaaattgtaaatttctcttcaagccttttatatactctcttttaatttcctcttcataaaaaatttcgtaaatacttcacaagctctatgctaaattggaggtgatatggatgaagttcacttgtatctcaaatcaaggtttaatttttaaatttcttagtgtgataatgtagtgtatgcgtgtgagtttggaataatattgtataaaaaatgaactgttttcaattctaaatatatctatgacttaatgataatttaagctattaaagctagattaataaattgtgaatgttttcctcaaggttatttttcagatattgttgacacaaatagaaaagtaggagtgatggggtaacgaagtaagggtcaataagctgaacctatagcaatacgaatgcagagaaaagagaatggaagacacgaaagaggatgaagattaccatttcaaacagcaaaaccatgtaccaaactttatttattttcattacccaacaacaatgtctatgtgcaaatggc

SEQ ID NO: 11551 - DNA, 658 bp, Gossypium hirsutum
tgacctaacaacattagatgttcaccaaaaaaattcatttcgtgggtttgaataataaggatatttgtttctatcgaatgtttgtatgtcaagagagctaagaccccttcctattgttttgaatataagggttaatatcggatttagggtagtttccaatatagatattttttaataaatgcaaaaagggaggtcttttttgaaaaggatagcgtatggaattcctcaaagttccttcttttgcaaatcttagctttacattgacatgtgaatagaataaatgggtggaatccaattttgggggaaaaaaaaggtatgcataaattagctaactttacagcacaagacttcccacttgcaaattttggagtaatccataaacttccatatacatacatatatgtatgtatgtgaacatggatgaatgtggagatatatatattatgtgaacatggatgaatgtgggcacaaagttgaaaatggaatatcaagttgataaatattagagcatatatgcagtccccccatgccagcacagattccatgtattttccttccacttggaatttgccaatcaaggtgcaaagattttattaagtaaattatacacattttctcatttttggtatttaaaatgatatggaaatgacgttcaagt

SEQ ID NO: 11552 - DNA, 691 bp, Gossypium hirsutum
  misc_feature (652)..(652): n is a, c, g, or t
  misc_feature (654)..(657): n is a, c, g, or t
  misc_feature (660)..(685): n is a, c, g, or t
atacgcacatacatgcaaatcagtaaaaagaaggggagtagctaggcatgggccccaacccccctccaaattttaagacgattcttattgtttaggctatttaagataaacaaggataaaactgcaacattaaattattcttatatcatgtaaatttagatttcgtccctcaaaattataatttatatgttaccccttttcaatttaattctattaaaatttcattttcataacacttttaatatatatcacttattactttttttagtttaaatttgtttacatttttattaatcaaattaatatatatttactcttgttattttgttagtaatatttttcatcctacgctcataatgaaaaataataaacttaaattatgtttattcttaatataaattgaagattacttatttcactttttctaaattaaaatcatttcatgtttttatatcataatattgaataattttattataatttcttaaatgttgagacttcaatagttataaaaaaattaagatagtaacgcgaaacataatttataatattttaaaatcgaaaaaaattattccaagattttatataatattagtaatttaaatactatataatatttaaatatggtgcttttcagggaagcagccttgangnnnnggnnnnnnnnnnnnnnnnnnnnnnnnnnaaaaaa

SEQ ID NO: 11553 - DNA, 643 bp, Gossypium hirsutum
cctaaggtctaccaatgtaaactcttcccttgtatcttaccatcccattggcgaatgtaaaccctgaatctcctccttgttgtaccactaagccagttaccttctcttgagcccattgacatgttaaaaaaattcagtttagaaaacgtgtttgaagcacaatggaaataaaaaaaatttctaaaaaaaaccaagtcattatattatttattgcaataaaaatttttttatattaattatacatgtgttcttttggatatgcaaattaggtcattcctgtctttcaacctttcgattttcttctctaatctcgaccgctgtttgttagagtgtgactctattctcaaactaattactcaagaaaaagggaattatttagtgtagaataaatttattgtattttggcaaagtaactttttaggtgaatggtgtaatttgatgtaattcataatctctgtttatagaaaaaataataagagtgtcaatcaaacaaggtttattcgaataataatattttaataggaaaaatatactcctactaagagtacatgaaatgggtggcgacaacaccctttgggaactctagggttgccaccccttgccttatatcgagcttattgggcctattccgtatatcgggtaa

SEQ ID NO: 11554 - DNA, 654 bp, Gossypium hirsutum
tttcattgcgtcaacaaagcttcaagtaaatgttcttttacatatgttccacgaatcgggtcatttcaagtgagttgaatgagtctcatttaattaattgacctccataaaacgttctatgcacatttgtcatggactttgatccacgacccgtgacatttgtaacacattcgaaaatttttttaaaaaaaaccctaaaccatttttctcttctaactattttaaccttgaataattattttaaaccatttttctctttaacacattcgaaaatatatattgttttaccattttatcttcaagcctaagataataattttttttatcataaaccattaaggaattataagttataattttttatatttataatatgttgtatttttgttattttatttgataaaaatataaaccataaaatgaacatgcataatattaaaaaatatattctatatatttatttctagtaattggcttaattaatttttattaaaacctacagaataatcaatacttttatcttgttcatttgtggattcctttattaattggacttatttgaaaacaaacaaggcttagggctgattcaagcggcaaaggatatcacatttagtagtaatactaattttttgttagtttgaagtacaatccaca

SEQ ID NO: 11555 - DNA, 430 bp, Gossypium hirsutum
tgttctcgtgtttacaatagatgggaagaggaaagaaaggcttttagccagcaacaaatgagatgcttaccaaatatgtcaattccaagttgattataaattggagagaaaaagccatccacgaagtgaataaaccaccatgttacatagaaagtgattgctataggaaacaaaatgacactgcaaaacaactacgcatcattagttaaatcatcattttcactcactatcaaatatacaacacaagatgctaaaccagaaaatatcattctttttacaaggaaatatcatagagatgataatttgacaaatatgaatcttgagtttataaatctaaagtaagaagatataagaatggcacttaccatcctgtcataaacttcttagaagcccaactcctgacaaatttgtaaaaggtctgcataaaaca

SEQ ID NO: 11556 - DNA, 414 bp, Gossypium hirsutum
atgactcagcctgatggattcaaggttgctggaaaagaaaattgggtttgcaaactgacaaagtcgctttatggattgaaacaatctccgaggcagtggtacaagcgatttgatcagttcatgaaagggcaaaggtacacaagaagtaaatttgatcattgcgtgtattttcagaagctacaagaaggaactttcatatacttgctcttatatgttgatgatatgctgatagcatctaagagcaaagttgagattgagagattgaagactcaactcaatctcgagtttgagatgaaagatctaggagaagctaaaaagattcttggcatggaaatatgtagagatagagctcatggcagagttagcttgtctcagaagcagtatttgaagaaagtactacagcagtttggcaaa

SEQ ID NO: 11557 - DNA, 597 bp, Gossypium hirsutum
  misc_feature (508)..(508): n is a, c, g, or t
tctgagtgatccagagcttatctggaacataacttgggggatgctcttggtacgtgcgcccataaaccattttttcttttgcttccctcttaatctgaacattttgtgataaaataagagaactgaaaagaaaagctgacatgcaatgttataaatgtacttcattttgaaattaggtgcatttctttgatttttatggacgaaaattgaacactgtggatgttggtgtatcttgcaaagagagaggcactttctttttgaagagtagcaaagggtaaaaggaaaaaatttccgtcatgctgagttgatcacttttcttcctcaattactggtgactaaaattgtatattcttcttttggtttgattcttctttaggttttcaaacaaaggacgaccatttctcatctccatcgaggacccacaggttgccctgaatgttgttacttcttattcatgctttggctgctgagttatgctctcgttttttttttttaaatttattaatcncttccttatgattaaacaaaccccaaacaatgactttggaaaaaactcatttaactatatccgggtaaaaagtttttacctttctagtc

SEQ ID NO: 11558 - DNA, 600 bp, Gossypium hirsutum
tttccttgtgggtgacaagatcaatgcttgaaccctgatataacaccagttaacattataaacattgaagattccaacgacataataaattgaagactaagccttgaaagatgggaaatccatcatgagatttgaagcctcaaagactaaaccctaacttaccattaagcaaattatattatttcaaaattagggttttagctatcaggtatataagaattagggctttcagggagcaaatgcatatcaacgtataatggaaatcaccacaaaagaactgattttaaaatatatataaaaaaaaaagtaaaagtaaaaacatactctctgctagcggtgtcgaccacttggcaaacggtgagggcaatcatggaagttttgccggtaccagactgggcttgcgcaataacatcacggccgttaattatgggcatgaccgctctctgttggatggcagatggcttttcgaagccgtaattatagattccacggaggagatcgtccttcaaccccatctgatcgaaactcagtatgggctcgattccttccgtcgtctcgaaaactaacttatcatcgtcggcacccatacgcccgaacaca

SEQ ID NO: 11559 - DNA, 584 bp, Gossypium hirsutum
tgaccattaaaccgataaaatcgataccaagagaaaattatcgatactaaataaaaggtatcaataccggtgatagtactagaaagaacatatgttatctccttacttattggttaatctgtccccatttagttatctttagcacatattttagcaattttagttcaataaattatattttataactcagtagatcttagcctatttatccttaaattttgccatgttttggtaccaatctcgctgcatgagtattttcagattgcacccagaattgtctctgcacctgacagttgtcaagataagaacaaaaatgtgtgcgatgtctagtctagtataaccaacttttacatgcaaaggcaacatgattctgatgaaaggacacctgggctatttggaagaatataaatattcacgtgaaaagaaaaaaaaagtaaggctttttggggggtattatcttcttcaacctatcttttgaagcatttctatcatggcaggttaagcttactataggtgaactagcgtgaaagggatacagattagctcttgacgaggagccctgagtgcgacacaagagggagttg

SEQ ID NO: 11560 - DNA, 485 bp, Gossypium hirsutum
taattcatttgtgccggaaaataaaataaattttttaaataatatcttttaagttataccatccttaacggtttttcgtataagtaaatattgtctcattgactacgtaaggtttaattgatattaagttacggacaaattataatgcaagaagataacttatattagtaggtcatctcaattgtccatagtccatagaatcagattgagcaaatatttcaattaatagcagactattatgtcgtctacagatccaattgggggagatagtttgtcttagctattggagtaggattgactcccagagaaaaaagaaataaatgtgattttctggactgacaatacattagacacgacccgagttgaatcaatcctaaatccatttatagatttatttacttgtgaagttcatagtgtacgtgacttacttaaatcctaaatgaatgaccataagtgtgtaactcatgtgttttaatatattggaa

SEQ ID NO: 11561 - DNA, 669 bp, Gossypium hirsutum
tttttgagactggctcaaattaaggactctcacctttctaagtcctgcaaagagattgtcatggattttgttaataggattacccacaaggattatcacggttagctcggagaaacccgagaattgcttcggtggctttgtgatgttggtaaacaaaatacttgcacaaggttcctctgagccttgttttgttgatatccatatggctacatccctgaccacatcatgtaatttcacagttccagcacaatcaccctgttctaataagcaagagtccttcagagtttcaatcaatgctatcccatcattgaaacaatcttccaaaggctggtgttcattgattaatctatcagctatccagcattgaatcaattcatctgttctgatcgaatagttttctggatataaagaacaaaacagaaagcatgactgcaggatcttacttggcaatgagtcgtaactcaactttaaacgacgatagacttcgtcctcgatgtgtttgacgtgagggtctgaatgctgcaaatggtgaagtgcgtgtttccacaactcgatccttcttttgttcctcattgacttcccaaccgttttgagagctaatggcaaaccactgcattcttttgcaaccgcccttgctagtggattaatgcttggtacttcaaccacatc

SEQ ID NO: 11562 - DNA, 627 bp, Gossypium hirsutum
  misc_feature (59)..(65): n is a, c, g, or t
  misc_feature (318)..(318): n is a, c, g, or t
  misc_feature (321)..(321): n is a, c, g, or t
  misc_feature (328)..(328): n is a, c, g, or t
  misc_feature (330)..(330): n is a, c, g, or t
tagagttttacactctacctgagtatgacggcaattataaaagtccaggaaggaatcgnnnnnnncagagttgcaacgaatgtcggagaagtgtatttcaaacttgcaaagtgcaggttaagggatgaacagattctgtttttatcatcaaagggacaaaataaggaacaaacgttataattcaaactctttgaatcaaattggcattaactagaggtagatggacgtttataatttactctaccctatgagagaaagcaaaaagaactccgaaaacagtcgaaacgtaaggtttggcctcgaatttctgcaagacanaanaacccgnanaatttacagtctcataaacacagtttaaaccagtgttggtataacaaacctctcaagaaaataggcaaaaggaaacatgaggcaggcagataggcaaaatcggtaagtgacatatatatgtggattcagcccttgactgaaggcagcttcagtaaagaaatacacaattgcataaccgatctgagtcagaaacatgattagatgaggcttatatctttccaaggttgccatgaatgtgcaggccatgtatccccttgctttctgcaatgataattacagttttttttttttcccttt

SEQ ID NO: 11563 - DNA, 635 bp, Gossypium hirsutum
  misc_feature (490)..(494): n is a, c, g, or t
  misc_feature (496)..(496): n is a, c, g, or t
cagttcctcacctttaattgctcccttctccatcgccctttctactgcatttaatcacccctcatctgtaattgaaaactttgctcctctgcatagtattgccaaaattaaaaccacttttacaagagataaaagtactaagtatactttcatgctattatttatttgtctaaagttgcagttttcctatgcagctttccttcttagtagatgctttgccaatgagttgttccctagtgcaacgcaatggtgcaaatgagtcctgccatggaagtcgcgcatatttatatcagcaccaaactgcagcagcagctcaagcatcacacagttcccaccttggcatgcctgatgcaacaatgaacaaccttgtagacagttccccgggtcattagaatccttgattctctgacagtccaatggatcatgctgttccttttcctctttctggctttcaggagacgagtcttgtgcatcaacaacattatgtggnnnnngnagggatcagacatcaaagatctaagggaaaaagccaacgcaccaaatcatatgcttgaattgccagggcgaccttttcatccgcaatcctaacactatgcttttgttcatcaagtgcttcttcggagaatctgagaagc

SEQ ID NO: 11564 - DNA, 501 bp, Gossypium hirsutum
acttgctattcgccattgtcttgcatgttcttcaatgccaatattgtatatcattcaccactaggaaatatcactgttcatatatttcaaacaaaagtcctttcattctaaaacaagaagagccttctccgtatacagaaatacgactacttgttacaaactataactatctttaaaagtcgtctccttagttagaattgtttgatttagaattgaaagggtttgtttttgttgagtgttttttgtgtactcattaaagccaattcttatttatatgttacagttccatgatttgatatactaagattaagtaggtcttcatacaggtcaacacgtataggttaacatgtgtttcttgaataagggtttacctgcatggtgatacgaacacatgcaagcgaactacttagtggcaaactatatatcaacgagctatacatgctggtttggttgtgggttggtatgaaagttgtgccggtctaagaattgagtagaggtgaa

SEQ ID NO: 11565 - DNA, 467 bp, Gossypium hirsutum
gctatgaattttatttagttgattggaactcttgatggtggaggagtcggcttgagaagacgagcgtttttttgacccaacggatattaggcgaaaatcctaagggagaaataggaagtaaaggaggcgttgctggttcgtgttgagagagtaaattgttgtttcatttggcgctcgctttctaaggtatgggctgatattcgtgagtcgtgagcacacttgttggtctatcggagtcggttagatgtggcttgtggatagatcttccgataaattatgcccacgtggtaccattgaagagatgaaggttataaacatgacaaatgcccaaggctgatttggagaatgtcctcccataaattaaataccatgaatgccccgactgaagcactgcttcggggaaattcttttctgcagataagcgattgggatctgctgagtcaatcttggcagcaaatttggagata

SEQ ID NO: 11566 - DNA, 592 bp, Gossypium hirsutum
  misc_feature (58)..(63): n is a, c, g, or t
  misc_feature (413)..(415): n is a, c, g, or t
  misc_feature (467)..(467): n is a, c, g, or t
  misc_feature (469)..(470): n is a, c, g, or t
  misc_feature (486)..(486): n is a, c, g, or t
  misc_feature (488)..(488): n is a, c, g, or t
  misc_feature (533)..(535): n is a, c, g, or t
  misc_feature (540)..(540): n is a, c, g, or t
  misc_feature (549)..(549): n is a, c, g, or t
  misc_feature (552)..(552): n is a, c, g, or t
  misc_feature (571)..(572): n is a, c, g, or t
ctgtttgattgacacaatgttcctggaaaccgcctgcttactgacaagcagcatgatnnnnnnctccttttcatgaaaaatctagttttgtttttcatctacattgaagtttgatttgttttctaaatattgggataatttggagagagttgttttcacttgtgttgatcagattattttgggacgggttccctggaccggacctggttccggatttctttcccccatcccccctttcctaattgaaggaaattgaaaactctgtaaattgattttgggaaaaggaaccaccggctaatttccctttccttttccttgcaccttttggaagcttttttaaagcgtttaaaaattaaaaattttttttcagaccgggggggtgtgtggtgttatttctcgtggataactactgnnncttgccttttctttgtctttctatgtttatggggttagctcatatttccccntnnccccctttaataaccntnttatacaaatgaacctgtgttgcttatcgtggttattttatgatnnntatanttcttgcanttnttgatattgtgcagtttgnngggcaggttcttcactctct

SEQ ID NO: 11567 - DNA, 590 bp, Gossypium hirsutum
agcagaaaaataatgagaattctagataattccactttagtcctagtttattaagtaaatttttgcaacattccaattttgcccttaactcatcaattttcctgctgatttcatgcaccttgccatccagcccaaatagacctggggtctatttgccttttaaaccctatttcttttatcatttaagctatttaatcatttcccataattttacatttgttacaatttaatcctttttattcaattaactatcgaaactttaaaatttcttgacgaaactttaatactaacttattaacactctataaatatttataaaaatatttatggctcgttttaaaaatttttcaaactctcgatatctcgtttccgattctaatttaatttttttatttctagcacactattcgctatttcaaaaaattttcctaacttcacacttaacttatattcactaaattattaatattttctactcatttgtcggatttagtgatctcgaatcactattctgacaccactgaaaattcaggctattacattcgacctatcccaattctcaagccggcttgtcaaagctacaatgaatg

SEQ ID NO: 11568 - DNA, 632 bp, Gossypium hirsutum
tgcagatgttgagatttggcctgcaatgcaacattggaccgttggcagcttggaaggatgcatgaagcagtagcagctcagcctaaagggcacaatcgagctgagttcaaaagcagcaactagcttagctgccttgtttcgttttgttattttggttcatatgtaacttgatcaagttagcttgtaacttgacatcaaagtttgtaattttttgtttagtttttttatttgagtttgatggatgtaaggctggccataccagtttgcttttatcttgtaatttaagttagcttaagtctcttattagtgggagttggtaaattattaggtaatggtcatttgacttgttaactttgcatttattttcatcatcaatcaatgaaaattgctgctgattttctcatccatttttagtgctcaagttctttgctttgctcttggtttcattttagttcttaagcaaataggatgttatttttatgtgttgttgcttccaatgtttcaaaaaatggtattaagagcctaagtctttgagggccttcttttgttggttgttgtttgtttttgaaatcaagcttaagaaagtaggaaaccgaagctgttgaacttgttgcagcaggatgagcttcaca

SEQ ID NO: 11569 - DNA, 692 bp, Gossypium hirsutum
catactcatcatgccccgccccgatcgctgtatgagatttttattttaacaacttttcgtctccaatttcgttttgattaggtctacctcaaaatcccccattcatcatttatttaatattaaaaaaattcattgtaaaaaattaattaaaaataataatattttgggtcggagtaatttgaacagaatcatatcagtccactagaataaacgaataatccaaaccttcaataaattgatatattttatggtgtcaatattttttatccattgaatgttaacttatttagaagactttattattattgtaacgataaaaaagacatgagtaaatatttgactaagttggataagttggaattgatgggatgttttttttctctcaccactaccatgaacaacttgtcttccatagaattgatttatgtcgccaacataaatggaagaagctgtagatagtattagccccctttggattaactaggttagtgcgtttgaatttatatgcttaagtcaattccctctaagtcacctccatgagctgaaatttccctatctagagggtttagtagacattattattagggatggcaaacaaaaaattgaaatcaaaatttgtagctattattattaggaatggcaaaaaaaaaattgaaattgaaattgaaatttgtctaacttaatagggttgg

SEQ ID NO: 11570 - DNA, 447 bp, Gossypium hirsutum
tttttttaaatagttggaagagatgaagcacatgacaaggcaggagtatgttgcttcactgcgaaggtatagcattatataaacaatggcatttgcatatatatttgatggaacaaaacttatatatacaaatattacaaatgcatgaaataatggtacagctttatgtgtttcaaatttgttgtagaaagagtagtggattttctcgaggagcttccatgtatagaggtgttacaaggtatatatattctttaagtatcgaatttgggtttatgtttttatgtgttgttaatgaatcagatgatgaaatatcgtgtaaaactcttgaaaacaggcaccatcaacatggaagatggcaagctaggattggaagagttgctggaaataaagatctttacttgggaactttcagtaagtttacttcaaatttctgcattgttggagcgt

SEQ ID NO: 11571 - DNA, 645 bp, Gossypium hirsutum
  misc_feature (5)..(5): n is a, c, g, or t
ggagnctggaccgcttagatattggctgttggggacctgtaactttctcatggatttctttgaatggtagctagccttgtaggcagaatctgatccattcaggaacttacctgtcgagagtcaccggccttaaaactttgctagggtcactctatatatgtataaaacctactcatctctcaaacatggtgacagtaacatgacatatatatatacacacacacatttagttgctgatgatctcttttgaaggtcaaaatcaccaacatagaactgtgtatgtgaataatgtaatttgtgtttcataccttggttacgatgctggtgcattagcctttgtaagtcgaatgaataatgaataaaaggttcatttcccgttcatcaatagttagggtttagttaagacttttggaatattattgttcaatttgcatgtcacaattcacaatctctctacatttcttatagaggttaatgtaagttaaattatataacacatataaatccatatattttatacttttcaagtatatattatctttaaactcaatagcgttttgtagtcactcaacttaggtattcaattttagatttttttttagcactcaactatcttagatatttggatgttttcattattacgtt

SEQ ID NO: 11572 - DNA, 602 bp, Gossypium hirsutum
  misc_feature (599)..(599): n is a, c, g, or t
cgagcattattatcttaatgtgcaattcaaaataaatttggacatttatttctctagatgtattttagatgtaactttttaaattataaaaatgtatacaaaaatctattacaacttgtaaaatattataaaaattataaataaaaggaaataaaaattcaaaaacattatttaaagaattcaagtctaaaataaacctagataaatagatatccaactttatttaaatgactttctagattttttctagatatagttttctttttaattaaaaaatatatacaacattagtacaactttgtaaaacatagtaaaattataaaaatagagaaataaaaattcaattatacatatatactaaacaaaatgtatttgtatatatatttttattttattttatatacatgtttgatcataacaatagtaagtttatttctcaaaattgcatgttacatcttgcattgaagttaacaacagacagaaaatgatcttgaaagtatatcaaacaccaatacaacaattaacaaattatatcaaacaccaatacaacaattaacaaattagataaaacatgaaccaattacaggaacttcaagaancct

SEQ ID NO: 11573 - DNA, 270 bp, Gossypium hirsutum
accattaaccctaacactagccaaaattaagtcatatcgtttaacctttctcaatccacctttgtttacttttaagtatttgggtcttaatggatatatttttgtagattaaagtttcaattgggataggtagagacattaagatgggcattttcgataagagaatggataaagcatgaaagttagtctttgtcgactttcttattttattttcttttgttaatttattttggctaaaaaaagaaaaaatgaaagaaattgtaaaaaaaa

SEQ ID NO: 11574 - DNA, 410 bp, Gossypium hirsutum
tttttggtcctgccattttgattagtcaattagagccctagcctccaattcttaaatacctctcatttatctgtcaaatttgaaattaggcatatttggtcctaccccaattttgaatttttaaattgatggattaataaataaaatttcaaaaaccctttttttatttttaatttcatattctagtttattcttatttgcctatcttattcaaattatttttttatttttacgctaagctcttcgttatttgtctacacttcccaaataaaaatttccccccccacgtactagacgttgcaattcgtattaaaaggaaaaattataaaatcttatctatttttttagtttaaatttaatcacgtgtggttactattatatatacatatatatattatttcctactatta

SEQ ID NO: 11575 - DNA, 666 bp, Gossypium hirsutum
ccttgtgagtacaaccaccagacatatctgcagaatggcaagaggaagtgcataatcaagggggttatcaccctggaagaaaccattcgatgtagccttcatcggccatggacatttctgtcctacactagtattagaagccatattccactgagacaacaccaacacagaccaacactttacgcttcagttcctgcaatgacagatagcttgtcaaacttcaaaatcttataaaagaacctacacatccactgagactgtccaaataagacatggtaagctggtaacaatataaaaactcccccttctctcctcaaagaacggtcagcttttgtcattctcttttatccattgaagttgcaagaagtgaggtcagcactaaattctctttctcatattttaaggttactacctgagctttagtagctgctttataacaagaatatcctccttatggagcttatagaaatcacactacaactttaaatcatatcaaaaggcctaatatggattttatttgatgcatgcgtccacaaagccaccatataaaataaactactaagacaaaatgcccaaacaactcaacataaaacactgtaggatcaaaatatcgctggcccaccagatacccataacagagatgactctccgcaacaacttcattta

SEQ ID NO: 11576 - DNA, 645 bp, Gossypium hirsutum
caataacatccaaattaacaagatttcatcaatggcatcatttaaaatctttaacagttttaaaaacgaaggtacgggttagttagacctagttgtaacgatctaaaaacataaaaatcacaagaaataataaaaaaaattactcacatgcatgcatccaaagcttggttgaaccctaaccttacataaacatggtgtttctataacagctcagttttagctaaatcagaacagtggtttcgggaccacaaattagatgtgaaaaaactattttaatattatttttggtgtttatagcatgtgagtatatatgtgtgaaaatttcatgagctaattttatcatttaatagctcagtttgagaaaaaagattaaatcgcataaaatgcaaaagttgtgttccatttgataaaggtgtctaattgctatggattattaaatgaaaggtccttatgttgatattataccattgacagtgggaatggtcacaaatgggcatatattagatgattttataaaggatttattaacgtgaaaattgtaagttggcatgttagttataattaataagataaatcaagaacattgcttcattatcatcttgtctaactaaaaataagaagaaagaataccatatttagggattt

SEQ ID NO: 11577 - DNA, 601 bp, Gossypium hirsutum
gacacatggcactttgtaattggtttaaaaatttatttatctacaatataatctcgaatcttccatactaaactaaaagcaaagaaaaaatcattacgattaattaaattaagttctttgtttgggtaaagaagtgatgaaaaaattttctgagtttcgtttgacatagaagacaaaattaattcaattataattgtaatgatttttctttgtttttagcttagcatgaaaaacttaagattatataatcaaaagaaatttaagtttcatagaccattattaaagatgagttatttgaaaacataaaataaaaatttaaaattagaaggacattgaactagttaatttcaatattatggtaacaaattagttgatattgtcaagggattaatttttaataatttatttaattgaattttatgttttgaaatgtaaatttcaatataaaaataaataaatttaggactttcggcaatggggtaaataagtacaatttaacttttttttttaacattattttagtttctatcactttttcttaccccaaacattacttaaaaatggtattttttttagtgaccaaaaaaaaagtgacctaaaa

SEQ ID NO: 11578 - DNA, 697 bp, Gossypium hirsutum
cccaacttgattggagtttggatatgatttttaaaaaattgataggattattttggattactatttattaaataaaaatatttttattaaatttaattataaaataaatattattttttaatattaaataatgaacttagatcaaattgagttaaaattggtgggaaaaaaaaagcttgaataaagaaattcaagtcatgtcttgacttaagttatgcacaaatcttaaggattaagtttacaacaacaaatacacaaacaattataagtaatacatattcaaattaattataataaaaatgaagcgttacagagcacaacctaactaatatctgaaatatatttggaacaaaattaaaatagtttcgagaaagactcaaacataatgaaattgaagtgaatccacatatattacaacgcttcaaccttattattctatctttattcatcatttgtgtttatacataacaatcatcctaaggtggaataatataaagatcacaagtaatttaaatataaagatgtagagagacctaacttaaatataaagatcacaagtaatttaaataatgtagattaagcagagcatttgataagcagtatcgacagtgcaaaattcaaagagagtgacgtccacaaaatccctttttataatattacaagtctaactcccgacttttacttctctcaaatgccc

SEQ ID NO: 11579 - DNA, 585 bp, Gossypium hirsutum
tgccaatctcgttcgagcattctattcgaatgccttgctcgaacatgatgaaatgagtgagatcgttgttgctatcaactcttttttaatgaatacccctattcgtctcaccatagaaaatttgggagaacttataaaacttcccccagtggcgtgtcgaatgagaaaggctcatataatctggccttgaccaatctgagctcgcatgcattcgagctcaatatccatgatcgctttctacatttaataattacatggatactacgtcctatttctagacatgctataattcaatccatcaattcttggtggattgattgtttcaaaacaataggtttctcgacctcatacttatcatgtttaatgacattaccaaggtcattggtaaggagcttaccagcacttttacttttccatttgaaacgtgcctatcttacatttgtaaacatttgaaaatcccaacccgaggtgaccctactttggcctcgcctactcctcttagctttggtacccttcaacatgctacatataagaaggatccatacactagtgaatgggtcaaggatgtccaaccaacagctcatg

SEQ ID NO: 11580 - DNA, 667 bp, Gossypium hirsutum
atccattatttaggcattccaaatttagaatttatactaatatataattggagtgactgacttgaattatccataatccattaagtaatagatatattaatgtcattttaccttctttacaaatgaaattctattttgaattaattttattttttacctgcaattataaaaattacccatttcttcttgagttcatcttccttttgcttatgtttctgccaaaatctaatattagcaagcctaacctttctacttatagtgtgtcttttcatgattctatttgtatagtagataaattaaatatctccaagtttactttaatctgtgatggaggagtaaccggttgcccattgtggtatttggcatctataagatattatttctttgctttctagacatatgatacatgttagagagaagtatggcttgctgacagaagtgtttgccttttatgaggaatcacatctgtggagcttgtggatgtctgtccttgttgatcttcaattaaacattctatgttgacccccccaaaaattaaatactcagtcatttgtggaacttttgttgctgacattttaataatctggttctcttttatactctttcttggtttaacaccagtaacaagaatttgaaatagcttaataaatttgacaattcacaagta

SEQ ID NO: 11581 - DNA, 525 bp, Gossypium hirsutum
tcatgatcttgaggagaagtgtgataaagaagttcaacaaattcattctagtgataatttaggagatctttttagaaaaacaatgccaacttcaacatttgaaagactactacacaatattggaatgcatcaactcaaatatgtaatgtgatgttgccatttgggggagtcaaaaacacattgcactcttttcctttaaccaatgtttagtcccactgggtctttttggtaaagttttttaacaaggcagcttatactaatatattatctactcttttccatcattaggtttttatcacataggatttttcctattaatttttttacgagacattttcattaatggacatctaagggggagagttgtaaatccattgataaatggatgtccataacaccctcaaatttatcctatgtaatccttaaagaatgaatgttcataaaccctaaatcatttttaaggtaccttaatgttggccattaatgctttgtaacttatggtacttgaagccttataaatagagg

SEQ ID NO: 11582 - DNA, 685 bp, Gossypium hirsutum
ttttttttttatgtttatgctaagggcctgatagtttaaaaagaaaacaggaaaagaagaagataagattgtctcaaagtaattaaatcctttagattgagtggatgccattccaatgacagcttgagaaaaagacagggactcccttgaaaattttctccaatgacaaagatgtcccaataattttccctaaacaagacttaacattctacaatcccttaacacttaggaaatagattcgagatttcttctatctaattgtcaatttattattttatttattacaaataataattgctgatgtttatatgagtttgatttgaagaaaaaaattcactgttttccattgggaccaatggatgaatccataaacgtttggccacccaaatttctcatttgcctagaatttaccaacacaaacacaaacaagataaggccgaatcctatgtaattccataagcaatcttaaaaaatatcacgtatattttttaaatatttatttttaatattttattataactctacgaaacatttatcaattccttaatcctacttataaaatataaaaactccgctgtagagttattcatattattaaaatattgatagttgtaatgaatctcaagtaaaatgataaaaataatctttaaatccttaaattattcttacctcactcgttatcaca

SEQ ID NO: 11583 - DNA, 592 bp, Gossypium hirsutum
catctagcatacaaaaactaatttactatttttttaataaaaaaactaaaaagcaatccaatgtataatacaaatgatttcgtgatacttttttttatcaaatatttataattctaaactttatatcacaaataacatatttacacgtatcattataatagagtgtaacttaagctaagttgattaccttttatttatccactaaaaaaaattatttcattttttggagattcataaaaaaatataatatttttcctattatttaatttctactgagtatgccacgagttaaagtgcactaattcagttaaaaaatattattttgtatttaaaataatttatattagtcgagtgtattttaatctttttattttttaaaaaatacaataaaaatgtatgttatgggattacagtcacactaattgcatacatgaaactaagtttaccactcaacaaaagctctaatttaatttttttatacattttaattttattacatacactttattatctacattaattgtatatatatattattatttaagtccttgactaagttggtgtcacgagttaatcgggcatcaacttggtt

SEQ ID NO: 11584 - DNA, 607 bp, Gossypium hirsutum
cttattccctccaggatgcatggcacatagtcccccatgagcttccttcaatattgtctgcctcaaatcagagtccttcggaacacaaattcttcctcggaaacacagaactccttcgccatttaacccaaactcagaagtttccccttccttaacttgttgaaaacgagcgaccaaagactcatcgttcaactgcttttccttaatctgatccacccaggttggcctcacttgcaactcagccaacagacttccatcatcatacagactcaaacgagcaaacattgctctcagatcagatacagttctacgacttagagcatcggctaccacattagccttgcctgggtgatactcgatcgaacagtcataatccttaagcaactcaatccatctcctttgcctaaggttcagctccttctgagtcaacaaatacttaagactcttgtggtctgtgtatataatacacctttctccgtacaagtaatgtctccaaatcttaagtgcaaatatcactgctgccaactccaaatcatgagtaggatagttcccctcgtgaggcttaagctgtcgtgatgcatatgcaaccaccttaccctcttgcatt

SEQ ID NO: 11585 - DNA, 378 bp, Gossypium hirsutum
tcgtgtaggttttttaatctcattgtatgtaattatcatacgtgtgttttaatttaattactccagtttattggctttaattttgattatatcaactcttattcttgttaagttcaggggagaaattagggagactggcaaggaccccgacccccctaaagtgaaaaacttttttttaaaaaatttaaattaattgatgggtgtcgaaaccaacaaataaaaataattcttacaataaaaatactctaaacagtaataaaaaatagtaggttgagtccacaggaattggtgatttagatcaattttcatgtttttttttgtggacaaaatttttatcatggcgatagtcgtacccacaactccaaatgacttgccaaa

SEQ ID NO: 11586 - DNA, 662 bp, Gossypium hirsutum
ggtgggagattcgggagaagtggtatagataccgtcaaaatgaagatttatgtcccctccagcttcaagatcatccatgtaagacatatgggataacctccgagaatcccgccaatcaaggtattgatcttgcccttgtatgcttctctcggataagttattgtactgacagtctgcaggatagcggttgaaatcgggaggctctagaaaacttgcttggggctgtgaaccgtgcaagccacttcggtcccaccaatggctccatgtatggtgtgccaagtcatttgcatcatgatgctgaagtacactgtcatggaagaaaggagctgatgtcgaagcttcaagttgcgactgcggccaattgtcatagtggtgtagccagtgatcttcatctattccttcattatgtgctaggctagttggcccccaatagtccccatgctgttgctcggccggttcaaattgccttgttgtggtgtctctcctatgacttctcacatggtgaggtcgagaggtataataccaatcgagaagacacgggtgattcttttgaacagcatcaattatccatgaagacctcgaatcattgccggagcccggaatattgtgttgcatttctcttgatgaaaggccgtttctatctctgtaagctctctgtgagc

SEQ ID NO: 11587 - DNA, 615 bp, Gossypium hirsutum
tgtttcaatctaacccatccaagtaacaaatttaaaattaattattgcaaaccttgaataaatagataactcaaagtttttaaaataaagttgtggattcttttaaactaaaatttcggatttaaatttataaataaaaagtgtcaagaaaagaaaagtactaacgttgcttgcactccgattccgcgaatgcatgcatacatgatgtgtatacatatatacggtgtactactccccatgggaacttcacgagtggttttagattaggtataataatttttttaacctttaattttataaaaaaaaggttattttaatcataaatataatttttcgtttttttagtcttaaaatttagtttttttggtcaaattacgttaagaaaaataaacatttgtcaattttattgataacaaatgtattgtcatgtagatgagatatcaacatttttcttttaatttataatttttacaaatttttaatagttttaattttttttaatttttaaaaataataattatagttttattgattttttaaattttttttaaaattagttaaatgttgatgtatcatccacgtggcaatccgcgtgtatgctccgtccacaaattt

SEQ ID NO: 11588 - DNA, 553 bp, Gossypium hirsutum
ggtgaattataagtggaaggcaaaactctaacaataacacgactaatacaatttaaatctagatcacctttaggagaatgaacatcttgtttgttaggggaacacacgaaattctataatatagtaattattgattgccaaatcttagacattgcaataagcaatttagctacaatatagtaattattgatgggccaaatcttagacagcacaataagttttaagatgagatattagatccccagatttaacaacacctttagcgacttgggaggataaatatttcaaaaattcttcatggtcatgaggtttgaagagcatgggatttttgtcatccacaagctcagttggaaactttaccatgtagcctccgcttacagttgcaaacagtgcaaggctatacgtatcttcattacccaaggctatacgtatcttcattacccttcatcatgacacgatgataaggcgaagacagtcgaccatttaaccatatctgcaacaatataaaagtctatgtttaagtaagttatttaaacacttgtgacccgtttgg

SEQ ID NO: 11589 - DNA, 678 bp, Gossypium hirsutum
tgatccctaaatcgattccttaccaaaggaatgtccatattttcagaggaagcttctgttattgaaaacaaaagatttcttcgttaaaatatatttgtttttagtgtcaactaattattgtcgatagacatgataatgcacgagaaaataaaaaaaaaattgatacacgaattttaatttgattcaattatatatataaatattgtattgtagtttatatgtacacataaaattttaattttaatttaattgtatatatttaagaaaattaatatatacatttatttttatatttaataaatataattatttgtgtatgtaatatattaacgcaaaatagtaataattgataatgttgttaataatttatgaaaattaaattaaattaaaatattatatataaaataacacaaaaaattagacttcatatttaatttcgaaatttgttttaaaaaataaacattctattattttttggattcaaatattaaatgtttttaattactgtttaagttttaaattcacttttatatttgaaaatcttataattgaattttattttaaagtattaatatcgtataagttgtggtattactgtatttgtgtgttaaatgtaatttgcacttaaaacgcatgaattaaagtatgagcatgtgtacttatggcattgggctcaat

SEQ ID NO: 11590 - DNA, 557 bp, Gossypium hirsutum
gcttggaatcgacaataagacagattgagccaaaatgaaccttcctaccagagacaaatgtctcacatccaaactatacagcttactccaaaccctatccacaacaaacgttaaagtactattagtaactttatcatcaaaagggggtaccccaaatacgtaccgaggttttgaaccttatgataacaaaaaatactactgatctgctcccccaactccttgttaacaccttagaaaagaagatgttcgtctttcgagaattaacttgtggctggaataaccacaaaaactttccatcataccttttatgattttggcttgctacacctccactcactcgaaaaaatgagatcatctacaaaaaagatgtgagaaagggtaggccctatgcgcgaaaacttggtaggcttccactgatccatggtaatggcaaacttaataccatgtcctaaccaatccatgctcaaaatgaagaggtatagaggaagcgaacgcccctattggatgcccctaataggtcgaaccttctcaattgggactctatttatcatgatctg

SEQ ID NO: 11591 - DNA, 663 bp, Gossypium hirsutum
ccatataattcctccccaaaagtaatatcgggaaattatattaggtctgatattatattttgtttcctttgcttggaaaataagtaaattaatttttgtatgttagatcaaaaataacatacaaaaataaattggtactttccattaaaaaaattcatccagttctactagtaaaaactgacattgctaatagaaaaatcaaatagttacatatgacgtgccacgtgtacatcatgttaacatatagaaactaatttttaacaataaaaatggacgaaattttaaataaaagagccagtttgctttttgatcatataaagattattttgcctattgtttgagtagtggagacaaaatacaatcctacttctaatatacgagcctacattgtacttttaccaatttgtactactactcataatctcactaaaatccttgaatcaaaatttacctaatctttttagggagaagtttctactttcgtttttatgcttttcgcttaataatatatctcatacattatatagattataatatttggtatcagagtcagctttggatagttgatactagcaatatgtcatttattatggtagactcttgttcaaataaaaaaatatcatggttctagataagagtcataaatctcaactcggttactga

SEQ ID NO: 11592 - DNA, 542 bp, Gossypium hirsutum
cttattccttacctcaatttgcaccgttgttattgcaattactaaacgaacatagattcaaatacatttaaacacgtattttcttctaatttagtataaaaaatcctttaaattttcctttaattttatttgaaaaaattaaataatataaatctatcaacatccactaaaatatcttttcttttacacagcaaaatattactagatattttttgcttttcttttttattatgtaaatcatgttcattaacaaaaatattagaggaaaatatttttgcatttttttgggtcttaatcaagtgatatttaatctattattttattttaaaaatattttttttcgataaacactagttgagttaaattaaagctcgatctattttaagtaagatctcgaatttaaatcttataaataaaaaaataatattaaaatttttttatcactatttaaatattcaaccaaactcgaatttaattttaaaaaatccaatataattactgaatcctgagaaaaaaaaatatgtttattcacattcatgccg

SEQ ID NO: 11593 - DNA, 636 bp, Gossypium hirsutum
gaagaagttagaggaggcagatgtgatgttttgataggctgagttcggagaagaaagaggatttgttacaggatctcttaggaactcaaagattaaaggaactaggggaagaaaatgacccacacacactgtttgaggaataccagttccctcgcaaaaggacatttgacgctgcaataacaaagaagaagggtaaaagaaatctatgaatttagggtttcattttattttagtttccttaggataatggctgtttgtttcttctacaaagtttaagcgcctgttttcaagccgtaggaaattgaaatatcaaggcactgcccacaggaagcaatggtttagtggacagatgataagattaggaggcacaatgattttttaggaatttgtaattttatttaactttctctaattaatgcataagtcgaatttgtgtaaaaaaggagtaaaataaaataaccaagcaacattttttttcccttaaattgactcattttgaaaaagtatttgaatatttactatgcctactcatgtattacctttttatactatattataaattggtctctaattttttaagtattctaattatatcttaaaaatattaatgttatatcaattaggtccctttcatca

SEQ ID NO: 11594 - DNA, 684 bp, Gossypium hirsutum
  misc_feature (678)..(679): n is a, c, g, or t
atttggttatgctctgttgaatattgttgatgtatatacgcttataatttagcaattgtatattatgttgttaaaaaaatagttgagcattactgagttatgagaaaagttcagtgtgtggatttgttgcagatcaccggtgatctgagaatggatagtgggatcaagcagcatcagtcttcaaagtttcgtcgatttttcatctttttaaaaacttttacttgtttttaacttttgaaatctttttacttatgttgagtatttgttttttttggaatggctcattcgcgtgtgtgtatatatatataagatacggtccgttgatgtgacgtgttagaggtaattaggtgtcatgcatggtgacgcgttatctcgcctagaggttatacatatcttagatactcttcagaggattatggttgaacaggtgataccatgcaagtcaccaagttggtaggctgtcaggttaacagtacttacgtgtcagacgtaagtcaccaagttggtaggctgtcaggttaacagtacttacgtgtcagacgttttgtattgctataaaacaacgtgtattttctattactaaggtgatcaaattttgaatgatgtggtgtataattcttaatttgcatgttttgtttgtacaatttagtatatctagatttatgggcttgggtattnntactt

SEQ ID NO: 11595 - DNA, 600 bp, Gossypium hirsutum
ctttttaggcacttggattgtcaaaattttgactacttgggtttaaggtatatggaaattaataacaagttatttgaattgaaatttataaatttgtttaagagttccaatccatttattcttcacaaattatttgaataccattatgcaaatttgaatttgtcggatattttgtatctgcaaaaaaatatatatatattttaaaattcataatcatcttttagatatccaaattcgtaaaaattcaaatttgaattaagttaaaattcttttttaaaatatataaacaaacatataagcaatttttaatatgtggattcagttatctgaatttgtatttactatctgaatcaataatatcaaatcgaatatccaaatcacctatccctagagaataactttttcggagtccatgattgtcattcctaacaatgttatctctaaagttcaaacttgaatttttttttaagagtgtaatatgtcatattactacatccaacacttatggtatcgtaaaatagttttaataattttttttttgttttttataaatcgggaaaaaagtattaaaaagaggttttatgactagcaaactagtaa

SEQ ID NO: 11596 - DNA, 469 bp, Gossypium hirsutum
tattttaaatcagagatgatgcgtagttaaaattttttctatattatttgaaataatcattattttaatcacatttttattgggtgatcgggtaataatgggttatggtgtgttgttgttttttttaaaaaaatttatggattatgcaataaatttaatttttccatgttaatgatgtttactttttttttattatattgttgataatataagtaatgagttgcttatatttctaaatataatgttatgtttcttatatataaataaaaataaagcatgccaccacatgaaaagttcccgactaaaggattggagggtgcaccaagtaatgatataggttggcactttggaactccagtgccaaatacgaaaggaaatgttgtatgtaaaccttatggtaaagttgtgaaaggaggaataacacgatttaaagagcacatagctcataaaacaggcaatgttgcaacat

SEQ ID NO: 11597 - DNA, 662 bp, Gossypium hirsutum
tgtgcacttagttagcatctcggttattgttgtagtgcgttggcttcagaccaacctctatactggtgtttttgatttttgagctatctgcctgatgttttaccttctttattatgtgatcagattcgtaaatctaatggagggacatatttggatcgagagtgacggtcttggtaagggatgtactgctatcttcatggtaaaactcggcatcccggaacggttgaacgaacctaaacttcctttcatgcctaaagtaccaacaaatcatggtccaacagcttttcccgggcttaaagttctggttatggatgagaatgggtcagtttcatcgtgttcatgttaaatcctatttatttgattatgttttttttatcatatttcgtagttacagatgataagatatatctggtactcgtgtttcttgcttgtttagttacatattattttcatgtatgcttcttccatatgcattaatggtaaattcacactgctatcattatgatttgcatatgataaaaacatgcttttcaccgagctgataaattgttacattaaatgggatggggtgttttcgattgatggactgatgtaggaataattcgattatgagtactgtttttttcctccatgccaagtgaatgaacatggagttgttatgc

SEQ ID NO: 11598 - DNA, 513 bp, Gossypium hirsutum
  misc_feature (62)..(64): n is a, c, g, or t
  misc_feature (470)..(474): n is a, c, g, or t
caggttagctcgggttggaggccgtcagagatattatcacactgtcgagttaacgctatcgnnntaagtaaactcaagtgattctagtctatggcatgtatagggttttaatgtgagtatgtaatattatgatttagccaaaggcattggcttgttattaaggtagtattgtaatattatgatttacccaaaggcattggcttgttattaacgcagtattatacatgtaaattggcctatgtctactactatcgttatggccccatatgattattcttatgcatgtatgttattatctcttgtgatgtggcttacaacatgtatgcctagagattgaattgagattcattgatgacctaatagctaatgcaagattaattgattggtaaatagttaataatgcttcatgaatggcttgtagatatgattatgcatgctttgtgatggacatgaggtttgatgaacagttnnnnngattatgcatgctttgtgatggacatgaggtttgatgaa

SEQ ID NO: 11599 - DNA, 648 bp, Gossypium hirsutum
aaggctcgacagctcgagaaatcatagaaaatgttggaagacaagggttgaacatgagtagcgccgaagacgatgataggaccaccgccaagattaagcgcattaagaaaagaactagtcggtctgaaagagcattagtaaggttgattcgtacaaagaatgggttgtcggagaacatgatcaacgcaacactggtggtagcggcgctggtcataacagcgatctaccaatcatctttaagcccaccgagaggtctttggcaaggtgataacacgagtaacctcaccaccacctcaaaccttactactaccactaaatttaaactctttaacgacaattacgatgaaaaactttctaaacatgtgtttcgtgaagaaacaatgaaacctggtacagcaatcatgaatcccaacttgtttttagggttttggttagtcaattttatagcatttgggcttccggttcttctaaccgttttccttttatacgatgtagctcgtattcttcttctcccgctttattttctatccgtctcctactttaactgcatgacattaatatctccgtccatgttttgggcaaacctcaactttgttgtcatgtggacagccattattctcccgtctgtcttagtttttggaggcgtat

SEQ ID NO: 11600 - DNA, 669 bp, Gossypium hirsutum
cctaattagacacactactaggctcataaatatttttaattattattttcaaacttatttcactaagacggaggaatgataacacacttttccggtgcccatggattttgggtcgttacaccaagtctttccgaatcggagaacgggttacggatatgagtacatcattttctttgtgtcatagtccaactatggtcttacacagcattgccatggcccaaccatggtcttacagtcgtagtgccataacccagttatggccttatcatcataatgccatagcccaactatggtctaacatataaatactgccatggtccaaccatggtcatacattcaaagtgtcataacctagttatggttatttccgtcaattcatcctttacattaatgccatagcccaactatagtcttacatataaatactgccatggtccaaccatggtcttacatttttagtgccataacctagttatggtcttatccgtcaattcctcctttacactgaacaattgtactcaatctcgagttccgttcacattgaacattcacttcaatttttataacttagcaataattttattttcaacaatagatatgaataaatacataataccattcatcactttaataaataaacattaaagtttaaccctttgagcttacata

SEQ ID NO: 11601 - DNA, 652 bp, Gossypium hirsutum
  misc_feature (591)..(591): n is a, c, g, or t
  misc_feature (596)..(596): n is a, c, g, or t
  misc_feature (604)..(604): n is a, c, g, or t
  misc_feature (606)..(606): n is a, c, g, or t
  misc_feature (609)..(609): n is a, c, g, or t
ctgagcggcaaaaggtataacaaatataaatgaatttattcatgaacataaataaataaataaaagctttacttgtactcaattcatttgataaactagctttaaaatcttgttctttgacttaataaacataataaatatacataaatcatttattaaagggttaatatatgccaacatacctagacttggcagattatatttgatacttaaatttttttttttaactaacaggtaagttgtactatttttatgcacctccgtaacaacattagtttttctatcaaatcctccagccacatgttgaatttttaattatcccttgcaatcccaaaatatatattcaggaaattgaacaaataataataataataataataataataataattgactttttaatttaaagaaataagaaaatctccagaatttgcaaaattgttaagatgaactgtatttcattaattacattttttaatattcataacaatttgattaaaacagctttgccaagaataaaccttttcattccatgattatgttaggaaaaaaaaaacctttctttcccccaaaacccttctttttcttaanagtcnaaacggtngngtngaaattttaaagctttcttttcttttatttgtgaatccattat

SEQ ID NO: 11602 - DNA, 410 bp, Gossypium hirsutum
ttttttttcatcgtttgaatgccgatttgcgaaaactaacttaatcgtgtaaattgtaaaaatggcttgctatttgttaaagtacttaattgctatgttcttttaatgttgtggccttaaaataaaattaggccattaaatgatagtatggacaatagcggacaaccattattaagtttttatattatttcattaagcatagtttggtaattatgttaataatgataataaaaataaaacaaaattggattttgtttgtcattttacactttgttgaccggatgtaagaaagaaaaagaagccattttctttgtttatggttcagcactttggagatcaaattaagttatggattttgttcgatttttgataatttttatgtttttgagaccgttgcttcgtaaagcagc

SEQ ID NO: 11603 - DNA, 574 bp, Gossypium hirsutum
ttcagaatgcttacccttcattttctgagatgccatgtaaccttcttcaagtgatgttaggaatgaattttatctacttcaattaacatctccttgttaatcatatatttaccaagttttcgtttgataaacccaagaaaaatactgaatttgtattattaaaattttatgtatgtcacagaaaattaaatgctgaatatatttatattattgggcaagtgtaaatactgaattttgaaaagtacttatttcatgattttaacttctttcatgtaacattttgtattagtctgaattttagagtgcaggttccagaagctcgaggcattcacagagtgattggaaatgcttacttaatcccattcaacgttttccatatttttcaacaattttaatatttttatttataaaatttgttttatttcattacttcaaatcgtatttaatattttatttacattagttaggtgtataaacaaatatatttataaataatattaaatgcataaatttaaatgatataattaattttgcacattaaaaggggagggatctgcttacaccagtgtgaaaa

SEQ ID NO: 11604 - DNA, 611 bp, Gossypium hirsutum
  misc_feature (17)..(17): n is a, c, g, or t
ctttatagaaactaatnatgcaactcatcccttcgcatagaaacaactagataagatgaaaaggatattcttcttaatgatggagtcaaacattgtttggaacctttgttgctgtaatatgtaatggaagggtggtattagctaaatctgtttaaaatttattgttctaaaattccttatagaataccaaaacagttcaaaataagaactcactatctgttgaagtaaagcctggacctgcatgacaatgtaattaaaatcattaaaatcaggatcaaaatcggttaaatcattgcaatatctatataactaaacaaaaaaaaatccccatgcttttccgctatctcgaaaaattatacaagggtccaaaacaaacaaatcaatttaagggcaaaattcaaaataaaccctaaaaaaaaaaaatatttgcctgttctaaacaaccgtgaaaaaaaggaaaaactcttaaagtttatttgtgatacttataagtgtcgggaaacttgaaaagtaacttacaaaagctgccattgtttctttctccggttccttatctacaaaatcatccccattctgcacaatataatataaaataaaaactatacaacaca

SEQ ID NO: 11605 - DNA, 682 bp, Gossypium hirsutum
gaatgtgaagatgtatgtgcagctagtttaatgcattgaagctgattaattttggctctcttcaaagcaatgatacggggttgcacgcggaccaagatcgagttgccaagtcacgagaaactcctacgaaaaccttaaacaatcagatctgaaatgaaacagaaaattaaaagattagaactttgaatttccagatctgaaataaaatccccaaatcagtaaagaatcaaattgagaatagaaataagtgttaataaggattcttgaaaccctaaaggagattgcgattctacccaattgaacaccaagatagttttccccaaatttcggcaatctaatttcacccaaaaagagtaaggatgaatcgtcaagaaccctagaaattggggatttttggctgattctttaagatagaaaaaaggctggaaacacaataagaacagcaaataaattagattaagattcggcacaagcagaaataaagaaagaattgatagcaagaaattaaaagataagtcctgagaagccttgaaatcccgaaagatctcacaactcccttcaaacggctctaatctcccctccaaagaatatcaatggcaagaagaaggctgaagatggctcccacaatcaaaagattgttaaaacaacttctaaagaaaacccaagagagaattcttggaga

SEQ ID NO: 11606 - DNA, 552 bp, Gossypium hirsutum
tcaagctattgcactagagatgggccaatatggagtaagcaaactgaatccaataacatttaaataattaaattttaatttatttatggtttaatgataaatttggtcattaatatttgcataatttttaaaacggtcctaattgtatttttgagcctttctggccatcaacctttgatttttttttcaaactgctttttctggcaaatttaataaataaattcaaggttttaatctttcttaaggttttaatctttcttaaggttttaatctttcataggtttatttactaagagatctttctattgaattaatttttttagataattatgtttattttctttaaattaagagttatttttttaatttcatgtattatttattttattattttccacatgtaattatctaataaggttattttaagtaataaattacatctcattaaaaatatttcacataacccccattaaccttttaaacggtatttttattaaatctattagaaaaacaatttaaaaaaaaaaaacaaaagttgatggctcaaacaag

SEQ ID NO: 11607 - DNA, 498 bp, Gossypium hirsutum
tggaggtggaatacgtgttgggctactccttcaagggaaaaaggtgagagatgacagcagagctctatcacaggctggtatttcctgtgatgataatctggatgctctcggtttcactttggagcctggtcctgcaaaagctcctccaaccatgtgctctgaagaaccacctcttttattatcatatgacgccaccctgcaaaatttaacgaggtgatttttgtagaaatcagagtattatttttattaaatagaacataaatcagagtttttatatacaacctatgacactactttaggaaactctaagttaggaaagatactaaataggagatatgatcccttaaaataagggattttaataaaaaaatatctacaaaatattcctaaaatatttacagaatattcctacactccccctcaagctggagaatatacattgtataatcccagcttgaataggaatttattgaacacaggttttggcaaagccttggt

SEQ ID NO: 11608 - DNA, 644 bp, Gossypium hirsutum
  misc_feature (638)..(638): n is a, c, g, or t
tattcctagtggctgtttctaacatcctgttcgttatttgcagaaattttcagacttgaaagcagaattgagcagaaccgaaaggcacatactgaaagagatgggttttgtttgtcatgttgaacatccccataagttcatatctaactatcttgctacccttgaaacacctcctgagttgaggcaggaagcatggaatctagcaaatgataggtacttttacaacagaagcatcctttattcacaatgttcatcttgtttgtgcatgttttatttgctcatttagttattctaggtaattaatagtaattactgttcttagtattaattctatacacttaggttcataagcaaaccaaaaaggttctgctattatgaccagtttatagttgaagttagatggcaagttcaattcccaattgataactcagtggatatagatattggattactattctgttgaagtcctttcaacgaacctaacaatttcatgcaataacagtggggcattgatatgacaaacctaacattgagcataacgtttctgaagtagaaatcttgatatgtaattggagataggaaaatgatatttctagaagggggaatttctaatatctgctggattgtgcgtcaactcnttagaa

SEQ ID NO: 11609 - DNA, 664 bp, Gossypium hirsutum
caccattgacgacaattagttcagtgactaaaatgtaataacataataacgtaagtgactaaaacgtaacatttcaaacataagtgagtaaatgtaacatgaggcaaataaaagtaactattttgatagtttacccttttaaattttacttgtgaagggaagaaagattcttgattatattttttgaaatattctactgaaattatttgcatacattttaattttttatattatattttaaaattaagtatattttttaagttgtttatatatttaaatattatttcatcaataatttcaattaatttatcattatttaattgtaacaattttataaaatatatgagtatagaaaaccagccatatgtgtattttaaaaatatttatattattggttaagcctgtgattgagtttgtgtcacgagttaatcgaaccccaactcggttaggaaaatgaaaaaatatatattttcgtacttaaaataatttatatgggtactttagtcttttacttgaaaaaggcaatcaaaataagcatattttgagatttaaacctaaaccaattacataattaaaacctttaatttatcacccaaccaaaactctattttaattttttatccattttaattttatcatactccctttattacctccatcgaaa

SEQ ID NO: 11610 - DNA, 448 bp, Gossypium hirsutum
atagttccgctctatcatcttaatctcgtgtattcttttccgtagaacaatcatgttttcatcgacgagtcgccgtcttcctccaccaccaacgccgctgcagctcaagtcatcgttatccgatcttctcgaagcgaatatcttcggcgtcgtcgtggagatcggttttctggatcggtgtttcggaaagcaggttgttgaggaaagaaaacaggtattgcaaagagattttgatcccatgattttgaattttctttcttctttttttttgtttgtttgttgatgatgatatttgataatagcgtttatgctaacagtggttttatagtttgaaaaacggcggtgggaaccaccgatgggggcggcgcgcgaaagcgtgttaattaacagcgcagatacaagttggctgcgcgtttttcaaagtggatcccccaaaacacaacgctca

SEQ ID NO: 11611 - DNA, 534 bp, Gossypium hirsutum
  misc_feature (505)..(506): n is a, c, g, or t
  misc_feature (508)..(508): n is a, c, g, or t
attatttttctacatcctaaaattacatgaaaacttacaattttgaatgcccatgacttcaggagaaatatatatttttttaaaagaataccattttttttttgaatttataacatgtataaagatattaatttatacatctagtttttcttaaaccttgttaggccatacaattattattcattttctttttagttattgaactatcaatatttttaatttaactactgacggtgacatatgtgaatcgaaatatacaaatatatataattatgtgggatgtgtactactagtgcacaggttatattgtaataaattgtataacaatggaacccttagaaaattccaagagtcaaacccaaaggagatcatgcaaaatagagaaaagaacaaaaataacatgggaagagaaagtctatcaaattattaaagctgcaaattagtacaacagtccaaaacaaatgattttctaatgattactaaatagcaattaagcatcaaaacnntnaattaacagaaaacaatataggcaac

SEQ ID NO: 11612 - DNA, 511 bp, Gossypium hirsutum
ctatctcctcccgatgctcttgctaaggttctcagcaatgatgctattcattagtgatgaaccgtctgttttttttcatgatttgattaaattgaagtgttttaactaatattttattgatttagatttaattcaatggataaaagaaattatgtcaaatcagataatatcattatccaaacttacctaaattcatcaaagtccaaagtgcaacatataatttataagtttccaaaaatattaaatgattaaattataagggggggggggacagatatcccgattattagactttagagatgccaatcattcttttgtgttaaccctaaactgtttgattaaactaaagttctggttttgatgaaacgtcgcactatttaccaaaaaatatatattataatgttgtctacaaataatccacgccccatttttcttttatttattcccattttatgtattaaacaaaataatgataccaatatttatttaataatcgacgcatgaccaattt

SEQ ID NO: 11613 - DNA, 639 bp, Gossypium hirsutum
tcgttccaatgattccgacagttctaattcacccaacatggacactggaattgttgacttcattggtggcttatgctttcctgtttcttgcatgtacttttctgaaatgaaaatcaaaagctgttatgttaggaaagttttgaaactaagattgaactccatttttacatgaacctttaatctgcaagcaattcgtccttgtttcacttcaattatgtacttccgatttacttcaaccgtacaacgtggatgtttacaaactttcatccatcattatttactttactacttcggttattccgtattaaaagtaatatgcacaccacgacatgaattcatggtggcgtggatgggaagaccaatagattaaacattgagatttttattttttgttgcagaaatagacttggttttttatttaaatttgattataaaaatatataaaagtttaaatgccttttgaagaaaaaaacttataaaactttgtggtgattagaggtgatcatgggttgggccgagtttggataaaattttaggctcgctttctaggtttgggtccgtcttgacccgaaatatgggcttaaaaatttgtccaagtctggcttgaaagaaaattactaatctctaacccggccaaat

SEQ ID NO: 11614 - DNA, 650 bp, Gossypium hirsutum
ggtatgtctgtctttggaatagctttattttctaccaaaacctactttctgctaaattattgggattgcttggattctaagcgaagtctcattattcgatcactgtacttcaccatggaacaccactacacccaactcgacgacggcgcctccgccgacgtcaaaccggcgtctaatttcggagcggcggttttgacggtgctcctagctttgcttttacaaatattttggcgttgctgtcgctcaatttgccgtaatcatgtcaagaaatacaagttttcttcttcttccgccgccgctaacatggacgggtcgacaatcgccgccgtggagaagatccttaaatacacgtttaaagacaaaagactcctgaaagaagccttgacgcactcttcgtgccgcgaagacatgtcgtacgaaagactggagttcattggggacgcggcgctcggcttggctgttgctacctatttcttctgttgggaaccgcgactgaaccctgaccagcttacgctgctccgaacaaaaagtgtaagcaacgagagactggcgctcgtggcggctaggcatgagcttgaccggttcgtcaggagcaaagacactgctcctcttaaccgcaatgtaagcagaaactgttaattctcctccaa

SEQ ID NO: 11615 - DNA, 701 bp, Gossypium hirsutum
atttatcgaaacaggaagggggttaggactaaattataaattttttactaacttacagctttataatttatagagggattataactgatacttctgtcgtttttgagggtcaaaaaatgtaattttatgtaacttacatagagggactggattaatattccactgttttaaaaaagattaagaattgaattataaatttttaggaatcaaaatgcaattttatctttgcactaggaattcagcacttctctagggaccagagtagcatttctttagattgaaatggttataagctaattgttcaaggcatttatttcgggttaattcatcttacatcctcaaactatgactcgaattttagattggttttcaaactataaaatattctaattgagtcctcaaagtatcaatatcatattgattagatcattgtcaacttaaatttgatgtggagcatatttatgaaacatgggtcaaattgtaaacacgtgtgtatgacgtcgtgttaaaaagagatctaatttatctaagctatctatggagcaggtacatacttatcgcagtttaatccaagtgttttaaatatgcttcatatcaaatttgaattgacacttactaataaaaaaggcttgattgataagatactaatattttgaggacacaatttgaacattataaagtttagggattgtttggtggga

SEQ ID NO: 11616 - DNA, 653 bp, Gossypium hirsutum
ggtgtttgaatgggtaacaagacatcattttgttgctgttttttatctaaagaactataactccctgaacgaatccccaatgaacccccattcattgtctaaaagaaaagttcaaaaaactgagaactttgaagaaaagaaaatctgggttctaactgaagaaaagtgggtgtcttttgaaaaagaaaatggaaaaagtttatgtgggaaaatgagggaaaattcaaagtgtttatacatgaaaaatttatgacatgattgtgatatgtaataagtttctgattggttctattctatttggtttttaattttgtaataaaaatgaaaccgacaatatttgtcaaagaaattgttgatgaaaaatgtatgaaaattgctggtttggatataaaaacatgagaaaagtacaatgtgaattgaaactgaaaagggttgctgtcttttttgggaaaattgtactcaaagtcattaaattattagtagatttacattttagtcacttaatttcaaaaagtcaaaaaataattattaaactattctaaagttttcatttaagttaattaaccattcaaaagattatatttaagtcattgggttgttaagttttttttaaagttcaactagtgatctctaagcgatagttcgattatccg

SEQ ID NO: 11617 - DNA, 646 bp, Gossypium hirsutum
atccaggacattgcatccgatccggttgtatcatgaacatcagaaaagaaatcaatgctagcatttttcctaacctgcaattttgatcaatcgatagacatgctgcacgaatgtcggtggttaatcggtccatcaaactttcttgagttacacgatattcaaactgtcctgtaaatgaatgaatgaatgcttggtttcgggtaaaacttaactagtttatcacaaaaattgtccaatggagggtgacaaatgaacctcacataaaaatattgggaaaaaatgaagcataatacagtagctaccttctctattcttaacatcaataaacccattctgcttgattctttgtaaaaaatctttacccaatcgaccttccatgcctttctccaaatggaaccggccggaaatattgatgacggtgggtaaatcattgtactttgaagaatagagaagcaccacattcccccctgcaggaaccctagtcagcattaaagaaacttcaaaaagaaatgataaatgaatcaaaacaccagattctctcaaagaacatgagagaaaatatgagaaagcatgaaactctatcatcagcagattgcatttactttttcagcaataacaaagtaacccttctcttatggttgaggga

SEQ ID NO: 11618 - DNA, 559 bp, Gossypium hirsutum
ccatcggtcatataatgtgaacaagtgaaaccaaacagtcataacaatgtgaactaacaaatctgaacagcccttggtgtgaaaaggacaatcagcatgtgtaaacagccttaaaatgctttgggcaatcgaacagttttcttggagacttaaaatgctatgcggaaagttacttagaaatcaccaataatcagctcaccattttaaaaccatacacgcacccaagctgtccagggaagatgtacctgcagcaaataaaactcagcaagttaaatgtatttcagacacattaaatcagcagcatatgaactcattgatctgcacattaaattcggtcatacatattaacaccttgtaataatttcagacatatttaaaacaacataattaattaagtatttaattttgacataattaaaacacttaattaattatttgtctagattttaaaaaaattaattaacttaaactacataactaatttaactaaaaacaaattaaatgtttattccagcataattaaatgcaaacaaaagtaagctaaagacgagctcattga

SEQ ID NO: 11619 - DNA, 644 bp, Gossypium hirsutum
attagtcattggaccacatataaatgatgcaaggcaaagactacacgggttcgaagatgagatcacaccttttcaaagacaagcaaaacaagtagcacactcattgactaaattaaatgttatttgagcaggatgatatcgcagttatgttggataccattaatatatgatgaatgaaattatgtttatttgagaaaaaaaaaattacaccatagcaaatgaataaaaatagaaatgcaaagagtgtaatcatttctcaaagttaaatttcgtatcctgtctcacaaccatgtcttaagtggcatcaatcagggaaattaaagaaaaagtgggagagaagggttgtatcaaaaaaaaaaaaaagaaaaaacccaaaaatttacaaaaaaatttttaacactttcaagtcgggaccggcccaaaaacccccccccccaaaactgggaaaaaaaggaagaaatcccaatcccccggaccggaattttggccttgatttaactcttctggaaaaatcggggggccccaaattttcggcatacttttccttgaaaaatttgtcaacaatatcaaaataggtggaaaaagggagtcaaaaatagaatgaaaaaaccccttcatggccaaaaacttgtccccctttgctc

SEQ ID NO: 11620 - DNA, 530 bp, Gossypium hirsutum
gcctttgacaccatccttaattgtaaaggactgaaagtgctaagctagatcttggtaacaacaagatcaatggtacatttcctcattggctgggaagtcttcctgataaaaaatgagacggatgaacacagaagaggatcgtaaagtttgtcaaagtcgtgaatttgacttagggctctacacgtttggaaagaaatttagattttgacacaacctaaaacgaaatcaaatcgaaatcagataaaacaattaaaataaataactagaataaaaaaataaatcaaatattagaacaataaggaaatgaataaagaaaataaatagaaagatagaatgtgacgtatagaagtcctaaaaagctttagaaacacgaagaatccaaaacccccttcaagcagttctaatttctcttccaagataaatagaaagatagaacgtgacatgtagtcttaagaagccttgcaaacacaaagaatctacaacccatttcaaacaactctaatttcccctccaggatagaaatcttggta

SEQ ID NO: 11621 - DNA, 618 bp, Gossypium hirsutum
ttaattatggaagggccaaaatgaaaattttctattaatcaaagagctaaaaagcttaaataatcaattgttaaaagggtgtaaaattgaaatactttcataaccttgccataaatgaatttttcttttagaataactagagcttcttaatttgtattaaaatttataaattgatttaatttgattaattaggtgtgacattttgttgtttgtgaacgacaactccacgtaagaagtttgtagcaatgacaaaaagagtgtagtattagtacaaattttgtcctaagagtatatgtatagatagatagcattgcccagacacccctcacgtttgcattatcatctttgttaatttctcaatcacgttataataaaaacaaaaagaataaaaacaacaacgataatgcatgatttatttttttcaataatttaggttgatataaattaagcatgctaaagcttatcaaattatgtatctttgtattagtttgacaatgattataccttttgttttttactataaatggtaactttcaaatacattttgaagggcggaaaataattctaaaattctaatttaaaaaatctcggatcccgattcgcttattcgtttaagct

SEQ ID NO: 11622 - DNA, 411 bp, Gossypium hirsutum
tacgggccaatagaactaggctaaaaacccaattgaactcgttttttatattttaaatatttttattttttatgcttttgaatgattcatttaatcgaatcatacgaacggttgtctaatcagttcaaccgccgttttggttctaaaaattttgctcagggtatatttaatcttcaaatgtttattctatattttaacataaacaaataatcaatcttgtgcgaaatgtagatgaactatactagttaagaataatttttttaaattcatgatgcatagaattaaattaaagataaaagcatcaaatttattttatggatcaattttattttatttaaaataaaaatacatttaaatatatactaaatatatatatttcagttttttgggcctagccctctttgccattta

SEQ ID NO: 11623 - DNA, 325 bp, Gossypium hirsutum
tggatagatgtgcagctccggtggggtgattatgactcccatgatattgagcgttacactcgagccaaatttatggactatacaacagataacatgtctatttatccatctcccactggtaaattttacctcctttacccttgtcttcctactcttttatatgtctttgttttctctggcctaatataatcatatctatcatgtttatgtaggggtaatgattggccttgatctggcttacaacttgcattctgcatttggtaattggttccctggttcaaagccattgctcgctcaggcaatgaataagatcatgaaggtaatg

SEQ ID NO: 11624 - DNA, 430 bp, Gossypium hirsutum
tttccctgaaagcactactaagtatataccgcgtctcatctctgtctttatatatatatatatatatagaaagtttcttctttatatcaccataaactttctgattccaattctctgatttcaacacttaacaacgtcaaataaagggaaaaaatggattattacggatacccatctcgtgtttctatgtcttcaatttctttgttagggaatttcattgaaaaggttaaagaatgttgcaattccgccctttctgccattattgggaacattttctctgccatcttaaccttcttctttgcgttgggttggtttcttttctctctttccgtttcattgtttcttcaaaagcttttggatttgattcgttacctattcatattggttttgcaataaattgaattttccctgttgttatagcttgaatgaa

SEQ ID NO: 11625 - DNA, 439 bp, Gossypium hirsutum
gctccttctaaacatctctttcttcctgctgttattgatagaggaagcgattgttactcttcgcctcttccattctttgtactttcggcaattgctggtggtggccggatgttctttttctcctaagttagactctgcattttggtaagtggcttttcatctagtacaattttcagttgttgatggttgataagtgttgttgaaatgcaaattaccccctaaggcctatcgattggtcacttactaacggattcagcaagtaagccatattcggtggatctattcaagtgaggggtaagtttggacaagttattttggaaggggttttggataggttgagtaatgtacgtttaactgaatcttgtgaatgaatgtaggttggagcactcgtggattctgcgcacgctttcgtgaataggtgtgggtaattacactcctt

SEQ ID NO: 11626 - DNA, 606 bp, Gossypium hirsutum
  misc_feature (60)..(60): n is a, c, g, or t
  misc_feature (63)..(63): n is a, c, g, or t
ggtcataatgtcgcgaaaggttacaacttttttcctaagttccattataagaatgaaatnacntgccggttgagatgagctatcctttttgaaacgagaacgcatcgttttctgcgaattcttgtctaccatcgacttcggatacgtttttaatcgctgcgaaagatatcgaattttcgattaatttttatatggattcatatattacttgtgtctgaaaaaaaattacgtacctgggcaagttttactgatttgctaccaaataacattgacattgatgacagaccacagcaaattggaggcatgattattagaccaagaagctaatatatacaccaaaaaggaaaagctttacaaagtcttcaatggaacaaaatcaatggtaataataatgatgttggactaacatacaaaatataaacatgtatacatgagaatgacaaagccaattcaaattccaaacgttttgtctgtaaaaaagtgaacactttttttttttacaaataaaaaatttaaaaaaaaattgaaagaaaactagttttggggtttgttcataaatttaattgtttattattattattattattatttgcaggcaaagtatca

SEQ ID NO: 11627 - DNA, 631 bp, Gossypium hirsutum
tcatgttatttaaaaagcacgtatatatatatatattcttcgattgctataaagtagaaagaaaattaaaattttccgaagtacagtaggacaaactcattctttctagtttagtttatttattcacttgattgaaacttgtaacagattttaatttcctttcttgcacacagaaaagtttgtaaatgaataatttcgagctttaattttacttattgaattacttaaacggtgttaaattctgagtttgtattttaatgggttaatatatcattcgatacttttctggtagaaagaaacataagtatttaactgggacaaaacttcgagtaccaaattgaacattgaaatcaaacttaagtacgtttgaaaaaattcatgtactaaataggacgttaaaactaaactcaagtatcagattgatcattaacgtcaaatataggtactaaatagtatattaaacctatggaaattctattgaaaaggacaattgaatcttctttatagtgaaaacaaagcatgtgattctttaattccaaggcttgaagcatgccattaagagagaaatctgaaaattggtaggcatcaaatttcatgccattctcaataattgtgggagcatgccattctc

SEQ ID NO: 11628 - DNA, 688 bp, Gossypium hirsutum
cgagagacgttagtgactccatcgcattggcaacctcttggcagtccactttcttcaagttttacgaacgaagatgacagagattcggaggcatccggtgattgggtggataaagtcatggtgaacaagcatgacaacatgtcaacaaggccgggtaaagaagtaagcaatggccaaaaactgtctgacaagttctatcagagttatattcctgatcctacaaagatataccctgaacatagcttgaacaaaatgactacaaacagaaagggcaaccgagactttgatgatgactccgatcgtgaatctgtaaccagtgattgttcggaatcagattcggtttcatccagcattcctaaaatcacgagtagtccaaacatgtttgcatctaaacagaagaaaccgcaacccaagacgacagcaaagagcaccgaaatcaggtaagctttcatgctggaaactcactgccattttcttacattaagccttgagtgttcatttttcttggcttccactcaggagttcaattccgtcactaataccttcgccatcatcaatgcgcaaatctcccagtggagtgaatccgaatttgcaaaagggaaaacggaaaaccggacttagcaagtgatataaactaaaatgatgagaaggaactaagcttcctcattgtttcttctttgtgtgttat

SEQ ID NO: 11629 - DNA, 618 bp, Gossypium hirsutum
  misc_feature (66)..(66): n is a, c, g, or t
ttccctcctctttctttctttttataatgtatctgggttttaaacttgaggattaatccaaatcantcatgctcttcaaattaaaaaaattgctttcatttggtgtttagagttcaatgtttcgtttttttttctcttttggtgttcttgaattcaactagctattaagtttctaggtcttgtctgtttgatacccagattttgttggtttggaagttctatgtaggtatcatagatctgccaagttttaagattttgaggttcctttctttttcttttttttttttaaaaaattgaaaaaaaaaaattggggggccaaaacccggggggtttttttttgggtttaaattttaaattaaattttttccccaaaaaaaatcccctttcggtttttgggggaaaaaaattttttaaaagggttttaaggaattggtttgtttgcctggttttcattaaaataaaaatggggggggtaattattttttttaaacaaattgaaaaagaaatttattttgaaaaaaggaccccaaaattaaatttgaatttggggggatgggggggaaaatttaaaaaaaacaagggaaatttttaaaagggggaaaaaaccccaaaaaaaaa

SEQ ID NO: 11630 - DNA, 656 bp, Gossypium hirsutum
  misc_feature (594)..(597): n is a, c, g, or t
  misc_feature (650)..(650): n is a, c, g, or t
tctctccgaatgaccttcagtttgtcggtgaaatcttgtactaaaattcagtttcattcccaatgcctcttgcaacttcttccaaaacctcgaggtaaacctcagatctctatccaaaataattgacaagggcactcaatgaagcctcactatctcggaaacatacaattcagccaatttctcaagggggaaatcgatacttactggtataaaatgtgctgacttggtaagtctatcaaccataacccaaacagaatcctttttccctggtgttaagggcaatctcgatacaaaatacatggttatccgatcccatttccactcgagaaccatcataggttgaagtaatcctgaaggtacttgtgttcggccttcacttgttgacaaactagacacttagaaacaaactcagaaatgtctcttttcatccccgaccaccagtacattttcttcaagtcgttatacattttcacactacccagatgaatagacaaacaactactatatgcctctcgtaaaatccactaaataagctcactatcattgggttcaaaaattttgtctcggaacatcatgcaatcgtcggtattaaannnnaactctgattcatctcccatttcacactgagcaatcttaggttgcaattcctnatcacc

SEQ ID NO: 11631 - DNA, 677 bp, Gossypium hirsutum
gtctgttaccttgacaaacactttgctgtacatatggaatcgcaagaatcagttcatcaatggaagtagactaacaataatgcaaaagtttagaaaccttagaaagaacatttagaggaaaactgagtaatcttgaatgcttcatatattttgttaagcacaagaacctgcttatttatataaccaaactaacttcaacaaacagaagaactaactactaacaaacttcaacagacttaactaacaggaactgcactgtccacagtgggttcaatagtacatgccttctttcacactttctaaacatttcctcaacaaataattaggtagaaaaatttagtgtgcataatttatgataaatgtagtagtaaacaataactatgatcagaaaacaacaaatattaatagagttagttgcagacagaagccattttcagacatggatacttcaagtctagcttcattcactctctcatgagcatagttcaattactgctctgatagagttatgctattatatttgcatcctgttcttttaaaagtttcaatagcaacctcacccaatatcaagaacttgatgccatgtaacgccccaattttcgagaattttaaaaatgttggaaaatttaaaattttgtgacctgtttgtttgtcataggattaagtacgggaatggg

SEQ ID NO: 11632 - DNA, 500 bp, Gossypium hirsutum
gggggcgaagaagttgttggttcaaaaggagtcataaagaaagtcgaatttgtccgaataatagcaaaagcattatactcgcttggttatataaggagtggtgctcatttagaagaggaatcagggatagcattgcattcttctattattaatgtatttatgcggcaagttcttgagggagattgggatgaaagtgtcgccacattgcacaatattggtctaacagatgaaatgatcataaaatcagcctcttttctgatattggagcagaagttttttgaatttttggacgaagaaaaagtcatggatgctctgaagacactgagaactgagatatctcctctttgtatcaatcatggtagagttcgtgagctttctttgtccattgtgtcaccctctcactgttttactgttcggtctccaaaacaaaatacttcaagggcaagatcccggactaagttattggaagaattacagaagctgcttcctccaacagttat

SEQ ID NO: 11633 - DNA, 434 bp, Gossypium hirsutum
  misc_feature (56)..(56): n is a, c, g, or t
  misc_feature (58)..(58): n is a, c, g, or t
ctgacaaacagaattttctggtctagctgtcatatttgcagtagaactgtcgtatncncttcttttgtcatatcataacccacccccaaaacacatgcatatcataatcatatatcatacatcatacatcatacttatttatatcacatatcatattgcatgcatacacacatattttcatataggccataacatagaatatgatttaattctagaatatcttagttaacatacctgctaagcttattcatatattgttatatgctaaaacttgcccttttccggtctcatatgatgcctatagacccaaattttgagtccctcaagtggcccctaatcaagcctaaaatttttccaaagtggctcacacagcccaaaaacctagcctgtgtggtccacacggccaacccacatggtctgttaaagtttcaaaa

SEQ ID NO: 11634 - DNA, 650 bp, Gossypium hirsutum
ttatgtggctacagttattgttaccttttatcgatgctaaatttgtggtagactgaaatactgaaatttactttttcaagcctgactttcaaagtttgatgttcactttgataaatttctttgcaagttgtggtaagtgcctgcttttgtcgcaattgtgtcaatcgaacttcgcaaaatcgtttttaagtgcatttaaatttttttttcaatttatgttttatttggtaaaagtaactgagccaattgagttgaagttatattaatgtggtagactgttttttgatctaattaaaagtggctttatgctttgtttcttttaagcaaaattgatttgttggattgatattaattggctctttggatttgtggagaaaataatttttttttataaacttcaatttattttcattttagtttcgttgtcacattttaacatgctaatttgaatatataacaatgatatttaccattaattaaattattttattatgcatacaattatatcaaaattaaagttttttttatttgatgggattaatcaaaatttaaatctcacgttacacattaaatcaaaattatatcaaaagtgttttgggggctaaatgtgcttttggagccataagtaaatgctaaacaaacaccttttc

SEQ ID NO: 11635 - DNA, 646 bp, Gossypium hirsutum
  misc_feature (55)..(55): n is a, c, g, or t
ttaagagggggaggagggaggggaaatcaaattaccactactgttttgtctttanaaacttaccgttgcgttttctttcgttttctcaggaaccaaacaaacaagacaagataacgggaaggggaaaaaaagggtatggagagtaccttgtgatgaagcgataaatgtcattaagccctaaccgaaaaccctaaatagagagaaagcgtgtttggaatttgtgggtaatgaaagggacaaaggaaattaatagtgtaaattacacatatatgccctaaggttaaaatgttttacaagtaagtacatttggaatctaatctattgtttcttttaaattttaatttttacaatatgcaatttcaccatttgaatagctatatctttttaatttttaaaggattaaatcaaatttttatcatttttagggagaccaaagtgtatttttacttttacttttactaatttaaaatttaaaaaaaattaaaaagcctaaatgaaaattttttcattttaggggggccgggccctgccaaccccctgactactcatttaccattgatgctctcgtaataggagtcagattgtattttaccccactactaaaaaaattgacaaatcattccctgtatgttagttcaatgaccaa

SEQ ID NO: 11636 - DNA, 576 bp, Gossypium hirsutum
taatttaggttacatccgggacgataaacacattgacaatcacagaaggtcctttcaaattttactcgataatacaaaaccactccttattcttgaaaacattaatgaagaatttattttatataaaattttttattgaattaatgtctctatcatttatataaatatatgtttattattaatgatataagattttaggatcaatgttcaaattcgtttagacatttattaaatcaaggcttaatttttataaaagtgctcaaattaaataaaggttaaaactttttaaatgatcaaataaatgtaaaagtgctcaaataaaggcttctcaaatgtttttagtttcaaattatgtttttattatttcgttttcaagcaatatctgattgggctttcatatattttattctaaatgtgttagcattcactaattttgaccaaaaagtggactaaagtgcgtaaaaattctttatttgagcacttttgtaaagttaggtttttatatgaccattttgaaatgttaacatttaacttttatatgagcaattcctaaaaagttaggaccaagggcaaagc

SEQ ID NO: 11637 - DNA, 673 bp, Gossypium hirsutum
agataaatgtgcaaacgttgagagttattttttttaaaaaaatttagcattaaattgacacgaaatgtaaattttgacggctaaatttactattatgctaattttaaaagcttatcttcatgttagccatttaaggattggtgaccaaaaaatcaaaaatcaaataattggttgattattttataaatttttataattaggtgaaaaaaaaataaacttattagtaattggatgactacattgaagtttgcccatatttatattagatatcggctgatttctctagtatttttatctttttgtataaaatttagaaaaattttgatgcttatgatgggatttaaacccaaaatatcaaacatacactctctcaactttaccatttcaacttgaggaacatctactttttatgtgagctcttatcaaatatatagtataattattttcatgagtatgccataatcttattgataatgtcgtcgaatgagttaatgtcacaatttaaatttccttttactcaaagtttaaactattttttatcttaattttgtgcatgttgcatatgtgttattattattagtttcaaatcttacattttattatttatcatatgttaattataaacgcacacatgtgttttaaatacatgatttcaacagacatacacgtgtga

SEQ ID NO: 11638 - DNA, 666 bp, Gossypium hirsutum
tgaaagtgagagccataaaagaatcaattagaaagaaactaaagtaagaagtaaacaatagagcataaaacgaaagtcagaattattgtatctgatattctaagtttaatattttcatctatctacatttatattttttcgaacaaattattttaataaaattattcataattacattagtactctttgtatattgacttcccgtgatttttacatgtaaaataaaaataaatatcagctcaccggttgtctaatatttaacagtattacatgatcggatcataatacgaaaagacaatttatattagtaaatgaatttaaacatgtccttaatctaataaaaaataaacaaacagattgaaagactaacacgtcgtctatcaagtctaattaggaagatgttttgtcttgaatgttggagcggataactcacaaagattaaaatatagatgtgactgactggagtgacagtacatcgaattgaactcacgcaaaataaatcctgaatccgtttgtggatttattcacttttaacattcataatctaaactatcttaatcctgaatggatgataaactatatatgcgtgactcgtatattttaatttaagtaaaaacccaagtttgaatatatgtaattcatagcctaagacatgggtaaaatgac

SEQ ID NO: 11639 - DNA, 473 bp, Gossypium hirsutum
atgagaaactgctttccatattagtcacaggctaagttactgcaagaggctacatagaacaatttttaaaaaaagtccataccagtgagtcctcgctgccgctggcaataaaagcttgctcaagtccaccaaaacaagatcgaatgatgaagcgagtgcgtttatggcctctatatttagaaacaagcttcggatcaccctctatattccatagatggatctcttggtttaaaagatttatcagtaagaatctactgtctctagataatgagaatgaagttattggttgatcctcttcgataaatctctcaacttttgcttccctgtcaagtaataatattgctgtttcccgacatatacttataatctgctttccatcccctgttatttccaaatcagaaatttttagtgttcgttgccctttccagcactctagctctttcccatccaattcccacatgcagatacactta

SEQ ID NO: 11640 - DNA, 643 bp, Gossypium hirsutum
ctttggacagtacctgaagaatcataggcccccactttcactctccatgtgtagtggagcacacgtcctcgagtatagatgattataaattatgaaagttatgaaattttaaaataataataaataataactaattatcattataaattataattacaatattaattaaaaaataacatataaagtaaaattataaacctgataagattgaagctttcatattaaaaaatataataatatgattgttatcaatgcaattttcattttctataaaatctctccaaactctaataaatcaacccaaatatactttgcttcaacaagttaaaagaggatgggagtgagaggtggaattcactcttttccactttaaatacttactagtttatagaaatagcatgtgaaaacatttacgtaatatatttataaaaaaattgctatgaaaattaagggcatgaaatgataaagttaagatgattttaatgttggatttcaaatgtcattatttacatttatatgcatgtatttttttttctaaatttatcaaatataaaaatatataaatacctcaaaataatatttgttgttttataaaatgaatggataataattttctaattgagtttggtctcgggtattaggt

SEQ ID NO: 11641 - DNA, 502 bp, Gossypium hirsutum
taactagaacaggctcatactgggttacaagaggcatcttcaaatggaaacctgatcatatggtaaagataaaataaacctttagactatagactatatatgtttattatgattaaatttagtttcttattttcattttctagtcctcttatttcaatatatttaattagagttgagtaaataattggagataattgaaaattgattctaatcctattgttcaatttgatgttatttaattctgtttgattataacttaaaaggtattggattcagttttcagctcacaagttaaaaatgataattattagaactgaattttttttatactataaaaatattagtaaaataatattaaattacaaaagatatttttgaaaatattcaataacctatgaatcccaaccagagaaattctatttggctatcttcgaaatgttgttcaattcgattttgttttagaaaaaaagcctaatatggtccggtaaccacaattatactt

SEQ ID NO: 11642 - DNA, 637 bp, Gossypium hirsutum
ttgagtgggaaaccaggtgctaccactgctcgaggtagaccatctagaaatacgggcaatgctagtggtggtcagagaggatctagagatgctacgaccagatccgaggctcgtgcgcctgctagagcttatgctatacgtgcccgcgaggatgcttcttcgcctgatgttattaccggtacttttactctctttgatactaatgtaattgctttgattgaccccggttctactcattcttacatatgtgaaaccttagcatccagtaagactttacctattgagtctactgagttcgtaattcgggtgtcaaatcccttgggtcgttacgtgcttgtcgacaaagtgtgtaagaaatgtcccctagtaattcgaggttcctgttttccggcggacttgatgcttttgccgtttgatgaatttgatgttattcttggtttggattggttgaccgcgcatgatgcggttgtgaattgcaaaagcaagactattgatttgaggtgcgcaaataacgaaataatccgagttgagtctacggacttgaaggggttgccagctgtaatatcctcaatgttggcccagaaatatgtaagaaaagggtgcgaagcataccttgcgtatgttcttgatgacaaag

SEQ ID NO: 11643 - DNA, 669 bp, Gossypium hirsutum
ctactttcttctgcttttgaacagatgaaaccaacagggttcggctcccttccattacaatcttcgagtaactttattgtttcagacgcaggtccacccttccatgatttttcgtttacagatattcttccgagaagaagatagcaatgaccttatcctatacaaaggcatctccggagtccctaattttattggagtttctagtttttagattcacctcgtaagttcttttgattatggattttactgttagcacattatggtgcattcaactgatgatgatgtatcatagaatcatagaacataaatggtgtaactccacttccaggttgaactctttgtgtacaaggagaaaagcagtgataaaaaatctgacttgcttcactttttttattttctttttagtttcacattattaacttcaatttttggagttgatagtgcctcttttattccttttcaatatatttatttcttattttgatatttcattcttttcttagggaataaatctaaattttagttgaacgtgaattgatagcagcataaatgatttgacggagataatggctttaatgatgccccctccaccagcatttctccacctaaatagttaccaacatttctttttgttgcctaaaactcattccacaaatcatctcaggtaca

SEQ ID NO: 11644 - DNA, 670 bp, Gossypium hirsutum
tgtgattgcagtgcaggtaaatgctctacctttcacacaaaacaagagttctgtgccaagcataaagattgaactaataggaccgtagtctaatcctagaatgccataattctctttctgaatgtctcaactttctttttcaaaccaccagacgctggtgcaaaaatagcttaaattaatggtagagcagaaatagcttctggctgctgtgataggtgagaatttgtcagaaatgatagtatagaaagagggatgtgcaatgcacagggagggtgaaaatgaaatgctaatctgctgtgtttctgttacaaatggtaggaaatttgaaatagttttaaatttctctcgatgttaatatgttttttcatcaattttacaaaacttgcaatggctttaatcgtggtgctgttgatcttaggtacatgtatatgtttaaaaccttcgattagggtcaatttagtcttgatcagaaaatgccccatgttgaataccttgaaggaagatgaaaatgtcatgtaaaatccaaataagtaggacttccagagagttgatacataggggccagttccttttccttttgcttcttgtaaaaggttgcactaaactattcaattgcttgaaggaatttcagcgtaaaattttgcttgtgtttgagctaatggctattgga

SEQ ID NO: 11645 - DNA, 458 bp, Gossypium hirsutum
ttaattaatggctgttccttgcttccaaaatgcatgtttaattaatgggtttggtgccttcttcctatgtctggttggtgcaagcagatagatatgaatgtcaggaattcaatccgattttaaaatttgagcttttaaataaaaaataaattatttaagataatatcaatgactgttaaaataaactttaaaaatataggtgtttttatatccaatagtaagttacattatatttttaaaaagaagatcgtgtatttgaattttgaaaatattgaaatgatcttaaaataaacatgattaatttgttctacaatttgagtgaaccaaaagatttcattagcttaaaatcaacggtgttaattaatatgagtaattgtcaatggcaaaaccaggggaggatagcagggtcttagaccccctaaaataaaaaaaaattcgtatgatggtttgagtaaagg

SEQ ID NO: 11646 - DNA, 632 bp, Gossypium hirsutum
gatacccaagcatagtacatttttgattttttgtgaatgattaccaatgaattttcttttaggtgaatcaaccttattctcttcttctcttttcctaatagataattacaattttttcataagcgtatctgtagaaatcataaatttagaacataaatgtgtgtttgaaaataacagataataaataatgaaatgtgtggtttaaaataaattaaccataataacactgattatcatggtgtttttatcaatcttaagttggtgtggacaccaacttaaccaattacattaatctaacatatcaaatatatatattctattgcaaggttttcttggatttgtgctaacctttaaatttaagtgagtttagaattttccatgtgtcaccaatcatttcatggaaagtatgaaattaatgaaattacttatttgcctagaattaaagttgtgtaattaactaaaacttttaaataacttgagaccatttagtttttataaattttgtaagtgccaacttacatattcggttactcggtcatatttcaaaacacatcaaatctagaaaagaaagaatgaagaatcatgagtgttcttcatatagtaatattcctattgatgcaatggcaataacg

SEQ ID NO: 11647 - DNA, 463 bp, Gossypium hirsutum
taaataccgaaggaagttggtttcgagacaggcaggggataattagagatatgcatgggagatgggtttctggtttttcgatcagcaattgcagcattgatttagcagaactttggggtcttttagatgatattcatttagcatggaacacaaagtttaacatttaatctgatactttaccaaataagtgtggataatattatcgagagggataactcttttatatatatatatataaaagaatgagaatatttgatacattatcggtacataaacttatgtatcatcagtggatgataacataagacatcattgttaaataaaacaaaaagtaatggagggctttgttcttttcggtgaattacaataatatggtaaaactcaaacaatcaacacaatcagccaaactcgaactcaagccacacctagagcagtgaatacccttaaccattagaccatcaca

SEQ ID NO: 11648 - DNA, 573 bp, Gossypium hirsutum
  misc_feature (514)..(514): n is a, c, g, or t
  misc_feature (521)..(522): n is a, c, g, or t
ggtagcaagatggtcgaacccaaataaacattgttgcttggtcatacaaagaaaatcataagcgctatggaatttgtcgtgtttaacgttgaaatttttaaattaatttcccgactgagctataacagccggctgaaatacaaataaataaaagcatctctttcataacaaaaaaattgttctgcttttttgccttttttttcctctcaaccctcatcaaaagcatcatctctttgttatttgtcaacatgaacgacttgcttacggtaactgtcaatcactttgctgtttttttcatccgttgttttctaagttaagatcatcaaatccttcttttgctttgatcaatcaagtgtttctttttctttctgcaatttaatgctgaaaattggatgcatgtttctgggcttatttcggatcccagttagtgtttacttgtggtgaggaatatcatcctggctttgtctatgaaagtttcacttttttttttcttttttaattatgttgctttatnttctaannaatgattttcctctctttgtttggttactgagaattcactaggaattgttt

SEQ ID NO: 11649 - DNA, 465 bp, Gossypium hirsutum
  misc_feature (393)..(393): n is a, c, g, or t
  misc_feature (396)..(396): n is a, c, g, or t
  misc_feature (456)..(456): n is a, c, g, or t
  misc_feature (461)..(462): n is a, c, g, or t
ttgttccccttgacatcaatagaatgcatgttgttttcaataatttaatgtgtacggcaagaatctagcaatgttagctggagatatcgaagttcatatatatttatatcaagcaacatgtatatattttttgtacgatgatcagaaagtcattaaaaccgtaaaatcttcatgtggtccaatttaaaaaatttaaattgaatcgttttattttttattacaagtaagtaacttgtttggttggaaaaaaatatcgatcaagtactaatttgtcattcaatcgaaatcaaacaaaatttggacaattttacagagaaaaaaaaaacaacgagctctcccatttttcctctgttgaaaagaaaaaagttttaaatcctaggttctaggggtggnggnaacggtgtccgccaccagtagtttgctgaccattatcaacggaatcaacgcatcaattgncaggnnttt

SEQ ID NO: 11650 - DNA, 611 bp, Gossypium hirsutum
ttacaacttcatcaataaatttatgcctgagtgcttcccttgctgcagacccttcccctcccccctttataaacacagttttggggctgcaaaattggtaagaacaatatatgttactactttacagataaatggaaatggagtactcatagagacattgactagccaccaaaaataataataataaaaaggactcacttcgagtggaacaaaagagctggatgaattaagcattcatggtaaataaattcatcaacttcggcactttgcattttcccatcaatcaccaatacctacatatgcaattattcaaacaatcggagattagaaaacttgaaaaaaggatgaaacgaaacaatgaatgcctataggtataccttgccaaaacgtttagtgtccaaaagggcaatatcttgatactcactagaacctttatacagtacactgttaagagagatacaaagagatgagagttggtttaagatactgaattatgagttaaagaaaaacccaaagttgtttgcttttatcatgttttgagtaatgtgcatataatgaagaaagattagggtgaaaccttttcaaagcgaaggaacatttgagatcatcat

SEQ ID NO: 11651 - DNA, 674 bp, Gossypium hirsutum
ctttggtatacatttgcaagacgctgcgttaccttcattctcctacatattgcaaaatccaaaactgtatatctctgcatttctacatcaaaaaacccaatgggtcataccaccaaattctaattttatttccataaaaggccaaattccttttaaataaatatcaaaaaagaaatttgagaaaacccattatttatttattataaaattgtgaaattgagatctgggtggaaagtcaattacttctagaaacatggaaatagagttaaaacctgttgtggatcaaaattattgggtctagtcaatagacgccaacgcgtttctaaagtttgtcaacagacatttagtgattataatccattctgctttaacacaaagtcttccactaaatgttatccaccaaagaaaaatgaaaaatggtgaaattctataaatggtccttatattatacatatatttttttacaggtttagccattcacaacttgtagatacgaatgaaggtagatatcatcccctactctgggtccccgaaccatcatccttctccaggcctcatggaacactagtgataatctccatcaacaactttaaaatatgtatttttagtttaaatttttttttactaattatattgattaagttgatgtgacctattttaaagtgccatgttca

SEQ ID NO: 11652 - DNA, 472 bp, Gossypium hirsutum
cccaaatcgtgatttaacctgatgtatttataatttaaccttcatgatccaccaagttgatagttagattgattgaatgattgtattaataaggtactactactttgaaaactcaattagaaattaaaataggtaaatgtatttgagaggttcgtttattataaggacatgatcaaattaattattttactattaaatagatcattttagtccctatactattaaaaaagaatcaaataagttcaatctgtagcagagttaacatttattgtataaaataaatcatttgctatttaacaaagtaaatatttttaacattttatggttttgtaaatgaaatattttgtttgaaattgcattgcaattgaaaaaaaaattgtaaggcatttattaaacagtaaatgttaactatattctaatttgatattatttgattcttttttaggctaaatgttcaaattaggcccaacgt

SEQ ID NO: 11653 - DNA, 455 bp, Gossypium hirsutum
ttccggctaaattatgcatttgagtgaaaattgtattaattttctctcctttttacaaacaaaagtgactatttttgtagtttactcttgttataaaataacatttaacaataaaaattaaaaataattatcattttatctaataaataatttaaattgattatataattcattaaaatatttataataaaatattggaagataaattttaatattttattaaatgaatttacaaattcacatattttaataattttaaaaaagtaaaataatttaaaaaacttctattatatatcaattctaatatgatgtccttaatagtcattttttattctcacctcacagttacagctgcgttgaaatccaaacacacactctaccattgtttctaatctcactgctacagtatctaatctcaccgttacagaaactaatctcaccgccaatcaccgcca

SEQ ID NO: 11654 - DNA, 678 bp, Gossypium hirsutum
tacaatcgccctgtaccctattctattaacccctacagtggcatcgaaattgatttttacaaatcccttaggaggttttttcccatttcttagccgcactattaggtgagaccagtggttccctaaatagattgcaaatgaggaactctttgccgagattgttggccctatcccaaatggtctgcgctttgtcttctttgcctttgaaaatgagattgttcctactgttccagcagttccataaagtagtcaacgaatcgggcataactcttttatcaaggattctcatcacattttcaatccaaccaatgcaactattatactacttcgacgtaatgctcatatcccaaccacctatggaaagaacttcacgagaagtggtacagtctctaagaacatgtatgagagtttaagcagcagctccacatctagggcaaccttggttaaaatcatttttgatggacgcaattttgacattcgtacagagaagctcgtgaccaaccctccaagcgaacatctagattttaggtaaagtgtcaagcttccaaaaggtcttccgtagaacctgtgcaagtcgagtcccatctcttttcaacaaaagccacgagtaggccgatttcaaagtgaaacagccatgagagttatgaaatcacactattttatctctttggctcctct

SEQ ID NO: 11655 - DNA, 592 bp, Gossypium hirsutum
ccctccaaaattctgaaaatatggtttatttgctataaaatctcttatacattcccttatttttcaaattagtcccatttaattaatattttaaatcacccaattaaacccccattttaaattatttttaaattccaatttaaccccaaatatttatttttacccaaaaattatttaaaactataaaattattatttttaaatatttttatttttcggaatattattaccgatttttagatgaaattaagctaactaattaagaatataaatagctaattaactcggttaattcccaattttcactcggaacctgataaacttacctgaaactacttaactaattttcggggatttacaatacatgggttgtcgtcaagtgcggcactgctctaactatctttttgctaaggtagtactaggttgataagccttaggtgagtgcattcccactaaaagttagtgacttggaggacaaggtgtccaaatggcttgtcatagggtgaccaattgggtgatgtaggtaagagactatctgaatgatcttcagatgggatttacagtacgtgggttgttgtgtggatatcttctcg

SEQ ID NO: 11656 - DNA, 528 bp, Gossypium hirsutum
acttcaatgagacacgccagattcgagccaaacttccacgccgggtttggggtgttatacaaaccaaaacatatatatttacaagccatttctaatagccaaatacacatcaatattaacatcatttataagacaaatctcatgccgatgatcacaactgaaacataaccaaaataccataatcctatacatgccatatgaccaaaccaagagctcaaaagtaccaaagtgatggttggatagtgtgacgtagctttcgacgatccctgagtctgagctagctttgatatcactataaacacgggaaaatacacaaagtaagctaataagcttagtaagctcgtatgatataaacttaactaatcacaaatacaacattcatcaatccaaacatattatcatgtactttatgattactaacaaactttcacctacttatttataagcttatatacaaactttgtaacttcttcaaatttaagctcataatatacatgtacatacctgtaccaatccttaacaggatca

SEQ ID NO: 11657 - DNA, 645 bp, Gossypium hirsutum
gtgtaacgccgccagtcacccaggggaacgctgcaaattcttttatggtccgaaattaaattttaattttaataataataaaaatataattttattatttaaatagtttatatctttataatttttaaaggtttaaattaaatttttatcatttttagaaatattaaactgtaattttatctttattaatttaaaatttttaaaaaaattaaagagcttaaatagaaaattttctattttaggggagttgagacctctgccaaccccctaattataccgctgcagtcatcataagagaatgtctatccccgtaattagatatgggaaaattcaaaccgattcatttcgaatagtgaattttttttatttgaaaagtggatgcaatgtaggatatgatgaattttctcttttgaatagtagatttggagtaattataataattgcttgtctcgctccactatataaatttactattttattcttctatatgtaaactattaaaagggtaaaattgtaataatgtaatataaaaaaattatatattttatgtttaaataatcacttaattttaaaaagattaaaaaattaaagataaatagcaacaattaaattgaagtaaagtggagtaaggtgaagatgaatgca

SEQ ID NO: 11658 - DNA, 635 bp, Gossypium hirsutum
gtgggggagtgatttttcgataaaaattaatagaaattatgaaaaagttgtaaaaattaagatctatacaagaaaattatagttttttttaaaggtttgggttagattttaatgggggcttgaagtgcgaaaataatttgagttggatgggggtgtcgagtaaagattccaagaaataatgtatttaatatttggtagtttaaggtgagtgatgagtaataattttgattgagaatagatgatggatccaagttgatacagatagtttacacaatggtatagggcaatatgtatgaaaaaaacaaaaaaatgagtactaatttttattaaaaaaatttaaaaattattagaaattactaaaatattataagttcttgaaaaaaattataaaatgcatgtcattaaaaattattaaatgttatgaaaatttaaaattaattctcttttctataagttttcattatttttataatttttgataaattttatataatctttaaaaatcaattaagtcctcctaaaatattttaaaaaaccaattaaatcctcaatgacaacatttttccacgctaaccgtcatgttatcaaaatttttatatcaaccgctacatcagcaccttaacaatccatgaaag

SEQ ID NO: 11659 - DNA, 372 bp, Gossypium hirsutum
tttcgaaaattttaatgtagattgtacatatatgataaatgacttttttggtacataacttagggtgggactctacaccataaaataggggcatagctagggactgatagcgccgactcccctaaaatggaaaaacttttatttagttcttttaaaatttttaaaaatttaaattaataaaagtaaaattatactttggccttcctaaaaatgataaaattttaatttaattctttaaaaattataaatatataattgtatttttactattgtaaaaattataatttaatttcgaccctcctaaaaatattttctagcttcgcccctgccataaaaagaattaatctattatttgaacccacaacataggta

SEQ ID NO: 11660 - DNA, 677 bp, Gossypium hirsutum
gtaaatgggataggtgcatacatccccatgaagctacgagcttaatgggctgatacgaatataaaaaagtgaacttgcagggcttcaagtgatttagggggtttgttctcaataatcctgttcgttatggaacaaaaggcttaaaccccccccccaaacattttctttgatgcattgggttaagttgctggaccgcagctttcttttctcaaaataaaaactttttgtgcctcaaattttatagaaaaagtcattttaactttttatttattttttcgttttttttaatccttaaatttgtttttttgttaaattactctaaaatgaataaaaaattagcgtattttgactttattagcgtgacatacatgtgaataacatgtcaatatttaattaatttatttatgatttttatactttttaaataattttattaatttttaatttttaaaaaataattttttgaatttttaaaattttaattaaatgttgatgtgtcatctatgtggcaatccacatgtatgtcacatcaacaaattaaaaaaaacgttaatatttttatctattttggggggatttaataaaaaacacaaatttaaaggctaaaaaagacaaaagaaaattttaattaaaaactaaactgactttttctgtaaagttggaacacagctgaaagg

SEQ ID NO: 11661 - DNA, 478 bp, Gossypium hirsutum
tatttccaaacctgaaatttttaaatatatattaattttgttgaatattgtgatggcctgatagttaagggtgctcattgtttcaggtgtggcttgggtttaagtcgcgctagtcacgttagttgtttggattttaccttgttattgtaattcacagaaaaaagaaaatagtatttgtattactactttaagttgtatatttacttaaaaatgagaattgtaatagaacaccaaaatttatttacacagtttgatttttctacatattgagaacttgagcaataaatacttaacaatgtttacaattaagtttgcactctctcacaaaaatagttcctcaatgaacatttttaaatgcaacacacaatattgatcagtccttcaataaaacaacacattaacagttctaaattattttttcaataaattatcaaatcaaataaaataagtatttaaaccacctcagttaacattgact

SEQ ID NO: 11662 - DNA, 420 bp, Gossypium hirsutum
gtgttcgagtagttgggttcagctactgcttttggttttcggtattaggacttcgtattatcgttccttcgtatcttgctttacatttaccttccaaaataatataaaatctcctttcccttttggtataatcaatgtgtttttcaggttattttactattgttaaatttttacgaagtttgtgattgtcttttttttaataatatcatcaatttttaaaattcaaacttaaattatctttggtaaaaaatataatatatcttatcattacaaccaacatttattaattgttaatattatctcttaagatgattaactaaactaattaagtacgatgatgatgatcatagtttgtaatattcaaacttgaatccagtttgccaccttttagggtgattatatgtactaattggactaact

SEQ ID NO: 11663 - DNA, 580 bp, Gossypium hirsutum
agggtgaaaggctaagcatttgaagggcaaaatttaccatttcactgagaggcatgaattgcttataccagtcagagtcttgcttgattgcagcttttaaactaagctgcaaagcttcaacaaactgcagtagagatagaagagccattgcttcgtttgcatctaaaggtaaacccctccgtgcatgtttgatagcagattcaacctttacagagacaaaaacacaaacacttggaagagccataaatcgacaaattaaaagctggaagaaagtgaaaaagaagaagaagatatttacgagagcaaggtcgacggaagtcaagtccaagttaaaagagtcatgattgtgcattaagatcgcagcattggtttcttgtaaaagcctcaaactctcttggaatgtttgatcgacaaattaaaagctggaagaaagtgaaaaagaagaagaagatatttacgagagcaaggtcgacggaagtcaagtccaagttaaaagagtcatgattgtgcattaagatcgcagcattggtttcttgtaaaagcctcaaactctcttggaatgtttgatcgagagaccaaa

SEQ ID NO: 11664 - DNA, 636 bp, Gossypium hirsutum
tttgaatgggaggacaatgaaaaaaattgagaattaattttttattgtaatattttttttttataaatctagactattaatatttttgttactaagtcgatgttaccgatctttttatatttagaattaattctataaaaaatatacatatccaatggtgcttctccacgtctcaaatccgtgacctatatgaacataaaaggttaaatggcaaccattggtaccatttggacacgcattcttgtcaaaacatcgtttaataagggtattatctttttgaatgccgttgtaaaacaactaatcttttaagattttgtcccaataaaagctaaaagaagatacatataatgaaataaaataactataaatattgaatataaataataaaatagatataaaaaattaaaaattatttggataattataaatagctaaacatgttacatcatatatatattacaataaaagtagtatggatgtttttatattagaaatctgttgtattttttttttcttatttaaaacatggaaaaggataaattagtcaactttatcattctgttaaaattttaatttaattatacctttaaaaattgatctttgtagccaacataatgtacatgcaaagggcaattc

SEQ ID NO: 11665 - DNA, 549 bp, Gossypium hirsutum
cctgaaactagactcacatatcttcataccataaaattttcataatttttggttcagccaaatagtacagtttattctttaaagtttcccctgtttcgctgtctgacagttccgaccactcttcactaaaaattaattatctcattgtacagaattcggatgatgttttagcttgtttcttttaaaaatagactcattaaggattctaaccatataaactataactcataatcatttttgtacaatttttaatgattttccaaagtcagaacaggggaacccgaattcattctgaccttgtctcacaaaatttattatatctcatgatttacaattccattgctcacatcatttcttttataagaaactagactcaataagctttaatttcatattttattcatcctctaattccatttctacaatttttggtgatttttcaaagttacactactgctgctgtccaaaacagttttagtgcaaaatgttgatttccattttgccccaaatttcacagtttatacaattcagcccttactcaattaaccc

SEQ ID NO: 11666 - DNA, 569 bp, Gossypium hirsutum
  misc_feature (62)..(62): n is a, c, g, or t
attgctaccgattacttcaagtctctatttgaatagtaagggtcctcggttaacgaagaagngctagatgatggtttgaatcccaagagattcgattctccactgcttctagcacttcttcgttaaccgaggacccttactattcaaatagagacttgaagtaatcggtagcaatcctctcctcttcttctgtttccctcccgtccagtaatctggttctttcttcttccatcatgatattttcatttcaattttttcattatattcttcatgatagccacagtgttagtgcataataagccaaaagcaaataaacaaattctcaagtcaaatattttttggtcttggggaaagcccccccaacccccaaagtcctttctttctggatttaaaatatcaagtttttaaatacccatatctttttctccttatttggcaaccatgtaggattaagatatttcaacacacaaaaggtttggacattgtttttctaaagataatccaattttgggtcataccaattccctacaaaggaacccccaagcccttccttatttcacatcatctaa

SEQ ID NO: 11667 - DNA, 641 bp, Gossypium hirsutum
ctaacttcactttgcgctagttttgatctcactagcttagcatcttgctggctttgcctactgttggtttcgtgtctcgctagctagcttcacttcccggtagctttaaaatgttttcttatcaagtaagtttttatcatttagatattgaaaaattctcaattataacatttatcattttttttatttgcatatatcatatcattaaatatatattttatgtgaataaatatgtttatgttacatatatgttaatgttttacccatatatatatatgaattcaattttaatgtatttttttagtatttaatcattttttttaaatacacataagtggtttcatatatacttgttcacattttgtttgcccacatgtcgctagctcatataacttgctcagatactactaatttaagtaatactcttgttatagcttagaattgcttaggtaatttcccctaaaatgttttacatgatgcaatttagttttgaagtattcccatattatgcctcatgcgtgagagtttcttttcttttaaaaagaaaaattaccaggtaaaatgtagatattattttttttttattaacatttctattagtaataatagtggtaggaaatatcattctttacctaatcatt

SEQ ID NO: 11668 - DNA, 422 bp, Gossypium hirsutum
taaattatatatatactatatcatattgtaatcatgtaatattgtcgtctttctatctgcatagaataatctttacgttgtaatcatgctaaataacatcggaaactgatttgtctttgattctttacattgcagaaataatctttatagtggggtggggtttagagggttggaaaaagaagaaagatttgagtttgaggtggaggtggaggtgttagagcagaacttagatctttaccacaaattttgacaaatggaaaatacattattattttgaatacatattagtaattacaaacacagatttgctgcttgataacatatagatcttttttttttcatagtttaccatggttgctttatgtctatatgattgttcataaaaaattttttttggaaaaagcctatgcatgaaatttaaa

SEQ ID NO: 11669 - DNA, 667 bp, Gossypium hirsutum
caatttaggcataattgtttcttaagtccttcatcattaattaattaagccatttagtcattttattgtcataattagtaagttttgcacattttcaatttagttctttttaattacttacctatggaaacattaaaattttttaatgaaattttaatactatcttattgacacttcataaatatttataaaaatatttatagtttggtttataaaaatgaggtcccaatacctcattttctaaaacacttgatcgaataaatcattataaaacacaaattactaatttaaaaatctttctaaaactatatttgactcgtaaatattaaataatatttacgaacttacttgccgaatttagtggcctcaaaccactatttctaataccactaaaaatcaggctgttacatgtaaattggcctatttccgtctacacgggcaaagacacaggcgtgtgtctcagccgtgtgtgacacaactgtgtgttctctgtatcttttaaagagtgcaagtcagtatattcacacgacctagcacacgggtgttggacttggccgtgtactcaagtcaaagacttacacgagcatggacacgggctgggacacggtcgtgtgtccctattttgaatgcctacacgggcgtgtctcttgaccctgttacccacata

SEQ ID NO: 11670 - DNA, 639 bp, Gossypium hirsutum
tccacttatttgggtcacactcccaccaacatacatttctatgtccatatttgaggactacaattatatatatatacacacgctaattaatcacttgaaaatgtgttcttcttatttatatcacatatccaatctgaaatgcataagttgcaatcaaaacaaaacttagcacttcaaacaaaattcatttatgaactattttaccttataagttactttattttagaaattgatgtaaattaaatctcatgtgatgatttgatgatcaacggtattcactatcctaaatatagtctaagttcgagtcgtgctagttacgttagttgtttgaattttaccttattattataattcaaaaaaaaatattcgaattttactctattattgtaattaaaaaaagaagaaaataaaagttaattttttaataacaccaatttgataatctcaatataacatatggagcttaccactactttgacctataatattgtgtcatataacatattttcatatccaaattaaattttaattttaattttacaaaattataatcatttcaatttttctgttttattaaattgaaataaacggaatttaagcaacctaataattgcagagacaattaaacttagatcatgg

SEQ ID NO: 11671 - DNA, 405 bp, Gossypium hirsutum
  misc_feature (59)..(59): n is a, c, g, or t
tttgttattcacgaacgatttctattctttttggaagctagttcgttaaattgcccttnaatggttaacttgattcaagaatattgtgcagcttctggacgaagggtcaattatgataaatgaagcaacgattttagtgtgaatactcccgaagggacaacgaaaggttgattcaagaagagactaacatagaggtggcaaataattcggacgcctacttgggtgtcccttctttgtgggggctttcgaaaacattaactttgaggcgtatcaaagataaggtccttactttcaccaaaaaaaaaaaaaaaaaaaaaaaaagttccttaccaaatttaggggggggaagcaccaaacttttttttgaggggaaaggggggtttttattaaagcagaaccttgccc

SEQ ID NO: 11672 - DNA, 668 bp, Gossypium hirsutum
ccctcatttcctctacatctctcctcaacgtaatacacggtgcccttaccaaatcattccaacaaaacaccatcgacttcaccaatttacttcctttgaaggaaagagtgctgccaccgcgacatcgaagctcaaccatgagccctttagtcccgaattcacaatacaaatgccaagcttttcgccatgaatcgcatgaaaagtcggtgattggtttctcaagtttaagctccctgtgacatcttaacatccgaagacgaagaaatttgtgtttgttgtctatgtttgttgctttcctccgatcattgagccttacaaagacacatgcctgcattgttgtgccacaaaatcaagctatatatgtaaggtttataagttgctagagtaacctaattggctaatactagactatacacactatgaaaagtagaggtcaagttatgaaaatcaaatcatatctcctaggaataatttactttacattacaattttctagaggcattttcatgaaatgccactgaaaatatgaaaaatttcaaagctatggaccacatggtccatgagcattaaagaattgttggagagagataacgaagggggtaaatggttaagcaaggtaaggatagtgccataataattacctcaaggagaaaccttggtatcatgga

SEQ ID NO: 11673 - DNA, 666 bp, Gossypium hirsutum
ttgatacctcgagaacttttttggtcagattgatacatatgtactttcatccaacttcaagttccgaaattcaagcatttcataatattatgaatctttatatttttaacattttttttgcattttttaaaattttaaaactaattatttaaaatgatctttcttttattttttttaaaattaggttcttttttttataattttcctattttaatttttttttgggaaaattttagtatatttttcatttcttatcatttttaaaaatgaataaatttgaaaacgggggattttagataattttatttttttagaattttatgacttttaattttttttttaaaaaattaagcatgattacatttttaaaaatatatttataatttcatcagataaattctaaatttgagatttttttaaaatatatatttaaaatttttaaggaacttcttgcatttttttatgatttttaataaaattgtcatttataatgactaatgtggcaccaaactgattttttcgttaaactatttccaaggtcaacaaattattattaagtttacagtttggtcattcaatttcaaaaagttacaaattggttacagaactattcaaaagttatcatttaagtaattgagctattaagttgaaaacatatgtcaaatg

SEQ ID NO: 11674 - DNA, 576 bp, Gossypium hirsutum
tagcaagcaaagcatagtgagagcacggattcaaaaatttcccacatggaaggaaatgggatttttgaatctcgaacccccataaatttttttttaattgattctagagaagtgttagtaactaaatacaattgttgattttttttaaaagaaaaacctttaaattaaatttaagagaagtacaatggaggtttcaatcttaaattttaaattatatatttttggagttattttgaaattcaacaagaaattaaataatatgtgcaaaattatatttgaatataactattaagaaaatgtcaagtttgttaggcttgactaaaatttaactttttaaaaatatttgaaatggtttttgttggtatctttctttctttttttctttttggtaccatttgaaattatttgtttatactcgattgttggtttgatagtcaccgtgtttattattttaggtatagtttggattcaagcagtactaattgttttattgttagggttaaaattttaaagtgtcttgatttgaatggagcaatgactaaaattcttatcaaatacccgtttgacacaactaga

SEQ ID NO: 11675 - DNA, 633 bp, Gossypium hirsutum
  misc_feature (13)..(13): n is a, c, g, or t
atgtgttttggantattcgaccatctagatcactattgtacgaaagtatatatatgtgagagttaagtgatgcgtttattgatattatagttcgagatgaagctctagattaacttcatcgaacagttgaaatgaatgaccaaagatattgaatgaaaacactttgcgacttaaagctcagggctaaagaaaggcgaattaaattatgtgaaattttggttaggtatattgggtcaaatgagattttatctagattaagtatatgtgaaaaacgtcattgattcaacaaaattatcgttttgcttaaaacttactaagcttacgaaagcttactctgttcgttcatgtttttggtctgtaggttgtggattctgactactagctcggggatcgtcagcacttcatcacactatctaccattacggtagccatgagattggattatcttatggcatgtatagaatagactagtagcgaaagaataatttggttattgtatataagccatgcgaaaatgacatcttttgaatgtttacttatagaagtttacattttatccctggctgtgtttagtgtttatccaaatgaatgatcttaaaaaaaaaatttttcccttttgtcatgagttacaaa

SEQ ID NO: 11676 - DNA, 669 bp, Gossypium hirsutum
atgcattcttatgggaatattgttaaggaaaaccatcgaacaacccctacccatttttctaaaaaatttcaatataaactgttgaatgcaactcttgatgaacttaagcttccaagaagttcttagacatgcagttaaaacctccacttgtttcaaagcaattctaatgtgttaactgttgacaccattttttggatgaaaacgggtcgacttgggttttgaaaaatgaaaacgaaaatgggagtcaccaccgattctttttggtgaggtgtgatcgggtcaccttgaaaagtggttgtttttaataaacgactaagttttaaaacaacgagtttgttccacgaaattcagaaaaacgggttcgggagtcggttacgtacgaggaaggattagcaccctcgtaatgcccaaaattggtacctagttgattagttaatatcttaatgtcgaaaattgaaaactttgaagaattttaaaaatacgatccttgtattaaacgttgaaaatctttgggaaaagaagcatattttacgctaatcgagaaagagaatcatatctagtaagttaggacacaatatctcgaattcccgatacgcaaaaaatgcttatttaaaaaatattttagctatctcggattgaaaaacgagatcacgaccagtaagttaggac

SEQ ID NO: 11677 - DNA, 652 bp, Gossypium hirsutum
aattcgataggtgagtcctttaagcttaatttaattttcatatcattaaattaatatattgcaacattatatatattttatataatcccaaaatttaaattttttaaatttgaatattattttatatataataattacattaaaaattattttatattcatatttagtgttttaaacatttattttaatttataaattaacctaaagatgcattgttatttgtaaatttttaatataattatataatatttaaaatatattttcataaattcagcctttttcaaattttagatttgacctatctcgggcttgatcttggatcagtcttggggtctagatttaaatttttctcgaacttgaattttcttagattcggattattacatgctgaaataagcatgagtgggcttgtggacttaaacctattttaccagatattattaacccatgttttaaagttaaattaatggaataattcgatctattaccaaattaaatgattaatttaattaacatttaatgttttaagatgatatatgttttctaatttttagaaattagattttaacattttacactaatatatatatatcccatttataatcttcaaattcgcttgatgtatatatctcctcttcttcctcctcctaat

SEQ ID NO: 11678 - DNA, 859 bp, Gossypium hirsutum
  misc_feature (337)..(337): n is a, c, g, or t
  misc_feature (432)..(432): n is a, c, g, or t
  misc_feature (443)..(443): n is a, c, g, or t
  misc_feature (574)..(574): n is a, c, g, or t
  misc_feature (693)..(694): n is a, c, g, or t
agaaaaaaatagtttaaaaggtttttgtgttgatttttcatatgagttatgggtacaatgagtcaatataggtatgattttttattaactaaaattttaacaaattcgataggtgagtcctttaagcttaatttaattttcatatcattaaattaatatattgcaacattatatatattttatataatcccaaaatttaaattttttaaatttgaatattattttatatataataattacattaaaaattattttatattcatatttagtgttttaaacatttattttaatttataaattaacctaaagatgcattgttatttgtaaatttttaatntaattatataatatttaaaatatattttcataaattcagcctttttcaaattttagatttgacctatctcgggcttgatcttggatcagtcttgnggtctagattnaaatttttctcgaacttgaattttcttagattcggattattacatgctgaaataagcatgagtgggcttgtggacttaaacctattttaccagatattattaacccatgttttaaagttaaattaatggantaattcgatctattaccaaattaaatgattaatttaattaacatttaatgttttaagatgatatatgttttctaatttttagaaattagattttaacattttacactaatatatatatnncccatttataatcttcaaattcgcttgatgtatatatctcctcttcttcctcctccttattattagtatatttctaatttctagaaattagactttaacattaaattactgatgttttacactcatatataaattccatttaccatcttcaattgtatatacctc

SEQ ID NO: 11679 - DNA, 641 bp, Gossypium hirsutum
  misc_feature (635)..(636): n is a, c, g, or t
agggatgaccagaatagggattattttcttgatagacattataacaataactaagtataatatataatatacaatatatacctaaatatacagaaagatatataacatatttagatattcttaaaatataatatcccctaataatatcttaaacaaaaataccttaactatataaaaatccatgtttggagggttcaattcttgtaaaatcaaacaacatcagcaccatggaaagcacctaaacaccactgatatgtactctgccaatttatgattatgtatgtaatgcatcattttcatgttttgaatatccaagcaaataccttaaacccatcataatgaagcttcaaattccaaacaagtcataagggaaaaaactcaacacatctaaaaaaaatcatcaatcattaggagattgtagttttggaaacatattaatgtaatatcttcaataacattgcttttatgtcactaatcaaaagagacttaaaagagagtaaaatatttcatcctatggtttgaactaatccgtataatgctaggagagccagcaacatttgattcgtctcattccatttagattttaaaacattcttacccttgagctttataaaacattgatgcgtgagtaaatnntctga

SEQ ID NO: 11680 - DNA, 689 bp, Gossypium hirsutum
tggaaccttgcgtaggacttatttatgatgcatattttatcccattatatggtttttgtttgtgtaactgataattgaaagattcaaggatggttgtttatttttctttgattcttctgtgttggttcgcaaaagaaggaatgttttatgacttcgagaggactggaataagcactttagtcactatgggagtccgagatattcaggatgagggatttcccgatcagttttctgggttggctgactccgtatttctggacctaccacaaccttggctagccattccttcaggttgaaacatgttgaaacaagatggaactctgtgttccttctcaccgtgcatggagcaagtgcaacgttcatgtgaaactctgagatctgactttataggtaacaaattagaaacaagttatcctatcttgttcaagcagtttttcttttaaagcatcatgagctttgcttgtaatatgcagagatatatggacctttgaaatactgctccgcatgtatgaaatctgtgaatggaaaatggatcactcgaaggtcaatgatgggaattccattgcatgctctccacacaagaggaggccgccttcaagtgaagcaagtgtgggggacaatgcaagttctccgagaatcatggcttggccatctgctgaaactcgagggcatactggatataaaaaaaa

SEQ ID NO: 11681 - DNA, 574 bp, Gossypium hirsutum
aaaaatttggattgcctacctgcgaaccgattgggccctaccagttgggtgcgtgaaggtcttgtagtgggggttcatcaggagggttcgcaagggaaatttgcaatcccagttcccatgtgggggctacgaaagttcagcaaacagaccagagcagtacatgtgtccaatatgcataaatattccatgaacaataaccatatgtataaatatttgattatccccttcaataagataagacagaaaaacactcaacacatttatatactcatataacattataaaaaattgactaatgcattaatattacctatccaaatttttttagaaaataatgattgatgttaactttgcaaataattaagattgaattcatatatttcataaaaaattgaattcacattttttttaaaatccataaaaactaaaaggattttctactttgtatgtatgaattgttaatattgatgtagcatttttttctatttatatttatttcactacaacaaaattattgcttaattcctataagtaaaaaaaaaaaatctgtcaatataaggtccaaaaacttata

SEQ ID NO: 11682 - DNA, 658 bp, Gossypium hirsutum
aggttatcatgcacatctaaaaccttaagagatgtcaaattgctcaggcaagaaggaagggttccttccaacctattatgactaatgtccaacacttgaagtctcctcaattcgcacaagcctgtcaccaaggagaaattaaaaatgtttacatcatttatatgaaaaaataatacatctaaacattttaattttgctcttacctgggaccggtaaagaccctttgaatagattgcctgccaaatatagcgctttaagataggatagcttcccaagattttgaggaatactcccattgaaataattcctgcttaaatctaatagctccaatcttcctaaagttatcaaatctaccaacaaagcaaagataaggcatgttaggagatgcaacaaatagggaaacctaagaaaacatttttttttcaaagcagtatcgtgtgcaagttagtacatctataccatttttttcattcaataatttaaaattataacagtgttatgtaagtataaggaatatttttttgattaattggaagatttcactgctcgaagctaagcaaaagttactcaaaacaggcgaaggaagctaaaatcacaaatatctaacatcgtttgtgcaatatgtcttcaatcttgataatggacgaagtcacctatc

SEQ ID NO: 11683 - DNA, 543 bp, Gossypium hirsutum
  misc_feature (91)..(91): n is a, c, g, or t
aatggaatgctgctccgacgaacagaagagggcgaacaaaaagagaagtgagagatgaaaagaatggaagttgatgatattactcttcttnttcatctcacatgagacatttgattcaaaaaatgccacttttttttgtgtgttttgtttggttttggctctagaattctcaccctctaaaagcttcaaaaaagctttgagtgaaaaatgtgggttcactttgagatccaagggaagagatatggatttttgggggtttgaggagagagacaaggggatgaaagggtgtttttctagtaggaattgtagggcatgtgcttgtgtgagagaaatgaaaataacaataataaaaagaaggagaagaaaaagagacaaagggatgaaagggtgtttttctagtaggaattgtagggcatgtgcttgtgtaagagaaaggaaaaaaacaataataaaaaggaggagaagaaaaaaagaaataataattcaccaaaaagacaactaaatcacagctcaaagcccaccaaattctgtcattatcatccc

SEQ ID NO: 11684 - DNA, 600 bp, Gossypium hirsutum
taaatgttactgattgttttatttgaaatatatatatatatatataaattttgaaactttatcgaagaatattttaacagcataaaagcaaaatttcaaaataaatataaaaaattaataagaaaaacggataatcataccaaattatgaacaatttaaaaaatccaaaaagaatccaaattgaactgaactcgtcctttttttattctgaaaagaaattcaattcaacctattaacacaatttttgaacagtactcaatatttgaactaaagcataaaatattaataaataatatcaaattaaaatatgaaacttctttcatatccaaacagggacgaagccagaggggccggataaaatattaattttttatagtttatatttttataatttataaaggattaaattaaatttttataattttaggggagacaaagtgcaattttacttttactaatttaaaatttttaaaaaatttcaaaggcctaaaataaaattttctattttaggggggccgggcccatgccagccccctggctacgcccctgtatccaaataaatatgtttatatgtatgtatgtatgctcatgctggcataa

SEQ ID NO: 11685 - DNA, 613 bp, Gossypium hirsutum
  misc_feature (10)..(10): n is a, c, g, or t
  misc_feature (231)..(231): n is a, c, g, or t
tttggtcagngccaattagtaaagtttattagttaaagtctcccctgttacagggttcgactactctgaccttcatgcattatgacttagatatctttctgtacagagcttcaatacttattccgtttgtttctaaagaaattagtctcgaaaagaaatatgtaaatatagggcatgacttctaattatctctggttaatttatagtgaatttccaaagtcagaacagggngatccagaaatcgctctggccctgtttcacgaaaacttaaacatcccttaaaatacagctcatatgatcgtttcgtttcttccatatgaaaatagactcatcaaggttcgattacataatttattcgctatttaattacatttctactatttttagttatttttcaaattcacatcactgctgctatcagcatctgtttttaaggtagactatacctatttcatgattttccatggatcaactaaaatttcaagaactaatataaacaccttaccttactatcaacctaagatgaccgaatgctttcctcccttcttcctctttcatttcggccaagaagaaccaaagaatacaactttttttttcatcacccttcctttac

SEQ ID NO: 11686 - DNA, 585 bp, Gossypium hirsutum
atgttcagccatggttgtttaatgcatgtataaaattgtaagtaaggtttagtatctaggcatgaaattttatgtttttgataatataatgctatgatctaggtcacccatgttgaaatttcaagaatgaatgaaaattatgaaagttaccatggatgagaaacttaaaggtttgggattattttgttgaatattaaatgtttttgaggtgatgatttgagtataaattttgtagattaaattggtcatattgagtagtgattttattgataataattcctagggactaaaatgttgttaagtcaaaataacataggggctgcttcagtggactattattatgctggaaaaattgggacttatttgctaagtctataaatacatgaaatatgttgtgatatgaaattgactagcaataactagaaatgagtaaaatgttataatataaatttgattaatattagtagaaacaagaatggtattaattgagctaaattgttaaaaatagatcaagagaagaatagagcgagtagcaaccgtggaaaggaaaagatcactgagtagatatccgtcgtattttggtaa

SEQ ID NO: 11687 - DNA, 666 bp, Gossypium hirsutum
  misc_feature (657)..(660): n is a, c, g, or t
tggttcctgatttgatcggttcgattggttaaatcaatttgtctagtttaaattaaagaaattatttaaagttataaaatttgattcaaacaccaatcattcaattttcttctcgatttaattaatttgtactgtttcacaagtcaatcaattttgttagctcgattaatcaaccgaaatagtcaagaggggtgaattggccttttaaaaattcgtggaagtaaaagaaaaagtatgaaacaatgaacataaaaatttatagtggttctatcttgattgcctactccactaccttagctttccacaactaaggattttctcaaattcactaatttgatgaatctttgaggagaaggtttaaccttacaactatattaagatttctatccaaatcttaagatacaaaccttttcaaaagagcaaacaaagaaacaatctttacaagattaagatgtttgccaattaagcactaagataaagaaaacacttgagttgatagaaaaaattaaatgctcacaagtgtatataagaaaaatatgaagaattgaagcactgataggattactttttgacatttttactctctcttgttattgttgaacctttggaagctggtatttatagtcccaaattgatttccaaccgttgtggttgttnnnnaaattg

SEQ ID NO: 11688 - DNA, 775 bp, Gossypium hirsutum
  misc_feature (580)..(580): n is a, c, g, or t
  misc_feature (582)..(596): n is a, c, g, or t
  misc_feature (598)..(603): n is a, c, g, or t
  misc_feature (605)..(610): n is a, c, g, or t
  misc_feature (613)..(617): n is a, c, g, or t
  misc_feature (619)..(622): n is a, c, g, or t
  misc_feature (624)..(640): n is a, c, g, or t
  misc_feature (642)..(646): n is a, c, g, or t
  misc_feature (648)..(653): n is a, c, g, or t
  misc_feature (660)..(665): n is a, c, g, or t
  misc_feature (674)..(680): n is a, c, g, or t
  misc_feature (685)..(685): n is a, c, g, or t
  misc_feature (687)..(697): n is a, c, g, or t
  misc_feature (700)..(715): n is a, c, g, or t
  misc_feature (718)..(723): n is a, c, g, or t
  misc_feature (726)..(729): n is a, c, g, or t
  misc_feature (733)..(744): n is a, c, g, or t
  misc_feature (747)..(756): n is a, c, g, or t
  misc_feature (764)..(766): n is a, c, g, or t
ttttccctaaacgatgtcggattttgttacattgtaagatatgtctggcaaaaaaagatacacactctctctcctgatttattggaaaaatataaatttaaaattataacctcaatttgtgatggtggattaattggtgcaagaattcagcttgaatcggctccattatagtagattaaacgcttgattataatcggatttgttttacttaataaaaagaaattagttgtattaagcctatgatatttgtgctcaaaccaatttcaattgtgatatctttgtagatcaagtacaaaatgtttccgtattagttcacggtgacatcagccccactttcgctccacctttaaattctttagtaataagatcagatagattactcaatttttagggatgttcgtaattttgtcgctaaatttttaagatatttttattttagtcactcaactgttaaattcttaacaacaattaacttatacacactacgtcatattcacacatttatattagtccccccaaaaatatattgctttaataattgtcaaattgtacttgtttatctccttgccaaaacagtccntnnnnnnnnnnnnnnncnnnnnngnnnnnnttnnnnngnnnntnnnnnnnnnnnnnnnnnannnnntnnnnnnaactacnnnnnntcctatctnnnnnnntcatnannnnnnnnnnntannnnnnnnnnnnnnnntcnnnnnnccnnnncctnnnnnnnnnnnnccnnnnnnnnnntccctacnnnccataaccc

SEQ ID NO: 11689 - DNA, 478 bp, Gossypium hirsutum
ccatttcatgcaagttggtcatttctaacaattttttttacaaaattgcccataaaattttacttgtattcaatttagtccatgagcctaaaacatacaaattagccatgctagctgaatattcatacatattttcctccccctcctctccattccacatccttaatttatataacatgcaacaagtaacattatcaataattttactatttacttatgtatattcaaaattgtccatttgcgtcatagtcactaaattatttatatcttaagctacagaactcgaaattaagatccgctaatttttcctgaaactagacttacttatcttattaccataaaattttcagaatttttggtttagccaataagtacagtttattctttaaagttgcccctgttctgctgtctgacagttccgacccttcttcactaagaattaattatctcatcgtatgagattcggatgatgttctaa

SEQ ID NO: 11690 - DNA, 498 bp, Gossypium hirsutum
  misc_feature (46)..(47): n is a, c, g, or t
  misc_feature (449)..(449): n is a, c, g, or t
ccccttattcgggggggtttgaaattttttttttttgggtcagcannctccctactcgcggttgatttgaatttttttttggtttgggtcagcaaaaatattgatcaaacttggtgctggtgggcttaaactgaaataagttcggaaatggggatggacatgtaattagcaacgggtttaaaagttgctgttgattgacgcgtgtaagccttacagccttataggcttatagcatatttacaaattctacccaactaaaaacataataaaatccaaatcatacgcaacataataggaagcagctttggcttgacggacacgtgaaaaatcttatagtttttacgtccacgcgtcacactgtttgtttgtttatttttccgcaagcactttgccgaatgccttgcttcgttgggtaaaatgaccaattcatccttcacgtaccttccacngggccttggggaaaaaaaggccaatttccccttcacaaaccttccaaaa

SEQ ID NO: 11691 - DNA, 636 bp, Gossypium hirsutum
caaccactggacaatactttaaacgtaattgtaatcctatcatttttgtatgaacaagttcaaacttgtataatgataaacgcgcttcaataaagggataaaaccatattttcctctacaggcaataatgatagtgataattaagttaagattcaaggaaagctttatatttgatattattgatagtaaataagtttatatcgagagagaataattcataagttgacacctagttaaacttttttttttaataattaactacatttttaacaaatgatttgtaagtttgatctgtataaatagataatatttggtatgatgatataatcacttttcttaaaatttaatcggttgaaaagtgattcaaacgtttggtgtactaagttttatttactttttggtatacaggtagtagaagctattaagctcgagtacggtggaggtagagggaatttccggtggagcaataaaatgcgtacagatcgaaaagaatatcaaacagtgaaagcattctttgagagttattttctcatcaacaaggtaacatgattcataacataaaagacgggtaagttaatttctcatgtagatgaaaaagttaaaaaaatattaagtcaaaattaaccctatcttatt

SEQ ID NO: 11692 - DNA, 652 bp, Gossypium hirsutum
ccatcatatgtggatgatgtaggtgttttatgaatgactagtaatattttctttcattaagaaaatctgtgtaagataaccactgtttcaggactttgagcttctgcggaaaattgcgggatgccaagaatacatggcccaggaaaactttgagaagatgtggtgttggttataccctgtagcttatacattatctagtgactgggtaaatgaaatgtggaattctacatccccaaagtggatagaaggatttataaccaaggaagaagctgaactctcacttcaaggttccagaggcctgcaagagcctgggacatttatacttaggtttcctacttctaggagttggccccaccccgatgccggtagcttagttgtgacatatgttggcactgattacagtcttcaccacaagctgctttccattgataatgtatataggtgtgcggttctggctttattgaatttaattgttgtcttaataaactgtctctattaatatgttctttttagctgtattatctactatttatatccgaatgcttagtaatttcttcaccaagaatgaagcctgagaggctgggagggccatggccccttggttaaatgggaaataattatagggatcaatttgcttaattttgaatttgag

SEQ ID NO: 11693 - DNA, 590 bp, Gossypium hirsutum
aattctaggcatttgtatggccaagcaaaaaaaaaatcctaaatattcgttagaaggatatttatcgataaggggaataattaatgttgtttgtcttgattctcgaaaaggtaagaaaagattggtcgcctggcgattgtaattaactataaccattttataattgaataaagaaatttgtctttgcatcgataatcatacaataaatcaaaattgagattttacctttgaccagactcttatcatattgattttgtaacaccccctaacctcgtcccgtcgccggaacagaactacggagtattactagtcattacagtacatttacacgtaaaacatgaataaaaacaatattgtacatcaaatacatcttaatatatctttaatgggccctcggtacttaataagtacatttaaaacaaatcggggctcgatcggaagcttagaaatttttttgtgaaatttcaaagtttcctcctatgaacagaaccacacactcgggcggtttaggggacacgccgggggcccctttcaacatgccagggggaacaccccgggtcactcacacggtctggacacccccgtaccct

SEQ ID NO: 11694 - DNA, 792 bp, Gossypium hirsutum
  misc_feature (560)..(574): n is a, c, g, or t
  misc_feature (576)..(576): n is a, c, g, or t
  misc_feature (578)..(578): n is a, c, g, or t
  misc_feature (591)..(593): n is a, c, g, or t
  misc_feature (598)..(603): n is a, c, g, or t
  misc_feature (606)..(611): n is a, c, g, or t
  misc_feature (615)..(619): n is a, c, g, or t
  misc_feature (627)..(632): n is a, c, g, or t
  misc_feature (634)..(644): n is a, c, g, or t
  misc_feature (654)..(674): n is a, c, g, or t
  misc_feature (676)..(682): n is a, c, g, or t
  misc_feature (684)..(684): n is a, c, g, or t
  misc_feature (686)..(686): n is a, c, g, or t
  misc_feature (691)..(692): n is a, c, g, or t
  misc_feature (694)..(702): n is a, c, g, or t
  misc_feature (719)..(741): n is a, c, g, or t
  misc_feature (746)..(748): n is a, c, g, or t
  misc_feature (753)..(759): n is a, c, g, or t
  misc_feature (772)..(774): n is a, c, g, or t
  misc_feature (778)..(778): n is a, c, g, or t
  misc_feature (781)..(783): n is a, c, g, or t
ccatactgattcaagcattcaagataagtaaaccctatcattaaacatgatatatcatcacaagcattcatgtttacaatcttactctttaatatggatacttgtctcccctttcttaattaaacaatatatagtacctatgttatcaccataacatgaacttaaatacatatatacatgtaccaaaacataatcatcaccagccattccaatggctagattacaatgatcatttacattttcatgccaatattgccaacataacctatacatgccattacaaccataattgatttaccatatatataccgacataggtcgatggatagtgtgagtgatctccgccaagcttccaatcaaacaagaatctaacttactctaaaacaggggaaataaaatgcagtaagcataaaaatgcttagtaagttctataacatggtacttaacttaccattcattctattatgaggtaactatgtaaggcataatcaatcaatttgccctcaagccctacacacattctcattgcgctcgtcagtcatatattacataaaaaaaannnnnnnnnnnnnnncncntttcccttttttnnnttttnnnnnntcnnnnnnctcnnnnnctttaacnnnnnntnnnnnnnnnnnattttaattnnnnnnnnnnnnnnnnnnnnnannnnnnntntntgccnncnnnnnnnnnataaaaaaatcataatnnnnnnnnnnnnnnnnnnnnnnnatatnnnattcnnnnnnntattctcttaatnnnaccnttnnnccttttctc

SEQ ID NO: 11695 - DNA, 573 bp, Gossypium hirsutum
  misc_feature (562)..(564): n is a, c, g, or t
ttgaggaaaaggctgcgcgggctatgatggagctaagaaagatgaacgccgaatatgaagctgtgtctgccgaggtaatgactagtcgatctaaacgtcaagaactaaaagagaggatacgagatttagaagacatgctgcaagatcgtcaacaacagctagatactctcttggaggctttggaagaaaagaatagtcagtatgatagagacattcgtgcttacgaagagggcctccaagaaaaagaaatgcaacttagctatttgatcaatgaaattcgtggggtagccatgcacgtggtacaactatcggaagaagctgaaattctcatgtgccaattccctccaagtcgaagatcaaacatatcagaattcttagcacgagtaaagaaatatggcgatatagctaggaagtttgtgtaatggctgaatcaaaaatggcaaaatgttttgtaatggactcttttgataaatgaaatgcctaaataggggctatcttgaaatcaacactaaattcttgcatatgcattcatgactaacattcatttgacatttatgctttnnntcgttcatt

SEQ ID NO: 11696 - DNA, 407 bp, Gossypium hirsutum
tgaaagtttggctaggcttgggttgtgaggaaattgaaagaaaatcattttacgagcctaggaactaaattgtaaaaattcaaattgttaggggcaaaaatgtaatttttaccatagtgtgtttttgggctgaattgaataatgtgatgattaaataagttaaacttgatattatagatcaagaaaaacaatgttcaaatttagactggggaaagaacaaggttgtggactaaattaaactaatagtcatttttgtaactgaggtatgtttgtatgttaaataagctttaatataattgtatttaaatgctttaatattgcatgacctgtatgattgattgtgtggatgagtttaactttacagataagttcgactacggttcggtaagcaaagaaatcacgtaaaa

SEQ ID NO: 11697 - DNA, 633 bp, Gossypium hirsutum
  misc_feature (45)..(45): n is a, c, g, or t
atagaaaaagttaaatacaatttcgtatctcacaactcatatgtngagatttcatccacctttagatagaaaataatttaattactcacaatagaaaattaaaataaagaaatttagaattgaataaagcaaaacaaaacaagagcagggcgttgttgaaagaaaaaacaaaatttgatttctctccaaaaccaaaaacaagacagggatgtctccccctctccgtggtttcagtttttaaactgaaatttaattcatagtattctactcttacataattttttaaagataaaattaaatatttatctaaataaaatataagggatacaacttaatcttaataaaactcctaataaacatctttataaataatattttaataaaagtaaaataatcctaaaaatctaaaaaaccttgtacgctgaattgctactcccatgcccaaatttttcatatgactccatattttcacgtgctctctacattataaacttatactgcatctacataaaaaataagcgacacacaacaaagttagtagcatcaagcccaaaagtttacaaaataaagcacataaatatgttaatttggaacaatatcatcaagcgaagataaacttgatcggtaatgagt

SEQ ID NO: 11698 - DNA, 665 bp, Gossypium hirsutum
tggtggcctcaactttgaatttagttgataatcaaaggaaaatgatgggtggaatttgaaacatcaattcagtgggtgggagcaatggattcatggtcccgcctagctttaacctttcatatattttgtgttgttcaattctccaaattatgcccattttatttaatacaaatatccttatattgctaacagaattaaggagcttcttatattagaagttagatcacattttatttctgtctattccaaaaataggtgaaatagtctttgtatattaaatctcaaagtaaactatttctactgttaaaaatcgattcatgtacgtcaacatgcggtatacatggcacactacgtgttactgtcttattattctatcagccacgccaatttttaacgaacaaaaatgatccatttactctttgatttaatttaatgggaccaatttaatcatttttttgtatgaatgaacaaaatacaatttgactcctaatacatggacctccatcatacttaattaaaagtattaagtattacattattatattacggattgtccaagtaatcacaaagtagaatcaaacaaatagattaagaactagtattggttttaattggattggactaacacacatggcaattgcacatggtgaaacccagaaactcac

SEQ ID NO: 11699 - DNA, 547 bp, Gossypium hirsutum
  misc_feature (72)..(73): n is a, c, g, or t
  misc_feature (75)..(78): n is a, c, g, or t
cctttttttctcttcataccgattgttgattaaatggtcacttcatgagcttaatttccatccaagttgctnncnnnnttcggctgacccaggagacttcaaaagtttttcgtaaagcattcaagtgaattgaaatcaactaaattgaagaattacatcgtcttaaaggaaggagttacttaggctagagtttcaaaagttgtgactttacatttcagctcattaagctgaataaaagtgactattcggctagcctcttttaacattataaatagttgtaatcagcctattgtaagataacgtttttgctgaatgtatgttaaacttgagttttgtgagttatccaattctttttattcttttggaactgatctgacttatcaagcattgtttgtggcataaatcatttctattgttaactgaacttatcactttcaagtgtggcattcgtatacctttggtttctatcactaattgatagtgggttaaggtttatcatttgttgttttccttaatcgtaaaacatctaagagccatttgagattcg

SEQ ID NO: 11700 - DNA, 506 bp, Gossypium hirsutum
acttaattatgtatttttttaatttataagtacaaaatttaattatttaaatcccattatttattttttttaaatatccttcaaaagttaattaaaaaaactgtcttcattaaaaattttggttatctgatttttttttcgaccattaagatcatatattaatataaatatttattatttatataaaatattaattttttatataataaatattaattctttaataaaaatttataaaattagagctcaagttgaagtgaattttttatttaggaggaatccctataacactaggagagaatttttttttatttaggatgaatccctataatactaggagataatatacattagagaccaacaaaatgggagagaatttttaggaataaaaataatattattttaattaccaaaaaatattatttttaaagaataatttttaaattttaaaaaataatgagatattgtatggacccgctcctataggaatcggctgagactattat

SEQ ID NO: 11701 - DNA, 583 bp, Gossypium hirsutum
actccctttattcgcgtcaggcaaagaaagtgatactagcgaagacaagaagaagaacatatatttttgaaggatggacttcataattatttctttacacaaatacaaggaatgctaactttcaagttacgaggctgagtttagacgattcacggtgcgtttttagttacggatagtataaaaataataatagtggtgggatttaatagttaaaggtgagataaaaagtaaattaaatacattatatcgtagtacactatattatctatctaaactcatcataagtaaaaattatattgtttaagaattttaatatttgatatctatgtttatttattttatttaaaaaatgagataaagattaaaattacctataaactttgatttaatatgtaatgtgttacataattaaaggtgtgcatgagccgggctgagccgagttcgagctgggcttaactaaatatttagacccgtttgctaggcctgagtctgacccggcccgaaaaataattctaaaattttgcccaagcccgacccggaaaaaatgttaaaactcggatccgacccggcccaccatataatt

SEQ ID NO: 11702 - DNA, 653 bp, Gossypium hirsutum
tactcatttggtttggtccattatgcttattttgggcttgagcttgtatatatatatatcaaatctgggctcacttaattttagatattaatcatcctaataaaagcaaatgtttaattatggttttagtttatcaactaattaattttaggatttaattgaatatttttcttggtgcatattgttaattgaaatatgattgattggattttagggtacctcaaattataatcatattaagataaaggattaaatctaaaatttcaacataataggagggttaaaatcaaattaaaccaaaaacaacaaactcgcacgctgtacatggcgcgggactcctcacggctcacgccagagccgcgtttcttttgccacttaggaccgtcaccgtccttagcacattaaaaccaacacgtgtcagaaatagattggatagtaagttctagaaggtcatagaagactgcgaatcaagcagaatctcggagcaccgaacaaacctaaccgcccaactataaattgacctctttccttttaattcgtccagtttccaatcttacgcaaagcggtaattagaggaataagaactagaaaagtttttgcgattgcgatctcgggtgcgtttctctccctctccgtacagtttacattcccaa

SEQ ID NO: 11703 - DNA, 673 bp, Gossypium hirsutum
ccagtgaagaagatgaagatggagagattataagttcttccatggctgacaaatacaaaaagaaggaaaacaatacaggagggaatctaaaaggcagagattttggaagttctttacaacaaatgagccattaaatcatcttaaattttacaaggaaaagaaaaaaccaaaagagaatacggggagcattggacaaaaaagggggatggagggggagtttataagctttgtaacttataaggtgggggccacaagatcctaaaatcttctgcatgcacacctataagctttgtctacttttctttgtttattttaacagtaagactgtgactttaactcattaagttagacttaaacttgcttcttctcctcttgaaatttttgttttccttctaatcacacctattttgttttcgtgtttattttgactgtgtgaaatgattttaggttatcaagttgggattattaacctgtaattttcgataacagaaactaccatattaatctcaattatccttgcagcatcaaggaaacagggatttggttctaacccgaattgatataatttgattaattcatctaattcgatcggaggtcagtcaaaaactttatgaaatttcggttaacggttaatttgattcgaaatcggggaactaatcgcattaaactgaac

SEQ ID NO: 11704 - DNA, 635 bp, Gossypium hirsutum
atttcagtttctctattaaaaaaataaacaagttaacttttatacatttcgaaacatgcaaattatcaattaaatgatagtggagaatattaatttaaatagttaattgttaatttggttcgtgaactatagctaaaatattgttttgattttttatttttttcttaataataatcctaaaaacttaaattatttttaaaaatatggttagtgtctcattgtattagataattatcatcaaatcgagaattttaaaaatgaaaatatttctccgttattgaatgagagttcaatttttcaaaaaataaaaacataccaaaaaagagctcctttgaatgtaagttttggttttaataaatctgagtttgattttgttttaacataagttttaataatttatatttatttttgagatttttttaaaaaaattagaattattgttaagaatttttaaaaaaaatttaaaacgacgttttagctatagtttagggtcaaattagtaattaaccatttaaattaacgttctacatcatcatgtaatagataaattttaatagagagactaatttgcatattttaaaatgtataaggactaatttatctatttttcagtagaggggccttaagttcaagga

SEQ ID NO: 11705 - DNA, 363 bp, Gossypium hirsutum
catatttgtgtcaatgtataaatattgaggttaaatttattgaattctttttagaatcaagaccaaattaacaaaatatgtaaacatcaagagctaaatttgttattatatcaatcaaaactatatacaactgatgtcgtgattagttgtccttaattactcgctttcaaaattaaccatgattctttttatcaaatgaaaatcaatcgggtgaattaatttctccatcatacaaaaaaaagtaggtaaatataattggtttcttgcataattagtaatttgacaagcttctaatcaaaatcaaaacattatgaattttaattttccacattgaattttgtatcaccctttcatcaatccatg

SEQ ID NO: 11706 - DNA, 644 bp, Gossypium hirsutum
ttaataatggcgctaggtttagctacaccaatcatgtcttcctggataatctttggtaaggtttctaagagagtgaaccaatttagttatgtcaaaaggcctttaaaatgcccagcttgtcaaaaaatctacacacatattagcttcacgataataatgaacaagactacaattctaattgcattgaagcagctccttacaattccagatcactaaagaaagaatcatgttgttgcaagagggtcaaaatcttattaacagccacaaatgagtctaacttgataacaagattccttatgccatgttcccaagctggacgaagaacattatatatagcataaagctcgactttagtgatgtgcccatatcctaatttcccagtaaaaaggtaggccataattcatataacgtcaacaacattttttaaaaaataagaaggttgtaattttttttaacatttatattagtaatataaattatttattattttaataccacatattagatgtgctcgtgaatgggttagatttgagtcgtaaccatataaggtatctagattaatttttaaggctaagtttaacccgaaaaatgagcttccttttttgttcaagtttagcccaatttaagaaaggtaaacccgaaac

SEQ ID NO: 11707 - DNA, 649 bp, Gossypium hirsutum
tatctggttggatctgtgcacttatcggagtataatctagggaataggcaagatcctcagtattaaccccaaagtggaccaccgggtctttcttcttttctaactcttcagctaacaatttgttgaactggcttatcatagtgctctataattctaacatctaatctttcatttcctgttgaaatttggtcaattgctcctgcatctgtatctgcattcactcaaatttttccaacctttgttccatttctctagtctttgcttagataccgtaagggtgtttggttggttagtttttcagattagctgaaataaatttactcaattagactcttttaatggattttaatgatgtcatgtaatgcagatgcatgaaatgaatgcctaaaaagatgttaattctgattcaattacatttagaaaacttcattagaaagcaaattcctttacataaagcagatgcatgtacgacctctcccttatatttcaagagacaaacatcaatctttttcttcatccgcatgcttgaaataatctcaccgatagatgccactgctagctcattttcttgatcttggtcgcgatccatcatctacccatcttcataaggctcgtcagcttctttaagggaattggtacgttgaaaagt

SEQ ID NO: 11708 - DNA, 655 bp, Gossypium hirsutum
aggagaaggtccaggagcaatagccggtccaaaagaaggattgacatgttcctggggtgatcttactcgagaaaataacacacgcactgaaagcagcctagctgctaggagcagaacaaccttattaatatttcataagcaagagtaataatgcgaagtaatttaaggatgctagaatgcctttaaaagtcatctgataacctatactgaacatctatagaaaataggtagacatgaacaacttaatgtagcactcttttttcttctatcgcatcattaatttaacatcatgggttaaatatcagaaaacgtgacaggaggatcaaggaaccttttaataacattgacttatgaagaactggaagtaggcatgaaaaacttataacttaagctttctaagtttacatgccattagactgaagaattgggaagcaaagatgcataagaaaagagcctatctgatgactaacatgtactccacaaatagatggtaagagttcctcttctaaacagaatacataaagaaccttgaagatcctttttttgataaaacaattagtgggcaaagcgcaaactaacatataaaactgtaaaacaaaaataaaaaacttgttaaaactgaaaacaattttttagctgggaacaactatccctt

SEQ ID NO: 11709 - DNA, 651 bp, Gossypium hirsutum
tttagggcttgtatttgatactctgccaatgcatatttttttattccataggctgtcttaaaaaattgctctttgtttttaaatattcatttattaatgttttactatacccttgtaggatatttgtcaactccttaaccctacttgtgtagtcttagttgaccaaatattttctctaaaatttaatatgattacaaatatatcattatacagaaatataattctatatatgtatacttattaacaaattatttccttactattaaatttcaagtttaaattgactgttagagttagcgaggaattgtaagtcaaaattgagcatgaggtttttacatttttattacacttatcttcttttttctcaaataaaactgcaaaagattcttgattagttatcttctctaactcatatcttccaagtgtaattaattgatttcaacttcagacttagatgtaatatattcattatatcacagattcatgaagttggttacacagatgaatcaaattttgttcttgcaagtattaagaaggtacattaggaagtttatttaacaagtccatattaattcacaaaattatacagttaaacataatcgaatttattttctagcttctcaatagttctattgtccatggatcttcttg

SEQ ID NO: 11710 - DNA, 563 bp, Gossypium hirsutum
ggtgaagttcatagagtggagacactttgttggatcaagttatgcgtggcatacggtcacctaccaagaggatgtaaagatcgagcgtttggtagggtttgaaccattgcctcttatatggcatataagacacacatgttaccacttgatctagtgtctatttttagaggagattgattcccttgaaagaattttgagaagtgtcgttcacttagagtcggtggaccactcaactggttgtattatcccaaaattgaaccgggattttgtttcccaactctgtcaagagcttgagtgtcggaggtggggttctagaacgagagagcctagtcagacaggatcatccatgatgcacgaccacctaccaagagaatgtgagcgtcaagctttcgataggattttaaccctggccccttatatgacacctaagggaaagcatgtgttgagaagtggccaacgctttgaggagaagttttcaaaatgttgtctgtttggaactaacggaccactcaacgggtcaatatgtccttgagtcaagtcctctagataaacaacactttgca

SEQ ID NO: 11711 - DNA, 611 bp, Gossypium hirsutum
caattgggaagggcaacctgcagacatatataaatgtcataaaaagataacataagttttccttctttacagacaaatacaaattcaatcaaaatgtagagagaattgaaaggagtgagtgaagtgataaaatgtagagctgcataaatctaacatcattcaattttggaattaaaaagaaatgcccttcttttactatccttaaattacactttcattctcatttactttatttatttttcatttacacttttattttatttcaataatataaaattaaagcttaaaagcaatttttattttttttcattcatactttgaagggttttttattgctgtaaaataattaatatattttaattatgtttaataattttaataatattactttatattaattaatgaaataaaaatacattatatttgtcacatttttatttattaaaaggcttaatataacatttgatatttgaatttgacactttttgttaatttagtccctaattttttttgtctaatttaatacctaaacttgttaaaagttatacaaattactccaatatgctaatagtgttaattttttagggataatatgtagtttggcacctgaa

SEQ ID NO: 11712 - DNA, 518 bp, Gossypium hirsutum
  misc_feature (52)..(59): n is a, c, g, or t
  misc_feature (502)..(503): n is a, c, g, or t
ctgatttttctgaatatattctgaattatctgtctgtactgaaactttactnnnnnnnnctagataggatgctactgaaaccctagaaaagcttgctaaaagactgaaactgtagctagacgtcgattctacgaaaaccatctctgaattactgtttgaatcataaaacatctgtaataatcactggaatgctaaaattgatgcataaaattcgtaatcaaataatacaatatgagtacgcgagctcctcgaggaagaggccgaggacgacgacgaagaagacctcgagcgtcatcttcttcttcaggacatatgccagcggcagaagcaccggcaccttcaacaacggaagtggaatctcatgatcgtggcgccggggatgacgccctgtcgcaggcaatgcttcgagttctggaaagggttgccgggacaagttcggacaaaaaaattcgaggatctatttatgaactactccggaataaaggagagaacatttttgggnnagcttctggtgcccc

SEQ ID NO: 11713 - DNA, 620 bp, Gossypium hirsutum
attgctgcgagctggatccaaaatattgggtttggttaacaaaagatccttgaaatcgaacccgaccatacctttcaggacccaaaacttcagtaataattcagttatcaatgtcgtcaagattaatagaactatcacttcaagtgatcgcttcatactcagcctttttatcctttaattagtttctcctaataaatcaatcaaagagttagaaacgaaatatataatcaaaacaaatgcaacataacttaacattatttgcataccgtttgccctaagcattcatgaaaaactcctgtgaataacttatgaatctctcgatgttgtaatcttcggaagcgtgaacgagatctcaagacttgtttgtactccctatgttaaaaagtggattacatggttagaagataaacaaattaaaaagatgaatatttatcaaattctaaaacttacttgtgtaatggttcaattgaatcgtggtgaaaaagaacatatcgatgtgcttgtacccaaaatctatcatctatgtgtgcaatttcaactttatcgattagttctccataacttcgaaatagataagtttcggctaagtcatgattagtgagcccgatatttctacttgg

SEQ ID NO: 11714 - DNA, 540 bp, Gossypium hirsutum
gagtttcctccctccgccattagacggcggaaaccaccagctatgctctgcttcctccactgtttgccttccctagcactgtacgtcacctcaaagctcgaaaaccaaaacagcaaaacactaagaaatgcgataattgtcgaattaaccctacacatcttgaacttgaaaaagaaaagaaaagacaggttttggacagttataaaatgcttcttttatgtttatgtgattcgtggagatattggattagttagctgatatatatatatatatataggaaggtataagcagttcacgtgctatacagtttaatgaaatacaagacttaggaaataattcaagcttattggatcagattcatggatcaggaatcaatcagggtattgatatggagaagaacattgaatcgtttaaactggattttcaattttttaaatatttttttataaaatttttaataatttatttaattgaaccggttaaataggtaaaccagtggcttgatcggtttgaccaccaatttgattctaaaaatcgggc

SEQ ID NO: 11715 - DNA, 564 bp, Gossypium hirsutum
tgatggcacattaagttggatgtttttgaccattcggctagcttgttctagcactataaatagatgtaatcagccttagaaaaggagacttttgttgatatatatgaaatctttgaattgtgagttatccaattctctttgttcttacggaattgatttgtcttatcaagcttagcttgtggtgtctatccatttcttgttttcgaacttatcactttcatagtatggcgttcatcatataccaaggttcctatcatccttgatggtaggtcgaggttcattatataccaaggttcctatcattcttgagagtgggttgaggtcttttctttgttgttttcctataccgtcattcacctaagagctactttgagactcgggttaacaatctctattgttggttaattttttacccttagccaaattttccattcgttgttaagcctatttccctttgaaacttttgtttgtagcctttcttctattttgtagaaacgaacttagccttatccaatttcacgatcaggaaagaaacaactcgaatcattacagaacgagaacgta

SEQ ID NO: 11716 - DNA, 516 bp, Gossypium hirsutum
tttcagtaatctctgtaggaagacggggagttgttcagtttggatccacaaagaaggttagtacatataaaatgactgatatattttcatccctatgaaaaatgtgtttaagtgaagtacatcatccaattttaagttttaaatagatggaaatgctagcatatatgttatacttatgcaagtcccttagaagtcttatgtatgaatcattaagatgttgtgtaagtggagttgttcttgcagattttggagaggttggaacttttggctgaaacggagaagttgttttatgacatgggaagttgtcatgggcttacacctttggaaattgaaacttgcaacctagatggatggtttacttccttcattctgggtcagaatccgacaaccgaacaaggtggctgttctgtggagccaacagggtggtcatgttccttacaaagtctcattgaaccctcctgctctgtgcatgactatagtatgaactctgtgcaacagaaaactctgtgcaacaga

SEQ ID NO: 11717 - DNA, 677 bp, Gossypium hirsutum
tcatcatgttacatatacattcgcacttgaatcctttcagattcaaatagtgaaattagccagtttatctcggcctcatactctttataattccacacagtctgattatttgccaaatcaactctcagttacctttcatttcaaagcctcctttggctttcctaagaaatcatgctatgaaacccagatctgaatccgtttagtggatattaaaatttatagatatcgaacaatcataaagacacagaattctatgaatctagtgagcagacattcaggcatacccgcataattcacaaatctcatgacgtttaacaacactacatattactttcctctttcaagtacaagaataatccagacaagaagatccatattaactttctcaatctccatcctaatgcccaaactgcaaaaataactttgatgattcttgctatacatcctcaaacttttaacattccaagaatttatactcaaagatcaacaatgattgtttcatcatcttttatactcagatcgttctgttgtatccaagtcttataagaaacatacacttctcaatcagactattcttctcttttacccgtgaataaataaaatcttattctcaagcctgaacatctcattaaattctaaacatatattccatacagattgaacagttaactcatccg

SEQ ID NO: 11718 - DNA, 645 bp, Gossypium hirsutum
tatggttgtgctccataaaaactatacattggtagtactgacgactctggtgctttctctgctaccagttaaagtatgagctaaaagggcatgactataccgtaaagctagagggagagaagtcaccttcgagcaactcacgtcataaggtgtcgtactcgtcataagatctacccagcaactagatggcgagaagtagatacgctgatgtaggcagagaaagttcttggtactcagaaactcttcagtgtatagtcccaaaacatcgccaaactttgggacactcgtatggcacaccagtccactaagtcaaaaagtggtggtgcccggcttgtcattactcgtcatcatatgctggagagtaaatataatgtagaattccaaagttagctttgtgtatgtgggctcgatgatagagaagaatcggtctcacggggctgtggcaataaatgctcgaacatgatcagataactagacctattccaaatatctatagcaccttatcgaaaggcctcaacaaagttaaaagagttgaaagcacagttacaagaattaacagacaaaggttttgtttgacccagctcgtcaccttatggtacgccgattttgtttgttaaaaagaaagatggatcgttgaaaggtttg

SEQ ID NO: 11719 - DNA, 667 bp, Gossypium hirsutum
attttagaagctggtcatgggatatacttagaatggtgggaaaattagtgagggaggactgaatcgtgggtggtgacttcaatgccatcatcgacggagctaaaaaagaagggcaaccatggatgagtttagagatgtattggaggagttgacttttgtggacatgaaaaccgacggggattggtttacgtgggttaataatcgtgatgataataacatggttaaagagaggttggataaatttcttatttctattaatgctattaataactttcctttcattgcgacaaatatggtaagacaagcaaactcggaccacgatgctgtcttgatggatactataggtcaaaacctagagaggacctcaaagatccgagacttttctttaagttcgatgtgtgttgggcgaaagagagggtttccaaagacattataacaaaaacttggggtagaagtggtactaatatcattgaaaaaatcaagaaggtgcgcgaggagcttagcttttggcaacatgattggtacataaagatgataaaccatattctaggctggttacgaggatcgacaagcttattgatggcacatatgaggagtcaaacgtcgaaaggttgaaagctgctcgtcttaagctggggcacctttatgttgaggaggaaagtattgg

SEQ ID NO: 11720 - DNA, 587 bp, Gossypium hirsutum
aattaaaacatgtaataatttagacaaattaaatgacatctagacacctttaattcagacaaatcaagacatattaaacacttgtaataaattaagacatatttaaaagctgtaatgaaacttatttacatgcttatttaaatggtctaaaactccagcaaataaagttaatttagctaaagagctaataatgagctgaattgaatttaaaccaagctcaaacgagctgaattaagctcatgtgagctaaaataaaattcggtgagctgaaccaagctaaatggagcttgaggagctgaattcaagctgaaatcaagggcatccttgaccagggtcatatcagctttaaactcaaaacttgctttgcttcgtcttgagttcctcgttgaataggaatcatggtatgaatctcttcccaaaaaatcaatggatgtgtgccttcgtgatgatcttgtctccgtctcttcacccggtgagtttggcttccatcgggctctttcctccactcgatccaatcgatcatgcaatttatcaaattttgatttcaccattctatgcatctcttgcatcaaatattggaattctga

SEQ ID NO: 11721 - DNA, 481 bp, Gossypium hirsutum
tgaaagtataaaaactaaaattgatcaaataaaaacataagtagaatttaagctttcatttattatttattattttcctttgtttactgcaatttatgaacggattgtaagttgtggcaatgatatttttatttggaattctaattaatctatatacaattattagacatgcttttttattattatataaattaggcttcacttgtgattttattatttatatcaatatatcttaattaaaaaaatgggaacgattaaatttaaaatgaaaatttcttattatttttaaaatcttcttgttttataatttttttaagaaaaaatgttatatatttgaaacaattaaggaggagaaagcagctaccaaatctctaataatagaaatgttgaataacaaccctggcccaaaataagtaaatacctccttataaaattatccttcttagcaagctttgataattgaagaaagaaaaaaaaaaaa

SEQ ID NO: 11722 - DNA, 590 bp, Gossypium hirsutum
actatgccaaatcagaagggatatacaaattctttcgagatagatacctttccatactttcggcttcttgcttggagttgtaagctgccatcatgctggaaattacgaacctcagcctgaagaaaaaagaatgtcatttccaacacaagtgttcatcgttttcttctatttgtcatatagcatgttcatgttcatataaaaatactacaaaagagaacacaaacaagtgcgtcactggacttacacagacaatatcattctcttcaaatataattcgcatgttgagttcatccaaagcagttcgccgtctctaataatacaaagtgaaatttaaattaggaaaatttataagggagcaaaagcaaagttgtatgttacttagggatgagtatcggacttaaatgtccaacatgggtatattcaattttctaaattttccatctattaggaggatcatatctacatatcaatgaccaaatatatgtcaaaaacaggttcttcaagaaaaatgagtcagtataacatagggaaaaaacataaatattttccccatatggcatcaaaacgcagctagcataaatatgaagcag

SEQ ID NO: 11723 - DNA, 675 bp, Gossypium hirsutum
attgatgtagacattatgatttggactttagttatgatttgaaaattacattttcatttgaataaattaatttgataaataaattggaacttttattttttattttaaaaatttggtctttatatatcagtatgagatatacgatatatactgtttaattatttcatcagttacgttagcttttaacattaatttttagtataaatgatcaatttatttttgagtctaacatatagggaccaaattatttattttttaaataaataaaataaatacaatctaactcttaatttatgattttcataacactttttatttttatatttaacgtaaaaatatattagataaaaaatccaaaattttaataaattcagtataatattcaacaacagattaagaaatgtattgaacctaaatttgaattaattatttacatatatttctaaatattcaacaactcattgacctaaatttgaagaaggcttattttattgaaaatgatggaaattcaaactgggtttatagttagacagcaaaaatcataattatatgcatttcttcggtgcatgtaatgagtagtatgagaagtacttttttattggattctatatgtaataattaagctatggaaaatcgactagaatccaaaaaggttatgaataagggccactttat

SEQ ID NO: 11724 - DNA, 624 bp, Gossypium hirsutum
  misc_feature (616)..(619): n is a, c, g, or t
gcgttgtatattgtgcatgggtgttaaaatatagaaagcgaatacatttcagaatgtggtgaagccttcggatggaagctcctgtcctggacttgcaagattcaagacctgcaagctacctgaccaggttgaatgatggttttaaagtcatttatacaccaaatctctgagctcctgggatcaatatggggcagaaaagttggttaacagagcataacgaaagaacccccaaggttcaccattctagaggatatacacttttcagcttgtagctaaatcccggcagaattgtaacatacttcagttcatggttggtgtactaatattaaactggctgtatcctcgactaggcccattttatccgagtaagcgtcttgggctgcttacctgatgggttttataccatcaaatgcgttgttgtactgtctatgcctcggttttgttattttcgtaactgtccacggatgtaaaaatttaaggattgagctaaattcctagttttgcccacaaatacattacaattgaaattataaagtaggacaagagaacacaatgatgaaatcaggaactatgtgatgggggcttgaggtaaaactaaaaaactttaaggcagtcnnnnctaca

SEQ ID NO: 11725 - DNA, 639 bp, Gossypium hirsutum
agctaaactttcccccaaaagacggattccttcattggtttcaggatggaagataagcaacttgctttaaatatactcatataaagacattagatatgctccaaattcttgattctatcatgcaatttaaaaattccatccataatttataagatattaataatattaaagataatttaggttcgaataaaattgtaaaaaataataattaataattaaatacatataaaaattgaattaatagatattaattggccaacaaataattttaatagttttatttataaaaaaaaatattgtattaattccacaagtagaattaaaaaattactattgtctcatttattttatatacatttttatttgggataaatatatattttttgtccctgaacttgcaattaggttcactttggtatctctatttttttgtccactttggtacttatacttgacgactaggtccattttggtcccttaacttgaataataaaaaagtttgatggccgtgccacatcatcatttgaaaattaaataatttcagagtgtcacatttagtactttaataaccagaccggtggttgaacaaatcaaaccacttgttctcaattcaaccagtttgatctgttcggacattgg

SEQ ID NO: 11726 - DNA, 708 bp, Gossypium hirsutum
  misc_feature (587)..(591): n is a, c, g, or t
  misc_feature (593)..(603): n is a, c, g, or t
  misc_feature (607)..(639): n is a, c, g, or t
  misc_feature (642)..(643): n is a, c, g, or t
  misc_feature (650)..(655): n is a, c, g, or t
  misc_feature (660)..(662): n is a, c, g, or t
  misc_feature (664)..(671): n is a, c, g, or t
  misc_feature (674)..(674): n is a, c, g, or t
  misc_feature (676)..(696): n is a, c, g, or t
  misc_feature (700)..(703): n is a, c, g, or t
tcttgggacaatggctcctcttgtaatgattcttcacacaaatcatggatttcaagggttggaacttggcatgtttctggttccacctacaaccttcctgaggacatgaatacttcttattcattttcgttgaacagtttcccaaggcactactgctactacttccctccctaggattcttcatggggttaatcaaagcagcactgctcttgtattcatccccgtgagctctcatgtgcattctcaaatttgcgtctcgcttgaaccctttaccgcaaacttgacagtaatgtgtgtacttagctaataagtcttcagcatccaattcgattatgtcataattcatagctgaaaccgcttcacaccctccgctaatttcacttcttcgaggaaattcaacaaattctttcctttccagcttatcgtcattactgacttgtaaacttcgattcctattattgccattgttgttgttacggccattattgcaggggtcgccataccagctaatcgtttcagcactataataaaagctttgccctttttcttgaacaatgttaccaacacaaatatcactgaaagtggannnnnannnnnnnnnnnaggnnnnnnnnnnnnnnnnnnnnnnnnnnnnnnnnnagnnagaaaannnnnnaaaannngnnnnnnnnaanannnnnnnnnnnnnnnnnnnnnaaannnnaaaaa

SEQ ID NO: 11727 - DNA, 659 bp, Gossypium hirsutum
tgcaaatgtaagaggacgtgagttctagtgcactgaagcacattatcctcctatttatagattggagagggactataggtaatttaggcattgtgccaaaaagagcagatattattgaaatgtaattataaaaaaaattattcataattttttattacaatttgaattttataatttttatatgatattttggaaagaataatctaaaatgatatgataagtgactatagacttcacaactaaaggccatgggaaggttcaatgcaatgcaagcacatttattttgaataattgataataaatggggatcttaaaagatctgagagggggccatcaatccttatattattcatgcttaggcccattttggcatgtcttatacccctaactgcacaacatatatttagcttcctagaaagggattgattgtccctttcatcctgatttttttaataagttcaaattaatttttattttcttcgtttatgttagattttagcagagcctcaaaactcgacttattatttattttaatattaatataaatatttacattcatgtttatttatcataattaaaattaaatattaataattttctgttattaaatagttattcaggttggtctattatttgaggtttagctcatgcaagtaatc

SEQ ID NO: 11728 - DNA, 193 bp, Gossypium hirsutum
ctgaatgaagtggatattggtcatggaagtgggttttttgagagaaaggctgtgaaggtgaaaatgaatggtgtgcggtttaataaaattaagagtaaaaataaattaagagaagaaggattgaattatcagtggtaggtgatgagttttctatatcaaaaacaccaaattttacatcttcactaattacccc

SEQ ID NO: 11729 - DNA, 666 bp, Gossypium hirsutum
  misc_feature (566)..(567): n is a, c, g, or t
  misc_feature (569)..(569): n is a, c, g, or t
tgtgaatcgaactcacttgtgtaccatttggggagaaagaccgatgccgttcctaccttttagctagtcgcatgatcaattgatttaatacaatatatcgcttctccaatccgtgataagctgtgccatgtgctttcagttcttcgtacgctgagaaaggagaatgccttcttttggtcgaataagagatacttttgcttccaaacaaacataggtcatcccggaagttaactatgtaaagcccgtttgtctgccttagacagaaaaagctgtaatctcttatgttgaagcgaatgataaaactggcatccccctatgcggctcccctgccattccagccagataaagcaatgcaatgagtcggaggagaaacattaaaaaattccaacgactactcatatctggccttgtgtaagtaaagccctcggtaggtagttcttcttcctaagctacaagcgtgagaccgccagggaactcatatcgaaagaactacttgcatagaataagaaagaagtctggtatttggcgatcggacggcgttttgtctttgaggcaatgggaaaacnncnaacactcactactgatgtggcttgagatttagaacttgagtattattttatacgatctctgtttgaattttcatttgaagcatttgggtgagcatac

SEQ ID NO: 11730 - DNA, 597 bp, Gossypium hirsutum
attgaaatcactttaatggctggaaaatacccattaaatacttaaaaatcacccctattctagatatggaaatttaggtactcaacttacaagaccatcaagaaatttaaaaaaaaaacaagaacttacataagttaggtgaaaggcgtggcaatggctcttcttggcaacaatgagaatcgttcttggaggtccaaaatttcaaatttgagactggaaaattagggggaaatgacagcaagatttaggggaagataatacaagatcttgtggcaaaagaaaagaaaaagagatggtgattcaaggggtttgggcggcaacaacaagggagaaagaaagaaaaaaattgaaaagaaaataggagaggagaagagagggatggctagggtgaagaaaataggattaaaggctgataaaaattgttaaaagtaatatttatacctagttttaattaggcatggacggcacacacttaaaagaaaatgaattattgcaaaatttaatcattttataatggaagggattcgaatttggaacctaaatccaatttccatgctttttcatttatcaattaaccactgtgccagttccttattt

SEQ ID NO: 11731 - DNA, 651 bp, Gossypium hirsutum
ctcaatgcctttgatacaccacttacggtctttaatttaaactttcaataacctctataaatttccataccaaaggcccataccatcgaaacaccgttactcttgaacacataactccaagcaattgtttcatcataattcttgaatcatcatatatttagataacagttaccacattcaaatataaagtgtgggttctttattcagagtacatgtgacagcccaaaattgaccctagtcgggaagtggtttcgggaccgctaaaccgagtcaccgaaatgttcgaatgcgatatttattgtctagaatatgtaattatgaatgtgtgaaaatttcaagcttcgatttagtcgattgcatgtgagttttagtaaataggacttatgtgagaaaattttgaaatgtgataggtcaaagcataaggacctattagtgcatgttgaaaaaggggggacttgcatgtcaatttccccccctctattagtagtggccggtcatgacaagtatggtagaccaagtgtgatgggcaagacatgtcatagacatgttgtgttggtgcatcatgggtggaaacaataaaataatgagcatggtaattaaataatgaaagggaagagtgatgaacaaaaaaaagaatggtctcatccatgc

SEQ ID NO: 11732 - DNA, 604 bp, Gossypium hirsutum
agaactgagaattcaagaaagggatcatgttgtcaatggtgatcaacaacatgaatttgatatcagaaacaatccaaactcacaaactatatctgatgtgttaaaatgttgtttcatcaaattgttggtagatggcatggatatggtgttgaaagatgcaaaatcaaggaaaatcaatggccttaattcttcattagaggaatttagtttccattgtaaggattcatggaaacatgaacatgtcaatatatctatagggggctatactgaattcctcatgaattttcttacttttcctccagttctatgatcaaattggtggggtttcaacttaatcttttagtcacctttttcacattccctatatggttttcttactttgctttcatgtctttgatgtttccattacatgctgtaaagaaaatcattgagaaaattgttcacaatgttgaattaaactaacaaaactgttaaagccaaagcaatgaacttggcaactaagttcatttcaactctaaacttgaaaaatgaaaaagtttcataaggtggcattttattttaaaataattttatgtgatgacagggtacaatctcatagtgttac

SEQ ID NO: 11733 - DNA, 434 bp, Gossypium hirsutum
aataatgaaatggaccgttagccaggtcgaattcaggcatgggtttggaaatttttttggaatcgcaccccgatcatgatccaatttatggatagattttagttaaatcgagtaaaatttgggtaagttaatttttatattgaaccgatacaattcaacttaaatttaatttgaataaggaataaagttatttaaatttaagggtaaattaaaaattttaacattccggtgacttaaataaaaaactttgaatagtttagtgattgttttgaaactttttgaaattaagtgatcaaaacataaacttacaaataatttagtgactttgtgtaatttaccctacatttaattataaaaacattttataatatataaacaatgaggggtaatcgcattcggttgtctaaattcgaaactgacgcccttgaaaccaa

SEQ ID NO: 11734 - DNA, 448 bp, Gossypium hirsutum
aaatttcgtattgtcgctcagaataaatgatagaatgaattccatcatcaacatcttcctcgtgcactccacaatgatgacaagtactcaaagcacggaacctatacgatatatacccccagtttgatataagggtgcaccctccaatattctagcctccatattatctttggtactctcatttacatccttggcttccttgctcactcaccacctctaactctacgccttgcaaggtgaatcggctttcctgagtggcacatccttctccttgtcaacaaaacttcagatatttttattggtagacaaacgatttgctctattttcagttatatattatccttgaaatcaatcaaaccacaaattctcaatacaatgagtataacaagttgatctagttttgaagtactaattttgttaaattggattgaaatgaacttgccaatct

SEQ ID NO: 11735 - DNA, 453 bp, Gossypium hirsutum
ctacggaaaaatccttacgaagaagtgaatgtgtctcgtataagaactcatccatggaggtttattcacgaagagtttatcgtgactcttatgaagattcttccacttctttccaacgaaaagtctattgttttgattcttttgtattatcgccattttgtaataaagttgagagaagaaaaagagtgacgagagaaaaagaaactgaaaaagaaacaaaaattgaaaaagagaaaaatattggagaaagaaaagaaagagtgtgagaaacaagtgttgttgaaaatgaaagagaattgatgagtgaaagtgagtttgttaagaattcatatggaaagagaaacatatggaaaggattctaagaattctacccattttgcatgtcgtttgttaagcttagtttgccctctcaaatgcttcaaagcctcatggtccgtgtgtataacaaactcc

SEQ ID NO: 11736 - DNA, 455 bp, Gossypium hirsutum
  misc_feature (36)..(38): n is a, c, g, or t
aattagtttataattaaagtaacatagggtaaattnnntttgggaggtcctcccataattattagtgattttttacaagctaattctgtggaactgaagatgagattcttataatctttatggttttatttctttgctaacaaaagatggtaaataaaaggtttgggtaattaaggtcttagtatcatataaagttgggattatttttttatgctatcagagtaagggtaatttgatttaagagttgacttcgattttttggttttggatattttagaaattttacagttttttttttcatattttttattacttgggtgatttgggacttctgatttttgcatgaataaatataagttgggatggttttatttgaaacttatctatgatggtgtcgttgaaggtgggggaaatggtggaaaggggatggaatgaaatgaaaagggtggtgtttt

SEQ ID NO: 11737 - DNA, 369 bp, Gossypium hirsutum
  misc_feature (61)..(65): n is a, c, g, or t
aagtttgagtctcgagactcgaagaatgacagatgggtaagtcacttcagtcctcatctannnnncctagagagtttaatactcgatcaagtacttcagttgggtttccaaatagaaaccatgggaagcagtattcgggttataaggcttagactacttcaatagcgagtatgggtaatgctcgacctagtagacctgaatgtccacattgttgtaggcgtcaccccggtgagtgtcgggtggatgattgaacttatttcaagtgtggttcccaagatcacttcattagagattgccccgagatggttgaaaaaagggaaatttcagagtgcaagatcgagtaatattacttctagagggagggcacaa

SEQ ID NO: 11738 - DNA, 729 bp, Gossypium hirsutum
  misc_feature (649)..(658): n is a, c, g, or t
  misc_feature (660)..(670): n is a, c, g, or t
  misc_feature (672)..(672): n is a, c, g, or t
  misc_feature (674)..(684): n is a, c, g, or t
  misc_feature (690)..(692): n is a, c, g, or t
  misc_feature (694)..(694): n is a, c, g, or t
  misc_feature (696)..(698): n is a, c, g, or t
  misc_feature (701)..(703): n is a, c, g, or t
  misc_feature (706)..(708): n is a, c, g, or t
  misc_feature (720)..(721): n is a, c, g, or t
atggaaggttggactcgtaagctgattgaggatgaagtaattatgttacgaggatgtccgaatttatacttcgagacactctcaagtcggtgaaaatttttgagtaatgaaaaaggttaagatagtaagatcaagatgatgatgaagatgaaaaaataccaagattttatatatgttcttttggttcgtacatgagtaaatttagatgagatttataagaattattttattgaccttgtaatatgtccgtgtcgatattaacttaccatatatgttgagggttgaaagtttgtattttaaattatcttattgtgggtcgtcttttattaatgtttacaaaccctgtagttttagagcttttaatttattggtatcaatatataaaaaattaaaataaatataaaagaaaaagaaaattttaaataaaaacacaataaatttatataattaatagaattaagaccatagatgcaaatcttagaagattgacttgtaacgtgcccaaattttattttcctctataaatttaaagaaattacacgtggtcctgaaaatgagtaataaataatgcataacaaattaaggtattaaacaaatttggtcaaaaattgtaattcaagcttactgggaatctgccacaattgtaatnnnnnnnnnncnnnnnnnnnnnancnnnnnnnnnnncctctnnntncnnnccnnnctnnnttccttcttccnnttccccct

SEQ ID NO: 11739 - DNA, 496 bp, Gossypium hirsutum
  misc_feature (471)..(471): n is a, c, g, or t
  misc_feature (486)..(492): n is a, c, g, or t
taacatgggggtttcaaaggtgatcacagctgaccagaagagattcttctttgatcttgggagcaacaacagaggacatttcttgaggatatctgaagtattctctccattcaactttatttctttgtcttattttatatacacgtatattaataaagtgtaagatatggagtgttggttgataagaggattgttcaacattgcaggttgcaggttctgatcggtcttccatcattctcccactgtcaggattaaagcagttccacgaaatagtgggtcattttgtggagataacaaaggatcgcattgaaggaatgatgagtgcaaatgttcgaacggtggatccgccacaaaggtgaatggctggcagtggaagatggtaaaataaataattgtcaagtttggtttaaagcctctaatagaagagatgcaattgtgttgtcattcaaggcttggaaataatcctatttntctgtttgattaacnnnnnnntatt

SEQ ID NO: 11740 - DNA, 601 bp, Gossypium hirsutum
cggaggaccaatacggtagatattagtttacgtactcaaattgatgaaaacagtgcttagattcccatttgagaaaacaagtagagtttagagaataaattttatattaagccttcaatctataaacagatttacttataatttatttaatttaattgaataacatcgattcaaattaattcttaaatacatttaacttttaatccttagaattaaatccttaatttatgtatagttcatatattaacaataaaatttaacttttaataaatattatattatgatacattatcgatgtgggtaaaagaatatgtaaaattaaattttataaaaaaattaaaaaaacaaatgaacctttggattatattccaatctaaaattttaaattttaataatttttgaatggatattaaactaattcatatcatccaatcaattaggtagataggcttcttctttatctgttagtctttagtagtttctggttatgtatttcacgaatgatgcatttgtaattaactggatttggttatagttgtactaataagatcggttcaactaaaaattgatgatttgattggtttaatggccaattcgattg

SEQ ID NO: 11741 - DNA, 571 bp, Gossypium hirsutum
  misc_feature (64)..(64): n is a, c, g, or t
  misc_feature (66)..(66): n is a, c, g, or t
ttactacatcgcaggcttctcatggtcgtaccatgcagcacgttgtttaaaagtcaaaattatncntaattttccgtggaaaaaaatggtcaaacctgaaaatctatgtaatggagatttatgtcagaagaaaaaggactaaaaatgttaaaaatgaatttaaacaaattctttatatatattttttgaaagtttaaattttaaatttttattattgtctcaaataagctttcatatatttatgttaagaattttgttaaatatagattaaagctttggtttattttagctaccaataaaagattctgaaaacaattaaaaacaatacctacctacaaattaaaaattttgaaaaaaaaatacaagtaattggtcaaaacttatttacctacaaattaaaaattaaaaaaaataattacaattttttaaaaaataaaaatattgcattttattattgtaatcaaaactactagaagcacttaaaaaaaaaaactactaaaaccaatcccaggccccagtttaaaaaaaaaaaaattcgggtaaaaaaaaaccttttaccccgggattaaaa

SEQ ID NO: 11742 - DNA, 516 bp, Gossypium hirsutum
attttaaagatatgcacttctgtttttagaagtagctgttcttttgttttcttctttttctccttctgctgtttgataacctgataagttttaggttcaaacgttaattaataagagccttcgtgttacctgttgactacctcaccatgcacatgcatgatgaggaggaataacttggtccttctcctttctttacccgtgtgtagcattactttagtactttccattcctcctgccctggtatctcttctttagaccgtcttaacactttgctatcctcttcttttggttgtcactgattatcatcttgcacatgatgtattaaatttgtgattttgttgtagaattagcagttttcttttttccattttgcatggcactttccaggtttcatgaatgccggaggctgaatcaattcacaaactttttgatgggaaagggaaaaaagacgatttcaaaagccaaaataaaatgaaataaattctatatgcattccacagattgatcacttcagtc

SEQ ID NO: 11743 - DNA, 638 bp, Gossypium hirsutum
gaggaagcagtcggggttgagggaaatgaagttgttggcttggattgattgcctgaactgttggacacgaccatccatgtgaaccaccgtggctgccatcgatgaccgtttggttgagctcgatgatcctcctcctcctcctactgttttgcctggttttgaggttgaagttgaggatacacaggcacccatttaggcttctctaacaattcttttttcttggtgtagaaaagggtttgatggagagggcatccattacatttatatatatatgggtagtgtttatattattaattgtcgatgatatgcctgcctggatgcaatatttggggtgatattatgtaaaaaatttccccaaatgaaatttgatgtaaagtgtcaatttaagttgttagataacaaaagctccttagtgataagaatttcaatcccagtgtgacttagctcatagtccctagtatatgcacaaatgtgagtggttgaattttaagtactacaaaatattaaaaatattccaatggctaataacccgtaaataaaatcttgaattttctgtctgagtgtgtattaaatgtgctcaagttttattttgtgctttcctggtaaaaaattacaagccacaaaggcactttatattg

SEQ ID NO: 11744 - DNA, 688 bp, Gossypium hirsutum
aaggttcaaccaggatttcacatttgtcgaatcgttgtcgaatatgtctgcaaaattgtcttcacaatttatacaatattaaagcatttaaaacataaatataaatcgtattcacaatttatgcaatattaaaacatttaaaacataaatataacaatgcttataacatatgaacttacatcgaatgtaaaaacgacaaagtagatcaactaatccaacaccttgtttctcccttaatctaaatcagaatttcacttttcttgatctatataatatcaaatttagcttatttaatcattaatcaataaaatttagtccaaaatacacattatagcaactttacacttttgcacctaatatttcaacatttttacaatttagtccttatctcataaaaatacaaattcatgcaattcaatctatacccatgctagacgaatttcaattaagtctctagtagcccatatttttcacttacttcataatttaaccacaaaatttcaacatttctcaattaaatccctaaatgacaattttgtcaaaaatcactttacaaatgttgtttatctaacaacaagcatacattttctatcatcaaacatcaaaatacacatagattcatcaatggaaaaaccctaaacctttaaattttagtaaattagtcactgagcttgctagattaagctgc

SEQ ID NO: 11745 - DNA, 559 bp, Gossypium hirsutum
atgttgtcagactccttccacttcttctgaaattcttcccactcaacccctaaaaatttgagtgcattgaagcctagattgatgttggtaagcttacgcatatagatgaagtttacttgactcgcatcaaaaggccccatgacgacttcggtatgtaaaatgtggttggatctcagctttggaaggtaaccttgtatccccgccttggtttctaccttgtaacacttcagggctccattgttttctttttgcatcctctctaagtgtgccaaacattattcatctaaggaatggatttagctctttagttggcgtattctttcctcaaactctttcttcatagaattgtatttagtctcctacctaaagacaaatttggttagcacctagtgttggcggactaaagccttgtgtgattggcgaagctgggctagtgcttggttgctggaagccaaggccttttctaacttaatttgtttagctttacttccactacagtacttgcagagggcccagccaagaagtctgcattcttcgaccatcacttggtaagaaactt

SEQ ID NO: 11746 - DNA, 550 bp, Gossypium hirsutum
ttttatacttatgccgcctcaaccatctcttataggctaatttactctttaagtcctccctatttaccatttaagccatttaatcactatttcttttaattagcaagttttgcacctttttttcaatttagtcttttttaattaattaactatcaaaatattaaaattttctaatgaaactttaatactactttaataacactccataaatatttataaaaatatttatggctcggtttatagaatcgaggtctcgatacctcattttctaaaccatttgacctaataaatctttataaaacacaaattactaattcaaaaatatttctaaaaccacatttgacttgtaaatactaaataataaaatttttgagcttactcgtcgaatttggtggtctcaaactactgtttccgacaccactgaaaattaggttgttacaaaaatcctatctgaggcttggcccatttagaaaacgaaccttattttttgtccaaacccattcttcgagcctatatttttgctcaagccctcccactttttggacgagcc

SEQ ID NO: 11747 - DNA, 626 bp, Gossypium hirsutum
  misc_feature (570)..(570): n is a, c, g, or t
ttattaactttataaaaagatagaagaaggggtcacaatttataatcatatttcgtgtatacattccaatgtatctgattaatcatgcaggacatctaaaataaataaattaagactgtgggaagtgaattatttttttctttatagatttttatcatgttttttagtacaacaaaattataaaaaaaaataaattcaaaattaaagtaatgaacataaaacttggaaaaaattatgttttatatatggtaaaagatgtattgacttcttcaattttttttttttaaaaaaaaaatcatttaaagtactaccatttttgtaggtttctcattccaatgttgtaagcacagtctattttctcattccattttagaagatgataaagtctaaaaaatttgtgaatgctgaaattatactgagaatattaatataatacaagttaaaaatttgatagtaccttttcactatacatatcttgaaataaagtcgaattaagtaaatggaattgcagcaattcctttttgcttttcatgcaaatgcatgcggattttgaagttttagtgataactntgttctatggggaatttaaagtagtttaattaattaatttgtttaatccttccctt

SEQ ID NO: 11748 - DNA, 691 bp, Gossypium hirsutum
  misc_feature (685)..(686): n is a, c, g, or t
tatggtatccattcaaactacagtgtccaattgtaaattttgttatgtacggaattttattttacaaatcatttcgtaattattatatgtttgaaaaataagtaactaactttggcttccaagcgttgatctaaaagtagccggatatcttcgagctgcacgagtagtcccacgtaactcggctcatggttccacatatacaagcgatatgttaatccaaacatataataaataaacaatatttaccatacaaactacatatatgaaaacatatgggtcgttcactcgggtacgaaaagatggtagttgccactaggcccatgactacagcaagagcaggcaaccatcgattggcatcttatccgattctgtctcccgacacaaatcccggtacaacgtggccaacatgacgaatccctaactcagtcgtctgctttctttgaagttgactaggtgtagtagccaccttatgtgtactaaatttttagatttatcgggcattagaatgtccctgattaacctcaggatgaatgtcgagcgtattattctttaatgacgccgtgcgcgtccttaagaagatttttttaaattgattttcaatcactttatatttatccgaccacaataaaacttttattcgacatcttccccaaaaacatctcgcaaaagacatctttaccagganngaatg

SEQ ID NO: 11749 - DNA, 639 bp, Gossypium hirsutum
aaatttcaagctaattaatttcaaggatataatgaagtcaatgactatttgtgttttgcactaacgagaataatttacacactaacgagaataactcactaagcactgagtaatatataacaagaaactcaaattttacaaaagatttctatagtaatattgtatagaataatctaataatattagaatttttgaccaatgaccaaaaaatttattttttgattaattacgtacatttatttatagttattgaaacaatataaatatttaaaaatattctaacaacttcttcaaaattttcattgatagcaagataaattcgtatttttaatatatttatttttgactaattatcaaataaaatgctattaaatttggatttttcttatcaggaatgaagttggtgtgctgaatttaaactcttataaaaaaagggctaaattaaaacaaaaagcaaagaggagggcttgattgaaagattactgaataaagattgaaggatttttaatattgttacaacaatgtaattagtttaaatttaatttttaatttttaaattatttagtaataatatttagaattatttaatgataatacctggtggctatagcaactcgaggtgttcatgggttgagctac

SEQ ID NO: 11750 - DNA, 618 bp, Gossypium hirsutum
cttccttctattcttatcttttactttcagagcccttaatagagttactttgaagatgttgatattcaaattcaatgccattaagagcaacaccctctctcaacttcataaggtaattattaacatctcttctcaatcccttttgtttgaggcctgggttatccctatatctgttttttgaggctatgagaggtttactgttccattggcattcgctaggtttaatcagcgtattaggtgaatgagtcaatggctgaagcccttgttttggggtttaattttctgtgtttttgtatgatggagcttctgttaccttttcacttgttattttagggcctttcttccttcctttgggtatggccttgcctgaacagaaaaaaaaaatctattatcactctgtttcatatctaggaacccttttttttttcctttcttttttttccccaaaaacttgtaaaaaaatctaagtttaaaaacaaggctcacttaaaaaaattcgaaatccccccccgccttcctttgccccttcccaaatttctcccaatttgggggttaattttttttttttctaaatttttgcacccggaatttgttttccccaaaaatttgaggggggac

SEQ ID NO: 11751 - DNA, 500 bp, Gossypium hirsutum
  misc_feature (475)..(475): n is a, c, g, or t
  misc_feature (480)..(483): n is a, c, g, or t
  misc_feature (485)..(487): n is a, c, g, or t
cggcttattgccaaatatatgtatagagatgcagcttcaaatataagataagatgcaacaaactaaatatattgatcaagcgcctaattgattcttcgttactttttgtgttgtatcaatatggtctcactgataagttttacaaggtttgtgcattaaaatctacaacggtggccataattggtaatggagtgttttcgttttttaatgaaatctcctaatacataaaaatggtgaaaagtatttgtagttaaatttaattttacgattattacaaaggatacaatttttttttggagaatatgagtcgaagcatgaataataaatctcgtactatataaattacaaaaattataatggaaggtaaaaaatttaaaaggaataatggattatctaagtatatttattaaaatagaggaaatttggtacgcaaaatattattggctcgtagctaacattatctaagttggaaggngctcnnnnannncaaccatgagaaa

SEQ ID NO: 11752 - DNA, 733 bp, Gossypium hirsutum
  misc_feature (569)..(571): n is a, c, g, or t
  misc_feature (575)..(576): n is a, c, g, or t
  misc_feature (578)..(579): n is a, c, g, or t
  misc_feature (582)..(582): n is a, c, g, or t
  misc_feature (585)..(586): n is a, c, g, or t
  misc_feature (601)..(602): n is a, c, g, or t
  misc_feature (618)..(619): n is a, c, g, or t
  misc_feature (667)..(669): n is a, c, g, or t
  misc_feature (685)..(687): n is a, c, g, or t
  misc_feature (693)..(695): n is a, c, g, or t
  misc_feature (699)..(702): n is a, c, g, or t
  misc_feature (719)..(719): n is a, c, g, or t
  misc_feature (721)..(726): n is a, c, g, or t
ttttgtaggtcagttactgagctccaattttctatttcttttctttttttggtcaaacctaattaagcaagccaaagtttgtaaaggtaatagtagtgaatttcacccttatatttaaaactgttgctttctcttcgcttgtacttgtaaattaagtgggctactattttgtacttgtaaattataaaaaaaggatattgcttggctcacctctgtatagatgatccattttttttgtccacgaatttaattctttcccttactaatgatctgaccttgtaaaatgtttttgcagtcaactgcatcagaaagtagcattttctatcatttgataaacatttgggaattcaatcctggaccaggcccaataacttgtagcctttacttccttgtggtatgcgtgtgacaatcactctactgtttattttttgacttattattttttttctcctttgatgaaatgttgccagcctcttgagtagttgtgttaaattcttgttaaccacctgaaccttcttcctttttttattttttaatatatctgcatacatattgtcagctagatgggnnntcanngnnccnatnnccactctatctgcanntaatgtcccaatacgnnataaggcatttataggtcattactaatacttgattttccctcttgcgnnntgcgtgtaacaatcannntgcagnnngttnnnngacttgttatttctttncnnnnnnaatgaaa

SEQ ID NO: 11753 - DNA, 612 bp, Gossypium hirsutum
  misc_feature (63)..(64): n is a, c, g, or t
  misc_feature (67)..(67): n is a, c, g, or t
  misc_feature (553)..(553): n is a, c, g, or t
  misc_feature (555)..(555): n is a, c, g, or t
  misc_feature (557)..(558): n is a, c, g, or t
  misc_feature (560)..(560): n is a, c, g, or t
atgataattgcacaattaagtcacccaatttttgtaaattttcattttgagcattaaaaagannagnttgcaaaaagggcaccgttgttagcaaatattttagtttggtcactatcgattgtaagggctacggaaattttacctggcatgccaactcatttttaattttattttcatgtatacaatttccacctcattatttgttttaaacacaaaaaaaatctcataatataattttggatatcttatcatccatttttctttttttttgaaaccctaaaaaacattgttgtgatgtcatcgccgcaccatctccaattgttgacatcactaaaatgcttctcatcctcctatttcactttattgaagcaaatctccttgaagtagctaagtttcactccctttatcccttattgttttagcaatgccatgaaaaccacctttcttcaacatcgaaactttgatcgggcacaattgttcgatagcccaaaatctcctcactctttctctctctctctctctctctctctctctctctctctccataagatanananntnttatctttgttctttaaagaatggcttaaaactttctaagttacccctaagt

SEQ ID NO: 11754 - DNA, 500 bp, Gossypium hirsutum
caattagccaaaggtccaaaatggtaattaaatcattttgtaacatgaattagtgcttgatgatggaagattccactaatttctaattaatggttaattaagctagttaaaacatgattagtttaattaaactaagttaattaactattaaacatcgtataaaagagaaatttagtggagttgtctcactttcatcttctttaccgtccaaatcataaaaacctaaagaaaaaaaccatttttaagtttttacatttggtccttgattagtaagcacttccaagtccttttcttgtaatttttatattttttataggggtgaatgttcgaccgaattgaatcgaatgaaaaaatttcaagttaatcgagttgacaaattctattttataatcctaactcgatttgaaattttctcgaatcgagtggagtgagatggaattcgaatcgaatcgaatgaaatatatttgttcgagttaaatttaaaaatatgactttggatc

SEQ ID NO: 11755 - DNA, 391 bp, Gossypium hirsutum
cttgcatgatacgccttaagttattagacagttcacagatgatttttaatcaggagtagtttgtgtacgacctgtataagaaattatctatatcaactatatgttagtgttgggggttcacagacgaccctttgcaattcacatctaagtcaacttagggatagacctataattgccttaccatctagccgatgcgtacaacattacagtacactatattaccaactacataacactacatgataaagagtgagcgtccttatataagcctgagtgcacgagagactaaagatcaactcctactctaaaaactttacacaacaatcttagcaatccttctccgtctcctccttattttgactcttcgcttatcgcaaatgaactaacactc

SEQ ID NO: 11756 - DNA, 661 bp, Gossypium hirsutum
tagttgagcgatcctaactagacgacggctagtagacacataattgaaaagtgcaatgctcaatttagatccttaaacccgactaagttgaggttcgtaatatctttagttagctctattgccttgcatagtttttaggtttatgtaattaaactgttgcaaacgtaaatgtccccgtgaccttacataaattctaagaaacccttagttaatatgatcagtaaaatgcatatttaactaagtaaaagactctgaaaggacttaatttggtttccaaattcatgaaagatcgagttgccatggaagtattttcgaatattgttaagcatgataaagtaaattgaattgattaatgtaattatcctagcccatttaatgttgattgtttttgttgctaaagtcattcatttatacatttaggtaaattgcatctatactagaattgcatagggatcaatctttccatcaagttagttttacttagtttaatcatcaccatccaaattattgaattttacatcaaattgtgtgaagttataattttacaaatatttggttaagcttatacagtccttttggagacgaccactcatttaattacttattacttgaatgactatatacacttggacatatttcttggtacattcttgcaggtagg

SEQ ID NO: 11757 - DNA, 603 bp, Gossypium hirsutum
ttttctttttccgcagactataattttctgatatatgttattacccttttcccccttttccttttcctttaaattaatttttaaaaaaatcacccaaaaacccctcaaaagaacagaagagagagaaaattcctctctctctcttgctgttttttttttaaatttcttatttagtattttggtttatgttaagttggtttgtttaaaagaaaaacatttgaggatgagattgaatattttggagaaatttgtttggttaaattgggataaaataagaaccattgtattttggggtgttgattcttaattttaggtaaataaaccatttttaatgggaggggcgcactaaatgcaaattccattcataatgtactcaaaatagattaatatctaaatttacttttattagtttaagttatttttgttattttctgtttaaacattgagttatttgtttaaatcaaaaatagattattatgaatgaatttagacaaagttttatgtttatttttcgaatcgagtttgagtaaacataaaatatgttaatattcagtttaaacccgatcgggtttgactcttgaacacctctaaccgtcttggttc

SEQ ID NO: 11758 - DNA, 602 bp, Gossypium hirsutum
catgggattacttaaaccacaagcaagtcactttaaactaaaatagagctctagtatatttttcctctacaaatatacatgttagacaacacttcacgtatccaaatattacgagaaaactgtgtcaaaatctagcgaaagtttgtactcgagtatattctatttttcttgattatcggttatagataattacaatgaactctaattcattagacatgtttaacaggcaaaatataattttatcttaaaaagagaattttttataaataaaaaataaaaagtcatcaatccaatgtaagtccccatttctctcagtaattgaagtattcaattacatccaattcaaaaaaattggcagtttggtattgcttcagagaaatttattgagatcaagcatgaacaatatcgtcctctagacagattgagttcaaaaatgataaaaagaacaaagaatgcctccaaacgcaaagccagactaaacaaagtctggcaccagaatttattcacagggagtagcaattaaaactgaaatcattgacaaaaccaaatgcaagacttaggtcttcaagattcagaaccagacttaacgatgaaattctggc

SEQ ID NO: 11759 - DNA, 390 bp, Gossypium hirsutum
aaaaaattagggttttgacggataatctaccggcttgtgctagccttaaggaggagattgtggaggtaagaggtttataccgaatgttcttcaattagggtttctatttcttggtcttggggttcattggcttgattattatattctaaaagtttattttcttttacattgtggcaattagattctaaattttgcagcccaagaacaaaattcctttctttttcctagtgtttttgactaaaacccttggcgactaaatctggaactgagccccttaacagaaactatgaacccaagggcttggcgcatcaatttatttcctacattcattgccaagggtttttgactaaaacccttggcaattcggtagttacattcggtatgactaaa

SEQ ID NO: 11760 - DNA, 653 bp, Gossypium hirsutum
ttaacaaaccacatgctccctggcccatggttttaattattgcaatgtattgtgtttccacttcccactcgacccaagtacaaaattattttaacggtgaaaattaaattttaatttttatgatagtaaaatataaattttaaaaaattaaattaaaaatttattatttttaaagggttaaaaaaagttgaagtatattttttttattaatttattttaaagagttaaataaaaaaatattattttaagaaaatcgagacctatatcaacccttaaattcactcctaatagtaaggttgatgtccttgcttaacttttttttctttaaaatatttcaaaattctagttttctttacattacaagtaataattgattaactaaattacattaataatcttccaattatattttttatcacttaattataaaaaaaattatttgatgagtaacattttgaaatttgattttttttcacccggaatgttaaattccaacggaggcactctttcattggcttaataacaaagttagtccctcaaatcaccactcgtaaccacggccatccctttcccacgccacgaaaacgtctacatggccaaactcactgagcaagtcgagcgctatgaggagatggtcaagttcatggagaatg

SEQ ID NO: 11761 - DNA, 610 bp, Gossypium hirsutum
tgaatacatcgtctgcccggtgtcacaatttgcttgaatttttttttcacaatgctataactcagtatggtggtctttattgaaacaccatacttacttttcacattttgccatggatccaccatggacttatccgtcaattcatcactgattgccgtacatatgtactcaatcctgcgtgtccattaatttgaacaaacaatctcattttattcttatttttaccataattataattcaacaactttatactaattgatacattataccattcccacattaacgattaatcataaaagttcagccatatgaacttacttttcattaactttccacactcattttctatgaacatcacacaagatataaacaaatcattcaatcatagtcgcaagctagtgtatttaaacataactctttttgggactaatcacataacaaaccatatcaatgcataacttataaatttaacgtggcatggtctatgtaactacttggccaaagcctaagcatgtataccaaatatgttcaccaaatatacatataacataagcattataagtagggataagcacaacatttattcatgtatcgggcttaccaacaagtt

SEQ ID NO: 11762 - DNA, 599 bp, Gossypium hirsutum
actgggtcttcctggaaacaacattattcgccttccaattcgttgcaggtttttataacttacatcctcaactcatttttatatatctatttatatttttataagttttcataatttcttttatattttttaaaattaaatatatttttaaaaaattaatgtgataacgtagtataatctcatagtatcatgatattgcattttaatggtgttaaaaataattcaagtatttgatggaaccctttgttggacaaaacacattagtgaatcaaatatataaatataaataaacaaatatttatatacaaaataaaatataaatagaataatttatatttaaattgtcaaatacgtaaaccaataaaaaccataataaaaagttgaaatcgaaaagaagaatacattgaggcctgtttaacacaatttccttaagatagattcggtcgctctaacataacttggagaaaagttagtcgaatgtttcccaggatacaacaacacaataatcaaagtagtagcacctctgcagcaatcaacgaacaaacgttgtctttttgagagcaaaataaatttggtgtgagagagtacgagtgtggaaa

SEQ ID NO: 11763 - DNA, 617 bp, Gossypium hirsutum
  misc_feature (53)..(55): n is a, c, g, or t
  misc_feature (57)..(57): n is a, c, g, or t
  misc_feature (61)..(61): n is a, c, g, or t
  misc_feature (602)..(602): n is a, c, g, or t
tgagcttgagatggcttctttttgtgaataatgaaatacataatgagttgaannncntttngatgcataatttccttcttaattagaaaaaaaaaacttaaaaactctattaatatatacataaatattattataaaagtattatataaaattgtttaaaaacaactaaaaataaattgagggactaaggatcaaacctgaaattagtaccactcttatggttcattcaagcttaatatatcatttactatctgtgattaacacttcttttagggggatattggggttttctttaatgtgatatttgacaaaaattgtatattgttactaataatatcaattttttaatgtttaattcgagtctagggattgatttgatgaaaactaattgcaaaaatgattaattaattatgaattttcattaaatgaattctaaaatcaaaattacacagtaaaaaattatcaacattattttcaagtactaaaatgtgtttattatatctgttttttttttatgcaaggcttaaaattattcaaaaaatttttaaacctttaaaaaaaagaaaaaggcgttacaccccgtttgaattcacatactcttnccctgacaacagagg

SEQ ID NO: 11764 - DNA, 694 bp, Gossypium hirsutum
ccatcaccaactacacccatattctctgtaatttcaaatgcaataaaattaaaaatgcactaaaacaagtaatatttaatacttttatacataaaataacattacatacctatagataagacgaggacgagaataagaatgaacgataaaatcttcatttttgccatttcttttttctttcaaggtgatcaaattttctttattgaaaaaacccatctcgaatatgtaatttatagtgtttaattttaatacgtttccttaaataaaaatgcaaaatcatagccataactacatgcaaataaatttcttaaacggaaatttggcatttactttccaacttttatgatcctctcgcatggaaaatatatattaattgatatttttgttaatttctatatttaaggatgaattttcaatttttatattctaaaaaagttactattaaatatgtttaaataaataaaaattatagtatttaaatattatataattgcatttattaaattgatttaaatctttaaattaattaataattacacatcacaattttttattaattctacataaaaatatgaagaaacaaaaaaaaatttctcataataatataattttgtgcaaattgaatcttagcataattggcatcgttcatgttgcaacaactagaaagacataagttcaaacacgttgatgtgag

SEQ ID NO: 11765 - DNA, 656 bp, Gossypium hirsutum
catgtgtcctgcagggtatggtctattttttccagtttttccatgtattttgaaagtcctttgagagccatatcaaatacctgtgtgtgaaaatgtgtaggacatgagtatttccaaaagaaagaaaaagaaaaaaggaaggcattgtgaattttcttgcattagagaaataaatgcgcatctttagtgaggattttattaatttgaaatgctccaatgttacttggttttagttagtgtatcacatatgagtatgcatctgatagaatatattcatttttaaaaaaagttttttcatgttcttagaggattcttggagggtcatatctctataccgatgtccatatttgtgtcagacatggctacttcaaataaactgaagagtcagagaaacatagttgaaatgtgcatgatattttgtaacttattaagtaagactatttgcaagattcgtgggacttgcacttttattgtttatatacttgcatttgcttaaatgtatttggattctcaacttttagtgcatttagtgtttctttgagttaatttctacaaacttaaaatgggaaactaagccacaatcaaccatgaatcttaagtatagttgttgcaggatatttgagatttgaaatgcctcattgtttatatgatccacg

SEQ ID NO: 11766 - DNA, 504 bp, Gossypium hirsutum
tccctaggaagtcatataggtaggaattaacccaaaattggtatggcatatccgtgaacaccttagccctgaattggtctggactatgaggttgaaagataagtggtttgtgacaccccaaacccgaccgggacagaccagcctgaattcgaagcattacattagccacctaagtgactctctagctaacgaccacccaagacacaccttgaccttataacacctcaatattatctaattactaattgtttattaatgtggaagcaaattatgagccaaatttaaatttttcctaggtaatttaaccataaaacattttcgtcatttttcacttatggaaaaaccaacccaattgtagatctaagtttttaccgatcttttagtcaaattatacaagcccaaaaaatttcaacttaatttgagttcatttactatgtctaattcaagttttattattatggactaaattgtaacaattacaaacaatcaggacctataccgaaa

SEQ ID NO: 11767 - DNA, 557 bp, Gossypium hirsutum
  misc_feature (35)..(37): n is a, c, g, or t
tgaaaaaattcccccaaaggataggataaaaaaannncaagaaaagaaactttactagatgagcaaaaatcgaaagagtataagataaagataatctcaacaaataaaccctaaatctcgaaagaacaaagtactctaaataaaatccaaaattccccaaaattcacagaattcccttaagataatctcaacaaataaatctgaaatctcgaaagaacaaagtactctaactaaaacccaaaattccccaaaactcacaaaactctcttaatctcataaatgatgaagtgaattattctaggttacaatagcccatttataggctaaattcgtagattaaatatgactaaaattacctaaactaatcagagttaattgggaaacaataacaaagattaactaagagaagaaaacctggttaaattgtgaaacatgtcgccacgtagcaacgtcgcatactcctcgtcaaggcgcctttcttcgcgtcatcgagacatggccaatcttctcgttaggacgtcgtggttgccttgtcacaacgtcggctcgtaagtaca

SEQ ID NO: 11768 - DNA, 660 bp, Gossypium hirsutum
cagccatgaatccagagaaagaatatatcttattggtatactctcgttttcaacaagctttcactatgacttgcaggaatttctatcaacattaggggaaattttattcttcttccacaaaactttatgtctttgataaagattccttccccatgtataaaggtaggcataggatggaaagtaagctatgatgctttaattaaaaatatatttctttaagctaatatttgatgcatttatctactcaataaactacaaaataacatgatatcttttctctttttttaaaaaaattattttagatcttatgaagaattttattttgaatgatattttattatctaataggttttaaagtgataactatacgaatatatgcttgccaacaacctcttggcagcatttgtgttgtgacatgagagcttaggttcaatccctaagaaccttacccctaaccctaattataatatatatatataagaatatatggttaaataatttgaaaacaaagattatttatttggccctccaattttacaaaaaaaatatttcaattttctatttaatttttttgtctcttttgacccttgaacatgtattgtttatcaaatcaccccaaaatgcatcgaaaagttaatgtctgttaactttgccgatgtg

SEQ ID NO: 11769 - DNA, 652 bp, Gossypium hirsutum
gagattgattgagtcatgtggattttaaattttgacaaaaaaattataacaattttaataaatgaacttaaatttttaaatttaaaaagcaaaaaggactaaacttttaaaaataaaattatggatctttcaattattagtctataatttattcagaaaataaataatttatctagtacgaagtgtaatcataaataataaaaaatattttaaaaaaatatttatgtcgataaaacatcaatgagtgtcttaagatgcaagttttgacattttatttatttatttttctcttgtaatgacttgaaaccattcaattccattttatattcattgaagaatatttcttattctacactttggtatttaaagataacagagttaattttttagtgtttaattcagattttaaagttgattagatgaaaattcataattaggtaataatattaacaattaatttttataaaatcaacaataaaacctaaattatatcacatctattggattgtatttgacaaattaaatgtaaatttaaacaagttaacaattaacactaaatttattcgttttacaaaattatgaaaatttcaaaccaaattatattagaaattaattttcatcaaatcaaccctaaaatccaaactgaaccctc

SEQ ID NO: 11770 - DNA, 645 bp, Gossypium hirsutum
gttcatttaggtgtttccatgctaacacctttcacaaaagttgtttataagacaagtaagactcattttcttccataaaaacttagcaaccaacacaaatcccttcatttcaaaacctaaactcttgatcattttgcaagatagcaccctcatttgaaagcttatgcttcaagggtctcaaaagtacaaaaatcatcaacaaaggacatgaaaatcacttacttgtgagtgcttcaagttcctgaaaattttaagctatcaagccccctacaatggcagatatttttagctaagaaggaagaaaaatgatagattttcctttttgtattattaaaattacaactagtcaaaattggtgacataagcttcacctaattttgaccatctctccaattttgtctcccatggccggccaagctattttctaagggcctacttgccctttaaatacccccaatttaggttctctagctatttaatgccttagctatcaatttaggacttttacactttatgtgatttagtcctttttcacaatcgagctcacaactgtcaaaattaacttaccaaaattttcatgtactaatataaacatgctatggcaccaaaataataataaaatattttttccaaatttgtatttat

SEQ ID NO: 11771 - DNA, 784 bp, Gossypium hirsutum
  misc_feature (63)..(67): n is a, c, g, or t
  misc_feature (529)..(537): n is a, c, g, or t
  misc_feature (540)..(546): n is a, c, g, or t
  misc_feature (549)..(553): n is a, c, g, or t
  misc_feature (558)..(559): n is a, c, g, or t
  misc_feature (561)..(561): n is a, c, g, or t
  misc_feature (566)..(567): n is a, c, g, or t
  misc_feature (584)..(584): n is a, c, g, or t
  misc_feature (586)..(587): n is a, c, g, or t
  misc_feature (598)..(600): n is a, c, g, or t
  misc_feature (609)..(611): n is a, c, g, or t
  misc_feature (620)..(625): n is a, c, g, or t
  misc_feature (673)..(676): n is a, c, g, or t
  misc_feature (678)..(678): n is a, c, g, or t
  misc_feature (681)..(681): n is a, c, g, or t
  misc_feature (690)..(694): n is a, c, g, or t
  misc_feature (700)..(702): n is a, c, g, or t
  misc_feature (707)..(707): n is a, c, g, or t
  misc_feature (716)..(719): n is a, c, g, or t
  misc_feature (723)..(725): n is a, c, g, or t
  misc_feature (727)..(730): n is a, c, g, or t
  misc_feature (734)..(736): n is a, c, g, or t
  misc_feature (738)..(741): n is a, c, g, or t
  misc_feature (743)..(747): n is a, c, g, or t
  misc_feature (749)..(750): n is a, c, g, or t
  misc_feature (753)..(760): n is a, c, g, or t
  misc_feature (767)..(769): n is a, c, g, or t
tggacgttcttgaaggtgaaagtgccatgcatatgctttaattgaatcataatggcgtcttgnnnnnatagatgggcaattggcatttaactgattcagccccttcttttgatgcatgtatgtgctggtacatgggctgaattaatgaacttattagtcatgaacttggagcatgtatcttggagattcaaggcatgacattaaatcccgtacaattccctttggaatgcataaatggacagattcgttcctcttgattaattcatgtatcagcagaattgaacagccacaatcttcacctttaaggaatgtacatgaaatgaatttgagcttccatgtgatcggtcacaatgcaccatcattcaagcatcttcattgctgtccattgcatgtgcctgcagcaaatacattcaataaattagatgcattttagacacattaatttggcagcaaataacactaaattcctgcatcaaaacaaagcagcaattaatcatgtatcaaacaaattaaacttggcagcaaatgnnnnnnnnnaannnnnnnatnnnnnagganngnctttnnttggtttgaatggtcantnntttcaaccttnnntttttgccnnnttgagcaannnnnngggttaaaaaatgtttgccaaaaatattgattctacaaatcctctgannnntnctnttttttaannnnntacacnnncgcgnctccccatnnnntttnnntnnnnttannncnnnncnnnnnannatnnnnnnnnttacttnnnactatctctcctttt

SEQ ID NO: 11772 - DNA, 663 bp, Gossypium hirsutum
ttttggtatttacttataaaaagatataaactattatttaactttttgacttttttttctgtcatcctactattcaattttttatttgttggtcaccacccattaaattaccgagggaaagacaatttggtaccttttaaaattaatataatagtacttttaactctcaacatttataaattgtatcaatttagtcttggttccaaaaatctaacccttaacatttacatattgtgtaatttgatttttttttgtaattttacttttacttgtgacattaaaggctaattttaaaagaacaacaaaagatgaaattattatattagattttctagtgtctcctttttggtatggtctcgatcaaatttagttgataatttcttttcttttcttttctttttttactttttaggtgaaaagatcacaaagagaagtaaaattgaaaaaaaaattacacaatttataaacgttgagggttaaattttttaaaatcaaaactaaattgacccaatgtataatgttgagggttaaagttactattatgcctattttaaaaactgtcacgacattttcccacaagtcatttaacaattagggaccaaaaaaaaaataaattgaatagttgaatgacaaaaaaaaaatttcccaatttggggggtaaaa

SEQ ID NO: 11773 - DNA, 521 bp, Gossypium hirsutum
gtgtcgtatgtatatcgcggatgcaattattagaaatgtaaattagataaagttcaagccatctgttagaaatataaaatgtaagagatgtgactcatttcttggtaatatgaaacgcaagaaatgcatactatccgttggtgatataaaacgtaagaaaatgtattatccgttgcgtaagaaatgcaaaatgcttggttaaactgcgagcaaaatgattattcattgttataaatcatggtagagaatatagcttttggcctaagttttttacgagtaatattggataagtgcataggaaatgtggttgatctggagaaataaagtgcatgtgctcgtagttataaaatttattcattaacttaactttgatctttatgaagatgatgtgcctcactttcttagagaacctaaaaggttcatggaggggcctgaatattgaagatacaccccacctcttttgaaagcccaaaggaatcacgaaaggacctaaatgtaaaagatatggctcaccttcaccg

SEQ ID NO: 11774 - DNA, 638 bp, Gossypium hirsutum
cccttttgccattaatccgtacccgtttttcgcttatcaaagtgactccagacccgaaacgcttgccttctgcttgtttcaacccaacgcgggacgatttgactcggggaacggaatcaagtacatgaacatgtttgatgctcaggttttggtccctccctaactttttcttttggttaaatttggttttgatgcttttattatctctaattttaagatttaatccttgcatttaaacctattccaattaaaatattaacataatttttcttgaaaacaacttttcgaacaacaagcaaggtttagttgttaaaattgataaattttcccaacttaatttctattttttttttcaaattaatttttgaacttgacaaattttctatttttacccatttgatgacgtgacactataaaattatgttatactatcctttaaaatttagttgataacatacaaagtcgcaaaattttatatctttgaaagagttgtaagttcagggactaataggaataaaaaaagttagggaccgaattaaaaaaaaagttgttaggtttatgttaccttatccaaaaaaaaggcaggttaacagggtatcaacctataattctatactttttaaagggagtgaacctta

SEQ ID NO: 11775 - DNA, 379 bp, Gossypium hirsutum
  misc_feature (61)..(65): n is a, c, g, or t
tttatctagttcagtttggacaaaattttaggcccatttttcgacccgaatcaatatgggnnnnntttagtaagctcgaatttagcatttttaatctagtttaaatttagacaaaattttaggcctatttttcgacctgaatccgagtctgaaaaataaacttgaaattttaatcagtccaacccatgatcaagtctactgtagaatatattaaaatattatttaataattattttgtaaggtgggcttaattaaatgatgcacattcatttaaattttgttgtgattatttcaagtgatgtaacatgtttatagtatccattgcatttaaataaaatttagtttaagttaaagtaaattgtgaggctaacgtgacaac

SEQ ID NO: 11776 - DNA, 634 bp, Gossypium hirsutum
ggttgtaggctgttgatttggaaacatcattcccaaccataattttcgctgaagggattttggtttttcctagccatagaggttagcaccattcggccttagagcgcatgcttagaaaattgtaagcctttttgaaattgggtggcacttggcataatcttcaaaacatttggaggacttgatcttgccatatatatgttcccccttattcttctctagctaatcacatggaacaaaaaccttctgcccctttattctgctctttgttgtgccccaacacatgtatttctttattttttatgttaacatgtctcacgttcaaaccatactgctgttaatggtatactgtcgtttatcctgtagctaataacttaaacgagattgtgctttagtattgatgaacaagtagcctcattactttgatccccatccgagcatttatttttctaagaaccaacatgattttttttttctttttctgttttcttgaaaaagaagatttaaaataacatatgggggcgccacttaaaaattctgaaaagtcaacatgattctatcaaaaataaaataaagtaggcaacatgatgatcttcatttcaccttttccctattcttgatacccaatcgtgaaggt

SEQ ID NO: 11777 - DNA, 685 bp, Gossypium hirsutum
ctctttccggtaagtcttcaacctgtcattcgtcggggatccccagtgcctataatggcagatttagtaaagtgggagtgccttgtcaagatggaccgtgtgatcacttaccaagggaatgtgaacattcacgctaggtagcatttaaatccatgcttttaaacaacatcaatgggcatctatcctacggtttgattaacctaatttcttgatgcattttgattctttttggagaagttttcaaactgatgaatcccttaacaaatcagtattattcttactctcaactttgtgaaaagttgagttattgaggtgacaagttcgataaaatgaaagcacctctttgaaatatatcgtgcatgtacatatttgaattattcatggatctagtttagggtttagtgttcatatttcaagtcgagtcggacttaggcaaatataaaatatgttaatattatacttaggtttagctcgacttgcccatgagcacctttaatttgaatacattacatcaatgggcatctatatcatcgcttgattaactatattaaaaccaacccattaaaattcaaaaattataatattataaaatataaaattttaggtattgcatttaattttaatttatttaaaaaaatcactttgtatttttcttctctctcctcagatgttaaatccttacctc

SEQ ID NO: 11778 - DNA, 682 bp, Gossypium hirsutum
ttgacctgttacaaccgtgattctacatcattcttatccctttccaataagagaatgacaaataagatttttcctcctgatttttagcatgtttagttggatttgaatttttttcaggaggaaaaagctaaaattcaggaggaaatttttgatttgtcattctcctattagaaagtgatggtcactaaactaactataattacaacgaaggcacgcacctatcgaacaatagtatagctatggtgagtaggaaatatcgtatctacgaggactaaaagtattagtaattaccgtttttctattatttaaccaataaattgaagtgattgttttttctctctaaaattactaaactaatttatctaagaacgcaacagagaataaaatggaaaaaataatcgaagacaaccaatgacaaagacaatacccaggaaagaatccacctagacttcacctattattctgaatctgaattaaacgatttattcacttgtgccttgatccgtagacatccctaaattatgttaatatctctttcgagagtaagaacaactgactctaggttgattaattgaaatctctttctaattaaaacccttatcgtcgcattaacttgatttaggaattcccctattagatttgactctaatctgatatatttgtgtcgtcctatttctaggga

SEQ ID NO: 11779 - DNA, 579 bp, Gossypium hirsutum
gaattagatcaccagtatttaaattgattgaaacaattgttaatctgttacaaaaataaaaaattcagaaaattctgaaaaatcatataaaatataaaacaagaaataagaaaaaacacacacaaataattaataatataaatataagcattattttctagattattaaatatttacagtaacttaaatctattcaaacgattttttaaccatttttacttaatataaatggtttttaacgcgatcaaccaattttttatctgttgatgctatcagattttttacaaccatgctaatgccctacacatatgtattgttcatagaaatagtggatggcccaatttaatccaatagcctttagttcttcaacttagtaattaggtttattttagtatttgtattttattttttctattttaatatttaaatatgtcaattagatttattttggtctctaaatttgaattccatccatatttaatgacatagtacattgagattatattgcatcattacctaaattttttattttcaagtatggacatagtacaatattaaaatgccacgtcatccaaatat

SEQ ID NO: 11780 - DNA, 462 bp, Gossypium hirsutum
aggaactaaattagcgactcctttgtacacttctctttttaaatagcaaattttctgtataattttttttaatcacgaaactaaaatataaaactttataaaataatttatttttaagtttatgttataattttttttctcctattggataatattaatttaattatgttttagaaaaaaaatggaaaataaagaagcacgtgactgagtgagtaaaaagaggtaggtggcggtttttagcctttggagtctgcgacgtgcacccaccgttttcaactttgatttctattgtctacccttctctttttatatctatattttataaaatttcaattaaattactgttaagagttattcagggataaaatcaaaaaaaaatttaaatgtgaacgttggaagtcaaagtataattttattatatattaatctaaaactttatgcatgacgagcaattaatgaaaa

SEQ ID NO: 11781 - DNA, 650 bp, Gossypium hirsutum
tcgtacgagcataacagagcatttgcagccacaagttttacaacattctacttgggttataacacactctcacagctttagtccctttccccaaatcttgtctcaaagctttagtccttttcacccaaatcttggcaaaagatatatattatagcattaattacattaatagtgaccaattataaaaatttacaaataacttttaaatttggtataatatcaactttaacccttaataatgtccaattccacacaactaatatgagccatgacatttccaccttcaatgttagaacagagtaaaaagccttaccacaaaaggttcaaagggctatgagagaggagttaaaacaaatacataggttttccccatagacatacttctaacaaatctagaacttgtcgacacctataccatccctattaacctcataagcatctctgttcctggttttggttattccagcactaacatacagctttgatccatcagaagtgatgcatgatacttttatccataatatcatttttgtcttcataccatctatatctgcgagctttcctttcgctaaatggccagtcacagtggtgaagaagcgtagaacagatgagtccctgtattcgatttcacatattgatgggagatgaac

SEQ ID NO: 11782 - DNA, 683 bp, Gossypium hirsutum
ggtgaattagaccccctcatagttttgcttttaaaaaatacataacacttttctttgttttccatgaaaatggcctttccaaatataacttcatctctgttatcaattttcagtcacaaaaggacgtaattatcataatataattgacgaaaacctattccgcttactaacttttctaagaaaaaaaagtacaaactattttgcagttctactctttctgataatatctactctttttgatatacaatataaaaaattatccgtatacccaactcttaaataagagtataatgcgcttcagcgcactcaaattcatatcctcttacaacagcaataatgtcaataccaatcaaattaaaactcaattaaccttccattacaaattattatttcgacagcaactactttcattttaataaatttaaaagtttagtatctcaaaatcaagtggcaccattctttatttttatttatatatataaaaaagtaatcacctttttatttgaaaaataactttttactttcttttgaaaaataacaatattcctttttaatgtattattttgttaaaaaatttccattcactaatcaaaatcaagttgtaatataaaaactacttatttccatgcaaaaaaaggaaaaagaaaaagagtgcattggattctagtaagtctcatgatgcg

SEQ ID NO: 11783 - DNA, 561 bp, Gossypium hirsutum
gcagtcaagtctgcatttcgtagtttgccttttgaattatgttcttggatattcaactatcaattgtatcagagaggatcttgggagatacaaattaaaacaaccatgagatttgccacctcatgctctgcttaccacatggatgttcttgttttgatttcttttttgttactcatctctttgattttcctttgttgcataacatggtgcatgctttgacaagacgtttaagacaactttctagtaaaagatggtggaatgtgtttctttttcggtatgatttttattctctttcggcttcgactagtaagtagtctttctggttgattggctcttgatgcagctaaaatgaagcagttttcctttaacctttctagggcttttaatagaccggaattactgaaatgcaagcggtttatgttgagaatttattgtgatgcgaaatgtttgaatcactagatttggaattctcgtctaacatcttgatgtcttgcttttccattgtttcagggaaaattttcatttgacaaaagtttatgtgaagaagagtgttcaactccc

SEQ ID NO: 11784 - DNA, 622 bp, Gossypium hirsutum
tctcataatttacaattccattacttacactgtttattttatgagaaactagactaaataacctttaattccatattttattcatactctaattcgattttcataatttattgtggtttttcaaagtgagcccactgttactgtccaaaaccattttagtgcaagatgtttattaccaagtttataacacccttattttctttctctacactatttctcatcactttctcttattttctcttcactaacatatcaagaacataggaccatatatacaaaaactttacattaacatcatttccatactttttcaataatatcaaacttaaaaatatattaaaatcttgatgtacttaccttgtcatattgatttcaatctttaacttgattttctctctcctccagcttctatttcttgaatctaacttgatattctaactccccatagtctccttgttatctttctctcttgatggatctagaaattcttttgatttctaaaaaaaaatgatgaatttttgggggaaggactaaattgtaaaaaaagaaaaactttctttcttctcttctcttctaacgtgaattgcatggaaacaatggggggtttatccttcccatctta

SEQ ID NO: 11785 - DNA, 678 bp, Gossypium hirsutum
cccactcacctcatcaatggacactgttggaatgtattctttgcttcttttcaacatctttgaaaaaccatgatttgcttaccttatcatgtgaatacaaccatagcattaacaatctttaattttaaaaattagggtttaaaatgcttcataatttcatgtgaaatgtaaaagtaattgaaagaaaaaccagaagaagaacaaatcattttctaaaaaatgtaccaatctaaaactctgttgtagaaattcatgaattgttgttattctaattacattaaaatttataattaatttaattatctaatggactcaagagatggggaagatactcaaattcctctaaaactttatcattatgtaattatttcaatttgtacctctttttaggactataatatactttactatcacactcaattttatcactaaaatgattaataattaataaggatgtaattactagttttcttatcaacgtggatattcttcaaactttttaaaaaataaagggataatataatttttagcccctaaacttataactagatctattttggtacctttcttcttgtccacattggtctttgaacttggcaactaaattcattttggtccataaacttggattttgtcaagatctgaggatagattagtgttattagaataggatcaaat

SEQ ID NO: 11786 - DNA, 524 bp, Gossypium hirsutum
  misc_feature (6)..(6): n is a, c, g, or t
tatttntcattttttcaatttcttttttgagtttttgttgccttttgacttgatgggtacttttaatttctttgttattttgtgggtttttttttcttgtcttttgacttgatgggtagatttaatttttggttattttgtggattttttccttgcccttcggcttgatgcagtgttaatttctttgttattttgcgggtttttcttgccttttggcttgatgggtagttttaatatcttgtttagtttgtgggtttttcttcttgccgtttggcttgatgtgtagttttaatttctttgttattttgtgggttttttttttcttgccttttgatttgatgtgtaattttaatttctttgttagtttgtagggtttttttgccttttggcttgatgggtacttttagtttcttatttaatttgagggattcccctcccccccttttatgtgaatctatgaattccttattagttgggttttgaaattgtattgtatgtacttttgggcaaacgattcctttgac

SEQ ID NO: 11787 - DNA, 640 bp, Gossypium hirsutum
attaagcacgttaaaggcaaaaaaggggaaagaaactatagggtggtaacggagagaaggaaagaccaagcgattaacgtagaactgttggaaacacgaattaaccccctgtatgtattgaaatgaataaaatcatcaaattctttctgctattcaatgatccacaaaaataaactccctccaccaaccctccttctgctttcacagaataacaaatataaaaggaaaatacgagcacaacacaaatactgctaccaacattaaacaaatctagaaataataatgttattgtcgaaacctttattttaaaatgaagacagagtcgccaccaatgcttttttatcaagctgtgattggatcatctcgaaatttaatcattttaataaaatagtaaaattactaaaattgtgattttcggtctacaaaatccaagaagtaggttcgggagtcgattacgtatgaggaaagattagcaccctcataatgcccaaaattggtacctagttgattacttgatgtcttagtgtcgaaaattgagaatttgagaagaatttaaaatgcaacctcttatatttcgagtcaactaagaataagagccgtgtcccgtaagttaggggcacaacatcatgaatcctcgaga

SEQ ID NO: 11788 - DNA, 654 bp, Gossypium hirsutum
tatgtggttgaagattgcaggcaggttaccaggcagaaccgacaatgagatcaagaatcattggaacacccacatcaagaaaaagcttattaaaatggggatcgatcctgttactcatgaaccattgaacaaagaagcaaaagctgcagagaatcatatatcagaaaccgatggcgtcggtgccgattcattagaggataattcgagtacaccaacagagaattgtgataattcgagtacaccaacagagaattgttctagttctgttggttccaattcactggacaaattttgcaatgatgaatctttattgagtagcttatggatgaaggatgaaccccccttaatcgatgcttcatgggacattaatataccaacaggaggagaaacctgtaatggcataagcttgccatcttgggaagaaaactgtgcatggttactggattgtcaggattttggtattaatgattttgggttggattgcttaaatgacattgaattaaacacgatgaacacgttagagatggccgacaaaacagtagcctgacatgcaatgaaattccatattaaagcttcaaatgaaggtgcatatatatatatatatagtcttgtagatgggaaaattgttggaaggtggaagataaacctaactta

SEQ ID NO: 11789 - DNA, 662 bp, Gossypium hirsutum
gtgattatgcaggacaagaatgtaaagaagatgaagatcatgatgtgtaattaaattaatcggaagttcaaagctggtttaatgatctgtttgaatgctttggtgctggttttgttagcacctagctaatttttagcaggttgtttatttttaggttttcttgatttggcttggtttacttgtgcaccaagatttgtgtttttgcttaaattaaatgagaaagtgtaaaggtatatatatttgggcattaagattggattaataacacatttagtccttaatacttatatattctatcattttgattttgattctaaaaaattaataaatttaactctttatatttataaattctatcaaatttatccccaaactttctaatcaaaacagagaactttcacatttattaattattttatttatgattgaaattgtccaacataaccctttttttatttttaagaagtcagtgttagaaattaactaaacatcattcaaaataataaaaaaaatataaattttaaaaatataatataccctaacctttttttgtttatctattaattattttatttatggatgaagtaggtgaattgcatatcatattagacatttttttgggaagagaataatagcctcgtgacaagtggtataaagcaacc

SEQ ID NO: 11790 - DNA, 677 bp, Gossypium hirsutum
tttaggacagagctattccggtatgtatagttaacatacagatatggatttacatttggtacctttagacagggctggttgagtgttctatgttaggatttaagttaacaagtaatggaaattcctgaattactatctctttcggaatctgatttagctagaaagattatcggcatttcgtgactgaaccaatgaactagtgttcaaattacaaatatatctgtgtaaaggtattgttttactagatcatgctttcatcttttctaggagtcctcttgtatcgtttctctatgaaagaggctggcgtcaaaattttaatctcagtggcttccctggagctgatgaagaggtaaatcttttgcgggtttcatagaccccttgtagaatattaatctgtatgtatgcgtatatcgttttctggaccccaatatgattcttccttccaagtgagctgatttaatatatgctgcaatatcaccaaaatccttatattgtatggcttatttgtctagtttgtgacattgctattcatgtctaactttatgttttcaaaataatgcagttcagaatggctcaggagtactttaaacctgcagaaggtggcactttagtggatgttagctgtggaagtggtttgttttcccgaaaatttgccaaatcaaggacatattcaggta

SEQ ID NO: 11791 - DNA, 638 bp, Gossypium hirsutum
tgactcggcccttttccaacattaccaaaattcatattggccacattgagctcaataacaatttccaatatgccacaatctttactagtagctaatagcatccaaatatgtatttatattcgagaacactattacgtcttttaactgatcaaacaagtcgtctatactagataaaatatatttattctttatcctgaatttgttcaactttcacatttaagcagaaatcccagaaattcttcaggaaacaaatcaagaaattcgctgataatagataaaggataaatctttgatcccatttcttgattatcaagtaaacatacatacatacatacatacatatatatatatataacatttacaagtcaatttatgtacagagataattgaaataactctaatagtattatctgaattaatcaaactcagccataatcctttcaccattccaatagtacagatcaattttttttgtctatagttcactacagcatcgtataaccttagccattctattctcagattaatatcaaattcatgaaatggtaataatatcagatcaataggaaaatcacagccatagattctcaactgataattttgatataccaagttaactattacactctacccagtgg

SEQ ID NO: 11792 - DNA, 664 bp, Gossypium hirsutum
tggagaatagcaatcagcagcctaaattcatcttgaatacaactccacattcatgtatcctttactgtgcacgaaaaaggtgtttagaaaagaactaagtcaacagatcatttagtgccgtcctttgcatggaacatctcatttaattcatggctttgctgcacattaaatcagcaagcagcttctttaatttcgtccattaaatggccacatgaaaaagcacaagcaactcctttaatgccgttccttgcatgtagaacagcatctttaatgcatgtcttgctgtacattaaattcggccaacatccacttccttaaatgccgtccaagccattaaacctgcagacaaataattaaattcagtcattaatatctgctcattaaaaatcagcatcttcagacaaattaaattggcagcaatttgatcaataaatatgcttcatcaattcggatgaaactaatgaaaaacatcaataaattcggcaactaaggcacatttaattcagcagccacaattaacttcatctggacatcatttaagacatcattaaattcggttgtagcaagactaattaaattcgtccagacacattaaacaacattattaatgatacgagtcacaaaggcccaacccaagcttaagaaagtgaagggctcaaatctg

SEQ ID NO: 11793 - DNA, 160 bp, Gossypium hirsutum
tataaccataaatctaacttaaataagagaacaggagaaaaagaaaaaagacttaaaagggtaaatgaaaaaaaagctaaaaaagagaatgaattatttcctattaaaaaggtgaccaatgctataaataacaatcaagtgtataacttgagttaattca

SEQ ID NO: 11794 - DNA, 691 bp, Gossypium hirsutum
actggttctttgagttcgtgagaacaaacccgatgactcaacgacctttaccccctcccataccctaacatgtccctattattcctcaaggtttggaacaagtatgtgaaagcaagccttccgttaataaaatttgtaaatacggggctgaagagttctatagtacagctgaaaatgatcttgaaaaggctaagttttggttggaaaacaccatgagggtttttgatgaattgtcttgtacaccgattaaatgcttaaaatgttttgtctctctattgaaagactcaatgtatcaatggtggaatagcttgattgcagtaatacctaaagaccatatgaatagggaattctttcagacaaaatttagaaagaaatatattagtcattgatttctcgacaagaaatggaaaggatttctagaattgaagcaaggttatatgattgtaactgagtatgaaagagagtttgtgcgtctcaaaaaatatgctcgagaatgcataccatcagaggctgttatgtgtacccagtttgaagacgatctaaatgaaggtatcaagttgctagttgggattctaaaggtgaaaggaattatggttttagtagattgaacacataaatctgaagaacttagtaaagctaaaagaaaagaagattctgagactcgtgatacgggtaaacgaccctatggaaa

SEQ ID NO: 11795 - DNA, 681 bp, Gossypium hirsutum
caacatagtttgaaccgctagatttgaaagtcctggagtttgtgcaaccaaagttgttagtcaaggaaccacccaaactcgaacttaaggtacttcctttccatttgaaatacatttatttgggtaactattctactttgcctatgattgtttcagtggaattaacaccaataagagtaatttattgctgttttaaagaaattcaaaaaggcaattggttggactataactcatttgagttataagccctctcttttgtatacacaagattatcctagaggagagtggaagagctagaatcgatgggaaattgagactcaatccaatcatgaaagaggtagttcaaaaggaagtgatcaaatggttagatgcgagaattatctaccccatctcagatagttcatgggtaagtctggtacagtgtgtaccgaagaaagaagaaatcacgattgttgagaatgaatgatatgagttaattctggagagaattcccatgggttggagaatctgtatttattatagaaaattgaacaaagccacttggaaggataatttcctgttgacttttatggatcagatgtcaaattgactgacaagtaacaaatattactgtttcttagataaatattcgggaaacaaccaaatagttgtagccccgaaagaccaacacagaaccaattt

SEQ ID NO: 11796 - DNA, 495 bp, Gossypium hirsutum
agcttttttcccttttgcgagttgtggatattggaaggcgtgtggttaattttgtttatgtatatatatatttgctgagaatagttactgcctggaggagggaagagagcaaaaatgatggcggcgtagttggaaagggtataatagctcatttgacgcagtatgccgttacacttaccctttgtttttcaagataactaccgaaatgccatttcttttgcattctatgaatttttttgaggaattataattagtttttaatgtatttttatcttaatcttttttgttttattataattatatttaaaaaataaattttaattatttaattaaattattgaattcttttagtaatcttaaattttatattaacgtataaatatatttatacaaatgtaattaaaatatatttatataatattatatataaaaaattatttaaaaacaaaacaaaaacaatatatctatgaaaagtaaaagtatcacgagatctag

SEQ ID NO: 11797 - DNA, 663 bp, Gossypium hirsutum
ccaccgtcccactattttaaggatgactaatttactcaataagttcatccaattataattctttaatcaatcaacacctttaaactaataacgattgactttttcaatttttacgatttagtccttttcgcttaattaactattgaaacgttaaaatttttcaacggaactttagtaccaccttaatgacactctgtaaatatttataaaaatgttcacgactcgatttatagaaatgaggtcttgatacctcatttttctacaaccacttgaccttaaggtcttatcacttaaacttaattaatcattcaaataacataaattatcaaataaaaaaactttttaaaaccatatttgactcataaatattaaataataatatttacaaacttactcgttggatttggtggccccaaaaccactatttccgacaccactgaaaaataggctgttacaagaattccaagtcattatttgtgcagaggtgttttatctattttcctattttcttctctctcatatttttttgagccttaaacacagaaaacacatcatttttctacttcaggatgaatgccaaaacttttctagaaaaaatcatcaatgatcatcagcatataattagcgtcacccttcgaaagcactctggatggtccctaaata

SEQ ID NO: 11798 - DNA, 652 bp, Gossypium hirsutum
atcaaggtccaaaccttgtgtacaaactcatcccttaaaatttatataacaatgtatttcattgataaaatatttcataataatactagattgaatatttctacaagactaatatttttgctataattatcatcttaattgtaatcgtttaaaaataaaacttaataaattttattattttaataaaatttcaaattataatttattgtcttttttttaaaagagtttgaactaaattcacaataaattatttaataaaattagagaaaacgctatattctaacgggacattggttagtaattaaaaaaagcttatgtactataaacatcagtattgaccctaagccttcttttggatcgaaataagaagcttaggtttgaataataaaatgataaaagcgatgaattgttaattggtgggtggccgtttcaagcatctacctcacggagtttgataagtaaaatattactaaattcaagatgcattaatggtgaagtgctgcgaagcgacaaagatcatatggggggcatcttctttggtgtccaaagcatctttcctcctcctttttttcttaacaaaaaaaattactaataattaatccaatttatgatatgttttttctggaaactattgtcgctttctaatcaaacc

SEQ ID NO: 11799 - DNA, 494 bp, Gossypium hirsutum
attaacaggcaggacacagatgatggaaaggaaatttttgaggaaccagaaataaatgagactactacaaagtacttccagaatctattttcgtctaatggaatagggaatctatcccatcttttaacaggtattaacaatagcatttcttcagacatcaacataaccctattggcaaaatatacggcagaagagatctttattgcagtaaaaggaatggggcccactaaagcaccaggctacgatggcttttcggcactagttttttaaaaatattggcacattgtgggtaaagatattgaaactttttgcttggaagttttgaatgatggcaaggatttcgaagctttaaacctaacagagataatacttatttcaaagatctctaaccctacaaatcttgttaacttcagacccattagtctatgcacagttatatacaaaattgtagccaaaactattgctaatcgtctttagaaatttattggaaggtg

SEQ ID NO: 11800 - DNA, 691 bp, Gossypium hirsutum
tgggtcagctctcatttggcccatattagtcctcaacctagtccccttcccttgcacttattcctcctctactaaggttttcagtgcttggaacctggaggcgcgtaattttttcccttatttcccttcgccattctagaaggttgcctacatttcctctccactagcacctacaggccatagttgcttgtgtctatcgtcgactcaatcgggttcaaggctaagttcatcttatgttcttccttaccatttgcactcctcgcttctaaatcctttagtctttttacctcattagagaaaagcactttcacatggccatagtgcccacacgataaacaaacagtgggtagatactcatattctacccactacaaaaccccattaaccagcacttgagataccaatgccttctccaagttcacgtacatcgcaatccccgcaaacatcccttgaaccccattatccttgtcaaaatcgagcttagcaactttctttattgtcctccttatttcccctaaaacctttcttttgtacatatgcctaggcagactcgggagctaaatccaagacataaccatgcttggataaacctatactgtgctaaaatccattgtccaaggttgaaccgttaggtattgcccatatacaaccatgacccctggcacaacaccttctcgaaatcttctgaatt

SEQ ID NO: 11801 - DNA, 513 bp, Gossypium hirsutum
gggtgatggatggtctgcatccgcaaaatgcagctttatatatggatgttcattacatgggtgatggtccttactgtttgggaccatgataatgtgcaatacaccattatatatatatgtgcttgttgtttgtttagttacactgcagtcacagtgtatgttctttcgatattacaaacatcctttttataattttgtgcattcgtcgtcattttaccagttacacaagatttgggatgtttgcttttttttgctgctcatgttcgatggtatgctgtcgtgctttgtctgcaagtagaagggcatgtaaggagctttaatcctgtaagagagatggtaattgtgtaattgaaatttcatgtctgtatgtttaagtactacctgttttaagtgtatatagtgctaaacagttaatgatgttgtaatacttggggatcttaatctgtcttgaataacttagaacttctgtcttgatggatggttataattgccagtgacttcaagtgtatatgt

SEQ ID NO: 11802 - DNA, 483 bp, Gossypium hirsutum
  misc_feature (467)..(468): n is a, c, g, or t
gaccaatgagggttggttaagttcctgagttttggcaagaaatttagtagtacttggacgcgaaccaaataaattaaaaataagggtaaattacatttaaggtcaataaattattactaagttaatattttagttacttgacttcaaaaagttataaaatgattattgaactattcgaaaattttcatttaaatagtaaaactatttaaaagtgtttatttaagtcactagtacgatttaacgattagtatggtagatcaatacccattggtaaatagaagaacataccttagatccaattcaagttgacgaccaatattggagattggagaagaaagttgtttggatttgtttctcagattcatgtcatttaagttgtttcatgaaaaaaagaactgaattgcataaagagaaagggaatgacagcttttgatttgtgcaaataggtcaaatagagaaggccaaannttgtgcttgggaggg

SEQ ID NO: 11803 - DNA, 651 bp, Gossypium hirsutum
ttgatacttgcttcaggcttacgtcaaaatcaaatagtagaagttgctctagctttttgtatactaattccgtaagtaatgattcggatttcaattttgtctttctggatttaatgcatttctgattacaatcagcgttgatgattgtaaaaggttaaaatatgtcacaagtccctgtcctttttgaaaattaggattttagttcctatgcttatattctatagaatttagtctctctactttttatcttttgaaattcaggttcaattgttttttgtgttaaattcgttgctgtgataattttatctaagctctttccctaatttcttgattttgttaatgctatatcctcatatcaaaattcctagttttgttgttcttgcaaggacgattcttgattttgttgaccctacaaggactatatttttttaacatatcagattaagctacgatatagtaagtacaaatattttttaaatttaatcactttttcttaaatatgcttctaagctaatatttaattatcaagattttgagtagacggatttaatgtattaaaatttgaagtataattggaattcctaaccatatctagtttagcattgagtacaaagatggagcgagagagcaagcaatacccttgactcctta

SEQ ID NO: 11804 - DNA, 664 bp, Gossypium hirsutum
gtaagtgtgtattgttgtttgggggatgttgattattgaaaatagattggatcagtgttgaatttttgtgaatcgagattgataaaccatctccattggtgtttatttgacgtgtttaggttttggagttcttttgggtggttccgcgttagaaacgaaccaggtgtgtaacgaaaaactcaaaaatcagagaacgacgaaagtcggaaaataattctgtcgacactacatggtcatgtgccagactgtgtggtaggccgtgtgcgaagtgatgagccgtatgtcagaccgcgtgggccacaagggctagccatttaggtcgtgtgagccacacgggcatgtgagctcaaaattttgaatttttcgctagggctataaacatcatttggatcaatcgtaggacttctgtagaatcaatatattataaattaagctataaaacacgaattctgaccacctgttaccaataaattagatataaatacacatgtttgaaataatatctgtaatatgctatgtatggattgaaaattgttatgtacctgatatccgataagtatgacttgagtttgatttttgagcatgtatgacatatacatatctgacatctgatatatctgtatgtgcattcgagatgagatttgtatatatggagaaagtgtag

SEQ ID NO: 11805 - DNA, 640 bp, Gossypium hirsutum
gctatgtgtccagccgagggtactcgttcgataagctttgcaaagtttgtcatggttcggacgaagacattgggtatattttcattaactgccaaaaagccaaggaggcttggctcgatgttaaggctgccatcgatttctctccactgagttggacaaattggaatgaatagttgctgtcaatctaatgtctaaacagtgggttcatagaccaaaactgcctttttatctggtttttacctactgccttttggaattatggttgtcgcgaaacaatttcatttttaactttggccactaggagacgagctaagtttagctaagagcttcaatattagttactcttattattcatttcatgtctaattttaactctttaaatattaatcctatcttgtccccattaatgcagtacgctcctccgtcctttgacgcctactagcatctcacatacttttcgggaaagaaacaaatgtgcagaagctttggctctaatgggagcaattctcaatcaacttcttactcggattgtaatttcatcaaggattatatttttcattagtaatcacccttctatatattattgtcatgtccattttagaggcggaggccagagggaccgttacttatggaacttctt

SEQ ID NO: 11806 - DNA, 721 bp, Gossypium hirsutum
  misc_feature (360)..(362): n is a, c, g, or t
  misc_feature (365)..(366): n is a, c, g, or t
  misc_feature (368)..(373): n is a, c, g, or t
  misc_feature (404)..(405): n is a, c, g, or t
  misc_feature (407)..(415): n is a, c, g, or t
  misc_feature (425)..(433): n is a, c, g, or t
  misc_feature (439)..(448): n is a, c, g, or t
  misc_feature (463)..(467): n is a, c, g, or t
  misc_feature (490)..(490): n is a, c, g, or t
  misc_feature (492)..(492): n is a, c, g, or t
  misc_feature (507)..(513): n is a, c, g, or t
  misc_feature (516)..(518): n is a, c, g, or t
  misc_feature (522)..(523): n is a, c, g, or t
  misc_feature (526)..(528): n is a, c, g, or t
  misc_feature (534)..(536): n is a, c, g, or t
  misc_feature (538)..(549): n is a, c, g, or t
  misc_feature (565)..(580): n is a, c, g, or t
  misc_feature (582)..(582): n is a, c, g, or t
  misc_feature (584)..(595): n is a, c, g, or t
  misc_feature (597)..(617): n is a, c, g, or t
  misc_feature (619)..(620): n is a, c, g, or t
  misc_feature (622)..(622): n is a, c, g, or t
  misc_feature (624)..(624): n is a, c, g, or t
  misc_feature (628)..(630): n is a, c, g, or t
  misc_feature (632)..(638): n is a, c, g, or t
  misc_feature (642)..(651): n is a, c, g, or t
  misc_feature (653)..(653): n is a, c, g, or t
  misc_feature (657)..(660): n is a, c, g, or t
  misc_feature (662)..(666): n is a, c, g, or t
  misc_feature (668)..(689): n is a, c, g, or t
  misc_feature (694)..(696): n is a, c, g, or t
  misc_feature (710)..(718): n is a, c, g, or t
ttgaagcatgtttatcctcctatttgagggttagtgaggtgctataagtaattctaaagatttgtataaaataaaaacttaataaaaattgtcattcttttaaaaaaattatttaaaaaaaacaatatttatattttgtttgtcatgttttaaacttgtttggaaaaaaaaccatgtacaactcgattaatttgattatcaactgaattaactaaaattagttccgatttggttaataagttacaaaaatttttgacttcattaactgttaaagatttcaatttttaattaactcgataaacagtaatttaatttgggtattaattgaactaaccgtttgaacacctttacacatctaannnaanntnnnnnncttacctattgatagaatattaaatttctannannnnnnnnnaactttttannnnnnnnnaactgnnnnnnnnnnaaattctccttaggnnnnntaaaattttaaattgtaaccttntncatttaaaaaattannnnnnnttnnnctannaannntttaannntnnnnnnnnnnnnttaaaattgttctgcnnnnnnnnnnnnnnnntnannnnnnnnnnnncnnnnnnnnnnnnnnnnnnnnntnnangncggnnnannnnnnnaatnnnnnnnnnnanaacnnnncnnnnncnnnnnnnnnnnnnnnnnnnnnnacaannnaatttttttttatnnnnnnnnntac

SEQ ID NO: 11807 - DNA, 511 bp, Gossypium hirsutum
aagtcgctggtgatagtacattacaagagttggaataaaggtggaggttaaacttcaggataaaaatgagtttttccattgacctgaagttgtcttaccaatgttattttttcacaatcgagtacgggaaataaggaaaatgttatttatatttagttttcaaaattccaatgtctaatgtccaatgtctaatattttgtgttttctttttaaatataattggtacattgatggcacaaaatatttgaaaataatcttataaaaaataagtttttacaaaaatttaaaaaggattcacaaaactttttaaattcattttgaaaaatattttatataaaaataaataaatttctcttcgcccattaaaaataaaaaatctttaatcattttattttcttccaacactcatacttttctttcaaatttctcttactctctcactctctaaaatttttataaggtaggtgttcaatttctttatacttacaaacgggactccctaatttgataa

SEQ ID NO: 11808 - DNA, 676 bp, Gossypium hirsutum
tctacccaattcctattccaccctacccctgatccaagcccaaggcagatactgggaattactatatctccaaaactgaatccctaatatgtccaaataccaatcaaaagtgaccaactaaataataataataacggtcaaaattccttttgactacaaagaatttatcctcaatggaaaaataaagatcaagtgatatctaaagagttaattaatcctcgctgctttttagctagtaagtcttattccatcacatacggggttcacctagaagtaaaaaataaatcacaaccaaagaaactgggtagacaaaaggaaagcaaaagcgaactgcttgactgcttctttagcaactaaatcagacctattataatcaagaaaaatgaaatctaatatcctcaggccgaacctttacacattccaaaattgttgccctatgtctctgcactgcttgagcatccactgtaatagccttcataagcatatttaatgcaacatatctgaaaaacatgcaaggttcagtgtcataatatagtaaagcaacaaagaaagtgtagaaagtggcatgaaaagtcaagatagatttgaaagaaaatacctgatattgttgtcacgatttgacaagaatcttcccaagatattgatggcaagcacacgtaagccaccattatcttca

SEQ ID NO: 11809 - DNA, 641 bp, Gossypium hirsutum
gccagttgggcctctttagtcccgggtctatttgggtctgggtttgctggatggttgtaatcagatatgggcttttgtatttgggcttcgggactactttggggttttgggtagcgacagtgggcctactgggtagggatagtttattgggttttggctaattgtaaaaggactgcttaaaaaacttttattattatttttgatattttggactatgtcttgcttccaatgggccgggaaaaattgaggtattacagctgcccctctttgctcattgttgtgtaacgggaatcaagcaaagatttagaaagaccaaatttgaccggccctattaaatcatggtatacaaacttcttgtaaacttatgacaatcatgttgatatctttgatttgctctccgccgaacacagaaacgccaaatttgcctcttcgatttgttccttgtaagcacaagaatgccaaatcatcttggatcttgcttcagtgtaatcgtctgaaggtcagatctgctatgtatctgctctccattgaagtggagatgccagacttcgatttgttctctgacactacagagacgacaaatcatcttagatttgcttcatcgtaagcacgtgaaagctaaattagctatgtcttcgatt

SEQ ID NO: 11810 - DNA, 653 bp, Gossypium hirsutum
aaatccatcgtgactcgatcccatttccattcaggtatcatgatcggctgaagtaaacctgtaggcacttgatgttccgctttcacttgttgacatattaaacacttcgaaacaaaatcggaaatgtctcgtttcataccatgccaccaaaactgacgtctcagatcgttgtacattttcgtactccccgggtgaattgacattcggctacaatgagcttcgttcagaatcatcgaaataagttctgaatttcttggaacacacaaacgacttctgaacctcaaacaatcgtcatcatcaatttgaaactctgattccatattcgaaacacattcagcccgttttgcaaccaattcatcatcgactttctgagcttcacgaatttgatgaatcaacaatggtttggcctttaattctgctactaacacattgtcggatagaacagacaagtgtacattcatcgctcgtaaagcaaacagtgatttacgacttaaggcatccgcaaccacattagcctttcccgggtgatagtcaatgacaagctcataatctttcaacaactcaagccaacgtctttgtcgcagattcaagtctctttgagtcatcaaatatttgagacttttgtgatccgaataaacatggcacttttctca

SEQ ID NO: 11811 - DNA, 461 bp, Gossypium hirsutum
aattcttgcttgttcttctttttttttctttttttttaatttcaaatatatgaaaaagaataaaaaataagttgtgtaaaagttgtgttgatatatgtttcgtattgcaggagtagtagtgaaattggaatgtaggaaccgtacgaacgaagtgattacattccagagcccagaaatagtggctaacaatcacggagactaccacattatagtggaaggcgattatgaggaatcagactgcgatgttgctttggtgaggagtccaagggttgattgcagtgatcccaccgaagcgtggagaaaaaccagggtggttctaaccacactcgatggtctcagcggtaaactccgatttgccaacaatcttgggtttaagaaggatgtagctcttcctcagtgcactcgaattcttcaagagatgggctattatgagcttagtcaagaagctggagactttaacc

SEQ ID NO: 11812 - DNA, 609 bp, Gossypium hirsutum
aatagggtaagcgaacttagaatgcattagaaattaattgttgataagaatagaatactaggcttaatggctaaagtgttaagcaagctaaggtcttatattcaaactcccttgattgcatcctgtgttgatttttattcattttctctactttgccaaaatccttaaaaccaatttcttgaaggcttatgttaagactcagttttctagtgttaaaacttagcattctctttggtcctaagtttggaatttttggaatttttgtgcattttcaattaaaatattttattctcttatttttaccccataaggtactgaattcctaattttaaactaattccttgcccaaattaaaaattgtttttattaattaagtccttaatttaaatcaattcctaattcttaattctatttcagttagggaaaaagttttataaatagttcatctttcaaaccctaaaatttttatttaaaatttttttaaagaaaaactctcaaaattagggatgagcaaaatttgattcgattaaaaaaactcgataaaaaatttaaattttgaagcaaatagttcgataaaaatttgtcattgttagggacagggacagaaaa

SEQ ID NO: 11813 - DNA, 512 bp, Gossypium hirsutum
tgtccttacactcccatctcattatattttgaaacgatggacgaaaaatgcaaggagtagtgttatattagaagaacgttctagcgatgtatatactaattatcttgaatctcatacagtccggtataataccctacgccatgagaccttcaaacttgttgatgaaggatcaaagtctttagacacttgcaatgtggcaatagatgctctccaacaggctgccaaaagagttgcacttgcaacaaagaacgagggcagggctacactggttaacgggcggatcaggggggactctgcacgtgatgctagtcgggcaaataccactaatcacaaaatgctctgtcaaccattatctgaggtcagaactattattctattattcccgttgcttgttctacatataatgtattgaatggaaaagctatgtacatgagtcctttccttcagtacctggcttactgtttgcatttgaaattgttattatcgtattaggacttaccactaagagagaa

SEQ ID NO: 11814 - DNA, 600 bp, Gossypium hirsutum
  misc_feature (65)..(65): n is a, c, g, or t
  misc_feature (590)..(594): n is a, c, g, or t
aatcattttctcattgtataatttccatagggggttctcccttgtttctacagaaaatagactcnctaaggaatctagacatataaattataactcataattatttttttacaatttttaattattttctaaattcaaaacaggggactccaaaaaccattctgaccctgtctaaccaaaattcaaatatctcataatataaaattcctttacccacaccgttatttttctatgaaaatagactcgataagatttaattttatatatcattcactctctaattcattttatactatccttggtgatttttcaaagtcacgtcactgctgctgtcccaaaactgtttcattgcaaatttttactctttcataatttctaggtataaactatcacctaggcattcataataccaaacatattcttacttagccattttaatagctaaaaattatcacatatttacacatcatcctttagcaatatcataaggacatacattcaaaatgactaagtccctatacatgccatagctcaaacattgatcatcataaaataccgagttgttgttgttgatagtgggagcgctctcnnnnntcttta

SEQ ID NO: 11815 - DNA, 656 bp, Gossypium hirsutum
gaatgcccacatagtatctaacatgttattattcaatttccaaagccaaatagtcattataaaacctaatccgcaaacactcaaatacataaactcatgtatcaaaatataacttcatatacatatactagttatgtgacctaatacacatgatcatatatgcacatagttaagatacatttcaataatattcacaaggccgaatacacttactaaattcataaatgttcttcatttgcatcacacacaatttgtaacaagtatcaagttatttacttatttcaagtagacaataacctaaatcatacctggccattgagctcatattacacattcgatcacatcttatctttgcccgatgcaccattcagaattggataggacactcgaattatcacacatatatcgtacaatgccaacgtcccaaacgtggtcttacatgtactcacatattgatgccactatcccagacagggtcttactcgttcaaatatatcggaatcacatatcgatgccatggtcttactcacacatcacatatcaaaatcctatttcatgacatatgtatcctagctattcccaaggttcttacgaggctttcgtgtaacaccccgaacccgagaccgacaccggagtcggacacgagatgttaacaa

SEQ ID NO: 11816 - DNA, 597 bp, Gossypium hirsutum
tgaatctcggagagacagacagagaggggactctatcatacctgcaaattcctaggatgagaagtaggcctggcctcttgtttttggcaggaatagttccagcctttgttgcccctcggtagagtgagtctacttagcgaactggcaggacgcggagatcaattgatcaaaatatgaatctcgagagtggatggttgaccgccgcccccttgtcctggaggctctccgaccggggaggggcttgctatcgtaaccttttcccccggtgtatgtgaaaaagagtgacgaacccattttttttcggtcataggttggtccaaagaatgagagtcggcttccttaagtccgttgttcctcagtagctcagtggtagagcggtcggctgttaactgactggtcgtaggttcaaatcctacttggggagaatttatagttatcgcttttctgacctagcgacccctgcccttctcctttgtttctaaactagcagaatcgtgggacatcaaaagtgggaagttgattgttggtttttattcctcactctcgtataggtgaacttggttcgtttaattcttagggagaagaaggatccactcg

SEQ ID NO: 11817 - DNA, 335 bp, Gossypium hirsutum
  misc_feature (64)..(64): n is a, c, g, or t
cttacaattcgtcactaactctcccccactttcaaattccacacttccctcccttaattctttnctaaaatcccttcagattacacctccccacaaccactcaattttaattcccctcaacaacttctgtgtttcattcagcccacaactctcccacggcacagcaacaaaataaaacacccactgcgcccaccaggattcgaaccccaatcctctggcataggtaacacccacttccccctagactagcaggccctttacgtcatgtttcacccatttttatttaaaagcctactgactagagacaagggtttaaccaattaattttttttttt

SEQ ID NO: 11818 - DNA, 599 bp, Gossypium hirsutum
cgacagtaaagcaactaaaagaaacattgaatcagtacctgttgtattcagtacctgttgtatgtgagtatccggatgtgtttccaaaagaattaccaggtttgccacctattcgggaagtagagtttggtattgagttaatgcttgggatgacaatgatatccatagctccgtatagaatggcacctacagaattaaaagaattgaaagctcagttgcaagaattgatagatagaggtttcgtttaaccgagtttctctccgtggggtgctcctgtgttgtttgtgaaaaagaaagatggaactatgagaatgtgcatcgattacagacagcttaataaggtgactataaaggataaatattcattgccatggattgacgatctgtttgaccaacttaaaggggctacagtatttttgaaaatagatttggatcaggctactatcagttgtgggttaaagatttagatgtgccaaagactgctttcagaacgaggtacgaacactatgagtttttggttatgcctttcggactcactaatgcacctgctgttttcatggattttatgaatcggatcttcagaccgtatctagaccagt

SEQ ID NO: 11819 - DNA, 501 bp, Gossypium hirsutum
atcactcattattgatagtcggagttgctcgaatgtagtgagtagctatttggtggattctttaaagttgccttgtaccaaacaccctaagccatatcaccttcagtggcttaatgaatgttccgaagttaaagttacgaaacagtccttggtcacttttaagctcagcaattatgaggatgatgtatggtgtgatgtggtcccaatgcatgcggcacacttgctccttggacggccttggcaatttgatcgcgatgttacacaccaaggtaaacttaatcgatactcccttctgtttaaaggtaggaaatccacttttgctccttttgatgtgatcctgatcgcatcctgtaatgtcacaacccaacgctgtcgagattggcctaaacacgagggccccaagtgcaagatgaagctaatttttagcttatttgaatttcttttcgtgtggttcatctcactgagctttgtttagctcgtttccagctcaatgggatcatt

SEQ ID NO: 11820 - DNA, 535 bp, Gossypium hirsutum
  misc_feature (445)..(445): n is a, c, g, or t
  misc_feature (528)..(529): n is a, c, g, or t
  misc_feature (531)..(532): n is a, c, g, or t
tttttcttttttgggtttattttgtcatcactatatgatagcagcgaccactatcaggcctctttaacttgctgaaattggggcagtgcatctgatcggagctaagctaacacatgttagtccgtataattctggttctggcctatggattttgagatttagttattttctctagggtatactagactagtattggtaatttttttggtcactcaattatgaaaagttatattattcaattgttttttttggtcagcagttaaaaatgaaacacccaaaaatctaaaaaataatttaatattgattatgattaattatattttcatttggtcttgtgaattaaaagtaaaaaataatagcaacaacaatcctcaaaaaaaagaaaaaaaaaagctaaccaccacctaagggtttttgccaatttgaatctcctatcacctaaagnatgaaattgacccaataaaatttgaaaaattgaatcctaatttttaacttgataaagggactaaaataaaaattaacccagtnncnnccc

SEQ ID NO: 11821 - DNA, 658 bp, Gossypium hirsutum
aatgagggacatgaatccttcaggtttcaatggaaagagaattgaaattttctatacaaaattacttggcaaatcttttcagaacagtggatatacggaaggatgaaactaacttgaatatgaatacctattactaaaaagatgacttaattccctttgtcattatttctttcacaacaacgaaaaaccgaatttccattacgagttcacctccatccactactttttaatcttctattgtctatttctccttactagatgtttagctgtaaacaggaaacacagaaaagtaccagagtattcaatgcgaaaatgagcatgtcgatggcaggacagtgatctaagcatgtagtttagatttgctttgatgtcttaatgacaggataagcaagtagtaatgcttaaggataggtgttcaatagtgtctctgagatcaccttttcaaccggatattggtaaaaagcttccttgctgcaaacctagtaaacatcttaaaaccacactgcattttatgaagaaactccagatcaggaaaatgttaataaagaattcaatatattatgttagtaatataaaagatatgcttcttgggccaaaaaaagaaacagaaatccatacaatgaaggaacatacctgcatatcacgaaattccaggaac

SEQ ID NO: 11822 - DNA, 640 bp, Gossypium hirsutum
ccatttcagcacttctaggattcatgttacatcaactattttgactagaaagcattcgttgtctcttttcttattattctttatttattgacttggctcttgttactcattccttagaacacaagtatgggctacatttccaagacaggatgaagcagtaaagtttgctaaagtacatgcaaatgcacatgtttttagttatcaagatcactatagtggacaaagaagatatcttgcttctacatatgaggagttctggaagaggtctttactgttttttcttgcctgttcagatttgattgcttcatgagaattatccttttaaactcttcgtttgttgctttgttatcctgtcattccaggtacaaaataatggaatcaaaacttcgccatcactatgaagtgattcaggaggtagaaatctctacacgtctgtccgtaattgaatgaacatgtgtaatattatatgatttcggttttccattctagcaaatttccattcatacagtttgtctgtgcttgagtagtaaaacctgaaactaccacgaggagatgtttgactcgtcttttttttcattgacattattttattgattgtggctgcattgtttctagggtttcccgtgtcacttgtactttg

SEQ ID NO: 11823 - DNA, 500 bp, Gossypium hirsutum
  misc_feature (46)..(46): n is a, c, g, or t
  misc_feature (48)..(49): n is a, c, g, or t
  misc_feature (51)..(53): n is a, c, g, or t
  misc_feature (56)..(56): n is a, c, g, or t
  misc_feature (431)..(431): n is a, c, g, or t
cacaaattggccagcgaacaaagataagatatgccgcttgtctctncnntnnnggntaattcacaattattccaaaagtaaattaataaatgctataccttataccagttttcatatacttcttttcttattcaataatataatgaaaaatgttaattgagtctcaactcaatttacataagaatttttgttaatgtaagagaatgcaagtttgaatgcgttgaagtacatcgtattcttatttattagtaattttaaacattatctaaaaaatatataatctaaattgaataataaagcaaaaataatttcgatgaatgatttctgtaataaaataaaaatattattgagaaaatatttttttcctgaattaaaaaatattaatgaataaaaagattatgcattggttaaaaaaaaaaacacattatgcnttatcattgcattaccagtattctcatgctttatttttactcttccatataccccccccaaaaaaaaaa

SEQ ID NO: 11824 - DNA, 658 bp, Gossypium hirsutum
tgtgggtggtcctccttctctcctccccaccccaatggttggccataaatgggtttgttaaagcaggaccacactcttctccaaggattgagcccatcagcgaggccgcactgttgcactcttctccaaggatttataaaatactacataatctaatctctagcaatattataaattagaatttagttattaaattaaaaaatagatgaactaaatttttggattacaccagcaagtgttggatgtagttgtaaataacattgcactctagggagaaaattcaaagttagaatattaaagacaatgttgttgggagggttatttctttcatcacccccaaacaagtcaatattagcgctatggtgcataaatgtaattcactatttaaagaattattcaaagttcctagagctccttgtaaagtttgttggaaaattcattattgaacttgattaatcgctttttgttgttcaaataaatagtttcatttttttaattttttaattgtcctaaaatcttataagttgaatcaatcaaatttaatttttcccgttctatctcagagtatctattcactcaaattgatccacctccatttctactttctgtaagcaaacccaagccttttccagccgttcaatagccaaccacgacatag

SEQ ID NO: 11825 - DNA, 642 bp, Gossypium hirsutum
aggagcagcctgtgaggtttgaatttccgcaagtgtcttcccttgaggttacatccctaaaaaacgtcaaatgtttctatgaagggcaacatacaatagtctggccaatgttgaaaaaattgaaaacagattgctcttctttgctaaagatactggcttcggaacatcttagattaatccaaggaaatgagcaaccagttttgttggttgaagaggtatgtatatcattacaactatatttctttttatgatttaaactctgtcacatgtatttcaggttgatattataatttaaatcacgtcacatgcatctcaatttgatataattttttgatttttatgtatttttaaaaacttttgttacatatatgtttttaaaatttttaaaagcaagattgaatagacgtaacaatttgatataattttttgattttttgattttttatgtatttttaaaaacttttgttacatatatatatttaaaatttttaaaagaaagattgaatagacgtaacaggtaaatattgatggctactcttgatctttaagaatcgagtctaaattgatagataatttaagtttcgaggataagaaaaatactactttagcatccttttagggacttagcaccattgcgattaa

SEQ ID NO: 11826 - DNA, 910 bp, Gossypium hirsutum
  misc_feature (390)..(390): n is a, c, g, or t
  misc_feature (394)..(395): n is a, c, g, or t
  misc_feature (828)..(830): n is a, c, g, or t
  misc_feature (832)..(832): n is a, c, g, or t
  misc_feature (834)..(847): n is a, c, g, or t
  misc_feature (849)..(854): n is a, c, g, or t
  misc_feature (856)..(861): n is a, c, g, or t
  misc_feature (866)..(867): n is a, c, g, or t
  misc_feature (872)..(874): n is a, c, g, or t
  misc_feature (884)..(892): n is a, c, g, or t
  misc_feature (897)..(901): n is a, c, g, or t
cgaggttgtatcagacatattctagacttaatttctaagcaaaaattgaacaaaaatttagcttaaattcatgtatatgcttgcatcaaggttcggctgaatagagaccaaggaagagctttcaatgaacttggaaaaaaatggcagcagctacattcggcaaatggagtttaatgaggtcattcatgaagcaactattgatgaaaaattaccagcattaattggcaacttgaacagccatttagaagcgtgaatggacggttttgaagagccttgaagtgtgaacatggctgaaccgaatagacatagtgtgaacagcttttatacgcccttgggaagagaatcggccaagcttgaaaggatgaaaaacttggtcactttggccgaatngttnnaaattcaacaactatttatagccttcctactagtagccgaatggacaaattcaagacttagtttctaagtaaacaatgaactaaaattcagcatgaatgcaaaattattagcccatgtagattcggctgaatgagagctccaatggtcatcttctagatgggcaaatgcaccttgaacatcttggatgtgcatgaataggctaggttcggtcaatgaacataatggggtcattcatgaagcaactattgctgaaaaattaccagcattaattggcaatttgaagagccatttagaagtgtgaacggacggttttgaagggccatgaggtgtgaacatggttgaaccgaacagccatagtgtgaacagccttatacttccttgagaagagaatcggccaattttgaaaggatgaaaagcttggtcactttggcnnnantnnnnnnnnnnnnnngnnnnnntnnnnnngactnnttcannnggcaactctnnnnnnnnnacgannnnnattaaaaga

SEQ ID NO: 11827 - DNA, 654 bp, Gossypium hirsutum
ctaagttgttgatttcttgaagacaagaagagaattttataggaattctcaacagaataactagaaaaaataaagaaagaaggcacttttgatcgtttaagaactaaaaattgggaaataatgcaaaaggattgagtgttctttttcttgtaacatttgtactctttttttatgcattgtatgtttgtaacaataattttttttttgccaataattaatgctttgtttggtgtataaaatgatagcattcaatgatttttaaaaaatccaagagataaaaaaaaattaaattttgggtgtttgtcataagaatcagaacaatatcgagtttaattttaattgggatcaatattattggtaatgtaagagacgtgcgttcgagtaggttgaagtgcattttcctcctatttaagggttggggaggggatatgggtagttctagatattgtataaaaaagagcaaatatgataagaacctataatgagatcaaagagcaaactagtctttttattaaagattctatccatatctattattaagtgatgacctattactgtttagttgcttattaaaaaaaatcatccatttcttatattaaaattcacattcattttacttgaattagtccttatatgtcaacataaggtacacat

SEQ ID NO: 11828 - DNA, 635 bp, Gossypium hirsutum
aggtattgccctccctttcaaagggtttgcatgtctaattaatagattttttgacagtttaattgtataatttcttgaggaataatttacttttcaccgagtgcaggtaaggatacgggaaatacctgtcctggacaagctacagtatcactactgtcttttatcttcagtgcttcctgttattaagaagatccatcaggaacagtgttctgaagtggaattggaaagaaaacttcgtagtaagatgcttgttgattaaatggtttgagctcaggttcctactgagtttaatgtccttatctaaccattaataaatatgtttttcaggaactgaaatagacctttttagggcaaaggtgaatgcagatgagcagatgtgctggtacctaataacatttactagctattttaaaatcatctcgcttagtgtggttagtttaataggttaattttctgtccatttggtgaggtttattaattagatttacaaaagtatggttaacacattctcatatttattgtgctaaggacatatagttcatgtctttttgcagcaacttttgtaggataccaattgttgattatcatcggcattgtccaaattgctcatatgatctgtgtctccgttgcttgtc

SEQ ID NO: 11829 - DNA, 420 bp, Gossypium hirsutum
aaagggtacctaactcactcaacattgagtcataactcatcttctctccctaaagttttatcacttctcattattaatttaatcttttagattctactaataacacgacattttaagctgtatttaaaaattcggattacagattcaaatattttcgacataatattttacgaactgtattattataggtcggaacttttaaattattatttggtgcgggctcgaaacgaattatagatagatattttgaaggtaaaagtttcacgaggtttttgtgttggggattaaattgtattttgctcctttgtattaaaaaattaacaaattagtccttgaatgttatattaaagagcaaattgattcttttgttaaaaattccatcaatttctactattgaaaatggtcattgtacataagcat

SEQ ID NO: 11830 - DNA, 642 bp, Gossypium hirsutum
ttctttgtgcactcttagtttagttaattaatttagataaacaaatcccttaatttttaggctagataataaaaagcaagtaattactagtactcttggttcctttcgatttgacaatccggtcttgctaaagctatactactgttcgataggtacacttgctttcatcgtgataatagttagtttcaagaacgattaattataaatatttaaaacctgtcgcgaatatcatgtatcacaaacacataggtgcgttagacttagtattcttccaatccataacttgaaaggagattttggcaattccttactaagaaccctattttatgtatttacaatagtttcgagtacatgtatgaacaatgtcataggtaaaaaggagtttctcatcatactcctaaccatatcccttaaagtttgattatgtctttttgtcacatcattttattgaggtgttttcgtagcatagtataatgcacatatgccataaatttttaggaattgtgtaaatggacctaaaaattatctcgattcaatgtatttcccataatatttaccatcaaaagatgaacatcaaaatgtccacatatataaatgtgtattgtctcaagaacttgagtgcttcgtatggaaccattctta

SEQ ID NO: 11831 - DNA, 626 bp, Gossypium hirsutum
tttagtagggttttgtttatttttaattaacttaaacttagccctttgatcgtgacgtgcatagggttcaaaatcctttacatcaaataattgaggagaaatattattatcgccaaaggtcatttccacatctataataaaaggggaaatataaattgtacttctaattatttattttaagatttaatgatataaataaagaaaaaacatgattattgaaatatttccttctccatttcagtaaaaacaatagattaaatgaaaattaattaaatattcaaatcattcttaatcaccaatgatataaagccaatagccaagagatactggttcctattactttgttgaaaaactcatcattttagtaagaaaatgaaagctcaaaagatacacaaacgcactttaggttttgccctcaccttttaacatcatcaatagatttagaatcttgcttggtgccatatttgtaacataaatatcattatgaagtctaaaaagcataaagctagagattcttcttcttattaattaatctctttctcaacctaaattataacctctattttttctttctatttttgagttagaaaaatatcaacaccgttggagaatggagtagcactcat

SEQ ID NO: 11832 - DNA, 695 bp, Gossypium hirsutum
gaatgtagggttgtctccatatgcggaatgggtggtctgggcaagaccactcttgccaagaaaatatatagtcaaagccaagttgttggtcatttcaaacatttggcttgggcatacgtttctcaaaactgtcaaaaaagaaaagtatgggaagacattttatctgattttaacctcttaagtactgaagctgacaaggagatgaaggttgaaaaattagcagagaagttatctagtttcttggaggaaaataaatgtttggtggtactcgatgatatttggaacaccgagtcttgggatagcttaaaaccagcatttttagtaagggagacgagaagcaagatattactcacctctcggaacaaagagatagtttcacatgctgacagtaaaggtttcctatatgagttgcagtatctaaactacaaacaaagctgggaattatttcaaaagattgcctttcccccaacaaattctccaggtaatatgtttattgatttcataattgcaaaattattcttgtcttaatatatattgcaatgtttactctacactctattttttttgttaaaattattctataaaattagttgatttaatattataaatcaattatagggaattattaaattaactttcattaatatcaaaatcttgattcattaaagaaagatacgaggagcaatcataacacg

SEQ ID NO: 11833 - DNA, 617 bp, Gossypium hirsutum
gctcagcttcccgggtcgttacataatgtacatgatcaaaaggtacatatataccttactatgtggtatgtgattattcgatatgttatttggatatgtatatacttgctacgtgatatttggttgctattctactgtgattatacattgtgatcattgataaaggaatgtgccctattaacgttgttggatagagttacgtgtatagttggcatgccatagggttcgtttgataggtgggagtttcaatgctttatgtgtgttatattcaatgccttgtatgtgttacattcaacactatatgtgtgttatattcaacaccttgtgcatgttatattcagtgctttatgcatgttaatctgagttagttaataagggctaaactaataaattgaatgtaatatgaaataagatatttgactctgttagtagggactaaaatgtaaaacttacggttgatataatctgtaaattatgtgatatatgaattttatttgaaaaaaaatagatgcaaataccctaagggtgcatcgaaaattatattacataaattggcatctatatgaaataaatatgattgaacaataatggatcattggcttaatggtatatacatg

SEQ ID NO: 11834 - DNA, 687 bp, Gossypium hirsutum
gccctagctgtccaccatttctatagttcataactaatcccctcatactcagctatccaggtttaagcttctgtggttcatccttggcccttctcttatttttcttgggcctcctaggcataaccctctccattggaggcagaataggcttaccccagttctcttccacccatgtcacccattgataggctgcaatgcatactgatatgcattcaagtaagtttccatgtggtagtgtagtcatttggctctttaccaatgtgccatatggcacatgtatgtgagcatggacttcattttgcaacctcaaaaatacttttttttaatgaattatatctctaaacaatcttattctacctaagttaggatatgaaaaatttaaataaattaaaaattaatatttttaataatttaatttttaatacttaatttttcaacacttattttttcaacaaatagcttttaatttatcaaacaacactttattcaatttttttttcatttattaatccaatagactaataatgattcactcacatgtctgccaaattcctcatgttccttatttcttttgccttttcttttgtgtctccaagcttcttgattcaaatcatgaaaaaaaacactaactaaattttcatgaaaaattcaagtaaaaactcttctctttctctctctcttccaccc

SEQ ID NO: 11835 - DNA, 373 bp, Gossypium hirsutum
  misc_feature (58)..(60): n is a, c, g, or t
  misc_feature (63)..(63): n is a, c, g, or t
ttttcattttctcctcccatccttctacttttccacccaaccaaacacacttttaaannnttnttgcaatcagaaaagctagagggtatgcatttggtcaaacatttgccatgtttgtttttatgttgctcatcaacctgtgtgaaaatgcaaatggacatgcatctgctggttgcagatatgcatgttctctttcattgtttgttagaattattgttttaactccattgtttagttcactgatacatgcattcggctgattctttgcagaacagtgttgtaaatgtcttctttttttttttcccatatgcccaattggaacctctaattttaaaaataaatttaaggccaaagggtttgttgtcaaataaaa

SEQ ID NO: 11836 - DNA, 648 bp, Gossypium hirsutum
gtgttctcctatccaactacctatcaccttttcaccttaaacgatataggaaccggaatgacactcatcataatgtttaattgctcttgaagtttaacttcgatttccattttcattttctatccttgtttcacttattaccctaaatcgaacacattcaacacatcttctacctttgtttctttctagccgaacctaccatcatctacctagccaactttgaaccccatttcaatatcattcaaccttttaagctaattccaacaaatcaacaattttgtgaacgacctttcttgtagacgattgggcaacttacgtgaactcgactcaatcacctgacccagatcacataatttggtatcagagcttgtaaaacgagaagtgccgatgttcgtatcaagtccgtagtaggttcgttataaaaaatgtttcaaattaaaaaaaattctatcaagttgtattcaagttctctattttgtttatcattatattttaagtaaaaaaatacaaaattttaaaaaaaattgtattaaaaaaagtgtgaagcattaaagttctttttttttgctgttcatatcattttgttcccgatctccaagggtttgttctgccatcttttggccccccaacgccacactgcatcgaaat

SEQ ID NO: 11837 - DNA, 628 bp, Gossypium hirsutum
catagcccaagacataggtaaatgatatcctctcattggtattacatgatagatgaaaagtaaacgtagtcacgagtcatttgtctttatgataaataaattaattactatttgatagtaattgactgttcatgaagaaagatgtaatgattacccttggataaaataggatcatattgggagaacgaatttatcctaaacaaattaaatatatcttatgtgggtaacacacttatgacaaggtcattggatgagcactgaccgagtagctttcataatagcatgttatcagatagagcttagttaccatactataatggaattagttcatgattaaaagagtttctaattaataggtgaaaatttggaatttaattataacttatttaagccttaattatatatgtccaattgatctctttgctagaaatgaattgcatgtggaatcaaatgaacataaatggatgaaaataataatgttagagaaatgtgttacattcgaaaatgattgtggtttctttctaaccatggaaatgacttgattattaatttaagttttttgaattattttttaattaaataattgaagttcgaaaagggaattagattacttggtcaatcggaatcc

SEQ ID NO: 11838 - DNA, 677 bp, Gossypium hirsutum
cacaatgaatctgaacacgtgagaaaagggcaaactaggacattcacaaatttcgttatttttaaagaaaaacgattgtctctttttgtatgcaatgtatgaacagccaaaagggggggtgggacatttccgtggctcacacgctgcatttaaggacgaagttaagtgattggcccctccctcactcgcaccacggcgccaccctaatatcaacatccacgcggctatcttattcactccttcctcaatctctttcttaagatattttttccccataaattacttacttcatgaaaacaaaatatattttattattagtcatttatttcttcgaacaacactcgcaacaaataaatgaactattgttattcacagtaaatatcttgatttcagacttaaatttttttttcatactttatcatatttaataattataactcactttaattaaatttaaatttgagttacatcggatttttaaacaaatattctttacctattaggttcgactttaaaattttgtttaaaaattttaattttttttattattccacttgttgagtatttaataatagttccatggtttgacatattaggattgagtaaacctcatgcaagtcaacacatattttactatagggtgaacatgtatttttttgagtaaggttcgcctacat

SEQ ID NO: 11839 - DNA, 636 bp, Gossypium hirsutum
ttttcttgatgaattaaaaaaataaaaaaaatcttacaaattaagaacccaattgtggaaaatgattctttttattctttattgtgctttctgtaaattttagtttttcaaggtagtagtttcattttttaatcattgaaaactttaacttaaaaaatgaaaatataaacaaaacaagtgggcaatggtatggttgaaatcaaagggagaatgatccaaaaaagaaatgaccataaatttcatccttgatacttattttagtttgagattttaattttacagtgtttttgaaataaaggtaattttcttttaatatagattagtagatctgcatgcatagtcaaagaaacagactggactccaataccaacaggcttttgattgacattgtcattgtttttccttaaacacccttgctttagtttcaaaatatttaaattaataacatacaatccctttaatctttcttctagagagtagggaccatcttcatactaagatggatggtgtcacgtatgtatgggcatacatggagagaagattgaggaatcaaagcatagtcccccacaaaacaaaaagataaaaaaagtaaaaaaaaagaaaagaaaaataaggtgggttggaattacaaagatt

SEQ ID NO: 11840 - DNA, 527 bp, Gossypium hirsutum
  misc_feature (519)..(521): n is a, c, g, or t
caaaccaaacctaaactaattaaaaaacctagcagcccaacctaaccctagcccaaacaaaatcagaaaaagaaaaaaaaaccctaaccttcccctctagccgccgcctctgtcccatcacctctgtcaacccccattccaccgttcaaccaccacctgcaaaacaaagagaacacacaagcagcaaaaatagattagagagcaatgtaaatggctatataagccgaacaaagtgatgtaaaaatgagattttttggaataaaaaggaaaaaaaacaaatcaatacaaaaaaccgaatattgagaagcaatcggatagaaaaatcgaaaggtgatttctttgtttctttactgctattattcatagataagcataaaaaatatcaactcttaccttgttttgaggggagtgatcggagagtttagaaccgagactttttttttatttccaccggctttcctgaggtttttgggtaccttaactacggatctaggatgaggggagtaaaagggtaaaaannngggtcg

SEQ ID NO: 11841 - DNA, 639 bp, Gossypium hirsutum
tggcggactctcccactaataagtttgtcgcccgtgtttttgtgttgccgcagatgaaattgtagtcgttagtgagtcatgtttaagtcatctagcatcctagtggaggtaacgtgtcaataacttgaacacttggggagcctcataggatgtgattaattagtggaagcgtgtgagcataattactgattagagtttaaccttgagtgagatttaggttggagatagcttaaataggacaacctggtagtgaagagaagatttctatttcatcttctccactagccttcgttatcatcgaagaaaaactaaaggtgttcttcatcgttaacgaaagagttgtttgtcaagcttataaaagcttcttttccttaagttgtttgttggtaaaattcttcaatcattctttaagtttactagatagaaatgagttattataagagctattcaatagggctttcatttgaatattagataggaagtaaacttctatctggaaactgtttgcatgtttatcgatttatattatttcataagttttggttatttttatatttaaagaagtcatttgattgttttagccaaagatacgagagaaggtcctagtgttaaaaggaaagaactcgttgagtaggaagc

SEQ ID NO: 11842 - DNA, 424 bp, Gossypium hirsutum
aatgtttggacttgttgagcccaaagtggcctattgatattgtagcccaacactaaatcatttttcctcaacagacagaatttgtttatatatggacatttattttatttatttgattaaattttttatttaatttttaatcaaattgatttattgactcattaatgacagattttgtggaaatttccaaaatttcaacattctcaatgcctatttaaggctataaattttgtaggtattctctcataccaaatttctgttgctctcaaaactcttcttttcttctctctatttttccaatgttccggtgataaaaaaagacatcgtttgtttgttgatcattgtagaggtattgctgctttaatcattattttgttgtatcatgggagacatttgaccaatgtttctccaagtacggtagagc

SEQ ID NO: 11843 - DNA, 689 bp, Gossypium hirsutum
ctaaatgaagaggaagtggaaagagaggaagggattttaaaagggagattttacgaagggtttgcagaagcaacaatggaggaacaataaaggcaaagaaaaggggaaatttttggggaatttcattgggatgctaaaattccaccccaaaaagactgaaagtggggaaaaaaatagagatataatgggcagagagccttttcctatgaatgtattttcaccatcagatgacaagtctacaactactttctttacttctcagtactctcttaatttataccctcaaactttagtctagtgtagaatataatcaagtttgcaacttatgtaaccataggatttaaggtcatatctcccatgttgccctctacaagagaggtatcgattcaaaaatatgtcttgaaacttaatcattatagcttaatcttgataagtaaacatggggttaaaggactttgggatccattgaaacccaaagctatgacaatcctttgggtcaagcattagagaatgttttagagcacaaaattttgacacccttatagtttaccttcgtcttaaagaaattcaagagcattcaaatttatgttcaagtcgagtccattaataagtatacctaaaactcataaaatcacacaaccacctaggttttaatggagactataattaggtctatccgagctcaagca

SEQ ID NO: 11844 - DNA, 654 bp, Gossypium hirsutum
tgtatagaggtgagctttcggtcgaattgagtaaaaaaaatttgagttaatataaaggttttcttgacatttctctgtcttgcttaagttgttcccctatttacatcctaaattattatgataaatctgaaaatgacacatattttgatctaatatataatgttatgttgaattttgattttgtgcaattatatatatcaaattttattttgcttcaaatatatataaaaaaactatgattttgattcaattatatacatttataaaaataaattaatctaattattttcatatttaataaatataataattcgtgtatgtcacaagtaaacttgaaatagtgtcacaccagtaatggtgctagcagttgagaagattgaactaaaataaaaacttcatgatatagttaaacaaaattaaagttcatgtactatattacacgttaaaccaaaatttatatataattctaaattcttatatttatccctaaattactagtttgaactttgaactattgtggaattcaatagatttgtttggaccataatttgtatgggtaaagccaagccgaataatttcgaaataattcaagataggtttggtgaaaatagcaaactattatttcaagttggatcaaacctgacctaagataac

SEQ ID NO: 11845 - DNA, 510 bp, Gossypium hirsutum
cttccaggctcacttgtttgtttaaaatttttcaagtaatcttctaacttaagaccagacggcgtgcgggagcttggattgttttctcagtcaattaaagtatggctattttcataaatatctattatggacttttaggactgtaaactgttggacttcgatttggtttttgttttattcgtcggtaaacgatattttcgaatgtgatactgcaaaatcacacgagttaacaaaatggattttgattttcaaaactaaaactttgaaaattttccgctgtaaaattaagtaatttcttaagagttttttttgtaaatgaataaatagcttttaacgaatgtttgccatatttatattttctaaacactcactaaaattagaagttttcaaacaagattaagttaagagttattctgtaaaataattaagacttgtgtgaaatttccaaaataacatgcaagtgttttgttaaaaaatttattttcggaatactcggtttctaaagttagg

SEQ ID NO: 11846 - DNA, 624 bp, Gossypium hirsutum
cagtgcacatgtgattaaaaagcatagaaatacctccataaaaatattaaataccatatcacttatttataaaagttagttatacaagtaaccattttatattttttttaatattaaaattttaataatattattatactttaacaatcaacatcatttttaaaaaatgaattattaataaaaagctcagctaactctctttaaactaagttcaattactatatattgttttactcaaaatattaaatattcattagatattgcatcacccggtgaaacttaaaaaaatgtttgaaaattattttaaactaaataataattattttggacttcggtatcaaaacaagaagagttatgctcgaatcaggctccaagacctctctttcaaatatatatttaaccaaattacaaatgaattcacccacttctattgaaaattttaagcattaagactattgaaaaatataaaattggcaattaggtattaaagggagtgcccaccaaatttgtgtaaagatcattttacttgggaatacaaatattggtaattgatttggatcaaatttccccaaaataatcctttagataatggattttggatcggatcattctactgataagctg

SEQ ID NO: 11847 - DNA, 399 bp, Gossypium hirsutum
ccctcccacaaatggcagtagcatgttgaagaaaaggaacaagagccaaaaggtgtttgtaaaaactcctaaaccggtcaaagaaattgactcttctaaagccccatctgatatgaacatattgctaagttggttgttgaaggccccaatcccttagtgctacttcgggtaaggttttaaacattaaaaaccatgttgacgttagctactgttaaggtaggagattgtgaacagaggcctttgataaaattatggaacctatgcactcaaccaactttaaaacctctgccaaggggaaggctttgtattggaaagctttagaaaagaaaaaaatcgatgacctcagaacctgtcccatctgataacgtgattaatcctttacctcttcctcctcattta

SEQ ID NO: 11848 - DNA, 421 bp, Gossypium hirsutum
atcttgatctgtctaggggataacaaacgtcaaggggcttggcttggttcaccctctctggtacatcctaggacattagagtgagatgtcggccgttccactcgcgagtaaagaatctttaccactactacctactaacttctcgcctaatccctcaggaaagttgaccgactaaggcctcttcaaagccggacggaggatcactttttctttgaacgaatcttgctctcttatctgcttcttcttttgttgacaattcttctgttgtcgtagagggaagaactggtctttcagggccccgacgggtcaatgctttggattcagcccttcttatggacttcccctgtctcagttcatgtctaactggcacctagggggaacccggcctttcatcatttcattccttaccatctttcggaag

SEQ ID NO: 11849 - DNA, 633 bp, Gossypium hirsutum
tccgacggctttccgtcaagtgcctcggcgattaatccgaacggcttgaactcgccgagtacggagagttggcgaacgccaaccggcatttttgaggagtgagtcgactcgaagagaggttttgggagtcaaaagagtagaaattgaaatgagcttgcaattggaaatgcgagttctgtggtttataattttatctcccgctcttttttgttaattttttttttattttagcaccaaaaaagtaaaaccctagaaggtttttctgtttggatacagacataataatgctgtccttcgataggatgagaacaacccctttagggtaagctacatttcaaaaaaaatttgtaattcttaatattttaaaatatatattaaaagttaattttataataatggaaaaagatgaaaattattattttcaatttttgaatgtttttgtttcattgataatttcttttaacttttttaacttttcaggtaaaaagttaaagaaataaaaataaaaaattaaacaatatataaatcgaatagtaaatgatcatttaccaaaagttccatatatttttaaggtcaaattctgtttaacaaacagttaaaacactaggttctagctaaaagtccagtaaaaac

SEQ ID NO: 11850 - DNA, 532 bp, Gossypium hirsutum
tattattattttaaaattaaaaatcatataatatatataatctaaaaaaattttaaagatatataaattatttgatagtcaaaataagcctggacaaatgaatgtttaggtttaaatgaactcgacattaatttgtctaagttcattccaaatgaattttttttaagtaattatatatatttaatttttataaaaggtttgattgtacaaatattgaagtataaaaaatcaaatacagacagattaaaatttcagaaaacctaaaaaaaataaaatataggaaataataaaaaatagtaacaatcaaaaagattttcttgcatatttctcatgataattgattaaagttaaaaatggtttcaactaaatcataaaaattcaaaaaagataaattttgtttgaaattgggagtaaaccccacaattattgaaacaagaagacaaaaaacaaaacattcaaacaaaaagaattgaatcatttatttagtgcataaaaaaccgagtgagttgaaagtcgaagagatccaaccaaa

SEQ ID NO: 11851 - DNA, 535 bp, Gossypium hirsutum
ggagggatcttcttcttctctatttcttgaccttagaatccctccccttattttcacatccgtcgatcatatgaattaacagatatcattaatttttgatattaaattattaacttaaaaattaaaaaattaaaaatttatatataacaaattaataaaaataaaaatatataactttattattaatttaagtttaaataacccttatctttttcttcattaaaaaaaaccttattaattgttccatcaaatttagttattatttgatatattaaaaatttaaagacaaatttaaaaaaaaatcatctaattaaattgtaattttacataatagagaaatataatgaactgataaatttgattagaaaaatgatttaagatgaaatatgagtaaggaacgacttaagatgaatttcaattgatttaaatgtgttgacttgatcagtgcatagcgaagatgcgtgtgaaaaggagagtaggtaagaggctggtgaaatggggaagcattatgaagaaaagaataaaaaaatctaaa

SEQ ID NO: 11852 - DNA, 688 bp, Gossypium hirsutum
gtgtatccagacaagttggtgcttcttatatggggttcaggacatgatccagtatcaaatatcccggattttctctatcaatttattttggagagaaatttagggctaattaagtaattcaatgttctttcatataagtaaagaaatttcatgaattacaacatctagcaatcacttgtgaatcttcaaataaagcataatttgattagtttccttaaaaacaaatcatttctttgactttttatcatctgtaaaatgtctacttcctataatataattaaaggatatcaattactacgttaattgagatttatgaaataaaatccattaaaagcacacaaatcattgagatttggtatactcctttctggtatctgtactcattttttgccattcatgtgaatttgacaaaattgccaaattttagcctaattctacttgtttgctgaacttcaacagatttgaacacattggttttgaaatgtccaaacatgacttataatctgctataccataatcggttttaacttgtacgagttaaaaaagataattgattcaagacttagctggaatggttttatcgtgtttcaattatatgaatccattttactttggaattcagttctaatacatatgaaatcaaattttatattaaatcaattatataatctagccctcggaattgtcc

SEQ ID NO: 11853 - DNA, 422 bp, Gossypium hirsutum
cattctctcattctctcttctcctctctcacttttctctccatttttttcatcccatttccctttttgttcaagtgccgatttcttctcttgggaaagaggctctcatcagccattttgaagcaccaattaggtgttcatgcgccactttgaaagctgagggcaatgaagaacgaagaacggagaacggagcaactagtcaagccacggataaacaccggatttgcttcttattccctatctctttaatttttgttgttgttttgacgaacatgtttatgaatatttatgctattgaaatggttattttaataaatttagcttaaattaagtttgtgttggattgattatattttgcttgcttgaattattaaaatgatgtttatgctgttataggcctcggtaattgcttgattaagtaaa

SEQ ID NO: 11854 - DNA, 558 bp, Gossypium hirsutum
atgatcagcgtgaaagctccagaaaagccatttttttcactagggtaacgaagggcatggtggttcaagtaaagcaaacaacaagaagattaacaagttgaaagaagaaattggggcttaaaaaaaatggtttttgaagcctaagggaagcacatataattgagagaagaatacacactattggccatgtgaaagaagaaattaaagtaacaactcatcaagtaaaggtaaaagcatcatggagactcttgtacttgagtcagattgcatttagccccttaaaaaatgagcaaattagtccctgtaagagcaaactgatcctactattaaaaactggtcactatatgtcagcatgaggtgcgtgtggcatgccatgtgtaattgtctagttattccatcaactacgccaatttttaatagtagaaatggatgaaacttttaacagaaatgaccaatttactctttaatctaatatacagggactaatttaccccttttttttgagtaaaatggtcaaaatgcaatttgactcctaaagtaaagactttcgtggaaaaa

SEQ ID NO: 11855 - DNA, 560 bp, Gossypium hirsutum
ttacggcggcaatagattttggagatcttttcatccttaattgtttggaaaagataattaaaaaaaaagaagaagaagattaaaataataaacaatttttaaaccctatgattaaacaatcttaaatctttcccccttttttaccatgaattgggaagaggataacccatgatttattattaaatcgtattgcttccaccagagggaaacttccattttggatatttcaaattttctataactatatttaaagaaaaaaaaatcaagcaaatatttcaagggtcggctatccgtttgatttaatcgatcgagtttgaatataaaatttataaataatgaattgaattatcttttatgatagtccttgtaaatttaattcataggcggaccttgatggtgatttattgaattttacctcttttaaatttccataaaatttaaatttttaaatattcttattaatcttataaaaattttaaaaaagaataattacaccctaaatttaaaaaaaaattcttattaaagttccaaaatctagtttcaaaatccaccattcaaga

SEQ ID NO: 11856 - DNA, 689 bp, Gossypium hirsutum
gagcgataaacaagacagtcgcgctcgacggcgtcgtcgggggagagattgggcagatcgctgttgttgatggcagcctggtacgaacccaaatagaaattgttcctcaaattgaacaagtgatctgggcttccagccattttcttccgtctcctctgctaagatattctatcgaccgatagatctgaaacaattatctctattcactaacaccaaacaatacaaatcagatttgtttcacccccgagtccaatttctattgtttccaattttcacacttaaacgtcaccgtttaacatttacaatttaaataaagggtaaatttcgcagttagtcactaaaggattggtaagtttttgttttagtcacttgactaaaaaagttataatttgatcactaaactatttaaaaattttcatttaaattattgagtagttaaaattaatgatatatggttttctttattcttactgtttgcaccaatcgaaaactctctttccccttcttttttacagtttttttttatgaaatagctttagacgtcacaaatttacaaactaaaatttaaatagctttttcctctgatttctaacattgaccgacaaatcaaattgtatttgaggtatgttcttctactcgttaattgatattaatccaccatacaatttgtaaatgtcctttgggagctt

SEQ ID NO: 11857 - DNA, 375 bp, Gossypium hirsutum
cacaagacttcatcctccctgaggacttcggcacgagcggcctctttcaagtcggccaccgctactgaaagcaatagcgcggcggtggctctggcggggagtttgtacgagatactgagggtggagagaacggcgtcgttgaacgagatcaagacggcgtatcgaagcctggccaaggtttaccatcccgacgccaacagatcctcatcggacggccgcgatttcatcgagattcgtaacgcttacgcgacattgtctgatccgacggccagagccgtgtacgatatgtcgttgggggtacgtgcgagacggattaggactcgggtgtacccgatccgaagatgggaaaccgatcagtgctggtagaccaaaaaa

SEQ ID NO: 11858 - DNA, 217 bp, Gossypium hirsutum
  misc_feature (50)..(57): n is a, c, g, or t
atttttgtttccttcctctttttctcatcccattgattttattctctttnnnnnnnnccttccacctcttcaaatggcaggtaaaaagtttccatttttccttcattttccctcctaatttaacacaaaagctccccttcttttggttaattacatacctcttgattaataattttttatgggaatttgatgccatcttgttatttgagtaaatatg

SEQ ID NO: 11859 - DNA, 650 bp, Gossypium hirsutum
cgtccagctagcacaggagtcagagatcgtagaagatccgcccgcactatcaatactcttggtatctgaactcaacattttgaaatatggcatgtatagcagacttagttattttgttacgtgtcagaattgtctaggttcaaattactacttatagtatcaaactaatcattttttacgaagcctttgaagttggtttgtattgttaatggcatatgttataatgatcaaactgcacgccatattttgttgggctttgtttaatagtatatactataatttgttaatacctcgtaccctgttccggcgacggatacgggtaaggggtgttacaaagtcagtcaagaaggaagggttattgtaaggctagtgtagaaggcaacaaagttgaatgatttcagagtgtttgaaaatgtgagtaaatggactagtgagagaatccaccaaactatgaagaggagaatagctagtaatagtactagaggatgtaggtaaagttattagtaagaaaatccgccaaattgtgacggaaatgggtatctttcatttttttagttcgcggtagttaaacgagtaatataacatcgagtatgataggtgaggcaacagaataagacctaagctaattgttgggcagtaagcctccagtg

SEQ ID NO: 11860 - DNA, 650 bp, Gossypium hirsutum
ccactaaccacatccaactacctcagaattccaactccatcaaaactctatcatacaaccgagcaaaaattacatcgacgttcgcacagggattctaacaaaggacctctaacacactaactcacttaccacttcaaccagaaggctcattcggatttggattaacagacaatcttatataagcacactcaactggggtaaggcttggatctaaaataacaaaatttgtaaaagggagacttgaacccaagacctcatacacacacccaaaacacttaaccactgaagcagatacacacttatgtcaaaattcatagaaacataaataaattaagcggagcgttacacaattggaacaaagataaatatatgtaatatgattattaattcatgatgtgttggcacaataagagcccttggatttttataggaaatgagatgaaatataagtcattggattaacatcattatgatgggatattatattattattttaatagttttatattagataactattaaggaaatataaagaaatgtcttcatatttccatacatcacatgtctacgcaaagggaaggaaaaggaaactttcatttttgtttagtttggtcctttatcacctaattccatctttctaacccaagatc

SEQ ID NO: 11861 - DNA, 490 bp, Gossypium hirsutum
  misc_feature (8)..(8): n is a, c, g, or t
  misc_feature (10)..(11): n is a, c, g, or t
ttcttgcngnnttcatgccttgccgtccagcccaaagagaccttgggtctatttgccttttaaaccctctttcttttatcatttaagctatttaatcatttctcacaattttgcatttgatacaatttagtcctttttgttcaattaactatcagaactttaaaatttcttgacgaaactttaatactaacttattaacgctccataaatatttataaaaatatttatggctcgatttaaaattcccgaggtcttaatacctcgttttttgattctaattattttaatatttatttttagtacgctattcactattttaaattttttttccctaacttcacatttaacttatactcactaaattaataatatttcctactcatttgtagaatttagtgatctcaaatcactgttctgacaccactgaaaattaggctgttacaatcaaagtttattttgaccgtaccttggtcgggcttcctccaaccat

SEQ ID NO: 11862 - DNA, 661 bp, Gossypium hirsutum
ctgaccagtcgcacacacctagttttgtgtcatgtaacaccaagctatggccgctcattttaatatgtatgctactaatcttaccattcgctttatgaatctccatatggttgaatctatctacttctgcaagctaatctataaaacctttaatattcaaattaccataaaaatgaggaagatctatctttatacgaaattcatcatgttgagatcttcattttcttcatcctgtaatctttgacattggcttgttgtcaatgttgaaaaattcaatttgaaaacagtgtttattaggcacattgaaagtttaaaattttctttaattcgagtgatggtcactaaactaactataattacgacaaagacaagcgcacctattgaacaatagtatagctatggtgagtagggaatatcgtatccacgaagactaaaagtactagtaattatcgcttttctattatttagccgataaattgaagtgattgtttttaatctaaatttactaatctaatttaactacgaacgcaacagagaataaaatgggaaaataattgaaaacaaccaattagaaagacaatacccaggaaagaatccacctagactttacatatgattctgaatctgaattaaacgatttattcacttgtgtcttgatacg

SEQ ID NO: 11863 - DNA, 672 bp, Gossypium hirsutum
taggatccatcatcgttccaagaaaataaagtttaatccatgttgatttgagaaagcattataagaagaaatccaaaacaaacttacattgagaagaagtaaaaagaaataatctagagagaaataattatcgaattagtgtcgagcatttcagatctcttttttcttctcatctctgcaagtttgaagctacccttagtgtgtgagagttgtttcttagctctaagttgatttctcctcattttttttccctattttctcttaaatcatgtcacccttatttttagggttttaatcgttctactccaccgaatgcataattgcggtggagcgaactacttcttgtttgaaaattctgaattgaagattatgctccactatactgaaatctggtggaccaaaaaaattctcttcactaccttttactctctgctccaagccttcccttctttcatcttgaaacctataatgtagagaggaaaataacaagtaaatccaagctaactctagaaatgataaaaattaaataaaatataattaagctgaaaaatatataaaatgtaataaaactaacctaaatgctaagattatctactaaaatgctataaaaactaaatcaacatatctctaaatatgagagttattagcaatacgtgcaaacctctcacagaa

SEQ ID NO: 11864 - DNA, 645 bp, Gossypium hirsutum
ataaaggaagtccaaaagcttaaaattaagtcctccatgatttttaattcatcatcttgagctcccaaggtgccttgtcgattatttctttcaaggtgactgtcgagtttaattttcaccttttgtgcaaaattgccaaaaataacccaaattatgaagaattattataaaaataaaaaaaattcaaaattttttatacattaagatgaaattaattattttataataaaattataaaatttgacaaaaattacttaaacactgcatgaattagtgctcaaaaggtgctgaaaaagtgcatatattttagtgttaccacacccccaaacttaattcattgcttgtccagattaatgcacaaattgtaaaagaaaattaagaaaatcacctttgaaaattttcttcaaaaatcatttcccacaattatgagtttagtgtaactatgctcaagaacaagaattttaaaattatgcaactcaaatatacattttgttcaaattattctcaattattatcatgatataaagaatagaataaatgatgtctcaataaggatatggtaatttcttacatattaacttttaatcatcattcaagactaaattgcaatccctaattttaattacaccttcataggcctgaatc

SEQ ID NO: 11865 - DNA, 585 bp, Gossypium hirsutum
  misc_feature (548)..(552): n is a, c, g, or t
  misc_feature (564)..(566): n is a, c, g, or t
  misc_feature (569)..(575): n is a, c, g, or t
tatgtttgacttgatattgacggagtgttgctctttacatgtttttaattagtgatcatatacatacatagtgactaaaacgtaatctttcaaacataagcgattaaaatgcaacttaagacaaataaaaataactatttcaatagtttgccctaatattttcatattttcttattttattatagcatagatagtgatataatagagttggagattttgacatttaacagctctaattaatataagaatggtacaagttgaggagagaagggaattgaattttgatgcgaaagttggctcgtgaagaaatggaacatcttcccatgcaaatatatacatatatatatatacactctcttagttgtcaaactagttactattattatcgttattaattattcctctggattttgttcctcgaaattctcaaatttctttttaaacaataatttggtattacaaaaatgctcttaaacagaccaaaacccacgcatgcatgcatgttgatcttctcaataatgtaataaaaaaaaaaaaacacagtttcnnnnncccggctctcgnnnggnnnnnnntttggtttat

SEQ ID NO: 11866 - DNA, 535 bp, Gossypium hirsutum
aataacgaagagcttagcggagagtgaaaatgaagaagacgagaaagaagaaaaaaagatagtatagataacaacaatagaataatcctttttcaatcttattcaataataaaaacttcgttcattttaactcaacctatactcaatctcagtgaaagactaagaaaacatgtctatcaccacaacccatttactcaaatggaacaagaaatcaacaaaaacatataactaaatcaaaagataatttgagggacgttcgttattgcatcctttacctttcctagaactgccacttctcagcagttaaccaatttatcatctaatgcattcaaaagtcgatagtgtaacacgaatagcataaacccaatcatcaacattgtctagttttaatcgaataagagtaataaaatcatcgggtcaatcttgagtacccaagtaaacagagagttatgttcaattttattgagaacaataaaaaaatttgttgtgttaaaaagcaggcgatagtcagactagaggttgataccaccgcgta

SEQ ID NO: 11867 - DNA, 595 bp, Gossypium hirsutum
tgcaacagcactcactgctctagctaagaaaattttgtttgagcaatttgaatctaaactcattacaattcaatttgatcataaaaatcaacaattcaaacctaacctgaaatgatttgaattcaaagtgattatgatgttattataaaattcatatgcttgaattacatcaagttcgaatgtatgaaagttattatagtgaatcttgttgacgaagaagggtgaaactttaaataacaaccatataaacattgtaatgaccaagtttcaagacatctttccagggtcggattttgatcttcacctctcgtacactttcttacatcaaaggtattgtactcattgaacattcgacaacccttcaagactttatcacccaatgatgcacctccactgaatcgaacaaaagatctctgctttaagttatttctttagcgtagcgataacgaccaaatatcaatatttataatgacacacggtgagtgaagcaaaaggtcggacactgggtgaatttggattgaaaagaaaatttaaggaaacatgttgcaatgattgaatatgacaatgggaatacatgttaggcaaaacataatgt

SEQ ID NO: 11868 - DNA, 486 bp, Gossypium hirsutum
ttggtttctggtacctaaattgctgcattgttttgccaaaggagttatcgaagactcacttttacctgaatggatttgtcgaatcttgacacctcagcaagcttccatggttagagaatgcttatctcgtaataagtggaagcttcttggtgctaggagcttctgtgttctaccctttgattctaggtttcgatttctcttcctattggaggatgatgggaactccctttcctctacatcataagaccaaccatgtttcgttttctaactccaaaagtaggcaggcaattcttcagcacaagggctgtttccatgttatctattgccttgtaaattgatctcattgtacagtagttatgcatgggaaaaaattcaagccaaggttccttttttttctatatcagacctaaattttcttcggaatgcccattcaaatataaacgtactacgtaaaataagaacagaaaaacaagagcaagagaccaa

SEQ ID NO: 11869 - DNA, 591 bp, Gossypium hirsutum
cggtatgtttttattaaattgttatgcatttagaattataattttaattatgttttgtaacatcccgattttggccaagtcagaacagtggtttcggaaccataaattcgaggtcggagaaattatttttgatattattttatgtgttatagcatgattttatagatatttgaaaagtttggtgaattaattttagcagttgcatgcttaattttgaaaaagggattaaatctcataaagagtgaaaattatgttctactagtcaaaagtattatgtagctaaagaaattagatgtaaaggtccttattgagtaaatagaccactaataacgagtggtggatgtacatggagacaaaaaaattaaaatggtcaaagttggtggctttaggtgacttaataggtagaataatagtaaaagaaaaagaaaagctatcatctttttacttctctttcttctccaccgattcttacccaaggaaatggccatggaagcttgaaaatttcagcaacttctaaccctcagaagtaagtgattttgatggtcatttttgatgatttttgtatttttggaacccttgtagcttatctaa

SEQ ID NO: 11870 - DNA, 212 bp, Gossypium hirsutum
gttataaatgtttgatgaaagttaatgtagaagcccaaattgcccgggcccgattatatcaaaacccaaccaaacctctaaacccactaaaacccttaacctatgacccatttacatctacccaaactcattacaaaacccaaatattaaacccaattcaaaagcccattaagccccccacaaaaaaaatcctaaccaaaaaaaaaaaaaaa

SEQ ID NO: 11871 - DNA, 619 bp, Gossypium hirsutum
tgctccttctttcctccaacactcgccaggatggcgcttcccacaatcactgcacaactaaatctcagtcactacctctggtgtctcggccctcaagggcctattaaacctctcccgtttcttagggcgctgacaggaccaaagggacccgaatccctcttaactttatcttgatccttctcatgatcacgatgctcgtgctcagtgtgcttcacttcttccattattttcgctttgtcaaccagaaccacgaaaactcaccctctctagggagctgtcagaactcgcaggtcatatctcaatcccttttcaaattgtacacacttatcgtagtcagaagctactaaagtccgtgcatatctacacaatcgcagaaactcaacttcatatccaggcacagaccggtcgcccggaactagactcataaactctcttcgatgatcctcgatagaactcgcccccacaaatttaccctggaaggcattcttgaaatagtcccagtttacttcttcaggctgagcaccttgctcaatggttaaccactattgataagctttgtcctggagtaggaacacagcacccctcaatttctaagtagtactgtcaaggtctgtcatat

SEQ ID NO: 11872 - DNA, 600 bp, Gossypium hirsutum
tactcgttctgaatgttgttggtgaacaagtaagtccttgaacacttggaatgatatgttccgatgtgtcaaaaatgaaaagaaaagaaaagaaacttcttataaattctaggagcaaccttttcgaaagatgattgattctctttatgcatcttgaatacaatgtaaaacaaattaatccattcgctattgcacttcaccatcttgcttactttgttcagaaaacaaagcccacacaacacagtgttcgtggattgagaggcttgggattgacaccaaatatcttagcttgtcgcagtacaatggtttgatgtgcttttatcactctcatcctcttacacagaaaaagcatggatgctctgttctgaatataggttcctttttacaggcacttgatgacaatgtgaaggagaaactctctcaattttgccatgtctcggtatggaaattagtggatgaaggttttatttaggtatcatgctggatgttcatttatgtggttgaaaagatttaactaactgaaaatactcttgtaggcagaacatattatcactctttatgacgttcccaacatctggcacatccctttgctactaagag

SEQ ID NO: 11873 - DNA, 651 bp, Gossypium hirsutum
ttccttcgttaataatcagcttcccataattgaactaaaccaaaaataatctaatattaatacttacacattcgaccaccatccataatggccttaggaatcttacctttgtcgcgattgatgactaggtctagccactccggagatccaagctactccaagtcgacactacaccttgctgctcctccactaaataaaccacaaaaatattaaaagaagaccccataaggcctatacccatattcagccacctccttaaactagaggggtttcggcttttggccaaaagttactctaggaattgtttagagttcgagtacttaccacagtcttactcctcttgaattcggatgcctaaaaggtaaaggaattgaacgccaacaattgaaaaggaaggaaaaggttactggtcacaaagaatcggcaccccctatcttcattgctttcggcttttgcggtatttcggcagaagtagagattaaggaaagaaataataaatgagtagaggaaagtaatgggctggtttttgaataagaaaagggagaaaagatgagagggaagatggtagattcggctagggaagaagaaagaagagaaaaactaaaacaaaagagaaaacggcacagctaagaccctaatggcgaaattgct

SEQ ID NO: 11874 - DNA, 592 bp, Gossypium hirsutum
ccgagcctattaaacttgaagtacatagaaagaagtccattacttaccacaacgtcgccgtgaagcccaatcttctcaaccaaacaatgaagtagctcaccttctttaacattaaccaaacctccacatgcaggcaaaacactcgaaacggtaaaagagtccggcataattccctccattcttgacatattataaaattccaatgcttctacccaatacccattagcactataccctgaaatcaaactattccaagacacaacatccctttcaggcattccatcaaacatctttaaagcttcgtccatacaaccaaatctcgcgtacatatcaatcaaagcattcccaatatacaaatctgcacctaaacccatcttcaaaacattctcatgaacaagttgtcccatctcaatatcaaccaaagccgcacacgagttgataactgaaggaaaagtacatttatcgggtaaaacatccaattttcgcattttgccataaaaccctagtgctttagtgaataacccattgtgggtaagagctctaatgattgaattccattggtaaacattagctgtaggtgaaacttggtgga

SEQ ID NO: 11875 - DNA, 663 bp, Gossypium hirsutum
agaaacattattcgtggtgcagtggagtcaatatatatcaacgttattgcttccaacattcgagaattgactgggacactcattagccaattcagatttaacaaaaaattaaaaaaagtcacttacctactgtaaaaaaacaaaagaagaagaagaagaagaagaagaataaaccatttgccgtttaatatgttgtatatgttgctacgtttttcttatttgtaaaattttttaggtattgaccgcagagttttgttgaatataaagtgatgtatttggtatcatgatttgtgagttaaaacatccgccaaaaggttttttttcaattatgatttatatatttaaattaaaatttacaaataatttatattttatatatcacaatattaacaataagtttttataaattattttattttatttaaaaaaataggctttcacccccaatacacctatttaaaatatcacacacccctaatacacctatttaaaatatcacacgggcacgaccgacagatcaatctcatgaccttggcaatatagtgaacactagaggtgctcatgagttagattgagttaggcttaagcatgatattaacatactttatgcttgcccaagctttgcccgacccaaaatattagcttaagattttactcaaattc

SEQ ID NO: 11876 - DNA, 671 bp, Gossypium hirsutum
ttattacatagcctagccacacgaccgtgtaacccctccacatggtccagggcttcccacacggtccgtcacacaattatgtgtcctctgattctcaaatttaataatttttcctaaaattttatgttttatgcaatatagtccttgaatgtttcccgaactatttttagtgtttaattgtatacaattgagtcttgataatataattaatgttagaatccaatgtctgaatgattgaattagtattatacctatacgcataatatgtgaacaatatatataaatctattgtattgaaatttgtgaatgtacttacaacatgccttatgataccattaaatcaaaaccattataagtatgtcatatgctattataatgattagttaggggtatgttatagctgccttaccggtctatcataagcatattattcacttttattttgatctgttataaatatgccatattgtattgcatggggcaggaagatttgaagaggaagttctaacagattcttaatttgcaaatctggtggtttatccacatacatttggtagctttcatatacaattatgttgtgaactcacaaccctccaacactggtggtttgcccacccatgatctgccaacttttatctgcaattatattgtgtattcacatcgatctggca

SEQ ID NO: 11877 - DNA, 518 bp, Gossypium hirsutum
ttcttccacttgctgtccctttacttactttccttggggatttaaaccgcatcttccattattattcttatttagggtaagcattttatcatttaatttaattttttcaaataaaatttaaatttattcaaattaaataaaaaattatctatatttagagaaaaaaaagataattaatatgataatttaattttataatttatttgtttaaatctctaaaattaatattttaaaatattttattaattttttatatacatttactaaattttacatttttaaaactatcataaactttaaaaatatttatattaatttataattcgagttatttgaattataaaattaatttaaattttaataaatagtataattttaaattaaaatttaaaaaaataattttattaaaaagggaaaggaaaatggtcccatcccatcattatctgcaaaagctcagagcttgaaggaaaacgaaatgacttgttctcagagtctacctttgtgggtccaatctgata

SEQ ID NO: 11878 - DNA, 562 bp, Gossypium hirsutum
  misc_feature (68)..(68): n is a, c, g, or t
  misc_feature (231)..(231): n is a, c, g, or t
  misc_feature (269)..(269): n is a, c, g, or t
  misc_feature (273)..(273): n is a, c, g, or t
  misc_feature (339)..(339): n is a, c, g, or t
  misc_feature (401)..(402): n is a, c, g, or t
  misc_feature (479)..(479): n is a, c, g, or t
  misc_feature (496)..(496): n is a, c, g, or t
  misc_feature (503)..(503): n is a, c, g, or t
  misc_feature (507)..(509): n is a, c, g, or t
  misc_feature (515)..(526): n is a, c, g, or t
tttttatgttcttcttatttttgaaatctcggtagtttactctctctatttctacccatatttcatgntaggattcatgtttagaaatttacccatgcatgagttacttgtattttgatggtttatggaggaatatgaaagttggatgtgtgttaaacatcttttcctaggtgattttcatgaaaaacccttaaaaggacctttttgcaaaaggtgtaaaatgtgtggtanaaatgagaaataataaaaaaaatgtgggctaccataanaggnaaaaatattaggctaggcttgggtaaggtagaaattgcatgcatttcattatacgagcctagggantaaatcgtaaaaatgtgaaaagttaggggaaaaacagtcatttggaccgggggtgaaatttnnacttgaaaagtataatgtgaggtgttaataatttaattttatttttatagaccccgaggaacaaactttagaggttnatcgaggaaaacgaaangtttcgnaatnnncgacannnnnnnnnnnngacaaataccgggtaagttcggataacttaaagtaa

SEQ ID NO: 11879 - DNA, 598 bp, Gossypium hirsutum
aaaatttatcatctatttacacttaattaagtttagaatttataaaagtatatagaattccaatttaattataaaaacaatgatttattattttatccactagtaaaactacacaatcaaatctgaatttatgtcaggagtctttaagattactaaatttatttgtcttgagtttgttgtatgggcagaatagttattcatttataatatatatttataagaataatttttaaaattatatataaactttgatttaatatgaattttaattttatgtaattatacatatgaaattttaattatggttcaaatgtagatataatattttaatttttttcaattattaacatttgaaaaaaaatacatcaatttattttatattaaataaatgtaattatttgtgtatagaatatataaacataaaataatgatacatcaataattatattaataacttgcgagaattagatcaaatcaaaatttaatgtataaaataatacaaaaccaaattttaaatataaaattacacattaaattaaaatttttaatttcttaaaaagaagtatctcttattaaccgctcgttgtagtttcactca

SEQ ID NO: 11880 - DNA, 546 bp, Gossypium hirsutum
cttctcattcgctttatgtgccttctctcttttcaatttgtaaatacattttatgagtatatttagtgttttcacaagttgtgatggacaaatgacggtgcttatcgttgttgaaactccatcagctactagcaatttttgttggaaagtagatggctctttgtcagcttcttaatctatttctattttgagagtatttcagaataataaatgattttacgagttagtttggacccgtagttgttgtaagttttatatgtttttttattgttttccattgtttaataggtctccattgtttaataggtctttacttgtagaagtttttgtctactcttgtaacatatttttagtcttacttatgtatgtagtcttgcttttgcaagtgattttagggatggttttgtcgtcatcctctccaatttggtgggtactcgattctttttccgatttttgcctgacgctttggaccatccaaggctgtttccttattgtattaagggcttgtaattactctaaataagtgatgcttgagttgtgattgag

SEQ ID NO: 11881 - DNA, 565 bp, Gossypium hirsutum
gacaaatcaacactttgttcaacccaatttgctgtattctgtttcttgctttgggggcatcatttttttcttccaacgtatctgttaattttgtaattcatttttttaggaaatgctaaaataacttaattaaatatttcgattatttcagttaataattaaatcataactacatctttcattaaaaaaacattttgaaaaatttaattacttattatttaaaaaaatcaattaactaaattgattgaattaataatatatgtttacgtgtttataaaaagttatttatgtttataaattctttcacattaaatttttattatgataaaattttgatttaatagtaaaaatacatattagaaattttaaaattttaaagataaatctcaccatgtatgaatttattataatatagcatttttcatgttgtgaatgactaaatacataaagaatcattagtatgttttatgggattcatgtactcatgtagtacatagtattatttatcctctcctgtttatgtaatctatgtattatatggtacattgaattattgattcaatgg

SEQ ID NO: 11882 - DNA, 653 bp, Gossypium hirsutum
ttcatgtgtaaaccatttaagtgtaaaatattcatcgattttattactttccaatttgtctttttataaatttctcactttatctttaagcaaagccataggtaaatggccatgtttactttccaatttcttatttacttgtgcccattttttctatttttttctgattttctttttctgaattttttttttaaatttaagcttttaaatagtgaataatttgtttaaccagttcgatcatcgatccaatttgaaaactcaataaactatcacgtggaaagagattttatcaaacatcgatttccaaagtacagatttcataaaaatagattatacccaaactgaacatacttgtaattgtatctaaaaagattaaattttagcatgattggaaccattagcaactaaaagaaagtgaagttcatatatgcttaaagcgcgtttttttcgtgatgcgaaaattaaatagaaggtgagtctctggatataatcattatttaagggtttgttcagtgtttgaagctaagctccaagggattttagatggcttggctctcctacaaaagcggggcttctaaattgataatttagaagtagctaaaaccatttaacatagtcagttggcaaatttgaattcaaccttgcctatgagg

SEQ ID NO: 11883 - DNA, 613 bp, Gossypium hirsutum
  misc_feature (593)..(593): n is a, c, g, or t
  misc_feature (606)..(609): n is a, c, g, or t
tcattaacgaaattttcatgcacaacagaatattataagctgccttcaaccgctcccatgctcaaggcccaaaacttctaggcccaaattcagggtgttacaactctacctcccttaaagaaatttcgtccccgaaatttccatctaacagggtagtcgtgtaacatctaccccactacgctaccgctgcgcactctgatcctactatcactatcacacttcaactagaacttgaaacatctcatacatacaacacttattcactgaagcagacacatatttatcacacatatatacaatttctatatccaaacatcacatccacataaaataaataccaaatttaaattcagaccaatatctaaggaatccatagtatttcaatttctaaacagacaaaagtattcagaagacttacggattcggcgccggagcctcggtgtgccacactttttaagagaaatacttcaaacagaccacgtggttgaaaataattttctgaaattcaacctttgaaaacccaatccacagccgagttgttgcaacccaggctctgataccactaaatgtaaccccccaaacccggcctgaangtttggctcgaannnngggg

SEQ ID NO: 11884 - DNA, 340 bp, Gossypium hirsutum
  misc_feature (302)..(303): n is a, c, g, or t
ttagtaacttctctaatcttgtatttcagtatctcagctcttatcgcgttcaattccgattgcaaattctgcatttgttgctgcaaagttacgatggcacccatgcacccgtataccggatctcttagtctcaagtttgcctcataaaccagactgtttgccgcatcggctctttggctctctggcacctcctgcaaatattctatgtatataagaaagggaacttggggaaagcaaaaaaaaaagaaaaggagagagttggggtgttaccattaacatcttggagacgttgcttgcaccannaaactttgtgaacagcagcaaatttgtggggttcatg

SEQ ID NO: 11885 - DNA, 700 bp, Gossypium hirsutum
cgacctctccactgccaatctctttcagtagagtggatcgaacatcgaatgaggggcctttgaacccattattttcaaacggatgctttccgttttttctttgtaaataataatgaaatcgaaagaagaaacccaataagaacaacccagagaaagcaaggtatttcaccgtatcaaggcaaagtaatgatgataatcggctaatcgccgaaaaagaaaatttctttttggagaataaaaatggaaataaaatgcgtgaacaaggaagcaaccaattcataaccttttgttttgtttgtggactagaaggcccacgttggggtctcatttcatcccagcccaccattgattccttcgaaaacgctgctttcgtccttgtcgcttctcgtcgtgctgccagagaatatggaaatttgggttaatttatggttttggtccgtttattattctcaaatttgagatttagtttttattttattttgtataattttattttttatttttataattttattaatcagtctgattaaataattatatgtatgtttcttagaaacaccctctccactaaaaataattattaatataccattcagtacctacatttaacttcaatattcaaagtttttttttgtcacaatttggtacctaagtttgatttcaatgttcaatttggtacacaaactaaacaacagtccaa

SEQ ID NO: 11886 - DNA, 650 bp, Gossypium hirsutum
  misc_feature (533)..(544): n is a, c, g, or t
  misc_feature (555)..(558): n is a, c, g, or t
  misc_feature (560)..(560): n is a, c, g, or t
  misc_feature (567)..(570): n is a, c, g, or t
  misc_feature (572)..(572): n is a, c, g, or t
  misc_feature (574)..(575): n is a, c, g, or t
  misc_feature (579)..(583): n is a, c, g, or t
  misc_feature (590)..(594): n is a, c, g, or t
  misc_feature (604)..(611): n is a, c, g, or t
  misc_feature (618)..(618): n is a, c, g, or t
  misc_feature (620)..(626): n is a, c, g, or t
  misc_feature (629)..(632): n is a, c, g, or t
  misc_feature (637)..(640): n is a, c, g, or t
cagctcattagttaaggatattcaccccaacctcaaaacgtgaaatcgatccacaagtgtaacttgtgtgataatgtaattatgtggtactttaaaaatctttacttttgcattctatattttgagcctttacctcaagataaagagaagaagttgtacaaaccttattaaatatcaattaatgaattaactaatctaaccccaaattttacattagttcttgttccttatctgtttcgaattaaccagaccaaacttggaataagctatttttaaccccaacaaaatctggttggaatgacacattttatatttggaggtccagatgtctttactaaaacaataacttcttatgttccattttcttaacattgtaagcacataatctttggcatagtggaggctatcaaaaaacaaaatgatgcagataatgaatttaaagcatacttcttagataaacactcacattgaaatggtcaaccagctcacgaaggtcctctttgcggctagcaacttttctacctgtccaatgnnnnnnnnnnnnaaaaaaaaagnnnnantgtaacnnnnangnntttnnnnnatcaatnnnnnttcccaaatnnnnnnnnccttcgnannnnnnnttnnnntctannnnaacaatcaag

SEQ ID NO: 11887 - DNA, 596 bp, Gossypium hirsutum
ttcactaagacggaggcccgataacacacttttttggtgcccacggattttgggttgttacatttaagatatttatttttcttcaatcataaaaagaaatttaattaaaattttaaaataaaatatttacttttaatgattgcattgaaaatttcaaataaaaattaatgaaatgtaaaagttaaatctcaaattttataaaaaaaaacatggcatatttaaaaaaaaaattgaagttcatcccaaacaatgattagagcaacatttcaaatttgaaataagatcctctaagaaatcaagggtgagtttaaaaacaagagtgataatattgatagtaagatcaaaattagtgatgaatatacttttggaattaaaataattagaatgtgaatttaaaataaaaaattcaaatatataatatttagttataattaaatttattatttatattaaatggtatagattaaaattatgttgcactaaaactaaaatttaaaaaacaaattattaaaaaaattggtttttaagtttacagctactattgtcctaattttcaccatgtaagaaatcaaattatgatacagcacaagtgaatt

SEQ ID NO: 11888 - DNA, 690 bp, Gossypium hirsutum
ggctttccttatactcagcaagattaaacaaatcaatcaagtttattaatagtttctcaccgaccttcattactataccatgttcctcaacaaaagaaaatataaacctgaaaccgacaaacttttttagatataaatctaccaatattttatttgcaactaggtgattagccatgtgtcaagctttaatttaatgtcatttgagatcaacgataattcttgacattcatgtctataaataaattgtggaacgcatagctataatatccatcatccaatctgtcgtttaactgcatagaattctccaatttcaacaatggaatcagcttctctttcttcctcttctttccttccatctctacattcccggaaaatgtttaccccacggtggcacgataaaaggtctccctgcggcctggttttcgcggccggaagagagtctcaacaatggaatcacagtggacaattagtgaatgaaagcttgatcgtgttaaggaaacggattcatgatttgaagattattgagagaaattatgagccaccggcggattggatggagtgggagaagcagtattatacatcgtacaatgagttcatttgccaaattttggggttattgcaatcgtatttgatgaataccaaacctagctcggctcttgggattttagcgttggttacaatcctacttgc

SEQ ID NO: 11889 - DNA, 666 bp, Gossypium hirsutum
taccctcgagttggtgagttacaaatacttcaaactctcaacttatggatactactattataaataatgtagcaattctgaactaaatttaaaaaaaacacacacacacacagcataatattttattacctcatcattaattaatataatctttcatctctctggtgtcatcattgttgttcaactataattcgatattacctcttcaaagaaccattactctaatactctattatttttttaaataactctaaccatctctattatttttacagtcaatttttattagttgtaacttaattggaatgtttttgttagagttaaacttaaattaattggtatataactttaatattaattaagtgataaaatcatttcctctattttatgcttggaattatgtaaaagtcaaatctcaatatttcatcaatccttttaattgagtttaaaaccataaattttgtcacaattttacatctagttaataattataaattaaattatcacaatcacttatttactaattaataaatttaaattagattttgtatataaacttgatcatagtttgacctgagtcatgcaaaagtttagccccattttttaagcctgagctcagttcggctcgaaaaatgggcttaaaattctgcttcaagtctgatccca

SEQ ID NO: 11890 - DNA, 562 bp, Gossypium hirsutum
catgacaggagcttttgcccacggagctatattttttattagagattacaatccggaacagaatgaggataatgtattggcaagaatgctagaccataaagaagctatcatatcccatttaagttgggccagcctctttctgggatttcatactttgggactttatgtccataatgatgtcatgcttgcttttgggactccggagaaacaaatcttgatcgaacccatatttgcccaatggatccaatctgctcatggtaaaacttcatacgggttcgatgtgcttttatcttcaacgaatggcccagcattcaatgcgggtcgaagcatatggttgcctggctggttaaatgctgttaatgaaaatagtaattcactattcttaacaataggtcctggagacttcttggttcatcatgctattgctctaggtttacatacaactacattgatcttagtaaagggcgctttagatgcgcgcggttccaagttaatgccggataaaaaggatttcggttatagttttccttgcgatggtccggggcgagggggtacttgtgat

SEQ ID NO: 11891 - DNA, 689 bp, Gossypium hirsutum
ggtacaatagttgggtagaggatgatcattgatgagctagtactttggtgtgtgtatctactgtactgggtttatgaatattaatttgttttcttgcagggttttagtttagaaaacataaagttcgagtttgtagataagtagttatcagcattagtcggcagataacattgtcccagagcaggtcacaggtgtttccccctccacccatcaaacataatcttcttgggtgtgctatccttttcaatttctcggcccaacttttccacttttcccatattgtaactttgatatattcttcatccatcatttagcctacacaagtttcaatttgctatgtccacatatatctgtcaccctcatcacagtttagttacgtcttacttacacttgttgagcaataaagtattaaaggtaaatgctgccttggctagttttcccaatattctcacatcaatcgttgttaggatcgtcccgaataagcaacgaacaagtaaaaatagtagaagaaattgagaagatgaacacacaaatttaacgtggaaaaacccctcaaaagaggataaaaaaccacgggcaaagataattttactataatggcaaaagaatgaagagtacaaaagatggagataaaaactaaaccccaaaaacccgaaaaacaaagaaccctcaaagtaaacccaaatttc

SEQ ID NO: 11892 - DNA, 654 bp, Gossypium hirsutum
atgacttagctttcatgttaaaaacaaaaactttagcttctcactttttttagtttttaaacttgtatttgttcatcaattcactcatatgaaaattttaatgtttgttaattttgctaatgtgacataacgtagatgtaatgttagcaattaattaattttttaagttttttaaaattcaaaaaatatatataaattattttttgaaaaaaagtataaaattataaaaaatatatttttattttaaaaaaattaattaactgacatagcattgcaacaccaacaaaattatgcctatttagaatgataaacgatataatttactctaattttaatagttgggatagagtccaagcttattaaatagttaaatgattatctatatgtaatttattcataatatacaataaatttcataaataaaatctaaatttgtataaattgtaatgattgataaataacatttataggcaccaaatttaatgatattaaaattttagttacttatttattggtcattaatggttattatagcatttataggaacaacatgcagctaccgcattttgtttcaactttattgtttctcgtttaattttttttttaatctttttttttaccctttaaatttgagttgggttgtttgccaaaaca

SEQ ID NO: 11893 - DNA, 648 bp, Gossypium hirsutum
atgcatttccttctttgaggtgctaaaagtatctccattaattggttctatcttttggatttaagaaactcaccatatatgtttgcatatttatgccacttatcactatcatgattagggcatctcgatattactgtcacagtcgttacaaaacactatccttcgttttttatcttcttttagctcaattaattgttggttagcgaatgcattctttgttatttagatttgctactagaatattcatgacttctgcaatttgtttttgctcgatttcctttttaattattaaaattttctcacattgtgtaggttctccccgtaatcctcagactctatctttccaaatttgcttgaaacaattgtcggcatgtgatgggccagtttaggattattccagttcaggaaaacacctcttcaggagttttggagaaatcacatcgaataaccaagttttgaagctttcacgttaataatctgttaaactaatgaatggagggcttcaaacaaagccaacaattgtttcgggtttacctatttattttaaatgtataatacagaatactcagataaatataatatatcataaagctgattttgtctttgcctgccttacatttattttcggcgagttcatgtcaaatctat

SEQ ID NO: 11894 - DNA, 626 bp, Gossypium hirsutum
caatacttttgactcttatggccagtgaacactcggcttctctcgccatacaaatggtgtctccaaatttttaacgcgaacacaatggcggccaactctaaatcgtgtgttgggtaattcttctcgtgtggctttagctgtctcaaggcatatgctatcacttcaccttcttgcatgagtacacaccccaatccatttaaggaggtgtcactatataccatgaattctttccccaattctggttgcactaaaactagagcctcgataaacaaggcctttaatttctcgaaactttgttggcacttttttgtccattcaaacttgacgtcctcttgtaacaactttgtcatcggagtagctattattgaaaacccatttacaaatcctctgtagtatctagctaaacccaaaaagctttgaacctctatcacattcctcgatgatttccactcaacaatggccaaaattttgcttgggtcaactctgattccatctcccgatacgatgtgtcctaggaatccaacttctttaaccaaaattcactcttactgaattcactcttactgaatttagcatataattatttatctctcagggtttgtaaaatagttctcacatgctccgtg

SEQ ID NO: 11895 - DNA, 658 bp, Gossypium hirsutum
tcgaacaagtgccagtggtgaatgaatttcctgatgtgttccctgaagagttacccggtctaccacctgatagagaagttgaatttgtaattgatgtgatccccggaacaactcctatatcaatgacaccgtacagaatggctccagcggaattaaaagagttgaaggcgcagttgcaggagttattagataaagggttcatcagaccgagtatgtcgccctggggtgcacctgtcttgtttgtgaaaaagaaggacggttctttaagactgtgtatagattacaggcagttgaataaggtaacggtaaagaataaatatcctttgcctcgtattgatgatctgtttgatcagttgaaaggtgctgcagtattttccaagatagaccttcgatctgggtattatcagttgaaagttaaagagtgtgatgtgccaaaaactgccttccgaactcgatatggtcattatgaatttttggtgatgccatttggtttaaccaatgctcctgctgcttttatggatttgatgaatagaatttttcagtcatatttggatagatttgtggttgtgttcattgacgatatattgatttattcaaagacagagtccgaacatgcacaacatctaaggattgtattacagactttgcggggagaaca

SEQ ID NO: 11896 - DNA, 482 bp, Gossypium hirsutum
cctttctgtaaataattctcctcccccactagtttctattcttttcaatttccaaaagaaaggaaagaacacattagtgtaaagatgctccaaaagaggtggaaaaaaaaattaatccgcactaatgttccactgcatcttgtctctatagtcttttgttttcttagtaactgtgatctttatgttcttctgacatttactgattttctgatgtagattaacatttgtgtgcttagatttaattctgattatctaatttctaatgtgctggtgtcctttgcaatttttacattcaaaattgtactcgtgtagaaataagttaaaatattttagctatgtattcttatatataatgtgatatattaatgattacttatttttaacctatgtgtgtatcggttgccaaatttctattgtttggtcttagtacttattgatgctaatcttatgcagcggctatacaatgcttgaagagaaacccc

SEQ ID NO: 11897 - DNA, 665 bp, Gossypium hirsutum
  misc_feature (68)..(68): n is a, c, g, or t
aaattaaaaaaaatctaaaaatagttaataatatataaatttttttgaaaatgtataattctttttanctttggaatgaatctagacaaatcattccaaatattccttttaagtaattttgtcacactccaaaatatatagggttggatgataaaaaaaatcaagaaaatgattaggtttgatggttaagtgtttagtgcactctttagaagtagtaggttctatccacttctctcttatttttataattttcattttcagcaaactagaatggaaaatcactttaaaatggatattatttggagtaaaaatctatctagaagtaggaagcaactagaggtgatcatgggttgggtcaggccgggcccaaataaaattttaggcccattttctaggctcaggtttagcctggcccaaaagaaaattgctaagcccgagtccagtactgcctggcctatattaaatatatattaaatatatataaaatatatatttgattaaaaataatatatgtcgaaaccattttttatttaagtttgaaaaaaacggggatcgactttttaaaatgaaaacggggagtcgccaccgacctttattgaaggtgtgatcggatcaccctgaaaataaattttggtctgcgaattttgagaaacaggttcggaagt

SEQ ID NO: 11898 - DNA, 628 bp, Gossypium hirsutum
tgcttcagtttaaggagacaacctaaaatagtaatttctaaaaaatggcttatcatgtttgaccctctcatgtcttaaagtataaatcaaataatacacaaaaatccacaaattaataccaaacagaatcaataaaaactccaaattaaataaattaactttaatgatatgtgtgagtaaattacttaaacacaataacaattcaaggactatatcacataaatatataaaattcttcccgcacttaagatgtacattaccctcaatgtacaaacaaatataaccacaagaagcaatatatcagaagtgaggaagagaactaaaaatgccctgaatttggatgatttcgccgaaatagtaaaatctagaaacgtaggacatcctaaattaaaaacatgatttcgagcatagtaataaaaaaataaacaaaaataaaataagataaagagatgacaaaacaaatagaaaaagtcaaaagaataacaataaagtgcataataaaataaaacatatatgttcagaaaataaaataaaaacaaataaaaataaagatagttagggggacttttggatacgtgatgatggtaaagatagagaaacgattaggatttaggtttggtgaaatggg

SEQ ID NO: 11899 - DNA, 657 bp, Gossypium hirsutum
aataatagtcgacagaattaatacaagtatttttgcacattaaaaataaaaaaaaaatgatttgctcatattttcatataagcatcatttcagaagctgaattcagaataagatgttggtaatatagttgtcccagtcactaatcaataaaatagagtagaaagtataacataatcatattttcagaattgcatttagatgagctaccaaaagagagcaacttcaaggatacagatattccatattaaattactaaataaaatgtaatattcaaactttgctgtgaaaattatacattttatatactacatgactcatgtaaaatacaaaagaaaaaaagtctatatcagaattactaaataaaatataaagcttggatattcctctcttaagttggtatagaaaggacttcaattttaagaaattgacttgttgtatatatatataattatgagaaaaatgtgcagaatactctctttatataaatttaatatataaaacgcaccatacatagttatacatattttgtatatattaagtaggtgcgaaagttgaagtaattgattttactgttgaaccaatatgagtttaaaacaatatacataaaatcagttttagaaatattaaaaactagttatcgtttgaaccaatagaccc

SEQ ID NO: 11900 - DNA, 674 bp, Gossypium hirsutum
gatctttgattcttggctgttcttgattgttttggggatattaatttccagatctgatttgtttttaatcttattctttgttttgatttcagatctgttcgattagagctttcgtaggagtttctcgtgacttggcaactcgatcttggtccgcgtgcattccatatcaccttctctgacgtgctctctcttcaaccaagtccaacctttcttgtataggctcaagcttccggtcaaagagtcactccacctcgcgtaacattgcttgaagattaaggtccggaacatttcgaacaggttgtcgttcatgtcgctcctccaaattttgatcagaattttgtaacataaaacaaattaaacaaatcagaacagaagaaagataataattaaaaactcacaacaaaccttatattcacttgaaaagaaagaaaatgataacactcacggtcgtgtttgcactcgtatgttggcttttacctcctctctattgtgctcacgctttcgtgcctttttccacttcttcttttctcgtgactttgtaagcaaacttgctaaggcttaatcgtaggcttaggggtaagtcacaaatttgggaaacaaagggaataatgaatagggataaggtaggctgaacaaagaaagaaaaatcgggttgagtgtggcgttgaggagaa

SEQ ID NO: 11901 - DNA, 584 bp, Gossypium hirsutum
  misc_feature (45)..(46): n is a, c, g, or t
tcttaaatcaattttccaagtcgttagaggtttctaccacaattnnattctgaaacttagcttaacggttttattgttaataatatatgggaattacgaggcggccctctccaaggaagaaagaattctcttggggagtgggttcgttacattgtcttgttttctaaaggacaaaaccaaagttcatttacgttgttataaattctggaacccaatgaaagcttgctttccgtgcaaaattgatggagacgtacggctatgtgtctccatgaagtggctcttctttcactgctccctttgtgtgtgtatatatcggtgctaaaatagttaagtattaataaataagtattgtgtgtaatagtaagttatattatacttcaaatgagaaaaaatacgaatttaaattttagaaacaatattaaaacataaatgaaagataccaccaaaataactcaattaacttatttcaaaatggagatagagttggttcttcaattttgttaaagaaatttgtacattcttaaaattagctttctttttttctaaaattgttactaaaagcatctgctaacatacagaccgcg

SEQ ID NO: 11902 - DNA, 612 bp, Gossypium hirsutum
  misc_feature (490)..(492): n is a, c, g, or t
  misc_feature (498)..(500): n is a, c, g, or t
  misc_feature (505)..(506): n is a, c, g, or t
  misc_feature (508)..(508): n is a, c, g, or t
  misc_feature (512)..(514): n is a, c, g, or t
  misc_feature (518)..(520): n is a, c, g, or t
  misc_feature (523)..(525): n is a, c, g, or t
  misc_feature (527)..(530): n is a, c, g, or t
  misc_feature (534)..(534): n is a, c, g, or t
  misc_feature (545)..(547): n is a, c, g, or t
  misc_feature (549)..(551): n is a, c, g, or t
  misc_feature (553)..(555): n is a, c, g, or t
cttgcttctgttggttttttgtatgcgcacatgggttttaagtacatggagatatggatggtgatggtgacatgtctgaatggctatattgatggtatgaaggatctctctctattcaaaacagattctgacaattcgtttcatagggccatatgccatctcttatcatatccattcattttgttctcttgtgctaagaaagatataaccctgttgaaagctagcaattccctgaaagaatcttttgttttatcagagagaaaacttgaacaggttattgaggtttggaagtccttatatggttctgtttgtgttgcctgcttgaagtcttctgctacaaacactttcagtcatgatctgtgtgcaatgttaaattcatgtttcgatgaaaacggtagcatgtttcagtataatagtgagcttggttacaaggatctggagcttgcttgcctttctttctctggcaaggttttggtatgtattttggaannngaaacnnngcttnnanatannnatcnnncannngnnnngtgntggcgtctgcnnntnnntnnnggtggcattaataatattttcgtatttgcttccaggtaaattagaacattaaaactg

SEQ ID NO: 11903 - DNA, 602 bp, Gossypium hirsutum
  misc_feature (17)..(17): n is a, c, g, or t
attgtttgacaacgctntaattttccgcatttagaaaaaaaaatctcacacttctttagcttttgagttatattgatgttaaatttagtttatgatttgaagatgaattttatcattattcccaatattcacttattttataagaatattcatctaattatgcatttacttttattttggttatttaattattattttttaatttattcattcaaatttttaaaattaaatactttagttactctaccatattattagttgtcattaactcagtaatagaagtctaacttgttctttttttattgatttaatagtaaatttaaccctaaaatattttcaaaatctatcaatttaatcttaaattaaaaattttaacaaattctataaaaaaaataattgtatcctctctcactattggcaatacacaccctcgaccctctcctcatttctccttcgccgtctataccatatgcgtattggacttgggacccctgcatatccgaatccatgttcttatctttatataacttgctcccatgccttcacatatatgcagatatatattatgtatatactttttttttctgcacaacacaagcaaa

SEQ ID NO: 11904 - DNA, 643 bp, Gossypium hirsutum
ccgaaaaaccaaacagtgacacgtggagtgccacatgtacattatattgacatacaaagactaatttttaacattaaaaatggatggaatttttaacaagatgaccaatttgctctttgatctaatgtacaaggactaatttacccattttttagtagagtgagtaaaatgcaatttggctccttttacaaggtcttttgtggcacttttaccaaagaatttgctaatgcatggggtacaacactcattaagtgaaggggcatttaaccagttttcaagatttagcaaatatcataccatgacttttcaacagcaatggcggcttttcttcctggctagcttgataaagaggattagttggcggataatagtaagcataggcattttgaccaggaaccactgtcggaaattcaattaactccggctgactaaagtaggactcgtactttaaacaatctgacgaagacgaccaacaaatcttgaaatcaactactttacggccatctagagtcaccttcaacaacaacaaaagaatgttaagaccgtaatcaaaagatctctacatgtagaagaagagggcaaccttaccttagccactgatgaaggaggaaccgcagaggctccctcgacatacaaaaaaatc

SEQ ID NO: 11905 - DNA, 667 bp, Gossypium hirsutum
  misc_feature (664)..(664): n is a, c, g, or t
gcctccttcgccctcaggggcgtagccaggggagctggcatgggccccggcccccctaaaatagaaattttcattttagacccttgaattttttaaaaattttaaattagtaaaggtaaaattacactttgccccctaaaattataaaaatttaatttaatcctttacaaattataaaaatataaactataaaaaattaaaatttcatccggccccccctaaaaaaattttttagcttcgcccctgttcgccttgaaagctaaatatgataaccaaatatatcgattaaattgaaggaatttgaatttaaacccagaatctaatatcatacaaaaacttttttttcaaagatttcaaatatccttatttcttttttctcaattttatgaatacagagagatgaagaagcttaccaactcaccagattctctactttccagactcaaacttcacgatcactatctcatgtagagctttcatcaactttctcttcttcggagcaactgaaggagatgatgtaggcgaaaagaaaatgaaataaaaatgagaagaattttgcctcttgaaaaatccttctgacacatatatataaccattctttcacggtcaccaaagtctcaaataatctattcattagtaatcattctacttcctactaagggancca

SEQ ID NO: 11906 - DNA, 513 bp, Gossypium hirsutum
  misc_feature (466)..(469): n is a, c, g, or t
acgatatgttccgagtaagagatatcatccaatcatcaaattcaagactttactttgacattaatagactttttgaatttagtcaagttatttctaggcttattttaaaatttggatacaaacgaaggtcattggggcttatttgagtcataataaggtaacagggtcaatgtcacgacattgtgaaatgggtgtcacaacattgtactgatgtcgtgacactaatctcctgatgtggcaacatcgagaacaaattactcgacactgaaggtcagaagtctatacacaggagacagattgcccagaacatatctgaaacatctaaaactgagtttaaactatcgacaaccattccataatacatctaaacaattttatgactcaaaatatgtcaaattatcattcaaaacatctaaataattcttccttagtgatgtgacaaggatgagaatgactacttctaccnnnntattcttgggggtgtgacaaggatgagaatgactacttctacca

SEQ ID NO: 11907 - DNA, 636 bp, Gossypium hirsutum
gcagtgaaacttagcaaatatattttttattacttcccaaataaaaaacaaaagcaccaattgattgattgttaaatttttgtatttgaaaatagtagttatttattggtaaaataagttttataggcagatttttatttttaattagggttctaggtcggttttaaaattaatttgggatataaaattggaaaacttgttcagttagatgtattttttaattaagagttagattccaatgcctttttaaacgttgtcgccaatggtaaaaaaaattaatacgcaacagtaacttctattttactctataaatactcttcaaattttattttttcattcatatccttctctcaactctttaaattctctcaaactttctcaaatctcccaactctctcgtttttaatattttttgatatttttatttaaaaatattattatttttaattatttcgcttttattcatttaaatcgatttctcaagaatggctgcctccctaatccacttcaatggcaagtatattttctttgcccaattaacaattctaagaccgaaatttgaattttgttaatttcaataatgttaaatttaattttttattataactataattttttattgtgtaaataggcgga

SEQ ID NO: 11908 - DNA, 510 bp, Gossypium hirsutum
caatatctagacaaccacacttgcaatacatgtctaacaaagcattccccattatagtagtcaattcaagctcctcccttgcataatggtcaatttcctttccaagatccaatcttcccaatgccgtgcaagccgaaagagtactaacaattgtagcctcattaggcttaaccagaccctcttttctcatcagcccaaaaagattcacagcatcttcaaacttcccacacttcaccaacccagaaatcaacacattccaggcaacaacatctctttgaggcatttcatcaaacaacttcttcgaacactgaatccgacccacttgaacatacatatccataagtgaattaacgacataagcatcaaattcaagcgcagattttgctactaacccatgaatcttttgaccttcaaaaacacctcccaagcttccaattgccttaaaaacaaaaggataggtaaaattatcgggccacaatccttgctctctaagcttcccaaagaccaaga

SEQ ID NO: 11909 - DNA, 641 bp, Gossypium hirsutum
aggtttacgatgatttagatttaccttttgccaaattgagactacttccaaaaggcggacatggaggacataatgggtatttattctctgctttcttatcctattaaagtgaatatgttaagtgtaataattggcagtatgatatgttggtcttttcttttattctagcatgagaagtatcattgaccgtttaaaagggagccgtgattttcctcgtctaagaattggtatgccgctaagagcactaaattaatacctgaagttctggtaatagccttatatgctggtttgttaaatttgttgaacttctctaggcattgggcggcctcctgggaagatggatgctgttaattttgttcttcgccctttcaataagcaagaacatgaagaggtatgcaaaaatatattaaacaacaatatatagaagtaaaaaagaaagaagttggcaaactgtttcatggttatgtctttgtttttatcattcagcttgagtttacatttgaacgtggaatagaggctgtccggattcttttacttgagggtttcgataaaagtgctacatttgtcaacagcaccaaagcaatggaacaacttggttaaattatagcccttggtggttatatctttcgtttaaggcaagt

SEQ ID NO: 11910 - DNA, 390 bp, Gossypium hirsutum
  misc_feature (11)..(11): n is a, c, g, or t
  misc_feature (64)..(65): n is a, c, g, or t
tattttacacntcagatttgtggttccaaactactgttctgatttagctaaaatcaggttattnncttttccccccttagggattttcgtccccgaaaaacttactagtgaataggtttggataatgctctctcatagcattcttgggctcccacgtagcctcttcaatcccgtgtcggttccataatactttcactaatgaaattttcttatttctcaattctttgacctcgcgatctaaaattcagatcggttcttcttcgtacgtcatatcaaactgaatcttaatctcagatgaggaaatcacatgcaagggatcggatcgatatcgttgaagcattgatacgtaaaatatattatgaatcttttctaactcaggtgggcacaaca

SEQ ID NO: 11911 - DNA, 605 bp, Gossypium hirsutum
tgatttaactactaatgtctgtgccaagattagaatttcaaaaatctaaaagtaaagtaattaaaattgaccaattcaaaaagtacataaaataaaattgattagattaaagatagggactaaatctacaactttaacaaaatatagagactaataacaaaatttagcctcctatttaacatattacttttatcaaataaaaaaatttttgtaattactttttttaataaatactatcttaactaatgtatttgggtattttgttaacatcttccttcataatgataacaattttagtgaaaaatttaatggtttaagtaaatataatttttttttgataaaataagcaaatgattacatcaaattaatataaatcaaaagcattcttatcaatatcaaattccaagagatgtgagagctcctcgggaacctcctcaaaaacccaaatgtcttccttcttgtcaaagaccattttagctaacgaatccacaactctattctcctcctttggaacatgccttattcttcaatatccaaccaactttaacagttgaaaaatcctccttaccaaaattgaatttgcacttgccagctgactttcttgg

SEQ ID NO: 11912 - DNA, 483 bp, Gossypium hirsutum
gtttattcaaggctctctacttcccttcttacttcacatatccagtattgactatttttgtttatgaataatttaaagtatatggttttgttgggtaacaaagaatgacgtgtttgtcagacgctctggttcaagagattcattctggtaggacaaagcttgaaattctttttaaagtgctgaaattaaattttaaattttgataaaacttaaattgtaatttcattattgcattagctaatagttttataaatttttaaagggttaaattaatatcttatcatttgaagaggtaaagtgtaattttatcatgttgaggataaattcggtttaagtaacaaacaagtaaaataacaaataaattgaaaagatcagacacaaatattttacgtaaaaaagcctttccgaagagaataaaaaactacgaccaaagataatttcactaaaatgacaaaaacaaaagcacaaaagatggagataaaa

SEQ ID NO: 11913 - DNA, 416 bp, Gossypium hirsutum
aatattagttttttcagaaatttatattttcattttttagtttttgatattcatgaagaaattatttagaaaattattttaactatctgatgtcacataatttaatttttgacaatacataactagacagacaatcttgatcttttttatcagtatatccacaaaattctatttttaaaataaaagttaactcttttaataaatcttttaataggcttttatattattcctttgatagggttatgcataaaggaatacaaatacactctgagataggcgagcccaccactgaatcaaaccaattaaagagtatcttggcaacatttagcgacttatttcaagagccaacgagcctaccacatctaaggcaatgtgagattcaaatttgtttgctaccaggatctacacctcacttg

SEQ ID NO: 11914 - DNA, 641 bp, Gossypium hirsutum
cattgattgtctgaccatccatcctaaaacgttacattatcaacctataaaattttatcgtcacccttataagaaaacatgatgtggccttgccgataatgagatcttttaatacagcttatatactacttcccctttgtggattcaacttatcaacaatttcttttataaataattgttatacatgtatacatatgtatttcactcacgtaatttattttaattaaaaaaatcctcaaaatataaaacaagattatgattataataaccgagtcgatcaatttaatcaataaatttataaatattttaagtaaaaaacttaaaaatttgactcaatccaatccaatcaatagataaaaataataaaatagaaaggaaatatcttttaaatatgaacaaccaatacgaataataagtttcaccagaaattaataacaaaatgtttgttaaaaggtcattcaatttcatcacgtcaaatggtaatcatggttgatggaatggtaggaatgaattagttttaaagcaggctatgatttgatttggccaaaaaaaggaagtttataaacaattttaaaaaaacagtctaccttcttgatgaggacaatcccaacaataatccctctggagtctggacattaata

SEQ ID NO: 11915 - DNA, 493 bp, Gossypium hirsutum
gtgttatatccgggctaggtcccgaagagcaatcatgctggtgacgtgtattcgggccttcgtgcctagtaggcttcgtgccggtaatttgagcaaagtttaagtgttcattactatacgaattcaaatttaaatgagatgatatgtttaaaagtgtacatacatgatgtttatagacttggttaagtcatttcaatgtgtaataacgaatgaataagagcactatgtgtgtgaatgattagaggcactgtgtgtgtgcgaattcctttaaccgagcactatgagtgcgagatcggtcagtgggcactaagtgtgtgaagtggaattcatgtaagacctcgtctgggacgaaggcattgatttgagatagtgtgtaagaccatgtctgggacatggcatcggctcgatatgtgagaatatgtaagaccatatctaggatatggcattgtaagagctatatgtgcttaatgagtatccgtgatgatttcgaatg

SEQ ID NO: 11916 - DNA, 659 bp, Gossypium hirsutum
actcgttctacaaatagaggaaacatccaatttttaacaataagcttgtcaaatatttggacagattctgtcaacaatcgggcttatacatttattcgatctggccctttgattagacgcaaaaaacactgaaggatacagatttgactggtataaccatcagacaggagcacatcatcagaacaaaccatgttaaaattttctttctatcatttgagggctcatatccatttgctttttgcttccctgaccctgtttgaagttccaacccaataattgtgtacacaaaggaaacacaagcaattctaaaacaagctgtagagtacatgagtaagatattatcatattaatgccaaaaaaaagagttagtcaaattttgccattagtcccgtgtactaaactgcaaatttagtcactatactctaatttgatcatttttagtccttgtacttttcgaattttgaaactgtagcccttgtacttttcaaattttgaaatttcaactttagtcactactcactatgttaaattttgttgtttccgaaattttatgcaataaacaattatcacacggaaattcaatgtcaacttactatttccatataatagtcacaaaaatgccacctcattttagtcaatgaatttaacgactacaagta

SEQ ID NO: 11917 - DNA, 462 bp, Gossypium hirsutum
taaaataatatatatacgaaatttttaattaattaaatgtcatactttatttgttgagtaaatttatatgtagaatttgtaaatcaagtattgatttatctatctataagaaaaatattaatttgacttaagttaaagtcttgcctctacctcatcttttttttttctagagtgctaattatttttaattaactaaatgtaatgcttttattttgttgaataaatttatatgtagaatttgtaaacaagtattaatttttctatctataagaaaaatattaatttgactgaatttaatgtcttgcctctactttctctctttcccttctagaatgcaagttagtcatgtctttgggcatgttattgtcttgttagtcaagtttcccagggatctttagagcctttcaatacaggataaaaaaaagtctgaattgattttaaatttaaggagttgggggggaa

SEQ ID NO: 11918 - DNA, 672 bp, Gossypium hirsutum
aatagttattttcttaatccatggaaaacagtgcacagtaagaagtgaagagcccaaatctttactctaccatcctcttttttttctcttaatggcatactctaattttctggtggaaagaagaaaagacgagctcctataacaagccattataacaagaagtagaaccgtaaccattatcaagttatcttggcattattcttttgcactttcccttttgactaaaagcaatttcacgtacaacatcccttctaaaatccatccatgaaacaaatctctcccattttctgattaaaattgtaaatgcaaatactaaaataaaataggcatcatttactccacagaaagtaaagtttattaacctaattccagaaagcgctacaactcctacacttcatatccctaaacaccattctaactgcatcacaagtaatactatagtagaatgcaagtgaatactaaatgcaaaactcaaataactaaacaacggctgatacagtaggaaactcaatagagcataatatagagcataatccgaaattagaacttctttaactctcacaacgttaaatagaagaagaagaagaagaagaagaagaaatactaaaatgaaaacagattaaaaacaaagaaagcataattccaaacacaattacggatagaagatgtcca

SEQ ID NO: 11919 - DNA, 624 bp, Gossypium hirsutum
  misc_feature (61)..(63): n is a, c, g, or t
catgtttaagtttcgcctaacctaagctattttttttagttagtaatgttttatattatannnctttatttttatatattatataatttatagtatataaaatttaaatatatacaaaatatatatatatagacggcatattatatataaaaatttaataaataagaatatataaatttattaaatattaaattaaaaataatataaatatatatttttaaaatttttaaaaaataatataagcatgcatgaaataggtttaggataaccatttataaatatggacagattttaaaaaaaaaagttaggttcacattttgattcggttaagttaaaaaaagtataatatatgttaatatcatgtatgagtccgagccgaacggaccaaaacacctctatataattttccctcctaacttttatatatttaagcattgtccattaggcttttggcagtcctcatttaaaatccaaaagtaataggatttttttattataaaaaataatattaaatcactatttgtctgaacttagcaactttttttatattggaacttggattaaacaattgttctcatattaggacttaatttttttttgcccaatttccccttcccttgggaa

SEQ ID NO: 11920 - DNA, 593 bp, Gossypium hirsutum
  misc_feature (522)..(526): n is a, c, g, or t
  misc_feature (540)..(541): n is a, c, g, or t
  misc_feature (555)..(559): n is a, c, g, or t
  misc_feature (563)..(564): n is a, c, g, or t
  misc_feature (575)..(576): n is a, c, g, or t
  misc_feature (578)..(578): n is a, c, g, or t
  misc_feature (580)..(584): n is a, c, g, or t
gatatttgttcttgatggtcactttgttaagttgacggtaatcaatacacattctcatcgctttgtcctttttctttacaaatagaactggtgcaccctagggagaggagctcaggcgtgcaaaacctctatcagtcaattcttgcagctgggctttcaattcttttaattcagtaggcaccatatgggacgaagctatcgaaatcagattcgtacctgggactaattcaatactaaactctacctctctaacaggggggaaacccggtaattcatcaggaaacacatttggatacttgcacacaactggtacgaattcaatcttcttttcattcacttgattttctagaacatatacaaagtaagcttcgcaacctttcctcacatacttctgagccaatattgaagatatcactgacggtaaaccattcaaattagtggattcaatctgaataatctcattattctcacactatagatcaatagtctttcttttgcaatttaccaccgcatcatgcatgnnnnnccaatccatacccnnaattatatcaaacnnnnnaaanngaaatagcatnngnannnnngggaagtaa

SEQ ID NO: 11921 - DNA, 662 bp, Gossypium hirsutum
ccacttcgatatcactctcctcaaaagcaacctcataggtgaagacaatcggctcaccttccttgatgggcattgagacagcatttgggtcgcattttattggagattggtatttttcatacattttcaatttattaactaaattaccatcatgcaccacgctacaaggaaccacctcaaacccaacaaccatatgtccaggcatatctgacccctccttggtaacagtgggcataacctcaacagcatcccccgttcccatcacacgtgccacacttgtttcctcgtacttatgaataagcaccttaaatttcaaatgattaaacaaataatacacattctgaaccttaactccaaccggatacccggtccacctcaacataaaaccctctttcttggtataccttattgcaggcaaattatcgagaatcaagttaacctgatacatctcatcaatcctcttcttcaacaacttgaaatcatcagccgatacctttttagattgacataagaagatctcagactcattaacgtacattttaaacttatatggtgaattctcaatccgatctcccatgagaagctcacccaaattctcagcactatccttaacaccctctttaggcttacaaaagggtaaactgtatagcttaagggcattt

SEQ ID NO: 11922 - DNA, 647 bp, Gossypium hirsutum
  misc_feature (557)..(557): n is a, c, g, or t
  misc_feature (625)..(625): n is a, c, g, or t
aaatgttctttgattcagctgaacattgttgatattaattgggctgcttggaacacttcaatagccaaaaggtgtgaacaaaagaatttgaatgatcaagcaatgtgaacacacgaaaatgaacagcccctaatgtgaaaagcatattcagctgatgtgaacagcctttaaaagagctttgggcagccgaatgttcattcttggagagttggaaagcttggctgaagagtcacttggaaaacaccaataatcagctcacaattaaatttatccatgcaccttgccgtccaagagatgaatgtacctgcagcaaattaaacaaattaaattcagcatcaaatgaatgtaaaaatctgcacttaaaattcggtcaactcattaattgtttgtatgagtttaggacatatttaagacactaaaaataattaaaacataattaaaaacacttaataattatttgaccagaattaaattaaattaattaacttaactactttaactaacgacaaattaaatacttattccagcaaaataaatgcaaactaaaataagcttangatgagctaaatgagctaaaaatgagctcattgagctaaagtgagctgagtgagcttgaactataatncacggtttgctcatcttgctcg

SEQ ID NO: 11923 - DNA, 665 bp, Gossypium hirsutum
tttgaggtcaccgagttgtatcaaaacataatgcatgactttattaaatgcagaacacataatacatgtcataattaaaagatgtagatcaataatgcaagacattaattaaagatgcatttactaaataagacataattaaagtgatagagggttgcgcgtggaccaagatcgagttatcaagtcacaagaaactcctacaaaaactctaaacgcttggatctgaaacgaaaatacccaaatcaataaaagatcagccaagaattaaaaacacttaggaatagctaatcttggaagccaagaacacgaaattgaattcaagataggttccaaatagtcaaatctgaaaataagaacacaaaacagcaagttaatttcaaaaaaactcagcagatcacgaaatcaattagatctagggtttggacggcaataaagaggggttttgtgaaatcaaaacgtttcttgttgtccaaggttgatgccgaatagattcttgaaggttgaacggggctggagacgcaacaagagagtttaaacaagttagataatgaaatcgacacaagcaaaaaattaaaaagattaaacagcaagaaaaataaagataaagtcctaaaaagccttgaaattgagaaagactccacactcccttcaaacaaaaaaaaaaa

SEQ ID NO: 11924 - DNA, 651 bp, Gossypium hirsutum
aaagcctctaggacttcaccctgattatcctttcattcatcctttaaagttttagtttggtgaatttcctgagaaattaaagtggatgctttggtacttaactcaccttttccatattggcattgagttttatcttgaagacctctagtactatgtgacaaaggctatacaatggcatgtgatgattggacttgaatatcttaaaaatacaaaagcctagtggattgtaataatcttttacaaaccacagtatttcatacaaaatgacatagctacctagttaggagcatttcccagtgcctggattcacaagatttatccttcaaaagttagtaggagttcatgtcgttatagaagcctaccaaaatatctctgtcaaataaatagaatcatccctactgaaatatggccttcaccagacatacttgcaccatgggaagaagataaaccactaacactttatcaagcacagttgaaacaagctttagtggaatattagaaaaatatatcagatcccaaagaatggtcccaggagtatccaatgttttgcaaccaaaaagctgaaggcacgacgacctggaaagacatcagtgaagtgacaccacctgatgaccttgaaaaaagaattgaacagctggaactcaactgcta

SEQ ID NO: 11925 - DNA, 474 bp, Gossypium hirsutum
  misc_feature (419)..(419): n is a, c, g, or t
tccggccgttggtccggctttgcttcggtcatggacccccacgggccgccatcggcgccaccgcacacggcggccggacctcaaaaaaaacttttttcggaaaggaaaatatgggtaagcttcttacttttatttttactttcgtataaaaaaaaaaaaaaaaaattggagggaaaaaaaaaaaaaaaaaaaaaaatttaaagaaaaaaaaaaaaaaaaaaccccttttttgttttttttttttaaaccccccaaaaaaaccctttccaaaaaaaaaaaaaccccccccttaaaaaagtttggggggggttttttacccaaaattttaaaaaaaatttttttaaaaaagggggggggggggggggggttaggggggcaagggggggggccccaaagggggggggggaagggggggaaangggggggggaaaaagggggggggggagggggggaaaaaaatttttagaattgggg

SEQ ID NO: 11926 - DNA, 658 bp, Gossypium hirsutum
aggtccaccaatccaatcaattacgtatcttaatttttattaataatcacatttcccttcaatttataatataaaatttgattttaattggataaaaataaatttaaaaaaatttaaaaagttgaagttaattttatgtataaaataaacatttaattagataaacataaacttaaaattttataaatatttattataacttacaactaattagcataaataaaatttatatttatcatcagaattaattaagcaattaactaaataattaaatcaactcacaactaacttacaactatataaatatttaagttaatattttttaatttttatatttaaaataaatagttaactaattaaataaaaaatttaaaaataaattgtctatttaatttaaattatttttatatggacgcttttttactattgttaatacaattaataattcatacttaaaagctataagaaatggaataattttcttaaaagcccctctgtgttcagttttagtttattcggtcttcgtttttttctaattaacgttaatggtctttcaaatgttacaacctaacaaaaatacccaatttaataatagttttttaaatttagctttttatttattgtaatttatttatgttttttctccgccatcttcatt

SEQ ID NO: 11927 - DNA, 683 bp, Gossypium hirsutum
  misc_feature (9)..(9): n is a, c, g, or t
  misc_feature (587)..(587): n is a, c, g, or t
  misc_feature (629)..(630): n is a, c, g, or t
  misc_feature (640)..(641): n is a, c, g, or t
  misc_feature (650)..(650): n is a, c, g, or t
  misc_feature (652)..(652): n is a, c, g, or t
  misc_feature (655)..(657): n is a, c, g, or t
  misc_feature (659)..(669): n is a, c, g, or t
  misc_feature (676)..(678): n is a, c, g, or t
tttttttcnctgttccatgtacagtaatttacccatttcagtggttaaattaaatctttaattaccgttggtttatttttcctttacatttttattgactgaatttcaataaacgggcctgtatttgatccaggcttattaaactaagccatgtttctctttttccaaaaaaaaaatcatttttttgggtaaaattttataatctattaatatattaaggtaaatctaatcagaaatttaatagattttatataataattttaaaaatataatttttagtaaattcaattctgtttcagataaccataatttttttaacattaatcattaatctcaataggtttttatcctatccgctctttttgctataatatctaaaactatcaatagtcccttctcaaccttaaaacaggtaaataattcgcttcatcacacttgaactcacatcctcctgcactgataaaaatatcaatactaatcgaaataagactcaattaaccctatattaaaatatttcaatttgagtccattttcaatttttttttactctaccctatactacatttagttttttttttttaaccccnaaaaggaaaaaggccttgggttcggggggaaaggcctttggnncagggggtgnncccttttancnctnnntnnnnnnnnnnnccccccnnntcccc

SEQ ID NO: 11928 - DNA, 442 bp, Gossypium hirsutum
cggtggtgaagaaggtgagaaaaagatgatatctttttcaccttattttatttttattctagtcaaaataggttaccaactcacctaattttgaccatttctcttccttttatcccctatggccgactatcatttgtctaaaggtctatttgccctttaaagacccgcaatttatgattcatggcaatttaacacccttagctatcaatttaagacttttgtactttatgcgatttagtcatttttcacaattgggctcacaaacgtcaaaattaactcatcaaaattttcatgcactaatataaaaatgctatgactctaaaataacaataaaataatttttttgacttcgaatttgtggtcccgaaaccactattcctactagccctaaaatcgggctgttacattggggatatcatctccagtatacatctcttggatc

SEQ ID NO: 11929 - DNA, 742 bp, Gossypium hirsutum
  misc_feature (410)..(414): n is a, c, g, or t
  misc_feature (420)..(420): n is a, c, g, or t
cgatggagatggagattaaggagtgagctttggggtttaccatggtaccattttgaatgagaatgggatgaaaacagagatggaaatatacatccttctttcccagcgaaagcaatgatgatgatgatgatcctgaaatgattgatctacaatcagacggcagaaacctttcccacacttcatcacggtttgcaaccgatctggaagcgtgagaaatcatggccgatcgacatgcatcttccggcgaagtcaacgatatgatcagacacaggcactcttctggtaatatgcttgtaatttccattcttttggctggaattattcataaccactttccaaactttaattagaagctatcaatcgtgataatgtccattgttttcttcgtagtttccatctataccagtggnnnnnattatnaagattgatatctactaaataaagtttggaaagtggttatgaataattccagacaaaagaatggaaattacaagcatattaccagaagagtgcctgtgtctgatcatatccttgacttcgccggaagatgcatgtcgatcggccatgatttctcacgctttcagatcggtagcaaaccgtgatgaagtgtgggaaaagtttctgccgtctgattatagatcaatcatttcaggatcatcatcatcatcattgctttcgctgggaaagaaggatgtatatttccatctctgttttcatcccattctcattcaaaatggtacca

SEQ ID NO: 11930 - DNA, 654 bp, Gossypium hirsutum
tttatagggtcgttacatgtgtggacccatgtttcatcgtccaatttccacctttgattacaacatttaaattctttttatttttaaaattaaaaagttatttatttttaatatattaatacattttcttgtaaattcattagttgaattcaggaacccactataaatcaattaatttaatttgatcatttatattgattaattgaatttgttagatttataaactttataattaatcatgtgaacgaatgtaaaataaaaaatgcataaaagtaataatgcatgcacctattgtaacacttatcgcctaatctgatcgtcaagtttgagctatgggaatgctatagttgttgccggagcaactaccatagaaaacactgtagataaattaattaaacattcaaatattccacacatgcagtcattacatgctaaacaaacattttcgagactcaatcgagcttatgaaagctcatttactaatccgaacatgaaataagatcaaattgcaaagttttcaaagtttcaaaacaggtatcgatactcttgctaggtaccaataccattttgagctttgatgtttcaaaaaaatcaatttaaaaccaaaagtatttataccagacttaaagtctcgacactttctacaaggtattg

SEQ ID NO: 11931 - DNA, 678 bp, Gossypium hirsutum
gtcaagtgtagtttcaaaaatttctgtcgtgcaagctaacaagattctactgattttaggggacgacaattcatagcatagtatggagtatgtatggagtaatcctcgaattcctaaaactaccatgtgaaatatttttatttgttagttagaggctcataggtttccaattcttagtggaaatcggagttaataataataggtacttctccattctgcttataaattctattacaacaattggaatatttataatatagccctttaacaaatgagattgcctattcttagtagaattcggagttaatttcctctttctaatcaaatacttttaaaccgcctttgtcgtcttataaaatagttttacgagaacaagaaacttaaaaaaaatctgatttcttaaagctttctttcttctcaagttgaaacttattctggttgctttaaagctctcttgtttctgcagtttttcttaatggcttcaactccatacgtgtatgatatctttcaccagcatacttttgaagacaacatcatctcacaatctcatgatattgcttcccagttcgtcaatattgaattaaccattgactttgtcttcatatccgtccaccatgatttctcagcagacatctccaccgtcaccaaccatacgtccttacgagaaacctttcgttt

SEQ ID NO: 11932 - DNA, 622 bp, Gossypium hirsutum
tctttttatcttacacacactaattatataatcttgtccattagtcttgcaaccataagctccccattatagcatatcacattattaccaagttatttcaattttcttaacaacacgcaaatcatttacgagtaattataatttcaacatatagcttaacaatctttcacatatctattgaatcacaacttaagtatatacactgtactgtatcccaactcaattaggctcataagcctaacacatgattattttcaaatcttatcatacatccatttatcataattgtagatcattagtcacatgactatcaatatttcacaagcataactttctcgtatgcattcttaccacatattcatagtatactgagacctttactcatgggttataagtacatacctgtactaacttgtagcacattctcatatttcctcatcattaacttacttgtcacataattactgatttacccattgaacacttggaaaactatcggatacacagaaagcttgcacatagtgcctcatatgtagccacttactaccttatatcacatatcacacattactagctatcaagctaatcacaggcctacttacacaagctgacagttaggacg

SEQ ID NO: 11933 - DNA, 642 bp, Gossypium hirsutum
atgttggagatgcataatataaacccaaaatgtaaaatccctggtttgctgttattctgaagtaacatagactatataaacatatatacatatatataataagctcataaacaatgaagagctattatggttgctagtgttttcatcttaccccaataatgccaaaaggaagaactgaaccagcaatgaaaaagtaaggggtggtctttctttcctgaaattaattaattgatgaacattaaatactgtactattgtgaactattcaataagcaaaaaagtttatataacaggggcttacttttccaagaaataagcaaagggactcaacaaaagcaaagcaatgatatttctataaacaggataaactactttgctaacaccaatattaagtgcaacccttgacacaatatggaaccctgaaaagcataattgcaatgtaactaatgctagaacaagtttcattttgtatgaaacaatactctctttccccattattgcctgtttatcactttggttgaggcagtatcacaaatacatggttggcatatgctttataaacaaaccatggggaagaaccatttttttttttctaaaagcacatgcaaaaataatcatggcagtggaagggcatttcaatcat

SEQ ID NO: 11934 - DNA, 625 bp, Gossypium hirsutum
tcatgtaaggtattttaattctgctgctgatcatccctttgctacccatctgattagtaagcctattactattcagttcttcccagactgttgtgttaaaacaacagtacttggctcaaaacttcctggaaaaaacattgtagtaggttttaacctctagataaaagcccaacatttgagaatactcccaaatggagtaagattcaaaaatattttccaaccctttgtcaaaataccaaaactcttttctttccaatctgaaaagattcttcaaatcattcaggaattaaaaacccaatcatgtgtagattcccactcagaattcctgaaaaaatgcccaaatcctttatggaaaaacccagaattcttcattcaccttcccttaaagaaaaacgaatatattaatccaacaaaggtgagtcatcagggaatgaatccaaatcatttattgctagcagaacaagaattcaaggaactacaacagcaagatttgattgaaccatcagattcccaatgggcatgtgaagctttttatgtcaataaaatatctgagcaaattcgaggaaagttaagattggtaataaattatcaacctcttaaccatttccttcaggatgaccaggtt

SEQ ID NO: 11935 - DNA, 725 bp, Gossypium hirsutum
cctgtcaagaatagccaatttcagctctgtaactcatgaatagtgatgaggaaataattggttttggtttctgctggaattatttttctgaattacggttggaaattgagttgtttttgcagtaaaaggtcgtgagtttttttacccattcgcttcaacagtttcggctatattgtatcaggtccatcgatttagtttagttttattttccatttggtttaattttctgtttatttaaattttattataaaaatatttttaacattttaatatattagataaactaaactatttgggttttttataaaaataatattaaaaaaattaattatgaaaataagttattttctaccatgggtgtcacctaattaattgacagcactactataattttttataaaaataatttttattggtgttgttgatacattagcaacacccaactgaaatgtaatattgacagagatatcaaacttcacttttttagattgccgttgaaaaaagagaaggcttgaaggtgcggctgatatcaaacgtaacacacgggataattagttcataaactcttccttatttattattttctttttaaggtccctcaaaggcaatttgaaccaccataaaaagtggcatgagcattgatccatggtccatgagatccacgatggggatgatgactatgatgaagattccatggaaaaccatcaacaaagttgaacgacttg

SEQ ID NO: 11936 - DNA, 570 bp, Gossypium hirsutum
tatcagtcctccgccaagatgtcaaaagaattttctacccgatcgaatacttcggtggggtattctaagaggaataagaatcagcagaacatggtgtctaaagcccaaactacttcagttgcaggtgttggtagtgttcggccaaataggtcggagtgtcgcaatgtggaagatgtcacttgggcgaatgccgagtaaacgagaggggctgtttcaagtgtgagtcacttgaccactttatccgcgagtgtcctgagatggacaagagagagagaaaataagatgcgaaagcaagcagtgctccctttaggggtaggcctcaaaggaaccccgggagtgggactggtagtagaagtgcaccgagagatactgcgatgaggtccaaaggcaaagcactagcaatgacctatactatacgagcccggaaagaggcagagtctccaaacgtgatcacgggtaccttttctattcacgacataactattgtcgctttaattgacccgggatctacccactcttacatatgcatagatttgatacctcgtatagacatgcttatagagtccactg

SEQ ID NO: 11937 - DNA, 602 bp, Gossypium hirsutum
taaaaatagtaacgtcaacaaatagtcaaacatcctattgaactacttaaaagaaaactcaactcgtttatcttgcaactccaattccctgccttctcatttcccacaaaatttgcagatacatgtagggcaggtcatgaagtgcctactttcatcgcaagtaaaataacaagaagtgtaactatggataaactagtaaagaatataacaatgaattagatagatggttttcatgaattccaaattaaaaacttcattaacctaaaaaacctaaatatacaataggctcctacccagcctagtaaataaaggagcaacgcataaaccatctaagagaaatgaaaatttactgcaacattatcaaacaaaagagaaaacaataatgctataacaaaggaagtactgaatttgaagatacaaaaacgataacaaagaactaaacaaattatacctgattgtaatttaaagcctcggcagtaggatccatagccgcaagggtacctacaggcttgcctttgtaatatacgtaagatttctggaatggttcccacgcttcctccaccatcgcaccattctccgcgctcccctcaagaaagccgttc

SEQ ID NO: 11938 - DNA, 654 bp, Gossypium hirsutum
cgaaacctaaacacctttggttttttggtttgagaaaaaaaatagtacatccagagaatggcaaaggcaagttaaaaaaatatatatacatcttctggtaatttcataaattttttctttaacctgcctatgccattctgtacaacaatactgaatgtccgacatgtctttcttccatgttggaaagttaaattagaaagtatatcagataaagggcaaagacaagtcagagaaatattgtcttcttcccaaaggcgtggaggggttacattctatcaacaagtttagtattgtttttgtattggagttcagtctccaactctgcgaagagctttagtggattcacagagataaagcatgttaaagtagtcgaatagaaaaacttgtctgaaactaaagagtttgtgcatgatcagacttgatcctcatgaccaataagtcatttatggggagaattactaccacttgagctagtcatgggatcaagtccaatcgcacacaagctttcaatttcgtacggtttagtctgtttaagcactttaagactttcgctctatgaattcacaagaattcttaacagagttaaagaacaaaatcctgatacaaaagaataccgaacttgctggaggttgatgaccctcaacaagggatagc

SEQ ID NO: 11939 - DNA, 420 bp, Gossypium hirsutum
attatattaatctaaattttatcattaaactatgactttttaatactgaattttgttgtaattttattttaatttcattattattgtgtattatgattttaacttgattgattttttaaacaaaaaatatcgaattttaaatagttcataaaatattctagtcatgcaagtcacaaatgttgattttatgttgttttattttattggaaaatcaattttaatttgcggtggaaaaatttaatttaactttttttaaaaatattcgtaactatttttttaaggttacgacttactattatatcaacaattgtaatcaggatcaatcaataaaatattaaactaaacatttaatccaattcgtaattgctagacccagattagaccgatcgattgaataaaaaacaaataggattagcagtt

SEQ ID NO: 11940 - DNA, 175 bp, Gossypium hirsutum
attaggtggctttatttagattatggcgacatgttcaaattaagggaataattgagttagcatgtcatttcatcccttgctcaaattcgtttttcggtatgtccaaaaaatctattttattattcaaaaataataaaatatttatttttaattaatgtttaaattaaatttatat

SEQ ID NO: 11941 - DNA, 681 bp, Gossypium hirsutum
  misc_feature (615)..(615): n is a, c, g, or t
  misc_feature (620)..(620): n is a, c, g, or t
  misc_feature (625)..(625): n is a, c, g, or t
  misc_feature (627)..(630): n is a, c, g, or t
  misc_feature (633)..(634): n is a, c, g, or t
  misc_feature (650)..(650): n is a, c, g, or t
agacaccttattgtctcgaatttcgtgaatgtctacttggtcccctttcctatccggatctgttttttcttttgcattgcttcagtctttgttgatgtgggagaaagaaatgaatgaatgtttagagtacattcaattgtgtaaataatgatttgttgaataaataaataatcaaggatttcaggtttatgtttcccacataagctattcatttcttatgggtttctgtaaaacaaagttttaaataagatttaggatcattttctccatgcagggagctagagaaagggatttcaaaagaaaaatgtatggggagctgatactataatttgtaggtcttttatgattcaagtattatgaatttatgatagcttgaaccagaacagtaccaaatatggaattaaagtgtccagattgagagcagcattcgagaataagaaagctgatcctggttgtcggtcatctggtttctaagggaatacaatggaatttttcttaaaaattattgccaagggctgaactgactcataaataggagttcttgatgtagcatattgtgcctaataggcatgactatacaaatcttatatttgcttgactttctggcaaacatanaaaanagatngnnnnaannatgccgattaggttcnagatgctacatcaagaacttcctatttatga

SEQ ID NO: 11942 - DNA, 744 bp, Gossypium hirsutum
gtccttcatgcttaagccaggtttttctctgttgatttgttttgttggatttatgataatgttagaaacaaattttgaggatgttacctggtccacgttatttagctgggcaaaaagcatatttcaacgggataattagtgtgtgaacactacagcgtgaggctaaaatttagaggtaatggttgggaacttcgggaggtaggttgggttaaattgaatactgatggtgcttaagtcgagtacgagcatggcatcattggatggagttgcgcgagatgagcagggacagtggatggtggggtttagtcaaaacctcggatattgtagtattgaacaagctttggtccgaaagggtacgccgggtgcagatagaaagtgactgtattgaggcaatccaggcatgcaatgggagagataaataatgcggccaatacaacgttgtctagcttaagaaacaaaaaacactgtttgtggctgtgcaacactacaaaagggtctgtttgtggcactaaataagagaaccaaggtgtaattgcttttgtaacctttttcttacccaaaaaagaaaattaatcctaatattatttttactaattaaaccataactcggcagaactgaaacaaaagtcctaccttagagggatgctgcgaccataggtttaattagtaaaaataatattaggattaattttcttttttgggtaagaaaaaggttacaaaagcaattacaccttggttctctta

SEQ ID NO: 11943 - DNA, 364 bp, Gossypium hirsutum
ctagccttttctaccagtgcagcaaaatcgcgctctctctgcggagctatgagcacccttagctcatccctgaggcaatcctcaaagcgaacactgtgctcatattctgtagagacaataccactagcataccggctcaatcgcagaaactctgccctatattcagcaacgatcttaccaccctaggtctaggtctgggtcaggttcaggaattccttccttcgcgcatccatatagctagctccgacatacttcgccttgaaggactgcttaaacaactcctaagttaccctctcagctggggtaccctctctcacagtgatccaccactgatatgcctcgtcccgcagtaaggacaccgccc

SEQ ID NO: 11944 - DNA, 645 bp, Gossypium hirsutum
ctttccctctatcggagatgatgcaaatattatcgttgctaataacatacctccgcaggttggtaagaaagaactcccacgattccatgttctccttatcgacgatggcaaatgctatcgggagcacgttcctgttgccgtcttgagcaaccgcaagaagtaagatctgtgtgtattttccatatagccaggttccatctacttgcacaaatggtttgcagtggggaaatgcgcgcacacattgatcaaacgtccagaacatccgatggaaaattctttttctcgattgtagttggtcatttggcccgtaataagatcgtgtctgcaactcaattacagtccccggcacgtgttccctcatggcggctatccatccctgtaactcattgtacgatgcatcgaaatctccgtacaattgctccattgccatctgtttagctatccatgccttccggtatgatactcgatactggaatcgtgcttgtatttcggcaatcagtaccgaaactttaatggtcggcatgtctttcaccattggcatgatgcatgtacagatagttttggagtcaagttttcgatgatcttctgtcatacgtgttgaagtgcatgtgtgaggcccaacaaattttcgtatctcccacatct

SEQ ID NO: 11945 - DNA, 555 bp, Gossypium hirsutum
atttgtcaggcagcattgtcagaacactataacaaatacctattttcataattaatctgttttccatattttttttcataattaattattatttttatattatttgaataaaaaaccattaaaaaatctacataaatattttaattactttctattgtataatcataaaaaattgtcatgtgaagggaagttgtctaaagttgaaaattttgagttattatatatataaaaaagagttggggggttggacgtgaaaaggaaaagtgttggtgtaacaccccctaaccccaaaccgtcgccggaacagggctacgaggcattaccggatatatcagataacttatggatattttacaattattataacattcatagtataattgaagaattatgtccctataatggactttcgaagcccaacacaagtattaaagtggaatgaaacgggacttgttcgagtattcagggaaatatatatatattttttacaaaaaaaattcgacagcatttcttcttaatttttacataaaaccccctgcaaattcaaaccaaaat

SEQ ID NO: 11946 - DNA, 604 bp, Gossypium hirsutum
cgagatgggaggtgttgattagtagcaagaaaacaaaagaaaagttgaaaagaaaagggaaaaggctgtcccttgcttcttctttttttgaaggaaatgtgtagagagggagggagagagagagagcgtgttttggggagagaagaagagaagagagcccagaaatggtgcagaggaaacgtgggggcaacttggaatagggagtgaaatagtgaggcaatcgtgtctttcatcacatgtatgagagcctacccatggcactgtctctttcttagctgtttacttaatattctttcctttttttcttttcaggcttaatgcccctgccctcaaccatcatcaaaccctgtatccacaccattcttttcttggccccattatcgcccttttcaaaaaggaatggttaaattttgatattagtccttctagtataactaaattatgaatttagttcttatattttacttttgtcattttcagtccttgtactattttgaagttttagtcttgaccaaatggtggttgttaaattcacaaagttaaatttttttattttcaaaatttaatacgataaatatattattgcacatgtaatggtatgtca

SEQ ID NO: 11947 - DNA, 637 bp, Gossypium hirsutum
  misc_feature (29)..(30): n is a, c, g, or t
  misc_feature (623)..(624): n is a, c, g, or t
  misc_feature (629)..(634): n is a, c, g, or t
tatatatataaaatccaccattaaaatcnngggaaaacactaaatatttcatactctgatcaataccaaaagattcagtaaataaaacaaggaacctaacccaaagccttaaatggtttcattagtcttaattaacaaaattccttttaatttttcgaatgaaaatggtaggcttaatcatcaatcaacagatccccaaaaatgtaccttgctattactgataaatacaaaataaaccaccaatggttcaagtttcagcattatcactgatcaattgactcaaaaaaatccaagttatattctcagcaactttctcatcaaccaaacaagcaactacagggaagaaaaaacaaggtacctcgaagaacagcaccgcagccaccacactggtaaacagaataatcagcaagttctggaagaaggttttcacaatttggacaccgaactaaccttactttgttcgactcagccattactgagtcattcaaagaacctgtcgagtaaccgacgaataagaaaaagacgttacacccaaaaaaaaaaaaatttaaaaaccttccaaaaaaaaattttgtttaaaacaacttaaaaaaaaaaaaaaggccccggcaaaacccttcccnnaaaannnnnngaa

SEQ ID NO: 11948 - DNA, 650 bp, Gossypium hirsutum
tcactgggttctaccattgttctcatgcggagatttgatggcaatgaagcggtgaaactaattgactactacggagttactcactttccacttgttccacctatactaacaacattggtaatgacagccaaaggtgctaccaatactgaaaatagcttcaagagtttgaaacaggtttcttgtggtgctgctcccacaagcaggaaaatcatagaggacttttttcaggttcttcctcacgttgatttcattcaggtatatatattaaggcttagcacttacttggtgattaagtaactattagccctagaatttgattcttaagcttgattgaatgttatatgttaatagggttatggcatgactgaaacaagtgcagtaggaactcgtggattcaacacccaaaaatgtcataaatattgttcaataggacttcttgccccaaatatgcaagctaaagtgatggattggaattctggctctcctttgcctccggaatattatggcgagctttggctaaagggacctgcgattatgcaacgtaaacaattaacgaactcttcattaaaatatggggtgacctcatactttgaatatgattaagtagcttatgtgattttgcaggatacttgaataatgcttgtgtccac

SEQ ID NO: 11949 - DNA, 759 bp, Gossypium hirsutum
  misc_feature (617)..(619): n is a, c, g, or t
  misc_feature (712)..(713): n is a, c, g, or t
  misc_feature (733)..(733): n is a, c, g, or t
  misc_feature (735)..(737): n is a, c, g, or t
  misc_feature (751)..(752): n is a, c, g, or t
  misc_feature (755)..(755): n is a, c, g, or t
caagttgacatgacgttacacataatataatatatttgtcgcatcatattatgtaaataacataacttaataaatttaaccactatcgttcaataaggctaaagttttaacaatataattgctcttttgaaatgtaatagaatatatttttttcacaattttgtgatggattctgctatataataataataaaaagttaaaatatgcctaaatttttgtactcctcacaaatttgaaatttaattcatgtatttttattttcaaaaactaacctctatactttttagatttcaaaatttaagtatagttgttaatttttattattaaaattttttgtatgtaattttgaaagaaaaaaaattagtaacctgtaattaaaaaaatgatgttacaatgaacccaaatttaactaaatagttttaattgtattatttaaattaaaaatttaaaatctgaaaagtaaatactaaattcttagaaataaaaatgtaagaaccaaattctaaatttactaaaattataaaagtttataaaaaacaataataatattaattcttggattttattttctttcaccttgaaatgtcacacaatttatagtccgccatttggtgtgnnntttcaaggtgaaagaaaataaaatccaagaattaatattattattgttttttataaacttttataattttagtaaatttaaaatttgtttctnnactttttatttccaaaaatntnnnatttactttttacnnttntaaa

SEQ ID NO: 11950 - DNA, 657 bp, Gossypium hirsutum
  misc_feature (643)..(644): n is a, c, g, or t
tgatcgggctttaggtctatttgtaaagtgggtttataaattaggctataattttgggtttgtatttatggactataaacaattttaataatctatattttattattctttatttggtttataaatttaaaggcccgggcgaaatggaccttctacaattaccaacgtaaacaaaaattatcacaaaatcttatccagacctttttataaacacatggacaaattggactgtttttataaccttattttaacaaatattcactaagacgattgtaccatatacatccagaatattttaatctgtataaacctttttttttaatctgatcgagcaattttcatgagaaactctatatccttctggtattctaaatgcttcaaggattttcatataaatttcactatcaagtttaccatacaaataagctgtaacaacatccattagacacatgttaagtttttcacgtactgccagactaataagatatctaaacattattgcatccaccacgggagaatatgtctctacgtaatcaatgctgaacctttacaaaaaccattgtgctacaagccgtgctttatatcttatgacttcatttttctcatttcgatttcgcacaaatactcatttatatcctaccanntttacatctttag

SEQ ID NO: 11951 - DNA, 632 bp, Gossypium hirsutum
caagttaaggcgacaactcctaaatacatagaaaagttgaagtatgggaatagaaaatgttaagttatgttattagtccttgaaatttacaaaagttgtggatttagtctttgtattttttgatttggttaattttagtctctatactttatatatatatatataagtttttagtcttgtactatacatacaattgtagatttggtctacattcttaaattggaatattctcagtccttgtattttttgaattttgaaatttcagtcttgacgtaattgataacttgattttaatgagtaatatcatgtgcaaataacaagttaacatgatattgaacatatgattcgattaaaatttgaaaaaaaatgggggatttctaattttttttttaaattgaattgatggtcaagttggttaggacatcattctcattgattcgattaaaatttatctcaatcgcttcaacaagtttgtatcggttcactgtctaatcagttcaaagccatttcttagatcgatacctcgatcaattctcgatccaaccagttcaaacatccttggagatttctataaaaaattacattaaaatttaaaatcagattgaattggataactaaattgcttggactga

SEQ ID NO: 11952 - DNA, 619 bp, Gossypium hirsutum
caattaggtgtctcggccatctctcctcttgttggcgttgaagataggcgaaatctgctccctccaagtactctatggtgtccataaatcgaagagaattgtgtggattttaaaggacaaagcaaatatatagagagaggtcaaactaatatatatatatatatataattttggaatttctaaaatgatttttaaaattttcaagtgttaaaataaagtaaattgtttgggtgacaaattataaatttgtactctcctcatttatgatattatttacttataaaaattgataataatatttgttaatgagtaaaaattaaatcatcgagttaactctatggagaaagaggggagactatagagaggaggagaagagagtacttagagagggagtgtaatttggtggtgttgtgtttgtcctttgtcatgaaggttttggagaattatttaatagagacgctcataggttgtatatcctcttttaattggtgaatcgttatttaacgtaaatctttattagatcaactatataacttaacgtgataaatatggaaaagaagagaaaagagttttgagagagagattgtaattaggtagtgttgtgttcattctttgtcgg

SEQ ID NO: 11953 - DNA, 503 bp, Gossypium hirsutum
  misc_feature (446)..(446): n is a, c, g, or t
  misc_feature (495)..(496): n is a, c, g, or t
cagttcaccagaagaaaatcaaactttcagaacgggtgggcactcccaattccctcacagctccaagcccactatggttggggatttcctgcgtggatgaaaataaaaggggtgagtttggggaaactcagtgtgtaaattaacccaaccatagcctatatcagctcaaaccacaaaaatagaataagttggccttagcccaaaacagaattcaaaataaagcccataggcccataacagaacaaaacagatattacatgtttatgcaaaaacccaaccatatccaaccgtatacacccccgtaccaaccttacaccgtggggggagacaactcgacccacccaaccgctacacaccacaaaatttgcagcatgggtgcccgaacagataatgggaccgaatcccccaaaacagataatcggggcagagccaccaaaacaaatatntgtggcagaacccccaaatcaaatatttgtgggagaaccccccaatcannattttgt

SEQ ID NO: 11954 - DNA, 515 bp, Gossypium hirsutum
atctttggaaatagaggaagttggagttttagcccagattgaaactataaaacacatgatgacatctcccaaccaagcctaacctaaattaaagttctgagttttagtggaaccaacccacaccattacaaagctgaaccccaaattgcccataaatgggttgggtgcgctggatttttattggaaagatattggaggtgagcaggttttttattgtataggtaagcaaaaatcgtttcgactcaaaaattaaaaaaaattaaattttaaatcattcaaatcaactcaattttttttcgaattttaaattcgaatcaaggtgaaatttctaattcgaataaatcaaatatcaaatccttttatttttttgaccccaaactctccatccctcaaactcttttacttccccccaccccaaaattttacttctccttaaattcccaaaactttttttcttttattttctcctaaaacttttacttccctctcaaaaaatttatttcttcccaagccca

SEQ ID NO: 11955 - DNA, 655 bp, Gossypium hirsutum
  misc_feature (271)..(271): n is a, c, g, or t
  misc_feature (324)..(324): n is a, c, g, or t
  misc_feature (335)..(335): n is a, c, g, or t
  misc_feature (345)..(345): n is a, c, g, or t
  misc_feature (362)..(362): n is a, c, g, or t
  misc_feature (471)..(471): n is a, c, g, or t
  misc_feature (568)..(568): n is a, c, g, or t
  misc_feature (649)..(649): n is a, c, g, or t
caaactaaaattaattttccattaagaaacctttcaaaaaaaaagccattaagaaaaacacggttctaaaattcacattaatatcggttcacggcatcgggaaatcgttggaaatagaggaagttggagttttagcccagattgaaactataaaacacatgatgacatctcccaaccaagcctaacccaaattaaagttctgagttttagtggaaccaacccacaccattacaaagctgaaccccaaattgcccataaatgggttgggtgngctggatttttattggaaagatattggaggtgagcaggttttttattgtatangtaagcaaaantcgtttcgantcaaaaattaaaaaaanttaaattttaaatcattcaaatcaactcaattttttttcgaattttaaattcgaatcaaggtgaaatttctaattcgaataaatcaaatatcaaatccttttatttttntgaccccaaactctccatccctcaaactcttttacttccccccaccccaaaattttacttctccttaaattcccaaaactttttttcttttattttntcctaaaacttttacttccctctcaaaaaatttatttcttcccaagccccccaaacttttcccttttactttcttttcaanactttt

SEQ ID NO: 11956 - DNA, 605 bp, Gossypium hirsutum
ccggcctttgattgtgtttatatatattcaaacatatatatgatgagaggaactaagtccccacttttgcctctcatatgaccgaccactaaccctagaacttgacctaaattgctcccactatgtctctttctttccccttaagtattccttaatcggtttgcaaactactatccattttttctcttaggaaaaaaacctatatattaaaaccaaaagtaaaagagctgcaaatttgtaagcaaaaatatgggcaaggaaggtctgggactcgaaatcacggagttgaggttgggactccctggtgccgatagtgattccagtcaccgttgcaatgtaatgatcgataaaaatgagaaaaaaagggctttttcagagatttcggaggacgacgtcgaggagggaaataggaagaaaacgacaatcaagaatcaagttgtggggtggccgccggtatgttcatatcggaaaaagaatagttttagtgataaagatgggtcggttaaagcatcaaagatgtacgttaaagtttgcatggatggagctccttttcttcgtaaaattgatttaggcatgcatgaaggttaccctcatctagcaaagac

SEQ ID NO: 11957 - DNA, 550 bp, Gossypium hirsutum
tccacaaccacaaccacaaccacaaccacaaccatctagaagtcataatagaacaagtattaatgaagaagttgagaaaaatccaaaacaatcaatctcgcatttaataacacatttaacaataatagtacaataattatcattaaatcttatcgttctatcttttcaagactttttttcttcttttttctttgtttttggcattgggtttaaattattatttatcattaaaacattgtcaatttcagtacttgtctcattgtttacaagaaattctagaaatatagtactgtgtttttgaaaaactgtgaatcttgctaatctgggttcacgccaaattccattattgtactctactcgtggtttatttctatttagttttccaatttcttgtgcttgaaaacaagtttcaaaaaagttccttttctagtgcttgaaaatggggtattaatgacctttcagtactactcctaattgtgtataaagttgttcaaatttgtgtgattagccaaaggatgggaaatcaatggcatctactatacttactttt

SEQ ID NO: 11958 - DNA, 575 bp, Gossypium hirsutum
  misc_feature (59)..(61): n is a, c, g, or t
gatgagacgaagacaccatgcattgatgggtggtgaggccccatattgactatcataannnttttttctgtagctgatagattcataagtttttcctcgattcattcttacatgaattgttgaaaacgaaaacaagtacatcaaaatgaaaatctaataaatcgactaattcaaaatttgcaaattaacgattttttgattcccgaatatccaactcaccaattaattctttataacgtattttatttgtctttgataaataagatagcagtcgttgacgttttcctagaattttacgtagacctctctgagataaatagtcttttttgtgcaattccaaatgtgaagtaagtcttcgtatcttattggtgaaactaactatttgaaattcagcagaccccctgttttcttcttttttttcttgaaaaataactgagatgaatgaattttttaccataaaaccaaaaaatttccccctttttttgaatgtgaattttactgatcagtaataataataccagtcattttgatatacacgatgattttaagttcgttatgaactttatcattttttt

SEQ ID NO: 11959 - DNA, 635 bp, Gossypium hirsutum
aaatgcccctaagccctttctttcaaattttatccatacatgcccattttttttccaaaaaattagaaattgggcaaattctctttaaggacttctaattaataatctaaagcaattttatacaaattgcttctagaatccaatttttgcactttattcaatttggtccttaatttccaattggacacattactcatagaatttcttcatgaaactttaacacatgcatatactcatattctagatctaataataatcataaaataaatattttaacgtcagattcgtggtcccgaaaccaccgttccgactaggccctattttaggatgttacaatttttgaattgaatttgtatggatatatatgattgatgtggaaattgaatattggatatatattatatttgaaaaatatgttgattgggaatgtgatgaaattgatatgaatatgtgattattgtgaaatttgaatatttgttattgaaaagtgaattgaattgtattgaattgagaatatatgtgattaattgaaatgtgtactgattggaaactggaaagtgaattgaataccctattaactgtattgggctaagtcggatatagttggcatgccataggattggaagagttcaggg

SEQ ID NO: 11960 - DNA, 621 bp, Gossypium hirsutum
gccgagaatacttttcaaatcgtcaaatcttgacggaatcaaagcctaatgaccaagatggatatagttgccaagttcaggtaccaatgtaaacctaattgacaagtttaggagcaaaaaattatattatccctctcaatgattattaaactttttattgagtttatagggcaccggcttagctgggtaatgacaaaaatgtcctaatttttacaaagtaaatgatattattttgaatgtgtttttgtcattttatatcgtttatataaaatatatatataaatataaatacacaaactaaattttgaatccaaatctctataattttcaacacttgtacttacaaatgcgcttcatttattatttatataatttttataaatatatttattatataataattattttttgcataataaactaatttgtccgttaaaaaaagtcaaaactaaaaataaaaaacctatgcagcatatttttttaacattaatctcattataagttcttatcatatctaccattttttgataaaatgtctagaactactcataattccttcccaacttttgaataggagaataatgcgctttagtacattcgaactcacccacgtccttctga

SEQ ID NO: 11961 - DNA, 645 bp, Gossypium hirsutum
ctattgggagcaatttaagaagtgtgcaaattgcccacaatatggtataacagagcaatctctcatctaatacttttacgaaagcctgaaacccatggagatgaatatggtagatgccactagtggaggaacgttagtcaacataactcctcagcaagcaagagacttgatctccacgatggctacaaattctcagcaagttcgagccaatcttgaaccccctaaaaaggttcaccagctaagtaattctaccattgaggatagacttgaaagacttactaatattgtgaattctcttattgcagaaaaagaaaaaccggcatgagtatgtggagtatgtgctgcacctgaacatacaactgatgcatgtcccagtctgtatgatgatactatggctcatttagatgctgtgggaaatttccctgggccaccacaaagacgatacaacctttacgctaatacctacaacccaggatggagggaccaccttaacttgagttatggggtcaatccacgatacaactagccataccaaaatcaggttccacaatagccgcaagattcagctaattctctaaaaactttggttaatcaattagcattgagaaaatgagttctcaagggaagttgctgtcacaaatagaa

SEQ ID NO: 11962 - DNA, 649 bp, Gossypium hirsutum
gtgtcttaatgatggagagatctggtttttactgattggaccccacaaagggggtgactgtgagattctcgtcagagaaaagggagaagtgatgggacaaatgacgtgtgggacccagcagtagtgggaccgtgtccgaatctctgtcgttacttctaggttggaatgagaagctatgataacccccctttttctttaatgaaatttttgtccctttcctacaagttaaaaattttatatatatatatctcttaaattaatttgtcaatggttaaaacttaaaagtcatggacaattatgaacatgacaaaaatataaatacgaatattcactaaaaaaaagtggtttaaacaaaatataaatggttaatgtcatatttaatcctttaactttaatttaatgtataatatggtatttgcacaaaaaatatttaatgtgatatccgtgttattatgttatctatcaatatgccctaaaatcttaacaattttaaatttatttgttgacttgacaacaaataaatagatgtcacatgtacggttattattatttttgtatctatagataaaatttattttctcaatcaataaaaagattatgtaaagctcaaaatcaattatatgataacacaagacatttagcatgccac

SEQ ID NO: 11963 - DNA, 687 bp, Gossypium hirsutum
  misc_feature (637)..(637): n is a, c, g, or t
  misc_feature (649)..(649): n is a, c, g, or t
aattagtccctatattctgcgtaagttatgagtttaatccatgtattttagtaagcaggtaaatctgtttgattaaattttgctatcagtcttctactatgtgcaaagctatagatttaatccatgttttttaattgaatcattcatagttcctatattctttgaatttcggaatttcaatatatttttttgcgcgtgagtaatttgggggaaaaaactaaattaatgaatttaacaaatatcatttggttaggactgaaatttcaaaattcaagaaaatatatgtattaaatttgcaaattaaacaaaatacaaagactaatgatagaatttaaccaaacataaaagggcagtgccaaaaaacagaaccaacaatcatgattaaagtagtaattaattttttaatgttggattattgaaagaaagaaataaataaataaagtaaaggagttgccctaatgttgggaggagggtattattgggagcaagatacataataattcaaatctaaaagttgaatttaaaaacagaatttaaagccaagttgaaaacatcccaagaacaaatgattggggatgaaattattttttcatcaatgcttatctaagttttgctttacaacaagcaaccaaataangattccatcttngcttatctaagttttgctttaccaacaagcaaccaaat

SEQ ID NO: 11964 - DNA, 565 bp, Gossypium hirsutum
  misc_feature (59)..(60): n is a, c, g, or t
aatttaaatcaaataagcaatacatcaaacagcttaacaaaaaagaattgcagccacanntcaaatatagaagaaattgaccagaaactggatacctttaagtgtttcaagtcttgattgaagttgaaacctttcctatcgacgcaaaaaattataaatcaaaattcaaatagagaaataaaaactttccacatttacacataaactagcaagtagagtaattgagtaatgacctctttctctttttctaagcggtcgcctaatgaagcacaattttctcgaaaatcatcatcgaaatcgtcctcgtctgccaaattttcgctcataagctaatgtacacatcctcgataaacacagaaaaataacaataataatgtttataaaaagaaattaccagaaatgctctgatcagaatctggattttcctaaaagcaaacaagtagtcagtaaataactaatgatgatgaaaagaatataatttgtttttcagagggaaaaaaaaagtcaatgaggaagtcattacctgaaatgcgtttcgccgccacattccggagctccgctcttc

SEQ ID NO: 11965 - DNA, 569 bp, Gossypium hirsutum
ctccctgggttcactacataaaaacatagattacttaaacaaacaaaacttacggaatacacatatgcaagcaaacctagcttcctagacaatcaaccctaacaggatagagacttaccttagttgctacaaacttggtttaaaatagagacttgacggcagaataacgatgagagaattttcatggaatatgggttgtatataggcactaagtttattaatgatcctaagatcccttacttaacttatgaaaccctagttagtttggaagtgtaacagcccgttttcagtgaaattggaacagtggttttgagacaacaaatcatactagtaaattataattttcttattattataatttttatgggatgttagtaaagtcgtattaaaattttgttaagaaattttgatgtttgcatgatcaactaagtgaaaaggactaaatcgtaaaaagtgtaaaagtggagttctattaattaaaagggctaaaaagctatggaaatgaaaccgagtggacttaaatggtaattagaccatttatgtggttaaaggatgttcatgatgtgatt

SEQ ID NO: 11966 - DNA, 462 bp, Gossypium hirsutum
ttttttttaagacaaccatgtgacaccagaggtcacagaaagcaaatgggacttaacgttcttttcttcaatcagaacatattcttgtttagccttaaaagcctcaacagtgccaacaacacttggcaaatggtatatggcttacaacacaagggatcactccttttttgttttctctttgtgctttcataggttttcttgttggaaaaacaatcctaaaatattattttgcacttgaaagaaaaacacgcatacatacaaaacatattccggtttggttgggtgaactaattggggaaatgggggcatccatagcaaaaatagccaagaagttggggttccttcctcagtgtagaataaggattgtgatggtgggtcttgatggttcaggcaaaacaaccattctttataagctcaagcttggagacctgcttaaaaccaagcccactattggtacacata

SEQ ID NO: 11967 - DNA, 647 bp, Gossypium hirsutum
gttgagatgaaagttgtaatgcgacggtgatttattcctttgtattatcacctggagcttcatcaaaaacttcaaaatcttactcaaagaactaagagcgtagaagactattacaaggagatggaggtggcgatgactcgagcgaatgtgcaagaagatcgtgaagcgactatggctcattttctagctggtcttaaccgtgacattactaatgtcgtcgaacttcaaaattacatcgaggtggtacatggttcacatggccattaaagtggaaaaacaaatgaagcgtaagggtgctacccgaggctactccactgtaaatccttcaagatagggacaaggcagtagcaaaagctttccatcaaaccgagcgaaggagtccacggtgttgcttaaggcaaataagcctttggctgaatcaagcaaaggcaaagctatcgagagttcatccaaccgttccagagatattaaatgcttcaaatgtcttagaagaggacatattgcaagtcattacccaaaccaaagcaccatggtgttgtgtgctggtggtgaaattgaaacagaggatgaagaggaagatgagcccgaattgaattttcacgaagaaggatttggaacaccctgtcgaaggtgagttgcttgtattc

SEQ ID NO: 11968 - DNA, 694 bp, Gossypium hirsutum
acatatatgacagctttgctgcgtattattatctgaatagcttagtccacatacatgatgtgtagggttggatgggcctttcaagttcctacgtggtgtgtttggatggatgagcttaaacagctcttatggagtgtgatcggaggacggagtggtgtttttgctggatgggtgggttttgatatttgattgcatttatacgcatctggatgtaagtgccttgtctgtaatctgtttgttcgttgtaaacgttttgactgatcttgtgtgcattttggtgttgcatcataacaattcgggttgtgatgataagcgtttctgtttgaccgttgacggctttatcggttgggcattttgtgtgtgatttggtgtacttaactgttacgtttatttggatttttattctacaagtctgctgttttacaccttttgaactcacactgagctcgtgaagctcatcccctttagtgttttacctttcaggtacatattcgtgttctgttgctggactcagtatgcagaggtctcgaaagcgccatgtttttttttaaactggttaactaagtgttatctataaatctgaattttatgtaaacaattttggacggtaagttctgtttcgaataatgtaatgtttttcgagttgttaaattaaaatttctcatgatcacttcgatgaatagtgtgacttctg

SEQ ID NO: 11969 - DNA, 396 bp, Gossypium hirsutum
  misc_feature (364)..(364): n is a, c, g, or t
  misc_feature (371)..(372): n is a, c, g, or t
gaggtggcataaaggatttcaaaattataaaatggatctacttttttggtaaatactttaaattttatgtataattaaaaaaaaagtaataactcaatttcttttaaaacaacattatcaatatttaaaatatatgtaaaatatttaaaatgacattaaaaggctaaatttgattaatatgcccaggtttttttttcaatttgacctttagatcaatttaaaattaattaagaaaatatatcgtttttaggaaagagaaagtgaaaacttgtccaactgggtgtattttctgcacagatagtaggcccgttgcatgagagatgcatgcaaaaatcggacctcttaccggtacccataaatttcnaaatgannttacgtcaacactataaaaaaaaa

SEQ ID NO: 11970 - DNA, 600 bp, Gossypium hirsutum
ctttaaattgttttgcacgagcccttgtgatcggcccttgaggtagcaccatcggatctcggcttagacttgacttatgggaagccgtgatcgtatcatcctccccctcttgaaaatgacttgtcctcaagtcagtatctacatcaaaaggagtcaagtcagagacattaaaactagcactaacattgtactcacccagtaagtcaagcttatacaattttcattgattcgctcgatgacttggaaggggccgtctcttcgcggcaacaacttagatcttcgttgagccagaacctttcttctctcatgtgcacccagacccagtctccgggttcaaatacaactctttttcgccctttgttggctcgttggacatattgctcggttcgagattcaatattctcacgaactttcctatgtatttccttgacaaattcatcctttttccttgtatctgtatggacaaattgatcaataggaaaaggtaataaatcaagaggagtaagaggattaaatccatagacagtctcaaaaggagagaatttggttgccgagtgaacagagcgattatacgcgaactcgatgtggggtaagcattct

SEQ ID NO: 11971 - DNA, 550 bp, Gossypium hirsutum
ttcttggcgtggttgattatcttttcttcttttgttgctttagagttgtctaaattttcatttgttatcataaaatagtgttataattatattatcaccgtcaaacatagaatgacggtctcttttgtctcttttactatgtgcaattgtcacccaaaaatataatattttcaacaaaactaaagtctttatttaagaaatacattctctaggaaagggtttaatttctttttggaggggaggatttctttctaagaaagggtcgttttcttttattaaaaattcacccattcccaaagactatttctagcataaaaaataaaatgtcaatttagccaagtcatgtcaaagttttagagtggatttagatagatgatatatttatttatatttagtgtaaaaataataataacaataaaataaaattagatacaataatataaaataaaaaataaattaaacacatcgcatcgcattatccacccatctaaacctatactatattattatcatagtgaaatgggtgaaatctgtgtcaagttaacagccg

SEQ ID NO: 11972 - DNA, 654 bp, Gossypium hirsutum
acacacatgccgtctagccttataataggggtttaattgcctattaggttcttccttcttaacatttaagctatttaatcacttcagcaattttttgctccttttacaatttagtcctttttaattaattagctattaaaacgttaaaattttctaacgaaacttcaatactaactcaatgacacttcgttttatgaattcaaggtcttgatacctcgtttttgacccaatttacctaataaattctttttgattctcaaaattcactaattcaaaaatatttctaataccatacttgacttataaatgttaatttatttaaattttcaaactcactcatcggatttagtgatctcgaatcactgtttctgacaccattgaaaattaatctattacacttttcacacccaagtttgctttcaacctacaacaacacttaaatatattcaccaaccaattcaagaaattaaaaccaagccaaaatcaatcttatacatgatatatcatcacatgtatttaagtgttcaaacttacctatttgtataatcatataagtttatcaaaattcaacctatcataccaagcacatatatattaagcatgatataatctcctacacaaacatcaaatatacatcactagccattccaatgc

SEQ ID NO: 11973 - DNA, 600 bp, Gossypium hirsutum
aatccggcagtagctttcgatctgttgtgatcttctctaaatttctttaaagtcgactgaaatgatttactggatgttcttttacgaaaatctctagcttcaaagtcagcctttctcttctctttctcgagttcttcggctttgcaagctcattcaacaagtaccacaaactcttttatctcaagtataccaactaacagtttaatatcttcattcagcccatcttcaaatcacttacacataacagcttcagtcgccacacactctcagacatatctgctaagtcgcacaaattcccactcatattcagtaacagtcatacgaccctatttaagttcaagaaattctttacgtttctgatcaatgaatctctgattgatatatttcttacggaactcagtctgaaagaattctcaggtgacccgctctttcagtacaacagacactagagtattgcaccaatgttaggcagagtcacgtaacaaggatatggcatatttcaaacactcgtcgggcatacatgacaattcttcgaatacacggatagtgttatcgagccaaaatttagcccgctcagcatcatcattaactgtggcccta

SEQ ID NO: 11974 - DNA, 653 bp, Gossypium hirsutum
aacgacaattaatggtttagtgactaaaatgttacaacacgttaatgtaagtgactaaaacgtaacattgcaaacataaatgactaaaatataatttaaagaaacaaaaataactattttaatagtttacccaataagttaataattcttatatagtagttgtatagaaatgtttagcatacatatgataaaattgtaaacaagtgtcatgttaaagaaaaaaataactttcttaaattttattgatgttgtctactttaatacgttagattcatgctattcatgtgatggatacatacattccacaatttaactcaacgtattttaagtatgtctcgaattggtattaaacacttaaattgaggattaggttgaaattaaatgattatcagatgtgaacgtttgaaaacgtgagcagtttggctttaacacccaacaaccctccaacacgcgtactgcatgatcacaggtaaacaataatatcttgttctgtcgttacgtatcattgcctgaaaagtgatgaaagttgaaaaggaaggcggaaatttccatgtgattaatactttatttattgccatctataaatcaaataaaattattttctatccactatattaagtaccttaggcatttttcctcatcaccatcgtctg

SEQ ID NO: 11975 - DNA, 677 bp, Gossypium hirsutum
ggtaagatttacctctctactttaatagaattaagggtgagcaaaatttggttcgactcgaaaaaataaaaataaaaagtttgaatttcaaattattcgaatcaacttgattttctttttcgaattttaaatttgaacaagcaaaatattaaaccctttacttcctcccctcaaatcttttcaagattttactttacaccaaatacttttttctttgtactttccccgaaatttttattttcccctaaaaaatattacttccccaaatctccaatttttttttccttttacttctccccaaagtttttacttccctttaaatctctaagatttctttttcgaatttatgtctattatttatattattgaattaaatttcatattttgtactatttatattattgaattgtttgattatgttgaatctttatcaatttttattaaaattgaattattaatgatatagttgatgatgtcataaaatattcgtgctaaattttaaaaattaaactttttagatttaatatatattttttaatttcaaaatacataataacagaatcagaagatcattgaagctactaagcaagtaaagaaactagtatataaaatattaataaattataaggggatgaacgttaataacaaatttaattacgatggacaaatttgattac

SEQ ID NO: 11976 - DNA, 415 bp, Gossypium hirsutum
gcccttgattcggtttgtattatcttctaatccaatctatttgctatctccgaagtttgttgggagaaaagcttgaccgtattatgcgaacgttttggtggggtcatgatccgaatcagaggaaacttcactttgggaaaccgaaaaccaatggtggacttagtattcacagcatggagtgatgcattacttagtaagcaggcctggaggttactgactgaaccccaacacttcgccatataggaaaatatcatcgacaccaacatttctttaatggaagagtttagttgaaggagacgagatggttgtttgagtggtattgatatctaaatttgcaaggtgcaaacaactctttttaagtgactaggtgatggatgatgggtagacaaactttctaacccacgcttctcacact

SEQ ID NO: 11977 - DNA, 680 bp, Gossypium hirsutum
tgctgctgtatagtggaagaatccgttgattttacgtataaattatttaggaaagatggtgcaatttcagctttagagctaagggtggttaaacatggaagctttgatgaactcatggatttctatacatcaaagggagcttccatttcccaatacaagccaccttgttggcttaaatctgaggaagccataaagatattgaatccagggatggtggggaagtttttcagccccaaaacaatgtcttaagctgcattgtttgaggattaatcaaacattgtggaggtaatcctacaagctgaaattgcaggcatggacttgacaaaggatcttttcatgaaaagataattcaccgaatctacagtttctgaatttatgccattatatattattttttctctcttaatattagtacgtttgagtttttcttttttatccgatggctacattagactcaaactatttcgacactgagctggatcaaaacttaaaaggaataaaagggtcttttagtgcctatttaatatggcaagtagtttatgtactgattcccaatattatttaataataaataattaaatattttatgaaataatgaaagaaagataaatatcaatacaaactaaaaaataataataatatttaaacctactaacagtaccttccaaatccattacagg

SEQ ID NO: 11978 - DNA, 643 bp, Gossypium hirsutum
agagtaggaaactatcataaacctgttcctccattggcgcatcaataaatacgataggaaaaagtttctgatatgaacatttagatcatgcataatattagaagcttagtccttgtttaatagttaaaactatcttacaaaaatcgaatatcttcctatggaagctgacccctcgtagcatgcaagaagcataaggattacggttttgttgacttaaacgacattttcgaaacatccatcgaataggtgaagcatgtgaaattatagagctaaaagtacacttacattctcatgatccatgtgacgaagaagcttgatttctcgcaatgtcctcttggcatcgatcctgttgtcgaatgcattgctgattttcttgatagcaacctcctctcgtgtctctgaattcacggcggcactaaaaagaacaaacagaggagcaacaatggcatcttagcttcatattattaataacataaagacagcaagccttaatacagccaaaacttgagctttagattcatttttcatttagaagggtaacacactgcaaaaatacagctaaaaatgctgatgaaagccagtcaaagggtcacgcactctcaacactacatgaaagtaaccaaaggctaaggtcagtcaattc

SEQ ID NO: 11979 - DNA, 419 bp, Gossypium hirsutum
ttttggcatttaattttggtggtattttctttacttttgggggtaaatgtttgagaaaagatttctttccaaattcttggaggaaaaaattaaaatgtatcgtgccaaaataaatttaagggctataaataaagatcaaatcagaagaaaagcctcacatctattctttgaatatttcaagccctaaacaattccttgttttattgatcttcttactttcttctcctcattgggttcgagaaaacttaacaatatttaccaatgaccaatattgagaaaatctcgtctcttcttgaaagagcataagtacaagatgtccaaatctcaaggaaagccattaccagccttgaggttcttatttctaaaatccctaaaggttctcaaatagtgccacaaactgtgggcagtatctcagacac

SEQ ID NO: 11980 - DNA, 445 bp, Gossypium hirsutum
tggtcctgccgagcgtataaaaattgtcattttaacccactgcatcttcaatggtcctgccgagcgtataaaaattctcattttaacccactgcatcttcaagggtatagaaattgtcacttcgatccactctactgcaatgttagggagataggatttgttgcttcaatctactccactgcgacttaagggatatacgacttgtagcttcaatctgctattgtaacttcaaaaggataaggtttgtgactttagtctgctccactgcaacttcatggagatgagacttgttgtggtagatttaatccgacctactgcaacttcaaaggtataggatttttttttaatccgctccactgcaacttcacggagataggattggtggcttcaatctccttcactgcagcttcaggaagataagatccgccataatttgtagctttaa

SEQ ID NO: 11981 - DNA, 650 bp, Gossypium hirsutum
tctgaagagagatggtgacaagggaatcaaagatacctccccacactgccttttttaaaacttgtttcaatcaaagtaattattgcatcgctggatcagattttgtacagatttatttgcatatatatatacatagattttctgcatccacttcctctcttttgcttatttctttgaattactttcctatataattattattttttgtaatttattggtatgattattgatttagtcaattaaaatttaaacgcttttctttaatttaaaggttaaaaaattatagatctcaataattacattaaatattaataaaatttaaattcgaatcaaattaaaccctaaacggagagggtaatttttctaatattgttttcttctatttacgttactaaagtgttatttcttttagttgattaggagtttgaaagcgattgtctctttgaaaattgcgtttgccaaagaaaaaaatatactctaaccttacgcgccattgcaatgaatacttcattcaacttggtctagttatggtagtagtcattctactacatttaaatttgaattttaactcttttacttcagttttgcataatttgatcttgtacttttgtaatgttattactaagttcccactgataacttcagtccag

SEQ ID NO: 11982 - DNA, 645 bp, Gossypium hirsutum
  misc_feature (614)..(615): n is a, c, g, or t
tgtttttatttatcttgaattgggggttcttaaaaatgggtgtttgttgtttttatttgttattcttaatgagtggctaatttgcttaaattcttgcctttatgttggtaaatttctggtatcttttgataatgatgaacatttagttttcatggtttgtagaaataggttcttcagtttctgttgagaatgcacttgctcttaaattgtcgcaatgatgatgagaactacatatgagcatttaggacataatttttctttccaatgcttgggatgagagatggaaaaatggaaagaaaattacctttttattttcatgcattgctcggtagaggtgcaaaaatggaaggaaaaaaaataaaacataaaaaatgcataattttgagctcacatgcacatctctctcattttctctcctccctattccaatttggaaggattgatttttatgcgttaggctgtaaaatgatttcctctcttattttcttccccctcacttttcttccttaccttacacactcaaaaatcattttctttccacttttcctttccttcctcccattccctccacttttccaaccaaccaagcacacccttaatgtccttgattacgnngatgctgttagactgccatgaaccatttcc

SEQ ID NO: 11983 - DNA, 393 bp, Gossypium hirsutum
atgctttgtcttgaaatttggtacatgatgagcatgattcttcttgtcggtcaccttgacaatgcagtcattgctgtcggttccctttccatttggtgagttcttaacactaattttgactgtgttgaaatcagaaattagtggtttagtatttatctttcataggtaaataagcataaacaaaccagtaaaaatatgatgctcgttaagttggttggataaaagtattatacgggctattgtaataagagtcggattgtattttttttctctctattcaaaaaaaggcaaaataatccatatacattagattaaagagcaaatcattcctttccgctaaaaatttcatctatttgtattgctaaaaatattgtgtgcttgacgtaataatca

SEQ ID NO: 11984 - DNA, 662 bp, Gossypium hirsutum
gcacaagaaagacttagtctactgtggaaaagcaaaaataaaacaaccaccaaatcagccgtagagaaaatcaagcaacctctctcccaaatcaagaaaccatcaacctacatggaacaaaatcaggggggtgacgccaaaaatagaaggattcaagggggctcaaactagtataaaatggggcatatgcttgagggaaaagacattacacaacacaagaaagtgagccagcaatagacaaagttgagagaagagaagttagcaaaacttgagagcattagtgctcagagtgacacaaaaagaaagagagaggagaaggagaatcgtgacaagtgccacggagaaccatcgagatcggctttccagttttccttcctttgtctattactttcttttgtgctgataaacatgattgtaacttatttccttattttttaatttaattattatggcttaattttattgatgctagaataattatgattccttagttttagttattaatgctttgctgaagatgttcggtttatttggtactttactcatttaagtattatcatgatcacgctttttaatgcatcaataacatgggtaagtatatgaattaatttattgatcgatctgaaaagatgataattaatgggcatactacttgaatggtg

SEQ ID NO: 11985 - DNA, 536 bp, Gossypium hirsutum
  misc_feature (458)..(458): n is a, c, g, or t
  misc_feature (498)..(502): n is a, c, g, or t
  misc_feature (521)..(521): n is a, c, g, or t
  misc_feature (524)..(533): n is a, c, g, or t
atcatatcttctggatatgttgggttaataaccttagccaaacacactttcaatttgcctcatacattgcaattatttcagcataatttgaagaggtagcaactaatgtctactttattgaacgccatgatatgatagtaccttcacatgtaaataaatatcttgtttgagatcgacctttatgtggattcgataaatatctaacatcagaatagtcgactaatagggactttgaatcatttgaataaaataatcctatatcaatggtccctctaagatatttaaatacatgtttaattccagtttaatgtctacatgttggagaagaactaaatcttgctaatatgaacttattcaataattctatgaacttatctagaatatgctaatggctgactcgtagggactaatccaacattttccatttgtcctcggttatccttcataagaatcaaagnaaaaggattagtattctcggaacgcctaagattggtactnnnnnagataaaatttgtttcganatnnnnnnnnnnttt

SEQ ID NO: 11986 - DNA, 446 bp, Gossypium hirsutum
ccttctacgaatctttttcttttgatttctactcaagtccccattagttgaatttaaagagtccagcaacatcttgtacttgttattaggaaggacaagaggggtgcctgactttcttggatccttagacggatctatcatcgacaagagtaaaatattttcaggcttcagatcagtgtgtataatggaaagctccctatgcaagtaatctaaccccgctaaaatatggaaacatatctccttaaccctatgaataggcattccacgataatcagagtacttgatgagcgtcaaaagattatcgcccaagtattcaaacaccatacaaacatgctgtccatttggacctgaatgcttaaaatgatctaaaagcttcactacacattttttatcttctttatccccatccgcaatctgttgtaagattgttatctcatcaattgctg

SEQ ID NO: 11987 - DNA, 644 bp, Gossypium hirsutum
tgtatgggtagcaaacagaaacaagcctctcaaagattcttctgggattctcaacatatcagatgatggcaaccttgttgttttcaatggaaaagctgagattctttggtcatcaaatattacgaatttggttcctaatgcaacaacatcccagcttttagactctggaaaccttgtccttagtaatggtgaggatggagcaagcagcttatgggagagttttgaagatccttccaatgccttccttgaaactatgaagattagcaatgatgtaaaaaagggtcgtaaagtggagatcaaatcatggaaaagccctgatgatccatctgatggtaacttttctattggtattgaaccttttaacattccagagggtgtcattaggaacaataacaagctctattttcgaaccggtccatggaatgggaatacctttattggtgtaattatgaagaccgtttatattgatgggttttatattgttgcagataatcaacaacaaacgtactatatcacttatgaattttctgataactctaggttgaggtactatgaactggattctcaaggaaaattctttgaacggaaatgggatgcggggaaaggtgactggataaacaggtactctgcttctcaaacagaat

SEQ ID NO: 11988 - DNA, 687 bp, Gossypium hirsutum
agctcagctctagggcataatccagatacttgagcttgattaagctcgatctgttggtaattaaactctttctatataataagggtaaaaatgtaacttcataaaggaaaagcctatgatataaaattatactaataaggaaaagcttattagactcgtaagccatccaattcgagcttggctctatagttaccggatcaaattcgagttgttccaagtcaatctccatagtttatgagcaccaatatttcatttacacccaaggtaacctcactaaaaaacacccaggtcaaagctatgaaacaaaagcaattagtccaaatcgacttcaatggggaaaaaaacactatatttttacggacattaaaaacttaacccaaaaaagaaacaaaaatacaaccttgaagttagggtctttatcagcttcgtataaaagaggccatctttctttaaaaagcgactcccataaacaatccgacctgcatatttcttgccaatcccgagaacaacaacccgatgaagaaagagtcggtacctaaaaacccgaatacccaacaatcaaacatctcatttacattcaattcaatacccagaaaaggaaaaaaaatgaaatgagataaagcaagtaaacgaacctcaagggaagatgcaatttcgagagctatctcttttggtagtgaatggatg

SEQ ID NO: 11989 - DNA, 430 bp, Gossypium hirsutum
ttgatgtactaggtataaatatgcttgaatgaatatttgtccattggaatggctaatgatggcataatttgaagtatataagtatgaaactatgtaaggtttggtatatgcactaggtataaatatgcttgaatgagtattgggtcactttggtaagttgaatgtttgaataaatgtcatgatatatcatgtataagacttagattttcgcttggtttgagtgttatgaattgacttgtgaatgtgttaaaatgttgatgtgacacacggccttgcacatgagcatgtgtttcggttgtgtatcccctgcatcttaaaaattgagaaatagaatgcttcgaattcacacgggcagagacacgggctcgtgtctcagacgtgtgactggcacacgggcgtgtgacttggccgtgtgaatcctgcaccttaa

SEQ ID NO: 11990 - DNA, 600 bp, Gossypium hirsutum
  misc_feature (578)..(582): n is a, c, g, or t
  misc_feature (584)..(586): n is a, c, g, or t
  misc_feature (588)..(588): n is a, c, g, or t
gattggatggatggactcttgtagtcctaattgttgtgattggctggacaaagatgatgtgtagcgaatggggataggtaccgtgattatatctgtatttgattatgaaatacatctgattttgtataatagaatgtgtttgatattttgattctgaaaattaagaattccattctaatatatgattatgaaaatatgacatttcgatttgacaaacgtttctagatatatgaccttctgatatggtttttgcatatgtgattactaaaaataaaactctatttttatgtttgcaattgtgcatgttgtagtaagaaaatcatgtacgcgggttaagttacacactaagcttctagctcactcgtttgtttaatttgtttcaggtgaacttctgaattaggaccggacggcgtgcgggagctcgaattattttctcaagtaaattaaaatatggtgattttcgtaattacctattttggatttatgggactataatttatttttggtttttgttttatttgttagcatttaatatttcctagcataaaactgcaaatcacaagagctaacaagagacnnnnncnnntnttttcgaaattg

SEQ ID NO: 11991 - DNA, 651 bp, Gossypium hirsutum
ggtggttgttcatcaaaggaggctagactacatatatctatctatttttccacccttcacctatcatcttctattttcagtttcatcaatccattatttcatctttgcttattttctttagttctagaaatttttagctttcgtgtcttggaactcagactatcaatacattaaagtatatgagtcacacagacatagtctatcacttatttgggattaaggcaagctacactatgaatgtcacaactaaataaatccataaatggatctaagattaattataattaggtcatgtccaatgtattgttagtctaaacaattacatttatgtctatatttttagagatgcattagcttcaatacccaagataaggtatctcccatttggacttaatagattgcataataattcttgaatcagtctactcaatttcagtgcattatgatccaatcatataatgcaacttaatattagttaaacattagataatcaataagttaatatttgcttattcattttgctttgcgtgcaaaaatcgttgacaaatacaaacgatattaatgtgaatgatgtaattttatctagaccaatctatttggaaaatttcaagtagattatgatgaaaaactatactacgggcacctggatcc

SEQ ID NO: 11992 - DNA, 636 bp, Gossypium hirsutum
  misc_feature (60)..(60): n is a, c, g, or t
  misc_feature (63)..(64): n is a, c, g, or t
ccttttctttcgtctggatgtgtcgatatcaaatccctcaaaatggcccatggaacgcanttnntatcacccttttgttgtacacgagctacagcccactggtgtgacagccctaaagtgaccctagtcggaaagcggtttcgggaccgctaaactgtgacagcccaaaattgaccctagtcgggaagtggtttcgggaccgctaaaccgagtcataaaaataattaaccgtcataattgatgctcattatatgtacatgtgcatgtgtgaaaatttcatgtttgaattttgtttaattgtaggtgaattttagtaaataggacttatgtgagaaaattttgaaatgtgataggtcaaagcataaggatctattagtgcatgaaataaaaaggggggacttgcatgttaatttaccccctaattagtagtggccggccataacaagcatggtagaccaagtgtgatgggcaagaacatgtcataaacatgttgagttagtgtttcatgggaagtatgataaaataaggagcatgggcataaaataatgaaagggaatatgatgaaaaaaaaaagtgtgtggttgttcccccccccattttgccgaaactaaaaaaaaaaaaaaaaaaaaagtgtcc

SEQ ID NO: 11993 - DNA, 640 bp, Gossypium hirsutum
catgcaaatatgaaattattcttgaggagggactaaaagataatttgatgatttaatgaggaggccaaaatcctacttgcccttttagctacgtcggatgacaagaaatttacacacacttgcatataaatagcagctcaaatgaagtgatatcagccatccatccgagttgaggatagaaaaatgtgagctcattctcacgcaaatcatacaataagacttgtgaacacacaaaagacactttcactgccattaaattttctaacaaaaaggtactaatccttgcaccaatattaaatacttgccgccattaataggctgcctaagtttataattttaaattgatagccacaataattgcttaatctacatttataatatttcaatttcatatatggccgaagtgggtccttagttaaatgaaatcgcatctttattttattttttaagttcaaacatatatatcttgataataaaaccaactaactcggaataatttgagataatatagaaatagtgggatcctaatcttgacaatctaaggaaatgggcaaggcgatgccccttgtgattcaacatttcttgtcaatgattaaataatattttcatatataataaaattgaattctggccctctaaa

SEQ ID NO: 11994 - DNA, 400 bp, Gossypium hirsutum
ttagcaagttttgtacattttttaatttagtcctttttaattaattaaatatcgaaacgaaaaaaatttgtaacaaaactttaatactaccttaatgaaactctataaatatttataaaaatattgtaaagaagccatttggttgaagggactctttagtgatcttaatgaaaaccttcaaattagtacaatattttgtgacagtcaaaatgccatcttttttatgaaagatcaaatgttttattagagaacaaagcacattgatgtttggtatcattttgttcatgatattattgcttgtggtgatattgttctgagcaaaattagtactcatgaaaatcctgcagatatgatgactaagtcatttcccataaccaagtttgagcattgcttagacttg

SEQ ID NO: 11995 - DNA, 538 bp, Gossypium hirsutum
gtctaaagaaaacacaatgatgtaggaggaagttttttttattcaaaacataaatattaagaaaaaaataaacatacaaaagaaaaatgaaaactttgaaagaaggttttggttgattgttttattgaaagaggttttcgttatactagtattttcatctttgttagtcaaactgtcagtcaaatcgtttaatctatttttaaaaaaaggctgaaccgataaattggtaccaagacaagtgcgaagccaaggggttggcatgggccttgcccccttaaaatataaaattattttttaagcctttaatttttttaaaaaaattttaaattaataaaggtaaaattatactttaccccttaaaattataaaaatttgatttaatcctttacaaattattaagatataaactataaaaaattaaaatgtcatccagccccctctaaaaaatttttctgactttgcccctgtaccaagactctatcattttttccattttgataccttaacaattttttggtcacaagtgctaccctgcaat

SEQ ID NO: 11996 - DNA, 673 bp, Gossypium hirsutum
gctcaatacattacctcaaacaggttaaaaaaccatctgcatttctctcattgatgattcttactaattgattcattaaacaagaacttgctgacccattttttctttttatctcaactacgcagcaagtctcatggggtgtgtctataattctttcaaagatgatgatgggtttctctacatgtgttacagcactgagaaaacttttggctaaactctcctctgcatctttaatcttcaatgtaaaacattggcaaatatatatacatatctatgtatgtattgttgtaattgtttatagctcaattcaccctattgatctgtaaatgatgtaactatatttaactaaaaaaatgtttatatgacttgtatttgcatatttatgtttccttttttatgtaacatattggcactgcacattgtaagatacagtgatgccaggaaagattgtataccttttactcgtgtctagatatgcatcggtcacgagtgtctaatgcgagccccgagtttaattatagcaaaacattagttacaatgtattggaaacggcgtggacagtcacctcagcttccaccatgcatatatctttcactaggcacccactacttgcatgatagaaataagccagagaaacaaatttttcccaccactttcttggcttgagcaacta

SEQ ID NO: 11997 - DNA, 658 bp, Gossypium hirsutum
  misc_feature (630)..(650): n is a, c, g, or t
  misc_feature (653)..(655): n is a, c, g, or t
cccaatttggtcatgaaattaaaactcaaattattaaatctcatatgaaaaaattataaagccctaaaatattttaatatgcctcgtttggttattacatatgtattataataattagatataaaataaaaaataattattataaatttaaatttaaaattaaaaaaataactctttaaaaatatgtacatttgtattttgatttatattattgttatactatatttcatgtaacctttttaattaatttagggtaaactatactaatattcacttaactattagtaggcttctttttttaatcaccctattatgaaagcttattaaatgatcatccaaatattcgattttttcttcattggtcatctacggttaaaaatcactaatgaaaagatgccatggcaacttttaaaattaacataataataactttgaccctaaaaatttatacattgtgttaatttagtcttaattctaaaaaaatctcaatgtttaccgttgtgtaatttgatctttttgcaatttttttctttgtgattctttcacttagaaagctaaaagaaaaacaaatttattagctaaacttaatataaatatacaaaaaaaaccaaaacccaaaatcataatttnnnnnnnnnnnnnnnnnnnnnttnnnttt

SEQ ID NO: 11998 - DNA, 659 bp, Gossypium hirsutum
tatcgtggagaagatgaagaaataagctaaattattctttttcttttcttttctttaatatatacataggttattttgtaaatatttcaaagttcctaattaaacattaattaatcccaattaaccttaattaaacttattcatttaaataaataaccatgttgatccacccattaaaatctttatggactaatttattcatttagccctcttaatttagtaaactctacttttaaagcttttacgattcagttctttttacttaactaactatctaaatgatataatctcgtaactaaattttaatgctacattaatgaactcgtaaatatttaaactaataaatatttatgaactgacacgtcagatttgtggtctcaaaaccactgttttcgataccattgaaaaacaggttgttacagaaggtatgatcctttatgttttggtatatgtggacgatattattgtcagtgggaaccatcaaggtaatatagatgatgtgatctggctcggttgattgagtcgattcacttgattgcccgatcgtcaacgagaagtgtcgttcaattttgtagatcaatggagttaggttgatttataagcggaagtaaacaaaatgggttcaaaagatggcttggttttgaagatggataggttcg

SEQ ID NO: 11999 - DNA, 451 bp, Gossypium hirsutum
catttgtcaacccattgattttgtttgtggagtttagaaatttcactgatagtgtaccaaatatttttctcatataattataataagtatatatacatgctaaaagaaactgcaaatagaattgaactattataacatacaaatagacgaagaattagcataaaccggacaaagattcacccataaaattagagccacctatggtatcacacattgtgaaattagacacccacacatgataattgcatatggtgagactcaaacttaagtactctaaggtgacatttggtacattctcatagtaaaattccaagggaatgtgattgctaagaatgtgattaccaagaatgtaacagtataaggtttggtatactaagaaagtactaattaatatactaagaaaattacattgaagtgtctgattcagtaagcactttacagaggatgtgaa

SEQ ID NO: 12000 - DNA, 495 bp, Gossypium hirsutum
ttggctagaacggacttacaatcgagcttagaagcttgaaaaaccatagccatggtttctacatgcaaatttcggcccctagcttgaagatggacaaaaattggcttttaattttgtttttaattcattttaattactaaatgactaaaatgcccttaatgaaaaactttggaaacatgtccaaccatgcccatttttgtccaccaacttaaccaatggtctaattaccatataaagagctccaatttaaaatttcataataattggacatctttaacatatagaactcaaattttgcactttttacaatttagtccttttgactaaattgagtgcctaaacgtcaaaattttcgaacgaaattttcatgaaatcattttgtgaaatcgtagaccataaaaatataatgaaaataaatttttttctcgtcgaatttgtggtcccaaaaccactattccgactagccccaattccgggctgttacaccattccatt

SEQ ID NO: 12001 - DNA, 632 bp, Gossypium hirsutum
gccttagagacaaaaatattttttttttagacttgaaatgataaactaaaacactttaattaataattaagcgaatactggtctatatctaaaagttaaaaaatataaaaacaaattttattaatcaaataatatcttaaaaaaacatatgttgacaatcattgcacaaatgaatttaataatgcaaccttttggctaaagatgaagataatttcagcattaaagtttaataatgcaacctttcggctaaagacgaagataattttcagtggtgcaagatcttccgtatcccacagcattaaattttgattgcatctcccatttgataatataaaataaaggagattatgacccaatttttaaacgtttttattttaggtaataaaaaaaagtttttcattattttgactacttccgttaaatttgtaaatcaaaataatatgaaattatttttaaaattttgatttttcacacaatttaaaaaaaataaaaatttatcattttaatcttcaatcttttaatataagtgaggtttaaccctcttcttaacaaattgggaataacaaccacatcatctatgaaaaatggcctccactttcatctgcttcattgattggagcaatgcatcgtcg

SEQ ID NO: 12002 - DNA, 609 bp, Gossypium hirsutum
atgatgtttgtggaataatggggaaataaaaagctttcatgctcacaatccaaccaatcatatttgaattccaaaacccaaaattaattataattccatttttttttctttatttgatgtataaatttatataccaatattaatttacattaattttttataattattagtgttttcgtttgtcttatagtgtgtgattaattttatttggaccggaatgataccgagttgaaacctttctaatacatggtaaggtatagtgtggtgagttaaaattaatgaaatatatggtaatacatatagcacttttaagggaagaatgtatattcgaatctcggagataatattgttaagagaagaagtcacgaatcccgaataagaattgtaaaatagacatgcatgatataaaaaaaaataattaatgaaataaaaagaagaacgagaattttgaatataatcaaaataactttaagctgaaagccagattttgaattagaacaaaagaaagaaaagcactatcttgcctatttaaaattaagcaaaattattgcatgtttaaacctgtaaaaaatggggtcgaccaaaatgggaccttaatgacttaacaac

SEQ ID NO: 12003 - DNA, 657 bp, Gossypium hirsutum
aatttgctctactgccactgctccactgcaacttcagggagataaggcttgcgtattcttattctgcttaactgcaacttcggagagataaggattgtggcttcgatctgcttgatcgcgttatttcgtgataggttttaaatatttataattaatcgttcatgaaactaactattatcgcgatttaggcaagtgtacctaccgaacagtagtatagttttagcaagatcgaattgtcgaactcaaaggaactaaaagtactagtaataactgtctttttactatctagcctaagaataatggggttttattttaattaactacttatctaaactaagaactcacagagaaaagaattggggaattgcttttaggaaaaatcgattgacttaagacaatacctaaggaaaaatccacctagactttacttgttattctggctccgaatcagacgatttatttattcaacttgtcccgtagagatccctaagttatgttattatccctatttaagactaataacgtctaattcctagattgaataaacgagacttttctctaactaacactctagggttgcattaactcgatctatggatccccttattaggtttcacccgaatatggaaaaatcttgtcaccctatgtctaggcatg

SEQ ID NO: 12004 - DNA, 436 bp, Gossypium hirsutum
  misc_feature (430)..(431): n is a, c, g, or t
ccttgtaatttctgtccctcgaacgtcaacatggaagtcggctggtagagggaagacatcgccggccgatcgttatcgaaaagatggtagtagtgatcgacgaaagctttccccaccgaatcgatctgttcttccatattacctatatcactcaatacgcaagcaagaagggttcctcaccatggcatattgaaaatataaggaaaatgaatctgccataaaagaacatagcttgtaggtaaagcaaagctaaagggtaatttggaagatgggggaatcgacgctgctgcattgatacgcaatgtttgcgaggtggattgaaattatagtataaagagttcactataattcgtagccctttttgtgatgaatgtttaaaagccatatcagctcaagtgaggaggaatgggatgatgccaggttaatgtgnnattct

SEQ ID NO: 12005 - DNA, 448 bp, Gossypium hirsutum
ctctccaagttcaagtgagaaagctcctttttcgccctccgagtacttgtccccctctttttttccatagcttaaacgagaaacttgaggggtttcatggcccttttggatcggggaatctccgataggggcgggacgcgaagaataggtaagtttttagcccctcttttgttttttatttttatttttttaaaagatttaacacataaaataaaataaaaaaatctaaagaaagaaaaaaaaaaccaaggaaagaaaatatgaaaacaaccttttttgttctcttttttattaataatctgtgtaatacaaccctcttttttgtatttgaaaacaaaaccccctttttgtttattgatttgcagtaaatttgaaaggaaactaagaagaagttaaaatgaaatggaaacaaataaaatgaaatcaaaaaattcccctttctgcattt

SEQ ID NO: 12006 - DNA, 546 bp, Gossypium hirsutum
attcacaccgaatgcacaaacatctatcacccgtccttatattaagaaggaattaaaaataaattttaattcaaaattctaacttttttaactagttgggcaaagggggaaaaaaacagaaatcgatattgaaatgaaaatcttaacaaatcaatagaaacttcttatcctacttaaattccgtagacggtctaactgatatcggtaattgtttaaccttaacaaatcaacagatcatgaatcataaaaattcaaaatttcacgaaagacttcaaaccttgtattcttagaagaagaaaaaaagtgaggagattaaaaaggaattaggaagggaaaaggaaacctgcttgcgagaagagatgacaacagatgctccttccaagccgagacgctcagcgatggcgaagccaatgccttgggtggatgcggtgacgattgcaacttcgccttcaaatctcctcccaatcttggtttccatatccatcatcttcgccatttccaagaagagtgagttgtcttctttctgttattacctgttcgtacacg

SEQ ID NO: 12007 - DNA, 440 bp, Gossypium hirsutum
gtggagagttgaaggttacaaattgtaaatgtgaggagagtcttaagattgagagttgaggataagttgacaaaatttaggtttagtattattggagagtcgttcctttcttcattatttatagggtatttaatggtaagattcccgtataagatggtgttaacgtgttggccttgcattctagccatcattatagtatgcatgggatgtgtgtcttcgatgggatgaagatgtttatgatgggacagattctatatttgttctgacttgatagtataaggtagttgagccacgtgtggtgcttaatgaccagcaacttcatgttcccaataaaagctcaattgcctagatgtttgttggtacgcgcttgtccagatggtcattttgagtgggaagtttaagggggactttccgatttttcgataattggcttattgttt

SEQ ID NO: 12008 - DNA, 551 bp, Gossypium hirsutum
ttccggtttcagacgggagcattgtatcggaaaccgagcttgtaattggctcaacagtggcatcacgtgaagccattagaagggtttaaagaattactgatttcttgaaagagaagtatggaattagctaaaagaaacaaatatggcttaggaaaggtgatgtgaattgcaattagagagccaaatctagtatgtacttatagtagtggcatggccaagcaatgacaaaaacattgatcactcgggaaatgtgtgcattatttggagttaaaattatgatggattgtgaaatctacatcgtagatatatgattattaaaagaatttaagctaaattacatctaaaatcattagattataaataaatttacgttttggtcattcaattttataaagttataaaacggttattaaaatattagaatatttttatttaagtcactagactgttataaggtttttttttctaaaagtctagctaacaaactccaagcaacaattcgaaaattgatacggtagattagtatccatcaatgagtagaagaacgaaac

SEQ ID NO: 12009 - DNA, 527 bp, Gossypium hirsutum
  misc_feature (509)..(514): n is a, c, g, or t
  misc_feature (516)..(516): n is a, c, g, or t
  misc_feature (518)..(524): n is a, c, g, or t
atcctgaaacaagtcgaggaaaagaaaaagtagctgattagtccatgaacttttacaaattctgcaaatcgatccaggtaagttcatatggctgaaatttaatgattaaatgttaatttcatgaattatacaatgtatgatgaaatgtatttattgttgaaatgagaataaaataaaaatgtgaaaatcgaataaatgatcaaattaagtggaacaccggatttgagtacttctgatcaagaaacaaagtgataagtggctacacttatctgatcaagaaacaaagtgataagtggttacacttatctgatcaagaaacaaagtgataagtggttacacttatctgatcaagagacaaagtgataagtggctacacttatctgatcaagtgataaagtgataagtggtagcttcagctacacttatctgatcaagtggcaaagtgataagtggtagcacttatctgatcaagtggcaaagtgataagtggtagcactgattccatcgcnnnnnnanannnnnnntgg

SEQ ID NO: 12010 - DNA, 378 bp, Gossypium hirsutum
attgggatgtttgtttgttcagctaagtcccaagccatctgatttaggtaaaagaaggggggaaataagaaaaagaagaagatagcaattaggtaaaagaaggggacaaaaagaaaaagaagaagatagcaattaggtaaaagaaggggaaaaaatgaaaaagaagaagatagcaattgataaaaggaggaggcgtgagagaataaaagaatctaaaacgtcttttgactgaataattattttagtatctattagttgttttacgtttttcttttcttaattctagtgaaaaagagaagttcacttcaaattgaattttaaaaaattaattagtataaattgccctctattttgcttcctatcaattaaaatcccctt

SEQ ID NO: 12011 - DNA, 749 bp, Gossypium hirsutum
  misc_feature (669)..(669): n is a, c, g, or t
  misc_feature (671)..(692): n is a, c, g, or t
  misc_feature (695)..(699): n is a, c, g, or t
  misc_feature (702)..(704): n is a, c, g, or t
  misc_feature (709)..(709): n is a, c, g, or t
  misc_feature (711)..(715): n is a, c, g, or t
  misc_feature (717)..(718): n is a, c, g, or t
  misc_feature (720)..(725): n is a, c, g, or t
  misc_feature (727)..(732): n is a, c, g, or t
  misc_feature (734)..(745): n is a, c, g, or t
tcggcctctagatatttaagccagtgtgagacatatctgggacatgcatcagcctcgcgatatacaagctggtgtaagacctgtctgggacatggcgtcagcttgttgtgtgtctgtgtaagacctgtttgggacatggcatcagccttgctatatgaaagccagtgtaagaccatgtttgggatatgccgtcggcattttaacccatgttagggctattgaatattcgatagtattctaaatggttcaacaaaaggtttatgatttatattgaaaagagaaaagttatgataaggtgatgagtggtacaggtacctaattgaaatgtatgagatttgggctcaatgtatgcaatatgagttgtattggatggtgatgagtaagttgtacatatgtttatttatggtattcatgaataagctatgaaaagttatatgcatatcgttctatgattagttgatgattattttcatgcaacttattaagctttatgcttaccctatttcctttccattttcttatagtgtcgccaaagtagctcaaggatcattgcctacatcggagaagcaagttacactatcatccgaagcacttggtatagttagatattttattttgattatggcatgtataggaccctgacttttgagttttgcgtcattgttaaantnnnnnnnnnnnnnnnnnnnnnnttnnnnnttnnnacccntnnnnngnncnnnnnngnnnnnngnnnnnnnnnnnntttt

SEQ ID NO: 12012 - DNA, 699 bp, Gossypium hirsutum
gaggagtttggtccaatgaatcttatatttttgtagtaattttagatttcgaattatattcttatatttgaagaatacagattaccttaagcaaataatatgatattctaaaaagtattaaaatttggtaattatacattatttatttaataaattataatgaataaatttgtttatataaaatagttataattttattttaaattttagagaatgtacttcatatttttaaatgttattataagtgaaaagttgttataaattgtttaaataaaatataaaaaatcagttctattagaaatttgattgttaaaaaaaaccccttaaactctctctgttcccaagagtactttgctaagaagtcctagagatagcagcaactgttgcgacttgggatggaagcaagtggtggcgacgaccgagagaggaaggatgagatctctcttcttgccgaataactagttcagttatcagtcaaaggctcgatggtggtaccaagttccaaacctacactgatatgtacggtttggacagaaaagctgtataacccagacaattttagggctcatatgaaaggcatatagaagacaaggaaaaagtttgagattcaggtggtgggacaaaatttatttttaataatttttgagatgaaagaagatctggaattgattttggaggggaggccttggctctttcata

SEQ ID NO: 12013 - DNA, 450 bp, Gossypium hirsutum
atttagataaaaaataatatttatatatattattaattaaaaatattaaaaaaagttatatgcacggcaataagagtgaattaacagaaaatgttattttttaatatttatcggattaggcctttttctaaatatttatgagattaggccgattttttttaaaacatgttgagctggacatgattgcagtgtactttgcaagaaaatacgctgagctaaacgcatttttagcgaacgttgcaggaaaacgtttctaactagacacgctttcttactctatcagcaaaacgcttccaactcagcgcgttttccctaatggctaccccacagcagtcgaattccaacagcaacttcccgcccccaatggtaaaaaaagaccatttaaaacccctcaattctattttttttaaattcacttgtaacaccccttactcatcttcgtcactaaaa

SEQ ID NO: 12014 - DNA, 666 bp, Gossypium hirsutum
ttgcattatactcgctgatccctaaaaagataaagaaaataaaagaagaaagagggaattaaattcaaggaatctgatacaaataacaaataattaggagagggaatcgagcagaaagaatgattaaaagcaattcaattaaagaaaacttaggggaagaaaagggaataaaaggaaaaacatagaaagcgatattcattttttgcttacttgttgttgagacgctgcgtaatcggcatcgtctgataaatcgtgaagctctgcttcttgcatcgtttagggattttctttttcgatttaatagtgatttttagaggttttattagtttctttctcttagtttaccttcgagacgaagaaaaggggaaggagacgagagtgggaaagagtaggaagaaactagaaaaaaggaagtcgtggtgggacccgtgtgaacctgatttctgtacccgatcctttgtggatagttttgacatcatttttggattttcttttaaatccatacatatatactcttatttttgaccttttcctgtcgcatagatttacattcttatctcaattggtagttaaaaatccaaattgatttaaggacaaacaaacctttaacttttacttttccaattttagtgatttttaaggaaatcggtcatagttagagaaagg

SEQ ID NO: 12015 - DNA, 682 bp, Gossypium hirsutum
caattcctcttacttagcctctcaaaattttcttagataatctctatgctactttttgctgccagcatccatttctccacagcaagatgaagcatttggatgtttattttcattttgtttgtatattacttgaagttgtccacattccaattacagatcaacttgatgatgcttttaccaaatctcatccacacaagggttttcactatcttgttcccaagtgttgttgctcaccccctaacttgaggaaggcttattgaaaatatgtgttttactgaagatcaaaactttggtttattttaaatttattttatcatttactttggttttagtttatccttgtatttgagttctgaattcttattatttaaattttttttatcttagaattttttttgttatttgcctttacatcctttatgtaaatatatgacaggatacatcaataaaattatcaattttcgcttctcatttagaacttctttattagtaaaacttgaactctaatgtctaccaagaactcaatcaacttaattgtaaagcttaatgtagactttagtcttgaagtatattgcttttctgaatttagtccttcaaggtttttttggctcacttcagcccccaatgttatcaaatattcttagtttagtccctaaagttacaaacgttctcgactcaatcc

SEQ ID NO: 12016 - DNA, 453 bp, Gossypium hirsutum
taaggaagttggtcttccgctatctcttgaacttcattctttgtcacattacattccttgattccatgccctaaatgcccacaaccaaaacagaaatttggcaaagactcatatttaaaaggaagccatctactctcttgagcacccattgagataaaaatccctcttcgtagcggtttctgcacatctaaatgaactcttatctgaccaaaatcccccttttcttttgatatcatgatccatccaaaagttgacccaactgcatgcattaaatccttttttatcacatttcggcgggcatggaccaaccttaagccaaaagggtgatgaagtcaagcgaattttactgtgctcaatcgcttatagaaaatgttcaaaaataattaactgtcgtcgaaacaaccatgggcgcccctctaaaaccatttccagatcatcgtcactttctaagga

SEQ ID NO: 12017 - DNA, 699 bp, Gossypium hirsutum
catctcatggtcaaaggagaaagaaaagctgtagtcgatgaactagggcatgatgcaagacccatgcttttcaaaacaaatttaccaaaatagaaaatgcaatcacatttttcagtcaattttgcttttaattgaaaaaattgcaaacttagtccaagagcaacacctaagttaggttggactgaggcccaaagtaagaacataatatatccaagaagccaatcttactccatttctaaattttaatgttttatccaacaagttagatgaactgtgcagtaaaccccaaaatctcccatagctcgaatgtttctctacaacaattccaataagtgtaattttaggtccaactctctctttcccaatattgaggtcatatagcattaccagcacaagctggaatatagggacaagaaaatacgaaaccccttctcaacattgagaacaacatgaggataaggaaatagctttgcaaggcaagcttgataccatacagcccaactatgagtgccaattgtgaagtgataaaaaatccggttcatcttctttccacatttttctaacagaagtcattactatctaaaaagtatttttgtgacgtgaaacatttgtagacagaaataacagaagcttattaaataatttctttcaaatacaatgaatatatcagaaacagtccattgattatgagatcatccc

SEQ ID NO: 12018 - DNA, 448 bp, Gossypium hirsutum
atctgtaggggcgaaggaccatgttgcacaagttgaatctgtatagaactatacttattctattagacattgattatgacagggttgtttaacatttaaaacgtgcatagtcgaaaatatcttgtattatggtttttcaacattagtgaatttctcctcttttacttgtagttttttctcgataagagttttccaagtaaaatttgcgatcattcctactgccattattggcgtatagtataacattaataattcattttgtattttttatatctatatatttattttatgctattttttaacatgatacttttaattttttttctcgtgcatttttatcaaataattcaatattttatttatttaataactgaattattatatatatcatatttaaaaattgaatttatctttgtgaagtgtagcaagcaggcatgttctagtgata

SEQ ID NO: 12019 - DNA, 569 bp, Gossypium hirsutum
ctcgcactaatttggtatcaagttaacttgtcacacctacgatgtgggtgaaagaaaatgttttatgttaaaagtattttcttttaaaatttattcaataataaatataggtgatgtgataataaatttgtattttaatactattgaatatgtgttcgatagtatttcaataatttcataacaatagggtaaaagtgacataaactttatataaataatatagatatagataaattttccctacactaattgaattcaaactaaatctctaatccataatataattaacttaagaatcaggtaacaaatctatctatttaaagaagattccatacatctatataaggaagattttaaagttcaagattttaacctttccattaaatcaaattttcatctatttaataattattaattaggacaagggtgaagcataaataagacttataataatgcttttatacaacttccatcctagctagtaaataatctcctttcgaggaaaaagaaaatcctaaatgtgtcttgcttgttattaaacaaatgcaagcgattatggctatgaaaaa

SEQ ID NO: 12020 - DNA, 641 bp, Gossypium hirsutum
tagttctgaagctcgaaagacaacgagttgtccaatgcttacgagctgctgttgaaaggagagcatcacatgtatgtatatggaatcgtttacgtttttaatgtttatccggtatttgcaaacactgaagctttaattgtatgattgcagggtgtaaggctggagttatgcacatcagataggcaaggtctattagcaaatgtgacccggactttccgagaaaacggtcttaacgtgacaagagccgaaatatcaaccacgaatgacattgctcgaaacgttttttatgtgacggatgcaatcggcaatgtagcagatcccaaaatcatagaaactgtgagagaaaagattggtttaggggagttaaaggtaaaggaattgcctttgatatatcatgaaagggaagaagcagcaataggggttggtggggcagtgttatcacttgggagcctagtgagaaagaatttatacaatttggggcttcttattaaatcatattcttgacgtggaaactccaactctcatggcagcaatttggtggcaaagagctttgagctgtggccttggtgtacatatgaaggtggaatgcggtaatagatgttataggtggattttgttggtacaaaagatgccaaccgaag

SEQ ID NO: 12021 - DNA, 672 bp, Gossypium hirsutum
ctccaacacagttagtgaaagttgaaaagccctaactgtgttatctttcaaaattttcttaagtatgaaatagctcgtggattaaaatccctagttgtgttatctttcaaaattttcttaagtatgaaatagctcatagattaaaatccccaattatgttatgtaacaacccgattttggggctagatggaacagtggtttcgggaccacaaatctgacaaggaaaattttattttaaaattatgacatgggttgcattatgataggaaggttgcatgaaaatactgatatggtaaaataaggaaataaagtgataaaaatgataattgagttatgtcaacattggaaagtatattatgacatattaatccaagaaaggattaaattgcaaaagtgagaaaggttttgttacccaagagtaaatactcaaaatttgagaggttaaagtgtaaatatgaaaaaattgaaggaccaatagtgtaaatattttaagggtggaataatctagaaactaaggaagatggatgaattgggaccaaattgaatagatgaaggaattatgagggactaaattgtaattttaccaaattaagtgatgactcaatgatgggattttaaaagaacataaagggcaaaatggtcaattagaagagagaaaatctagaaggcaat

SEQ ID NO: 12022 - DNA, 677 bp, Gossypium hirsutum
aagaacacaattttagccaaagattaacaaaatccttgactcatttgtgttttataggtaaatatattctacaacaaaccagaacacttctaccagcgcaatcaatgacttaggccaactcctcctggatttgaccttctgcaagggttagaaagatctcataaacatccagcatttaattgattatgataaatagaaaaatggttaaaaccaaacctcactagcaagtttgatagccaagttggcttcagcatcagcctcgccatgcagttcgtgaacaagagaggttaaaatcatgcagtgcaataaaaagacaaaagatcttattcatgagcaacaacagtgaaataacattcttgcaaaggctggtttgaggttgtttagatttgagacttgagaactattggtactgatgtttcaacacttcaaattatttaccatgtctcatttttcattatagaaatacaaatggcactggaaacatcagccattagttttaatgttaaaatgttctccaaaaaattttaattgttaagaatataaatgtatatatatatatttgttaaaattttaaatgttttaatatttttataaaattctagagtcaatttgacaggaaatataaaaagttgatgactaactttattattaaatcaattaaaagaatgtctctgtta

SEQ ID NO: 12023 - DNA, 422 bp, Gossypium hirsutum
  misc_feature (10)..(10): n is a, c, g, or t
  misc_feature (412)..(416): n is a, c, g, or t
taacttattngttaggtcgggtcaaatttaaaaccgaatttaaatttcttttaaaatcaagtaatgacttgactcatgaacaaatataagtcaagttttttagtttaaattcaagcttgaattcgactctgtctatctaacagtataacaaaatcttcatcattggtgtatgagaaatttgagtgtggtgtttggctggcagcttcagaaaatgtgaagttagaggtggagaaagttgaaggcaaaaaatctaaggaagaagaaatgtgtctccctccctttgcaatggtttcttacaagatgttcggaacactgtggacaaacccgaaaacaaccgattacgacatcgctctccgccatcgaactgccgcatgttgctggttgaaacaacttaacttccaccaccatgacnnnnncttctt

SEQ ID NO: 12024 - DNA, 598 bp, Gossypium hirsutum
  misc_feature (53)..(54): n is a, c, g, or t
agactaaaattttgacgagatcgaattatatcgaactgtactaaactttatcnnctatgatggagaaacttgaatataacaataccgatacaatcaaaacatcaaacacacattctttcgtgaaataacacattcatcaatttaatttatttgttatatatatattaaaatccaaccttatacatgcatgatttttgtttatttcccaacttctatcatttgtattgtaaccgtaaccaaaaagacattaatcacttaaatagcaatcctgtgtaggactaaggatagcaatagtaatggctgtcttttacaaagagttcaatgtttctttttgtttgcatgtttggcgtggatagtgaccacatggccccataatcacaatgggccaattatttcacatggttatccttgtataaaaactatgtaccacgttttaagatagccattcatgcatgaaacccatttcttaatttcataaaatagattcctaaaagacaaatatttcaacctacggaaaaaaatcatttttatttggttaaaatttcctatcagtccccatactttgtatcaaagtttgatatttaggctttgtttgctt

SEQ ID NO: 12025 - DNA, 682 bp, Gossypium hirsutum
ggtagaagcagcacgaggtatgcagcttttcttgtaaagttctaaaagcctttgcactgcctaaacaagagtcatttggaatatgaaaaaacatgacaagcatattgtggtggcatttatgctataactcactaaacaggatccaaaaccatagtaaaaatagtacattctgtatacagaggtttttgtaaggaaacctccattgtttagtgagtcagtatattgtagcatggagtattattttaatgacctagaaggatatccgcatcgtttcattctggaatatatagtgtatactgagtttaattattcatgtgttcaatcttttggaatatgattacagggaatgatgctgcagttcatcgaatatatgaagccatcgagtgttacaaaggccgaaaaagaggaaggtttgacaatggagagtagcaatgtagagggaaggttggaaagactgaaggaagcttgcgagggaaatccctctcttctcacacttgttgacaaacttaagtcttcttgtctgaaacaatagtttgtcttgtgacctacacaatttgtatattggaacacaacacagttaaacataaaccttctttaagaaaaaacgaaatatttatttcagtcacataagaagtgtgtatacgagtatagttcattcttggattgatgatttgacaaaggg

SEQ ID NO: 12026 - DNA, 661 bp, Gossypium hirsutum
  misc_feature (649)..(651): n is a, c, g, or t
  misc_feature (653)..(658): n is a, c, g, or t
gggttagtgctaggtgggctaggattttgggcctaggtctttagtttgggtatttaatttgggctgtaattttggactaattcagttattttggactttgttttttatttggttttgtttttggcccgggctaaaattgggctctacaactactatttagacttgtttatgggttgagttatttgtctaaatccaaacgttcacctgaaatatgaggggtttggataaaaatattaggcttgaaaaattggttttgagtaaaaaaattaggcccatataaaatataagtggaacttaagtttgaaccatcaaggctttagtctcgctcgactcgactcatttttaaatttataatactttattttatgttatttttatatattatgtaatttaaaacatactaaaaaaataaaccaataataaatatataatactactctattgtaaatattaaaataatgataatatgactatataaaaaatttcaataaataaaaaattgtataaaattattaaatattaaaataaaataaacaatttttaaaaaagtaaaaataatatgagcaggcttaaaatgagtttgagttgctttttttaaatatgaacagatttggacaaaattttaagttcatatttcgggtcaagcaannntnnnnnnatt

SEQ ID NO: 12027 - DNA, 561 bp, Gossypium hirsutum
  misc_feature (204)..(204): n is a, c, g, or t
  misc_feature (355)..(355): n is a, c, g, or t
  misc_feature (378)..(378): n is a, c, g, or t
  misc_feature (380)..(380): n is a, c, g, or t
  misc_feature (392)..(392): n is a, c, g, or t
  misc_feature (431)..(431): n is a, c, g, or t
  misc_feature (450)..(450): n is a, c, g, or t
  misc_feature (508)..(508): n is a, c, g, or t
caaagtcgtgaagaattcaaacagaaaggcaagtagatggaaataaatgattgagaagaagttgagaaaactttaccttgggtacgttgaaggaaagaaggaggcttcagagtcacatgagaaacagataaagatggcttttgcgaaatgaaacatgtatgttcggtgttgaaattaaaaaaagaaaaagaaagaggggaagangatgatgaagacggtggtggcagagagaaacacttaaaagcgtgttttgaggataccaattttagggggaaaaaattagggtttcagcaggaaattttgatataaagcgctattttgaaaagtggaatattttttgcggcgtttatttttnatcttttgcggcgttttttcaananaatgtcacaaanaaagtatttcattttgaacaaaacgacgccgttttgttntactaaaattttattattnctattttttataaattgattttttataaaataaaaaaaactaagtactctcaaaatanatattttatattttaataagaaaacaaatgataaaatgactgtaattaattat

SEQ ID NO: 12028 - DNA, 649 bp, Gossypium hirsutum
ccacgtatgaaattcaaaaaggagaattcggatttctcctttattccacaaacacatatatatattctcaatttgcaaacttaaaattcaaattattagagatttttcatcgaagagatttattcaagccattcaaattaagttaaaagtgattatggccgacgggttaattaaacacgaactgtatttagagtttttttattgtaattttaaataattctagagtttggagtaaatatgtattatttaaataaattatttgtaacatccacaaaacccccttagtcgtaaataatatgagataaataatgtataagattaaagaaaatgaaagttgcaatatatcaaaagagagttgaatcaagaagcatgacatgatgtattaaggaagaaactaaattgtaaacatgtgaaattttttaactcaggtgtaaatattcaaaatttaggggatcgaagtataaaaatgagaacgttgaaagaccaaaagtgaaaataaaccaatttactaatatatggaatcggcatgcagggaccaatttgaatatgtgaagaattgtgagggactaaatcataattttacgaaattaagtatgattcaaggatggaatttagaaagatcatgaagggtaaaatggtcaattagcag

SEQ ID NO: 12029 - DNA, 627 bp, Gossypium hirsutum
  misc_feature (65)..(65): n is a, c, g, or t
tatttataaaaatatttacgagtccagtttacagaaacaagatcccgatacctcaatttcccttncactgactttagaaccgatacacttgtacattgtctaactttccaaagaattaaaattattagaccaaacaacaatataatactgtaataccctcataaatattagtaaataatatccataaattctatcattagaaaacaacatttcgaaatcatcgtttctgactccactgactttcgagttgttacataaagatgttgatatggatgataaagataatgatgaggattatgatgatagttgtaattgtgctagtcaaaatactttggaacaaaaagtagagaagttagaaaaacatttacatgattttcaaaaaatgaaatcctctgggttaatgatgaagtataaaaatgagcccctagaacatgccaaaccgagcatatgataagatacgagcttgatgtgtcactactcaaatcggactaacttatagcaaaacaatttggcagaaactttataaaattattacaaagttatacatataaacatatgatagttgtggttttactgaagtttaaatgaaatcattaacaatttgaaatagcgttcaagccatttggc

SEQ ID NO: 12030 - DNA, 596 bp, Gossypium hirsutum
agcagacagtctatgcttttgcattgggaccttagattactgaagagcagatgtaagaaagaggttatggctatcaaaacattgttgttcatctcaaaaacggtgtttgatcatcaatgtttccggtttttatcagaagtctagtgcaaatcatagttctagtttattatttgatgttaggaaaattttaggtttagaaaaaatgtgtttgaacagtgtgaggaaaaaaaagttattttggtgttttgggcatgtagataaaaagttgggtaagaaattaaaatctcaaaaagtatatgtttaaaataattaaaatctaaaaaattcaaaaaaaccaacataagtgaaggtatttttttttaaaagtatttataatttttttaatcctttgataaatgagaaactttatacttttatgccttctaaaaatttattatttaatttaatttcttttaaaaataatttaactttaatacctcaaaaatttataattttatgtcccttctactaaaatttctgagttcgttactataaaaaaatgttaatatatattttgcatgtttaacttgttcatttgtatttaattggcacccgaa

SEQ ID NO: 12031 - DNA, 580 bp, Gossypium hirsutum
  misc_feature (50)..(50): n is a, c, g, or t
  misc_feature (417)..(417): n is a, c, g, or t
ctcaagcctattcaaccaataccacaaactcttttagtctaaaatcccanctaacacatgaatgtcttcattcaatccatcctcaaatctcttgcacataatggcctaggtggaaacacattcccgtgcatatttactcagtctgaaaaattctcgctcatactctgttacggtcatacgaccctgtttcagctcaagaaactccttacatttctgatcgatgaatctccggctaatatacttcttacgaaactcttcctgaaagaagtcccatgtgactctttctctcgaaactacatatacaagtgtattccaccaatgatatgtagaatctatcagaagcacaataacacactttaaacattcgtctggtttgcatcacagcttatcaaatactctgatggaattttcgagccnaaactcggcttttttagtatcatcatccatagtagctataaaatttttcgccccatgcttttggatcttatctatcaggcttactcattctcatgaaatccataccttgaagggctacgggaatcggtcaaggaatgggtaggggtggaggaggttgggcatt

SEQ ID NO: 12032 - DNA, 650 bp, Gossypium hirsutum
agttcacaatgagattccgatagctctccaaatccctctaattattcccccaatccctcaaaacactcccactacccctcacttctctaaaaccatccaacacccaaaccatcatcagaatttcggctccactcaaacactttcaacctaccgaggtaaaaatataaacccttgcttacaccttgattcaagcataggacctccaacttaaattcacaccacttaaccaccagaccagctggtccattctgctagaattttacaaacaatcaaatataagcctattgaacaagagtaagactttattcattaaaaagccaaaatttgcccaagctaaagcttgaacttgggacatctcacacacacccagaacacttaaccactgaagtagagacacagttgtgtcactaaattacagaaatatatttaaaagcttgaggtgttacaatcattctctcttctctctcaattctctttaacattttccatttctcacgcctagcattttcatagagattttagtaattaggcctcttaaaaagcccttggtcggccaccttggagagccattatcaaaggagaaaagtgaaagagcgaaggagcctcgtcagttagagtcttgggtgatagccactttgatttgggtttaa

SEQ ID NO: 12033 - DNA, 673 bp, Gossypium hirsutum
cgaaagatgagtggtggttaagctaagttctctatcatggactccacttgtctctcgtctctttgcattgctcttgggattggatatttattgtttatttttgcatgtaatctcaaattctaagcccagaatacattcttatgttcttactttcatcaacctaagaaatgtaacccacgtatgcacttcattttttctttattttcaaccatatcaaacatagaaaggaaggcaaaagtagaagaaaaagatgaaaagggaaaagttttgaaaggaaaaaaagagagaatattttgtatttttatattatttttcatatgtttaaaatattattataaatttatactagtatgattcccggtctatgctttgcattaggtttaattgtttgtttgtgtcaaattatagattaaaagcttgaaggttaaatccctatacactttcgtacattttgaattcaatctccctatttttattttcaggaatatggtcctctacttttgggagttaaaaattcaaatccagttgttaccaccattaaagttctcccattaacttttttggtgtgacattttgaaattttttaagaaatattcatttgataatcatataataataacgttgacaatattgattgtggttttttttcttaaaacaacctttcgacgtcgac

SEQ ID NO: 12034 - DNA, 669 bp, Gossypium hirsutum
cggtgtttcatttgcagccattcagatagtaatctggttgtattaggaaaggagacaattaaagaagatgacagggctgttttgcttgaagggggtctaacaagatcagcatctactaagctccatgcttcatccatcaaaacaaacttgattaggttgctttctttacgtttcagtgttgttatggttttccatgattgtactctaaacccatcttaccatttatgactccaggtttttgaccatggaagactctttccttctggaacaccgaaccactttgagagcaatgttagttataaacagaaagacactttttttggcagctttctgtttttgtcttatatttgactacgcaatctaatgcagggccgagtttggggctattctggtgtacttctacatatgtgatcggacagatttactaggagaatctaccaaggtgcttttatacctggttgtgttgttgattgtaattcatgctttcatctgtggttgagagcaatgttagttataaacattatactattgcatctgcatacttattagggtcctcattttcattattatttatagttatattattttgtgctttctggttatgttggtatcctacttttatctatgtccatctggttttctcttaattcctttccccttcaaatgaca

SEQ ID NO: 12035 - DNA, 600 bp, Gossypium hirsutum
ccgttagctttaactattgaccattaaaccaataatttactgaccaatttgtaaactcttttatctctaagtactaaaggagtgaagaattttaagattgaagttaaaactatatatatctttaacctttatgagttgtaaattcgaaaaaattaatttacttactagaattaatttaaaaaatgaatgatttgaataattcgattcggtaaatttaaaatttatttatttactttttaaaattaaattaaaatttaatctaattactaagtggaccccactaattctcttatcctaaaaatcaatgtacatgcatcaacttagcattttttttggaattccctttttgctttaagcaagattcgcccttttagcctctttttcccacgtggctcccaccacttaatcaaaacccttctcgcatgtaattccatgaaaagagggtcccacatgtttagaaaggtcaagaaagcagccaatgagaggagagtcgagtctcgcggcaacagccctacctttatttatatatatatattcattgtcaagtttgtactctctgtttctccatttgacacatgttgcatacttctgtcacgtgaa

SEQ ID NO: 12036 - DNA, 373 bp, Gossypium hirsutum
attatgattccaatatttttatattataatattttattaattaaattaattagatatttttattacaattacgtagagatttcatccattcttcatgcttcacacgccaccacccttgctcatgaaagaaacttttcattttattataatttagtctcttaaccattaagctttggctagaagccatcaattttccattaaaaatttaaaaatcaagccgatttgtgatatttatagcaataaacttgttctcaaaatcatatatgtgttttgggctagacggatccaagacattcttgactttcaactgatcggccttctctgctattcccgtaccatgaactactttgagtgtgggctcgaataatttcaa

SEQ ID NO: 12037 - DNA, 661 bp, Gossypium hirsutum
ctcaaccatcaggagtaagtttggtcctaaaaacacacttcactccaatcacctttctgtttgcaggtcacccaactagctcccatatctggtttttctttatcatacctagctcttccttcattgcctccatccattcttgatcatctttggcttcctcatacccaacaagttcaagaacaaccacactacacctttgataaacttcattcaataatcttgtacctctagttgatgtatcatccaccaatttattagaactgagagataactcttgcttctttacttcagtgtcacttgtccgatcccactgttcatcttctgggaactagaaatctctacttccaataattttccttgcctgaggttaatggattctgtagtcttttaacaccaagttataactaacaaatatttcatgctcagatgtctctcctaacttgtccctcttaacctgtgtaacatgacagaatcataaacaaccaaacatattcaaaattttcagagttggtttcatctcaaaaatatttcatgcttagatttctctcctaacttgtccctcttaacctgtgtaacatgacaaaatcataaacaaccaaacatattcaagcttcataaggtgttttcttctctaacatcctcatagacaggctattcagca

SEQ ID NO: 12038 - DNA, 670 bp, Gossypium hirsutum
tatcgggtgtcatgttagtcacatggctgtattgtttcatgaaagtctatgtcaagtctttccatgaattgattttagcatggtttagctgattgtaccatttggcacccgacccaatcaaactatcttggaatcaatggattaacaattggtcgttattgatgtatcccattattcttcaacaaaacattgtgatataggcttcaagacaattagtcccactgtattttttgaattctggatttttgaattttggcaggagcactagattcgagactaaactaaattccttggcattgaacctacaaaggtagtcaacactatccatagctctgaatttctcctccaaccacttgcacagatcttctagctgttttggcaactctactcttactctatccatttctgccatgtcgttcaaatttggaaaaatagggttggtcagattatttccaggattggaacctgaattcgttgggtagttcactggtcttgaagtgtcagcctggaattgttttagtcttatggtaacggtacctttcatggatatgtatctagttgtgcttggacattcactggggtaaagcccgggggtatgtaaggtcttcattatcatcttagagttaatcacagtactcttccctttttcaatccctcggccagtaattgg

SEQ ID NO: 12039 - DNA, 674 bp, Gossypium hirsutum
cattattcctttttttattgtcgaattattcagtaaaggaattcaattctttgtctgttttactttctgccctcgaattgcatacacacgagggcacagacgtgtgcagaagtggttaacgtttggctaagttgttatgagttatgccatcttaaatctttcttttcatttgatgcatgacggctttttcactaaaataatataaaaatgttttttacccaaatgacataagagcaatattatttatgtaaatagcatgaaatctatggtgattttgggagggacgtacggcctggcaccattagtggtgatttgggcagggcacaaaactttgagtcccaaatccttgccaataatttcgatttgaggtatgaaaaattgaaaatttcttttacaggaaaaaaattgttgatttatctaagttaacataattggtgattttatccagcaaaactctacatgatcccttttctacctaacactaatctctcattacaaaaactcaacataaaacacaaaaaaaattccaaaaaaccactcccaaatttctgaggaaaaaaatcatttcgattcaaaaaattcactaaaaaaatttaaaccctaaatcacttaaattttcaaatcctaaaccatttttttaaagcaaattttattggttagcattctaagaccgg

SEQ ID NO: 12040 - DNA, 511 bp, Gossypium hirsutum
ttgagttccattgaactgaaacaagctcgatcaacttgcaagaatttgcgattgtcgcttgatgaactgaaccaaggatgttttcggggcagggtcgtatcattcccccttctttagaacgacttgtcctcaagtcgagccattggttcactcgatcgcatcaacttttacttagctttcctcggtcgaacggaatggattggaattggaacaacagaaaggaataaccatgagttagcagaaattgtttcagataaatttgtaatccaaatgcaagcaaaatagaacaagaaaatcccatgcgagtggacagatgcaaagcaacatgttcacaatcatgcaaacaaattaatttactcgctaatgcctcgacaattattcgaaacgaaaatgaacatgttctaaggaaatcaaatgtctcaaattgtttccacaagtcataaccagcatgtgaataacgaatcaaatcaacaaaactatctttggcaccacctaaagagaacaacaacga

SEQ ID NO: 12041 - DNA, 592 bp, Gossypium hirsutum
  misc_feature (470)..(489): n is a, c, g, or t
  misc_feature (509)..(511): n is a, c, g, or t
  misc_feature (517)..(517): n is a, c, g, or t
  misc_feature (546)..(551): n is a, c, g, or t
tttgatagtcattgtgaaatctaaattttacagggggttttatgtaaaataggtagaaatgttgctgaaatttttataaaataattttaccactacatttccattttgacaaagtaagatataaaagtaagttgcttcggcaacggaatgtgacattttatatttggatccaataactagatagggtataaggtgtcataatgagactgctatgagtcacacaatgccattgttgaatggctaatgaaattgaatggtacaactctataaattgtttttactgattgattatccttataacatacttaaaatggttgtttatgtgttaaggcaaaacgatgcctccaaacattgaatataacattgcttatctagaatcttctccgaaccaagtaaggggtggtacgcaaagatgaataaattgactcaagctagtatgattcaagtttcatgttcattggcactcaaannnnnnnnnnnnnnnnnnnnggaaaaggtggagcatccannnccttantgtttgctccaaccaattagtatttcggnnnnnnaatggtagaggattactatgaactttgactggagttttcct

SEQ ID NO: 12042 - DNA, 546 bp, Gossypium hirsutum
  misc_feature (90)..(91): n is a, c, g, or t
gatcttaaacccatcgctagttttcatatatatcaattctttaatttacaaagttacgagcatataataagggttttacataagcaagcnngcttgacattactgatacagtaagtaaaatatataattatattttttatttactaaactagcacaattacaaatacagcaagtaaaatccatatttgtgtgttggggttattgttcacactccaatcataatccttgaaagtacgaaattcccactcccaaaagtttataatttaaagggcacgtgattgatttagtccatttggttattagtgtaatgatgtgatttatgttgaaaataaaatttaaaaaataaactcaaagaattcaaaataaaaatttaaaacctttaatggtatatctagtaatctaaaaaatctaagaattcgaatctaaactaatgtaataaattttgaaataaataaactcaacaaattctagtgagattacagtactgagcccgtcggggcagtctgtttggggagttcgacttaattctgtgcatggattggttgg

SEQ ID NO: 12043 - DNA, 469 bp, Gossypium hirsutum
atttgaagaattgttaatttaattgtcttctatcacacatcatctcacaaattctaccaactcaaatattataatatatataaaaaaagaattactatgactgttgaaaatttcaattataaaagtcaatagcatttgaaaaagcccctcgatcattaaaccaaaacaatttcaaactaaaggcagcctgattaaaaccagaaaatttgaaccaaccatagatttttgtctctgagagccaatcattgagcaggagcttctacaaggaaatggaaagtaaagccggcaatatatgtactgtagatggtggttggattgaaagtcaaagtcgtcattgataaccaagaaaacttgctatgatataactaacataacaagctaatttatcatgtctgaagttataagttgattacaatattttgtatagcatatgatgttcaatattttgtatagcattgatggcttaggg

SEQ ID NO: 12044 - DNA, 625 bp, Gossypium hirsutum
tcaatgcaaaagaaagtaatccatgcatgaagtgtaacagcccagtttagaccctattcaaaaaagtggttttgggaccacaaatcatagtcagaaaaatattctaatattatttttggtgtctacagcatgttaatttatatgtgtaaaaatttcgtgtgaaaattttatcgtttgtgtgctcgatttaattaaaaggacttaattgcgtaagttgtaaaagtggctatctaattgttaaagtgctacattgttattgtttttataatgtgggctccttatgttgatatttgaccattgaatattagtatggatggttctggacatgagttataatgttttcatattattttataaaggttaaaatagtaattaatatattaaaatgtagttaaataaaataaaacataaaaccatgcattatgttcatcatctttgttgaatccttaaaggaaaaagaaaaaaaataagctagctacattcggccttgtccaagcttaattcaaggttagtttttgttaggtttttgataatttttacgtttttgatatcgttacttcgagtactagttagcccatgcttgaatttttttattttgatgatgtattcatgaattgccattgtc

SEQ ID NO: 12045 - DNA, 645 bp, Gossypium hirsutum
tgtgtatttgttcggtgcagtatatatttttttggggtttatttataagtcgttattaaattatgatttaaattttaaaatatttgtgttgcatttattaattccttttttaagtttatctaaattaaatagtgttaatatatttataatacgtcgattaaattgtaaacatgcgtgtatttattatatagatgtatcgattttaaagtaaattagcaatatatagcgattttaaaattattgtaagctaatttcaagattaattttgttaatctcctaattgttgagaaatggtgtggttggtgtaattaattataaatgtaacttactttgatgtcaagtttttttaatatatataataagttggtaggagattataatttgatgtcagactaataatattagggtggagtatagtttaagtcttttccattctttattacaaaacaatgccaaaataaattgcacttattattattattattattttatattttaaaaaagttggaaaaagttgtaaatatattttgcacccataattaaataggtcatgcaatttatgcgtttttgtttttttatatattataatggtgtttaagctaatatatgtttatagaaattttgatataagacgccaccaacact

SEQ ID NO: 12046 - DNA, 651 bp, Gossypium hirsutum
ttcactgttgtgaatgatgttacatactgcagaagtcatacacccaacacactactttttgatttattatctatttgaactcaggcttttatttacatcaaagtgtacgagtcacacatacatagtccgtcatctactcaggattttggtatgtcacactatgaacgtcatgagtgaataaatccaaaaattttattgatctattttgcttgggaccagtccgatgtactgtcagtccaactagtcacatctatgcctctatcttctgggagtcgttcactctgatgcttaaggcaaagcatctcttgaattggacttgatagacaacatattagtatttcactcagtttgttcattttttattagactaagttgtctttctgtattatgacccaactacataataccgcgtaggattagttaaacattagacaactagagagcaacatttacttcattttgctttacgtgcaaaaaccatatgatgacaatatacaaagtattaacgtaattcttgaatagttttattaaccaatctgtttaaaaaactacaagtgtacttagataaaattactacacttagggaaccagatccaacaacaagtttccacactgaattggaatccatataatccatcttagctttcattg

SEQ ID NO: 12047 - DNA, 651 bp, Gossypium hirsutum
caaggtgtcatagtacttgtaaatgcttagaaggcattctataaaaattttgacctgtgcaactgaatatgcccatgaagagtacattctggcaaacctttcacggtagactattgtacgctgagtagatatgaatggaagaacagatgaacaattgcttgttccagtgaatatgatgaaaacatatgttgatccgattatgttgaaaaaatcctgctcatcatgtcttcagaaaggggaataggatgtcagcatgtcacacagtacttatataacctaatatactccaagcaattattttttgtggtttttactcccaagttttcaatagatacaattctctagattgaatttaaagtcttttctctttccaccaagtaacttccataactatgtgctaggaatttaatgcattcttgtggaaaatgaattgtcagggtatgctagtgagtcatgacacaatcccattccttaaatttttgctaatttgctgatttttattttgaatgtcctgactaccttctcttgctctcgcctcctctatcttctttaaattttagcacgaggagataagtttttattactaatatcatttccttacctctttagcattctatttatctccttaacggacgacagtacacatatgac

SEQ ID NO: 12048 - DNA, 619 bp, Gossypium hirsutum
tcgataatagacaacggatggttgatttccatgttgttggttaacatttgaattagggatctaaatcgttaatactcctaaattggctcaattttacctctcggcctcaattttaacaaattagaaaaattagtctggtttatctttcgacctcaccaaactaacctaggacgattgaattggtgcccgacacgatctcctctcagtcttacttatctaaattttccttttggggcatcaatcctaagttttgaattctattcaatttagtctctaaactcaaaaatcaattacccaacattttcatcaaccaaccacctaagatttaggtactcatgctcatatctaaacacaaataatcaagcaaaaattgcattaacttaaactcaaggctaagtaaaaaaaactcaagctcttgcaaaagcttggagaacacaaaattggagttaagatagatgaataaaaacactaaataaattatttttaacaggtaaaatagaacaaagttgaatgagattaaacaaagctgaataagattaagttgaaggattaaagtgtaattacaaggaaagttaaggtattaaaaagtaattaacaacaagctacagtgttaactaac

SEQ ID NO: 12049 - DNA, 472 bp, Gossypium hirsutum
ttattctaaaagacgttttactttagttgggagtctaaattaatggtgaattagtagaatattttgacatgcgtaattcgaatgggtattttggatataatagtataatatttagaataaaataatttttaaatataatgtattagttcatcatgattttcttcaatataagttcattagttataatttgactggcggttcaattaattctaaaattatatatttgagttggtgttattttttattattcaagtttaatattcatgaatcgtgataaaaatatttaaggtgtatttggttagatgaaaaagtgaaggactggaaggagataattaaaaagtggaaagaagatagatattaagtgtgtttggtaggaaagaaaagtgagagaaaataaaataggagagatgattaaatttctatcctaatgcataaaaaattattcttccaaattaaagtgagaagagtggag

SEQ ID NO: 12050 - DNA, 726 bp, Gossypium hirsutum
  misc_feature (672)..(674): n is a, c, g, or t
  misc_feature (677)..(680): n is a, c, g, or t
  misc_feature (682)..(682): n is a, c, g, or t
  misc_feature (686)..(721): n is a, c, g, or t
gttttggttgtgggtagcagtaagatgaattttagaaacaaaacgggaatttctaagggggtggatacaagggaggagctggtttggaaagggaggagggcgagagtggtgcgtgagttgatagaaggatgtgagtgtaagttgtggattgttaccaatctttgtactataagttgtggatttaatttatgtacttattaattttaaaaatttagtattgacttaattggtaattgttaatttttgctattttcaaaattttacacgataaatataatatcacatgtgtaacatcatattaccttattatttttacataatactcacaaaaaaaattatattattttaattaatgaatttataaattattttactaaattttaaaattcaaaaaatatctaaaaatatcaaattaaaaaacaataattaaatccataatttacatagagtatgagactaataataatctaacagatttatttctaacgttaaaattttaaattttaaaaatataataactaacttacttacatagtacaaagattaatggcaaaattagtgctttttatatttgaattaagttgagttgaaaagcaacctctcaagtctgagagtttctattattcaaagtttgtttctcttttacgagagtcggtttggatatgtaaaaannnccnnnncncccnnnnnnnnnnnnnnnnnnnnnnnnnnnnnnnnnnnnccccc

SEQ ID NO: 12051 - DNA, 606 bp, Gossypium hirsutum
tttttgcgtgccatcaatggctgaagcattgctttcgatattgctggagagctcattactaagttgatctctcgagctccctctcagattggagtatggtggaatttcaaagatgacctcgatgacttcaaacattgttgctgtcatatctgaatgggctgatctatgaaaattaaattaactctaatactacttaattgttaggatcaatccaattaagcaataagtaaataaaatagcggaataaatttagaaattgaacacataaatttaacgtggaaaaatccctttaaagaggataaaaaccacgagcaaatataattttactataatggcaaaagaacgaagagcataaaagatggagataaaaactaaaccccgaaaacccgaaaacaaagaaccctaaaaacataaacacaaaattctctaaatgtgttatgagtcttattattaattattggtatcgttgatatagctgagcgtgttaatatttgttgttagtggtagtaacattttaattattttattctacatttatttgtttattgaagtgggttgatgatttttaattgtttatttttggaaatcttgtttcattcttttgtt

SEQ ID NO: 12052 - DNA, 640 bp, Gossypium hirsutum
gagtttgaatcggaagatgagtgaatcccgaagctcttcgtatggtatcttcactatgttaagcctctacttctagtggcgtcgtcttctattatatgtttgtgtttggctttaccgtgtcgtgtttcctagaataaaagacagtgagctacatcccgtacgtgctctctgctgttctgtggtttattatgttgtgaactggtcattgtttattcccctaatgtgttaattgagtttatgttttatttctttctagttttttttttcttttttatgtgatcttaaaccgtcattaagcctggtttaacttttcatttttttaattaatttttcctgattaaagcaaaatttagaaactttaccgagtagtgtcttttagtgggagaaatgtatgccgctcgagcgtatatattggagctaaaaaaggggtactcatgtggaacctgatgtacttgcctcctctgttggttgattttcaagttggttcttcatacaagtacattggaccatgaaccttgttagacaacaaagcaccatacacaaggtatgggtggggttcaccaacaatatgttttctcacttataaataggtaaaaccaaatttaaaacatcctacaagttttctttctttttagatgtt

SEQ ID NO: 12053 - DNA, 336 bp, Gossypium hirsutum
ttttttttatatataaaaccaaatataagttgatgaagttagaaatagttcaactcattaaactagggtaaactattatagtaattgttttgtcatctaattaaatcataattgttgggtgatcattttataacacttaatagttagctgattaaaaaagaaatttattaatagttgattgactactaatgtagtttacccattaaaatattaataagtttacgtttcggtcacttaacttaaaaattataaaatggtcattgaattattcaaaaattttcatttaagtcctaaactatttgaaagttttatttaagtaattgggctatttttttt

SEQ ID NO: 12054 - DNA, 607 bp, Gossypium hirsutum
  misc_feature (65)..(66): n is a, c, g, or t
tggtactaaagcatattcataaccactccagaaagggtgtctttgagacttgaacttgaatatcnnttctctaacttatttctcttctatgtaggacccatgtataggctcaattcaatttattttcttcaaaacttatacactgcttcaatactagaaaccaaaaagtaaattaagaaataagattgcattttaattctacttacggaagaaaattgttacaagacataatgagaataagagcaaaaaaggtggagaaagagacttaaacttggacacataccttcttaactctacaggcaagcgtcgatgactcatccattgctccacatcacgacgtcttagtgacatttctaacctcctataaagagaacaaaatttatcaagcaaagtcagattgtaactcaaaataataagtaaatctaattcgaacaaataaaggcatgtagtgggggtgaaattgaagaaagttttagtaaacatataggatattgtcctcaagggaacaccacagtggttaaatttaaacctctagtttaaaaacttattcaaagaattgagtgtgtatcctgagacttaatatgattaaactaattgagaatacact

SEQ ID NO: 12055 - DNA, 665 bp, Gossypium hirsutum
ggtgtatttacctgggaaatgggtatacagtcggtctggcaaagtttcaccctacttggactccaggaacttcactttatgcattttgcattgtttaggttaggctatgccaagctaagctgtgactgaccttggcaaagcttgccactaagaaagaactaagcagaaccaacagaaaacaaacaattagttcaaccttaaaaaatcatattcattcaaactcattaacaacgtcaagtatagagtaactgcaatagtaataatactagtaataagctttgcctttgatagcaagtaccaaaggcaagtgaggacaaagtgctttcgaaacttggcactccaattccacatcctgatctttaaatttcaagctcacattcaataaagtactacaccctcttccttcaataatttagtgcatgttaaaccctaaaacatcaacttaccgtaaccaaacatccatatttatgatagtgaaagggaacactccatttagcagatcaagaacactgtattcttcatggtattaaatggaaagagattatcatgtttgaacttcgatactgaaagggtgaaaaagcgggagctaaaattatgcatacaacaacaacaacaaagtagaaaggatgaaaaattaaagccccaccttggaaggaatattcata

SEQ ID NO: 12056 - DNA, 402 bp, Gossypium hirsutum
gtcggccctaaagatgaaccatcgacgttaaattcaagccaattccaatcaggagcagtccacatttgtacccccaacatgatgcatgtcattagaggttggttgggcaaaaagactagggagatgcgaaaacacgactcaacgtagctgccaatttccttcgtatccaccattctaaccttccctcacattcttcgccaattataacagtaaaagtattgtagaagtcttttattagaaattaggttgtattttatttcttttactaaaaaaaaagacaagttaacctttttatggtaaattaaatagtaaattagttttttatgctaaaaattaatctatttttacatttaaaaattagcataattgatgatataaccagacaattacatgtgatgagct

SEQ ID NO: 12057 - DNA, 403 bp, Gossypium hirsutum
gcaaaagtcggtgaacttttggggacgtgttcttactgaggttcagagccttcattcgaggattcttgttcttccttagcatggtaattttctgcggtttgctttacactgtttgtatcttttgactgttgtgttggaaaagattaattcgttctttcttaggttgatggtcacatgtttttatttgttgtatatagtttcgaattaaagaaaaaaatggtcctatatatatatgtgtgtgtgtattgtgtggattcttatttcaatctattcttatttagacatatgcacactgacaagtacttaaccgatgtgtaaacaattaattatttgtttttcattacagtgcccttgttgtcctcaacgccattttcagatttaagagtttgtaatgagcctagcc

SEQ ID NO: 12058 - DNA, 520 bp, Gossypium hirsutum
cataagcaaacaattcgccatcaagataagtagttatattgtcatttcatcatttgacaacattggtgtttgatgcacacagatatagtacagaaacaagtcaacatctaaggataaaacaaaactataacatgagtaatgggtcagtaggaagcaggaaattacaacctaaaaaaaatctatgcttttatttattatttcaacattggacatgttactatttcttctacgaagccagtcctttataagatggttttgtgttagatctccattagctcatcattagatgaagccccttataactcatttgatagtatgtaatgtaaatattaaaggagaagaattcccatggtctgccttctctatgtttaaaaaggatcacaattgcactacatgaagtagtggtgagcaaaacttaattcaattctaaaaaagaaaaaaaaaatcgaattttgagttgatcgaatcgagttattccagtaaacgcaaatcagtaattcatgtttcgagctcgaaacat

SEQ ID NO: 12059 - DNA, 657 bp, Gossypium hirsutum
gacaattaaatacaatttgttaatttttttaatttaggattaaattagtaaaatgtgtaaatattagaggtataaatttattattaagttagactttagtttttaagtaacataaactaacgagattaaatttatttattttaaaaaatactatcaataataagaatcataaataataatataaaaatatggcatatggtacaaccggtaagaaagacaaaatggcagtacttgcaatactagaaaaagttagaaacaaactaaatatgtatcaatttggtcaaacttttgaatattgcatcctaatcccgctatcattagattaacctaacaataaactcccgtcaaccaagaaatctctgccaagagcatcaagaaacttgcatcagtgatatacaaaaggccaagcctcagatggcttatttccatcatcatctcaaatttcaattttatgtgttaataaggttttgaggccttggtcgcttcaaacaacttttgcagagattgagatcgctaagatgaaggtgggaaatgtcgtcttctcattgacgaataagaatggtaatggtatggctttctccttggcgatgacatgtgttaatcggacacaaatgtttaaagcttaatggtgatgttctgttgtgaagaattagcagg

SEQ ID NO: 12060 - DNA, 754 bp, Gossypium hirsutum
  misc_feature (104)..(104): n is a, c, g, or t
  misc_feature (130)..(130): n is a, c, g, or t
  misc_feature (275)..(275): n is a, c, g, or t
  misc_feature (375)..(375): n is a, c, g, or t
  misc_feature (392)..(392): n is a, c, g, or t
  misc_feature (408)..(408): n is a, c, g, or t
  misc_feature (410)..(410): n is a, c, g, or t
  misc_feature (426)..(426): n is a, c, g, or t
  misc_feature (448)..(448): n is a, c, g, or t
  misc_feature (718)..(718): n is a, c, g, or t
tttttctttttgtccacctcttttaaagggccgacaattaaatacaatttgttaatttttttaatttaggattaaattagtaaaatgtgtaaatattagaggtntaaatttattattaagttagactttngtttttaagtaacataaactaacgagattaaatttatttattttaaaaaatactatcaataataagaatcataaataataatataaaaatatggcatatggtacaaccggtaagaaagacaaaatggcagtacttgcaatactanaaaaagttagaaacaaactaaatatgtatcaatttggtcaaacttttgaatattgcatcctaatcccgctatcattagattaacctaacaataaactccngtcaaccaagaaatctntgccaagagcatcaananacttgcatcagtgatntacaaaaggccaagcctcaganggcttatttccatcatcatctcaaatttcaattttatgtgttaataaggttttgaggccttggtcgcttcaaacaacttttgcaaagattgagatcgctaagatgaaggtgggaaatgtcgtcttctcattgacgaataagaatggtaatggtatggctttctccttggcgatgacatgtgttaatcggacacaaatgtttaaagcttaatggtgatgttctgttgtgaagaattagcaggttatatattttgtgcttggtctgtgctcntataatgttctattttgctgtaagtttgagtttttg

SEQ ID NO: 12061 - DNA, 427 bp, Gossypium hirsutum
attttgagcaatgccatggtcttgattttgatagtcaactttatatatatatattacatcgttctgagtgaaaaaaaaaacttacatatattatcaaaattttatataaaaaattaaatatgagtttaattgaaataatagaagtaaagtttttatatttataattatttgtgtttaaattttattatgggtagtttttcttgtagataattgttgaatataaaaaataaaaaataccctcgtaagtatatttatattttgtaaaaaagataaatactttaataattagattactatgtaatttatctcatgaacttattttccgtcatttaagttggaaactctgcattaatactattagtttatgttgatgtgacattgatggcttatctcagggggacacgtgataacctctcaatatgaaagg

SEQ ID NO: 12062 - DNA, 695 bp, Gossypium hirsutum
gcttgcagaacccattttttatgattttttgttgtttttgtagttgatgacataggagtagattgaatgaaaattgtcttttttttattttattttgttagaaaaatatattattcgcttaatgtcataaaacgtattattttaatgaaatcactagtatatgattttattttattgtattacattttatatattttttaaaaggacctgatttattatttcgcctaagtcccaaaaaatgtcaagaacgggcctgcaaccatcttggtaagcaaacaattgccaatgcaactaaacctctaacttattaaaaaaaaaaccataactcaaacatattcccaatataatttaaaacaaactagaaagtctttcaaacatatatacatatagaaatcatgtgtttagaatacatgtatatgcttaagaatatcccataataaatcatgaaacttaatgtttgaaactataataataatagatgcaatatgtatagaattaaattaaaagaattagtttaaattgtgagtaaaaagaaatttaaataggtaaatacatcagattgagaatattaaatgcactcaaattatttatcatgatatttttatttttcttgtattgatatccagttaacttatgacgtaaactcaattaacgacattattaacatatatatatacacacaaacaatgtgagtg

SEQ ID NO: 12063 - DNA, 622 bp, Gossypium hirsutum
catccagaatctagaacggattgaaaaagtgttatatccttttttaccattcattaatatctttaagtcttagttatactattatactgttaaggatttctttgtgagctagacaagtcaaaagcaccgaagatgaaacgaagataaataatattattttagtattattcttaatttaatttcaagttgtaaaggtttaagaccctctcgagtctaaggttaggatcttccttcgacgagtttcatatattattgatcataggttcttcacaatcaaccattgaatgtaacatgtacactgtgatttaatgatactaatattttcctttcctttttaattgtgtttttattcatgatctgcattcatagcatatggttaactaattttctttttctgtataaaacagaggtacttgtccaatgtgacttcaatccaagatggcttaaagaaattgtacactagaaagttgaagccattagaagttacatattgttttaatgattttgtatccccattattggtgagtagtagatgtacttttctcttaaattcggttttaatcttacatgatcatgactctttttcttaaatactaatgcataaacacatgtatccgggata

SEQ ID NO: 12064 - DNA, 617 bp, Gossypium hirsutum
ccagttcatctcaactccataaacatgcttgatttgcatcctcgatcttggttagtgaagaaaaaatgtttcggttttatatgaaatagaccaagactcgttttaatgttgggttgcttctttattacaggtattctgttgcatggtatcctatttatagaattccagacggaaattttcgtgccgcatttctgacttaccattcactcagccatttcgttcgtagaagttccaagtttgattatgctagtaccgtggatgcatgtattgtctctcctgttgtgggtctaaagagctacaatgctcaggtacccataattaaattactcaatgctattatgtactgttatttactttgctaatatctgaggatgctatgatgtaaatgcacatcacttggaacagggggaatgctggttccgaccgagacacgctacaacgaacattacgtatgaaaacctgggccttagcccttctagaatactgaaggagcgatcaaggacactggaggagactgcatcacttatggcaagggcggttgtcatcaagggaaatcggacatcagtaaacagacaccccgattatgagttcttcgtgtctagggcaaccaaaggtaa

SEQ ID NO: 12065 - DNA, 414 bp, Gossypium hirsutum
gatattatttgtagtaattgagccgaatgtaagatatttgatttgtttttcttttttttacttaactcacatattagtatctaaattataattcttttcttttgatatttaaatggtttttttatttattttggaaatcattatagttcatcgcccatgataataaataattatggtttcaggtattttttaaagaggtaaataattaattataaaatgtgttttattaaatttctaaattttattattaagaaatgatgtgagcaatcatcatttcattcctcgtgattggtatttaattttattattaaaatgtatctaatttttttttaaattgatgcctttattagttaaatctttttttaaaaaagtaaaaatatgttataagtctacgagggtgttgggtaaatttag

SEQ ID NO: 12066 - DNA, 492 bp, Gossypium hirsutum
attaacacctcgtgttcgactccggcaacggtctcgggtacggggcgttacaaaaggttacaattatacgtaaaggcacactttgtatgagctttcccgtgtatccgatgaaattctagatggttcaacgggtatgaaaaggagcgaaatggtaagtactcaaatggaatgtatcatcaacttatgaaaaggaattatgaactaaatgatgagtttatatgtgcaaatctacttgtttatggataaattcatttgaaccatgtacaagaggactaacttatggtttttatgatgttttataggcttatgtcaaccttatagttttgattgattttatatttatgctttatattatgaaaataaaatggtaagttatgttttgatttatacaagcttactaagcgttcattgcttacgtagttgtttcttttatgttttatagattatcggaagctcaatttggatgaaagctcgtcagagacctatcacaca

SEQ ID NO: 12067 - DNA, 461 bp, Gossypium hirsutum
agagatagctgtgaaacgaatttcgcacgaaaatgatggcatgagagagtttttggccgaggtttcgagtctcggtcggttaacgcaccggagtttggtcagtttaaaaggttggtgtaagaaagaaaaaggtacattcatgttggtttatgattatatggaaaatgggagcttagacaagaggatatactatgattgtgatgagaccaaaatgttgaattataatgatagaattagaatcataaaagatgttgcttcagcaatattgtatttgcatgaaggatgggaagctaaggtcttacatagggatattaaagcaagcaatgtattgcttgataagtacatgaatggaaggttaggtgattttgggttagcccgaatgcacggacatggtcaagcagctagcacaacacgtgtggttggaaccgtgggttacttggcacccgaagtgtttagatgcc

SEQ ID NO: 12068 - DNA, 488 bp, Gossypium hirsutum
tttttttttctccctccctcctttgattttgaatcaatttatagtggtcacaatgttgtaatatcatagttataatcgtctatattgattaaatattttctcttcaacagttctatttgatgagtaatttgtaagtctcatattcaacacttcataaatccaatgacatgccttgaccttagactagagtaacctcccctcacttaatctaataaaaaatgtaatgtattcacatttctaattgttaatttatggtattgggttatgatgaattagggttcgtctcgctctattacccaatttatagcaattgatcattgtaatatccatttgcatgaatgtttctttgtttaaaaagttggaaaatcattcaagtcaagcagtagcagaaaagtctgcataaaaaaaaaaataacatctacccccctacaaaaattgagaaaaaaaatccctcacgcaacatgtgaaacatttcggccaactaaaaa

SEQ ID NO: 12069 - DNA, 501 bp, Gossypium hirsutum
agatgctatttggacatatggtgactttactaaaagattatcatcaggtcagcttcttcttcttcttcatttatcttaaatgtggcaaatggtttatatgctgaataatcgagcatgtttctaataattgtaactgaccaggaattccctaaaataaacaaggtgattacatgtgtccctggaagtgagatcccggaatggtttgatttcaaaagctcaggatcttccataaacatccaattgccttcaaagtggtactacaatagcagcaaaaactttccaactttcgttgtttccactgttgtttctttccaagactattctggcgacagagaaattctcattagatgtaaatgtcgtctaaaatcccgtaatggcgactgtcatgaccttagttgttctttcttaacttggacaaaacgaattcctggaagcgaattgactggatcgaatcacttgttcctcttatataaaacttgtttctgtgatgaggatgatgag

SEQ ID NO: 12070 - DNA, 681 bp, Gossypium hirsutum
cattctcactaatgctctcattatcattagcaacatctgtttcccacttctcaaaatcatcacttttttccaaaggaattttggcagggcactcatcacttttcctgagaaattgcgtaagtagtataacataaatgatgttataacataagtagtatcacttttcttgaaaattagcataagtagtataacaaagaaggagggcatggacaacactgttgattacacatgcataaatgatgtcgtctggcataattacaggagataattaatgacagaaagggcagaccaaaaagacattgttcaatcaaagtagaagcaaaagaacaggaacctcagaggcttatatttgcgcaatatagttgactagcaaggaaaagagaagacaactaaaacatcatgaaaatatgagcaaatcatttaatggaacttacactaagcaagataaagtcaataacccatcttgtctacgatttgatgttacttgacagtaaaatatgcccgttaagtttaatgcataatcagccactctgcctaaaagtgtcaacacatttgtagctctgtagaaaatgatcaacatttattaagtgaacagtccttgataacaatagtaagaaagaattttgcatattcaagtggtgcatgggggattgaagtactttctggagtgtctgttccagt

SEQ ID NO: 12071 - DNA, 652 bp, Gossypium hirsutum
aagctaattaatcgtccagcttgattgagacctgctatacagttataagtcctatgaacatatatttttaaattcttttcaacatctagaaaattcttagatcattgcatctctgaggtgcttggtttaggactacagtcgtgcaaaggatagtcaattcaggtttatcagatggaacttttgtttctctttatttttctctatgaattcctgaattgacaaacattcttctagtaggtcagccatgaatataattgtatctgttggtgggtttgtgttatactgctattatgttccaacttatcaaaagaacttaaaattgttgggacgacgagttccatgcctatctgattcttctgttcactagccatttccctaactagctctataccatctattgctcctatttcgttcaatttatatggaatttcttcttgactttcgagcaaataatagtcttggagttcccttttctcccaagcatctatagtggcattctctcatttgcttagttctggacatgatacgtttggatgcctttctgagggtacactaatatggttgttatcgtcttaggaaatagttgaggtttcccctcagatttgacttaattcaagaaataataatcattggtcctctttgtatctcccaa

SEQ ID NO: 12072 - DNA, 643 bp, Gossypium hirsutum
aggtacgaggttgttgagctctggattatttggtgaaaaaggttgcttgattaagattgaaatgaaggcatttgagatgttgatctgatcggacgagaggaaattgtcgtttcgatgctttgcacaaatgggtcttcgctgatttgaggggaaaaacagggggcttttgcaggaatgcagtaacgaagaattcggtgggattagtttgattgatttgacgagagtttgattggattttatgattcttgacaatgccatgatgctaagaagtagataacaggagaaactttagtctaatattataaaaagtccggaggtggccaaaatggccgcgtctcgcgctgctttttctagtttcgctgcaaccgtcgccggcagaaagaaccagtaactgctcctataagtagaggccctcatttaccgggccgggctgggacgaggtccggtttaaaaaaaaaattcagacccgagtccgagtccggcttcattaagtttgccaaataattcattaaaaataataattttttattttaatttaatgatattagatataaaatagagaataattactataaatttaaacataaaattaaaaggatgagcaaaattttttgtaaaaaataaaacccttcgaaacaaacga

SEQ ID NO: 12073 - DNA, 459 bp, Gossypium hirsutum
aatttcaagccttccttgttcttgacttttaattttaatcaaccaccttttgcccaaggtggacttaatttttccccaccgtaagaatggtagcaaagcatagttttaaaaggaacaatattttaatgcaagtatgaggatcatcttttttgtgtcggcaaaatacatttttcctttgatgaacaatcctgctaagtgacaatgaattaagaggaaaaaaaaacattgaactgtaacaaaactggaacattccattaacttcccaagattacaatttatagcaaaaaggggggaggggggatttcagtcctaaatatggatgggtgaggaatgctagtcgtcattggagtcctcagcttcatcttcggtgatggtctccaacactggagaattagatgttctgttcctgaggggagaaatgagaagaggaggtgcaacttcaacccatgaactcgaatg

SEQ ID NO: 12074 - DNA, 430 bp, Gossypium hirsutum
taaaattattaatataatgttactaataatattttcttttataaatttaacttatctatactattaatatttttgttagtaagttggtgttaccgatatttttatatttaaaataaattctataaaaagtatacatatccaatttataaaatcttaaatttatctttcaatcaaaattcattttattatttttttataaacattttattatttccctcaaaataaagatattgttgttaaataatttgtcatcacaatttaactcaaaatcaattgatgttaagtggtgcttctgccacgtctcaaatccgtgacgtatatgagcataaaaggttaaatggcaaccattggtaccatttggacacgccttcttgtcaaaacatcgtttataagggtattatctttttgaatgccgttgtaaagcaactaa

SEQ ID NO: 12075 - DNA, 675 bp, Gossypium hirsutum
caaacttgccaaaaaaaaaataatgttgtttccattgttttggttatgctttggttatttcactattatattactactattttgttgttcttatttgaatattgtattacttttattttattgttaattttaccattgttttagaggcatttgcttgttaaattgcacatatcttaatgttatttaagcataaatattaattttttaaaaatttatttttaatttattgagaaacatttattttaatgtttttagtgtatttaatgtattataatttttaaatttctttttatataaaataataatataaatatatttaatacgaacgggatggattgaactcgagttttaacatttttattcaagccaggattggataaaattgtaaactcattttttagatgagctgaagcctaaacctaaaaaacgaatctaaaattatgttgaagcccaaccatgatcacctgagtttttagctttaatcgaattgggctctaaatgcaataagccactactgggctttgaatttgatccatttagttcatgaaatttttgtatatctatcttctatactatatttaagtaagttggtattatccttaatctgttgtgaaataataaagaaagaataaactaaaatgtgataaaaaaaagagtgtaaagagaatgtaaaag

SEQ ID NO: 12076 - DNA, 857 bp, Gossypium hirsutum
  misc_feature (175)..(175): n is a, c, g, or t
  misc_feature (305)..(305): n is a, c, g, or t
atcgagaatttgaataaaaatataaatttaagaataagacttattttttaaatatatcgggtcttgagtaaacttttttatcttagcccagcttgactcaaacttgccaaaaaaaaaataatgttgtttccattgttttggttatgctttggttatttcactattatattactantattttgttattcttatttgaatattgtattacttttattttattgttaattttaccattgttttagaggcatttgcttgttaaattgcacatatcttaatgttatttaagcataaatattaattttttnaaaatttatttttaatttattgagaaacatttattttaatgtttttagtgtatttaatgtattataatttttaaatttctttttatataaaataataatataaatatatttaatacgaacgggatggattgaactcgagttttaacatttttattcaagccaggattggataaaattgtaaactcattttttagatgagctgaagcctaaacctaaaaaacgaatctaaaattatgttgaagcccaaccatgatcacctgagtttttagctttaatcgaattgggctctaaatgcaataagccactactgggctttgaatttgatccatttagttcatgaaatttttgtatatctatcttctatactatatttaagtaagttggtattatccttaatctgttgtgaaataataaagaaagaataaactaaaatgtgataaaaaaaagagtgtaaagagaatgtagaagagagagtgtatctttcttttatatattattattcatgagtacatgagccccatatatataggggttaaaagtaactctctaatt

SEQ ID NO: 12077 - DNA, 653 bp, Gossypium hirsutum
tatttagggatgacaagtccgaactgtccgatgaattttgaatcaatccactctgaatggagtagattttttttatttgaaaagtagatgcgagacatggcaggatggatcttttcttttggggtatagagcaattatggtaattacatgtcttatctcgccctactttgttatataaaattatcattttattattgcatatatgaactattaaaaggataaaaatgtaataacatattataaaaaaattatatatttaaaattaaaatattaaagatattaaagataaataacaaagttaaattgaagtgaagtgggatgagatagggatgattagtgatttaaaacatgattatgattagagaaaagtcaaaaatattttttaggctgaaaattaagttatatattttattgagagtaaaaatatagtttcggcattgtattagcttatacctttatagtttttagaataacaaaatcataattttatcatttttaggatcaaattacaaatttttttattattaacttacaacttcataagatttaaaaaaaaattaagatgtaatttttcattttaagaaaccagagtcttttcctacatctgtgacacaatctaagagcatagctaaggaggttaggagggacctgaa

SEQ ID NO: 12078 - DNA, 599 bp, Gossypium hirsutum
cctaagtttgagagccttgagttggtgtcaagttttaagctttactattccttattaacattggtacaattgaatctcgttctcagcataaaatgtgccagacaaactcaatacaaaattgaaatagcctatattcctaccttatgccaactttacgtttcagatcgatttccaagtaacagaaacaatataattactttcttatgtagctgaaaaatttctaccaaatacttatgtagttagctcatctaagtctctagaacaataatatccattttgccaattgatttgaagtccttagatgcttccagcacattgtctacagagaagcaagcgccagaatctaccagtaaaaacttgaaactagccccgccaaactttaccaaaatcctcaagtccctcaattaaatactattctatgataccttaaactagcctcatcctttatatcatacaagaaaagatgaaaatttcaccatgatcttcttgtactagcaactttatatgaggcccagcttctttaaagaatacttgtagaattgactctccgtatacatataagtatattatgattatagcaccagaaagatgagaacaca

SEQ ID NO: 12079 - DNA, 643 bp, Gossypium hirsutum
ccataatgctcatttgaagcagcctaaacaatttgcagcaggattgcagcaggagatcttgcccttttatacaattcaaggctcaagttatttcccggaaagctaaaatcaagatggccaggtccattcgtagtacaaatcattttcccctacggtaagatagaggtaactcattcagaatatggcacattcaaggtaaacggtcatcgacttaaactttataatggtgaggattttaaaaatgatagagaggagctttagctccgcgaaccttcataattatgcgcacaaggtaagtctagcttaaactctaaataagcgcttctcgaggggcaacccgagtgttaacactactaatttctttactttcatttcataatatttctttaaaattaactaaatattaaaaaatacaagtttttgaccaacacggcctggacacacagacgtgtccttggccgtgtggatcttgtgacttaatttttaaattttaaggaagttggcaaagagttacacagcctggcgacatggccgtgtaatccatacagctaggacgcaagggcgtgtccttggccgtgtatattctggagcttaaattctcaaaaattgacagagacacagcctaaatatagtcccacacggg

SEQ ID NO: 12080 - DNA, 644 bp, Gossypium hirsutum
caattagattccctttgctatttatactttctttttctcgttttgtatctatatttggtagcattttttttttattttggttcataaatttagattttgtaaaaaaataatgatatgtctaattttaaatttcaaagtgaacttaatttcatgtttagggtaaaaaattacattaatccaaaaataaatactaaataaaaatgcgtccacaaaaataggcataatgcttagtttagccctggaattatattgtttttcaacatttgccccactttagaacttaaattgtcatttttgttattcagtttaatccaaattttgtcgtgactaaaacaaaaatattgacatgtggtcagtggcggatattagcactaagttttgagggtctaattagaaattttaaaaactttgagaattttgtgatagttttaaaaaatattgataagtttaattaaaactttaaaaaaatttagaggtattacgaaaatttaagaaaaaaaactttattgaaacatttaaaatttttggaaggatttaattaaaatttttaaaaaaaatttaagggtataattaaaaactctggaggccacgctctaggccctaatgagaatctacctctggatgccgtgcaatcaaaatgaatc

SEQ ID NO: 12081 - DNA, 480 bp, Gossypium hirsutum
acgaataaattttactttttaatagtttatatcttataaattttaaaagaaatttcataattttaagagggccaaaatgtaatttatcttaattaatttaaagttttctaaagggctgaaacaataattttctattttagaatgcgactcccggattcgcctatgttatgaagtaaatggtcgcccttgtggatagaaaagaaaagttggtttaaaatcatgggtattttctttgagttaagaagtcctcaaattgtcaattagattttaagttaatctttaaatttataatattttaattgagtcatcatgttttttcatcaataattattttaaatgttaaatgtcaatttgaatataatgtggagtatatttaaaatacacactttggccgattaagtcctaattcgattgacatcagaattgttgtcaatataggaggacatgagtttgagtgtgttgaagctcattatcctccta

SEQ ID NO: 12082 - DNA, 657 bp, Gossypium hirsutum
gaagtttgtatctctagagatacatttgaagatgacaactttaaaagacttgtgaatactcaaaaaagataaattttgatttgtgttctcacaacacaacctataactcgtggactaaaccaactcaattgactaatcaatgtctaaagggtgatctatatctataatttcataagatttctttaaaatattcagcaataaggatgacaaaacgcatataatcaatggtcaaattatacaagagataataactgataacttttggtcacggctgcaccctttcttttatcagaaagaggatggagaattaagggatcaatatataaagaaggaataaagtaggctagcagatgatatggtaccatcaacccaattttacatttatgcatgagttgttagcagaacttgacttgtccagatccttgttgttcaaataaaggtaagatggttggtcgctgaacattgataatgtaggccttggagaaaacccagcatagtctctgtctacctttgctaagcataattcgttaatgtatttgaaaagctcgtgcttttgggcaaaaggttgagcagcatattcttcaaacggcatccactgaaggaaacaaaaagagtaaacatataagatgaaaggtgtctaagtaaatgcctggcaaa

SEQ ID NO: 12083 - DNA, 661 bp, Gossypium hirsutum
  misc_feature (647)..(650): n is a, c, g, or t
tatgtccatagtgaatgatttgggttttaagataaattttcttcaaatgtgtataattgaatcaaaatctaagttttatgtatacatatgaactacaattgaagtttcatgtgtataattacaccaaattaaaatttatgtatcaaattgcatattgaactaaagttcatgtacgagtttgatatttatcctttttttataatattttacgcatacaagttgaacaaacagttaaaagattattttatatatatatatttaattgattttgatggatcatctttttactgtaatcgaattaattgatttttaccatcttaaattaacttaattgaattttataggtgaattccgtggactaagttcgaattgattatattttattttaaaatgtaattatgaaaataaatatttaagataaaaaatattaaaattttatatcaatcattattagttggtatacactagtacaaattgttaagactggaatggtaacctactattagaggtactcacggacttggttggtttggattgagttaagtctaagcatgatattaacatactttataattgttcaagcctgacttgactcgaaataagaatctatgatttagcccaagtccactcatatttacaaatttaannnnttagtatcttg

SEQ ID NO: 12084 - DNA, 651 bp, Gossypium hirsutum
catttcactgctattccttcccttgttgtttctctcttcttctttcttcatctttaaatcttaaggataaacttcctccgtactatattcattgtgatactggtactttctaaattataataaatttcttacatcttgacataatatctcaaattttgatatatatatatattggggttaaaatatgcatattgtattcttcacaaatttggttttcgtcactataatttttatttttaagaatttagttattttcttttcacattttaaaatttagatctaattattaaatctatttattgttgatgtgatattttaaaataaaataaaatcacttgatagtaatataattaaaaaataacattataataaatttaaatttaataaaataattttaaaagtgttgacaaaataacaattgcacttgaaatttaaaatttaaaaaataaataagtcctgaaaataaaaatataaaaactaaattttaaatttatgaaaagcgtaattaattttttataatcaaatatttcaatattacttcagtcaagtaaattaactctaacacttatgcagaatttctaaatgaattagttgaataactaatcacgtcagcattctttgtaaattttgtggtggaacataccttgaaag

SEQ ID NO: 12085 - DNA, 627 bp, Gossypium hirsutum
  misc_feature (62)..(63): n is a, c, g, or t
  misc_feature (66)..(68): n is a, c, g, or t
  misc_feature (619)..(622): n is a, c, g, or t
  misc_feature (624)..(624): n is a, c, g, or t
tgccatttatgttttattatttttaattctaaccctattaaaaaaaaatccatttctacgtnntcnnncagccattgcttcattccttctaaaaaaaaattcatggtttcatctcttccaatttttttatacaaaaatcctttctcattaatattttttattaaaattttatcttctttatttataatattttattatttaattttttaaataataatacttatataatcaaatataatataatttatttatgttgcatcttctgaaattacattctatttattttcgattaaagattttactaaatctaaataaagattcatattatgatgtgaagcaagaaagtttgactgttacattgttgtttggaatcaagtttaatcatttgggatgaaactccaatagcacatatacatgcttttgaaacaattgattgtatttctaaacttgacttggaggaaaaacatttctattaggggtgattttagtcaaattcttctaattgtgccatgaggtagtagatctaatcttgtctcatttacaatatttaaatcaggttacgaaattttacttatgatataatttcagatttcaacaaatgattattggacttgggtgnnnntnaaa

SEQ ID NO: 12086 - DNA, 233 bp, Gossypium hirsutum
  misc_feature (59)..(59): n is a, c, g, or t
  misc_feature (61)..(63): n is a, c, g, or t
  misc_feature (65)..(65): n is a, c, g, or t
  misc_feature (68)..(69): n is a, c, g, or t
cgctttgttttattggaccttcctcgctttaatcctttacgctcgtacccgaaagtttncnnntncgnnaagatcatagggtaatagaaactaattatattttattattgtaggggaagatttaacttgctaattatttttgtatttgtgttctactttaaaaaaataaataaattaaattatgaatttcatacttgttattgtattggtgttggaatttgacattatcctta

SEQ ID NO: 12087 - DNA, 474 bp, Gossypium hirsutum
tccaatgatgactactcatgcttaaccactaagcactttaatggcctatttactatataaagacctccaatttaaaattctatagctatttaatacctttagctattagaacacaacctttgcactttatgcaatttagtccttgttatcaaattacgcatgtaaacggtaaaatttcttaacaaaatttttatatgatatttctatcatactgtagaccataaaataatattaaattaaattttatgaattcgaatttttggtcccgaaatcactattctaatttcactaaaaatgggctgttatagttaaaacaggcgaaagtttcattggctccacttaattgtttccaaagagctttgacaaaaaaactatatttttatgtgttatatccctctactacttggacacgtgatagcaaggcagatggcattgacttcccctttgactcacctaacacagtatcctggttgg

SEQ ID NO: 12088 - DNA, 627 bp, Gossypium hirsutum
cattcttgcttaaaggaatacctaaagccagtagcaaaggtatggttttattttattcgctacagttttatgcctatatcatatagttccaccatttcgatggaacaaatgctcttgttatatgaaatcttgatagaaaagtccattaatgttaggaaaattattctcaaggagatttatgactgtgctaaaaagaagacaagaagtgtttatttcccatcattaatcacttcactttgcttaagggttcgtgttaaaacacaagcaaattactttgcttaagggctcatgttaaaacacaagcgaatttgaaggggcaatatgtccgagggtgcattacaagtcatgatctagaaaggttaatagataaggtgcatgagctgaatcaaggtgagcaagaagaaccaactgagccaagtactgaggagtcaacgaatgaaactgaaactgaatcagtttcaaacactgaagaagaagaatctgataagtaactagttgaagaccctgaaccaagggttgagccagaagaagaaccagtcaagctaagtgttgaacctgaatatacaactcccttgccaacttctgcaagtactttaaggaaatcagagttatcaatgttgatggata

SEQ ID NO: 12089 - DNA, 673 bp, Gossypium hirsutum
ttttcgaggagactgctttaaaccatacaaagatttcctgagcttacatacttgatttctaaatttttcttcaaaacttggaggtggatccatgtaaacttcttcttcaagtttctcatttaggaaagcattcttcacatctagctactgtaaggaccaatcaagattaaaataaaatgataaaagaactctaacagaatttaatttggctactagagcaaatgtttcaagataatctatcctgtatgtttaagtgtaccctttagccaccaattgggttttgtatctatctaaagatccatccgatttgaatttggttgtgaacacccatttacagcccacagttttcttccctacaggtaattccattgtttcccatgtacctgttttttcaagagcgcgcatctcctctaaaatagcctccttccactcaggaacttgtaaagcatcattcacatttttgggtattttcacagtatcaagacacaaaacaaaggttgagaatgtcgaagacaaggctttataggacacaaagttagacatgtgatatttgacaacatttctaacaccttttcttttagcaattggaatatctaaattagaaaattcattggttggattatgagctttacttggaattttgacaagatcttgtgggttagattcttggtga

SEQ ID NO: 12090 - DNA, 658 bp, Gossypium hirsutum
aaactcggatcttctgaaccaatgattgtctgcttttgggggggttacttctgtaagtgtcatgtgtttacagtcatctccagttcatctttatgtgcaaaatttgtttgatgggtgggactggatgcgataatgagtttgtgaactccttagaatgatgggaattttgtttcttttattttgtgtaaataattttccttattaagagacaggaggggataaactgagtagccatttcattttgtatataacatgattcgtgcccatatatataaaaatttgattgaaggtatgattttcacatcgaagttttgatgaattatgcatatttgtcaatgtcactgattccctttggtgctttggtgagcttgatctaaacttgttcccctctacccccgccccccgggattctgaaatttacatggtaaaacttatattatttatgtatgattatgggattataaaatacgaagttaatatcaatgttgtctctagcgttttgagtttatcgttagtcatttttattttatatatttattgtctaattttaatttttattaaaatatgcataatatacatgcaaatatatattagctacataatataaatatgtctattccgaatagaatatttaaacaatccagaaatctgttgccaa

SEQ ID NO: 12091 - DNA, 662 bp, Gossypium hirsutum
caagtcatccagagtcaatttcaaatttcaaccaaccagtcatcaaaatacagttacaacaagtatctagaactcacaaatcaagggcacagtactactaaatcaaacataaaatactgtagcctcgaagtagccagaaaattagagatgctcacatcagaaatgtgtcaatgccatttaggtaacagaacaatataatcccaagtagctagaaagccacaacatattcccatccatgcaacactttacacttaaaaccaacaatataatccagttaactaatagaaaaaaaaatgcccaattaattgaaagtcatttccagttcaatcgaatttaaagccaattagctaaatacaatgtaagcacaaacaaattcaatttaccggatcaattttaaaggattccaaagatcgatgctaccatcaacgaggccaccagcaatgagtccgagagaaaactcatcggaaccggatccgttcttgccccaagctaggcggttaaaccgctctgagcttgggcactcacctataacggggagctcgagatcgtcactctggaaatcaaacttgaagatctcgagattcgccgatgaactgaaggatagatccaccgctccggccatcgtcccagcagccatgtagggcgcgtccggcgccagtgcc

SEQ ID NO: 12092 - DNA, 715 bp, Gossypium hirsutum
  misc_feature (56)..(57): n is a, c, g, or t
  misc_feature (482)..(484): n is a, c, g, or t
  misc_feature (646)..(650): n is a, c, g, or t
  misc_feature (671)..(671): n is a, c, g, or t
  misc_feature (674)..(674): n is a, c, g, or t
  misc_feature (684)..(685): n is a, c, g, or t
  misc_feature (693)..(699): n is a, c, g, or t
  misc_feature (701)..(712): n is a, c, g, or t
ggcttctctcttctgactatatctatgactggggaagctacatgggtagtctgagnncttgagggggtggaagtctaacggccggattcatacgaataaactcagtaaaccattcattcatagcttggaagaaggcctctcgagcccctcctccctgactaactgtaacgggcctttcactaatatctagtggcaccgtcctttcagcaggagcaggcgcgttactttctacatcatctgcacgtactcgttcgggatccataactatgaaagaaaaacattttaaaatcgtcaagagtcgtcacactatcaaaatataaatatggcatgtatagctagactcttactcatactgaatattcagagaaccaactaaactcttactttgataccaacaaatgtaacagcccttacccgagaccatcgccggagtcgagcacaagacattaccagacatatattttggtagtgtgacgactcgnnncgattttaagatgtttttctttcatagttatggatcccgaacgagtacgtgcagatgatgtagaaagtaacgcgcctgctcctgctgaaaggacggtgccactagatattagtgaaaggcccgttacagttagtcagggaggaggggctcgagaggccttcnnnnnagctatgaatgaatggtttantgngtttatttgnntgaatccnnnnnnncnnnnnnnnnnnnaaa

SEQ ID NO: 12093 - DNA, 403 bp, Gossypium hirsutum
actgcattactattaccgatggtttatcaacaacaagctttagcttacactatttagagttcggtagacgggttctggggaatgcgtggtatgtagcggatggttcgataagaaccttttgtattgcatcatacacatgacatgctcatacattgattggttatgtcatgtacaattctgaaatgattgcttgtatgattgtaccttttattgactcacaccgagctttgtcgctcaccccattagtttaatatcttacaggtaatctacgaggttagggttcaactcaggaatcgggagtctcgtctcggttttgctaaataaagcatttttaattttataattttatatttgtttatgactgtaaatatttttatataaactgtggcatgaggtttaatta

SEQ ID NO: 12094 - DNA, 666 bp, Gossypium hirsutum
atctgatctgtattcttcaaacaaattaatcatttacactggttcatgcatcttaccccagaatatttcaaacaaatttgtatatcaatggcctcatccatgatgatgaaagatcagattggattattcagtttaataaaaagtaattataacattaatcatttactaagttaattttatctgtggttaggttgatgccacgtaattttttaggcatttattagttttccatatgctttcaaactttttttttaaatgtgtatttaaattgaacttcaaccctaaatgctattcgtttttcagaagaatgttggtcaaacgaagaacagaagtagaagggagagatcagtgtcagaaaacaacaaaatagacggactcagtaagattcaagtttgctatcatgtaaacccagagaatcaagaaacacctaaaaccccaaatccactcaaaatcatcccagaaaattaaaaaaaaatctaataacaaaaggatattttacacatactgtatgccatgcttattgtccctgcctttccattgttttctctccataaacaaacattacatagtttctttgattttttctctctcaatcaatcctaaccctaagatagggcgtagattggcccaaaaatggtaaaattgctttatagctttggggcttcc

SEQ ID NO: 12095 - DNA, 608 bp, Gossypium hirsutum
gcttctttgtaaatcgcctaaagatcaattcatttccaaggaagagagtagtgaatttgtttacagagcaaagaatcaaactcctcagtcgaataactattcaagattaaataaataaatagaaacagaaaatgagaataaatttagggcagtttctctgaacataaacatgagaataatcacaaaacatgaaaattcttgaggctgccccataaaaacttaatctaggccgggtgaaattgaattctcacatcaatttttttactaagcaagaactcatttggaacggccaattcttcaagaacgataaaaagatcgtcttttcaaaaggaaaaacacacacttcattaacataaaaaattgaaaatctcatggaatgtataattacctttctgagaaccttgcaagagtaagaaaatttacttgcaaaaaaccgaaaggaattattttagggtttgatttctgccggcaacggaacaagagcggcactgcttataataaacttcgctctgttctctcaaaggcattctggaaaaccctagatcggcctttagtatttataacctgattatttagctcctttcccctttttgtcccttgactgcccg

SEQ ID NO: 12096 - DNA, 628 bp, Gossypium hirsutum
  misc_feature (524)..(524): n is a, c, g, or t
gggagtcacggacaaatattaaccacaaaaatattattcctttgaagtcacttcttttcttcttatggatgagacttttctttttcttttccttcggtcctatgagtatcacacacaaggctttttatagatataatccaaataaattaattatttacgaaaacaatccacttacaaaattatgtgcaaaaatgtcccattttatacagtaaacatcgatatcgttgttgtcattggcggcaccacccttcataatgggttaaccattgactgaagtgtgattatataaaatatttagggacctgatgaagtaattaaatgctggcggcacccaaaaaattatttttttaaaaccagccaatgattgctctattatgaaaggtggcgacgccaatggcaatagcagcaccgaggttcactgttcaaaacggatcattttcatacatgattttgcaagtgagtcattttcgtaaataattaatttatttggatacttctagaaaaaagcccacacacaataaatnaataggaccgaaggaaaagaaaaagaaaagtctcatccataagaagaaaagaagtgacttcaaaggaataatatttttgtggttaatatttgtccgtgactccc

SEQ ID NO: 12097 - DNA, 616 bp, Gossypium hirsutum
catctttaaattcttttctttttggttgggtgaaatataatagagagagtaaagccctaacaacaatacaacttacacgactcgaactcaggttacacctggggcaataagcgccttaaccatcaagccaacacatgggttcatatcatttttaattataataaaagggtaatggtggtgagaagtgagtttggaactattcataacatctctctactcttaaataaaaagataaacgcactctaactcacgtatttttatattgacaacaatgctaatgctaacctaactaagacttagtctatctcatattaatcatgttaataaaaggataaaatattttgatttattaaatttatatggttattctatctcatgttaattataaaattaaatatgttaatttattaattttacttgaaatttatttattctatttaagaaactagaaattattaatatttaaatttaatttatttcatctttatcatgtttattaagaatttaaaatttattttgaacaaaaagctatagattttaattaaataagaagaagaaattcatgtgtcatcaaattaaacaactcacgtggcaatcatctgtgagcttgaaaact

SEQ ID NO: 12098 - DNA, 497 bp, Gossypium hirsutum
gtgcaaggaaatagcaagggatggtagggagtcttatttatgcaaagtggtacatgatatgaacacttgttgcaatggctcctacgcttggtttagagcggggtcggtgcaccattacatctaggtggtaggcatctccacccttggagctactatagtcgtttatttctcactaatcccaacgggatttgtatttgtagaggatataaaaaatcttaacaaacccttttactatgatttaattcgttgtctggttttgcctctccatcatctatttttctctaaaatatacaatgagtataagaataagatttatatgtattcgatttgatctactttaattctactattgctattattgagatgtgtctcaaatatacaatgatttttttgcttctctcttgttatcatattataataaaatatgtttatgatagtaaaggcgagttaaatctattatttgagaagccatagcccatagctatttaatcccattc

SEQ ID NO: 12099 - DNA, 457 bp, Gossypium hirsutum
ggtgtgaatgcttgagttagattgaattgcattagggattagttttgttgaaatggaacatttgcatattgagagtagagtgtatatatataattatgtcatgaaatgatgttaaagaagtgcatatggtagttaaatctgatttgaatatgtttggttttggcttggcaaagattgcaggaaaaaaatcttagaaattgtagaaatagtatgtgacattgcgacgtcaaacgtatcacatcatgatgagaaatgacatataacgtcatggcaagatgaggaaccccattatctcaacgaggtcaaaacattatatggtgttgcgacgtcaagtggcttgatgtcatgacgtgacaaactatttgacgatgtcacgatgtgaaccctaaatatttttaatttttttttacgattcaatcatatttcgatctcgggttaactttcagctttcacacca

SEQ ID NO: 12100 - DNA, 382 bp, Gossypium hirsutum
cttcttgggagcaataggtttagcaagagcatttgtaatatgactagatgatggaacatagttgacttgtagtgagccatcaaccactttctcatagacaaagtgatagtctatttcaacatgcttaactcttgcatgatgcgttggattagcagacatagacactatagacgtgttatcacaccagacaattggtggctattctatatgaacccctatctcttctagtagcggtcgaacccacacgagctcggatacacagtttgccaggctgcggtattcagcttctgaagacgacctggacataacagcttgcttcttggagcaccaagctattgggtttggccctaggtagataacataacctgtggtagaacaccta

SEQ ID NO: 12101 - DNA, 450 bp, Gossypium hirsutum
gatatgaaaaggcatagacgacctatggccaactttggtcatttcataaaccttctaaaaaatctcgtgtcttgtacctgcaagctccccaatcttgaagaaaaaattaaaacactctgcgcagtgtgatttcaagcgagaccactaatatcccctttcgattcattaagttatattggtgagtggccccttgactaatcgacaaccgcatacgatacatgcatttggcagtaaagggttatttccacttaattgagaagttgaactttctgtcaaactttaattctgcaagtatatgtaaatactaatcctagttatttccccaaacaatatattatccatcttcaattgggtttcttgtgggcagaatttgagcaatcttgagactttctctttgtctatctcccttaaatagtacaggtaccgaaagacatgcacaaacggataagt

SEQ ID NO: 12102 - DNA, 564 bp, Gossypium hirsutum
gaagcagaaataagaagctacgacaatctgatggtccctgaaaagatgacatcaaacaaacaaattgcagcgacgaacaagtctttccaggaagtagaagaggattttatgtgaatatttcatcgctaattacgattcttcttgctttccatcaaagactagttatttctttttcattgcaagcttgagttatttgcctccattaagtcggttcactcaggatttcaacccccgtcattttgggtgagatgaacttctataaaatatgattcaacctccattgttgaataaataaataataaatttaaatacataataaaaattaaatctaaaaatttaacttaatattatttaaattctaattaaacctcaaaattcatatttgtcttcactaaaaagctcataattaagagtcagatcttccatcgatacgaagacatctcaacctaaaaataactaaattacatctaaaaattcattgcaagtcaattaatttttagaacttgaaaattgacaaattcgataaatgaaatttaataattttcacccaatcctgtatcaaaa

SEQ ID NO: 12103 - DNA, 666 bp, Gossypium hirsutum
cgtcacatgagagataatggaaggtgatatcatcaaactccttgattaagtccagaaccagctctcaataattgatcaactttaagtcacttgtttccctttcacctttgagttgatagatcactagtgcagaatccccatatacctctaacatcttgattttgcgctctacagccgcatagatacccatgatacatgcttcgtattcttccatattatttgtgcaatcaaaatccaatttacaagtgaatggatggtgatctccatttagggatatcaagactgtctcaattccattactaacggcgtttgatactccgtcgaaatttagtttccagggatgatcttctggagagtcttcttgagtggataccatatacattagatcttcattggaaaaatcaaaatccaaaggctcgtaatcttctaaagctctgctggccagaaaatctgctattacactcccttttacagccttctggctcacgcaaactatgttgaatttggaaagcaaaatttgccatcggaccatccttccattcagagcagctgactccattatgtacttaagaggatctaatttcaagattaaccagtatggtacagcatgtattgcctcaatctccaagttgtccagaccaaagcacaacatagcttctcaattgg

SEQ ID NO: 12104 - DNA, 435 bp, Gossypium hirsutum
ttttgtaaccctttataacccatcagctaacccatgtgagatattaaaataaaaaaaagaatgctctctttcaagtcatttgcataattttttttactataatttaggctttacattggaccaaaccaattggctgggaaccttttttgaataattggctgcattaccacttgaacaggtaacatttttaatgtctttattttcttttagatcttaaatttttgtgtgtttaatcctaactttttaaatttcttttgcaagtaacttgaaagagggttcctctttttcttattttaatatctcacttgggttaggcatagggatgtcaaaaaacctaaattttatggattccaagccaatccaacttgatcgggtcaatccttttttctattgaagttgggggtatgggtggagcgggttaatttttaaaaatag

SEQ ID NO: 12105 - DNA, 720 bp, Gossypium hirsutum
  misc_feature (610)..(626): n is a, c, g, or t
  misc_feature (628)..(633): n is a, c, g, or t
  misc_feature (638)..(644): n is a, c, g, or t
  misc_feature (649)..(658): n is a, c, g, or t
  misc_feature (667)..(668): n is a, c, g, or t
  misc_feature (670)..(671): n is a, c, g, or t
  misc_feature (676)..(687): n is a, c, g, or t
  misc_feature (689)..(695): n is a, c, g, or t
  misc_feature (701)..(701): n is a, c, g, or t
  misc_feature (707)..(717): n is a, c, g, or t
tctactccacggttcaactgtgtggattgaataaaatttctcggattggcttccatcaaatccatgttgttttcaccttcttcaaccaagatagtcagtgtgactgaagacgcattgaggctgaagttgtttctgtactcgttgcgagatcaagcacgagcatggctcaattcattgtcaccaagtttcatatttacatggcaagaattagcagagagatttttgattaagtatttcccgcctagcaaaaatgctaagttgaggagtgagatcacaactttttaacaattggatgatgagtctttgtatgaggcttaggagtgattcaaggagttacttcgtaagtgtcctcatcgtgggattcctcactgtattcagttggagacattctataatggtctcaatgcacatacaagattgattgtagatgcttccgcgaatggtgcaattttgtatatgcacatacaagtcttataatgaggcttatgagatcattgaaaggatcacgagtaataactatcaatggccaacaaatcgaacaacttcaggaagatgcgtagccagagttcataaagttgactctttcacttcgtatcagctcaggtatcgnnnnnnnnnnnnnnnnntnnnnnntcctnnnnnnnttctnnnnnnnnnntttccctcnngnntctcnnnnnnnnnnnntnnnnnnntccctntttttnnnnnnnnnnnctc

SEQ ID NO: 12106 - DNA, 502 bp, Gossypium hirsutum
tttaaagactttggtaaagtaaaatattttgatttgagaaggtgcttaaaactaagtttttaactaagtaaaataaataaaaagaaaataaaagttccaatgcatgattttagaagatggttttaatcaagatgacataattgtgctatattaatgacatttcttaacttcgaattattaaacacatgttcatgttgttacgtataaattcacggcaactcagtaatttgttaacttatgaacatacttacctaccaaaatttatttatttcttgactatatttctatgtcaattcaactgattacacaaattttactaagcaaatgtgttaatgcacattcatacttatgaaatcaaaataatctcttgtacatatctctatgccaattcaaacaattaattctcataagtaaataaaagattatgtgaggtaacaatgtatttctacattgaaatagtttaatcacaataatcttgcaagttatgcaaggctaatgtatc

SEQ ID NO: 12107 - DNA, 664 bp, Gossypium hirsutum
ttcaagccctttccgtccagcccaaataagttttgggtttaattgccttttaaatcctttctcattagacacttaagctatttaatcattttagcaacttttacaccttttccaatttagtccttttcatttaattaactacccaaacattaaaattttctaacgaaattttaataccacatcaccaacattttataaatacttataaaaatatttcctacttatttttatgagatcaaggtttcgatactttgtttttatccaattccttcaataattcctttttttctaactaaccactaaatcggtaaaatttttctatcgatattttaatacgattttcctatcatataaatattcatgaaaaaatattaaaataaatttctctttaaattagatttgtggttacgaaaccactgttccgataaccttgaatttaggccagtacaaatcaacacggcccggacttcctcacacgggcgtgtcacacgggcatgtccttttggtaagatcgaagcatgacttacatgggtagatcacatgtccgtgcccatttaacagccttgaccacggccttaagtaacgtacacgggcgtgtcatacgggcgtgtccttaccgagtccaagtttagtccaattcggaaaaggccaattttgagggctc

SEQ ID NO: 12108 - DNA, 642 bp, Gossypium hirsutum
ccaatgttatcactggtacatttcctctctatgacactaatgtaattgccttgattgatcctggatagactcattcatatatttttatgaatttagtgtctagtaagagtttttctgttgactctaccgaaattatgattaaagtatctaaccccttaggcaagtatgtcctagttgataaagtttgtaagaattgtcctttgatgactcggggttattgttttctagctaatttgatgcttttaccgtttgatgaatttgaggtgattctgggtatggatttgttgactttgcatgatgctgttgtgaattgtagacgaataactattaaattgaaatgttagaagagtgaaatccttcaaattgaatctgatgagtcgagtgggttgcctattgtgatatcatagacgttagcttagaaaaatgtgagaaaatgttgtgatgcttaccttgcatatatactggatacaaaagtgtctgaatcgaagattgaatcagtaaacgtgtttgtgagtatccaaatgtgttttcagaagaattgcccaggttgccactgatcagagaagtcgagtttactattgaatctataacaccccaaacctggcctagaagttaggcctgagtctaacgtgtcacactgaa

SEQ ID NO: 12109 - DNA, 605 bp, Gossypium hirsutum
gggggctaagttgagcgataatgaatattttgttgatttttgcattttgaataaaagctcttttatcttatggttttatcattttcaaccatctatttcttttttcttctatgaaatttaatataaaatcataatccattattatgtatatgcaatatctctttaaattaaattaaattaaattaactgccaagcgttcactagtgcatactaaaaaggaaatctaatgtaaaattaaatcaaacatactacagaattgaatctaaaactggaatattttaaaacctcacaaacaatgcaattctttattcctcttttcctctcaagttattttgtatcatgttatattttacataattaatcgtatcatcaaattttaaaaaaaatttaatattttgatatcatgttcatattatgctttaattcacaatgtattttgtataatatgttataacaattcaatttaaaaaacaaacaattatcttatttttgcataccgtaatatacatttacatgttaataattctttgtacataaattttgacatgttcgtatattcgagtcattataattttattatttgtaatatgacatgttttacttac

SEQ ID NO: 12110 - DNA, 668 bp, Gossypium hirsutum
ccataatttgctacaccaccattggcccaataccgtgtagcctactcaatccacactgccacgatattttttttaaagaaatcataaattttttaattaaattgttttaatattgaatttaaaaatatatataacaataaattcaaccatgtaaaataattaaaaaattaattaaatatttgtaaaataattaaagattaattaatattagatttgtccataggtcccacttggcttgaaagttcgttcgaaaaataagaagtctggataaaaatatagactcaaaaactaggtttagacaaaaaaaatccatctagaaaacgagtcaggccttggttaaggtttttttgaaaaaaaatgatgttttgctactattttcttattgttttactgtcaatttattattatattgttactattttgttgttattgtttaaatattatataactcttattttattattaattttactactattttaaaggtatttgcttgttaagttgtacctatttcagtattatttaagtataaatattttttaaattttttttaatttatttggaaatatttattttaatatatttagtgtttttgatgtattatattttttattttatataaaaaataaaaaaattaatacgatgaggcccgagtttagcatctataa

SEQ ID NO: 12111 - DNA, 619 bp, Gossypium hirsutum
gttaatggcccttcgactatatccttaattattagatttttcttttattttttttgttagaagcggtacttatactattaattttatctcatttactcaaaatatttatggtatcatatgaaatagtactatatttcacatttttattggttgatattattttttaaggtaaattgtgataaaattaatagtttaagtattactttttaaaaagttctaaaaactaatctaagaatctagttataattcaacaatcattttattaaggtagtgtttagaaagttacatagtaattgtgttagtttagatatttgtaatagtacaaagcgtgatttttaaattatttatttgttaagtctattattaaaattttaattgtttgtgcagatatcgagatgtgttccttaattattgcagaatatcacacaattaggacgatccatttactggtaagagaatgttcgaatgttgtacatattttttggcatagttgcatgtaattttttatttaattatgggatcttaaccaattttataatatgactagggtctgtactgcgtgttgaagctgagtgaccatggtttgagctatcggccggacacacggattatgccttac

SEQ ID NO: 12112 - DNA, 658 bp, Gossypium hirsutum
ttgacgaggttagtgttgaagtagtagagatggaagttgaggtaagggaaagtggaggtaatggcgcgcgtgagtttagctccgtgtcggtgcgtggtgacaaaatggaacacgatgttttccggacaagtggcgtggtggagaacggagaagactccagcgacggagccccggaggtaagcagtgtctaatgtcatagcgatgtggataatggagggattgtggatctctttgtcgagggaggaccatgttgtttgtggacattctctgccgtttcgaaatgccggtgcctcccgaaaagaaggtagatcggcgaagcagagacggatcatgaccgttaaaataaaaaagagattgagtggtttggacggatgcatagcggtggaggaaaattagggagaacgactgtggagagataaggagaatgttgcgcttttgagtttgttgaccttttgtttcgggtttgattcgaataggagtggggcccaacttgggacaagtccagcctggcaagacgcgtcttatgtgagctcgaagcttgattgcagacgggacgatcctatggttctgattgcaccgtaacaagtagtgaaactgtacattcggcgtcgtttcattgtgaggtcattcagttattcgatttgtttgtgacccaact

SEQ ID NO: 12113 - DNA, 652 bp, Gossypium hirsutum
atttaatgaacaaaattaagcaaacttgattatgctgttaataaatttaaattttaatctctatattttttatttttaggaatttaacacgtatttttaagaatttaatctttttattttttagatttcaaaatttaagttaagttgttcaaatttttaaatttgttggtatgatgttttgaaataaaaaaataacgtaactaaaaaaaatgatgctgtaatgaatttaaaattaaaaaattaattatcagtattaacagttggacatgaatttttaaatctgaaaaaatagataaactaatttcctaaaaataaaactcgtgaaaagtacataaacttaattttaaaagcaaagttataaaaccgccatgaatctcatttatttactatttttaaatatcaattaaggacaaataaatgtttcttaatttcactagtgatattacaaaaagaaaaaaattctacctttaatatatctaataatcatccttattatatatactaatatggttctcaattagacttgatcatgggttgagttatgtatcttacacccaaaggcccatccaaaaaatgagagaatttgagtaaaaaatataggctcaaaaaatgagatttgacaaaaaaaaaggctcattttctcaaatggtca

SEQ ID NO: 12114 - DNA, 659 bp, Gossypium hirsutum
gttatcgttggagcgagcttattttctatcggtgactgccaaggggtaagctgaccggtcgcaataaaaatattttgttggaatatccatgatttggggtgtccataggctataaaaagactttgacatatgctgaagatgtataatccccaggtagttttctttatgaagacaaaattaagtaatagacgaatggagaatgtgcataggaggtatggattttttaatggaatcgatgtttcagttgaaggatcatgagagggtctatgtatggcttggaaggggaatattacaatcaatcttaaaattttttcaatgaatcacctagacattgaaatccagaagattgaggatagaaaatagtaaaggtttattggcttctacgaggccccaaatgcatgtagtagagatgatttgtggaatttactgaaaaatctagggggttctcaggatttaccttggttagtgtgtagggattttaatgataacatgtattcttttgagaaggttagggaagtaccaaagaaaaaaaaaggagaatgaagatctttttaggagtattagaagaatctcgattaatggatgtagtatggggcttggtttatttgggaaagggggaatctttcaaaaaaaagagaacgaattgaatagaggtggga

SEQ ID NO: 12115 - DNA, 445 bp, Gossypium hirsutum
taccggagtcttaccagttctaacaggttttgtacctagtggcatatttggaaccggttgagaaataggagggggaagttgttgtacagctggatttgttcttaagaattttgtgaaccactcattcatcatttgaaagaaggatacttttgcctcctcacctcgaccctcatattcgggccttctactattagatacagctctttgaactgaaggtggagcattgctctcagcttcctcggattcaactctagctcagttggacgacattactatatgaaaaacacatttaaaatggttagaagatattacattatcatagattatataacgacatgtatagctaaacttatacttgctacgttagtccgagaatcggctaaatcgtagctttgctaccaataaatgtaacactcctaacctatatccatcgccggaacagggt

SEQ ID NO: 12116 - DNA, 652 bp, Gossypium hirsutum
caataaacccatttctgacatctcgaattcattcatcatttgagacttaaactcatcaataagaaagttagaggaactagtataaatgatatcatcagcgtaaagacaaaaaatgataaaatcaattttacctttcttttttcacatgcaaggtaggctcattctcacttctcatgtaccatttcttctgaagatacctatcgatcttgctgtaccatgctcgaggggactgcttcaatccgtacaacgcctttttcaacttgtacacctttgtttcattgcctttctctatgaaacattctggttgtgctacataaacctcctcttgtaggtctccattgaggaatgctgatttgacattaaattgataaacaagccattgcaattgtgcagccaatgctaaccaagctaccggagagaaggtttttcaaaatcaacaccagattgctgtgcataacctttcgccacaagacgagctttgtgtttttggatgcttccgtctgcaccaaattttttcttgaacacccagttcaaaccaattgcattttttttcttatggcaagttgaccatctcccaagttttattattttcgatgaatttcatctcctccatcatcgccttttgccattctcctttatcagcagcttcatc

SEQ ID NO: 12117 - DNA, 507 bp, Gossypium hirsutum
ttcgttatacctatacctggcgagttttgattgttggaaacctgaatttcaggacatatctttgggtgttgctttgggttctgcaactcaaatctccatgtttgctgtaagattttaaacatgtatagtgtcatcttcaacaacttactgtcttaatctctcgatcaattctaacattatatgtatatattacaggttccattatgtgttgtggttgggtggattatgagaatcaaaatggaccttgatttcaatcttctcgaaactggttgtcttgctttaacaatacttgttgttgcctttacgctacaggttttattaatcaatttttaattaattttcttttttaattttagtgtttatattttatttttgtaataaatattcttttttttataggatggaacttcacattacatgaaaggagtggtactttgcctttgttatgcggccatttctgcatgtttttttgttcataaaattccagcaccgttgggtaaataaaaa

SEQ ID NO: 12118 - DNA, 676 bp, Gossypium hirsutum
aatataagcatatgaattaaacaactcattactcattattcaagaccaaatatacctgcaaccttattataagttttgactaaaccaagcttacttatttgatattccattaatacacacaaaatgtcatataacatttacttaataattaaagcacaataacaaagccacatactaaacttgaatcaaaccatcttgttcattaaaagcataagttactattcatatggtcaatttctaaagctttagccgaatattaaacatgctaaatacttatgctttatttaatgtctacttccattatactctattactttacacacatgaaacatttcaaagaactaaacaataaatcaaacatattttacctttcacatcaatgcatcaataatatatatttatgcataatacatagcaactatttgtctaacactttaacataccaaaactgaattttaacaagctaatattactcatcatgcaaagtaacaaaggtcatattcaagactaattcaatgatcacatattcgactaagtacataaatatacatatagccaaaatttatgtcatgtcaaacatattacaaatatatctcaactaatgtatagttattaaatcaatacataaccgaatacataaaaacatatttttataatgaattaatcttataagcca

SEQ ID NO: 12119 - DNA, 661 bp, Gossypium hirsutum
gtacttcataggttcccatttttctaaaggaatggtattttttctgcaactactagttgtagctccagtatctagtaaagcatgtaaagaatatatttaatattctttaaattgaaatgtaatttcaatatatgtgtaatatttcctagattagaaatttgaaaatataatcacatcacttgtaccaagtttcatttgttggagattattgaagtttgtatttctttcattctagtatttctagaagatacagaatttctacttggttctgtgagaaaaataggaatatgaattgttttcattcctattggtgttgaagatataaaacttctacttggattttcctcatcttcctctatttgagtatttgagggtaaaaccaaattatcatttgtattttttattgtcgtatttttaaaatataatttatcaccggacgacacatattctattatactaactagtttaaaagtacttgctctattaattctttctatcatccaatctcttggaattgatagatctcttaaatgtaataattttggttgtacttcagttgtgattttattatattcaaagagttcaataattttattattaatttctttaatttccacttctgttattttagtatatccgttaatagaagtccaactgattg

SEQ ID NO: 12120 - DNA, 485 bp, Gossypium hirsutum
tctctactactgaatttagatctaaacatacaattattatacattgattgcatcttccatgcccattcatattaattttagcgtagtaaataaataatctctgcctagtatttttttttcagagaaaaaaaactggataaaatatatttatgggtaaatacagttttgatcttcatgtttgtattgagctgcttgttttcacttttcattgtagaatcctaaataaattaactgatctgaagaggctaattatcttgcaaatttccgcatttattaatataataaattattcaaataatcattttcaactaccaattaagtttcatccatcctgataataattagggtaagctatacccgtactcattcaactattgataaatttcttttttagtcatttaattataaaaaattacaaaattgtcatcaacttttcaattttgttttttttagttactaacagctaaatggccaataaaaagatg

SEQ ID NO: 12121 - DNA, 654 bp, Gossypium hirsutum
accaattcgttgtgttttggaaaaaaccgttgctattgctacaacatattgtggttttttatcaaaagaataatcgtcagagtttcttatatttagcggcaatcagatggctaagacgccactaaaacatgcaatttgctatgcttttccaaaacagccgctaaatatataaatatactaataattaaacttttttgggacgatagataaacaatgtcattaaatcctttataaccaataaaattatgacatttttcaattaactaaaatagacaggaagacaaatgtttattgtattatagaaattaacaaaaaaattatgctgcattagtgatttaccatgaaaagctaattaattttttaaaaaatgtttttttttagacaaaatgtcgtctctgtcatctatatatgacacgtagataacattaatttaaatgttgtcaccctcttcttcaatattacactgataaatatttattcgactaaaaattatttatttaaacaaaatgtaataatttaagacttttttaatatgttaacttatttagtttggatttcagtgtctagatttatataacatatataaattctgtaaacgaaaaagaataattttgtcccaaaaaaatataaaaaacttaatccttttatatatag

SEQ ID NO: 12122 - DNA, 547 bp, Gossypium hirsutum
  misc_feature (315)..(315): n is a, c, g, or t
acgagcaaaagggcttaatcggtaaaaatacctaatagtcataagtacatgttagagtgagaatttgatgttgccatagaagggaaaaatgatcagcatgtcataaaacataagaaaataggctgaagtttaatttacgagctttggggcaaaagtgtaaatatgcaaaagtttaggggcaaaattgtaatttttccaaaatatgattttgggtcaatttgaataatgtgagtcctaattagactatattttaaatgatagagcaaggaaaactgaaattcgggctaaaatggggaaaataccaagttgtggacnaaatggtaaaagtagccattttcgcatacgaggtaagttcatatgtaaatgttggtaacatagttattattttaaatgttttaatgttatttaaatgatatgataattattatgaaatattatacttgtgataattgtttgataatatgtcaaattatgtgatatacttggaaaatgtgaaatactaccgagtatcggtatcggctttccgtaaaaaatggttgaaacactg

SEQ ID NO: 12123 - DNA, 369 bp, Gossypium hirsutum
  misc_feature (311)..(311): n is a, c, g, or t
  misc_feature (313)..(314): n is a, c, g, or t
  misc_feature (316)..(317): n is a, c, g, or t
  misc_feature (347)..(348): n is a, c, g, or t
atacactattatctcctattcaaattggttaaaaaaattatcaataccctacttagtcttataattacaatactatttaggaccaatttaatattaattttaataaacgtaaaaacattcctaaacaagctaaaaattttagtttcttccaatttccaaaaaaaaaaatatttttaagaaacatttctaaactaagctttaatcacttacctttaactcacttataagaactcgacatgtggcatctcaagactacaatcagacaagagtaaaactttgcttatgaagtataaaaaatttcctatgataantnntnnttgctaagctctcttatgataattattccnntatattacggatgtatgacat

SEQ ID NO: 12124 - DNA, 671 bp, Gossypium hirsutum
tttacgtgaggtgaaatggaaaggtttttgaagataacgtttgtattattattgaaaagggtaaggtaggattatattataaggtcaaaacattaataaaatataaataaaagttgatgtttttaaggtaaaatgttgaaagcattaatgcaccaatttttagtttattgaagtgatggaaaattattacttaactgaatttgttatcattaagactgtcgaaacttcatcattgcagctttttttacttacaatattaagtctttcgactattatttattatttaaaaaatgataaatcctttaataaattgatattatctctaatcgggattttatattttaactttgtggagagcttaaatgcttaaagtatcaactttgactttatctcttgttggctgcttgaataggtgaaccacccatgacaaacgaacaactattaaggaaatgtaagcaactatgctaaattctaaaccctaaatcttaccaaataaacaaaaaacaaaaaaaaacttacattttcttagtacctaatgagacgcttctactccattgaacttgttgctttaggcactcctgctcctcatagggtcgagaaataaaactttgaccaaggacaataccatacatattaagggtttcatcggttgcagacgaacaatacttcaa

SEQ ID NO: 12125 - DNA, 618 bp, Gossypium hirsutum
tcctacagaaccagaaccagtgcagccaattgaaatttttgacttggcagaacagactgaacaaaatcttcaacctgacatgacttccccaatgtttaaaactcattcgcctagcctaaatcttcaagatgagttgtcaaagttgatggacttactacaacgtatgcaatgacggtaatggggttattggagatactaaaaaatacgggatgactcaattagagatacttttaagacaatatctcacaaccctttcatttttttgccagaatttccagacttcatattcgatccatggactccaatgtcgaggaaggaacaaggcgattcaagcaaaaacaatgacgatgaagcaaaagatgggtcaaattctgaggggtctacaaataaataaaaggggagaaaatgtctttactttatgtttcttttttaggatatttttagttttaagttcttttaggatatttctatttctcgcataataaaacaagaggttgaaatcattaataaaattaaacaatttgcaaaaaaagaactgtggtaatagatatgtacatgtctaggattggaactatctaggaaaagtttggtatttaagcagtcaaacttgagtcacct

SEQ ID NO: 12126 - DNA, 656 bp, Gossypium hirsutum
  misc_feature (629)..(630): n is a, c, g, or t
  misc_feature (639)..(641): n is a, c, g, or t
tttaagcatgagcacaagccataaatttatgtattatcatcttaatagatgtgatcaacaaaagctgacaattttccttacaagacaagaaggaaatgacctaatgcaatgatttagatttcaatggaatcaagtttgaccattttattaatcctcaatcctcaatttaagaggaaagtcagttttcaattaagcaatagaagctgcaaaatattaaagctctaatgccttgtttggttactagggtaataatatgaggaaagaacttatttattacatatgtatacaatggttagacataacataaagaatagttagtacaattttaaacttgaaattagaaagatgagtaaaaactcttgtaaaaaataagagttgctaaaataagtcgtggaaatggttaaatattaccgattgaattagtttattgctaacttatatactaaaacatgcataaaaaataatactcctaccaaatgtagcataaatattttaattttatcttcataacttccttgataaaataattccatttccaaatgatttgagtttgatgatttaaattcttaccagcagcgccaaatgcctcatgaatctccaagtgcaagaaatgaacgatatctacaagnntctcacatnnnaatgaacgatatcta

SEQ ID NO: 12127 - DNA, 541 bp, Gossypium hirsutum
cctaccttaaatttcttgcgcatcagcttggagtcacgaaatgccttcgatttacctttgtagatgactgaattgtcataggcctccaagcgcaactcctccaattcttgcagcttcaacttgcgctcttcacctgccaaactataatccagatggcattgcttaacagcccaaaatgacctatgttcaagctctacgggaagaagacacgccttcccaaaaacaaccctataaggcgacatccctattggcgttttgtaagctgttcgaacagcccacaatgcttcatctaaccgttggctccaatcttttctattaggcttcacaattttcttcaaaattcccttaatttccttgttactactctcggcttgcccattggtttgagggtgataagctgtcgacactttgtgggtgacaccaaattgtgcaaataaagctttcaaggttctattatagatatgtgttcccttgtcactgattatagcccttggtaccccatatctatttaaaatgttggtcttaagaaagttcaccacag

SEQ ID NO: 12128 - DNA, 382 bp, Gossypium hirsutum
tacataaggtactccctgtaatgacaaatgaatgtcaacaacttctatttaaacataaaataaaaaataaaaaataaaaaaagaagaagaagaaaagaaaagaatcgtttgttcatgatcatgatcaataatttaccttggagtgaagtccctctgccaatttgacaccattgggaatctctaagtaaacctacataaacattcgacatttacaatcaatttcaaataagcaatgaacttagcaaaacttgtaaaaggaaatcatagaacaaaacaaaacaacatatgtaaaaggaacttaaaaggagaaagatttaaaaagtaataataagaagaagaaaaaaaacaatcctttcctatatctctagcaccttatcccttt

SEQ ID NO: 12129 - DNA, 671 bp, Gossypium hirsutum
tggttacgggttgttaaccattcggggctgcgtctttggataagaacataatagaggtttaatttactatttggtacctgactttaatgtttaatttggaatttgaggttttttatccaatttaagtacttgattttagtttcaattttcaattcggtacttaggtttttttcttatcccattcaaccgattgataaatccctaactttaggtcttttttaaattgaattaattttaaaaaaaaaatcatgatatgcgtatctaaggaatagttactccaaaatcaaagtgaattctccctagatacatttatttaattttggtcctaatctatggattgtgctaaaggttcaagattcattggattaaaaattttggtaaatcaatttcgaaatgccttttctactttttttctagaatgcccaatatttgttttactacctaaattgtcaaatattcattgggataatgagtaccaaattgaatacttaaattaaattcaagtaccaaataatatattaactcataaaaagctgatgtgaccagtaatggcagttaaagtaaccttagttaagaaaaattctgcattgggatggggttggttgggatttggtgagtcaaattaatgctaaaaaaagaaggggtcaggccaagctaacctccctgggacc

SEQ ID NO: 12130 - DNA, 651 bp, Gossypium hirsutum
tctcgacatagtaatcaacagcagccaacaaagaagcttttccttttatatggaccctttccgccaaagaggctaggctctttttgtcttccatcaaggggaatagctttcgtagtgtggaaatcctagcttcccctccatatacctggaatacaatgaattcgaagttgtgagggaaagtgtagggaagacaagtaacgctgcaaaaccaaagtttgtaagacaacggaccttgtgggaggcaagataaagacgggtattattgtcgaaacccaaagctgctagcagcaatccgacttcttcaggagtcaacgggcaacgcccctgacttctcaactctttgtctgtaaactgtgaattgagaactcttccttgccaaattgtttgccggtacttggccagagccaatttttcagccttacccccaccgaaatcacaggcagaatgggcagccatatcctgcacgtattaaaggttagtgagaaaaccagtgactggccataaaatagaaagtcattggagaaaacactaaaatcaaataggtcaattatcttccatccttaaagcttgttaactgaactagtgtgtataaagggtgttaaaactgtgtatgtaaccatgtaactttgacaacagatggtcatctcacat

SEQ ID NO: 12131 - DNA, 613 bp, Gossypium hirsutum
gacaactccagagattcaagacagtacatgctataccataccacttggctcatctcaaagcttgatccattgaaatacatgatggagtcaacggctctaaatgggagaatggcgagatggcaaattttgctttcagagtttgatatagtctacataagtcagaaggctataaaaggaagtgcggtagcagacttcttggccagtagggctctagaggattatgagccattgaactttgattttccaaatgaggagttaatgtgtatagcaacgactgaagattctccttggaagctaaattttgatggggcttctaatgcagtcggaaatggaattggggcagtcttggtatccccgaatggcgatcattaccctttcacgtgcaagttggactttgattgcacgaacaatatggctgagtatgaagcatgcatcatgggacttcaagcagctatagagcgaggtataaaaaccctaaaagtatatggagattctgcgttggtaatttatcagcttagaggtgaatgggagacaagggaccctaaattgatcaattatcgaaaggtagttttggggttacttgaggagtttgatgacatcaccttcattatct

SEQ ID NO: 12132 - DNA, 683 bp, Gossypium hirsutum
taggacaagacacattaaaacatgctataaaacatatttataagctataggaattaagatgacttaaaaacatgtaagaaacacaattaatatgcataattaaattcgtctagatttaagaccaattaaacaatgaaaattaattgagctgtgatgtgagcacatttacggcaacaaagcaaaccgatccggaggtcttaccattaggacctattacccgttctaaggaaaataaattcagggaagtcttgttccttacttatgctacgattccagattcattcgatcatgttcatgccttcgaacataggctttataacatgttgcatgctgatatgtgacatatctctgttatattactagttcatgcgtttaagtatgtatatgttatgctaagtacgtttctgcaattgggttgagagtatttgtattgtttgtaagttgtttcttaattgtaagtgtgttaaagaataagaattgcaagtgttccagcttgtaattgtgatttccattactttgatggaagtttgatatgttttgatataggtacaataatggacagcagcttaaggcctcatttctagctcggttgaagcccaaatatgtgcatgcagctcctctcagctcgaaatagttctaaaagttcatttcaagctcatttcagctcagcacatttccagcta

SEQ ID NO: 12133 - DNA, 644 bp, Gossypium hirsutum
atagcccaacgacctaggaaattcattaacctgtatggacactgacgttgcggtctaatttatagttcccgatgaaaccatggacccatgcatacaagttatatttccctcgtcggacattttttatactgaaacgaccagccttatcggtttgagtccagaattgatatccctgaaaataaaaaaagaaaatattataaccttgtaatcttatcttcttgactgatttaggttcagttaaaactattagatactaacctttccttcagtttgccatgatcctgcacgtccaggcgctgccaaccccacgaaggcagatttggccttcattaattgcttgtgcaaatatctgagccgagaaaataaagcaaagataagcttagggaatactaaattaattaaatgaagaagaaaaggcacatacttgtctcgcactagtaattgaccactaatttctcctcgatgatcagcatgaggataatcctttgaagcagcgaaactgtaaggccagcttttgatttctttactcaaccgctttttagcgtccttccacagtgacttgcggtaacgatgagcatgatcaaaagttgcagagttgagatagatcaaaacagggccgaaagcctttttccaagcactcgttc

SEQ ID NO: 12134 - DNA, 657 bp, Gossypium hirsutum
tccattcggggagtactaagatgtataataatctgagacagttttattggtgaatgagtatgaaaactgatacttctaactttgtatccaaatgtatgatggttaaagctgattatcgagtgttttcaaaactgttacagcatgtgatgatatctgagtagaaatgaatttaaattttgatcaatttttataatgggattattcttatcattgaaaaagacagatgttatttgaactattgttgaatatttaaagaagtttgcatattttatctctatatgtacaaatttctctcttgttaggctagttaagttatacattcctgagatggttaatttttacagagtgtcagttttcattgttcaattggagacacgaggtttatatagtgttattgaagtaaactactgataagtcataatttataaatatttttatcccatgcttagcacatttttggatgaattatcattagatttgtggaatttgatgctcctaatcctttaatttcatgttttatacttatgtgagcataggagagtaaaaagagcgagaaacgggcaaaaaatggagaaaatgggtcaacgtgggaaatcaacacggcctaggcttccttaccgggtagaccacacgcccgtgtctttttagcagactcta

SEQ ID NO: 12135 - DNA, 552 bp, Gossypium hirsutum
tttttcgactcgactttgaccatatgattccggctttaaaatgatatcaggagaagctgacatgaattgcttgacagactttaggcatggcaaaacttgaccttcaagcaaagcatatgcaaatactgtcgctcgatgtgcattgctactgatctgcaaattatgcattggaagttgccataggtgaggcccgaaagtgggaaccacccaacaatatacttcatctgtttgaggatcataataaggtctaggatcagtaagaggagcagagaaagtgcaataagacttggcatatttaacaagccaatccgatttcacacttgttgccccatgcatgtatggccgctttgtctgtaatagttcactgtataccaagaactccggagcagaacttgaaagagatgaagcgcgatggagaaagacggtttctgtaaccaagcaggcctgatatctgactgtatttaccttcctatctccttcagacgatcttgaaactcctctgatgcgtttggcaaccctatcagcccagccagcacagatagcttgtcctaa

SEQ ID NO: 12136 - DNA, 620 bp, Gossypium hirsutum
gagctaattcgagcttattgagcttgaaaggagcaggaaacgagctaaatgaagctccacaaaaatataattgagctacgtccagcttgcaaacacgacgagcctcgcttgtaggctgatgcaatggccgttcccaagggcgggtcatatcacataactattcggaaaataaaaaggtaaagctcgctgccattgaattctcggattatgcgatcgtgtggtgggatcaattggtgactagccgaaggaggaatggggagaggcctatctctacgtgggccgaaatgaaggccgttatgcgcaagcgttttgttccctcctattaccatcgggagttgtaccaacgattgcaaaatctcacacaaggcaaccgaactgtcgaggactactataaagacatggaaatcgctatgataagagccgacgtggaggaggatcgtgaagcaacaatggcgagatttttagccggcctaaatcgggatattgccaatatcgtcgagcttcaacactatgtagaagttatggacatggtgcatatggcaataaaagttgaaaacaattgaaacggaaaggacccatgcggacatatccaacggcttctaccaacaagtggactcaag

SEQ ID NO: 12137 - DNA, 501 bp, Gossypium hirsutum
ggacatatatttggtttagggttttggtttttgttctcttcgattgcttagagaaggggtccaaatgtggacccctaattatagctattttggggaagaatgtctaattattgcacaataagtttgcaaatattgtagttgaatttatagtatgcacaagtatttttgttttaacttttgagtaaatgtagatgtaattatactaggagttggattatatttcgttatcttaaatcaaagagtaaactaatcttttctgttaaaattttcatctatttctactattaaaaactaagatggctagccaaataatcaaatagttatatgtggtgtgccacatgtaccttgttccaacattcaaggaccaatgtttaatagcaaaaaatagatgaaacttttaatagaatgaccagtttgctcattagtctagcgttcatggattaatttgccccccttttttaatagagagggcaaaatgaaaccagactcttggtacaaagg

SEQ ID NO: 12138 - DNA, 648 bp, Gossypium hirsutum
tcttcagatatccatacaactcaaaatattattacatgggcatgctcaacccagaaccaatgcacaatcacttatcatgaatgagcacatacatcattggcagatacaatcttcaaacatatagatacaagcttttaatcagaatcatcttttcaatattatcccatttcttttctgtatcttttcaattcactaactttagtcaaatcttagccttatatagtacttaccatgtaactgataaatctcttatactatactaatttcacttagtaatttaaataatcatatagaacatgccacagagcttccaaattaaggtatgccataaaggtagtccattcagagtttgccacaaagatgattatttcaaagttcaccataaaggctattcttttagatttttccataaaggctattctttcagagttcaccgcaaaggctattctttcagagttctccacaaaggctattcttttagagttcaccacaaaggatattctttgttatcgtgtttacaatatagattttcctaaactcacattacgtgaggtttgcccatcatcatcttgggacatgcagagaacccactggaaaatcaccattcattagttcctttccagacggtgccatgtccatgaaattgtc

SEQ ID NO: 12139 - DNA, 659 bp, Gossypium hirsutum
tttctgacgatgccgttatttcttttttcattaaggaataaagctaaacagttgttgaactcgttaccatgagggtcaatcaccacttgggaacaaatgactcaaaaattcttacttaaatattttcctctggctaaaacggctaaactaaggaatgatatctcttcttttgtgcagatggatttaaaaaccttttatgatgcatgggagaggtacaaagatctattgaaaaggtgccctcaccatgggttacctctatggctgcaggttctgtaacacctcaaacccggcctggaagtttggctcgaatctggcgtgtcacattgaagtgttttttgaaaaccatgtttccattaaaaacccttcttaataattaaaaacttataccctttttaaaccttgctagaaaacctcaactgaataacattcttaacaactttgtaaaaatcttggtagttgcggaagcttaatttaaaaacaattgcagatacgtgatgttttgaacaacagtagttgttttggaaaatcgtgttctaatactagaaattataagaacaataaataaaattctaaatttgaaatccaaaaaattacaacggctttactacaacccacataaatacatttaaaagtaataatcaaaactgtaacataaacag

SEQ ID NO: 12140 - DNA, 663 bp, Gossypium hirsutum
tcctttgatgtagcctgagttttcagagggcagtcgaagttaaagaagagtgaagttaaaacaaaaggaaaagagtgtgcaagtttaccttttgattggattttctgggaccgaaaccccgtttacggttagaatcagagcattgtatttgaaagaaagacaaggttgaactcgacgttgatgttgctgcaatccacattgtaatagtggaggagttcttaatctcttaagtaacgaaagtttttatctccgaattaataaattaacatgaaattaaactccaatttatcatccaaagaattgttttgttcattgatcttaagaaatggaagagcgtactgcctttttttgtttttcggttgattcggtaacgggagagaaggataaggttacccgacaatgaaccgtttggttggatccgtatgtggattccaacccgatttcttattttatgctctgctaaatttgtagggtcagaaactgaccacccgagtgaatttgtatgctcacctttttcctagtttttcaatggtaaaagctttggggattacattcaaagtaaccaaataattataagagagaaaaacaataaatacgaatttctaagtggaaaataaacccacttcttatatattataatagtctaaatggctcaagcagaca

SEQ ID NO: 12141 - DNA, 610 bp, Gossypium hirsutum
aaaagaatattgtatttttcttttatttttttttcttcggctataaggcccaaaaaagaatcatctgtaagaggttacgcacactgagagaagcatattgaaaagaaaaattcaaaagcaatttaaaaggtgatttctgttttgagtctcgggatcttttgcgttttttatctgcttctttcatttttttatgtgcattttcttttatttatttgcatttaaaaacaaaaaagggaaggggagtgcttaccttcgcgaataggccatcggaatcttcatctcctttgtcgaaatcaaaggtcaagatgagatttcaagggctgagattggtaacctttgaaccaaggttctaagtgtggtgcgcgcaagtcggtaaccacctattacagtggtggcgattgatttgctcaaagttttggggttagccgaatggggtaatggcttttagatttttttttactctattttttagaaaagggaaagaaatggtggctttgcttcattagggttattttttttttactttttaaaggacataaagtgacaacgttttgagccaatattaagggttttgaaattgcaccatttggcccttgagggttaattgtat

SEQ ID NO: 12142 - DNA, 459 bp, Gossypium hirsutum
aaccgatggtcaatccgagcggataattcagatacttgaggatatgttgagatgttgcatcctcgagttcagtagttcatgggaacggtatttacctttgattgaattcgcttacaacaatagttttcaatcaagtattaagatggcaccttacgaggctttgtacggtcgtaaatgccgtacaccattgttttggaccgagctcggtgaaagtaaaattttcggagttgatttgattaaagatgccgaacagaaagtaaaggtaatccgtgaaagtctgaaggcagccacagatcgtcagaaatcgtatgcggatttgaaacgaaaagacattgaatatcaggtgggagataaagtgtttcttaaagtttcgccttggaaaaagatactcagatttggccgtaagggcaagttgagttcgagattcattgggccgtatgaaatctccaacgagttggt

SEQ ID NO: 12143 - DNA, 428 bp, Gossypium hirsutum
  misc_feature (421)..(421): n is a, c, g, or t
gtcctgtgctgctatctttaatcttctcaattgatttgaaagattggtttttaaacaacaattaaaataaagaatggtagtctttgattttaatctcttccaaacttttcccctaaataagggatctcttcctttaccaactcaccaaagctcaaaaatcatggatcatgttgttcttgattatctttcccatgatcatggcgtttactaaagaaggtttgttagaagtagagtatattaaaaaaatgccaccattgccgacaaccttaagataataggtgcttacattttcattcgtaatcaatcatgtctgcaccagttctagttacaccagtcattatgctccgttttaataataaatcagaatgttcatttctttttcgtattgatttaaatttcggtccgtatcgattgtaccagnacataaa

SEQ ID NO: 12144 - DNA, 660 bp, Gossypium hirsutum
gacaataatgctcatgctagtcgaactaaaactcaatcggcggttaattgaactttttagattttaagaaacaaaccaataaactaacatatacggttaaggtatattagaaaaaaaattaattgaaaagaaaagacatgggaaattagaaaataggacaaaataaaattaaaaattttataatttttataagggataaaagcataaattttgtattaaaaaaacaagattgaattataatttttttttaaaaaaaccataaaagatataattattaattagattaaataaattagtgatggataaggggacatgagatactaattatgaggaggaaaagttctcatgcatatttaataacatttttttatattttatttatttttcacttaaaaaaaatccccaaacccccttttcctaatctatgtgctaaggggaggctttctttcttttgctataattatatagataatttattaattttaaaaatttttatgagtgaaattaattagatatgtgacattttttttaaattattaaaaacttatgtgatgacttgatggttaaaggtatttaccaccccaaatctggcctgtgtccgagtcgtgctagccgcgtcgattgtatgggttttaccctgttattgtaactcacccaaaa

SEQ ID NO: 12145 - DNA, 513 bp, Gossypium hirsutum
tgttgagtatgccacgtatttcaatcaaatttgaaagataatctctcagttaaactctatttatttgttttatcgaactctgattagtctagattattttattattatttgagctacgaatttagcatataaatatgttcttttacaacctcagaaaatacacctattaaatattagaactcatgacacttttggagaattttgtatttacgttttgagggttctttgttttcgggttttcgggttttcgggtttggtttttcatctccatcttttgtactcttcgttcttttgttattatagtaaaattatatttgccgtggtttttttatcttgtttggaaagggttttccatgttaaatttgtgtgttcaaatttttaatttctttctctattttttatttgttcattgtttaatcgagtcgatccccaatagctttgtatataaagcttttttggttctacatttttgtcatgtgctcaacatttgaggcatggttattgtatccattt

SEQ ID NO: 12146 - DNA, 605 bp, Gossypium hirsutum
tgacaatgctagaggtcccaaaaaaaattccttccacattggtgatgcatagaaacaatctccaaatgacctcacctccttcataaattccccaaaacggaaactaaagtaccaactaagaaaaatagacattaaagttacaactaaataataccaccatggctttcaaaaaaagcaaaatggatcacagcttttagtaaaagctgagtaatctattaataacagagcaacgcattgatatcgttacttctttaagagagagaagaacaaacattatttataactagcaatcctattatactcatatggatgtgtaaatcatattttaaaacacaaatgtgtgtttaaaataatattcaataaataatgaaacttatggtaaatttaaggtaataaaatgtgcatattaaaataaaaacgtataaaacacatgaaaatgaaattttagttgagtggtaaatttaaagttttatcctattataaacgtatttttattagtttttgttaaaaaaaagactaaagtaccttgaaataatataacttattttaattacggaagaacatttccataatttattttaaccgagttgttgtccacataattc

SEQ ID NO: 12147 - DNA, 529 bp, Gossypium hirsutum
  misc_feature (23)..(23): n is a, c, g, or t
gatcggtactcattcttggtagncaattcgactaaacttatcttttccattaatcctgtcgaattcttcttgtcaaaactgactgttttaggttgctggaattttgggaaaaatcaagttgctggaatttggggctttattcatcggtttagttcttggacagattcggcttgttgaaaatcaatcttggagatcgatttcgtgtttttgcattccgaaaacatctattcataagatctttgattcttggctgttcttgattgttttggggatcttaatttccagatctgatttgtttttaatcttattctttgttttgatttcagatctgttcgattagagctttcgtaggagtttctcgtgacttggcaactcgatcttggtccgcgcgcacccccctatcatttggtatcagattttgggcgttttgggtgttcttggttgatttctaaactgatctctattttttaaagcataaacagcagttttacccaaaaaaattgttcaaaaaaaatttttttggggggga

SEQ ID NO: 12148 - DNA, 542 bp, Gossypium hirsutum
ttgctttgtgctagacagatcctttccattttcggctttcaaccgaatggtcttctccgctattcttgtaccatgaatcgcttcaagtgtgggctcaaacaatcacgaaccaaacatagaatcataaataattttcttcctttcagtaagaaagttaatctctctctataaaaaccaacagaattattattctcgaaaaataaaatttttacttagaaataatttctcactttcaggcaaaataacaatatctcaaagttgtatatgacttgtgtatatagccttaccggtgttatctatttatagggagaaatagaaaaatcctagttgaattagtaaaatacatataatacttatctgatagaaaaactagtcccctaattttactaggagagaggtgataagtgctaaaagcaacatgttttaacctcattcttaacgcatttttgggtgattatctgatgttaattgtgaattttatactcctaatcctttaaattcatgttttagtgcttaatataacatttgggagcaaaggagca

SEQ ID NO: 12149 - DNA, 603 bp, Gossypium hirsutum
  misc_feature (426)..(428): n is a, c, g, or t
  misc_feature (430)..(430): n is a, c, g, or t
  misc_feature (457)..(457): n is a, c, g, or t
  misc_feature (472)..(532): n is a, c, g, or t
  misc_feature (534)..(550): n is a, c, g, or t
  misc_feature (552)..(593): n is a, c, g, or t
atcctcaccatacatatgctcaacaccaaagacaattatgaattatctactaaatttaatattttttaaaccacactaagttgaattaattataccatcaatttgtcatcccaactattcaattaaaaaattattaaaattttgagaaattaaaatttcgagttcaacaactaaattcaaccaattcaaaatcccattctaaattaatagatagatcaatttttttatctaattgactgatctgattcggttcaaacaacatagaccaaattaccattattaatcattgttcttagcaataatgaatactgggatttttttctccacccaaactggtctctgctacacatagagaacttaaaaaaaaaaaaccaaaatggaaaaaaaaggaaaaaggagggggagggcgggccaaaaaaaccaggnnnangaatcacacatgggcatgtgactgccnagcccaatattagannnnnnnnnnnnnnnnnnnnnnnnnnnnnnnnnnnnnnnnnnnnnnnnnnnnnnnnnnnnntnnnnnnnnnnnnnnnnnannnnnnnnnnnnnnnnnnnnnnnnnnnnnnnnnnnnnnnnnntttttttgag

SEQ ID NO: 12150 - DNA, 442 bp, Gossypium hirsutum
ttgtttgtacctgagagatgagccaagctttttccatacgctcaacaaaatcggaagagctcccataggaatcaacagcagaagctctgacagccaaaacctttgaacccttggaccttgcggttgttgtagcttgagataaaaccccagcaccgaacgccactctatttgtcgacacaaagctcatgtctttctggtcgatggatttggccacaatcactgggcggtaaaaacacgcactactcttcatgtcccgtattactatcttccttttgcaaagatattggcttgtgattttctacaggaaaaaaactatattagagaaagaaaggggagaatttggctttgggcctggggccgtaatccctcgatttcaatgggaaaactgcagagacagaaaactatgagctttgggcatgtcgtgtttggattggagatactt

SEQ ID NO: 12151 - DNA, 555 bp, Gossypium hirsutum
aaggagcttgaggaatgcaagaaggaataccccaatgcattcattagaatcattggcttcgacaacgtgcgtcaagtgcagtgcattagtttcattgcctacaagcctccaggcttctaagctttttataaactttgtctctccatttgtttgaatttgtactcagaaaaaccatgttctttacttttgtttttctctttctttgagttattggcctttgtttctcgatttctgggttttaatcctttttggattttcattggaagaaaggctgagaactaatgaataaaagttggttttcttcccaatttccttcaacctacacttttatttttactttgttttcttcctctggaaaattggtgggcagttttcaacatggatggtaaatgtattaattaagataaaattaacatggattttggaatatcagcaatgttttagaaggagaatgctgaaatagatatataagtgtggataaaatttttgtggtattggtttccaagatgaggataaaatttttcaacaattagtcaatgcacttcattctcctca

SEQ ID NO: 12152 - DNA, 667 bp, Gossypium hirsutum
ctgaaagccaacacccttgcatatatattgatattgtcctaataaaacctttcccacagttttgataataatagcatatttgtattgagtttatatcacaccttaatcaggtttctattattaaattaaggcaattatggtaaaaataagagataagagttgacacaaaaatgaaaggataattctagtatttctcagatttaataagcttgtacatgccatctatttatagggcctcaatcactataggttacaaatacataataaagataattaaggtaccctataaattctttaggggttacaagagttacaaaagaatgaatttggtggttttgggagttatattggcatccatttattaatagatttataacactcccttttgaatgtccattaacaaaaacatgtctcattaaaaccttattaagaaaaaatcctatgggataaaaacccaatgaaggaaaaagattacacaatctcttattacaagttgcctcgctaaaaacctttatcaggaaaacccagtgggacaaaatcttggttaaaagaaaagagtacaacatgttttagactccactaatggaaaattttcctgtaaaggcaaattacatatcttctacatatgttgagtcaataatattaaccaaacacactctcagcttgc

SEQ ID NO: 12153 - DNA, 525 bp, Gossypium hirsutum
  misc_feature (502)..(502): n is a, c, g, or t
gattattgcattcccatttttacctccgaattgctttctttattttaacttcaaccgcaaggtatagcatcaaggaaaatccctattcagctattcttacactacacaatgtaagtctgtttgtttgattattataagtagcttcgacttttgcttttccagcaagttggtttctgtttctgtctctttaaaccatttctttacattcttttagtaaaattttccatttttatgcatgttctatcttttgggtttgtattatgagtttaccaaaacaagtaacatattaggtttcagacaaaaatatattttatttttaaattactatatatacaaatatatgctctttgctctacagtgatagaggaagcaagataaaagctaaaggatagatgaataataaaaggttgatgtttgtcggttttgggttttttttttttggttactaacaaaagggactgtccatataaaccaatcaaaaaaaaaatttctaatctttggnctttcgaaggaacctaaaaaaaa

SEQ ID NO: 12154 - DNA, 663 bp, Gossypium hirsutum
tcttttgcctccgcttgacaggggtatcatgataccaaggctccagtatcacgatacccacgatagtcttgaaatgaggggtccttggatgtctcagtatcgcgatacccatggttggtatcgcgataccactaaagatggcttcaattctttttgtttcagcactggtaactttcatgtttcgatatcgtgatacctccttctaagtgaagttttcttcacgtttgggccaccatcaactccctacaacactcaatcaactcgttcagttcccaatggcatatttggccaacttgggtctaaaaaataacataaatcataccaaatcacttattcaagcgaaaagctaaaactaaataaaaacatgaaaaagacatccaaattgctcgagaataaactcttcaagtgtaatggagagcctaatttgacatatcaaattacgacaaatcacgaaacaaacacattcgcatgctaagcattgataactcagtgatgctaacatattttgtattcaatgcatgacaatattaaacaaatagacatattagtatgagatagtttgtcacctaaaacgataaggtaggtgtttatgagtgaagataattccaacaatactttaagtttacgtattccatgtcttgagcaacattattgtaagccctc

SEQ ID NO: 12155 - DNA, 650 bp, Gossypium hirsutum
caaattattccctggaaagcttaaatcacgatggtcaggtccttttgtcgtccaaaacatttttccatatggcacagtagaggtaagtcacccaactcaggacactttcaaggtaaatggacatcgatttaaactttatatcggtgaggatttcaaagacaaaggagaggagcttcagcttcgtgaacctgaataaacatacctaccaggtaaagttgagcttagactctaaataagcacttctcgggaggcaacccgagtactaaccccactaaataacttagtttgtttatgtcccatttactttatccttaactgtaggtattttcggcacacacggcctagcacacgggcgtggtttcggtcgtgggatccccacgggcaggagacacgggtgtggtcatggtcgtgctaaaataggacacatatttttcccaagactgaatgacacacgggctgcgatagatagccacggccgtacgactcgaccgtgcgcatcacacggctaaaggacacgggcttgtcccagaccgtggtgaaattgcaccttgatttccaaaaatattcagtagagacacggcttacaataaaacaccacagccgtgtgagacggccgtggaagacacacggcttgcaccacgagcgtgctg

SEQ ID NO: 12156 - DNA, 672 bp, Gossypium hirsutum
catgaagcgttcccaagatatagcaaaaggacctttacatctcttcatagccttatcaaacacaagttcagcttcctcaagcaggtcccctgatagataaccatggatcacgttatcggccaacctcatatcatatacggagcgactatactcccaaaccttaaagcatttcttcaaccccttaaaatccttaagcctaatgagtgactaaaccataacaaggtagctcaagttgggaacaatgaaaaaagctcgtttcatagcttcacaaactcgataagcctcggctcgattcgaagtaccagcatacaagctaatcagagaatggtaagcctcgtgttttacgaggcatcttatcactctctaacttcctaagaaaagcctcagctttttcaaactggttagcctggacataaattgcagcaagagtactaaattctatccaagtacagtttcaaactctctctacaccttccatgtcgtttaactcctgttggagtttgagtgtactttaaccgggtaaagtaagagttgcaaacagagcaccaacaacaacgtaatatacccgggtaaagaatgaaggaaaaaatgcttgaagttcaggctttaagagcagaaattggaaggaaaacaagaacagaactaaagcaaagaaagaaggagcatgaagag

SEQ ID NO: 12157 - DNA, 647 bp, Gossypium hirsutum
tgggtttcaagattttatggaatggaaatcaggaatgaaattcattttcattataggacttattctatctcttttagaagatactatgccgccactcggactcgaaccgagatgctctagcactgcttcctaagagcagcgtgtctaccgatttcaccatagcggcttgctcgaaatcataataacccattttttagtcaatcgtcgagattgaaggtgaaggggtcaattcaatgtaaaatgtcaaatttgttaggaagcatttaattttttattgataaataacaactcgttgaaatagcaatttgaaggttcaaaaggaatctttagtatttattgtatcattttatttatttaattatcctttctatttaattaggtcgtcaatagagatttttgtgttttcctaaaagagaactcctttattggaactaaactaactagttgtaacttcaattcatagataaaattcaacaaaacaaaaaagggttctttatcattttcattttttaatgattcatttctcattcttttgtatgatttttatgaatctataaaaaactataaaaaaatgcttattaattgactgaataaatgaatgaaaaaatatgatttttagagatcacaatttcagcaccacacccaat

SEQ ID NO: 12158 - DNA, 648 bp, Gossypium hirsutum
ctccatccattcctcaattcaataatctacagcttccaccttttcttttgaattttacttttaattcacaatttgtgcagccacagatttagcattaaaggacgcgtttatccggcaattctcccagtccaaaactgtgatgttagtggcagggtgctaataggaatatcggatcctgaattgtatattttggatgaatttgaggatgttgagtaccaaaggacccgcgttgaggtctccttgctggtaatccattctatttttcatttagttttagtatattaccatagcctagtctagtctgacccaattcatctcctcttctaatttctgtgttgttcaccttccctttggcttgtcctgtattgggaaattgatttcattcttcaaggtgatcgaatctatgcatagccacaaaataacaaattcgtcattatgcatagccaacccaagcacaccattcttcatccaaattagtaataataatctattattccattatgcagaaaagttctgacaagttacaagcccacgcttatgtgtggagcaacactagtgatcccaatttgtacggtgattgggattttgaggtatttttcattttttcttctttgctactatgcgggtggagcctgatttagaggtttc

SEQ ID NO: 12159 - DNA, 656 bp, Gossypium hirsutum
gttgatgtagatggaaaggctgctgttgaatttaaaagaagatataatgctcttttaattgttataacagctctttaaaatatgtacaatgtctcccttatatgtaaccgaaatgtcccccttgtttgtaatcgaaaatcacttgaaaagttacattaatgaatttgtaacagcccttgaatgtaatggtttccagctaaaaaggcacctgaaattaaacacattaaaacacttattaaacgcaaagcacattaaacacttaacttaattaaataaactcaaaactcatgcatcaataaattattccaacaactaaattatttaaaataagcatttattttaacaactcaattaagtaagatacttaaatgcatggtttataatgcagactaaataaacatgtgagttatttaatgtaagacttaattcaatgatgtagacttaaactaacatgggagttacataatgcaagtcattgtttatgatgcatacttaactaacatgaaagttacataatgcattactttattaaatgcaaaacacacaaagtgcaagtcaaattaaaatatgcaaacttattaatttaaataaaactttattaaattaagaagtccttaaaaacattggcccaataatctatcaagcctatgaaaaaa

SEQ ID NO: 12160 - DNA, 581 bp, Gossypium hirsutum
catctcaagaccgatgcatgtcccaaacatgtcttacactggctctcatactgtggctgatgcatgtcctagacatgtcttacactagccctcgtctcaatgccgatgccatgtcccagacatggtcttacactggcacacaaatctcatctattgccacggtccaaccatagtcttttccgtcaattcattagtgaacgatcgtactcataatcctttattaaaccatttgaaactgaccgctaagcctacgataaagccttggtgagtccaaatacgaaattacgaaagaaattttgagtggtaaaaggcatgagcgtgtgagactattcgagaggaggtaaaagccaattgagtgtaaacacgagcgtgagtgcaaaccattaatttttctttccgagtgaaattgtgaggattttgttgtgaggaatttacttttggttttgtctaacaaaatttctttccagcaataacatcatgtctcgcgaagaatttactgaattagagttccaatatttggtgcaagaaatgtgaagaatggtgaattctaaattcgatacattgcacgagagattagaccg

SEQ ID NO: 12161 - DNA, 539 bp, Gossypium hirsutum
tcacttacaccacttaagcacctaaaaggacaaattaacactaaaatgacttgattccacttaaaacaagctgtaatatgcttgaacgaacaataaataaacacatcaaattacgacatatcaattagtcttttaatcggtttgctcattgtttattagactaagggcacatttaggtttatctactaatacaagttgtttttccttatcacgatctgaccacgtaataccgcttaatgttagttaaacgttagataactagtgaggctataacgacccaatagtcacgggtgtcagaaagtgcattttcgagacactgttactgtaaatcagactcgtaaatatttattaaaaatatttatggagctagttgtgtagttaattaggctttcgttaagtgaatttgcatgaattaagagtaattaggtataatgactaaattgcatatagggtgaaagttgaattatagattaaagaaaattaaaagaactaaagaagcaattttgccataatttataaatgaggcgaaataagggtga

SEQ ID NO: 12162 - DNA, 552 bp, Gossypium hirsutum
gacctcccattaaccaacaccaaaaattgaattgaaaggagccataagatgtgtatcgatggcgccatttgcttcaattccatagattttcaaacagactatatatatatatatacacaaatgtggtaggggtggggaggggaggggagggatcgagctaactttcttatttcttattttctaactttctgatgatcaaatggttggaggagggcttttatatgcataaatattattatgatgcgacctgaccagctgacacagaaaatgataagaataaataaaatgttaaaattttatatgatatgcataattaatttattaaattttatataaatacaaaacaccataattgtatgtaactatgatatggtaatatttattccaaaaaataaaaaatatatataataattaagatggaatattggtgaaagatttaatagctacttgaatcaggagtaagttgtactttgggtgatgtaataacggccaggttggctaaagacgtccaaacatttgagacaatggttcttattgcttcaggctttagaa

SEQ ID NO: 12163 - DNA, 646 bp, Gossypium hirsutum
cggccatcttctttagcttattcgcttcgtatctatcatccggtaaggttctgtcagatactcgatatatggctgtctccaatccactacattgataaaggcacattctgctctatcgggcatccatgtacattttagacaagcctcttctcgagcttttgcatccctagccatatcaggccaatagtaaccttgtctttgcaatcttctgtagaggtttaccggttttgttgtcccacagaccttatcatgaacttcttcaagtctctttgctgcttcttcaacgccaaggcaccgagctaagaccccatcggacatcttgtagtcaaaattgccacataatttagtgaagcacttcaagtctttcttggccatgtgcactgacgacactcattgctttagttcttgaatcacagcatgtctccaatctccttctttaaggacatcttcatatagcttatcgttaaagttccatgagctggagttcgtcgcttgctgatcttaatgacagcttcatcttcatcatcttcgaactttatctttgaagctagagtggccaaagaatcagcatgtcgattggtaaacctgttgacatgggttaattccacatcaatttcatcacacagcttctgcacaagggactgat

SEQ ID NO: 12164 - DNA, 566 bp, Gossypium hirsutum
caattaaaggtgaaggagcctgatatctttaaaactgcatttaagactcagtatgggaactatgagtttttggtcatgtcgtttggtttaactaatacccctactatgttcatggatttgatgaacctagtattccatttttacttggatcaatttgtggttgtcttcatagacgatattttagtgtattctcattcagaggaggatcacgacgcgcactaaagggttgttttacaggttctgttagataagcaattgttagatggggagttgttaaagaggattcaataggttgagcaaagtgttaagggagattttgatgttgacagtgatggtatgttgaatttttgaggtagattatgtatgccttattatgtggatttgaggcaagtgattattatcgacgcgcatagtagcccttacactatgcattccagtagtggtaaaatgtatcatgatcttcgaaagatttattggtggcctgggttgaagcgtgatgttacaaatattgtgactcgatgcttggtttcttagaaggtaaaggtagagcatcaatttccttcagg

SEQ ID NO: 12165 - DNA, 630 bp, Gossypium hirsutum
aaatagtagccaacaactccttgatcgcattcaaaaccgggctttggttctggatgacggagcagagcccaaagccgtcttgccacgatgtcatggttggtaaatatgtcccgacggaagccgacttggcagctaatcggacggcgggatatgggttggtaaccaacataatcaacggtgggttggagtgtggaatacccaacgatgcacgtgtaaatgacagaattggattctttgagagatatgctcagttgtttaaagttgatacagggcctaacctagactgtgcgaatcaaaagccgttttaacaaaaatggggttccctacctctgttttcttcttgtataataaaacagggcagtacttgtttgttgtgaccttgtgatacaattgtaatttccataataatagtaaatgtttattctgacggaagagcaaagggtttttctcaatggaattttctttttgttttgttttagggttgattctctgtgagattttatgaatagattattctaaaatccgacgttaatgatcaaggctgaaacatgcaggcaaatagcatggttataagaagaaaacgtcaaagcataaactgacaatgacgttcgaatcagctaatttatttgg

SEQ ID NO: 12166 - DNA, 679 bp, Gossypium hirsutum
ctacattgcaagctcgaaattcttcgtggctcaaacccccaactttctttctaattctagttcatagctcatgcgattgaaaattccataaattgaactcctataaatacgaccccgatatttttattgcatatttgaccgtcgtagtaaatgacaaatttcattcgtcaactcattttaatttaaaacaaattagatatttagaacaaaaatatcttcaaatggatacccaaagaaatgaagacgacacatgtaatgcaactcttcaatgttttatatgaatttattgcgtgtttaagttctgaatattttgatattttaatagcaaaatagaatgatgagagagggaatgcgtgcttcaaaatgcatttcagaatacatgctttcatcgaataataataatgaaacacttttcagtgcttgaaaacgtgtttcacagatcaaatgatttcatcaaatgcatacttcaaaaaggtctttaatgctttaaaacgtgtttcaaatcttactctaattttgggaatctcgagtaatatttgaaacacatttttcagatattcaatgaaaacgttggtgttgcgatacgttttctgcgacgaggattttttcctttgcaatctcacccttttcccgcacctacaaaagtgagacttcccctatttgctctagcatccctaaa

SEQ ID NO: 12167 - DNA, 656 bp, Gossypium hirsutum
ctctctgggactctttgagttcgtttggcaggtatttgtggcgagaaacgtgtgcgtggaggggagatcggccccgagacgtgcgccgattggagtcttactggcggcgctggaggtagtggctggtggggcgtttgaagagcggctagggttttgttctttttgttttttgttttgctgtattggctattgggtttgggccaattgactgggcctgaactgttttctttttgtgtttggacccaagccgattgggccttattacaatgtgaatgagatttttttccccctttgatatggtctgagtttcatacatcacatggctttcttaatttgtaatgttgttttgattttattttcaaattttttgtgatcattttctttgattataagaattttatatatcaataaatttatcctttactaataaatgattggaaaagtggtagtaaactttttcttcaaacatttaaactcaacttaaatctcgaaactattattgttgaatgacttttatctaaataacataattaaactcagaatactaaacatatactatgtttgtgattatagaaaattaattatttccttcaaattacaacctatgcattgaatgagaaagatggggcggtttgaagactgaaatctaaaaaaaa

SEQ ID NO: 12168 - DNA, 706 bp, Gossypium hirsutum
  misc_feature (674)..(685): n is a, c, g, or t
  misc_feature (687)..(687): n is a, c, g, or t
  misc_feature (689)..(689): n is a, c, g, or t
  misc_feature (692)..(697): n is a, c, g, or t
gttaggaaataggattataactatgaggggatggatggagactggagagaatctataacttttcttggatgctgtgctttgtttttcttaacgttggttttctttttgtttttctccatttccaattcttggtggtgcatataactatgccctgccaacatcactctaaacaaaaaccttattctaacctgctttcccttttcattttacttcatttatgcatctgatttggtttaaaagtttaaaataaaaatcatttttatttattttataattcattttagtttttttactatcaaaaatgttttgtattaaattttatttaatagtttaaaaataccattttgaattaatcagacttcatgaatttctattctgttcaaaagttgtttttttttattcgtaaattatcaaatgaaatagttggctgtgtgattaaaatattaaatattattatatttataaattttgtattgattaactaataattcaagtagaaatttgcggactgaattctaaaatattttatatcaaaaatgaacctttggaaaatctacttaccatttgatataaatgattaatattaagatataccatattatgattaatgtaataatttttctaatactgacatatatcataatatcatttgtttaagttgtttgagagacatnnnnnnnnnnnnantngtnnnnnntgtttgaga

SEQ ID NO: 12169 - DNA, 662 bp, Gossypium hirsutum
gattaaattgcaggttgcataacaactctaaccaagctctgttatctgcatagttgttagatttgtgtgattacactgcttcaaacctaacacgtccctgttacctcgcatgaatgctaagaaacccttagtaaataaggattagtaaaatgcatatttactaagtaaaggataccgaaaggacctaatgtggtttccaaacttatgaaagatcgagttgccatggaatgtttttctgaatgttattaagcatgttgataataaattgagtttaattaaagtaattgtcctagtttatttatgttataatttttgcaaattgtgtttaattttgctaaaatctatttcattcatatagtgtgcatatttaggataatttgcattggggatcatttcatttagtttaatatatttaattttaatcatcacttctcaatcatattgtgtttttatttaccaagttgttaatataattttacaattaagtgatttgacacaaatacaatccttgtggaaacgataacttgatacgtacttgttacttgataatgattgtgtacacttgcacaaagctacgcgttataaggagacgaaatatcttaaagataagagtctatcgttgtagattggaactaggacaattttgggagctgaagcagtgg

SEQ ID NO: 12170 - DNA, 696 bp, Gossypium hirsutum
aaagaccgccaagttatacgttttgcagggttctactgttactggtgatgcatatattgcatcctcttccttgtcagatgatgatattactaaactttggcatatgcacttagggcatatgagtgagaatggcatgacagaattgagtaaaagaggactttttgatgggcaaggaatttgtaaactgaagttatgtgagcactgtgtttttgggaagcaaaagagagtttgattcaccacaggaatccataacacgaagagaacattggagtatattcattctaatctgtgggggccatccagagtgccttcgagaggtggagctaattatatactaacttttattgataatttttccagaaaagtgtgggtgttcttcctgaagtagaaaaccgatgtgttttctgtatttaaatcttggaaaactatgattgaaaaatagacgggaaaacaaataaaatacctccgcacaaacaatggcttagagttctgttctgataagtttaataaactgtgcaagtcagaagggatcgtgagaaacttgacagtttgtcatactccacagcaaaacggcgttgcaaaacgaatgaacagaacggtcatggagaaggtttaatgtatgttgtcaaatgccaacttactaaagtcattttgggccgaagaagcctctactgcatgttttttgatctaccgatc

SEQ ID NO: 12171 - DNA, 638 bp, Gossypium hirsutum
  misc_feature (67)..(70): n is a, c, g, or t
  misc_feature (556)..(556): n is a, c, g, or t
  misc_feature (558)..(558): n is a, c, g, or t
  misc_feature (570)..(571): n is a, c, g, or t
  misc_feature (573)..(575): n is a, c, g, or t
  misc_feature (593)..(598): n is a, c, g, or t
  misc_feature (612)..(626): n is a, c, g, or t
  misc_feature (631)..(631): n is a, c, g, or t
tcacttacttaatacttgataatctcaattacttacaatctcaatattaaataagccttaaatgccnnnntgtactctttcttcatgttctcaccttgtcgtttctttgacttactctttggattactcgggaaccttttcctttttgaacttaccattgccatgtcttgacatggtcttacgtggtatccttgccttatgaactcaccaatgccatgccttggcatggtcttacatgggacctttgccttatagtaactcatcaatgccatgtcttgacatggtcttacatgatttccttgccttataaaacttatcaaggccatggcttggaatgggcttacatgatatccttatcttaccaaaggcaatgttccaaacatgggcttacatggtatccttgtcttaccgaatggcatgttccaaaaatggtcttacatggtatccttgacttaaggccaatgccacatcttgatgtggtcttacatggagtccttaatcaatgccgatgccatgtcttgacatggtcttacacggaatccttgccttaccaacncnatgtattgacanngnnntaaatggaatccttcccnnnnnnttcccccaaaaaannnnnnnnnnnnnnnctggncttttcc

SEQ ID NO: 12172 - DNA, 653 bp, Gossypium hirsutum
gaatgacaatgctccaaaataccgtgtatttcattgtcaaggatacacttctgaatgatttgattcacataatatttaaataagaaaggttcaccccaataatagtgcttagtatcatgaagaaatttccgccttttatgggtgtttaaatcaggtggcatcacagcactcaccaagaaattcattgtattagcataccagggtaatgccttggcaaatagcagttgttcatctaaaaaatcttctttaataaagttatcattgccatttacattacccgattctaaacttgacacatgatcaatcacttggttttcagtccccttttgatctcgaattttcaaatcaaactcttgtagtaacattacccacccaatcaacctcggcttggcatctttcttacgcaccaagtacttaatagtcgagtgatctgtgtaaactgtgaccttcgtacccactagataaggacggaatttgtcgaacgcgaacaccacagctaacagctctttttccatggtggtataattatgttatgcattcgtcaaagttttgctagcataatatattgcacgcaatattttgtctctcctttgccccaatactactccaatggtataatcgctagcatcgcacatgagttcaaacaaacaagg

SEQ ID NO: 12173 - DNA, 401 bp, Gossypium hirsutum
tctcgggaaatgcattgaacaagggcactgcaaggggtgagtgattttgttgatgtggtagtttttattactatcttattgcagtcttctttttctgtttcattatggtgagatatgtttgtcaatgggaaacaaaggtcaatctccttgccttctgttgttctacttgaattaattgtctctgtcgccatttcattattgttaattgaccctaaatgtttaacacaatcctgtagttgattactgctatgtatcatgtctatccaataatcctgtgatttttcaacttatgattccaatggaatgtaatcgtggggaaggttagatttataaaaatattcttgcccctccccaacccattaatagaggataatgcatttgaactcacatcctcctgcata

SEQ ID NO: 12174 - DNA, 603 bp, Gossypium hirsutum
gaacgtaattaagttattaaaaatgtttttaggagagaaaagctaaaaagttttaccttctccacttgggaaaaagtgcttttgaaaaaccaaaaatttcctacaaaagttatttatttagcaatccttttacttgaaaagtgtttttcatatcaaaagtgcttctaaaaagcactattaaacatagccttagtttacttattcggttgatattaaataatcgaatcaatcgattatatatccttaataaaatacattgtgctttcaaaaaaaaaaaaacttcaaatttttaaaaagaattttttaaaaaaaaaaaaaaaaaactggaaaaaaaaaattaaaaaaaaaaaaaggaaatccccgggaaggaaaaatttttttaccttccaaaattaattttaacccaacaaaaggaaaaccaaaaaggcccttctctttttcccccttcccttggttggttcccaaaacttaaaatgggaaattttgcaaggttttggtttttaaccccaacaaggacttaacccccaattcccccaatttagcccttctaccccacaagggtttttttaggttccattttttttttgattcccccctttcaaa

SEQ ID NO: 12175 - DNA, 662 bp, Gossypium hirsutum
agtcaaagttcaaaggctcataatcgtccagggctctacttgctagaaaatctgctatcgcgctcccttttacagccttttgattcacataggttatgtcaaattcagatagtagaatttgccatcgggccatccttccgtttagagcagttgactccatcatgtatttcagagggtctaactttgagattaaccaagtcgtatggtacaacatgtattgtctcaatctccgagtagtccaaaccaatgcgcaacataatttttcaattggcgaatatctcgtttcgcattcagtgaacttcttactgagataatagatcgctctttcttttcgtcctgactcatcatgttggccgagcacgcaccccatggaattctcaaatactgccaagtatagtatcagtggtttgtcagggcaaggtggcatcagtactggggcgttggacaagtaatgtttaactctttcgaaagtttcctggcactcctcatcccatacacctggattgtgtttcctaagaagacggaatatggggtcacatttctcagttaattgtgaaatgaatcgagcgatgtaatttagtcttcctaggaaaccccgaacttctttttgagtacttggcggaggtaattcttgtatggccttaactttgtctggggtcatt

SEQ ID NO: 12176 - DNA, 631 bp, Gossypium hirsutum
ctcgagtgggtacctcttgaaaagggccgtcaaaaggatagactgaattcaaataagccttcactttcaatccgttgaaatgtatgggttaggatgaccagctttcgtacaagagtttacctagaaaaaacctgactgtgagaccgactcggcaaagagagaggaaagtcaaccaagtgttcaatctattaaatagactatttttctttcattaaagtttacagataagtaagatattgaaaggggcagaacgctttctaagctagactttctccttacgtccttcggggtgtggagaggataaatctccacatcttttgcgattggaaagtgtattggaatcagattgaaaatctcagtagggcgactcctaatacgattctaccgggatcaggagaatcaaatcacacaaaaagaagatgaaatagctgcttattctcttctcttgcaggggctgtcgtttcgggattgatggatacctgcaagaacccctattctctattttattagtctctttatttccaactcttttccacatccttaataaggcaccgagctacgaggctcaaacattgaacacaactagacagcactaatgccggtggtggtgggatagatagtgaaaaaaaaa

SEQ ID NO: 12177 - DNA, 675 bp, Gossypium hirsutum
tcacggataagccataccaatttttggttaattcccacctaaatgacttcctagggttatcaggcctagggtttgtttcacgctcttcctttcccaaatagctgatcctctaagaaactctatcactcaagcaattaattaagttaacgcaactaaaacatgcaaaatatgtagaaagctcaaattgaatctaatatttacacaaacattcatctaacaatgttaaagaaagaaatataaaatgacctaagtaaagaataagaatgaaagaaaaacctaagaatcaaaaccctaaaattgtatgcttaacatgattacaatggtatttatataggttcaacttggaatattaaagtgcctaaattatccttgaagtccttagagttagattaggataaatacacctaatttcccttcaaaacgtagttaaaacgtgccagaatttttgggttgcacaggggcttggttgcaacataggccttcaatgttgcaacatcagagtccggtgtcatgaaatcgaagggccataccaggacatcggaggcagtttcactccaaaacttgtttttagcttctatctttgatgtagagacatcaatatcttggtgtagcgacataggcatcagttttggccaaaataagcttttttagctctcgacttgacctacaagacca

SEQ ID NO: 12178 - DNA, 655 bp, Gossypium hirsutum
  misc_feature (34)..(34): n is a, c, g, or t
  misc_feature (592)..(597): n is a, c, g, or t
  misc_feature (600)..(613): n is a, c, g, or t
  misc_feature (616)..(619): n is a, c, g, or t
  misc_feature (623)..(626): n is a, c, g, or t
  misc_feature (632)..(637): n is a, c, g, or t
  misc_feature (639)..(641): n is a, c, g, or t
  misc_feature (644)..(645): n is a, c, g, or t
  misc_feature (648)..(652): n is a, c, g, or t
cttttaaaatgtaagagattcttactggaaggcnattaccgacgatctgcagatcaaaatatctatactcatataaatggagtgacttagggccttcttacatgacacatatcctttttccatttttcttacacgagaagataatggttaaatttcagttttaatccctttatttttacatttttgagataatataaaaatagtatattttcacttaaatttgaaatttaatttctatactttaattttgacatagtttactacctccattagatagtctaaatgttttatatattccaaatggacctaaatttttaaattcaaaaagtaaagagattaaattcataaaaatagaagtatgaagattaaattttaattatacaaagagtacaagaactttgagtttattgtaacctttaaattttttattctataatttaattaaataataataattaatccaatacgaagcatgagtgaaaaccatactaattaacatcaaaattacatttatatatatatatatttacaaagtaataaatctatgtttaggaatgacaatgaagcgggcaggtagttattgttaaataannnnnnccnnnnnnnnnnnnnnccnnnncccnnnnctcttnnnnnngnnnttnngcnnnnntct

SEQ ID NO: 12179 - DNA, 652 bp, Gossypium hirsutum
cctaagccaaacggcttggttcacagctgctgcagctgagatatattcagcctctgctgtagattgtgcaacagtttgttgcttcttcgaactccagctgaaaacactcgagcctaaggtgaaaaaataacctgaagtgctcctcatgtcatcaactgaccctgcccaatcgctatcagaatagcctacgagtttcagctcctttgccctccaaaacttcacaccagtatcgatggttcctttgacataccttaacactctttttgctgccttcagatgtgccacattactgcagtgcataaaccttgaaagtagactaacagcatagacaatgtctggtctagttgctgttaaataaagcaaacaaccaattaagcttctatatgccttctcatctactcgatcatgttcactggcacttgacaatttttctcccaatgcaactggtgtagtgactgatttgcatttcaacatgcaaaatttttcaagcaccttggaagcaaatgtttgctgacttatgaaaatgccatcacttccttgttttatctccatgccaagaaagtaggtcatcagaccaaggtcagtcatctcaaagacatgttgcatctgtttcttgaagtcttcaataagttcatctttgcagccaataacc

SEQ ID NO: 12180 - DNA, 576 bp, Gossypium hirsutum
gtgtcgtctaattctagactcataacagccagacagggaggagaggctaaagaagccttcttccaaatgatgaacaggtggttcacacaatacattcgtacgaacccggctgctcaacaacctccaccccctcttaatctccaactggttcctatagctcctcaaggagtcgagcttttaagattaaataagcctccagttgacaagatctgtaaacacggggctgaagagtttagagctaatgttgataatgacccgagagagccgagttttggcttgaaaatatggtttgagtgtttgatgagctttcttgcatgccacctgaatgtttaaagtgtgctatatcccttctgagagacaccgcatatcagtggtgtaatacattggtatctgtggtgccgaaggagagagttacttgggaattctttcaaactgagcttcgaaataaatacaccagtcaaaagcataaagtttttagaactgaaacaaggccgcatgacaacaacttagtacgagagagaatttgtatggttgggcaagtatgctcgggagtatgtttctaccgaagagattatg

SEQ ID NO: 12181 - DNA, 555 bp, Gossypium hirsutum
aaatttgaagctcagggaaaaagacagctttttcatagttaagttgtatggtatgttctcttgtgtgaagtcacataagatgatagcttctgtggaaggattgtttacttttgtgatcttttggtttccattttttcttcccttttctaatttttaaatttcatattgtggattgaagtttacttgggcttaggtcttgatgtgcaaaatatcgctacattgcttgcttattgcttgttcaatttgcattgcgagatgatgatgatgatgacctttgatcactaaaatagattggattgcttataggcatgtccatgtgtatatcaaactgttattaatgatgcaaagagtaggtctagctaatgtaccccgttggaacttataggtatgattcatattatcatcttcctcttagaaaggagaatgaagagaactaaagctaaaatgaaacaaaaggaagctagtcaaataaactgtctgctaatctacattgtggagtgcactgggttcactgtatgtaacatcctatgccccacattttaaaacgggagcttg

SEQ ID NO: 12182 - DNA, 726 bp, Gossypium hirsutum
  misc_feature (695)..(703): n is a, c, g, or t
  misc_feature (708)..(713): n is a, c, g, or t
gtttaaataggaacatggctcatcttatcaaaaaccaaatatggaagaattaaagcatatattttgtacctgaagttgagcctcaagaaaagcaagtatggttcctggtatgattcctctaatcccacctccatcaatgctaaggatggtgattatttcaccgtaggtgggaagttgatgtttcatttagtcaagggagaaagaggagcttgtattgtttctttgatggccttaactaaaatatatatatatatatatagagagagagagagagagcaatgaggtgataatatgatatatgttctgtttgttttctatactctttgaggaatgcaagagctgctatttatagccttgagatcgttgctcaagtttgacatattccattttcattggcatttttatgattttctatttcagtttatgtcagatataggtagatgtttccagaggggactgttacggtggcttagtggccttgtacccaaaaaattttgcgaaattttaattttttaaaattttcattataccttttaatttttttaatattttaattaaattctcttaaaatttttaaaaaatatttttaatctcacaaattttaattaaaccttaaattgtaaaaaaatattattaaacttttaatttttttagtattatatcagtctctcaatatttgatctctatatccgtannnnnnnnnttttnnnnnntttctttttccct

SEQ ID NO: 12183 - DNA, 654 bp, Gossypium hirsutum
tcaagtaccaaccttccatctagggtgaagtaaaactagttgaagaggcaatttaggcatcctaaagaatccaacactcgttaacattgattttcattctcaagtgtacattcttcacttgatcaaaagtgtgttgatgctagaaaaatgtagcaatttagttcataccatgaagagcggggaatgaggaagtaaatggttgccttgtaattttacaaccatatgggcaatatcgaattttgttcacttcgcctatacctttccagccgcttaattttccatttactaaaaggtaaaaatagaatcctaaaccttaaaaaccattactttctaaatgttttatatttgtgctgacattttgtaatttaatagttggtctaagcaacgtgaccacacaacatattgaaaggacaatttgctattgatacgaggagcaattgataaggaatccaatgttttagtaaattgtgttctatgtggtcaagtttgtttacttttaagtaatatcacctaataatggaatttaaattcaataatttttatttttgcaatttttttggatgtcgtaccaagcggaagatattataaccatactacaactaaggcaatgtgtgcacaaccatatttttaccatccacttgcctcttatatatt

SEQ ID NO: 12184 - DNA, 548 bp, Gossypium hirsutum
ataactctcagacctgtccagcaatagtagataatttagaggaccaaaaaatgtaatttaaccactttaattaataaatttactcaattaattaaagaccaatttattaatgaaacatattaaaataaattattaaatataactttatattttattatttaatttaatcatgcatggtccactttatagcttgacaatataatatgctcaaattaatataaaagaagccattttctgcgtgaaaactatataataaagcataaaatcgcattttaataatttctgtgtcctaatttcatattttcatatatttcattaatttattaagtaattacttgcttttaacaacaaatttaagtaaaaaggtgacgaattataaaggaaaaatcctatatattttgcaatttacaacggcccataccattaccacccctagcctgacctcggcccctaggtggctgctgaactaccctcgacagcagtgcagtactagaacctggagcttgcatctgatcggccctcagcggacactatcggacacaatgcta

SEQ ID NO: 12185 - DNA, 679 bp, Gossypium hirsutum
acgccctgaataatttatttttgtttctgtaaatacctaacataaatatgtatttgtttcagtggttaagtgttttgaatgtgtgtatgaagtcttaagttcaagtctcatatttgtaaatttttttatttttctaatcctagccttatccttggtgggttgggttatatttatctttataaactcatattaaaatgagcttgctggtttgagtggtaagaagttagtgtgtaggacgtcttatgtttgaatcattgtgagagcgaggtgttatattttttgtttcggttggctgagagaatttgagtggtcttgaaagtctgagttggtttgggttgttagtggatgtaatgggattgtaatcaaagtggtttttattttatttttattttttttcaaaattcctctctcttttcaggaaaaactgacgtcaattttgttttgcctttatcttctctttcgttcttcttttctttttgctacttctttctattttgttttcaatatattgtcaaatctctgtatcttggttttccattttccttcgattttttggtaagtgggattttagtgtttctatagctttcgatttccaaattaccgattagaactttattttctgttttggcaagatggtgtatagttaagaggtttaatctctgtgaatgtgtgttgtgta

SEQ ID NO: 12186 - DNA, 521 bp, Gossypium hirsutum
ccattgtaaattccgttgaatgtagaaattaaatatattttcttatagattcttttatggtaaattgaatggaaaatgtagtttcttatagattcttttacgaaattagaattgagtttaaaaaattatttaattagaaaattaatttaataaataatatttattttggaaaataaaaaaacatgtattgggttaaattaaattttaaagtgttggattaaaagtttagaaaacacataaattggacttggtataggagaggcacaaaacccctaagtgtgtggggcgacaaccctactattattaactagagttagttgccattctctcctaattcaactagggattggtttttgtaacgccccttacccatatccgtcaccggaacagggtacgaggtattaacaaatcatagtacatactatttaataaaaccgagacaaaaatatggcgtgcaattagatcatgaatcattataacatatgcctttaacaatactagccaatttcaaaggcttcata

SEQ ID NO: 12187 - DNA, 640 bp, Gossypium hirsutum
gtcaaaacctaatgtcgcaacttcaatgttcaaaacccaaccacctcatccagaacttcgagatgagctgtcaaaattgatggacttaatgcaacatatgcaccggcagcaacaagcttattgaagatattaaaaaataagggatgactccatgaaaagcgcttttacaaaaatatacaatgacctgcttatttttgtgcttgagtttccagatttcatatttgaaccatgaagtccactatcaaagagggagtaaagctattcatgcaaaaacaaagatgatggagcaaaagacgagtcgaattcgaaagaatctgcaaataaattaaaaaaggggatcttgactgtgacagccctaaattgaccctagtcagaaagtggtttcgggaccacgaaaccgagtcttataaataattaaaggttatattctgtgtttatgatgtgcgtaaatgcttgtgtgatagttccatactttaatttggtcagtgtatgtgaaatttattagtagggacttatgtgagacaatttagaaatatgctaggcaagtgttcaagtggcctattaatatatgtgggaaagtacttgtccttgcatgtcaaattagccaaattaaagcatagtggccggccatgctatgggt

SEQ ID NO: 12188 - DNA, 677 bp, Gossypium hirsutum
taattcaacaacgccggttaaagaccatataagtttaaattatttaataacaatagtagttgtatatatagtaaacaatattattgcaataattagtatatgtttgctaccaatgttttttaaattttttatattatattactaaattattttttacatatattaatttcatcttaatatttaatttatgattatcattttagattaattatcacttaactagtgctacaattatatgtcaattaaaagtaaattgagctttataaaaattctaacactttcaagtagaatttaaaataagctaggaaaaaaaatcatttttggtattatttattagattcccttgttaacgttactaaggcactagaatgtgatgaaaaatcaatttaatcgaatatgaggttgttttgtgatatttatattttatttttattcactttttactattttaatttttaattatcatggaactaaaattcaagctttgatgtttaatgatgttgtgataaaattcaagaaccaattttgattgaagatggtgacgaggatggtaaattgaagaaaacatcaagaaaaaggatgatgacaaggaggatagattgaagaaggagataaatattgagaacatttaaatatgtatattagatttcattttaacttttttaggaagttgaatt

SEQ ID NO: 12189 - DNA, 699 bp, Gossypium hirsutum
aacaagaccaaagcgaggatgattttgatctttttaatatgatgtaattgtgttgtttatttattcaaaaaaaatcaatttttaaaatggattttaaaatccaaaatttaattcttatgaaatttgacttggatctaattttttatttccaaacaaagaatttaaatttttaaattcaattttgttttgactcatatcatattttacaaacatagcataaaataaataaatacaaataatccaacagtttaacaagtgatatgtttttgtcaatggtaaaaacgaaagtagtagttaattcccatttttgcatttaaaaaaccaagattcaaactttgtgattgttatcttcttcccatttgtaatttgtataaaataaataattatttttaaaaaaatatataacaagtgatattgaaaatctatttaacctcttagcttaatgataaaagtattatgatgtaaacatacgagcttaaattcaatctcaaataattctatttctcacctccagttatcgaaaaatataattgaaaaacttaattattggtgtgcaaatttatacaaatgtattaaatattaatctttaaaagaatttattggtgcaaaaccatttttttcaagttttaaactgataaaaatatttatttagtttaaataaaacaattctaaatagatttcaaacactgggcaaagcag

SEQ ID NO: 12190 - DNA, 504 bp, Gossypium hirsutum
gatctcaccttctctttttccaaagttcatattagaaaatatttatatgcacttttctaaatcatggcaatagaaaatccatttgcagtataaaaaaaccataacaagaaagtgtaaatatagtaattaatatactaatattaaagaccaatcattttccaataatcttaggatattatttttagcttaatttatacataaaagctatgataccttagtccctattgtctccctcatctcttaactgtaaattcattatatacatatacactatatataaaaggaagtgtttttctcatcacacgtgtcaaatggtcatttttcttttgccattatacaaataatggtaaaatttctattttgatccctctaatatgctcacatttaagatttagttattttattttcatttgatatagcttagttctctagatagttaactctcttaactatttgattaactaatgacattaatttttccttaaacatgacatgatcagttgg

SEQ ID NO: 12191 - DNA, 631 bp, Gossypium hirsutum
tattatttccacttccggtttgggctgttgctggttttttgtgattgaataaaagggattgttggcatttggtgagggaagtgtcttgagcttgatcttacaataacatggacaagtagaagaaagtgaggaccttgaaatttcagggccgaatggacccattgttttttctttttatttttcctagttttggtgggagagtttagcttccaatatcaacttgtgagttactaactgtccaggttactgtctaagttcatccaaaatttggaagagtttgaacaaaaatattaaatttggaaaatggacttgggcaaagacaataatgggttgggcaatgggagttgattgttaagccatcatcatattgaatacaaccaacgagtaatacaatgaagacgacaagttgtttctatgctacacctttgtcgtttacagaccactttcgtctctttctcctttcagattcggtttttgtaacaatcttcatgtgaggattcataattttttttgctctaagaccatgtcatagagctctcaacacaccacacgtattgcttgatatatttaattgttacaatgtcaatgtgccttggaatcgtgggttgtcgaccaaccccgcaactcatct

SEQ ID NO: 12192 - DNA, 677 bp, Gossypium hirsutum
gggtagtcaaagatgatcctcagaaaacgttatatgttgttcctctttataattgagtcttacattcattcctttagttgcttgtaatctatcttcttgtgagagtttatgatcctcttctaattagttgggatatccttattttcaagggtcatgctcaatgaccctacatttactggctagagtgcctttatctgacaaggttatgcttaaagaccactttttccttcctctctatttaatccacatacttgtcagactatgatgtttattgtgaagcaccaagtatagctctatgataggtagtaattaagagtaaattgagtttgggctcactaagcttatttcctaggttggtatgacatatgtccttctagttcctaagtaaaaataaataaattaaattaaaattctataacaaaaagaaaaaaaaagaaaaagaagtcatattaataaaatgtgaggactaaaggtaaaatcgaatagggtgtcttgataggtttggtaaattacctaattttcatgaaataatccaagtcgatcgtaattttgtttgtgttaattagaacactttttcaaattttacttaaagtaagctaagggttctctttatttttcatatgcattttgactaatttttataaaactttggagtagtatttctttcatggcaggat

SEQ ID NO: 12193 - DNA, 652 bp, Gossypium hirsutum
ctcatcaatctctgagccttctaaatacagtagtactttgaatctttcaattcaaaattagttaaggtttgaactaccttaaaactgtcaatttgaattataactatacgtaccatttatcttgtaaaataaggagcccatcaagaataccctatacttcaacttcaaaaggagaataattacctaagtaactattgaaactcagtatccaattgctaaactggtctcataatttagttgtataaattcgtgttttactaatgagcaagtcacttaaaattagattaaattaaattattaagttaattcatctatcattacatctaaattatatgtaaaattaaggcatatcacacgaatcattccactttctcattttatatttgaatccattgtttcattttataaccatatcggccttcaaggctcgtaacaactgtatcatgtggtctttcacatgctattatcaatactataatgtttatatactaattcaaaattatcattcaatattcattatcatttatcaatttacatattttataatctttgttaaccagacacaaactcaagacggagatatggatcattcaaccatcacaccaatataattagcattcaatgtatcatcggaatgtctgaagaatattgt

SEQ ID NO: 12194 - DNA, 489 bp, Gossypium hirsutum
cgccagcacaaaatgaaagctttcattcttttctacaattcttttttttaattactttagatgtcatgaatatgtaagtcaaaattcaaacagttttattcttctatctccgacattgactgtcatatcaatttagatataaggtttatttttctactcatttatgagtattaatccattgtcccgatcatcgaatataaaaaaatataatctgaattttaaattaacaaaattataaaaaaattaatatataatttttgtcttggaatgataatattgagatagtattattttaacaacttgggttgaatctaaatatgtgcatgattttttctacttttcatataaaatataatgtcatggaatgataaaattaatgatttacctcaaattcttaaattggataagaaaaatacatttaaatacgtttgatcttatatttttagatgtcaatcgacttaaaagtagttatcttaaattataatgacg

SEQ ID NO: 12195 - DNA, 607 bp, Gossypium hirsutum
  misc_feature (213)..(213): n is a, c, g, or t
  misc_feature (254)..(254): n is a, c, g, or t
cctctcattttcccatttcaagtcccttgctcttgtgccgatttctccccttggaaaagggttcttcttcagacattttggagcaacaattgagtgttcaaagcaaccttgatcgacaaggacaacaaaggatgaagaacagagcaactttgtcaaagcctcggaaaaacaccagatttgattcttgttccctatctttttaatttttgttgntgttatgatgaacatatctatgaatatttatgttgttggantggtgaatttaatcaatttagcttgaatttaattcgtgttggtttgattgcatttcatctgcttaaattattaaaattgtgtttatgctgttataggcctcggtaaaatgcttgattaagtaaaaccatgcctaagttattcttgcattacaattgtgaagtagctaatgaattaattatttaaacggattgaaattgtaattaatggacacaatacttaatcagtgcatgtttattcttctaaggtagttgaaggttaaattagcaatctactggcgatacacttgccttgcataacttgcaagattattgtgattaaactgtttcaaagtaaggataccttgttacctcac

SEQ ID NO: 12196 - DNA, 560 bp, Gossypium hirsutum
tgtcgttattcgcttcttggtttttaacccgtttgccttttttgactttggcttttactggaatgcgttttttaccgttcataatgttaccatttaagagagaaagggtaaaatatgccattagtccttgtaatatttgtaaatttaaaatttaatccctctatattttagatttttaattttatattcagttgttaacactgttaaaattattggtgtggcattttaaaattaaaaaaaatactcatttgacaacaatgtaactaaaaaaaatgacgttgaaatgaatctaaatttaacaaaataactttaacagtattaactgtttaacttgaattttaaaatctaaaaaataaataaattaaatttttagaaataaaagtatggaaactgaattctaaatttttaaaaagtaaaggtctcccgtataaaagaaacaaaattttaaaataagaaaaatgaaatccttaaatagttaagttttatcactttattaagtgaatttattattttattattattaagcatgctctcggttttgtcgctttcttgatattaac

SEQ ID NO: 12197 - DNA, 643 bp, Gossypium hirsutum
ataagtatctttatacttagattgaactgttctgaaatactacacataatgtatactgaaactatactgagatagttagtagactgaaacctctaaaaatgattctcaacttctgatattatgcataaaacatctgctaataaatactaaaactgatgcataaaacttttaatgtagattaaacttgaattacacaatgaccgctcgtggaacacatggtcgtggtagaggcggtagggggctcgagctgagtcttcctctttgggcagtatgctgaacttaaataagagtaagacaccagtttcacctgctactgagactaggtctcaaagtcgctcggctagggacaactccctatcccaagccatgttgaggattttagagagggtcgttggaccccattctagagttgagggctgagggtcggtaactgaacgactccaatctaatggtgctgatttgtttagaggtgtcactagagtcgcccctagtgtggccgagtattggttggaggccatcgagaggataatgaatgatctggactgtactcctgagcagatgtttaggggtgcatagtctttgcttcgcgatgaggcttaccagtggtggttgacggttgaggtgggttctcatctagataaaa

SEQ ID NO: 12198 - DNA, 594 bp, Gossypium hirsutum
cacttggtttgattaagtcaaaattttttaaatagattaatgtaatttctcaaaatccggtcataatgtctaggccgggtttgggggtgttatagaacatgccgatacagttggagaatttctcggttggccacaatggagatataatccttatgccaatatttacaatcatgaatgaaaagattatgcaaattttggctatgaaccgaggccacatgctctgatgcaactgttgtccttaaggcaaggtaagtctcttgaggagatagttgaatctcttgctaatactgctcaaatccttcaataggaaacgagcacaagtgctcaaaaactctgtgatagcctgaaatatggcctaatcggaacagtggtttcgtaaccacaaattcgaagtgaaatagtttaattttataaattttattaattaccgattgattgaaatattgtgtgaaaatatggatgggaaattttaatgatttagtgcctaattgaatttttaggactaaattgagaaaaatgtaaagtgtgtctaattagtgattaaatggcttaattgaattattgcatgaaattggaagtgtttatgtgggcaaa

SEQ ID NO: 12199 - DNA, 634 bp, Gossypium hirsutum
atttaagggtgttaaagtctatgttacattaactcaagtatgagtataagatatgtctaatgtttttaattttttttcttctatttgaaagattctttaagatcgtatttctaaatctgtatatcagacacaaatagtttaaaaaaaaaacgaagaatttaaacaatttctcattaattgctttattaaagaccatgtgcttcttcttcatttagatgataatttttttcttcaaaatgtagggcatttgaagttgtaacctgaatttgaattaatatactaggtttgatctgatccaatccaactcgactcatacttttccttttcgaaagccttacaatgggttcataccaaacttgtaatcaatgagcaaccaatattaaaaggaaaggtatatataacataacattcacaccatagttatacatatagtttgtcatttgttgccactgtcccatgatttagacttgaaactaaatacaaatttaatgtacatgaataaaaacaatctctcttttttacaattttagcaaatttgtcctaattttggagacattttaaaatcacacaaaaaattttcaaaaatgaaacaaaattaactaaaattgaactttattcaacttattcaatggac

SEQ ID NO: 12200 - DNA, 566 bp, Gossypium hirsutum
  misc_feature (58)..(59): n is a, c, g, or t
  misc_feature (257)..(257): n is a, c, g, or t
  misc_feature (512)..(512): n is a, c, g, or t
cctctctatgctacattctgatcaacgtcgacagaatccgttgccccattactgaaanncctttgccttttcggtcagttttgaaggaagaattgagtgaaattttctagtatttcagaaccgtatgtactaaagaatgtaaaaaagccaacaaatgtaagaacttacagagctttcatggtggggtacctccaccaaatatatgtattaaagatgagataatccacatttttccagttatccccgtgttttgagantgattcaagcttgactacaggaaccactgtgccatacctcattgttggagggtctacattggattcaaccagaaatggtgcccagtaaaactccagtgtagcattgtaatcctacacagttcaaacaaattctttcattttttttttctcttagttatttgaatgaaatcaatcaatgagttaaaatattgtagaaacagcagcaagcaattaccttcattttaaagacagtggtatagcttgcataactaaagntcttcttctctggtgggataatagattgaaccatacaaaccatagatagcatct

SEQ ID NO: 12201 - DNA, 383 bp, Gossypium hirsutum
ttacatataaaatttcattattttatacatatagtactcgtatatatattgtattataattcgataatgatatatcaaagccaccaaaaagcatttaattaatcattcaagatcatgcaatgtactaatttaattttttaactatataagctcttgacctggtttgaaacagaacaacaacaataattattgaattgacaaggttaaattacgtagacatttcgtctatttaagcagggttaaattaatctcctgtatacattcagacatattaaactctagcatgcctttagatataaatttccagcacgcattcaaatacttttcgagctacaacaattaaattttcagacaatttagccacctacatcctttcatcaaaa

SEQ ID NO: 12202 - DNA, 665 bp, Gossypium hirsutum
cttggatgatggcattagttatttacttaaaaatcgtggtgtgataaatttaaggatatacttttagtaagctgatttatttattttgtattcttgggatttaaaaagcaaacttcaatttaatttataaacattttttagaagtgcgatcatctagctataatatataattcaagaaattcaaagtactattaatatcgtattatatatcatgtggtatataatacgtatatacacaaaagttatatccatttatactttttatgctaatataaaatttgaatatcatatcaaatgtataaattgaagtataaattaaaggagtttatatcaatagggtttgaattttggtaattgggtgccaaacaaagtgttcaaccactattttcttatgttgttgccaaactttatgtgttgcaatttacttttcaattgcccaatatatcatttatagataaatattatgaaaacaatttgattaaagtaaaaataaacaaaaaagttgatagggtgaaaagaaactgccaaccggaagataggttggtactcaaataattgaaactatttagagattttttattttttattttggataacagatacagaggaagaaaaaactagatagataaatagaaaactagaggtaaggtcatggttatttctgg

SEQ ID NO: 12203 - DNA, 586 bp, Gossypium hirsutum
  misc_feature (51)..(53): n is a, c, g, or t
  misc_feature (581)..(582): n is a, c, g, or t
tcattataaattgtacaaaaatggttatgagttattatttatattcttagnnnccttaatgagcccagtttcaagaaaaataaaagaaaaccttttttgagtcctgggctatgagataattgaactttagtgcaaaagggtccgaactggcagacagtgaatcaggggtaactttgaggaataaactgtactaatttgctaaaccaaaaattctggaaattttatggtaaaaaggtacatgagtctagtttcaaggaaaattaacggaacttaatttggagtttcgtagctccagatataaataatttagtgactgttgctcaggaagacagcttgtcgtgaacttgaaaatatgttgtaaacattgataaaacatgttaatgagttgcttattgttttcatatgaacttactaagcgtaaagcttacccccctttctttcccatgttccctagggttgccaggttagctcgggttggaggccgtcagagatattatcacactgtcgagttaacgctatcggcgtaagtaaatcctagtgtttcgagtctatggcatgtatagggttttaatgttgagtanngata

SEQ ID NO: 12204 - DNA, 512 bp, Gossypium hirsutum
caaatatcgaaatgttaataaaaaaaatattaatccattttataatgtaatatttttattcgcatttcaaagctaaatcttaaaaggtggaacttagcataatgggatgacacataattgaggttaattattttattatagcgccaacaactcttgggtggtgtcaggttttgtagtgcttccaaattaatttttccaataacacataaaataaataaagtaacataatttagaataataaaattaagattaagataatatatagtcggtgaccacctcaaacaaagattatccattagtgttaacaaaacaacgctatacttttttttttaacaatctcataatcttttcataactcttaaataaaaaaataatatattttaatgtactcaattttatattttcttatactaataataatatctatattaatcaaattaaaattcaatcgataaaataaaactgaataaacatgcatcaaagctaattatcttgggtcatgtgcagtaatt

SEQ ID NO: 12205 - DNA, 615 bp, Gossypium hirsutum
tcgcagtccctttacttactttccttggggatttaaaccgcatcttccattattattcttatttagggtaagcattttatcatttaatttaattttttcaaataaaatttaaatttattcaaattaaataaaaaattatctatatttagagaaaaaaaagataattaatatgataatttaattttataatttatttgtttaaatctctaaaattaatattttaaaatattttattaattttttatatacatttactaaattttacatttttaaaactatcataaactttaaaaatatttatattaatttataattcgagttatttgaattataaaattaatttaaattttaataaatagtataattttaaattaaaatttaaaaaaataattttattaaaaagggaaaggaaaatggtcccatcccatcattatctgcaaaagctcagagcttgaaggaaaacgaaatgacttgttctcagagtctacctttgtgggtccaatctgatatgactttaaatttttaagaaatataaattttaatgcccattttctgatttctgatcaaaagtttccttacggtaggaagtaagatacgtaggatttcattgccaga

SEQ ID NO: 12206 - DNA, 427 bp, Gossypium hirsutum
ttttcttctaccaaatcctgagatcaaatttaagtggacacataaaaagtaaacagcaaaattataaaacataaaaaaccagataagaactaatcatattttccttaggttatcatagaattatcaaataacaacttattagtttgtatataaaccaaacaagttaaaggaaccaaaagcatgctccaatgcgattaaatcagacaccaaataaattcgagtttttaaaattactagagtctaatgatctaatgatctaaatcataaaacaaaagaacaatgtactccgtaatcacttctatgtgtgccaatggtcatgacttccgctatctcccatttcgtgtggggagaagaagttgccttatacttattcttccatggccaatctttgttattactttgggtcgttaagttaagaaaaaaaaaa

SEQ ID NO: 12207 - DNA, 626 bp, Gossypium hirsutum
atatcatcgacgtagaccagcacatacactaactgggactcagactgaagaatgaataatgagttatctgctttagaaactacaaacttcatggacaccaagaactctctcaacttatgaaaccaagcccgaggtgcctgtttcagaccatacaaggccttccggagcttgcaaactaacttctcaccattggtcccttgttgttcgaatcctggaggctgcaccatataaatttcctccttcaaatccccatttaggaaggcattattaatgtcaacctgcctaagggaccaattgaatgacagtgctagtgcaagaacagttctgactgtagttggcttaacaacagggctgaacgtctcttgaaaatcgatgcccgcttcctgtaggtatcccttgacgacaagcctacccttgtatcgagcaactgatccatcagcatgtcttttgatcttaaagatccatttacaaccaaccgccctacgcccttcaggtagaggcatgagatcccaggtatggttggcaattaaggcattgtattcagctcgagcagcttctgtccaagcaggactttgaaaagcttcggttatattcaaaggctccttctccatcataacggatgctaa

SEQ ID NO: 12208 - DNA, 416 bp, Gossypium hirsutum
ctatggatgctgttgaacgcatattgaagtattaaaaagatactctaggaaaagagttaatttttaagaaacatgatgatttgagaatagagggttataatgatatagattgggcaggaccaactaataatagaaggtcgacttcaggttatttcactttcgttggaggaaaccttataacttggagaagtaagaaacaaccagttgttgcaaggtcaagtgcagaagcagaatatagaggcatggtttttggagtatatgaattgttgtggttgaagaaattgcttgaagaattagacatttatcctcaaggttcaatgaacctaaattgtgataatacttcagcgattaagattgctcacaacctagttcaatatgaacttatattgtgcctagtttgtggcaactatagagtg

SEQ ID NO: 12209 - DNA, 614 bp, Gossypium hirsutum
tctcttcccataagatagtgatgcaacgaacctggtcatggttgactaagctacacacaccccttgtgtcatccaccgccctcacttgcaccctaatctctatttttttgaaaattttcttcatcttctttttcctccaaatcaaaatagaactaccaccacctcctattaaattttgttttcaaaccacaaaaatcgagccttccaccaccatcaaagacctcctaccaccataaacgctgccccttttcactcctcttcccttccaccgccgtgagctgtcgccgcaaaccactgcgggtctcctccttgtaatagcccaattttaatggtgtcaaaaatagtggtttcgagaccatgaatttgacaagtgagttattattttaatatttattcaaagtctatgggattatattagggtcatattgaagtttcgttaagaaattttgaagtttaaatggttaactaggtaaaaaggaccaaattgtgaaagatgcaaaagttagttttaatagtaataggtattagatagttaaggaaataaaaattatggatttaaatggtaaatataccatgtgcttatatatagtggacggttatgagtgttggttgtg

SEQ ID NO: 12210 - DNA, 363 bp, Gossypium hirsutum
tatccggtccacttgttggtacaaattctggccaagatgtattcccttgttctgcttctccttcagggctattccatataacatcactctttgatggacgataaaaatccttaatcttaccttccatccaccggtccaattcatcaagacatatattagccaatagtggactaagaattccacaatgcccccatgaaggaagtttctcagcctcctcgggtgcaaaaccaaaaaatgtctccaaccaataaggatcgggtttcggttcatcctcagccaacactttcttcttctgatacttcctctttgtctttttcttcttttccatcccatcaatgggactcgttattaccggtgaaacaa

SEQ ID NO: 12211 - DNA, 632 bp, Gossypium hirsutum
catattttcatatgtgatttgtccacgggcaacctattcagggtggataagggtaagacgtttagggctgatccataatcaattaatacccctggcaacgtataccctttgcagcgggttgtaatgtgcagcgctttggtcgatcccatgcctcccggtggtatttcatcgtcattaaagaaaataaagttatcagtgcttatgttaccagccagacggtctaacttgttcacagagatgtcattagcaaattaagtttcatttaatactttcattaatgcactgcgatgtatctccgagcttaagagtaacgctagcatcgagatacgagctggctgtttatgtaactactctacgacactgtattcattgtgctttaagaattttagaaactccctaacttcattctccattaccggctcgttgacacgtgattcaagtcaaactgccatttccttcttctgttcgaccactaaggctttttcttttacaggctcagtttttgaaattgttgaatcgtaacgctttctgctacgtgtgtaaaaaccatcatcattgctctcttctgaagcatttattgggttctcctcccctggaattgtcacgttacagttatcattccaaggaacact

SEQ ID NO: 12212 - DNA, 608 bp, Gossypium hirsutum
  misc_feature (52)..(56): n is a, c, g, or t
tgcttcctcactgtttaggttgtgttttgatgtaggaaggcaaagttgtagnnnnnttcttcctgacagttgaaatcatacgagaaaaactatctaactcacaatttagaacttgtagcaattgtttttaccttaaacttttggcacatgttgtagtatctcgtttttcaatggtgtcaaaaatagtggtttttggaccataattttgacatgtgaggttgtgtttttattctaattaaaatatatggaggtacattagagtcgtattaaatttttggaaaagaaattttaatgtctagttaattaattgaataaaagggactaaattgtgaaagacataaaagttagaattattgaattggtttggtttgatgatttaactattaaaataaagatgacttatgaggtgattaatccattatatatatgatggatggttgatggcctttgaaaatgtaaattgtaagtttattcttaagggtgaattagtaaataactaattaatgtgaaattaaatcaaaacaaaagagattgtcatctttttccttgggtgccaaatttgagaaagaaagaaccatgaaaagagcttgagcatatgattgagagtc

SEQ ID NO: 12213 - DNA, 617 bp, Gossypium hirsutum
  misc_feature (57)..(60): n is a, c, g, or t
gaggagactatgagagattagtacccaaacttattcaccagtaagattttcaaggannnnatctctacggaggagaaatgtaacaggggctagtcagaataatggtctcgggaccacgaatctgaagtccgagaaattattttattattaaaatagagtcatatcatgtttataatagtgcatgaaaaatttggtgagttaattttgacgtttgtgagcccaattgcgaaaaaggactaaatcgcataaaatgagaaagtcctaaattgatagctaaaggtattaaatagttagagaaccaaattggggggtttttaaagagcaattagacccctaaaaaagagtagttggccataggagacatatgtggtcaaaattttcaaaatttcttgggttaggtgaccaattttgactaaaatagaattaaaaaaaaggatgatatcatcccttactcatctcttttcttcatctaaaattagaaattgaaggggatttgagagcttaaaaattttcagcaacatgaagcactcacaagtaagtgatttccatgcgatttgttgatgatttttacatttttgagacccttgaagcatgagctttcaaataaagggacaaaa

SEQ ID NO: 12214 - DNA, 554 bp, Gossypium hirsutum
ttgcctttgttgctgacaaattcagaagcttgctttgcttagcttagcttagcttagctcagcccagctcaagcaccaaagaacaaaacaaaggccgcctttaaaagagaggttattcgtgataaatgatgatcattctctctttagctgcgaattgataaacccaaatcaacatatatccatacactcggacctacctttcaaagatgattgaggtataactaaggtttaattatgctggccaatttaaaacactttcactttgctttatcttaaacagggttgaaaagttgtagatcccatatttagagttggaaaactttaagacatttttatttgtttgtttcgtctgtaatttttttaaatgtgagatgattggattttaatatttaatcttttgttttcctaggagggaaaccattaaaaatatatataacatgttcacattttttgtccaacatttccaaacccattttaaaaagtggtttctttataattaaattatcctcaaaataaagaaattaggtaaatctttacgttaagaagcttcggaa

SEQ ID NO: 12215 - DNA, 686 bp, Gossypium hirsutum
tttttattgagcttcccatatgttcaccaaaaaagcaacacaaaaacaaaacttattagcaatatgaaactccattatcacattcttcactcaaaaaatcaacaagcccttacttcaatttcattataaaaccaaacaatcagcttcaacaataaaaacccaacttcacaaattcacaactttctcaccatttgtactaagataaagacgactgaaatgcagcaaatataaagaaagaaagtataatgcatacccagatcttgctttaagaagagatttctgggtttttaacttttttcagatccaaagctttgatctttacggagactgaacaaagtttgtgggagtgagagaagcagagacagagagacgagaagccgaaaaatgcagagtaatgggaccctttttccttacaaattcttgtggtggataagtacccgtatttttaggaatatttacgaatatgacactgtcaacgtaagaaaattgctgaatgtacttggtaaagttagtcctaatgcctataaaataattctatttaaatagaaaatgttaattatgttaaaatttggtattatttaattttttttatagtataaaaattaaattgatatttcgtaaatatattcatctaaaaaaataaaaagtgttattgagttttagttcgattgatatgggcatttgtt

SEQ ID NO: 12216 - DNA, 614 bp, Gossypium hirsutum
gaagtgatatagttcaatatggaagataattttatggtactctacctatctatggtaaaaacaagagaagtttgaaggaattggctacgataagtaccagattgacagcctcttgagctgcaatagctagaatatcagcacaggaaacgatgcctggacactcaaattctagtgcgatcttcatggcatcgacaacctcaaatcctcttgctgagttattattcggcgcagcttctttctcgctttctatggtagcgctgttgtccaataaaatcgatgcatcacagccctgcaaaagaatttgtttcagtccttatattcagaaaagaaacaaattgaaagtagatatgatgttcacaacatttaccatctataaagctataactaggctacatacgtgaaatggctgaaaaggtaaacggaaggaagagaaagagatttggtaaggaacacaaacgttttggttattacattaacaaagcagtcatggaagtgaagcctaagaaggctggcaccaatcctaggatcagagagcaaagcttgttcgatgattcctcgaatgatgctaaataccgcggggcatgtttcatcataaaatgatggacttaatgtgg

SEQ ID NO: 12217 - DNA, 672 bp, Gossypium hirsutum
ctcctttgtaagtgaaaccgagccccgtttttaatgttctttacatttttgaagtcccggtaactcgatttacctatttctaccattattttgagctagggttcatgtttaaaaatttacccatgagtgatatgcatgtgttttgatgtctaatggtagaaaatgaatgttgggtgttaaataaccgacttttgctaagtgattttcagtgaaaatgcttaaaaggaccattttgtaaaagttataaaatttgtcataaaagtgtgatttagtggaaattgggggcagctatagttatgaaaatgattcagctaggcttaaaacactaagaaattgaataaaaatcattttacgagcctagaggccaaagtgtaaataagtgaaagtttaggggtaaaaatgaaaatttgtaaaagtatgatttttgggtcaatttgaataatttgaataataaatgagctatgtttgaattgttagatcaagaaaactgagattcgggcataaatagagaaagttcaagattatggactaaattggaatagttggccgtaattgcttttatggtaagttcgtgtgataataataatgaaatgttatacttgaattgtaatgttaaattaatattatattagttgtatgaattgctacacgttagtactcgacgaggattca

SEQ ID NO: 12218 - DNA, 541 bp, Gossypium hirsutum
atgattattttgcagatgaagtatctattaaaattaaatcaaaacatccacttgttggttaaatgagttcatatttgtttcaaaaatttaaaagatccaatctcaatcataaggttgttgataaatcttattctttgagaacaagcagcacttcaaaaatctttagaatggataatttttaggttctttaataaatattcatgtaaactttaatttgttgtgtcattattgactgatatggactgattggtaatgtcaagtaacttatttgactagtaaacttctagtttatcatcgcatgagattcaaccatcttatcgtatccataatacgaactagaggaaaagcgatagttttctaatacaaacttttagccaatataacagtgtaataaatagaaatggatctttccctcattcatagtctcaatacgatatccattatagtacatctttttaaagcaaagtaatttctataagattgattagaacataatacattaattatcattttatttcttcggttgacaatgtattagctc

SEQ ID NO: 12219 - DNA, 614 bp, Gossypium hirsutum
  misc_feature (462)..(463): n is a, c, g, or t
  misc_feature (465)..(465): n is a, c, g, or t
cacactatcgatctcattttggtacttttgaaagtgtaaatattttaaagtatggcatgtataggctagaaggtttatgtattaagttttgaattgtaaatataggttatgcaatgaaagttggctatcaaatggtatgtttgtgttaagttttggtatggtttgaatgagttgttgatggagatgaaattatttgtaagaaaccaggttttgagcataaattggctgaatattttgtatgaatgttgtttaatttggcttgaaagaatgaccccataaaggggtggcaaattggcttaaaccaagcctgcattgtgccacacggccctaacacacgggcgtgtttgttggccgtgggcttaagttagtaactacctaagaatcacacggccgtggcacacgggcgtgtctgttggccctgggaataaatcagaataaacgtgtgaataaaccacaataaanncngccagagcatcgtccaaatcagacaactacctctcaaaactcaggtatgtgtttttaccttaatacagatggtgctactcactctgtatctagtttctctgctacagggggagtaatatacgatggtaaaggacaatggatcttaagat

SEQ ID NO: 12220 - DNA, 619 bp, Gossypium hirsutum
gttcctaaagagggagattcttcatctcaaagaccacacaaaatggacactaccaaaagaaaaggatatatatatataatccttactttgctgtaagattttattttattgatgatttatggtgggatgtaatgagaaaattaattagcgagtttaatagagttacgcaattaacctaaattaagagttaccatattatatgcttcctcaaatttgctttcttggttaagtagcggagggaagatgcgtgaaccatagcattttatttctaattgcagtgggaaacacatcttagtctaatgattttggcttttttttgtttgaaagcgatacttaaatctcggaagaagtaggtcaatggaaagtatcaaagggtaggtcttaacacattcaaattcattatgcgttatttttattttagaaattgattccaccttttgctgcttcactttattggtaaaaaggagatttggaagttttgagatttgtcctagtaatcgtttttaatattggattatggttaatttatctcttttatatattacaatgtttttaacatatgtttatattataaaaatttgacatatgggaaagaaagtaagcatgcatttggtacatg

SEQ ID NO: 12221 - DNA, 640 bp, Gossypium hirsutum
gagcaatcaagatcggagttgttaccagtatcaactcaataccaaattctacttccctgactagaggcaaacccggcaactcttctgtaaatacatctgcgaatgaattacatacgccaaataagcttcataaccctttctcaaatatctctgagccgacatcgaagaaatcacactagataatgcctctgatttgtctgattcaacccgcagaattttaccactttcatactttaattctataaccttttctttacaatttactaatgcatcatgtaatgtcaaccaatccatacccaaaataacatcaaattcatcaaacgacaacaacatcaagtcggccggaaagtaatgaccccgaatcattaaagggcatttcttgcatactttatcaactatcacacatttgcctaatggattcgacactctaatcataaattctgtgtactcaacaggtatattcatactagacaccaatttcatgcacacatgtgaatgagtagaacatcaatcaaagcattaacattaacaaaatataccagtaatcacgtcaagtgatgaagcatcttcacgtgcctttatggcataagttctagctggagcccttgcttcaggtttagatggtgaacctttgactaca

SEQ ID NO: 12222 - DNA, 621 bp, Gossypium hirsutum
gggtgcatgttttcattaaatgagctttgatgaatcttgaaagatgcatgaatgtccagctccaaagcataattcggatacatgctccactttaattagcttgaatgaacagtaatgtccagttgaaatcagctccccaatgtataggcacaatcaggtacatgcttaatattaatgagcttcaataaatcagctagattcatggctataagttcagtcaaacagttggatgttcagccgtccattccaacaacctattaagacacaattaaacacacaattaaagcttaactaagacaaattaacacaattaattatataattaaggttgtaagaaaattaaatagaattaatataataatttgtaaatgtcttagcagttgagttagctagctaagttagactagctaaatttggttcagcttcaaataagttgaaaatttcccttgctgaaccatctaagttatgattaacgaatccacttgtattttccttccaaactcaatcaattaaagtcaaaattgactctttaaaacatttagctcgtgatcgagtgattggaccaattggcaactcaatggggtcgcatttggtgtcagctaagtccataagcgagttaaa

SEQ ID NO: 12223 - DNA, 601 bp, Gossypium hirsutum
gtggtcactgatagtatgatatccctggcaagctctttctgttttcctataattttcgatactaaaataaccttttaccaacaacttttcattgaacttgcaaaccaaccgcaatgccttttattgacaaattgttctaaaaatttattaggtcactttttatttctcgaaaaactggtctatttttaagagatccggattccaagtgatagaaatttttgcttttggtttcttctcttctctgtattggcttatttctgttgccacactatttggcttccgctctaatcagacctccgtaagtaatagtctgcaatgattaatttggttaattagaaattaacaaaaaccgagtgaaccaaagttatctgtagtacaagttaaattgatcgaaacttttgaattaatcaaaagcaggagaagcatgtcgattagacctgcaactacgcaatggtattggtaagccattaaataaaacaacaatttgcaaaatgtaatgtgtgaagggattagattctgtttgtatggttttgcaaaggcttcaatctttactttaggaatttttaagaaaaaaaaaaggtttcaaagcccaattgcaggg

SEQ ID NO: 12224 - DNA, 687 bp, Gossypium hirsutum
ctaaggataatctggaaacatagaataaaattttaaattttaaaaaaattaatttatttaattttaatattaccgtaacaaatcggttgacattatcaatgaataaatttttttaatacttaaaaaaatatttttttagtgataaacatgaaagcggcctaaaagttgggtgactaaaatgaaagtgtaaacatgatgtgacatttactaaaatgaaaataccataaaaattgagtgaccaaattgtaatgatttcattttaggtaatcaaactaaatgcgcctaaaagttgagtatcaactagacagtttatccataacctcttctcaatcattaaataagaggataaacgcattttaacattttttgaactcatgtccatttgtgctaacaaaaatactaatattaactaaattaagtctcaatcaactaatagattagttaattaaaacaaaaccatttaaaagtattatagcaaatataaatgaactttaaaaaaataaattttgaaaatttttaattatataatataaaatatgaattacttccgtttacgtaaaagagtttttcaaatctcattttttaacccaattccagtcttcaaaatttttgtgtagttgactttcaaggaaaccgaaccatagtgaaacaaccgtgtaaccgagtacgggattacctccagtcaag

SEQ ID NO: 12225 - DNA, 410 bp, Gossypium hirsutum
tgggtacaactaattacgtatgcgacgcacgtttggatattcattgttacttaagtctttaattatatagttatgtaattataacttttacttaaaaaatcaaatataaaagggataaaatacaagtgattcctcaaaaactgtatgaggacaatgaaacaacaaatgaagttgaaagttttgaaagtgattgggaaacaagatttactcaccaccgttcgttccttttaaacattttcggaaatatagtaacaaagaacagaacgatagatttcatatccaaaccttccttgtatatgttatatacactatatatgtgtgtcgtggaatagagtcgtgtgtcaataccactaaaactttacctttatatataataagtgttagtacaagtagtgtgtttacaattttgg

SEQ ID NO: 12226 - DNA, 586 bp, Gossypium hirsutum
cattatcagtcttttacataaatatttttaaaattttttattattattttaaatataaatatttattcttatatcatgaaaaagttaaatataattatgaataataaaaaatctgtttttagaacttataaactaaaatggtcaaaacatcaattgattttttgttttctcatactgcgattgccaaaatattcgagtgaaatcattttcctccgttggctcttttggatttaccgtaataattccaagcccatgatccaacctctcatacaaatacaatgacttagtggttgtggtaaatcataaagtttgtaacaaccgatttggagtttggaccattttcttttttggaaaatttatatttaagttggattaaattattagtgaatttatattttaattatttaacttcaaaaagttacaaatggttattttaagttattgaacaattaaaaatttctttttaagaaaaaaaattcaactgacaaactctaagcaacaattcaactattagtatagtatattaaatattcattaaagagtagaggaatatactttaaatctaattcgatttaacgatctaagt

SEQ ID NO: 12227 - DNA, 310 bp, Gossypium hirsutum
taataattttatttatattaaatttaggtccatagagatggcaacgaattggacaggttgcagtagttgttataccctcttaaaggatatgggattgaacgcatttaagagcataatattatcaactttcaatatttaggatgatcatgagtagtggcgaagttataaagttttttttgggaggtggaattaagttgtatgtttttatgaaagctagaatgtaatttcataattttaataacttgtatctttataattttaaaggattaaatcaaatttttatcattttggagagctagtatgttttttt

SEQ ID NO: 12228 - DNA, 654 bp, Gossypium hirsutum
  misc_feature (411)..(411): n is a, c, g, or t
  misc_feature (445)..(450): n is a, c, g, or t
  misc_feature (468)..(469): n is a, c, g, or t
  misc_feature (471)..(474): n is a, c, g, or t
  misc_feature (478)..(479): n is a, c, g, or t
  misc_feature (489)..(498): n is a, c, g, or t
  misc_feature (514)..(515): n is a, c, g, or t
  misc_feature (523)..(529): n is a, c, g, or t
  misc_feature (592)..(593): n is a, c, g, or t
  misc_feature (600)..(605): n is a, c, g, or t
  misc_feature (615)..(619): n is a, c, g, or t
  misc_feature (647)..(648): n is a, c, g, or t
ttttatatctcgtgagcatccgataagctaaaagtagaatacgggataatccaataaaggaagatttgggtttttttattcaaaataatacaaataaaatttcaattacaaaaataaaataagttttagattatttatgaaaatgaaatatttttataataaaattgagtcccaccgatccgtcagatagtaccagttataaaaataatattttaataaaaacaactaaaattatattttaataaaaaaagtgtgaagcccatttttcaggcaacattctttttcccttctcacttttatttattttttttaatttgggatggttgtggtataattttgaatttcatacatttattttatgaaaattgaaagttagttattttattaggtgctttggattatcaatggatncagtgattcgtttgttatcgctgacagggtaacnnnnnntagacgtgacgagttaanncnnnnattnnaagaataatnnnnnnnnnnatagtacgattggacnncgcaattnnnnnnnttgaagcacttttttctttgatattcttttaagattcccctcttttttttcgcattctctatnngcatctnnnnnnaactattatnnnnnaatagaaaactagaggtaaggtcatggnntttctc

SEQ ID NO: 12229 - DNA, 523 bp, Gossypium hirsutum
atcacgaccttatgttaaatcgatacgttgccttatttattgaaattaattagaagaaaacaataatatttctaaaataataaaaagaaaactaataataatgttgtaataatatgtgatctaaaatatatattaaattcggaatgagtaaataataataaaaagggtaagaatataccgaagtccaatattatgggttactgaaattaatctattttctcctcgggttgctgaaatgggtctttgttggtgatcgtcactggatcagattgccgcaaatagagtcgggttgacccgactatttaaaaatttatttttttaagaccaaatttttacatggcccaaataaaatccacataaggacaaaagattcaaatcatttcaacttattacaaaataatcccaacccaactaacttaatatttcaaaccaaactaaacccaactcactaatttaaaaaaataataataataatacaaaccaacccaagtcactacttaataaaccccacaccacccaacca

SEQ ID NO: 12230 - DNA, 660 bp, Gossypium hirsutum
attctccctctctgagtctctctgtgtactctgtaagttctttattttcattaaattttaaaacattgcgtacatgtgacgggtaattttttaaaaattttatacgaaaagaaggagacattatttttactttttattttgggttaatagcattagccattctcaaactatagcataagttttaaattagtccttaatcttcaaaacatcctaattgaatattaaaagtattaatattgtatcaaccaggtccttacacaagcttagctagggaagaagctcgtgaaaaatgtcaaatatattgaattgagattctgaatggagactaagtaatagttatttcgtgcccagcaataatagacaagttaaacaaccctgctcataattgaattcagcccaaccaaacattcgtttaagagagtttgactgtagaaataaaaatcgggcttgaatggaatagccatttaacccaaccaaacatgctgtaaatgtgattggaatttgatgtagagtatataaaacatgtgtattaaatttttaaatacggatgcacttatcacattgatagtttaggtttgacatattaaaatagtgaatgttgaagggtactactttttttttatatgttaaatatgaatttacaagttgatttatgtgtct

SEQ ID NO: 12231 - DNA, 345 bp, Gossypium hirsutum
ctttttatttattgacaagataatgaacgataattttttttttctgcaatttttgcctgtttgtgatgtcatttgagcttttctttggaggactcgaccacgtttttataatgcttaacatacaactctatttattattcaatcccatctctttattttcagaagaaaatgctatctcgtgttgtgtaaaagtaccatggaggctcttattctaagagttggattgcattttgtctttactaaaaataggcaaattagtcattgaacgttagacgagtaaactggtccttctgttaaaattttcatccatatctactgttaaaatttggcctttgtatgtcagaa

SEQ ID NO: 12232 - DNA, 448 bp, Gossypium hirsutum
aattaagaaattaatccctccaatttaatctatcaaaatttaatcttcaaattttgtgaaaattaaaattttaattcaattaggtaacattgttaaagcttcacattaaatccctaatttgaaaataagcagttcagactaaattatcaaaaattatcaattagactaacagtttaaatatgtcataggtcattatactctttataaatttaaaatttaatacttaatactttttttatttcaaatgatttagttcttttacttttgaaaagtgaaaggaccaaattttaacattttaaagtatagggaccaatgtcttaatttttttataaaatagaaggatgaaattcacaattaaacctaaaataaagttccaccttcttacgtgccattaaagggtcccatgatgacctgtaccatcccgccgtttatacgctacgctcctaat

SEQ ID NO: 12233 - DNA, 672 bp, Gossypium hirsutum
aagtgaaagcccctttttttcattcattcatttctttttttggttagttgagttgtccatgggctaggccgggtggttaattcgaaaaatgagatgatttgagtaaaaatacagtctcaaataatgggtttgggaaaaaaataagatccatttagaaaatggactgggcctcgataaggtttttggcttgggcctggtccgacccgacccaaatttgtaataaaaaatcatgctgttttgctactttttatcactgttttgctattatttcactattatgttgctactattttattgttaatgtttggtattgtacaacatttgttttatttttaattttgctactattttagaggtatttgcttgttaagttacacttatcttaatgttatttaagtaagtataaaaactttttttaatttattttcattttgttggagaaatatctattttaatatttttagtatatttggtgtattatattttttaaaaactacataaaaaatataaaattaaaaaaaattaatacaaacaagccggaccgggttttggaaaaacttaggcctaaaattttatcaaggactagactggactggcctgacctgaaccatggacaactttatgacagtatagttgggataaataccaaaactgcacatggactatggatta

SEQ ID NO: 12234 - DNA, 666 bp, Gossypium hirsutum
cattaatgactaaattgagtgcccaaacgtcaaaattttcaaacgaaattttcacaaaattattttgtgaaatcttataccataaaaatataataaaaataatttttttcctcgtcgaatttgtgatcccgaaaccactattctgactaggcccaaaatcgggttgttgcaggcgaagagagattacatcaactacttttaatcttgattattgaggtgtcaacaagagaccttaaatctttaaccactattcttgtttataaaattataaccatgttaaattaaactttgtatatatatattaaaaatgggtaaactacaaaaataatcacttttgtttgtctcatatacattttagtcatttatgtttgaaatgttacattttagtcacttacgttaccgttttgttacaaagtagttattctgtcgttaagctctgttacctccttaacaacaatcttacatggcagtccaaatgagttataaatgctaacttggatgtccaactaggatgaaaataaatttttcaatcaaaatggaaaagaaaactaaaagaaaaaggagacaaatggtttttcttttctagttcaaggtgcaattaatttaaaattttcaattaattaaaattatttaattaaaaacttattctcgtcccagtttgaactt

SEQ ID NO: 12235 - DNA, 625 bp, Gossypium hirsutum
ctcatatctgcagtttaaaaggtcagattttactttagaaattattgagaactgaaattaatttgtttgtgctatttccttctgttttgtctttttccggcttaatagagttcattatgattttcgtatgtaagaatgaatttggatttataattttctggatattcgcgttttttgtgttttcatagaccaaaaatagaagagtcacggaggccttgttaaatgatgattgttagtcacagttagcacttattatctgattcttcgtttctcatttccttaaaagagtatccatgtcttgacatttacttggatgcgagtacaaggtacgattatctaaacatgatatataaatatattttaaaatttgagtatattttatgtccaacactcacgttgaaattgattaattcaatctttattcatttgatattagtgataatgaacattgtataagcgtgactgtgaactttagaaattttatcaagcatgtgatgagttaaaaatctaacagaccatacgcgttattgattgatgaaatattttgctgcttttgttctatttacaggtttcttttatcagatctgttgagttacattattaacaattagagctgaataaaaag

SEQ ID NO: 12236 - DNA, 541 bp, Gossypium hirsutum
  misc_feature (196)..(196): n is a, c, g, or t
gtgggataggggggtgcataaaagggggccaaaagggttggtaaaaaaccctaattttttccccacagggaaacacacgcgcgcgtgtttctaccctgtgtgacacacaggttgcccccccggcatggggtcacaccacgattccccaggtcctgaaaatttataaaaaggacgcgcctaattcaccaaccacttnaaataaacaccgtgtgtctcaaccgtgtgaaggccatggccttggacacaggcgtgtgtcctgagcgtgtgaagtctgcacttatttaatgaaaaatcataaattttaaatcgaccacacagcctagcacacgggcgtgtgacttggccgtgtgtctttaaattgtttttgggtgacaaacagagagttatacaagttcgagacacgggcgtgtgtgaccacacggcctgcccacacgggcgtaccccataaccacacgggcgtgtgacccctgtttagtgaaaaattttctaagtgatacaaaattttctaaagttctcaacttagtctcgaaccacttcaaat

SEQ ID NO: 12237 - DNA, 366 bp, Gossypium hirsutum
attgcaagaagctttgggtaccaagctgcattttagcactactttgaatggatatattagggtaataatgcattgaatggatatatgaatgtttattgtattgtattgaaaatattaggtaagtataattcttgttacatgagcttactaagcacgaagtgcttaccccgtttcctttttccctattttgtagtgttaagagctcggaggtcggatttggtcggagacacatcacactatcaacctcaggatttcggtatataaagaaactttattttggaaatcaatggcatgtataagctaataaagtaaatgttaacgtgaaatgaatataaagttagccattagtatggttaacaaacctgg

SEQ ID NO: 12238 - DNA, 410 bp, Gossypium hirsutum
aaatgcattttatttataaaatggaaatatgaaatagggtgcgtgggattaagtttccattgaattctttaaccaaaaaaaggaaatatatatatatatatatataaaatgattctcatggtttcacacctacctgaggagattccctttttgactgtccatgcattgatttctatttgtttgtatattatgcattagataagttcaatgttaaaaagaaaaaaaaaactactgcattcatttgtttttgttttgatgtatcaaaaatttgtatttgttttgatttttaaaaaatgagcttttaaggattatttttattaaaaaaattaatttttaaaaaaaaaattaaatattaattcaactaataccggggttgtaccaacaactttaaggttgggggttaaaataaa

SEQ ID NO: 12239 - DNA, 639 bp, Gossypium hirsutum
gaacaactccaatgtccaccccatggtagtcctcaaaaccgtatagggttgcattgcctaggtttgctaaatcagataaggaccccgcatttacagtggccgaggctgtctctccagagatctgctccaaatattaaagatcagtcctaaacgtcatgtgatggaaggtaaaacaaagagaagagtgggtatggatgcttaaattcaataagaacattcaagtaacagcaacaattcttaaaacattgttgcaagtgggattgtaaagcattgtaccttagtaagcagggattcagtctgaatattgatgaaaagaatgggaaccccggaggcctgagatgcaaggagccaagcatcagcacgagcaagggtatcctccaagtcattgtatcgggaggccactcgatctgaagcttttggaaggagcaaaatagaaagaaaacagcttgaatttggaactgatagcacctcttgcatcctcctctgccacggataccatacatatccatcctggagccttgtcctcgatagttcactcacaatccttgtgttccttgaaactgcaatttcattgtttaacgttgcatcacaaattatcaaagtgaataacatgattcaagctttttagacccatttggt

SEQ ID NO: 12240 - DNA, 528 bp, Gossypium hirsutum
ttagacaaatgttgaacagcagaaaaacttaagggcattaatcgacagccaccataaaataactagttaatgcgacaacttatattagcaatcagcttaaaatatattcctcttgaaacattgctctaagagatataatttttttaacgaatcgtataaaatctattcagccatatgcaattaagccacacataaatatcgcgaaatcaacataaccgcatgaattctgcaataaaaaatggaaaattgggaggggtaatgactgaaaccaatacaattaaatataaaactaatcataatgatataactaaacccgtctcacttactagggattgtaagatctaaaacgaagcgttgaataacacaaaaccctaattatcgggaaaaactaaaagaactttttctatttaatctaatcggaagttagagggtataatttgcttaccataatttcttctctttctggcttcttcttcttcctctcttcttctgatttggatactggaaattgagattttgccctacttt

SEQ ID NO: 12241 - DNA, 475 bp, Gossypium hirsutum
acagtggttgtttcggatgctgcactaaacccacaccgattattgctgtggatgagccaacaaaaggattgagaattcgagggcgtagagtgaggaagcctagcatttctgatgatttttggagcagcagcacgtatgaattggaaaacagtgccctccaatctcaaaggagcttgtcatcaattagtgcatcaaacccaactctaagccaatgcagtagcagcagtggcattgtcaacccatctgattttgtaaatcagggcaagttttgtttattatataatatatatatttctaagtcaacagaatatatgagtcaaggattgatcattgaaatttgattcatgatgttattgttaactttgagattctcaaaattaaaacgtacaattatatttgtgttcattgtaggtcttattgtctggaatcaggccagactccaatggattggaagtaataggcctaggaaccatac

SEQ ID NO: 12242 - DNA, 647 bp, Gossypium hirsutum
gaaacagccgattttttatttttgtgagtggatatatatggctccttgcttgtttgtgaatcattatggttatatttgtattgtgatgttttcagagttagaaattatgtgtttgtatgttcatgtaaatcatgtatcccttgtgggttttctggattcttggcatgaacagtgaagttcaaagagttatcttttgggggttttatgtttgcaatgacttttgattcatctctaagttccatccattgcaataataaattacatttgactaatgaacaagcctatgaagctttagattttggagtactgggttcaactttgtgaagcatggtctgatgcaaaaatggtgatggatggcagcatgagtgagggttgttgattgggttttattttatttttaagaattaggatgaaattgacaagtgtgtaagtgttaaaaaaagataaatttattgaattttttttagaattatgaccaaattaacataattgatcaataatataggttaaatttattattatgtcaattaaagaaatgcaaaaataaagttaaattgtctgattaccttagaaattgataggattaaattgcttccagtttttatagggatcaatttgcttaattttgaatttgagaggaaccggtg

SEQ ID NO: 12243 - DNA, 657 bp, Gossypium hirsutum
  misc_feature (57)..(59): n is a, c, g, or t
  misc_feature (61)..(64): n is a, c, g, or t
ttgtgcgatctatcaaaaatgataaaaattaaacaaattttattataaaattagttnnncnnnnacatgttaataatttaagtactatttaattattttataataattatatatatttttataagaattttaccgaaactgcatgaatttgagttaaaaaatggcatgaaaaattgtatatattttcatgtttccacttgttcataaaaactaaagaacaatacattttagtagtactttatgttgatggtattatatttggtgctactaatgaacttctttgttaagaattttctaagatcatgcaaggtgaatctgagttgagcatgatgggtgagcttaacttctttttagggcttcaaatcgagcaaaataaaaatgaaatattcatcaatcaagccatacattaataaaatgcttaagaattttaaaatggaggatttgaaacctgaatcaacaccaataagcacttcaacaaagcttgataaagatgaaggaggtaaatgtgttgaaactaaactttataggtctgtgatagggtcattgctttatcttaccgcaagtagaccggatataatgtttagtgtttgtttatgctctagatttcaatcatcccctaaggagtcacatttacaagccatcaagggaatctttaga

SEQ ID NO: 12244 - DNA, 642 bp, Gossypium hirsutum
aggttcgatttcccaattctgcgcatttaaagattgggttttcttgtctttgttaattcttttttgtttgttatttgttgatgaccctgaaatatcttgaaatcgtcttctctgtgcatagggttttcgatcgtttcatttttcttcatcgtcgcgaaggtactgtaatggtttcacttcttttatattgggaatgctttcattggtttggagtaaatgttatgttgttagtgacgacaatttggagtaaatgttatgctttcatttcttttttgttggtgtcgataaaatcatgttcttgttttttttagtatgaaatattgatgtgtaatttaggttttattttattaattgataaaaaaaagttgttacaagtttatgatgattacatttccaggtaatgaatttgattttaattggatttttatgagactatgtttctcaagatttgaatgacagaaatcatgaatttaggttttggcattcgtaagagtagtataaaatctcaaaaaagaaattcaaaaaaatcatgaatttaggttttggattttaattggtttttgcagctaagatggtaccttctattggtttttgctactaagatggtaccttctattgatttttgctactaaatcaacccaa

SEQ ID NO: 12245 - DNA, 544 bp, Gossypium hirsutum
  misc_feature (488)..(488): n is a, c, g, or t
  misc_feature (490)..(490): n is a, c, g, or t
ctcaggccacatttagaacgatgaataccctaactatcaggtcatcacatgatgttttgatacaaattaaagttcaataatttatctggatgtaatgaaattataagggcttttagggaaaatagtataagggtttatttatataaaactacatagttcaaggactttctttttgggtagatattcaaggacttctttaatattctaactcttttttaattactatttgcaccattggaagtaaactagtttgaagtttttttttatggtgtttcactctttcttttattaataaaaataattatttaaataaaaaaaaaaccaacccagtaactacacctaaaaataatcatgtgcttaaaaattattacctcttaatttttaacccttactttatttttctttaaaatataatttttttataaaaaaagtattagttaaaatgatctgtggggtgatgatttctagtatggttaaaatactgtgancnttattcaatggagacatgaagcattagggtgagtttggatgggcggtgcgttta

SEQ ID NO: 12246 - DNA, 553 bp, Gossypium hirsutum
atagaattgacatcctgtttggggccccaatccgtccaggcgttctccccgaagtgcaagtcggcaaataacgcaactttaaagggtgcatccgcccgtgttcggatatggttctcaggcgtgtggtgatcagaagatgcggcgatggagatgaagaaagcttggaagagcaatgccagacaagagttggataaaatggtgaaataggaggaggtaggcatttgaatgggcgatagagagttaaattgtttgaagaggttaatagtgggagaggagctttggagatggcgcaaagcaattggccttgtgcgtacagaatattgggatgggatattcccgttgatttgtaaatcgtaattatcaaatggcatataacaccattaccttaccttgtgaaagtcagtcctaaaggcacttttctcaatgtggtattccaattttcttgtttctatattaatcttcgtactccacatttcttttccattttgatacccattcacatctaagtattaaatacaaacttttaacccacgctccaaatttatcttcactg

SEQ ID NO: 12247 - DNA, 423 bp, Gossypium hirsutum
atcctcaaccaactgaaggagctgaaaaccctgaacctagggttgatctaaaagaagaaccagtcaagctaagtgttgaaccagaatttacaactccaatgctgactcctgcaagtactttaaagaaatcggagctgtcaattatgatggacatgtgaaagttcatgcacaaacaacagcagacttactggaaatatgcaaaaattagggatgattcaattcgaaatacttttaagaatatttctaacacttttgttcctgagacgagacccaagtatagttagagtatttagagcatttgaatggcatagattaattagtagattgtgtctcacgtatatacctttactaagtaaaaaaaagaccacgttggttatatcaaaattcgggagcaacaaaaattttagtttaccatgggtaagg

SEQ ID NO: 12248 - DNA, 429 bp, Gossypium hirsutum
  misc_feature (34)..(35): n is a, c, g, or t
  misc_feature (413)..(414): n is a, c, g, or t
  misc_feature (417)..(417): n is a, c, g, or t
gaaatccaaataaaaaaaaaaattgtttatagcnnggaaaccaccatatccctttatctcttaatttgcataaaaaaaatgaattacaatgtcttttactattttactaattcaatatcaattttaaagattcattttattatgttacttgaaaatgaagtatatgagtgtagcaacaacatatttaaattctaggcctatggttgggtttggattttgaattatggattttgataaataacaatagagaaaatggtgagggaaaaggaaaaaaaatgttttcttaaaactattataaaaatttaagtttcaaattttaaagatataaaattatttcataaattttttaaaattaaaaaaaaaaagttaaaaggaaatcaatttccccctggctccggtaaaaaaaattttannaangctgggccccca

SEQ ID NO: 12249 - DNA, 695 bp, Gossypium hirsutum
  misc_feature (5)..(8): n is a, c, g, or t
agcannnnattgtgtttgccctaaaaatttggcgacattatttgtacagaaaaaagtgtcatatcttcactgaccatataagtttggaatatctgatgtcccaaaatagctgaatttgagacaacatatatggctggaattgctgacagaatatgatttgatcattcactatcacccgaggaaagccaatatagttgcagatgccttgagtcaaaaatctttatttttttaagagccatgaatccacgtctgatgtttagaagtgacggtttgattttggttgaattaaaaactaaaccgatgtttttgcaaaaaatccatgaagcgcaaaaaaatgatgttgagttgaatgctaaatgggaaaatgttggaaaaatgcaagatatcaactttcgtattggtgttgatggtagtttgtatttctgggataaattatgtttgataaagaattctgatgtcaaacgaaagattttttgagaagctcattgtagcgctaattcgattcatcctgttagtaacaaaatgtacagtaacttgaaacaacaatactggtggcctggtatgaaacatgaaatttcagaatttgtggcgagatgtctgatatccaacaggtgaaagtcaaacatcaagttctgataggattactacagcctgttacgattctagagtcaaaatggaaatgagtcacccatgaa

SEQ ID NO: 12250 - DNA, 627 bp, Gossypium hirsutum
agaatggcagatccataagcaggagtattcgtctgtaattttttcgttattggctggaggagccaggatgttaattttcagaggccaaattgaaattagacaatattatgtaacaatttatttaaaaatatagacaatcaatacaaaatataaaagaagtattttaacatgaaaatcaatttaaacataaaaataatcgatttaaaagaagcaatatttcaacataacaattgattcaatccaaatttgaccaattcatcatcatctacaatcaaccaaatttgatcatccaaaaacaagtatatatatatataaatgggaaaattgtaaaaatcttaaattttggggggcctacttatatttttgggagggccataatatatctacaaaaggctaaataaaaaattttaaactttggggggccatggcctcttaggccactactaggctctgccattggttatttagccttttgtagatatattatggccctcccaaaaatataagtgggccccccaaaatttaagatttttacaattttcccatttatatatatatatacttgtttttggatgatcaaatttggttgattgtagatgatgatgaattggtccaatttggattgaa

SEQ ID NO: 12251 - DNA, 463 bp, Gossypium hirsutum
tgtctaagagtgttgaaaagggattgattggctttgctatgcagggcagcggagaacaaagaaaattgtaagctggaatgcctgtggtttgggacgctcacgggtagtgaaccgtgtcaggaatatacagagagacattcgtccaacaattttgttctttatggagacaaaagttagtgtaaggaggatggaagcagtgaggcgtaagtgtggttttgttagtggaattgatgttagttcgattgatgctagagggggtttatctttgggttggaggtaagatattgtggtgagtttaagaagttatccccaatatcatattgatgtggtagtcatggatggtgaagttgggttgaattggcagtttactggtttctatggtcatcctaaagattggaggcgtggtgagtcatggagtttgcttcactagttgagtcaagatcagacacttctatggttggga

SEQ ID NO: 12252 - DNA, 547 bp, Gossypium hirsutum
caaatccttagctcccacttaccaaaattacttcaatgccataaattatattttggagtttaaaaatataaaatattatttttataatatttttattaagtaataattcgagccttttaaatttaaaaagatatttttgattaaaatcctaaataaaatatgtaatgtataaatggaagtcaacttcttataagctagctttatttgttacataaattagctgtcacattgttgaatatgataataactatttatttttttaaagcgatgtggttaatgtacacaaatctagatgaattcagtcatttactttcataaattaaatcccaagtgtaaactacaaaaacaaaaaataaaccattttttctctaataaggtcaatgccttcttaaaaatacttagtaattttcatatagggtaaattattaaaatagttaattttgtttgtcttagattacattttagtcacttatgtaatcttattgtaacattttagttattaagccgttaattgttgttaacagtgtaacaggtaaagctgatgtgg

SEQ ID NO: 12253 - DNA, 652 bp, Gossypium hirsutum
gcctgtacatggcgttcctaggccgactaccccatccattcctattgagcctatttctaataatgttcaatttgatccctttattggtgtagggccgaatgatggtcagccgagtgggattgtggttccttggcgcaccaaaccctgtgcgcgtgtctactctgggtttgatccttgcattggacttcctcgagtcggtgacattcacgcatctgattattttgattcctctaggtcttatggaaatactacacaagttggctctaatggtgatggcacagactcgtatattcttatgccagttggcacctcctcgtggtaacctgactctggtgctagtaattatgtttgtcgggatccttcggctttgcatgacacttaacccgtattcaggtacgtcttcactcttaatagctgatggaacgcctgctataatctcgtctattggtcagggggtataatttacgcagtctaaactgctttggttatctaatgttttgtgtgttccggcagtacaaaaaaaattattatttgtatctcagtttgccactgacaatggtgtcttttttgaattccattccacatattgtgttattaaggacagcgtgacccgggaagttttgctgaaggccatcttcctgatggattgtac

SEQ ID NO: 12254 - DNA, 676 bp, Gossypium hirsutum
cgtcgtttgctactccttcggaaccagctttgtcttcgacgacaatgggttcgtaatgacaaacccatatattcaacaaacgttctacacttcttgcattttatattattaatgaacggttttgcaccgtttaagttttatatcgctaacggataatatgcattttttatgttttgtattaccagcgaataagtcacacctttcacattttatattgccaatagatggctcgaatctcctttattttacatttccaacaattgcatatgtgatatacatacaacacatctccactgcataattttggatcttcttattgactattataccactcatttctaaattgtcgagccaatgggtataccactcactaaatcataaaacaaactttatacaagtcaactacgaataaaaataccatttgtaaacacattattaaaaggggtatgcatatgttcttaaatcattcggccaataaattatactctccatcttgttactttatttgcaacaaatgtcacccacagggataacctgcggatggtctcaagacatgatcaccttataacctatctctcgattgagggggactattgttatatccctaccacaatttggattcagttggggccctcacctattgtggacccgattgggccctcataactcctataaa

SEQ ID NO: 12255 - DNA, 466 bp, Gossypium hirsutum
agtaccgaacgagtcgaagctcgggcttcgaacaacaattgggatcgttgtcgctcggcttttgatacttccattggctgggatcgggataatctatttggccgacaaatggaattgtttgatcgccgatgattcgatgtacagatttgttctattgatgcaatatgcaacgccgagtgccatattgcttggtgccattgcgagcctgagggggtatgcagtgggggaagcttcggctcttttattttggcagcatgtgtttggtttggtctctatttcagtgtatatattcatctatttcaagttgctggttaatcttttctaaggttagttcctatatttaaaaattataccttcatattcatgtaaatcatgtatttttgccgagttgagagcttagcttccccacccctgcttttctctacttttatctacttcgaaaacaggtttcgaggttgaaatttaa

SEQ ID NO: 12256 - DNA, 433 bp, Gossypium hirsutum
ttgttatttgcttagtgcaggtgaaaattattttgtgggtttatttcaataagaaagtcaaatttcaataattttttattcactcttattatttttattaaatgtgtttattaatttagtgagactatcttttgaatttatcatgaattattattataatagctgaatgttgcttcatctatttttttcaaattaatattataatttactttcttatatagttccaaatttatatattgtttaaatattaatagaaattatcactctgaataataattaaaaatatattaattaaaaactaaatacatgtaagattataaattaaaatccttaattctactggatacataattgtgagtaattgaatttgtttagtgaatatataaaacatgtatagttctattaaataagcaaatgcatgaactgaaatggg

SEQ ID NO: 12257 - DNA, 677 bp, Gossypium hirsutum
  misc_feature (629)..(648): n is a, c, g, or t
ttacatccatgctttcgttgcatattttgatgtttcgtttaccaaatgccacaaattgatgggtttctctacaggtttgtatctacatcaaaattctccatcctttgtcctttccattttatctacgaatagaaatcagcaagccagcctagaagaactttgccttggctaatggcaaatacaaaatgcaggaccaagatcgcgagctacccattggaagcaaacagtcctatatctagaggatgtgttaaccatctgtgaaggggagacaataattgggagcatgactgttgcaccaaacaagaagaatccccgagacgttgatataatggttaaatattcattgagcggacgacgttgtgtggtttcgagagttcaattctataagatgcgctgattttgttgcagagtatttcatcaccactactagctgtaggataccttgtttgcatgttcctcaaatgtttcaccaacatttttttaattccttttctactttcttttttctcgaaaggttttccctgagaaagaaaaacacataagatgcatgtacttcattaactcaatccaactgttttcttctcatgtatgcttcatattgagtcttgtgttttgtgctgatgtgaggnnnnnnnnnnnnnnnnnnnnctggtttcctcttaattccaatccccttc

SEQ ID NO: 12258 - DNA, 649 bp, Gossypium hirsutum
gttctttcagtgtcatgcggtagggtgcaatgaacacaggaacggtacatagtaagagatcgatgctgaactcaacctctctatccagatgtattcttagcaattccttgagaaagatgtctgggaagtccctcacagtacgaatatctcctatagaaagatattttatttttatttaacccttttgacacacattaggagcccaaaacacagtccaagtgttgacaaacttgactctgataccactacatataacaccccaaactcggcctaaacgttaagaccaagtttggagagttacattaacgttattgggaaaaaccaacttttataaacacaactaaaaatcgtctgatagattataacaatcttaaaacctagtcgatcattcaactatattagaaagtcataataggaagaaaatactgaaattactgaaaatataaataaatggtgataaaacagattaactgagctttcactacgctgacccgatcaagattaagagttacttgtaattcagtcaacaataaaataagttgagaactcaatgtgtaactgatataaattcaattaaaagcacaattataatagtaaattcttaaactcaagttcaaattagaattagagaatggtccatgcagtctta

SEQ ID NO: 12259 - DNA, 650 bp, Gossypium hirsutum
gcagtatgtatttgcatgtgtgtgatacaagaagtgaaacattttagtagaataaaacaaaaatttgtttgtaaacagagtggaatgattatttaaaaataaaaatagacattaaggacggatttggctgtgattaatataaaaataaggataagaagactgtgatatttggctaaacccaccaccatccaaatatacccttgtgggcgtatcaattgtggaccaccattggaaatggcaacatcatagcgagatcaacacaattcacacgctcctttcaaattacgtcatacgtacatgctgtaaatcttttttaatgaaacatattaacctattaaaatgtaattagttttttcaaaactcttaaaatgacatgttataatatcctgcatctgttagtataattttgtaagattttcaagtaaattaatgtctgatttcagtcggctttttaattatgaataggttgcatctcttacaacccattaagcataaagtaatctaaataagttttaatctgctgttaaataaactgcagattgagtcacatgtttcatgtctggggtgcacaagggattaaacaaatatattactataataataatatttggggagaaggaggaggcgcaagtgatacacacacggttatg

SEQ ID NO: 12260 - DNA, 639 bp, Gossypium hirsutum
  misc_feature (72)..(73): n is a, c, g, or t
ctttgatatggacaatcatttgtccagttcaaatgtatttataagttattttatatatttttaatttttttnnaaaatatttgggcaactatttatctatgttctttcttgatgtgaatttttttattaacttatatatttttaaagttttttttattttttatttatgtgtcatgtggcatactaaaaggttattgtgtgtcgaattggctattagtgtcatgccggtataaactaatagtgttagtacaaaggtattgaattgagtgacataatacaagttgaagtaccaacgaagtacaagaagtgcaaggggaaaaatatatattaatccaatttaaacttgttatacttaactaccttgttaggagggctcacctccaacaaaggcttacccgattaagtatgcaggttgtcacaaggtgatgttaaggtcaattcagaagtaactttcattacatccaatgaaggttctcattactttatgacttgctttaaaagagttgagccaattcatatccaattatctttagatagagtaaaccatgactttatcacagtaggacacttgtctcaaaggatccatttgaaatccttttgttttacaaaactcctcattcctctcatggttgtctcttg

SEQ ID NO: 12261 - DNA, 645 bp, Gossypium hirsutum
  misc_feature (639)..(641): n is a, c, g, or t
tattttcacaattctcctgatttttctcagcttatgccgcccaaaatatctccttttgggcttatttgcaatttatgtctctcctcatttaacaattgagttatttaatccttttagtaacttttacaccctttcaatttagtcatttttacttaattaactacccaaatgtaaaaattttctaacagaattttaataccatattactaacatttcataaatatttataaaaatatttttaacttatttttttgagatcgaggtcttgataccttgtttgtaccaaatttcttcaataattttttttctaactaaccactaaatcggtaaaatttttctatcgatattttcatacgattttcctatcatatcaatattcaagtaaaaatattaaaataaatttctctttaaattgaatttgtggttacaaaaccactgttctgacaaccttgaatttaagccattacaaaacaagtttgggaatgattcgatgatgattcgacagttggaagcctggttgaaccttaggaatagtttaggatgctagtgacatgtcattaggggtaatttgagttggcttcgggccatgatatagcacttcgggtgcgagataagtcgatttggcttcaggctatgcannntcag

SEQ ID NO: 12262 - DNA, 520 bp, Gossypium hirsutum
tgggctaggtagtttattgggctaggtagtttaattcagtcttggtctgtaatgtaacgagttgggttgtaacagtaggcctgttggtttttaacatttgtaaaaggactgtaaagacttttgttttattattttggatatattggactatgccttggattccaatgggccaggcaaaattgaggtattacagctgcccctctttgctcattgttgtataacaggaatagagcaaagatataaaagaaccaattttgcccgggctcgccaagtcttgatttcttcgatttgctcctcgccgaatatagaaatgcaaaatctgcttcttcaattcgtttctttataatacaaagatgctaagttatcttagatttgcttcagcgcgaatacgtgaaagccaaatatacttatgtcttcgatttgttccttgtgactataaggatgccaaaccatcttgagtctgctccctgttgaagtggagatgcctgatttcgatttgttctctgacaatacagagacg

SEQ ID NO: 12263 - DNA, 670 bp, Gossypium hirsutum
cactcttcacaaacatcgaaacatctaaaaaagcctcttttttcccccaattacaactaaaaataataaaaaatcttaatttctcatagaagataacttaaaattaagataaaagaaaatgacccagaaaaagcagcttcagccactcattttaaggggaaaaaaagcacttgataaatccattaaaatgattgaaatcaactaacagatctgacatttatagaacaaccagaaaaccagaccataaatccacataaacacaagtaaaaattttcaagccaaaaaagttcaaaaaccctaaattccagcaaaacctatcaaacagtgccgcacaacaaaaaagaactcaagccctaacaatcagaaacccctaaattcagaatccgaacactcggaaacagattaacaaagagcaaaaaaccctaaaaaatccaaaatgcaagtaaagaactcacgagatcatatcgattgccatcaaactcaaaagcttcataatgactcctccttcctcttcctttcccagaaaccctaacggcttcccctattggcttcgcatcctcttgaactccttcttcctctggttcctcttcttcctctggttcttcttcttcttcttcctccgtgtcgtcatctcgctttttcttattcttcttcgttttcttcaatgccc

SEQ ID NO: 12264 - DNA, 451 bp, Gossypium hirsutum
cttcctaatcttggatgccctctttggacctctcatccttgtcttttcagtgtcagtcagcccaggcaattcattctcccccttcttcactacaaccaagttcaaaacagacaggtcatggctaacaatgcatccacgaacagacttccttcttctctccccattacgccttccatatccccggaagcgaggggtgcctgctcaagcaccataaacgcaatcaagctccaattctgcagaggaagacatgaaggcaaaaacctagattccaagagagacaccaagacatagagatcataatggttaaggcaaaagaaaatcaaataaccaagtcgtgtatgattagaaacatgttgttacgtttccccacgttttgtttggcagtaacagagagacagaggttgaaggaagaaggtggaaacatggagagttgagccgcaaaggaagtcag

SEQ ID NO: 12265 - DNA, 702 bp, Gossypium hirsutum
  misc_feature (683)..(684): n is a, c, g, or t
atctactagccgttaccctagcaggatctctcaatcttttactaaactaatgagtcgacaataactacttatctctcgacctcatagtgtagaccgattcaaggttaaggtgttcacgtataggccattccaattttgggttaactcccacctaaatgacttcctagggtcatcaagcctagggattgtaacgcccccatactcgaaaccgtcaccgaagtcgagcttgaggggttaccaaacataatttatcaaattaagaacttcaaattatttgtttctacattcacagctttctagctacccgcgtcatagttacaagaaaaatcatatctcgagttatgaaactcgaaatcaagatccgtaaattttacctaaatctagactcatatatacatttactaatttttttctagaatttttgattaggccaattagtacagtttattagttaaagtctcccctatttcagggtttgactgctctgaccactgtatattacgaatcagatatctctctatacagaatttcaatgactacgagtttgtttctattaaaactagacttaacaaggaatctgtacatataaataattacttataattatttttttacaatttattatgaattgttaaagtcagaacagaggatccagaaatcactctggtcctgtttcacaattnntaataaattgtaaaaaaa

SEQ ID NO: 12266 - DNA, 406 bp, Gossypium hirsutum
ctccatgtttatgacttgtgggatgcggacaagcagggagacaccacctttgagagcaaatcctaccattgctcaaataaggcaatacagtgatttctagctttgaaaatttaataatttaatttactttaaacatttttaatagaaaatttttaaacttgagcctccacaaattttataatcttatctcgccccccatacaagatttctagcttcgcccctacttgcagtgatatatttatgtaaagaaatgtatcatttgaatcaccaattatttttaatggtacaagataaataatttctataggattacttcatagagaatgttcagcccatcttaaaccttatcaaacatatgtgaaatcaatgatctgaagttaaaaatagtttggctacaattttcacg

SEQ ID NO: 12267 - DNA, 606 bp, Gossypium hirsutum
tgactgctactgatattttgatgggctaaggccctaatacatactgatactgtgatgggccatggtcctactacatatttgatatcgtactgagatgggctaaggcccaaacagttactaatactgaaaagagcttaggcccaaaactgtatttgactgtgcactatgtctagtattgtttgttttctatggtattacacactgagtttatgtaaactcaccccattctatttaatattcataggtaatgtaacaacccttaccggtgtccgatgccgggacaaggtacgaggcattatcggacttaaacattcacatacatgcaaaaatcaggccataaaatttctttttaattcaaaacttttcagacacatgcataatgtcccatacacggcctacgatgccctaaacatgcattgaaattagttagggactaaaccgaggaccttagaaagttttgagaaaacttagaaaatttctttccatgaaacagggtcacacacccgtgtgggcatagggacacgcctgtgtgcccaggacacacccgtgtcctcagtccgtgtgactctctgactatgacatcaacaaacaaaatttaactacatg

SEQ ID NO: 12268 - DNA, 453 bp, Gossypium hirsutum
ttcgtggtaccaggaacataactgaaacgaaacagtcttttcttcatatgtaacttattttgactgttcttcttcagaaatttctcctccaatgctttccacaatttacttgcagaagtctctttactgaatgtatacttctgctctctggaaagacatgatcgaattgtaccacatgccaatcggttgatggtcttccattctttatcatcaaccccttctggtttttcttcctcaatggcaatatctagaccctgttgaaagagggcatctagaagctcactttgccacatgccgaaatgacctgttccatcaaaaatttccactacaaatctcgtatttgcagttccaatcctcggcaaaatgtacgaagtggaagttgttgatatggatggtttttcttctgtcatttttgccatagcttctacttaatagccaccaaatgcagaatac

SEQ ID NO: 12269 - DNA, 563 bp, Gossypium hirsutum
aaggttatagttttactcaagggtttattttttggtgagaaaattttgaagtgttgttcgttatataattaatcggcttcttaataattgaaagtattgtattttaatgaaaattttgtttgttacattctcccaaaagcaggggtgaagccaaaaaaaatttttagaggggtcggataaaattttaattttttatagtttatatctttataatttgtaaaaaattaaatcaaatttttataattttagggaggtcaaagtgaaattttacctttactaatttaaaatttttaaaaaaatctaagggcttaaaatataattttatattttaggggggtaagggcccatgccagccccctggctacggccctgcccaaaagttaatgtatcataaatagttgcccgaaattaaatttgaagtattttagttggtcaacctacaaaattcaagagaaagaaattaacatcttgcatgtaatttaagtggtcaacctacaaaaattaaagagagaaaaatcaacatcttgcatataatttaagtggtgttgtagttgcaagtattt

SEQ ID NO: 12270 - DNA, 461 bp, Gossypium hirsutum
tttcttaacaatggaggaaaggcctaaacgagagaggtcagaagggattgcaatgtctgttgttggaactttatatggtgcttttaattttgttataaatcaaaattgaatcctcattgagttgccttcattggtttctctttgaatttccattttgaaggagagaaaaattagggtttcaaagttaaaggaaagttagggtttcattggttcctcgtcataacgactagcggtagtggactgtcccttttgaggcacctctgagccagactgagtggagtcgggagagttgggttgagacagggataaggaaacagaacataacagaggtgcattaacaaggttgtaagtctgggcagttagtgagtggatgtggtaggagggagggagcgattcctgagggagtgaaggagttggaaaagggagtgacgagctctggagaggagagaggctagggtttg

SEQ ID NO: 12271 - DNA, 691 bp, Gossypium hirsutum
tgctccgtaaacctatcgaatctactcgcccacaacattccgtagcaacccatcagcagaagctaatctcacgctctgaacatttttaagaaccttttttacgtggagattttgaaaatattaaatttaactctaatttggtttaatcttgtgtttgacccttacacatttttcatttcattcaatttaatctctaatttgaaatgttaatttatttgatttaatatctaagttcaattttgatttttataattaggtgcttattatttaatgttttaatttctacaagttctgcactttaatttatttttattgttttacaaactagtttatttacgatataattattatttataattattttacataattacaatgcatataaaaaaagtttagaataatgctcaaataaatgattaggacgatgttgattcaagttttaaaaataatactttcctcaagcattacaatttttaaatacattttaataaacaaatccaataaacttatatatgcaacctaatataccttaatttcaaaactcaacattgctttatggtattatacaactagcctaaattagatttacatatcgttaatttttaggacgttttttttaaaatatataaagaaataggttgtttttttagagagaatatgaaagcgcgtttaattaggtgcgttttccctc

SEQ ID NO: 12272 - DNA, 587 bp, Gossypium hirsutum
ttttaattttgacataatttgatacctcaacttttatagtatcattagttagtctaaatactttattttaattaaaatgatgatgtgaatatttaagaattgttagcaccattaaaattttttattaaattcaactccattacaattttatttttttgttacatgaatactagtttattttatttttttcaaaatattacacaaatacaagaattctaatagtgttaacaaatgaacctaaatttttaaattcgaaaagtagagagaataaattactaaaaataaaaatatgaagattaaattccaaatatacgaaaaataaagagactttgaataaattgtaacatttaaatttttacactataatttaattaagaaataaataattaactcaacgtaaaacatactatttaggaatcaaaataaatattataaagtagtctttttcttcattttataattattaaaaatgtttaaaaatatcttattaatctctataagaatggtgcgtgaatattacaccacgaaattatgctcctaattaagcagacttttttttttatgtattgttgggccattgttgatgg

SEQ ID NO: 12273 - DNA, 690 bp, Gossypium hirsutum
  misc_feature (7)..(7): n is a, c, g, or t
  misc_feature (9)..(10): n is a, c, g, or t
ccatcanannttcaatggcctaatttcactttaaagacccccaatttaagatacaaggcaatttaacacacctttaggtattaaacacaacttttaccttttacgtgatttagtcctttttcgaaattggactagaaattgctaaaattaacttaccaaaatttacatgcacttataaaattatattataacacataaaataatactaaaataattttctctagcctcgaaatagtggtcccgaaaccactgttccgactaggcccaaaatcgggctgttacatagggtttatatttaaaaatttacccatggatgacatgcttgtatttggatgttttatagaagaatatgaatgtttggagtgtgataaacaacttttactaagtgatttttgatgaaattgcataaaaggactagtttgtaaaaagttgtaaaatgtgtgtaagtgtgtgaattagtgcaaattgtggacttatatagttatttaaatggttcgtctaggcctaaaatgcaaggaaattgaataaaaactatttttcgagcctaggggcaaaatcataattttgtgaaactttaggggcaaaattgtaatttttccataggatgtttttgggttgatttgaataatgtgagcattgaataagtcaaatgtgtttttatagatcaagaaagacgtggaatcaacctag

SEQ ID NO: 12274 - DNA, 662 bp, Gossypium hirsutum
cggccatattgtttgtgcaatcaaaatctaacttgcatgagaatgaataataattaccattcggggattccaggactgtcccaattccatttcccactgcattggatgccccatcaaagctcaacttccaaggacaatcctctatagttgctacacacatcaactcctcatttgggaaatcaaaattcaatggctcatagtcttctagagctctactagcaaggaattctgctatcgcgcttcattttatagccttttgacttacatagactataccaaattctgtaagcagtatttgccctcttgccattcttctattcaacgctgttgactccatcatatgtttcaaaggatcaagttttgaaataagccaagtagtatgatatagcatgtactgtcttaacctccgagttgtccaactcagagcgtaacataattttttgataggcgagtatctcatttcacattcggtgaatttcttgctgaggtaatatatcgccttctcctttcttcctgactcatcatgttggccaagcacacttcccatggaattgctgaatactaataagtactgatgcagtcgttgagagcaccaaaaatatcctattccctgtaaaataacgaaaaagaaacagtaaaggagaagtacggtcaaatcctca

SEQ ID NO: 12275 - DNA, 676 bp, Gossypium hirsutum
agatagctcgctgctatatgttggcaagcataatcggtaccctttgtaagaaactagagagcttaagattgccaaagcaattctagacaaactagaagacacccattttaatttctttacgcctaaccataatttcttttaagtactttgtgtatttaggaactttttccattaattctactagaagcaagttaacattaagtgacttgaataagtttagaaaacttacaaatttcgcttcatcccctttttgcttattctctaaccgtgaagggaatggtaccttggttagtgtaggttctctgtttggctcaactaccgtcttagtttctgactcagctaccttttctggttcagcatcatcattttggagagcttcttcttgaaaatcatcggcatcctccttgccttcctcttgagttgggttctctgggtttctcagtaccttacccaaatggagagcaatttctttgacatgctccttccctttcctccgaggattattctcggtgttgcttcaggtttcggtgccaatttttcttttaatgtctcccataatactcatcaattggcatatttgatcttgaagtttagttaatgtctttttcatttgggtacactcaaaatgcacctattttactttggtacacattgaatgtatctctccctcgatttg

SEQ ID NO: 12276 - DNA, 665 bp, Gossypium hirsutum
cgattcgactgtcgatctaattctgaaaggcttgaattatttatatgttgagacctaaaattattttttagaattaggattaaattgatataatgtctaaatattgaaggattaaatttatttttaagccaataagaaaatgtcatgttagacttcatttattaacttaacgtcaggtgactaaaaaatataatttcgaaaaatttggtgactaaataaaaaaaaaattatagttgggtgaccaaaataaaaacactatcatagttgaatgattatttgtgtagtttaccctaaattttaattaaattaaacttagtatcaatattaatatttaagactaacttagaatcaatattaatatttaagatctttctcgagtttgtgtcgctcttcaatcaaattccaactcaatggaaaatttaccaaaaactccttatttttaaaaagtgctttttatcttttcatataaattttagaaaaatatgcgtgcatgataaaaatcaaacccgaacattatgatttttaacaacttaatttcaccattgtagctaaagtcatatttgattattatatcattttttcatttttttgggtaaattattctgctaatctctttaaataatgattatttctaaataatttggtgatcattgtaccgattactc

SEQ ID NO: 12277 - DNA, 502 bp, Gossypium hirsutum
attttgtcattgtagctcgtttcctttaattaaacaagtacagttctagacttagcttacattttagctgttgttctttctttggggtaatctccccttctcccatcatttctccctaacttaaatctctctgttcctttgtgagtaaatcctgtaagagccaactttaaggctgaaactgtacttcttgcatgaaaagtttgataaaaacaaggatctttttttaaaattactaaatgaaattaatataactatatataatgaccctcttaagcattttaccaaattcttctccaaacatttggatcaagttcataggggtgagcatccaaccgaatcaagttgagttgagtaaaaaaaatttgaatttatgaattctattttatcatcttaacttgatttgaatttctttcgaattaaatctagtaaaatgtgatttgaatcaaataaatttgttcgagttaaattaaaaaaattaaaccgaccatattgaaatcttgtc

SEQ ID NO: 12278 - DNA, 621 bp, Gossypium hirsutum
atgtgtttgtccttagactttggatttctatatgaagtttattttgagattaattttatatttgttaaataaaaaaattaagcgccaaataaattaaggattgaatttaagattaaatttaagttataaattctgtttggtatattaattaaaactaaatactaaatagagtataagattaaattcatcaatttcgtaagaatttaatttaatttatgtttgattatgaggtctaagctcaattttgagtttgaattaaaatattcaatattaaaattaaagtcccaagttgtcgatgtcaaagattagtaggtttgaatttgatttatacgtggctctattttgggattttttaaaaaattttattttaataaaaattgtaaaaattactataatttttaaaaatttaaaaattcttatcatttttgaataatttttgcaatttctaatcattatttaacaattttaatgatatttacaatttttatgaattttaaatattatttatattttaataaatttgaaaaaaaattagttttacaagtttttttttttacatttttacaatgatgcttctttttacttctatcttgttatttaaattcctaattgaattggggg

SEQ ID NO: 12279 - DNA, 663 bp, Gossypium hirsutum
gagaaacctcaaatacagaacaactaagttcccaacaaataaaataacttcgttaattttaaaacatttaaaggagtatttatgctaattattttttatagttaaattcgaaattgagaatattagaacctattagattttaattcgactaaataatagtatagattgggttttaattggactttggtaaataaccctaactttgttattatggtatgatcatttgagacataaaattacctaaaaccaatgccaaccctccacattttcatatattccagtgatcagattgcacatatttaataatatgagattccaaaaactgcagatccctaatgaagcagcacaaccaaaagcttggcaacattagcatcaccaaaaccaaaaatattattctttcttgctgggccatcaagcacaaacaaaatgacaatatttatgtgatggctaccttttattttcttccaagaaaatgaaaacccccatgtgctgcacactcataagctgcactctccttaaaacatcccaactatattcaaatacactacatagtacatacctagatgaagcctctaaaatatatattaatttaccatgtaatttttatagaatttatatctcatataaatataaagagattaaaccctgtgtcttgtagtgcaa

SEQ ID NO: 12280 - DNA, 645 bp, Gossypium hirsutum
ggtgattaaacaggtggcatggtgattaaacaggcggcatgtattaagcttatctaatacattttaaattggtcaaattataatttcagtccctatactacctcaaatttgatgatatagtcactttgatcaataatacaagtactaaactgaatagaatccatacgtttaactacaacaaataaatggaaataaatgattaaagagcctacaacccataaaaattttaaaacgcaacttgtaaaaacaacatgtaaaattttgtttaagacattattatttgctaaacaaaaagccggttttgttgaatgaaatttgataaagaaatgaatttcagattttttacttgcaaagatatttgtaatttctattttgtgcattgcaaaaattattaatatgtattgttcatttttctttggtggtgtgttattgcttcatcttcttctttggcttgcttgattgcttcctccacccacagttgagcttcttgtattcactaaatcactgtaagttcttttgcaattaaattatttgattttgttttattgttattgagattagtattgaagaaatgtgacccttttactatggtttgaagatatgtaacactttaatatattgtagtaatggctcgtctgtctttaa

SEQ ID NO: 12281 - DNA, 682 bp, Gossypium hirsutum
gagatgatcaatcacccttctgtcttcatcattgctcgaagtaacagtgggagcagggacttcagcctcccctgcagtagccgttgcttcatatgtaatcatttgcgaaagtggtattacaattattaaaaagaagagcaaaatataagaacttccaaaacaaatgaagaaaccaatacacaacccacattttgcaacattaaatgagtatggtatttatattttggcatatttgttttgtatcacatattttaattatttaaacaaaattgttcaaaaatagcagtacccttaaatgaatacagtagttgcaatatttagttgataacttgtaatatattttttttaatttttgtatttatttttaataattcaattgttaaaattatcaatataattatatttatcatgcatgtaaattttttaagaatctaatctctctattatattgacaaaaaaaactatcttttctaatatatatttatatgttgaaagctttttattaaaataaataactacactttgacatacacaacctacattttctctccctaaaactaaacattatactatagttttgtcaatataattccgcaaaaaataaaattaagtacaatattaatcataaaacttttccagattatttttaaaaacatgcaaatttgtttcccttatgccgaaa

SEQ ID NO: 12282 - DNA, 621 bp, Gossypium hirsutum
tcacctcagggaatatgccaaaatcttcaaatatataaaaaaataagtataaaagtatttttcaggtgtacaataggtgcataaccaatgatttttcatacataagttttctctcttacaagttctcatcagtaatatttgtccacgtaattttaattgagaacttattctgaatattgtagagtttactcatagtttaaaaaaaaacttgcaactttaggtgcatccaaccataacaagatttagatggaattaccatattctattgctcataagtagatcttttatagtcaaatattttgctttcaacctcttaatagggatgatgacaaaagatcacaaaaatagtcacaatcaattcaattcaataataagagtaattaataaatcaatcctccattgattcatatgaaatataattttttcttcattcgcaagctcaatatgagattaattataaatatcttttaaaatcaatagattaaccatcacaagatattaacatattagctcttttggagcttttgactaattttgtactaccaaatattggaatattattggtttatattttcttttgcgttcactttggggaatgtaatagatttaataggacgaact

SEQ ID NO: 12283 - DNA, 687 bp, Gossypium hirsutum
tttctgtgaaggttaaagggagtctattgaggtttatatatatatgtataatagtgtttgaatgaaaaaacaggggattgatttgaagatgatgaacttcacacggtgttcaaagactaggactttgttatgaattgttgaaagtttattgagaattgttcaaattgaatttgtgagtgtagagaaagagagactaattcacatgcacaaaatgtcagaaaattaataaaatattttggatcaatttttctatcagtccttgtgcgttacaaaagttgtggatttggtccctataatttaatttgatcaattttagtctctttacttttcggattggttaattttagtccttatactttttggattccgaagttttactccagacacaaatagtaacaactaaatttgttctattaaattcaattactagtcatgcattatgtgtataattgtagatttaatccatattctctaattggatcattctaaatccctatactttccaaattatgaaatttttgtcttgacgcaaatggtcattgttaatccattaactgaatttttagtgaataatatgtgaaaataaacaaattgacataacattgcacatatgataatatgttttctacaacaaattttaggaatagtaagttctaatttaatgaatttaacaagtattatttggcg

SEQ ID NO: 12284 - DNA, 641 bp, Gossypium hirsutum
gaatgttttaggggtgaaattaaaatatatatttttactataataaaaatgtaattttatcattttaatattgttaaagttgtgtgacttaattctaaaagattgcttacaagtcaagttaaacaaaatatattttctttctagaagatttagtatttattagtataatatatttaacatttattagcataatttatttgacctactaatttagcctataaataggttcttttgcaacattaaaaaatacacccattagaaattataactcataacacatttagagaattttgtatttacgttttgagagttatttgttttcgaattttcggggtttagtttttatctccatcttttgtactattcgttcttttgccattatagtaaaattatctttacctgtgattttttatcctctttgaaagagtttttccaagttaaatttgtgtgttcaatttctcaatttattttgctatttttttacttgctgtttaattgggtcgatcttaacaagtggtatcagagctagtttaattttcatagattagcccgttcaaagatggcagcaacaagttttgaaattgagaagttcgatggtgagacaaattttaatctgtggcaagttcagatgatgacaattc

SEQ ID NO: 12285 - DNA, 642 bp, Gossypium hirsutum
aggatggaatgcaaatgtataataagatcttcctcttgaggacaaaatgcaccactcttgagatcaggtctcaaataattaatccaacgaagacgacagctcttaccacacctctgcaaaccagcattcctagcaatgtcactccaacacccttgtccgttgctcaacatgtacttcatcagcttctcgtcttcttcaggcgaccaaagtcccttcctcagcttcaccttgttgttgtcttttcccatgtttggtggatctggaacaggtttcctcatttgctggtgagcccctttaagtttttctaattaagagggtgaattatgtgggttgtgataataaagagaaaagctatgtaagggggaatggactggtgtggaatgatgggttgaatataagaaagagagagagaaagatcaaagagagaaggcttcatggggtggtaatggtgatgatgatagtgatggtttggagtttgctttaaactttgaatatgaataatgtataaataaatatatgatggttaattatggttttagcccttatactatgttaatatttgatattttatctctttactttaatttgacataaatttatttttctacttttaataatgttattagtaagtgcaaatcgtta

SEQ ID NO: 12286 - DNA, 564 bp, Gossypium hirsutum
ctagaacacgaagcaacgattacaaaaacatagaaatcataaaaaactgagctaaaaccataccttaatcaaagcttcaagttttcgaaaccttaaacacattcaagatttcttttcttcttcaaatttagtgcaaaaaagatgataatggactaatttcatgtttattttattttaattaaatattaattctatttttaccattttaaccttggtttataaacactaaaacatcaaatataaggccattaatgtccatatccactatcaatggtctaataacaatgtaaggacctttcatttaataagccatagcaattaaacacctttttcaaatagaatgcaacttttgcattttatgcaatttagtcttttttctcaagttaaccacttaaatgataaaattagcacacaacttttacacatatctaatttcatgccataaacaccaaaaattatattaaaataattttacaacctcaaatttatggttttaaaaccactgtttcagtttagttaaaaccttggctattacatgattaggatatgtcatgtacctagggt

SEQ ID NO: 12287 - DNA, 557 bp, Gossypium hirsutum
catagatagtaggtttcaccaaccatataacacctaatgctgtcatcttcaagtcaatagacagaaccttcaaaacaatggtgaagataggaaatggccacttcattaaggcagaaagaaagggagatatgctaatagtcctacaagtaacaagctggtttcaaatgttctattggtgcctgacattaatagaaacttgcttagcatagctcagttgcttgaaaagggctatttagttgtgtttagaggcaatgagggtcaaattagtgatctcagtggatccaagttcatgacagtagctatcacagacaaaagctttgttatggactagaacaaaggcctagaccgtgcctatactatttcatcagatggattcaagctatggcaccaaaggcttggccatgccaactatagatcgatgactcaattggctaaagaggatttggttgaaagcttcattaactcagttgagaaagaagaagtttgtgaagtgtgtcagctaagaaagtaagccatgcaaccatttccttcaaacaaggtctggagagataaaaaaa

SEQ ID NO: 12288 - DNA, 530 bp, Gossypium hirsutum
  misc_feature (61)..(61): n is a, c, g, or t
actccgctctataaatcctatacattttcaagtttgccatgattttattatattgcctccnttgacgcttacttccgtgctttcatttgcatatagtgttgcttcattttgtattagaatatgcttagttgaatggaaaaggggaaggatgaaaagaggtgagtggaaaaaaaaataaattttgagtgtgcttggtaaaaagaaaaaataagagaaaagaaaataaggaatatgatcatttgccattcctaatgcataaaaacaaatcattgcaaattggaatgataagcggagtggaaatgaaaacggtgcaagttaagtgtgcatttcacaagattatgcatttttcatagaactttcttttctttcctcctatttttcaactctcccatgcaatggttgtaaagaattttttttttttcatttttccatctttcatatcttgtacaccaatggaaagaaaaaataaattttttatcccccctcgaatttttcatatttccgattctcattccactttaccaagcatc

SEQ ID NO: 12289 - DNA, 661 bp, Gossypium hirsutum
ctcgcaagaggggagatctctttcaagatgtccttggcacttgatccattccctataagcaccactatctgtcagccaaaacccagaatcatcttagcaacctatgtgttctcttggttgagatgtatggattgatgaaactaaaagttcatcaagttcagaaacatattaccaagtttgcagcttcatgtagaggactgcagagtgattataagtaaaaatactgcagattggttgtacttgtatatgattaaataccttattttcaaactgttcaggagtccggtagctatggctatgcatttgcaatcctggccaagcatccctgcctaatatatgacaaatatcattatagctaaagataagagttgagcattattgagaaagaatattcctggatttagaagcttttaaatagcaacagtgatgaaagtaatgcatatttattctatatttctgaagcaatttctttatttaataaagctgattcaatgatttccaatggcatcaaagaaatacctggaaattctgcaatttttggctccgtgtgtttaccattgcaaataaccactgcctcaaacagctcctctttcgattcccatctcgattcagtctctcgagtcacctccttcgattcccatctcgattcagtctctcgagt

SEQ ID NO: 12290 - DNA, 633 bp, Gossypium hirsutum
aaaaaaattgcgcggatggtgtaggaacccaagccatacaagtagatcatgtccaaatcgaaatagttgatagttgtcgaaaaaaactatgttgtattatttatattttattaaatgaaactatgttgtattacaattgtcttattcaaaagaacttttattttattaaatgaaacaatataaaaaaatttgtacaaatatattaaaaaaatcaatgtccgtggcggtcggaatcagtgccatatgggcgtcatcgacgggtccgtgctggattcctccttggatcagcttctgatgggggttgtggttcctctggcaggggatctggttatgggtgttgggagagtgacccgccttgatagaataatgactgtggtggtgtttgcatcacccatggcggaggtgtttaaatcccgtaaggtgatgaggattggtagaaaaaagagctccgtgatggtgcatcgtgcgatccctcatacgacgacgacctatagatcggtagttgactaggagtaatcgagaacgaagataaaccgggccattgattccaacatgccataggactaggaaaaggaaacatataagggttaggatacatataagggctaggatacgcacctagcataatcctga

SEQ ID NO: 12291 - DNA, 642 bp, Gossypium hirsutum
aagagacaaaggaagaagggatcgatggctaccgagaggatcacatgcttatttatactgcttcaatagggtgacactgatttttatatgattgaattatctatggcaatctgacacggcttttttagacagttttcctctgtgtttttttatgggacagtggaattatggggatctcttgtgttgggttgttgaatcatgggaacatgaactacgtcgatcattatccccaataatttatgatggacactatccacatgctcttattattattatttttctttaaagcaataatcacactatcagatctaagaaaaatgttgggttctaattaccaattactttgttttcaaaagtgatgcaatatttgttattgagccatgatgcaaggaaacaacataaatataaaaccaatatatcttgtcatgcatgaagtggaaagcaaagctcatattggggaatatatatatatatatataagagaggaaagataatattgagagagaaaaaatagagaagaaaactgatattgattttaagatgaagcaaataaatatatggtaattcatgaatccatgtttcattcagtcaaaagtcttcatggttattgaggaaaagacagaccaatgttgttcacattcc

SEQ ID NO: 12292 - DNA, 589 bp, Gossypium hirsutum
  misc_feature (18)..(18): n is a, c, g, or t
ttgtaataccacattttngagtgtaatcgtacactcattgaatggaaaatggaaagtatgagttttgagttttcatctctctagcaaagcattgacatttttaaaattggcaacatttatcaaattaaacaagattaattaatttagacaattaaataaactaatttttttaatattattaaattaaaaatttatttagcataaaaatatcgttaaatctattaaaaataaacaaattaaaaaataaattatcttattttacttgaaatctttgagatgatgaaaatcgaataatatcaagaaattgaatgaaaaaaaaaataagtgaagagaagaagaaattgagaggttagaatagaaaattaagagaaaaagagttgagataaaagataaatgaaattgaatgaaataaatgataagtggagagatttttattgggaaaattttgagagccgttgggtgcatttaatttttttttcaatttttagccgttggcccaacggttaaaaaatcaatggtctagattttaaaaacgtattttcctactaccacataaacaaaaacgtattttcctacatggcagccacaa

SEQ ID NO: 12293 - DNA, 374 bp, Gossypium hirsutum
acgcaaaagcataaacagtacacaacttactgtcaaaggcagactgatctgtatcggatgccttctcttgcgccggggatggagctgccgaacaaacattgttcatcgaacctaaaagaaaacccaaacccgaaataattcgatagctatggtttaacaatcgttagattaaacagtcaaatcttcggatcagcaatctttgacttagctaagatattacaatcacacatattgacaaacatttggtcctcaccattatgacactcaatcttgtgatgaatttgggtgtgactggcatccatcaccaactttaattatgcttatcaaatctaaatctttatcatttagcagcatatctcaatccgaaatcaaaa

SEQ ID NO: 12294 - DNA, 687 bp, Gossypium hirsutum
gttcatctttatatatttattcgttatttgttcggtaaaaaatgctttgtaaatttgttttgaaaggggttaaatttgttgcaagtggaacaacgaacttcggtttttttgctctgtaatacagtttcgctttacgtaattccggcgcgtgaacaacgccgaccgttttggtctattgtttaaggagtgatggccacgctccttgtttgtggtgtggaagttttacatctgattaacagactcggggtaacctcagttcagcgaattctgagtaatcggccgacgagtaataaaaaaggtcaaacgcatgaatcagcagcattccggaccaacatgtgttgaggtactcttctttgttttttttttccccattaatttcctcaatttccatttttgcccttttttcttaattaataaattattaattgatacttctcgattttatattttattactttattgcaaatttactcacggttaaattttactattagtttatatacttttgcaaagttatgagtttggtccttgtactttaatctgttcgtatttactccttatatctttcaaatttaaaaacttcaatctttatcggatgataattgttaaatttgtttagttatgtaatttcaaaattttgatgtggcaaacatattttcaattgtgcaatatcttgtccccttacaa

SEQ ID NO: 12295 - DNA, 641 bp, Gossypium hirsutum
atagggaaattttgttcaactgaatttttagcttaattcaatcagtcagtgtcagttcaaaggttaatctattcaactctatctctggtctgatacctcgatcggttctcaatccaaccaatctaatcggccaatttaattttggaaacactagttttgatcaatcaaagaacttatgcgatcctgtcaattcaagtaagcaagcagtgaagttcaaaaacggaattaatcgccaacgtctcaacattcaaaggggaaattttgagcattgttggcatttttagacataaaggaagaagaaataaataaaaaggaaaaataaaaaataaaaaggaaataatgtaaaagaaaaaagaaattaattttttttaaaaattttatatgacgtgatagtctattattggctagaactttaacagatacacaattttaaagtaaaatggtaatgaaagaatacattatataccacttgtgataaaaaaaaaagtttaggtaccaaggaaaaacaacataatttaggtattaatttctgggataagccttttttttttaaataaactcatggatttgacaaacaaatatacaatttaaaaaaaaaagtatttaaggacccatttgaaaaaaaaaaaaggaaaacaacc

SEQ ID NO: 12296 - DNA, 352 bp, Gossypium hirsutum
  misc_feature (19)..(20): n is a, c, g, or t
ataaaggtggggtttttannggctaactcaagttcaaattcatacaaaaaaaaacatataaaaccctaaatgttggaatcataatgttagttgctaaaatcaaagaaattcattctctataacttataagttgcatgaaaaacaaaaataatgtctttttctatttcttaaataaaatgggatcctttgggacatggaaagcatgaaaaacttgacaaactgataatttggaacaaatgtaaaaatcccactaaaaacattaaaatataaaaaaattttacaaggttgacagtggaaaaaaaaaaattgttaaatttacaaaaaaaagggaaaaaaattaaacttttttttt

SEQ ID NO: 12297 - DNA, 688 bp, Gossypium hirsutum
tcgtatcaggtttacccctatctctgagaaagaaagatgctatttgggttgtcattgatcgtctaatgaagtcatcacattttatttcggtatgtacagatttttctcttgagagactagctgagatatatgtctctgagattgtcagattgcagagagtgccaatttctattatttcagatagagatacatgatttacatcacagttttggagtaaactacaggaagctttaggtacatggctacacttcagtactacatttcatccacaaatagatggttagtctgagcgagtaattcagatactcgaagatatgcttcgttgttgtgcattagagttcaaaagtaattgggaaaaaaacttactattggttgagtttgcgtacaataacagttatcagtcaagtataaagatggcgccgtacgaagctttgtacggtcataaatgcaaaacccctttgtactggactaagcttactgagaaaaagatacaagaggtcaattatattcgagagattgaagaaaaagtgaaagtaatgatagtttgaaagtagctttagatcgacaaaagtcttatgcagatttgaaacgtaaagatattgaatttcaaattggcaacaaagtatttctgaaatattcaccttggaagagagttttttgtttcagtcataaagggaagctttagtcc

SEQ ID NO: 12298 - DNA, 550 bp, Gossypium hirsutum
aaagccctgcatgggatgcaaaatgagtgatgatgaaaattcgaaagggcaaagaacgttagtaggctgggtgagagagcaaatgggaagagccaaacagaatgaaacatggaagcatgaggtaatagattccaagcttgaaggtatatatgatgaggctgagatggtaattatggttaatgtagcacttcgttgtgttgaggaagataaagatgaaagacccacaatgggggaagtggtcgaaatgctgcttcaacatggaagccattgaaccacagattatgattatctccattagtaatgggaactatcatcaaattatgttaagacccttcttctacattgttgtaccccattagggattaatgtaaatatttgtaaactatgtttgtatctcaagactctaggtgcgggtcttggctattacatcccttccccaaatttgtatgcttgtaatggttaaaaaaaaaaaatttggttaaaaaaattggcaaaattttcctgaaccggccttttaatttttcaaaaaaacacttccaagaaaaaaaaa

SEQ ID NO: 12299 - DNA, 527 bp, Gossypium hirsutum
ctttcgttaagacccttaatttgatatcagtaaaccaccttagcaatgaagcagcttcgtgtatggtctcgaaatttgagcttcttgagaacctgaaaatcattggatgccatggattggaatccatgagcattgcttctaatacaaagcttttgagcttaaccatctttgattgtccacacttaaaatctctccatattagatcctataaacttaggacccttttgtatagagggaaatttccatggtttctgcctgagtttcatttcaaccttggaaatgccatgcttgattctcggcaaggacctgcttacaataccttcaaaacatgtgattttgatcgagtgctgctgaccatcaagaattctgaaattcttaccttgtgcaaatggacttttgaggtatgttatctctatttctccaattctagtttctagtcctaaccaataaaaaaaaactggggatttagcttaattgattcagacaatcattttcaaagggtgatagtttaaagactgaatccaggc

SEQ ID NO: 12300 - DNA, 640 bp, Gossypium hirsutum
taacggttctgtggattggggttcaaaaccttttaagttcagaaacgcgtggcttagcaataaagagtgtccgagcttaataagaaaggaataggatgttatgggtagcatgaatggtagaatatcggggaaattgatgaagttaaaaggagccattaaaaaatagagtgggcaagatagaaatatgttggaaaaaagaataaatgagattgaagagaggattaagatagtggatggtgaaaacgacaatagagagcttactaaaatggaattggaggagatgaaaagtttgaatcttgaacttggagaaataattaaatataaggaatcggtgtggagacaaaaatcaagaatgacttggctgaaagatggagactctaatacgactttttttatagggcggtaaagattaaagcaaagaggaatatggtgcatgggatgaaaattggtaattcttggtatagtgatcctaatgagttaaaagagaagatgattaattattttaaaaaacattttaattgtcctttgaggaaatggaaaatagatttggtcttgaatttcaagaggctgaatgaagtagaagctcgaaaacttgaagtgcctttttccatggaggaaatcaaggaagcggtgtggagct

SEQ ID NO: 12301 - DNA, 644 bp, Gossypium hirsutum
acttgatgtccaatcatacacataacaaaacaagtattacgcatgcgaatcgacatattcagattaccatgcaaacaagctaatttacttgctaatgcctcgtcaaatattcgaaacaaagatggacatgttttaaggcattcaatcatctcaaattgtttgcacaaaccatgaataaatcacgagtaataaatcaaatcgtaaacataattgtcacaagtaggtatttgaaaaggttcacatagttcacagagttgcacaatcataccatgcattaattgacggactatagattcactcacacatgcatcataaaaattatcaaaaacaataatctttttatcaaccatcaaaatagatagatcatcaataaataaaatacgacagtcaagcacgttctgattatagtgtgttacaaaaattaaatcatcaacatgatctttgtcactatccgaggagtacaaaagtgtttcaaaagtttcaagcatcttacctttataagcagaagaataagggtcgattttaccttttccatttaatacaaaccttcgttcatcgggggtatagtgtagttgaagctctgttgttgagttaacctttgtcaaatggaactcaaacttcatgtaagaccacagaaactgtta

SEQ ID NO: 12302 - DNA, 566 bp, Gossypium hirsutum
aatttttcttccagttgggctaattttccgactgatggtgtagggtcttattcaagttctcataccactatgcccgttctaacacataacatggatgtcttagccattctagatgaggctcgtgcaaatgaaggtgcttctgctgctcctcccagaaaaacagcaattaagaaaactcaaaaaagacctagggtggaatggagcaaccaagaaactaaagacaatgaacacccgcaactgacacagcatagactctgaaaagggcttactacacttggaacgaacacttcaatagttctcgcccttcctgcagctcctacccttccagtggagtccgcccactctatagacttccaagttcttgccactgatcctcccctctgaggttccaacagatacaatatgcccagaactgtcaatggctcattctagttctctaccacatgttgctttcactggcaaagcagatgaattcttcccttggcgtgacctattaaggctagagccatctcttattattaggtgccatcttctagcaataaaacaactttatgcctcagcaagat

SEQ ID NO: 12303 - DNA, 395 bp, Gossypium hirsutum
accagaaattgagcactgtcagtcacgcatcaatatatatataacattatgatataacattcacaaagcaagcttgatatttagtttagctgttaaatcagtcagtcacacatcaaaatagaacaaggacatgggagactatagtgtcaacgccatgatccacacgcaaattagccccgcgcgataaacaaatgtaacctcatgatgatgaagtaattaacgaagcaaccgggcattcacgcatgtgttacatataccgttggcgtggcgcacatcaataaatatttaaaaatttaaaaaatttctaaaattaaataaaattttaaaaattatttaaaacatatagaaaattattaaggtgcattcagtatttttccaccacaaagcaacgaaga

SEQ ID NO: 12304 - DNA, 528 bp, Gossypium hirsutum
gcatcgggatgatcaaaacacattccataataaaatctaagcattaaacacatggtacaacattacattaattatgaatactcactataataaaagcttttatttcatttcactttttcatattctaatccattcatcacaactaaattaacataccaatttaaacttcagccacaaacaacaataacattaacaacttgcttatttcatcatacgaacttacctcggctttgagtacaactacttattccgaattagtccataaccttgttcaacctcgttctaagctcgaatcttgttttccttgatctataatatcgcatttagcttactaattagtcacattattcatatgggtcaaaaaatcatatttttaaaaattttcattttgcccccttaaactttcacatatttcgtaaaatgatttttattcaattttctcattctataggcctagccgaaccattttcataactatagaaactacaattctcatcatagcacacttatctcatcatagcacactta

SEQ ID NO: 12305 - DNA, 566 bp, Gossypium hirsutum
aaaaaccttgaatgggatcggcaaccgcaccaccttctaccctctcggtggactctgacctgcaaaactgccggtgtttccctttgtcaaaaattatacaagtacaggaaaaaagacagcacagaagagaatcccgtaactattattaacagggtgcagtgcagccctctaaaatgtctacaaaattcataatcacaaatgttcatatactaaaaataataaaatattcacagaggtgaaaatggtgagaacaggaacattgttaccctctgaagcatcatctggttaaagagatttataagttcaaacaactaacaaacaaaaagtttatgcacttcataaaaaactacctgaaatgttgatcaaaatcttcattagtggaattttcttgacatagcaatttgctttcttgcataggatgaccatgttgttgggtgttaccttgctcagacccatgactggtgtcagcattatcctccacgttttgtctattatgggaatctgtctccatctttttatcacagcatggagactcgacattaagatcagagaccaaatcaaatcct

SEQ ID NO: 12306 - DNA, 595 bp, Gossypium hirsutum
tttaatacatattactagcagcccatattttcaatttattcatactttcaaccacataattttacattttcacaaattaatccctttctgacattttcgtaaaaaattactttacagaactagtttaactatcaaaagttattcaaaatccatcattaactatcaaattactcaagcattcaataatgaaaacatgagaaatctttagaaatttcaaaatctaaggtacgggctagctagaatacgaagcaacgatctcaaaaatgtagaaatcataaaaaaactgagtcaaaatcacttaccaatttaacttttagagaccgaaccctagatgagcaaaatttttttctttttcttctttagattcggctaagtgaagatgacaatgaaaaaaaacagggttttttgttttaattgttttatcatttattaaccatttaccattttaaccttaaaattaattcaaaatttcatttatgccaaaccattaacatccaatagaaatggtatatttaccacttaaggacctttaatttaatgttctatagctatttgacacttttagctagtagaacacaagttttgtcctttacgt

SEQ ID NO: 12307 - DNA, 670 bp, Gossypium hirsutum
gagcacacacaaagagtacatttttagccaagtcaatttttaatagaaattagttacaattgatgaacggttttgtaacgccctaaatttttagtttttgaattattaaaaattgtcaacatgattaatttggtttactggttaagtgttgtacttatgtacgtgaggttttgggtttgaattttttccttgaagttttgttaattttgccccaacccttatttgtggatattaaggttaaaaattattttcgctcaactaatgacaagaatgagcttgttggttcaatagtaaggcttctcttacccagtgatctggtgtttgagttcttgtgtgtgtgaaatggggatatttttgcacttttcttacttgtgcttcccataaggtggaagttgggaagatttcaaattttaaggtttaatctgataggatgacagtaaatctgataagttgagattcgattttattttaattctttttaaaaaatttttcctaaaatctctccacaatcgtccacttattttcccactctcctcattgttttggtttttacattggttattggtaaatgttctcaaacttattttcctttcttttttccaaattattccttctgatttctcattattctctttaacatcgaaatttcgttggtgggtatatttaaaaa

SEQ ID NO: 12308 - DNA, 639 bp, Gossypium hirsutum
cagattcaatacggagcaactcaccattctgacattttaatacaatatacttctgtttacaatttaccactacatcatgctgagttagccaatccatacccagaattacatcaagttcataaaatggcaacaacatcaaattagtcggaaaaaaaaaccccgtataatcaacggacagtttttacaaattttatccaccatcacatactgacctagggggtttgaaactttaaccacgaattcagtggcctcgacaggtaaatttttaatagatactaaatttgtgcaaatgtatgaaagtgttgaaccaggaccaatcaaagcagtaatattagtatcaagaagagaaatagtaccattttgccattatatttttaattaattacaatttcgtccctaggctcgaaaaatgaaattcacgcaatttaatccttattccaagcttagccagatttttcatataacaatagcagtccatgtatttcacaaaaattataaattttccatgaattttacatcttttcaatttagtccctaaatcacaatttcatgaaaatttcctttacaaaagttgtttatctatcaacaacctttcattttctaccataaatttcaaaatttcagcatactcatccatca

SEQ ID NO: 12309 - DNA, 477 bp, Gossypium hirsutum
tttctctttgcttcattgctgctctgttgcttcagaaatgtttcagtcagaaagtctggaattttgtaaaacaagtgaagcaaatgctgggattttgtagtaagcaatgaaagtgaaactcccttacctgcaagtcccatggaggagaaaaatagaccccttgttggaaaggaagtattacttgggttgttctagatcctgcaaaaatttgaaccataagcgtataaaaaaagttcataacagccaacccaagtatgcaacattgtttagaaagcaacatagaagagaatatatccctgatatataaatacaatattcgagtataagggggcagactttttaccttgtattgcatgcgctgcaaggaagaaggtgaagaatagcatgtgtaagcagcttagattaaggttggccattgtagcctttgtattgtaaagttagaaggtgaatatatacgggatgaagttgtaaggcaaa

SEQ ID NO: 12310 - DNA, 571 bp, Gossypium hirsutum
gaaatttaaattggagtctcctcaaatagtgtagatttaatttgggagatttcggcacaaaattcaacccacaaaatattttttttattttttcacttttttgatctttttttttgtggcaaatctttttttatattctaaaagagtaccaagaatcagtctgtaatgacccaaaattcacgggcatcggaaaagtacattaacgggcctctgtcttagtaaatcgagttcgaaataattactagaaatatttatgagtttagcgatgtgtttaattaggtttaaattaggtgaatttagcttaattaagagtaattaggaaaaatgactaaattgaataaaggatgaaagttaaattgtagattaaaagaaaatgaagaggaccaaaatggcaattatgccatttgtcctaagtgaggcggcataagcataaaaatctaagatttttatgtgttaaaatatatattaaattattattattaaaagtaaagtaaataaaaaggaaataaaggaaagaaacaaaagaataaaaagaaggaaggaaacaaaatagcacgaaacgaaacaaaga

SEQ ID NO: 12311 - DNA, 651 bp, Gossypium hirsutum
atgttccagtgtttattatagatattttatgaaaaatattatcttagagtttgttttcgcagtttgtaatcttgctatggtttgaagtctaccctaactagagagtttcagtacaattttaccacctaaagtagtctcagtaataacatttcaatataatctttcccgtacaaaaaaatcagaagacttacaggatcggcgcggagactcggtgtactactcattcagtaaaacatttccaaattattcccaccactttaaaccattaaaacaattccgttaaaattttcacattcttacaaaagcttaaaatccacagctgagttttgaactcagctttgataccactaaatgtaacaccctaaacccagcctagacgttatggccaaatctatgattcaaattggagtgtgcttgagaagcgtagttccgtttaaaaagtctgttttatgataaaacctcgttatgattttgataagtgaaggtatcttgttcattgttaaaactccagttggtttagtaaaacgtaagtatttttagatcgtgattacctttttttgagaaaaaatagtgtttattgcgaaagctttttaaatcaagttgcgtaagcgtgacagttgaaaatcatttatcttttgaaaacttgagacc

SEQ ID NO: 12312 - DNA, 595 bp, Gossypium hirsutum
catccaaaagtatccattccgccataggctttggtcccctatttgtttggctcgcactggctcaccgctaactcatctcttcttcgcagatgatttgatcttatttggacgtgctgaagaacatcaagctgggtcatcaaagacattcttgataagttctgtgaatattcgggatatcggattaatatgtggaaaacaaatatcttcttttttaaaagcattgatggtagcttaaagagatgtataagcggatactttggatgtcaagaagtacgaaacttagggtcttaccttagatgccccaattccatgagaaggtcactaataacactctgcattttgttgttgacaaggtgcatagtaaactgtctatttgggacgttagacaactctctttagttggtaggtgactttggctcaatcgattttgctttcaatttcaagctattttatgcagacaatgatggttcctaaaggcttgtgtgatgagattgagcgaccaattaggaagatagtatgggggtcctataatggtggtaaagcggtaagttgagactcggtgtgtcaacctaaatcgcacaaaggtcttggtctg

SEQ ID NO: 12313 - DNA, 667 bp, Gossypium hirsutum
gaatggaccaattcaaatacatagactaaatccacagcttttgtgaagtataaggactaatagcataatttaacctatataaaatgctcagctactgttatatcaccctattttaaattagggataaatatcaaatttatcaatgaactttgctccaatgtgcaatttgatacatgaactttgatttgatgtagttatacacatgaaatttgaattgtgattcacatgtatatgtgaagcattgattttaattcaattgtgcacatttaaaaagtgaatacatacatttatttttatattagattaatataattatttgtgtatgcaatatatcaacataaaatagtgctaatttaataatgttatcaaaattttgtgaaaattgaatcaagataaaatttaatggacaaaatcgtacaaaatcaaaatttatgcatgacattgcacattaagtcaaagtttatatataatttttatatttataattttaaattataaatattaatatgacgacatctctatattttcatacttttataatatctttaaataaaataattataacttataaatccaagcattgaacatatgtttagtagtattaaaatacaacctcattatcactcaacccatgttaattgttgaatgagttggtgtcgaagaattg

SEQ ID NO: 12314 - DNA, 544 bp, Gossypium hirsutum
gggtttgtgaggccgaaccatcggatttccgtcccttttataggaccaaatacggcgtcgttttgggcctgattcagtggctccaaaaatggcatcgtttagcttaaacgacccgacccgattcttaaccctcaggacccgcttgtttccacagtgaagggttatttgcgcaaaaagtcctccccttttgcatgcgcagtcgattgcgtcccatttgctttattttctcttttgatttggccctgtaatttacattcgtttgcaatctaattcgggcctaaacgcaacgttttgggatctggtacattgccagttttagtccctatacgttttcgcgcattgaatattgatccttttattattgttgctttatcttcaaattatccctcttgttttagattaattctaattaaatccttttagtttataacttttattcctaattacttatttatagaattgttttgaagattttttttgttaatatttcgtatttcttattttttttctatatgtatatttgtacatgcataacttcgctttg

SEQ ID NO: 12315 - DNA, 364 bp, Gossypium hirsutum
ttgacaaattattttttttttcatgtgaatttggtagataataatatttcactatttttaaaatgtttaactttaaatttaatgcattttcttaattttatcttaattttaaatttttaaaaattttaaaaattaaaaattattaaatgtttgaaaaaaaaaacatagaaattaaaatttggcgggtgaaacaaaaacatgaaatggatcgatacaagggtagtatttcagggaaggaggcactaacaatttcagggttctagataaaattctccccccctttttcttaggttatcaaaggttaaatttttatattgaacttaaacaaataaacttttatagtgcatcatccattgcttataaa

SEQ ID NO: 12316 - DNA, 612 bp, Gossypium hirsutum
  misc_feature (552)..(552): n is a, c, g, or t
tttttatttacatttgtctattgcaatttgataacagttattagccaccacatttagaacatattgccaatgcaaaccaacggccaaaaaaagttaacaaatgtgcaatgcaaaaaaacaaatcttggtcaacaaaacagcagttaatgcatctatttcatagtcgtaacgttttagatatgagcaagtatcatgtaacccttgcaatttaattcaaatgattgaagacataaacaattaaactaaaacaggattaacatagacaaaaaaaaataaagctttaactcaaatcattactagtccaaaattaatgctaccttgttatcttcatcagagaaatttttcaagcaatactggattacacgatgaccattcaagtccttcgacaatgcaacaacttcaatgcttagagctaacataaacaacgagatcttttgttgagtagtaagtttctccaacaatttttgtatagcacgagccctgccaccgaatgaaaatatatttgtattttatttattaaacacaaaacaacttcttaaggagaaaaaaaanaaaaaaaacaaaaataaaacaaaaccgaatcaaccaacatacccatgaagatgagacaat

SEQ ID NO: 12317 - DNA, 689 bp, Gossypium hirsutum
tcccatgcttgtcatatttatggatgatttatctttggttttattgaattcgatgtttctaatcctttaatttcatgttttatactcaagagagcataggatagtgaaaagagaaagaaacgggccaaaaacggacaaaataggctaatttcagtgttccacacggcctaagcacttccacacgggtaatccacacggccgtgttagacacacgggctggccacatgcccgtgtgtcatggccgtgtcaacttaaaaccatgtcagaattacacacggcctgagcaccattacacgggcgtgtcacactgccgtgtcccagtcggaacctattttaattctactaggaaaaggctaatttttgaatattttgggcattccaaagtctacttaaacaaaggagaagaggatcaaatgggggacggagagtagaaggcagagaatacttgaagacagccaacggaatcagctcggaagcaggatctacttcaagcctgaaaatctccattcaatttccttagaagttctttgggtccgtgtccctgtcagaacctattttaattctactaagaaaaggctaatttttgaatattttgggcattccaaagtctacttaaacaaaggagaagaggatcaaataggggacggagagtagaaggcagagaatactcgaaagatagccaacggaat

SEQ ID NO: 12318 - DNA, 496 bp, Gossypium hirsutum
cttttatattggtggccaagaatgaaaagagatatttctaattttgtttctaaatgtttgatctttcaacaagttaaagctaaacatcaggtgccatcaggtttattgcaaccgattatgattccgaaatggaaatgggatcgagtgaccatggattttgtttcgggtttgcccttgtctccgagaaagaaagatgcaatttgggttgtagttgacagattaacgaagtaagctcattttattccaatgcgatctaatttttcacttgataagttagctgagctttatatttctgatattgtgagactgcatagtgtaccattgtcgattgtgtcaaatagggatccgagatttacatcgcgattctggaagaaattgcaagatgctctgggtactaaattgcatttcagcactacttttcatccacaaacagatggtcaatctgagcggattattcagatactcgaggatatgttgagatgttgcattcttgagt

SEQ ID NO: 12319 - DNA, 510 bp, Gossypium hirsutum
gttacgtacgaatttaaaccggggaaaagataaagtattgaattaagcgaccgttatctctgtgcgaatttgaggtaagttctggactcgaacttaattttatttcaattacgatttaaattatttaatactaaattagctcttgttataaaatgtatgcatattatggaattaatgctaaggaaaaatgaatgaggaatttatcgaagtaattaattgtacaatcgttgatatattcaactagcgttgagcgcaatctttgtcagcttatctgactagtgctgggtacacaattgttggtttatccgactagcactgggcgcaattatcgttggtttatccaactagcgctaagcgcaattatcgttagtttatccaactagagctgggcctacaattattatcgtcgatatattcaactagcactaggtgcaaatatcgttggtttatccaactaggctgggctcacaattattatcatcggtatatccgactagtactgggtgcaaa

SEQ ID NO: 12320 - DNA, 782 bp, Gossypium hirsutum
  misc_feature (456)..(458): n is a, c, g, or t
  misc_feature (464)..(466): n is a, c, g, or t
  misc_feature (493)..(493): n is a, c, g, or t
  misc_feature (500)..(522): n is a, c, g, or t
  misc_feature (524)..(532): n is a, c, g, or t
  misc_feature (544)..(555): n is a, c, g, or t
  misc_feature (557)..(560): n is a, c, g, or t
  misc_feature (563)..(564): n is a, c, g, or t
  misc_feature (572)..(578): n is a, c, g, or t
  misc_feature (581)..(585): n is a, c, g, or t
  misc_feature (588)..(594): n is a, c, g, or t
  misc_feature (596)..(599): n is a, c, g, or t
  misc_feature (606)..(607): n is a, c, g, or t
  misc_feature (615)..(622): n is a, c, g, or t
  misc_feature (647)..(654): n is a, c, g, or t
  misc_feature (656)..(656): n is a, c, g, or t
  misc_feature (667)..(668): n is a, c, g, or t
  misc_feature (670)..(674): n is a, c, g, or t
  misc_feature (677)..(681): n is a, c, g, or t
  misc_feature (685)..(686): n is a, c, g, or t
  misc_feature (688)..(688): n is a, c, g, or t
  misc_feature (694)..(697): n is a, c, g, or t
  misc_feature (716)..(718): n is a, c, g, or t
  misc_feature (740)..(740): n is a, c, g, or t
  misc_feature (763)..(765): n is a, c, g, or t
  misc_feature (774)..(776): n is a, c, g, or t
  misc_feature (778)..(779): n is a, c, g, or t
attgctttggtaaatcgtgttctaatactagcaattataagaacaagaaataaaattcaaaatttgaaatccaaaaaattacaacggctttactacaacccacataaaataatttaaaggtaataatcaaaactgtaacataaacagtgtgtgtggcttcctccgagcccctagcaaccccgatccatctaaggctggaaattacctgaaaggttaataaacagggtgagtttacgaaaactcagtgtgaaatcccctactataaaaaggaacagtcagtcatctaaaagaattaaaagtctggccccagccttacttacaatttcagtaccaatcgggtcttagcccattacaacagacagtaccagatggaccttagcccattacagaataagaaacattatcagaattagaaccaaaatgagaatcggaatcagaatcaatagcagaaacatnnnttgtannnggtgtctgtattcggcccactatgtcncctggannnnnnnnnnnnnnnnnnnnnnngnnnnnnnnnccctgtcccttnnnnnnnnnnnntnnnnctnncacccccnnnnnnncgnnnnnctnnnnnnncnnnntttcttnnttgtctcnnnnnnnntttttttacccccctttcccccccnnnnnnnntntcccctttttnncnnnnnccnnnnncctnncnttttcnnnntctttttttttttttttcnnnctttttttttctccccccctcnccccttttttttccccccccccnnntccccctcnnntnnctt

SEQ ID NO: 12321 - DNA, 694 bp, Gossypium hirsutum
ttagctctcaacccactttctcctataactttcattcacttaattgtcacctagaatttctgtgcaaaaatcatgaaaattaagtcacatccatattttctaatgaaagttttaatcctatttcttattgatttgaaagcaacgtgatgaagcttaatgaaagagaaataaataaattaagatagtatttggagaatcatttagtaattagatttagtgtgattgtgtgtaattacacagtgatatcatgtttggataatcactgtaattaagggtctcactgaattggatgttattagagcacctcaaatataatttccaattcttagggggaattgtgagaattggagtaattatgttcataactataaacaaatccacttaccttgttactttccaaacactcataatgattgaactttaagaaattattttttatccaagtttaagttataaaaattatatataaggttataataaaaaatttatattataagttttaaaaaaaaattattcaacttgcaaattttttaatttgaaatattcaaggctttaaaatgtggttgaaaatgtatttgttattttataaaaggttttcatattaacaacatcaattcaatataacataaaaatacataattgaatcgtactagcatattgcatttgtcataaccctgtttgttagtcgaattgg

SEQ ID NO: 12322 - DNA, 461 bp, Gossypium hirsutum
atatttgagcctatgcactccttcattatcatttttgtcatgtttaatccttaattgtaagttgagttccaatggatcataccctatttgagtggtaatcatcaatgtaatgaaacaaatgtttaataatagcaatcagaatatgtaatgtaattctaataacaagttcataaaacaatgtagctgactaaaatatgcagaaacgtaaatttgttctttaattagtaagataagaaaccgataaattgataaaccaattattgcaaaacattcaaatatatgcatattgatgcctaacccagagaaacaatcatttctaatggatatcatacaacgaatgtatgaaatatcatgatgtccatgatcttaaaatttcatgattcctctacttcaaaacaaacctcacagtatcatgctattcagtattggatttatatagctaatttgatatcagctcgatg

SEQ ID NO: 12323 - DNA, 734 bp, Gossypium hirsutum
  misc_feature (453)..(454): n is a, c, g, or t
  misc_feature (456)..(457): n is a, c, g, or t
  misc_feature (476)..(481): n is a, c, g, or t
  misc_feature (490)..(490): n is a, c, g, or t
  misc_feature (492)..(495): n is a, c, g, or t
  misc_feature (517)..(519): n is a, c, g, or t
  misc_feature (521)..(523): n is a, c, g, or t
  misc_feature (526)..(527): n is a, c, g, or t
  misc_feature (530)..(536): n is a, c, g, or t
  misc_feature (540)..(540): n is a, c, g, or t
  misc_feature (542)..(542): n is a, c, g, or t
  misc_feature (556)..(557): n is a, c, g, or t
  misc_feature (563)..(565): n is a, c, g, or t
  misc_feature (567)..(567): n is a, c, g, or t
  misc_feature (569)..(569): n is a, c, g, or t
  misc_feature (574)..(578): n is a, c, g, or t
  misc_feature (581)..(591): n is a, c, g, or t
  misc_feature (593)..(607): n is a, c, g, or t
  misc_feature (614)..(617): n is a, c, g, or t
  misc_feature (622)..(622): n is a, c, g, or t
  misc_feature (626)..(630): n is a, c, g, or t
  misc_feature (644)..(647): n is a, c, g, or t
  misc_feature (649)..(658): n is a, c, g, or t
  misc_feature (663)..(664): n is a, c, g, or t
  misc_feature (666)..(687): n is a, c, g, or t
  misc_feature (697)..(710): n is a, c, g, or t
  misc_feature (712)..(713): n is a, c, g, or t
  misc_feature (715)..(717): n is a, c, g, or t
  misc_feature (721)..(727): n is a, c, g, or t
gatgcaactcaactttcctaattggaggcaatccgagcaactttctggaaatacatctggatattcacatactactggtactgactcaaattccaaatcaaactccttcgtattaaacacaaaggcaagatatgcttcataaccttttcttatatatctctgagcagttatagaagaaattactataggcaaactatttgattcattcgattctacccgaaggatatcaccactttcacatttcaactcaataattttcttgccacagtctaccacgacatcatgcatggttaaccaatccataccaagtgttatatcaaattcatcaaaaggaaaaaccatgagattagccagaaaataatgacctctaattattaaagggcaattcctacatacttggtcaactatcacatgcttgcctagagggtttgacaatttaaaaaaaaaagaagnncnntgtcctttggctaattagnnnnnnccctcgctngnnnncttttttctttttcctggcctnnncnnnatnntgnnnnnnnggtntnggggtgtgtggggnnatgtgnnngncngttgnnnnntcnnnnnnnnnnnannnnnnnnnnnnnnnatgggtnnnntgaanagtnnnnntggggtcaagttcnnnnannnnnnnnnngaaanntnnnnnnnnnnnnnnnnnnnnnncttgtttttnnnnnnnnnnnnnngnnannngcgnnnnnnnttttttt

SEQ ID NO: 12324 - DNA, 544 bp, Gossypium hirsutum
aaaatgaaaacaaaaaaaacgaaaaagtattaaattaaaagtctcgaacaggaatttcttggatcttcaaaaggaagactttgtaaatttccatatgagtaatcatatgtattatgaatcattcaaataggtattccttgctcaagagatttctacgtatatcatatatatatcacatcacactatatcacaagacttgtgataagagaacaaaattctgctatgctaggatacgcttgcaaaacggcaaagaataggatgaatgagaaacatgaggaactttgaaccactaacaaaaagggtaggataaaataaatagacagcaaacgggctttttggggttggggatagagggacttgaaccctcacgatttttaaagtcgacggattttcctcttactataaatttcattgttgtcggtattgatattgacatgtagaacgggactctatctttattctcgtccgattaatcagtttttcaaaagatttatcagactatggagtgaatgatttgattaatgactattctattcgattcttt

SEQ ID NO: 12325 - DNA, 600 bp, Gossypium hirsutum
gtctaagcatgttgcatggagattttgtgtattttgttttttatgcaagtaggactaatttgtaaaagtatgaaatatcaggggtaaaatggtaaattacccatttatgtgttgttggaatgagattaatttgaaattgtatagatcaagaacaaaagaaattggacttggattaggggaaagtaaaaacagtcaaatagtcgatttacatcgttagtcgatatccgaggtaagtctttaagcaattaaaaattgttaatttttttgaatgtaacttaatttaatatgctgatttggaattcatagatttatagtaaagttagccgaatatgattaagcatggaaataatgtatttgagtttaattcgactgagttataacatttgaaagtccatatgaactatatggaatatctgaaattttcgatgcatgaattgttatgagacagctttataatagtgatattcaggctttgagcctagcaagccttgtgctggtaaatgtaatcaggctttatgcctagcagacttatttcggtgtataaaaatcagactttgagcctagcaggccttgtgccggtgtgagatacaggtttagacc

SEQ ID NO: 12326 - DNA, 666 bp, Gossypium hirsutum
tacatcaggtgctctcattcttaaaggacttgtttttataccagtagttttttgaagatattgaacttccattaaaagggcaattgagattcaacttctcctttattagtttgtcatctagtattatttttttattgcattaatagattctaaataatattcgtcaaaccattcaaagaattttatatggattctatgggtattcatgaatttataatattcttgaagaatgttctcttttttattattataaattttaaagtaattttctctttttgtttatttttgttggaatagaagtatttcctacaccattttttttattgatcttaaaatatttttctaggacaaaaatttctgaattttctcattgtcttacattattagtcattgatgagtatgttggtgacatattaggcgaattttgggggctctctttctgtctggcatagataagttgagttttatttaaggaattttctattccttgtaaattggtccaaaatcttgtcaagatagaagagataaaggctttagcttttctaaaatctattattagtgtttcgatatttgattcttcttctaaatttaacctcctgaaagttgtgattgtgcttcctatttcaaaggaatgtcttggaggcattctaagtggtctgttgaaaa

SEQ ID NO: 12327 - DNA, 468 bp, Gossypium hirsutum
gttagcaagtttttggtccaactaatttggttcggtttagataatattgaatttttatatttttatatttttaaaatattaaaaaaaaatttgaattttaagaagtttttttcatatttctttttttaaataaatttcttttttttatgtttttgtttaaaatatgaaaaaaataaaaaaaattatgtacttttaaagggcatggaccaaattgacaaaaaattataaatgtttagggctaaaaaagttattttacctttttttatacgtcattaactttaacaaaaaaaattagatggagagaccactatttcaaaataaataaataaaaagtacatggaccctatctcaaaattaaagcataaaggttaaatttaaaatttcaaaagagtataggaacttttgacatatttaaaccttatttttcccactcaattagtcattatacttttcgaaatggtcaattcc

SEQ ID NO: 12328 - DNA, 474 bp, Gossypium hirsutum
ttttttctaccatggaatgtctccttaactatttaacattgtccttcaggatcatgacctcactgagatcggtgaaagaggtgtgaacataagtggtgggcagaaacagagagtttccatggctagagctgtctattccaattcagatgtgtacatatttgatgaccctttaagtgcccttgatgctcatgttgcagaacaggtaacttgtttactctgattaatgcaatttctttcacattctacctggaagcatgaaggtttgcgtcaaaccgatatgaatctagggcttctgttggatacaagaaaactaagtgaggctaaatgttctggttaataaggtcaaaaaggtgaacatagccaaagaattttagtttttgtgtgagatttgataggtttagaagttgaggtgaagaaatgagatttacctaggtgaagaaataagagcagcggtgctgaaatcttatatgagga

SEQ ID NO: 12329 - DNA, 684 bp, Gossypium hirsutum
ttggcacaaaggctaaagaggaaaaagtaacaactacagatctttaaattacattagtggaaaatttttatggtagaaaagtaataaaataattatttaattatttacttttgtttttttatttatcagatattaaatggttaacgggagaatgatgttttaactttttaaaattagtataatagtaattttaattcttaatatttataaattgtgtcaatttaattttaattctaaaatatttaacctataatatttatacatagtataatttagtttttctttctgtgactcttttacttaaaaagttaaaaaaaagttatatttttattcttttaaaaataacccttaatgccaaaaacataaaataaaactgtaaaagaaaatttaaattatacaatgtgtaaaatttgaagattaatttttttagaatcaatattgaattgacacaatatatacatgttaaaggttaaagttgttattatgttaattttaaaaaattatcaagtcatctttctgttagtgtttgataaaaaaaattttaaatagttaaataatattttgtaacttttcttggttaagtggtcagaaaaataataattataattaaataactactaatataattaatatttttgttttgatattttaatttgggttaggtgctttctaaatgttatttcg

SEQ ID NO: 12330 - DNA, 690 bp, Gossypium hirsutum
aaatcgggtttcttcttctagttaaactctgctatcttttcccacttaaattttgattactctatggatattttagtatgattagatctctaatcttctctaccttttttctattttgttgtttatatgggtcgatccccaataaatagttgagatttatttttattagttcaatgactaagattactttagatcatatagaattaaactaataaaaatctcaaacaaggtacacctaaagcttaaaaaagtaggcgacctaaaacaatcaaactctatcaagaattatgtagcagttaaagagtacaccacttggaaagtaaattaacttttagcccctaacatactgtcaagaaggaccttacacaacccatattgcaaggtcgagaaaacaataatttgtgttggaaaatatactactacaaaacaaatttgttagcactgattggaaatataaatcaagaattaagaaatcaaaatttactgcaccatggaaaaacaacctctttagaaatgaattcgccctaatcggtgtaattgcgtagtggacgtcatccctcaaggttaacatagtgcttcaatattcatatacccgaataaggaaggtagaacataattggtattgcttttcttagggaaattacattaggattaattcccaggaaagtttaaagggatcacagctggtca

SEQ ID NO: 12331 - DNA, 568 bp, Gossypium hirsutum
ttacaatggaattctcttttttctttcatcgaaaaaagaaaaagagaaaatatagagagcgtctattagacccagatcactaaataatccaattaccacccttcttttttttttcggaaaagttcaaaaatactatgagggctccgtggctttatatatttatttcgtcggggattcagcaatcccaaagtttctttttttttcaaaaaaaaaaaaaaaaaaaaaagcctttttttttcgaaccctttttttttataacaaaaatatggtaaaaaaaatggtaaaaacccccgggggggaaaaaaaaaaaagttggggacgtggaaaggggcccccaaaagcaaaaaaaaaatgggaaaggccctttcccccaaacaactctttcaaaacaaaaccaaggggttggaaaaaaaaaaaaatcaaaaaaaatttttttttcaattccaaggggccgggtttttttacttaacaatttcattttccaagggggaaggggggggctttttttttttttcccttcaaaaaaaaaaaccccttgggccccaaggggggggaagggtaaaacttt

SEQ ID NO: 12332 - DNA, 650 bp, Gossypium hirsutum
gaagtgatataagtctgcaaacccctcgtgtccgactccggcgacggactcgggtacggggtgttacacattttcttcaataaaatttcagcaaatatcataaattctctcatgatgaatttctaagctttcaaccattttacaaaatagtcccctcaatagatagctcatgctacaagggttctaaaagtaccaaaatcataaaaaataaccatctaaatcacttacttgagagaggaataagtggctaaaagttttaagctcccatggctacttcttgaaggaaaaatcggtggaaaaaggaaaagtaaaatgatgactatttttctctttattttatttatttagtcaaatacatcacctaatgccaacaacccttgatttttttgactttttttgtctcaatggccggttatgccttaaatattggcctatttgcacattaaatacccctaatttataatccatgccatctaatgccatttgctagcaaatcacaactttttctctttatgcaatttagtcccttttcaaaattaagcttccaatcgctaaaattaattgtccaaaattttcatgcactcatataattatgctaacacataaaataatattaaaaataatttcttgacctcagatttgtgatttcg

SEQ ID NO: 12333 - DNA, 637 bp, Gossypium hirsutum
acctttcaatagccttgagcaatcccattcaatgataaaattgtgtcatccattacaattaataataccaaatgtcgaaaccattgtttatttttttaaaaaaagcaagtcgatttaaaaatgaaaaattgagagtcaccaccaattttttattgatgtgtgattagatcacctaaaaacggctttggtccacgagttttagaaaacggatccgggagtcggttacgtacgaggaaggattagcaccctcgtaatgcccaaaaattggtacctagttgattaattagtgtcttaatgttgagagttaaaaaatatgatccttagtagaaactttaaaaatgcgttacttatttagacctttctcatttcggaaaaagaaaatgtcacacccaatgcgttagggcacgatattctacttctccaaaaatgagtttatccaaaattctcgtgtaataaaatttaaaagaatattcatttgtttaggatttataaagaaatcgcggcccaatacattagggcacaatttcacaaaattctaagcattgaatatttcctttattattttttagaaaaatccttatctcgagaaatcaacgcgtcacatccaatacgttaggacacaacatgttgaattccc

SEQ ID NO: 12334 - DNA, 458 bp, Gossypium hirsutum
  misc_feature (425)..(425): n is a, c, g, or t
cattacagataagcataaagaaggggcactctcctgtgatgtgaccgagttaagaagcaaacgaacgctaggtgaaaagtatgactccctatctttctatcactgaacttttataataaaaaaaaaaaaaaactaaaaaagggcccccccttttccgaaggtccggggcctaaaaaataccaatccagctaacccttatggatggtaaagggattccactcccgttcaattgggttttctctttttttttttttttttgggggggggggggggggttaaaattaaaattaacccctttcctaaaaattctttttaaaaaagtaaaaaaaaaaaaataaggttttttttttccttcaccaaccccattttttttttttccccaaaaaaaaaaaaaaaccaaaagggggaaaaaaaattttttttanggggaggttgggggcccccccaaaccagggttt

SEQ ID NO: 12335 - DNA, 505 bp, Gossypium hirsutum
  misc_feature (502)..(502): n is a, c, g, or t
gtggcggaatgggctataatgcatacagtggatatgtggcatagtctaggaatatgcctttcgagtctctattaaataaacttccatcttgtagataattgcacccagttggatgtaacaacttattttaatatacttcctttgttttcaaatagtaagattttcaattaaaatgtcaaataaaataattagagaaatgggaaaattgtaaactgtattgttaaaatgttaagtatattatatggtaacacttaaaattcagacctagcaaatcggatcgagtttagggcattacatagctggcgtgagtactcttaataatttataaaaatagttctcattgcgaaacaaaggaaacactagcagataacgctaaatggcggaaataatagatccaacgaagtagggcgatgaaggtatctcgacaaaagtatctccagcaaagtatatgtaacactaatataatctatatttacacatcattggtacccgacattgtaantga

SEQ ID NO: 12336 - DNA, 441 bp, Gossypium hirsutum
tccgcttctttattcatccacatcattcttcatcatttggtgtcagatttgggtgttttgagtgttcacagttgatttccaaactgatttccattgcaaaacaacctataagcagtttttacccataatttgtttcgaaaaaaatatttttgagtggataaactttttcaattgatctgaaattttatatattgattcttggtactgtattacaatataaaaaaaatatttcccatgaaaaaatgataaaaagtacagaaaaataaaatacgaaaagaaaagaaaaattaaaaaaaattccacaatttgaattttttgccgaaactttccaatttagatttacattatttgagtaggctccaatttaaattttgtgatttttggaaatcgggaatacctcaaacgaagtttgtcaagttgcttcacaattttttgggtctt

SEQ ID NO: 12337 - DNA, 410 bp, Gossypium hirsutum
tcgttagaaaagaaacctatttctttcttttattaaaaaaaaattaaacaaaataagagttttgaaatggaaaagaaagagggtagaaacagtaggcagtaggtagccaagcctttcaacttttttttgaagtaaatgaaaaagtgtaaaactgtagagaagctttgactacccaacgttgaaaaagaagaaagggagagagagttgggagtttgattgattttgcatattttttgtcgttcttgtcttttatccctttgtgaaccatcatgttgctcctcctgaatctgaagtgaatgccaccgctttactatatatatatatatagatgctagtacattttcgatttcatgcacttctgttcttttctttattgttttttcccccttatataattagtttgttatacg

SEQ ID NO: 12338 - DNA, 674 bp, Gossypium hirsutum
tatattcgggctaaatcccgaaggtaattgggttggaaatgtgcgatcttgtcgtaataatttctattgatgtgcttacaaccctaagatgatcaggtatgtaccgtatatacattgaaattaagttaagattgactatgagcatgtaagtgtatgggttgaagtgtgaagtaacataagtatgtgattttgcgtatttgcatttatttagccttgtaatcgaattagatgtattcagcctaattatgaggttagttgggtaaaaagagattatctacatgatacaaattcgtgtttaaggaaaaatttaagatgacatgtatgaacaatagtgctatatttaatcatgactacatttagtcagaaagatgatgagccttatgaatgctatgctttagttataaatgattccattacttaagacttactaagcatcgaaatgcttactctttttgccttaattccctgttttatagattttgttcgtgagctatcggactcaggagatccaaagtcgaagtcgtccactctatctaaacctttcggtactcttgtaaatgaagcttgataatggaatgtataggattgacttttgatgttaattacgtatctttttggcgatgcatatatatatagccatgcgaaaatggcttgttaagttattatatgcgctc

SEQ ID NO: 12339 - DNA, 616 bp, Gossypium hirsutum
tgcaacacgcaaacaccactaaactaaacatttttaacttctaatgtctacaactaaattaagacaactaaacaataacctaaaaaatgaatatcatcatataactttaattaatacacttatacactcaagatcattcaagttcaagtaagaaacctaaagctaaagccttcaggattacaagcaaaaaagatcaaccaaatcatttttttaccttagcgagaaaaaacccttgaagattaatttaatctaaacctaagacagaaaacacggcaggaatgaggttttttttttttaaaaaaaaaaattttcccctcccaaaaaattttttttgaaaggaaaaacctttttaaagtttttaaaaaaacccaaaagtttgaattttcaattttttttttttttttttttttaaaaacgtttcaaaaaacaaaaaatttcctttccgggaaaggacgggtttaccgaaaaccggaaagttcaattttttggttaagaggaaaagggttttttaaaaaaatttttccccgcaaaaaaaaaaaaattaagccaaaaatttttcaaaaacccagggcctaacccaaaaaaaaaattaaagccccggattcaaatggaaggg

SEQ ID NO: 12340 - DNA, 630 bp, Gossypium hirsutum
  misc_feature (67)..(67): n is a, c, g, or t
  misc_feature (70)..(71): n is a, c, g, or t
  misc_feature (613)..(614): n is a, c, g, or t
ttctattaatgttggcttgaattttaagaattgctaacatcactaaaattttttggtaatttttggnccnntataatgtcatttttttcccataaatatcaagttaatatttcttttaattttaaaatgtttttaataatgttaacctaaatttttaaaataaaaaagtagagacattaaattcttgaaaataaaaatataataactaaattccaaatatataaaatgtacaaatacttgaagcatattgtaatatttaaacttccacttcacaatttaacccaaaaagtttaaccctttacaaagctgggcggaaacaaaactaatattaataataatagcatttttatgtttatcaaacaactttttttaagccatgataattttagggaagaagtaatatttagtctttaaaattgacaattttattcattttaacccctaattttttatccacattaatataaaaaaaactattcaatgaaatctaaattcatagatcaaatcggaaaatataggggaaaaaatttaaaggctaaattaaaaaaaaaaaaaaatcaaaagcgaaatgttactccatcccaaaattttattaaaaaaaaaacaaaatganncctcctaaaaaaaggg

SEQ ID NO: 12341 - DNA, 522 bp, Gossypium hirsutum
  misc_feature (358)..(360): n is a, c, g, or t
ttagctgatgggaaatcaatggtattaagggatccctcaccatatgcttgtatgattcccaacagtagacaggttaacatgaaagcataatgtatgcttatgtaggctagtttggctgacactgttgtttactagcctcattgttgaaaataaaatgcagtagttatggcatggttcttgaatcttgaccaaattgtcgttgtttcatcgctattaattaatggaaactgtgttatggttcttgagcatgtgttttgatgttatgttttaactatttgttcttgaagggattgttattctctgttttgatgatttgtatgttagaaggggattgattgatagtgtcaactactttttnnntaactgtttttgcaggatttagaggacagttatatttacttgtgaagctgtttggcttgaataagaattcaagcagaaatttcctgataatctctctcaagctctgcaagcccagtgttagcttcttttgttcaaatgaatattgacccttggattatttct

SEQ ID NO: 12342 - DNA, 641 bp, Gossypium hirsutum
gggaaagatgatgataattcttcatctttccttccttttatactaaataaataataaaataataataaaataatatttatctaattaaataattataaaatatcatcaacatcatcaatactttctatatttatctcttttccaattgaccatttttccctttattatcttttaaaattccatccttgagccatcatttaatttggtaaaattacaatttagtccctcatagttcttcacctattcaatttggccctaattcatccattttccttagtttctagaccattccacccttaaaatatttacactattagtcctttaaatttttcatattttcactttaaccccttaaattttgagtatttactcttgtgcaacaaaacttttctcactttcacaatttagtcctttcttgaattaatatatcataatatacttcccaatattgacataactcaaaattttcctttttgtcactttatttccttattttactatatcaaggatagtatcttactgtaaaaattttcgaggtattacggctttattattgaataaattgtgaatacaaccttgtggatatgttcgacgacgatttggaaaatgtgaaatcccggctgaaccttaggaatagatta

SEQ ID NO: 12343 - DNA, 513 bp, Gossypium hirsutum
ataaacatcaaccataaccacaagctagtgcatttaaacataactcttacatatttaattaataattattctgtaattcatcattcgtctcaaactttcctataaacatatcattctagaatcacttaccttcattaaacaagattaaagctaaatgaataaaataatcatacatgttatacatttacgaagcacttataggcttagtattgaaaatgattcatcgtatgcttcttgtactataataattcaacccaaagtcatttatatatataaaaatatatctttaactgaataatcatcaatataacgacactcacatatgatcaagtaattcattaaatatttaacatttaatatttactaatatcttgactatacattagcctttaacattaaaataattttataaattccattcatagttagcccgacgaactagtaacttggttcggatactcgagtaactacaccacaccaaaggcgtcatagatgcataacaaaggccccaaa

SEQ ID NO: 12344 - DNA, 458 bp, Gossypium hirsutum
taagttaacagccgagtgacaagcatgtaacaatttaataacattaatgactattacgtaacttttaaaagttgagtgatcgaaatataattttaaataaaatttagggataaataatatagtttacccttaaacttttcaatataccaaaaaggaaaaagtaaaaggtttagaactttcgaaaaaattgaatttgacaaaagcgtggaaaattcaaaatcaaaggcccaaaaggaattgcgtgtaggggaaacaccttgagcccaccgtccatttcccaccagtttgcgccccattgttctcttcagattctgcctcgacgatttcgttttcatatttcaacaattatgccaggtttgcgcccttgaatttccttcactcttttgttacttgctacaaactgcaaaacccaacatgccttgttgtatttcttttgaagaaaaggatgatcaaggctg

SEQ ID NO: 12345 - DNA, 528 bp, Gossypium hirsutum
  misc_feature (514)..(516): n is a, c, g, or t
tatatactgatattgtattgttccggtcttaaatcagtaccaagtagaccatattccgtttcgattaaaattttgatagattttgtcaatttcaatgtgtttcaatatgttatagtcaatatcaatttatactaataggtatcaacccatagtgattaaaatgaaattttaatattttagatcaattttttaattttataattatatttaaaattaaaagttattaaattattcaacctagttgtttaaagcttatatatgtattaagataggaattttatattaaataccatcatgatcacatgaacattgattaggttaatattccttactatactttgacaagtgcaaaacatattttccatatatagtatatataatctagagaaaaggacacaacaataatatattgaaaatctctaatttattgatacaatgatgattaattagaattaaatttttaattgtgcagataaaagcatgcttcttggtgtttgatgttgtcccataagannnatgttgtcccat

SEQ ID NO: 12346 - DNA, 575 bp, Gossypium hirsutum
gtcccgtgaggcttacttcaattgggcattaaattttgtactactgcccggagataaatataggataattatttgtagtaattgagccgaatgtaagatatttgatttgtttttcttttttttacttaactcacatattagtatctaaattataattcttttcttttgatatttaaatggtttttttatttattttggaaatcattatagttcatcgcccatgataataaataattatggtttcaggtattttttaaagaggtaaataattaattataaaatgtttttattaaatttctaaattttattattaagaaatgatgtgagcaatcatcatttcattcctcgtgattggtatttaattttattattaaaatgtatctaatttttttttaaattgatgcctttattagttaaatctttttttaaaaaagtaaaaatatgttataagtctacgagggtgttgggtaaatttagttttgagcttttgtagttgatttgtgcacaaatagaggattgagtagtcaaattatcttgttgtagtgtttggtaaatggaggtttgtaagagtttgt

SEQ ID NO: 12347 - DNA, 642 bp, Gossypium hirsutum
gacgtcagaattttgagaggaaaagggagagaaccaaaattttcgagaaacaaaaaaaagatgtgatacacatccctaacttttctccactaccccactcctgataacttccacagaatttctatttgactgaaaccctcttagtcaaacgaacaaaaataaactcccacgcttgcatagggattcaaacactagaccttcagcaaaccaacactcaacttacccaccagaccagcagacccattatggtatggttttacaaataattaatataagcccaataagcaagtataaggcttatgtcagaaaaataccaaaatttcccaaagacaaggcttgaacgtgagacctctcaggcactcccagaacacttaaccactaaagcagatagatatttttgttaaaaacttacaaaagcataattataaaattcaggaaattacagtactttctaacttagaaatattttagttagaaaactctgaaatgattacaactgtactgagtaagttagagactaaaatttctgaaactccttatgatacttatttgaagcataaaacatttgctaataaaaactgaaactaatacataaaactctgtaatgtagataaaactgtgattacgatgagtaactcgtgg

SEQ ID NO: 12348 - DNA, 607 bp, Gossypium hirsutum
agtaatgaggtttgactcccttcaatatctacaatattgcctttgtcggaatacttgaggtcacaaaagctggtgcagacaagcacaactcaaacctaccatagaaggtgacttcaggaactcctagttggaaaatctaggacctataaatcagagacatctttagtgtttctattattaatagttcttccttgtccatccaaaaagcataaaactttttcttttccagtcagaaaaattccacccccgtggtggtctataataactggaaagcagtagtgtttatggaggatattgaactttcggtcataagaggaaaccattttcattttgggaggattgtgaaccttttttggtaagcatcattcaaaataataatttaaaatattggtttactaactctaattgcatgttagctagcattagtgatgatcttgaaacttcaacctttgtgatgaataattaccatgctcttctgatttgaaaacttcagtagttttggcttattaaaaagtaaacaataccagaacctcaatcaagaataaaaaaatggacacttgatataaaattaaaaaaagatatatagaaatcctcaaacccaatgaaa

SEQ ID NO: 12349 - DNA, 643 bp, Gossypium hirsutum
cccttttacattttttttttgcaaacaatgttattttgtttgcaaaggttaatataagatctgttgagtcaattaaagataccattaagatattcatggttcagtcaggtcaaaacattaatttccaaaaatctaaaatccttttttccccaagtattaatggaagccaaagaccttaggaagtacattggatacccgattcataccgctagagtgtttcgtaaagagtatgacttcatttccatatgatgccataacccactagttatggtcttacacgatatggtgccatggacttttccttttaaagaatcgtgtttaaagtctcaatggacccttttaaatgaattcgtggaaacaaaaacagactcatcatactctgactcactcttaatagacataactcataacatgctctcaacattcattatacattccaattgttcataaacaagcatatttctatttccagattcacatcacatacttagtttatcatatctcatgtaatttatacatacacggtctatcaaacattcattctacacaggagggtcacaccatacttctctagcttcaattccataatttatttacttttcacaaaagtttctaaaatacataatcacacatacaaaagtcg

SEQ ID NO: 12350 - DNA, 609 bp, Gossypium hirsutum
taattacatcatcacgcgcaaaacgcaaacgcgggacccaaatctttcctccactttcaaaagagggtgctgaaacaaaactaattacatacatggtgatattcataatcttatctcgttaagggcatgaattttaaatttttataattagttatcctgaagaaaaaagaaagttaaaaaagcatttataaataattgaaattattttaaagattttattttttgaaattagttatgcttagtttaataaaataaatatatcaaataagtgtttaaactttgttactttatttagggtaaactatcaaaatagtcacttttgtttcctttaggttacattttagtcacttatgtttgaaatgtttcgtttaagtcacttacgttaacatgttgtaacattttagtcactgagtcgttaattttcgttaacagtgtaacagtaagctgacgtgacacgttaaatcatcatttcaaacaaaaattttaggttaaattatacaattggtccccaaaattttttcgttttaagcacttttttcttttatattcttttaactttcccctcttttttttcccattctcttctgcttctccctctatatttctccc

SEQ ID NO: 12351 - DNA, 575 bp, Gossypium hirsutum
  misc_feature (22)..(23): n is a, c, g, or t
  misc_feature (464)..(472): n is a, c, g, or t
tttgatagctgtgtttgatagnnacgtacttatcatcttctttatccgtctcctctttcctataaaattcaccatttctgtaaggttttaggttgggttttatataaaaaggaatttaaataatttttttcctagagagagaaagagaatctctggctaccttggggttgttttttttataaatatttttcttatttttagagagaaaaaaagtttttttttatataaaaatcgctgggaagaggaagcttcttctttcttgtatgaaaatcgatctcagacggtaagcttctaacgaatatttcctgtttttgtgtttaagaatctctttctttacgatatgtaggtttttttttggaatttggttttatttttagggaaaaaagtggtttttccccttctttgatcaaaaaaaaccccccaaatttacctttgtttttcttcctcttttgagggtggaaggnnnnnnnnntgatgaaaggaggtggcggtttcagtgctttggtttatagacattcttccacaaatcaatattgatgtgggcaatcaaaataatcttttaattttgcctctta

SEQ ID NO: 12352 - DNA, 555 bp, Gossypium hirsutum
attaggtggatttctgcttcttccctagttatgatgacataaaattcccaaacaaacttgaaggtggtttacatatcctcacttttgcagcatctacttagactgcattccatccaaagcatgtctggagaatcttctgagcagtcgaagaaaagaggtcgaccaagtcattctccaaccgacaaccgaaagacgaacaagagaatcactgataaaaaagctcgacaagaaatcagggttagagccttttgctttcaggtttcagctttgaataaacgtatgactaaaaaatctttactctcaggacattgtagtggaacttacaaaagcgggcccgactcttaagcagctcttggaagcctttagaagcatcaatggagacgacttgctgcagacagttagttatatactggtaagtcatgatgcctctatttacgttgccttataggtttctatattttactgaatttgcagcttggtaatatattaatacatgataataaatctaaggctttaactagtaatcaagttgggttaaagcttctgtaactgaaa

SEQ ID NO: 12353 - DNA, 342 bp, Gossypium hirsutum
tcatcagcttatcagatcttcacgcgattcatttattttttctcaataattatcttcctctttgtttggtagaactaattgcagtgatgaacaattattctgtgtaccagaggattcatctatgacggtaacacaatccctctaagaagttctgagctcacaaaaatccgattcttcctttaaaatttttaaaaaatgtcttcttttttaatttttttaaaagaaagggagaatcaaaagcgatgagatgatagaaactcgtaattcactgatctaataatttgatgttacattgaagttccgacaggttctgatcgctttttatttcccctcttttttttt

SEQ ID NO: 12354 - DNA, 642 bp, Gossypium hirsutum
  misc_feature (634)..(634): n is a, c, g, or t
tcctttctctctcctatgctctcctaagtataaaacatgaaattaaagcattaagagcatcgaattcactaattctaacaggaaatcatccataaaatgtgttaaacatggggtaaaaatatgtataatttacagtttatcatttgtctcgagacatcaagaacatgtctcgagacctcaataacaaatttaagtgtttcatacatttcttagtaaaagtctcaagacatagtaacattgttttgagtcataaaacatcgaaactaaattagtgaatatttagttcaatatctttgagacatggaaccatgtctcgagaattcaaaatttgaaaatagaagaggcatgtcttgcaacatggctttactgtctggagacattgccttacatttaattagtttgacctaaaattcgtagcccgactttgcatttagtcatctttgaccttggattatcatgtgagcccgcttgagtttattcgagtacatttgatattcataacatctattaattgaaatggccatgcttgatatttttagtttcgatgaattgattttaatgtttgtttgagttgtttcggcaacaattgtggtgacttttatatcaattaacttctaaattgagtgcagggtgntacattta

SEQ ID NO: 12355 - DNA, 564 bp, Gossypium hirsutum
  misc_feature (57)..(62): n is a, c, g, or t
  misc_feature (64)..(64): n is a, c, g, or t
agagttgaaggagatttatccttagatagttcgatataaccgtgccgagtagtgagnnnnnnangggatttatatgcctaggtgagataaacaggtaatcttatggtggtatattttagtctaggatgaaaccgagaggagattcttaactaagagtaacaaacaatataattggtataagtccattagttaaattatcactcaactaattaatcgaccatcatttaattatttacattatctaaaacattaggaagaaagtttagcttgattagtttaattttagtttataaataattttaattagatttgcactaataattttcgacttgattagattaataattgtttaacttgtaattaacttgataaacacatttatccacttgacaatcctttgggttcgatctttaggatactcgagtgtcctattaatactaaaaatattacaactgacactgtgcgcttccagttaaaactgtactttaaaattgtttgttttaggcgcacacgtaatcagcgattagaaatcttgtgacttggtgaagcaaaaaaaaaattgtt

SEQ ID NO: 12356 - DNA, 440 bp, Gossypium hirsutum
tattttaacttatatgtcatgttgacaaaagagttaaaatttttaaaaattaaaaaaattgtaaataaaaattatagttttcaaaattatgaatttttgaataaattttttttgttatgatttataatttttttataattttaagttattttttgacgtgtaatataaaataaaatagtgtcacatcaagaaaatagacaaaattgaataaaggtgtaaagattaagggctaaatttattattatggcttattaataaacactataataaacatttaacatcacatatttaatgaaaaagactattttactctttcatctaatataataagacatgtttgcccattgtctagtagggactaaaatgcaatctttagcataatgcacgaacagtatgatacctttaccctcactttctttttgaatatttgctaatctgat

SEQ ID NO: 12357 - DNA, 672 bp, Gossypium hirsutum
  misc_feature (36)..(38): n is a, c, g, or t
  misc_feature (624)..(624): n is a, c, g, or t
gcagtggaggcggccaataaaaacattaaaaggatnnntggggaaaatgactgaaacctacaacgattggcatgagaaattatcatttgctctccttgcctatcgaacatctgttagaacttctactggggcaacgcctttttctctggtttatggaatggaggcagtattacccattgaagttgaaatcccttctctacgggtgttatctgagctacagttggatgaagccgattggatccaatctcggtacgatcagttgaacctaatagaagaaaagaggctaagagctattcaccatgggcaaatgtaccagaaacgaatgatgcgagcctataataaaaaggttcgcccccgagaatttcgtgaaggggacttggtactaaaaaagattcttcctatgcaaaaagattttagaggaaaatggatgccaaattgggaaggcccttatgttgtaaagaaggccttttccggtggagctttgatcctatgcgagatggatggcaaaagtttaccaaatcctgtaaacgcagactccgtcaagaaatacttcacttgaaagaaaggggaaccaaagtgaaaacccgtaaagggcgctttgcttcctaaaaaaaaaaaaaaaantaaaggatagggggaaaacctccccggggccctttttaaaaaaaaaaa

SEQ ID NO: 12358 - DNA, 355 bp, Gossypium hirsutum
tcctttattgtctcggagttcaactactccatatggaaaacctggttaatcgtaaaaggtcatgaccatcgagatttaagtttacttgaaaagaacttcaatcaagaattgaatagaaggacctgttaaccaacttcgaacacatagggatggatgtgcttgtcataccatctctttgatttttctttgaaaattttggtgttctcgtaagagaacaatctcatcttttccaactcattgatttgtaacatctatttgtctctggcagatttcgagtctagattgagctgtttaagagtctaataagccttatgttcaagttctaatggtaaatgacaagctttttcatacacta

SEQ ID NO: 12359 - DNA, 521 bp, Gossypium hirsutum
tcgcggtcgcgttttcggtcgcgtcgcgtttgtcgcggtcgcggacataacggacgctattgcggtcactgcgggtatcgcggttgtgaatttttttcaaattcgcacaacttactgtaaaacatagtaattataattataattataaaaagtcacttttaatgatttttagagtgttttttaacacttataaacctttattaatatgacatgagaacacaaattttataatcattaattattcttatatttatttacgaattttctaagaatgttatattaactaataacaaagtaaaaaaaaggaaatattaaacatttatcatatttaataagtttgaaagtttttatagataaaagaattgagaattcatacatgagagatgtcttcaatatttcttgacagctttgaagatagtgaagatataaatatgctgcaaaaggaaaaaaggaatagataaattaatgaatagattctcattaattattcctatttcctaccacttattctcatctcattc

SEQ ID NO: 12360 - DNA, 543 bp, Gossypium hirsutum
  misc_feature (59)..(59): n is a, c, g, or t
  misc_feature (478)..(478): n is a, c, g, or t
  misc_feature (484)..(484): n is a, c, g, or t
cccaaagttaacagggtatacaattttgtgaatatttgtttatatggaagaactacttncgatgaacccaaaaggcgatcagaatgatagggattaagtgtcaatagaccctttcctatatgtactaaaccttgagtaattcgcacctacaaaagcaattcaaacttagtttctatagcaaatgcacatagatcgtgcaagaaactacaaagataaatacaaaaaaaatacacaaaataaaaggctaggaactttgtagtaaaaacttaaaagattgcgaagcatgccaactatgcgagcattattagttccagcacctatcaaacccaatgagataacaacagcctggagcaccaatataaacacttaagtggaagctgatcaaaaacaaaaaaaaaatataaagttcaaccatattactattgcaacttttaaatctgtattatgactaagcttgcttaaagtgtatatcacattnaccggnagaatacttgtgtaatagataaaatggtgagaaagaggcgtatcataacaacagcaaaa

SEQ ID NO: 12361 - DNA, 482 bp, Gossypium hirsutum
agtagttttgccagcattgtcaagacccagtacgagaattcgagcttctctgttaccgaacagagaggagaacatccgagtaaaaacaatacccattttttccctgttgattcctttagcaattgctaccactaattacggatctaacacagattctaagctactttagttttagtgtggcaagtagtatttacaaaaatccaggtttttttttgtttgtttgtgttatttacatatttatcttaactttaaaaaaataaaaaaatgtttgtgtaaaggaaaagaattaggaacgttacgtacgtaaatactaaataatagttgtatttttttagcataataatagttatgttgagagtataaataaggtattgatatttataaactacttaaattcgattcgaaaaattttaaactcaaatcaataattatcaagctcaattcaagcttaatgatattagacccaaatagcttaggaacaa

SEQ ID NO: 12362 - DNA, 650 bp, Gossypium hirsutum
ttttgctcaaataatatggcagagtacgaaacatgtatcatgggaatccgtgcagccatcgaacgtaaaattagggtgttagaggtgtatgaggattctgcactggtgatctatcagctcaaaggtgagtgggagacaagagacccaaagttgatcaactatcgagagctagttcgggatttaattaaggtgtttgatgatatcactttcttttatctcccgcgagacgaaaaccagatggcagatgccttggctacgttagcttctatgatcagagtaaatggacgagagaatatgaagccgatctagatgagtatttatgaggctccagctcattgttgcaatatagacgacgaagaggaaagagatgattatccttggtatcatgatattttatgatatgtgaagaatcgtgaataccctgactaggcaacggaaaatgataaaagaacgttgagaaggctagccagtgactatgtcttggatggagaaatcctgtataaaaggaggaaagatcaggtactattaaaatgtgttgatgctgttgaagctaagaaaatcctagaagaggtctatgagggtgtctgcgggacgcatgccaatgggttcataatggccaggcaaattatgagaatcgggtactactgggt

SEQ ID NO: 12363 - DNA, 658 bp, Gossypium hirsutum
  misc_feature (50)..(50): n is a, c, g, or t
  misc_feature (650)..(650): n is a, c, g, or t
agagggaaagtaaagaaagaagaggaaaaagctgcgcgtgctgtgatagnagttagaaaagaagaatcttgaatatgaaaccgtgtctgcagaactaatgactagtcagtctaaacatcaagagctaatagagaaagtacaagatttagaaaatacactgcaagctcaacagcaacaattggataatctcctaaaagtcctggaagaaaagaatagtcagtacaacagagacactcacgcctacgaaagagctctccaagaaaaggaatgcaactcgaatttttgatcaatgaaattggcaaggcggctatgcaagtcgtgtaatcatcagatgaagctgaagctctcagttaccaattcccttcgagtcaaagatcaagcatattagaattcttagaacgaataaagaaacaaggcaatgtggctagaaaatttatgcagctgttgaatcaaatatagcggaacgttttgtaatagactcttttgattaatgaaatgccttagtaggggccatcttgaaatcaacaccaatttcttgcacattcattcatgactaacattcatttgtcattcatccattcatccgttctttacatgtatatatcaccataatcattcactgaggctaaaaccgtataatccgcagttgngacactaa

SEQ ID NO: 12364 - DNA, 618 bp, Gossypium hirsutum
  misc_feature (55)..(60): n is a, c, g, or t
ggtaatcttcagccttggatcaggagtaatatcataatgcagcaagagacaaccnnnnnngtctttatcaagcaccgaagtggaatattggtcagcaacatcagcgccacaagggagtatttggctgaaacaacttatgaaagatcttcatcagccaataaactatcaagtaaggcttctctacaataatttatcagtcatacgtctaatagagaatctaatctttcatgcaagaacaaaacatatagaagtgcattatcataatatttgcaaaaaggtccctgaagaggagatcaagatggtgccaacaaaaacaaatgagcaagttgcaaacatattcacttgctgcttttattttgccaaatagagatgtggtttttattcttttcacactctcacttgattattttttgttccctttgtgtatcctttgatgatcatttgttttttatcatcttttgttctttcaagtgttgctgtatttgctattgagatcatagattgttatgactgaattgtatatgtaaaggagtttcatttaatggaatatgctttcttttccctgttaacggattttggtattttatggattgcaccgttggggattttggctgctga

SEQ ID NO: 12365 - DNA, 689 bp, Gossypium hirsutum
acgacaggcactttgattcattcactacttagccaatatgacattttgttcatgatttaatgcttgctttagacgtttgtgcggttaaatatttttttataaagaaaaatagcaataaaaatacacattataggatttgaactcaaaacattgagagggaatccttttgaggacctaggggaccttctcgcctgccaaattttaggaaattttgattttttgttctgttgaaatttttagaatatcttaattaagtcccctcatatatttgagaattttccttctactttttaaaatttttttctaatattttaattaaactttcttaaaaattttaaaaattctcattaatctcacaaaaagattaattgaacccctaattcttttataaaaaattttcattaaactctttaaaatttttgaaaattttattaaactctcttctcaaaatttaatctcaaatctaccgctacaaacatctataattttaaacactttataatttaacattcaatcaaaacctcgtctattaataatatttattattacacatataagagagtttagaaatttcatgataaaagctttctcaaggttgtttcacataatcttatcaataggttagatataataattaatattgatatataagcattgtttagcatgtgtccatatgttgtgttcagatg

SEQ ID NO: 12366 - DNA, 656 bp, Gossypium hirsutum
agatcaaatagagcccaaatatgaagaatctcaagcttcgttggtaacctgggtgtggaatgcttatggaagccaacggttgcctgatgtagctgacccaaaactatgtatgaactttgatgctaaacaaatggaatgcttgttaatggttggactgtggtgcgtccatccagaccagcatttaagaccatctataaggcaaacacttcaggtttttaatttcgaagcaccgttgccgaagcttccaggtacgaggccaactccaacatatgatgcacaaaccacttcagaaattcaagcgagccatgtttttcgggtatgagtattacagtcccgcgttagactaatataattatcacatacataatattcaaattgataaaagatgtctatttacaataatatatatatatatcaatacatattttaaattttaaatttacacaacaatggacaatgatcaaaaatatggccgaatatttgcttgcccgaaaaaacgaaaatacccaaaaggcagacccaatctgccatagttttgtcattaaaaataaatagaatttaacatggggcatatttgagtgttgggctattaattgggtcatgtttggggcttagtttttttattcaaaactctcctaaattgtggactattgttc

SEQ ID NO: 12367 - DNA, 551 bp, Gossypium hirsutum
tctggcatgtttctgaacacagattattatttaattattttccattttttattaatttttaaacagtttatttttaaaaattatttattattttaaaatgttagtcacatttgggacatgggaaagagagattttaaggctccttggatcccttggtataaatttgcaatataacttcttattttagttgaggattaatgagttttgatgttcttttaatgattatttaattaatagttttgtttaaaatatattataagatttttatactttttatactatttttatttttaaaaatttagtccttttactattcagatttcataatttagacccaattgttaaaacggttaaatttattggtatgacatcttaaaataaaaaatttctcgcatgaaatttgaaaagtaaaagagactaaattccaaaacataaaagtaggtagtaggattaagttccaaatttatgaaaagtatcaagatttatgacatattttaacctacatggtaatatatagtcctctcgaggagagaatataaatttgggtgagg

SEQ ID NO: 12368 - DNA, 508 bp, Gossypium hirsutum
tatgtcttcattttgtggaggatcaataacctcaggcttactttgcaagtcgtcaaaaaatggattcacagatgccatgatggtagcaaagcacgtctgaactgaaaatacaaacaaaaatacaagaaatcattttttttacaaaaaattcataattgtgaagatcacaggttacaaacaatgtaggtgaaataatcaacaatcttccaaagaatcattaccaaaaaccctaaaagaatcaaacagatctacaatattccaaaagaggaaattttataaccaatatacgaaaaattaatccagataccaaaacacataaaaaaaaagtacacaccttcagctcaaaatcgaaaacccatttgaattaaaaggaaaaaagaaacaaagaaagaggcccaagatgaaaacaaagaagagaagtagtagcagtagtttttgaaggaaatgggcggaaaaaaaaatctttttcccccttaggggtgcgttatggtgtaataaaaaatcaagc

SEQ ID NO: 12369 - DNA, 575 bp, Gossypium hirsutum
gaaaggtttgtggtaattaaaagcataataatctcgtatttagaggtaaattatattttgtcgcatttgttaaaaaaatatgaaaaaattaattcttacacgttaaagttaagagcaaactagttattttgtcatccatatttataatttaaaactgatccatgtacatcaacatgagttacatgtggcacattatgtgtaattatgtgtctattttatcatgtcagtttttaacaataaaaatgaccaatttacttttaatctaatctacatggattaattactctcttttttttcttttttgaataatgagaggaaaatactttttgacttttaggataaaaattttcacaatacttttaccaaggatttggcgtattatttaacagttaaattaacaattttaataatagaaaattttaatttatatcacttcaatcatttaaagatgtaattaaaataatttaaagcttagagatcattttaaaataaaatgtttagtgtaacgaacttttacccttcaaatcactctaatttggggatgataatggggcgggaatttagggattgaaata

SEQ ID NO: 12370 - DNA, 472 bp, Gossypium hirsutum
cgatgcaattacatgttaccctacttatatatgtctacatgttctgctctttggaacttcaaatattgagggccccgtcccgcgacgttgagatatgagattaaaatcagcaacatgtatttagattcagtaaagtaaaaatagaaaataatatttaatgatttaatattaaaatacataataataactatcaaatctgggctacattaaacaataaaattaaaattatagttaaaagttattaaaattatatacattctgattaatgaaattttaatattaaataataattaatgttatatttagggtatgttctgccgtacttcaaaaaatatttttggctttaaaagtattttttaaagaaaaactgtgctaaacaagttgctttttactgaaatttttagctttttctctcttaaaagtatttttcgtgcttaattaatttttcatccctccaataacatagtacctt

SEQ ID NO: 12371 - DNA, 485 bp, Gossypium hirsutum
aatcgcatcctgcccttataaatggtaaacaaaaccaagagtattggtaatgattaacttctattctgcggagcagttaccaatctttacacttagcattcatcattctatcaaaggctattaaggagttcctcagcatttatgtgtccttcagaatccaattccttttttatctacatttttctcaaaacaatggattctatcaaagagtttattcttgcagcatgctttcatcttctagggttctcactttaaacaattagagcccttatcaaagagcctattcttcacacaggaacaagatttaacagattatggaaaacatatgtgggattgaaaatatgattcccattttgccaacaaacgtatgagttgtcaataatacagtagtcgtaattccaataaccatggttaaatccctaacagccccaagtacaaatacatatttgtgtggatataatttctagtttagtaggaatggaaca

SEQ ID NO: 12372 - DNA, 834 bp, Gossypium hirsutum
  misc_feature (196)..(198): n is a, c, g, or t
  misc_feature (200)..(202): n is a, c, g, or t
  misc_feature (672)..(674): n is a, c, g, or t
  misc_feature (679)..(684): n is a, c, g, or t
  misc_feature (692)..(697): n is a, c, g, or t
  misc_feature (811)..(812): n is a, c, g, or t
  misc_feature (819)..(819): n is a, c, g, or t
gtgttgctaattaaaacttgatgaatgaattttaatattttcataaaagtaaacatcaaatattattttcataaatgaatgaatgaattattttaagaaaatattacaaaaaaagaacataaaatatttccatgaattttagataattactttatggaaacattataagtaaatggatattatatctaaaactaannntnnntttggatattttcagtaacagtgccaaattatatcgaattaaattacatgtactaaatctttaaacatggtccaaagacagaaaactttcaaaaaaaataataataaaggcatttgacaaagtggcactatttaattcaataacagtaaaaaaaaagcatacccataaagattaaaaggaagtccttgtgggatgccataataatgcgggaaggttgctgctgaagaaaaagctattgctgtgggaaaacacctcattcccctcaaattccttcctcctgcattcgccatttctattattattataatttctttctttcattttcttctttaattataacaaaacagctaacctaatattcttacatatatgtgtatatataattaatgcaccaccaatgcatgcctgtcctatttgacaaccaaatttaaaaagtgaagcatcagatatcttatctcctcggaaatgtnnnctagnnnnnntctggggnnnnnntatccttttagaaatgaacatgcgaacttcaaagacaaccgcaaaaatggattaatgactgattttaatttgaaatcacatttttcatacctcaatttcttattcagcccccanngatcaanagaatataaattgat

SEQ ID NO: 12373 - DNA, 671 bp, Gossypium hirsutum
ctcatttccagttcattacaggccaaccctagcttgctatggtgatgtttctattaatttgtttaaacatttttacctaataaaactaatatttcttaccctaaaaaaactaatatttatgttttgtttctgtatataatatgcataatcttatatgatcttaatttatatttttccttatttggaaaatgctttttagttttgaataaagtgactttaaggaaaaatatgcaaacaactataaaattttatccaccaaagaaatacaaaaatcagaatatgggttttattttattttatcatttatttggtttgatttacacctctgttgtttcctatagagtccgaggattcttcttttcctcacattgtctaccaaattccctccttcccatgtcttaaaatgtaaacaaaaaaacaaaccaggttttcaaacatcagttcattgctgtcgtacattcaacaatggttgatattctctcccctctttgcccctgattcccttccctaccgcaccctctccatccatctaaggcaggatggtcgctctccctttcctcggccgcctgtctttcctcctcctcattgccaccactacaaccactgcctttgccatcggaatccaccatggcagcatcatccggaaaccttcttcgggcgttctaaacttt

SEQ ID NO: 12374 - DNA, 523 bp, Gossypium hirsutum
cgggtaatttttacatttagtccctccatcttgcgctataatgcaatctgactctcttttttttgatttgggccgtaagatttgctgttcgtttcattttagtccattgaaacgcagcacaggagagtaacgggatattttcccgattagtccccgctttaccttgcgcatttgaaattggtccttttatttatttatttttattctaatctatcctgttattttaatttaaactacaattaagccctttttatcttaattctttatttatttatttagtttgtttgcccatttacatccttaattccaaattttgttatatattcatacattttctaatatatatatatatatatgtatacgcgtgcatttcatggttcatttatatatatacttatatcttatattttataatttataaacgtaaacatatatacgatttttatactttatactttcgaaatacatatatacatataattttaaaatatacatgcatacgcaagttcttataacgatgcat

SEQ ID NO: 12375 - DNA, 630 bp, Gossypium hirsutum
ttaagggaggaaatcgggaaagatgattggttgatttagtttgggacagtgacgagtaggcagagtgaattggaaaaaacatccaatgaagtcgttaggatatatcagatatgccattttcctattcaaaaaatttattcattttcttaagaaaagttataattaaaagaaaaaaaaaagtcttacctatttattatatccacctataatatttaatgaaaatttattaaaaattattttaaggttaatatttgatataatactatcgaaattttttaattttaaaaataaaataaaaatattatcacatgtcttattccttttgtaattttactatgagtatgtgttacattttaaattttatttgtggaatttaaaattttcaaaataaataataaaatgattttaacaaaaagttgggattttaaaaattcattaataaattttataagaaataaataatattttgtgaagataatgcaatgatttcatacaacactttctggtagtgtagttttgagttgattttaaccgaaaatctgaaatgagggaatggagtggcgacttcgttcttcttcttcttattattattatttttgttaagggttgacactttccaaatcccttaaa

SEQ ID NO: 12376 - DNA, 608 bp, Gossypium hirsutum
aataattaaattaattttattttcatttttaaaggggtcaaaatgtaattttatctttaccaatttaaattttttttaaatttgaaaggcctaaattttcattttaggtacttttttatttttatttaataatatataataaattaacttttagtacactcaaactcactcctcttgctttgacaacaatatcgatatcagctaaattaagattaagttgtttattaaatttttaaagataaacaacttaacattttttaatatttatatcatattctagtacatttaatttttatatgatataaattatataatatataaaaaagtaacatattataaacttgaaaataagtcggtcgagtccaagttatgaatatcaaaacccgaacccaatctttactctagacaaatattatttcttacctaaattcttttatcaaatctgatattttcatctatatctctctaaattttaaataaaccttcagttttaagcaaattatcaaacccttgatcagattcaaaatacgagtgaaaaatgatttggatttaaataaatatcaaatttaagattaagtttttagaaaccggcttaaagaagaagaaaa

SEQ ID NO: 12377 - DNA, 411 bp, Gossypium hirsutum
ttcttgagtagggactatgcatgcttatatagaaaagcatgtagtcaataactactaataacaactaacagtaactactaacagttatcagcaaccaatatcaactaacaacagacttaacagaataataacagaagccagtccctagatcagttattattttaacattttcccggtttctttgttgtttgaacatttgagagcatcattttgtgtgagaactcgaagagcttgccgaaatgattcaaagtgcttaggtgtaataggcttggtaaggacatcagcgatttgttctaatgacgggacaaagttcacctacagggttccatcgagaaccttttcccggacaaagtggtgatctatctctacatgctctattcgtgcataatgtgtgggatttgcagctataga

SEQ ID NO: 12378 - DNA, 498 bp, Gossypium hirsutum
ttcctctttaggtagccttaatcactcgtgcttttgtcaaaaaagggaaaaaaccccatcgaaaactatattagacgtgttgaggggtttattatgctctagacaaatgatacttcgaatacttctcatgtaacatcccagaataacgcctaggagtttaaggcctggcgagctcgggttcgctaatgggcctggcgagctgtgatcgttgttttgggttaaaagtcaaaagtagaagtagttaaagggtaattataccaaaattaagaagtcgacttacttttctcttcgtaacaccatccatgcacgcaactctttcctacttctactacgactagggtttcctaaggacattgaaacacttaatgcctacaaattaaacccttttcattgaaaattcaaattcttttgaatgataaaactctctaaaatttcttcatctattatcttgttgtcaagtttccatgaaaacaagaacctatcacttagctcttagga

SEQ ID NO: 12379 - DNA, 551 bp, Gossypium hirsutum
atttaatgtatggcaaagcaactccaccatcttctaaccaagaatcatgctttccgcaaagctaaaccctcatttctctctaaatcaaatgtttccgaaattcaaatcattctcccaacaacaaagtattgacgcgataaatttatttttactagtaatgttaatcttcaaccaaaattcaaacaattttataagcaacccagaaaagcttgattacaaaaaataaataacttttgattaccttgaaaacccagaactcatcatcctcgtcgaattcacagacatcatcgtaatcatcataatcagaccaccagttcctctgcttcgcggcgctggtgaactcgaactcatcgtcatcctcatcctcgtcgggatttggaggatcgaatctgaaccgtccatttgtgcggtgaaagccagtggaattgcagcgtaggatgttgttagtaattactaaggatttgttgagtctgagaagaggtgatgaagtgagaggtggagttggaagctcaaggaagaggtgaagctgagtcccatcggtttggataaaa

SEQ ID NO: 12380 - DNA, 660 bp, Gossypium hirsutum
caataagccaagatagccacttccccttaaggttttctacccaaaaccttaagtaaatcatcacaaactagagaaataaaattgagaaagaattattacctttagaaggtagatatacaataattaaactctctcacaatacaagacaacacttgaaaggatgaattacaaatgaacccacaagtgtatacaagtgaaaatatgaataacaaagagaaatgattgaagttttactcttgatctttgtaagcatgtttcttatcttgttttgagtgtccttgtgctcaatttatatcctctcatggaataatagttgtttggtgttgatagaaatgaaattgagctgttgaagtcattaatttggacattcaatgcacttgcagagctagaggtattgataccaagcctttgaggtcgagttccttagattcaaaatgtgacctttgggccaccttaattgggagggtacggtagctcaaattttggggtttggtacctagattttttaagaccatcaaaagggaggcttgtatgcagtaaaaatataaaagggtttagtacccctctgtcaataagctcactgactcttaggtaccacactcttttccaaaagggtttgatacccttaaggcaacaaacaaattgcctcttaggtactgc

SEQ ID NO: 12381 - DNA, 406 bp, Gossypium hirsutum
aataaatagtttggattatttacaaaagggttttctaatttttaattaaaagtaaatttatcatatttcatcattcaattggctaatgcgacatatgatcaatgaattaatagaatttttaatgatattaaattgtaaaaaaattaaaatgactaaaataagattagggtgtatttttttttgtttttatgacagttatctggattctcccaatgccaaccagcacaacacgagttttggtgatggacaacttttcttttttaaaattttatttcattaataaaatgttacggatgaaagagggtgatattatagagtccaaaatttttctgttcagacagttagccatccccaacacctcacctcaccggttgcaaaataggatcttcactggacgttacaaaca

SEQ ID NO: 12382 - DNA, 544 bp, Gossypium hirsutum
ttattgaagcctgcaactaatgagctattaacagagcataaagattataaaatagaatgatgaaagaaataatagtaaattagtaataaagaaccgtgcagatctttcagtatatcctaatttattaaacttcagtgaagtttgttaaattatatggcatataatttataaacgttattattagatacaaaagaagaatcattatttcctataatagaactcaaaaggcatatggtacttctatgtcacttacggttcacttctggccaaattctatatcatgttattctctctaggagaaattcattaaccaggtttacagtttcccattctacaatctaagttcttagaagacgcaagaaagctagaagactttctagctcatttaaaaatgtgcacacacttttagttttatgtaactgtccctctaggaatttttgacacttgaaggatctcagaagtaatttcaggcatataacttgctaccctttatcaaccttttcatatttgcaacaggttcattttactcttatgagggcacacc

SEQ ID NO: 12383 - DNA, 758 bp, Gossypium hirsutum
  misc_feature (6)..(7): n is a, c, g, or t
  misc_feature (670)..(671): n is a, c, g, or t
  misc_feature (677)..(677): n is a, c, g, or t
  misc_feature (679)..(681): n is a, c, g, or t
  misc_feature (683)..(684): n is a, c, g, or t
  misc_feature (686)..(690): n is a, c, g, or t
  misc_feature (697)..(697): n is a, c, g, or t
  misc_feature (730)..(732): n is a, c, g, or t
  misc_feature (749)..(750): n is a, c, g, or t
gcattnntctggttgacttgtttcagccccattcttggcatcaaggtagccaacctgtagaacatagccgagaacacaaataaaatcggaagatattgtgtgttcttcaatacggagttaactgcctctaccaagttggtggtcatatgattacatcgaaacccgtcattgaaacattgagcccattgccacggctttatggtacccaaccactatcggaaaagagtgttcgttcaccttgcaccctcaagtctggtcatccattgctggaaaaggtgcggttctggctcgtacactatgtatgtattaagaaaagacaagttatagtctcgaattaatttgttctagtattgataatattaaaacatatattgatagtgcggtaactgttttttggacaataagccacaaaaagctggggcattggactgctataatcgtaggcttgagtactcatggcatggctgaccatgctctgaagctatttcttgaaatgcgcagaattgatgtgaagcctaatgctataacttttgttggtgtgcttaatgcttgtagtcatgttggattgattaacgatggtcacaaatattttaatacgatgataaatgaatatggaattaaacctactatagaacattatgaatgtttggtggacatattatgccaaacnnaccatncnnncnnannnnnctatcgnaggtttaatttccatattcatttatcatcgcannnaaatatttgtgaccctnnttaatcaa

SEQ ID NO: 12384 - DNA, 449 bp, Gossypium hirsutum
  misc_feature (5)..(5): n is a, c, g, or t
aattngtcagatttggtgttaaattttacggagttttgggttcaaactcatgaactgccatcaagtctaatgaatgaaactatggctaatcagtttggagattgtttgggaaaatttcttgactttgataattccaatccagtctcggggaatcaaaaatatatgcgcattcgtgttcggttggacgtaactggcccgttaaaacgcaagaaaaagatccagattgggaaaggtatggttgtttacgctcgctttaaatatgaaaagttaagtttgttttgcttcatttgtggaagattgagacatggtgagagttactgcccttttcgtcttaaaatcgaaccatcaaaaattatttttggctgggatctatcactacgtgcggtaccgagacgccggaatacagtggtgagtaggtggttgcgtgaagttgatgggtcacagtgatg

SEQ ID NO: 12385 - DNA, 360 bp, Gossypium hirsutum
  misc_feature (348)..(351): n is a, c, g, or t
  misc_feature (353)..(354): n is a, c, g, or t
ctctttacctgaattcaaattccattatcaacagcctacccccaaaattcttaaggcttgaaactgcaacatttcctgtgtatgttgagacctggtgcaataaatataaaggttgagccatagttaatttataactttgattcttttcattgttaataagtatttattatttattatttatttttataaagtttttatgcctgcaattatcatattaattcgaggcgatcgtaaatattaaaattattaagagatcaaaaaatcaaaaaactaatctgaatttaacattaaaattaggtatggatgaattgtgaatatatattatcttaagaataccgcctcgctatnnnngnnatgtca

SEQ ID NO: 12386 - DNA, 610 bp, Gossypium hirsutum
tttgagctttaccgttggaaggtgaagttgccacatttgtttaattcttaatgttctatttatgtatcaaaatttttgcttttttagcttactgtacataattttttttccttgtatctgaatcttaattgacttatctgtttatttactaaaattaagggtctcttttacatagcttgatgcttttgccccatggttagttttctgcaaatgctgtataacaagtgaaatatgagatttggaatgtaattttgaatactaagccttatttttattgaatttcgtaaattttgtaggtgttgaatatctgaaactaggggggaaaatggcaaatgatctcaatgctgaaatgtccaagaagacagccatttttggacttaaagtgtgggaagttattgggattgttgttgctttatttatcataatcatcctttctttgttgtcattttgtttaacttcaaggaagaagaaatcaagagctagaaataagctcccccttactcaaatcccatctatatctaaagaaatcaaggaagttcgagtcgaacaagtatcagccaacgatttcgttcctcgggacggtattcttctcaccattcatgaaaaaaaa

SEQ ID NO: 12387 - DNA, 641 bp, Gossypium hirsutum
catggctctaataccaataaaatgtaacagccttcgcccgtatccctcgtcggaacagggttcgaggtgctaccagatttaaactcatccatttagataaaaccagaccgtaaaaatttttgatcaattttaaacttttcatacacacgtatattatcctttaatcaggcttacaaggcccaaaatattcatgaggcattattaaatatttaccaatatcttagtcttgtatcatttacttactcaactttacaaccctatacatgccatagactcgaaacactaagatttatttacgccgatagcgtagacttgacaatgtgataatatctctgatggcctccaactcgagctaacctggcaaccctagggaatatgggaaagaaaaggggagtaagctttacgcttagtaagttcataagaaaacaataagcaactcattaacaagtcttatcaatgtttacaacataatcacaaattcactacaagttgtcttcctgagcaatagtcactaaattatttataactggagctacaagactccaaatcaattgtcgttaattttcccttccataaaattttcagaattttaggtttggccaatcaataccagatttttcttaaagtttgacctgttccac

SEQ ID NO: 12388 - DNA, 663 bp, Gossypium hirsutum
accaatattcaagcattaaatcatacgcattcatcaatcacattcaccttcaagtgcctaatattcaaatcttaatatcttaccataattagtcataatatctttcaaggcatgaattaacttgctcatatgcatatatataaacataattaagccaaaagcactaaatatgtacacatccacaaaccttacaaaaccaaagttttaaacaacatcattataagcaaatgaacttagaaattcctagtacatgccatttataaacaaaccagaatgattaaaacttctaccaagttgatgaatggatagtgtgtgctttgacttgaacttccaactgaccgagatttccgatgaactacaaggaaagaaagcaactaacataagcaactaatgcttagaaagctcgtataacttaaacttaaacttaccaaacaagaatttactcaaaccattcatgcatagattcattaactaaaccataggcacattatatcctatacaccacaaatctcacaaggttagtgagttcatcaataaaaacatataatcctatcatgacatggaacctttataagtaaacatataaagtacacaatacatttgtcacatattcaaatagcataactcttttcatttcaaagtgttcgtaccaaaatcctccat

SEQ ID NO: 12389 - DNA, 700 bp, Gossypium hirsutum
  misc_feature (550)..(550): n is a, c, g, or t
  misc_feature (558)..(562): n is a, c, g, or t
  misc_feature (643)..(643): n is a, c, g, or t
  misc_feature (645)..(645): n is a, c, g, or t
  misc_feature (656)..(660): n is a, c, g, or t
  misc_feature (663)..(665): n is a, c, g, or t
cttcatgggtcagtccgtcttttgacaatgcatcgaacatcttaacagcattgttgattaggctgtctcctctcatattgtggaacacttgttgcaggtttttggggtcttccacttcttcgataaccggtttcttgttaaaggggtcgtaaggaggacggaatttggatttgtcaaattcttgtttggaattgtttttttgttcttgttcatcttcagagtctgagttagggggagaaaagttgaccttggtgttaattttggtagggtttggggtgcggggagaggaagagaagggggatgagagtattgtaaatctactatgggttgcagtgggtagataaaatgaagaggaagtagtggggtttgagttgttgagaaacgttcgaagtgagaagaaataggcttttctaatgaagaaagacagggatgatgaatgtttagatgaaaaaaggcaaagacatattcttaccttagccatggccatggatggcattttttgcggtattaatctcagttagaagaaagttccagaacttgaagaaggcgnacagagannnnnattgataccgcaaaaaatgccatccatggccatggctaaggtaagaatatgtctttgccttttttcatctaaacattcatntntctttcttcannnnnaannntatttcttctccttcgaacgttttctcacaactca

SEQ ID NO: 12390 - DNA, 331 bp, Gossypium hirsutum
ttttgggttattatctgccctttgcctttgtccttaaattataaatatttataatttaagtacttttattttcaaaggcttaaatatgcatttaatttttgaacttgaaatattctttcaatttagtatttatgaattttttattccattttgatgtttaattttttaaataaaatttcatttttttaaattttataaaagtttaaacatcttttcatattataataccacgtgtcacaatttctagattatcacgtgacatataacaattcaaaaactgccaaaatagtgaataaaaaagttcgggtaccaaatattgtgacaaaaaaaa

SEQ ID NO: 12391 - DNA, 452 bp, Gossypium hirsutum
caaaagcgaagccaaagcgaataaaaaaaaacaaaaaggaaaatcttcctcttgttttgcttgtaagcttactctctcttctgtgctaacttttctcatagtacattttgatttctattgtctcgatttttgaaatcttttcttctttttagtgtttctttctttggtttcgaaggggaaaaaaaactgatgtttcggtgttttttgaaaatcaggaatggagatttgagccctgaaagtactgcatttgtgaggtaagtatcagatctagtgtaaatttgttagttttaagatgtttggttttgctttttttccttttggcgccatatctgtttattttttatttaatctcacagtagatcgtaaatgtttggcttaattactttaaatttcttcaagtttttgaaatttgtctttgaatctgttagatcattggattcttaacggatgca

SEQ ID NO: 12392 - DNA, 405 bp, Gossypium hirsutum
aacgccaaccaaacaattcctaattcagatagtaatacaactatgaaatttaagaggttaaattaagaaatgttcgtcctatccttaaaactaaagctaagaaccatctaataaactgaaaaatctctcactttaagaacgaaacttaaactttattttccaactattgaaaatttaattcaaaaagtatggctttcaaaactctgtcgctctttttcttcgagtttctaggcaaccaaacagaacaaacaaattatgaaccagaatttccagaattacgcgggaaaacgataaaggcaattcaattaactccagaaaaaaataaattaggtacaattaaaaaaaaactgaaccaagtaaataaaataatttttttataaataaaaaaggtttacctatgtaggt

SEQ ID NO: 12393 - DNA, 367 bp, Gossypium hirsutum
ttttgcagattaaagttgctattcaagttattcgtaatgtccgtggtttaccctcaacccagaaccttccaaaacgtgggactttcatagattgttttgaatttcttcagtattcttttgggttccaggtattctgaaatatctttttttattactctgtttcttttccatgggaggacacatgatttaacagttatgaaatggtgttctttgtgttcctaatgcattgaagaaagtgaaattcatattgtgcattgtttttcagaaagaaaatgtagccaaccagagggaacatcttgttctacttcttgctaatgtgctttctcagcactctcggaagcaagcgttggccttgaaggtgatttag

SEQ ID NO: 12394 - DNA, 541 bp, Gossypium hirsutum
atgatgtagctcacgtaatgacatagctcgcaccttaataaagctcacaagtttacacagtacgcatattactactttacagacaagcttgcacttacatactttacaaagagctcatgtaattactttacaaaaagctcgcacagacacaccatacaaagtcagttcacacataacaatgttaattaatcaattcacacaaacttgacaaagtcaattcgcatatatattacagagccagttaatgcatgactacttgcaaaatcaattcaaacatatgttgcagtgacaatttgcatataaacacaacacggacattgtcacagctcgcatatttacacagtccacatattgacatagtatacatataaacacaacacacacattgtcacatgtcacatatttacacggtccacacattgaaacagtttgtatatgaacacagctaggatataaacacggatctcttataaacacagctttcatataaacaaaggtagcatataaacacaacacacatataaacacagctcggcacatt

SEQ ID NO: 12395 - DNA, 554 bp, Gossypium hirsutum
  misc_feature (117)..(120): n is a, c, g, or t
  misc_feature (530)..(532): n is a, c, g, or t
  misc_feature (538)..(540): n is a, c, g, or t
tcgacttgtagtcattaaatgaatttgactttttgtaattaaggataatgactttcgaacttgcttaggttagagttgatgttagtgctagaatcccaggcacggtacagactgctnnnngtttcttagttgtgggctgaaatgatttacccatctgtctcttcttcgaatctcgagactctaactcaacttttctcttctctttagctaattcctctaccttacaagctctctctacgagcacaacaaattatctcagttcaaggaaacccaccaacaatcggatgtcttcgtttaactcatattcaaatcttttacacatgatggcctcagtcgatacacattctcgagcgtatttgctcagtctcacaaactcatgttcatattccattaccgtcattcggccctgttttaactcgaggaattcctttctcttctgatcaataagcctttgactaatatacttcttacggaattcttcttggaacaattcccaattaattctctctcttggtaccaccgacaaaaannncgctannnttagttaataagtt

SEQ ID NO: 12396 - DNA, 584 bp, Gossypium hirsutum
aaatcccagatagttaagtgactaaaaaaaagataaaattaaatagttgagtgactatttagtaacttttcataattaggtgaccaaaaaagaaaaaaaaagacataatcaagtgactaataatgcaatttacccttatatttaattttaatttttttctttattagtcttggaattttgatttaatctataaacttagattccgttaaagtatgatggcgtagcactctcgattatcattttaaattgaaaaaaaaagttgaaatttgttaaaaaaatgttaaagtatcaagtttcaagattaatataaatataaaaaattttaaaggactaaattgaaaatattttactatgagaataaaaaaaagtattaaaaatagatttaatatgacttgcacggggctcgttgaagattcttgttgatctctaaataacttattaattattatttgatccctataatttgtacctcttattgtagtgggtttacataattaaagaatggtttaatacataatttagtatttgagtttgacactttttttaatatggtacttgtgttattttttggtccaatctgctta

SEQ ID NO: 12397 - DNA, 471 bp, Gossypium hirsutum
tttcttacttgccgacaatggcaacccagatacaaaatccatcgtgactcgatcccatttccattcaggtatcatgatcggctgaagtaaacctgtaggcacttgatgttccgctttcacttgttgacatattaaacacttcgaaacaaaatcggaaatgtctcgtttcataccatgccaccaaaactgacgtctcagatcgttgtacattttcgtactccccgggtgaattgacattcggctacaatgagcttcgttcagaatcatcgaaataagttctgaatttcttggaacacacaaacgacttctgaacctcaaacaatcgtcatcatcaatttgaaactctgattccatattcgaaacacattcagcccgttttgcaaccaattcatcatcgactttctgagcttcacgaatttgatgaatcaacaatggtttggcctttaattctgctactaacacattgtcgga

SEQ ID NO: 12398 - DNA, 455 bp, Gossypium hirsutum
ttttgtccaaaaacataaaaattgggaaaattgctctttaagaccttataattaataatctaaagcaatttcatgcaaattgcttctagaatccaagttttgcaatttattcaatttggtccttattttccaattggacaccttactcatagaatttcttcatgaaaaacacttgcatattttcatattctaggcctcataataatcataaaacaaatatttcaatgtcagatttgtggtcttgaaaccactgttctgactaggccctattttgagatgttacatgaggcacataggtgtgagattctgatgtatccgatagtattccgagtgttcaacgggtagttcccaagaaagttcaatgagtaatcttgttgaatacgtcaaagacgagaaagtaagttattatgtgcaactggcataggtatgtacattgaactcatgagaatgacatg

SEQ ID NO: 12399 - DNA, 731 bp, Gossypium hirsutum
  misc_feature (678)..(678): n is a, c, g, or t
tgaactgatcgacaaatttaccattttacctgaaaggaacaaggatacgatgaagtctccactgcttcagtccccattcaacagatagtaacctgataaaagaaacagaaattaagtcaagcaggtcaattaagataaagaaaaagcaaaacagcacgggtttacgtagaaacttatcacaatgatataaatggttagaaacgatttaccagaggtcaattaagataataaaaaaagaacaattaagggatgaaaagggttttttttttatagtggcatcaccgtgaaacttgcagtcaaagaagaaagatatgcaaaacatatcgaccagacttttctatgtaccccacacaccaccaaaaagaaaaagattatgcataattagacttatttttaagtatgcttttgaattttctttcataaagatgtaggatttttttgttcttttttatattaattttgaacttgatcatgatacgggaagggggaaaccaggttgggagggaaggggaagagaaaactcaccttagtgcaagtggaagctagagcaatgataaagagatgctgcttgttttcgctgtatgtttatttgtgaagctatagaccaacaccaaaagagatgctgcttgttttcgctgtatgtttatttgtgaagctatagaccaacaccaaaagaantgctgcttgttttcgctgtatgtttatttgtgaagctatagaccaacaccaaa

SEQ ID NO: 12400 - DNA, 629 bp, Gossypium hirsutum
agagatcgtgttgcagtatcaaactctcattttggtattttggactttgtatattatcattaaatggcatgtataggtgttttggctaatgtggcctatatgtcttgttgtgtttttggtcacttgagatggtttgtaaggtggtcacatatgttgatatgtatatatatgctcaaatagccatttgatatgtggtgtatggttgttttatgaatactttgcttgtgagattgtgtttagcattaattggttgaaattaagatgtgtatacaagttaagttttaggcacaatgtctcatgtatgtatttgaccatttaggtagatttcagaagtataattggtaagttttaaagtggtcaaatgaatgtgttatgaatgtcatgttgtatgtgtggatggatcatgttataaacttgaaattggttggttttgaaagctcaatgtgccatgattgtatgcaatttgatgtataggttggaacctattcgggtgagaaacatggcttggaaaatgaccaatttttgtccacacaggtagagacacggacgtgtgtctcagctgtgtgtgatacacggctaggtgacacggtcatgtgtcccctgatacttctatagaaatcaagtcagta

SEQ ID NO: 12401 - DNA, 662 bp, Gossypium hirsutum
caatcatcaaacttgtagctaaatattaaaccgagttttagaatgtatgtgggtttcacaacactattggggtttagagtttagagcctttcttgtctttaatgaagacagaccaagcacttccatccagtcagggatgagccaaaatccatggaaatatgttcattattcaatcaaatccattcggtttattttttattttaattttatgtcgtgggttttttcagagttggatcagtgctggaatttgtccatcatcgattaaaattaaaaattattaataattcattaaaaaataaaaatagcaaaaggaaaatcgattcaatcaattcgtattggcttgtggatcaatcaattcaaccttttatcttgaagtgatactttaactgatccttaattaaatcaattcaactaattaattcgttccaatttcgaaagtcattaaaatcaaattaattagttttatattactctattaaatttgtatgttttaaatttttcaaaaagtatattgatctacacttcttttattatgttgatattttttttgtaattttatatgatctttaattaaaaaaaactaaaagctatatatccaccaatcaagccactagttcagtggtaaatgtgttaattttaagttgattgatgtgaggtcaact

SEQ ID NO: 12402 - DNA, 625 bp, Gossypium hirsutum
acagtttgctaactcgaactgactgccccagtggacttagtacaatcacctcactagaaatactctcaactagaatccccaagtttccagatacagtgctagttaaataggaatgtgtggaacctatgtctgccaaagcaaaataaagtacatcataaattaagaacgtaccggtaataatgtctaaagcatctctatcttctcaacgacgagcagcataaaccagagcaagctgcctcgcctcaatctgtccagcacctctgcctagtgctctctatctacgacacataccattaccacccctagcctgaccacggccccttagtggctgctgaaccaccctctgtggctacgcaatactagagctcgcatctgatcggcctttagcggacactcccgaatgcggtactccaatgacccacacctcaaacatgccctggtcctcctctaacactcgccctgatggtgtctaccataatctccacatagctacaatccagtatgagcaacaaagggcccagctctaactgacccatcagtcctggcctttttcttagacctatataccgaactcgaaggctccgaatccctcttgttcttacctctttcatgctacctaaaaaaa

SEQ ID NO: 12403 - DNA, 634 bp, Gossypium hirsutum
tcaagacaagtctattatatattataattacgtcctatatatagattcaatttaaaacctagcatacatgtatttatgtaacataatcatcttatgctcatgcaaggtacgcatttacccagaaagccaaggccacacttgatattaaagtatccaaaatatatcaaatggttgacagcttaaatcatgaaccacatacaatatttatcgttattacttaagctaatcaaattagaatataaacacctaacattaaaacaatgtcacatcttatattttccatcacatgataatgaacataccattatatgttttatctatactcattcaaggtcgaaccttgctgtctaaaaatcatatatgcacccaaacttccatcataaattatcaatagatagactcattaaacatttgactaagaatttttagcatactatgcaagccattatcaaaacatatagtgctcatcacatataatatgcattcaaggcacaccacttagtaaccaagattaatataagtcttacctatcataaccgatcactactataataatttagccattttcgcatgcttatatacataaccaactttcaacattttcgaaataaaaaccagcctatacatgacatga

SEQ ID NO: 12404 - DNA, 513 bp, Gossypium hirsutum
  misc_feature (30)..(30): n is a, c, g, or t
cttcagaaacctagagggaagatgaagttntgagagtctgtttctcaacatccagtaggctatcaattatttaaaaaaaatttaaagtggtgcgacttaatagcccgtcggcacctaaaaatatttttttttcgctttttctcttataatgtatgcctttattttttaaaaacatgagtgtcgcctgatacagtgataacatcaaaaaatatatttcttttaaagtctaatgattgcatgatgattaattgaaaaaggaaagtggtgccgccaatgttcgagacgacactgataaatactgtagcaaacaacctatttatgtaaataattagtctctaacacaatttcgtaattaattaattagtttttttatattattttatataaaaaaaacctaatataatgcaacactattttaacaggtttcgtatcgatgaaatatgaatacaaaatcataatatatatatatcgaaaacatatcaaaatgccatcacttaagacttgtaagtaaag

SEQ ID NO: 12405 - DNA, 583 bp, Gossypium hirsutum
attatccctttcctctagatctttgattgcctctttaggctctatcttagttcctaaaacaattaaagaatccttgtctcatcctggttcgtatgaagcaatgcttgaaagatacaagctctcgatgacaatcacacacgagatttggtaaatttacctaagggtaaggcaacaggttgcaaatgggtctttctggtcaaagttaatcaaaatgactcaatggctcgacttaaagctcgagctgctacgtgcttttcgtcatggtggtctcaaaaaaaaagtctatgtggagcaaccacttaagtttgttgctcaagaagagtatgggaaggtttgttgttcgaagaaatctttgtacaaagtagagtcctcaagcatggtttggcaaattcaatgaggtagttcaagagtttgggctgaaaaattgtaattataaccactcaattttctataagcggaaaaaaactagtatcattctccttgtggtgtatgtagttcatattgttaatgttgtagatctaccaaaaattgtatcattttggcgaaaatttagtatcatggagcaagaagtagaatgtcctat

SEQ ID NO: 12406 - DNA, 581 bp, Gossypium hirsutum
gggagttctggtgactgcatgcctggtggacgtgatgacactactactgttgtcgattccggtgccggaatacctcctcccgccaagtaagtacagcgagacctttcttttctttaactgtttttaagcgagaccttttttttctttaactgttttttaaaaaggttgcaatttcaaaataataaattaaattaactaaaattcgaaactttttttcccaccttgaaaattatatatatttttgctataataaatggtattaatttttcacctcttgacttgctagtattatataaaattaggtttagaaaaaaaaaccttaaaaaaattatagttaattatttgttttattaaacatataattgaaaaaatcacaaaaacttccaattattttattttatttttaaaaaatatgtagatattttttatttaaatttcttctattttcaattaaattagattgaattatgagcattaatcatgcatatataaaattacgtggtatatttcataagaaggatcaaaagggtaacacatccaaccccatgtgatggtgtgttcaccgctctaagtatggctta

SEQ ID NO: 12407 - DNA, 515 bp, Gossypium hirsutum
acacctcgcttccccaatcggttttgtcctcatatccacagctaatgacatgaatagcttctttaaggagggattctggagttgcagactgcggaacaccaccattttccataagtgttgaagcaacaaaaactgctgattgaccgaaccttttttctagggtcatctgtgacagaagatgtgagttctcatcatcgaatccagcacctacaaacaaaatgaaaataattcaatatcacaacttcaaaatttgtgtttcataagtaaaaccaatacaccatagttgcattttttatgatcaaaactcaaaagtaaaaccaacactagcatgggcagaagtcaacataagaaacacatcgggcattactaacagacattaaccaaatatttcatgcaatttgtagaatactgaacagaaatagttagcatatttctgcttaagcacaaagtatatagggtggaataatataacccttaatgagaaaataatgtcgaacaactccacaatgaaactt

SEQ ID NO: 12408 - DNA, 430 bp, Gossypium hirsutum
aatggtgttgctgagtcgggtgacaagcctgtgaaaatggaaactgatactaaagtaagtgatttttctctgcaatatgtacatgaattgccagagttcacattgtagccttttaggccagtgtgttcctgattcgctgaatttttagtgtgggttacttatgtggtatttttttacagccttggttcttgcttgttttggttggttggtttatgcattttgttctggctgtcatgtaggttgaggctcccaagaagaaggtaaagaaaacaaacgtaccagtggcagagctagtctatggtgcaatgttgcctgcagatgttcaaaaggcagtagagaaggagtttgaaatggctttgcaagacagggttatggaagaaaccaaggataaaaagaatgctgttgaggcctatgtttatgacatgaggaa

SEQ ID NO: 12409 - DNA, 631 bp, Gossypium hirsutum
  misc_feature (348)..(348): n is a, c, g, or t
tttttttaattttaataattaataacttttactttttccattaacagtttattggaagaaggtggctctatgtttacctttgaaggaactagcaataagtgttctctaaaaactgtaattaaagttcacagtccacatttttattggaaggtaaatgcatttgaaatcaatcgttcaataaagataccatatgattatcttatgttctcatgactttttacttgaaatgaattactttgacctacactcctgtcagagacatatttccatccccaatttccataataaaaaatatcgtgattctccctcaccttgaaaaaaaataacgtatacgcaaactcaataatntgtatgactaactacaatgaatggaatgaacttatggaaactgctttccttatgagagagatttcaccaattaatgagaacaaataatttttttttttaggaatgacacagacagaattctggcttatacatatatatatgaatggggattttttttttattgaaaaaaaagacggcctgctcaaccttgggatggaaaataaaaaaatgacacaatcataacaatgtggtataactaccggtacctgcgttcatcatatttgccttgttaccaaaaaataaa

SEQ ID NO: 12410 - DNA, 640 bp, Gossypium hirsutum
  misc_feature (94)..(94): n is a, c, g, or t
attttattcaaggggaagcaacagagatatattgtggcaaccgatttgttgttgcaattgtaaacaatcttgtctttcatggcaagacaaagcncttcacgacaaaatatcactttgtaagaaaagtcgaacaatcaaatgaagtgaaattggttcaatgcagttcaaaagaccaacttgctgatattctgacaaaacctctcgaaaagatgaagtttgtgttaagcaatggactgcaatgcaacaagtgaccaacagcaatagcagcagcagatcaactagcatgccagcatcgagacagaaccagaagcaacttagcattttgtttctttagttttttttttgtaattcaatcaagttaacttgtaacttgatatctaaagttagtaaacttttgatttgaatttgatggatgtaatagctgacattatcagattttcttttgtgtatcactcaagttagaaaattagtcaaattagtgggagcagttatatgtttaggtaactgtcaagttaattttgtaacttcaatatatttcaatttttgaatgaaaaaaagtgttccttcagttacattttctttggccttcatttttgttttagttttgattgctgtttgggttgctcttgctgcaattatt

SEQ ID NO: 12411 - DNA, 648 bp, Gossypium hirsutum
gtaaggatgatctggatccatttccgaccgcaatacaggattcaaccagggtattttgcattcatttttttttctttttttggtctaaataatttaaagttcttacatggttaagtgaataagtagaatgtcttagaagactcataaaattctaaattttgtgttcatttcatttagacccagcaatattagacttgagactgaaaaaataactaaaacattaatgatactaatataaaaatgcctcaaaatgaattattaacgtgtcaaagttaaacaaagataaattaacttaaacacaatttttgacatagcaaaatgtacgaacacaatacagatacacagatttcaggtctaatgtcattgaagaggtgcaacatgtgtttatgtcactgtttgcctcaccgtatagggtaattgcaggggaagtcctttgcagtttcatcttgaagaacaggactgaatgcatatcgttgcaaattttgcttttgcaggttagccaggatatgggaatagaggcacctatacctatcagctcaaaattgagtgatttcaataacatattccgaaggatagtaaatgctgctgagcctcctcatttgagcattcctgaaactgaggctggcagaagtcggaagcagtaccatc

SEQ ID NO: 12412 - DNA, 617 bp, Gossypium hirsutum
acaattactgaataaactgtattagttcctacaatgagatatgttctctcaagattcttttatatggccccatactttctcttcttggtcaatatatggccccatgccatactgacgaatattcatatatttaatcttataattttattaggataaactcaattattacctcttatcttatcttaaaaattcttcttcccccaacaaagtaaatctagatttggtaatataaaagtatcgatcttccatctgtttttctcatctaattgcttataatttatttattgtttagagaaaaagtatattgcttatagatgcgatttttttgcattgttttattttatatgaaatattcatataatatattattatgcagaattcggataaattttgttagtttagtctattatcatctcgattatggtgattaggttaatagattatcaatcactaaaattcataacttaatcgacttaaaatatatttattaggaaaactgcataaaaaatcactaaattattaataagtttatgttttaactactcaactttaaaaagtttcaaaatgatcactagattatttcaactttgaacgtcataaatttacgaatcaccatc

SEQ ID NO: 12413 - DNA, 689 bp, Gossypium hirsutum
tctaagaacaaccaaggcggccaagaaaatggctggatatagaaattgtcttttcagtctaaattcgatgaatgagattaaaataattatggtgaaatttgctccccattttttcatagataagttaaaaaatgttgctttaaagtaatatggaaaatataattatgttgtattttagaaaataccgattttttattttgattttttaaaattgctttgcaacacaagaaattaacattttaatcaagtttactatttataaaaaaaaattatatttttaccatacattttaatctaccatttaaatctagtgaagaagaaaggtttctttattagcagacgtgagatcggttaataatataaatatctttaaaaaaattcaaagtaatacaacctttttaataataaccaaactagtacaggtattgtaagttagagagagaaatcagttcaatgaaatcgatttttgcatttttaaccatgaatcccaattccctgagtccctgtcaaatacttggaaagaaataaaaaataattaaaaagaaaaaaattatgattttcttaagaaattcaagaagagacatgtcaaaaaatcaaactaaaattgatttcgaaccaaaaagcttacggaatgttggaactaaaatcgatttaaatagattgactgactgctaggtattcatagcgtg

SEQ ID NO: 12414 - DNA, 1120 bp, Gossypium hirsutum
  misc_feature (359)..(359): n is a, c, g, or t
  misc_feature (461)..(461): n is a, c, g, or t
  misc_feature (901)..(901): n is a, c, g, or t
gaataggacaatcgatactcgccgtactaggaacggccgccggatccgttccgtcgggttcttcctcgtaacgttatctcgttacaggcgtctaagaacaaccaaggcggccaagaaaatggctggatatagaaattgtcttttcagtctaaattcgatgaatgagattaaaataattatggtgaaatttgctccccattttttcatagataagttaaaaaatgttgctttaaagtaatatggaaaatataattatgttgtattttagaaaataccgattttttattttgattttttaaaattgctttgcaacacaagaaattaacattttaatcaagtttactatttataaaaaaaanttatatttttaccatacattttaatctaccatttaaatctagtgaagaagaaaggtttctttattagcagacgtgagatcggttaataatataaatatcttnaaaaaaattcaaagtaatacaacctttttaataataaccaaactagtacaggtattgtaagttagagagagaaatcagttcaatgaaatcgatttttgcatttttaaccatgaatcccaattccctgagtccctgtcaaatacttggaaagaaataaaaaataattaaaaagaaaaaaattatgattttcttaagaaattcaagaagagacatgtcaaaaaatcaaactaaaattgatttcgaaccaaaaagcttacggaatgttggaactaaaatcgatttaaatagattgactgactgctaggtattcatagcgtggtagtcggtattgttttctatcagtcaaaacgttttgatttcagtaataaatttgggattatagattttagatacaaattctgatttttttttaaatttaattatttattttaaatatttantatttttggtatcaatcaaattttcattaaatagatctaaaatttattgtctaacccgtacggaccacaccaattatctggtataacacctaaagtcggtttttttttccgatttaatttaaatatacctaaaataattttcaaaaaatttaattaaaaaatgggttttttttttttttggccccttttaaagagccccaagaaatttttattattttt

SEQ ID NO: 12415 - DNA, 644 bp, Gossypium hirsutum
cgtctccactatagttatcgactagcaaacattttcttctttttctcatgatgaaaacatgctatgttcaataaaacgtatttcatggttgcatcatctgcggcttgagttgttaaaagtagtcttaccatgataattataggcaccgcttgaaatgttgtctctgttttttactatttagtttagtctaaatgcttaaattagagggaataaggttgcgttcagataatggtcaaaattttacagaactcttcaagagtttttcacttattcaaattagtttgcggtaaaaaggttaaaaagaattctcagagcaaatttgtccttttgaaaataatcaaagcaatttaattactattaattttgaaaaaaagtttgcattttagtcatcacttttaaaaataatcattttgaaaataatcaaagtttgcattttgaaaataatcattttggtcattcggaagtatttttaaaatttttttccacttactttaggtaaaataaaaaaattaacattttagtccctaatcttttaatataaatgaggtttaatccttttctaaaaggatgaggttaaccctaaaattgaagaaaagaaagggggtttgtggaaaatctgtagctgaatcgtttttgttctgctt

SEQ ID NO: 12416 - DNA, 658 bp, Gossypium hirsutum
gttatggcttcgagaagttggattcttgggccacattgtttcgggtgatggtattagagttgacccaggtaagatctcggctattgttgaatggaaattatcgaagaatgtgactgaggttagaagctttccaggcttggccgattattacagatggttcgttaaaagattctcaatgatttctactctgatgacgaagttgttacagaaagacgtcaagttcgaatggacagaaaaatgccagcagagttttgagaaattaaaggcattgttgatgagtctccaattttggtacaactcgagtcaggtaaagaatttgtgatttatagtgatgcttccttaaatggtgtgggatgtgtacttatgcaagagggtaaagtcgtagcttacacttagagttggttgccatagtgtttgctttgaagatttggcaacgtcatttatttggtgagaaatgccatgtctatagcgatcataaaagtcttaagtacttgatgactcaaaaggatttaaacttgcagcaacgaatatggttggaactgttaaaagattatgagcttgtaattgactaccatccagttaaggcgaatgtggtcaccaatgctttgagtaggaaatcattgtttgccttgagggctatgaatacacgattgacatg

SEQ ID NO: 12417 - DNA, 550 bp, Gossypium hirsutum
tcggtttggacaagacacattacaaacatgcaataaaatatatttataagctgtagaaattaagatgacttaataacatgtaagaaaacacagttaacttgcataattaaatttgtccatatttaagaccaattaaacaacgaaaattaattgaactatatttaactaatttaactaacttaaataattatctcagcaactatgttaatgactaaattatatggagctgaatcaaaatttattgagctgaattggagctggttcgagctcattgagccgaaatagagcttaattcagctcgcaacaaattgcacggagaactcatggaattagtccaagcttcttcgatgtgtccaaccaaggtctcaccccaaactttatccagtagagccgaaacagcctccttgaaatgcttggctcgtgatcgagtgatagggccttggggcagctccaaaggttccttgctcgagctagttgtgacttgggtcgtggccgtatcatcctccccctcttcaaagcaatttgccctcaaataggaatctgcatcaaa

SEQ ID NO: 12418 - DNA, 454 bp, Gossypium hirsutum
gttggtttgattggtattgcttagaagtaatattggatttataatccatcgatgtaataggtcccttttctttctctttatgattccttatgataataaatgacctacttaactcagtggttagagtattgctttcatacggcgggagtcattggttcaaatccaatagtaggtagaacttattagataccatcgatcccggtgtctaataagtttttctacccaccttctttttcttttattgattttctatctttttcatcctattctatttccgttttcaattttcaaatttttcgttagatcaaaatctgatttcacttttgattgtatttgattctatttaatcggcagaatcaaaatgggatgtataaacgaaagttctgtttctacggaaattctttcgattaaccaactcgttacgaaatcgcgttgatagcctcgactcgtgacc

SEQ ID NO: 12419 - DNA, 471 bp, Gossypium hirsutum
tatagcttatcgggtcattcgagaatgtaatatggaattagagcccgcggggaaggtaaggaaattggacattcaagaattggaggaaatttataatgatgcctatgagaatgctcgcatttataaagacaaaacaaagctgtttcatgataagaaaatagctcagaagcatttttccgtaggacaaaaagttttactttataactccgtattaaaactattcccagataagcttcgatcttgatggcaagggccttttattgtgacccaagtattcacacatggtgcagttgaaataaagagtgaagaaacagggaaacgacttgtagtcaatgaccaacggttgaagccattttacgagaattttcaggcccactcggtcgagaaaatttagttagagccaccatagaaccattcacggcgttgagctaacgacgttaaacaagcgcttgttgggaggtagcccaattt

SEQ ID NO: 12420 - DNA, 616 bp, Gossypium hirsutum
gttgtgttcatttgctcttagtagggaggtggagatattagaaatggtttaagaacatttattattgttttagttcaatttatggataaaagttcgttttttgttatgtcctagttaatgagaagctccatttttgaaccaatattacgacctgtcttaatcatatttcatgaatccatgcttaagctgtgaatctgagccttcggtggcgataaatcacgatgagaggatatataccatcttataatcattaattatgtagggggtcccaaaagtacgttttcaacatgcatattggttcaaacaaagtttttacattgtaaaatatatatttgataaaggtttacataaaaattagattaaactttaaatcaaatggtaaagattaatgctatggtgttttcaagtttggttatgtgtgggattttatataaaaatattttaaaacaataaactaaactcttaataatataattttatataaataattatttttagaggttttttcaattgagttgtttatgacatcaatttagtaaaatgtttaaataataatagagatatttgagagatgtttttatgcagaatgctcgttgtgcaattaccagacaaaaaa

SEQ ID NO: 12421 - DNA, 640 bp, Gossypium hirsutum
gaaagaacacattgcagaatgttgaatgacaaaactagcaaatcctcgtgattcaggtatcatttcaagatgaattctcctttttcaacttcgcgagttcttgcctgacaaccccagccctctgcaagatacattatatatccggttaagctcagatcaaggtttcaagaaagccttttggattttgagaaaaaatacaattgtgcataaatccggtgagcatataagaagtagaacgaactgaccttgatcttagctaacataagcttgaaccgatcaaagtcgttgagagatgctcttctcttctgaacaatcaactttcgaccccatgagctattctcccacttgttcttaacatctgccattgtcaaataaatgaaataccaattagaaagaaaaaattgtttgagaaacaacaacataatgttggtcaaagttattgtacttaccggccttctccatagcttcaatcaatgtcttcttctttggaacacggggaatgtcgattgtgatatctgtcaatgtaagcctcttgaagttcatttggcctctgaccatatctggagcatcaacaagtgcctgacagaccaggataaaagcaatacacataatttcttagcacacaaatattaccaatcta

SEQ ID NO: 12422 - DNA, 662 bp, Gossypium hirsutum
atttgcacattcacaaaccacaacaaaaccttcaattcaaaccaaaatcaagtttttatacctattatatcattacatatactcaaatatcctaacttaccaaattaaccacatacatctatatgcatattttactaatttactagtttaaatcatgcttcaatatacctattaattaaccatcatctaaccaattcaaacatacctcatgcatgattaatccatacccacataaattgattagaaatataatcaaagtataactcttaataattacacaaaccaattttacttaaaccattatagccctatacatgccatataaaccttagtacacattgcaaaagctactcgagtgagttggatagcgtggcttgatgtgttgatcaaatctctcgacctcacgttaatctacaaggacattaaagaacacaagtaagtttaatgaagcttaataagttcgatagattaaacatagatcttaccgaactcaatataataaatttaatagtaaattattcatacattttccctgccaatcacaacataaattgatgaacacatttctttcaaatcaatatcaataataaatgataaatctttcaaatccaatcacataagtcttttatcaaatcttaccgaatcagagaactacttacgga

SEQ ID NO: 12423 - DNA, 675 bp, Gossypium hirsutum
catattggaggagtccgatcagaaaacaaaagaaaaagaagaagaagacgagtttagtgagggagcacgtgttgagggtgaccaatattgacggagatggttttaaccaagcttggtttgctgcaactattgttaaaccagtggggaataataggtacctcattcggtttgagaccttgagaaccgaagagggtactcgtttcttagagaaagagatggatagcttgcacattaggcctcctccaccacatattccggtgcctgaccagtttaaaatgtttgatcacgttgaagctttgtacaaaggtgggtggtggaagggcgtgattgcagaggttcttcctgatgaccctaaatatctggtctttttggctgaccatgagaaattggaatgtaaacactctgatttaaggccacgccaaggcaggattgatggaaaatgatctaaagcatgtgcacatatggtcataaaagtagtcaagcttggagggtttccttttctgctttatatgcaaaaattcactcttttcaacactttttttctttttggattttgagcgactccatattatgatcataaattgttttttggttttggtcaatacaaggttgaagcacttgcttcgagtcaaaacatattggcataattgcaaaaagcatcctcaacacttaagg

SEQ ID NO: 12424 - DNA, 480 bp, Gossypium hirsutum
atcttggtgttgcagtcaattctaagttggtgtcgagttaatttgtgatatcatctcaatcgataatattattaatatatacaattgatggagttaataaagtgttcatgataaaactaaaatgtataaaaatatcaaaataaaattttggttgagaagtaaatttcaagttttgttaatccaatttgcatgggtttaaatcccattatatacatatttttatcgggtttttttaaataaaaaactaaaataccctcaaataatataatttattttaaatgtgaaactttataaaaaataagttagctcaacattttacttatactcataaccgcttaatttttcttactcttaaaacaaaaaattaaaactttatagctcataattgtagttgttgagtttggacctagaattgactggtgcattggtccggagtaagggagagaattagtgacccatgaattagtatgaatcaattga

SEQ ID NO: 12425 - DNA, 662 bp, Gossypium hirsutum
tttccatattgatgccatagcccagctatagtcttaaatgatatggtgccatggacttctcttttcgtaatcatgtttaaagtcccaacaacccttttagacgacttcatagagatagatacaagctcatcattctcagacccactctcattagaacatatcgaataacatacaactaagacacatgtgcaaaatccaaatgcctacttgaactcaacaaatctataccaaatatgcataccattcccaacaaacattagtacagtgataaacatatttcaataatcacacagcgggtcgtacacatatcatactgtaacctttagaataacgacattatcttttagccactctcttacaaatctacaagtactataatcatataaacaatagtcagcataaagactcacttgattctcatcaatggtaattcaaaactctagatctaaacttctatcgtgtaatcaacagtaaccactactaaagaacaagaaaaatcattaagatctattcatatacccctttttctcatcatttttaacattgaaagtccccaagaaatgtcctttttatcctttatcttactaatcatccaagtctaatatattttctctttacaacacaatatgcagagtcataaatcttaccttgaggtggtgaaa

SEQ ID NO: 12426 - DNA, 746 bp, Gossypium hirsutum
aatgaatttgttcccacattatacgtatttatttcatctttggtttcaggatattcttttgaggaggagatatcacatgatctaaatgctttgtttgagattgtttccccaattataagataccaagtttcatcaatgaagttttacatacttgctccatatattttcccttcattttctggatttgcaacgcttcacaaaacacattggagagcctccatgaacagcaagacaaggttcttcaaatgattaaataagtagctttcctaatcataaagagacagtttagtcatggtagtatattgaaatcattaaataatgatgtaattaataggcgaaaagtctaaattcattataaattatttgtgttttaattatatattttaatcggttgttctgttatctcaagataactcaaaatgaattgcatgaagtattaatagctgtcgtgaatgaaaataataagagaaatgaattgcatgaattactatctatactaaatttgttttcttgctaaccacaaaagatgatttaaaaattaaattaatttattcgaattattatttaattgattgtaattaaataattgaagttcgaaataagaattaaattaattttttttgtgagaaaaaatctaaaaaactacaaaaatatcatttagtaaaaaaaacgcctgaaagtttattccaatccattaaattgcgagcttatcatttagtaaaagaaaacgcctgaaagtttattcc

SEQ ID NO: 12427 - DNA, 486 bp, Gossypium hirsutum
  misc_feature (460)..(461): n is a, c, g, or t
tgcaactttctttgaccgctttatctcactggggctgcaagtaaacagaattaaatatatattcttataatcataaaatattacattacaatattaaaaattcactgattttaattgaaatagtaatactaaatagctattgtgatggtgttttgagttcacattgtataattaaaataatggctttttggtaatttaataattgagttggacttagacttgtccataggccgagttcaggttagacattgacaaaattttaagctcgcgtttagtctgacccaaataaaaatgctataactctgacttggtctggcctattaaatatttttatataatttttttaaaaaatataatacataaaaaaatattaaaataaatgtttcccaacaaatcgaaaataatttttttaaaaaaatctttatacttaaataacacttgcataagcgcaacctaatanncatttactttatcataaccgaacaa

SEQ ID NO: 12428 - DNA, 620 bp, Gossypium hirsutum
gactcccacgtagaatacgtccttacgtcgccgtactggtactattgctaaactatttagtccttcgttattttcagagcagcagccgctaagcggagaaacttgcatcggtgagctgaataagatggcttggacggccaaatttcagcttccctttagacaatcattttctcaatcccgacatttatgtaagtttcattaaactatattttcatttttcttttctttcatttcttttaaatatttgttttttcttttcattttcgacagttcatggaaaaattagacctttgaaaacataggttcatatttttgaacctaaactacaaagcagagcctcaaagtttgaatatatgctaaatatatagagaaaatgttttaatggtgaattttatgctcctaatactttaaattcaagtctctatacttaggagagcatttgggagaaaaaggagcgaaataggaatgaaaatcgaaaaatcggagcaaatttcaagagccacacgggttgggccattgcatacggtctagacacacgactaagtgagccacacgggctatcacacgaccatgtgccagacagtgtggaaatcgcaaattgcactctaaacacgcagaaa

SEQ ID NO: 12429 - DNA, 693 bp, Gossypium hirsutum
cttagtgaattcaatgaaaggaacctagttctaaaaaagatccttctcatacaaaaagacttcagaggaaaattgatgccaaactgggaaggactatatgtagtaaagaagtcattttctagaggagctctgattttgaccgaaatggatggaaaaaacttgcccaatcctgtgaattcagactcagttaaaaatacttcacctaaaaaagaaaagaaaagagagagactaaggcgaaaacccacaaagggcgctttgagaccaaaggagttttgagttgaaaacccagaaatgggcaattcaaattttgatcaaaggtggggcatgcggtaatctcactattcctgaattaacaagaaggaagaatgctacattttggggcatcaacaaaatactctggatcttttaagcacgcatcaaattcaaagggtccttgaagagtttgtgtaaagaagcttatgctacgatatctgaggcacctatttttatttttttgtatcttagcaaaatttcctatcttgattaacttattttgagttttgatataaataaaatttcatctttctgttgtgatagtctttttcaagcatgtttcattgaaatacgattaatggactaataattttcaagcaaaaggggttttgcatattactctgaaaagttcaaaatagtacaaagacctgaagcaggacc

SEQ ID NO: 12430 - DNA, 599 bp, Gossypium hirsutum
  misc_feature (38)..(38): n is a, c, g, or t
tttcacataattgacactcatcaccaactacatcaatnggacccaataaccaaaaattcgaattttagaataattttaagagttgaatagtgaaaataggatgtcatttagtactaaaaattctcatacatactgatactcctttattttgtcttgagctgatgaaatttttgccctttctatacaaaaagtgggaaaaaaaggtatgggtactaacatattatcacagtgaatcatccagagagaaacatagaaaaacatctttatctgaaacccaccatgattacaagttactaaagctggcaaatcgcaatctcccatatgtagtagtgggtaggacgaggtctaaaacgaaagcttgagactccaatggccacacacatgtctgtttccatcatcattgcctttgcttacctattcttttaaacaatatttttcatttgcttgagagatgtgaaagcttgttttctttcttttgttctttcgccgtgtcaatttttgaatgctagattttgatttctttaatccctttgtctccaagaatgtgtcctttttgctcttttagactacattcattttcacacttggaaattgttatg

SEQ ID NO: 12431 - DNA, 666 bp, Gossypium hirsutum
aatttgccatcatgccactccccattttcccttgttttacaatttgctactttccctccaaaatttcgaaaatatggtttatttactataaaacctcttacacatttcccttatttttcaaattagtctcatttaattaatattttaaatcacctaattcaacccccattttaaattatttttaaattccaattgaacctaaaatatttattttttcctaaaaattatttaaaaccataaaattaatttttctaaaaatatttcttttagaatattatttactgatttttagatgaaattaagctaactaattaataatataaaccgctaattaatccgattaattcccaattttcactcagaaccaggtaaacatacttgaaactactagacctatttttagggccttacacaatgccattctgtgtcctatttttctatgctacctgaaagggtaagaaatggggagtgagcttataatggctcagtgtcagactaaattctaaatcattacatataactgactacaataacgtatataaaagttcagtagaaattaaagcattcatcatgaaatacataataaatcaatgaataacaattttatataatgcaattagtgttttaaagttgccactcttccatcttatctaccctcgagcttag

SEQ ID NO: 12432 - DNA, 787 bp, Gossypium hirsutum
  misc_feature (703)..(709): n is a, c, g, or t
  misc_feature (769)..(770): n is a, c, g, or t
cgaaacgcactgtccaaattaaaacaaagtttaaagctttctaatcttcagaaaagaaaacaatagaaaaaaaacgaaaacgtacctaaaggttctgagattatttgttgtcggcctttaactccaattgctcgcgctactcgcctgaaacgctcaactctggcctcctgattgggcataaatctcacttgcacacctatatagaaataaagtggagttggaaatacatgatctatcttggtgacaaggacagagaacacataggatattgccacgtgttttggatcgatgagaacaatgcatatgaacacgaaatcgcatgggattggaaaggaatttccgtcgctaataaagaagatgaaaaatgcaaacataagccatgacgtcaatggtttgattcaatgttcccatggagaaagacgtaataaagtaatccatggacggacaaatccataaatgaataaaaagttctggagaaatgtgtcggcttccccctacaattgtaagtgtacaaaagtgtcattatctctattggattcaactcgttggttatcaaactcattggaaatttgcaggtaattcgttttctatgcactgaatagttttggaatgtctattcgatttaccaacacctgtatgaagtaaagtttaattgaaattgaaagcaatttttatttgaaaacgatttccctttcccatgagnnnnnnnttgataaccaacgagttgaatccaatagagataacgacacttttgtacacttacaatttnngggggaagccgaaacat

SEQ ID NO: 12433 - DNA, 670 bp, Gossypium hirsutum
acctccactgctaaagcatacaaatgattttgagaatttagaagtcatttttaattatatattgcaataatgttcttgttattaaatatagtgtttcttcaccatttaacttctgtagttcgaatttcttttcctatgaaacttagtgaaaagttcaagcttgtggacaagctgattttccaatcagtagactttgcattgaactcgtggcctgaaacgcttgaaactcagtagattttccaatcaatagatttttcttgtggtatttttttttcattcctcaaatttgttatctatttgtcgatataattgtggagaaaatatgtatttaatttcggcattttgtgaagatagttttggcgtttgttgtgcttagttaaaatgcaataggaaatttgaaatttaggaaattacagaagctaactatgatttgagttgtaatctctctttttcacttgttttatttagttgatcaagtttcttaacaattactggacttttacttttgtttgatgttaaatgaaactcgtttgataattggataaggcttaaattcgattacccttttagtgagaaatctctatttatgtgtttaatggtaaaagtcaatattttgtagaactagagataattacttagctatttgatgagttcttgacattgttgtgct

SEQ ID NO: 12434 - DNA, 477 bp, Gossypium hirsutum
tttttttacttaatcatgatttaaggtgatattatatatcatctttcttttaattgtgtgtttgctagagatattggactttttatctcgtgattaaagtttttttttatctttaatgatctaattatcatggtgataagtagaaatggcaaaaaaatcacatctgatgggtttcaacccgattcaatttgttaaagtttgattatttttttaaaaatttagattcgagtcaagtgaatttagaaatatagtcggattggggtcagatttaaggtaaatccgtcttgtctggaaatatttacaaaaatgtcattgatatatatattattaagttttaagtctaaactcaaaaaataatcttaattgtttccaaataaaaaataaaataattcaaaaatataaatttaattatttcaaaataaaaaacaaaccaattaaattaaatatgaatggggtgggaatcaaatctcctgttaa

SEQ ID NO: 12435 - DNA, 630 bp, Gossypium hirsutum
tataatgagtggaaaaatagacgcaggggaaaaagctaaaaggtcttcccgagaaagaaagaaaacgaagtaaacaccgtgagtgtgtacaataaaagctattcaaaaccagtcattgtaggccaaccaaggaccatgacaattaactatcaagtcctttcgagccaagaatctaactcaaggccaaacacgaaaaaacttcaattcacacctatcttgatgacatatggaaagttaaatcagaatttgttcaacgagcatatagcatccccgttttacttaaacccatgcaatctctattcccaaagtggtaggatacgaatactcaatacgagtaccatgcaggaataacaggacactcgattgagaactgcactgcattcaagaagttgatcgaaaggtttattaagatggggattgtaaggttcgatgatcctttaggacctaatgtggcaggaaatccattacctagtcatcctgaccaggaggtaaacgcgataatcgatagtgggggcaagaggaccaaatccaatgttgcggaaatgaaatcctcactaaaatgggtttagcaaaaaatgatagatgtgggattaatcatgcaagattgaaaggagatacccaaaggactga

SEQ ID NO: 12436 - DNA, 685 bp, Gossypium hirsutum
gaagtgattttaagtctgcaaacccctcgtgtccgactccggcgacggactcgggtacggggtgttacatggtctatactgcggaggcttagactgcctcagaccccatcttcttaaagtatgttttataataaattaaacttagtggccataaaagttgaaaggatatgttataattcaccttaacaagatgttgtattatgtatgctattattgacatgaacggtgtttgaaatgcatagttatagcccaatgacccatttaataaaaggttgtaattttataaatacggcctgcgtgtcgtgccttactactattttcttgtatttcttttctcatcttactccctggtatgtaaaacgagtttctgcatattgtaatttgcaagagttgttgtgggctagacgagaaggaagatgggccaactagtgtggatcgatagcttgtgaaacggcttacacctttaggtttccttttggttctcccattggcttgggttgcaccactttattttatgggctataattatttcatttatttattgctttatttattcatgtatgagatgctatggatgtctaaagcatgccaaattttaaatatgttaaaatttgataataatgaaccacattaattgatgagatcaattaaatagctaaatggactaaggtaaaccataattggt

SEQ ID NO: 12437 - DNA, 521 bp, Gossypium hirsutum
tttgtgggtgcattatttgtaaaaaaatttaagattcaaatacttttttattataatttctttacatataaaacaacttaattgggcccttttggctatgattaatcgctttttaggggtccattagggggaaaaaaagcaagagccctatgttggcttttatgggcgtaggcagtcaaccggccgagggtcaaacatccacttcccacaaacatatatatgtaatgtaaaattatccaaacttttagacaacattggcttaattgatggaaatattaattctgatgccatgatagtgaatataagcatttttaaatgatacaacatgccttttttttccttcttttttaatccgtggagcgatttgaaaattattggattattcagtctccaaagtttatatttaaaaagaaaaaaaaacttaaaaaggtcaatttagaaaatactgtcaagattatcaatttattgtcttaattttatgtaataccattatcttgtcccaacttatgtgaactaattcc

SEQ ID NO: 12438 - DNA, 655 bp, Gossypium hirsutum
gtataaacacgaattcaaaggccaaaacttgtaattcctataataattttgtccaaaaaattttgctcgtatagtcttcactaaaacaacaatattttgagctcttgaatttgaaataagattattcaaagtgcattttaaagttaagatatagctctttcatcattcagaatatctcaacccaaaaatatctagatctcatcaaaatgtgttggaaatcaactaattttctagacttaaaaattgaacctaagctcaatctcatctgaactcaatctgtgcatgtatcaatattaatacattttatatttacctaagctcaatcgaacttgaaatatgagcttaaattttgtacaagcaaaatattatcttattataaaataaatttcgattatcaaaataaaattcttgttaatattttgtaacaaatataatttacattatgtttgttttactgaaaacaaattctaatatatgatttcaggaaagttggtcaaacaatgaataaatatttatgcgggatatttaaacataaaaaaattacttttctcctgaaaatcaatccatcttctataaatcatttttttgaaagttatttttagtgaaataacataattctaataatcaaaattgcccggtatttgaatattgctta

SEQ ID NO: 12439 - DNA, 249 bp, Gossypium hirsutum
tacttactcattatcagtattttttttatctcttaattatgaaaatttataaaatagttattcaattatttaattttatcacttaattatttaaatttttttcttctttttttatcactagttggctaaaatagtagttttttaaattttgtataattgcaactttataagttatgtcaattaatattgattttaaaaaagaaattagctctcaacatttactaattgtgaaaattgaatttctttttt

SEQ ID NO: 12440 - DNA, 502 bp, Gossypium hirsutum
attaagtcctggcaactggaagaaaagaggctcaaagataaaaaggactctcagaacacaacaatcatactcgaatgcaccccaacacccaacaagagaactctcgaatatatctcagaactcagaaaacaaacatcaaaatgaccttaaagtagaaaacaagacaccaagctgaatagaaacaacagactcaaaaatcagagataaaggctcagaaaatcgttgtagcaaagagccaaaaccatcccgtacatcaagatattgcctccacgcttcactatcaaaagtctctttgtaacagcccgcttggcagaggcttaatatcaagatactgtttggcgtattagttggtaaagtcaagggtagaatttagtacgtaaagtatttgttttggcttagtggcgaactctgtgggattcgccatttcaagaacacaaagttttggcgaactccagggttttgtggactcttctactaaatatccttccaccctagatgtctt

SEQ ID NO: 12441 - DNA, 679 bp, Gossypium hirsutum
cgtgtgatccataaattgaccctaaattcatgtcatttcaaggccaaatcaaacctagccatccataccatttgagcatacattcaaggaacttaaaacatcattcacacaaacctaacataccatttcaaacatcctaattcatctaaccaatatgtcattcaaaggcaccacaattatatgaaaacatcatttatcaaaacaagtcaatattgccaaattccaagcatacaaacctacactgtctatgcatggaggagacaagccactcttccattatatcaataatcctgctgatgatataaattacattgggaatagggggaaacacttattcgagtacatacaatcccgactgaagggaccacccaaacttgaagtggggaggaaacaaaggagaaggtaacaattcaaatcaagttaaaaatactaattaccaacctccttatttgtagagaccccaggatagagtcaacctaagtgaccatactacatgtggtcaacgtttagatagaattgagggagagaggtagtcaatgagaacaaatgtcaaacaggtgcaatctgagtgcaccaactcaacaagaacattgtctaagcttgaggatcaaatgagccaattgatgaacatgatgggcgacatcaaaagataaattggcaaaggtattcccagtaacac

SEQ ID NO: 12442 - DNA, 563 bp, Gossypium hirsutum
tatttcggaacatctcgttcactcgtttgcaacatctcctctctccatcaaatactcctctacaaagcgaaacctaagttattaataatattgtggataaagcttttggtactaagccaggatacgttttgagaattggttatgagtctaagactaataaaagaaaatcaagtgcaactacaattgacttagaaaagtgtgtgaacaatacacaagatgagtttcaaaacttaagaatgattcaaactcaaatggaagcgatgaaagttggtttcatagttgttggatccaagtactcccacctcaatttccaagtttataataatatgcttttaataaaagctaatcaaaagaatagtttattcacttttaataataatcaattaaacaatttttttacatacctcatatggtttttgattgaataattgactaaaaaccaaatataaatgtttattgcatttatcaatatattaataatttcttgtagcttcgagttgcaccagaggctcaccattatcaaaattacctttgacacaaggcttgtattgagaagctcacaa

SEQ ID NO: 12443 - DNA, 623 bp, Gossypium hirsutum
atctggaaatcggattctcttggttttcttgattactgtctgtatatatatattatatgtaatacgtgctgactatcatctgttatgtctcttacaattgttcgagtataataataacttttgatatttataatattatttggtttcgataattcactagaattcttttaaattcaactcaacttctatatttatacttttatcaacctttattgaatttcacacgccataactaatatttgttacactaaaagaatgttatagtaaaagaagttagaatgctatataaagcctttacaatagttgtgtgcctatgtcctcaaattttgtttactattactcacttgtccaatttaatcaaggagagattataaaataggttaaattttgaggatagtctttgtatttatcgatttctgcaaatttaattttttttattttatttactcaaaattaacccttttatctttcgatttgctcatattcagtctatctattaactttttccattaattctgttgaaaaattaggtataataaaaaatttagtcccacaacttttaaaatttttatcaatttgacccctatttgattacaacacagcataatagtaggacatttccc

SEQ ID NO: 12444 - DNA, 535 bp, Gossypium hirsutum
cgctcgacaccgaatgtggccgcattctttcttcaaactttcttttcacagtaaaaagggatgatctttgctttttttctttcgcaacgagaatgaaatctgtccttttctctacgagtttctctttagaaagaatatatttttttcatttctttcaaaaagaaagcggaaaatgaaggaggaagtacgcagcttattatttcatttagtttacaaaatttgtttatcattcaatattgatgataattaaaataaagtttttttcctgataaatttaatatgttaattgtaattttttattggatttttttaaataataaaaggaataaaatatattcaaataatataattcattttagatataaaataatattttcataatttttataatcgagttagtattaaatttgacacgtgaaattaacttaaataataatataaatatctataaaaaattacaaaaatatatattgttttaaattttaccaatatatattaccaaaaatcacagtaaaaatcagtatcaagtgatgac

SEQ ID NO: 12445 - DNA, 749 bp, Gossypium hirsutum
  misc_feature (662)..(663): n is a, c, g, or t
  misc_feature (667)..(668): n is a, c, g, or t
  misc_feature (671)..(673): n is a, c, g, or t
  misc_feature (703)..(705): n is a, c, g, or t
  misc_feature (718)..(718): n is a, c, g, or t
taagagggccaaactttcattttctacagcagcaactaacaaatgaaaatatatttacataaattaaattgaagggtagcttagctattcattctcccccaaaatcatgaatatgaacataaaaccttgaattgaactcaaataagagtgatggacacaattgaagatagtaatgatgaaggcacgagcagagaagatatgattatgggagagttggcataccttagtaaaataataataataaaaaagattttagctttaggttttctttgtgaccgtctgacaaacgaaccctttgtcctttgtgtgtctctgtttgtctccagaaatatgtgatggttttctttattgtttgttgtttcatggcggaactttatagagagagatatgcacatacagatagatagatacaagaagttatcactaacggaccttagagttgatcttatttacacggatgccactaagaaaaatcattaaaaagatgcggtcaaattttttatgcttgcctaatgcatttgcatatgtatgaaaatagcctttggtggctcgcaatgtgtggtgtgtgcctgtggatcacaccgctagctactcggtagcaaaccgactatgtgggccattcttactttcatataatgtgtcgtaattatactccaaattcnncctnnctnnntgcgccattcgtactttcatataatgtgtnnntgtgaactacaantacagctattaattatactccaaattctccc

SEQ ID NO: 12446 - DNA, 561 bp, Gossypium hirsutum
  misc_feature (378)..(379): n is a, c, g, or t
  misc_feature (384)..(387): n is a, c, g, or t
aattcgttgcgtgttttggaaatcatgagatgatctcagtttttgagggcttgaaatatcgtgtcctaacatgctggatgtgatattttattccttcagaatgagtgaattttaaaatccagctcgcgttgttctcacaattttaaagggatcgttttaagaattattccaaattttcaacattaggacattaattaatcgattaggtaccaattttgggcattgcgagggtgctaatccttcctcgtacgtaaccgactcccgaacttgttttcttgaattacgtaggccaaaatcgatgttttaataaaatgaaatgttttacaaggtgatccgatcacacctcgaaaaaagatcggtggtgactccatatctaanncagcnnnngctggtacaaaatctgctgctagtctttttgccataggagcagttcttgcttttgtttcagaagctcttctcgctcaagtcgactctgaactcatggtctcatgtaaaaaaagaagaagaggggaaatcacccgagggtaggaccaatacggtagttgttaggattagagggca

SEQ ID NO: 12447 - DNA, 464 bp, Gossypium hirsutum
  misc_feature (7)..(10): n is a, c, g, or t
gtgatgnnnnatattgaagaccctaattaattttttttacctattatataaaaatcttttaaaatgtatataacaatataaatgtctctttagctagtctggacatatgatattaaaataatttaaaattttaaataaatacatttatgttaataaaaactttcaaaaataatattataacacgaaataggtaaagagtttatagtttttaaaaaatatatttatttcattgattgattgattcaatttaattaaagtggatgtgaatacatattaaataattaaatgtgtaaagttggtttatttaattaaattaaatgcaaaaaaattaatattaaaaatggaatagaggcacggtttagacctgctcatgggccgagccaaggcctgtttgcaaagtgggaagatttgggtaaaaaaaataatgcccgtttaaaaaacaggtcaggcctcggtaagtcatt

SEQ ID NO: 12448 - DNA, 640 bp, Gossypium hirsutum
actactcacttttaataaaattgtgatttagtccctcgtatttctttcacttatccaatttggtcactatataccaatttcatattttaagaaattgggttatttacttttgattctttaaattttctcatatttacactttaaccccttaaatactgaataattatactcatgtctcaactttttgacattattacaatctagtcccctccttatattaacattcttcttaattcaaaattttctttggcccttttcttttatcatcttcatatcttcttcttattttatcagtaaataaattatactattttaatttaatactacttttataatatatcaattttagaggtgttacagacatgtttaggttcatctacaaatataagttgtctttttgtattatgacctggccacgtagtaccatttagtattagttaatcattagataaccggtgagctaatatttgcttccattttgctttgcatgcaaaaaccattaaggacaatatacaaaatttattaatgcaattcatgaataattttattaaaccaaacaatttgaaaaaatgcaggtgtacatagactaaaaatactacacttagggcactagatccaacaccatcctcatacgcaaatg

SEQ ID NO: 12449 - DNA, 460 bp, Gossypium hirsutum
tagtttgtttttgtaattattttaagaagacttttgctaagtatatgaacttttgttctttgtgagaattcaactctcagtgttctctcttggactaaaatgacttatcaagcttaggttgtggtgtcaatctttccttgttatctgaacttatcacttaccaaagtgtggcatttgctatacctttggttcctatattgataggtagcggatcaaggttttatttgctattttcacctacctatccatctaagtgcttttaagacctgggtcaacaatcttatatattgatggttcagcctttgccttagccaaacactttccatccatcttttaaactatctttgagacctttatttgaacctaacttctagccttttcaaatttatctttccatttttccaacctatttcgatttaattgaacgcttacttaaacgacttgaatcatcatcgaacta

SEQ ID NO: 12450 - DNA, 402 bp, Gossypium hirsutum
aaatatcttggtttttctttttggaactttcccaacccataaaaaaagaaaagaaaagaaattccgacatttttgaagaatctaattgccccaagaccaagggggttgtggcaaaagaacattgctccgagtcactgctgtttttgacttagaattcccctggattcatgggtcaagcaaggtcgtttctggcactttttcagtagtagtttcacctaacctataataaatttagccttcattctagcttgggggaactgggacaccagacctagagctttgagaatccttttcttaataaactttccttctaatgtagttgcattccaagtgtggcgatttttatttaagtgagcccacactgaatgcaatggggatgggatgagcagcatagattcaata

SEQ ID NO: 12451 - DNA, 559 bp, Gossypium hirsutum
ggtgccttgtcttgtatttgcaagtaacgtttttgagctttgtactctttattaataaaaaaattatttgccacgaaagaaatagttattttattaataacactcaaataatttgaaatttatacatgagatgatttttcctacattttgatttgctaaatgtttaattaatgtattaacacatgatgaaaaagagtaattgaatttgaaattagataattacctattaaaaatatgacagaattaaattgcaatatatttctctgtattcaaaatacagaagtattagaaatacatttctcgtgtttacacggttgtacaatcgcttgaaaaagtatacctccaaagtatttcagggatggttctttgcccggagatgttttcaaacgtttattaaaaattattattttggctgtacggattgtttcaaacttaaaagaaggattattaattcgaaataggttttataatttatatggatataaagatatataactatccataaatattatatatttatggaatttgtttcattcaggagcatatctagacggatgac

SEQ ID NO: 12452 - DNA, 690 bp, Gossypium hirsutum
agatcccaccacacctcttgtccgatgggattcaaactaaagcataatattttaaaatataatttattaatataatttacatcatttaattttattaagatccaaaaaagataaattatactatagtttacattaaaatagtattgtttttattttggtcaccttaatttttttgtcaatttaatcactattgttagaaaaattgaccaggatgatcacttaaccattaaacctttaacgaattgcttactggacttgcaaaaaagagaaattttatttttttatccctttaaaaattacaacttttttaagttaatctcttaaatttccatcaaaaacccatattaaataacataaaaaaatgttaaatccagccttcaatatgcttccattgtcgtcttctcccactatctccttcgttcccccttccatctcaacattaaggtaattttaattacccatgttttcccatttatttatttttcaactaaatagtttagttgcacttgtttttcaaatgccccataattattcatgttctcttcttcaaatgccccataattattcatgttctcttatttatgtattttccaactaaatagtttagttatactagtttttcaaatgcaccataattattcatatttttctaattatttattttccaaccaaagtcaaccaaggacctta

SEQ ID NO: 12453 - DNA, 699 bp, Gossypium hirsutum
ttttggtacctcagagaaatagggacttgaattaaattttctcttataaatttttaagctcaattttattaaataaagcagaaataaaatgacatgtttccttcaaatttagagccttttatttttaaaaaaaaatttatacttaaatatattactaaattaaaatttttaattaattaattttacattttcaattttcaattttcaattttaataatcttctctctcaaataaaatacattaagagatgtcccctccggtcattggcactgtcgccgccgccttttacggtgatcgaatgtttccttcacccattcgcttctcctgattctgatattccaaaaccaaccaaagggaaaattgaaaacttttcagcttcttttgacacaatcttcacgctactttggccatcgccggtcaaccatcaaccgaggaaatcaaagttgatccaacatgtttaacctagaaatcaatagaaacgcaaaatcacaaagcttgaagaggagggtggttcagtggccaatcccaacagtgaagaggcaaaggaggagatgcacaacataaggcaaaccaaagttgatccaacggtggagattggggatcggatgagagaaaaaccgaatttcaagattcgatttgagcatttggacttgattttcggggaatttaaacacacaaaggtaaagaagaggctttgag

SEQ ID NO: 12454 - DNA, 593 bp, Gossypium hirsutum
  misc_feature (47)..(50): n is a, c, g, or t
  misc_feature (568)..(568): n is a, c, g, or t
cttttatcatttcgtccacacgaattaaaaagtgttcaaaagattannnngaacatcaagctgatagcaagttattgtaggatttggatggcagtgggagctttgcaatgaaataaagagaaaagtgaatctagatcaaataaacaaatttcgaggttctttttttttcccccaaaccctttccaacccccaaggacctgggaaccaaggcccaaaagtccccgaacggaaccctaccaaaagggtttcctaagaagaagaaaaaaatggttaatttttccccccatgaaattggtggggaaaaaaaggaaaaaaatttccattttttccccaagaaaattaactatttaaattggtaccccaggcccttggtccatgaacctccccacaagaaaaggaactccaaaaggaaggaaactggccaccagggcttaaccctccttcaaaggaacaactaaaggcctgggcccaaagttttaaatccggccaccccctttggttgaattaactaaggccaaaaaagctggcttaccttttggatccattggtttttccaaccccttccatnctcccaaaatccggaatccggaacc

SEQ ID NO: 12455 - DNA, 602 bp, Gossypium hirsutum
taaattgtgactgattgggtgactgactgtgacatggagggatggctgtgattggagggtgaggtaaggggtgtgggtgaaattaaaattaggagtgaatggaagtctgagtgagccgctgatcatcattggcaaattcagtattcaattctccatcatttcttttcttaattatctttatttatttattttatagatacttccacatattaatccattatcattacaaccttttttactcctttttattcatttttaaaaataatctattacttttatttaccttcacccatatctattcttttttctcattttggcatgtgaattatttttagttataaactaaaaaaaagacttaattcatagtttaacctctcatttttccttttgatacttcaagtatcaattttgactaatgaataaatgctacgtgataattaggtttatctaaaataaaattattaaatttaaattttaaaaaatggaaaattgtaatattatatatttaaatattaaaaaacaattttgactttgatggttgtttatcagtcattgatcgacattgatcaatcacatgacattattagaacatgccacgtgtc

SEQ ID NO: 12456 - DNA, 446 bp, Gossypium hirsutum
  misc_feature (411)..(411): n is a, c, g, or t
ttaaatatccaaatacacacatatttatcatggttcaaaaccctatactttaaccatatctcaaaatattagtagaaatagatagatcgagtgataacgactttaaaaatgtaaaaatcattaaaaacggggctaaaacgaacttactatgcagcttgaaaagtttgaaaatgttaactatggtctccccttgcaaaattcagtcatggcatgcaaaatgaagaagatgacatcttttttttcatgttattttggctttattagccaaattactaaaatacccttaatgaaaaacaatttaaaacatacctaaccatgtccattgttgtccacaactcaactaatggtttaatttccacataaggacttccaatttaaaatttcatagcaattagacacctctagcttctnaaactcaaaattgtgtggatataatttctagttta

SEQ ID NO: 12457 - DNA, 631 bp, Gossypium hirsutum
attataactagatccctttgatcctcaactaacctaacgagtcaacaaggactacttatcttctaacctcacaatccagactagttcgaagtgaaggtgttcacggataggcaataccaattttgggttaattcccaccttgatggctttctggggttgtgaggcctagggtttgtttcacactcttcctttcccaaatagttgatctattgggtaaccctacaaaatagttaatagatcatgcattcactcgctaattccccatagaagaattagttccttatgacttttataaacaatatggaatagatagaagaataaaacatggtgaatgaatcgaagttgaaagtttaagaaaagcctgatttatataaataataacacaaatccacagaagttgatatcttcacaaatcaaatttcttaaaagaaaacaacaggcaaataaactaaactctagaaaacctaagaaagatagaaaacaacactaaatctaaagaaaaaaagtaggttaatggaaaaatgtccataattgataagtcgtaatttatacatactttatcccatgcttaagcacatttttggatgaattatcattaaatttgcagaatttgatgctcctaaacctaaaa

SEQ ID NO: 12458 - DNA, 641 bp, Gossypium hirsutum
  misc_feature (58)..(60): n is a, c, g, or t
  misc_feature (64)..(64): n is a, c, g, or t
aaaaatctataaaacagagaatttaagcaaaagattaagcacttcgatgcttagtaannnttanggaatgaaatcatttaaaagagtggcataataatttcaaagtttacttgttccatcctttggccgaatataaacctaactaaggtatcatttttatcattcatatcacaaaggtaaagtcaatatatccaatttaaattcaatctatagccaaatcctgttcatctcaaatttccatatcaatctcatgcatatacacatatatctcatatttatgaaattgaactctctaatcttgaactcatgcatcatgatcaaatcataaacatttgaatgatttaacaatggtctaagcatacctaccgaatttcgaacccatagtttaaaatccattgtattctcaacgaaagtaaattacttacctggttatcttacggtaagtagcacaggtgtttaaaattgtttccacatgtattatatgatttctcgtgcaaacacttatgggttttcaacctcaaatattatgccggcacaaccacccttcggaatcaagcacgattcttaacactggctcaaagcccttcgagaccaagctcggattaagccactggctcgaaggcccttcggaactaagtccg

SEQ ID NO: 12459 - DNA, 590 bp, Gossypium hirsutum
cagttacaaacatttgctttcccaggatggtaatcaattatgcaatcataatctttaaacaatttagtccagcgacgctgtgtcaattttagttctttttcggagagtaggtatgtgagactcttatgatttttaaaaatatagcattttcaccatagaggtagtgcctctagatatttatagcaaacaccatagtggctagctccaaatcgtgcgtcgaataattactttcatgcgaattcggtttttaagacacatattcaattaccttaccatcctatatcaacacatagtccaatccacttagtgaagcatcacttagtacaacatattcattccctgatttgggtaaggtcaatattgatgcttctaccaacatgaccttttatttctcgaaactttcctagcgctagtcattctacacaatcgactcaatcttttgcaggagctttgtcataggaaaagctattttggagaatccatttatgaatttttccaaccaggcctaggaagtttcagatttctgatacatttttcgacaattaccattgcaaaatggcttcaatctttttggaatccacacggattcc

SEQ ID NO: 12460 - DNA, 651 bp, Gossypium hirsutum
cgcaactgaaaatgataaaagaacattaaggagactagccggtgactatgtcttagacggtgaaatcctgtataaaggaagaaaggaccaagtgctgctaagatgtgttaatgctgttgaagcaaagaaaatcctagaagaagtccatgaatgtgtctgcgagacgcatgccaatgggtttacaatgtccaggcaaatcatgatatttgggtattactggtctacaatggaaggagattgcatcaactatgccaagaaatgtcataagtgccaaatttatggtgacaagatccatgtccctctttcacctcttcatgtcatgacttccccatgacctttctcaatgtggggcatggacgtcattgtgtcgatttcatcgaaggcttctaatggatatcgttttatctttgtggttattgattatttcaccaagtgggtggaggctgcttcatacgccaacatcacgaagtcggcggtcaacaagttcttgaagaaggaaattatatgctgatatggcatgccagagaggatcatatctgacaacgcgctaaatttaaataacaacgtgatagtggaggtctgcagtcaattcaaaattaaacaccacaactcgtcaccgtatcgcccgaaaatgaatggggcagttgaggc

SEQ ID NO: 12461 - DNA, 640 bp, Gossypium hirsutum
tagtgaataaggcgatggttgatgctaatcaataaataaaacatcttcctaatagtattctctcttttgcaccaaaaccaacgaattataaaataattttagacatactctttagatttaggttgcttcatactttttatgattctaaaagcttgtgaaagtctaatactggcttttttattacaaaaatgttagtattgcagaaaccgtcaattctgtttggttttgatatagaagaagaaaagacaggttgaaaagatatgccaagctaatcaaaccaaacagtactccattatatattctttttcaatgtccattgttttgttttgttttttaatttattccaaaagattttttaatttttggtgggtggaggaccacgaaactagaaatcgataataaagcattgccaatgaatgggtactttttggtcatcatgtatttgtggcttttatgtactaaggtgacatttggagaattatgtcaatgaagatatatgtaaaagaattgacaaaggatcgattctcatttcatgcagtatcatcggtatttcacaagtggttcgttgtgtattgcaccacttgccgccctatatatatatattatctcttttttgttcaatgtttctccctatccatca

SEQ ID NO: 12462 - DNA, 645 bp, Gossypium hirsutum
ttgaattttagcctttatcattttattttataaaaaaattgaactgataaaaaattgatttcccttatttcaaattttaattttttaattttaagtgaaaatattgatttttgggaaattttttgaaattcaatggtaaaagaaggaagttggatccataattatggtgattaatttagaaaacctataaagggaaggaatggggtccaaaaaattttaagaatattatcaaattttataacataattaaaaataaaaaaaaaaaatatttccttggtctttcccctttgaatgtggcttggggaataaaaaaagaaaaatgggggcccaaaaaggtttgaaaaaaatctgtcatttttgacataaggccaaaaagaccccatacccccctcacccaaaaaaaaaaagaaaaaaaccctccaccccaaaacaaaaaaaagaaaaaaactaacccccaatttacctcccccaaaagttgcaacattataatataacctccaattctttataaccaatactacatatataaaaaacaaacccttaaaacatgcaaaaacaaaccatgatgatgacccaaattttatgtgaaaatattaaacctagtaagcatcataaacaacaatcctgtccatgatcttggccaca

SEQ ID NO: 12463 - DNA, 694 bp, Gossypium hirsutum
agatgtgcaagatgggttctgtaaagtgattggttgagagttaattgaatggattgattggtcaaataacatcggcattatattttcttcgatttttgtaggacattaaagggacaaattctgtatacttttggcacttttcaagatccactaagagattttggtatatatatacggtaataagggaacgtttagatggttttcctttctttcattctacactttagctttcttaaaaattaaatattctcttcttctccgttaaactggaagctaaggtttttgacgtcattggtggatgtttcaacctcttggtaagtctagtaactctacatgttaggattttgaaagaataaacatgttatgaagcagataaacaataagatatgaataggagactctgcataggggtcatctgcatttgagatgatagcaaattgtctgtaaatgggttttaatggtgatttcatgttcttttaagcagttgttgctgttggtttgtgaagaacatttgagtttggaattttgagctgtagtaaaagtgagtttcaagtgattccttatcataactcatgcatgttaaatttacaatggaaaatcttatgttaatgacatctcaaatgcttggtaagtgtgtaagatatataagttactgcatgagtaagctaatgtgtggtatgtatgcttgtcgaaa

SEQ ID NO: 12464 - DNA, 696 bp, Gossypium hirsutum
  misc_feature (691)..(691): n is a, c, g, or t
agatttgtaaagataagcggaataatagagagttgttttgttctgatatctactagtcttagaagggattttttagtcgacaacacatataattttttgtattaattttttacttcatagagttcaatattcaactcttcgacatttttattcttatcatatcaagttaatgaatatatataagcttataattgataaatattctgcccatgtcaatgatgtgatccgtgataaaaatttataaaattataatccggtaatgaaattttaatagaatgtgaggggagttggtatataacaaaaataaatgaagatgtaaaggggcaaaattatgcattctcccatttgggtagctaattgggtcattaacgcttgccatgtgacaaataggtgattgaaaaaacaataacgtttcatattttgtcatattaaatggcacaaaatttgtcaaccatatattaaaataattctcccacttgttaattcttataataaaccagctttgtttcctgttcaaatgacaaaatccccttcacttaatttgattaaatttatatccaaaattaaattaatatcaatgtttcaacttgcttttgtttatattctatttttaataaatttttattttggtttttcccattaaaaatgctcacataatctgattcggtgtctccgtctatatttagaaatnagaaa

SEQ ID NO: 12465 - DNA, 620 bp, Gossypium hirsutum
tttattaactcccgacgcaaattttcactaatttatgtgtaaattgatgtcataacattgcattaggttagagaacaaacaaacaaatttaaattatttacaactagattaaaaattaaacacatttgggaaaagaatttcttattttccccaataaatctgttatttttttaatctagatgaaaataatttaaatttgtttgtttgtcatgtcaacaatttacacttggtttaacacaaaattatgccatgtagataatgagttagtgaaatgagaaaattgtaccaaacctatagtttgatataaatgcaccaaactaaagttgatgtataacattgtaatttatatcaaagttaatgtataatttaatatttatccttaaaaataatatatatttttataaaaataatgagctgtaaatttatttttttatcttaattaaggtatccactactaataacaatattaatttttttaccgtagatgctcccgaaagagctaagcttaaattataatttaagttagcctaaacagaatttgaaaaaatcgatctaactaaccataatactaataaaatattcaaatggtaaactgaaacacatctctagtgaaagtgacg

SEQ ID NO: 12466 - DNA, 499 bp, Gossypium hirsutum
ttatagctcaaggaaggagaacagtcattaccctaggtcgagtcagagacgtaaccaaacccagtaaagcccaaaatgaatttggatctctttatgtttcagacttcatttagaaaattgggtttcggcaattctgtagatgagatatgttttttgtttttcttttccattttctagcccaagtaaatatgaatccagaaagaaagaaggccactgttttcattttcatctttctatatatcaagtatattagtactcgtttaattattaatattttttttctacgaaaattatgaaaatttataaaatagttatttaattatttaaatttatttttttctagtcacccattagctgacggtggcagcttttaaccctcaataattatacattatgtcaatttagtcttaattctaaaaaatctaaccctcaacatttacacattttgtaatttggtctttttttcacttttatttttctttgtgactctctttcacct

SEQ ID NO: 12467 - DNA, 512 bp, Gossypium hirsutum
ccttacccgcgcataaattaaaattaacattaatttgttaaattggagtgaaattaaattattatagcatggcatgtacttaatcaatttaagttgaatgataacttaattgaccaaagagtaatcaataatttaaataatttaattgaataagttaagctcaaaattgaacttaacaaactcccccatacttaaattattgatcgtccctgagcagttaaaccgaaaagtcaggaatcgaagcccataaaagcatgataaaatcttaaaacaaactcaagtcgactcatgaattgttgcatctttcatgctttggagcaaattttggattcatcaatcctgaattctagttcgtaaagaaaaaaaatctgctttaaatccacaactaaattgaaagtttaatcaaaatttaagaatgctttcttaatcaatcacttccagaaaaaaaatgtttaactcatatcactcaatgtgtttaggctaatatgctgctctcaaattgaaatcgacag

SEQ ID NO: 12468 - DNA, 691 bp, Gossypium hirsutum
gaatctttgactggttgcattcgttttgcatctaaatatacgtctgtttgtgtaatcatttggttatcaacaatatggttaatgtgttttgatgtgtttcaattattatgtatagttgggacatcgtttctgtggtttgatagtgtactttaaatttctgttttgagattttcataagtgaatttttatacatatacttgtctgaaataagtgttgtgtcactccgtcttttgccatctgttttatgtttccggctcacactgagctcgcatagctcacctcattgtggtgttctttcttttaggtactttttgtgttttggaagctggactcagcataccggaggtctcagaaaaatattatttgattcggtttaagtaaaatttcataagttttatacggttggttttaaatcagtttgtaaaacgattatataaactatggtacaaatttttatgttggaccttcgtaaagtgttatttggattgaactttagaaactgtggattttactactgaatgttttgacgctggtttaatattgttcaaacataatgcacaaaagtgttttcttggtttgaattaaagtttttgtttccgccacttttggtgaccaatgtagtcttcgaaattcagtcttaacttctaggccaagttttggggtgttgcaaagggagtgatggtgttgataa

SEQ ID NO: 12469 - DNA, 690 bp, Gossypium hirsutum
tgttcgtaacgttgaaatgatggcccgtcttgctcctagtgcattccctagttgttttgtctcgtgcttagctgcagttttcgttagggaaagtcctcaaggttcgattttcggttttgcaggacgtgcctttagaaggttatgattatagaatgcgatatttggtgcagtacaggtacgcgacccgtatattgcggttagatattgtctctaatcttggcaattgatagggaaaaagctgaactggcaatgctatagttaattatcatgagacactatagtcattaaagaggaaataaggattttattgtcgtaaccatttttttggaaacgattttgaaaatggaaacgaagaactggagtcgccatcgatcctttttgatgaggtgtgatcgggtcaccttaaattaatcattttaataaaagttaagatttactaaaataataatttttggtctacgaaaatcaaaaaatgagttcgggagtcggttacgcacgaggaaggattagcaccctcgtaacgcccaaaattggtacctaattgattaattagtgtctttgttgttgaaaatttgaaaacttgaaagactttgaaatacgatcccttttttgcaaaaaaatgctcatatgttaaagaccttcttgtctcgaagtaataaaacaccttgtccagtaagttaggacacagca

SEQ ID NO: 12470 - DNA, 608 bp, Gossypium hirsutum
tatttagctctattgagccggaacaagctagtttagcttgcaaaagtttacgaatggcgcctgatgaactgagccaatgatgttttcggggcagggtcgtatcacttggcatgacgtttattgagcttcgtttgtcctttgagatgttttagggcctcgtgatccgaatgaattacaaattccttcggctataggtaatgttgccacgtttcgagagctcggatcaacgcatataattccttgtcatacattggataattcaacgtagctccgtggatcttttcactaaagtatgcaataggccgtccatcttgcattaaaacagcgccaatgccaatgcctgaagcatcacattcaatctcgaatgtcttgttaaaattaggtaaagacaacaatggagcgttagtaagacactctttaattttaataaaagcattctcttgatcatcagtccaaatgaaaggagagtttttcttgattatacctatcaaaggtgatgctaaagaactaaaattaggcacaaaccttcagtagaaacttgcaacccttaaaaactccttacttggctgatgctagttggacgcggccatctgtttatcggcttgacc

SEQ ID NO: 12471 - DNA, 652 bp, Gossypium hirsutum
tgtgattgccttgttgtgaattggtattttaagcactaaatgattgaatttgagaatgtggtatgcttgttgatttaggcacaaattctaataggtgagtttgatcatttagtgatttttggatgtgaatttggatgaatatgaatggctatttgggatgcttatgaacattttggttgttggtattggtaggatatgattttttcttgaaattggttggttataagtgcctatttatgcattggttgtttgtgcattgttgaacctaggctgacaacattttgggtgtaacaactcatttttaggtcaaatcaaaatattggttttgacaccacaaattcgaagtcaaaatatttattttattattttaataaggtttacagcatgatagattaattatgtgaaagtttcgtaaagaaattttattgtttaagtacttaattcggtaaaaagactaaatcgcgtaatgcgttaaatatgagatctattagttaaatgactcaaatgactatgaagttaatattagaagtctttaagttgataatatacccttgttaaaattagtgtacattcatattgatcgcgaggtttcgtgataggttttaaatatttataattactcgttcttaaactaaatatcctcgcgatgtag

SEQ ID NO: 12472 - DNA, 561 bp, Gossypium hirsutum
  misc_feature (556)..(558): n is a, c, g, or t
tcactctgaagtcgatcggaccttcacacgtcccattcgtgacgacgttgtctctaagctcgactcggctcgccgtgccctggtccaagaatctgatcggtatatatgcatactcatgaattaaattttaggtttctaaacctatttgttgttcaattgaaaaagctgaaattctaatataattgttttcttcgatattttttgctattagctgctttattttatttccaatgaagattgattatagggaacctttttggtttaatgttaatgttacgcatttagatcttgatctttgttgttgataaagtgtactaagaatcgtgtacttccagccgagcatttgagcaagcaggtaaagctcctggttgtgtttttgggatgaaaggaggtattgatatcgacaaaatcaagcaatcaaagtatttctgtacacagcttcagcaatctaagggaaaggttctaaatgaattggtatatcaatttacctgcaattttgttctgtaaaaattttcattatgtcatactcatatgcaccgggagttcctttctgaannnaaa

SEQ ID NO: 12473 - DNA, 573 bp, Gossypium hirsutum
agtatgtttacatggataatttcctttaactttaaacttgttaattcgcacttcatcctttatttgttcattaaaagttccgccagaacattttcatctgcaggtatgttgctttagaggattttgagaatggaatcaagagctaccaggatgcccttcagatcgattcaaggcattacaatgcctggtatggtctaggaatgatctttcttcgccaagagaagtttgagttttccgagcatcactttagaactgctttcctcataaatccacgttcttctgttatattgtcttatcttggaaccgctctccatgccttaaaggtcaagctactttacatactgtttatatcttgacttgaatggtatcgtcttgggaattctttgaatttttctatcaatcattctacagagaagtgaagatgccatcaagataatggactgcgcgattttttcagacagaaaaaacccgcttccgatgtatcaaaaggctaacatactgatgagtctagagaaatttgatgaagctcttgaagttctacaggaacttaaagggtatgcccctcgtgaaagc

SEQ ID NO: 12474 - DNA, 467 bp, Gossypium hirsutum
tcatccaactatgcacttggttctattttggtcacccacctattaaatttttttatttagtcacttaattttttttaaattaaatattttaatcactcacttgttagttatcgtcacttaatttattaataattgggtgattattatgcaatttacccttaacataatgggagtgttgaattttttcaactcaaaggaagaaaaacaaatacaaacaaacttgtagtagggttaatcaattaaaaatatttatttaaatcaaatattttattggccttttatttggatttttcataagatgacttaattaaaaatagttattttaatcaaattttgtagtatatatagattcattgagtgctagacctttcaattagtgtagtatctctgccaaacaatgatgagtttaatccacgtctttttgtttttaatttttgggacattggaatctcttgccatgtcccaaa

SEQ ID NO: 12475 - DNA, 592 bp, Gossypium hirsutum
  misc_feature (43)..(46): n is a, c, g, or t
actccataggagtttcaggagggggacaaaacacactggtgcnnnnaccttgcagggacgtcctcatctatattttcctgcttttcacactgtacaggccaattttgggccaccccaaaacccaactaacctaccctaacctaaacagcccaatacccattaagcctaactaatacatcagccaacccaatttcaaaccccattaaatcactaacccattaaaccccaaaacccaactaacccaccccaaaacccaataactaaacctactcaaaatccatacccatctcatcctaaacaagcccaaaccaataccaaatccctagcccaagaccagaatcgggaaaccctagtcccacttggcctctgactgagcaactgccactgatcgagtctcccactcagcccccacgcgagctgccaaaccacttcctcctctgcccgagaccatgcgctgcccatactgtctgacactcccatcacttgcacctccacacctgcgaataaacaaaggaagacaggaaaggaacagagaaacatgcaaagcaaaagcaaaacaagcagaaagtagtggaagtaacatgtaatcagc

SEQ ID NO: 12476 - DNA, 688 bp, Gossypium hirsutum
tgtagcttgagaccaatagacagaagcagaaacttactgatgttgtccgatgtcaactcattttggttaccttaagttcatagtttgtaacttagttcttttagaacttggtaaatattttaatgtattttagatgttgattgactgaaaattcagcaaagcaacttgtgcaagctagtttagcaattttcaatgttttaagtggtgttaggtaaatgtttaggtagcattttgacttgtaatgatcatctcatgtttgatatatgtcatggcagtttgccaatgttttaattaatgaaaaattatcatctttttcattcaatatcctctccatttccttagcttattttctttgcttttcaattctgtttctgttttgcttaaaaactccaaacctgattctcaaggtttcttcattcttcatccggatttattacgttgttgtttaagctcgagactgaagtccatacttcatccggataaagtgtcccaaaacaccaacacaaacctatttcatctaatgttcgcaccatcacaaaagtaaaggctagatgattgccatgtagttacatttgctgtttggggggctaatgtcttttgattgttgctcattttctttggcagtcaaggataaccgtattttacttttatgttactttgatttgaatgtgagtgttgaacatgagat

SEQ ID NO: 12477 - DNA, 585 bp, Gossypium hirsutum
cgaaataggagctagaagaagcccttcccgctttcctgttgatgccgtaggaattctctctggaacaacccctggctgggataaatagactgattgactgtgatgaggtagcttagattctgagatagaaatttctttgtggcaaccaaagtgccatcgagttagctgttggatgaagatcagtaggttaggagttcacaccaggctgaggggaaatggctattactgatgttctcacaagtctttctcaagtaggttaagctctaatctaaacaaggaaaaagaagaagaagaagctgtcatttggaaagaggaggaagagttcttacggattcggaataataggatccccgactttactttaccttgtaatcgtgggcactaggatgtgaagctgctcactctgcttttgctggtacaaaatctgctgctagtctttttgccataggagcagttcttgcttttgtttcagaagctcttctcgctcaagtcgactctgaactcatggtctcatgtaaaaaaagaagaagaggggaaatcacccgagggtaggaccaatacggtagttgttaggattagagggca

SEQ ID NO: 12478 - DNA, 538 bp, Gossypium hirsutum
cctcacgctaatatttaaggaccaatttttaacagtaaaaatggataaatttttaacagatgaccaaattgctctttgatcaaatatacaagaactaatttaacctttttttagtagaggggtaaaatgtaatctaactcctgatacaagagtctctgtagtacttttaccaccatgcatgttatcacctgaaacttaaaataattaatttaaaatttcaagtgatgacataatacaattttaaacggtcgtagtatcatcacaattttatagaagttctaatgttaaattagaaaaaacggataagtacatgcactaaaacggaccaaaatatatatataaataaacttagttaccaaattttggaaccaagaattacattattagaattgcttgacgtgttaagatctctatcattgattatttttatttattattacttacaaatttaaccatcatttataaagttgacatcgttattgttgtaacttataagaggacgtggatttgagcgcaattaaacacgtactattctcca

SEQ ID NO: 12479 - DNA, 622 bp, Gossypium hirsutum
  misc_feature (123)..(123): n is a, c, g, or t
  misc_feature (319)..(319): n is a, c, g, or t
  misc_feature (365)..(366): n is a, c, g, or t
  misc_feature (568)..(568): n is a, c, g, or t
  misc_feature (570)..(575): n is a, c, g, or t
  misc_feature (577)..(577): n is a, c, g, or t
  misc_feature (615)..(617): n is a, c, g, or t
taaggagttgatgtctattcggctagccatgggacaactcaagagttatttttcaagctttcatggacattcattcagctaaattgaagagaattcaatgaaggagttatttgtttcaagaangccaagagtcttgaactataaatcagcttttaattagtacattaagtgaatgcttgtgactgtttgctaccctattttagcactataaatagttgtattcagattttgtatgtaacttttggatgatttttgaatgaatctttgttacttttgtgagaattacttttcttcgattttgttcaaaggcttattggcnttatctacaaagctagtggcgtcaacccattctttgtcttatcccnnaacttatcactttatcaagtgtggcgttcaaaccctataccgaggtttctatttttctagatagcgggtcaaggttttgattgaattttctatccatctctttaaacgtataagtgttgggtcgatacttattagtgttggttcttacttgtttcttgagccgttattcttccatcatttttactattatcgaacacatctncnnnnnnanttttatgaacctttgatattataatacaatatttagcnnnatttc

SEQ ID NO: 12480 - DNA, 580 bp, Gossypium hirsutum
ccttccttctcctttcttctctactggaactacagacattataataccaaataggacagaacttatcatccactacgtaaacaaaaaagactacacttttctttacatcaggtaaaatatagagagaaaatgttgacagaattgaaagttcatgccgcagtgtaaaaaagggtgagaaagaatattagaaagcaataaaattgttttatgagatcctacaaatcattttacggctataaaatccaaaggaacatattgaaaccaacataaattatatgcttaaaacctcatagactacatgataaccatattgtatgttccacagcacaaataatggcaatgtcgaggagtgtctttaacaaccaccatagaatgaaatgactcgggaccgtgttaaaccaatggatactgtaaattctcaaaaatcagatcactcaaaagataaaaaaggatacccaccggcagaataaagcatgactttagttagatataaccaaataatgtcaatataagaatttgccatacgtgatatacattttctacttttatctacggtattaaaaaacctaaagatttcagt

SEQ ID NO: 12481 - DNA, 673 bp, Gossypium hirsutum
gcatcctaagaaacacccgtctcctttccttttgatgaaattgagtgaaatcatggtttcagctaagactgctggagcaagatttacctctttttcaatctgaaatagaaaatcggctagctccacacttacatatcccagagcttttgggaacacaatcaacccgtacatgacaaacgctaacagtgctaaatgtctatcaccgcaggcctttcctatggcatccctaatgtcagaccaggaaatgcagggaccgtttttatattttaaccttgctttccccgcatctacaggtaatcccatcatattggctaaaggtctcagaaaatcgacgttctgcttctaatatatcctgagcgaatctttaaagtcatagtagagaagggtagaatattccttgatattcggtaacatatccacttcattgagtgtaaaaaacctataagtgggatcccaaaaatgtaccatagcctcaaacaaggcatcatccggtttaacaaacagaagctgtgctacatcgccacacttgtcccagaaatgtgttttcttagcatcgtcccatgattaccatattctttttaactcatcttcacgattcctcctacagtccatgtgaactatctaaggcaggctcgagtcaaaacaagctatctatcaatcgccttctctgctc

SEQ ID NO: 12482 - DNA, 660 bp, Gossypium hirsutum
tccaaacagtggaaaattttgatttttaggtttttcgagaattttaagacgtatatatgacaaaaatgagaagataagagtgagtcatcttagaatattcaagaaaacaactcgaaaaacaccattaaagccgattttgaagcagatttctatcaagattgaagacacttagttgatgtcttaggagattatcatgagtttctttatttctttcgattatactgtgttttggatgtttttattttcaagcatgaactaattttttaaatacctaaggagatgaaccttatgatggattctgttgtttgatttttattttacgcaacaaataattatatcttgtcatcaattatgtgtgtttaattcttggtttgatatttctagattattgatctatgtttgatgtgctcaaatcagaggaggaatagaccctgtttaagagtacatcttacgtaattgagtggagttgcatgcaatcctagaaataggacgacataaatcgaccagattagagtaaaatttaataagtgaattcatagatcgacttaatgggataataggggttttaataagaaagaaattccaattaatcaacctagagtcagttgctcttaaatttcaattaatcaacctagagtcagttgctcttactctcgaaag

SEQ ID NO: 12483 - DNA, 577 bp, Gossypium hirsutum
gatatgcatcacaacattttttcatacatttctgagctaacatagacgatatcacagtaggtaactcactcgaatcatcagactcaatccaaagaatttcaccattctgacatttcaattcaataatctttcgtctacaattcaaactacatcatgcatcgtgagccaatccagacccaaaatcacatcaaattcatcaaatggatacaacatcagattagctagataacaaaaatcccgattcattaacaaacaattcttccagactttgtcaagcaaaacacatatgcttaaggagttcgatactctaatctcaaattcagtagactctacaggcaaagtcttactagatactaaatttatacatatataagaatgagttgatcctggatctatcaatgcaatcacattagtatcatagagagtgaaagtaccggtgataacatttggagatgatgcctcctctcatgcacgaatagtataaactcgggcaggtgctcgtgccttagacctcagagcagaatctctcatcacacgtctactactagatgcatttctcgtatttcttggtagtctc

SEQ ID NO: 12484 - DNA, 654 bp, Gossypium hirsutum
  misc_feature (646)..(646): n is a, c, g, or t
cagagggactaaagtggtaattcaggatatatctacattcagtgcattggtgctcctcccttccaattgctccactgcgagacatggtatttatagcttatatatctctcttctcaaccatatgatttgttacagataacaagtttgaaattattatttacaatagaagtggtcctgaaaaccgactagttttgacaaccttttatttttgcaattttcctggttttggaactcctatgtgggggaggcctaagcttagaggatccaccgacgtttgatttatgagatcaaactctcttctccctcctcctagttttaacaaaatttgtgattcacttcttacattttaaaacttctaatttaaatcatgcttctatttcttttcttttttaatttaaaaatcattctctaatataatttcgttaatattttctatcaaaatttatcaatatctttttttttgttaatgacatgttacatcatgttaggatagcttactccacatatcaaattgacaaattttgaaatatactaacgatattaatgatttgactaaaacttttaaatcgaaaaaagaaaaataacttaaattttaacttctaaagtataagcattaaatctcaaattttgtcatagtagagggatntgcttaca

SEQ ID NO: 12485 - DNA, 517 bp, Gossypium hirsutum
gtgcaattaaaaaaaattattattagctaaccaaataatttttcttaattagagctaaccaaataaattatgttatttcaaaagacagatagatttgtctcgaataaaaacaatagaaatcttaagcatgactaaatgtgagcataaagataatctgtgtgatccaaggtagacagcgggcatatgtacccaggattcttcttcctttaaagcaaagggcgcaggggcttacgtttacagtacagtccccttcatcgcactatcttggaactgaattattactacctgtttcttcattttaaaggctaaaatgctgttaaaggttaaaacgaatataattttgtgttatattttcaacatagttttagatatgatagatgttctttattctcttaatcattaatagctttgttgtatttttcattattcacatttatctattcgaatattccaaatctataaacaaaaaaaaaattgctggtctttctaaaaccttaaaaaccatcacgttacatat

SEQ ID NO: 12486 - DNA, 676 bp, Gossypium hirsutum
  misc_feature (5)..(5): n is a, c, g, or t
  misc_feature (7)..(8): n is a, c, g, or t
cacananntttgttcaacttgttcctttaaaccatcaaactctaattcatattcccatcttttttctttttcttttatttttcccctaattaacccattgttttcctattttaaattattaaaaaaaatcatattacacatatagttctctacaaatatatttcggttttcaatctgttgatatattgtaatgatttaattttagatctagttatttagacgtgtattaattataattttttaagacatattaaaaaaataaaaaataatttgtatgtatatatatatgttaatttttatccatttttatcagtaatatcttggtaaaaatattatagaggtccatgcgttaggagttaaattattcattgtacgttagattaaagagtaaactggttatttctattaaaatttcatctatttttattgttaaaaactgacgtggttaacaaaatagccatacggttacatgtggcgagtcatgtgtacctcattttaacatacaatgaccaatttttaactgtaaaaatgaatagaaattttaacaaaagaaccaatttttattgatctaatatacaaggactaatttactcattttttaagtagaagagacaaaatataatataactcataataaaaaggactccatgatattttcatcatcaaatcttcaacc

SEQ ID NO: 12487 - DNA, 580 bp, Gossypium hirsutum
  misc_feature (574)..(574): n is a, c, g, or t
aatctctccaaaatgatccaaattaatcaaaattctttataaaattcaataaaattaaacatgttaattatttaagtacaatttaattatcttataataattaaatattttttgacaataattttaccgaaactgcatgaatttgagttaaaaagggaatgaaaaagtgtgtatatttacgtgtttccacacccccaaacttaattcattgctcgtcccgaataatttctcgaaaacaccttcaaaaactttcttcagaacaacattcttcccaaaaatcatgatttaagtatacttatgctcaaaaacaaggaatttgatacttatgctacttatgtgtacatatcattcaaattaatctcaattattattatgatagcaaaaataaactaagtgctttctcaataaagacatgctaaattcctatcaatttgattttattcccttattcaagaaagttgcaatcattaagtttaacttacgcctttatatattgaacatagcaatttccctccactaatgtaggtcgcatagaaacttgaatcaataggtctttaagaaggttgtaacatgnctaagt

SEQ ID NO: 12488 - DNA, 442 bp, Gossypium hirsutum
agcgtcacatattcgggtgtgtctttagagtgcttttggcttttgcactctcactcttgtgttaggaatttttcgttagagagtttatatttgatgtatatgagattttttaggtgagtaatttacaacaattagagtaaggtaaattgagttttaacctataggcgatttggaaaattgttgaataagaatcatttattgaaacgaggctctaaattcaaactacattaataaatttcttgtatttatttctctcattttcttgttttgcttattgcttgtgttctgttcgaacacgtgtgcaaacacttgtttgaatagtcattgcatgaacatttgactgaacatctgtttaaacatcaaattgtacatagagcaaactgagtttcttacacgtgtttacaaaaaaaatttgaagttagaagaatttgtcaagtcgagg

SEQ ID NO: 12489 - DNA, 546 bp, Gossypium hirsutum
  misc_feature (73)..(73): n is a, c, g, or t
  misc_feature (75)..(75): n is a, c, g, or t
  misc_feature (487)..(489): n is a, c, g, or t
  misc_feature (491)..(498): n is a, c, g, or t
gaaggatatgagatatgattttgtgagacaaggtcagaatgaattcgagttcccctgttctgactttgaaaantnttaaaaaattgaataaaaataattaggggcttaaatttatatgtctagaatcctgaatgagtctattttcaaaaaaaacaaacgggaacatcatccaaattctgtatgaagagataattaatttttagggaagaagggtcaaaactatcagccagcagaacaggggggactttaaagaataaactgtacttattggctaaaccaaaaattctgaaaattttatggtaagaagatatatgagtctagtttcagggaaaattaacggatcttaatttggagttccgtagctcgagttataaataatttagtgactatgactcaaatagacagctttgaataaactataaataataataatgaaattatagaaattgttgcatatgaacatgaaatgtattaaattgataattannntnnnnnnnntagatccagaagattcaaatacgaagctagatcgaggaaaggaaaaag

SEQ ID NO: 12490 - DNA, 672 bp, Gossypium hirsutum
cctttcatgcctgcattaaaaaatgtataattgtgatacagggtttctatcgtaatcacatggaagaagtgatcaagttttttgaaacatatcacaaggtaatcaaatctctatcaatataacatgcatcattattcttttcttttctggcatttcccctgattaatgttatttttacaatttttccgtaaaattttgtcttatgattgcttcttgtagtaatttactaagacatattgatttttgtgatgtttctttgttggggctttaccatttatatcctaaatagatggcaagttcgttgttctggcatcataagttgaacaaaaacaaatttcttccctcgtttgtgttagtttttttttcagtatttgagatatattaaacatcttacaggactgtgtgcaatgatgataagttgtctttgctgcagagcagctcattcaaatactgatttattaaattttgattggtggttgggagagattattcttgcctcttcttttaatattctgctctttgaacatgagaactttcctcagccttcactctgttctgtctatgccttctttggcaatcgtctatcttcaaataaaaacttcacaagtctatgttcaactttccggcctgtacctttttcaaaatttacgcccacctctcttcagtatgaac

SEQ ID NO: 12491 - DNA, 472 bp, Gossypium hirsutum
tgtctttcatctacaatttactactacatcatgcaatgtcaaccagaccatacccagaattacatcaaactcatcaaatggcaacaacatcaaatcagccggaaaacagtaaccctgagtcactaacggacaattcttgcaaactttgtcaaccaggacatatttgcctaaggggttcgacacttttataacaaactcagtagaaccaacaagtaaattcttacgagaaactaagttcacacatatatatgaatgagttgatccggggtctgtcaatgcaactacatcagtttcataaagagagaatgtaccagtaataacatctggagatgacgcttcttcgcgagcgtgaatagaataagtttcggcaggtgctctagctttagatcttacagtagtatttcgtgatgcacctctactaccactcatatttccaacattacgaggtggtcttcctctcgcaaatgtgttg

SEQ ID NO: 12492 - DNA, 640 bp, Gossypium hirsutum
cactagatcatcatttctaaatggtgaatgccatgccatttcatctcttgggctcgaaatccacagatgcaataagttagcgaaccaactatgaaaccttcccaaaacatacaaaacagtcgttccttgcacaatatgaatagatcacttttggaaggacatggacggaagcaccagtcccgtaatgtggagaaatgatgaatactgacaggttctatgcctcatgaacctttttgggaagtcgacaatgtttggttagatgagtttaatggttcatgctttcaggaaaagaaacacaaatgtagtagaataaaattttattgaaagaagaagaaacaaaaaggctagagccttagagggaatgagctttttaccgaaaatgatgagtgaatattcaagttactccatcccctatttatagtaaatagaaaacctaatttgtttctatttaaactctaaaagataaataaaaatatagtctgaaactaaatctgaataatttcttaataatcctaataataatcatcaaaataaaattttaatttaaatagtcttctgttcataaatctcttctttgaatttttgccccaagtcttttgcactttgtattttcggcaccattttttccctatttctcatg

SEQ ID NO: 12493 - DNA, 613 bp, Gossypium hirsutum
gaagagatgaagtttcagggatttgattttggcgggtttaggaagggtaaaatctagaacgacatagttcaaaaaggttgagataaatcacaaatgcaacacaaaaaaagttgggttgaataaaatatttgccgacacataaaaaaaagttgggataggttatattttcccaaatttttctaaaaagtcgggatataattagattttgccaatacctaaaaatttgcttaaagatacaaatttaaataacctaaaaaaggatcgatgtaatccaaaaagagtcatcttaggcttttcatatgacaacacttttatgtagttgggaaaggtataacaaatgccggcatagtgttgggaaaaatcgacacttttttaagcgttgccttagacatggatatcccgacctttacacaaagttggccaaagcgtatatagacaagtctatccccacacttaagaaagtgtcaaaaaaaagtgttgtggtaggcctattttgttgtaatgcgagaagaatataacatgtttacaaagtatttagagttaatgtaacaacctatttttcagtggtatcagaaacgatggttttaggaccacaactccgaccaatgagtaa

SEQ ID NO: 12494 - DNA, 543 bp, Gossypium hirsutum
agggaatcctttatccgtcagctcttgcaactgtgcttttaactccttcagctcagtaggtgccattctgtacggggcaatagaaatgggagtcgtccctggcaccaattcaataccaaactctatctccctttcaggaggtaatccgggtaattcctccggaaacacatctgggtactcacatactatcggcacagactcaatcttcagctctgtttccttagtgttcaatacaaatgcaaggtaggcttcatatcctttcctcatatatctctgggcaaccattgccgtgattacaaccggagacgaacccaattctcttgattcaacccgtagaatcttaccatccgggcattttaacttaatatacttactaccacaattcacaattacatcatgaagggctaaccaatccataccaagtattacatcaaattcatcaaatggtaacaacataaggttagccggaaaacaacgaccttgaatcgtcaaaggacaattcttacagactttatcaactagaactgatctacctagtgggtt

SEQ ID NO: 12495 - DNA, 622 bp, Gossypium hirsutum
  misc_feature (600)..(604): n is a, c, g, or t
  misc_feature (606)..(615): n is a, c, g, or t
  misc_feature (617)..(618): n is a, c, g, or t
tttctttcttttcacaaagcaaaagaacctaattgagccaatttgtataattttgctattttacatgacagcacccaataaggcacgaagaagcattttaatcgcttgaaactatgtttgtaacttgagttgaaattggattcatttgctataaatgtagttaagattcaatgattatatatttgaaaagtataaaaacaagaatttcaaagtcacaatacctatagctatttcaagttatccactgaataggctttcaacaaatccaatttgtgaaagctacatctacatgtgttttatcacacatttgaacaaattttaaaaaatccaagctcctaaacttaacttgaatgttatgctaaaactttatttgggcaatgcaataaacatattgtaactttttcaataatttcctctcttttccacatatcaatcgaatttgtttcctttgtaatcatatacttctaacaaatcaaatacactgcacagttattttctgtacaaaaatctgagcggctagtcaaattctagccaattatactttttcgcaaaaaaaaaaaaccctgaaaaatcaaaaacaaaccaaaatttcaaggtaannnnntnnnnnnnnnntnngttt

SEQ ID NO: 12496 - DNA, 350 bp, Gossypium hirsutum
ttggctgagaaaatcaatgcattaactcaaagttgggaattccggtacaattgcaaaaataaaagtggtggaaaaagagaaaacactaccatccgtggagttcttgaattggattggattcttgtagaagatgtgaccttttgtatgggttgtaaaattagtttaaagaacccacttgaatctactgaagatgcaagtaacctttgaaactgaactgaccctgattgatatctgaagatgcaaggttcaggaggaaaagcaacacaagtatgatcaaacaagacatcattacacacacaaaatatatatatagatacaatagacatttagataaccaatcagttaggtaa

SEQ ID NO: 12497 - DNA, 558 bp, Gossypium hirsutum
tgggtggaaaccactagtatcagtggttccaaaagaacgggttacctgggagttctttaagactgaattctggaagaaatatattagtcaaagattcatagataaaaaacgcaaagaattcctcgaattaaaacagggtcgcatgacagtgacagaatataagtgagaatttatgagactcagcagatatacctgggaatgtgtttcgactgaagctataatgtgtaaaatatttgaagactgtttgaatcaagacagtaagctgttattcgggattctagaaataaaagagtttgtggtactcgccgagcgagcatgcaaagctgaagaacttgggaaagagaaaagaaaagctgattttgaagctagagattcgcgaaaaagatcagtcagcatcaaagaagttctgagataattttaacagttcaaaggctactgtgggttattctagaagagaccgagacagaccacctgtgagttcgaaagttccttcaatagctagcgttggaaatgttagatcaaatcaacttgagtgcaaaaattgtgataagcggcatc

SEQ ID NO: 12498 - DNA, 616 bp, Gossypium hirsutum
ggagtgcaaactatctatttgggccatatgtcagaatcatgactgtataggcccaaatttgcccgggcccattaacccaaaaacagtaggcccaaaaaactaaattggcccaattgggcccaaaaattaaaaatcagggaaccctagggttccctgccttctccagcgccgcatgccagggccatgtgtgccgtacgctcctgcctctgacgccgcacctactcctgcaaaaacagaggccaaacagagagaaacaagcaaagacctaaaggacaacagcaaagattgattttttattttattttcttttgggtataaaaatcaatttgtaaaccgaaagcaggggggcttcatcacggtaatcgggtcttttctttttcttttgtaacattttcacaaaaatacaacgaattaataacaagaagatcaaaaagcaaaaaaggttgatctcagtctattttcttttctgttcttgcgtttcttttttgtttattttcttccttttttatttattttctataactttttaaacgaaacaaaagagagaaaggattcttaccggtctcgaaagtctgtccccggagaccgtcttcggtgctggaatcggaccgagaaa

SEQ ID NO: 12499 - DNA, 684 bp, Gossypium hirsutum
gattgatgtacgacatctatattaacaataagacaagcaaataagataatgttggcaataagacaagcaagaatatgaaatatagagcctagaactttcatctatccctttcgtctttgtcccctaatgataaaagcttgattaggacttccaaccttccccatgtgcagcaaatagataaatgttggtaaaagtattatggaaatccctgtatttagtgtgagattacattttgccctcttctaaagaaatgggcaaattaatccctatacattagattaaagaattaactagtcctttgtataaaaattctattcatttctattattaaaaactgacatcgctaattgaataaccaaacagtgacacgtgatatatcacatgcacctcatgttgaagtataaggatcacttttaatagtacattcggatgaaatttttaacaaaatgactaatttactctttgatctaacgtacatgattggtttacccattttttgagtataaaggcaaaatataatccgactctcagtacaagggactccaaggtacttttacctacaaatgcttccaaaagaaatctacatatacatatattaactaaaataactacaattgcatcgtctttatagaattttatttgttctcaacatatgaaattgtaactccaaacaacaatgcctaa

SEQ ID NO: 12500 - DNA, 475 bp, Gossypium hirsutum
cgaaatgagggttcgcctttttgttattgatattacgatagtagttcttaaccacctttccaagtagattactcccccgattaccgacaacggttgaagacgagcaaaatgagaagagggaaacgggaaacaaagaaacctaagctacaaagattgtacatacaaggatatctgtaatatacttgaatacaatctgttgataccaagcctttttacgcgtatcaatttcactgttcatccaaacatatcggaaaaaaaccctgaaatcaaatcaaagagatatcattgggaatggctttttaacatatttcattggaatatgggataccatctctcaagccattccataggtatattaagtgttaccccttccttcacaatgaacttcagcttctgtatttcaagagattataaaaaaacgttaaatgcaaagacaggttatgaatgaaggaaaggattcataaatggtgattgt

SEQ ID NO: 12501 - DNA, 647 bp, Gossypium hirsutum
ggatcttgaacgtcaaaattcaagctcggcttataatttaaacagttttaattcttttattcaagctcattctttaaactttatatttttgtctaagtcctaatccctccctgacctttatatgaaaagataatatacgtcaacgcactcgttctcctacactgacaataatgctaatgacaatcgatctacattcaatcggtgaactgaaatgagcaaaataatagtttcaatgcataaagagcaattaccatatcatcctaatactaagtcttagaaacggggagcaggagcaaaaaatcagaaatagcatgggtagattacgatatttgaaaattagagggttgaaaggcgaaatatatatttctaacttcgctcctccatatttattaaaattgctcaatccagtccctgattcgtgattcccacttccagctttcaacgcagagagagagagagagaaagagaaatataaatagaatagaaagagcaatagaaagaaagaggaaggcggagggttcataataaggggaaccgaaaacgggaaaaagaaaacgaaaaaaggcaaaccctaggaaattcttagcttccgattttgattcattgaagatttacatttcgagatcttaattcttcagtaatccaga

SEQ ID NO: 12502 - DNA, 411 bp, Gossypium hirsutum
aaccacctctcaaatctgctctattttcctttttatttcatttttttccaaaaaaggggaaccccttacaagcatccgattaaggcctttatagtcgaaatacaagattcgtttttgtttttttttgtgatttagtctgtccctatctgttgttttctactttgttagtttcttgcaggtagcaaaggcgtggcaaaggctgtgagacgtggtggcaaaagcgtgcggtcagtggcaaaaaaccctaggtgctttcaaatttttctgaaaatttttaaacattttgggccacttgggccttcatttttgggttgtaatttgttgggttttagtttatatttaggctgaagtcagttttgggctggtgagatattttggtttgggccccgggtagaaattgggtcttacaca

SEQ ID NO: 12503 - DNA, 676 bp, Gossypium hirsutum
aagtcatgaaatgcccatcatgaaaaatttacctaaaccattatcatggaacatttacctaacccattatcatggaatatttacctaatccattatcatggaacatttacctaacccattatcaatttttaccatgaattatggatatcaagtgctcatattgtctacaacaacatgatggctggccacttcatgtaaaatgggagatttttcatgcaaatcctcctattttgcacccctatttatttggccacttcaatttagcctatagcattttcaaacattttcacataggtcctatttcataatttcaccccctttttcttatggaacaaaaattaactaaaattgccaggttctatcttaagcttgggccttctagaggcccactaacataattaaacctatgccaacattcacagaattcccaaaagttgaggcgttacatatggcatgtataggctagaagtactttgattatgttttgtaatgtgtatgtctagccatatgatatggcttggttttggatgtgattatgaagaaattttggtttatgctttgtgttaaaaaatggtatgttttgatgtactcttgaatgaccaaatgaaatggttaattttggtaagttttaatttgtgcatatttgagaaattggtaagtgtatggcatgagattg

SEQ ID NO: 12504 - DNA, 467 bp, Gossypium hirsutum
  misc_feature (356)..(356): n is a, c, g, or t
  misc_feature (458)..(460): n is a, c, g, or t
  misc_feature (464)..(464): n is a, c, g, or t
gatcatgttaagacatcaattatacacaccttcaaagtcgaagaatttggccccacaaggctctgccttcttttaacaaatcgctcctgtaaaaacaaatatttagacaactttgtgaaaaattttagatgcaacaatgtaatatcttgccatctatcaaaatgaaaaataaattcagtaagttacacagaaaaacaaaaaataaaaaaaaccaaagctggcccaacttaaataataaaaccaaaaaaggaggcatttcattaaatccgcttccccattatgctgtaaaaccgattatctaactgttgaactaaccataaaataacacttaaatgttccacttaacattaacttantgttccatataaatgttccactttgaacatgctaaagcatgttttatgtgggctttttttttatggttatgtgttgctgttatgtgttaactggttttgaannncagngaa

SEQ ID NO: 12505 - DNA, 539 bp, Gossypium hirsutum
  misc_feature (206)..(206): n is a, c, g, or t
  misc_feature (287)..(287): n is a, c, g, or t
  misc_feature (327)..(327): n is a, c, g, or t
  misc_feature (335)..(335): n is a, c, g, or t
  misc_feature (361)..(362): n is a, c, g, or t
  misc_feature (391)..(391): n is a, c, g, or t
  misc_feature (422)..(422): n is a, c, g, or t
  misc_feature (427)..(427): n is a, c, g, or t
  misc_feature (433)..(433): n is a, c, g, or t
  misc_feature (439)..(440): n is a, c, g, or t
  misc_feature (443)..(444): n is a, c, g, or t
  misc_feature (446)..(446): n is a, c, g, or t
  misc_feature (449)..(449): n is a, c, g, or t
  misc_feature (452)..(452): n is a, c, g, or t
  misc_feature (466)..(468): n is a, c, g, or t
  misc_feature (470)..(483): n is a, c, g, or t
  misc_feature (485)..(489): n is a, c, g, or t
  misc_feature (491)..(493): n is a, c, g, or t
  misc_feature (508)..(508): n is a, c, g, or t
  misc_feature (515)..(520): n is a, c, g, or t
  misc_feature (527)..(536): n is a, c, g, or t
aatcttaaatcgggaacacgtgtatctcggttagataattggtaagggttggtttgcaggtcgtaccgggaccagctacgagaggaagaattggtggttaggacgttcttaactgctataaccagcttatcgtttggaggagaagattaattttcgaggatcgattctcaacacggaattgaccgagtctaaggctaaggcttatnttatctgttgtaaaattctgaatttattttcttatttatttaattaattgtttgtgctgtttcagttatctactttctaancatttcaaaaatccccgatttacttttatttctaattttngcaggtantgattggagtcgtgggcacgaatatnnccacgacagacaatctgatcataatctanacacggaagtcgattatcgcatctaatcttngtggnctcgancctacnnccnntntantantaaatagagttatnnngnnnnnnnnnnnnnngnnnnntnnncgcccatcaaatttnggcgtcnnnnnnggggatnnnnnnnnnnttt

SEQ ID NO: 12506 - DNA, 579 bp, Gossypium hirsutum
  misc_feature (74)..(76): n is a, c, g, or t
actgtctgctcaatttctttaatcaaatcgaccccgtatattttattttcactaagcccaatccaatacaattnnnggtgtacctatttctattgtttcggacagagacccgaggtttacatcgcggttttagaagaaactgcaagatgctttaggaataaagctgcactttagcacagctttccatccgcaaatagatggtcagtccgaacgaatcattcagatacttgaagatatgttgagatgttgcattcttgagtttgatggtacatgggaacgatacttacctttgattgaatttgcatataataatagttttaaatctagtatcaaaatggcaccttacgaggctttgtacagtcgtaaatgtcgtacaccattgtattggattgggcttagtgaaaataaaatatacggggtcgatttgattaaagaaattgagcagaaagtgaaagtgatttgggatagtttgaaaacagtatcggatcgtcagaaatcatatgcagactcaaagagaaaagatatagagtttcagattggagataaagtctttctgaaagtctcactatggaagcaaaa

SEQ ID NO: 12507 - DNA, 658 bp, Gossypium hirsutum
ctccattatcgaattcctcctttgtataaatattaagattttacctatcgaaaaaacaaatgattttatgattttcaaaagtcctagctataatattcaaaattttaaaaatattattgctaatcaattacagcgtgtttggttcgttgtaatgggtatgcaattacccatctattccgcgcgcctcacctaatccgacgtttggttcgttgtatgcctattacgggcgtattacattaccggcctattccccaaaatctctgcttttgtattcccttcccaaaacgacgattagctattacggacgtcttcccaatttctatgtcctgttttaccctcccagtctttttcaaccagcgctgaaaactcgactctttccagctccctctctgaacatgtctttaacaaccatttccccatttcccatttcccctcttccccaaatcagaatccctaacccttgcccgattttgaacaagtctttaatttgtttttttgttatgttgtttaactttgttagttctttggtgccagagctgaaaacccgaatcaataagtactttgaagggtatgaagaggcactctcttcagttcttgaggccattttgcggagaaagttggctgggaagcatgaggagaccgatgatgaattgataga

SEQ ID NO: 12508 - DNA, 547 bp, Gossypium hirsutum
  misc_feature (503)..(505): n is a, c, g, or t
aatgttagtgatcaaattgtaacttcttttagttaaatgaccaaaacaaaaacttacacacagttttgtgattaatggtgtagtttaccccaaaacttatgattcaaaacatcaaaaccctaagactgcagctataaaaatccccaatcccattttctcctcgttcctattatagtttcagttaaattatgtccaaaactttaacacctttccattctttgatgcaagaagatctttcatctttgaccgagtcgagtaaagtccagtttatagcccttagacaacgcgagtggaatacataaacttcaatatcatgtaaatctaacaaacaagctatttatttgctgctatgtttatgcactttctggttaattctaaacatctgaaaggctcactagaattttaaattactatcaaaagggatccattactatagtaaatgaaacctttttcaaaaataaataagaaaaaaggaacttcaatgcatctatcattcactccannnaggagtgaatgatttgattaatgactattctattcgattctt

SEQ ID NO: 12509 - DNA, 366 bp, Gossypium hirsutum
aatcacctttctctataacgcctctttttcatttgcaaatctccaactccatttagccaatagagctttatttttaacttcaagatttgccacgcccactctacccttaacctttggtttacagacaatatcccatcttattctcgccatctttctttttccatccgtgttcccccataaaaaattccttctgatcttgtcaattctttcaataacagtcaccggagcatgaaacagagacatgaagtatatcggcagcgaggacaacaccacattaataagaactaccctgccagcccatgaaagagatcgacatttccatcccgatgacttcttcctgactctgtctataattggttcccaaaa

SEQ ID NO: 12510 - DNA, 516 bp, Gossypium hirsutum
ggttaaaaggaataaaataaaaatgggattgaaattgtgatgattaaattatttaggggaatgaaaaaaaaagttcatgtgatgtgtgcatgtatgaggctttagctgacatcttgaaatagaggttacaacacttaaggtgtattgggtcatatcttgaaacaacaaattgcgggtagtacacggcaattctgataaataattaaatttcattttcgaaactagaagatcccaagatttggtcctttttagtggagatggcttcttgattttgacaagaaactaacatgcttggctggcctttacaattaaacctcatttctatgatcatcccatttttcaattacatgtatttggatcataacctaacctttcttttatatatatatatatatatatatcgtcttagtcgtaatattgttagaaattacacatgcaaaaaataaatgatatgatcgtcattgttatgagaatgaatattgaatgaaaaaattttgacaaatcttgctggctaaa

SEQ ID NO: 12511 - DNA, 383 bp, Gossypium hirsutum
atgagagagagaggggcatagatagcaataagtgaaaggtaaaagagtgtttgtgcaagtctaatggccaaaaaggcaaatcccagagactactttaatgttgaaaccatgcatccatttccatggaacatcacctttcctatttattattataccctttctctttctctctctcacacacacacacacactctctctctctctttttttaatgtatattccttttgatatctggatttgatgtcacactaaagagaattatcatgttatagaagataggcaaattgttgattgttaaaagcatattaactaatttaatgattgttgggttaagtaataaataagtgttcaaaatcatcggagtctagaaatgtactttcaca

SEQ ID NO: 12512 - DNA, 607 bp, Gossypium hirsutum
gtcttttgtctcatagctctgcatcaaaggctgagcatttccctataattttgatgaaatcattcacccaatagcctctatgtaacaattcgatttttttcggtgataacaaatgcggtttcgaaattttgtttctataaattgagtttgtaaggataaaattagaagatgtacggtattagtatgaaaatatattaaagatcggttaagtaatttaacagagaaaatcgttaattaaaactcagattaaattataaaagttcaatcactattaaattttaaattagaaaatgtttgaggacttaattagcaattatccaaagagcctaaataattacgaaaccatggtttcttgtactatagcggatgataacgacggtgattaattaactttacaattaaataaacatggtttctttaaccatggtttctttaactaaacatgattaaattaaataaattaagtgttgatagtaatatataagcaagttagtggagagagaaattaacatcgcccatcttgtccttccttcaatcgtctaaactattaagaagaaagaaaaacattaattttcttaagcaaacattcggccaccaattcactaag

SEQ ID NO: 12513 - DNA, 598 bp, Gossypium hirsutum
  misc_feature (595)..(595): n is a, c, g, or t
cccctctctctctctctctaaaacgacgcctctctcgaagtaagccaatcgatcttctcgatcttcacgcttttaattctaaaataatttgaaatttttaacgaatcacgaaattagattccttcataaatccaataatttgtcaattcgaaattttttaaggttccattttttaaaatttgtggttgaaatcatcgatggctagttctgggaaccgagaatttgttgatgatcacgtggatcaaaacggcgacgaatcgatggattcatcatcggacggcgttatcgagacctcctctagcggtggatctggagcagcttcgagacaaaacagtgagacaatgaatgaaatcggactcacggaaagattaaccgacatatttgttgatgaaaacgacggagatttgttgcttcaacatagcaatcgagaagatagggttcttcaatggttgcaagctttagatatgcaattaatcggcgcttgtcgaaccgatgagagattaaagcctctgttgaaagtcaactcctcaaacggcgtcgccgaggatagattgttagctcatttgagtcaggtacctttgataacttggaactntat

SEQ ID NO: 12514 - DNA, 517 bp, Gossypium hirsutum
gccttggcttgtttgcaaaatggggtgtcaaatgtgattttgaccaggataatggcctacaattcacccaaaaaagcatgggaaaagctaaatgaggagttcacgggttcaaataaaacaaggcagcaatagttggttaatctcagaagagattttgaaaacttgaagatgaaggagtctgagactatgaagcaatactcagacagaattatggccactgtcaacagcataagactccttggagaagacttcagtgagagcaaagttgtggaaaaggtcatcaccacccttctagagagatttgtgtccaaaatctcatcactcgaggactcaagggaattgacaaccatttctttgtctgaattggtgaactccctttatgcattgaagtagagaaaggcaagaaaaacatcttgaaggagccttccaagcaagggccaaagagagctccagttcaagctagaaaggaaagaagccttagcttgataagagggataaatcaaggagagattcacga

SEQ ID NO: 12515 - DNA, 401 bp, Gossypium hirsutum
tttaaagccttaataccatatttagaaaaaaaaaatttagtaaatttgataccttatactttaattctgtcagtcaaattatctgaaaaaaaactacgtagcttgcaaagccaatcaaatattgccatttggataactaatccacgtcactaaattatgtaatttctacaaaaatatatttttaatttcttaaaaaattttcatttttctattaatttctattgttcttcatcttttttttatttattttcgattcttcaatgctgaagtaaataatgacatacccatcgacggaacgagggaaaaacttgaaatgcaacgaaaaagaaaaaagaaagattaaaaagaaatcacatatatggtttcatggtttccaatgataggaaaattttttcttttct

SEQ ID NO: 12516 - DNA, 594 bp, Gossypium hirsutum
cagccatcacctcccccccggcgccccacccttttccttttttggtttgaccgggatcacctctatttaaatctaaaaattttacttttatcattttcttttttacaaagtatttttattgaaaataatttttattattttctaatttttatttttaaaaattatttttaaaattttcaaccaaacacattttttaatattttaatattctacaaaaaggaaaatgactccgttttttaagccaatcggagccttatattttattaaagaatctaaattggaaatcaacaaaactataatgaaaagactcaattctttagctaaaaaaaaaatcaaatcttatttgttgaactgactatttgtcggattatattgagaatcaaacttctccttttgagcccaatgtatggactttgcctccagttcatttattttgttttttttcttacaaatgtcatggtttgatcaaatatatatatatattcctatatttacgtattaaatggatttcacgtggaattttacattttcttatgtgatatatatttttttggaaaaaatattatggagaccctgtattaagtgttaagttga

SEQ ID NO: 12517 - DNA, 555 bp, Gossypium hirsutum
cattgatcaccaatctgagttaccctctagcttgctctacttttttattgacatagaatgctttacatgcctattgaaagtttgagggttcaatcaacccttgtagttgaagctctttgcattattgttctactagcttttaatgatcaagatttattcctatatggcttgcatttgtgatatagatatctccatttcttttgaaaggaagtgtggtgaagaaatttggattcttccataatggcttttcacatttggataaaaattcagaatgtgagtttgcacaagcttcatctttaagctcctgaccaatctattggagtttttctaactaaataacaaacaacttgggaatttaaacatcttaaatcagattccatcaagtagaattctcaaatgttgggctttggtgtataaatcaaagcctataacaatatcttctcttgggaatttggatcttgatactgaatggttgatctacaaccgaattaaaaattctttcaaacggcttcaaccattctgttaggaaaacctttgagttcatgttggtttctg

SEQ ID NO: 12518 - DNA, 470 bp, Gossypium hirsutum
  misc_feature (54)..(56): n is a, c, g, or t
  misc_feature (461)..(461): n is a, c, g, or t
tgatttcaactacgaatggtgattaatttaaaaattctgggtctggttttattnnnttttataataaaatagatataattatgatgatttaaataaaataatattattttaaaaataaagtataattataatactacctacttagtctgatgaataataacttccattgattataggatacaatcataacaaagtttagagttatttcattattaggtgggttatattttcacattttatgttttatattaatttgattttactttataattatttaaatatatgtttataattatattgtattttacttgtaaattctataaaaatcaactatttaattacattttactctcgagggtttttttttttttttaattgactttatataaatttgaaattttaaatttgaaaaaacatcaaaaattgcggtctttctttatttttgttcaattacaattagnattcaagcc

SEQ ID NO: 12519 - DNA, 626 bp, Gossypium hirsutum
tttttgctttccttcataatgtatgatgtgcggctgaagtacccttgttgctttaagaaatcaggtacagggctgtgacaagtgcatactaccgaggagcagtaggagcgatgttggtttatgatatgaccaagcggcaatcgtttgacaacatggcaaggtggctagaggaattgaggggacatgctgatcagaatctagtgatcatgcttgtgggaaacaagtgtgacttgggaagcctgagagcggtaccaacagaagatgcacaagagtttgcacaaagagagaacctgttcttcatggagacatcagcactagaatctaccaatgttgaaacagctttttttacggttctaacagagatatatcgaacaatcagcaagaaaacacttactgctaatgatgagttagatcctaatggcaatgcagcacttcttaagggaacccggattattgttcccaatcaggagatgcaaaaagacagtagaggcggctgctgcgcataatcctaatgttactttaggttcagttttgtatttcatctacctacgcgcttatgggggcaattgcacccacccaattttttaaaattgattaaaaactcttaataagaatattacccttcc

SEQ ID NO: 12520 - DNA, 508 bp, Gossypium hirsutum
  misc_feature (453)..(453): n is a, c, g, or t
  misc_feature (455)..(455): n is a, c, g, or t
attatttggtttaagcataacttttaaatgaataggttactagttcatgcccacacagtccagtccaatttttaaaaccactgagtattgttatatatgtatatcaccttaacaagggatttcctaattcattttgtattaggtataggagtcaattttgaatttttcatttatataaatgggaatggttaactgagtttaatcaatttatatactaagctcaacttttgatttaaaaagaaaaggttgaacaaactcttaggatgtgtctgtctcttatcttcagattaacattcacgtttgaccacaattgtgattattgtcattaatcaaaatatctctcaattttatgaacagaaatttcaaagaaagtagtcttttttttttttgtcattaagttcccctttaaaagataaaacatattttctcctgaatgtttgtagcatttaaaantntttactctgcgttgtgtgaataaatcattttaggtaaattatcatttgttatt

SEQ ID NO: 12521 - DNA, 549 bp, Gossypium hirsutum
ccctactagatgcatttttgctacgggggcgcactttcccctccctccatgccacatcaacaatcattacattaaaaaaatttttgttaatttgaaaaattaaattttattgttcgataaaaaaaagcaattggattgaaatttgaaaaaatcgagtaaagtttaataattttctaaaaaaatagagaattctgggataaaacttgcagttcgtctcgtcttttccatggcagaattttcaggtcacaagaatactgatctgtcgtaattcggtgttgcaaattaaactaatatccgcactttaggagcttaaagacaagcatttttattaagcttaattatgttttcttaaattttcgttaagttaataaaatgtgcaaagtgagtcttttattgaccttagggcccaaatgaggcctaagggtgagctaatgaactttataagtgtgtaggagaccattagaaggcataccaaatcaatactggtcactacgtcgcaacacggaaggtctgatatcgcaacatagggaacaaaatagagaaatcacg

SEQ ID NO: 12522 - DNA, 667 bp, Gossypium hirsutum
gaagattatagagtaaacaatctgagtcgacaaattccgagtacgaggtaagtttgtacgcaaaatatgatgttataagtatgttttgatgctttgattatgtaacaccccttacccgtatccaaggccggaacagggtacgaggcattaccagacttaaccatacacatagatgaaaatcgagcaataaaatttcatttaattcaaaaatttttgaacacatgcatagactcatatttaaagacatataacgtgacataaatgagcacttacacatccataatcatgcaataacatgtcattcaatttaaacatatttgctaaccatcctgtatataatatacattcttacattaactagactagatggtacgatccgcctcggggtgagtcgagtcgtatgcgagtttgcccgatcgtctacgagaaagtattgttcggctcttttaaagaagatgtttttaggttaaataatgcgaaagatttttttttaaagggtttgaaaatgggtttgaaatatgaatattaaaggttcggttttaaaagaaacaaaagaatgaaaatagattgaaggtagtttaataaatgctggttatggaagatggtgaacttaaaagcaagtaagaaccaatattaggaaatattgacccaagtacttctttatacg

SEQ ID NO: 12523 - DNA, 451 bp, Gossypium hirsutum
ttttattaaggatgcaagtggttgttcggctagcttagtctttagttataaatagtttgctttgtaatcattttgggggttagacaatatacttttgatcctttatgaattttgattactttgtgagtttgttttcaactctcattgttctccaaagactcgtctgacttatcaagtaacccttgtggcgtcaacccgtctttgttttttgaacttatcagtttgtacccaaagtgtggggttcaaattataccgaggttcctatcatctttgatagcgggtcgaggttccattttatcttctttccatccactcaacatttatcctacctaagtatttatataagtcccgggttaacacatttttattgtgttagttcaatcttgaaattcttagccaaatcctattcatcatttccttaatctttccaaacccccattacacctacctg

SEQ ID NO: 12524 - DNA, 414 bp, Gossypium hirsutum
ggatccttttcagattttataagttatcagttagctttcaattatgttttgatttaaaacataggggtaaattcacaagtgatcactcagtttttataatttttattttagacacaaaaaattaggcctccgccattaatttaatgatattttacactcattgtaatctcccaatattaataaggttcggttcgttttgattactcattattaattttattatttttttcaaaaaaattaaattttttatagaaaagtaagatattcaactatgaagataaaataaagggaaaactacctaattaatcactaaattttaatgtgtttttttttgtcatttaactataaaaatctataatttgaagtttaaaaaatcttttttaattactgtgtggctaaatctcaaacaaccag

SEQ ID NO: 12525 - DNA, 690 bp, Gossypium hirsutum
tagtgcctttagtagccgaagctagtttaaatcgtacacttggtgccaatgctttcaattcatcattatatcacccaattcaattatatacaacccatgtataataaaggcatcaaaacttacttaacatcatattttaagtacgaacttacctcgtactcgaaatttatcgactcggactgtttattctacaatcttcgattttcctcggtcttagtctgaattcctcttttcttgatctaaatgtattcaaaattaacccttttattcaccaaataattcaaaacaatccatatgtacacaattagggcattttgcaaactagccctcacattttcaaatttgacactttagttacttgtaaaaacccaaacctggcccagacgttatggctgaatctggcacgttacattgaagtgttttagcaaaaaccttgttttcattggaaacacttccttaaaacaaaaaaccttaattactttgtaaaatctctttttagttgcggaagatttatttagaacatatgattttatgaaaactcgtcatttaaaaattgagttgcggaaacgtagtatttaaaaacagttatggtttaggaaactacgttctacttttaataaatatgaagcataaaaaaatgataataatcctaatttgaaatattagccagaggaaagaacttgttacaaa

SEQ ID NO: 12526 - DNA, 502 bp, Gossypium hirsutum
aaatccgtggtcactcgatcccatttccactccggaatcataatcggttgtaataacccagatggcacctgatgctcagctttaacttgctgacagattaaacatctcaaaacaaagtcagaaatatctcttttcattcccggccaccaatatagttgtttcaaatcgttatacattttcgtacttcccggatgtacagaaaatctactactgtgagcttcactcaaaatcgtttgaatcaaatctggatttcttggaacacaaagtctatttctgaacctcagacaatcatcatcatctattcgaaattcagaatcagaatcagaattacactgagttcgtttagccataatctcattatcaaccttctgagcttcgataatctgttgtaaaaacaaaggtcttgcttttaattcagctaaaactgaaccatcatcagacagaactaaatgagcattcattgcaaataacgattttcgactcaaagcatcaacaaccacat

SEQ ID NO: 12527 - DNA, 609 bp, Gossypium hirsutum
  misc_feature (552)..(555): n is a, c, g, or t
ccttctttacttcacggaatctttgtatatttttatttgattatactaattaccatatgattacaaaactctaatctttcaatctaagggaaacgaagaaatatcattaccctatttctcattgaaattgggcatcataacactaatgtaatccttgtaaatcatgactttttatattgttggggtttagggtgaattttagataccatcctggtgttcaaacgggccaaattattattaattaattattcgaaatgtaaaaaattttaatcgttaaccgaattaattttttttcaaatacattaatcaaatcgaaataactaaatttgatatttttttttgttttttggttaaaataagtataaaatatatataaaaaaaatacagggttaatgttcatttttttaaagttcaaaaaatataatatattttatttatttcaattaatataaaaaaattattaatcgaattaaatcaattcgactgattaattcgattttaactgaactataaataatacccctaatgatacataatacacatattttaaannnngaaaaaattatattcacgttaaaatgtgaaatcaaatataaaatgtcaaacata

SEQ ID NO: 12528 - DNA, 427 bp, Gossypium hirsutum
ctccaccaattcctcatcaactcccccaaccactccattcaaaatccattcaaactcccccttagttgtgtttcagtccaactccactacctacacagctcaagcagcaaaataaatatccaattgcgcaacccaagacttgaaccttaaacctcacaattacacaacacgccaccttaccactagaccacaagctctttttgtatcatgaaacaaactctaatatttataaatcctatataccaaagtccagattcaattaagagcaaaattaaaaattctgccaaggccaaaacttgaacccaggcttcttaaacactcccaaacacacccaaatcacttagccattaaagaaaaaaagaaatttgtgtcaaaacatacaaaaattaaagacatagatttttagggcgttacaagaaacatgaaa

SEQ ID NO: 12529 - DNA, 552 bp, Gossypium hirsutum
gttttggtgtaatgggtcaagataatgtgacatgttatattatcatttcagataaattttaagtcaaattgttcactaatcattatatatatatttatttattttattttcctttttcctttttcctttatttctttattttggcctcaccgccactgttagccatccaaacaaaagctcctattcccctcttttactttttcggttagtcttacttgaaccgttcaaaactcatgaaaccaacatccaaattttgatctttcaaactctgaccggtaatcatcaccattttggagtgtctgcttctctggtgtcttcactttctcttcaccgttcggattctccaactactcttaaatggtggtttcctcatgcaatcaatttggtggtattattattcagacaagaagaaaaaccagcaatatgagatcagtgttcaataatttatgagtaaactactaaaatagtcacttttgtttattttatgctatattttagtaatttatatgtgaaatgttatgttttagtcagttacgttatcatgttgaagca

SEQ ID NO: 12530 - DNA, 609 bp, Gossypium hirsutum
atatctacaggcattctgaccaaatcaatgaaagcaatcataacttagcatgcattaacaaactagaactatagcattacactttcaatgatgatattgtttactttggcttacattaacacctcaaacagagtttgttacttttctactgagcaccagagctgagtgaaggaagatattatgcctgtaattcacaccatttttttgtagttagaattaattaagagttttattgaaatatgattcgatgagatttggtcctgctcttataaagtcaactttcgaagattttatgagagtttattggtggttcatgtgaagtgcacatgaaaatcttctaaagaacctttctatgggcaagattttcaaaaaaaaatatagggcattaaaaagtagaaagtgattgatattatagttcatcttacgtcataacaagggcacccaagagggcaatggcgtcgctggtggctccttgggcattaagcttaggaacaaaaatgcctttaaccacacctgatgctggtggctttatgtaactcatttccccaaagaaacatcctgccattacaaacaccagcactgctatcagcatttccagctttctcacat

SEQ ID NO: 12531 - DNA, 614 bp, Gossypium hirsutum
tgtcgttgtcccttcggccggagctggcgcattactttcaacatcatcagctacctctcgattgggatccatgtactagatgaaaacacaatttaaattgtcaggagttgtcacactatgacaaattaaatatggcatgtatagctagactctcacacaagctacgttagactgagaatcgactaaaccatagcactgataacactaaatgtaacaccccatacttgtattcaagctgaaaaaggatacgaggcattagcagagttacaaagcgaacaaacatataattccgggtaataaattttcatccaaataaaaaccattcgcattcaatcataaagtttctaatactagcctacgaagcccgaaacatgctttgaagtggctcaagactaaactaagcacttaggaaatttttacaaaacttaaaaaattttttctatgaacaggggtcacacgcccgtacggcttgggacacacccgtgtgggcaaaccatgtgttcacccacgctcgtgtccctaacctgtataaatatctattttgcaatgcatgaaaaaattgatgtcacacggccaagtcacacgcccgtgtgccaggtcgtgttgtaaaatat

SEQ ID NO: 12532 - DNA, 557 bp, Gossypium hirsutum
gattgagtgattaacacgtgccaaatttttttttaaactttttattagagttaagaagtctctataattaatccaaaacattctatttttattttttatttgttctctcttctctggcttcttcttgttgtaaaacagagacatttgagggaaatgcgaaggtttagatttaagatctaataataattcttatcaaggttactcaccgttacctcaaaattgtaaaaaattaccgataaagttactcacggtagcggttgggtgagcggaaacgacgatttggttgctaacaatttcttttgccggaggatagcgaaattgtgtgatgctatagttgtggaggtcggttatgggttggcggcagagaataagtatctggcggcgttttatgacgaaatgaagacgttgcaatggttagagaagcaagcaaattgagcaggatgtagtaagttgatggggagtagagctcgtggtgttggagttgagtttacaaaggctaaagttcaaagacatattgtgggtaccattggggcttccgtggttgagccatggttgga

SEQ ID NO: 12533 - DNA, 656 bp, Gossypium hirsutum
gttcgtccggtaacgccttgtaccttatcccggcctcgggaacgggtaagggttgttacaagaactcataacacatttagagaattttgtgtttacgttttgagggttctttgtctttgggttttcggggtttaatctttatctccatcttttgtacttttcgttcttttgccattatagtaaaattatctttacccgtggttttttatcctctttggaggggtttttccacgttaaatttgtgtgttcaatttctcaatttatttcgctatttttcttgttcgttacttaatcgggtcgatcctaacaagtggtatcaaagctagttcaattttcataaatcagctcgttcagagatgtcaacaacaaggtttgaaattgagaagttcgatggtgagacaaatttcaatctgtggcaagttcggatgatgacaattctagttcaacccagttcgaaaaaggttgttaccgggaaaaagcctgagaatctaaataaaatagaatgggaagagcttgatgaaaaggcattgtctgcaatccagttgtgcctcgcgaatacggtattgtaggaggtattgatggagaagacctcatctgccttgtggaaaaggttagaaactctttatgcgactaagtctctgggctaccgtttagtg

SEQ ID NO: 12534 - DNA, 679 bp, Gossypium hirsutum
  misc_feature (545)..(550): n is a, c, g, or t
  misc_feature (553)..(554): n is a, c, g, or t
  misc_feature (559)..(561): n is a, c, g, or t
  misc_feature (563)..(571): n is a, c, g, or t
  misc_feature (574)..(576): n is a, c, g, or t
  misc_feature (580)..(587): n is a, c, g, or t
  misc_feature (591)..(592): n is a, c, g, or t
  misc_feature (597)..(600): n is a, c, g, or t
  misc_feature (604)..(609): n is a, c, g, or t
  misc_feature (612)..(621): n is a, c, g, or t
  misc_feature (625)..(628): n is a, c, g, or t
  misc_feature (631)..(632): n is a, c, g, or t
  misc_feature (634)..(641): n is a, c, g, or t
  misc_feature (644)..(648): n is a, c, g, or t
  misc_feature (651)..(651): n is a, c, g, or t
  misc_feature (653)..(653): n is a, c, g, or t
  misc_feature (656)..(659): n is a, c, g, or t
  misc_feature (663)..(664): n is a, c, g, or t
  misc_feature (668)..(669): n is a, c, g, or t
  misc_feature (674)..(674): n is a, c, g, or t
gagtttatcttatacttgcttatgaaaattgattaattgttgaattaacgtagaaatatgtttaagagattaattaatttagtaagtatgtatgtggattagttaacaaaagaccaagttgccatgaaattattcataacaacataaacatggttttaataattctaagttaaagaataaaaccgtttttagaaatcgtgcatttagaatttttattttcttagtcaatcaattatcaacatatttttcttcacctatttgtttaatttttacatttcataaatattttcttgtacagtacctataggtacgataactcgatattcttgtcactttattacttgatatgattgtgaacacttgtacatttccgtcgtacgtaccacgtacatgcaaaaatgttttacaaaataaattagtaaacatgctattacataaataaataaaataattaacttatcgtaactattataatatcacttgccatattttattaccacaaatttttaacgcttattgaggttaaaggaaataaaaaaaaaacnnnnnntgnnaattnnnannnnnnnnngtnnncctnnnnnnnnaaannaaaannnnattnnnnnntannnnnnnnnnctcnnnncanncnnnnnnnnttnnnnnttncnttnnnnccanntttnnatttnttacc

SEQ ID NO: 12535 - DNA, 594 bp, Gossypium hirsutum
  misc_feature (65)..(65): n is a, c, g, or t
  misc_feature (93)..(94): n is a, c, g, or t
aaaaaagtattaaattttgtaggtaaaagtactatggagcccactggagtcaaattgcattttgntcatctactcaaaagaaacaaatttgtnncccatatattagatcaaaaagcaaatcaatcctcgtattaaaaattttatccatttttattatcaaaaactaatcattgtttgtcagggaagaagttcgtgtaactatatgatatttctgcaactacaataatttttaaacaataaaaacagataaatattttaataaaaatgatcaatttattattttatttaacattcgatactaatttatcaatttttgagtaaataggataaaatgcgttatgactcctagtgcagggactcatagtacttttacagtttttccattcgttttctcatagtagagttcaaaacaagtcaatcataccacaatgagaaaccaaccaagatcatcaaaacagaacagtgagatttagtgaactccaattttctagttaaactctatcactaaatagataatgcaaatgctataaaatttcaagacagatatgaaaaattcaaactaaaagaaagattagacaacgaacaagtcagatc

SEQ ID NO: 12536 - DNA, 490 bp, Gossypium hirsutum
  misc_feature (62)..(67): n is a, c, g, or t
aaacaccggttaacaccgacctactacacgaggtgtgcttatagtcttttaagtccagagannnnnnttattcatcaaagactgatgtcatttcggcaaaaacctttcttataggtaaacaaaagaggcggatatatatataaatgctctttaaagctgtatgattatgctgttatgcttttaagactcgttttatttttttatatatatgtattgcggcaagtgtttattattgcccaaaagcggattggaatggaactccattggaactgatccattatgctttaaatacaaggaatgccttttgaggcttctggtttttgtttttacgtataatcttgggtctttttaagcttatataatttacagcttctttatgcatgcatgtatttttgtattaatctaatgaaagaatttcatatgattaaaacaaaaacagactaatagttaaatggtcagaaatgtaatttcccttaattttttgtttttt

SEQ ID NO: 12537 - DNA, 693 bp, Gossypium hirsutum
catacctgagtgtcaacagtgtggtaggcgacattgagatatttaatcatgtaaattacaaaccataactctttttgtacattttttaatgattttacaaagttggaataggggatttcaaaatcattctgaccctgtctcactaaaattcaaatatctcaaaatatttaactcttttgcttattctatttcatttatgtgaaaatagactcattcagatttaatttcatatctcatgaaacccctaattcaatttccaccatttttggtgatttttcaaaattacacaactggtgttgttcaaaactgttttatttctaaatttactctttaatagttttaatacttcatatcatcttgctcaagggtcgattaaatatcgaacccaatattcatcacgtaatcttatccatttcacatgtactttcacttgtccaatttccccgatgaacatttcagaatattaaccgttactcggtggaatcaacacttagcaaccaccttatattcagtgatacgggaaatcagcacatagaaaccccttcataatcaaggatacgatggaatcaacacttagcacccacctttaaaatcaataattcggggaatcagcacttagcaatccctcagggaatctgcacttaccaacccctatttgatcaaagtttcggggaatctgcacttaacactacc

SEQ ID NO: 12538 - DNA, 630 bp, Gossypium hirsutum
gtactcgactctgaccacggtctcgggtaaggggtgttacagactcgtgatgaattaatggaaaagaccatggttggaccatggcaatatgagagccagtgtaagaccacgtctaggacatggcatcggcaccggtatatgggagccagtgtaagatcatgtctgggacatgacattggcctcgacatgtgtcagtttaagaccatgtctggaacatggcatcagcaccgatacatgggagccagtgtaagaccatgtctgggacatggcatcagcctcgatacatgtcagtgtaagaccatgtttgggacatggcattgacaccggtatatgcaagctagtgtaagaccatgtggaacatggcatcgccctcaatatgcgagccagtgtaggaccatgtttggaacatggcatcgtcattgttatatgtatcagtgtaagaccatgtctgggacatggcatcggcaccgatgtatgagagtcagtttaagaccatgtctgggacatggcatcgacattttatccttttgtatgatgcttatcgggtatcctttagtattccaactggttcaacgggtgatttaaagattgtgtcatgattgataaaagttatgattatgttgcaagtgg

SEQ ID NO: 12539 - DNA, 552 bp, Gossypium hirsutum
tatctaatctcaccgcgaccgttgtttttacactaaccgcaggtaaacgcaccgttcatccaaactcaccctaaatagtaagtggtgcggttatgataattatgaaattaccaatttattcttatacatataaactataaaaaaggtaaaaatataataacaatacaggaaaaatcatatattttatgtttaaatatcttttcaaataattatgtttaaatatgtagttgacttcaaaaaaattttgaaaatattaaagataagtggccaaatttaaattgaaacggaacagtataggtaaggatggatgtatcatacattcatggagatgataatgattttcaatattatacatccataatggagtgggaccggtagtaaagcaggacggataatagagcaaagcatgccaattttggagtagttatgaatttagcaatattgctctcgtcccgttccattaccatacttacattaatctcgatttacattaaaatgaatcccacataattgttgaaccaacaatgccatccactaaaggcgcgcttggat

SEQ ID NO: 12540 - DNA, 570 bp, Gossypium hirsutum
atctcatctcattaggtgccctagaatctaaagggctcacaatcactttgagagatggattactaaaagtagtagctgggcaactgacggtgatgaaaggcacaagaagaaataacttgtattttttaaatggaagtacagttattggatcaacatcaacagtttctacaaaagatgtagattcagaggctaccagattatggcatatgcgattgggacatgctggtgaaaaagctttgcagacattggtgaagcaaggcttattgaaaggtgcaaattcttgcaaaatggaattctgtgaacattgtgttctgggcaagcagaagagggtaaaatttggtccagcaattcacaatacgaaaggaattctggactacgttcacagtgatgtgtggggacctaccaaagtagcttctttgggaggtatgcactattttgttacttttgttgatgattattcaagaaaagtatgggtgtatctaatgaaaagaaaaagtgaagttttggatgcatttctgaaatggaagaagatggtggagactcagactggtcgaaaggtcaaacgacttc

SEQ ID NO: 12541 - DNA, 663 bp, Gossypium hirsutum
ccctccttcatatctgataacttgattgatctgcacttgttcatttttttcttcaaatcagtccctttgttcttgccatcaatatgatgatcagcttggataccaatttcaagcttgttggtcacctttctttgaaccatgttcaaagggtgggttttggttcccctagaaactggggaaattgagctgtgaaagaaaaccagaaaagtagttttatatttatataaaagattattattagctttggtgtgggattgtagtgggggtggcagtgtcaccaaatttgaataaggttgagataagaactagattctgacttgcactaaattaagataaccggtgtttgagttttgcgacccctttgttttagtttaatagaatttttgctttactaaaatatttggaatattgtatattatgccaatgaccatatgagatgtattcatataccttcaatgaactaaatgtacgtaattcaaagaaaatatgatgattataaaacaaaatgtaaattacactcaacaattaataagtttatgttttgatcacttacttttaaaaaaaattataaaatgatcactgaactatttaaaagtttttatttaatttaataaactattcaaataatattatttaaatcactgaattgttaagcaaagtccg

SEQ ID NO: 12542 - DNA, 617 bp, Gossypium hirsutum
  misc_feature (595)..(595): n is a, c, g, or t
  misc_feature (597)..(601): n is a, c, g, or t
  misc_feature (603)..(613): n is a, c, g, or t
tcaaaataaaaatataaagagtaaaaatctttatatatatgcaacctgtaaactggttttccccagtttctcttgccacataatccatatagctcagtttgtgctccaataatctcaaaagattcaaaatcgttgggcaccgtaatttcatctatcattaatacatccttaaatatctgccaatatcatcatataaagtgtacattagatgatgaactaatctccatgcatgtggtgttgcatgcttgcagtccccactcagaaagggataatatagtttttggtccttgaactgcagggtcaaaaattatattaaccgaataaagaataaacgaaagaaccgtaccgtccacagcttggtgagatcaaaattgagatccaaatagacagcaccggctagagcttcgacaatatcagccaaaatatctggacttcgaactgtcaagtttttatgatcatctccttgtttaactgcctttacatactccctaaccttcagccaatataagatatatatatatcatgggcttaatggattacattttgattaattgaaattatataactctaccgagagtgaaatacccaaaaaaanannnnntnnnnnnnnnnnccct

SEQ ID NO: 12543 - DNA, 648 bp, Gossypium hirsutum
caataatcgagaaatttttaacgaatcactgatagtatccggctaatcccaaaaaacttcggactacagaaatgttcttcagaatttgtcgttcaacaatcgcatattgtttatccgaatcaaccttgattccatccgcagaaataacatgtcccagaaaatctacttctcgtagcaaaattcatatttactgaatttcacatacaattgtttttcactcaaagtttacattgcaactcttaaatatttggcattatctgactcattcagtgaatagatcaggatatcatcaatgaataccacaatgatctaatctaaatatggttgaaatactagattcatcaaatccatgaatgctgcaggagcattagtcaaaccaaaaggcatcaccagaaattcctaatgaacatatctagttctaaatgtaatttttcgtacgtctttctccttaaatcgtagctgataatatccagacctcaagtcggtctttgaaaacattttaattgatcgaacaaatcattaatacgaggtaacaagaatttattcttaatggtagctcaactatcgataatttatacatgatctcattgacccatatttcttctttacggacaaaactgaagcaccccaaggtgacacgctcggttg

SEQ ID NO: 12544 - DNA, 490 bp, Gossypium hirsutum
tttatacctaatacataagaggccccaaacctctttataaccctttatgtgtatatatatatatattaaaaaaataatttttatctctttataacccattgactagcccatatgagatattaaaataagaaaaaaagtattcttttaagtcgcttgcaataatttcttttgctataatttaggcttcacactagaccaaaccaattgattttgatcctatttgaaataattggttgcattactactcgtacaaatgacatttttaatgcctttattttcctttgaatcttaattttttgtgtgtattttgtcccaactttttaaagttattttgcaagtgacttgaattagagcactctttttcttattttaatatctctcatgggttagccgatgagttataaagggataaaaattatttttttaatatatatatatatacacataaagggttataaagaggtttggggcctcttatgtattaggtcta

SEQ ID NO: 12545 - DNA, 485 bp, Gossypium hirsutum
accttaggaatagttaggatacatatgtcatgacataagattctgatatgtgatttcgtgtaagaccatgtctgggacgttggcatcaatttttcatttgcatgtaagaccatgtttgggacatcgacatctatatgagttcgtgtaagaccctctctgagatagtggcattgatatgtgattacatgtaagaccatttctgggacgttggcgttgtacgagcttttcaattatccgagtatcctcattaattcttaatggttcaacgggaaatatcgagttaagatcgaatgtgaaatagagctaaaaggataggtatgtgctaagtaaaatgatcgaatagtaaggtaagtatatactttatataaatatatgaaatgtacattatgaaaatgagagttaaatatgcttatgaatatatttgtatttggccaagtggaaaataatgctaaagtatatgtattgatgcatgaagttgcaagcaa

SEQ ID NO: 12546 - DNA, 578 bp, Gossypium hirsutum
  misc_feature (560)..(560): n is a, c, g, or t
  misc_feature (568)..(572): n is a, c, g, or t
gcaaatcgttctagaaaccctagggatttttggatgcttcaagcaaataggctacttcaagttgggctagggtttgggtctggtgttgggttatttgggtttgggaaatatattttggataacttaattggggttgttgttgtaataaaaactggacatttatttgtttttttttaatttttatttggttttattattgattgggcaattttgggtattacacccacgatttaattgcatttatattgtacaatcgttggcatgtgtttgcttgcttatgatatttattcttatgaatagaattaattaaatatgactttgattaatgcaatgccttcaaattaattggatggatgaattctctaccatttcgggaggaagtttattggtgctactaacgacgggataccctctttcgagcaaagtgaacttaaataattcgtcataataagtaagtttaaataatttaatctgtacaaatgataatattgattaaaattataaaataattcatgtgcctttaattaactagttcttatatcaggtgcgttgcacaaaangatcccannnnncgtagg

SEQ ID NO: 12547 - DNA, 491 bp, Gossypium hirsutum
aaatattgtacttcgttgccaactcaatgttcactagtggcaatttttatgtttttcatatttaaacattaatgtaatataaaataatggctaaattagctaaaatgccccattttgaacaaaagttagagatttttaggtcgattcttttattatttagagaaataggtcgctaacaagttaaaagcgtgccttttagggcgtgcttctgaaaagcactttatacaaaaacgtatttttctttagcatgttaatcttgaataaatgattaaactattagtattttcacctatgtgacttaggttcgaatcctcctcaataatttttttttacaaattacagtcaaataaagcatcaacatcaaggaaaacattgttacagtaataagattaaacaaatatgtgcttaaatacaaatgttgttaatgaaatagagaaaagcttacttctttttactcttagtttcacatgtgatgatgaccctatctacat

SEQ ID NO: 12548 - DNA, 670 bp, Gossypium hirsutum
gaaagacagaccttacatcagatttctgttttaaaagaaatatccaagacacacgggtacaatcatcaataaaggatacaaaccaccgagccccagaaatatttgaaatagtggatggtccccaaacatcactatgaataagagtaaaaggagcggatgttcttttattgcttaccggaaaagaggtacgtttatgttttgcaagttcacagacatcacaatggaatttttcaacagttaatcctttgaacaatgaaggaaacataattttaaggactctaaacgatggatgaccaaggcggaggtgatggagccaaatttggtttttattggttttaatagattcggatatgaaagataatggtgaggaattcagagcactaacttctccactggattcctcaagatagtataggccatttacttccttagcatgtccaatcatcctcctcgtattctgttcctgaaaaagacatcgattgtgatagaaaaccacactacagttagagtctttggtaattctttggatggatagaagattggtaaatagttttggaacatgaaggacatttttaagagtaagggttttgtttataacaatatcaccctgaccagccactgtgatcacagaaccatcggctactggtatctttctactactacgacaagg

SEQ ID NO: 12549 - DNA, 649 bp, Gossypium hirsutum
cttccatcttggattagtgatagctcctctccaatcctgtgaaacaggcataaagaataaggacaaaacaaaaactctataggatgaggataaggaatcataagagacaaagtcagagataggataaaaaattcaagttctaacaccttttcgttgggctattggtaattctaaatcagtatcaaatttaggtaaagaagactcacgtggcagtgaagagttagggaacataatagattgtatgatggcatcttctttcttatctttgtatgtccttaaattagatctatccgacaaccgtccactagttttctcttgaatcgaagtctctactggaactaaatttccctcggaagagtaacagagtaaggtgtcatctcttcattttcagtaatcttcccctgaagagatggttgtgataaggaaaagtaaggtttatcctcacgatgttacttccatacataatactttctaaatgatagatgataacatttgtaacccttttgtgtgggagagtatccgatgaaaactcatttgactgctcgaggatctagtttgctcctatgtcgaaaatggacaaagaaaacacaaccaaataccttcagtgaagttatgtaatctgtcttgccttgtaagatttctggtggaa

SEQ ID NO: 12550 - DNA, 572 bp, Gossypium hirsutum
tgtgtcataagtacttgctggtacaataaatatttccggcaaaataaggcgattatttaatagaaaaaacccaaaaaatatttgctcagaactctatccaactttgttagctttggtcgaaaataatatttacaccgtcttgcatgaagaagtaatttaccattttatcaaaatcacgatcaaagaaatcatttatggtacaagcagcacccctaaaaaatggagctgcacaagcaaatacagctaaattcttgaaatcaggaatatttccagtcgatgctgctaacgtagctgacctatacgtacacaaagtttttaattaaggaattgaagtatatatgattccatattatcaaataaaatggaaggaagggaaggaagagtttgttaccaggcaaagggaaaaagaaataaccaagtaccgatgggcttatctacgcgagccagcttagcgaaaggctgaatttctttgggtaagtaatcaatccacgatgaaacttggaccactttctcattcggttgcccattaattagcttttcatcatctttgcttactggagatgtggatgtat

SEQ ID NO: 12551 - DNA, 602 bp, Gossypium hirsutum
  misc_feature (59)..(59): n is a, c, g, or t
ctgccttgtgaagtattatggaataggcatggggtagatgaggctacatgggagcctgnccattttatgcgaaaacagtatccaaatcttttcacaggtaagattttcgaggacaaaaatccctaaagggggggaaatgtaacatcccaaaataaggcctaagcggaacagtggttgcgaaacggcgaatccaagatagaaaagtttattccgattaatttttatagtttatcaagtgattagatgcatgtgttagagtatcgatgaaaaattttgtcaagcttccaggcttcgtagtaagtggattcctgaaaacgaataagttacaaaacttgcattctagaagtttttagtatgaaattgctttgaaatattaattaggaggtcttaaatggtactttgaccaattttaagttcatggacaaaattaggacatggaaggaatttttttgaaagtttagtaaggaggggcattttggtcaattggatattaaatgaaataaaaagggaaaaataacacaaaattggttatcatcttccctagttgctgttgaatgctcccctctctccatagctagggtttcttccacttttcaggcttc

SEQ ID NO: 12552 - DNA, 667 bp, Gossypium hirsutum
gtgtaaggtctttgaattaaaccaaaaacacaccaacttttatttttaaaccaaccaagaattgtatattcttattcaataaaagtttgaaatattctagaatttaaaaagaagggctaaattgttaaatatatatatatatatataggaaataaaaataattaaaatttagaatttgtttaatgcgatcggttgaaatatttttagggaatttattaaacgtcatataaaacccaactttttttgttagggtttcaaaaccttcgacacaccacaaaaacaatgccttctctcctttttttttcaagaaaatctcaataacattttatctaaaacaaaaattttaaactcgactcacaacaaatccctttgatgttctacttgatcaatctaaaaaaagcagtcttttttatttctttttccattttaaaaccacaaaaagttcctattaacaatatatctttttcttgtaaagttcagggcatcatggaccttcttcggcaagagttctaaataataatatggcctaacatgattttatgttcatatttacatgcaaccaagataaaataattaaccttaaaatataaatcaaaatatattctaaattcaaatataaacctcaattatttaccatcaagtcgtttaaaaaagtgaaactgatttg

SEQ ID NO: 12553 - DNA, 455 bp, Gossypium hirsutum
tcctagggtttcctggatcagttttgggccactattcggtttgggcctcagtttgtttttaattgggccacataggttgattgtaaattggccccttaaagcccgggcaaaatctgttattacaacattatttccatgctttttcaataatatcaaacttaaaaatatattgaaatcttgattttcttaacttgtgctattgatttcaatctttaacttgattttctctctcctccagcttctatttcttgaatctaacttgatattctagctccccattgtctccttgttattcttctctcttggaagctatggaaattcttttaatttctaggtgaaaatggtaaatttttggtgaaaggacgaaattgtaaagaaagcaaaactttctttcttctcctctcttctcacgttagttgcatgaaaatatggtggaatggatgattcttcatctt

SEQ ID NO: 12554 - DNA, 614 bp, Gossypium hirsutum
  misc_feature (61)..(62): n is a, c, g, or t
agaacaagaaacaaaatatgggactggtgactaatgctatgacatgtaaggatatatctanntatgaataaataaatgaactttggggtaacccttggttttggtgacttaatccaaataccaaagcatatgcaacaacttaggaaagattcttaatgacaaaaatctgtcatggctttcttttgagtacatagagcaagaatgtaacacgtggcgcgaatttagtgaatgctgaccgcctatggacggcgccatggcggtttccttatgcttgtaataaagccattcacatgaagacacatgagcacgtgccgagattgcgagttgttaattacaattatcctattattggctaattttaatctttttaatccattaacattgtgattttttgcggcgcaaagatgattaatcttcaatcttaacaatgtgaacacaattaagtactttttagttttttttttttgggggaacttaaatttaaaagttgaaaacccccccccccatatttgtatatatttggtttatatttaagggaaaagaaaaaaaaaaaggaacccctttgttttttattttgtttttttgggggggttaattggaaaaggggggaataa

SEQ ID NO: 12555 - DNA, 646 bp, Gossypium hirsutum
ttatagcacgaaatgccaatatagttgcctatcaactacgagtcatggcatcaaatgcctgatagtaacaaaaatcaagctcttgataatattaaggtaacaaaacgtgaatgtaatttataatactttggtttaagtttcatttatatttactttctaaacttgtgtttttttaggagagatttgctttagaggtctcggataattatgtcaagaaggcattgggaaaaaaatggagagaccataaaaacactttaaaaaaagaatgttttaaaaaaaatataagcctcgaagagaaattgcgaaatgtcccgccgggaatgctaaggtaccaataggaagattcggttagattctggaattcaaagaaaggagaggtattacgtacttccaaactcttataattatttcggtttatagtattactacataagtaataataatttcataatgtaggatcgtgagcgagttggaacaacaagcaggcaaaaacaaaaattcacgcacacagtagggtcgaaaagttttgcttgtgtaactgaggccgaggtattttgaatttattaattgtgtcaaatattaattactttctattaaattatatttttactactatattggaggaactctcgtttggacaaaaaaa

SEQ ID NO: 12556 - DNA, 685 bp, Gossypium hirsutum
aggtttcttatcttatatgcatcatcattttaatcatcaatattttccttttaatgtcaagggatgctaattgtgtattattccttcttctttcctataaaaaatggtttagggctccttcgatgcggtaaaagttgtaggctgagatggataaattatcttaggcctgaccttaaaagaggtaactttactgaagatgaagaggatctaattatcaagcttcatgcactcttaggcaaccggtaccaattctctctttatatcttttacatactgacaaaattttgtttttttatagacacaagataacataataattcaatatttaaattatatttgcttttttaaaaaactataatatgttaataatattattaattagtcagattagattatctttattaaaattttaaaaatgtaattttatttattaaaaatagttttcttaaaaaaattatcaaaataatatctttaattaaaatttatgatttttatttcacttaagaataaaattgatttcattaaaatttaagataatataatgtttaaaaaaaactaatttaatagagagtgtactttataattgttgttataagtgaaaaaactcttacaaaaacataaaaatttggttctaaaaaaaattaattttattaataattattataatgagagttcgctgtgtgtt

SEQ ID NO: 12557 - DNA, 518 bp, Gossypium hirsutum
ccctgagtcacagtataattgattggcatctcataaaaatattaacaatatcaataaaagaaatttaaaaatttttaatgattggagtaaaaggaatcaaaattttggcatgtttctttggttcatagtatgttcaaatgggatgcacatgataaaagagtacaattaataaaacaaaaggtttaaattatggttgtctcactactttaatttcatacaatttaatccttttacttttattaatattatattttaatccaatcattaacatcgtttaatttttttatgttaattgtgttagtgctctaaactacgtataataccatcaataatagtaaaaaacattaaattatattaaattagaatacaaaaattaaatacaaggaccaaaactacaatttgaccgaacaatatttaccaaagttttggatcgagtccctgcaataccacttgaacatcaatgtgttgtgaaagcctgcaaacacaaacatgcaatgtcatatatcgttcctacaccc

SEQ ID NO: 12558 - DNA, 691 bp, Gossypium hirsutum
tgtctggaacttaaggtcctccctccgagcataggcgagctaatcgggttaaaataccttggcatttcgcaatgtgttaacttgaggtctctacccagagaaattggtagattagcaagcttggaaataatagacatgagggaatgcccacagattgtgaatttaccatcgccagtcatgttgttgaacttgaaatcactacgccgagttatatgcgatgatgaagtttccgaggactggaaaaaggtgaagaggggaatgcgacaccttcatgttcaagttgcagagaaatggtatagtttggactggcttcatgactgaaacagcatatgatatgtatctatgtgtcaaatattaatattaagtttattttactgccataaaagtcctcttggtgttagatcataattcaaatcaatggggaagtactgcaactactttccttttcctttaaaagaagggtgtgaaggagcagggccagcaaaataaagagaaaagaagcataaaaaggttccatcctggatgaggaaaatgccatcacccgagatgtgacaggcggctattaaagatttagtggaattcttcttgttggtgtgcatgtggttctaaagttaggaggataagttatgttttttttctatttcagagaaaaggaaattttatatctaaattcgatgaatgggtacccaaa

SEQ ID NO: 12559 - DNA, 395 bp, Gossypium hirsutum
atcttacttaggtatggaagaataaggccctgatgaaatctagctaatgtagccatcaacctgacagattcctttctaacagcactcttctgctctgaatcagtatccaatatacacgacaaaaatggggaaatcttatctggtgttaaacattctgctgttttctcaagctcatcaactcctagttgatatgtatccctatcagctaacttgttcagcgcaagattcaccttattctttagctcaaaagctacctgttgtgagttgatattagagggtcctttggctttcctatgcatgtgcgccttcatcttgttaccgattatcaagctattttcacagggttaaagagtttaaaggatgcaccgctgctcgtaacatgaatttgcaaagag

SEQ ID NO: 12560 - DNA, 661 bp, Gossypium hirsutum
  misc_feature (5)..(6): n is a, c, g, or t
tcggnngcacatcatattttccaatggaatgcaggatccatggagcagaggagggtaagatgttagaaacagtatgctggttagcttcttagattagaattaacatgagccaaaattataatcaatttcaatcacaatgaaactggtttatggtatgaaatatatacagtgtgctgagaaatatatccgccactatcattgctcttgtcacagaaaaaggtatgtaaatttatgattaagcatttttgtttagttgtcatcaacttaaacaagttctctcattggtatgtattaggagctcaccatgttgatttccgagccgccacaaaagacgatccggactggcttatacaacaaaggcggcaagaagttgaaatcatccaaagatggttagatgagtactatgtggatctcagacatgcttaaattaaggactgacagaagctgtgttggcaaaactagattatttggattgaatgaatgttttgaaactcaaatttgcagaaatcctctaatctaattgtttaggctgatacaggaatgtaccattttcattacttgtatgacaaactatgtccactgtcttaaaatactattacataatttacatttcataaatgtgctggaatgaatgaatatttatcgtcccaaggctaacatg

SEQ ID NO: 12561 - DNA, 459 bp, Gossypium hirsutum
aaaaaaggtgctttctaggacaaaagatcaggcacctattatgaagttttttatccatagaaactattatgaagttttttatcttttactttttaattcccagaaataagacaaattgcataatcagtcttgtttctggaaaatatcgctttaacaccttgttaatctttcagtaatttccggaggcaagaaacgaaatcataattgctgcaccgggttagttacagtagccggttagatttttgagtcgtatttcatgcttatctacgagttgatactttgggaaattgatactatgtttatttaaggagttgtttgctgcttttaagtgattttaagagtattctgaactcacatcttagtttagtttgttcattatgttgcctttaggaggtgccatctatgatttggtctgtactttctggtttttgcattgtttataaattctgggtccttgag

SEQ ID NO: 12562 - DNA, 659 bp, Gossypium hirsutum
atttctatgggatattgcgttgcagtgtgatgcagtggatccaagtgatttggataaggtggcaaagactgtcaagaaagctcttgcaacatatggcactccaaccatgaacgaaatgatccgaaactgtatggcacaagacctttcatggaaggttagttccttgccgaacacgtaagaacctcacactaacccgcatttgtagctttaggaagaatgaacacaatgggaaatttgttgatcaatgcagggaccatcaaagctgtgggagaagttgttgttgagcctggaggttgctggcagtgaacccggtaacgaaggtgaggagattgctccacttgccaaggaaaacgttgccaccccatgaactgcccttcggagtctaaataaaatgtttcgatatcgaattgttcttaaagcaagcaaatgcaaaccagtagctgcgtcaagttttggggtgccattagcattgactgatataaagcactcaatggtatggttgagggtgaaaagttgggagatttttgtataaagagagaaataatattaagtagctaacagggtgttagtgaaagtttcacaaagactaaaatggtgaagccattttcactgaatatgtctgagagcaaataaagttagttcgtttgtggtgccattaa

SEQ ID NO: 12563 - DNA, 655 bp, Gossypium hirsutum
  misc_feature (57)..(59): n is a, c, g, or t
  misc_feature (61)..(61): n is a, c, g, or t
tgcacaatcaagccctcgtaaacaagaaagtaattatagttgtcaagtttacaaatnnntnaagtcattctttccattcgtacttaagaggcttagttaataatactatgcaaacacatcagtgtaagctaataagctccacttgcttaacaatctcgaaatccaaaacacataacagctcgagtgctgggccattcataaactacagcaactttctaaactaactacaaacccaagccaataatcaagaaagaaaagagagtaagaatcttactctatgaatatgcaaacaagtcttctgaccagccggtgtcgaaccataaattcgaataacaggaacttcattaactttttcaccttcaaattttcaacaattgaatttaaaataaactcgaagattcaaaaacattttagcttcatcacaaacaacagtagctaaacaaacgttctagatatagtcgacaattaaaaaaaatgtaaaggaaatcgtaccttgaaagctactgtagcaaacatcgaagccagggattggcggtgccatgtaatgatcgatggacacgattcgaacgctgaaaacgctcgaatctgactgcgaattcaacatttcgatttctccttttttatgagaaaaaacggaattcagaggaaaatgagg

SEQ ID NO: 12564 - DNA, 631 bp, Gossypium hirsutum
  misc_feature (132)..(132): n is a, c, g, or t
ccgcagataaagaattaactcaaaattatagccaataataatgttattattagatcaaatttaatagtttccttgagggaattagtttattacatgagatttggatggcagccggcggcggcgcaaggattnggggaagtttacccaccgaaggtgagcaatgaatggcgataatcaaattctttgggaattgggggagaaatattgatcgatgaattttcttttcttttttcttaaatttttaatatctttgttccggaaacgaggagcgctatattttatacataaatatttttatattttaaaaaaataaaacaagtaaggattctaagaaagcaattttgattcgaaaattttaataaaaattttaaattttgaattaaaaagtttgggttaattgagttattcaaaaatccgaataagaaaatgtaaaattaagttattttgataaatgtttaccttttttaaaattaaaagtcaaaactattaagttaaaatgtaaaactacgtcgttttgataaatgtttagttattaagttaaaaggcaaaaccattatgttgtttatgtagctaaataattttatacttcgtctactagttaaataaccggtccatgtaaacgtaatattga

SEQ ID NO: 12565 - DNA, 534 bp, Gossypium hirsutum
ggatgaatctcggggatctaataatcgtgcatgaaagtatttatctaagatgcatgtatgtactagatacacattaattattagatgcatatattgaaattaataatcacatacaacagttataaaggttgtaagtgatgaaaccattatgagaaagtacaaaagtaaagagataaaaaaaatatgacatgagaaaagtattcattccatgtttagtgtttcttcctttcactgactctagaatcctctccaactaaacggtatcaatagctagaggttcctgtaatgtgagtgtgtgtgtgaaaataaaattaatcatgacttctacaagcacaatctacaataatgttcaagttcttatcatctatggcaaaaattgtgatttttgaacagtcaaaatagatacattattcacttccttgaatatattggagtagtcaaggagggctatcaagatccagaagatgaagaacaacttgaagaattaaagaatgagaagattacgaatgtcagagttctcaagatgatctaaag

SEQ ID NO: 12566 - DNA, 698 bp, Gossypium hirsutum
gtcatggaagcgctcaatagtagcaacattaaaaaccgccaaatttgtatcaaatggtggaagctcggcagatggttctatggattccgtatgcgggatgaattccatttccgatgtctctctctagaagatcttgcatcgtcgaaagacgatgaagacgtcctgggggtgcttcaacgaggagccattcatgaggttttacaagttcagatatccattgttagttccagaagcaatgcctgggcctaattaaagcttgcaatcaccagtttaaacaatggggagaataaggtaaaaaaatcatagaggtctttgtactaagagtcagattgcaatttgtcccttttactcaacaaatcggcaaattaatcactgtacgttagattaaaaagtaaattgatcattctgttaaaaattcaatccattttacagttaaaaattgatctttatacgactatataaggtacaaggggcatatcactgtttgattattttttagcgataccagtttttaacagtagaaatgaatgaaaattttaataaaaatgaccaatttgctatttgatatagtgtacaaggactaatttatttattttttgagtagagagggtaaaatgcaatctgacacttggtataggaactccatagtatttttacaggcaaaacaatgaataaatgatccgcagatgtacagtgta

SEQ ID NO: 12567 - DNA, 575 bp, Gossypium hirsutum
gactatacttggaatgatgaatagtctaagtatcaggttatcacacgaggttctgatatcaattaaagtttaataatttatttaggtataataaaattataaaaacttttagggaaaatagcataagggtttatttaaataaaactagatagttcaaggagtttctttttgggtagatattcaaggacttctttaatattgtaactcttttttaattactatttgcaccattggaagtatactagtttgaagttttttttatggtcttttactctttcttttattaataaaaaataattatttaaattaaaaaataaccaacccagtaactacacctaaaaataatcatgtgcttaaaaattacctcttaatttttaacccttactttatttttctttaaaatataattttttataaaaaaattattagttaaaatgatttgtaggcgtgatgatttctagtatggttaaaaatttgtgagctttattcaatggagacatgaagggttagtcaacataattggttccacatcggttctggttgtattgatgggtgggcaccatttccgatcagta

SEQ ID NO: 12568 - DNA, 478 bp, Gossypium hirsutum
taccctatatggtgtgttggatggttggagatggtgtgtagcggatgggagtatgattgtaaatctacatctattgtgttctaatacggtttttatttttgatatatgtctaattaatttctattgatgatatgatatgttacacactgagtttcgaaactcattctttgcttatttgttattttcagataaccctcagacttaggatgggtcggggcgacaagagttcggataaaatattttacttttcatatggttaattaaatattaggatggttgtgttttgttatttttggggaccgttcgattttggactattaaatgtcgtttttaaccgtttattgattttaaagggaaacttcatgaacatcaaaacgatagattttcaaaacacgacttatgttttccaaatctaatttaactaaaattttcgctacaaataaatgtgtttaatcgtgttttccaaaattggacttga

SEQ ID NO: 12569 - DNA, 611 bp, Gossypium hirsutum
cctgtcctgtgttgaagtaggttgaaggctgttttgattttctcttgttgatttgggcaaccttagtggtcctgttacttttattttgcacattttcgtatattatgactattaaaaatttattttcatcccagcaattggatatttaagttggtatttaaaattcacttggactgccactttgactgctgttaggagtaatggagtttaccgatagagtgactacttcgtaataaaattataatataactgaataaaacataacattttaaatataagtgattaaaatataatttaagataaataaaagtgactatttttacagtttaccctttgatttatataaatatatttaaagaaaaaaaatcctgagccttagacttagtgctcctttggattgaggcagtgaggtagtgaggcacgtttgaaagaaaaagatggtgccaaactcactgcatttgtgtttggttgaggtatcagtgcagtgaggttgcttttcaaccacactgatcagctgattttcagctggagcaaatagcagcagttagaggctttcagtgcagttgacattataacagaccaaaatagccttccatcatccttactgtgat

SEQ ID NO: 12570 - DNA, 653 bp, Gossypium hirsutum
ctgaacaattagataggattcgcactaaaaactctagtgaaaacccttattaattagcaacttgcttgacaagtaggttcgtttattaactaccatatcaggtcttaaccgttatgtctcatttaagatgactcgagttacatcatagtatcaccttatctaggcctatagcgccagaccacttgcctctaatccactaatactgactcaccacatgattctttaggatagaggatgaccaattatctcaatccttcccaccagatctcaacttccttctcattcttcctttcacaactccaacctttttattcatctgccctttgtcccattttaaatagaatgaaccgatcatcttcgtctctcactttatatatcaacaaatattatttgagtcaaaatgattcaaatatgaacttctaaaaaattcaattaaataatataaagatatctattttttaccttctattaccatccattcatttaaatggattgatgatggtgagtggggaatggaatatagtttgatgatgtggatgtaaagtgtgaaccaaattacatatattaatatataaaagagcagtaatacaacaatggttttgcaagtaagtaatgtagcttaaaaaaagtgggcttattcagcaaatcataag

SEQ ID NO: 12571 - DNA, 686 bp, Gossypium hirsutum
gaacggattctatgattaaaataaggtaattcaaactatccccgccctgaaataacaaaattatcacaataaaatcaatattttgataaaaaacgagagctttatcactgatcaacaacaaatctcaagattttttaacctatttatatcaatcaccagtatccaccttccaaaaattccccaatcatcgaatcatccttatgacataccatgaaaatacaggaataacaagacatccctaaatcctcatccgaaatttgataaattataattaaaatgcaataaaaaataattatttaagcagttacgtcttgggaaacctgaacctaaagtccaaagttttcataaaagaagtaaacaattgaccaaacgaaattaaaattggaagaaacccaatacaacttagagttcgatttatgtaaataacataacgtacctgaatttcaaaagctgaagaatcaaaactgatctttagcttaattaggggttctgatttgtttctgaaatacaactattattgaagcggagctcattttggccagaaatggatttgggtgaaaaaggaaattattgtttttggtacaaaaaagaattattcgatttgtcattttgtgttggtttttgtttgactaatgatgttagtggccctctaattttcggcatattccgtttaggtcctggtcctt

SEQ ID NO: 12572 - DNA, 488 bp, Gossypium hirsutum
  misc_feature (14)..(15): n is a, c, g, or t
ctagttacggcccnnagaatgttgaattgaattccattgaagataatagattaggggatttaatagggtgaaaattgctgacttgcataccaatatatagacaagtgtcggaatttgataatatatttatttaattcgtatctaaaattgaaaataataaattaaaatggtagcttcattagatacttggttaacttcgttataaaaatattacttttatcaaattataaacaatcaattgagttatgtcatgtgtattagaactattactttttttcctttttattttttaataattatttttcaatattctgaaattgaatcaaagttgggattcatctcttctatcaactcatccggccttttctttcaaaactcatcatactactttctattaaactcttcatctcatgtttcatttcttcttttcccgttttcaatcaaaattctatctccattttacttaaatacgaacagacgcaagctaa

SEQ ID NO: 12573 - DNA, 650 bp, Gossypium hirsutum
ctctcaaggcaaagaagatgttgtgatcaacatatgttcaggtaacaaaatcatttctaatgtgttttttgtgcctgacatagatcagaatatgcttagtgttggtcagttaccggaaaaatggtactcattggtctttaaagatggttcctgcattgttaaagactcatttggtcaggagttagtcacagtagtaatgacagatagatgctttatgctcggtatgaatcaactcgagaagaaggcttacactagtcttgctaataacactgttctttggcataggagactgggccatgtcaattttagatcacttgatttgttgcacaagctaaatttggtagatgatttgtcaaaatttgaatcaagagacattgtttgtgaagtttgtcagcttagtaagcaggctagattgccttttccagctaacaatgcatggagagcgcgagaaaagcttgaattagttcattctgatatttgtggaccaatgaagactccttcattgaatgacaataagtattttgttctgttcatagatgacttaaccaggttttgttagatttatttcttgaggcagaaatttgaagtgtttctgatagatttaaagccttagttgaaaaccatactggctgtaagatcaaagccttgag

SEQ ID NO: 12574 - DNA, 606 bp, Gossypium hirsutum
atatgttgtcagggctcgtactttttttatttaaaacttctaatccaataataatttgcttactgatttcgtaataatttacttactctgctcattagttcataataatttgcttctgaaattactatatgattagataaatatattgatatttagattgtcaaaattttggcagaaaataaatactattgcactaggattcttaaatcgaaaagagagagagagagagagagagagagagagagggagagacaagatttatttctttaattcagggactgaatctcaattttgattaaatgttaggcacaatacaaaaaaggataatgagaaagggaaaaaaaggagtaacgagaggtaaattaccaatggttaattggcgagataaggaagtcgaatagctacgaacggcatctttggcttcggattcaagtgcttccaagtccaaatcatcgtcctcataaaattcttcttcgtcttcctcctcctcctcctccgccgccgcagcttcttcttcgtcgtcgtctagaaaacctatgaatccgtcggagtgaggaggcggagaagtggcagaggtgcagcggcagataaacagagaaaggaggg

SEQ ID NO: 12575 - DNA, 407 bp, Gossypium hirsutum
ctagcacacagtacaagggtacttttagtgtcactcatgctacgtattagtttcatttatatattaattaatacataatttagtattttatttacagttatatctaacttttttttaaacttataagtatatataatattacatttcatagtaaaattaaattttacaattatgatccattactaaaatttggagaaaaatgtgaaagggatttaagactattctataaaacatagactgatttcataacttttgaagtcaagaaaaatttttaaaaattctacatggaagatgaaaaggaagttgcccaataccaaatgttcctccactaaccatctttctaaagaattgaccctccaaattttctcttttactcttacatgaatttgcttgcatgtttctttgga

SEQ ID NO: 12576 - DNA, 455 bp, Gossypium hirsutum
cgtaatgtgctttgctatatgcctgattctaaatgttaatctcaccggcggctcaaatcaggcaatattcttcttagctcctatattactacttctcaaccaggactcagatttcgtcgctggattcggggacaaacagaggtatttccctgttacagtcaccatatcaatctatttagtcttggcctcagtatacagcatatgggaagatgtctggcacggaaatgccgggtggggcatcgacattgggggtcctggttggttttttgcagtaaaaaacctagccctcctcatcctaacattcccaagccacatcttattcaaccgattcgtatggacttactcaaagacgacagattcaacaccactcctaacactaccactcaacctgccgccgatcgtaatatcggatttggttaagattagggtgttgggattgttaggaataatttatt

SEQ ID NO: 12577 - DNA, 490 bp, Gossypium hirsutum
taagcctttttgatttatggtcgaagttggttaatttgctgttgatgattggtctgtgagcgggagattgtgacaggcgattactggcgctaagataagttcaaaacactaaaaaaggtataatgaactatcctcgaaaccgccgtcattttgatttttcttgggaggtttgaaatttccgaacttagcacacgaatttaaggttatttacaatattaggattgctttgctttgctttgccgcgttaatcttggcctttacgcaaattgccgctctttctttttcctaattttggaaggttttattagcacgcgccaagggtcaggctttctttatctgacggaaactacgggcttaagatttaaatcggacggctcctgtgacgagtggaatcacgtgctgggttttattcgagtagcaaaattgcgtgtagaaaattcgtgcatgcaaagcgtgttgagctacggccttcgatctacccgatatcata

SEQ ID NO: 12578 - DNA, 609 bp, Gossypium hirsutum
gtatggcttgaaacaaacacctaaatattggcatgagaaattagatcaagtattggcaagccatcatttctttttcgttgaagcagataaatatgttcatacaaaatttattagtagtgactgtgtgatcatatgcttgtatgctatgcttgttttcagtactagttatgagttaatatttgaaataaagtgttttcttgcttctaaatttgacatgaacaatatgagtaagacaaatgttatattgagtgctaaaatcataaggaaaagtgataatataatgttatcacaaaaatattatgttgagaaacttttagaaaaattagacattttgatgtcaaactagtgaatgcttatgatgctaatactcaattaaaaaatagaggtgaccctattgctctatctaaatatgagcatatcattaaaagttagatgcatttaataaattttactcgacataatataacatatattgtacgtagattgaacagatacatacatagtccaaatcatgagcattagtctagctaatgagatatttaaaaggtactatgaattatgttatttagtttagtggatttcctactatattggaaggataaagtgatg

SEQ ID NO: 12579 - DNA, 583 bp, Gossypium hirsutum
gctaatagatcaaactttttgatacgaactatgaaatctctcgtttcaaacctggcaaccagtacaattgtttcaagttaccgtacattttattactaccaggatgaatcgataagccactactgtgagcttcctgtaaaatattctgaatgagatcagaattcttcggaacacaaatcttgtttttaaggtacaaactaccatatgaattaacatgaaagtttgaatcagatgttgactcaatctctttccgtttagcgatcagttcagcgtcacttttctgagcttcacaaatctattgcaaaaacatcggtctagcttttaactcaactaaaataaaaccatcatcaatgaacgtcaatcgtgagttcaaagctcgtaaagcaaaaaaagattttttacttagagcatcaataacgacattagtttttcccaggtgataatcaattatcaaatcataatctttcagcaattcaagttatctacattgtctcaagttcagatctttttatgcataaaatatttcaagcttttttgatccatgaagatatgagattttttcccgtacaaatggtgtcgtcaa

SEQ ID NO: 12580 - DNA, 581 bp, Gossypium hirsutum
gtccatgcgctttgctttcattatttaatcaataattgtagggacatgcatgctttgagcgcacgtaaattaatcattcttctttcaagtgaaaaaacaaaaaagcatttgcacatttattgcttgtgaatgactatggtctttacatcatgcatgttccatacaaaatttcactaacaaaaacaaaagacaaaaaagaaaaagacatgcctttctttactcttttgacctgcatctattaggttggttcatttaaagtagagattgatgtccataatcaaaattcaattattcaattttattaaaaccatattcccagtctcattaaattcaaaccattgaagggaataattcgattctctcacacaaatatattctagaaagtgttttttttttggggggagggagggtattaccattaagggatgaatataatttttggtctataaatctggcaatagctctatttctgtatttgtattttttattattatctattttagtacatgattttgataactagatttatttaggtatttgaacttgaaatatataaaaaggtttgatgatacggcattatg

SEQ ID NO: 12581 - DNA, 1055 bp, Gossypium hirsutum
  misc_feature (464)..(465): n is a, c, g, or t
  misc_feature (467)..(471): n is a, c, g, or t
ggcgtgtggaaatgcccaggctatgtgggtcctaaaaacaactcttgttgtctaactttggctcgtttttcgctcctttcgctcccaaattctctcctaagtatataaacatgaatttaaaagactaggagtatcaaattcactaatttgcataattaatcctgaagcaaaatcctcaactcacattaaaattaatattcctcaacttgtaattatcatcaataatgtctcaaaataattcacaaattatcatgcattggcaattcaactaaaagagcactaaagtctcaaacaatccaagctaacatttttaaacacaaaaacataggtgtctccccttatcttagtaattaccgttaattcaaaatctacaaaatcaacatgctcattaaagattcactcaaatcactcaaagtgtttaaggttcaagaataagcactaaatagtcaaacaagaaaagtcannannnnncatgcgaggcctatgataatgacttttcttgtttgactatttagtgcttattcttgaaccttaaacactttgagtgatttgagtgaatctttagtgagcatgttgattttgtagattttgaattaacggtaattactaagataaggggagacacctatgtttttgtgtttaaaaatgttagcttggattgtttgagactttagtgctcttttagttgaattgccaatgcatgataatttgtgaattattttgagacattattgatgataattacaagttgaggaatattaattttaatgtgagttgaggattttgcttcaggacaagcaaacgcttaagtgtggggaaatttgataagctataaaagtaacatattttaatcccattcttaatgcgttttgggatgattaattatgcaaattagtgaatttgatactcctagtcttttaaattcatgtttatatacttaggagagaatttgggagcgaaaggagcgaaaaacgagccaaagttagacaacaagagttgtttttaggacccacatagcctgggcatttccacacgcccatgtgccagcccatgtc

SEQ ID NO: 12582 - DNA, 609 bp, Gossypium hirsutum
  misc_feature (603)..(605): n is a, c, g, or t
ctgattttaatgattcaagaaccagcataatgccgttcacacatgaagttcacactcttggcttttcggttttggaatgttcacacacaaagactctttgaaaccgagtgttcacacttcatttggccattcaaatccctcttaatggctggtcacttttcagcaaaagctacaaattaaatgagcttatttatgcacattgaccgaatctagctcatccatgcaccattcaagttgtccaaggttcaatgtgaattctaaaagctttccaagttcagccaaacctagccaagccattgaagaattcattagcttaatttttaagaaaatgtatgtgactatccggctaacttagttgctgattataaatagctgaaatttcattttgtaaaggacttttggacatttttaaaaaacaaattgtgcccaaatttgggaggaattttctctcaaatttctttcgggacccgaaaaacttatctagcttctaggggggtctttccaagtctttttttcaaatttatcccccccaaaacccaaggggggggtccccctttaaaaccttgggttcatactttacaaaaaatcgggccagggttcttnnnaaaa

SEQ ID NO: 12583 - DNA, 443 bp, Gossypium hirsutum
  misc_feature (383)..(383): n is a, c, g, or t
tgcatttaactgcaagaatatcatcctactgggagctttaagttcaaaaataaagtaacaaaaaggtgcattgtccaagtttctaatattgtttcatctctctacattttccccagaggccaaacagaccatgacaaaagcaactaatagcagattctactcaatcaaacaaaggaaaacaaaattctaaatcaattgatttcagaagtgaattggtccaatacaaagaaggtttcttgtcaagcttaaactacatatctacttttcactaagattctttgagacaaaacagaataaaccaaaacacaaagtgccaaaaatagaaaagaaaaaagaaaaagcagaatcagattataaatcaaaaaaaaaaagaacaaaaaaancataaccaaatcaaattttaaaatggtttaaaaaaaatttaaccccccaaaaagccaaaa

SEQ ID NO: 12584 - DNA, 534 bp, Gossypium hirsutum
gaattgaaatcgtataaaatattaaggtaaattatgtctaagtttgttaaactattagtaagtttacattttagttattcaattttaaaaagttataaaatagtcactgaattatttgaaaattttcatttaagttattggttgttaaaactgaagctgtatggtcttatttgttcgcattacctataccaatcgaaagctctcattctccttatttttttatagttaattttttttaatgaaacaattttaaatgtcacgaatctgtaaatcaaaattcaaacaatttttttctccaatttttgacactgaccgttaaatcgacttgaatcaaatgtatgttcttctattcatcgataggtactgattcactttatcaatcgccgaatcatcgttttgagtttgctagtttgactttaaaaaaaaaccattttgtaactttttaaagttgagggatcaatatgtaaacttactgatagtttggtaatatcctcaatatatattatttgtaggcataatgacatatttgaccgt

SEQ ID NO: 12585 - DNA, 600 bp, Gossypium hirsutum
tgttaaaaaattcatcattttttgccattaaaaattgatcattgtacattagcatgaggaacacgtgtcattgtttaattattttgtcaaccatgccaatttttaatagtataaatggatggaatttttatcagaaaggatcattttgctctttaatctaatgtatggggactagtttgctaatttttttagtagaaggggcaaagtgcaacccgactcctattacaagggcctctataatacttttaccaataaaagcatatgatttctttttgttgattgaataaaattttgggataaagcaccatttagctcctgaatttgataacttttccaaagctttttttttatccacgttagtctcgaaacttaacaacttttccctatttcaaccataaacttggattccgttaaagtgtgatgatgtggtactttaaaaaaaaatgttataatttctttagatttttaatatagttttgtaattttagatgttatataatgctttaaaaattttgaggtgatggtgttgtgctctgataaattgtcacgccatcaaactttgatggaatttaagttcaaaggccaagttagaaaggtttc

SEQ ID NO: 12586 - DNA, 593 bp, Gossypium hirsutum
  misc_feature (523)..(523): n is a, c, g, or t
ggttttcggataactcgaatttgtattttatatccgagttaaaccgaaaaatttaaattttttttcgagtcgatctgaataactcgaataactcgaactatttaattcaaaatttaaattttttatcgaatttttcatcgaatttttcgaatcgagtcggattttactcacccctacttgcaaacaagctaaagaggttgtatgaatttttcgaatcgagtcggattttactcacccctacttgcaaacaagctaaagaggttgtaaaaatcggctataaagccaaatcgaaccaagtgtaagggtttttttttggagaaaaatagcagaatacacacaaaagaggaatcaataaaaaaatcaaactcaaaattctaaaggttactttacttcttcttctttgggtcttttttttgctttatatttcgtttcttttttctttcttatttatttattgggttttatgaaaatatatttgaaacaagaattaaagagaaggtttacctgggtcttagtgatttanaacccgaatgccgaggaaatgtgaaggttcgggcaggagatttcgtccatggctataacggggggccttc

SEQ ID NO: 12587 - DNA, 409 bp, Gossypium hirsutum
agagccattcgccaaaattttcttattgcttgtcaccatgcttggtacttctatggtcattggcgacagtatcttcactccttccatctctggtaattcactaattactttctcttcttattaatttattaatttttcatggtaattcaaaaaaatagaaaaaaaagtaaatgacttggtgtattgtagttttatctgccgtggctggtgtcaaggaagtaacatctgccctcacagacggtatatatatatgtttgttatcattccttattgacatatctatgtggcttaaacaagatttagtgttgtaaacagatatgattgctgggatatcagtagtaatattgatcttcctcttcatgattcaaagatttggaactcacagagtgagttacacctttgctcccac

SEQ ID NO: 12588 - DNA, 470 bp, Gossypium hirsutum
  misc_feature (326)..(326): n is a, c, g, or t
  misc_feature (331)..(331): n is a, c, g, or t
  misc_feature (415)..(416): n is a, c, g, or t
atgacttaatgtattattttgatattatttgatatatgttgagatttatttggaattaaaataaatgtttggcaatatcctaaaaatgttgttaaatcgggaaaggtgataaagggttgcaatatatgggttatgggttgaacactcggaataagccgaagtatgttgtatataaaaggggttgctgtgtgctgattccccaatttatggggggggctatgtgcgtgatccaccatatctttaaaatgtgaaagggggttgctatgtgctgattcccccaaggggttgctaagtgctgattccccgattcattgggggggcaaagngcganatccaccatatctttaaaaaaaaaaggggtgtttatatgttcatttccccccgagggttctcaaagggcaatcccccatttaannttgaagttaaaagggggttcctccaataacgtttaaccttccgagtgctcaaag

SEQ ID NO: 12589 - DNA, 671 bp, Gossypium hirsutum
  misc_feature (665)..(668): n is a, c, g, or t
ttgcataacaattcaaggtgttaccaatgttataatacatggtattagcattcatgattgtaaacctgggatggccggtcaggttaggagttccccgacacatgcagggatgcgcggagggtctgatggggatgcaatcagcgttttcgcgtcttcaaacatttggatcgatcattgttatctcgcacgggctaaagatggtcttattgatgtgattcatgcttcaactggcgtcacgatctctaataactatttcactcaacacgataaagtcgagcattaaagcttatgaatatttcaggtaaaaagacctcttcagtccctctcaattaaaaaaaattgaataaattggtctctatcaaaaaaattggagtaacttaattcctgccaattttaaaagtaagcaattaagtataattaattatggtattaatgtctttcgtcaattgtgcataattttgattggtataataacaaattgagcctttgatatttacatattttattaatttggtcttgattattaaaaaattaacaaatgtagccttaacgtttacatatttacaaaaatagtacgggataaatttgttaaatcataatcaaattgatagaatgtgtaacttatgagagctaaggttattatcgtaccaatcaaaattatgatnnnntga

SEQ ID NO: 12590 - DNA, 639 bp, Gossypium hirsutum
ccatgttattgatatgattttgcatttgcaactcttagatcactagttcataaaacagagtaggaagaggaaacaccgaatcatggatactatcaccctcaaaaacaaactcattcagaagattataggtaaaagtaccatgaaggcctttgtattagtcaactagcattttgccccctctactaaaaaaatgggtaaagtagtccttgtacaatagatcaaagagcaaatcggtcatttttgttaaaaatttcatccattgtactattaaaactgacgtggatgacgaaataaccagacagtgacatgtggtgtgccacgtatacaatatgttgatatattgagacccgtttttaaaagtaaaaatggataaaaattttaacaaaagaactagtttgctatttgatgtaaggcactaatttactgagtagagggggcaaaatgcaattacctgtctcagtgatagccatagcatatgaatcagataacaaagtgcagggatcaaacatcaaagttctaagggaaaaagccaacgcaccaaatcatatgcttgaattgccagggcaaccttttcatccgcaatcctaacactatgcttttgttcatcaagtgcttcttcggagaatctgagaagcgaat

SEQ ID NO: 12591 - DNA, 670 bp, Gossypium hirsutum
tcctccaaaggatgttcagaatcaataacgagatgtctagacaagtgagtcttataggttgaattgtactattttgccaagcttgtggaaatcttaatagtttccataaaactccatgttattccctaaagtccaaaaggttcttagttttgcatatacaccaagctattaaaccaaatttgtaacaccctaatcccgacctagacgttatggtcggatccagaggtgtcacaaagaatgggctgaaaaatgaagtcattaggataaaaacattccagtttttcaattcttgtttacctgtatccaatgtcaaaatgtgatctaattaattaatttgcctttaaacgtgctttacaagggaagctttcgaaaaccattctatttcaaaataattcagtttgcattttcgaaaaacctttatttttgataaacctttgttttcgtaaaaacattttaccgaagcagtcaaaatatcaaacaaaccaaaaatcaacagttaaaaaccaaatagtctaagagttccagaatttacaaagtcctaaataaatctaaagttttaaataaaccataaatactaagttttaatggttttacggatgagtggtcaccgctgagtctctgccgtatcgatccacttatgtaacaccccctacctatatccgtcgccaga

SEQ ID NO: 12592 - DNA, 557 bp, Gossypium hirsutum
attgggtattaacttgggataaaaagatcataagtacgaatttgaaagaaagtgacaaatttaggggttaaatgaagatttaagtctttcaagtaagaactgagtttctattattaatattttaagggttattcgcatcataagtcctcaagctattttcaagattttaaattaatcaagttttttaagcctaggcctacctttaagatatttataaattacatgtatttattgtataaataatttgaatatcatgtattaaaaactcataactttattaaaatttatttacaggatatattataaattaatcaagttttaaaatttttaaataatttataacaaataagatatattcttgactaaatctgttcatcggcctggtcacccagcctgacttgaaggttcgtccaaaaagtgagagggtttgggtgaaaatataaacccccaaaatgagcttgggtaaaaaaaataaagcccattttaaaaagggttgggcctcgggtaagatattttttgctcgagcccagcccggcccgagttcactaaatgccaaa

SEQ ID NO: 12593 - DNA, 594 bp, Gossypium hirsutum
gattgtttgggtaagcatactcagaagaaatattgttgttgatcccagtgcttacgtaagctccgtctggtgtataacttatacccgtgtcaacgtctacgaagttgaaattcacaggtgacccacaatcaatgcttatgaatcctggagaagaaaagaataaaagaagcaccatctaagattcttcaaactgtgatttattacagttttaattaaatcattatcacattatgaatcatatttagagtgttcaatctagttctaaacttggtgtttatatataaccagatacatattaaaaacaaccctattgcagagatagtcgaacaggaataaagtttcactaacctgtttggagttgtccatgaacaagaacagcaagggaaagcaacaacggagtaaggtacccaacaaacattttgctctggtttttcttgaggtcaataacgcaaaaaagctttagagaataatagtagagaagcaagccgtccgtagatattcatcaaattgttagactattgttagtaaacttataatagtttaataatataagtgcagggaaggattcagtcatttcgactgatacacttcaca

SEQ ID NO: 12594 - DNA, 540 bp, Gossypium hirsutum
aaggaactgccggctacctggatccagaatatctaagaacctatcaacttacagaaaagagtgatgtttattcgtttgggatattattggttgaactagttacaggcaggcgccctattgaaccaaaacgggaacccagggagcggataacagcgaaatgggtgtgattttctttccattaattctctctttgctcatattatcacttggtagttggtaccattcagttaatggcgtgtgccatagttcatccccaataagtttactgatatgtttatagaattgcaggcgctgaagaagtttaacgatggagatgccatttcggccttggacccaaggctacaacagaccgtggggactaacttagcccttgaaaaggttctcgagttagccttgcaatgcctggctcctcgtagacagagtcggcctagaatgtggaggtgtggagaaatcctgtggagcatccgtaaggattatcggaactatcagctttagaccttcgctctcgttcatgtaattcccaaacaagtgcttctgtta

SEQ ID NO: 12595 - DNA, 518 bp, Gossypium hirsutum
tcacagggagatcactcagagtataaccctgaaaacaaaagcgcatttcaacggatccaatcgctctttttttttcttggataagaataaaataaacaaaaccccattttcttaattaatcctcgcgggtagattgatttttgattgattctatataaatagatataaaataaaaaatttctatttattcgaaatctataatttcgaatttctatttagaataaatagaatttcgaattaaaagtttttttatttcttctaataaatattagatattagttagatattagaattccttttatttagaaaaatccgaaatgaagtgaaaacgaaaaagtattacttgttttggatttgtatagtattatactatatatagtataaatatatatttatactagtattatacaaattagtactatatcgaaatgaaatcgaaataagtggaatgtaaataaaataggattaattccaatcaataaatcttaaaacgcaacatggaaacaccgcaaacaaac

SEQ ID NO: 12596 - DNA, 381 bp, Gossypium hirsutum
ttaacttttaacatacaaagtgaataaaaaaatgttattataaaattccaatacatgtattatattagtaaagtaatgactccaccgcccaaatagttatttataacttctagtaaacattttaattcaagccaccataatctcaattgtaaaacatattttcatgccaaaactttttaataatatttgtgaaaaataaataagagcttcaacattcgaatgttgaacaacataattattatatatttgtgttacaaattcataaagttatttgttaaacctatccaatattaagctcttactagattgaaggttgtctaatatgaggcccaaaccacatataaaagaacaaacatagggctaataccatcaaatgtccca

SEQ ID NO: 12597 - DNA, 616 bp, Gossypium hirsutum
aattagaaccggctagaaatgttgcaaggctcgatcctgaaatgagattgtggaagaagagaacgttgggtttcacatgattcattccattttcatttaattaaatttctgactcatgttacgtcaacagctagagctttgagagagagtctctatgggatcttagattaatataaaccaagaaaacggaaatatgtagagtgttaaatcaaatcaatgataaggtttatgtcttcttaatttttatttgtaatgtcaatggtgaaagcttagtcaagtgattattaatttgtaattgataagtggatcaacctactaatagaagaaaattaggaccactctttctttttcagattggataagaatcatggggatgattttttttttcaaagagaaaagaaaatagtttgggtttaaatgggattaaattctgatttcaaaccttggttggggcatacctaatggatccaacttttgcacttgtcacattgttaagctttttcagggcccagatgctgttcttcactcatttagtaaacaatcaaattgtttcaattctactcttttcacttgagtggaaggacttttatcaaattaaattcgaattttaggatcg

SEQ ID NO: 12598 - DNA, 652 bp, Gossypium hirsutum
gatgtaaggattaacactgacgaagcaaaaaccagaaatataatttaatgatttggctctgtattatatatggaatttcattaaggaggaagaagattattagtatcttttctaattaatgttttcttatataagttaaatgtaaaaaataaaaaggttaaaatattatgtttgtccctgtagttgtatagtatttgagatatggtctctatattttaaaagttcaaaattcaatcctcctactttttccaatgtaaaaactttgtctaatcattatcgttgttaatactttctgtcaaaattttaatgactagactaatatttttaaatgaaaaaataggataacttaatttttaatttttcaagtatagagattaaatatcaaattttatcaaaatatagagataaacaacatatcttaatcaaataaaaagctagaataagataatcaaatgtatataatttttttaatatatgtgaaagatgaaaaaagtaatttgggttaatatactatttagtacttaaatttgatttcaatgttcaatttgatacttgagccttttttttatgttaatttggtacttgggttttttcaatatgatatttttacgtttttttagtcctaattaagtactcgagtttggtacttggg

SEQ ID NO: 12599 - DNA, 490 bp, Gossypium hirsutum
caagtaaaactgtagcatctctagcttgcaggccgtggaccgttggattcgaaatttttgagtggcacaaatgatgcaatagaaatgtttagggttttgaaatttatgcgttatgttatttactggttagaggaaaaaaatatgccgtagagttatccgttcagtttcccctactttctcttttacgctgttataatatttcagaaatactattattatttttcattttcgactttctttgctctttctggaaaacttgccttttacacataacttgataatatcaatatataaatggaaaagaaatgagacaacaaaaaacatctaacaatgaatttctttttcaatgaaaatcatcaaaatttgttttaagacaaacaaataattagaattgttcatgagtaaaattacttgaaatttagaagagtttagataaaaaatttaggtttgaaaaataaatttaggcaaaaaaattaagtttgtttaacat

SEQ ID NO: 12600 - DNA, 392 bp, Gossypium hirsutum
  misc_feature (52)..(53): n is a, c, g, or t
  misc_feature (55)..(57): n is a, c, g, or t
  misc_feature (350)..(354): n is a, c, g, or t
  misc_feature (358)..(361): n is a, c, g, or t
  misc_feature (371)..(372): n is a, c, g, or t
ctacaagcgaggctcgtcgtgtttgcaagctggacgtagctcaatcttattnngnnnagcttcatttagctcgtttccagctcctttcaagctcaatgagctcgaactagctcaatttcattaagaccttattatagtagctgaaataattatttgagtcatttaattagtttattacagctcaattaatattcattatttatttggtttaaaatctggttggatttaattatgcatgattaattgtgtttttcttagatgttattaagttaaattaaattcctacagcttataaataagtcttaatacatgttttaatgtgtcttgccaaactgaatgccaaactgaannnnncttnnnntacatggttnnatgggtcttgccaaagtgaa

SEQ ID NO: 12601 - DNA, 663 bp, Gossypium hirsutum
ctcaatgatttccccttaaagaagattagtcttgatagacatatctgtcatgcggtgtgtcctttttttttcaatgggttctaactaactcccattttccttgtagactaactagcgtactttatgttaaatctctagtttacagggtttctttgagtaccctctggtttgtgattaatgacgtatctttatctgtgatcctcggataaacctttttttgtttgcctatacaccagacacctattagcatgtcattttccatgatcgtttaatgttgagttaccacccttttgctatactggcttttatgattactgttcaggcggattgtctcccctttctactacctttaccttgtttggaagattcctcaagcccactcgccaatttacattttccttttccttatatgtgactatccataattaccatcttagtgttctaccctctttttattatctcggcagactctattggttgttatctcctaactagggtcttacttcctttcacccagtgtttattgtcccaatagactaccttgtgtttagtgtcctagcagactatcccgtgtttattatcctggtagatcttctatgctgtcatatttgagctatggtcttatatagtatatcccacgtttaacgtcctggcgaactccct

SEQ ID NO: 12602 - DNA, 647 bp, Gossypium hirsutum
ttccgttacccacgtattgatgatttgtttgatcaactgaatggagcctcggtgttttcaaagatagatttgagatcgggttattatcagttgcgaattagagattcggatatacccaaaactgctttcagaacgagatacggccactacgagttcttagtgatgccatttgggctcactaatgcccctgctgtaacaccccgtacccgagaccgttgccggagtcgaacacgaggtgctaaccgacttaattcatttacttttacaatccattttaaaaatttccaggcagttggctaactgtgtcactgtcaccttaaaaatcatatcttgagttctaaaactcgaaaatcagtttcgtaatttttccctgaaactacactcgtaattccatctaaatattttttttctagaatttttggttgggccaattagtacagtttattagttaaattctcccctgttacagggtgcgactacactgaccttcatgcattacgatttggatatctccacgtacagggcttcaatactgatgtcgtttatttctatagaaactaaactcaaaaaggaatctatgcatatatggcatgactcctaattatctctggttaatttataatgaatttctaaagttgaaacaggga

SEQ ID NO: 12603 - DNA, 631 bp, Gossypium hirsutum
  misc_feature (615)..(615): n is a, c, g, or t
ggaccaaatcaaagcatcacaagtataaaagagggaattagcatccatagatcttagttaagttaccttgtcaactttgttcccaacaagcatcttgatgcagtcttgatttgttgagtagagttcaatttccttggcccagacgtcagaaaggttagtaaatgtctccctccgtgttacatcataaactgttaagatcaaagaaaatctcatattgtaattctccaaacaaattaagggcagaaatacatgcagagtcataaaattgaccagaatgataaaagctaaatgtcacattattgcacacttaaaagaggttagaattgaagaggcatctaatcttagtcatttatactgactacagcgaaaaaaagctttagcagagtaaaactttttacagataaaaaggaagaagaaaacatctaaccatttaatccaggccaaggcaatatgtaacacagtagctacagcaaaaaaaaaaaacccaaaaattaaaaagggggaaaaaaaaaaaaaaaaaaaaaaaaagggtttggaatttaaaaaaaaattgtttttcccggggaaaatagacccccaacttttaaaaattttttttttttgtttttttttttnttctttaggccttggg

SEQ ID NO: 12604 - DNA, 613 bp, Gossypium hirsutum
  misc_feature (558)..(559): n is a, c, g, or t
ccgtgtggttatttaattttcaaaattaagtgcaagtttcacacggccaagtcacacgcttgtgttctaggccattagcacacacgacggagacacacgcccatgtctctgcccatgtgtccaattctgagcattctatttctaaattttaagatgcaggtgacacacggtctaaccacacgcccatgtaccaggccgtgtgtcacacacggtcaaaacacatgcccttgtgtctaccaatatggacgaaataaagccatttcctagctttatttcttacccaaatttgccaataacctacaccaaaacatacaagtatatataccagccaatttaatcattaaaactaagccaattctatcatctaacatgatatattatcacatgtattcatgtttatatttttacctttgttaaacctatatgttaagcataacttgatcaaccatacttaatatacataacacataggtatttttcataatataaccttataaatataccaagacaaatcattactagccattccaatagctagattataaacaacatttacanngcaacaatggccaagttacgtatagatgccattataccaaaataaatttactag

SEQ ID NO: 12605 - DNA, 662 bp, Gossypium hirsutum
  misc_feature (462)..(462): n is a, c, g, or t
ccgatctatgaacccataaaatttcaaattgtatctaatccaacccaagtattgtagacatttccccattttcatccccgagcattttgaatttcccatttccaaaaaattctcattcttcattgaatcatacaaatcgatctaataatgatagaattcaatttctattatgtttactgaatcacatgaacttttatctaactccatataccatataatatatgtggaatgtatgaaatatgaaatgcgtatgaatagaagaagaaaaattatactcaaattttaatttatatttataacaaacaaatacagaaaagaataaataaatgccatttagccatatggagttttgtatagaatgtaaaaaaattttcaatttctaccattattatgatattacatattccaatccgaatactagaaaaatgaaaggaattcctaacttgatctggtcgttgaganaagaaaaacatttgttaactgtattattatttttattctagcattcaccataatgtcgcctctcacactgctaacactcgggtttgttgtctctcacactgccaacactcactactgatgtggcttgagatttagaacttgagtattattttatacgatctctgtttgaattttcatttgaagcatttgggtgagcatac

SEQ ID NO: 12606 - DNA, 400 bp, Gossypium hirsutum
actcggttgctgaaattccaaatatctctctgacaatacaaaagcaatcaaaaagagtgaagatagcatcattttaacttaaactacacaaaaggaacttgatattttactattctaaggccctgaaggcacatcatacatccactctctcgacatcctcgagtacgagcgtctttgatggctttcccaacagatcagtatactcttggaaaggagatcttgtgaatcgagtctctttccagaaatcaggagtcaagaaaccataagttttcagaagacactcgaaggtggcctgcatttacatttgcaacaataagaaagcatactaatttgccaaacaatatacaagcactaggtagcagtatgcaatgatttaaaaatagagccaatagttggtcag

SEQ ID NO: 12607 - DNA, 624 bp, Gossypium hirsutum
  misc_feature (42)..(46): n is a, c, g, or t
gtgcctcaccaaataaaatgcagttatctgcaaacatgaagnnnnnaatttaaaggcttatgtgacaaacctttgcaccctttaataaacctttatcctaagttaatttcatgagggctgacaaaccttcactacaaaatagaaacaaatacgggctcaataggtctccctgatacaacccctttaaagggtaaaaaatctctccctcttccccattcatacaaactttgtaagatgtagttgagatgcatcacattattagttctaccaaccgaatatcaaatctcatctttaacattatgctcctcaaaaaccccattccactcgatcatgcgccttactcattattaaacaaaacatgttagcaaaataatatagataaatataaataaataaatatttttatatataatgaaatataaatagaacaatttttatttaatttgtgaaatacaaataatcaaataaaaccgtaacaaaagttgaaataaaaaggaagaataaagattttaagaaacgttaaggcttgtgaaacacaatttccttaagacaaatttgactgctcctacggcacttggagaaacgttggtcgaatttctcccaggatacaacacaaaaaaaaaa

SEQ ID NO: 12608 - DNA, 639 bp, Gossypium hirsutum
tgcgccttataggtgatctagacaaagcaaaataagaagttgcattaaggtaaaagtagtactggaaaagggattgttgaaatgaccaatagatttctcagagaaattgatgaagtggggaatagatcccttaccaaacaatgggtaatgtcgaaatggaggcctccagaaacccaagttgttaagatcaattttgatgcggcgtatgattgtaatcaactcagatcggcttcagggttggtggctagaaatggtgaaggaaaggtgttggcctcaaaatcgattttgtgtacagaagttgcctttttgtttgcaacggaggcccatgcatgtcttcatgcagtgcaaatggggttagccatgagagtaggcaagattgaagttgaaggagatgcattaacaatcataaagaagtgtcagtctacaaccatagacaaatcgattatagtagtatatattcgagacattcaacatagcgacagttttcaaagtatccaatttaaacatgtttcaagatcggcaagtaaaacaacctatagaatcgtagaagagagtttaagaaggaaagaataggtttacttggaaggatcgatgcctgggtatgccatggaatcgctgggttctggttgacaaagagag

SEQ ID NO: 12609 - DNA, 410 bp, Gossypium hirsutum
aaccttcctataggtgttagaccgtattttgttatttttatttttaaaaattaggttaattagtcattatacgttaaatcaaaaagcaaactggtcttttttattaaaatttcatctattgctactgttaataactagcatgactaatagaataaccaaacagtgacacctggtgtgacacgtgtacctcatgctaacatacagggaccaatttctaatagtagaaatggatgaaatttttaacaagaccaatttactctttgatttaacatataaagaccaatttatctattttttaataaagagggtaaaatgttgtctgactcttaacacaagggttttcatgatacttttaccgattttagctttatatattttattgaataatgacctaactaaggtcccaacta

SEQ ID NO: 12610 - DNA, 596 bp, Gossypium hirsutum
ttgaccctttgggatttagcttcagaatttttcaaagcattaataaaaagattggataatttagttttaatatcgatatgttcaagaatcagtgtgtataagttgttactggagaatctctctgttgtacctagtatgaatcactgggctcgggtttcataaggctctttgtgtgtgtgtgttttcctggttgtatagttaattgggcttttgggctggtttgtgctttaatctatcttgtctatgtgagaagtttaatgtttcttggatttaggatgagggaatgttagatcggaacgtgtatttaatttttaaagtatatacatatatatatataggtatatataattttaaaatataattatgatataaaaatatttaagtaggatataagtacaaaacattatttaatttacaaataatcagcagcttatattctttttaattatgtaaatataatctatatattaaatatataaatataatatcttttaactctaaaaaaattacaatgtctttaaaacgtataaaaggaaaagacattgagcaccatggatacatttattactctctttaactaaaattaaattaatggc

SEQ ID NO: 12611 - DNA, 629 bp, Gossypium hirsutum
catgtgaattcttctcggtgtcttcaaagacaacaaatcatctttaattggtagagttgtactccttctttggcatcttctatacataatagttaagactattagtactacgacaataccaattgttggtaaaccatacctaaaagcatgcaatataatcatttgggagtttttgtggatgtcatttttgcaaggtgggactagcaatctaggtggaccacaaagtgcacaattcttcatgaatgatgtgctagaaaagtttgaaaaacatcctttgctgggaatttccccttcaagtctattgaaagacacattaaaatactttagatataaaagttgttccaaagatttgggaatgactccagagaaattgttattgcataaatccaagaattccaaactaatcaacccatcaaatgattcagggatatgaccatgtagtatattatttgataaatctaatgaaaccaaagtttgaagacccccaaatgtggataagatatcgcccatgagaagattccttgataaatttagtctcagtagactcctaaaatttccaacatcaatagcatgtgaattgtgaagacggtttgatgataaatctatttctaagatatctttaagactcc

SEQ ID NO: 12612 - DNA, 561 bp, Gossypium hirsutum
tgttcgtagcggtataaacataagtttaataattctaacttaaaggaatgtaattaatccagcacaattatatcatcttgattaaaccttattttaaatcgtgcattagaaccttttttatttttaaatttttttatttagtttttaacccttagttttcaatcatctttaaaccaaaatattttccatcaccgaactgttttaacattaattccataaatattcctttttacagtccctgtgggtacgataacttgacttttacttgtcactttattacttgttacgattgtgtacacttgcacattttcgtcgttccaggtattctggttgagctgcaagtaaagcctgtttgggttcaggaaatcaaacataagcaacaaatagatgattctttagcacctcgatttaatcaggttaagcatggttcaacaatagactttaggattaattctgatggtatcttatgttacggaggcagatattgtgtaccgaattaccaaagtttgtgacagtctatactataggcagtgcataatagcccttatcttatgcatcctg

SEQ ID NO: 12613 - DNA, 437 bp, Gossypium hirsutum
  misc_feature (429)..(434): n is a, c, g, or t
aatctattaagtaaattttacatcagcacaaatctattaagtttttaggaatattttatttttattttttgaaaaacatctcttttaagatattaattaaaattaaatttattttaattctccgatttaagagattcagttgttgaattggtacaatttgtaattgtcgtatttagtccaccgaaaaataaattgatgcgactaattgagtgagttgttggatttatcataggagttaacgattaaatttaaacgaccagtgcaattgaggcctttgatttgagtcatgtcctagtttgcaagacccttgaggaattaaatcacggaagctaattttaagattatttgcttggtaagagttggttgtcgaattatttccacggttaatttatatatgaaagggctagtggtttgaggttgttacttaannnnnnaaa

SEQ ID NO: 12614 - DNA, 434 bp, Gossypium hirsutum
atctcagatacaacaatccatccattgaattgctttaaaccaaagaataattttaggaagtgattcttaaatgatataagcctcaacttaacaatctatttatagcatatgaatctaattaaaagattttctcaatacccgtgagcccatgacttcggatgtaccaatgacccacttcccacccgaaaagacataaatgtttcggtaatgatattccctaagcgtgtcttatcatccataaaaccaaagattttagacaacttgaatccgactaattggttggattagtttgtttgttttgattaaataattaattaaaagtaaaaaatttgattcaattaattttttgtttggcttaatcattttattaattttaggttaatcaatttaatgatttcttttcgaatcgatgttccaatcgattctcgactaaa

SEQ ID NO: 12615 - DNA, 483 bp, Gossypium hirsutum
attatacatacaactccatataggatgctccactagcgagattagtctgcaccattgcctccaagctacgagcaccttttatgtcgaacgagtcatatgtcaccggatcaacagaagaacaaaattgatacgtaatagacagaactttcattggggtcgtcctgaatgttttactcctaattcttttacgcagttctgtcaaatttattttctggttaaaaaccagtcgcattgtattctccgataaaaaaataacaccgttcttggtgtggtgaacctcaccatcatagcaaataacagcactaatacgttcactcatcttcaatttctatccttcttacactctctaaaatttttttgttgtaacttatgcaatctgagaaaaaaatttacctcatttatagccccaggcctaacaggagctactgtagcaaaaatgcgtccacgtgggagcttcttttagtaattctgctgacaaagcat

SEQ ID NO: 12616 - DNA, 598 bp, Gossypium hirsutum
aggtttccattcaacaaaatcaacatattacatggcaacatcaatacattgtatttagattaatgcgtcaattatatatacgatatctatcttaaacattttacatataaagtcatttgaaattaaaaaagaatcttaaacatatgatttcatattcgactttagaaaaacatgtagttaaaaagttaacttagttgattgagttttagttctattagtatatgtattgttgctaatacaagagaggatgtaaattcgagtgcgctaaaacgcattatccttctatttataggttgggaaagggctatagatagttctaaatattgtgccaaaaagaacctatattataaaaacatataatgagattattaaaaacaaaaaaaaaacaaatcttaaaaatatggtttttagactttgtaaaagagaacaaattttagggtaaactaccaaaatagtcactttttgtttgcctcatgttttatttttgttacttatgtttgaaatgttatgttttagtcacttacgttatcgttttgttttgaaagggccactctaccgttaatatttgttactttccaaagggcagaatgacatgaca

SEQ ID NO: 12617 - DNA, 645 bp, Gossypium hirsutum
cttctgtctaacaaaatcactttcagtctctttcccatttaataaaaccactttctctttgatgtacacttatatttgacactttttgcttgttaattcttttgtcttatgaatttttcactgcttaattggttgtatttgatttatttcttgtgtagtgaacccaatactggaaatgacaacaaaaagacgtaatctgcagttttctttctttttattctgtcacggctggagtcgtgggcacgacgctgggcacgatgcggggcacgatgcggatctgacgtggcaaatcagaagtcaacacagggaatattctggaaacaacttatcttgatctattgacgtgatttgggagattttggatttcattttcataattttaaagatattatcttatctttttttgattagtttgttgatttgggaatttgaagcctataaatacccacctttgggtaaggctaaggggatctcgtcttttgttcttattgctactttattttcatttttaataaaattttcttcttttatttatttctactttattttattttattttatgtttttacattatcaaaacatgttaagcatgataatcaatatcatgcttggctaatttttctcaagccaagagctagtacgatt

SEQ ID NO: 12618 - DNA, 461 bp, Gossypium hirsutum
aaaaattgacttttccaataccgatgaagattgaattgttacatatgataaaagtttaattccacgtagcggccccttcgcatgttgccatgctttgttactctcagtaaatggtgtattcttccttttctctacaatgggtgcgtatgcaagaaccacagagttctcacattctgcagatagatagcattagaaatctgttaatatctctatgtgtttatcatttagataagttttaaatgggtggtgcaatggtgttggtgggtgcaaggagaggcaaagaaggtgttgggcatggataggacaatggaggttggaagatgctgaaggtggatataaaagtttgactcagatttaaagaaaaattgacccaaaatacatatttaaatttgattttttaatggtagttagagatttagagcttgagtgatcaaaatgataattttttctaatgacagtga

SEQ ID NO: 12619 - DNA, 654 bp, Gossypium hirsutum
cttcatgtaccatttggggatgatttgacaataaatacaagttctaaggataaaacagatgaaaaattaaatgaagagttaaaatgactttttttaataaaattggagtgctaaaaaatcatcataccctatcaaaatatagatatgcattatgtccatcttttaaacattacatatacctactttatttaatgttatacaaaaataataaaaatagaaacatgtatcacatgcaacacatgtgatcttgaaaactagattttactaaacacaacaagaaaatattgacctttctaaaatatgcataatcaactctcaaatctaaaatattttctttggtttcaatatttaacaattatattgcttttaaaatctctttaaaagattatttttatacaccactaatcacatctaactaaaaaaaattggtggcatttctatgtttttcaaaattttatctagtgacttgaaagctattgtgacaatatacacatttaatagaaatccattaatagttaaaaaaaattgttgaagatgggatcgaatcaagtatattagtacgaccatgaataaatttatcggaaataaataaaaaaatctaataagaaatatagtatgaaaagaagaaataatagggacacaaggatttacgtg

SEQ ID NO: 12620 - DNA, 691 bp, Gossypium hirsutum
  misc_feature (666)..(673): n is a, c, g, or t
aagaaacacttcagctggttcaaacagacatctgtggacctatgaagaccacctccttaaatggcagcaagtactttgtacttttcattgatgattattctaggttctgttgggtaaatttcttgaagttaaagtcagatgtttatgatttcttctgcaaatttaaagctctggctgaaaaccaaactagctgcaaactgaaatgtttgaggtctaacaatggatctgagtatgtatctcagaaatttcaaaaaatatgtgatgatgctagaattcaacaccagctaactattgtttatacaccatggtgtttgtgaaaggaaaaatagaatagtcctcgatatggccaggtgtcttttgtttgaggctaaaatgcctaacatcttttgggctgaagctatgaacatagttgtttacctgctaaacaggctaccaactaatgtagtcaaaggtaaaacaccctttgaagcctggtttgtgttatatattggtaccagtagagaaaagaaccaagttggataggaggtccatgccaggggtgtttgttggttatagcagcgtaaaaaagggatatagagtctttgatccactaaccaagaaggttgtagtgagcagagatgtcaaatttagtgaagcaaacagttggaaataggatggaattgaggnnnnnnnncattctatttttcctttc

SEQ ID NO: 12621 - DNA, 503 bp, Gossypium hirsutum
agttagcaaattaccaagttgccgtgaatttattcgcaacaatataaacatgagtttaataattctaagttaagaaatttaattgatctaacacaattatgtcatcttgattaaaatcatattttgaaatcatgcatttgagatttatttattaggtttacttagtttaaaatcttagtttttaatcaccctcttcaaacaaattttttttctttaccaaagttttttaaatagaattcataaataattcttttcacagtccctgtgggtacgataactcgacatttacttgtcactttattacttgttgcgattgtgtacacttgtacatttttgttgttctagcctcccaaaaagcgtttatttagagtctaagctcaacttaccttatatttgtacggtcacagtgggttgcaaagttgaaactcctctttcttgttatcaaatattttaccaagataaggtttgattcgagtattgtttgccttaacatgttgaactca

SEQ ID NO: 12622 - DNA, 515 bp, Gossypium hirsutum
ctcttatttggtgaaattataatgaaagtaccttattaaaagaaaaagtgatttaggatagggactcatttttgtatttaaccttagttacagcgttacccttccagtcttgtaggtgtaagcgcgtgataaaaaaagactattcttcttgatattccctattgagtattgacacttttccgcgtagcattcactctaatggccattgaccatgacttgcacaaaaaaaaattgagccaagtgaccaagctttgataatgataggtagttaatttaacaaaaatatctccttaatatgaaatttttacttaattaatctatatattatataaaattagtccctttaagagccataaaagttaatagaagcactctggatttttttggaaaaaagtctaaatttttctggaaaaatcattaataagtgttagcatataattagttccactttttgaaggcattctggatggcccctacagatcataatgaatatactccaacattcccttcgtgat

SEQ ID NO: 12623 - DNA, 461 bp, Gossypium hirsutum
ctaacaagatctttcgcataacaccgaagtattcgaattcatacaaaggcctaaaaattctcacaaaacttgatacaaacacttgatgaacatcccaattagataattacaatatgcatccatgatatccaaccataccctaacttcaataaaaccttccctacctgtctcgtcgtctgtccccaattcgatcaatcaaaaaacaccataactttcccaaaatatctccaaaatccaagaccttgatgcagacctgtactagaattaataaaccttaaaaccacactatgaactttccggtacaatacagaatacagatacagcctaattcccttaataattgacattaaagaatgttatctacaaacaatgacaactaagacaagtaaatggaccaaaccccaatttttatttgatattaaattgttgaagttttaccccattgttgctagaactcagaa

SEQ ID NO: 12624 - DNA, 666 bp, Gossypium hirsutum
aatagaggcaatgtgggtgttggaaatgcaggtcaaaactgaagatgtggtagccatgatgtggggcatggttgaagaaattaaataaatattgatataaggttcttcccaacatgaagcaaggcatatgctttaacattttattattaattttgtagggttgatccatgaaaagattattgttgttttataaagtttttttttgggttgtggtaatgcatgcgtgcaatgcatctccttcctttcatcatgttctttttaaatatttaagacattttcggtgcacaaatttatatattcataatagaataaaatttagttaagtttttttttgttgataacgtttaacataaaatttaaaagaataactaaaattttaaaaagaatgattaaactttaaaaagtttaaatgcacccaaactaagccttagttaggaaggttgtgagagtacacggttgattatttgtagttggttttacaattaaaattaaataaagaagtcttgtaataattttatactttcgggaatccatttattaggctatgaggattgggagagccaccgacagaaacaaggttaagtggaggcagagaaggcccattgtagcaaaccctccttgacggccagccaacttgggcaaccacaaaaaaggacccaattaaac

SEQ ID NO: 12625 - DNA, 667 bp, Gossypium hirsutum
atacgctcataatgttggatatacatatacgccaagtaccatacttaacatatcatctcttccttcgttactagttgacttcagaccttactagatgatttctatgtttctttactcttgaaacaatgaaggtaattctcaaaataatatctatacagaactcactttcaaaggatttcctcatcagtcttacacttcacatttttttccagaatggttattcacagatactattccttggaggatatctactaattagtcttttgggtggattcccatatggagttcgataattgttagactactccacagatcatatcttgattcaaacctaaaacatgctcatattgatgatgaaatgccctagatcaaatagaatagtttcaaacatctatgggtcatgacacaagaaagcccaagttgtccaacgatcagattccaattaatccttagaacgagatataacactatttgtatatggtggatactagataactcaaattccaacccttcatagcgtagaaaaactcagacaatcgaatacttttacttttcacaaacatgaaaatacccttattctatattgaaaaaccactatagcggattccttttttagaaatacaaattcatactttctttcaagaacctcattcaactccattacaaa

SEQ ID NO: 12626 - DNA, 616 bp, Gossypium hirsutum
gggcaattcttacacactttaccaactataacacaccggcccaaagggtttgacactctaatcacaaactcagtagactcaacaggtaaagtcttactgaatactaatgtcttacacacataagaatgagtagaactagaatcaatcaatgcaattacattagtatcatatagagtgaatgtaccagtaatgacatctggagatgaagcctcctctcgtgcgcgaatgacataggctttggtaggtgcacgagcctcagatctgactactgtatctttaattcctctctgactacactcgcattacccgtatttctaggtggtctacctctagctgtagtattactcgatctcgtgttctgcactagattttctttagctaaccttggacaatctcgaatataataatccattgatacatatttaaaataggcccgatcatgaaatttgcaactgctgggatgtcatttaccacagtgtttacactcaagttgatttgatctgacattccccacactaagtattgaggtagctctcaagctcacatgaggtctattttgatctcgttgagaataacccgaaatagcttttgaacgactgaaatcatctccaaactt

SEQ ID NO: 12627 - DNA, 714 bp, Gossypium hirsutum
cttcagtaacccaagctgatagcaaacccgatcatatggtccaacccaaaaaagaaacccgaccatatggatggcgtgggtaacagatttcattaatttcttcaaaaccaaatctgtcatgaaccatatggatggcgtgggtaacagatttcattaatttcttcaaaaccaaatctgtcatgacgtgtgaatattgcaagataaattgtcattttggaattgttgaattgtgtaaatataagcaaatacaatttaacttaaccaccaagtaagatcaaatcaaatgataagtataagatttgctcccatcaaacacagctctttcttctctcattcggccaagggaaaacaataaatcatcctacaacaataaaattaatcaaagcaaaccccgaaagaattattctatagaataataataaaattacatggcaagaatgacatcttagaaatttattgaaatctactcatttttaaaagaagttaaaataccaaaccttgcatatggtaagtatagcaccttagaaatttattgaattttataataaaattaaaataccaattagttagtgaaatcgtaaacagaagcaagtaggcgaggagttatatgaacttctagtggagttgctttagaaatcgttatcccaaatgcttcacgcatatcaataggttcgtttgatggagtctcaaagtcaaaccaatgcaacatattac

SEQ ID NO: 12628 - DNA, 549 bp, Gossypium hirsutum
tcatggattgatccaactttaccggcaaccgttgttttcagtcggtagtgaaatttaaatgtatattttagttttaccggcaaagcaattatcgtaatggacagagtggagataaacacggttttcgaaatgttcgacaagaatagagatggacaaatttcaaggaaagagatgagcgaatcgttgcagaacttaggtatctatatccccgaataaatttatctcaaatgattgaaaaggttgatcccaacggcgataattgtgttgatattgatgagttcagtgaattatatcgatcccttatgagtgataaggatgaagaggatgatatgaaggaagcattcaacgtttttgaccagaatggggacgggtatatttctgttgatgaattgagatttgttttgatttcacttggacaacgaaagaaaactattgatgattgcaagaggatgataacgagagtggatgtgaatggtgacggtagagtgaattttatagaattcatgcaaatggtgaaaggaggtgacggtttcaatgctttggcttaac

SEQ ID NO: 12629 - DNA, 676 bp, Gossypium hirsutum
aggacgaacaagcctaggaggtcctgctctcggagaagcagctcttggaggtggaggcagaaacggagaagcagctctaggtgaattggctcgtggagaagaagcagtcttcggagaagcagcccttggagaggcaatcctttgagaacgaacacgaggagacgcagctctaggaagcatgaaaggtggtgttctaagttgatccggtggtgttgaaggccggaacgatagtttccgatctctttcagcctccccaagaattttctcgatactactcggttccctaaacaggggaatgaaggaattagcttctccatgcttgtaatttgcttgacctttcttcttcctttctttaccgccctttttgtccgattcctaaaacgattcatcgaaacaaaacaagccgtaaaaattccgattttacgacatacatgctgcataacaatctattaggatataaatctcaataggtcacatacataacaaaaccgacttcaaccttaaaaacatcgaaataccgacttacaatatttagcttctccttcgaattcgatacgaaaactcttttgattgcagaaaaccaacttcctttctttcccatactgccagcattactgaaaccgaagaacgaaaactctgcagggactaattcaatgcacccgaaatatatcgatac

SEQ ID NO: 12630 - DNA, 650 bp, Gossypium hirsutum
gcatgagctagcatgaacggacccgcttccacgatctgcctgtgttttctttcaactaaaccgttctgatcaaaattaaacagacatgtaaccctttgctgaataccctgttgagacaagtaactttttaacgcctagaactctccacccccatcggtttgtagagtaagcaacttgtaaccgagagtttattctgcttatttatgaaagagtggaaaaatatgcaacacgtcagactttttcttcaaaaaatagagccacgtatatctggtacacgtatcagtaaaagcaacatagtaatgaaaactattagaagaaatcggagcaaggccccaaacatctacaactacaagttgtaatggcttagtgtattcagatacagacttagaaaaggtaatttgtgttcttttcctaagtgacaagcaatacatggaagagaatctgtagaagcgccaaagcttatattacaacgatgtaacgcctttcggagtgtagcagtacaagggtgtcctagtctaaaatgccatagattgagaggaagagaagtagtagcagcaaagcactgagctgaagtaatacagtcaagcttgtatagtccattatgtactgaaccccggagcagaacctcattgctttgtagatcactaacc

SEQ ID NO: 12631 - DNA, 548 bp, Gossypium hirsutum
tgcgtgataaattatatccattttccttgaaagataaatatggtggctgtgaaaccaataatttacggacaacagattgcttagatcataaacgtgatgggcttcatgtgtatttcaatgggcatagccttaaggtgaagaagtgtggtgttagaatagtgtatgagaaagatttggaagaaataaaagagttgcagtgccatacccctcaatcttcaccaaattttgaacacatccaccaacactctgctcacaacgatggatcagtaggtagcacttctgacattaaacaagaacgtaatatctccgaggaagcggaggaagaggggcagcaaccaaaactgttgcaaaaaattttcaattttataatgggccaatcagggaagaagcattaactgtggtaaactacttaaccaatcttgtcctattaactttttttcacatctttcatttaatgtgatcaatctagacttacttacgatccttcttacataccacaaagttataaatcttttactcatattcaacaggagctcatattccgtaaa

SEQ ID NO: 12632 - DNA, 488 bp, Gossypium hirsutum
atgatattacctgttagaagttctaactcttggttgtatgttgacagcatcttcttatgcctttctgcaaattgcatatgccaaaacaagatacgaccataattttggaagatgaaagtggggaagaatataaagcatcttacattgcacaaaggacagcattgagtgctggctggaaagcattctcggctgatcataaattagtcgagggagacgttctagttttccatctggtcggttcttcaaaatttaaggtacacgatttgatttatttctcttgtatttgtatgtcatataatgtgtttttgaatcctttagcatatgttcttataggtttacatagtccgagcattcaaatctagtgaagtagatcaatgttttaggtcactagaagtggatatccaagcgaagccaattcgttcaagtatgttctctttgaacttctttcttatttaataagttctaagtccattaacgttgttgatccg

SEQ ID NO: 12633 - DNA, 645 bp, Gossypium hirsutum
tgttgcggtatggaagacgacggaaacgacgacttgagttcgcgttttggtgatttattgcgcgtttggatggtagatagagtcgggatggaaggtgaaaaaagagatgacttgaaggtgtttttcccacttgttagtgaagaatctcgaaaagtgatcagaggaggatgcaaggttcggtatttggctggtgttgtcatgtgtcaggcttttctgctgagattgtgcttgaaatttggatatgggattccgaaattggagttggaaaacgatttgcatgattgcgccgttcaaatgataactgggtttcggagttttcactttctgggtattttccccttctctctaaccattttctgtggaaaagttttatttaaaaatttgtatcgttgaagcttttccttcttagttgttctgaaattgtttaaacttcatttacttctattaatgctaagtttgatagggatgaattggcttgtttttttcgtataatttgtcgactcaccgattttgacttttatatcaacttgtatcgttatcatgatattacttactttttctctttccttgtttctttataaagtaagtaacaaagtctcatttaattaaacctttgaataattaagcaggaaataacactgaccc

SEQ ID NO: 12634 - DNA, 577 bp, Gossypium hirsutum
  misc_feature (36)..(36): n is a, c, g, or t
  misc_feature (244)..(245): n is a, c, g, or t
  misc_feature (276)..(276): n is a, c, g, or t
  misc_feature (300)..(300): n is a, c, g, or t
  misc_feature (340)..(340): n is a, c, g, or t
  misc_feature (385)..(385): n is a, c, g, or t
  misc_feature (436)..(437): n is a, c, g, or t
  misc_feature (493)..(494): n is a, c, g, or t
  misc_feature (496)..(498): n is a, c, g, or t
  misc_feature (516)..(519): n is a, c, g, or t
  misc_feature (527)..(539): n is a, c, g, or t
  misc_feature (541)..(544): n is a, c, g, or t
  misc_feature (563)..(565): n is a, c, g, or t
acataatataaaggggaaaaatttcaaaagatttancacttcaaaacatatcaaaatcaatggatgaaaaacactaaaaaaggaaagaaattgattcagtgaatacctaatccaagaagaattaacagaattgtgcattttacagtagaatccattcattcaattcctattcaaatcactgccgagaaaaataataattacaataaataacaaaacaaaaaggcgaaagggggagggggagggnncacaacccacagatcacgataaaaaaaaccntaaatcacaataaaacgctatatnacagaagatgaggaaaagggaattttaatttaaaaagaantaaaaataaataaaaaaagaagaaatatattcagaaatagtgggntgctacctgtatggaataacgggatctcgtgctcataaattaaatcccttnnaagctgtgtcgggactttgggtacacacaatttaactctttgatcaattttggtcnnannnaataaaaaattacgttgnnnntccagggnnnnnnnnnnnnntnnnnttctcagcagccaaacagnnngtgggaaatttt

SEQ ID NO: 12635 - DNA, 450 bp, Gossypium hirsutum
tatgctgaaattaaaagaggaaaagctaggatggttattaattataagagattaaatcaaaacactacttttgatggatattttatcccaagaaaagaagttttgatcaatcaagctaaacaagccaaatattttaataaatttgattgtaaatcgggattctggcaaatcatgctaaccgataagtcaaaacctttaacagcttttagtgcccctaatggtcattatcaatggagggtaatgccatttggattatgtaatgctccacaaatctttcaaagatggattatcagttggacttctattaataaatataccaatacggcagaagtagaaataaaagagattgataacaaaattattgaactctttgaaccaaataggtttactactgaaattcagtcgaaattattagatttaagagatctgtcaattccaagagattggatg

SEQ ID NO: 12636 - DNA, 586 bp, Gossypium hirsutum
ttgagtcaatcacgacagtgttttttttaagagttcattggtacaattataggtaaaatctataaattaaaagtgatacatgttcaattaaaattataataatttttgaaaaaaattaatagacataaaaattaaaatatatttagatttaaattataataaatttagataaaatccaattaaatccaaaattatctgaaagaaaatctatccataataaaacttgaacaagatcacaattttttcctttattcgaaatagtcttagttaaggtctaaaaacacttgagttgaaaaatagacattggaacaataacatcctaaaactcatttttctctcgttttgctctctcgaggttggtctccatctagtgcctttgtcgtgtttgcggctagcaactaagtcaaccactacgccttgtccttccctcatggtgcctatttctcttgtcctagtcgccatggctggcgacctattggggagataatcatattgttttggcattcttccttggattttcgacgacatcagaggcgggtgccaatgttgatggcttgtcctccttggtgccttattcaacaaactg

SEQ ID NO: 12637 - DNA, 647 bp, Gossypium hirsutum
taagcaaagcaaccatcatgtctaacattaggggtctctttggcatctgcaattatttcaagaaaccagtgtatgcaatatatatttatttatttggatacaaaaatttaagaaggttcagggtgagtttaaataggcagtgcatttacttgcagttagtgtaaaaatagtagtgacggtgaaattagatactatagcatgagataaaaaataagctaaacgcaccgtatcacgccccactacctatccaaactcaccctcaagtaataatcaaaatagcaaattgtgttcattatgatttaagatcgagttttattatatacaatttttatgcacgagtttttaatttcatcacgctaaattagtatgggtgaattttgtttggttcttaatatgttttgtgctttgtatcagtttagttctactttgtagttacttagatatatatttgtaattcgtaatttattgtatttatatttataaactcgcgagaagaagttaatatttgatgcactaattagtggattaaatataagtcttttaattatttatatgagcttttaaggttttttaatcatgtgacataagattgttagtaaatatatttataaacaaatagtccatgggttaagctggatgagactaga

SEQ ID NO: 12638 - DNA, 595 bp, Gossypium hirsutum
  misc_feature (555)..(557): n is a, c, g, or t
  misc_feature (559)..(561): n is a, c, g, or t
  misc_feature (564)..(574): n is a, c, g, or t
tgaatcattagaaggtacacgatcagtaattgaaagattagaaccttctatggatactcaagtcagaatggttaatcaggttagattcaactactattatttgtaacttagttaaataatttgaaatagaatttttatttttatttttactctatcttttatttatgcagttgttattatttagagataaacatgagacattcggtactccacaagcacaaagagcttggaagcaaatgaatccgggtaaacagttaattaaattatttaatttaatttatattatttaattatattgtacattttaaagttattttgaaatttaaataatattatgcagctgagtggtggatgatatatggcacatgtgttcccgaattacaaaaattagcaattaaagtgcttagtcaaacaacttcagcatcaaattgcgaacgaaattggagcacatttagttatattcacaccaaggcaagaaataggttaaagtataaaaaacttgaaaaactagtgtttacctattataatatgaggcttaagatgaggcatcaaatnnntnnnggnnnnnnnnnnnatttggaattttgtaaataaa

SEQ ID NO: 12639 - DNA, 501 bp, Gossypium hirsutum
gtagagacttgcctaaatgatgtgggataatggataatggatgaatgatactcacatgttgagttaacttggtatgcctttggttcatggaactttgtggtggaaaacagcaagtgaaggacatgatgatggggcattttgaaaatgagattttggaatgtagtaatagttttgtggtgtaccatgtcacatggactttattacacacatctgttctatttttgtgacaatatggaaatgtatgtcccaatgacttggagccaaaccccaaaactgcaaaaccacctaatctaaaccttccaacagggtttttttttccctcttgtcctcactattacaatttttagccacattatcttctcggttatatagataaaatatagtagacattaccttgttccaaatttcaaccattaaattaaacaaattggtataattttgctttcaatcctttttacgtttcaaacttttaaatgttagagatttagtctttttactcat

SEQ ID NO: 12640 - DNA, 560 bp, Gossypium hirsutum
tttgaagattttttcatctacactctttaaaatttttaaaattttaaattactaaaagtaaaattacactttgccccctaaaatgataaaattttaatttaattttttaaaaattataaagatataggctattaaaatggtaaaattgtatttttactatcgtaaaaattacaatttaatttcaactctcctaaaaaatttcctgactttacccttacaccttgcaaactaagacatctacaagctcaagatcttgcaagcacaaaacctggcaacccgaaccaataagatcacatatctaacatggacaagacatttatatgtcacacatatttgttctccaaatatgatagctcatacctaccacaacaagacaccagtgggatggctaaatttgagagaatccagaatcaatactttaaaagcttactagccaaaaaaaaaaaagggggaaggggcccttttttctttaaccctccaactttttccctttttttttgaacctttttccacatcccaaatcccttttttccaattttttttgggtttctcgccaaaaa

SEQ ID NO: 12641 - DNA, 560 bp, Gossypium hirsutum
ttccacctgaggtaaaaaagattcataatgtatttcacgtatcgatgcttcaacgatacagatatgatccctcgcatgtgatttccccatctgagatagaaattcagtcctatatgacctatgaagaagaacagttctttatcttagctcgcgaggttaaagaattacgaaatgagaaaatttcattagtaaaagtgttatggcatcgacacaatgttgaagaggctacgtgggagtctcaagatgctatgagacaacaatacctgaatctgtttaacagtaaaattttcggggacgaaaatccctagggggagagatgtaacagcccagtttagaccctagtcgaaatagtggttttgggaccacaaattcaagtcagaaaaatgttttaatattattttccatgcttataatatgtgaattgatatctgtgaaaatttcgtgtgaaaattttatcgtttgtgtgcctaatttagaacaaagacctaattgcgtaaaatgtaaaagtggctagctatttgttaaaagtggctatttgctatggctttattgtgaggtca

SEQ ID NO: 12642 - DNA, 677 bp, Gossypium hirsutum
ttgatttcattccgtatacgctcattttctctcatcaacatttcttgtctttcttttcttcttatttgtttttctttttgcctcactttttcattataatataaagatgttacaaatgagtcggatcgacaaactttttgttcaaaggatgggaaagcatatacaaagtggtcacgatcaactctttgtgaataaacctccgagggcaaatatcttgatgcataagaaacttgttcatctctttgtgtttgatccttcgaggacgagtaccttgatgtatacaaagaccgacttgtgatttcttgtttgtcgccttgagaaacgtcgcagttgaaacttgctttgcatcatcttggattcctcattgaataggaatcatgatataaatcttttcttgaataatcattggatgtgtgctttcgtgatgatcttgtcttcgtctcttgacccggtgaatttggcttccgtcgggctctttcctctactcgatccaatcgatcatgcaatttatcaaattttgatttcaccattctatgcatctcttgcatcaaatattgaaaatctgattctgaaagctcttcttgaaacatgattttattattgaaaaagaaaagtgattaaaataaaacaaaatttaaatacctcaactcaaaacctcacgtttcactcacaaagaa

SEQ ID NO: 12643 - DNA, 653 bp, Gossypium hirsutum
ttcccatacatagagatgggtggatgatataaaatctaaagataataattaataatcctactatacataatacagataaacattgcataaaaggacagacatcctcattctcaaatctcaaataatgacagatccgcattaataggctcacgtattctcatgcaaaacttaaaactatttaatactatagggatatatagcgcaatactaaacgataacagaaaaatggctgggtttgactaaaacttcacaggctatgaagacactgcctcatataagtttttaatttttttcttaaaaagccctaacttgctctagtttgggtgtttcgatactgttgaatccttcatttctttgaatgtaagacacaaagattcgagagacatgtccaatgtttctacgtaatataatattttatataaagaaaattattttttagtactaaaatttctttcaaaatattttttgttgacacaaaatagaacgaggaggaagacagggagtgattgtggtgatctaaaggaggtaggttcaccttaacaggcagagagccgaagaaagataagaggatagagagatgctgtgagggctaaggaagcttggttgcaaggagtaagtggccagggattgcttaaggggagaagatcccttcc

SEQ ID NO: 12644 - DNA, 626 bp, Gossypium hirsutum
aatggcttcacaatgggcgcatgaactgcatcttctctcacaccttggcggccttgaccctatctgagctctcaatattttcttttcttcatttactttctatcaaacgtaagaagaaaaaaaaagacagacattcttaacattcattgtatgatcttcagaggaaaagaaatatagttttctgttctgtatgctggtttaccttggaaaaggtatcagatttgggatttggtatacctgaaaattaaaaacaagtttaaaaaaattgtgttcattaattcaaaaaatattttcaaaacttactggttgtgatgaaaattttattgattacgtaccttcagctttgcatctaacttgggttgtgcttaaaatcaagagaaaaataaggaaaaggtagcgatgtctttggcaaagtacgaaaccgtggctataaaccattttgatgaactgcacacttgtggtttcagtaaatgaaatgaaagcttaatgtaagtgttgtctcgcactcagtctgttgaagtgatggaaggtggaaggaaaactaattacatttatgcagaaatagaactataaaagtgaataaaaggaatccagaaaggagaagaacattattaacctcgtttctt

SEQ ID NO: 12645 - DNA, 641 bp, Gossypium hirsutum
ttgatttgagtttaatcaagttccacttctaaaattagatctcaattcgagatagaaatttgaactacttgagtttgttcgattaggctcttttacttaacgccctcaattttcatgctcaacttcaaattttattatttattcctgagcttaagctccagtttgaaatgagatttttcagtatagttaaaaggtaaaaagacctcaatcaaactcgtgtgatactttaatcaagcattaaggtacttgaatttgatctgctcaatagctcaaactcgactcaacaccacacaagtctaatttgagaatttctgagaaggatccacaaataataactgaattattgccaagtatgaaataatggtgatacttaacaactctagtgattgcatatctggataagaaactggaggcctgggggcatatgatgcagacatttattgactgccgctgtgcattttggcttttactgcctgcatatatttggttttaattgctaatagtgaagctttaaaagaaccaaagttgccaatgtctgttcctatctagaggtccacgacacatttatgatgtttataattgtgtgcataagtgctttatcttgaactgcattgacaacatgataatttcacggactgtca

SEQ ID NO: 12646 - DNA, 398 bp, Gossypium hirsutum
  misc_feature (357)..(357): n is a, c, g, or t
  misc_feature (362)..(362): n is a, c, g, or t
  misc_feature (394)..(394): n is a, c, g, or t
agttggattcaatatttttacccataataataattattaataattaatattaataataataactctaaaaatccagaaagaaagagatactgagatagtgatatagggattatagtctaaggttatatagaaaaaaaaacttgtttttctatttagacattatataaaaacaaagtttcaacggatgcttccttttatagtaaaagtcagccactatgttgattaaatgtagaggtagttgataagtcgtcaattttaaacgtgaagaatacccggggaatagggttcaattctgtgttattagaggcaatcttttccgaaccaaatccacctatccgaccggatgaatctgatagnaattnatcctcttataccagaggatgatgatgataantatt

SEQ ID NO: 12647 - DNA, 679 bp, Gossypium hirsutum
  misc_feature (673)..(674): n is a, c, g, or t
attagatgggtcaatggagctggaatgtaacgacctgatagtcacgggtatcgaaaagtgtatttttgggtctctattttcgtaaaacagactcataaatatttattaaaaatatttatgaaggtagttgtgtagtgtaacagcccgattttgaccctaattagaatagtggttttgggaccacaaattcgagtctaaaaaatattttaatattattttatgtgttaaatatgtgtgaaattatatgtgtgaaagtttcatgaaataattctattgtttgtgtgcttaatttgagaaaatggcttaatcgcgtaaaatgaaaatttaggggctaaatctaaaatgtacctaaattgttgttgtcttaataaaagggaggttttatgtggaaaataggccattttaaggttagcgggcggcaaaggtcaaaattaaccatgaattatatgttttatatattaaatattaaaggttaatttaggaaatcaataatacattaatatatatgttaaaataaaacataataaaccattgttatcatctttatgcaccgaaaattaaaggaagaaaaagagaagaagcttggcaaagttcggcacttgttcttcttaatttaggttagtttttgcttcggttttcgataatttttacatttttgagatcgttgcttcgnntactt

SEQ ID NO: 12648 - DNA, 532 bp, Gossypium hirsutum
atcttagagtggttctgtagattatccgagaaaagaagctctaagctaagttgagaaaatgtgagttttggttgagggaagttatgtttttcaggcatgtagttttttccaagggtatccgtgtggaccaaaaaagattaaggctattcttgagtggaaacaacctagaaatgtttttgagattcggagcttcctaggtctggcgaggtattattggaggtttgtaaaggggttttcatatattgcagctcttttgactgaattgttgcgtaagaatggtcttttgtgtggattgataatcaacaattgagctttgagaagcttaaattaattttgactcaggcactcgttctgatacagcctaaatctgagaaaaattttgttatgtatatgacgcaccgcacattagtctcgtttgttttttgatgtaggaaggtaaagtggtggcttacatatctagacagcttaagctgcatgaaggcaactatccaacacataatcttgagtgagttgaggctttcttcgcactaaa

SEQ ID NO: 12649 - DNA, 617 bp, Gossypium hirsutum
cctaaatgataccattgaccattccaacatataatgaaacaaccatcggaaaattacaaggaaaaaagagaaactccagtttacaaattacccttacccatttattggtgtggagaggaccgatgtttattgctccattttggtagaccacaaggtcgacccttgaatgaaggccatcaatgaggggacctaaaatgaaaccacaaccaaaaagcgagagagagatggaaggccatgagctttttagacttctcttgcgctgttttcttacagtgcaacaatttatagaaggggaatgtttgaaattaacatttagaggaagtttaggaagcagatgagaggaacttacagcgatgaggttgggcatggtttaccatcccctcaagttttgcgactgctatatttcttcattttcagattgagctaaagttaaatctcaaccacataagcaattgtgtttttgggtaaactactagttggtcacccaacttttagggtgattttattttggtcacccaaaatgaaatccttgcaatttcatcattcaacttttttgacacgttcattttagtcacacaaccgtttaatttctaatggcagttatcttgtacatgtca

SEQ ID NO: 12650 - DNA, 629 bp, Gossypium hirsutum
  misc_feature (562)..(564): n is a, c, g, or t
  misc_feature (566)..(570): n is a, c, g, or t
  misc_feature (576)..(576): n is a, c, g, or t
  misc_feature (591)..(605): n is a, c, g, or t
  misc_feature (610)..(610): n is a, c, g, or t
  misc_feature (612)..(616): n is a, c, g, or t
  misc_feature (626)..(626): n is a, c, g, or t
cgaaagttctgctaacatggatcaaatttccgcagaaagggcatagaaatccgagtaatctcattgctgtgtgtagtatctatcgtgctcttttcggatttatatacatatattccttatgattattagtcttcctttgagaaaaaaaaggggttgtaattaggcttgtttaagagtcgggttttcgtatgacccgagcctcggacacggattttgtgaattcgggcctgtgccctaaccagcataggctctgtccacggaaaggtggttctgcttttgaaaaattgaatagccatgtgagatggctctctccctacattatgggcttagagaccgggtagtttaggataaaatttatctttaatttgggaggatttgtatattttttttgcctttattttaacctaaatttgcttataattatttggttttatatttaggtattgaatcaatgaagtttttaaattttaaaatgttttgattggcttactttgacaaagcattgtatcaaccaatttttttagatcaaatgtaagcccttgtgtaactattgcaagcatannntnnnnngactgncgtgctcctaattannnnnnnnnnnnnnnagcangnnnnncaactagttnatt

SEQ ID NO: 12651 - DNA, 531 bp, Gossypium hirsutum
tggacgctctcacttcactcgtatctcaggtatcatccatttcatcaatgcttaaaaattttaccattaatgggtttaatagttttgcagctcagccaccgaatcaagtggaaaatgtagcttgtgtctattgcggggaaggaaatttgtttgaagaatgttcatcgaacctagaatccgtctattacatgggtaaccaaaaccaaaatcaaggaaggcaaggcctgcaatccaattcctataaccgatcatggcgaaaccaccttaatttctcctggagtaaccaaggggctggacctactaacacatatgcccaacctagaccgacccagccacctatttttacccaacaagttcagaaacaacctcaagctggaccatccaatggcttagaaaacttgttgaatgcatacatagccaagaatgatgccttaatctaatgccaagcagttacattgaaaaacctggaaaaccaaatgggccagcttgcaattgaactcagaaacctaccacaaggtgccttacctagtg

SEQ ID NO: 12652 - DNA, 647 bp, Gossypium hirsutum
atgccttttatttttttaaatactatttttttttctttaaatcaattgtataactaagatttattcttaatatttgattttatgcattgtcaaaaaataaaaataaaatagaataaaagtgttcatttacggttttatataattaagaatttattaagatatttgtgcatctaaatttttgaatttatccaatacatctatcatatcaatgtaaaatattgtttatcttaatatatatttaacttttgaaagtcttttatatcaaacaaatgatggggtatgaaatattaatattaattgtataaaaaagttatgaaagaatattaaatcactttaagttttacacggatataggtagatccctccctaaaataataaaatgatacatcatcaaaaataatgtcatttaattttaaaatttcttaactatgtatcatacaagggcataactaaggaggcgggtaagggctacggcccctcaaatttttaagggtttttttttttaagtaaggagtgtctatttgaaaaaagaacaagtaaaatatttctctagtttctctcattttcgatatttggcaaattgatccatcatcaaaatatggagcaatttagtcactatcattttctaaaatcactaaggataatta

SEQ ID NO: 12653 - DNA, 365 bp, Gossypium hirsutum
cgcgcgtatactactagaatgacgaaaatgtgtaagtgtacacaatcgcaacaagtaataaagtgacaagtaaatgtcgagttatcgtacccacagggactgtgaaaagaattatttatgaatgcaatttaaaaacactttggtgaagaaaaatattttgatttgaggaggtgattaaaaactaggaatttaactaagtaaaataaataaaaataaaataaaagttccaatgcacgatttcaaaaaatgattttaatcaagataacataattgtgctagattaattacatttcgtaacttcgaattattaaactcatgtttatgttgttatgaataaattcacgacaactcgataatttgctaac

SEQ ID NO: 12654 - DNA, 600 bp, Gossypium hirsutum
tgccaacaaaaccaatacaataaatgacacgggaagagtcaaacctgaaactgttggaatttttctccatcagccgtcaattgcaagcgtaaattcttttcagtagccaataactgcgacacttgttctgagtatactttcatctgcgcttgttcctcaaccaatttctcttcatgttgtttaattttcagattggcaagttgcagttctagtgttttctgctttagctgtatcaaaaatccaaaacagcgaaagtaagttcagtcctcgacaatgggaaccaattattatttcgagagagaattccttagatataccaggaaatctgaatctataccttctgtgcatattgctgttcagcgagggcacattgatcggcaaactccttcaacttatttcttaacctatacatgaagaatttcaaaatttcaattaattatgaagaacaagcactaaaacaatataggtgaggatgatgctttaaattctatgaaattttactcaaaatatccaacatatcaggaactactaatgtaagaaagatcaaaagcccaaattaaagattctaacttggaaaattcaaaaattccgaatggaaaa

SEQ ID NO: 12655 - DNA, 666 bp, Gossypium hirsutum
taacccaaccatagcctatatcggttcaaaccacagataacagaataagttggccttagcccagaacagaagtcagaatagagcccataggcccataacagaacataatagatatcacatgtttatgcaaaacccaacccatatccaaccacatgcacccccatacccacctttcaccatgtagggagactactcgacccacccaaccgctacacgccacagaaatatgcaacatggctgccagaacagataatgtgacagagccaccagaacagataattgtggcagagccaccagaatagatatatgtggcagagccaccagatcagataattgtggcatagccaccaggacgcttcctccataatataacccatgttcccatgcagcagatatacaatcatggcatacatcatacagaattaaatcatcatgcttttcattaaaaagtaaccctaggggtataatggtaattttgcacctaggggtatatcagtaatttccatacataggggtattcaagtaatttcactattcttaaggtttccatgcataacatagccctttacgtacgaccagaaacacttaccgcattttcttaccgaattgggcctgttggcccactatcccgatgttggcccattaagcccaaaaacatcgaaatga

SEQ ID NO: 12656 - DNA, 684 bp, Gossypium hirsutum
ggatttctcttccccttcatctaccaaaaactctgaaaagttcaatggcgaacgctcttgcattctctttctcagccccaatccgggcctcatccgaatcacttaaaaggcccgacccgagtcgtaagaatccagtttcttcatcctcatggtggaccccaatcttcgggtggtcatccaaccccgattacctcaacgatagcaatgccggaaacacatcggagacgaagccgagatgcagatacacactggggagcttcacggaggagaaagcgagacaactccgaaagaagacgatggagaactcgtcgtttcacgatatgatgtaccactcggcaatcgcgtctcgactggcgtcggatatctccgggaagtgattgaagggtagtaagggtaaaaataatttgtcgaaatgaaaatgtatccttcaccgtcgttattgttcgttgggattttgggcaatgtttgcgttaaggacagacattgtactttaattttgattttaggacgttgatgaacggtgatgcattatcttttctttctttcttttttgggtacaaatgccttctcttttctgactttgatcttttgaaattctgacgttgttgtacttttttaccgacgtggaaggcagttttcttttaataatcaggatctactttagatatttccacgtcagcatct

SEQ ID NO: 12657 - DNA, 651 bp, Gossypium hirsutum
atcccatacgacaaggtcattgtcttggatgaacaatgtcattttagttttccaatatgaataatttgcaccattgaaataaagaagttgagattatagcttgacactcaccaaccataatggagctggaagtagatgtcatcttctacaatttgaagatatgatatttgaactacctcaaggattttctcttggttgttagactatctttttgaggctagctcttatatcaattgttagcttgataaaacaaatcgaaatcaccaagagggggtgaattggcctttaaaaattttgtgaaagcaaagagagaaaattgaaagatgaacacgatgatttagagtggttcagccccagttgcttacttcactcccttagctttccacaactaaggattttcccaaattcactaatttgataacctttgaggacaaggtttaaccttacaactctcttaagatttctactccaaatcttaagactcaaaccctctcaaggaaatacaaataagcaaacaaagaaataatttttacaagatcaaagtgtttgcaagttaagctcaaatacaatgaaatacacttgagcaaaagaataaaattaaagcttacaagtgtatgaaaaagaaatatggaaatattaagctcaaaggtt

SEQ ID NO: 12658 - DNA, 735 bp, Gossypium hirsutum
attcgggtcaatttcgtatttaaggagcttattttctaagcaatttagtattttaatttacattttcagctgttgaaaccatctttttgaagtttttcgaaaaatagggaccgactttaaaaatggaaatgggagtcgccttattcggtcaagaagaggcacatatcttatacctaaggtgatttaccgtcaaatgtagtagttaattcgggtcaatttcgtatttaaggagcttattttctaagcaatttggtattttaatttatatttttagctgtcgaaaccatctttttgaagtttttcgaaaaataggaatcgactttaaaaatggaaatgagagtcgccaccgatcttttattaaggtgtaccggttcaccattaaaaattttaggtctgcgagatttgaaaaaaataggtccgggagttggttacgcacgaggaagggttagcgccctcgtgacgcccaaaattggtaccgaattaattgtttaatgtcttaatgtcgaaattttgaaaagattttaaaatacgatccttttcttttggataaaatgaattagacgatgagattcacttatttcaaagaaataaattgtcacactcagtaagttagagtgcaacattttaaattttcaaaattaaatttatctcttgacttttaaaacccatgcgttttgagaaggttattcgattatttgaattaaatgagaaaatcaagacccagtaagttagggc

SEQ ID NO: 12659 - DNA, 550 bp, Gossypium hirsutum
  misc_feature (494)..(494): n is a, c, g, or t
  misc_feature (500)..(500): n is a, c, g, or t
  misc_feature (503)..(504): n is a, c, g, or t
aaatcaatgtgcaattcggcgccgcattctttttgtagacccagtagggaaaaaatccctttgcttatatttttggaataaatcctaaatttacttccggcataaaaatgataaacttcaatagaatcaagtaaaaaaaatttatttaattgagtcgatgagtcatatttattgtcttaatttaatttaattatttttttgaattgagttaagtaaaataaaatttgaattgaatagagtaaaattatacaagttaaattaaaaaaattaaatatgttaaattaaaatcttattacaatataactaatgtgatgttagagcacataaatttaaaatcatatatatttgaaaacttaaaaaaaaaagaagaataagatattttagtatgttaaacttgaatcattaattaacttatttacctctcaaaattattgttttaaaaaaaatttaaatttttcattttctttatatattttttataacttttttaaaanttttanaannttttttaaaatataaattttgggatttttataaatattttgaattt

SEQ ID NO: 12660 - DNA, 583 bp, Gossypium hirsutum
gaacattcccaactctcaagatcaccatctcattaattttacacatacaatttgcaatcaaatgaatgtttcccataacaaaagatttaggattggcataccatcgtccacactaataaaacttcctcaatgattagtgatattttgaaatgtagagatcgaccaaacatggctcggaactctaaagcaagtcatccaagttcttctactattaaccaaaatgttttcggaccatgactcaactttttgaaccacctcaccaaaatttcacttaactcttttataaccttatttgttttttctccatggttaaattccattaaaaccattagcctagagactcttttaatgttagcaacttgaaggccgccctcttttaactgcatagcaaggtcctctagaatacataaatctttacaccatcccatgatacaagactgtagaaagtttttcttcgtcaataggaattgactctatctctttcttacctgtagccacttactccatgagacaattcttatttattgctttttctcctctgagggttccacttgtatttggagaatcttttgatacctctggg

SEQ ID NO: 12661 - DNA, 402 bp, Gossypium hirsutum
aagtataataaatgaacaaaataatcacttttgcataaagaagaaataggattaggtagatggaaaagtgtatagagagtgaggaagttacagaaagggaaaagagaaagtgtagagagttgcatggcgaatgcgatgtgatgcccccgattttgggtgtctttacagatcccaaatcggtagtttaagtgcgtgttgttggatttgttttagattttggcctttcacgcattcggcaaggtgaaaaggagaagcttttggggcatggcgttttagagtttgcctatttcaatttgaaggggctgtgccagcgtactcctaagttctcgtctttgtattttgttcatttgcatttatgcttttttgcgccggactttaatctgcttgtcccgacattcaaaa

SEQ ID NO: 12662 - DNA, 361 bp, Gossypium hirsutum
taaggtttattcttatctgttaaattatttatttggtggtttatcagttatataatgatttcacttggtttaaaaaggtttattttagaataattattggagaaattttaataagatatattcaaattataattgtgagttttactctatcaagactacttgaagaagatatcgaatttaacctataaataggctgttgtgctacacatatgggcatgccttttagagtgcttttgtatggttatttgtgtttcttttacttggtatttttgcactcttgcctctgacttttatcaaagagtttatactcgatgtaagtgaggtttttgggtgggtggtttataacaattggaggtaggta

SEQ ID NO: 12663 - DNA, 497 bp, Gossypium hirsutum
attagttgatggagggggaggggtagatctggggatcaaccagtagcgagagaagggatcgcttcttccttgaattgaagagttcgttcaaaaaattcatctatctgattgatgagccataagacaattcatggttcagacgactagtaaaaatagaaaagaataaacgaattgagttcatggatttacctaagtcaggttatggaccaatacaagaaaatatttttttatattcgaaaccaattaattattaattataaggggcagtgcacgagaaatcaaatcatacataaaaaatcgaatcccccagcgcccccataacataaggtgctcggaaatggttgaagtagttgaataggaggattgctatgactatagcccttggtaaatttaccaaagatgaaaatgatttatttgatattatggatgactggttacgtagggaccgtttcgtttttgtaggttggtccggcctattgctctttccttgtgccaat

SEQ ID NO: 12664 - DNA, 599 bp, Gossypium hirsutum
gagatatcacgaccatgatgtagacatatcataacattgaagacagaaacatgcatcgcgactttaatcgaggtgagttgcgacctttaaggcagggggattcaatgttgcaaccttaataggggagaatcgcgactacgaggacaaaaaatcaatgccgcgacaccaataagagagtgtcttgactctgagggaagtttccccaaattatgatttattcttctctaatctaccaaacatcattacccaaatggtcaatgttgcgaacacctgaactaaaaatattgcaataaaatagataaataattaaacagtgatgtccgcaaatatacaggtcaaattgtaatacagattagtattacaaaaaaacacttcgagaaacattccaaggatcatactcaagggaggttgaattagacctaaattaactctctacattaatgaggttaaataatatcaatttaaaattatattacaaaaaataaaattaacatcaattaattaaattaaactaaaaatcaaccaattaacaaccaaatttaatccaataaaacaagaaggatatcaactcacttcagtgctcctaattaacttcaaaa

SEQ ID NO: 12665 - DNA, 676 bp, Gossypium hirsutum
gggcatagactaaatcgtacctcaaataccaaatcatttatatcaaagtgtttggcttgaattacgttatgaaactttatatcacaatctgagtaaaagtataatgaatattttatattaagagttaaattatatttaaaataaataaattaatttttatacattagattaaaaagtaaactgattcctacatatatgtgtgaagtacacgtggcattgtatgattattttgtcagttatattagtttttaacagtacaaataaataaaatttttgacaaaaagactgatttttattttaatttaacgaacataaattaatttactcatttttcttatagaaaggccaaactagagaccttcatatattttttatccaatataacttattatacctcaggtatttttgaattaagattttattattgtaaaaaaatataaagaagtgaaatagcaacatgtgagtatctaaaaaaatacaatatcagtttgtgtcttgcacttaacaaggatagagttaagctgagtttctcatctcctttccctttccattggccctcatcgcatcatggtgaacttatcattctttattagaaaaatgtgtaccattttttaaaacacaaccggtacactaagatactatatatattagtatatacgcacataccaacaaatac

SEQ ID NO: 12666 - DNA, 511 bp, Gossypium hirsutum
  misc_feature (499)..(500): n is a, c, g, or t
ggaaattgactggtgagggcgtcatcttacaaccaaatgtaatcatttctttcatgttcgggggtttctcgtttaccagtcattgtcattttatcttttccccaacaacacagctcatgaagttttacaacatcattaacaattagttcaaagcctaaacaacaaacacaactagcgcaactcgaacccaagccacatctggagcggtgaacacccttgacctttgtatcattttaattgtatataacctgatttaaatatttaattttgtagcttttattatttatttgcatttttaatatatatataattttttatttttttattttatgaatttctttttttttgaattatttaaaaaattatcattattgatttgacggtttaatcgattgaatcgagaaccggtgaaaagaaaccaaaaaacctattaaaatgaaataaaactaaaatggaacttattgagccaagttcacagtatccaagatccacaccagcnntttttttgttg

SEQ ID NO: 12667 - DNA, 429 bp, Gossypium hirsutum
  misc_feature (390)..(394): n is a, c, g, or t
  misc_feature (396)..(396): n is a, c, g, or t
ctctttaaaatggccagagatgtgttagctataccggtttctacggttgcttcagagtctgcatttagcaccgggggacgtgtgcttgatcaatataggagttctttaactcctaaaattgtacaagctcttgtgtgtactcaagattggattcgaaaatcatcatcacaagaagacataaaaaagattgaagaacaaatccaagagcttgacaagattgaaaatggtatatttattgttttattttaatagtttcaatttttttaccatatcactcttacttatttaattgattcaatgtttagacttttcttggaatgcatcaaagcctaccctaaattcatgagctttcgtgagttgaaggataaaaaagataagatatctttgtannnnngngcgagagaataatgaaaaaatagccccactact

SEQ ID NO: 12668 - DNA, 612 bp, Gossypium hirsutum
taagccttgttagtattgtcatacattataaaacgaaaaggaaatgaaaagaaatgaaaatagaaaaaaaaagaattaaaaaatattttttaagtttatatgacgtggcaaattattattggttggaattgtttttaatagacataacatttatgtgtaaaatgggtaacaaaagaatagtttaggtaccaaaataggaaagacgaacaatttcactaatggagataccaactcgagaaaaaaataatttagatacaaaacttagaaaattggtataacttaagtacggatttatgaactaagccattatccagttacatataactttaaaaaatattttatttgttgacaccactttaaaaaaaaaacatttttttacaaatgtaaaatattaagctgttaatgagtcaattgacaccactataaaaaaattttgttgacaccactataaaaaaaatttgtattcgtatggtatttgtttagtattaaaaaaatattcgtattcttttgggtgctacttgactaggggacaaccccccttaaaaaaatatttttttacttccctggaatgaaaaagcttggggaaattttaaagggtcgttgccaaacact

SEQ ID NO: 12669 - DNA, 670 bp, Gossypium hirsutum
  misc_feature (661)..(662): n is a, c, g, or t
gagaatggggaacccccgggcaagacgtcgcctttgacatgtgctgagggagactaatcccgatttagcttttttcatggaaactaagctacatagttcgaagatgtagaaggttaggaagagttggggtatgttggaaggaattgatgtaagtagtgatggtacaacgggggattatttttaggttgaaaacaagggcttaaattggttttaaaaagcttcggtggaaaatctgaggcattacttgtggtgtttattaaaatatctctcggtcgaaagtggtgaatcgtggttggttgtgggagatttcaacgagattatgtatttctataaaaagaaagaagaaaggttgagggacgaacagtttatgaaagctttgcagtcagctcttgatgattgtgattttctggaagtgggttatgagggtcaatggtttacgtgggaacgtgagagattgtctcataacaatactcgggaaaggctagatagaagggtgtcaactccgggatggaaagacttattctcaaattatagccttaagcattgcggtcattcagtatctgatcattgtcctcttttacttagtatttgtggttggatgggaaggcaagaacataagtattgtaattttaagtttgaggcaacttggatcctcgaaganntgtgtaaa

SEQ ID NO: 12670 - DNA, 395 bp, Gossypium hirsutum
agtaagaggagagagacttaatggtggaaacatggagaaaaagacaatgaatggaagtccccatggcttagctcactgattagtaaggagtgacgccgacgttagctgaagcaaaaaatccatctttcatgagaacgtcctcgctttcctagagggaaatgtattgaacttcgattagtaaattaagtcgttatataattgttttggtggtgagagtgagaagaaagaggtggaaaagtgacttgctggcgcacgttagtcctcttggcaggctgatcaggcattaggccaaagtgaatatgtgggaagtgagcccactgtcaacaccaaaacaaaaaaggatcagacaaaggatcccatcaaaagactgtgtaggagaatagagaacctccaac

SEQ ID NO: 12671 - DNA, 595 bp, Gossypium hirsutum
agtcaggttttcttgtcgattttgatctagaaattgaaaagactgtttggagtagacttcgagaacaaaaaattatggctctaccagggaacaatgcagccatacccctgatgcaacaacaaaatgttaataacccattgttgccgcaagatgctcacatacaaaataggactatacgagattttgtagtacctgtcttggatgatttataatcgggagttgttagaccaacaatccgagctgtgaattttgaactcaagctaataatgtttcaaatgctgaattctaatggacaatatgctagactaccacatgatgatgcaagagaacatcttggatcttttttattgatctatgcttcctttattcaacaaggcgttcctaatgatgccttgaagatgcaattatttccttattccttacagggaagagcccgtacttggtttttgggctacctgccggatcaaatacttcttgggatgcttagcaacacagtttattttacgatttaacccacggacaatgaatgctcgtcttcgaaatgatattattgcttatcatcaattggatgatgaaaatcttcacaccacctaaa

SEQ ID NO: 12672 - DNA, 376 bp, Gossypium hirsutum
tactgcagaatcagatatcagataaccacaaatcaaatcaaaaactcaaaaatctcatagttgaggaagaaatctattagcttaggcattcaaaattacctcattcaatagttttgtttataggttttggtttgacccgtcgagatcttgaaggcaggaccggaaccgataactcgggcaggaatcgggtggaccgaagcaggagcggtggggcgggagaaggcgacctgagaggaagagaacggaatgatatcgcacgcgcagagaacgagcgctagtgggggtgttgcccgtgcgggttatttgaaattttggggggaaaggggaaggtagttgaccttaggagtgatgatgggaatataagatgtgagatggg

SEQ ID NO: 12673 - DNA, 552 bp, Gossypium hirsutum
tttcttctgtccaatctacaagatgctactaaacttttcctaaaatcctgccaagcaaccataataatttgaccaaggggacaaaggaaatgaagtgttctacgaatgcggcaaccatacttgtccagtgagatgatctctttttaagtcatgagttgatccaactcctcgtaataaatttagttggcttgaatggcacaatatcatatagtatatacaatattgggaaaaattagtaaggaaaaaattattcaatacacatatcttaaaatgtttagacataaaataaaaaataattaagctaaccacgatattagattgggttccttcgttctttgttttgcactccgaatttcttttataatcaaaacaaatatatctcaatcggtaaccacaactttcgtgaaatagtataacaaatccttatattaattttcttacgaagaatgaaggaccattggccaagttgttagaaggttttggaaatttattccttgtaccattattttcaaggaccactgctttcccgacttgatatattttcatgtggcc

SEQ ID NO: 12674 - DNA, 570 bp, Gossypium hirsutum
  misc_feature (525)..(525): n is a, c, g, or t
  misc_feature (529)..(529): n is a, c, g, or t
aaagagtaaagttgttagagttggtgttgtcaacccaaccattttttgggtttataattttttttttgagcttctttctaggttttaattagcatttaagatgaataatgtaacaaaagaaaaaaaaagactaaatcaaaatatattgaataaaaaataggttagtttttggatttttcacatgtttggttgatgagaaaaatgtaaatataaattataaaatttaaaacataaatataaaaatatttttaaaattatattttataacttttagaattagaaataaaatgacaaattttataacattgagggttaaatttattgatttttttagatttagaatcaaattaactaaatgtgtaaatattggagaaataaatttgttattaggctaataaaacaaagctcacaatagactttgttaggcaactaatggaagaataaataaatttttaattttaaaaagttgagtgactaaaaaaaataaaattgaatgattaaaataaaaggaactgaattgttganaaantattcttatactttaaccttatctattttagtttcaactcc

SEQ ID NO: 12675 - DNA, 622 bp, Gossypium hirsutum
tgggtgaatatcaatcaactcgggttaaaacggtatgtccttctcaaaaatcaaaaacattgaaaattcttgtgtttcaactggatcacggctaaaccttacattgaactcgtatttttgaaggtcaagacaacacacgttttaaaagataccaattttgggcgtcacgagggtgctaatgccttcctcgcgcgtaaccgactctcgaaccctactttattctgattttcgcgtagacccacatttggccttcacttttgttcgaggataaattttcttttcaaaaaagatgatttattaggtgtccgatcacacctagaaaaaggatcggtggcgatttcctttttaaataaaatcgaaagtcggtttttaaattttcaaataatcaccataattagcgaccaagctaaaatttttacgtcgctacaattatattccatagatacttgtgtgcacagtaaatacagattatatcagtcttaatttagttagcactaatattgatgtcagcgtaggaggatgtgagttggaacatgtttaaatgcgtttatcctattatttaaaggtcgggagtaattgttaataattttaaactttgtgtaaaaaaaaaaagaaaagctaa

SEQ ID NO: 12676 - DNA, 218 bp, Gossypium hirsutum
attgaagctttaatttgtttatgagatgattttattaggtaatttcaatagaaattgatttgtaggacctaattgtgaaaaagtttggaattaaagtctagtgctaaaattctgatttccaaaggttataaagtagtttaaagtgatggaataaagttttgattgagaaaaatcagctcaattgagaggttaattgagcagggatgaaattatcattt

SEQ ID NO: 12677 - DNA, 683 bp, Gossypium hirsutum
  misc_feature (659)..(676): n is a, c, g, or t
gccattatcctttgcacaaataatggttgcttggacatgggagacacgactaggttcaggggtaaaaaatctacggtttctgataaatgcttgaaaagcatattcgaaagaggaattacttaggatgcaaattgattcacgcattgtagcggatttgttagcaaggcattggaaaaaattttcaacttcagaatcagaacaattaaagaagatgaagtaaatggttcagttttaaagttttgggtttaaaattattttttaattaattataaatttacatgaaaataatgtgaaaaaaacaaagggttaaaagaatacatatcatgaagttaacccgcaagtcaacaatttgttagtattttaacggttaattttaccgaaagtaaatgcatcgtctatctaaaagcaccctaaaaaaataaaataataaattgagtgattattttataatttttactaaaccaaactctgaaagtcaaatctaaatctcaactttttgcatttgagtgaaaaagcacttttttaccaccaaaagtcaaaaattcctttcaagttgtaaatgaaccatgtttgaatgaacgaacctctattcatattcatttgtttatttttaagtttatttttgttcttaaagaatttcaaaatgtttgctcgccctnnnnnnnnnnnnnnnnnnaacttaa

SEQ ID NO: 12678 - DNA, 639 bp, Gossypium hirsutum
atgataagaacttataataatgatatatgtcatttttttattaaccaacacgttctgcacagatcaaatataaaaaaatatgaactcaagtagtaagctcattagtcgaaacagagtttccttatactcgatatcaagattctgtgtgagtttaaaattgtattatataaataaatacaccctagtaaaataacggttttactaaggctttgatttcaaaaaggttatgcacttttaatacaataattgactaacattattaaaacacgacacaaaacgttgtctcatcaaaaattaaatcacatgctttgacatatatgactttttcttcctcttttaggtggcggagatgaccaaagaaccaacttttgtttctagcatctcttttcatttttgtcttaatttataagttaattaaaatttttattttgtattaacattttcattgtccctgccgagaagattacaaggtttttttctgactcgtttaaaatttagtttttcgttaattttcgctgtcatgataaattacaggataagagagttacgtggtcgtgcttttttgagatagttgattggagactttagaataataggaatcttttcatcttccaaaacatcaattggacgccatatgag

SEQ ID NO: 12679 - DNA, 350 bp, Gossypium hirsutum
aaactggttttggaccatttggtggagtaacttagaattctaaagaaaaaatggaaacgaggtttctatccctcttattctttcaccgtctttaaggtttttttgggtcaccaaaatacaaaattgtgaactcaacattcaagccatccatttggtttgtgtgatattcttatagttgaaagtaacagaataaaattaaagatagttagcaatggcaggcttttgaaaggtgatctgagaagcattaagtgagacccttttgggagagagatgagagctttaaactgaccccaccattacaaaagaaaccaaaattggttggagaaggggtgtcaagtaattaatctttg

SEQ ID NO: 12680 - DNA, 637 bp, Gossypium hirsutum
  misc_feature (613)..(613): n is a, c, g, or t
aaattctgttccggtactgcctggaatgctccatttcagtaacaaacattcagtttcgttttggagacggtaccattgtgttcctgtacaggccggccggaaaaaaattttaaattttttgttattgaatgatggattatgcattttattgtttatggaataatttgtggattgtatttgaaaagtttattgatgtgtattttatacttgagatttatttaattttattattccatatttgtaaatctttatatatatattttaaaaaataattataaatccaaaatgttctcttttttaaaagagagtttcatgtggaatttattcctttagatagtgggaaatttatattaacttgtttaactcgtgaaatgcttttttgggaatgtgaatgtgatagaaaattatactcactattgcgtttaaaaaaaaaactagtaagttgtccaacactttttcaactttttatttacgtgaaaaaagataatttttgaccgttgatcataagtttgtaggaaagtaactatatttgttcattcggttttaaaaaattataaaatgattattgaattatttgaaagttgtttatataaattgaaagtctggctagcanattgattatttgatgattggtatg

SEQ ID NO: 12681 - DNA, 389 bp, Gossypium hirsutum
attgacatgtaattcaggaggctggaggacccaaaattcccatgaaatatggaagggtggatgtctccggtcctaatgagtgtcctgaggagggcaggctacctggcaagtgaaccttataatggtgcatgattgttcatgtcaatttaaattgtggggagattcctaaattaagaaatgtaactggaaacttgaggcacataatccattggcaagttgggttgctaactagcttgaatgattggacaatgaattgaacgtgtcttgttttagtccatttaattctgaatttctgggaagtttactgcactgttgtgaagtggttatggttaacagattatttatctgtatctggaaaaggaagagatataactaggtgctccctaatc

SEQ ID NO: 12682 - DNA, 374 bp, Gossypium hirsutum
ttggttaatttatttttcttatattcttatctcaatctgtttttatagttttttgttccttaatttttctttgttttttctccctttctctgattctgagttgattgtttaaaaatataaaaagttaacatttgattgttgcccttatggatttcttctactcctttgggtaaaggggaagggcagctttatgggcttgggcttttacattttgggcaacatattcattccatttaaatcgatataccgaataatatatttatctttaaaattagaatcaatttatatcttaattcaattaacatcgacattgttatcagtataagtggaagtaaattcgagtgctttgaagctctttatactaagggttggga

SEQ ID NO: 12683 - DNA, 562 bp, Gossypium hirsutum
tttatttcatccatactaatccttacaagttttgaatgtatggtgaatcgccaaatttcaactcaaagaactccttgacctgctaattgccataacagtttgcaggtaagaatattataacaccgcaaaacttgtgtcatcaaatcttaataagcttggaacaatcaacagccagaagtaaaataatgaagcacagaacaatcctggaaaagaaaaacagaacatgagagtggagtaaccataaagatacaacacaaaatcatcctattcctttggcctacatcagggattccaaaacaaattatctgtttctttaacttgactcttagggtgtcccattgagggatgcattttgagctgtactagactgtcgaacgattccatatgccttaaccccttaagatgttcaactcttatcctcagagacacagcaagaatcagacagaaatgggttgagaagaagaagaagatgatgatgataacatcctcagggttgcgttgggaagcagcaagagcaaaaagaagatcatcatcttattctgcaatctacacttttatgggc

SEQ ID NO: 12684 - DNA, 652 bp, Gossypium hirsutum
tatttgtatgcatgcctgtgtgtgtgtatgtatgtaatatcattttgaaaatattttagagaagttttaagactttttgacttttatgagccaaacctatgttaggaaaggccattaatgatgtggtttaggggaaaattgaaataaatcaatagaattagggctataaaatgaggtagaaacaagttggaactctagaaagttataaggaatctccggtctttctttattaattcaaagatgataagaagaataataatgactatgaagcctactacttatttatataggttttctctcttacaagtaaagttattaattgcaaataaagtttcattcctagtcttggtttaaaccctaaagataactaatagccctagtcatctataaaatatctaatacttcactgaataaatttgaaataataaaaaaatatattataatatatctaaaagctcttgcttcattctctctgacttggattcttatttgttattcttgtctttttctcggccatatgcagctccgcattacaaaattttagttcatttcggtccttatgcaatggcttattaactgttacaaccttgttcccttttgcattgtcctctaacctagcctaaagagcagtgtcctttccttgtcatcatga

SEQ ID NO: 12685 - DNA, 497 bp, Gossypium hirsutum
tatctcatgtaaggctataaatatttagtccatttctgatgtagaaaaaacttttgccattttattgaatgaacttttgttcttgtgaggtttcttcctctcagatttcatgtgagtctcaagtgacttacctagcgtgctagtggcgttaacccgaactcttttgtttgaacttatcaccaaccttttggtgtgacgttcacctatccttctaccaaaccattattccaccttaaacaatataagaaccggggtgacactctttatagtgttgaatcgctcttgacatttatgttcactatccattcccattatctatctttatctatcttcatatcttaacaccgagtccattccctaataactcccatcctttatttctttataaccgaacttatagcatccatatctagcctaactttgaacctctttgaaaacttctactttcacttaacccaatacaccattgcttaagccgaacgatactttatcgacga

SEQ ID NO: 12686 - DNA, 462 bp, Gossypium hirsutum
tttttatttttcatttgtttcttccaccaaacctctttcttttattctgattggaaatatatcattgccaaccttcagcattattacttcttcgagtttatatgcttgctttattaatatcaaaatatccatcttctcaaagttgtttaccattgtcagattgtctcccattactattatctctccccataatcctgccactctcttaaacgtttggtacttccagtaatgaagtggaacccctgaaacttctatccaagctgccctttccgttactttaaatttctctgaccagggctctatattaatgaaaaattctttcagatatgcccagtctttttactttaatatctccaatagctcatcatcaggaacttcaattagaaagtatctatcctgaattttcttgactgttaattctccaaggcctattctagctattctttcagacaagctagttgt

SEQ ID NO: 12687 - DNA, 691 bp, Gossypium hirsutum
gattcgggttgaagaaaagtgaggaatggacctctaaattttccaattctataatatatgaaaaggacatttctaatatcaaattacgcacaatcagtagtagcaacaaagaaataagttgtccattcatctattaaaaaaataattaaaattcccagagaaccaaaataattaaaaaatctatctaaacacaaattatgcctgaaactaaaattcccagagaaaaacctaatgagaaccaagaaaaagacaaaaggaatggtcacactgatacaataacagtttgtgagtgctaaaacagtaacttgaattgggttttagcatatttagtaggctattttacctaaatagccccaaaaaatattttatttataaaaataacctaagtttaaaaacaataacgaaaataacctgaaatgaacagtaaaatcaggttgtggcctgtcaatggccgaaaccatctcatattttgaatccattattgcctaataattgtgtcagactaaaaaaatttattttttttggttctggcctgtcaatggccggaaccagtgtatttttttaagattatataatactgatatacgaagaagaaaaaaattttaaaaaaaattttgggtgctggcttgtcaatggtcggcacccctgtacacacaaaaaaaattcgagttttggtctgtcaatagccggt

SEQ ID NO: 12688 - DNA, 670 bp, Gossypium hirsutum
cgggtacattaacaatgatcagctattaatacattgttttcaggatagcctcattggggcggcgtctaaatggtataaccagttgagccaaaccaaaatcagcacttagagggatttggcgcaggcttttatgagacagtacagtcatgtatctgaaataatgcctgatagaatcactttgcagaacttggaaaagaaatcaaacgaaagttttagacagtatgcacagaggtggagagagattgcagttcaagttcagccaccacttttggaaaaggaaatgacgatgcttttcctcaatacattgaaggcgccgtttatcacgcacatgttaggaagtgcctcaaagagtttcgcggatataatcatgaatggcgaaatgattgaacatgctattaaaagtggaaaaatagatggtggggagaataaacaaaagtcagcttcaaagaaaagagaaggtgaagtaaataatgtgaacgcatacagtaaatcaattacagtgaatcaaccaaggaagatggctgctaatcaacaagactcatcgaaacaagagtcgggaatgaggaaaaatactgagaagccccagttcactcccattccaatgacatataaagagctgtattagaagttatttaatgcacatgttcttgctcctcgttacttgaaacct

SEQ ID NO: 12689 - DNA, 400 bp, Gossypium hirsutum
ctcgacagacacaggatgactgaaatatcctcttgattcaaattagaacatcaaaataaattcctcaagacaaggtcaccaaacctatgtataaccacagatgagctgcagtttcaagttgtgtaaagtctaacctccagttaatcgatgtaacaagaaaggatgtatttatgccaatatcatccttcacttatacttctaaccaataattaacatctcattcaatgaaacagcactaaattccaatgttttgtcaactcaacacctataaataatttcacatacatcattgaacacaaatgtagaaattttcgaaacgttgaatatccttaaaggaactatgctaaacgatgtgaaaattaaagatctagaatccatcacaggtctcagaggccgataa

SEQ ID NO: 12690 - DNA, 495 bp, Gossypium hirsutum
caattttatttctagagataacaaagaatgtggtaattgtgattctactgtttttatgtgtgttttactttcatcaatctaattgttttagtatagattattttgatttttaatatatactggtttgatttagagaggtaatagaatagggtgagagtggatgttgctaaatctagctggcacgctctgctttaccacccacttcgttccactatcaatataatatcttgaaaccattatcaatttcatggacattggatgtatccatttttgcctaccccaactcgatccatttctatttaatttacctttttaaacataaaataaggataaaatgatgatttcatatagtggagtaggatggagcgagataagtgattatcataaccgcttcaaaccaattatccaaaagaaaaaatccacatgcatccactttttttttttttaaaaccccccccttttaaaaaaaaagggtttgaaattcttggaaagaaa

SEQ ID NO: 12691 - DNA, 489 bp, Gossypium hirsutum
ataactttttttcttcttattttaacccccacctcttaaaggtgcttcactaattattttagattatccaattatttctctttttcataggtcactaattattaatttttttaatttaatcaccaattattaattttttctccctccctcaatttacaaataatttcaatttaatcctcaaagtttaacttccccttctgtcattgcctaaggtatactcattttttttatattgatatctaaattttattggtctcaaattgatacctaaagtatcgatttcttttatttttggcccattttgtaaactttagcaagtggaagaacaccacatgacatgttttaactaatgagaattacatttatttaaaaaaaaaccttaaaattctgatttgttattaggtttaacccacttaaccctagccattcctcactttgagttactacttctctaccctacatggactccattaaatgcctaagcatcaa

SEQ ID NO: 12692 - DNA, 479 bp, Gossypium hirsutum
ctctataattcgttacttagccctcataattttttttctttttaaatataaagagttaataattttaaggcataatgacaaattaagctcttaacgttaatatatttagttaatttgactcttatgttttttagataaattttatcattaatttttttaaaagagttgaatttaactattaatattttaaaaattgttagtcatcgtgatatgtatgataaatagtgtcatgtcaacataaaatacatgtagactgctatgttagttaccaaatcaatatcactaaaaaaattaatattttaatgatttaactctttttaaaatattaataggatgacattaaaatataaatatttcaataactccatttccctttccctccaacaggaaataaattatggactagatcgtaaatttaagtatactagagagatgaattcagaatttcacaagaaaaaaaaaacatgacccaaatggcc

SEQ ID NO: 12693 - DNA, 689 bp, Gossypium hirsutum
  misc_feature (654)..(655): n is a, c, g, or t
  misc_feature (657)..(658): n is a, c, g, or t
  misc_feature (662)..(664): n is a, c, g, or t
  misc_feature (667)..(669): n is a, c, g, or t
  misc_feature (675)..(676): n is a, c, g, or t
  misc_feature (684)..(686): n is a, c, g, or t
agttgggtttgaatcctaaagttatatcattcttgattcaaacggtaaatggaatgagaatatcgaggtcactaaattattagtaagtttacgctttgaccactcaactgtaaaaggttataaaatagttcgctgaactattcgaaggtttttatttaagtcactagactgttaaaatcgttgttgtatggtctcttctgttcgcaccggctgcaacaattgaaaactttccttctcattctcttttacagttaagtttttcttttcttttcttatgaaatagctttgaacgttatcaatctgtaaatcaaaatccaaatagcttttttctttgaccttcaacattgaccgtcaaatcgacttggatctaaggtatgttcttctacttgtcgatgggtattgacccattacaccggtcgtcgaatcgtagactttttttaattataaaaaagtaatttagataatttttttgaatagtttaatagccattttgtaatatttttaaagttaaataactaaaacgtaaacttactaataatttaatgatcagacgtaatttaccgatatattatttgttgtttggtagtagtaaatgggtaggaatttatggtaatgttaaaaggtaaaatgattcagcaataccgacagcatagnncnntttnnnttnnncccccnnctttttcnnnctc

SEQ ID NO: 12694 - DNA, 563 bp, Gossypium hirsutum
cttgcaagtatgtagcctatatgtattggtaacttatataattaacattacgtactatggtaacacatcacatctctttatcttcactagttaaaacactctcaatttcataaattcgaactcacatcaaaccttttaagacaatctttgtataaaaaaatttcatcatgaaaataatatcttcaattattcggcataaagttccattattaagacaaaaccctcaaaacaacaatttaaaatatttaaatatcaaaataggtataaaaaaatcacatcatgcattataggtaaagtaaaaataaaatcaagtggtgatgatgtagggcttagattccatagaagagatcctaatcatcgttcttatcttggcttcatcttgggatatcttttcctttttaataaaaaaatggtaattagtactttaatatagtaataattaaattttatatgataagattaaaagactaatggtgtaatcactgcctctgaccattgactgaaaagcacgtgcgctgcatcttttaattcaaatgttttcggtcgacgatttcggtgacaca

SEQ ID NO: 12695 - DNA, 569 bp, Gossypium hirsutum
  misc_feature (52)..(54): n is a, c, g, or t
  misc_feature (537)..(537): n is a, c, g, or t
  misc_feature (554)..(556): n is a, c, g, or t
tattgcgtggtagtgcattcatgtcctcctcctccataaactcatcggtgcnnntcccagagcgactccaaactctgggacactcatcgcgcgaactagaccgcctaatcggaagtgaatggtgccggggtcgtcattgttcgtcatcaccacctgtaaatgaaaagtagagcataattctaaagttagctctaaataagtgggttcggtaatagcgaagaaccgttcccatgggtctgtggacaggagggcgcggatggcatcagctagctggacttgctctacggcagcccaatcgatgcagcgacctgtagtgaggggtcgcgcgcgtagtatctgaaatagctcctcctgcgaagcttgcgaaaactcaaggaatgggtgccgaacttcggctgtagcacgtaccgaggaagaacccggtcccctacgtctctttgaggatgggaccgcggccttcttgcctctcgatgatgacataatgtacctgaaaatgtatgagcattgatatagtctttccaagatgtgtcaacattnaacgatatctagcgaannncgaaaaatttata

SEQ ID NO: 12696 - DNA, 625 bp, Gossypium hirsutum
atttcgagcttgctcgaaaaagagcaacctatcgagatcgttggacatttccatggctttggtttccggttaaatctttagtatgaattatctgtacggacaaatgttagagcgtatccaaatcaagactccgtgtctttggaaggagccctaaagattttgacagagtgaatctttctctactttagcatctgcaatattcttattttattttcctcctttaaaattgggctctttgagaatgggcttcttgttctaaatacaaccaccatcactatttacctggatctttattacaacccataattctttttgtttcttcccatctttgattgtgatgcaatagaagttacaataactaatttcacattcaccgctgttttttaatcttatcgaggtaaacccacataaattttattatatgaaaacttcaataaggttttgtttttcattacctttcaaaaacatttttgaaatcataagtaatatattttttaacattaatctcattgtaagttcttaacatatttgccctttttgatacaatgcctacaactaggcatagcccccaacccttaaataggaggataattcgcttcaacgtactcaaactcacatcctcctg

SEQ ID NO: 12697 - DNA, 570 bp, Gossypium hirsutum
ggaccttttctttttctgtatgtgcagatcaagtaattcagagatgtgtttgaaatcagaagtgagtaaaatcttggaacactgccactcaggaccaacaggaggacattatagtgggactaggacaacacataaaacgcttgaatctggtttttattggcccacactattcaaggatgcaagcaaatatgttatttcttgtgataaatgccagagaacaggtaatatttctaaacgtgatgaaatacctcaaacttatatgctctcatgtgaaatatttgatgtctaaggcattaattttataggcccattttctggctcatttggtaataaatacatcctagtagcgattgattatatgtcaaagtgggtaaaagctcaagctttacctatcaatgatgctagagtggtagttcgattttttaagaagctcttttctcgatttggaacaccgaaagcaattattagtgataggggtactcattttttgtaatgctcagtttgataaagttcttaagaagtatggagtgtaacatagaacaactaccccttatcacccttaaactaatg

SEQ ID NO: 12698 - DNA, 641 bp, Gossypium hirsutum
gccttggtcgacgaggacaacggagaaggaagaacggagcaaactagtcaagccacggaaaaacaccggatttgattcttgttccctatctctttaatttttgttgttgttatgatgaacatatctatgaatatttatgttgttggaatggttaatttaatcaatttagcttgaatttatttcgtgttaggttgattgcattttgttttctaaaattgttaaaattgtgtttatgttgttataggcctcggtaagatgcttgattaagtaaaatcatgactaagttattcttgcattacaattgtgaggtagctaatgaattaattatttaaacggattgaaattgtaattaatggacacagtacttaatcagtgcatgtttaatcatctaaggtagctgagggttaaattagcaacggtatctgacgatacatttaccttgcataacttgcaagattattgtgattaaattgtttcaaggtagggatactttgttacctcacgtagttttttatgtgcttattagatttaattaattgtttgaattgacacggggatatgtacaagagattatttcgatttaataagttgtatgtgcaataacatatttgcctattaaagatttgtttaatcggttgaat

SEQ ID NO: 12699 - DNA, 360 bp, Gossypium hirsutum
gtattctgaagaacaaactattgctgcgaccggctgcatcatttcacgaaaactgcaaagccgaactatttattcgttagaacattataaagcattggtttctcatgttccaacaacatgcctgcataaatataatgaaatggagaaagatatgctatgttctctttgaggaactcaaattttccaccattcaaaaagtgtcttttcctttgcatcttatctggtgattcaataatgcgttgaagtttggcattttgtgagggcatgcacatgggtttagaccaggtaatattagataaagttggattactcaacacgaaaaaggaaaaaatactatcaaatatacaagtacaatatgaa

SEQ ID NO: 12700 - DNA, 669 bp, Gossypium hirsutum
  misc_feature (447)..(453): n is a, c, g, or t
  misc_feature (456)..(464): n is a, c, g, or t
  misc_feature (490)..(490): n is a, c, g, or t
tcgtgatgactgtattcatgctgactttttaattgaagttaatgacgattagttactgtgttcaggttaccactctttgtaccaatggtaccaatcggtggaaactgaacattttccagatcctactggtcttcgagcacgtatagagcaatggacatttggcctttatccagcatgtatcaaatatcttatgtctgcatttgatgttcctgaggtaagaaacctctccttgtttgggaaatgtgataactttcgcgataaaagtaccatgaggcccttgtattaagagttagattgcattttgccccctctactcaaaaaatgggcaaaaatgggcaaattagtccctgtccgtttagatgaaagagcaaactgattcttttgttaaaaaatccatccatttctatggttaaaaaccggtacttgtatatcaaaataaggtactgnnnnnnngtnnnnnnnnnaatgttatcttttaagtttgaactcnatatacaacgtgattgttcattatacctaacatttattaaataaattatcatattcttgacagatttggttattgattaaataacatttgctaatctaaagcattagttccttatagtttattataaaataataaacaggattaagagcatttctagtaaatttaatggtaaacaaagt

SEQ ID NO: 12701 - DNA, 470 bp, Gossypium hirsutum
gggatcaatttgaagcacatacacactatccatcctttatttcagtagaagttttggttattttgatgttggttataaatggcatgtactatgagcttttatgttaacttgccaaaatgatgttgtttaagtttggttctagcttacttgtgtacatgtctttggttttggcttgtatatgttcatttataaatgttttagtcatttgacatatgccttttgaaagtgcataagttatggtagaattgaatgtgtatggaatagatgtattgatatgttggcatgtgtttaaggtaagaatttgacctctttgatgtgaataagattggtgtatggtatgtggttccaatgaaggcatattggttaggcacctaggttgaatgttttggtatgttttaaatttgtttgaatgtgttttgatggcatgggaatggttgattttggtttggatttggcaactaggaaatgag

SEQ ID NO: 12702 - DNA, 597 bp, Gossypium hirsutum
tctaacactcaccagtttagacttctcacttttatacctaaaatctaaatctctcccctctaagttttccctttgaaagcttagactctaatcaagtcacacacttgattattacaatttgatgcactcacaaaaatgtttctcattgaacaaaataaagtgtccttaatcagtacaaaacctatgcatgtatccataaaatataagcgaacaaatcttgctaacataccatatcttttacaatcaagtatcccatcaaattagcaagataacatgcacaaataatatctactaaacaacatagaattatgcttgagtcattggatatactttcttctatagcttgattcaatccgatcctatccatgagttaagggatggtgattgctttgatccaatctaaacaaatatccaagatctcttgttaagtgaagtttggatatccaagatgggctagtagatgtcctaaataactaaggagattgcaactttaagtaattttattgtcaaaacttgtcaactcaaacaagacaatttttttgagtagacagtgccacttctagttggcactagttcaagtattggtgcagacacacc

SEQ ID NO: 12703 - DNA, 613 bp, Gossypium hirsutum
gctttctttcgaacttaaataatttaaattcaacatttcaactctaaaataaataaaaatttgtatttttggctaatccaaaatttaataacgtaatttaattctttttaatgtaaaatttattatttttttaaaattttataattatatctcaatctcttaaataaatttattgactacactcataatgttacgaattaaatgaatattaattcaattataaaaaattaattttaaattaaataaattagatttttaaaagaataatgattgactttttgttgagatttgattcttaatgttagtatagatattgtagatattttatataaattttctcttatataatctagttttagttgttttttaacgatcataatctaattttagttgaatattttaacataaatcatttgtataagtgattcaatcatttctcctaaaaaaaattaagaagtctcatctatctattattaatctttaattggttgctaatttcttaaaattttaaaaatttaaaaaataatctcaatcaataaaatttcggtataattatttaaaacagactttaaaatttttaaaatacagatttgaatttcaccatttataatta

SEQ ID NO: 12704 - DNA, 637 bp, Gossypium hirsutum
gggccttcttatgctatgccactattatccagggtgtcctgagccagaattggctttgggaacaagtaagcatgcagacaatgatttcttcactgtgctgcttcaagatcatattggtggtctccaagtacttcatgaagacaaatggattaatgtgccttgttctcctggggctctagtgattaacatgggtgatcttttacacgttaatccgttgtcactcccgactctttattttccttaaagcactcatgtctaaaacttatgtcttgaatgctagtgaatatttgggaaatttcaatttattttttcagcttatttcgaacgatgctttcgtaagcgtggagcacagagtgctggcaaactcggtcggaccgagaatttcagtttcagaacttcggaccccagactgtacggtcctatcaaggaactgttatcagaagagaatccaccaaagtacagggaaacaaaccacgtgcatgtggacaatgtccccacagttttttatgatagtttctagcagctagaacataggaagtaaaccaaatttaaacaagcttagttcaatgtaagcaacaggtaataaaacaggcaacaaaagtaatcattatatccagggattagtagaaaccaacgt

SEQ ID NO: 12705 - DNA, 421 bp, Gossypium hirsutum
aataaattctagtttcggcaaaggtaggttcgctagtgccatggtgctttgggccgaatgtggtaaggggttagttatagttcatttttagtagttagattaacgtattaataatctaattgtaggcagttggtgtgtggatctcgtcagcatatcgtcacaaatcaggtgtgtaactgacaccctctcataaactagatcggcaaaagccgaaaagccgaaatgccgaaatgccgaaaagctggtattttgggggcttgcgagtgtacgaatgcttgtaagaaagattgattagcgtatttggtaaattcaagtgttaagactgtagaatgcgatattttgtgcattatgacgttttgggcttaatgggcctaaactgggccaatgggccaacagacccactttggttaaagacgaaata

SEQ ID NO: 12706 - DNA, 668 bp, Gossypium hirsutum
caaactcatcgaaaggtagaagcatcaagtcagcccgaaaacaataactccggatcatcagagaacaattcttacaaattttatcaactaaaacaaacttgcctaaggggttcgatactttgattacaaactctatagactcaacatgtaaactctttttaaacactaaatttatacagatatataaatgggttgatccaggatctatcaacgcaactatatcagtattaaaaagagaaaaagtactggtaataacatttcgtgatgatgcctcctctcgtgcacgtatagcataagccctggtaggtgctcgtgccctagatctcacagtcgaatctctcgtagcacctcgattgccactcacatttttggtgtttcgaggcggtctccctctagtagccaagttacttgttttcactggtttttctctttcaactatgaacttttctagacaatcacagagaaagtgatcaaaagatccacatttaaagcaagctatcctcactaatccgcattcaccgtaatgtcacttattgcaatgtttacatttaaatccaacatttctaacacttcccacactggccacagatgttgcttgaggttttaaacttgattgtctcgcatttctatctctaatagaaattccctcagaggctatataatgagga

SEQ ID NO: 12707 - DNA, 590 bp, Gossypium hirsutum
tagattgcgccactttagtcttattttatttttttaatattatattgattaaaaagataaaaaaaatacataatatataaataattcaaaaaattatttaaaaataaaattttataaaaatagaaaataaatataaatttaaaacagtgataataatatataaaaattgaaaattttataaaaaaataaaaaagtattaagatattagaaattaaaatttactaaattaattgtaaatataaattaaaattaaaaaaaataacactattacctttaagtattaaaatatataattttcacaaataaaaatataaacaacacaaatataacattataaatgtatcgaattcgagtactaatccataaaaaatacaaatttaaacacattcctctctttatgttcacaaaacaaaatgaatttctttttcaataaaatcgttttttatttatttataaatcttgtacaatgtttataggatgttaagtgatcagtctttaatttgttttgcgataaatgagcagaccatgcatttaatttaagctactacagtacttggatttttggactgccctgcccagtcccacatgct

SEQ ID NO: 12708 - DNA, 646 bp, Gossypium hirsutum
aggttgaattccttgctcctctattagtacccactgcatcactcccatcatctatttctccagtacgttctttgtccctacctccggctcttcttgaaccttatgttgatccaccaatggcacaaacctacctgctaacacttcagttccccgcgcttcccttattggttccatcacttatactccccctttgggggtagtccaaaccttcttcccttggcgaaatcatctccacacaggcagtatcctttttttttccttttcttgtccaacaatgtcaggactaggagctgtcctcaaaattgaaggagttaacctacccttcttcctcttcttctagagtcataagcctaattttagtgagttggtgggttcctatttcatgctatcaggagagaataccctcacaaactgggctctcttacaagcttgtgttgaaactgaggccaaataggtcgagtcagaaagggcccttctctctagtaagcaatctcttgccttactctgctagtcacataaggcttttattgagcagattagtgagcttactaaatctatctccatctgggaaaccaagtaccaatccttagggacaagagcaagggagctgaagcaaagagttccccaattggagacccgtgagcaa

SEQ ID NO: 12709 - DNA, 609 bp, Gossypium hirsutum
tcccttccaaagtgaacaaagacatagagcaatgttcataaaccatatagatcatgccacgatctccttctgctcttttaacaaatgggtaatcaatcaaatttggtacctaaatatattaatctacatataaatattgatacctaaataaggggatttatggtaactattctctcttgttcttttatttaaaaaaaaaaaagaaaaaaccctaactactaccataatttgtgatgcatacgcataccacatgtgcagcatacttgtttattattccacaataatacataatctaaataatctttctttagtgacgtcttcaataattttgcaattttttaagtaaaattttaaaatgcaacttccatgcactttcttcgtcttcttctatctctatactttgattgatggactaagctctatcttcgacttgttgtcttaatcctaaaacgttttgaatacaagttggatcgacatttttgtccccttctccgatgaatacaaattggatcgacatttttgtccccttctccgacacatgttttacctgatcgaaacaatcgtttttttctgtcttcaattttactcgcttagcaacaacattaatcc

SEQ ID NO: 12710 - DNA, 597 bp, Gossypium hirsutum
taagtgctcctcgtacagggccgatgtcacgaaaccctagtgtctatatcacgacatcaaaggcagtatgctcaaattcaggatggctttatgggtgtgtcgcgacatcccttgtctttttcgcgacatcgaatgtagtgtcaaaattcttgcattatgctctctatgttgccacatcaaactctctgtgttgcaacacaatgaccagtattgagttttattccctttgatggtcttctgcacactcactaagtacattagcttacctttaggcctcattcggcccctaaggtccataaaagactcaaattacactttttattaaattcaaactaaactatgaaaacataattggaatataatgaaaattcttgtattcaactcctaaaatgcaaaaactagtttaatctactacaccgaattacagcagatcaaactcccccacacttaattcattgcttgtcctcaagtaaagcaaaataaaaacgaaaagcaaacgacgacccttgagcaagtatagtatagagataggattggcagtacataactagacgttttatgttcacacataatccttgcatgctatatgactgactt

SEQ ID NO: 12711 - DNA, 664 bp, Gossypium hirsutum
catgagcttctattcagccttcaggcttctgaaaatgatgtactcttatccgtaagttgttctccgatttaggaagatttggtaagtgacttatgaaattaaaaatttaaaagacatattgtttgttattggtattgaactgaaataagtgtattcattgattagagttgtgattggcaaggagtttacattaaatgaattttatttagttgatgtgttatagctggttcggtaagatttaagtttaacccatcgaacttactaagcttcattaagcttacttgtgttgtttaatgtccttatagattctcgtaaggtcgaaaggtcagatcaacacatcaagtcacactatctagcctatttcggtagtttttgtccgttcaagacaatttatatggcatgtatagggtttttgtggatttaattaaagtttgtcttgtgtaaatattaataattatagttttgcatttatatatgttgggttggaaatgagacatattgatgatgttggtgtgaatgatatatgtgtttgtgtatatttcagttatggtgaacttaggtagaattgttagatggattaaataagtaagtttaggtattttggtatatgtgatgatacactgtgcttaaaacatgattttggcttactatgattggcttggta

SEQ ID NO: 12712 - DNA, 468 bp, Gossypium hirsutum
tcaccatccatggaatgattaaattaagggtctttaggctttttaaaaatttaaaaatagccccaacaagtttgtcaagtgatcgtttaactccttccttgaaacataccttgtttttgctatttttagcaaagtcatcctactcactcctcttctcaaggtggtcggccataggaatggagattggttgttatttttagcaaatgcaagctgccccatttcatgtataaatacccaccatcaccgcctcatttcatcatccctcattcatccatctttctctcttttctctattttcttttctttcccatttttccatttttcaagtgagttgtgcaaggatttgatagcagccctttcagccatttttggcttaattgttatggcaaggagtgaagcacaaaggaggagcaaggaagttatgccacaaagaaccacatgcaacgactatgcatttctttcccttta

SEQ ID NO: 12713 - DNA, 375 bp, Gossypium hirsutum
gagtcgggtacgaaggctgtggttgccgatgtttggccctttcgatggttacttgtcggccctttcactcttgcaggtctggagtttgaccaattcgctttctttttgtggtgaaattggatttgatattttttaattgtgtttgtggtggttgatatgatttcactatcattttatacaaactattgagattcttgttacttttattggaaaatgagtgcttctggtgccaaaagctgatagaactcacaaaaaagtcgaatcttgattggcttttgggaaaaaatgagctgtggttccgtttatgttttggcaatttaaagttgtttttaaggattatattggtctttatggaaattggaagcatgaattatg

SEQ ID NO: 12714 - DNA, 372 bp, Gossypium hirsutum
aggtgtgagttagaatggatgcatttatgtatatttttggagtaattcttagatgatccttaacaaggatgctcttaatttttggagggaaatttctcatgtgaaacaacttcataccaattataaaaacatcagacatatatggcaattatgatgatatgaatttataacataaaattaatttgttattaacctttaattttatagatgataaattgataatatataaattgtcacggttgtaaattaatcatcacaaaatattttcttccattaggatttgaaggataattttaatattttttataaaaataaaatatattcttataaaaaattttcactataaaggcatcaaccatagttataaaatgc

SEQ ID NO: 12715 - DNA, 527 bp, Gossypium hirsutum
cttccgtagaagccaaactcagccacgctttagttggagtaaaatttggcttggaatctgaacgcattaaaggatttgttgcatccaaaggggccttagagttatttgttccttattttagtaggattttaggaatttttaatttaattttcttagattttaaaaattttatttcaataatgttttaagttaattatatatttatagtgttaaatcggagtagttttcgatgtgtttttatctaatataggaccaacaaagcatgagaaataatagcttgacataagtagatttctattccaacagaaaatgtccccgctccaacaaaagcaaatagacaacttttcactccaatggaaagatttctcgttggagcaatgcatatacttgatagtttttaaaagttatgatttttagagattataaaagaagaaaaaaaaaacaaaaaggagagaagagaaaaaagaggaggaagaacccaagctttcatgcatcaagaattgacagatggattccaacaaaaaaaa

SEQ ID NO: 12716 - DNA, 394 bp, Gossypium hirsutum
cagtgaaacgacaagcaataaacttgaattttttttaaggaagaaagaagaagaagaaatgaaccattttcttccaaccaggaggagcagtgagttgtaagcaaacaacatcatctttggcactgtccatttccttctccttctccaccgcgctcgccctttccacctaccaaattacccactcaaaattttataccaaattttacttatttatccatctaatccacaaaatttatgctaatgtgtctacgggccgggccagattctactggactccaaatccacaacttttctattattttttcatttttattataattttaaatgtaaatcatgtaatattatattatagaaataaaatataaaattggaatacaggttggccaagctccac

SEQ ID NO: 12717 - DNA, 630 bp, Gossypium hirsutum
gtcaggtatcattttctaattctattgaagttttgttaaaggaatatatggccaagaatgatgttgtaattcagggtcaggctgtatcactccgagcacttaaaaatcaagtggggcaaataatgaatgctttaaattcaaggccacaaggagcattgtcaagtgatattgagaattcaggagcacaaggcaaggagtagtgcaaggctatcacccttagaagaggtacttagttgagtgatgttattcatgatgccgcagtaggagaggataatgcaagtaacaaccaggtaaagatcccaaaaccatctgaaaaacatatagcatctaaaaatgataagcaaaagaatgttaaagtagaaccagatcaggcagccaatagaattgccataacaaaaatcaataactagaaggacgattgcctctaccttttccacaacgattctataaatccaaacatgatgctcaatttaaaagacttttagatgttttgaaccaactctacatcaacataccattagttgaagatttggagcaaatgcctaattatgtgaaatttatgaaagacatatagtcaaagaagcacagattgggagaatttgagactattgctctcacggaaaggtgcac

SEQ ID NO: 12718 - DNA, 605 bp, Gossypium hirsutum
  misc_feature (85)..(85): n is a, c, g, or t
  misc_feature (587)..(591): n is a, c, g, or t
acgaattccggtttaggccaaataatatagtgtacggtttgggggtttagtacatttttaatttctatgtttattccatcttcantcaagcgtacgacccataataatttaggagggtgatggcattttgttgctcaactttatttgatattttggtttccaacttcaaatctaaccctaaatttatacaactataaactgcagtttaataaatacttagaaagttatttttggatcattccaatattaaatacaaacattgggtgaaaattccaacctatatatacacaattatgaggcttaagttttttactaccgtttggaattgaaataatttttatttgttagtcaaagatgatcgcaacaaatttgttaattttcttatctctacaaaatctattttaatcaacaataacccaatactactcttgatttaaaagatgccttctactcctccagaccaaatgaaccctaaatgttttaatatctttgaatcttgatgcataaaagggtgtaaatattgagaaataaaataatcattcaagggagaaaggaaatttttgacatctcatatgatttggtattgnnnnngcatatctccctct

SEQ ID NO: 12719 - DNA, 523 bp, Gossypium hirsutum
tgtttttaattcttttttcgtcttttttgtctatggtagccctgatagaactaagaggaagtctctttgaattgacttaatggaagttgtacctcccgatccttatccttggcttatcttgggggacttcaacgctatcatttctcctaaggataaaaaaagtgatagatcaacgggtaagaggtgtaagttttttggtgattttgttaacacttgtaacttgcaggatcttggatttataggttcagcctttacttggtagagaggtaataagcatgaacgaatagattgagctttaacgtctgattcttggatttcatctttcccgcgtactttagtgtatcatatttcgcgtaataaatcggatcacagacctattcttattaacactaaccctagtcttagccttccgaaagggagaccttttcgttttcttgcaggttagacaaggcataaaaattttaaagaattagtcactacgaaatggaggtttaacgggaatatggctcaatggcttattgag

SEQ ID NO: 12720 - DNA, 503 bp, Gossypium hirsutum
acattattcagggcgaatctgaaagggggaaggcaagggccttggcccccagatgaaaaatttctatttaagtccctataagatgatcaaattaaaatttaatttatgataaaattacactttggcccccaaaaagaacataatgttaatcccttcaaaaatgaaaataataaattaatacattataaattttttttaatctctcaaaaatttattattcaattctaatcccttctaaaattttctagattcgcccctaactctattgtggattggatggctattttagataggttgcccaccaaagagagattaagtacaatgggactgaatttaaggtaggctgcaatatttgtagcaaggacaagattgtaggaatcatcttttctttgagcgtgattactcaaagaaagtagtgtaggaataaattctaaagctatgtaaaatatgaagatttattaggaattaggatggagagtttcaataggcactcaacaatttgg

SEQ ID NO: 12721 - DNA, 645 bp, Gossypium hirsutum
  misc_feature (640)..(642): n is a, c, g, or t
caatcagtcgtgagctaattctcctgtctcgtattgtcttaataatcttatttacgagtttattatcttcccgagaaatatgttgaaaactctagtgtcttaaaaattccaatagcttataaattttcctgactaaaacggaattggaaccctcgagtaacctatcccgaatgatattaactgttttaaaactgtgagtttgaattaaaaatttctcaataacttaaattctatttttttgaaaaattatatttgtttcgatacaattaattattcttgacttttaagattataaagtttttattcttgacttttagcttaaaattttaattttttaaagttattacaacaattttaatacaattaattattagaaatgcggaatcaaattagtaactcaactctaattaactagaaaaaaaatttatatattggtattggtattggcattgttgtcaatgtaggaggacgtaagttcgaatgcactcaaacgcattatccatctattcattttatctttgatcttttataaatatacatttttcttaatttttgacatcttaaaatattcatgaatttttaatttttattaaattattcatttaaattttttaaagtgtttgaatcatctgattatacnnngtg

SEQ ID NO: 12722 - DNA, 562 bp, Gossypium hirsutum
catccctcgcaacgtcattcctggcaatgtagaaagtaattactattactatggggtgtcaaacatttaagggaattatgctttccataatttgtcaaacgttagataattactcttaccttagtatttttctccagtttttgtgggtgttttgatgttaataactcattcgcagttaatggtagttaattaatttggaaattcacaaccttcagtaattactattctatattgttgagtcataacctaaaaatggaccttggtccaatttaaattttgactctttatttatttttttaataatcaagataaagtcttttttttatctaaaattagtgatatatatcgaaaatataaaattttatgaaggagtaggttttgaaaaagatggatagtgttttaaaacataattatttcttttttcaatgtatttttttaaagaaaaaagttacttatgtatttgtacaagttagcaaaaacaaattcgtgtaattttcgtcaatatcatttaaaaaaagtcaaataattaaaattaaggggtttctatgagtatcccactaag

SEQ ID NO: 12723 - DNA, 614 bp, Gossypium hirsutum
ttttcatctcattttttattcctaatttttttcaactcctaatttacattattttgggtgttttcagaatgtttataaacaattatcattcacacgtaatacacatgatatcaagtacatgggtaaaaatgttatgaaactcttttgtactaagagttaaattgtattttatcctctttatttaataaatgaataagccggtttttgcacgttacatcaaagaacaaattaattcttttgttaaaaattagtcattgtacgtcgaggtatacgtgacatgtcatatgccaaaatctaactattccgtcaaccactccagtttttaacaaaaatgattaatttactctcttttttaatgtacttgaaataatttacctattttttaaatagaaaagataaaatttaatttgccaatgcatatatacatgggacaaacacaaaattaagttcaaattagtttggaatgattcaaggaaatggtacattttcataactaatttgatcatacgagacaagtgagggcaagtaatttccaaagctggtaatggaggcaggcagcctaaaatttgctcataacctcaaagtataaacgaggttgaagccaaatgtacatt

SEQ ID NO: 12724 - DNA, 627 bp, Gossypium hirsutum
  misc_feature (341)..(341): n is a, c, g, or t
  misc_feature (345)..(345): n is a, c, g, or t
  misc_feature (363)..(363): n is a, c, g, or t
  misc_feature (376)..(376): n is a, c, g, or t
  misc_feature (446)..(446): n is a, c, g, or t
  misc_feature (587)..(587): n is a, c, g, or t
  misc_feature (589)..(590): n is a, c, g, or t
  misc_feature (618)..(620): n is a, c, g, or t
agaaagtagtggagtaaattgcaaaattacgatattttgcaccgaggtaagtaaacatgtgaaataatgcattattttgatattatttgatatgtgttgagatttatttgaacatagaataaatatttggctaggatactaaaaatgtggctaagtggggaagggtggtaaagtgttgaaaaacatggtttccggttgaacactcggaataggctggattacattgaataaaaagggggttgctaagtgctgattcccccaaggggttgctgagtgctgattcccctattcattggtggttgctaagtgctgattccaccatattttaaatgtgaaggggnttgntaagtgctgattcccccnaggggttgctaantgctgattccccgactcattggtggttgctaagtgctgattccaccgtatcttaaatgtgaagggggttnctatgtgctgattcccccgaggggttgctaagtgctgattccccgaatcattggtggttgctaagtgctgaaccccccgtatcttaaatgtgaaaggggtcgctaagtgctgattccccgactcattggtggttgctaagngnngaatccaccgataacggttaacattccnnngtgttca

SEQ ID NO: 12725 - DNA, 577 bp, Gossypium hirsutum
  misc_feature (526)..(527): n is a, c, g, or t
  misc_feature (541)..(547): n is a, c, g, or t
aaggatctatacatatatggcatgacttctaattatctctggttaatttataatgaatttccaaagtcagaacaggggatccagaaatcgctctggccctgtttcacgaaaacttaaatatctcttaaaatacggctcatatgatcgtttcgttacttccatatgaaaatagattcatcaaggttcgattacataatttattcactatttaattccattcctactatttttagtgatttttcaaatccacatcactgctgctgtcagcatctgtttttaaggtaaactttacctatttcatggttttcctggaatcaccaaccctttgtcatacatagcaccaaaatggacctggattaacctttccaagggtaaatctttgccaaaattttcctacccccccaagaaccacatacaaaaaaaataaaaaggtatgctcgaacaaaaaataaaacattttttcttgggggtcccaatttatataaaacccaaggggacgtgaccaaaaacaaaaggggggggcctnnatttgccttttttnnnnnnnaaccaaaaaagtaccaaaagggttttgatt

SEQ ID NO: 12726 - DNA, 612 bp, Gossypium hirsutum
cgtacataatggtgtcgtcgatttgtaccagtggtttattgtaccagaatgtctgtcagcattgcttgaaggtccagaagaaacgatggaacactcagcatccatggaccaaccgatcgttgtagtatgtaggtataatttccagatcgattacgcaatctggaacgtactacttcagtaactgacaccattgccacaaaatcattgtacgacgtgccccgcctattatgcatcttatttaatgccttctgttttgcgatacatgccttgcggtataacaatgtataatcgtactggctacgaatatttgcagttaaaactagaacaacaatcctggaacaacacgagtacgttaaaattagggattcaatatcccaaatataatacaagcattgtacgatgagtacaggcaacacatgtatgcgaagcggtatattttttatggtccacaatcctgtctttttttttacagaagccatgacttttcacgcacatttattgtttcgcattgcgcatttcacctcgaatttgttcgattaagatttaacaacatggaagtttaccctgctctttatgctgtattgcttcactactgtgaccaaaccatcttta

SEQ ID NO: 12727 - DNA, 660 bp, Gossypium hirsutum
tcagacttgaacattcaaggtctgaccatttttaagtttataatattttatattatgttatttttatatattatgtaatatagaacatattaaaaaataaacctacactaaatagataatactactctaatgtaaacattaaaataatgttaggatgattatataaaaaaaattcaaaaaataaaaaatgtataaaattattaaatattaaaataaaataaatatccagatacttgaggatggagtggatggaagcgtatggaaataataatttgaaaaacaataacttaaatttttgaaagctagaaaatttcggagaaacaaatttctttttatttctatattgaatgtttgaagtcgtgccttttattacaaaattgatagttttttagagagaacttttgcatttttacaacatctttgtttgggaaattttatcccttttatcattatcaaaattacataattgctactttttagagaatatagtttctgcttacaattttttttccttttttacataaaatcttacagttaaattttgtaattttttttgcaatgaatatttactgttcattgcaaagaatcctctttgttcattgaaaagaatcttcactgttcattggaaggaatcttcattgttcatcgcagagaatttca

SEQ ID NO: 12728 - DNA, 635 bp, Gossypium hirsutum
acaacgatgaacaaccactactactactagtctaatttctgtccctatctcttaattatttaattaattaactaactatttatttatttatttattttgccttaagtaattccttgctgtgcattcacataaaacacacaccggatttggttcaacacctcccacgcgccatggattacgtgggttcctacactaactttcgaaataaaaataaggtaaaccaggttagtaattacccgattattactaatttttttcatctaactaagaaaaattataaaacagttatttaattattagttttttttggttattcaactattaaaaattataaaataatcactcaattattcaattttatctttcttgatcgcccaactattttagttttcgggtgtttttatttttagaaaagacaaatttgaatagttgagtgattattttgtaatttttttatagtctgatgataaaaaataaatttactaataattaaatgatcattttgtaacttttcatggttaggtgattactaatgtattttacctattaaaatatcggcactcttggtaaaggctaagaccttaggccttgctgcacacatgttcaagtttcatcacatgtgtgggtctccatct

SEQ ID NO: 12729 - DNA, 857 bp, Gossypium hirsutum
  misc_feature (307)..(307): n is a, c, g, or t
  misc_feature (408)..(408): n is a, c, g, or t
  misc_feature (468)..(468): n is a, c, g, or t
  misc_feature (567)..(567): n is a, c, g, or t
  misc_feature (742)..(742): n is a, c, g, or t
  misc_feature (761)..(761): n is a, c, g, or t
tttttttcaaatgtacgatcttgatagtgtataaaataaatactaaaatcaatataataatatacgcgtcaaattctagaatccaagaaaggagaaaataaaaaggaaaaagaggtgtgaaaataggaaagtcgccattgaagaccgcgttgatttactaataagtaacaagcctttttggagtacaacgatgaacaaccactactactactagtctaatttctgtccctatctcttaattatttaattaattaactaactatttatttatttatttattttgccttaagtaattccttgctgtgcnttcacataaaacacacaccggatttggttcaacacctcccacgcgccatggattacgtgggttcctacactaactttcgaaataaaaataaggtaaaccangttagtaattacccgattattactaatttttttcatctaactaagaaaaattataaaacngttatttaattattagttttttttggttattcaactattaaaaattataaaataatcactcaattattcaattttatctttcttgatcgcccaactatnttagttttcgggtgtttttatttttagaaaagacaaatttgaatagttgagtgattattttgtaatttttttatagtctgatgataaaaaataaatttactaataattaaatgatcattttgtaacttttcatggttaggtgactactaatgtattttacctattaaaatatcgncactcttggtaaaggctangaccttaggccttgctgcacacatgttcaagtttcatcacatgtgtgggtctccatctctatcatgtgcaaatgtgcgagtgtggattttagtctg

SEQ ID NO: 12730 - DNA, 649 bp, Gossypium hirsutum
tgtattccggcacgcacactaacttaggaatgatgatcgattcttgagtaggtatataatcatactgattttcttacattttgatatattctgaccagtatctcggccaatccgtattcaatagccgtaagtcgactttgtgctcatcatcgagcacctcaagttccacaaaaatcgattgccaaaatccaaattgccgcaatactctatttgactggggcatctccataatagtatagttgaccaatgggaccttcacatgccaaatgtttagattttgaaaaaattcatccagaattactacccgaattgtcagatcctcttatggtgtccattgaaactatatgaacataataaaaatattagttatatataatactaaatactaaatactaaatactaaatacgaaacaattattttattatgtatatatattttatttaatacttacttgtgcttccgattgttagtctaatagaattcgtatatcttcaaaagaggtgggtattccaacataactcgcccaatggttccacctaattaaataaatttttagcatacaattatattataaatctacgtaataattgtaaaatctaatataaaatttacctcgttatcagtgggaatatatatggggtggatcaa

SEQ ID NO: 12731 - DNA, 467 bp, Gossypium hirsutum
  misc_feature (371)..(376): n is a, c, g, or t
attttggctctgcgtgaggatgtttcttgactttgatcgttatatttgaaaggtgttattatgagaatcggtaatcaacatttctagcaatcgtttacttttggtcattcggatgtttctgtttcaggattattatttgcacactgtgtttttattatttctcacttttaactttttactttttcattagattcgtaggaatgctaataaggctactcatatttcgacacgaatagctttaataaaagcaaatcacatgaattgtattacttgttcttcttctattgtcgataatttgatattgtcaatggtaagagattgactaaaatgaatgtgaatgagagttcgacttggatgtattggacaaactnnnnnntcccctgttatttccaaatcagaaatttttagtgttcgttgccctttccagcactctagctctttcccatccaattcccacatgcaaaata

SEQ ID NO: 12732 - DNA, 652 bp, Gossypium hirsutum
aagcattatcttaaacattattagtatttgaaggttcgttgttgtcatcatctttattgtgatcaccactgttatcatcctaaatatcaacaacattggtggcttgagcatagtcggcccctgaaaaagaggtaccaagaactggtatggatagagaagaatttttaacgttgttaatcactaacctcaaattttaaattcaagtgtaagaatgaactaaagtagattaaattccaaatataatattataatcacttgaatagtaatataaattattatttaatgtaaatgttattttttatttataattttattgatgactgtttaaatttaacttttacatattttagtttcagtgtgaaattacttaattctttttatacaaatgttctcatccggatctaaacttaatcttatttggatcaaggtggtattcaagtaaagttctctgaacgatatctatttcaagatttgaacttggtccaaatatttgggacaaaaaatccactttcactttttccaattacttattgatgaaagtacctaatcttacgtagaggtgttaatggattgagtctaatcatgatattaatactctttatacttgcttaagctcggctcgaaatatagacctgaaatttgctcaagctca

SEQ ID NO: 12733 - DNA, 535 bp, Gossypium hirsutum
gtttctttatttacaatttcttacttaagtaattaatttctaagcacagtgttcgccataagcaatagcatgaaatattcaaaactgaacaaactcatatagggttcgccaaatctgctgtgaagtgacagagttgacaaactatgctaagttcgaacccctacaattggcgaactactatctgcaaacccttaataacctttttgataaaatatgatccgcagaataggagagacccaacaaatcgtgttcgtggaaactaaacacatagaggtaattcgcgagacctacctttgtaaaaagaaacttaccccatgaaaggcttagaatgtgcaagctatgcaggggtgcgaaccccaatttcagatagatgaactgttgtgattccacaaggtacattgttttgcaaaacttagggttcgcatgttcttaattcctttctttaaatatttatgacttcaagaaaaaaattaagtccttgcaagtgaagtaggtttgcatgttattgccgttgcacatcatgaagcaagcaaat

SEQ ID NO: 12734 - DNA, 672 bp, Gossypium hirsutum
attgaaattaggcaataaacacagaatttagtagcatcatgtccccaaatatatcaaaataaagcacataaatatgtcaatttggcacaacatcatgttaggtgtgtcaataaaatttactgtttgaaatctcgcatagttaaaacttaaacataaaatgtcattaatattctcttaacaattaggttcttgtccattttcatttttattaattaaaactaaaaaatatttttttttaaataaattgaatacttgatacatctactagtataaaaattgcaagtcaaatattcaaacaagaacaagaaaaattatttggaacaagtggaacctgatgtattttgacaactaatttttttttaaaagaaaattggtttttgggtatttgtgaagtcagtttcacgattcatattttaaaaagaaatatttgttgtgccgtgggagttcagttaaacgttattatttagtagtaattaaaaatctagttcattcggtttcgataatttttggactatttttaaactttgaattttaacttgttttatttcctgtctttaattattttgatgtatttcttatgatattcattgtatatgcaaaaccaaggtttccaataacaaatcgcattttacaaaatcaaactacattaaaattccgccgcaaacttaaaaa

SEQ ID NO: 12735 - DNA, 450 bp, Gossypium hirsutum
aagttaccgcgtaagaaaggactacagccgtggggtccactctccagggcattaaacattagcaagaaaaaggtaaaaaagccactttcattcaaatttcatattaatttcatgcagtacagaaagaaacttgtaagttgaatattaaattttcaaatcaagtcctcgtattaaaaattagtttttttaattaaaaagtaattaaattaatttttatgccttaaataataaaaataaattgatatttttattaattttagaatttaacttattccaaacataaacaatgaatgtatcagtagttttaattttaattttaaattattaaaatgttaaaatttaattggaattcatataaattgaaatttaatttaaatcagaggatataaatttcctgtaataaaaaataggagtagatttcaaaatttcaaagagtgtaaggcctgaatg

SEQ ID NO: 12736 - DNA, 559 bp, Gossypium hirsutum
  misc_feature (480)..(481): n is a, c, g, or t
  misc_feature (497)..(500): n is a, c, g, or t
  misc_feature (530)..(532): n is a, c, g, or t
  misc_feature (536)..(536): n is a, c, g, or t
  misc_feature (539)..(540): n is a, c, g, or t
  misc_feature (556)..(556): n is a, c, g, or t
agatattggaatttaagcgggaccgcttgtgacccctccaatctttcctaggaatttattttgacataatttcctaagaaattattccctaaatggaaaaataaatttttattttttgaaataaaagggtcaattttgatccacgttttaatttgcaactcaattttaaattttcattaagtctaaggacttaattgaattatttctaaaatttgattgctctttttgtaaataataaaaactaggtgcttctccttataaatattttcaaaaagcatctagaataaatatttttaatattatttattaatttgataaaccttaatatataattatatttattataaattgtatgttaattttaataaattaatggcaattgataatttcatatacatatatttaactattaattgttgttaaactttgagtagaattagaacttaggatttttttcttttaaattttttatgagatttnntatacatataattttnnnncatctataaacaccatcaacctttctcccnnncatncanncatctcaaaaccccanaac

SEQ ID NO: 12737 - DNA, 671 bp, Gossypium hirsutum
ccatgtggacaaaaataggccattttaaggccacttttctcaccctttgcacattccacctacactcaatactttcatataccaatatactccaaatccacaaccaatccaagtcaataactcacatggtaatccaaatttacaactacactacttatttacataaatttactatgttgtttctatcattaaccaccattatatactaataaatacaaacacataaactaacatatatgtatgaaagtcattcataatcatgtttcaagtttactttctttccattccatcctatacatgccatataaaccttaagttataatacaaaatctaacggtgaaatctggatagtgtgacccggtgtgatgatctgatcctccgaactcttggtaatttacaaagaacatttaacacacaaaagtaagcttatgaaagcttagtaagttcataggttttaaattaaatcttaccaaacatactattataaagcataaaatatgcaattcactaccacttcctaccattcacaatttcaaatgatgaattcacttgattgagctcaaaaccaataactaattaaatcccaacacttaaattcacataacacttactaataattgtcaaattagagaatgtcttaaggaatagagtacatcgttagcttgatgcca

SEQ ID NO: 12738 - DNA, 431 bp, Gossypium hirsutum
aagcccacaaatgtattgggtcccactagattaattttagattatattaattttgaatttaatctttagatatttttgagtaaattctatgaaatagtcatctaattatgatttttttatcattcaactatgaaaaatttataaaatggtcatttaattatggtttttttcttttttatcacttaactatgaaaagtttcaaaatggtcacttaattattatttttttatcactaattggctaacataaaaataaaaacatcaaaaatgaaaagttacaaaatgatcacttaattatgatttttttatcactgattggctaacgtaaaaatgaaaacataaaaaaaaatctaaaatagttaggtgacaaaaaaacaagattgaatagttgagtgtcaattttataactttttatagttgagtgacaaaaaa

SEQ ID NO: 12739 - DNA, 494 bp, Gossypium hirsutum
tttgcatctccctgttcagtaaatcgttccttgttctgtaagttgtccagataatcaagtgtccctaatccttccacacgaacttcactgtaccacaagcagctatgttattttaaatcctgatcatatgagccaatgaaattagttgaacatgggtaacatgttattccacgaactaattccacccgttgaggagcaagatggctaatcatacccccttccattaaaaaaataataaattcaagatggacttaaaaaggtttcattgcaggagctttatagcttttatttcagcggattttacatcctagatttgatggcttagtagacatgcggtgtacttatctttttgtattttgatgttacaattaattgcttagtttactcattgggattgatttatttgtcttttggttgtatctaagctgtatgccacatcagcatgtaaccagccctttgtttgcagcactctaaaaggcctaaaatctatcctt

SEQ ID NO: 12740 - DNA, 553 bp, Gossypium hirsutum
gagatgagggatcaaatacaggaatcccaaagaagtatgataagccaattgacgtagttgctggctgaaggaattgaaaaggggaggagcactatggtcaactgaggggatgataatgaggaccctatttatcccctgggttttacctcgataaacgcctaggcacaactagatgtgtacccgcgaaggatacccgttacaatcaaacctcaacagtatctacctcggtgctgataaactaccaaataggctcaggttccaattcgagggataatccatccaatcccgttgttcctgatctaaatgatatgaaagaaatgaaaaaagcaagagtggaactaccaaagcaacttaaagatcgatgtagatggttagaagaaaaatttagagcaatggaaaacgctgattaccattgcgaaattgatgctaaggacttgagtttggtcccagatttggtgttccctccaaagttcagaactccagaggttgaaaagtataatgggactagttgccctgaagctcacatcacgatgttctgttaaaggatgactgg

SEQ ID NO: 12741 - DNA, 495 bp, Gossypium hirsutum
  misc_feature (58)..(61): n is a, c, g, or t
tgtattcactagcatttccaaaaggggagaagttaaaggaccttctactacagaaatnnnnttttaaaggaccttctacagaaattgactcttagggtctgattttgatatggtgtaatgatgtttcacggcagcctcaaatgtttacatctactgatctacattctacatctcaatttcctttgtatatacgtaatctctttttgacttatggaaattttctggaagtgtcaattactcttaattttctatatttttgttggccctttcttgcattggagtaccaaaaaatcaactcatgcgccaccatgttcgcacaaatacaatcagggaaatcaatacttctagcttgtcatgcacgtttaatttggttgacatgaagactcatttatcttccacccaaaatgcaagtttaatttgctttccactgttttcttcttaaaaattacattgttgatttaagacatcaaaaaaagtctctttacggaaacgcga

SEQ ID NO: 12742 - DNA, 426 bp, Gossypium hirsutum
cggggaatcctaaatgaaatgaaatgaaatgaaatgaaataaaattatatcaaaataaaaaagaaagtgaaaataaataaataaataaaagggaaaggggaaattaaaagagagaagaggaagggactaagggaggcggcttttgcatagggaaacgttgtttactatgctcagtaattgtaatgttttagtaccacacaaaaccagctcagcttcagagactacttttcttttcttttcttctccattttttatttagttccttcataccgattatgcccttatctttcgtgcgaaatatcggtatcccccaactcctagtgagtatttttttattattattccactggttatctttgcgacgtgacggaatagtctaggaaatgcggagggtataagtgcgtcatttgtgatgcgtcatttgtg

SEQ ID NO: 12743 - DNA, 615 bp, Gossypium hirsutum
  misc_feature (61)..(61): n is a, c, g, or t
gagagaaggggttggttcttaaattggggttcatcaaactccattaaaaaggaggacccanccaagcattaaaagtgggaagtagatatcactttaatgcacccaaaatttgcttctcttcttaccaaaaaaaaagggaaaaactattgaacattaaaattgaactaaacatgacaacctcaaaatctaacccccctctttaaattggtgaaagttcttcataaattcctccaactccccttcctttcttcatcttaaattttcatgagttgagttcttgggggagtaattatatgtaagaatttgaactaactagctttttatacagagagagagagatgcaagagtgctttctagccattaaaaaactggacaggagacaagggtgaaatcaaaaaattttcttagagggccagactagaaataaattattaattattaataaatttatattttggtcatttaacttcaaaaagttacaaaatggtctttaaactattcgaaactttttatctaaatcactggactgttgacaccatttttttgttaaaacggggtcaacttggattttgaaaatgaaaacaaaaatgggagtcgccaccaatcctttttgat

SEQ ID NO: 12744 - DNA, 335 bp, Gossypium hirsutum
gccagtaagctttcagagttcgactttttttttcttttaaagaaaaaagagagtgaaaaagatttaaaatccctcaacggcaagacgagttcttgaaaacgaccttgatctgctgttttggatccttcctcgctgctgcatcacacactaaaatgcaaaacaatttgagctacgattactactgtaactgcaaattgaattgtgttctgctgtggaagttttaggctaccatttttttatagagccaagaaggacaatttcgtcatttcatatgagtactattattttattatcggtatgcatctcaattcccaatctaaaaagcgaattaatac

SEQ ID NO: 12745 - DNA, 643 bp, Gossypium hirsutum
agaggtccgttggctgattataaaaaaaatctcaatttttgtttctagttgaatgccatgcacgggagagcgtcaaaataaagatttataacgttcccatgtagtctgaatattttcattatccagttgatgataagcagtaatatcatttcaaagatgagcattcattgttggcgggctaaatcgcaaaacaaactgtgttgctagtgcattccaagaagtaattgatctggcaggtaacctaaaaacccaagtacaggttcttccctgtaaggaataaggaaataattgcatcttcaaagcatcatccggaacgccttgttgactaatggaaacacaaatcaataaaaaggatttaagatgttttctcgcatcttcatgtgggagtccaacatattgtccattagaattcagcatttgaaccattactggcttgagttcaaaattcccagcttggattgttggtttaacaactccctgttgtaaatcatccaagacaggtactacaaaatctcgtacagtcctattttgtaagtgagcatcttgcggcaacaattgattattaacattttgatgttgcatcaggggtatggctacattgtccccgatagagccatatttctttattctcgaagtctactct

SEQ ID NO: 12746 - DNA, 594 bp, Gossypium hirsutum
cctatatgtaacaacccgattttaggcttagttggaacagtggttttgggaccacgaatccgacatagaaaaacttgtttttattacattttcatgatatacagttttacggaatgatcttttgaaaatttcgttcgaaaattttgacgtttgaacactcagtttagcaaaaaggattaaattgtaaaaagtgcaaaagttgagttctacatgcaagaggtgtctaattgttataaaattttaaattgaaggtccttagatgataattagatcattttactttaagctggacaaaaatagacatgagataagagaattttagtgttttgaaaaaaagggcattttggtcatttggtaattaaatgaataaaaaacaaaaaatcaagccaaaatttagtccatcttcttcatgcttggccgaaacttgcaaggaagacatagctagggtttttccactttgcaagctcgattgtaagttcgttcttacctcgtttttaatgctctttacatttttaaagtcgttatcactcgatctatctgtttctaccatttatttgagatatgattaaggtatagggtttgacccatgttaaa

SEQ ID NO: 12747 - DNA, 462 bp, Gossypium hirsutum
taattcgttgcccaacacgtgtttggataaaatcccgaacagataacgatctttttagaggaaaatgaattgaactactgatctttaaaaaaaattataataacgtaactaacactcattgtagatgaattatgtgtaatggtaggccatgttgtttggagaataaaggggcaagggtccaaagatgcggaaattttgttatttgttgttaaaacatgaatggaaatgtccctttcaatgggattttattaacccaaagaataaccttctttttaattgattttcagttaaaagaagcaaaacttaatctggaatctcattttaacatatacgccaccaacttgaatatggtaaagaacatacatatctgcacaatttcgccctaatcagaagggttttaaatgattatttatttctaatttaagcttatctaaatgatttagcttcggatagaatggatgg

SEQ ID NO: 12748 - DNA, 665 bp, Gossypium hirsutum
gttgtgtttgaggaggagtaagtacgggtgcagacctctcagatcttggtgggaatactgcaccaagacgctgaacaacaaaccaatttgcctcagagaggaaaaaggaaaggggaaaagggaaaaggccacactatatggaaggatagcatatgaagaatacaaattaagagtcatgaatgaaggatagcatatgaagacttggatcccaagaaatacaaaacatgtctcgtacaatttgagatgagtccttagcagacataccaacaactcttggtaggcaacataatattgtggatatcttgccctcgcacctccaaaagcttcttgccaagtgtcaatcagagtcaatatcttctctttaacattaaagtcgggctacaattgagcagtacaaaaattgagaagaagtttttactagaaaaaaataactacaaaatgggactccctacctttttcttgactattctaaccatctcatgaagaacatccctctctgcaacgtgcatgtggacaatgtccccacagttttttatgatagtttctagcagctagaacataggaagtaaaccaaatttaaacaagcttagttcaatgtaagcaacaggtaataaaacaggcaacaaaagtaatcattatatccagggattagtagaaaccaacgt

SEQ ID NO: 12749 - DNA, 413 bp, Gossypium hirsutum
  misc_feature (25)..(26): n is a, c, g, or t
  misc_feature (54)..(54): n is a, c, g, or t
  misc_feature (354)..(354): n is a, c, g, or t
  misc_feature (373)..(373): n is a, c, g, or t
atgtcgagttaagagctaatcaatnntttaaccatcaactaaaatcatcctatntgataatacaaaatcccaaaacaggctgccatttatattaagttaaatatcaactaaattccaagtacaaaaaaaacatgcagctcaaggtatatgataatactgttgaattaagacacaacttcactacttgaaaattcatactaaaagtgtaaccactatcacaatctcaaaatctcctgaaaatggtgaaagaaaggttaaaaaaagggacatttgatctgaaatatgaaatctcaagtaacaaaactttaggcagctccctttcccttccttctctggatcttcttcatgtagaantccagttctttgccttccnaagatatacctgtaaaacccatttcacacattagaataag

SEQ ID NO: 12750 - DNA, 640 bp, Gossypium hirsutum
gttcattacccattaggccaattgtctaacttgaaaattaattttcaaaaatatcatatttattttagttaatttggttaatttaattttacttgatcaaaattaatttttcaaaaaatcatttagatttttcaaatttttttttcaagaaaattctttaatcaaattccctagttgaacaattctcatgattgtctaatttaattccacatcaaataaatcaactaaaataaattgttttaaagtcgtagaattttcttttgattcaaatgcagtccgatcaagcatttattgagctaacgaagggaccaatcgtacacatacaattagactcaagttattgcaattatgttcagaagtatcgttccgataattcgcaattcacttaatcgtggagttagtccacaaaaagtaccatgattgaaaactccttattatgtactctttacgaaagcaattgtaacacccctaacccgtatccgtcgccaaaatagggttatagagtattaccaggtttacagataaattgagccaaaattactattcacattcgataataatcaatagtcccttaaatggaccctcgaacccaatatgaacagtaaaaatgattcggaactaaatcggaaaccctaaaaaa

SEQ ID NO: 12751 - DNA, 525 bp, Gossypium hirsutum
atgaggattggcagtgttttggggttgctggctgttatcctacactaatttgcatcccgatgatgatgtatatggattgttaaaagtagtgtctgatatatttacaatggttggatgatagataaatacatactgagggatgcattcttctcttttttacttgtaatgagtatttggttatcaagactagcattgttaacgaaattaatatcaaattcaatctcaaggcagtttatgccaaagccatcaggcgtgggctcataatttggaatatgtctcatcatccctctaacccaatcactctcaaggtctcgaatgatacaaccgggccttgctgctcccggattctaaatatattctattcaattatatattaatattctaaataaaatgacaaatcattcaaaatgcaagttaaacgcatgcaaaaatataaattaatagaagcatatgaaattcaacaatgaagttaaagaaagggattggactgaattgtgattggatttgtggatttacatttaaata

SEQ ID NO: 12752 - DNA, 617 bp, Gossypium hirsutum
aaggtttgagttcgagcttaggggtgaaggaaattatggtttaattattaaaagaaccttattagcaagtaggttggcttttaaataaatgaaggaagaatatgacacaagaaagccttgtggtggagtggcaagtggcgtcacatacatgacaaggaggtccggggttcgaatccctccttgctcaaaagaaggatttatttttgcttaagggatgaacagtggtggcattggatatgaacactgtagagagtgaaaagaggagaagtttgaggaggggattagagagttatcagggagaaaaattaggagatgaggagtgaagaagaggtggagctgaattgggaatttgggtataggaaatttggccataaaggctatatataggtgccgaatgtgaggttgccaggctaatgtcgaattctccctcaccttgttgccagaaagcaccttttttctccgaagatctaaaagccaaaaatcccttgttcttctttctttttctttgtgccgattctccatgtaacatcctgattttcggatttattcgtggttttcaatattttgtaaagattttaaaaattttgtatttggatgtgaaattaatattttgagta

SEQ ID NO: 12753 - DNA, 455 bp, Gossypium hirsutum
ttcactccctctaaggagctatcaaaacctacagattgtaacacagaccctcctcaaatctcacactcttgtcataattagatgctactaactcttgagcgtacctgctcaatctcagaaactcagcctcatactcaaccatagatctctcaccttaaaccaaattaataaactcacgtcgacaagcctctacgtaagttgcccccacatacttactctagaaggcagtattaaagtaatcccaattaacctactcaggttgagcaccctgctcaaccgtcaaccaccattgataggcttcatcacggagtagagatacaacatatcttaatttttgagttagactacagtcgatatcggtcatgattcgcttggtagcctctacccaatactcgaccacggtaggggcgactccaatgaaaccctaaataactcagcatcaattgaccagagaa

SEQ ID NO: 12754 - DNA, 717 bp, Gossypium hirsutum
  misc_feature (674)..(674): n is a, c, g, or t
  misc_feature (676)..(683): n is a, c, g, or t
  misc_feature (685)..(694): n is a, c, g, or t
  misc_feature (696)..(713): n is a, c, g, or t
tttgcatttggtctggaaaataaaagaagtcgtaaatgttggaatttaaatctccaagttaatttcaagtttgcaaaatttaatgtacttgattgttctctcttctttgttaacttttatggatcaaattggtatacctgtctagagttatttcgattttttattttaaagcgtatatttagattcagcacattcaaacatgagaatgaacataaaatctttcaaaaatattcaaaataatttataaaagttttaatatactcgtgtgaaatacatacccgacaaaaattctttcaagttatcgagattccatccaccccagccatatagggtggttttttgcttttaaaaattgtgtttgaagcaaggtgaatcagagtttttagcaagggctacgtgtagctaaaaaaaactctgattcaccttgcttcaaacacaatttttaaaagcaaaaaaccaccctatatggctggggtggatggaatctcgataacttgaaagaatttttgtcgggtatgtatttcacacgagtatattaaaacttttataaattattttgaatatttttgaaagattttatgttcattctcatgtttgaatgtgctgaatctaaatatacgctttaaaataaaaaatcgaaataactctagacaggtataccaatttgatcatanannnnnnnnannnnnnnnnnannnnnnnnnnnnnnnnnnggaa

SEQ ID NO: 12755 - DNA, 545 bp, Gossypium hirsutum
tgcaactagcacaattaccctaataacatggtgcactacgcctttggcgagtactcctttcatagtcatctctctacttggctattatctcattccaaccaatataatgatttgtctttaaaccacccttaacttaaacactgttagggatacgcctattctgtacgctagagagaactcttgggcggatactactctaccgaacatactaatttaggaccacgctacaaaaccttgcacacgccaaaactgaggtgttacacacggggttcctcaaacaatcttaatcatgatctcgtgtcttaaactatcttgacaagttcatctacaacttaattttcttctctaggaatatatgtaatctccatacccctatggatgccaatagttggtgaattctcctgaaaaaagtagaattggaatctctgaataatctaccttgaatggtgttaacaacttcaagattgtcagtttgaattagaacactctcaaaaccccaatctagtataagtgtcaattcatgcaatatgccctatagttttgtt

SEQ ID NO: 12756 - DNA, 765 bp, Gossypium hirsutum
  misc_feature (103)..(104): n is a, c, g, or t
tttcggaatctgtaaaccaaagagcgcccatcgagtttcggagatccgagacatcaatctgcgaaggcggcggcggagagatggtggtttcaagtatagagcnncttttcggaatctgtaaaccaaagagcgccaatcgagtttcggagatccgagacatcaatctgcgaaggtggcggcggagagacggtggtttcaggtatagagccgcggaggaaatcaatggaggaaatgagcaacgaagagtttcagcggatcatagatagtttcattgctgaaagaaagaaaactctactgcaagaaaacactgcccattacactagcacaaaagaaaagtgcatgcctatcctattgaagcattagggggttaattacaacattattaggttttaggatcatatagtattgataactgttaaggatgtacagtgataatatttcccggcttaaaattaataagataatttatttaagttctatgaacacaaaactccaatcgaattcagatcaaacaccatgatcatcaagctaatatatgtgtttctgctttgccgagtttattacttgacttatgaatcaaatgcaatccatttttttggtagaaaagatgttgttaatggttcccagatattgaaacttcaatctcaatttgccgaaatttgccgagtttattacttgacttatgaatcaaatgcaatccttttttggtacaaaagatgctgttaatggttcccagatattgaaacttcaatctcaatttgccga

SEQ ID NO: 12757 - DNA, 610 bp, Gossypium hirsutum
aaaaaaggatctgtcaaggtgtgcttttaaattagtatcttgagtttaaaattttttgtttgaatctcaacaccgctaatgttattttttaattttgttgctgtgtcattccaaggcttatgccatctttagcaatagagaaaatgtactatatttgtaggtttcgtaattagataaaatgtaattattgtttactcttggctaacatatgcttgcaatactggtagcattaaatataaacctatcttaatatatttgcgtcttcaaaattgagtaagcttattaaatattgttaaaaacaggctattttgattatatttttcacaagaaattacataaatatttatacacatagtgagcctaacttaggaaactttacactacgaaacaaactaattctagggatgctgtacctaaaaacagccttaaagttagggataaaatatttacagaatcttatttgatacacttaaatattccttaattaggaaactgaagtctgacactccccctcaagctgggaagtggatatcatccattctcagcttgctgactaatttctgaaacaacttcctagacaatcctttggtaagtatgtctgctagttgtc

SEQ ID NO: 12758 - DNA, 650 bp, Gossypium hirsutum
gtgtatcattctatacaaaccatttcattggaagagattataatatttggaactaatttattgtttgtctgcaaccttatattaaaattgtccaaatgtataaaatttaatcgagaaaaacaatatttctcaatcattatatcatacaaaattgaatatcatttagatagagcaattttaaacttaagatgattatgttttgcaacactttacatcacaagtttttatgtatatttagttatcatgataaattatataaatatgtcatggattgatatatgatataagtgcaatgaaccacaataataacaatatgatataaacacaacaccttaatatataaaaaaaataaatgtttttcttttaaattcatgaaaatttaacacgaatagtttactaaaaatatgaaatgtaccaataagtggttaggtgcaatgataaaacacattgtactctcaagggaaaaatctaagttcgaaccttagagacaacattgttgagagggacaaccacgaatcctaaacatgcatcgtaaaacagacatgcataatatataaaaaaaaatatgaaatgtaagtaaaagaaatataatatgtttgattaaatgctaaagttacatattttatgtaattaaattggttaatttatga

SEQ ID NO: 12759 - DNA, 340 bp, Gossypium hirsutum
ttttacaaacccaaaacaacctaccaagctaacccaaagcccaattacaacccttacctaccaaccttacaaaactattacccatcaataccctcaacccaatacaaacttatcagacccaacaaattacacagcccaatacatttaaaccccaacccgttagcccaactagacctaagcccaagtcagaaaacagaaaccctagccgaacctaccccccacttgcccacttgcgccgcaaccaccgacaccaccggccaaccaccctctgactcacctgctccaccgtttgcccatcccctgcaaggacaaaacagaagacatgacagaaacaataaaa

SEQ ID NO: 12760 - DNA, 495 bp, Gossypium hirsutum
ttttagagttatatttgggctcggcagggacatgcccatgtgtgattactccaactcgtggtcaagcctgttgaacaggcacgggcatgtagtatacccatgtaagtcgtaattcaatcctgccaaagggacacggctgtgtgacacgcccatgtgagaaagtccaggccgtgttgatttcccacgtgggtccattttctccgatttcggcctgtttctcgctctttttactctcctatgctctcctaagtataaaacatgaaattaaaggattaggagcatcgaattcaccaaatctaagaagaaaccattcataaataggctaagcataggataaaaatatgtataaattacgatttatcatacatatatttgatttgttgtggttgtggtaactttgttaggtattttgatttggtattgcttgaatgagttgatgaattgaattaatgtgtattttgagattaaattatatataattgtggtaccaatgag

SEQ ID NO: 12761 - DNA, 646 bp, Gossypium hirsutum
atatcaacttactaattcaagcgttgaaggcattatgagtcaaattaccaatacataccaaaaccatcaaattaggccataaattataagacacacctaggtaaatgctataaactatatacatacaaaacgagcataaacttagtctgagtcgagtcattgagtctcgaatgctttcaactttaatctactgaacttgtacgcatcctatacacataaataaataaattgtacgctgagtaatgtatactcagtgatgataccataatctgaaaaacaataaaactatgaaatcaagcttagtaacatgtttagaaatcatcttattacataataatgagcaaactatcaaagctataaatcaggtaagttttcatgtcaaccgacttgtaaatcacccttgggacattcatttaatacatttgattgtccagtatatcaacgcaccctcaaagtattagcacatcattttgcataatccatccttcatgtttactccttaaccattaaccattacattacacgtatatttaattatcagcacaacccttattaattgactcagatttgaggatggatacatggatcaatccaccaacacaccattatacgcaccaaagtgctagtcaggtataaatgcacctaa

SEQ ID NO: 12762 - DNA, 406 bp, Gossypium hirsutum
ttttgaggttgaaagactgaagcaaaccctttttatagcacaagtgacagaaagaaagggctgatgctgatgaagtgatatagggttagaattagtcataactttgaaactaaagttgagatttgttgaaatggaaaatggagtgagttgctaagccggattgaagatgtttttaatgcttaatgagaaagtaaaattaaaaatgatattagagtacaagcatgtgtggggcccaaatgctgcccgttactgtagaatcttctatttatgttatgaggtgccatgtttaagctattgggcttttcttatattttgatatggctccgctttagatgagttattgaatgaatattttatttgggtacatgatttgtatttcacttttgaggagtgaagggactaaatt

SEQ ID NO: 12763 - DNA, 674 bp, Gossypium hirsutum
cggaatgtttgtagctgaactttggtttagtttttatttcttcgtcactgtaatagttaaatggaaccctgtctttcgttccactttcaaagacagactctcttccaggtcttcatctctttcactctgtctctccatatattccgtttcacttgttcctagcgcttgcttgtttcttacaggtacgaagaagaagaattgccaggagtagacatatttgtgtgcacggcagacccaagattagagccaccaacaatggtagtcagcacagtgttatcggtcatggcttatgactacccacctcataagctaagcgtctatttatctgatgatggttgctccgatttgacattttatgctttattagaagcttcagggtttgcccagctatggcttccattttgcaggaagctgaaagtagagcccacatctcctgaggcttatttccagaccactcctgaaccagtggatgatgcattcatggccaatgagtggttaatcatcaaggtaacatgtttatttcctttaattctaccacggatgtttgccccaccgcaacataaaatgattttaacctcaaggaaatggacggtttcgtatcaaattctactcttcagaggcattcttcttctactttatctataaaaaaaaagactctaagggaccttcctcaa

SEQ ID NO: 12764 - DNA, 531 bp, Gossypium hirsutum
aaccctagaccgtcaaccattttgcaagatatacccctcatttgatagctcatgcttcaagggtcttaaaaatgcaaaaatcatcaacaaatggtatgaaaatcacttacttgtgagtcaactaagtagctaaaaattttcagctttcaaacccccttcaatggctgatttttggtggagaaaagagatgagtaagggatgatatcatcctttttttatttatttctattttagtcaaaattggtcacctaacccaacaaaatttgaaaattttgaccacatatggctcctatggccgaccactctatttctaggggtctaattaccctttaaaatcccctaatttttcttctctaataaaataacatctttagctatcaattcaagactttttcactttatgcgatttagtctttttttcgcaattgggctgacaaacgtcaaaattagctcaccaaaatttttcatgtactattataaacatgctatgactccaaaataataataaaataatttactcaactctggatt

SEQ ID NO: 12765 - DNA, 620 bp, Gossypium hirsutum
ttcagagtgattctagacttccctgtcttattattagaaaatcactaaaaattgtaaaagaataattgtgagttagaatttatatgattaaaatacttattgagtttattttttataaagatagatgcgaacattatccgagttccgtattatgagataaataatttttagtgaagagaggtcagaactattggacagtgaaataggggcaactttaatgaataaactgtactaattggctaaaccaaaaattctgaaaattttatggtaagaatatatgtgagtctagtttttggaaaaattaatagatcttaatttggagtcccgtatctcaagttataaataatttatcaactatgacttgagtagatagcttgactagaatatgactaaaagtgtaattatagttgttttacctaaggaaacatattggtaaattgcttattaatttcatatgaacttactaagtgtaaagcttacccctccctccatttcttttagtattagcaggtcggctcagggatggagatcgtcgaaggcagcatcacactatcaaaatgttgatgtgaagtgtcgataaacttcaagtcttttcaagtgagtgggatgtaaagagactt

SEQ ID NO: 12766 - DNA, 689 bp, Gossypium hirsutum
caaacatcctcgtaatcatgttcctgttagaaaggttagctagctcttcttcttcttctaggaatcttgctgaatttgagataagagaatgaatggggtttggtataatacttagggtattattgtcttctaaaaatgtctactgccctactggagcttttaccaccagtcagcttaaggctgtccagtgcagtagaaactcctcactgtgctggaagccaacacatccaaaggttgtccacagtccagtccagtgcagtgagattgataataaaggggaaaaaattcaacgcactgttgtgcgttggcatccaaaggagccctaagtaaaacaaatgctcttacatttatgctcaaactctagatatatgatggcaagtatatcagaaaagcataagataaatatatcatgttaggtagtgtcaaattcatggttggcaaacaactcaaaggctactaattccaattctttaaccctcctccaaggcaaatcaagcaaagcaaacaaggtaccaagtaatagtatgtcactcttgtgcataaaaactaccagcactcttgtacataaaaactaaagtaaatttcattaatgcaccttcttttcttttggttaatacttatattcaacaaaaatggcctaattaataattttttggacatattctcatcacacgaatcacttgaatctg

SEQ ID NO: 12767 - DNA, 482 bp, Gossypium hirsutum
ttcttgatccattggtaacaggtaaatctatttatttaaattttgttcttagtcttgtattatgctcaaagttatagatttaatctgcattcatcaattagatattttgtaatgactatattttttaaatttcaaaacttaagtcttaatgcaaacaaaatttgttaaatctattcattgcttttttttaagtaatatataaaaatatcaaacaaacataacattacacatgtgataatatgtttcacacttcaattttaaaaataacaaaacttaatggattttatagttatcatttagataggaccaaaattttcaaattctaaaaataaaatgcaaggattaaaaatgatcaaattaaagtataagtattaaatccataatttacacaaagtacaaggtcaaattgtagaatttgacctacaatgtctaatatatatgtatgtatgacgaggggcgaatctagagaggctagtgagaaa

SEQ ID NO: 12768 - DNA, 677 bp, Gossypium hirsutum
cgggatttcgattttctcgttaaatccgaataaatgaatacttttttaaaaatgtgaattttaaataacctcgagaattaaaaagaacttgtattctaacttacggaatatgatttctttttaaaaaccgggataattgaatgtctttttcaaagaaaaaaacttttcgatgttattgctcgttttcgggggtttaaggtatcgtgtcttaacttacaggacgtaatttttttccctcgattagtgcaaaatacattatctcctaaatttttttcaattaaataatattttaacaaaggatcgtatttttaaaacttctttaaatttttaatttttcgacactaagacactaattaatcagtcaggtaccaattttaggcattatgagggtgctaatccttcatcgtgtgtaaccgactcccgaactcgttttctggattttgtagaccaaaaaatcgtcgttttaataaatttaaatttttttaaaatgaatgaattactagataatccaattacacctaaataaaaaggattagtggcaactcaaatttcgttttaaaaaatcaattcctctttttcaaattaaaaatggtctcgacacccatcatactgtacgtgcattttaactgtttttaccttttaggcagagaaaatcatgatcatgcatcaacctcatg

SEQ ID NO: 12769 - DNA, 630 bp, Gossypium hirsutum
cgtcactatcatgtccgtagtcctaaaaaagttcacccctagacgatccatcttattcccaccagcaacactgtcaaacaagcatatagcataatctgtcgaaagaaatggttcttatttatactcattctcgtaagatagaagtgccatcgggattttatcctatccataatctttttgagagaaacggttcctattcatgcttgttctcgcaagatagaagtgtcgttgggatcggatcttacctataatctggaaaaagaaatggttcctattcacactcattctcacaagatagaagtgtcgtcaggactggatactatccataatccgttgaaaaaatagttcctattcacacttgttcttgtaagatagaagtgccatcaagagtgaatccaatccgtaatccttcgagagaaaggattcctatgcacacttgttctcgcaagttagatgtgccgtgactggattctatccatgatccttcaaaagaaaggtttcttattcacactcgttctcgcaagatagaaatgccgtcaggatcggatcctatccataattctccaagagaaacgattcctaagcacactcgttctcgcaaaataaaagtgcctttaggactgaatccta

SEQ ID NO: 12770 - DNA, 341 bp, Gossypium hirsutum
  misc_feature (183)..(183): n is a, c, g, or t
  misc_feature (187)..(187): n is a, c, g, or t
  misc_feature (220)..(220): n is a, c, g, or t
  misc_feature (236)..(236): n is a, c, g, or t
  misc_feature (258)..(258): n is a, c, g, or t
  misc_feature (260)..(260): n is a, c, g, or t
  misc_feature (269)..(269): n is a, c, g, or t
  misc_feature (283)..(283): n is a, c, g, or t
  misc_feature (286)..(287): n is a, c, g, or t
  misc_feature (289)..(289): n is a, c, g, or t
  misc_feature (332)..(332): n is a, c, g, or t
gaacctcaagcgctaatttaaagggtttagttggaattgaaaggcggatgcaggaagttttgtctttatttcaagacggattcccagattttcgaatgctaggcttttggggtatgggaggtataggcaaaactacacttgccgacgccatttatcaccatgtttcaaatggtttccaaagcngctnctttcttgcaaacgtgagagaacatgaagaacnaagagaattattcaanttgcgtcagaaatttctttcancnatattagangatgaaaatttatntanntnaacgcccacaatcggatcaggctttcttaaggacaggctttcnaagaagaag

SEQ ID NO: 12771 - DNA, 595 bp, Gossypium hirsutum
  misc_feature (529)..(529): n is a, c, g, or t
  misc_feature (532)..(532): n is a, c, g, or t
  misc_feature (569)..(569): n is a, c, g, or t
accctttcttttttgtcttccaatgttactgttactttagcctgctctctagttattggtggaataattagagagaatatgttaatcatgtttgttttcatggtagtttcaatccatattctcattcaagttatcctaatccccccaaaagtaaaggatggctcttttttctgtatttgtaaacaagaataaagatttctgcaagtcacgcctgttagtcaaacagaaaatatgcttgataccatttgtttgtgaagaaggaaaacaaagttataaaaggagcagcattttgcattttgttctacaacttttcagtaaaaatataaatccaaaagctcctttgatgtttaagtctatcagaattcacattttttttttatgtttgttgttcaactctttgaagttttcttctttaatcccacctaagctaagtgttaatttatgctttattttagtcccattagtatttatgtttttaagattgttgttatgcaaggaagcatgtataatcctatcaatattgtctgtnttntatttgcttgaccctgtaatttgcttgctgtgatgtngttcagaaccctgcaaacaagaagga

SEQ ID NO: 12772 - DNA, 615 bp, Gossypium hirsutum
cgatatgaacttacctggcaagacaataataaacgagactttaaggactaatcaataatttttgcttttcctcaattatctttggtttggttcaatttttgatctatacaattattcaattcaattgatatcaaaatttttataacatctcataatatgcataagccatctcaatttcatattttaaatgtccttaaagttttttcattttattcaatttagtctctaaaacttaaataataatatctttcaattttgagcttcgagttagaaattgatctcaatcacatccttctatgaccctctattatctatcattgtagaaatttcacatcaatttcacaatttatacacttcagttcttatgttcaaaaactaactattaaacataacaacttactcatttttcacatttaagtttaaaatctaacaatttaacaccaatttcttcaagaattcatcagtggaaactttcaaaaaatttaacagttttaaaaattggtacatgggctagctaaatcaagctcctgtgacctcaagaacataaaaattacaagaaaagaacttgaaattacctagtaataaaagggtcgaatgtaaagaaacttgaaacca

SEQ ID NO: 12773 - DNA, 612 bp, Gossypium hirsutum
ggacattgatgaagatgatttaggtgattctattatctggagaatgatactattatatcttatttacttgtatccaagatattatttgaaggactttgatccttggttaaaagaatagtttgaaaaagcacttttctatacaataagaaatttgttaataatgcatttagattactaattcactcctttgagagtttattgaaacttttagtggaaaaatttgagtgatcaaaagaattcactaaaagtattcaacattaaaactgttgtaaccttaaaattgattgaattgtaattaaagataaaattattgacgtgatagtgaattcaatctctaagacataagtgattcaccggattgcgtaaatatccatagtgtacttattgttccttggagttacgctaattgttccaaggtcccaacaacacctctctcactagacattttcatattagtttgatatatatatatatattagtaaagatagcaacaaggtaaggtgaggtaatttttttgcttatcccaccccaatcttgccctcaacctggttttaaaagtttagcacccgaactcaaccctgaaaaaataaaggttctctcactccattcaat

SEQ ID NO: 12774 - DNA, 660 bp, Gossypium hirsutum
ctgttttggttgagccttgaaaatctttaactatcccattaaatcaatctccaaacacaaatgagttaactgtgatttcttacacattggatgataaacgaaaaccttatacctagcaacaagatttaagagagttgagaaaatatttagaacaagaatggataggtaaggggataaggggttccctgccctattcaaagccactgaagatagcacaaactcaatttctacaaacatcgtgaaatcccaaaactttcaacatctaaaaaatgaatttaatcccaaggttcacctttaaagcacattttggggacatactatacccatgtaccaattcttgtgctaacagaagagaatcagcctagtttctaccagccaaaaaagccttctgattactagaaactaaagcaagtaagctttgtttaactctatttaacatcaagagatagataaaaaaatcataaacctatatacacgaaagtgaagatggcagagaagaaatacttcacagcctctataacatcttgccccataggccataatactacaacatgcttgaaaatttttagcaaaacagccatccagcccaagtgctttattaccattcattccaaaccttacaaacttaatttcttcagaaggaacaggagcaataaacaa

SEQ ID NO: 12775 - DNA, 680 bp, Gossypium hirsutum
gggacatcgacaatgacaataagtttttgacaaagcttaaatttgaccaactaatcaatttcttttaagtgtggtgattaaattaacataattttttaagtattcaaaataaaaataacacttatttaatctttcaaaatttaataataatgcacaataataaaatggttaaaatcatattacattatgatttttctaaatgataaacaatcaagatttattgttataataacttcaacaaatatttatcatctgtttggagtagtttagagtaatggttaaagcttttgatgattgaatgacacgagtttaaacattgttatattttctccctccacataataatgataaaagaaaaattatcatcatatgaactttgattttgtacaattttatacatgaaattttgatttgatccaattcttataaattattaacacaatcattaatgtaacatcgttttatgcttatatattacatacatacataattatatttatctaatataaaaataaattgatatatttatttctttaaaggtgtataattaaatcaaaattaaaattttaagtatacatttaaaccacaattagagttttatgtatataattgaaccaattgagtttcatataaaattttaaaatttatccttttttatgtaaaatatatacgcaatgaga

SEQ ID NO: 12776 - DNA, 598 bp, Gossypium hirsutum
atttctttattttattttgacacaaatttcaagttgaagttattttggttcgggtttatgggtttgtattacttcttctatagtttgaatatttttagatttaggtttttcatattccatggttgaattgagtttgaattcatattaatcgaattggattttcaaatttaagtgaggattgagtgtattccaaatgtgtaaacctgtccatgtccatgggctaggtagaccacctgacccgacttgagctagggttgattaaataaattttaaaatatttttatttttattttaaatttaatttaattataatatataaatattaatataaaataatatgtttttaatatttgggtaaattctcaaaatagtcacttttgtttccctcaatttacaatttaatcactgctgttaatggtgtaacagtaagctgacgtgacatgtaaaccatcattttaaacaaaatttttaggttaaattataaaattgatcttcatttttttttcgttttgagcaatttactttttttttcttttatgttaactttccttttctcttttttttttctttcccttcgaatttcccctctatttccccc

SEQ ID NO: 12777 - DNA, 627 bp, Gossypium hirsutum
  misc_feature (73)..(77): n is a, c, g, or t
aaattttttcttcttcgagtcaaggtaatccagttacaaaaatctaccgtaattctatcctatttccactcgnnnnntttcacatactgaagtaaacccgaaggtacttggtgtttgggctttacttgttggcaagtcaaacatctcgttatgaattcagaaatatcttgtttcatacctgaccatcaatacaatttcttcaaatcatgatacatcttcatacttcctaggtgaacaaatagataactactatgtgcctcgtgaagaattttctgaataagcttggtatctctcgatacacaaaccctacctcagaacatcaaacaatcatcggctgcaatttgaaaatctaaatcactagtcaattcgcactgaactcttttagcttgaagttcttcgtcacatttctgagcttcacaaatttgctgaagaaataccagtttagattttaactcagctctaatcgaaccatcatcaaataaagttagtcatgtattcattgctctcaaagaaaagaaagtctttctacttaaagcatcggcgactacatttgcctttcccgaatgataatcattactaactcatagtctttcaacaactcgagtcatctctgttgtcgcaattcaa

SEQ ID NO: 12778 - DNA, 483 bp, Gossypium hirsutum
ttccagtcaagggctgcttgagttcaaaaatgaagtcatgttaattgccaaactacaacatagaaatcttgtgaggctcttaggatgttgcttagagaaaaatgaaaagttacttgtatatgaattcctgcccaatagaagtcttgacctgttcctatttggtttgagccttaaacctttaaatagcgacatttttctttatacattaacaaaatgaatttgaatatttaactagtgttttttttttggaacgtttattagattcaagtttggctacacaattgtcttggcaaaagcgattcaatattattaaaggagttgcccgaggtatcatgtatctgcatgaggattctcatattagagttatccacagagaccttaaagcaagtaatgttttacttgatcatgagatgaatccaaaaatatcagacttcggcatggcaaaaattttttgtggagatcaaaatgaagcaaatacaaata

SEQ ID NO: 12779 - DNA, 670 bp, Gossypium hirsutum
acaaatcgggcatagtgtgagttgattttcgattcagaattttagattggacccgatgattgtttattatttagaggtagaatttgtgtaccgaagagtccagagctcattcaaagaatcttacacgaagcttatagtggtagcttgtctgttcatctatgaagtaataagatgtacagtgatttaaaatagatgtactggtggctgggaatgaaacgcgagatttctgactttgtacctagatgtttagtatgtcagcaggtaaaagctgaacatcaggtaccttcgagattattacagccagtgataatatcagagtggaaatgggattgagttacaatatatttcgtatcaggtttacccctatatccgagaaagaaagatgccatttgggttgttattgatcagttgacgaagttaacacattttattccggtacatatagattactcccctgacatattgctgagttatatgtttctgagattgtcagattacacggggtgccagtttctatcatttcgaatagagatccgcgatttacatcacgattttggagaaagttacagaaaactcttggtacgcggttgcattttaggactgcatttcatcctcaaatcgatggtcagtctgagcgagtaattcaaattctcaaagatatgcttcgttt

SEQ ID NO: 12780 - DNA, 654 bp, Gossypium hirsutum
ttcaaaccaatttggatctaaggtatgctcttttactcatcaatgaatattgatccaccgtattaatttgttgaatcgtcacttggagttcgttggtggaactttttttaaaaataaacttaacaacctagacttaaataattttttttgaataattcaatgaccaaattgtaacattttttaattaaatgaccaaaactaaaacttacccataatttagtggataatggtgtagtttaccctatatataaatatttttcatttgggttaaaatatgtcataagcccgtatattttttgaaaatttaaaatttagtccttgtactttaattttcagaaatttagtcattctacttttcatatttcaaaatttaagtccaaatgttaacaatgttaattttttagcgttatacctcatttaaattaaattaaaagtttggggactaaaatgataaatttttaatgaataacaatgacattggatttactttaattacgtggaaaatcaaaatttaaaagaaaaattcatatcaacttgccatttgtgattttaatggggtgatcaaatgactgaattatgtaacgtgcgtgtctaaattgtaaatttttttgagtgcctaaaataaataaaaaattataattgaatgactatctg

SEQ ID NO: 12781 - DNA, 548 bp, Gossypium hirsutum
cttccaatctaacaccggttgaaaaataaaacaattcaagaatgtggctaccaagcaaatactagactagtagaatatggttggtatacaattccaaaatgagcacatgcatcatccaccaaacacgatagaaatgaaaaccataagatcatgcagcagaatctataacctttactgctagcatcaaaagttcagagatgagagctggccgtgggatctaacaagtttatagcaacaaagatttactgtttgtgcccttagatcgagtctttttaaaggacccaacagatcccctaaggaccaagtctaactacctcatagatagaatccacaagacattgaattaacctagaaataaatgcatcttattgccatctctcactgacttttcggtccctggtttgaatagaaaatgggaagctcacaaactgccctctacagtaaacaatgccaaaacaggacccttgactatttaaaatgactcatgactgcttaatcgagacatgagttaccctagagtaagtgaagcaacatactcaacgtctcta

SEQ ID NO: 12782 - DNA, 574 bp, Gossypium hirsutum
agatgaaacatcacgtcagggactgagttttgttaatatatggatgttatcttggatggatttttaatgattaatcgatttgaatttatgattgtttgtatgattcgtgagtttctggtcatgtggttaatcaaatttgttattaggtgtgtgaatctaacccgaaatgtcgattagaacctagaaaaactcaaaaacagaggctgtttttgaaacagctttatgacacatggcatgtgcattacacaggcgtgtggtctgccgtgtactaggccatgtagagcacatgggcaattttattaggttgtgtgagacacacaggcgtgtgtaaccacaaaggcagattaggtaggctgtgtgggccaattttttgaaaattttcacttaggcccatttgacttaagaattcgtaattagacctcccgtgaggtctgtttggcttaaataagattcgaaatatgacatttgtcaatttgtgatatggttaaagtagctgaaaaacttatgtgcgatctatgttctgataactctaaaacataattacgtgtaaaaacatgcatgacacctgtatgtg

SEQ ID NO: 12783 - DNA, 520 bp, Gossypium hirsutum
ctctctattggaggaaccaaagtttatacatgtttttgtttaggtaaagttgggcttgtagattcacatattttctttctaaatctcaaataaggatatgctgcaagaatctagttgggaattactgcttgagaatgataacttttctctgattttatctttttacttgtctctgtcctatttttaatccctgacattttttggtggccgagagtgcttgatgcttgatattttgttttcaatttctctctacagaagtgatgaaaaacaccccaacgtggagatttaagtcatcagcaaaggtttctactaaatcacaaggtagatttcactagctatactgtttttgttatgctggtgtatagagcttttttatgcgggggtattcttaaaagaaaaagaaatatttgaagtggtttttgagtttattatcattttttgttcaacatccattgtatttatgttgtgacaggtaaaagcaaaaatggcaagaaacctacacctgagactagcagggaag

SEQ ID NO: 12784 - DNA, 605 bp, Gossypium hirsutum
cttcaattgtttcattggccgaatacacataggtgagcatccaaattgcactttctttcctctttcaggtttttcccttttctggttattatcttttgtttctccttttctcaccaactatattattttggtatactctttagattaaaccgattctcgactcgtgtacactactccttttcttagtatatggttatacggtctggtaagtggtggagaatggggtataaggttcttgttgtaatgatatcatatgtctggtgtgaatctaaagaagaagggggttcttgtgtaggttgtggccaagggtgattggtgcattgttcgtgaactgaagatgtgatcgcttctgttgttggtaagggcatcagattttagaatttcgttagatttcgttagtgttttgagttaagtttctaaccggatattattggtttaatttaggtaaaaggttactttgagcacagttcgctttcataattaggtgtgtaaccgtatgctatgtttgatgatcgactgaaaagcctaaagcgtgtgtatttgtatgcagtattcgataatcgtttgaaagctgaaagtatgtgttgtttacactgctatgactg

SEQ ID NO: 12785 - DNA, 445 bp, Gossypium hirsutum
cttcaacactaccttcattaccaagaagtactccgaagacacaagagtttcaggaatttcactttgagacaatggctagagcaagtaagaatgcagagacatcttcagtagcttcaacagaagtgtctcgccaggttcggagaactatctcgcatgtatgtgattcattttcatttggaaccttaaatattgcttaccttctctctttttccctgcctacagaatactcaatggaaacctcatctcacagaacctaaaaccccagtgcttcaaacatctctaagggcaagacctataacggtcaaaagttctattgaacttgagcaggaggaacttgaaaaagctcctaaatttaaggcaaggccattgaataaaaaggtaactttctccttcatttcaattctgcattgtatgagatagtaactttgttacttgcgaaagtaac

SEQ ID NO: 12786 - DNA, 368 bp, Gossypium hirsutum
tgcttggctcatacaccaaaggtggttgattattttcttggagattatactagagaaataaatcccgacaatcctttgggaatgaaagtacgttatatttacttcaatccctctgctttcatgtttcattacatttattataggtttcagaatagtgtgaagtttgaactgttcttagttgtatgcatccataaagcatgcgagtttttcagggtgagattgcttcagccttcggggatctgttgaggaagttatgggcccctggagcaacccctgtggcaccgagaacatttaagtcaaagcttgctcgttttgctcctcagtttagtggcttcaatcagcatgattctcaagtcggtgaacgtaaa

SEQ ID NO: 12787 - DNA, 665 bp, Gossypium hirsutum
agaagggattgaggatttgatgtgtgataaagagaatggaggaggttgcttattggaggggtcatcatcatcatcatctgatgatgattgggagggtattgaacgaaccgaattggagaaagattttggtgcagcggtgagtttttcggtgcaaaaaagtaatgctgatcaagatttgaaacttggtaatgatttaaagatgcaattgtatggacttcacaagattgccactcaagggccttgccacgagcctcagccgatgccattcaagttatctgctcgtgcaaagtggtaaaattcccccctctgaattttggtttttaatttttctacttcctcttgaatttggaataggaaaccctatctaatttgtgtgtaataatgtgctttctgtatctattttaagaacttgattgatagaaatttcatgaagaatgatgaatggaattgacttgacttgatgaatagtgaaaatgtaaagaataaaaccatatatattgattcaaacagtacagtgattcccaattgctttgttggttcaacttagatccttcccttttttatctttgataatcgtcttccatatgattgaagaaactgatttttcttcattacaggaatgcctggaaaaaacttggtaatatgagtctagaagcagctatgga

SEQ ID NO: 12788 - DNA, 600 bp, Gossypium hirsutum
cgtgcggatggagtaggggtgggggtgttggggtttgggtttggccttggtttaggggtgggtgaagagcaagagccacaagcactgactagggaaaagaagagaatgttgagtgctaaaaagaaggccatggaagctgatttttttgaagccattttgatcttctcttaaaaccctagtggcttgctttctttgcttagagtgtgttttgaggatgggaacttggagcgaatgggatgggggttttatagtgtttaaaagaagactagtggatttttttttttaatgttaggttaattgatcaaaattgtagaataaatcaatttgattttttttcttttttaagctgcctggtgaagtttggatgtttgtgatctgtgaggtggaaattaacacactaccacgttaccattgctcctataggatcaataatttgtggatctgccttagcctaactttaaatgaatatccccattgtaatgttccatgttcttccaaaatataagcataatagtgacaacttacaaaccgccaaagtagaaacaaaatggattacactctttgtcaaacctttcatgttcttcttgaggcattagtacc

SEQ ID NO: 12789 - DNA, 651 bp, Gossypium hirsutum
agaacaagaaagacgtggaatcgaccttgatctgggaaaggaaaaaattgtagactaaattgcaaaatttctatattttgcaccgaggtaactttgtatgtaaataatatttcaattctttttatgatattatcttttgttattatatgagatgtggctacctatagaatgatcaattgatgtaaactacgaattgggattgactaagaacgagttagtaaaatgttgaaaagtgaagaatttctcgattgaacctttggaatagaagagatacgaatgatccattgtgagaacacatctgtagtactgtatgcaggctactatgtgtttaagatagttttaggtcacgtgtgtagtactaagtgcaggctactacgtgtatcagattgttaggtcacatgtgtagtactaagagcaggctactatgcgtacccgatagttttgatcacgtctgtcgtactaagtgcaggctactacgtgtatcagatggttaggtcacgtgtgtagtactaagtgtaggctactttacgtacctgttaactttgatcacatgtgtagtactaagtgcaggctactacatgtatcagatggataagtcacatgtgtagtactaagtatagcctactacctgttccagaatgataggtcaca

SEQ ID NO: 12790 - DNA, 426 bp, Gossypium hirsutum
gggtttaagttaattttgtaatttgttctaaactttgtaaaaattgctaaaagaaaaaatcaccgttgatcgaatatcaaaaaccatgaatgtaataaaacaccaactctaggagttctgcataaaagtaaaatcatgtacttatatttcttacagaaaagatatatttttaaattttacacttcaaaaaaaaatttattatcttgtaaatctaaactataacctttttaactctttcagaagttatatatgtgtgtgtatatatatatatatatagccaacatactgaagacaagttatagaaaaaggttggtagaaagtagaaacatactacaaccctgatgttcttccttgtctctttggcacaattgtctttttcagcccacttttcaaggcaacccaatccataacgtacaaattcatcag

SEQ ID NO: 12791 - DNA, 669 bp, Gossypium hirsutum
gcctggcagtttgatacatgatgaatgatgagacatgtatatatatcatcagttcatcatcatcatcatcatcatcaactccactatctttttccttctgcatgtacagattttagcagccgttttatttgttgtagcgtggacaacacatttctaacaatttatcattctatgcccaaactctctttctataatttactatttacttccaatattttataccttcaaataaggtattttttttgtagctaaataacacaatatacatgtcccaattgtttttatttttaatattagtgtgtctatgcataattaaaaccacatacatataaaaattgggatttttaaaaaatacataatatataatatattttacatattttttagatgtcaactttcaaatatatgagttagagcatattttaaatttttttttcagataaagtgaacctacctgaagacgataagctaagttgcatgcatgcatgggatagcattaattaacaaatagaaacaaaaatgagtaattgctttcgatagaccttttcatggccggattagtaggcccgtctaaaatatgagagagtttaaataaaaatataggcttaaaaaatgggcttaaacaaaaaaaataaggtccgtttttaaacgagtcggaccttgggaaag

SEQ ID NO: 12792 - DNA, 501 bp, Gossypium hirsutum
  misc_feature (479)..(479): n is a, c, g, or t
gaccaaagcagctacatgaaagttgagttatttattgatcctttcaaatacaaagaaaattattttcgtgctgttttcacttttcttccatggaagaatattttcataggtgatgaatatgactaccaatattttggattttttttactttggcctttgattgattacttccggcaattggatcaagctgttccagtaacctctggtctctatgttgcggtggaataacttgcgtgtatcctgtccaaaagattaatccattcgtgaacaagatactaacacttgctttcgtaaatcttctctccctcaaaattttacctaaattgggctgttgttgcagtaaatctcttaacgtatattcgcagtttggtaatttttagtgcagtcaatttctttcatgctttagcacccatctttttcccctggtttggttatcaaaatcatgcatgcagccgtactgctcaagaacctttaatttnatttcagttctctgagtttggg

SEQ ID NO: 12793 - DNA, 632 bp, Gossypium hirsutum
gtgtaggttcatgattacaatgtcactataaaatcatcccgttgaacaattcggatcaatcctcgatacttggtggtttcagcacacagctccaccatcatatttcatataattcggctctcttgtacacatggtgaacacttagtaccacccatgtgacctagccaatttatctcgtagctctcttgtctacatggtgtccttcacttggaatcacacatgcgacctagctacatttatcctctcccgtagctctcttgtctacatgggatacatcccgtatcacacatgtgacctagctactacatagtatctcgtagctctcttgtacacatgatgtgcactcagcaccatacatgtgacctagctacatttcatctatattattcaatctttccgaaagttcaaccgggatttctctcactattacttatttccattcttccaatagtcgatttatgattcaaaatcaactaaaatatataaaataggctgaaatacaaaaatgtaaatgaagttaatgtattatttacatacaaacttacctcggtgcaaaatatggaaattttgcaatttagtccaaaaccttttccttcccccgttcgaggtcaattcccccccattcttgatct

SEQ ID NO: 12794 - DNA, 557 bp, Gossypium hirsutum
  misc_feature (433)..(433): n is a, c, g, or t
  misc_feature (463)..(463): n is a, c, g, or t
  misc_feature (465)..(465): n is a, c, g, or t
  misc_feature (500)..(500): n is a, c, g, or t
  misc_feature (502)..(502): n is a, c, g, or t
  misc_feature (527)..(529): n is a, c, g, or t
ggacttttattcttcatcctcaaacatgtcttcatctggtttctctctagctccgccacctgtgttgaatggtgaaggctaccacatttgggcagtgaaaatgaagacctacctgtaggcatttgacttgtaggatgttgtcaactgtaatgttgaaccaccgcccttgagagctaaccccacggtggctcagatcaagcagcactctgataatagagctaagagatacaaagcaatgtcttgcattcaaaatagtgtgtcagacttgattttcacaaggatcatagcttatgagtgtccaaaataggcctgggataggctcaaggaggagtttcaaggaaattaaagaatgagacaacaacaactcttgaatttgagaagggactttgaaaatttgaagatgaaagaagtaaaaaaatcaagcaatactcanacaggatcatgtctgttgtgaacagcatcncnttactttgggaccagttcagtgaggcaagaatagngnaaaaggttatttcaaccttagctgnnngatatgaagccaaaatctcctcccttga

SEQ ID NO: 12795 - DNA, 696 bp, Gossypium hirsutum
cagatatcagaatcaagccataccccttggatttgagcaagaacaatcccaaccatatggtatatcagccaccacaacagaacctcaacgccgagaataagactcataccatgcttgaacaaatgatgaagatgatgtctgaccaaaagaaagaaatcgatggaagattccaagctttggaatcaacagtgaaacaattacaaactagtgcctcatcgaccgatgttaaccttgtaaacttgcaagcgcatgtgaataaccgattgccatcacagccagtggcgaatccaagggataatgttagcgttataaccttgtgaagtgggaaggaattgagacctatactaaaaaaagtccaaaacagcgatgaggaagatgagaccgaggttaagagagtccgatttagtgatagaacagaggagagcttagccctaccaaaggctgatttacaaccgtcacaagcagcttcaaaagaagtaagaaaatcacgcctacagcaggccactgtttcgcgcgatgcaacagaatttgagcaggagacgcagacccttgaacctcaagttgaaggaaaaccgaatactaatgttcagcagcgatcttatgtatcgaaagctccatttccacagcgcttaaggaaggaaaaatcagacgacgtcaatgctgaaattctagaaacactctgcaaggtacaagtta

SEQ ID NO: 12796 - DNA, 433 bp, Gossypium hirsutum
cccccctcagtaggagaatttttaaaatacccttccccagataatatatatattacatgtttttatattccaatctcaatatttataatccattacaatatattttcagcccgttcaattttcgaagagccaaccctaaaagtgcttatatatatatatgccctataatttcttttgttgttattaacaatcttttataattgtgattcgaggttcacctaagaatatattgctgatttaggtgtttcaaatttcttttacaaaaactttaggattgaaacaatttctatacaactaaaataatttaattagggtaaaatgtaaaataaaatctactaatatctcatatttttaatgaatcttaatataaataatgttattatatatgagaattaaatgataataaaaaaaaaacttcactaacaatcgaggg

SEQ ID NO: 12797 - DNA, 660 bp, Gossypium hirsutum
accaaagattagtggttttttttaaagactttacacaggaagataggtgaagcgatatctaaatttttaatatatgaacaacttcattttcaattagcaagttctctatggttgtataacttaattcaagtgtcaatagaagttggacaatgtgtaaagctctcaataccttatgaggtttcaaatgtgtatttggagttagagtatcaacgagttcgtgattgggtaattggactaaagactcattggaaaaaattgggtgcaactctaatgtgtgatggttggaccaacaaattgaattaaatacacatcattaatttccttgtttattgaagtaaaggaactgttttttaaaatctgtgaataactcgagtgttcatagtaaagatgttgaattctactacaatttgttagatttagttgtagaaaaaattgaagttacattttccaaatagtgactgataatgaggcaacaataaaagcctctagaaaaaaaattaatgttgaaaagaaaacatttatagtagacctcatttgcagctcattgtttagatttatgccttgaagatattgggaaaaagcccaatgtagcaaaaatgttaaatgatgctaagaaagtgacttgaccgtgtgacccaagtcagagagttacacgggtaa

SEQ ID NO: 12798 - DNA, 539 bp, Gossypium hirsutum
  misc_feature (477)..(477): n is a, c, g, or t
  misc_feature (479)..(479): n is a, c, g, or t
  misc_feature (481)..(481): n is a, c, g, or t
tttcctgcatcttaaatatcttcttattcaacattcttctgtcttctatgctttcctacaaaaccctttttctttctttacatattaaagtttctatttggctctttcttgtaatctattcctttaatcctgtttttattagttctctaaagcatttcccttttatgttacttagacatagatggacgggaagatatgaagctcatctatgggacaatagttgcaagaaggaagggcaaagcaggaaaggaagacaaggttagtgtggaacaataatataccctctaattttggtattttttgttcttgaccggactcatttttgttctctttttcatgcatgacttggggattccgattctaatcaaatgattattttcagtttatttgggtaagcccttctggcattattaatcattaattattatcttatatttattcttgtaatgtgttgaataacaaatcatttccaaaatnantngttttagggggttatgatatggaagagaaagctgcaagagcttatgattagctcactc

SEQ ID NO: 12799 - DNA, 534 bp, Gossypium hirsutum
  misc_feature (466)..(467): n is a, c, g, or t
  misc_feature (473)..(474): n is a, c, g, or t
  misc_feature (490)..(490): n is a, c, g, or t
  misc_feature (492)..(492): n is a, c, g, or t
  misc_feature (498)..(500): n is a, c, g, or t
  misc_feature (502)..(502): n is a, c, g, or t
  misc_feature (513)..(514): n is a, c, g, or t
ctatgtgaacgctcgttgtggattggtattttgagtaccaaatggttgaattttgagatatggtatgcttgtggttttaggtaaaatgatgcatgtttgaaagtgatcaataaggtgaatttttgaatttggtatgtttagattcgaaaattataatgttatgagcattctgattgttggtattggaataacatgatttaggcttggttgagatttgtaacaccccgaactcatggccgttaccggaaatcgaacacgatgtgttaccggcttacttcatttatttccccctatattttttttgttccaggcaagctggctactgtatcgtggtcgctttaaaaatcatattttgagttatgaaactcgaaatccaattccgtaaattttccccgatactagactcatatatatttatgggggaatttttttagaatttttggttgggccaattagtaaagtagcnngcttgnntggaacaaaaaaaatntngggggnnntnaatgaagtatnncggtaacacatcgtgttcga

SEQ ID NO: 12800 - DNA, 597 bp, Gossypium hirsutum
taatggattccaacaaatttcctaatttttcaaaagcacccccatttttttaatttcagctctgtcaaattttatcttatccactatatattaagaacaaaagcaaagaggattgatagattactggcctattaatcatccatatactgtttaaatatttattgagcacctctttgagatcagatttgtacattatgttaccatgtccctatccttctccttgtccccaaaattaacaagttggacgctcttaagtgctacgtctattaacatcaccgcccagtaccagtaatgccatgaatttatcaactcctcctcctcatcatcaatactttgaataggaatggcaccaaagaaggaaatgtcatcttcaaactgatgctttatattcgtttttatgccaatttataattttgtttcaagtacaagaggatggatgcatacttcatactcaatttttatgtctaattactgaaaataatatcaaaatggactgtaacactccctacccgtattcgtcatcggaacagaatacgaggtattaacggagttacaaatttatttatcaaacattttatttcatctagcattcatatt

SEQ ID NO: 12801 - DNA, 644 bp, Gossypium hirsutum
gaacctagttgtgtttatatggtatgttgtgtgtgtataatttaaatccttttctgttagattttgaggttcttcagtcgattctgaattatcctacatatttgattttcgggttatgaccatttctggtttagatcattttaagcttgggttattcatttcggtccctttaacctgtgcaatcatatatctacatatcttactttaaaatagatagttttgggtttgggtcacttgggttattttggctggctattgttggtctagttgttcgtttggtcctttcaacttatgcaattccttaaaatagatagtttcgggttttagttgtttttaggtttgggtcattgctggtccagatcatttcatcattcggtcacctcagactagggtcatttattttggccccttttaacctgtatagtcatatagccttatatcttaccttaaaatagatagtttcagattcagatttggttcaaatcatttcaatatttgatcactttacactcaagtatatattttatatatatatcttaccttgaaatagatgctttccctcacattttcatgtgtttgtatataaagtgtcacaatcatttattgtaataaggaatttgcaagatataagattgtaagctggg

SEQ ID NO: 12802 - DNA, 639 bp, Gossypium hirsutum
tctcgaaaaattttaataagtggtttgaagtctgttaacacctcgtgttcgactccggcgacggcctcgggttcggggtgttacaacgtgacttcaattataattgtcacataggttcaaacttaccaagctcaacttcaaatataaacataacgcctattagtcacgaactcaaggtacttacccgatccgctgtccgtgattgactcaataatgtcgcacacttagtgttcataatgattcaaaagtatatattaagtctgcacagtcagtgctatataatcaactcgcacacttagtgctatataatcaaactcgcacacttagtgctacataatcaagctcgcacacttagtgctacataatcaaactcgcacacttagtgctgtacaatttaaacccgcacacttagcgccaatctcatgatcataaatgtttatacccgcactcttagtgccgagatcaacaactcaatacatctcacctcttttctcttcatccaacactttcatcaccacatacatacatgtatatatatatatttatcattccattcagcatcattacatagacgttatgatcatttaaattaatacaaactatatgcttaatgacttactttgtgttggggtaagacgg

SEQ ID NO: 12803 - DNA, 558 bp, Gossypium hirsutum
ggttcttgtttacttttgattattttgtaaggctatcaaagcatgaatgtaattagaccttagagttgttaggatttgaatttgatagatgtaatggctgaattatttagctctttaatttgtattattttgtattgcaacttgctaaaactgatgggagcagttacatatgttaggtaactgtcatactatttttgtaacatcttatatttcaaagtttcaatgaaaaattgatttgcttcatcggttacttgctattcttagtctttcaattttgtttcattgtttttgcttgttgttttctgagcttatgctcgatgaagcttcattttgttttatttgctgctgccattgatctaacaaatggtaatcagagtctcctatctttgaggacctctgctgtttaagttttagttttcaaaatcaatttggaatcatgtttgcaaagtcagtttcagcagcatgagttttgcacctcctccaccaccagtatttgctggagacaactaccacatttgggtagtcaagatgaagacatatctccaagcacttgacatc

SEQ ID NO: 12804 - DNA, 620 bp, Gossypium hirsutum
cattcaagaggatgcaatgaaggtgttgaagattgccattttgtgcaccactacactgcctgccctaagacccaccatgagaagagtggttcaaatgctcaaagaagctggaccctaccgattggtcgggattgttatcggaaaggacagtaacctgaaggaaaaggaaaaccattgatggattcatatagtaacatatggagtaacttttttttgtaacatattaggtaatttcatcagcatgtcattggttgtgtggtatattggcctagttttagatgggcggttcaaaaagtttcgggtttttcttttttcgattcagttaattttgagttaaggtagttcaagtttttgtgtctagtcattacatgttttgatatttcaggtttaagtttattattagataagtttaaattattaattttcatgatcaaatcaagttgagatatgagacaaatttaagttttgattgatctaatcgaatttatgaaattagaataacgagtctatctaattattcataataatgattggaaattgtgaaaataaaagagtactatttttgtaatattgtgaaattattggtgtgaattgattaatgtcacattagtaatagaatc

SEQ ID NO: 12805 - DNA, 681 bp, Gossypium hirsutum
atggttcaaggcaagagaatatgattaagattgtttaaggatcccccatgggagggatagtttaatttcttatatttgtgtcgctttttccttttcaccacaaaaaattaactttagattttataaattgtttaatatttttacaactctttaaattttaaatgtgctatcaattataattacatagttaaaaatattttaacaactttttgttaaaatttaaaaagaaatctaaagattttcactgtaattgttttaaaatatgaatgtgacaatttcgtgtcagaggaagtgtcactctcttgcccaccaaatctgtatggagacaatttccatattaaggggtgggaaatttattgaaacttttatctgagttatgctgattatatggatgatatcttgtcaattatggaagatcatattacttgaaaaatgttattttggtgattggattgttccaaaatttctcgagacaatccctcagattgtggactttggatgaatagttattttgttggatgagccaccaagagtccttaatttatttttatgttattattataatgtattcttcttatgatattgttgttttagtgggattgtattagatcttcatttttaagcaagtttcaaaattaaaatctatatatttgagagacttacctaagtgaaatgtacaga

SEQ ID NO: 12806 - DNA, 406 bp, Gossypium hirsutum
aagtgagtagtttcgcttcttttttcttttaatttcaaaatgtcacaacaaatttaaccaaaaaaatttaatgtattaatagttaaaccaaaattttaaaatctaaaaaatagagaaattaaattcctaattttaaaaaatacagggaccataggcacaaatgtcaacaatttcaacgctttctcttgtcatgttgaaaagaattgtgagaataacttctgcaaccttattatcttaatgaaatagcatatgaccgtgaatttacacacaacaaacaatactgcccaccatggaatcacatagcttgataggagtaaatcaccgcgaatttacacagaacaaacataaccgcccggtacggaatttttcatataaatattcaacgctactaaatcaaagccaagac

SEQ ID NO: 12807 - DNA, 598 bp, Gossypium hirsutum
  misc_feature (80)..(80): n is a, c, g, or t
  misc_feature (213)..(213): n is a, c, g, or t
  misc_feature (310)..(310): n is a, c, g, or t
  misc_feature (353)..(353): n is a, c, g, or t
  misc_feature (500)..(500): n is a, c, g, or t
  misc_feature (508)..(508): n is a, c, g, or t
  misc_feature (542)..(553): n is a, c, g, or t
  misc_feature (563)..(563): n is a, c, g, or t
  misc_feature (566)..(566): n is a, c, g, or t
  misc_feature (568)..(570): n is a, c, g, or t
  misc_feature (573)..(573): n is a, c, g, or t
  misc_feature (587)..(587): n is a, c, g, or t
  misc_feature (590)..(590): n is a, c, g, or t
  misc_feature (595)..(595): n is a, c, g, or t
tgcacgacattgcatgaccgttgtggttatacctttaagtgggagtgagaagctatgcctttttgaagttttcacctccncatgggctagtggattacttccgggatacatccgtaactatgatttcgtgagattttcatctccgcatggtcatagggaaatgtattcccctgaaatgaagtcgatccatatgagcctataatttgtggaatntgctggttcaggtaccctttctttagaaccaaaccacttatagtgaaccctaagagctgtcattacgtagagctacgttaaaccttagtagttgccnatatatttgttttgattatttttgttttgcttgtattttatcncttatatttgatactgacttatggtgttttgttttgattgtgttttgcataacattgcatatttaaggaggtgtcgattcgtgttcgattactaagttagaagatttaacatggagaatgaatttcttaataaagtcgaggataatncggccatncgtgcatggtcagagaagttacaatcagagaaannnnnnnnnnnngcacaagganatncnnnggngttacagaacttcnccngcatnaat

SEQ ID NO: 12808 - DNA, 543 bp, Gossypium hirsutum
ttgaattttagtgagatagggtcagaatggtttttgaagtcccctgttctgacattagaaaatcgttatcaattgtacagaaagaattataggtcataatttatatttctagattccttagtgagtctattttgaaaagaaataaacgaaaaacttatatgaattctgtacaataagataattgatttttagtgccaagaggtcagatctatcgagctgtgaaacagtggataatttaatgaataaaatgtactaattggctaagtaaaaaattctgaaaattttatggtaagtaggaatatgagtctagtttcagggaaaatttacggatttaaatttctagttttgtaactcgagttataattaaattagtgacagtcacgcaagtggaaagttttgttgtgaacagtgaatttaattttaaaagcaaatttttatgctccgaattggtaagttaaattgaatgacatctcgtactcaattccggcgacagtttcgggtaaggggtgttacagaaaaagagtatagcgtgtatttactccc

SEQ ID NO: 12809 - DNA, 640 bp, Gossypium hirsutum
gatgttgttcttagcattgttcggttcttgcttgataatatgtgatgcagtccttactccggctatttcgggtttgatcgactcctttcgatgtcacattgtagtttaataccttcttgtgtttatgtttcgtttttttgttttcttttggcagttttatcggctgcatcgggtcttcgacgatcgttaacggatatcaaatgtaagaactaagtaattggaacatacaagtttatgtttttcaaccattgataataaactttttatgttgtttctgcagattcgtcatcccgtaaaactgaggattcggtattgaaagatctaaggaaatgtaagtttttacgaaactcgatgtttttgatatcaatatatcgtgactcggcctcttatttatttcagatgtacctgtgcctacttcatgtgccatattggtttgccttttcactctacaacaatacggtagccatagaatcgggtcgatattcgctccggtagtcatattatggcttttatttattaccggagtcagtatatataacatttttcactacgatccacatatcgtatttgcaatctccccgaagtacatgtacaagtttttccaaagtataagctggcgtagttggagatcattgggcag

SEQ ID NO: 12810 - DNA, 603 bp, Gossypium hirsutum
  misc_feature (57)..(58): n is a, c, g, or t
gagtactgttatcttctccttgcttttaagtttttatgtggtgtgacaatgtttgtnncttttggtttggttttaatggagttgttattttccaaaggcatcttcctttacatgttcttagttatggtacgtgcaactattcttaaaacatgcgatacgagattcgaattttaagctataaatattagatttagaagtgaatagtacaattcacataactcgacaatttgaataatagattggtgtaaatactccttttggtccttgttcattttaaaaataaataaattaatctttctcaacaaaaattataattttctatttttctttaaagttttcattttaaattaataattaaaatatttaaaaatttaaaaataatttaaaatgaacatcataacaagaatgttgaggcacttaactcaaatataaatatctgaaatagaaaaatccaaagctaacaaaaatatttatactttacgtaagtaatgacgtggcaaattatttaaccgttagtttacatcccaataaagaaatgaaaactaactatatatatttgaagtattttatgatgtcaccactacatttgttggctgggcctaa

SEQ ID NO: 12811 - DNA, 499 bp, Gossypium hirsutum
tatcactttagcagatgtggcgttcgaaccctataccgaggtttctatctttctagatagtgggtcaaggttttgattgaattttcaatctatctcactaaacgtaaaagtgttgggtcgacccttactagtgttggttcttgtttcttgagtcgtttttcttttcttcattttatcataacataacacatccatctttagccatttttcctgaacctttgttgttataaaacaatattgagcctatttttctttttcaattttatttgttagctattcatttaaggactttttaatttaatatagttttatttaaattaataagtttgcatatttttaatttttagacttgcattttgtgtgttctgcatttaataaagtcatgcattatgtaactcccatgttagtttaagtctgcatcattaaattaagtcttgtatgatgcgaacccggtcgcatcatgttttgacacaactcgccgatatcagaattggcctaa

SEQ ID NO: 12812 - DNA, 618 bp, Gossypium hirsutum
  misc_feature (569)..(569): n is a, c, g, or t
  misc_feature (607)..(607): n is a, c, g, or t
gacaactttgaacgcttaattggtaagtgatttttgtctcgtttttaatgatttctatgtttttgtgatcgttacaactagcactagctagcccgtgtcctcgatttcaaaactgttaaagattttgatagtttccattgttgagcttatgtgttctttgttgtttaatggtgaaatatgaatatttgatgttagattttcaaattttataatgtgatttttgatgaaaatgcaaaaaagggattaaattgataaaatgtgaaatgtggtggttaaaagtgtgaataaattgaaaatatgggctgttagtaatatatattaaattcagttaagtatgagtttgtactaaattgcatgaatttgcaattttatgtgataaggactaaattgtaaaaatatgaaagtttaggggcaaatgtgtaaaatagccctaatgtgtgttttggactaaattgattaaatatttgattaaataagctaattttgataatatatagatcaagataagtcaagattgggattagatcggggaaaagaaaaagtggatgaatagtcgataatttccatcngagcgactcgaggtaagttcttataattagaatcaaantttcatttaat

SEQ ID NO: 12813 - DNA, 674 bp, Gossypium hirsutum
aatttctgattctgccaatgaataaatttctcgtgtatgagctttgacccaggtaatttttcacatttcctattgataaacccccttcatgtaccaatttattccttgacttatcaatttgtccaattcgtgactgcaattagttgacaaacattagcatcaacagcggtaaacgtaattatcataatgatttgcaggccaagaaatcccgaagtgagatcaaatgttcaaagcaaaaggacaagcaagcaaaagatgagtagtcgattcttgaaaagaagcacatttagggcaatttgcattagttgagattctcttaatctgtaaattgtggaaagttggcacataattattagcaaaccttcatagtgtaattttaattttgggagggactttaagttgccaaagttgtctgtagaaagtagaaaccataggcaagtgcatgctaagattagaattgctatcattagttaggccagataagaggagttgatagccacttttcacagaatagtcctctgaattgtcatcacaataagactgagctaatggtatacggagaattctacgaggctcgtccatatcgaaaatggtattaattaaatcgtcgttccaatttttctccccgccagcataagatcagaaacaacattaatactatcactaactcttgt

SEQ ID NO: 12814 - DNA, 361 bp, Gossypium hirsutum
aactagcattggatgaattttagatattaagtggtaaagaacacaaaatataccattagctatatagttagtatcaatttgaaaatgaagtataatatataaaatctgttcgaaacattgaatccttcagcataaagcgtacaatttccatatgtgttttgcttcttttggagaaaaatataaacaggaaagtacaaaaccagctctaaccatgccaatgtgtttcttcatattgggtgagtatctgagcttttcaatgggcctgcaagtgataacgtattaatttaatatggctttcagcaaaatccctgtggaacctaatatatagggatacctaccctttcaccatcactacatcgag

SEQ ID NO: 12815 - DNA, 636 bp, Gossypium hirsutum
tcaaaggagacccaaggcttcgagctatatcaaacgcaataagggttgttacctttgggttctctgttaagaagcaacagtggtggtcagttaacgatgatggaccggtgggtgcatagtggaccagtggtgattggagtgggggagggtggctgaggaaatcgggaaaagagaaagaaagaaaatgaaaatgtgacctatttatcaatatgattcgtgccggtcgggtcaagccaggcctggtaaaaaatatcatatataaggctcagtctgttttaaaaatgagttttatttttgttcaaattcatttttcgagtttatatttttgtttaaatctcttactttttggacaagctttcaaatcgagttcaccgtaattacattgaaccacacaactaaaatgaaaagacaaaaaataatataatttttagatttttaatttggtaactaggttcactttgttatttatatatatatttatctattttgattcttaaatttgaaaacgagattcatttaggtgcttaaatttagatttatcaagatttgatgatatgatcagtgttattagaatatgattggattggacgaacaaagattaattgatataacaattcgaacaaggaccgaagctaa

SEQ ID NO: 12816 - DNA, 383 bp, Gossypium hirsutum
ttatgagaagcactgaaagggtgacgtttgggctgacgaatttgaagattcctaattcgtggagaaacagtcatcacgttgtcatcacacacattcttgttgtagggactcattaatttctatatgttaaattaaaatataattaattttttaaaaaaattatccaaaaattttgtgacaaattaaaagccgaagttaaaaacaatagcaaaaccgaatatatatacatcaaaatggtatgtctgttattgtactgttttgttggtgtcaggtggtatcagactgaaatgtaataatttaaagtatttagggatttgaagtgcaaattcccattttaagtgactaccggaaaaagaagtgaaatggtgctgcttaaatgtggc

SEQ ID NO: 12817 - DNA, 410 bp, Gossypium hirsutum
gtggtttcgcagaaacttctaatgaaatgatagattttaataaaaaattccaatatttatataaaaaacatatatatcctaaaatatgaaaaaagaaaacaagtgaattgatttaaaaattatgaaatgtatgacatcatattctaaacttgtaggattgaaatggaattttatatttgcattacctaggaaaaaagacaaattattaaaatttgttaaatggttagaaagttgaagaaatctctgttcatgcatgaattgagttgcaccctcatccattttctcacctatgacatcttcactttacttaatggaatcatggctaggctcgcatatcaaacaaagttagacaaatgtgcattttggattacatttacacgtctctccccccaccttttaatacccattct

SEQ ID NO: 12818 - DNA, 600 bp, Gossypium hirsutum
tttattaatagtggcacgtaattggggcatttagtttagaacttttaaaggtcaccattctaatcattttaattatgctctaaattccttacctccaatcattatttttggttgataaaatgacggtccaaccactttatactttagttactaaccatctttattttttcgtaccttatagttatctttatctttcaattttatctataaatatttaacatgtgccacttgtatatcatatattgtttagtatttatattaactagtagattttatgtattatggttgttggagaaatagcaaatcataatcgaataagatttttcgatttttttgtgtttaactaatattgttgttgtcctaataatttagaattatagattttagctaaattttttgtgatgtaaatttagatttggacaaaaagatttttatcttggactaactcaaatttaataaataactttgaacattatttaagttcaattatacaaatatataaacataaagctatatatatttatatattttttgaaaatagtgaaatgatttatttgaataagctaagttaggttttaggttgcatgtaatgccccctaa

SEQ ID NO: 12819 - DNA, 425 bp, Gossypium hirsutum
cattgaccatcgttgaccactattgatcaaatgttgaccaagttgactgttcacgcggcgttatcagaatttatcacaccacccttctttttttaaaatattatatataatatattgtttaaaaatataaaaatatcatatataatataaataattcaaaaaaaattaaaaaattttaaaaattaaaaaaatctaaaatgtataatcataaatttaaaaaattaaaatattatataaaaattgaaaataaaaaataaaaaactataaatttatacaatataaacctttgtatcttatttgagttaaaccaattcagattactccaaatttatctgtcgaacaaaaaaacataaaaaacattttgaatttcccgtagaaagagatttggctaatgaaaaagctttcaaggccgcctaatatcattt

SEQ ID NO: 12820 - DNA, 632 bp, Gossypium hirsutum
tgtgtccataaagatgttcaatttccaaagacgttaacaaatttttggtttaaatattgtgtacaacaaaattccatgtttgtaatattagaatatattattaggaacagaacaagttccaaaagttgtatgttatcttgtattcaaaatatttaattccaaatttatatattcgttacaaccttcaaatactcttctttctagatcaattaacaaattccatcctctttttaaggattggatttgactttaggtgttcaatgtcatgcatttaatgaaatttgtaatccaaatataaattcaaattttggtatttaaaaaaaatttaatatctataaatacaattttaaaatttcagataattatgggaataatttatattaaaataatgttaaaaattaagatttttaggcatcggtcattaattattctatgtctttaaaatttaatgatatggtgaaaatatttaaaatataagtaattaaaaataaacatctaaagctccagagtagtttactgatatttttattttatgttttaaaaaattattatgaaattatattttatttttaaaaataatattttgattttaaaagaaagatacttaaattacaaatgtttggccacacatc

SEQ ID NO: 12821 - DNA, 545 bp, Gossypium hirsutum
acattaggtccaaaaaaggtttaggtatcaattagttacaagtaaccaagttcatattaaccattgattaaagtataaaaataatcaattaaaaaaattaaccaaatcgaaaaattgatcaattaaacatctgctattaagaccctctattttttgagtatcattcatgtctattttacagtctatgtttggtgtttatgactatcactcccaataatgttgataaaaaaatatacccttgttttattgataataacttttattagaataattctaaaaacttctatttttaagaaccaataaaatagtgtcacatcatcatcaatttttaaagacatacaaatattattatgcacccatacatatttaataatatcctctctaattttatttaattttaacataattatttaaaaacaattaatttaaaatttaaaaagaaagaaaaaataattaaatctacctctcaaaaagtattacaagcagcatcattcaaataggttttagcggggcaaagcgagggaggttggcagggaacccaaacc

SEQ ID NO: 12822 - DNA, 515 bp, Gossypium hirsutum
  misc_feature (506)..(509): n is a, c, g, or t
ggaagtcagatcgtattttattttttcccttaaaaagtggataaaaattaatccatgtatattagattcaagaacaaacgagttcttcagaggcgaagttagaaaatttttttaggaggggtcgaaattaaattgtaatttttacgattgtaaaaatacaatttcaccattttaatattatatctttataatttttaaaggattaaatcaaatttttatcatttgtagggggccaaagtgtaattttacctttactaatttaaaatttaaaaaattttaaagggcctaaataaaaaattatttaagggggattggggcccctgccaccctttagctacgccgtggagtccttttgataaaaattttatctatttttattgtaaaaaattggtccatgtacatcaacatgagatatagttattttgttagccacaccagtttttaataatacaaatggatgaaatttttaacataaaaatccgtttgctctttgatctaacttacannnntggatt

SEQ ID NO: 12823 - DNA, 669 bp, Gossypium hirsutum
  misc_feature (236)..(237): n is a, c, g, or t
  misc_feature (254)..(257): n is a, c, g, or t
  misc_feature (292)..(293): n is a, c, g, or t
  misc_feature (295)..(296): n is a, c, g, or t
  misc_feature (309)..(309): n is a, c, g, or t
  misc_feature (311)..(311): n is a, c, g, or t
  misc_feature (324)..(331): n is a, c, g, or t
  misc_feature (437)..(439): n is a, c, g, or t
  misc_feature (506)..(508): n is a, c, g, or t
  misc_feature (520)..(530): n is a, c, g, or t
  misc_feature (533)..(537): n is a, c, g, or t
  misc_feature (551)..(562): n is a, c, g, or t
  misc_feature (565)..(565): n is a, c, g, or t
  misc_feature (569)..(570): n is a, c, g, or t
  misc_feature (578)..(587): n is a, c, g, or t
  misc_feature (592)..(600): n is a, c, g, or t
  misc_feature (602)..(605): n is a, c, g, or t
  misc_feature (610)..(611): n is a, c, g, or t
  misc_feature (613)..(625): n is a, c, g, or t
  misc_feature (628)..(643): n is a, c, g, or t
  misc_feature (645)..(647): n is a, c, g, or t
  misc_feature (651)..(657): n is a, c, g, or t
  misc_feature (660)..(665): n is a, c, g, or t
taatgggtatggcgttaaaagttttaaaggacggtgtgtttgtaaagttgggggtttcaaggggggaaattagggagggatttcaggggggaaaatttataaaatggcgcttttttttaaaaaaaattaattttttggggcgtttttataaaggttaaaattttttaatttaaacatctaatttggtggttaaaattttgagatattaaattttttattttttaatttaaacatcnnaattttgtggttaaaannnncaatgtagcaattaataaatgataaaataattttnnanncttataatgtttntngtttttattattnnnnnnnntctttgaatgatattattattataaaaataaaattttaaaatctttttaaaatttttaaaaaaatttaatatcttttaaaattcattttaaaattttatatcactnnnaatattaaacctttcaaaatttaaaaaaataaatgttatttacttttaaaagataattaaaaatgtnnnctacccatacannnnnnnnnnnccnnnnncgcccccaccccannnnnnnnnnnnatnccanntctaacannnnnnnnnntcacnnnnnnnnntnnnncaccnntnnnnnnnnnnnnnttnnnnnnnnnnnnnnnntnnncctnnnnnnnttnnnnnnatac

SEQ ID NO: 12824 - DNA, 675 bp, Gossypium hirsutum
ttcccataaacgcaatcaatctccacttggcacgtgtacatttccaataatgaagcttgccctttcataaatttattaggacaagtttagttgattttatttttaaattttgttattaatttttttaccatgcgaaaattttgtatataatgtgatttcaatttattatttttacataatgcttataaaagaaagatgcacggaatcgatgttagggataaaaaagtacatggattagaaataattaaattgaactataacaactaaatttataacttataaataatatatatattacaaatgattaaattgaactacaatgattaaatctacaatttactcatagtataaagattaatagcaaaatttgacttaaaggacttaatggcaattaactgggttacgactagagatgtttataggttaggtcaagtttatgcatgatattaatatcatacgtacatagttgcctaagcttgaacataaaaaatatgggtctcaaattttacttaaatccgcccatatttgtaaacagttatgctaatccctcttaggcccattcatagtactttttttaaaaatattattgattttatttagtatctagtaatatatatattttaacaccccttaccggtacccgaggccaggataggatacgaggcattaccgaaa

SEQ ID NO: 12825 - DNA, 620 bp, Gossypium hirsutum
ctgacgtgactctatttgaagacaacggtgcaagcaagcgttacaaacaaaatcaaaaacactaaggtttggttagttaatgaaaaagaaacaccgactgagcaaggggaccacacaaatattgaccgtagtccttttgcacaggaagactgaacttgagggaaaaaaaggaactgttgcaaagtagaagattgaaaaaattgctctaaccacgtgattgtcctcgatactcatcaaggaagtatcgtgaattattgatatgatgggaaccatgaaggcataataccctccaatcacggtaggcaaccgagttccgaacagtgtttgtagaagtgtattaatcccttcaacaaatagtagtgcctgcaccactcttactttatcaccctaaaccatcaaatgggggaaatagatcatgttaaatacagtaacaaacaattaaaattcatgttgaacatatatctttttttgctttgtgggtgtatgaatggggaaaaaaaaggaaatgcaaaagaatatcccaagttcagaaagaagagaatcatcacaattcgaagtgacatacatcatttccccccctcaaaggaacaagaaacgaagggatcatcacaacagttcct

SEQ ID NO: 12826 - DNA, 511 bp, Gossypium hirsutum
aattcaagttggcccctaaaatctagttggactgccacgtagaattaccgttagagagataacgaaacttaacggtagagtgatcacttcgtaacaaaaaaataacataagtgactaaaatgtaacatgaggcaaacaaaagtgactatttttgtagattacccaaattttaattaattgctgaggtggcgtacatgttgtagtgtgaatgcaacaaatttttcatccaaatttgaataatttgatagaaaaaacacaaattcaaaaattaagaaacgaagaaaaaagaaaaaggttaaaatgattttcttttgtatagttgaaaggaaaaaaaaataaaaaaccaatatcttaaggaaaatcaaaggtaaactaaaagaaaaccccaactctcaatgatattaagagtttgtttagtagtgcttaaaaaaaagtattgtttagtagtgcttaaaaaaagtagttttagtttcaaaaacacttttggaaaaaagagttgtgctaaacagaa

SEQ ID NO: 12827 - DNA, 525 bp, Gossypium hirsutum
ttcacacccagttatcaaccctatagatacatgcattagtaatcattttgtctctcactaaggaactggttggttctaatcaaaccaaaccagaattagaaatcaactatgtccaaatcagcctctaaatttttctaatttttcagtagaagctgccaacttacggcttctttcaagttaacccctaatcgttcctaaattttggactttaagaaaatcaggtgtgacaataattatgtaatgttattacattcaattactgaaaatattatgtaatatcaacaacatagagtattaaggcttttcttgataaagtagaaagaaaattagaaaaataaaatgaaggaaaatatattttttctttccataggtgtgtttggtagaaaagatggaaagaaaaaataattttttttctctccattgcttggtagagttgaaaagtgaaaagaaaaaaaattaaaaaatgcataatttgaactaacatacacttctcttcccatagacctaacatacacttctcttcca

SEQ ID NO: 12828 - DNA, 637 bp, Gossypium hirsutum
  misc_feature (569)..(571): n is a, c, g, or t
  misc_feature (593)..(595): n is a, c, g, or t
  misc_feature (600)..(602): n is a, c, g, or t
  misc_feature (607)..(609): n is a, c, g, or t
  misc_feature (627)..(629): n is a, c, g, or t
ccaatgtaggttgaaggacacatcgagcaatagtatttgcaagtaaatactgatcatttcctagttgaatacatataaaatgaatgggcgggctcaggaatactgcttcaagcatgcatcaaggattcaagatggatgcatggcttcccatcatgagaaaaatctttctcggattttattccctgtgcaaagactaagtaacaaaattcaaaatcatacatgcattagtgtcctcttgtcacattgcattatatcactgccttggctgcattccattaatacagtcattgatttttcacgtttgttttagttaatgaactctaaaagtcgtgggtcttgcattctatatagtaccattcattcatcatatcaaaccgaatttgtagtaattgttttagggtataattctactcaccattttgtcacgtaagacatccaagttgacatttaaaatctatttgaattgtcacgtaggaccgcattagggaagtaacagagttaacggtagagtaaccacttcgtaacaaaacaataatgtaagtgactaaaatgtaaaattttaaacatannntgactaaaatctaatttaaaannnaatannngtgannnatttttatagtttatccnnnttaaaata

SEQ ID NO: 12829 - DNA, 633 bp, Gossypium hirsutum
  misc_feature (36)..(37): n is a, c, g, or t
  misc_feature (39)..(40): n is a, c, g, or t
ggtcgaacccaatctaaactctatacaaaattgtcnnannaaacattttcttttaatctcacattatatgttctttaattcttgatttctccaccactttcttgtacataaacaacccagaagatgtcgtacttcacgctcggtgaaaaccgatcgaggtacggcagctcctttttccggaaatcggaggtaaggatccacgaatagcaatggaggagagatttccatacgtaaaggcaagctaccatcggcatggtttggcatttcaagcaaacgcccgttgtcgcaccatccatcttcgagaagcgtgacctgaataaggccaagttcgcgtaggttacatcttgtagttcattgaaacacggcgacgaaatgaggttcaaggagattatgtctccattggagaacttggctgcatttgacccatcttttgattcaccggcatatgaatcgaagaagctatgttgagttaaaatagccatgcttgacatacttgttaacattgatagctgaaaaaagaaatagagattttgagtgagtgctcgatataagtatatgtttgacatggatatatttgattttgacttgtcatcttatctatctatttattaggcttattcatgggttgaggtt

SEQ ID NO: 12830 - DNA, 465 bp, Gossypium hirsutum
ccaaagagcgttgaattgaagaagggaaaggttctcgggttcttcatgatcgaactggaaattgaaaaagaaagatgaaaatcacttggaattcaatgattgattttaatttatgaaacagggattttttttttccttttttgaataccattgtgaaatcaagatctgaaactatcatgaggcggggagggccattgagacgatccatgggtggtggtttaagttagttgtttcactgcaaattcaccgtgtttgatgagaaattttggtttaaaatggaaaagaaaaaacagaggagggaaaatgtggggaagaaattacgaggctatttcaatggagatatgtgggatgaggacagaaatagccatgaaaatggaagcaaagagagagaagactccactataatctctatgatactgtagggacaaccaagggacttcattcctcactgtgaatgtttgttaa

SEQ ID NO: 12831 - DNA, 511 bp, Gossypium hirsutum
tttttttttcgttcattgactcacatgtgttaagaaaaaaatgagtaatttaatatccgtctttagactaaagagtaaactagttttttttttaaatttcatctaaatctagtgataaaaactagtatagctaacaaaataactagacaacacgccatgtataactcatgctgacgtataaaaatcagcttttaattgtagaaatatatgaaacttttaacaaaaagatcagtttgctctttaatttaccatacaataactttacttgttttttaagtaaataaaataaaatgtaatccgtctttcgatacaaaaatctttgtatcaatgattgaatcaaatactcgaactgaaataacaaatcatatataatttgggaaatatatttgaattgaagctcaaaataagatcttttaggaaaaaattaattaatattaattaagtgttaaagaaaacccaatacatcaatttctaaattaatcatcaatctttaaattattttaaatgaatc

SEQ ID NO: 12832 - DNA, 641 bp, Gossypium hirsutum
taccaagcctttataattcattcaaaaacatcacaaaactcatgatatcaacaatggcatttcatgaaatctttaacagaaatagaaattcagacatgggttttgaagaacacgaagcaacaatcacagaaacgtagaaattatcaaaaacggaccaaagtacataccttaatcaaccaaatcaataaccgaaccctaggatggtcttcttctttctatttctttgtatttttggccatacatgcgtgaaatggcttcatttttatgtttattttcatttaataattttaataatcattttcccattttgcccttgtcatatatcatcaaattttcaaccactaatgtccattattttctaccattaatataaatggtaaattttacatgcaaggacctttattttaaaagtcaagccaattaggtgctttaacatttagcactcaacttttatactttacgcaatttaatcctttttcataattaaacacagaaaagcacaaattaaatcacagaaatttcacagacataaattcacatatcacagacacagaaactaatattaaaatattcttcagactcaaatttatagtctcgaaaccactattctgactagggtcaaaactgggctggtacacatc

SEQ ID NO: 12833 - DNA, 652 bp, Gossypium hirsutum
acgagaggaaagggaaaaataaaacaaaaccattagttgcttaaaaggttaatttattcaaatggcaccaaagctattgagtgtgttatggtccacgttttcttttttctaaatgggttaatgtatatttcagcccctgaacttattaaattttatctaattggtatctaatttcttttatgaattaaaaaattagggaaaaaatcaaatactaattcaattgataaaatgtatttgatatattttttaaaactaagggcatttttggatgggtggtgcgcttatctgcggtaagtaagaaacatgatcagatatgtaaattttaaattatgaaatttttatttcatatttttaaatattcaacgttttttcatcaaagtcaaatttcaaacattaaatctttaaatattttcgttaaaactattaatttgatatgcttatttttttgtgaagtatatgttatgttatatgaatacagcctaatcaacatattaacttgacgaattttaacaaaaaatattaacaacgctaataataatgtttaacttttttaagtatagggacttgatatcaaattttgtcataatatagggattgatgttacattttaactgttttttcaataaggggccctcaagttcacttccaaaaa

SEQ ID NO: 12834 - DNA, 651 bp, Gossypium hirsutum
aatatgagggaagattgatatggctgtccacttaagtttccaatattttaataataaattaccattttaatattatatcctatggattccacaacaattcatctgttttctatcctataaaatgttaaaattgtaataaaatttgtgtaatgggctttaagagtgtgtgatgaggattttcacttaataatgtcacttatcttcaaaatgaatcacaattaaaactttactacttaattttgttaaaattttattaaaagggtaaaagattatttctaaaggaaattaaaggaatatcccatggcatattttagtgattgattttttcctaatcaaactagaaataaaattggtacaaatgaaagagaatatcttagtgttagatttttattattattatcatcaaatcaagagtgcattcgtctacaaatgaatggtaaaaaataaaaaataataaaaggaaagagtacgcatgtgtagtagataactattttatacactgttaatttattaatataatgtctagaactacttataatcttcctctaacccttacatatgaggataaatgtgtttcatcgtactcgaatttacattctctaatactgacaataatatcaatttcaatcgagttaagactcaatctgcaaa

SEQ ID NO: 12835 - DNA, 577 bp, Gossypium hirsutum
  misc_feature (555)..(560): n is a, c, g, or t
  misc_feature (566)..(566): n is a, c, g, or t
taacgacgcttggttggtaagtttttatcaggttcctagattaactgaaatgatttcaactaattagggacccttttatgaaaatctaatgcaaatgatgcaatgatgcaatgcaatgcaaatgtatgagatgaatgcaatgtagttataaacaaaacaaaaacaaaacacgttagtacaggtgaaataaatatcaaataaagtacctattcaggtaaccactaaatttgggcaaggttctacttaaggtggattctcaaggttcactatatgtagctcagctctagagaaagggtacctgaaccagcaaattcctcaattctcacccattataggctcatatgaatcgagttcggttcaggagaatacatttccctatgacaatgtgaagatgaaaatctcacaaaatcataggtacggatgtatcccggaagcaatccactagcccatgcggaggtgaaaacctcacgaaagcatagtttcttactcccacttaacaggtataaccacagcggtcatgcaatacaatgcaatactattccacaagaccacacnnnnnntacaanacaagaccaca

SEQ ID NO: 12836 - DNA, 697 bp, Gossypium hirsutum
tatgtgtgacaggtctgtacattcttactttcggtgtctaaagcatattaatcgttgaggtttccatttaattcagtgatttatgtttcaggcagcggtgtatggactgggtgtttgtacagaatttggtggacctgtatttaagccgcttgtaggaggtaaaattttcatgattgtctgtaaggtcccccctacccccaagaataacatttttctttttgacattttccagaggctctatcaaggttaaatgctgtaatctggcatcccaatgctttgcaacctgaaaatgtaatggcatatgataatgctgtttctgctttaggaaaaatatgcctgttccatcgtgacagtattgatgcagctcaggtatgcaatcaataaaattagttttccaagttaattaataagtagatgttttgatatggaaggattggatctgtgctttggattaaacacatgcatgttcctaagctatcttgcaagtctccaaatgtcttcttgttaaaaaccattctagaaatcaagatggattgcagtgattttgtaattgtaccttttctgagtaaactttgcagtgcatttttcacaaaagtaatgcaggttgtgtgtgttgttatgcttatattgatactctatttctgttctctttatgttgccttcaacacacccatttgtgtttgggtagaatgttcct

SEQ ID NO: 12837 - DNA, 757 bp, Gossypium hirsutum
  misc_feature (530)..(530): n is a, c, g, or t
  misc_feature (565)..(565): n is a, c, g, or t
  misc_feature (577)..(577): n is a, c, g, or t
  misc_feature (616)..(620): n is a, c, g, or t
  misc_feature (627)..(661): n is a, c, g, or t
  misc_feature (664)..(669): n is a, c, g, or t
  misc_feature (671)..(677): n is a, c, g, or t
  misc_feature (682)..(712): n is a, c, g, or t
  misc_feature (714)..(718): n is a, c, g, or t
  misc_feature (722)..(753): n is a, c, g, or t
ttccaccactctatacctgcaaaagaagacaaaaaaaaggacagcaaagaaaaacaccaaaaaataaaattctttgtattttttctttggattttgggctaaataaaagccctatgttccttgtgccatgggagaggggggaatcgattgtattttggagagaagagattgtattagagggggttgtattacagaaatttttgggagaaatcaaaaggagaaaacaagttcaaaaggtgtttatccttatttttatttatttatttattttgatcttctttctattcgtttgttttatctattttacaaatatttttaacaaaaaaaacttgcaaaaaaaatataaaaaagggaaagagggaaggaacttaccggtgttcagttttccaacatcgtggacgaccgaggaagccaccgccgaagatcggtggccggaaaccgaatggattcttgagttctagggtgcttctcattaatttttgaaggtttttgggtcgttttaaccccaaatccgggctctactcgagaanaaaagtgaaaaaaggcctcgaaagattttccagcncccgtggatggnggcgccgccgtcggtggcctgtgacctgcgaaactgcannnnnaaaaaannnnnnnnnnnnnnnnnnnnnnnnnnnnnnnnnnnggnnnnnncnnnnnnnggcannnnnnnnnnnnnnnnnnnnnnnnnnnnnnnannnnnaggnnnnnnnnnnnnnnnnnnnnnnnnnnnnnnnnttcc

SEQ ID NO: 12838 - DNA, 670 bp, Gossypium hirsutum
tcttcagtcgtctaactgcttggctatctctagatcttaacagacgatacaaccttttccttttctcttcagacaattttaaatagttaaccgtagacattatccttagtggataccacttactggtcttgctaaatcaaaccttaattgaactatattctatctcaaccaaatacatactcatactgatgagaaccacttcaaatcattcaaaaaaatttcacatgtctttgttacaaagcacaagaccttcaaattagcgaacaactcaaattccttcaagtttcaaaacaagccatcatactattcacaaataataaatactagataactcatatttccaccttaataacacagatagctcaaactgacaaacccttacatcgaatatgcccttataataaactgggttgataaccacagcagataccctcattaaacatactgatttatacttcttttcaagaaacttcctttaaaacttattcaatttcaccacaaaactttccacgccaaataatttcaaacaaatcatatcattatcatagatttgtcagaatacaccacaagggccagacagagatatgccacaaaggcatcatatggaatatgccacaaaggctaatagagtacctcaaaggctaacaaaatgccacgaaagccaaaccaa

SEQ ID NO: 12839 - DNA, 654 bp, Gossypium hirsutum
tttcggatcgagttactgaacgatttataaaagaatcctttgatttagtggagcttttcctcttgtttctttcacatgaataacttatagtgaactagtgaaacttgtttgagttttaaatctcttgactaaattattctaacgtaattttatttctcccaacttgatctctttaataaggttatatagttcaaataaaatattaaagcaaatattccaacaaaagaaggacacctaatagataaaaatctcctaattgtaacactatataccagacctaatcgccaagtccgaattaagggatgtcacatttgttgccaaagtaactatgattaataacgattcagtttaaccttgtatgtgctagcaattatatattcatttataatatgataaatactcatattcgggtcttatgtgagcttatgaaagctcttaaggtgacttgggtcgaataaggatcaaactgtaaaggttctaaaatatggggttgacatcgtgactttgggggctccttattgcgacgcaacatattgactagactagttgcgatattaagggcttgatgtcatgacgtgacctctatttttaacaaggtctaatttggtacccaatcagtcataccaacacctacctagttgttcaattcaactg

SEQ ID NO: 12840 - DNA, 385 bp, Gossypium hirsutum
aaaaaacgaagctgatatgttgattaattacaaataaaaaatagcttaaaacaacttaaaataaaaattataaatgtgtttaaaagaggggaatagaacctgagtttaaatgatgaaatcatcattatttaaccatttaaccaattaaactaatatgttaaaaatataaaaaaaaaacttaaaacaaaatgaaataatataaatatatgagtaggagaggaatcaaatctaagacttaaaggataaaactactaacatttaaacatctgaccaatgtaattaattatattaaaaaaatcaaataattaccctaaatttttaaaaattcagcctaaaagcctaattaataagaaaaaaaatggcctttacccctaatttagccgta

SEQ ID NO: 12841 - DNA, 652 bp, Gossypium hirsutum
ggcttaattccaccaaacatacccaaaccatagcacttcttctaaattagtccaaacctaactcaaagcatattaaaacagttttaatcaaaatttagatgcattttggatctaatgtgttggaaaaagattttaaaaataaattttaatgaaactgtatccaaatctcatgttttatatattctccacatccaatcaactaccattgatgggtaacacttgagaatttaatccaaatattttaaagtttaacgatgaaacatctagtgcaattaaccttataatatcatgtatcatgagtaaaacctgcaccactcattttataattaaatttaaataaaattatttttaataataaaatgagttcaaataaactcgaatttaaacctaatgtttttttacacaaaacctaaatctatctaaccccattcgaccgagcagcactatgcgctacctttttacttggaatttgatttggtggcatcaataagaaaccccatcatgattaaaagttgcagactttgtgttaatgcgaataaaaatattttctttcctaaatttggctttaaacttcaaacattatataattgagttattatagtattaatactatattaatgaggtcttttcattggtctagccatcaatttca

SEQ ID NO: 12842 - DNA, 601 bp, Gossypium hirsutum
tcatcatagtgatagcacccaacaagtgattttgggcggagactttatttattatatgattaattgaggaatctaagtgcttgttaaattgctattatgctactatcccatctctctcataatccttgaattcgagttttgcttaatccacccacattcaggaatctgacgcctttgtcttttcacaaacttgtactaattaatcatcaattgttttcttttttacatttccaaataatttcgttattttattcatcaatgcattgtaattatttaaattttatttacttttcttaataatgtttttaattattgtatttagtataaagtaacattttcattttatttgttaaaaataattaaaatatatttacttatttaataatttaaatattataaaaataaatagggtaaattatctagtttgacattcaatttttagggtgtttacattttggtcacccaaaatgaaattatgtaatttgattactcaatttttagggtttaatggcggttaactatacatgtcatatcatgtttgtgttttcattttgatcgtctaacttttacgttactttcattttggtcgttcccaaatatc

SEQ ID NO: 12843 - DNA, 495 bp, Gossypium hirsutum
atgtataaagaagctacaaagatataacaggaaagaatccttagacacatgctaccctgtaatttatcgactcaccacagccttgcatcgcaagaatagccaatcatgagggacattgtccaacaagtacacaaagtccttgggttctgccactaaaataaatgaaaaacaactaagaaaatatgttaggttgacaagaaacatttaaagatccaaaagtagaagaaaaggaacttacaattcccaaggccaccccagcctttattaatgatacctctctgtcctgtttgctccaatgcatccacgattatttgggtcattctttcaggttcttgaacaggctgaaatgatagaagagctagttcaaaaggacatatattttcatgaaaataaaaagcagctatatcatgacaagtgagaacaatatctcatagcaacttaacttttcattcacacactatattaaggttcaaaccagtctactttcctgggagg

SEQ ID NO: 12844 - DNA, 609 bp, Gossypium hirsutum
  misc_feature (416)..(420): n is a, c, g, or t
  misc_feature (588)..(590): n is a, c, g, or t
  misc_feature (592)..(593): n is a, c, g, or t
  misc_feature (595)..(597): n is a, c, g, or t
ctatttactcatcgccaacttggatcctaacttagtggacttgcatcttttggacttctatgtccattatcgtctgtttttgtgcaacattcattaagtagacaaggatacttgagaaaagaaaatggttacaaaaatgttcctgaaaaatgctgacactgcatagttcttaaccatgaaatggaatagccgttataaatggtactacattttacagattggaaccggttaaaaggtaaatatatggaaccaaagattgcgtatacttgttatcggcttttgttgttgcctgactagtatgtcaaggtctcaaatccaaataattgatgaactgttgaacttgtaaacaggcctgattcttcctctttaactttttaaagcaaatctaacatagggttggtggtagtttaatccannnnnccaaccctatgttagatttgctttaaaaagttaaagaggaagaatcaggcctgtttacaagttcaacagttcatcaattatttggatttgagaccttgacatactagtcaggcaacaacaaaagccgataacaagtatacgcaatctttggttcatatatttaccttnnnanngnnntcaatctgtaaa

SEQ ID NO: 12845 - DNA, 567 bp, Gossypium hirsutum
  misc_feature (562)..(562): n is a, c, g, or t
ctgattgctgcgcatattgttcaacaggctggtttgtttctcaaaagctgaagtgtatcattgacggtgtttttgtggatagtgatgttatcggatggattgctatagttaagaatgatgtgggtggctttgtatgctgcattttgggctttgtatggctgaagtttatgcagctcaggacgccctctcctctcatggcatgctctctcgtaccgaacttctgatgcctcggaattgggttgattactctaagactgtgtgtatcagtccttgtcctattgttggatttatagatgtttgacaagaacatgtttttttttatcttcattctatttttattttgtatttgctgattgttctaaaccggatatactttgatgacttggaaattaggtattgtctctcacttttctccttatctatttttatttttattttaattaatgaagctttattcttaaaaaaaaggttaaactacgaaaatagtcatttttgtttgcttcaagttgcattttagttacttatgttatcttgttgtaacattttagtcattgagccgttnattac

SEQ ID NO: 12846 - DNA, 580 bp, Gossypium hirsutum
  misc_feature (242)..(243): n is a, c, g, or t
aatccacgcctgagcatggaaggccaatcggttccaaagataaaaatcctcgtaaaaggaaaggatcaattattcaagatggtaatattgtgggggcaagtgccccagaagaggccaaagatataactaatcaaaaaaccccagaagaggttcaggtacctgaaaatggtgataatgaagaaatctcaataagttatgttacttcaggaaaaagatggaaccgaaaaaatatagttgccgannaacaattttgcttataatgttgctattgaaatagcaaaagaaaatgaggatcctgagcctaaatctattgaggaatgtagaaatagaaaagattggccaaaatggaaagacgcaattcaagcagaattaaattcactttctaaacgtgaggtttttggacctatagtccaaacccctaaatatgtaaagccggtaggatataaatggatatttgtgcgaaaaccaaatgagaaaaatgaagtcgtaacatataaatcacgacttgtagcacaaggatttttgcaaagatccaacattgattatgaagagacatattctcctgtggtggatgcaatca

SEQ ID NO: 12847 - DNA, 435 bp, Gossypium hirsutum
tcttttacctctgtttcagtacaaatttgtcttcccctgcatcctgacacatcacccacggcccacgtcacttgttctcaacaaggaaaccgtgtactgtattgttcatcttcttagcatgttagtttttttaatgagatctataagcgatcgtgggtattcacatgcattaaaagggttttttttttcactcaaataatataaaataattaaataaatattgaaatgggataaatgtaatatagtaaaaaatttagaattgtctgactaattggcggcactactctctctagccactggtcacatcaaatttttttaaagaaagttataagcatcaaatttttttaaagaaagttataagtataggttgatcaattgactgacattaaactaaaatatgataacttaaaatatttagagataaattgccatttg

SEQ ID NO: 12848 - DNA, 654 bp, Gossypium hirsutum
ctcctcggtaatcgaagtttgtctgatcaaataaaggaatcttcatctcctaaaacagatacatcattgatctcttgacagaaacgggcatggtgggttgcaaacttgtagagtcacccatagagagcatcataagttgcaagttgggatcagagaaacagtggatagaggtatcaaagattagtggcgaatttgatttatttctcacaaactagaccagacagtgttgaaatatgtatatattttaaatttatttaggtaaataaatcttatttgggtagataagttttattcatattttagaaatatttttattttatcttttagtagtttattagaataagggaactattttctttttatattttagtagtttattagaataagggaactattttcctaattaggattaggactctttcctctatttaagttcaattctttagttaataagatgagtacaattttattcaaagctctcttgaaatctttcatggtatcacagctaggttaaaatctctagtaacatcatggttaaaacagccttcactggagataagagatccagcaatcaaacagaggaagaaagttctacagttgaaacaactaccgagtgtacaatgactcaagggacagaggcgtctcacctttatt

SEQ ID NO: 12849 - DNA, 450 bp, Gossypium hirsutum
atcctcgaactcctgcaccccacaaggccaaacagtcatttaggggattcttagagcctcaattaaaacaaggaaaactaccacaaatacaactttcatagcaacataatacatataaatagcacaatgactgaataagttaatatgaatacaaagttgaggatcggaataattatctatatgtgaatcatgctttatgaataaaacaaagtcaaatattcaacataaattaaaatatatttagaaaatacatgtttggttgtttatggaaatattttcaatgaatcactgtcaaccatgttttacgaataggacaatgttaaatattcaacataaactaaaatatatttagaaaataattttccttttcaagtagggaaatattatcaactaatcaatctggagtggatcagacaactcaatattgatgcctaaattactttcagccat

SEQ ID NO: 12850 - DNA, 697 bp, Gossypium hirsutum
ccaagatgtcatccacatcgtaagccaagtcctggaggtcgtccaaccatttcttcacaccctcgttcttgatctgcttctcctcagcatcggttaacactgcttggatatcgggcaatacggaatgccactgctcgagctgctggcggagatgcttatgatcagtaacaaagttgagtgcagagttgagcaacttggcccccaacagctccaaaaacacagaaagagcagcctctccaatgacagacatgatgaaataatgaaaagaaggtgaagagaggatcgaagaagccaaaaaaggaaattcagggaagaaagaagaaagaaatggagatggattctgaaaaattagtgaaagttgaagaagtcagctcaatatttttttcagcatctaataattcagacaacgaggcaatgaggtggaagtcaacgaattctgataaataaaatagaaaatggctgagccatccaccggcagtgtttatgaattttgatgctcttcttttgcttttgtccattatcccaatttgtatcttatctttatcattcagctttgtgttttcaactcaaatgaaagaatatatagttgtacaaaatctttaaagatttcataattttggaggatatgaatatgaagaaatggagatggagaatctgtataattagtgaaagttgaagaagttgactacgaggtgga

SEQ ID NO: 12851 - DNA, 658 bp, Gossypium hirsutum
atcatgacatggaacatggaaatttaatgagtaatttacttggaaaataatttcaaaaaaaaattaaaaatcaattcaaattttaggatttgatcttggattgattttattaaattcaaattggttattatttaaatgtatttagttcagttttcattttacagaatattaagaataatatttaatagatcgtcagtcgaattttttaaaaaaatatttaaaaaagagataaacatgacaatattttaagattttttgtgggataaaattagtaagcggctagtgtatcaagtattaacccaaacaaccattctatttttcttatgctgaaattctatggatgttatacacaatctagagaactgactcaaagtgtaagttgtgaactcaaactttgagagaagttgcaattgactgctattttagcctagatgatccttgaacgcacaaggcgcttcaaattgtataagtcaatcattcttgaagctttccctctatcccaatagtcggtggttgaactaagcaagagagagacacattttcaatattgcgatgaataaaaatacaattagaaagcgcttttctcttaggaaatgagtgctactcatatacttcagtgatataatattcatttgcatcaaattgtcaaaccactact

SEQ ID NO: 12852 - DNA, 650 bp, Gossypium hirsutum
gtctatctgtcaacaacaacccagattgtatctttcttacttggagataggggtaaacccgaaataaaatccatagccactctatcccatttccactcaggaataataataggttgcaataaacctgatagcacctgatgttcagctttaatttcctgacaaattaaacacttaaaaacatactctgaaatgtcacgtttcataccatgccaccaataaagctgtttcaaatcattatacattttcgtacttcccggatgtacagataatcaactactatgagtttcatttaaaatcatctgaataaactctaaatttttcagaacataaattcggcctctgaatcttaaacagtcatcatcatcaactcgaaactctgaatcagaattcaaatcacattgagctcttttagctaacaattcgttatcaactttctaagctttacaaatctgttgtaaaaacaacgatctcgctttcaactcagctacaatcaagccatcatcagaaagagtcaactgagcattcattgcacgtagagcaaacaaagactttcggcttaaagcatcggcaacaacatttgcttttcccggatggtagttaattattaactcgtaatcttttaacaattctagccatctctgctatcaaaa

SEQ ID NO: 12853 - DNA, 359 bp, Gossypium hirsutum
agtttgaccatcatttctgttttgaaaaccttaatgttatgtgtcttacattgcatttaacactagctaattgatagggacacaagttgtgaagaagatttcttgtatgcaatatgcaagtgtttgtttttgctgttgttcacttagggtagggtaaggacttgtccaaattcgaatttgatatttagttccatcaagaacttaagttatgcaagtcatttatcattgcatcaatgattaaattaaaactttttatagttatgtgaccagaatataaataaattaataattgaatgactactaatacagtttacctaatatttattctcaaacccaaacccaaatatatcttccaagcc

SEQ ID NO: 12854 - DNA, 553 bp, Gossypium hirsutum
gtcatctatgtggcaatctacatgtatgctatatcaataaagttaaaaaaacaagttgaaaaattaaaaacacaaaaaattaaataaataactaaaataatttttttataaaatttaaaggttaaataaatcattcggcctggaggtccagcaaggagagatcaacctacaaaatggatgaggactaagccttgcatggttttttgttttttatttatatatttttttctttttagatggccccagcccctaaaatggaaattttccttttacagcccttaaaattttaaatttgtaatggtaaaattacattttgactcccctaaatttgataaaaatttgatttaattctttaaaaattataaatatataaactattaaaatggtaaatttgtatttttactatcataaaaatacaatttaattttgactccctcaaaattttcttgacttcgcccctgcctatattaggccctggggtagggagttagaagatcatcttattcatttctttctcgattttgcatggatgcaatgacgaacccatgtagaa

SEQ ID NO: 12855 - DNA, 651 bp, Gossypium hirsutum
tcaatttttcttcccctctccaaaatttatcaaacaaaacatcccatctctccttattatcaagaattccaattctttcaccttggtttttcatcccttcaagactttcaaggtaaaaacttaactttttatttttcaaaaaaaaatacaattgatttgttttattttttctaatcttgatattggggtaatttgatacatatatattgtgtttttgatgcagggggtttgaccaacccaaaaattgcttcaaaaaattttctctaaacctttgcctaaaaggtgttcaacaaaattcccgaaccaagtctctaagttccttaatgtgtctaggcatacttattagtcaccatgcctattaagaaatgatcttgtgtccgtgcctcttcatctaacccctctagtggcccaagtgagtcttaaaatgattgttttagaaatctcaaaaagagaaatcgtttttacccttattttacttctcaaaaagttaacgtttcttctcctctagattttgaaactttagtcgattttaattttgcttatctccaaattgtaatcgattggcaatgggttgatttctttaaaattcattctttcacccatgccaaccttgttttagctttttattacaatgctttactcaaacataac

SEQ ID NO: 12856 - DNA, 488 bp, Gossypium hirsutum
tttggagcatatgctgcacattggggacttgacaacaatggtcaccattcaccaaccaacaacatggaaactttattatcaatcagattttcttacgtgtattagtcattaaattattaatgaatttacattttagtccgttaatttcaaaaagttataaaatagtcattaaattatttaaaactttttatttatattattaaactatttgaaagtttttatttacgccactagactgctattttttaaagaaaagtctagttagttagctctgaaagattatttggcaatcggtacagttgattaatacccatcaacaagtaaaaagacatatcttaaattcaattcaatctaacaatcaatgtcagaaatcgaaaaaaactgtttggatttttgtttacaaattcatgacatttaaaactatttcatgtaaaaaatgaactatagaagagaagtgtaataagagctttcaattgatgtagacgatg

SEQ ID NO: 12857 - DNA, 647 bp, Gossypium hirsutum
tttcgggttaattgctgcttagttgctgtcgccaggttgcctacgcgacaagccgatgcagcaccgccattaactaactgaaaatatcccaagtgttactaaaaggataaaataatgtggtcccctggaaaaacgatttgtatttttcttataactaaaagagttagctccactaaaaaaaattcagtaacgtttttattaaaatattcttaaatattttgataaaaaaattttaatctgaatttgataaaagtatcgctgttttatctattttatgatttgagtgtagttctatttggtctgaagtggtattcagataaagtttttccaattatattaattttagaatttaaatttttgttgaaagataatcttaattaaaatatacaattatttgtaggtgttaaatttagattaaaaatatttaagttgtataaatatatttattcccaattatcgttagctgtacaggaaattgattaaaaaatttatgtgtacatcgactgcaattaatttattatattcaactatcagttctattatttattggtatatgttgcttttccttgtctcgcatgcaaagcgcatttttataggctaaaggccgagttgtgaaatttctcaatctaccaagctaggcgaaaaaa

SEQ ID NO: 12858 - DNA, 493 bp, Gossypium hirsutum
taacttatagtactcccaccatctctattttagaaatatttccacattatctaaaattgattttgacatatagtgtttatttatttatttataaatgtgatttttactactttaatagagtttttttaaaataattttgtaaaatattttatcattttagataagttaaattctactattaaccctgtattttataaaagtagtggatttagttcttagagttttcgaaatggtcaaatttggttattgtgcttttcaatttttaaaattttagtcctgaattgtggagtatgtctcccatttcggtcaaattaagacacaaattgagaatggcatcgcaccaataagccatgtgacgacgagacgataaaacatgggagaagcagaaacgacgtcgcgatgacacaattggggacgttgcgacgtgtcatgcaattttctcagttttcttcttccagttaaattttgattatttgtcctaattgaacttcgg

SEQ ID NO: 12859 - DNA, 653 bp, Gossypium hirsutum
taatttccatccaaaagttgataccagttccatgaatgatcaaccgtaaggtccgtaactctatcagtaatattttcaactaccaacttctaaaaatagtattcaataacatttccttccattagccaggaattcataacatatgcgcaagtcaatgttaagaactcaagagtattaccagaaagattcatttgtcttatttgaaaaacaaagtgatggtaaattttcaaatagtaccctatccaaggtcaaatttaactctagaataaataaattgaacaacaaagaagcttgttcatcaaagttcttcagacctccgtttttgggtattcaaaaactacatctttctctgtaagcttcctgtatactcgtgcaattgtctctagcttctacttagtgctgtttctttccttagcgtctaagtgtaacgatccgatttttactggtgtcggaaaatatggttttgagcccccatttctgtaaaccgagtctataaatatttaatagagacatttacggagttagtgtattattgaattggattttggatagccaatttattcgaaattgtgtttaattaagtccgaaaaactaaattataaaatccaatcgctataaatttgtaattagtaaatggcttgaggatttaattg

SEQ ID NO: 12860 - DNA, 661 bp, Gossypium hirsutum
aagttgttcatgcaataggtacgcatgttcataatttgatttacgtgttttaaatatgtttcacgtgatgctccctgatataatattagtacggtttgaagttcaaggatcaatctgaaacatgtgtgataatttaatgacatttgatgaaattaaccctaattctttctagtagctgatagcaactttctaaatttcgttttagaattaagtattttcatgtgaagactttatcataaaccactgcatgtgattccaataaaaggcctactaatagagtgtgttgggtcaagcctagttggattagcatgtagtgttgcttaaagtttgactccataaattcaacatcaacttcaatcactaattcaaaatattaatctttaatatattgtttttgggtcaaaattcttttaggaggtaaaaattcttttataatttcattatttctgaagggactgaatataatttttttattatttttaagaggtcaaagcgtaatttataatttaattatctttgaagaaggggtgcttgccccttgtattcaccattgttttgggtttttgtacatttaggtttgaatttcattatgcgtataatgtgtgagttttcaatctcaccgtatacatatgccatgcatgtatgggttctgtctagattc

SEQ ID NO: 12861 - DNA, 642 bp, Gossypium hirsutum
agtcttcttgttgctaataaatataacattcttgaacttgtttgactgtataatgacctcatcataaccttgtttctgtagaaaaactaagccatccaatatgccccaaagctcagcaactgcaattgagcatttccccaagaactgattgtagcctaaaatccaagtccccctcttatcacgaattactccacctacaatagaaaaaccagaggctaagtgaacaacaccatcagtattaaggtaaacacacatacctgactttggatgaatgggactctgttgcgtattaatcttcaaagcttcgttgcgaatagaagtgaaatgtttcgcccagcaatacgaaactctaatgacttcctctgaattcatagcttttccttgaaagatgtacaagttgcggtttttccaaatgcgccacaaaattatcccaaagaaacaagtccaatctgaatcactcaagttattggtcgtacagacctacaaattcgaaatcagccaatctgaaatattacaagcaaagaagcgcctaatatgactgggggggatgacttgatgccaaatttccttcgcataggagaaatctctaaggacatgtgaaatatcctcaataatatgaccacaaagatggaaagaatcatc

SEQ ID NO: 12862 - DNA, 659 bp, Gossypium hirsutum
tggagtttcgtcagtcttgttgatttgtaatgataggtaagtaagtcatattaatattgtgggtttgcatgggcagctaagaaaaatccttaattgttaagcaaaatggtgagaactttttattattttaatccataatctttgaaatttttcaaaattcttttatatcaatatttatgtttttatgattaaaatttaaatatttttaaattatttatttatatttaaattaaaaaataaatttaaaatttaaaaatttattcaaactcaactcaatttaaattaaaatttcaaactaagtatcagtgtgaacatatatggcatgcattacattgtatttcttaaaagaaaatattaattggttttagtttttcgtttgaggtaggctggaaaatgttattatatgtttttttataattgaaatttggtgtgatgtgccttccaccaaaaataaatagaacgatatctagatgtttcaacaaaatattattaatgaaattgacctataaaaatgcagactattaatagtacctaatataagcttgttggtatgggtttaaagtttgatgttttgtttttggttggattagtatttaataattttaaataatagtagtagcacataaaagaaaaagagaaacatagacgaaatgggatgg

SEQ ID NO: 12863 - DNA, 395 bp, Gossypium hirsutum
atgatttgtggaagtttggctgatttttgcttgatttaagtgccacaacatcatcaggatcaagactcagtcaattgcaaatctccgatttcttcaactcttcaagggccttgtgtaattaaaccaaaatttgatttatgaacatccacatgcagccaaattttgggttgacttggtcctccatttggatggttttgtaatcaaaacaaagctctcagacctgtccaaaaattgtagataatttagaggaccaaagaatataatttaaccactttaattaatcaattaattaatcaatttacttaattaattaaaacccaatttattaatgaaatgtattaaaacaaattattaaatataactttatattttattatttaatttaatcatgcatg

SEQ ID NO: 12864 - DNA, 635 bp, Gossypium hirsutum
aggaagctaatgtatctggaagccatgaatcccaacaactctcaaaaccaaatacaaaagagtttgaggctcagaatccgtggggtatgagttgtttggagatagataagaattgagtggctaaaatttgccaagcattgctctctcaatttcatttgtgcgtacagaaatgagattccttgttctatgagtttacttggtaattcaaagtcttccattagtaattcaattatttgttttctgattctgaatctaaagataataataaaaattagaagaaagtggattatttgtttgtcaataatgcattctcccgcttttgatgaggaaataacatggttgaaacttcaatatgttatttgaataacatgtacatgcggtgaagttacgacatagacttggtcagtgacgcgaaataaataaataaatagtttgtaagatttaattaagaggtgaattccacttgtagagagtcaacaagaatattcatgtagatatagtttttgtattgtttagttgcagcgattggatcaacgtcatgcagagtcctgggtcaaaactcttactcctccctccataccaacctcagtttataattttccattaggccttatatatgattatgtcctaaaagc

SEQ ID NO: 12865 - DNA, 575 bp, Gossypium hirsutum
cctcgggttgtgtcaaaatgacgccgttttgggccttctgaagccagaccaaaatgacgtcgtgttggagccctacaaaaattaaaaatttttgaaaaaaaaattaattttcgcccgctttaaaaaaacattctttcatttttttcctcaaataattccagcatccggccaaggaacggcggtttttcgtcgtggccaccggtcgccggtgacagtgatcgccgtctttggtggccgaaaaatcaaccaaaaaatcccttttaaccccttttttgcgtagaactccgattcggagttgaaattgccagaataaggccaaaactcccgaaaaagaacctccgactcccgatgtcctccgtcgcatccttggccgaatccccagggatttgatggcctcgcggatcggaagtgacaccgacagcggcacccggacggaacaactagtaaagatgttattattatttattattttctatttttttaatcttaaaaataaaaaagtaaatcacattttttaatatttgtatatgatttcttcttaaaaaatctccactcgaaatacatctattctctgg

SEQ ID NO: 12866 - DNA, 696 bp, Gossypium hirsutum
tatacgtgggtggttatacatatattatatatatgcatgattttatcttatataatatatatgcatggctttatttacatagtatatattaatggattttggtattatatatataatatatattcatggttgattatatatataattacgtgaatggttttatataatatataaattcatgatactttcaatgtatgcttaaaatttgaagtgataaaggtcattaaatgaatatgtatatataatatatattcgtatatgattttgtaatatttatgaacaaatatatgaataaataatataatgtggactcttataacatgcaaatttgatcgataatgcatatctatgcatgcatgattatgagatttatgatattgcgagccaattatatttgtgtattgtgttatactgtaaaccatgttaacttggaaaattatattattatggcgaattgtgttaatttggtaatctgtattaatatggtgaactatattaatttgccaaacaatgtattgtgagattttgagttgcattgcatgtaagctaaggtattagatgccctttgctaaataaaatatgcgaacaatgatttctgcgagccatgtcattaatgatatgtgaaatgtgattataagtgcaatatatgttgcatgaaaatgatattatttgcgaaccatgctctattacgaattg

SEQ ID NO: 12867 - DNA, 464 bp, Gossypium hirsutum
ctctctctcccccttcctttttatgtatatatactatactatagttttccttctatatttctcccttttaattatctttttccccttcaacacctcttcatttcattgctagcttaggggtagtagggatgagttaaaagactgagttgcatgtgtctcgtcaaatgtctcgagaattaatgtcttctgcagggacggtgggacatatatttttctcccatgatattatatttaaagcccatagttttacttttcaacttcgatcggtcagtgaatgaatttccagacctggaaaactacaaaacaattccaaagggtaaatttcagttcccatagtcagtccctgctttttctgaaaattccaattccaaaccagcaagatgaagatgaagatggaatcttggaaaataacagaaagtgctgtataatatatatgtagctcacaaggaaataggatccgactc

SEQ ID NO: 12868 - DNA, 635 bp, Gossypium hirsutum
atgaactagtacgaattgtttaaccccaggctaaaagatcatttaaacaaatagttgaattgatttttacaattttgtaatttttaattttttataatttatttgctttaaaccgattaggccagtgattatgggaactaatttgtcagaccagtttaaaattggttcaactattagtgcaatcgattttttagctagcttctataactcaaccaattttttatccaactagtttggtctggattagataacattaaattttagaattttttatattttatttaattttttaaaattttaaagagcttttatttttcataattttttatttttaaaaattataatttcaagtcaatttggtcattgagaaactcaaattattatttttattattaaaacatattatgtgagtagataaaagtaaatctatattatttgagtgataaattattattttaatattatttctgtaaatttcgcgtccatatgttcaagagatatactatagcgttaatatacaatttaatatcagaacttaaataggttttcttagtttgatacatatatatttttttatcaaagtgatagttaaagtttcacatattatgagaataatttaacatcgttaatttttt

SEQ ID NO: 12869 - DNA, 552 bp, Gossypium hirsutum
catactatgataagtccttctaaaatcattagagtttcgctaattaaatcacttataatggtataaatagtattatagttatttatccgtaaatcctttgaatcgcatattcaagtttcatttctcgtcaataagtcttctcctataatattaaataatttgcttcaccgtgcattggccagtgtgactagaagtgataggaacaagtgagtacaatcgatacaaataaaaaaatcaccgatgtgaaagagagtgttgtttattccgctttaacacagaaataatgcacaccgacctgcacgaccagaaccggtgcagaaccgaagggacaatctcatctcatccagaagaaaaaaaggtcaaggaatggaccaatgaaaactaaaaagaacatgcaaaaagaggaaacctaacatttatataattcaaaggcatgaaagtaaaaaagctccactagtcaagcaaagtgagatggagtggacccattaatggagggatgagattattattggatttggaggtgatctatattgcatgtgctttcccacaact

SEQ ID NO: 12870 - DNA, 657 bp, Gossypium hirsutum
cagttgatgatgatcttgagagggctgagttttggttagagaatacgatctgagtctttgatgagttatcttgttcaccgactgaatgttataaatgtctcatatctctattgaaagattcagcctatcaatggtggaacacgttggtctctgttgtactgagagaacgaatagactgggaatttttccaaattgagttcatgaagaaatatataagtcgaaggtttctcgatcagaagcgcaaagaatttcttgagcttaaacagggttgtatgacagtatctgaatatgaaagagaatttttcagattgagcaagtgtgcccgagaatgcattccaatcaaggttactatgtgtaaatggtttgaagaagggttgaatgaagacataaagctttttaccagaaatatcaacttgaaagaattcgtcgttttggttgatagagcacataaagctgaggagcttagtaaagagaaaagaaaagctgattttgaagctagagatttaagaaagagatcaattgggaaatcgtatcattcatcattgaagagattgaaagattacaatatttttttgaccaatttagtgggatatcttagtagagattatggtaagcaacatgcaagttctaaagctcaagctacatcaatagcaagag

SEQ ID NO: 12871 - DNA, 618 bp, Gossypium hirsutum
aaagccaaggccttaaaataatcaaagctattcacatgtaaacagggtcaagaaatagtatacatacatacatataggtgaatgtgcttaggaagttcctctagtatacggacgggatcaaattagtcatttattattaaccagattaatttaatccatgtactattgaaaagaatcaaatgaggtcaatttagaatatagttaatattcactgttgaaatttggccttatttaatttttttaatagtataggaattaaattgatctaattaatagtagagggattaatttgatctagcccttaaaatagagggacccatcaagtatacttgcccatatgtttatatatatatacacacatatatgaatatgctagcgaacgtggcggtgttgcatcttctaggaagatatataattatggttaaattttgttattagtcctatatcatgcttaagttatggatttggtccttaaattttaatttggttatttttagtcaccatacttttcaatttttgaaatctcaatattaaccaaactgtagttattaaattcattaagttctattattttcgaagtcttatacatgaaacatattatcgtatgtgtaataccat

SEQ ID NO: 12872 - DNA, 355 bp, Gossypium hirsutum
tcttttgaactatgggctccaatggtcaaagaaatgttcatatgcttatctggaatgcattgtttaattggtaatcctgaggtgggaatgaatgggcagtaggccaatgcaatataaaagatttagattcacattgcttttttccaatgctcaaatcagcaatcaagtctattacgatgatatgaagcttttgcttaccataaaagcaaaacgcaagaacggagggaattgaaggctggtcttttgtcaactttttttaaagaaaacatagcataggagcattccctgaatggcatgatgtgtaacatcaggagcattccctatatggcatgacaacattaggagtctagattct

SEQ ID NO: 12873 - DNA, 654 bp, Gossypium hirsutum
cctttgatatttacccaatgacccaaatcttactctattttcatccactgtgacttagtcaaaaatggtacctcctccattaaaacaataccttcaatatattacacagatgtaaagtttttgttggggaagataatgtatcaagagttgcagagtaggtaagaaaatttcatcagacatatgtttttttctttgaaaaaaatggtggattgggtttcaggggctttgtgccgatgacataatttgtctgtagtttcagtggaaacaatgagagaccataagcctagtaattgattttggaatcactagaggcacctccattttttctcctcctccttcccctcttattatttttcttcttttcttctttttctttttttaaaccctaaaatggtgctgatagggctgttaaagtgagagtaaccggccagttggacggttttttgataccaaggataccgtcatttgccatgtcactttgtcattatgtctgtgacagaaaacggtaaaaaagactgttttgtaacttttcgaaagttgagtgactgaaatgaaacttaagtgactgttaatcccaaacttgagtgagtgttggtggaatttactctaatttttttttatttcccatcccattgtattgccttcatacaaaaa

SEQ ID NO: 12874 - DNA, 587 bp, Gossypium hirsutum
ttaacttgagttataaaacaagtttgaaatacattaaatacaaatcactaaaaaacataattaataattttgaacagaattcacacacataatttacgcacaatgtgattcaaactcggacactaagactttgtttggttgggttgatattcttgtattgtattatttaatacggcaatattacataacttgcaaataattatgtgtttgatagatgtgtaaattaatacattagatgaaacagtaagtaggtattttaataaagtccttattagtgttactaaaatcaaacacttgctatttagaaagactgaacttatttgcagtgattcaaccaaatgacaagtgaaaatggttcaaggtaattaactgaaaataatattaataatctgatatacattttactaatattagttaatttaagtaacctttgtaattatgtgctattagaattgtattggggtattagatagaacccacgacaaaatactagtgccatgtgaggagaaacctagatatcgtacaaggaaaaatgaggtagccattaatgttttagaggcatgtgcccttgacatgcaatttacata

SEQ ID NO: 12875 - DNA, 452 bp, Gossypium hirsutum
gatcccctctccccgaatgagtcaattttgaaagaaactgaccttgaaacgtgaaagggaattggcggaagcgaatttaggggcttaaaagaaagaaagggaaagaaagggaaagactttggcaaggagaatggaaacacaatctcaactttctctcagaaaaagaaagaaagaaagaatttttatttttatttcttgttgtaaattgtttatattatcatttttttgtcataaataaaaatgcgcatacacgtatttgttcttttttcttattcatgttttggtttctttcggcgtttggatgtagactcttagatataaagacaaacaaaatacgagaaaatgttattatttttattttacaaaaagaaaaaaatacttttaaactacttttctaaaaaatgcatacaaattacatttttttataaaaaaaaattgaaaggaacgaaggg

SEQ ID NO: 12876 - DNA, 392 bp, Gossypium hirsutum
aagtcactcatttccatcatttcgttccctagtaagggactgactggttctaattcaactaaactagacttgaatttcaactatgctcaaactagcccctctattccacaaattttccagtagagactgccagtttacaatctcttttaatttaacccctacaggttctaaagtttcaaatttagaggatttcaagtgtgacatagccgaagggaggtgcttagttgtcatttaccttcgcatcaaaaggttcagtgttttttagtacactccattgatgtagatatgagtaaagtcaaaaattgtttaggtttgattaaccaagtaatttggggtaggtgcttgggttgtaatcgacgctcatgttcgaaggtgatcaaccaagattaggt

SEQ ID NO: 12877 - DNA, 595 bp, Gossypium hirsutum
  misc_feature (44)..(45): n is a, c, g, or t
ttcatctcaagcagttactgtacaacaatggcgacgccttcttnngggtgaagatactgccaaggctgttctccgccaggttaaactcccctctcccttcttcttaactttttaacttccatttactctttataactttttttctaaaaattactttttcaggttgagttttacttcggtgatagcaatcttccaaaagacgactttctcaagacaaaaatcaatgagagcgaagatgatagtatcctttcacttcaatcctcttttatttatttcatggtgctacattgttgtttaccttgactctgggtaaacagtggttagtttggcattgatttgttcgttttcaaagatgagaggtcatttaaatttaacggaagtgaagaaagcagacgatgtaccagactgtactttgaaagttgttgctcaaactctcagaacttcatcttccctcaaggtttctgaagatggtcagttttaaccccccccccaaaaaaaaaaaaaaaaatcccaaaatttcctttattttcctctgagccaatgaattgaaaagtttctttgctcttttttttttttttccccttttttccgggaa

SEQ ID NO: 12878 - DNA, 534 bp, Gossypium hirsutum
atacctctaccgcattagaatcggtaatgcccgactggctagaaaacagtgctgaaatatctcttgtcgaattccttaagactccccaatatctccctagactcgacttaccccttgtggatcaaacgacattaaatttgaaacatctgcttagaggtggagaccacaatatgcctctatgaacaacacacccacggcttgatgatacacataaaagtcggttatcctaccatgttgactctaagatacacagattttctttcagagcttgaatccaatacaatgttctcaatttgcattagaagaagatgtcagtaatcttccattgtttactttcgaaccaagccgcgttacaccccaaccaaaaatcgcatagcagctaataatccataaccttttgacaatacttgtgaaattaaactctaaatagccatgcaaaaagctcgaaacacagggcaaaatgaaatcagccaccaattgaaaaataacgtccaaaactcgagaacctagcacattcgaaaaataaatgacctt

SEQ ID NO: 12879 - DNA, 635 bp, Gossypium hirsutum
ttttaattcaaacagattaaccaaaggcccaatgaccaaggcgcaatttcacaaaaaaatcagcctagggtttcagaaacagaaaccctaggcgccgcactagggtctttgacccttggcctcctgacagcgccgaatctgctgactcttggcctctgacaccgccactgtcgcgccgcacctgccaccatcctgtcgccacttgcacctgcagagaagaaacaacaagaaagacagaaacaaaccacaaaatcggggggatttttcttcttttttctctttgctttcggttataaaaaccgatgattgtaaaacaatggggttcggcccctctttcatgatttcaaggaataaaaaggcaaagaaaacaaattcaaaaacctctttttcgatataagctttatttttttcttttctctttatttttcttccattcgtttgcattcgattttttttatttttcttttatttttaaacaacgtataaacgttaaaaaaaagaaacaaaaaaaagtaaaaataaaaacctttttcgaaatttttgaccaccgtgtacgggggccggcgtggtgccggcgggatgcaggtgcaacgaacctgaggccggaggaaaggggggcatttgaaaggattaaa

SEQ ID NO: 12880 - DNA, 484 bp, Gossypium hirsutum
tcgtttcaacattgagggactaaactagcaattaaacacaaaaataaaaatagtttcaatcatcttcaaaatggtgccgttcaaatccagacctaaacgaacacggaagcaaatatatggtacaaattaaaaataaataaagaaaccaaattacaaatgcagtaaatgcagagggactagtttaataaataaactagacgcttcaaacgtgcagatccttcctggatcgggtcaccgctgggtcgggtattcagaacggtgccgtttaagagtcattggattgactctaaacgacggcgttttaatggccccccttttaaaccaaaataaaccctaaactacctatcaacctccctaaaaccgacctaggctaaaatagaaaaagaaaatctgcgccgctctgctggttgagtatctgaacctttgccgatcctagctcgtattccgatgtcgacggagagagggccaggaccgttcaatcggg

SEQ ID NO: 12881 - DNA, 571 bp, Gossypium hirsutum
gcagttctctgttggtttgtgaaccaacaaaatgttggctaaagggttcctaatattgttagcgttggcgacaatagagaagggattcacctcattacgaacagtcgtcgccgttggagccactgctaccaaaataaaaacaagcttcttgcattctgtttcttgtggctatttattgaattggttatgtatagtatagatgatatattgttctcactcagtagttccattatatagatagtgttgaactaaaccgattgctaagtagcaagttaagcattaacagaagtgattggagaagttgacacttctgcaaccactgcaaaaacacacagtaaacatgggacaacataatttgtttacgcagtttggttccctacgtctacggagcctagctcaataagaagtatacattatcctcaaatatttataaccagtgattctaaacctatcacactttagtgacaatttccttactcttgtacctttgaaaattagaactctcactaataaattcttactcttgtacctttgaaaattagaactctcactaataaattctcccactgag

SEQ ID NO: 12882 - DNA, 676 bp, Gossypium hirsutum
gaagcagtgggagaagttattttacactttgatagttttaggaagattgttttaaagaacgtgttttatgtacttcatttttaagaagaatttaatttctgtagcatgtttattttatgacagttatacagtgacattcaataaagagattgctattaacagaaatcattttttaaactgtaatggatggatggaaaataatctctactttattaaaccaaataactactcgatgtttcaaactaaaatagtgaataaaaagcttaaaacttctcagtctaatgaggggaacctatggcatttaagacttggccatattaaccaaaaaataatcactagactcgtgaaaaatggccccttaagtatgcttaatgcagttagtcttccacaatatgaatctttcttggaaggtaaaatgactaagaggtcttttaatgttaaagggccaaccaacctttagaacttgtgcgcaccaatgtaagtggtctcatgagcatcagtgccaaaggaagttatgattattacgtgacttttatcaacgactattctcagtatggatatgcgtatctaatacaccataaaagtgaaacctttgataaattttgagagtctcgtgaggaagtggaaaagaaattaggtttatccatcaagaatctacggtctgattgaggtaggg

SEQ ID NO: 12883 - DNA, 605 bp, Gossypium hirsutum
  misc_feature (52)..(52): n is a, c, g, or t
  misc_feature (54)..(55): n is a, c, g, or t
ctcgaactatttattttaatccaaaaatcacattatacaaaaattacatttntnnccccctaacttttacaaaattatgattttgccccaaggctcggaaatttaatttcagcccttattcttatgtttaatgacctactgatcatttttctcttctatggcaacatcaaattctcactctaacacatagttatgaacaataggtatttttatcgattatgccgttttgctcgttttcgttaaaaatcgcttaaaaaagatcgttctcctaacttcaaacattcatattctaccatcaaacaacaaaatacatgcctatcattcatgggtaaatttttaaacataaaccctaactcaaaataatggtaaaaataagtaaaccgagctacaaggatttcaaaaatgtgaagaacattaaaaacggggcttgaaatcacttactatgaagcttgaaagttgaaaaaaccctagctatggaggagagaaattttcggcagcaactaatgaaaatgataaccaattttgtgttatttttcccattttatttcatttaatatacaaatgaccaaaatgcccttactactaaactttaaaaaaatttcccc

SEQ ID NO: 12884 - DNA, 644 bp, Gossypium hirsutum
caatggaacccattattatcaatcaaattggattatgctagcagtttgcacgataagttccgcatgggacatggatggtatgatgacgggcgggaagccgataagggtcacccattgcttcaacataggctttaatatgattcttacgttgtaatttataaatttacccgccatgcatttaatttatccatgttgggccaatttattttggaggcctaaactttttatttcactattttgatcacgcagtgtttgtttttaatcctacatcttcaaattctttcttttttgtaattgttcattataatcagttcccctttttttttcatattaatttttttttataaaatgagatttattttgtcacttttaaatattatttggtaaaatttcaatgtctttttcataaatatttcttaaaaagttttcaagaatttttaattattttaactattttaaatataaaatatttatttatatcataaaaaattaacatcaattatatattaaataaaaaaacaaattcggtatggtttcaagtaggcccgtccgaaaaataaaaaagtttgaataaaaatataggttcaaaaaatgggtttagacaaaaaaaataatgcccattttctaaatgggctgaaccttga

SEQ ID NO: 12885 - DNA, 534 bp, Gossypium hirsutum
  misc_feature (14)..(14): n is a, c, g, or t
  misc_feature (515)..(516): n is a, c, g, or t
actctgcgagatanacagttgtatgcaaagttcagtaaatgtgaattttggttgcgagaagttggttttctgggtcatattgtatcagcttctggtatccgagttgatccgagcaaaatttcagctattttggattggaaacctccgagaaatgtttctgaagtccgcagttttctgggacttgctggttactatagaagatttgtaaaaggtttctcgatgattgcgactccgttgacaaaattgcttcagaaagatgtgaagtttgagtggtctgaaaaatgtcaaaaaagttttgatcagttgaaagctttgttgactgaagctccggtgttggtacaacctgaatcgggtaaagaatttgtgatttatagtgatgcttcgttgattggtttgggatgtgttttaatgcaagaaggaaaagttattgcttatgcttcgagacaattaaagccgcatgaaaagaactatccgactcacgacctcgagttagctgctattgtgtttgctttgannatctggcgtcactatctg

SEQ ID NO: 12886 - DNA, 603 bp, Gossypium hirsutum
tctcatcatgtgagcaactcccttgtgatgctcaacaaagtccctggagtcaacaaatcgaaacccgaggttttccctggatatggacgcgtgaaaaatgggttcccaacatggctatcttggagagatcgaaaacttctacaggcttcattaaatgaaaccaagttcgatctgatagttgccaaggacggcactggaaacttcaccaacatcaccgacgctgtttccgctgctccaaacaacagtgacacaaggttaattttatactgcacctatattagcgtttgatatggtttgaaattgggaaaatgaattaattaatgaagtggctaatgaactggtttgttgaattagctaggtttgtgatatatataaaagccggcgcttacttcgaaaatgtagatgtggataggaagaagacaatgctcatgttggtgggagatgggatcgggaagacagtggtgaaggctagcagaaatgtggttgatggctttacaactttccgctctgcgacagtcggtgagtttcatataattttcatttttcatttttttccttcactataatgcttccctcacgagtgggagaatccttaccgatttg

SEQ ID NO: 12887 - DNA, 486 bp, Gossypium hirsutum
tgttggaaggggaactttaaggcctcatcgcctcattaaataaccaaaaattgtggaaatttgagaagatggggaggctagcaatagcgagaatggttgggttgaagatatcatacccgccacacaatcaatcaatgaatgtgaaaaggaaatgcccaataaattgagtcacatccattttcatatattccttctcgttttttctgctctacttttttttataaactaagtacaagtaactttaagttttcattactcaaaatttaaaaattacaaaatagatattaaattatttgaaagtctattcttttctacagttcagtttcttttcatgacacaactttcaatatcacaaatttacgaactaaaatttaaataactttattctttgatcttcgaaattgaccctcagatcgacttgaatctaagttatgttcttccagtcatcgatggatattgattcaccatatcaatcgttgaatcgct

SEQ ID NO: 12888 - DNA, 462 bp, Gossypium hirsutum
ggagcggcccaaatataaaacacgaagctaaacccagaagtcttattttgattttattttatttacttaaacaatataaaagtaattaggatatttattttatactaaactacatctaaagtcattaaattattagtaaatttatattttgatcatttaattttaaaatgttacaaatgatcataaaattattcgaaacttttcatttaagctactaactatttgaaattttttatcttagtttttttttaaagtccatctaacaaggtctaagtgacaatttgacaattaatacggtgaattatttcccgtcaacaagtagaacataacatagatcaaagtcgatctagtgatcagtgttgaagattgtagaataaaactatttgaattttgactcatatattcgtaacatacaaaattatttaatgaaaaaaaaactaaactgaaaaaaaaaagggaaag

SEQ ID NO: 12889 - DNA, 590 bp, Gossypium hirsutum
gatttctcctagagccataaaacaataacaaaaaatgttcaaggaaaaatcaatagcaacaaacatctgacaatgttgttcaatgccaactctatgaccatcctagacatatagccaaagtctgcaagcctcaatattatcatcactttcatgcatgtgctaacttttttggatatatgcactatgatccttgggttatcgaatcaatagcaagtcaccacataatcaataaggcttaaaattggaccactcctcaagactaatatggttcagaagggatctcaatgggtaatggtaatacaataccaatttctcaaactggtattactcatttatgtgcatcaaatcacaacttatgttaacaaatactttgtgtgcactagacatcaaacaaaatcttatatatatttttaagttctgctaagatagcaacacttctgttgaattcttttttttcatttttcttgtcaatgatctaaatatgggggtgcctctagtgtgctggttgaataaacgcgagttgtatgaatggccacaaggcaacacacatatatcaaaacctcaatctctttggtcgttcttagtcgctc

SEQ ID NO: 12890 - DNA, 417 bp, Gossypium hirsutum
gatgatgccgttctgaagtgataatttagatttattccaattaaaatttctagatagataatactattggaaaatattttgaatagtatacagttaaggcataatgatttatttgattctttaattttataaaaaaaattattttagctttccatttaattttttacattttttaactcttaaacttgtatttttcttattaagtcatccaaaattgatggaaaagttaactttgctaaggtgatatacacgtagatgacacgtcgacattaattttttaaaaattttaaaaattcaaaaagattataagaaatatttaaaaaaataaaaaataattaaaattataataaaatattttttaatatttttaaattttaaaattaattaaatgatatgtcgtccacatggaaattcaca

SEQ ID NO: 12891 - DNA, 470 bp, Gossypium hirsutum
ggaacatgtcatacgtcactaagtgttttgacaactccatcaaacatcttaactttaattgttccaacacctgcgattttacataaagcattatttcccatcaaaacaacaccttcagacactgtttcgtaaattgtaaaccaatcccaattgggagtcatgtggaaggtgcagcctgaatcaagtatccactcctcgctcactttagaattgtttatagaagcgactagaagtttaccatcgctgtagtcttctacaacatcagcttcaccagaattttctggttgttttcccttttgattcgcagcctcccttttaatcttgttctgtagcttatagcactcagatttaatgtgccctttcttcttgcagaagttacaagttttacctctgtttgaagacttcgatctacccttagatttaccgcgaggattccattcctgtgtccttccacgatcatcatcagtatt

SEQ ID NO: 12892 - DNA, 653 bp, Gossypium hirsutum
gaacactgtcagatgtcagacacgtgcctgacttgaagaaaaatcttgtctttttaggtattctagactcaaatggttgtaggatcgtcatcgagtcaaataacattaaggtatctcatggtgctctcattttgatagggggttaaaaagttagtagcctgtatattctacaaggatcaactgtgactagagcaacaatgatttccttaacgatcaaagagatagagccaaaatcaatgccacatcgtgatgaggaaacacgaaagtcattacatggggatgaattccagcagactcagaatcagtgttaacccagttatggcatatgggacttggccatatgaacaaaaaagggggagaccattttggataaaagaggtcttcttccaaaagtaggagttgcaaaattagatttctacgaacattgtgtttataggaaatagactcgagtcaattttagttttacggagcacaagacgaagggcaccattgactacattcactctaatttaataggtccaacttaagtcacttccaaaagaggcagcaaatatcctctgacttttatccatgaccactctaggaaggtctgggtctattttgtaaaacacaataatgatgttttcaggacctttaagtagtggaagacctta

SEQ ID NO: 12893 - DNA, 449 bp, Gossypium hirsutum
atatctcgattcgttctcaatctagctaattcagtccaattataaaaacaatgattaatatatttttattaattagtttccaatactcttattatcctttaacagtaaaatatctattgaatcatataggttatcaaaggtttttttttattaccaaaagtgttacttaaattattaatttcatctcattttacatcaaaacataatattaacatctaagaatgtgctattcaacatcatgtattttttaaaaaaattgagacaaatttataaagcttagggtttaagatttaaaatttagggtttagatattaattttaaatacttaatgtaaaataggtggtataatttgaaaattaattttgttgttaaatcctattgttgaacttacagatccaattttgagataaagtatgaataaaatcacatcaatcatatattaataatgg

SEQ ID NO: 12894 - DNA, 594 bp, Gossypium hirsutum
gttctgaagaaaaaattttacgtggatgaagatatttttttaatttgagataggaaataaattaatgatgtggcataaaataatttgatatgactatatgtgagatagtaggaatggtccatataataatttttacatctcacataaaatttttatgacattgcatctttcgtggaaaaatgttggaggtttaattgatattttatttatttaaacttaaaatttattaaaatattaaaaaatttatagaaaatctataaaaatatttaaatataataaaattttaaaaactaccaaatattataaaatattattaatatgttatgaaaaatatgaaatattaaataaatattataaaaatttagaaattatagaaaatatataaaataattaaaatgataaagtataaaaaaagttgtaaaaatttaaaaaatatataagaaatataaaaaataaaatttgttattacgaaggtttggattaaatttttatagggagtttaaagtgtgatgatgttaatcagacttgtatggggtgtcgagtaaatggtatgagagataatgaatttagtgtttgacagcttaaggtgagtga

SEQ ID NO: 12895 - DNA, 452 bp, Gossypium hirsutum
tttcatcaagagcacttcacaagtcaagagagaaacatccactcaaaagttcaagagaaaatatttcatttcttcattctttttcatttctcttggtattttcttcacttttcttgctctcatatctttgtatttagagcttcaatttgcaaacacacacctattgtaggttcattgtttgcttgttcatcttcttttcgttataaagagtatacttaaggtttttgaggtataaaaccttaagtagattgtaaagagtttctagttaagccacaaaactagaaggttttagtttagtcacaaaaattaaaaggaaggttctatcttagccgttgtgaaaatatagaactataaaggttatacattttccttgaaaggtagctattcttatagtgaattgggaaaatccttagttgaggtatactaaggttgaggaggtaggcaattgaagt

SEQ ID NO: 12896 - DNA, 659 bp, Gossypium hirsutum
cccatttcccaataccataactacggcttaatttaattcaaattttgttattctcaccaatcctattattgtgaaataaattttcaataaaccaacagttggattttgaacaaataatcgtctgcttctttatttcctttatttgggaacatattcgagtgtccaattccctacattctccgggaaaaaattgatatgtcggattattgacgatctcactaacgtaagctctgaatcttggatagcttcaatgacctctaaactatcagtttgtatcaacaccgtattgcattgcttctcttgtaataatgacaaaccatctaagataccccataattcggcctccaaaattaaacatttcgccaattgcatacccctgctcgtccctaacaactccccctactgcagccattccgaagtcaaccttaactgaaccatctgttttaagccacacccaattgcctaaccaggtaaattcataactcgtcctttgtctcgcagtagattttgccttggaatgaatcgcgtactgctttgccaagctatatgatcctttgatgatctcatcaacactcccatgaactatggattttgccttggaatgggatgcataatgctttgccaaactctctgatgatctcatcaacactcccatgaac

SEQ ID NO: 12897 - DNA, 620 bp, Gossypium hirsutum
  misc_feature (609)..(610): n is a, c, g, or t
  misc_feature (612)..(615): n is a, c, g, or t
cttgacagacaactctagtgttcttttcttgcacgactttgaatcttctgtctctgctccagcttggaaacagatttttcacctttttttggtcaggaaaaagctttaaaaggtcggaaatttaaatcatcctcaagcttctctaactctagtctctaagattacaaaaaaagaaaagaaaagaggcacttcctaggcataaaaaaaggcaatatacctaagattccttaaaaatccgattctgtatcttatctgtcccttcaacttatttatctgatctcctaagtcctaccaaccagaagtaaaaaaaaaaaaaaaaaaaaaaatttttttgggggttccccaaaaaaagaacccttaaaaaaaaaaaaggaaaaagaaaaaaaaaaaaaaaaaaaaagggaaatggtaaaaaaagggggtttggtttttaaggagggaaaaaaagggcccggggggggtttttttggggggggccaggggggcccggagggggaaaaaaccaaacttttttttttggggcccccttaaggggtttccccgggggcccacccatttttttaccgttaaattggctggggcttttttgggggggggggaaaaaaaatnncnnnnaaaaa

SEQ ID NO: 12898 - DNA, 652 bp, Gossypium hirsutum
  misc_feature (7)..(9): n is a, c, g, or t
aatcatnnngttattctgggcctgagcccaattcaataatggtggcctttgggacttggccaatattagcctcagttgggccgaagcccacatcgcaataatatcacaataatatcatacgtgcaatgctgtgcaacccaccccaataatccaaccactacacaccagctttgtcccccggtacacttcatgtggggatataaatatcgacccacccatctggtacacatcaatgcgatactacctttatcgcagcaagctactaatcaaatattaggcttaatagccatcagtggatccacagtcgtcaagcaaccatgcgatcctcatatacttcctccgttccataattcccaacccatatgcaacctaaacagaatatcatatgaatgcagcaggtattcatgtaacatccataaatcttacattcaacacataggggtatgttagtcattttttgcccttaggggcatttcgataatttctctttattatgggtttattacctatctcgaccattgacaagtccccgttggctaaagtgaacagatactatacgccaggtaggatcccagtgaagaggaggtgagtcattaagaccgcttaagtaccaagctctccctggatccaaccctagacatgcatatagcca

SEQ ID NO: 12899 - DNA, 636 bp, Gossypium hirsutum
aagattgtacacgtgggttgtcctcaaaatggatgcaagatagagttggccaacgagggtaagaactgtgtgggaaaatattgaaatgaaagattataaaggtgggagaggggcggtgatgggggaatcattgtttccgtgtggaaataggggggattttcttacattggtggtgaaagggacccatttcccttaattttttttatattatgcctttctcaatctgattatcagattttggggggtttgctatggctccatcatttcactacaacttcgttttgtaaattaatcattacccaattatttgtgtttagaatcaatcacaatatttctacaattttgttcatataaaaaaaattggttttggggacccaattttgcgttgattggactttcattctctctccaattattcttcttcttgtttccaacatactattcaatgtaatacatctttaattttcattagattctgtttgctttgtctgtatatagtaaaattatagccattggtgtttttttttagttagcaaatattcagttttgacaatttgcctattattaattaagtctacattattcatattggattggaaaaagtagcccaaggcagtggagtgaatctaaccaatg

SEQ ID NO: 12900 - DNA, 672 bp, Gossypium hirsutum
ataaaggcaaccaatggattgcttgttcaaataatgtttcatatattaagaatttatataagattgagcttggagaattttaaaatttaatgaaaaaaagtaattttaattgtttattataacattaacatttgaatctttatttttatttttaccattaaattttgaatattaaaaatatttgagtaaactatactcaagggcattaaactattagtgagtttacgttttgattactcaacttcaaaagttacgaaatgattattggaaagtttccatttaagttattaggctgttaaaattattgttgtatggccttccctgtttacactgcttgcaccaattaaaagcttcattctccttttcttctacaatttcatattttttcatgaaacaactttgagtgtcaagaatctacaaactaaaatccaaacaaattatattatatacattacttatgcttaatgaaatgtatatcaacttaatataaagattatatatatatatatcattatgagcatgattaacaatttcacatcatattaatttaattaaaattttcttaaaaaattaatatgtaaatcaatataacatattatatcaatgaatatacatactatactataatatacaataaaataatatttgtgggagaatcgacttctttattgg

SEQ ID NO: 12901 - DNA, 605 bp, Gossypium hirsutum
tcgttatggtagatataaccgccgcagtttctaccttgctaatagtttagcaaattctttgttgttactatcgggtcctgactcgttggtgtctattaagtggtctgtggacatttgttgctattcacggcgtcttcggactaatagattttatttaaagatcaattttttaaaattaattaattttaaacttttggataaatttttaacttaatgattttgagaatggataatttaaaatttttaaaattaataactaaatagattaattgataattctttttattttatttttttaaagaaataatcaaaacaaaagaaaacatcataaaatcaagccaaaacaataaggagcaaaacactgaatccaagtagacaaactttattccgtacactcaatcttatgttcccttactacattggcacatgaagcaccgtcatcaacatcaagaacaagcctaatagactccaaaatattaaaccacttgacaatttgatcatacaataaagttacttgttttaaactatgagccgttttatcttctaagaaaaagttaattactaaagtgcatcttaagaagcaaactatcctagttaatagccca

SEQ ID NO: 12902 - DNA, 450 bp, Gossypium hirsutum
catcagaaaccaatttgagcaccaagaaatagaagaattaaaacccatttcggaataaatgcaagaaagcatagaaaaccaatgaaaacaaataaatctcaacttctactccagggactaaaaaacgcattttggaacagatgcaagaaagcatagaaaaccaatgaaaacaaagaaatctcaacttctactccaaattaggtggagggacgggtaaaataggaggaagagaagacgaggttggaagagcggtggtgaattttctggtttgtttgtcgactggtgcagtgcagattttggcaatgaaagacagaaagggggaagatcaaagatgaacgctgatgactggtgctgagaagcgttgctggctggcggcaagcatcgggtctgggtcgcaacgaagggggaaggggaatgaggtttttctttgttgggatgtgaagaggaaaa

SEQ ID NO: 12903 - DNA, 603 bp, Gossypium hirsutum
cagcacaaaatcttggtgattgttaatttctataattaaatggtacataaaaaagattccactgctgggcttacataaaataagagaaatgtactgtttgtttattgacattcaaatttttaattacgtttaaaccaaaatattaaggttatacattttttaatatataaaataaatgccttgattattttagcattatcaagtctctacacaatacatatatatatatatgaatatattatttctttagtttgtgtaatctaaaaattactttccttctaaagaaatatttccttagtaaataaattataattaagaaaattatttggtagaattttaaataaaactagaataaatgtctatttattatttttatataaaatctaaaaaaatcaatttaaactcataaaattaaatatatgacaaaacttgaacttagaggtgtgcatgggctgggttgagtttgagctgggtttcactaaaaatttaggctcgtttcttaggcccaggcctgactcgaaaaatgagtctaaatttttttcaagcccgacccagataaacatgctaaaacccgagcctaaccctgcccgcctatattaattt

SEQ ID NO: 12904 - DNA, 645 bp, Gossypium hirsutum
aattgcagtttgaaaataaaacagtttaggcaaaagaaaaactaacagaatcataaaataaataaatacataacactttcaacaaatttcaattcaaccgagaaataaataagaagcataaaactaaaaacatgaaaaaataaaatagtagaaatcaaacctgacgtggaattgaatcgcttctagggtcaccaggcagttctctaacgaatgaatggtcccaattaagatcttcaaggctcaatttaccattattcttcttattttcattgttcatattattattattactgatatcatgttctcttaagctttggtttttcaaaccgtcggcgacggagtcaacggagacggaggaggaagaggagggatccggtgaagtcgagtccatgcgaaggttgccgccggtggacgcgtggcatgcgagggaagggtaaaaaggggatttaggggcagaaggaaggaaaggacggaggcaaagggaagtgatagaggaagaagagagtgagaagagcggtgtctttggagagaaatgaaatctcattttcctttttttttttatttttttatttttttccctttaaaaattttaaaaaaaggaaaaaaggggggttgattgttgatctaagggatatacgtaacctt

SEQ ID NO: 12905 - DNA, 659 bp, Gossypium hirsutum
ggtggaaaggataaagtgaagaagatgttgtgtcttgatgtttgtactaggtggaacttgaactacttaatgttagacactgctcagaactttgagagagcttttgagagatttgaggagcaagatacaaactttagggctgaacttgaaagaggagagggttggcctagtgtggatgattgggataatgttagaaacttgagggatttcttggaacacttttatgaagtcactttgtgtatatctggcacttcatatgtcacgtctaataatttttttgatgagctttctgaaattgatattcttttataagatgctcagttaaaaagtaatgttgattttagtgttatggccatcaagatgaaagagaagtatgataagtattggggtgatattgataagatgaatttgcttatgtttgttgcttgtgttttagatccaagacaagaactaaagtatcttgaatttacacttagtgaaatgtctagttctgaaaaagcttgtgaaatgatgcaaaaattgaaggaatctttgtatgaattgtttgatgattataagcctcgacttcatagtacttgtagccaattgagtgtgccaacacatgtttctctcggtgaaccacaataaaaaatgaaaaggcgaatgcaagctttgtataa

SEQ ID NO: 12906 - DNA, 641 bp, Gossypium hirsutum
aatggcgagtagcggggagatgattcaaagcataaacttgcgaaagatatagcggaatcaacgtaatggtattcccaaacccaatcaatcaattacaagcatgcataacacttcaaatttattcacaactcagtgatcttaccttataaactctagcgatcctactatgccaaatttggcgaacatgccttgccattctagcgaacttacctataaaataatcaatttggctaacctttctctaataccaacaaatgtgacaccttaaagctggttgagttggttcgacccaaatctagtgtgccacaatagccaccaaagtgactctccattaactcccaacctaacctccaacacaccacggatttacagcataaaaatgtactaagttatcacaatgcaacggaatgtcatattaacatgtatgaaatatagaacatgaaacacatcaaatctacataaagaggaagggttcgcatgtcaacaaacaataaagaattcagggtttgcatattcgaacaataatacacaagtacttagaacttaatattaaggttcgcacaacaacataagttcgcataataacatacaatatgggttcgcatataatacgggcttcgcaacaagaaaggtcataactt

SEQ ID NO: 12907 - DNA, 610 bp, Gossypium hirsutum
gacaaatatttacatatagatgcaggttcatatatgcgaactattccacggactttcttatagagaaattccatgtataactttgtcataaagcttagagaataagtctagtggactgtcgtaactcaaatcatgagataagttcagcggtcgccttatcttgcgtgtgtccatggccatgggacttgcatatatacatggggctttaagccttaaactccgcaaagtctcatacttgaaagttcccatgtagggttatcataaatatgtgtgcatatatctccgtacaatccaactgaacctttgcaaaaccaataacatgtggcataaggtgcacaacatgacatttcttcaatgtccatccaccattacatacctctacacttcgcatattattcatttaacgaatgacatataacaagcattcaactaaacataatgataataacacaacatagatcatacaaaacatatcacctatcggactatttcaatgataacctatttagtaattactttaccagtgatagttcatcaaaacaaaaaaacttatatgcatctgtagatcattactttgcatgcttcaactgtacgacaaacatcccaaaat

SEQ ID NO: 12908 - DNA, 692 bp, Gossypium hirsutum
gattggttcagtagcagcatgaggttgcggatcgcggcgacggtggtgggtcaagcttcacaaagaatagttcccgtgatgagaacagtcaagagcttttcttttccatatccgaccaaatgcacaatctcatctcatctcaagtcatctccatttcttctgttaactagccacgttgatagctcaaatagtagattattctttttagatgctttggacataaaatctatcacggtcgccgcatttgagaggttgggtttgtaataacccgatagtcacgggtaccggaaagtgtactttcgggtctccgttttcgtaaaatggattcataaatatttattaaaaatatttacgaagttagttgtgtggttaattagattttgattaggtgaatttgtttaaattaagagtaattaggtgcaaggactagattgcatataggaagaaagttgaattatagattagagaaaagtgaagggactaaataagtaattaagccataaattgaaaagtgtatggtgattgtgtgtacatgtgtaaaatttatattcatatatttataataattacctacttattatttaagtaaatatattatatcattatattattataataattaaatgaataaacaaaataaatgaaagtaaaagaatataaaaagagaaaggaaaggaacgaaacagagaaga

SEQ ID NO: 12909 - DNA, 439 bp, Gossypium hirsutum
ggattgggatttatctttgcgagcacaatcccgaagaaccgtatctatgaatagcatatggcttcggaatgaagggaaagaaaaacgagaaggaatttaagaggataatcgatctttggggtttgatttttggaatggagatactaagggaagatgtggtaaatctattgatccaattctgggattcaatattgaaggaggaacatcacctttagctcacagacaagagagttcttgggctgatcagatgcaaacggccatggaatatgatttagaagatggtattttaacagaagaggaggggaaaaagcaaacaagaaggaaaatgagtgatctaacggggaaagaggagactggggcaatgtaatgacaatgagtaagcgtacggtggattttaatattttatcatcggagtttgcctagaggcaagccgaccaaa

SEQ ID NO: 12910 - DNA, 657 bp, Gossypium hirsutum
acataaacttctctcaacccaaacccttacgtcaacttgcctagccatgaccgccatggatgcccttacctagttcttgaatgtctttaacattccatcggctaactaccactatggtctctccttcaattgcaaacaccccatcatctcctacagtctacaagatcctaaagatgaccttataaaataaatattctatatttagcttcccaacctccaatgttgaagccattcctccagatcaagcttcccagtaacaactccttggttcacaacaccatgatactgagatgcaggaaaaaaaacgtctcgtgaagaaacaactactggatcaacaacgtcagtttcaggaatagcaagagtgttaacacctactagattaacaaaatgcccacaatgaataattgatcctaaagttgtgtgcagccaaaggcactaccaaaggtggtgtttaaaggtatgacacagtctagttttttgtaaagataagaatgattgcgatgataatgaagtggcataagctattcaacttatcgattgtttagagtaggaaccttgaaacaaggttgtttctattgaaaaaaattgcagcacttagattggaattcttgaaagaggttaagggttttatgtatggtgaagtttcttggagctact

SEQ ID NO: 12911 - DNA, 236 bp, Gossypium hirsutum
gttagtgtttgatgaatcagggtgttcgaaaacatcctccagttttgagatgggtttcagaggatttgacactgttgcctgaatccaagtgggcgatgtaggtgtagaaaggtaattgacttttcatattccttgaagtttatcagtacaataattcagacatggtatagagtccaagtacagtagatgggaacatgaaggttgttgaatcatgcaagagggactctttttttttt

SEQ ID NO: 12912 - DNA, 419 bp, Gossypium hirsutum
cactattcttgatatttatatgattcaagaattaagcatcaaatgtaacaaaaatttttgaacaactttcattaactataattaaacattgtatgcttcatttctaaaatgttttttgaaatgggggtgtatttccaagcaccatgtgcattcatccaaacttaaagtttgcattgtccccaatgcactaacatgaaaatgtaatgactataaaaatgcaatgaaaatatctatttaccaaaataaaacctacaactacttgcaatgcatgaatactaaactaaagcttaaaataaactaactcagttatccgcagccgtcaatgtggctgcatgatgtttctttctcctctttttcttctcctcctcattctttcattttttatctttgaagtgcttccttttcttttatttgggctt

SEQ ID NO: 12913 - DNA, 475 bp, Gossypium hirsutum
ccttacacacggcctaccacactattgtgtggcatgaacagaatcattttttggcttttaccaattctcgttttttgtgttttcgggtacatacctagttcattttcaatgcgtaattactcccgagcaaacccaaacatataattgaacatgttttactcggttaattctcttaaacgatcgaattgaactaaaaccccaaaatagattagacacttttcgagcatacaacccttaccttgcgaacgaatgcttcccactacggtttagcactagaaaggcctctcacaccagactttcgactgtcaaaacagttaataaaaatcccaattattattttaaaaaccaaaacttcaaggcaccaaaaccatttaccgaatccgcaatgacaatgtagaacaacagaaggcaaattgaaaacaaaatcgaacagaactagggagaggaagatgggaatttcgacaaagagtcacaa

SEQ ID NO: 12914 - DNA, 637 bp, Gossypium hirsutum
agaagtcatgccctatatttaaagaattattttcgagtctagtttctttaggaacaaacggcataagtattgaagccctgtacaggaagatatctaagtcgtaatgcatgaaggtcagagtagtcgaaccctgtaacaggggagactttaactaataaactgtactaattggctagaccaaaaattctagaaaaaaatttgtagatggacatatgagtctagtttcaggaaaaatttacggaactagtttttgagttttggaacacgagatatgatttttaaggtgacagtgacgcagttagccagcttgtctggaaattttaaatgaactgtgttttacaatgaaataagtccgtaaacacctcgtgttcgactccagcaacggtctcgggtacagggtgttacaacatgggtgtgtgacctttgtaacttagaaaaatttttaaattgacgaaaaattttgtatgtattcggtttagtcctgacctcttccgaatgcatgtttatggtattgttgacctaagaaagggaccttatattgatatttgactttgatatgataatgtatgattttctattgtgatatgaatgcaaaatgtttcgatatgtctgataatgcctcttaaccctagttcag

SEQ ID NO: 12915 - DNA, 681 bp, Gossypium hirsutum
atgctgaccatacttcaatagatgtcaacaacacgagtgtgatccatgcgaagtgcaagcacatttaacatatcattgatgagattaggatgttcttgcaagtagaaatggacggccttgtaatatagctcaacattagcaacttcggcaataatatctttaaactacatataatcccatgcttcaggagagtggttcatcacagtagtagcagcattatcaaacttctcatattggatatacaaataggtaagttcctttaaatgcttttgctcgtcacaagctcagcttggggatattaagacgagtagagaaaaatttaatatgctccatgagcttctctggacaatatctggcatacagaactcccaattcagtaaaaataaccatgtgcgcacgttccaatgctaaaccactcttcatgagagaaatcaactcattaaagcatcctctattttgatagtattttctgacttcttccaagtcacccacctacaaaatcaacaaacataatgaccaaattatcatggacaaatagcctccaacagaaaaacatgatgaaagaaaaaaaaggaactgaatatgcacacatatgaacaactttactgttctcaaaaattgtaattcaacatggaggcaaattcacctgtacaataatgttaagaccacgtatctgtgcca

SEQ ID NO: 12916 - DNA, 558 bp, Gossypium hirsutum
  misc_feature (518)..(518): n is a, c, g, or t
  misc_feature (521)..(521): n is a, c, g, or t
gatttaatctttcttaaaattataaagtattaagcttgaaattaaaaaattacattttaactctctaggaaattttgaatttaattgtggattttgaggtatagggacattggggattgggattgagtggggtgcattagttgcgcctagggttcctgtttatgcctgaacctggtattaaagtgagtttctttaaacctcgagaatgtcaataagcacatgtatgtatgcatgtatgagcaaagagtgtaaaaagttcgcttttctaatgtattagccgctcagtaagagcacatgctgtgagacagcattgtaccacatgttctaaagcttattttcaacatttgaacaaccaaggttcggaaaatcccaaacaatgcattgaaaaatctcatactccaatggctgtttctggcatgtttttttttttgttggttttgggtgaaaaaaattccccacccctttaaaacccccaaaaaaaaaaaaaaaaagggaacccaaaatttttccaaagcacntcncccccccggaaacccaaaaaaaaaattttggcccccc

SEQ ID NO: 12917 - DNA, 560 bp, Gossypium hirsutum
aaatcgggtctcctggtttgaatataacatgccaaagctatgtcccagacatagtcttacatgggatgtttcttgtactgccaatcccatatcccaaatatggtcttacatgagagttctcatataggtgcccatgccatgtcccagacatggtcatatgggagacctctcatcttagtgccaacaccatgtcccagacattgtcttacatgtgacctctcatctcggtgccaatgccatgtcccagacatggtcttacatgggacctctcataatctcaatgatgccaatgccatgtcccaaacatggtcttacatgggatctcatcctcttaatgtcatgacatttgtatccgatacattcctcatgtttcaacggggccttttaacactgattctctgtcatctcatacttgagttaacattagatattttcataaaataaatacataattgctgaaaaataacagcattaataataattatcaaaatattacatttatttgccgtaaacttacctcagtacaaaataggatgaaatctagcactttagaccacaac

SEQ ID NO: 12918 - DNA, 648 bp, Gossypium hirsutum
caagacattttctagctatgtgttttatcatctaatattatcctgttcttaattcagatcttcaagcctgttttcgtgtaacatattagctttctgttttctttgttcaaagctgaattatcatagataaacaagagattagaaaataaaaaagtccagagatcagcctagggatcaattcagcagatcagcctctatgaacaagtttaccacaatagctttctgaaacatactagaggcagagggggtaattggcaaatgtttgtggtagcattttcattacccatttcgtttcttactttttaagtgaagcttgttgcccttgtttaatttgcatctcccaaagccgtctggttttttactacatggcagcgaaatatgagcctctgatacgcaagttcagtacatccgttaaaattgtcaataaacaatgcggtaatcagttttcataaaattaaaaaaaaaaatcataaatacaaataaataataacaattagttcaaacaattttgtaatggatcttttaccctgtctagtcagtcttgtttactagttcaacaatttttctcttacgtttttgggttttatggtatgagttaaatagattggatatttgattttcggttcaatcgggtggttcgatttgaat

SEQ ID NO: 12919 - DNA, 608 bp, Gossypium hirsutum
tggttggattattgggcttcattaatatgtatttattttaaataaataaaaatattaaattaagtcattttttttggcccgataaatttaaaaatttaaaaatcaataaccaactaaaataatcaaccaaatgaaaccataacccaaaggttaaattctattattagtccttatactttataaaatctgtagatacagtcattgtactttaatttggttaaatttagtcctatactttctaaattttaaatttcaaattgagtcattaatttaatgcgaagcaaattgcaacttgagagtttgataaaacttgcattatatgaattgacatatttttgaactaaactctacggacctttgcttgatgaatcttgaagtctgttaaaacaacccattagtgaagcttgaacatgcaaattcaagtcaagttccattatagagaagatggaattttaataagagtttaacattgagaacatctatgccattataaggataattgaatatacacggtgacctttttatatgcgaattgtttcattgactacaaaaatcttagagggaaagtgatcctatttagagtcaagagatgaggttgctacttgatg

SEQ ID NO: 12920 - DNA, 549 bp, Gossypium hirsutum
  misc_feature (502)..(502): n is a, c, g, or t
  misc_feature (504)..(504): n is a, c, g, or t
gattggacagaaactatggatagttttaggcattgtgttaaaaagtataattttaaactaacataattatttcttatattttattttctttcttttttttacttaagagtgtaacctcaaacttaaaaaaaaaaactagtaagcccttttttattttttttatttttttgcacttgattaggtgcttgaacttttaaaaatgcatcaaaaacactcttaaattaaaaaaaacaattaagtttgtactctttttcactcaattgtgtacttaaactttcaaaatacatcaaaaaaaccctttgaccactaactttaacagtcaactgctaaagttagttgcccctaatttttttagttaaagctaccccgtgtcacaaccacagcgtgacatatgacaaaacattataaaaaataaaaattttaaaaattttaaaattttaaaatatatataaattagaaaaaattggaaaaatttataaaaatcataaaaaataataaaatncnttttaaccattaactttaacagttgaccgttaaacttaacaacct

SEQ ID NO: 12921 - DNA, 687 bp, Gossypium hirsutum
atccctcgctataaccatgaaatatctcacatattcatccttatcatttcccttgtttaatgccctttggcctcactcaaggaagtaactgacatgcctgttatataagggaacttgcacacggatttcactagaccaaaaacaataatggggttttggaaatggatagagtaaaagagaaacatttataagcacacaaaaaggaacaatgcccctggaattcgatgcgagtacaatttatatatgtacagcatctcaaaagataaaatataattatcgattcttaagattcgctcgcttaaacttaatgggaagttttacaagaagtatcatagaataagacttagattgcattttaactcttttactcaaaaaatagacaaattaaatcatgtatgtttagattaaaaagcaaattgatcatttttgttaaaaatttcattcatttttacggttaaaaaccgatataatttatgaaataaccatacaattacacatagcatgccacgtatatctcaagttgacatacatggactagtttttaatagtagaaatgaataatttttttaacagaatgatcaatttaccttttgatctaacaaacatggactaagttgccattttctttagtagatggggtaatgcaatctgacccttagtagaagggtctccatgatgcttctatca

SEQ ID NO: 12922 - DNA, 688 bp, Gossypium hirsutum
  misc_feature (651)..(653): n is a, c, g, or t
  misc_feature (663)..(664): n is a, c, g, or t
  misc_feature (677)..(682): n is a, c, g, or t
tgcaggcattcgggtgattttgggtgagaaatgaagctaggaaatggctttattttgtccgcacgggtagacatacgggcatgtgtctagaccgtgtgtgacacactgcctgctaacacgggtatgtggttagaccgtgtgtcccctgcaccttaattttaagaaacagaatgctcagaagtgggcacacgggcagagacacgggcgtgtgtctcagccgtgtagcctggaacacgggcatgtatcctggctgtgtgaaacctgcacctaattcgaattaaattaattaaccacacggccttgcacacgccgtacgggcgtgtggcatggccgtgtgtgcaagttagagagttacacggggtcgaacacgacctctagcatgggtgtgtcccagggtcacacgagcttgtgagccttgcaccttggaaaaattttataatttcgcgaaaaatttctagaggttccgattaagtctcgacttgattctaatgctcgtattggacctcgagggtccaattaagagacggtatgaatagtctcggttaatgaatagtgatttgcatgaattatttgaaaaaatgttctagatgttttggtaatgctccgagaccctgttccgatgacgggtatgggttaaggtgttacacagcnnngatccatgcnngtgttccaggctnnnnnnctgaga

SEQ ID NO: 12923 - DNA, 538 bp, Gossypium hirsutum
cacaggtactatttggttagggtctattgccataaatatcacaaaatgactcaattttgaaaatttttaatcttccattgtaattataaaaccgttttctgaacctgaattttccaacacaatgatgttgattggataggtaacttgaataataaaaaaagcactagaggagcatgtttctatcttggtgatattctaatatccaactatagcaagaaacaaaattccatttctttgtctattgtagaagctgagtatattgtagttggagaatcttatgctcaattgattggatgaaactaatgcttatggattaggatgtggccacaacttgtgtcatactacaacaacatcaataccattaatattccaaagaacccaatcctacattaaaaactaaacatattgacacctgtcatcattttattagggacctaggagaagaaaatggtgggattaaaacatattgtcactaaatgatagcttgcgagtcttagatagtaacatgtttggcaagcttcaaagtgagctcggaatt

SEQ ID NO: 12924 - DNA, 630 bp, Gossypium hirsutum
aagcaaccacaaatgccaaccaatttgattattactcaaaaaaactatttgctttctaagttgttcttacttcttagtcatcactatcataattaagctcattttgtgagacaaccccttgactattttccatctaataaatatggggttcatccatgtctttaaaacaaaagtggaggccatgaatttgcaagtcccctccccccttgatccaaccttgggccaaaccctaaattacctttattattgaaagcacatggtggaggtggaccctttccttgaccatcaaagataatctagtaactttgccaaaaggggtctctagaaatgaaaccatttgttttagattgaaggtagctagggtaacctcaaatgatattataattcaccctaatggtttgaagaaaatcattatacttgaatttaattttcaaagcatactctaaagcttaagcgagagccgaagagagataagaaataagtatataaatgaaaaaagttattgaaaataaactgattagtgtcggtacgtttaatatcttcttctttttctttttttttgtgaaccgtctcattttatcctaaaacataatgccaactaataaggatgtgacacttaacacgtttaca

SEQ ID NO: 12925 - DNA, 664 bp, Gossypium hirsutum
ttgaacagctttgcagtgtttctcgacccttctataacatgtaaacttataatatatgtatatattaatttgtggtagcaaaaggcatttgaggaattaagatttgcatggttttgagtgattcatataataatattatatattgtcagctctgttggaaaggtggaaggggcaaactattttggccactcaatacatatatacacatatataaaatttccatggataagaggattctcgctcatccaaccaatcttcgaagacattctgataacctatgtctccgtatgcaaaaaatttgcttaattgaggattttagtagtttatgataattcgtccaaaaattaattcaaggaatatattgaaattttcaatatgaattttttataaataaaaaatttgagcgttaagaggtttcatgataacaagatcttaccacttgtttaggttataggtgtatgagagaaagcgcttctatttgttcattaagatttgtgcataaattggattgtttatcaatttacattttaataggagagtgtgttgggaatattctacaggccaatcatatttttatgtttaaataaattgtataatgataatgttcaaagcatgatatgaccattcttaaatgtttttagtcaagtattattgtggggcatga

SEQ ID NO: 12926 - DNA, 545 bp, Gossypium hirsutum
gagatacaaccttgctcgtttgattaaatgcaaaaaaattttttaacccctcttataaataaaacatcaaatttaaatatttttaattcttcatttaaaaaattacatttttatcctataaaaacaataatttaatttaaatattttaagctttaaatgtttcaaaattttacaattttatttcttaatttcgccctacgttaaacactctcagtccgataaaaatgactgaaatctactttttctttattactatgaatgtagcatgcgtagggatgggagttttgtattggcatcttttgtagagagtaaaagcaaacaagctttctaatatatgcacgtggacgacacttaacaattactaaaaaaagcaaaacatccaaagaaagtgatgggcgacgatagtgattgattttaaatctataatcattatttcaaccatgagttagggttaatatgttataacctaactttccttttttcttttttaatattattttcaattcatcaagttttatcatttgaagtccattaagttgggatca

SEQ ID NO: 12927 - DNA, 593 bp, Gossypium hirsutum
attgaatataacaagaataaagtcatcagtaaaattactctgccaaatcccaaataatgaagattgtaaataatttcaaaaacacatcatgaattggatatcgcagtctataaatctccactaacagacatttctaataatttatagtaataaaaaaagatgaaaagaaaacaatgttgactggaaaataagcaattttgcgtttcttatctttcgtttcatccactaaggagtcaaaagaggtgtttaaaacaatgacctggaaggagcataagagaggcggcgggactggaggcgaggagcagaggaaaccgagggacgtagccggggtagcggtggaggggagcggagtgaaggagccctcgcggcagagatgacagagcgagacaaggatcctgcacttcgccaagccattttcacagtgaagattgaagcgtttcggtaagagagaagctgaataaagtagtgatttgcgtaaaggttttggttagggtttaaggggtgtgcctgtatccatgattcgggtcggatccttttcggatgggtctatgtatgtagtcttttaagcccggcccattcagaaatatgtgtta

SEQ ID NO: 12928 - DNA, 656 bp, Gossypium hirsutum
ttggattaactcacaaaggtggtggttctctgtttgaaacaacaacttcccacaagtcatatgcctaaagatacatcttcatcttcactacccaaatatggtagttttctctagaaaagataggaggtggaggtggtgtaaagcttctagatgacattgcaatacaaacaagatacaaacaaacctttgtgttcaacaagaaaaacactcagaagttcctctaaggctaaggctttctataccaattgttagagtctagagaagttgagagaacaaaatattgagaaaacaaagaaaaatacatagcataatttttttactgctatcaaattttctcatctttttttcattcaacaagaaatacaatatatatactggtgtagtgattacacgtaagtcaactaccccactaatacaccttaaaaatacaaaaatataacttgtacataaattgattaggtaaaagtcagaacttaaaaggttaaatcaatactaactctgcttatctaacaagtgatcttagcaagtagactaataaaaaaaatcatcatcagcatatgcgaacccttcttaaaatacgtcaggtggttcgccgacaacatataatagctcacactttgatgagctcgcaacattagttgagctcgcaaccataa

SEQ ID NO: 12929 - DNA, 812 bp, Gossypium hirsutum
  misc_feature (336)..(337): n is a, c, g, or t
  misc_feature (697)..(697): n is a, c, g, or t
aactcctccttcaacttatcctagagcttgtttagggagtttcacaagccataattctcgtgaaaataacatcagacacaccattctgaaggcaagacaaagccttatacttcttagcagcgttatcactatactgtctaatttgagctatcgttggattaactcacaaaggtggtggttctctgtttgaaacaacaacttcccacaagtcatatgcctaaagatacatcttcatcttcactacccaaatatggtagttttctctagaaaagataggaggtggaagtggtgtaaagcttctagatgacattgcaatacaaacaagatacaaacaannctttgtgttcaacaagaaaaacactcagaagttcctctaaggctaaggctttctataccaattgttagagtctagagaagttgagagaacaaaatattgagaaaacaaagaaaaatacatagcataatttttttactgctatcaaattttctcatctttttttcattcaacaagaaatacaatatatatactggtgtagtgattacacgtaagtcaactaccccactaatacaccttaaaaatacaaaaatataacttgtacataaattgattaggtaaaagtcagaacttaaaaggttaaatcaatactaactctgcttatctaacaagtgatcttagcaagtagactaataaaaaaantcatcatcagcatatgcgaacccttcttaaaatacgtcaggtggttcgccgacaacatataatagctcacactttgatgagctcgcaacattagttgagctcgcaaccatagagc

SEQ ID NO: 12930 - DNA, 652 bp, Gossypium hirsutum
tgaacatgagctttcctaaaaattgatgagtgggttgttttccacccttttataaatatttttgcaaaaaaaatgtctcaaaaagatgtaaatttccaaaatataaagtttccaagtaatttaaaaaataaaaattttcctaaattggaaggttccgaggacggtgaaattctttcaatgaatttttccttttacaaatttcaacttcacatgtatcatgaatctaacttaaaatggatagaaattattttcttgaacaaaaaatttagctttgatttcatttggcatgtctaacttttagtgattggttctttagataaaacaaacatttgtgaatcattctttgtttttccatggtttgcatcatactcaattcaaactgcttatgaatctaatcaagtttttcacttcaatatatatttaaattatgaaattatgtttttacctttattctatagcaacaatttaagtagaaacaagttcaagcttgaatataatcaatcttatttgaactcaaaaatttataaacgagtctaatcaaactcaaatttaaaaattgatatttaattaagtttaagctgaaaattaaacattaaattttaagtagagctcaaacttgcttctatttgagtttgactcagcccgattacac

SEQ ID NO: 12931 - DNA, 503 bp, Gossypium hirsutum
agatattcatgggttgagttgggtcagattcgggtcgagtctaagtatgatattaatatattttatgtttgcccaaacttggcctgactcgaaacataggcttaaaattttatttaaatccattttaggcccgcccatattatttttaatttttttaaaaatatttatattatattatattaatatttaataatttttatttttattttatttattgaagtcttttatatagtcatcttaacattattttaatgtttacattagagtagtattatatattttatatgtgtttatttttttaatatgttctaaattatataatatataaaaataacataatataaagaattataaaattaaaaataagtcagaccgggctaaacccgagccagcccacattttaaataggcttaatttttttctccagcccatttttcgggcttaatatttttactcaaatctttccaaatttcgagcggacctgaaacgatagctcgacctaa

SEQ ID NO: 12932 - DNA, 609 bp, Gossypium hirsutum
  misc_feature (430)..(430): n is a, c, g, or t
gattactaaaagacttgtatagcatcataaatgttcctatcgttaccctcttctctctctcattttagccaccggatatgaatttggttatgctcatatgtatgattccaaattatatatcaagtaaaacataaaatctcgtatttgagataatttcaacatatatactataaattaacacaattataaatctatatttgaacaactataaaataaaatataacataaaatcaaaatctataattataattataataaaacttaaaaactttagctgtcaaattctaaaaaccctgtgtgattcaacaatggttcacactctaagctgttgaaaaagagaaaggtctcctccaaccgtgtgccattgttaagcaatttgacaatagacaattttgtttttattttaattttggtgtgaattggtcagctnattgagtcttatctttcacactacaagctgttgaaaagagaaaggtctcctccaacacaataatcaatatacactgtgtggcattgttaagcaatttgacaatatattttatattataataatacgacttatgaaacaattttatttttattttaattttggtgtgaattggtcagcta

SEQ ID NO: 12933 - DNA, 675 bp, Gossypium hirsutum
ccttaatgacatgtcactagtgtcctaaactattcctagggttcaaccgggatttcgaatgccgaattatcatcaagtcaatgtcgaacttaaccgaagtctcgtatttataacttataatatatcaaagcttttaaaatacaattataatgaaatttatcacatacgaaattaccttgggttcaaaagtgatgaaattggtcgattaatcgagtactttgtcttttccctgatctaattcaaaattccacttttcttgatctatataatatcaaaatcagcttacttatttctctatttattcaattcaacccaaatatacatttgagctattttacacattagtccctaaactttcacatttttacaatttagtctttattacacaaaatcagaaattcatgcaaatttcaaaacacccaagcttatacaaattactattatacacttaacagcccataattatcaaattttcacacattcaaccacacatttatcacttttcacaagttaatccctaatttgcattttttttactcaaaatcactttaccaaacttgcataactatcatcaaatattcacaattcatcataaatcatcaaaaaacacatatatacatcaatggaaactctcacaaattttaacagttttgaaatcgaagatacgggctagat

SEQ ID NO: 12934 - DNA, 448 bp, Gossypium hirsutum
gctgagttcaactttctccaaatttcatggattcccccatcttctttatctcttgcaatatgctccttttcgtaattacaattaggccgattagccgggtagttcaagtccactaatcttattgcatgcaaagataagtttggtcaaatttatggaaggtccttgtactttatatttttggtggatttaacccctcgtcatatttctagtctctaatttttttaaatctatattttcagtcctgaaagataacatttttttcctgttgattacatcaagaacttgacctggtttattatattttaacatatatataatcatgtgacttatatatctagaaatttattttttctatttatataaaaaaatttgcacaaagggccggtttaatattgcttttaagaagctctttggggacaaaagcatttctaaataagttgctttttca

SEQ ID NO: 12935 - DNA, 625 bp, Gossypium hirsutum
  misc_feature (622)..(622): n is a, c, g, or t
ctttttctggatgcatctgttgatttttgaagatactttcgtatcttactttggcttcttcacagtggaatttgttttgtgtttcatgaatttgagcaaacgcacgaattctcttacgaggcatgtttaacctgatcataagatggaaaaattagtttcttaataaaacttaataaaattattaataattcaattaattgaaaaattaattaataaaactaaaattaagagagactaggccttaccaccctttttgtaaaaatataagaactctagaaattaataataataatgaagaaaaatatgagaattaaaaagaagagttagagggtttgtggcttaaggtggatggaagaggaatgccgcacaagcagctagggtgtgagggcgtggtgcgtgtgggagcagtgatgcgcagcagggctagtagcaattagcaacacgggcattcggcagtaggtagaacttgggtgcgcacaggaggtgcgaagggccagtaccgcacacgggatgaaggcctagcgcgagctgaggctggggctgtttgaggcaacgcgcgcattgggtgcgcgggatgtgcgtgcgatggagctgactgcttggtgctggagctagaaaaaanaaa

SEQ ID NO: 12936 - DNA, 558 bp, Gossypium hirsutum
ccgaagtccaaactagtgcaaatttcaagcccacaacaacatattccaaataacactttatatgtaaaatgagatctataccattatataaaagttatcactagtaagtgtttggtacatgataaaacacattagactcctaaaaagagaatgcaagtttaaacctcagagacgacattattagaaggggtagtcacaaactccgaacatatactgtaaaacaaacatggaaaataccgaaaaatttatataaaagctatcctcttaaagaaggttagtcaatttgaaaattgaaatcatcaagttttgacattatggttagaagagttatttttcctcatttctaatggtttttccaaatctacccaaatccagatacataatcctaaaaattctaatattgtgcttaacaatgatcatagcaaaaaaaaatgtcttaacactcggatttaatgtagcacaaaattcaacaagactgatatttacaagttgtacctttatcaaagttgttaccaaataaataaggccagatttgcgtggattagaggtgctcatggg

SEQ ID NO: 12937 - DNA, 668 bp, Gossypium hirsutum
gttgtaacacaattgatgagcactaaattttggtcaaggacagtcattcacaaacaatttagcaatggaatgcatgttcacgagaaaagaaatataaatcaaatgtgaagatacaggaatttcaagcaaaaatatttcaatgttggttatattacccctggcttgtatttggcagaccgagatgccagtttgttaaatagctgcattaactggacaggactctccttctcgtagcgcaaagcatacagcattaccaggcgaagtcggtcaatatcagatacactttcattatttaaaagatttgtcactgcctaaaaaagaaacatgtaaataaggtcattagagcctgtcaattgtaacatgatagtttaaatggagttccatctatatctccaaacaataaactaaaaaagaccactaccgaatcaaatgactaaaacagatactgaggcccacttttgatctgtacatggtaagataaggtagatttaactaaactaaaacttgatgagtaataaccaagacaacttaaactgcagcataatatgtgtactgtaaataaatcatagtctcttccactatacagtgtcattacttttatcataatcagttagatataaatttgttatttgattacacatcccattgatcatctccaacaagatttc
